United States Patent Application Publication US 2005/0118625 A1 - sequence listing, part 7

SEQ ID NO: 72290 - DNA, 25 bp, Probe Sequence
cacactaatgggtacagaaccgttc

SEQ ID NO: 72291 - DNA, 25 bp, Probe Sequence
gattctgtaagagacagtgcggatt

SEQ ID NO: 72292 - DNA, 25 bp, Probe Sequence
gtacgtgtctgccaggattctgtaa

SEQ ID NO: 72293 - DNA, 25 bp, Probe Sequence
taatcaagaccagaagttcaagacc

SEQ ID NO: 72294 - DNA, 25 bp, Probe Sequence
gtgtggtgttattacttagcgttat

SEQ ID NO: 72295 - DNA, 25 bp, Probe Sequence
ttaatcaagaccagaagttcaagac

SEQ ID NO: 72296 - DNA, 25 bp, Probe Sequence
gttaatcaagaccagaagttcaaga

SEQ ID NO: 72297 - DNA, 25 bp, Probe Sequence
tgtggtgttattacttagcgttatt

SEQ ID NO: 72298 - DNA, 25 bp, Probe Sequence
agtgtggtgttattacttagcgtta

SEQ ID NO: 72299 - DNA, 25 bp, Probe Sequence
tagtgtggtgttattacttagcgtt

SEQ ID NO: 72300 - DNA, 25 bp, Probe Sequence
atagtgtggtgttattacttagcgt

SEQ ID NO: 72301 - DNA, 25 bp, Probe Sequence
catagtgtggtgttattacttagcg

SEQ ID NO: 72302 - DNA, 25 bp, Probe Sequence
tggtgttattacttagcgttattct

SEQ ID NO: 72303 - DNA, 25 bp, Probe Sequence
gtggtgttattacttagcgttattc

SEQ ID NO: 72304 - DNA, 25 bp, Probe Sequence
tgagaattgactattatgtgtgtgt

SEQ ID NO: 72305 - DNA, 25 bp, Probe Sequence
aatcaagaccagaagttcaagacca

SEQ ID NO: 72306 - DNA, 25 bp, Probe Sequence
atcaagaccagaagttcaagaccag

SEQ ID NO: 72307 - DNA, 25 bp, Probe Sequence
ggttaatcaagaccagaagttcaag

SEQ ID NO: 72308 - DNA, 25 bp, Probe Sequence
ccatagtgtggtgttattacttagc

SEQ ID NO: 72309 - DNA, 25 bp, Probe Sequence
ggacagtggtttcattcataggtat

SEQ ID NO: 72310 - DNA, 25 bp, Probe Sequence
cagataatgtttactttggtggtga

SEQ ID NO: 72311 - DNA, 25 bp, Probe Sequence
atgagaattgactattatgtgtgtg

SEQ ID NO: 72312 - DNA, 25 bp, Probe Sequence
aagaggaaatagagaccattgaaga

SEQ ID NO: 72313 - DNA, 25 bp, Probe Sequence
acagtggtttcattcataggtattg

SEQ ID NO: 72314 - DNA, 25 bp, Probe Sequence
gataatgtttactttggtggtgaga

SEQ ID NO: 72315 - DNA, 25 bp, Probe Sequence
agataatgtttactttggtggtgag

SEQ ID NO: 72316 - DNA, 25 bp, Probe Sequence
aatgtttactttggtggtgagaaga

SEQ ID NO: 72317 - DNA, 25 bp, Probe Sequence
ttaggtgacactatagaaccaagtt

SEQ ID NO: 72318 - DNA, 25 bp, Probe Sequence
tgacactatagaaccaagtttgtac

SEQ ID NO: 72319 - DNA, 25 bp, Probe Sequence
gtgacactatagaaccaagtttgta

SEQ ID NO: 72320 - DNA, 25 bp, Probe Sequence
aggtgacactatagaaccaagtttg

SEQ ID NO: 72321 - DNA, 25 bp, Probe Sequence
ggtgacactatagaaccaagtttgt

SEQ ID NO: 72322 - DNA, 25 bp, Probe Sequence
taggtgacactatagaaccaagttt

SEQ ID NO: 72323 - DNA, 25 bp, Probe Sequence
tttaggtgacactatagaaccaagt

SEQ ID NO: 72324 - DNA, 25 bp, Probe Sequence
atttaggtgacactatagaaccaag

SEQ ID NO: 72325 - DNA, 25 bp, Probe Sequence
gacactatagaaccaagtttgtaca

SEQ ID NO: 72326 - DNA, 25 bp, Probe Sequence
tatttaggtgacactatagaaccaa

SEQ ID NO: 72327 - DNA, 25 bp, Probe Sequence
acaggaaaccagctatgaccattag

SEQ ID NO: 72328 - DNA, 25 bp, Probe Sequence
cacaggaaaccagctatgaccatta

SEQ ID NO: 72329 - DNA, 25 bp, Probe Sequence
caggaaaccagctatgaccattagg

SEQ ID NO: 72330 - DNA, 25 bp, Probe Sequence
gacggatacaattttcacacaggaa

SEQ ID NO: 72331 - DNA, 25 bp, Probe Sequence
ccttcacgaccacactcaactactg

SEQ ID NO: 72332 - DNA, 25 bp, Probe Sequence
atacaattttcacacaggaaaccag

SEQ ID NO: 72333 - DNA, 25 bp, Probe Sequence
gatacaattttcacacaggaaacca

SEQ ID NO: 72334 - DNA, 25 bp, Probe Sequence
ggatacaattttcacacaggaaacc

SEQ ID NO: 72335 - DNA, 25 bp, Probe Sequence
cggatacaattttcacacaggaaac

SEQ ID NO: 72336 - DNA, 25 bp, Probe Sequence
ggacggatacaattttcacacagga

SEQ ID NO: 72337 - DNA, 25 bp, Probe Sequence
acggatacaattttcacacaggaaa

SEQ ID NO: 72338 - DNA, 25 bp, Probe Sequence
acacaggaaaccagctatgaccatt

SEQ ID NO: 72339 - DNA, 25 bp, Probe Sequence
tttcacacaggaaaccagctatgac

SEQ ID NO: 72340 - DNA, 25 bp, Probe Sequence
tacaattttcacacaggaaaccagc

SEQ ID NO: 72341 - DNA, 25 bp, Probe Sequence
aggaaaccagctatgaccattaggc

SEQ ID NO: 72342 - DNA, 25 bp, Probe Sequence
aattttcacacaggaaaccagctat

SEQ ID NO: 72343 - DNA, 25 bp, Probe Sequence
gggacggatacaattttcacacagg

SEQ ID NO: 72344 - DNA, 25 bp, Probe Sequence
attttcacacaggaaaccagctatg

SEQ ID NO: 72345 - DNA, 25 bp, Probe Sequence
caattttcacacaggaaaccagcta

SEQ ID NO: 72346 - DNA, 25 bp, Probe Sequence
cacacaggaaaccagctatgaccat

SEQ ID NO: 72347 - DNA, 25 bp, Probe Sequence
cgggacggatacaattttcacacag

SEQ ID NO: 72348 - DNA, 25 bp, Probe Sequence
ttcacacaggaaaccagctatgacc

SEQ ID NO: 72349 - DNA, 25 bp, Probe Sequence
ttttcacacaggaaaccagctatga

SEQ ID NO: 72350 - DNA, 25 bp, Probe Sequence
acaattttcacacaggaaaccagct

SEQ ID NO: 72351 - DNA, 25 bp, Probe Sequence
acaggaaaccagctatgaccattag

SEQ ID NO: 72352 - DNA, 25 bp, Probe Sequence
cacaggaaaccagctatgaccatta

SEQ ID NO: 72353 - DNA, 25 bp, Probe Sequence
caggaaaccagctatgaccattagg

SEQ ID NO: 72354 - DNA, 25 bp, Probe Sequence
gacggatacaattttcacacaggaa

SEQ ID NO: 72355 - DNA, 25 bp, Probe Sequence
ccttcacgaccacactcaactactg

SEQ ID NO: 72356 - DNA, 25 bp, Probe Sequence
atacaattttcacacaggaaaccag

SEQ ID NO: 72357 - DNA, 25 bp, Probe Sequence
gatacaattttcacacaggaaacca

SEQ ID NO: 72358 - DNA, 25 bp, Probe Sequence
ggatacaattttcacacaggaaacc

SEQ ID NO: 72359 - DNA, 25 bp, Probe Sequence
cggatacaattttcacacaggaaac

SEQ ID NO: 72360 - DNA, 25 bp, Probe Sequence
ggacggatacaattttcacacagga

SEQ ID NO: 72361 - DNA, 25 bp, Probe Sequence
acggatacaattttcacacaggaaa

SEQ ID NO: 72362 - DNA, 25 bp, Probe Sequence
acacaggaaaccagctatgaccatt

SEQ ID NO: 72363 - DNA, 25 bp, Probe Sequence
tttcacacaggaaaccagctatgac

SEQ ID NO: 72364 - DNA, 25 bp, Probe Sequence
tacaattttcacacaggaaaccagc

SEQ ID NO: 72365 - DNA, 25 bp, Probe Sequence
aggaaaccagctatgaccattaggc

SEQ ID NO: 72366 - DNA, 25 bp, Probe Sequence
aattttcacacaggaaaccagctat

SEQ ID NO: 72367 - DNA, 25 bp, Probe Sequence
gggacggatacaattttcacacagg

SEQ ID NO: 72368 - DNA, 25 bp, Probe Sequence
attttcacacaggaaaccagctatg

SEQ ID NO: 72369 - DNA, 25 bp, Probe Sequence
caattttcacacaggaaaccagcta

SEQ ID NO: 72370 - DNA, 25 bp, Probe Sequence
cacacaggaaaccagctatgaccat

SEQ ID NO: 72371 - DNA, 25 bp, Probe Sequence
cgggacggatacaattttcacacag

SEQ ID NO: 72372 - DNA, 25 bp, Probe Sequence
ttcacacaggaaaccagctatgacc

SEQ ID NO: 72373 - DNA, 25 bp, Probe Sequence
ttttcacacaggaaaccagctatga

SEQ ID NO: 72374 - DNA, 25 bp, Probe Sequence
acaattttcacacaggaaaccagct

SEQ ID NO: 72375 - DNA, 25 bp, Probe Sequence
gttaatgttcctgccttcaatcaat

SEQ ID NO: 72376 - DNA, 25 bp, Probe Sequence
tgaaccagaacaacagcatctaata

SEQ ID NO: 72377 - DNA, 25 bp, Probe Sequence
accagaacaacagcatctaataaca

SEQ ID NO: 72378 - DNA, 25 bp, Probe Sequence
aaccagaacaacagcatctaataac

SEQ ID NO: 72379 - DNA, 25 bp, Probe Sequence
ccagaacaacagcatctaataacat

SEQ ID NO: 72380 - DNA, 25 bp, Probe Sequence
gaaccagaacaacagcatctaataa

SEQ ID NO: 72381 - DNA, 25 bp, Probe Sequence
ttaatgttcctgccttcaatcaata

SEQ ID NO: 72382 - DNA, 25 bp, Probe Sequence
ccatccatagatagacataaccaac

SEQ ID NO: 72383 - DNA, 25 bp, Probe Sequence
taatgttcctgccttcaatcaatat

SEQ ID NO: 72384 - DNA, 25 bp, Probe Sequence
cgttaatgttcctgccttcaatcaa

SEQ ID NO: 72385 - DNA, 25 bp, Probe Sequence
aatgttcctgccttcaatcaatatt

SEQ ID NO: 72386 - DNA, 25 bp, Probe Sequence
catccatagatagacataaccaact

SEQ ID NO: 72387 - DNA, 25 bp, Probe Sequence
ctgaaccagaacaacagcatctaat

SEQ ID NO: 72388 - DNA, 25 bp, Probe Sequence
tgtaagtattcattccagagaagaa

SEQ ID NO: 72389 - DNA, 25 bp, Probe Sequence
ggattgtgggtttagaagatggata

SEQ ID NO: 72390 - DNA, 25 bp, Probe Sequence
aagaaagttagagagaggattgtgg

SEQ ID NO: 72391 - DNA, 25 bp, Probe Sequence
tagagagaggattgtgggtttagaa

SEQ ID NO: 72392 - DNA, 25 bp, Probe Sequence
ttagagagaggattgtgggtttaga

SEQ ID NO: 72393 - DNA, 25 bp, Probe Sequence
gttagagagaggattgtgggtttag

SEQ ID NO: 72394 - DNA, 25 bp, Probe Sequence
agttagagagaggattgtgggttta

SEQ ID NO: 72395 - DNA, 25 bp, Probe Sequence
ccagagaagaaagttagagagagga

SEQ ID NO: 72396 - DNA, 25 bp, Probe Sequence
tccagagaagaaagttagagagagg

SEQ ID NO: 72397 - DNA, 25 bp, Probe Sequence
cccatccatagatagacataaccaa

SEQ ID NO: 72398 - DNA, 25 bp, Probe Sequence
gagaggattgtgggtttagaagatg

SEQ ID NO: 72399 - DNA, 25 bp, Probe Sequence
acactgttcatgcttctactaatca

SEQ ID NO: 72400 - DNA, 25 bp, Probe Sequence
cacactgttcatgcttctactaatc

SEQ ID NO: 72401 - DNA, 25 bp, Probe Sequence
cactgttcatgcttctactaatcaa

SEQ ID NO: 72402 - DNA, 25 bp, Probe Sequence
actgttcatgcttctactaatcaat

SEQ ID NO: 72403 - DNA, 25 bp, Probe Sequence
catccctccctgatattgtattgaa

SEQ ID NO: 72404 - DNA, 25 bp, Probe Sequence
atccctccctgatattgtattgaaa

SEQ ID NO: 72405 - DNA, 25 bp, Probe Sequence
tgcttctactaatcaataaacgctt

SEQ ID NO: 72406 - DNA, 25 bp, Probe Sequence
atgcttctactaatcaataaacgct

SEQ ID NO: 72407 - DNA, 25 bp, Probe Sequence
tcatccctccctgatattgtattga

SEQ ID NO: 72408 - DNA, 25 bp, Probe Sequence
gcttctactaatcaataaacgcttt

SEQ ID NO: 72409 - DNA, 25 bp, Probe Sequence
catgcttctactaatcaataaacgc

SEQ ID NO: 72410 - DNA, 25 bp, Probe Sequence
ctgttcatgcttctactaatcaata

SEQ ID NO: 72411 - DNA, 25 bp, Probe Sequence
gcacactgttcatgcttctactaat

SEQ ID NO: 72412 - DNA, 25 bp, Probe Sequence
cttctttggatgtccttgtgagtca

SEQ ID NO: 72413 - DNA, 25 bp, Probe Sequence
tgttcatgcttctactaatcaataa

SEQ ID NO: 72414 - DNA, 25 bp, Probe Sequence
atattatgcacactgttcatgcttc

SEQ ID NO: 72415 - DNA, 25 bp, Probe Sequence
aatattatgcacactgttcatgctt

SEQ ID NO: 72416 - DNA, 25 bp, Probe Sequence
attatgcacactgttcatgcttcta

SEQ ID NO: 72417 - DNA, 25 bp, Probe Sequence
tattatgcacactgttcatgcttct

SEQ ID NO: 72418 - DNA, 25 bp, Probe Sequence
tcatgcttctactaatcaataaacg

SEQ ID NO: 72419 - DNA, 25 bp, Probe Sequence
tccctccctgatattgtattgaaaa

SEQ ID NO: 72420 - DNA, 25 bp, Probe Sequence
atcatccctccctgatattgtattg

SEQ ID NO: 72421 - DNA, 25 bp, Probe Sequence
catcatccctccctgatattgtatt

SEQ ID NO: 72422 - DNA, 25 bp, Probe Sequence
ccttctttggatgtccttgtgagtc

SEQ ID NO: 72423 - DNA, 25 bp, Probe Sequence
aagaaggaatatctcattgcaggaa

SEQ ID NO: 72424 - DNA, 25 bp, Probe Sequence
gttggaggaaagaaggaatatctca

SEQ ID NO: 72425 - DNA, 25 bp, Probe Sequence
gaggaaagaaggaatatctcattgc

SEQ ID NO: 72426 - DNA, 25 bp, Probe Sequence
tggaggaaagaaggaatatctcatt

SEQ ID NO: 72427 - DNA, 25 bp, Probe Sequence
ttggaggaaagaaggaatatctcat

SEQ ID NO: 72428 - DNA, 25 bp, Probe Sequence
ggaggaaagaaggaatatctcattg

SEQ ID NO: 72429 - DNA, 25 bp, Probe Sequence
cgttggaggaaagaaggaatatctc

SEQ ID NO: 72430 - DNA, 25 bp, Probe Sequence
gaaggaatatctcattgcaggaaag

SEQ ID NO: 72431 - DNA, 25 bp, Probe Sequence
aaggaatatctcattgcaggaaagg

SEQ ID NO: 72432 - DNA, 25 bp, Probe Sequence
agaaggaatatctcattgcaggaaa

SEQ ID NO: 72433 - DNA, 25 bp, Probe Sequence
aaagaaggaatatctcattgcagga

SEQ ID NO: 72434 - DNA, 25 bp, Probe Sequence
aggaaagaaggaatatctcattgca

SEQ ID NO: 72435 - DNA, 25 bp, Probe Sequence
gaaagaaggaatatctcattgcagg

SEQ ID NO: 72436 - DNA, 25 bp, Probe Sequence
ggaaagaaggaatatctcattgcag

SEQ ID NO: 72437 - DNA, 25 bp, Probe Sequence
gacgttggaggaaagaaggaatatc

SEQ ID NO: 72438 - DNA, 25 bp, Probe Sequence
ccttcctggaaacagcatgaataaa

SEQ ID NO: 72439 - DNA, 25 bp, Probe Sequence
acgttggaggaaagaaggaatatct

SEQ ID NO: 72440 - DNA, 25 bp, Probe Sequence
ggacgttggaggaaagaaggaatat

SEQ ID NO: 72441 - DNA, 25 bp, Probe Sequence
tggaaacagcatgaataaaacactc

SEQ ID NO: 72442 - DNA, 25 bp, Probe Sequence
ctgggtcacagagaagaacatcaac

SEQ ID NO: 72443 - DNA, 25 bp, Probe Sequence
aggaatatctcattgcaggaaaggc

SEQ ID NO: 72444 - DNA, 25 bp, Probe Sequence
ggaaacagcatgaataaaacactca

SEQ ID NO: 72445 - DNA, 25 bp, Probe Sequence
cccttcctggaaacagcatgaataa

SEQ ID NO: 72446 - DNA, 25 bp, Probe Sequence
actgggtcacagagaagaacatcaa

SEQ ID NO: 72447 - DNA, 25 bp, Probe Sequence
gtcacatatagttagttaccaggtt

SEQ ID NO: 72448 - DNA, 25 bp, Probe Sequence
ggtcacatatagttagttaccaggt

SEQ ID NO: 72449 - DNA, 25 bp, Probe Sequence
gaagcattactttctctgaaggaag

SEQ ID NO: 72450 - DNA, 25 bp, Probe Sequence
aagcattactttctctgaaggaagc

SEQ ID NO: 72451 - DNA, 25 bp, Probe Sequence
attactttctctgaaggaagcccat

SEQ ID NO: 72452 - DNA, 25 bp, Probe Sequence
cattactttctctgaaggaagccca

SEQ ID NO: 72453 - DNA, 25 bp, Probe Sequence
accaggtttgtaacttagctttagt

SEQ ID NO: 72454 - DNA, 25 bp, Probe Sequence
ccaggtttgtaacttagctttagtc

SEQ ID NO: 72455 - DNA, 25 bp, Probe Sequence
agcattactttctctgaaggaagcc

SEQ ID NO: 72456 - DNA, 25 bp, Probe Sequence
taccaggtttgtaacttagctttag

SEQ ID NO: 72457 - DNA, 25 bp, Probe Sequence
cacatatagttagttaccaggtttg

SEQ ID NO: 72458 - DNA, 25 bp, Probe Sequence
caggtttgtaacttagctttagtct

SEQ ID NO: 72459 - DNA, 25 bp, Probe Sequence
tcacatatagttagttaccaggttt

SEQ ID NO: 72460 - DNA, 25 bp, Probe Sequence
agaagcattactttctctgaaggaa

SEQ ID NO: 72461 - DNA, 25 bp, Probe Sequence
ttactttctctgaaggaagcccatg

SEQ ID NO: 72462 - DNA, 25 bp, Probe Sequence
acatatagttagttaccaggtttgt

SEQ ID NO: 72463 - DNA, 25 bp, Probe Sequence
aggtttgtaacttagctttagtctt

SEQ ID NO: 72464 - DNA, 25 bp, Probe Sequence
gcctggattttggtcacatatagtt

SEQ ID NO: 72465 - DNA, 25 bp, Probe Sequence
atgcctggattttggtcacatatag

SEQ ID NO: 72466 - DNA, 25 bp, Probe Sequence
ctggacacagaagcattactttctc

SEQ ID NO: 72467 - DNA, 25 bp, Probe Sequence
tggacacagaagcattactttctct

SEQ ID NO: 72468 - DNA, 25 bp, Probe Sequence
gcattactttctctgaaggaagccc

SEQ ID NO: 72469 - DNA, 25 bp, Probe Sequence
cctggattttggtcacatatagtta

SEQ ID NO: 72470 - DNA, 25 bp, Probe Sequence
ttaccaggtttgtaacttagcttta

SEQ ID NO: 72471 - DNA, 25 bp, Probe Sequence
ttacgtggaggtctatataaccaga

SEQ ID NO: 72472 - DNA, 25 bp, Probe Sequence
tacgtggaggtctatataaccagag

SEQ ID NO: 72473 - DNA, 25 bp, Probe Sequence
tttaatggaaacaacttgacccaaa

SEQ ID NO: 72474 - DNA, 25 bp, Probe Sequence
cgtggaggtctatataaccagagct

SEQ ID NO: 72475 - DNA, 25 bp, Probe Sequence
gtttacgtggaggtctatataacca

SEQ ID NO: 72476 - DNA, 25 bp, Probe Sequence
tttacgtggaggtctatataaccag

SEQ ID NO: 72477 - DNA, 25 bp, Probe Sequence
cgtttacgtggaggtctatataacc

SEQ ID NO: 72478 - DNA, 25 bp, Probe Sequence
acgtggaggtctatataaccagagc

SEQ ID NO: 72479 - DNA, 25 bp, Probe Sequence
ttaatggaaacaacttgacccaaaa

SEQ ID NO: 72480 - DNA, 25 bp, Probe Sequence
ttttaatggaaacaacttgacccaa

SEQ ID NO: 72481 - DNA, 25 bp, Probe Sequence
gaggtctatataaccagagctcgtt

SEQ ID NO: 72482 - DNA, 25 bp, Probe Sequence
gtggaggtctatataaccagagctc

SEQ ID NO: 72483 - DNA, 25 bp, Probe Sequence
ctgttttggacctcccatagaagac

SEQ ID NO: 72484 - DNA, 25 bp, Probe Sequence
gttttggacctcccatagaagacac

SEQ ID NO: 72485 - DNA, 25 bp, Probe Sequence
tatataaccagagctcgtttagtga

SEQ ID NO: 72486 - DNA, 25 bp, Probe Sequence
ctatataaccagagctcgtttagtg

SEQ ID NO: 72487 - DNA, 25 bp, Probe Sequence
tctatataaccagagctcgtttagt

SEQ ID NO: 72488 - DNA, 25 bp, Probe Sequence
gtctatataaccagagctcgtttag

SEQ ID NO: 72489 - DNA, 25 bp, Probe Sequence
tgttttggacctcccatagaagaca

SEQ ID NO: 72490 - DNA, 25 bp, Probe Sequence
gagaatgttttgtggaccacctttg

SEQ ID NO: 72491 - DNA, 25 bp, Probe Sequence
ggaggtctatataaccagagctcgt

SEQ ID NO: 72492 - DNA, 25 bp, Probe Sequence
tggaggtctatataaccagagctcg

SEQ ID NO: 72493 - DNA, 25 bp, Probe Sequence
ggtctatataaccagagctcgttta

SEQ ID NO: 72494 - DNA, 25 bp, Probe Sequence
ggagaatgttttgtggaccaccttt

SEQ ID NO: 72495 - DNA, 25 bp, Probe Sequence
cgtcaatatctgctcacatcttact

SEQ ID NO: 72496 - DNA, 25 bp, Probe Sequence
acaccagagagttcatgcttaataa

SEQ ID NO: 72497 - DNA, 25 bp, Probe Sequence
gtcaatatctgctcacatcttacta

SEQ ID NO: 72498 - DNA, 25 bp, Probe Sequence
aacaccagagagttcatgcttaata

SEQ ID NO: 72499 - DNA, 25 bp, Probe Sequence
tcaatatctgctcacatcttactaa

SEQ ID NO: 72500 - DNA, 25 bp, Probe Sequence
acgtcaatatctgctcacatcttac

SEQ ID NO: 72501 - DNA, 25 bp, Probe Sequence
atctgctcacatcttactaaacacc

SEQ ID NO: 72502 - DNA, 25 bp, Probe Sequence
catcagggaatttatattggagagc

SEQ ID NO: 72503 - DNA, 25 bp, Probe Sequence
tcacatcttactaaacaccagagag

SEQ ID NO: 72504 - DNA, 25 bp, Probe Sequence
atgaacattacaaccataaagaggg

SEQ ID NO: 72505 - DNA, 25 bp, Probe Sequence
caaaccctatgcccagaatcattaa

SEQ ID NO: 72506 - DNA, 25 bp, Probe Sequence
cacatcttactaaacaccagagagt

SEQ ID NO: 72507 - DNA, 25 bp, Probe Sequence
tctgctcacatcttactaaacacca

SEQ ID NO: 72508 - DNA, 25 bp, Probe Sequence
tatctgctcacatcttactaaacac

SEQ ID NO: 72509 - DNA, 25 bp, Probe Sequence
acatcttactaaacaccagagagtt

SEQ ID NO: 72510 - DNA, 25 bp, Probe Sequence
ctcacatcttactaaacaccagaga

SEQ ID NO: 72511 - DNA, 25 bp, Probe Sequence
tcttactaaacaccagagagttcat

SEQ ID NO: 72512 - DNA, 25 bp, Probe Sequence
atcttactaaacaccagagagttca

SEQ ID NO: 72513 - DNA, 25 bp, Probe Sequence
gtagaaatatatgaggaagcgacac

SEQ ID NO: 72514 - DNA, 25 bp, Probe Sequence
catcttactaaacaccagagagttc

SEQ ID NO: 72515 - DNA, 25 bp, Probe Sequence
agaaatatatgaggaagcgacactt

SEQ ID NO: 72516 - DNA, 25 bp, Probe Sequence
tagaaatatatgaggaagcgacact

SEQ ID NO: 72517 - DNA, 25 bp, Probe Sequence
agtagaaatatatgaggaagcgaca

SEQ ID NO: 72518 - DNA, 25 bp, Probe Sequence
tgctcacatcttactaaacaccaga

SEQ ID NO: 72519 - DNA, 25 bp, Probe Sequence
attgaattggtggtagaaggtagtt

SEQ ID NO: 72520 - DNA, 25 bp, Probe Sequence
cagtgtattgaattggtggtagaag

SEQ ID NO: 72521 - DNA, 25 bp, Probe Sequence
agtgtattgaattggtggtagaagg

SEQ ID NO: 72522 - DNA, 25 bp, Probe Sequence
tgtattgaattggtggtagaaggta

SEQ ID NO: 72523 - DNA, 25 bp, Probe Sequence
gtgtattgaattggtggtagaaggt

SEQ ID NO: 72524 - DNA, 25 bp, Probe Sequence
tattgaattggtggtagaaggtagt

SEQ ID NO: 72525 - DNA, 25 bp, Probe Sequence
ttgaattggtggtagaaggtagttc

SEQ ID NO: 72526 - DNA, 25 bp, Probe Sequence
attctatcttatgttgtcttgaggc

SEQ ID NO: 72527 - DNA, 25 bp, Probe Sequence
gtattgaattggtggtagaaggtag

SEQ ID NO: 72528 - DNA, 25 bp, Probe Sequence
gtagaaggtagttccatgttccatt

SEQ ID NO: 72529 - DNA, 25 bp, Probe Sequence
atatatcagtgagagtaggcttgtt

SEQ ID NO: 72530 - DNA, 25 bp, Probe Sequence
tgaattggtggtagaaggtagttcc

SEQ ID NO: 72531 - DNA, 25 bp, Probe Sequence
tatatatcagtgagagtaggcttgt

SEQ ID NO: 72532 - DNA, 25 bp, Probe Sequence
ggtagaaggtagttccatgttccat

SEQ ID NO: 72533 - DNA, 25 bp, Probe Sequence
gtatatatcagtgagagtaggcttg

SEQ ID NO: 72534 - DNA, 25 bp, Probe Sequence
ccagtgtattgaattggtggtagaa

SEQ ID NO: 72535 - DNA, 25 bp, Probe Sequence
agtatatatcagtgagagtaggctt

SEQ ID NO: 72536 - DNA, 25 bp, Probe Sequence
aagtatatatcagtgagagtaggct

SEQ ID NO: 72537 - DNA, 25 bp, Probe Sequence
cattctatcttatgttgtcttgagg

SEQ ID NO: 72538 - DNA, 25 bp, Probe Sequence
aattggtggtagaaggtagttccat

SEQ ID NO: 72539 - DNA, 25 bp, Probe Sequence
tatatcagtgagagtaggcttgttt

SEQ ID NO: 72540 - DNA, 25 bp, Probe Sequence
tctcagaaacctaagaagtaagtgt

SEQ ID NO: 72541 - DNA, 25 bp, Probe Sequence
ttaatagaatgtggctcagttctgg

SEQ ID NO: 72542 - DNA, 25 bp, Probe Sequence
gaattggtggtagaaggtagttcca

SEQ ID NO: 72543 - DNA, 25 bp, Probe Sequence
caccactgttatattaccttctcca

SEQ ID NO: 72544 - DNA, 25 bp, Probe Sequence
tcaccactgttatattaccttctcc

SEQ ID NO: 72545 - DNA, 25 bp, Probe Sequence
gacttggatacattacagcagacat

SEQ ID NO: 72546 - DNA, 25 bp, Probe Sequence
aagacttggatacattacagcagac

SEQ ID NO: 72547 - DNA, 25 bp, Probe Sequence
gtcaccactgttatattaccttctc

SEQ ID NO: 72548 - DNA, 25 bp, Probe Sequence
agacttggatacattacagcagaca

SEQ ID NO: 72549 - DNA, 25 bp, Probe Sequence
agtcaccactgttatattaccttct

SEQ ID NO: 72550 - DNA, 25 bp, Probe Sequence
accactgttatattaccttctccag

SEQ ID NO: 72551 - DNA, 25 bp, Probe Sequence
tacaagacttggatacattacagca

SEQ ID NO: 72552 - DNA, 25 bp, Probe Sequence
aatcagacgatgagactagaaggag

SEQ ID NO: 72553 - DNA, 25 bp, Probe Sequence
acttggatacattacagcagacatg

SEQ ID NO: 72554 - DNA, 25 bp, Probe Sequence
ccactgttatattaccttctccagg

SEQ ID NO: 72555 - DNA, 25 bp, Probe Sequence
ttcagtatctcctctgtcacttcaa

SEQ ID NO: 72556 - DNA, 25 bp, Probe Sequence
caagacttggatacattacagcaga

SEQ ID NO: 72557 - DNA, 25 bp, Probe Sequence
acaagacttggatacattacagcag

SEQ ID NO: 72558 - DNA, 25 bp, Probe Sequence
tgttatattaccttctccaggaacc

SEQ ID NO: 72559 - DNA, 25 bp, Probe Sequence
cactgttatattaccttctccagga

SEQ ID NO: 72560 - DNA, 25 bp, Probe Sequence
ttacaagacttggatacattacagc

SEQ ID NO: 72561 - DNA, 25 bp, Probe Sequence
cagagttacatacatacagctacca

SEQ ID NO: 72562 - DNA, 25 bp, Probe Sequence
tcagagttacatacatacagctacc

SEQ ID NO: 72563 - DNA, 25 bp, Probe Sequence
cttggatacattacagcagacatgg

SEQ ID NO: 72564 - DNA, 25 bp, Probe Sequence
atcagacgatgagactagaaggaga

SEQ ID NO: 72565 - DNA, 25 bp, Probe Sequence
tggatacattacagcagacatggaa

SEQ ID NO: 72566 - DNA, 25 bp, Probe Sequence
ttggatacattacagcagacatgga

SEQ ID NO: 72567 - DNA, 25 bp, Probe Sequence
tggaacactatacctattattcggc

SEQ ID NO: 72568 - DNA, 25 bp, Probe Sequence
ggaacactatacctattattcggcg

SEQ ID NO: 72569 - DNA, 25 bp, Probe Sequence
ttggaacactatacctattattcgg

SEQ ID NO: 72570 - DNA, 25 bp, Probe Sequence
aagacattggaacactatacctatt

SEQ ID NO: 72571 - DNA, 25 bp, Probe Sequence
ttctaggtaacgaccacatctacaa

SEQ ID NO: 72572 - DNA, 25 bp, Probe Sequence
cttctaggtaacgaccacatctaca

SEQ ID NO: 72573 - DNA, 25 bp, Probe Sequence
tagtaatacccatcataatcggagg

SEQ ID NO: 72574 - DNA, 25 bp, Probe Sequence
taatacccatcataatcggaggctt

SEQ ID NO: 72575 - DNA, 25 bp, Probe Sequence
actattctctacaaccacaaagaca

SEQ ID NO: 72576 - DNA, 25 bp, Probe Sequence
tgactattctctacaaccacaaaga

SEQ ID NO: 72577 - DNA, 25 bp, Probe Sequence
tctaggtaacgaccacatctacaac

SEQ ID NO: 72578 - DNA, 25 bp, Probe Sequence
acaaagacattggaacactatacct

SEQ ID NO: 72579 - DNA, 25 bp, Probe Sequence
cacaaagacattggaacactatacc

SEQ ID NO: 72580 - DNA, 25 bp, Probe Sequence
gactattctctacaaccacaaagac

SEQ ID NO: 72581 - DNA, 25 bp, Probe Sequence
attctctacaaccacaaagacattg

SEQ ID NO: 72582 - DNA, 25 bp, Probe Sequence
ccttctaggtaacgaccacatctac

SEQ ID NO: 72583 - DNA, 25 bp, Probe Sequence
agacattggaacactatacctatta

SEQ ID NO: 72584 - DNA, 25 bp, Probe Sequence
ctattctctacaaccacaaagacat

SEQ ID NO: 72585 - DNA, 25 bp, Probe Sequence
aatacccatcataatcggaggcttt

SEQ ID NO: 72586 - DNA, 25 bp, Probe Sequence
gtaatacccatcataatcggaggct

SEQ ID NO: 72587 - DNA, 25 bp, Probe Sequence
agtaatacccatcataatcggaggc

SEQ ID NO: 72588 - DNA, 25 bp, Probe Sequence
ttgactattctctacaaccacaaag

SEQ ID NO: 72589 - DNA, 25 bp, Probe Sequence
caaagacattggaacactataccta

SEQ ID NO: 72590 - DNA, 25 bp, Probe Sequence
tattctctacaaccacaaagacatt

SEQ ID NO: 72591 - DNA, 25 bp, Probe Sequence
tcacagagagaagagagacagaatt

SEQ ID NO: 72592 - DNA, 25 bp, Probe Sequence
cacagagagaagagagacagaatta

SEQ ID NO: 72593 - DNA, 25 bp, Probe Sequence
ttcacagagagaagagagacagaat

SEQ ID NO: 72594 - DNA, 25 bp, Probe Sequence
agagaagagagacagaattattgct

SEQ ID NO: 72595 - DNA, 25 bp, Probe Sequence
gagagaagagagacagaattattgc

SEQ ID NO: 72596 - DNA, 25 bp, Probe Sequence
acagagagaagagagacagaattat

SEQ ID NO: 72597 - DNA, 25 bp, Probe Sequence
gagaagagagacagaattattgcta

SEQ ID NO: 72598 - DNA, 25 bp, Probe Sequence
agagagaagagagacagaattattg

SEQ ID NO: 72599 - DNA, 25 bp, Probe Sequence
cagagagaagagagacagaattatt

SEQ ID NO: 72600 - DNA, 25 bp, Probe Sequence
tttgttgattgtttgtgctttcttg

SEQ ID NO: 72601 - DNA, 25 bp, Probe Sequence
gtttgtggcagatgtgtttattact

SEQ ID NO: 72602 - DNA, 25 bp, Probe Sequence
tgtttgtggcagatgtgtttattac

SEQ ID NO: 72603 - DNA, 25 bp, Probe Sequence
agaagagagacagaattattgctat

SEQ ID NO: 72604 - DNA, 25 bp, Probe Sequence
catttgtaaacttcctttctgggta

SEQ ID NO: 72605 - DNA, 25 bp, Probe Sequence
aacatttgtaaacttcctttctggg

SEQ ID NO: 72606 - DNA, 25 bp, Probe Sequence
ttagcatttcacagagagaagagag

SEQ ID NO: 72607 - DNA, 25 bp, Probe Sequence
gttagcatttcacagagagaagaga

SEQ ID NO: 72608 - DNA, 25 bp, Probe Sequence
acatttgtaaacttcctttctgggt

SEQ ID NO: 72609 - DNA, 25 bp, Probe Sequence
atttcacagagagaagagagacaga

SEQ ID NO: 72610 - DNA, 25 bp, Probe Sequence
catttcacagagagaagagagacag

SEQ ID NO: 72611 - DNA, 25 bp, Probe Sequence
tttgtaaacttcctttctgggtagc

SEQ ID NO: 72612 - DNA, 25 bp, Probe Sequence
atttgtaaacttcctttctgggtag

SEQ ID NO: 72613 - DNA, 25 bp, Probe Sequence
tagcatttcacagagagaagagaga

SEQ ID NO: 72614 - DNA, 25 bp, Probe Sequence
tttcacagagagaagagagacagaa

SEQ ID NO: 72615 - DNA, 25 bp, Probe Sequence
attgtaatgttgggaagagatcact

SEQ ID NO: 72616 - DNA, 25 bp, Probe Sequence
ttgtaatgttgggaagagatcacta

SEQ ID NO: 72617 - DNA, 25 bp, Probe Sequence
tgtaatgttgggaagagatcactat

SEQ ID NO: 72618 - DNA, 25 bp, Probe Sequence
tatggctggcatggaaatagaaata

SEQ ID NO: 72619 - DNA, 25 bp, Probe Sequence
ctggcatggaaatagaaatactcaa

SEQ ID NO: 72620 - DNA, 25 bp, Probe Sequence
tattgtaatgttgggaagagatcac

SEQ ID NO: 72621 - DNA, 25 bp, Probe Sequence
gctggcatggaaatagaaatactca

SEQ ID NO: 72622 - DNA, 25 bp, Probe Sequence
ttatggctggcatggaaatagaaat

SEQ ID NO: 72623 - DNA, 25 bp, Probe Sequence
gtaatgttgggaagagatcactatt

SEQ ID NO: 72624 - DNA, 25 bp, Probe Sequence
tggcatggaaatagaaatactcaat

SEQ ID NO: 72625 - DNA, 25 bp, Probe Sequence
atggctggcatggaaatagaaatac

SEQ ID NO: 72626 - DNA, 25 bp, Probe Sequence
cttatggctggcatggaaatagaaa

SEQ ID NO: 72627 - DNA, 25 bp, Probe Sequence
ggctggcatggaaatagaaatactc

SEQ ID NO: 72628 - DNA, 25 bp, Probe Sequence
taatgttgggaagagatcactattt

SEQ ID NO: 72629 - DNA, 25 bp, Probe Sequence
atattgtaatgttgggaagagatca

SEQ ID NO: 72630 - DNA, 25 bp, Probe Sequence
tggctggcatggaaatagaaatact

SEQ ID NO: 72631 - DNA, 25 bp, Probe Sequence
ggcatggaaatagaaatactcaatt

SEQ ID NO: 72632 - DNA, 25 bp, Probe Sequence
ttatggtatttgagtgtgcaagaaa

SEQ ID NO: 72633 - DNA, 25 bp, Probe Sequence
tttatggtatttgagtgtgcaagaa

SEQ ID NO: 72634 - DNA, 25 bp, Probe Sequence
atttatggtatttgagtgtgcaaga

SEQ ID NO: 72635 - DNA, 25 bp, Probe Sequence
cagatgtggggagatgtaataaaac

SEQ ID NO: 72636 - DNA, 25 bp, Probe Sequence
aatttatggtatttgagtgtgcaag

SEQ ID NO: 72637 - DNA, 25 bp, Probe Sequence
tgaaatttatggtatttgagtgtgc

SEQ ID NO: 72638 - DNA, 25 bp, Probe Sequence
gaaatttatggtatttgagtgtgca

SEQ ID NO: 72639 - DNA, 25 bp, Probe Sequence
aatgtatcttgagaggtaggagcag

SEQ ID NO: 72640 - DNA, 25 bp, Probe Sequence
atgtatcttgagaggtaggagcaga

SEQ ID NO: 72641 - DNA, 25 bp, Probe Sequence
gctcctcagtcttgtaaatgtatct

SEQ ID NO: 72642 - DNA, 25 bp, Probe Sequence
tgtatcttgagaggtaggagcagag

SEQ ID NO: 72643 - DNA, 25 bp, Probe Sequence
tgctcctcagtcttgtaaatgtatc

SEQ ID NO: 72644 - DNA, 25 bp, Probe Sequence
taaatgtatcttgagaggtaggagc

SEQ ID NO: 72645 - DNA, 25 bp, Probe Sequence
aaatgtatcttgagaggtaggagca

SEQ ID NO: 72646 - DNA, 25 bp, Probe Sequence
ctgaaatggtagacctgtaattgtg

SEQ ID NO: 72647 - DNA, 25 bp, Probe Sequence
actataaactctcttgttacagccc

SEQ ID NO: 72648 - DNA, 25 bp, Probe Sequence
tgaaatggtagacctgtaattgtgg

SEQ ID NO: 72649 - DNA, 25 bp, Probe Sequence
gctgaaatggtagacctgtaattgt

SEQ ID NO: 72650 - DNA, 25 bp, Probe Sequence
tgtaaatgtatcttgagaggtagga

SEQ ID NO: 72651 - DNA, 25 bp, Probe Sequence
tcctcagtcttgtaaatgtatcttg

SEQ ID NO: 72652 - DNA, 25 bp, Probe Sequence
gaaatggtagacctgtaattgtggg

SEQ ID NO: 72653 - DNA, 25 bp, Probe Sequence
aactataaactctcttgttacagcc

SEQ ID NO: 72654 - DNA, 25 bp, Probe Sequence
ctcctcagtcttgtaaatgtatctt

SEQ ID NO: 72655 - DNA, 25 bp, Probe Sequence
atggtagacctgtaattgtgggaaa

SEQ ID NO: 72656 - DNA, 25 bp, Probe Sequence
aatggtagacctgtaattgtgggaa

SEQ ID NO: 72657 - DNA, 25 bp, Probe Sequence
aaatggtagacctgtaattgtggga

SEQ ID NO: 72658 - DNA, 25 bp, Probe Sequence
gtcttgtaaatgtatcttgagaggt

SEQ ID NO: 72659 - DNA, 25 bp, Probe Sequence
gtaaatgtatcttgagaggtaggag

SEQ ID NO: 72660 - DNA, 25 bp, Probe Sequence
ctgctcctcagtcttgtaaatgtat

SEQ ID NO: 72661 - DNA, 25 bp, Probe Sequence
agtcttgtaaatgtatcttgagagg

SEQ ID NO: 72662 - DNA, 25 bp, Probe Sequence
ttgtaaatgtatcttgagaggtagg

SEQ ID NO: 72663 - DNA, 25 bp, Probe Sequence
taggctagaggattgcttaggctaa

SEQ ID NO: 72664 - DNA, 25 bp, Probe Sequence
ttaggctagaggattgcttaggcta

SEQ ID NO: 72665 - DNA, 25 bp, Probe Sequence
gagtgaatgatggcttatttgtcag

SEQ ID NO: 72666 - DNA, 25 bp, Probe Sequence
caacatagtgaaacctcgtctctat

SEQ ID NO: 72667 - DNA, 25 bp, Probe Sequence
gggagtgaatgatggcttatttgtc

SEQ ID NO: 72668 - DNA, 25 bp, Probe Sequence
ctgggagtgaatgatggcttatttg

SEQ ID NO: 72669 - DNA, 25 bp, Probe Sequence
aacatagtgaaacctcgtctctatt

SEQ ID NO: 72670 - DNA, 25 bp, Probe Sequence
gcctattaggtgacactatagaaca

SEQ ID NO: 72671 - DNA, 25 bp, Probe Sequence
ggagtgaatgatggcttatttgtca

SEQ ID NO: 72672 - DNA, 25 bp, Probe Sequence
gccaacatgatgaaattctatctct

SEQ ID NO: 72673 - DNA, 25 bp, Probe Sequence
acatagtgaaacctcgtctctatta

SEQ ID NO: 72674 - DNA, 25 bp, Probe Sequence
ctagaggattgcttaggctaaggtg

SEQ ID NO: 72675 - DNA, 25 bp, Probe Sequence
gcaacatagtgaaacctcgtctcta

SEQ ID NO: 72676 - DNA, 25 bp, Probe Sequence
cttaggctagaggattgcttaggct

SEQ ID NO: 72677 - DNA, 25 bp, Probe Sequence
aggcttaggctagaggattgcttag

SEQ ID NO: 72678 - DNA, 25 bp, Probe Sequence
gaggcttaggctagaggattgctta

SEQ ID NO: 72679 - DNA, 25 bp, Probe Sequence
tgggagtgaatgatggcttatttgt

SEQ ID NO: 72680 - DNA, 25 bp, Probe Sequence
tttacaaatcctaagatggagaggt

SEQ ID NO: 72681 - DNA, 25 bp, Probe Sequence
tacaaatcctaagatggagaggtag

SEQ ID NO: 72682 - DNA, 25 bp, Probe Sequence
catagtgaaacctcgtctctattaa

SEQ ID NO: 72683 - DNA, 25 bp, Probe Sequence
attaagaaatgcaaagttaggctgg

SEQ ID NO: 72684 - DNA, 25 bp, Probe Sequence
attaggtgacactatagaacaagtt

SEQ ID NO: 72685 - DNA, 25 bp, Probe Sequence
aaacatttcacacaggaacagctat

SEQ ID NO: 72686 - DNA, 25 bp, Probe Sequence
tgattaagaaatgcaaagttaggct

SEQ ID NO: 72687 - DNA, 25 bp, Probe Sequence
aaataccatgcacagagtccttaaa

SEQ ID NO: 72688 - DNA, 25 bp, Probe Sequence
gtcaggtctgatagtcctctgctaa

SEQ ID NO: 72689 - DNA, 25 bp, Probe Sequence
gaaataccatgcacagagtccttaa

SEQ ID NO: 72690 - DNA, 25 bp, Probe Sequence
tctgatagtcctctgctaaaacaac

SEQ ID NO: 72691 - DNA, 25 bp, Probe Sequence
gtctgatagtcctctgctaaaacaa

SEQ ID NO: 72692 - DNA, 25 bp, Probe Sequence
ctgatagtcctctgctaaaacaaca

SEQ ID NO: 72693 - DNA, 25 bp, Probe Sequence
tgatagtcctctgctaaaacaacac

SEQ ID NO: 72694 - DNA, 25 bp, Probe Sequence
tcaggtctgatagtcctctgctaaa

SEQ ID NO: 72695 - DNA, 25 bp, Probe Sequence
ctctgctaaaacaacacgatttaca

SEQ ID NO: 72696 - DNA, 25 bp, Probe Sequence
tctgctaaaacaacacgatttacat

SEQ ID NO: 72697 - DNA, 25 bp, Probe Sequence
cctctgctaaaacaacacgatttac

SEQ ID NO: 72698 - DNA, 25 bp, Probe Sequence
tcctctgctaaaacaacacgattta

SEQ ID NO: 72699 - DNA, 25 bp, Probe Sequence
tgtcaggtctgatagtcctctgcta

SEQ ID NO: 72700 - DNA, 25 bp, Probe Sequence
gatagtcctctgctaaaacaacacg

SEQ ID NO: 72701 - DNA, 25 bp, Probe Sequence
ggtctgatagtcctctgctaaaaca

SEQ ID NO: 72702 - DNA, 25 bp, Probe Sequence
gtcctctgctaaaacaacacgattt

SEQ ID NO: 72703 - DNA, 25 bp, Probe Sequence
tagtcctctgctaaaacaacacgat

SEQ ID NO: 72704 - DNA, 25 bp, Probe Sequence
atagtcctctgctaaaacaacacga

SEQ ID NO: 72705 - DNA, 25 bp, Probe Sequence
ctgctaaaacaacacgatttacata

SEQ ID NO: 72706 - DNA, 25 bp, Probe Sequence
caggaaggattgtttctggtgactg

SEQ ID NO: 72707 - DNA, 25 bp, Probe Sequence
tgctaaaacaacacgatttacataa

SEQ ID NO: 72708 - DNA, 25 bp, Probe Sequence
ggaaataccatgcacagagtcctta

SEQ ID NO: 72709 - DNA, 25 bp, Probe Sequence
agtcctctgctaaaacaacacgatt

SEQ ID NO: 72710 - DNA, 25 bp, Probe Sequence
aatagagtgcagtatttaaaccaaa

SEQ ID NO: 72711 - DNA, 25 bp, Probe Sequence
aaataccatgcacagagtccttaaa

SEQ ID NO: 72712 - DNA, 25 bp, Probe Sequence
gtcaggtctgatagtcctctgctaa

SEQ ID NO: 72713 - DNA, 25 bp, Probe Sequence
gaaataccatgcacagagtccttaa

SEQ ID NO: 72714 - DNA, 25 bp, Probe Sequence
tctgatagtcctctgctaaaacaac

SEQ ID NO: 72715 - DNA, 25 bp, Probe Sequence
gtctgatagtcctctgctaaaacaa

SEQ ID NO: 72716 - DNA, 25 bp, Probe Sequence
ctgatagtcctctgctaaaacaaca

SEQ ID NO: 72717 - DNA, 25 bp, Probe Sequence
tgatagtcctctgctaaaacaacac

SEQ ID NO: 72718 - DNA, 25 bp, Probe Sequence
tcaggtctgatagtcctctgctaaa

SEQ ID NO: 72719 - DNA, 25 bp, Probe Sequence
ctctgctaaaacaacacgatttaca

SEQ ID NO: 72720 - DNA, 25 bp, Probe Sequence
tctgctaaaacaacacgatttacat

SEQ ID NO: 72721 - DNA, 25 bp, Probe Sequence
cctctgctaaaacaacacgatttac

SEQ ID NO: 72722 - DNA, 25 bp, Probe Sequence
tcctctgctaaaacaacacgattta

SEQ ID NO: 72723 - DNA, 25 bp, Probe Sequence
tgtcaggtctgatagtcctctgcta

SEQ ID NO: 72724 - DNA, 25 bp, Probe Sequence
gatagtcctctgctaaaacaacacg

SEQ ID NO: 72725 - DNA, 25 bp, Probe Sequence
ggtctgatagtcctctgctaaaaca

SEQ ID NO: 72726 - DNA, 25 bp, Probe Sequence
gtcctctgctaaaacaacacgattt

SEQ ID NO: 72727 - DNA, 25 bp, Probe Sequence
tagtcctctgctaaaacaacacgat

SEQ ID NO: 72728 - DNA, 25 bp, Probe Sequence
atagtcctctgctaaaacaacacga

SEQ ID NO: 72729 - DNA, 25 bp, Probe Sequence
ctgctaaaacaacacgatttacata

SEQ ID NO: 72730 - DNA, 25 bp, Probe Sequence
caggaaggattgtttctggtgactg

SEQ ID NO: 72731 - DNA, 25 bp, Probe Sequence
tgctaaaacaacacgatttacataa

SEQ ID NO: 72732 - DNA, 25 bp, Probe Sequence
ggaaataccatgcacagagtcctta

SEQ ID NO: 72733 - DNA, 25 bp, Probe Sequence
agtcctctgctaaaacaacacgatt

SEQ ID NO: 72734 - DNA, 25 bp, Probe Sequence
aatagagtgcagtatttaaaccaaa

SEQ ID NO: 72735 - DNA, 25 bp, Probe Sequence
tcttgaccaagtatgacaacctctt

SEQ ID NO: 72736 - DNA, 25 bp, Probe Sequence
cctataaagagttcagcattggaga

SEQ ID NO: 72737 - DNA, 25 bp, Probe Sequence
tataaagagttcagcattggagagc

SEQ ID NO: 72738 - DNA, 25 bp, Probe Sequence
ctcttgaccaagtatgacaacctct

SEQ ID NO: 72739 - DNA, 25 bp, Probe Sequence
tggaatttgggcagatatagcatta

SEQ ID NO: 72740 - DNA, 25 bp, Probe Sequence
ccctataaagagttcagcattggag

SEQ ID NO: 72741 - DNA, 25 bp, Probe Sequence
ctataaagagttcagcattggagag

SEQ ID NO: 72742 - DNA, 25 bp, Probe Sequence
ggaatttgggcagatatagcattaa

SEQ ID NO: 72743 - DNA, 25 bp, Probe Sequence
gaagctcttgaccaagtatgacaac

SEQ ID NO: 72744 - DNA, 25 bp, Probe Sequence
cagccctataaagagttcagcattg

SEQ ID NO: 72745 - DNA, 25 bp, Probe Sequence
agaagctcttgaccaagtatgacaa

SEQ ID NO: 72746 - DNA, 25 bp, Probe Sequence
ttgaccaagtatgacaacctctttg

SEQ ID NO: 72747 - DNA, 25 bp, Probe Sequence
ccaagtatgacaacctctttgagac

SEQ ID NO: 72748 - DNA, 25 bp, Probe Sequence
gaccaagtatgacaacctctttgag

SEQ ID NO: 72749 - DNA, 25 bp, Probe Sequence
tgaccaagtatgacaacctctttga

SEQ ID NO: 72750 - DNA, 25 bp, Probe Sequence
caagtatgacaacctctttgagacg

SEQ ID NO: 72751 - DNA, 25 bp, Probe Sequence
accaagtatgacaacctctttgaga

SEQ ID NO: 72752 - DNA, 25 bp, Probe Sequence
gaaattcatggttggctacgaaatg

SEQ ID NO: 72753 - DNA, 25 bp, Probe Sequence
cttgaccaagtatgacaacctcttt

SEQ ID NO: 72754 - DNA, 25 bp, Probe Sequence
ctggaatttgggcagatatagcatt

SEQ ID NO: 72755 - DNA, 25 bp, Probe Sequence
atctcagcagccctataaagagttc

SEQ ID NO: 72756 - DNA, 25 bp, Probe Sequence
atgaagaagctcttgaccaagtatg

SEQ ID NO: 72757 - DNA, 25 bp, Probe Sequence
catgaagaagctcttgaccaagtat

SEQ ID NO: 72758 - DNA, 25 bp, Probe Sequence
gccctataaagagttcagcattgga

SEQ ID NO: 72759 - DNA, 25 bp, Probe Sequence
tcttgaccaagtatgacaacctctt

SEQ ID NO: 72760 - DNA, 25 bp, Probe Sequence
cctataaagagttcagcattggaga

SEQ ID NO: 72761 - DNA, 25 bp, Probe Sequence
tataaagagttcagcattggagagc

SEQ ID NO: 72762 - DNA, 25 bp, Probe Sequence
ctcttgaccaagtatgacaacctct

SEQ ID NO: 72763 - DNA, 25 bp, Probe Sequence
tggaatttgggcagatatagcatta

SEQ ID NO: 72764 - DNA, 25 bp, Probe Sequence
ccctataaagagttcagcattggag

SEQ ID NO: 72765 - DNA, 25 bp, Probe Sequence
ctataaagagttcagcattggagag

SEQ ID NO: 72766 - DNA, 25 bp, Probe Sequence
ggaatttgggcagatatagcattaa

SEQ ID NO: 72767 - DNA, 25 bp, Probe Sequence
gaagctcttgaccaagtatgacaac

SEQ ID NO: 72768 - DNA, 25 bp, Probe Sequence
cagccctataaagagttcagcattg

SEQ ID NO: 72769 - DNA, 25 bp, Probe Sequence
agaagctcttgaccaagtatgacaa

SEQ ID NO: 72770 - DNA, 25 bp, Probe Sequence
ttgaccaagtatgacaacctctttg

SEQ ID NO: 72771 - DNA, 25 bp, Probe Sequence
ccaagtatgacaacctctttgagac

SEQ ID NO: 72772 - DNA, 25 bp, Probe Sequence
gaccaagtatgacaacctctttgag

SEQ ID NO: 72773 - DNA, 25 bp, Probe Sequence
tgaccaagtatgacaacctctttga

SEQ ID NO: 72774 - DNA, 25 bp, Probe Sequence
caagtatgacaacctctttgagacg

SEQ ID NO: 72775 - DNA, 25 bp, Probe Sequence
accaagtatgacaacctctttgaga

SEQ ID NO: 72776 - DNA, 25 bp, Probe Sequence
gaaattcatggttggctacgaaatg

SEQ ID NO: 72777 - DNA, 25 bp, Probe Sequence
cttgaccaagtatgacaacctcttt

SEQ ID NO: 72778 - DNA, 25 bp, Probe Sequence
ctggaatttgggcagatatagcatt

SEQ ID NO: 72779 - DNA, 25 bp, Probe Sequence
atctcagcagccctataaagagttc

SEQ ID NO: 72780 - DNA, 25 bp, Probe Sequence
atgaagaagctcttgaccaagtatg

SEQ ID NO: 72781 - DNA, 25 bp, Probe Sequence
catgaagaagctcttgaccaagtat

SEQ ID NO: 72782 - DNA, 25 bp, Probe Sequence
gccctataaagagttcagcattgga

SEQ ID NO: 72783 - DNA, 25 bp, Probe Sequence
atatacacacacacacatacacaca

SEQ ID NO: 72784 - DNA, 25 bp, Probe Sequence
tatacacacacacacatacacacac

SEQ ID NO: 72785 - DNA, 25 bp, Probe Sequence
tatatacacacacacacatacacac

SEQ ID NO: 72786 - DNA, 25 bp, Probe Sequence
acacacacatacacacacatactta

SEQ ID NO: 72787 - DNA, 25 bp, Probe Sequence
acacacatacttatattccaggcat

SEQ ID NO: 72788 - DNA, 25 bp, Probe Sequence
cacacacatacttatattccaggca

SEQ ID NO: 72789 - DNA, 25 bp, Probe Sequence
acacacacatacttatattccaggc

SEQ ID NO: 72790 - DNA, 25 bp, Probe Sequence
cacacacacacatacacacacatac

SEQ ID NO: 72791 - DNA, 25 bp, Probe Sequence
cacacacatacacacacatacttat

SEQ ID NO: 72792 - DNA, 25 bp, Probe Sequence
acacacacacatacacacacatact

SEQ ID NO: 72793 - DNA, 25 bp, Probe Sequence
acacacacacacatacacacacata

SEQ ID NO: 72794 - DNA, 25 bp, Probe Sequence
tacacacacacacatacacacacat

SEQ ID NO: 72795 - DNA, 25 bp, Probe Sequence
atacacacacacacatacacacaca

SEQ ID NO: 72796 - DNA, 25 bp, Probe Sequence
cacacacacatacacacacatactt

SEQ ID NO: 72797 - DNA, 25 bp, Probe Sequence
atatatacacacacacacatacaca

SEQ ID NO: 72798 - DNA, 25 bp, Probe Sequence
cacacatacttatattccaggcatg

SEQ ID NO: 72799 - DNA, 25 bp, Probe Sequence
tacacacacatacttatattccagg

SEQ ID NO: 72800 - DNA, 25 bp, Probe Sequence
acacacatacacacacatacttata

SEQ ID NO: 72801 - DNA, 25 bp, Probe Sequence
acatacttatattccaggcatggtg

SEQ ID NO: 72802 - DNA, 25 bp, Probe Sequence
cacatacttatattccaggcatggt

SEQ ID NO: 72803 - DNA, 25 bp, Probe Sequence
acacatacttatattccaggcatgg

SEQ ID NO: 72804 - DNA, 25 bp, Probe Sequence
ggtagcacattcctatatttccagc

SEQ ID NO: 72805 - DNA, 25 bp, Probe Sequence
catacttatattccaggcatggtgg

SEQ ID NO: 72806 - DNA, 25 bp, Probe Sequence
cacacatacacacacatacttatat

SEQ ID NO: 72807 - DNA, 25 bp, Probe Sequence
acaatagaacaggcactagaagaag

SEQ ID NO: 72808 - DNA, 25 bp, Probe Sequence
acatacaatagaacaggcactagaa

SEQ ID NO: 72809 - DNA, 25 bp, Probe Sequence
aacatacaatagaacaggcactaga

SEQ ID NO: 72810 - DNA, 25 bp, Probe Sequence
tacaatagaacaggcactagaagaa

SEQ ID NO: 72811 - DNA, 25 bp, Probe Sequence
atagaacaggcactagaagaaggaa

SEQ ID NO: 72812 - DNA, 25 bp, Probe Sequence
aatagaacaggcactagaagaagga

SEQ ID NO: 72813 - DNA, 25 bp, Probe Sequence
caatagaacaggcactagaagaagg

SEQ ID NO: 72814 - DNA, 25 bp, Probe Sequence
atacaatagaacaggcactagaaga

SEQ ID NO: 72815 - DNA, 25 bp, Probe Sequence
catacaatagaacaggcactagaag

SEQ ID NO: 72816 - DNA, 25 bp, Probe Sequence
tcacaaccagtctgaagtatcatac

SEQ ID NO: 72817 - DNA, 25 bp, Probe Sequence
atcacaaccagtctgaagtatcata

SEQ ID NO: 72818 - DNA, 25 bp, Probe Sequence
tatcacaaccagtctgaagtatcat

SEQ ID NO: 72819 - DNA, 25 bp, Probe Sequence
atatcacaaccagtctgaagtatca

SEQ ID NO: 72820 - DNA, 25 bp, Probe Sequence
cacaaccagtctgaagtatcatacc

SEQ ID NO: 72821 - DNA, 25 bp, Probe Sequence
tagaacaggcactagaagaaggaag

SEQ ID NO: 72822 - DNA, 25 bp, Probe Sequence
gcatatatcacaaccagtctgaagt

SEQ ID NO: 72823 - DNA, 25 bp, Probe Sequence
catctcctcgtacatagacacagaa

SEQ ID NO: 72824 - DNA, 25 bp, Probe Sequence
atatcattctccaccaatcgctctg

SEQ ID NO: 72825 - DNA, 25 bp, Probe Sequence
gaacaggcactagaagaaggaagaa

SEQ ID NO: 72826 - DNA, 25 bp, Probe Sequence
gtattgctcagcttataacagatgt

SEQ ID NO: 72827 - DNA, 25 bp, Probe Sequence
tccaagtattgctcagcttataaca

SEQ ID NO: 72828 - DNA, 25 bp, Probe Sequence
agtattgctcagcttataacagatg

SEQ ID NO: 72829 - DNA, 25 bp, Probe Sequence
ccaagtattgctcagcttataacag

SEQ ID NO: 72830 - DNA, 25 bp, Probe Sequence
ctccaagtattgctcagcttataac

SEQ ID NO: 72831 - DNA, 25 bp, Probe Sequence
ttagtctcgctattaccatgtgatc

SEQ ID NO: 72832 - DNA, 25 bp, Probe Sequence
cgtattagtctcgctattaccatgt

SEQ ID NO: 72833 - DNA, 25 bp, Probe Sequence
attagtctcgctattaccatgtgat

SEQ ID NO: 72834 - DNA, 25 bp, Probe Sequence
gtattagtctcgctattaccatgtg

SEQ ID NO: 72835 - DNA, 25 bp, Probe Sequence
tattagtctcgctattaccatgtga

SEQ ID NO: 72836 - DNA, 25 bp, Probe Sequence
tagtctcgctattaccatgtgatcg

SEQ ID NO: 72837 - DNA, 25 bp, Probe Sequence
acgtattagtctcgctattaccatg

SEQ ID NO: 72838 - DNA, 25 bp, Probe Sequence
gtactggcagacatctacgtattag

SEQ ID NO: 72839 - DNA, 25 bp, Probe Sequence
ctacgtattagtctcgctattacca

SEQ ID NO: 72840 - DNA, 25 bp, Probe Sequence
tctacgtattagtctcgctattacc

SEQ ID NO: 72841 - DNA, 25 bp, Probe Sequence
cagacagacttagggactttcgtac

SEQ ID NO: 72842 - DNA, 25 bp, Probe Sequence
acatctacgtattagtctcgctatt

SEQ ID NO: 72843 - DNA, 25 bp, Probe Sequence
agacagacttagggactttcgtact

SEQ ID NO: 72844 - DNA, 25 bp, Probe Sequence
tacgtattagtctcgctattaccat

SEQ ID NO: 72845 - DNA, 25 bp, Probe Sequence
ccagacagacttagggactttcgta

SEQ ID NO: 72846 - DNA, 25 bp, Probe Sequence
gacatctacgtattagtctcgctat

SEQ ID NO: 72847 - DNA, 25 bp, Probe Sequence
tctcgctattaccatgtgatcgctt

SEQ ID NO: 72848 - DNA, 25 bp, Probe Sequence
gactttcgtactggcagacatctac

SEQ ID NO: 72849 - DNA, 25 bp, Probe Sequence
gacagacttagggactttcgtactg

SEQ ID NO: 72850 - DNA, 25 bp, Probe Sequence
tttctgcctcctgaagcgaataaag

SEQ ID NO: 72851 - DNA, 25 bp, Probe Sequence
catctacgtattagtctcgctatta

SEQ ID NO: 72852 - DNA, 25 bp, Probe Sequence
atctacgtattagtctcgctattac

SEQ ID NO: 72853 - DNA, 25 bp, Probe Sequence
ctcgctattaccatgtgatcgcttt

SEQ ID NO: 72854 - DNA, 25 bp, Probe Sequence
gtctcgctattaccatgtgatcgct

SEQ ID NO: 72855 - DNA, 25 bp, Probe Sequence
aaggctctacttatccgaaccaatt

SEQ ID NO: 72856 - DNA, 25 bp, Probe Sequence
caaggctctacttatccgaaccaat

SEQ ID NO: 72857 - DNA, 25 bp, Probe Sequence
cagtgaaagaatgaatcggtaagtg

SEQ ID NO: 72858 - DNA, 25 bp, Probe Sequence
caaacagtgaaagaatgaatcggta

SEQ ID NO: 72859 - DNA, 25 bp, Probe Sequence
tacaaacagtgaaagaatgaatcgg

SEQ ID NO: 72860 - DNA, 25 bp, Probe Sequence
gcagatacaaacagtgaaagaatga

SEQ ID NO: 72861 - DNA, 25 bp, Probe Sequence
acagtgaaagaatgaatcggtaagt

SEQ ID NO: 72862 - DNA, 25 bp, Probe Sequence
aacagtgaaagaatgaatcggtaag

SEQ ID NO: 72863 - DNA, 25 bp, Probe Sequence
aaacagtgaaagaatgaatcggtaa

SEQ ID NO: 72864 - DNA, 25 bp, Probe Sequence
aaatataattcctccttcccaaccc

SEQ ID NO: 72865 - DNA, 25 bp, Probe Sequence
gcaaatataattcctccttcccaac

SEQ ID NO: 72866 - DNA, 25 bp, Probe Sequence
tctacttatccgaaccaatttaggg

SEQ ID NO: 72867 - DNA, 25 bp, Probe Sequence
ggctctacttatccgaaccaattta

SEQ ID NO: 72868 - DNA, 25 bp, Probe Sequence
caaatataattcctccttcccaacc

SEQ ID NO: 72869 - DNA, 25 bp, Probe Sequence
cgcagatacaaacagtgaaagaatg

SEQ ID NO: 72870 - DNA, 25 bp, Probe Sequence
agtgaaagaatgaatcggtaagtgg

SEQ ID NO: 72871 - DNA, 25 bp, Probe Sequence
gctctacttatccgaaccaatttag

SEQ ID NO: 72872 - DNA, 25 bp, Probe Sequence
atataattcctccttcccaaccctt

SEQ ID NO: 72873 - DNA, 25 bp, Probe Sequence
aatataattcctccttcccaaccct

SEQ ID NO: 72874 - DNA, 25 bp, Probe Sequence
acaaacagtgaaagaatgaatcggt

SEQ ID NO: 72875 - DNA, 25 bp, Probe Sequence
ctctacttatccgaaccaatttagg

SEQ ID NO: 72876 - DNA, 25 bp, Probe Sequence
gaaagaatgaatcggtaagtgggac

SEQ ID NO: 72877 - DNA, 25 bp, Probe Sequence
tataattcctccttcccaacccttc

SEQ ID NO: 72878 - DNA, 25 bp, Probe Sequence
atacaaacagtgaaagaatgaatcg

SEQ ID NO: 72879 - DNA, 25 bp, Probe Sequence
ttatagttggctcatacacttcctg

SEQ ID NO: 72880 - DNA, 25 bp, Probe Sequence
cttatagttggctcatacacttcct

SEQ ID NO: 72881 - DNA, 25 bp, Probe Sequence
ttcaggcttatagttggctcataca

SEQ ID NO: 72882 - DNA, 25 bp, Probe Sequence
gcttatagttggctcatacacttcc

SEQ ID NO: 72883 - DNA, 25 bp, Probe Sequence
ggcttatagttggctcatacacttc

SEQ ID NO: 72884 - DNA, 25 bp, Probe Sequence
agaagtgatgaatatatctggctgg

SEQ ID NO: 72885 - DNA, 25 bp, Probe Sequence
tcaggcttatagttggctcatacac

SEQ ID NO: 72886 - DNA, 25 bp, Probe Sequence
aggcttatagttggctcatacactt

SEQ ID NO: 72887 - DNA, 25 bp, Probe Sequence
tggctcacatctgtaatcctagtac

SEQ ID NO: 72888 - DNA, 25 bp, Probe Sequence
tatagttggctcatacacttcctgc

SEQ ID NO: 72889 - DNA, 25 bp, Probe Sequence
caggcttatagttggctcatacact

SEQ ID NO: 72890 - DNA, 25 bp, Probe Sequence
gtggctcacatctgtaatcctagta

SEQ ID NO: 72891 - DNA, 25 bp, Probe Sequence
atttcaggcttatagttggctcata

SEQ ID NO: 72892 - DNA, 25 bp, Probe Sequence
tttcaggcttatagttggctcatac

SEQ ID NO: 72893 - DNA, 25 bp, Probe Sequence
gatttgtagcactttgttgacttcc

SEQ ID NO: 72894 - DNA, 25 bp, Probe Sequence
tagaagtgatgaatatatctggctg

SEQ ID NO: 72895 - DNA, 25 bp, Probe Sequence
gatttcaggcttatagttggctcat

SEQ ID NO: 72896 - DNA, 25 bp, Probe Sequence
cgatttgtagcactttgttgacttc

SEQ ID NO: 72897 - DNA, 25 bp, Probe Sequence
tttgtagcactttgttgacttccat

SEQ ID NO: 72898 - DNA, 25 bp, Probe Sequence
atttgtagcactttgttgacttcca

SEQ ID NO: 72899 - DNA, 25 bp, Probe Sequence
aattcccgatttgtagcactttgtt

SEQ ID NO: 72900 - DNA, 25 bp, Probe Sequence
gaagtgatgaatatatctggctggg

SEQ ID NO: 72901 - DNA, 25 bp, Probe Sequence
ccgatttgtagcactttgttgactt

SEQ ID NO: 72902 - DNA, 25 bp, Probe Sequence
ttggctcatacacttcctgcatatt

SEQ ID NO: 72903 - DNA, 25 bp, Probe Sequence
aagagaatattggcataaggacaga

SEQ ID NO: 72904 - DNA, 25 bp, Probe Sequence
agagaatattggcataaggacagat

SEQ ID NO: 72905 - DNA, 25 bp, Probe Sequence
atattggcataaggacagataatca

SEQ ID NO: 72906 - DNA, 25 bp, Probe Sequence
tcaagagaatattggcataaggaca

SEQ ID NO: 72907 - DNA, 25 bp, Probe Sequence
caagagaatattggcataaggacag

SEQ ID NO: 72908 - DNA, 25 bp, Probe Sequence
tattggcataaggacagataatcaa

SEQ ID NO: 72909 - DNA, 25 bp, Probe Sequence
atcaagagaatattggcataaggac

SEQ ID NO: 72910 - DNA, 25 bp, Probe Sequence
ggcataaggacagataatcaaagga

SEQ ID NO: 72911 - DNA, 25 bp, Probe Sequence
tggcataaggacagataatcaaagg

SEQ ID NO: 72912 - DNA, 25 bp, Probe Sequence
aagttaaagggcatccattgatttc

SEQ ID NO: 72913 - DNA, 25 bp, Probe Sequence
aaagttaaagggcatccattgattt

SEQ ID NO: 72914 - DNA, 25 bp, Probe Sequence
gagaatattggcataaggacagata

SEQ ID NO: 72915 - DNA, 25 bp, Probe Sequence
acagtaatcaagagaatattggcat

SEQ ID NO: 72916 - DNA, 25 bp, Probe Sequence
gcataaggacagataatcaaaggaa

SEQ ID NO: 72917 - DNA, 25 bp, Probe Sequence
aaggaataggatatacactccagaa

SEQ ID NO: 72918 - DNA, 25 bp, Probe Sequence
agttaaagggcatccattgatttca

SEQ ID NO: 72919 - DNA, 25 bp, Probe Sequence
aggacagataatcaaaggaatagga

SEQ ID NO: 72920 - DNA, 25 bp, Probe Sequence
aatcaagagaatattggcataagga

SEQ ID NO: 72921 - DNA, 25 bp, Probe Sequence
ttggcataaggacagataatcaaag

SEQ ID NO: 72922 - DNA, 25 bp, Probe Sequence
agaatattggcataaggacagataa

SEQ ID NO: 72923 - DNA, 25 bp, Probe Sequence
tacagtaatcaagagaatattggca

SEQ ID NO: 72924 - DNA, 25 bp, Probe Sequence
acttcactcatgccatatacaaact

SEQ ID NO: 72925 - DNA, 25 bp, Probe Sequence
caagacacatccatgaaacaactaa

SEQ ID NO: 72926 - DNA, 25 bp, Probe Sequence
aacttcactcatgccatatacaaac

SEQ ID NO: 72927 - DNA, 25 bp, Probe Sequence
agttatcgctattaccatgtgatgc

SEQ ID NO: 72928 - DNA, 25 bp, Probe Sequence
tagttatcgctattaccatgtgatg

SEQ ID NO: 72929 - DNA, 25 bp, Probe Sequence
gacctactctgtctgctgtgattaa

SEQ ID NO: 72930 - DNA, 25 bp, Probe Sequence
attagttatcgctattaccatgtga

SEQ ID NO: 72931 - DNA, 25 bp, Probe Sequence
ttagttatcgctattaccatgtgat

SEQ ID NO: 72932 - DNA, 25 bp, Probe Sequence
gaagagggtaatctggaagagtttc

SEQ ID NO: 72933 - DNA, 25 bp, Probe Sequence
cctactctgtctgctgtgattaaac

SEQ ID NO: 72934 - DNA, 25 bp, Probe Sequence
acctactctgtctgctgtgattaaa

SEQ ID NO: 72935 - DNA, 25 bp, Probe Sequence
cgtattagttatcgctattaccatg

SEQ ID NO: 72936 - DNA, 25 bp, Probe Sequence
tactctgtctgctgtgattaaacaa

SEQ ID NO: 72937 - DNA, 25 bp, Probe Sequence
tgacctactctgtctgctgtgatta

SEQ ID NO: 72938 - DNA, 25 bp, Probe Sequence
ctactctgtctgctgtgattaaaca

SEQ ID NO: 72939 - DNA, 25 bp, Probe Sequence
ggaagagggtaatctggaagagttt

SEQ ID NO: 72940 - DNA, 25 bp, Probe Sequence
gtgattaaacaaccaccaggaaatt

SEQ ID NO: 72941 - DNA, 25 bp, Probe Sequence
acgtattagttatcgctattaccat

SEQ ID NO: 72942 - DNA, 25 bp, Probe Sequence
actctgtctgctgtgattaaacaac

SEQ ID NO: 72943 - DNA, 25 bp, Probe Sequence
tgtgattaaacaaccaccaggaaat

SEQ ID NO: 72944 - DNA, 25 bp, Probe Sequence
aggaagagggtaatctggaagagtt

SEQ ID NO: 72945 - DNA, 25 bp, Probe Sequence
tgattaaacaaccaccaggaaattt

SEQ ID NO: 72946 - DNA, 25 bp, Probe Sequence
ctgtgattaaacaaccaccaggaaa

SEQ ID NO: 72947 - DNA, 25 bp, Probe Sequence
ctctgtctgctgtgattaaacaacc

SEQ ID NO: 72948 - DNA, 25 bp, Probe Sequence
gaggaagagggtaatctggaagagt

SEQ ID NO: 72949 - DNA, 25 bp, Probe Sequence
tattagttatcgctattaccatgtg

SEQ ID NO: 72950 - DNA, 25 bp, Probe Sequence
gtattagttatcgctattaccatgt

SEQ ID NO: 72951 - DNA, 25 bp, Probe Sequence
ttaaatggcagtaaactatggcatc

SEQ ID NO: 72952 - DNA, 25 bp, Probe Sequence
cacaaattatgaagaaaccaccctt

SEQ ID NO: 72953 - DNA, 25 bp, Probe Sequence
acaaattatgaagaaaccacccttt

SEQ ID NO: 72954 - DNA, 25 bp, Probe Sequence
taaatggcagtaaactatggcatcc

SEQ ID NO: 72955 - DNA, 25 bp, Probe Sequence
tcacaaattatgaagaaaccaccct

SEQ ID NO: 72956 - DNA, 25 bp, Probe Sequence
actatggcatccactcaaattatca

SEQ ID NO: 72957 - DNA, 25 bp, Probe Sequence
tatggcatccactcaaattatcaca

SEQ ID NO: 72958 - DNA, 25 bp, Probe Sequence
ctatggcatccactcaaattatcac

SEQ ID NO: 72959 - DNA, 25 bp, Probe Sequence
agtaaactatggcatccactcaaat

SEQ ID NO: 72960 - DNA, 25 bp, Probe Sequence
gtaaactatggcatccactcaaatt

SEQ ID NO: 72961 - DNA, 25 bp, Probe Sequence
aactatggcatccactcaaattatc

SEQ ID NO: 72962 - DNA, 25 bp, Probe Sequence
atggcatccactcaaattatcacaa

SEQ ID NO: 72963 - DNA, 25 bp, Probe Sequence
cagtaaactatggcatccactcaaa

SEQ ID NO: 72964 - DNA, 25 bp, Probe Sequence
tttaaatggcagtaaactatggcat

SEQ ID NO: 72965 - DNA, 25 bp, Probe Sequence
tggcatccactcaaattatcacaaa

SEQ ID NO: 72966 - DNA, 25 bp, Probe Sequence
aaactatggcatccactcaaattat

SEQ ID NO: 72967 - DNA, 25 bp, Probe Sequence
taaactatggcatccactcaaatta

SEQ ID NO: 72968 - DNA, 25 bp, Probe Sequence
ggcatccactcaaattatcacaaaa

SEQ ID NO: 72969 - DNA, 25 bp, Probe Sequence
ttcacaaattatgaagaaaccaccc

SEQ ID NO: 72970 - DNA, 25 bp, Probe Sequence
atgaagaaaccacccttttacaaaa

SEQ ID NO: 72971 - DNA, 25 bp, Probe Sequence
tatgaagaaaccacccttttacaaa

SEQ ID NO: 72972 - DNA, 25 bp, Probe Sequence
ttatgaagaaaccacccttttacaa

SEQ ID NO: 72973 - DNA, 25 bp, Probe Sequence
attatgaagaaaccacccttttaca

SEQ ID NO: 72974 - DNA, 25 bp, Probe Sequence
aaatggcagtaaactatggcatcca

SEQ ID NO: 72975 - DNA, 25 bp, Probe Sequence
agagtatgtctgtgtctttgtttgc

SEQ ID NO: 72976 - DNA, 25 bp, Probe Sequence
ctgagatcagagtatgtctgtgtct

SEQ ID NO: 72977 - DNA, 25 bp, Probe Sequence
agactgagatcagagtatgtctgtg

SEQ ID NO: 72978 - DNA, 25 bp, Probe Sequence
ccaaagactgagatcagagtatgtc

SEQ ID NO: 72979 - DNA, 25 bp, Probe Sequence
atccaaagactgagatcagagtatg

SEQ ID NO: 72980 - DNA, 25 bp, Probe Sequence
catatccaaagactgagatcagagt

SEQ ID NO: 72981 - DNA, 25 bp, Probe Sequence
tccaaagactgagatcagagtatgt

SEQ ID NO: 72982 - DNA, 25 bp, Probe Sequence
actgagatcagagtatgtctgtgtc

SEQ ID NO: 72983 - DNA, 25 bp, Probe Sequence
gactgagatcagagtatgtctgtgt

SEQ ID NO: 72984 - DNA, 25 bp, Probe Sequence
gcatatccaaagactgagatcagag

SEQ ID NO: 72985 - DNA, 25 bp, Probe Sequence
cagatggcagctcaagtgtctatac

SEQ ID NO: 72986 - DNA, 25 bp, Probe Sequence
gtatgtctgtgtctttgtttgcatc

SEQ ID NO: 72987 - DNA, 25 bp, Probe Sequence
aactcttaacaagttcctggactcc

SEQ ID NO: 72988 - DNA, 25 bp, Probe Sequence
agtatgtctgtgtctttgtttgcat

SEQ ID NO: 72989 - DNA, 25 bp, Probe Sequence
gatggcagctcaagtgtctatacag

SEQ ID NO: 72990 - DNA, 25 bp, Probe Sequence
tatccaaagactgagatcagagtat

SEQ ID NO: 72991 - DNA, 25 bp, Probe Sequence
atatccaaagactgagatcagagta

SEQ ID NO: 72992 - DNA, 25 bp, Probe Sequence
gcacaggacctctcagactattcag

SEQ ID NO: 72993 - DNA, 25 bp, Probe Sequence
cagcacaggacctctcagactattc

SEQ ID NO: 72994 - DNA, 25 bp, Probe Sequence
gctcaagtgtctatacaggaggctt

SEQ ID NO: 72995 - DNA, 25 bp, Probe Sequence
cacaggacctctcagactattcagg

SEQ ID NO: 72996 - DNA, 25 bp, Probe Sequence
actcttaacaagttcctggactccg

SEQ ID NO: 72997 - DNA, 25 bp, Probe Sequence
gagtatgtctgtgtctttgtttgca

SEQ ID NO: 72998 - DNA, 25 bp, Probe Sequence
ggcatatccaaagactgagatcaga

SEQ ID NO: 72999 - DNA, 25 bp, Probe Sequence
ccattgatgagaacttaatagcgtg

SEQ ID NO: 73000 - DNA, 25 bp, Probe Sequence
tccattgatgagaacttaatagcgt

SEQ ID NO: 73001 - DNA, 25 bp, Probe Sequence
cattgatgagaacttaatagcgtgt

SEQ ID NO: 73002 - DNA, 25 bp, Probe Sequence
attgatgagaacttaatagcgtgtc

SEQ ID NO: 73003 - DNA, 25 bp, Probe Sequence
ctaagtaagtctggctagtctagga

SEQ ID NO: 73004 - DNA, 25 bp, Probe Sequence
tctaagtaagtctggctagtctagg

SEQ ID NO: 73005 - DNA, 25 bp, Probe Sequence
ttccattgatgagaacttaatagcg

SEQ ID NO: 73006 - DNA, 25 bp, Probe Sequence
ttgatgagaacttaatagcgtgtcg

SEQ ID NO: 73007 - DNA, 25 bp, Probe Sequence
taagtaagtctggctagtctaggat

SEQ ID NO: 73008 - DNA, 25 bp, Probe Sequence
aagtaagtctggctagtctaggatg

SEQ ID NO: 73009 - DNA, 25 bp, Probe Sequence
tgctcttattccattgatgagaact

SEQ ID NO: 73010 - DNA, 25 bp, Probe Sequence
atgctcttattccattgatgagaac

SEQ ID NO: 73011 - DNA, 25 bp, Probe Sequence
ttctaagtaagtctggctagtctag

SEQ ID NO: 73012 - DNA, 25 bp, Probe Sequence
gctcttattccattgatgagaactt

SEQ ID NO: 73013 - DNA, 25 bp, Probe Sequence
ttcttctatcttgttgctctgcctt

SEQ ID NO: 73014 - DNA, 25 bp, Probe Sequence
gattcctagcaactatataacctcc

SEQ ID NO: 73015 - DNA, 25 bp, Probe Sequence
ggattcctagcaactatataacctc

SEQ ID NO: 73016 - DNA, 25 bp, Probe Sequence
aagccatgccataaccattacttac

SEQ ID NO: 73017 - DNA, 25 bp, Probe Sequence
agtaagtctggctagtctaggatgg

SEQ ID NO: 73018 - DNA, 25 bp, Probe Sequence
tatgctcttattccattgatgagaa

SEQ ID NO: 73019 - DNA, 25 bp, Probe Sequence
ttatgctcttattccattgatgaga

SEQ ID NO: 73020 - DNA, 25 bp, Probe Sequence
ccatgccataaccattacttactgc

SEQ ID NO: 73021 - DNA, 25 bp, Probe Sequence
gccatgccataaccattacttactg

SEQ ID NO: 73022 - DNA, 25 bp, Probe Sequence
agccatgccataaccattacttact

SEQ ID NO: 73023 - DNA, 25 bp, Probe Sequence
gacttctacaggcaacacttcaatg

SEQ ID NO: 73024 - DNA, 25 bp, Probe Sequence
atactaatgaagccactgacatgac

SEQ ID NO: 73025 - DNA, 25 bp, Probe Sequence
tatactaatgaagccactgacatga

SEQ ID NO: 73026 - DNA, 25 bp, Probe Sequence
agacttctacaggcaacacttcaat

SEQ ID NO: 73027 - DNA, 25 bp, Probe Sequence
ttatactaatgaagccactgacatg

SEQ ID NO: 73028 - DNA, 25 bp, Probe Sequence
attatactaatgaagccactgacat

SEQ ID NO: 73029 - DNA, 25 bp, Probe Sequence
tactaatgaagccactgacatgaca

SEQ ID NO: 73030 - DNA, 25 bp, Probe Sequence
gagacttctacaggcaacacttcaa

SEQ ID NO: 73031 - DNA, 25 bp, Probe Sequence
atttctgtatgtgtgtgtgtttctt

SEQ ID NO: 73032 - DNA, 25 bp, Probe Sequence
tattatactaatgaagccactgaca

SEQ ID NO: 73033 - DNA, 25 bp, Probe Sequence
aacacttcaatgctcatagaaacac

SEQ ID NO: 73034 - DNA, 25 bp, Probe Sequence
caacacttcaatgctcatagaaaca

SEQ ID NO: 73035 - DNA, 25 bp, Probe Sequence
cacttcaatgctcatagaaacactc

SEQ ID NO: 73036 - DNA, 25 bp, Probe Sequence
aatttctgtatgtgtgtgtgtttct

SEQ ID NO: 73037 - DNA, 25 bp, Probe Sequence
acttcaatgctcatagaaacactca

SEQ ID NO: 73038 - DNA, 25 bp, Probe Sequence
tttctgtatgtgtgtgtgtttctta

SEQ ID NO: 73039 - DNA, 25 bp, Probe Sequence
ttgagacttctacaggcaacacttc

SEQ ID NO: 73040 - DNA, 25 bp, Probe Sequence
cttcaatgctcatagaaacactcat

SEQ ID NO: 73041 - DNA, 25 bp, Probe Sequence
acacttcaatgctcatagaaacact

SEQ ID NO: 73042 - DNA, 25 bp, Probe Sequence
tctgtatgtgtgtgtgtttcttaaa

SEQ ID NO: 73043 - DNA, 25 bp, Probe Sequence
ttctgtatgtgtgtgtgtttcttaa

SEQ ID NO: 73044 - DNA, 25 bp, Probe Sequence
ctcatagaaacactcatagccaatt

SEQ ID NO: 73045 - DNA, 25 bp, Probe Sequence
gaatttctgtatgtgtgtgtgtttc

SEQ ID NO: 73046 - DNA, 25 bp, Probe Sequence
tcaatgctcatagaaacactcatag

SEQ ID NO: 73047 - DNA, 25 bp, Probe Sequence
tggctgtgattaagaataactaacc

SEQ ID NO: 73048 - DNA, 25 bp, Probe Sequence
actggctgtgattaagaataactaa

SEQ ID NO: 73049 - DNA, 25 bp, Probe Sequence
ctggctgtgattaagaataactaac

SEQ ID NO: 73050 - DNA, 25 bp, Probe Sequence
agatcctcgattattgaactaccag

SEQ ID NO: 73051 - DNA, 25 bp, Probe Sequence
gattattgaactaccagtgctccac

SEQ ID NO: 73052 - DNA, 25 bp, Probe Sequence
cactggctgtgattaagaataacta

SEQ ID NO: 73053 - DNA, 25 bp, Probe Sequence
atcctcgattattgaactaccagtg

SEQ ID NO: 73054 - DNA, 25 bp, Probe Sequence
gatcctcgattattgaactaccagt

SEQ ID NO: 73055 - DNA, 25 bp, Probe Sequence
ccagtttaggaccagaagttaagat

SEQ ID NO: 73056 - DNA, 25 bp, Probe Sequence
attaagaataactaaccctccctgg

SEQ ID NO: 73057 - DNA, 25 bp, Probe Sequence
ggctgtgattaagaataactaaccc

SEQ ID NO: 73058 - DNA, 25 bp, Probe Sequence
gagatcctcgattattgaactacca

SEQ ID NO: 73059 - DNA, 25 bp, Probe Sequence
tgagatcctcgattattgaactacc

SEQ ID NO: 73060 - DNA, 25 bp, Probe Sequence
gaccagtttaggaccagaagttaag

SEQ ID NO: 73061 - DNA, 25 bp, Probe Sequence
cgattattgaactaccagtgctcca

SEQ ID NO: 73062 - DNA, 25 bp, Probe Sequence
accagtttaggaccagaagttaaga

SEQ ID NO: 73063 - DNA, 25 bp, Probe Sequence
actttatagggtaacttccaggcat

SEQ ID NO: 73064 - DNA, 25 bp, Probe Sequence
aattagagtataatgagcccgtgag

SEQ ID NO: 73065 - DNA, 25 bp, Probe Sequence
tagactttatagggtaacttccagg

SEQ ID NO: 73066 - DNA, 25 bp, Probe Sequence
ctcgattattgaactaccagtgctc

SEQ ID NO: 73067 - DNA, 25 bp, Probe Sequence
gtgattaagaataactaaccctccc

SEQ ID NO: 73068 - DNA, 25 bp, Probe Sequence
tgattaagaataactaaccctccct

SEQ ID NO: 73069 - DNA, 25 bp, Probe Sequence
gctgtgattaagaataactaaccct

SEQ ID NO: 73070 - DNA, 25 bp, Probe Sequence
agactttatagggtaacttccaggc

SEQ ID NO: 73071 - DNA, 25 bp, Probe Sequence
catcagagtcttctcctcattcata

SEQ ID NO: 73072 - DNA, 25 bp, Probe Sequence
tcagagtcttctcctcattcatatt

SEQ ID NO: 73073 - DNA, 25 bp, Probe Sequence
atcagagtcttctcctcattcatat

SEQ ID NO: 73074 - DNA, 25 bp, Probe Sequence
gcatcagagtcttctcctcattcat

SEQ ID NO: 73075 - DNA, 25 bp, Probe Sequence
atgttgaaaccctgtctctactaaa

SEQ ID NO: 73076 - DNA, 25 bp, Probe Sequence
ttgtcttaaattatgtggtatcggc

SEQ ID NO: 73077 - DNA, 25 bp, Probe Sequence
atcttcctaacccaagcatatcttt

SEQ ID NO: 73078 - DNA, 25 bp, Probe Sequence
catcttcctaacccaagcatatctt

SEQ ID NO: 73079 - DNA, 25 bp, Probe Sequence
tcctaacccaagcatatctttactt

SEQ ID NO: 73080 - DNA, 25 bp, Probe Sequence
ttcctaacccaagcatatctttact

SEQ ID NO: 73081 - DNA, 25 bp, Probe Sequence
aggctttcaccaacacttcaaatat

SEQ ID NO: 73082 - DNA, 25 bp, Probe Sequence
cttcctaacccaagcatatctttac

SEQ ID NO: 73083 - DNA, 25 bp, Probe Sequence
tcttcctaacccaagcatatcttta

SEQ ID NO: 73084 - DNA, 25 bp, Probe Sequence
cagcatcagagtcttctcctcattc

SEQ ID NO: 73085 - DNA, 25 bp, Probe Sequence
catgttgaaaccctgtctctactaa

SEQ ID NO: 73086 - DNA, 25 bp, Probe Sequence
agtcttctcctcattcatatttagc

SEQ ID NO: 73087 - DNA, 25 bp, Probe Sequence
caggctttcaccaacacttcaaata

SEQ ID NO: 73088 - DNA, 25 bp, Probe Sequence
ttacttgtaacatttgtgtgatggc

SEQ ID NO: 73089 - DNA, 25 bp, Probe Sequence
agcatcagagtcttctcctcattca

SEQ ID NO: 73090 - DNA, 25 bp, Probe Sequence
tacttgtaacatttgtgtgatggct

SEQ ID NO: 73091 - DNA, 25 bp, Probe Sequence
ggctttcaccaacacttcaaatatt

SEQ ID NO: 73092 - DNA, 25 bp, Probe Sequence
cttgtaacatttgtgtgatggcttg

SEQ ID NO: 73093 - DNA, 25 bp, Probe Sequence
ttgtaacatttgtgtgatggcttga

SEQ ID NO: 73094 - DNA, 25 bp, Probe Sequence
acttgtaacatttgtgtgatggctt

SEQ ID NO: 73095 - DNA, 25 bp, Probe Sequence
ttcaatggtgtagtggacaagttac

SEQ ID NO: 73096 - DNA, 25 bp, Probe Sequence
catctcagtaaggaagagcatgtat

SEQ ID NO: 73097 - DNA, 25 bp, Probe Sequence
atctcagtaaggaagagcatgtatt

SEQ ID NO: 73098 - DNA, 25 bp, Probe Sequence
tcatctcagtaaggaagagcatgta

SEQ ID NO: 73099 - DNA, 25 bp, Probe Sequence
catcatctcagtaaggaagagcatg

SEQ ID NO: 73100 - DNA, 25 bp, Probe Sequence
atcatctcagtaaggaagagcatgt

SEQ ID NO: 73101 - DNA, 25 bp, Probe Sequence
gcatcatctcagtaaggaagagcat

SEQ ID NO: 73102 - DNA, 25 bp, Probe Sequence
gagttaaagtctcaaccgtttgttt

SEQ ID NO: 73103 - DNA, 25 bp, Probe Sequence
tttcaatggtgtagtggacaagtta

SEQ ID NO: 73104 - DNA, 25 bp, Probe Sequence
tcaatggtgtagtggacaagttacc

SEQ ID NO: 73105 - DNA, 25 bp, Probe Sequence
ctcagtaaggaagagcatgtatttg

SEQ ID NO: 73106 - DNA, 25 bp, Probe Sequence
tctcagtaaggaagagcatgtattt

SEQ ID NO: 73107 - DNA, 25 bp, Probe Sequence
gtttcaatggtgtagtggacaagtt

SEQ ID NO: 73108 - DNA, 25 bp, Probe Sequence
cgagttaaagtctcaaccgtttgtt

SEQ ID NO: 73109 - DNA, 25 bp, Probe Sequence
taccaatgctgcatcatctcagtaa

SEQ ID NO: 73110 - DNA, 25 bp, Probe Sequence
ttaccaatgctgcatcatctcagta

SEQ ID NO: 73111 - DNA, 25 bp, Probe Sequence
ctgtttcaatggtgtagtggacaag

SEQ ID NO: 73112 - DNA, 25 bp, Probe Sequence
aatgctgcatcatctcagtaaggaa

SEQ ID NO: 73113 - DNA, 25 bp, Probe Sequence
ttatttaccaatgctgcatcatctc

SEQ ID NO: 73114 - DNA, 25 bp, Probe Sequence
tttagtagagacgtagtttcaccca

SEQ ID NO: 73115 - DNA, 25 bp, Probe Sequence
tatttaccaatgctgcatcatctca

SEQ ID NO: 73116 - DNA, 25 bp, Probe Sequence
attatttaccaatgctgcatcatct

SEQ ID NO: 73117 - DNA, 25 bp, Probe Sequence
tgtttcaatggtgtagtggacaagt

SEQ ID NO: 73118 - DNA, 25 bp, Probe Sequence
ttagtagagacgtagtttcacccac

SEQ ID NO: 73119 - DNA, 25 bp, Probe Sequence
gatattggcttcattgtctcagttg

SEQ ID NO: 73120 - DNA, 25 bp, Probe Sequence
agatattggcttcattgtctcagtt

SEQ ID NO: 73121 - DNA, 25 bp, Probe Sequence
tattggcttcattgtctcagttgat

SEQ ID NO: 73122 - DNA, 25 bp, Probe Sequence
atattggcttcattgtctcagttga

SEQ ID NO: 73123 - DNA, 25 bp, Probe Sequence
ttaatcagcataggcactaaccaga

SEQ ID NO: 73124 - DNA, 25 bp, Probe Sequence
taatcagcataggcactaaccagag

SEQ ID NO: 73125 - DNA, 25 bp, Probe Sequence
gagaagcctggaatagaacagaatt

SEQ ID NO: 73126 - DNA, 25 bp, Probe Sequence
cttcattgtctcagttgatggcatt

SEQ ID NO: 73127 - DNA, 25 bp, Probe Sequence
attggcttcattgtctcagttgatg

SEQ ID NO: 73128 - DNA, 25 bp, Probe Sequence
agagaagcctggaatagaacagaat

SEQ ID NO: 73129 - DNA, 25 bp, Probe Sequence
aagagaagcctggaatagaacagaa

SEQ ID NO: 73130 - DNA, 25 bp, Probe Sequence
ttccaagcattatcgtatctgagcc

SEQ ID NO: 73131 - DNA, 25 bp, Probe Sequence
gtttccaagcattatcgtatctgag

SEQ ID NO: 73132 - DNA, 25 bp, Probe Sequence
aatcgtttccaagcattatcgtatc

SEQ ID NO: 73133 - DNA, 25 bp, Probe Sequence
ggataaagagaagcctggaatagaa

SEQ ID NO: 73134 - DNA, 25 bp, Probe Sequence
atcgtttccaagcattatcgtatct

SEQ ID NO: 73135 - DNA, 25 bp, Probe Sequence
ataaagagaagcctggaatagaaca

SEQ ID NO: 73136 - DNA, 25 bp, Probe Sequence
caggataattccaataatgtcttgc

SEQ ID NO: 73137 - DNA, 25 bp, Probe Sequence
gaagtatgtttatggaggttgctgt

SEQ ID NO: 73138 - DNA, 25 bp, Probe Sequence
gataaagagaagcctggaatagaac

SEQ ID NO: 73139 - DNA, 25 bp, Probe Sequence
tttaatcagcataggcactaaccag

SEQ ID NO: 73140 - DNA, 25 bp, Probe Sequence
ctttaatcagcataggcactaacca

SEQ ID NO: 73141 - DNA, 25 bp, Probe Sequence
gtaatcgtttccaagcattatcgta

SEQ ID NO: 73142 - DNA, 25 bp, Probe Sequence
tttccaagcattatcgtatctgagc

SEQ ID NO: 73143 - DNA, 25 bp, Probe Sequence
gtgatgagcaagacctgtctcaaaa

SEQ ID NO: 73144 - DNA, 25 bp, Probe Sequence
ggtgatgagcaagacctgtctcaaa

SEQ ID NO: 73145 - DNA, 25 bp, Probe Sequence
cgttctcttctactacacattccag

SEQ ID NO: 73146 - DNA, 25 bp, Probe Sequence
gttctcttctactacacattccagc

SEQ ID NO: 73147 - DNA, 25 bp, Probe Sequence
taactctactccttgttgcttcatt

SEQ ID NO: 73148 - DNA, 25 bp, Probe Sequence
tgttctgtaactctactccttgttg

SEQ ID NO: 73149 - DNA, 25 bp, Probe Sequence
gtaactctactccttgttgcttcat

SEQ ID NO: 73150 - DNA, 25 bp, Probe Sequence
atgttctgtaactctactccttgtt

SEQ ID NO: 73151 - DNA, 25 bp, Probe Sequence
ctctactccttgttgcttcattctg

SEQ ID NO: 73152 - DNA, 25 bp, Probe Sequence
aactctactccttgttgcttcattc

SEQ ID NO: 73153 - DNA, 25 bp, Probe Sequence
ctgtaactctactccttgttgcttc

SEQ ID NO: 73154 - DNA, 25 bp, Probe Sequence
actctactccttgttgcttcattct

SEQ ID NO: 73155 - DNA, 25 bp, Probe Sequence
tctgtaactctactccttgttgctt

SEQ ID NO: 73156 - DNA, 25 bp, Probe Sequence
ttctgtaactctactccttgttgct

SEQ ID NO: 73157 - DNA, 25 bp, Probe Sequence
gttctgtaactctactccttgttgc

SEQ ID NO: 73158 - DNA, 25 bp, Probe Sequence
tgtaactctactccttgttgcttca

SEQ ID NO: 73159 - DNA, 25 bp, Probe Sequence
catgttctgtaactctactccttgt

SEQ ID NO: 73160 - DNA, 25 bp, Probe Sequence
tcatgttctgtaactctactccttg

SEQ ID NO: 73161 - DNA, 25 bp, Probe Sequence
agcatcatgttctgtaactctactc

SEQ ID NO: 73162 - DNA, 25 bp, Probe Sequence
catcatgttctgtaactctactcct

SEQ ID NO: 73163 - DNA, 25 bp, Probe Sequence
gcatcatgttctgtaactctactcc

SEQ ID NO: 73164 - DNA, 25 bp, Probe Sequence
atcatgttctgtaactctactcctt

SEQ ID NO: 73165 - DNA, 25 bp, Probe Sequence
ttctcttctactacacattccagct

SEQ ID NO: 73166 - DNA, 25 bp, Probe Sequence
cagcatcatgttctgtaactctact

SEQ ID NO: 73167 - DNA, 25 bp, Probe Sequence
cattctggctccttctcttctcttg

SEQ ID NO: 73168 - DNA, 25 bp, Probe Sequence
tcattctggctccttctcttctctt

SEQ ID NO: 73169 - DNA, 25 bp, Probe Sequence
cttgaactcttagaacttagcacag

SEQ ID NO: 73170 - DNA, 25 bp, Probe Sequence
taagcatcctattacagaactccat

SEQ ID NO: 73171 - DNA, 25 bp, Probe Sequence
ataagcatcctattacagaactcca

SEQ ID NO: 73172 - DNA, 25 bp, Probe Sequence
ttgaactcttagaacttagcacaga

SEQ ID NO: 73173 - DNA, 25 bp, Probe Sequence
tcttgaactcttagaacttagcaca

SEQ ID NO: 73174 - DNA, 25 bp, Probe Sequence
tgaactcttagaacttagcacagat

SEQ ID NO: 73175 - DNA, 25 bp, Probe Sequence
gaactcttagaacttagcacagatt

SEQ ID NO: 73176 - DNA, 25 bp, Probe Sequence
aatacacgaatgacatgaatgaacc

SEQ ID NO: 73177 - DNA, 25 bp, Probe Sequence
ccaatacacgaatgacatgaatgaa

SEQ ID NO: 73178 - DNA, 25 bp, Probe Sequence
atacacgaatgacatgaatgaacct

SEQ ID NO: 73179 - DNA, 25 bp, Probe Sequence
caatacacgaatgacatgaatgaac

SEQ ID NO: 73180 - DNA, 25 bp, Probe Sequence
aagcatcctattacagaactccatg

SEQ ID NO: 73181 - DNA, 25 bp, Probe Sequence
aataagcatcctattacagaactcc

SEQ ID NO: 73182 - DNA, 25 bp, Probe Sequence
tacacgaatgacatgaatgaacctc

SEQ ID NO: 73183 - DNA, 25 bp, Probe Sequence
gcatctatacaatggaacatgactt

SEQ ID NO: 73184 - DNA, 25 bp, Probe Sequence
atctatacaatggaacatgacttgc

SEQ ID NO: 73185 - DNA, 25 bp, Probe Sequence
gcatcctattacagaactccatgtt

SEQ ID NO: 73186 - DNA, 25 bp, Probe Sequence
aacttagcacagattatataccagg

SEQ ID NO: 73187 - DNA, 25 bp, Probe Sequence
gccaatacacgaatgacatgaatga

SEQ ID NO: 73188 - DNA, 25 bp, Probe Sequence
ctgccaatacacgaatgacatgaat

SEQ ID NO: 73189 - DNA, 25 bp, Probe Sequence
agcatcctattacagaactccatgt

SEQ ID NO: 73190 - DNA, 25 bp, Probe Sequence
aactcttagaacttagcacagatta

SEQ ID NO: 73191 - DNA, 25 bp, Probe Sequence
tgccaatacacgaatgacatgaatg

SEQ ID NO: 73192 - DNA, 25 bp, Probe Sequence
tgcatctatacaatggaacatgact

SEQ ID NO: 73193 - DNA, 25 bp, Probe Sequence
ataaagttattttctcattcccaaa

SEQ ID NO: 73194 - DNA, 25 bp, Probe Sequence
taaagttattttctcattcccaaaa

SEQ ID NO: 73195 - DNA, 25 bp, Probe Sequence
aataaagttattttctcattcccaa

SEQ ID NO: 73196 - DNA, 25 bp, Probe Sequence
aaataaagttattttctcattccca

SEQ ID NO: 73197 - DNA, 25 bp, Probe Sequence
ataaagttattttctcattcccaaa

SEQ ID NO: 73198 - DNA, 25 bp, Probe Sequence
taaagttattttctcattcccaaaa

SEQ ID NO: 73199 - DNA, 25 bp, Probe Sequence
aataaagttattttctcattcccaa

SEQ ID NO: 73200 - DNA, 25 bp, Probe Sequence
aaataaagttattttctcattccca

SEQ ID NO: 73201 - DNA, 25 bp, Probe Sequence
tgaagaacctacaaatgaagtgagt

SEQ ID NO: 73202 - DNA, 25 bp, Probe Sequence
gaagaacctacaaatgaagtgagtc

SEQ ID NO: 73203 - DNA, 25 bp, Probe Sequence
atgaagaacctacaaatgaagtgag

SEQ ID NO: 73204 - DNA, 25 bp, Probe Sequence
aatgaagaacctacaaatgaagtga

SEQ ID NO: 73205 - DNA, 25 bp, Probe Sequence
acctacaaatgaagtgagtcaagat

SEQ ID NO: 73206 - DNA, 25 bp, Probe Sequence
aacctacaaatgaagtgagtcaaga

SEQ ID NO: 73207 - DNA, 25 bp, Probe Sequence
agaacctacaaatgaagtgagtcaa

SEQ ID NO: 73208 - DNA, 25 bp, Probe Sequence
aagaacctacaaatgaagtgagtca

SEQ ID NO: 73209 - DNA, 25 bp, Probe Sequence
gaacctacaaatgaagtgagtcaag

SEQ ID NO: 73210 - DNA, 25 bp, Probe Sequence
taatagatgggattaacagcagtgt

SEQ ID NO: 73211 - DNA, 25 bp, Probe Sequence
aatagatgggattaacagcagtgtg

SEQ ID NO: 73212 - DNA, 25 bp, Probe Sequence
cctacaaatgaagtgagtcaagatc

SEQ ID NO: 73213 - DNA, 25 bp, Probe Sequence
aaacagaaattgaaaggattggaaa

SEQ ID NO: 73214 - DNA, 25 bp, Probe Sequence
caggagaatcacttgaatccaggag

SEQ ID NO: 73215 - DNA, 25 bp, Probe Sequence
acaaagcatcagttctaaacaatag

SEQ ID NO: 73216 - DNA, 25 bp, Probe Sequence
catatgtgcaattgaagttccagag

SEQ ID NO: 73217 - DNA, 25 bp, Probe Sequence
ctgaggcaggagaatcacttgaatc

SEQ ID NO: 73218 - DNA, 25 bp, Probe Sequence
taatgaagaacctacaaatgaagtg

SEQ ID NO: 73219 - DNA, 25 bp, Probe Sequence
atatgtgcaattgaagttccagagg

SEQ ID NO: 73220 - DNA, 25 bp, Probe Sequence
aacaaagcatcagttctaaacaata

SEQ ID NO: 73221 - DNA, 25 bp, Probe Sequence
aatcacttgaatccaggaggcagaa

SEQ ID NO: 73222 - DNA, 25 bp, Probe Sequence
atagatgggattaacagcagtgtgg

SEQ ID NO: 73223 - DNA, 25 bp, Probe Sequence
aggagaatcacttgaatccaggagg

SEQ ID NO: 73224 - DNA, 25 bp, Probe Sequence
gaatcacttgaatccaggaggcaga

SEQ ID NO: 73225 - DNA, 25 bp, Probe Sequence
gatagagaccatcctggctaacaag

SEQ ID NO: 73226 - DNA, 25 bp, Probe Sequence
cagatcacgaggtcaggagatagag

SEQ ID NO: 73227 - DNA, 25 bp, Probe Sequence
agatagagaccatcctggctaacaa

SEQ ID NO: 73228 - DNA, 25 bp, Probe Sequence
agatcacgaggtcaggagatagaga

SEQ ID NO: 73229 - DNA, 25 bp, Probe Sequence
gagatagagaccatcctggctaaca

SEQ ID NO: 73230 - DNA, 25 bp, Probe Sequence
gatcacgaggtcaggagatagagac

SEQ ID NO: 73231 - DNA, 25 bp, Probe Sequence
atagagaccatcctggctaacaagg

SEQ ID NO: 73232 - DNA, 25 bp, Probe Sequence
ggagatagagaccatcctggctaac

SEQ ID NO: 73233 - DNA, 25 bp, Probe Sequence
gactttctactggcagtacatctac

SEQ ID NO: 73234 - DNA, 25 bp, Probe Sequence
tctactggcagtacatctacgtatt

SEQ ID NO: 73235 - DNA, 25 bp, Probe Sequence
ggactttctactggcagtacatcta

SEQ ID NO: 73236 - DNA, 25 bp, Probe Sequence
actttctactggcagtacatctacg

SEQ ID NO: 73237 - DNA, 25 bp, Probe Sequence
ctttctactggcagtacatctacgt

SEQ ID NO: 73238 - DNA, 25 bp, Probe Sequence
catcctggctaacaaggtgaaactc

SEQ ID NO: 73239 - DNA, 25 bp, Probe Sequence
tagggactttctactggcagtacat

SEQ ID NO: 73240 - DNA, 25 bp, Probe Sequence
tagagaccatcctggctaacaaggt

SEQ ID NO: 73241 - DNA, 25 bp, Probe Sequence
gcagatcacgaggtcaggagataga

SEQ ID NO: 73242 - DNA, 25 bp, Probe Sequence
tttctactggcagtacatctacgta

SEQ ID NO: 73243 - DNA, 25 bp, Probe Sequence
aggtgaaactccgcctttactaaaa

SEQ ID NO: 73244 - DNA, 25 bp, Probe Sequence
atcctggctaacaaggtgaaactcc

SEQ ID NO: 73245 - DNA, 25 bp, Probe Sequence
gggactttctactggcagtacatct

SEQ ID NO: 73246 - DNA, 25 bp, Probe Sequence
agggactttctactggcagtacatc

SEQ ID NO: 73247 - DNA, 25 bp, Probe Sequence
aaggtgaaactccgcctttactaaa

SEQ ID NO: 73248 - DNA, 25 bp, Probe Sequence
aggagatagagaccatcctggctaa

SEQ ID NO: 73249 - DNA, 25 bp, Probe Sequence
gatactatatgaaggatggcaggag

SEQ ID NO: 73250 - DNA, 25 bp, Probe Sequence
agatactatatgaaggatggcagga

SEQ ID NO: 73251 - DNA, 25 bp, Probe Sequence
aagatactatatgaaggatggcagg

SEQ ID NO: 73252 - DNA, 25 bp, Probe Sequence
atactatatgaaggatggcaggagt

SEQ ID NO: 73253 - DNA, 25 bp, Probe Sequence
tactatatgaaggatggcaggagtg

SEQ ID NO: 73254 - DNA, 25 bp, Probe Sequence
ctatatgaaggatggcaggagtgag

SEQ ID NO: 73255 - DNA, 25 bp, Probe Sequence
aactgatagaaggctagtgtgacta

SEQ ID NO: 73256 - DNA, 25 bp, Probe Sequence
tgatagaaggctagtgtgactacag

SEQ ID NO: 73257 - DNA, 25 bp, Probe Sequence
ctgatagaaggctagtgtgactaca

SEQ ID NO: 73258 - DNA, 25 bp, Probe Sequence
actgatagaaggctagtgtgactac

SEQ ID NO: 73259 - DNA, 25 bp, Probe Sequence
actatatgaaggatggcaggagtga

SEQ ID NO: 73260 - DNA, 25 bp, Probe Sequence
tagaaataatctgtaggttgggcac

SEQ ID NO: 73261 - DNA, 25 bp, Probe Sequence
ttagaaataatctgtaggttgggca

SEQ ID NO: 73262 - DNA, 25 bp, Probe Sequence
gcagagaaactttaggttcattgag

SEQ ID NO: 73263 - DNA, 25 bp, Probe Sequence
ggagtgagggaatgttaatctagtt

SEQ ID NO: 73264 - DNA, 25 bp, Probe Sequence
caggagtgagggaatgttaatctag

SEQ ID NO: 73265 - DNA, 25 bp, Probe Sequence
aggagtgagggaatgttaatctagt

SEQ ID NO: 73266 - DNA, 25 bp, Probe Sequence
tatatgaaggatggcaggagtgagg

SEQ ID NO: 73267 - DNA, 25 bp, Probe Sequence
cagagaaactttaggttcattgaga

SEQ ID NO: 73268 - DNA, 25 bp, Probe Sequence
attagaaataatctgtaggttgggc

SEQ ID NO: 73269 - DNA, 25 bp, Probe Sequence
gcaggagtgagggaatgttaatcta

SEQ ID NO: 73270 - DNA, 25 bp, Probe Sequence
aaagatactatatgaaggatggcag

SEQ ID NO: 73271 - DNA, 25 bp, Probe Sequence
gagtgagggaatgttaatctagttt

SEQ ID NO: 73272 - DNA, 25 bp, Probe Sequence
aaactgatagaaggctagtgtgact

SEQ ID NO: 73273 - DNA, 25 bp, Probe Sequence
atcaagaagtagaactgaccaactg

SEQ ID NO: 73274 - DNA, 25 bp, Probe Sequence
aagtagaactgaccaactgtgagat

SEQ ID NO: 73275 - DNA, 25 bp, Probe Sequence
gatcaagaagtagaactgaccaact

SEQ ID NO: 73276 - DNA, 25 bp, Probe Sequence
aagaagtagaactgaccaactgtga

SEQ ID NO: 73277 - DNA, 25 bp, Probe Sequence
caagaagtagaactgaccaactgtg

SEQ ID NO: 73278 - DNA, 25 bp, Probe Sequence
tcaagaagtagaactgaccaactgt

SEQ ID NO: 73279 - DNA, 25 bp, Probe Sequence
ggatcaagaagtagaactgaccaac

SEQ ID NO: 73280 - DNA, 25 bp, Probe Sequence
gaagtagaactgaccaactgtgaga

SEQ ID NO: 73281 - DNA, 25 bp, Probe Sequence
agaagtagaactgaccaactgtgag

SEQ ID NO: 73282 - DNA, 25 bp, Probe Sequence
agtagaactgaccaactgtgagatc

SEQ ID NO: 73283 - DNA, 25 bp, Probe Sequence
gaagaaaggagaaaggagagttaca

SEQ ID NO: 73284 - DNA, 25 bp, Probe Sequence
tgtaggcaatgtagagaaagaagtc

SEQ ID NO: 73285 - DNA, 25 bp, Probe Sequence
ctgtaggcaatgtagagaaagaagt

SEQ ID NO: 73286 - DNA, 25 bp, Probe Sequence
actgtaggcaatgtagagaaagaag

SEQ ID NO: 73287 - DNA, 25 bp, Probe Sequence
aaggagaaaggagagttacaaagtt

SEQ ID NO: 73288 - DNA, 25 bp, Probe Sequence
aaaggagaaaggagagttacaaagt

SEQ ID NO: 73289 - DNA, 25 bp, Probe Sequence
cactgtaggcaatgtagagaaagaa

SEQ ID NO: 73290 - DNA, 25 bp, Probe Sequence
agaaaggagaaaggagagttacaaa

SEQ ID NO: 73291 - DNA, 25 bp, Probe Sequence
aagaaaggagaaaggagagttacaa

SEQ ID NO: 73292 - DNA, 25 bp, Probe Sequence
ggaagaaaggagaaaggagagttac

SEQ ID NO: 73293 - DNA, 25 bp, Probe Sequence
gagaaagccacaaacattaagaagt

SEQ ID NO: 73294 - DNA, 25 bp, Probe Sequence
agagaaagccacaaacattaagaag

SEQ ID NO: 73295 - DNA, 25 bp, Probe Sequence
gagagaaagccacaaacattaagaa

SEQ ID NO: 73296 - DNA, 25 bp, Probe Sequence
gtagaactgaccaactgtgagatca

SEQ ID NO: 73297 - DNA, 25 bp, Probe Sequence
ctattatctccgttataccaatgcg

SEQ ID NO: 73298 - DNA, 25 bp, Probe Sequence
tacaagactgattagtgatagagcc

SEQ ID NO: 73299 - DNA, 25 bp, Probe Sequence
actattatctccgttataccaatgc

SEQ ID NO: 73300 - DNA, 25 bp, Probe Sequence
acaagactgattagtgatagagcca

SEQ ID NO: 73301 - DNA, 25 bp, Probe Sequence
caagactgattagtgatagagccag

SEQ ID NO: 73302 - DNA, 25 bp, Probe Sequence
aacaacagcaatcctaatgtctgat

SEQ ID NO: 73303 - DNA, 25 bp, Probe Sequence
ctgcgtggataggtactattatctc

SEQ ID NO: 73304 - DNA, 25 bp, Probe Sequence
aagactgattagtgatagagccagg

SEQ ID NO: 73305 - DNA, 25 bp, Probe Sequence
acaacagcaatcctaatgtctgatg

SEQ ID NO: 73306 - DNA, 25 bp, Probe Sequence
gaacaacagcaatcctaatgtctga

SEQ ID NO: 73307 - DNA, 25 bp, Probe Sequence
ttacaagactgattagtgatagagc

SEQ ID NO: 73308 - DNA, 25 bp, Probe Sequence
cctgcgtggataggtactattatct

SEQ ID NO: 73309 - DNA, 25 bp, Probe Sequence
cgtggataggtactattatctccgt

SEQ ID NO: 73310 - DNA, 25 bp, Probe Sequence
actgtgttccaggtcttcttctaag

SEQ ID NO: 73311 - DNA, 25 bp, Probe Sequence
ttcccatctttaactcctctcattc

SEQ ID NO: 73312 - DNA, 25 bp, Probe Sequence
gtggataggtactattatctccgtt

SEQ ID NO: 73313 - DNA, 25 bp, Probe Sequence
tgcgtggataggtactattatctcc

SEQ ID NO: 73314 - DNA, 25 bp, Probe Sequence
atctttaactcctctcattcctcac

SEQ ID NO: 73315 - DNA, 25 bp, Probe Sequence
catctttaactcctctcattcctca

SEQ ID NO: 73316 - DNA, 25 bp, Probe Sequence
ccatctttaactcctctcattcctc

SEQ ID NO: 73317 - DNA, 25 bp, Probe Sequence
cactgtgttccaggtcttcttctaa

SEQ ID NO: 73318 - DNA, 25 bp, Probe Sequence
aatcctaatgtctgatgctcattga

SEQ ID NO: 73319 - DNA, 25 bp, Probe Sequence
caatcctaatgtctgatgctcattg

SEQ ID NO: 73320 - DNA, 25 bp, Probe Sequence
gttcccatctttaactcctctcatt

SEQ ID NO: 73321 - DNA, 25 bp, Probe Sequence
taatgcctacctaagtgggatagag

SEQ ID NO: 73322 - DNA, 25 bp, Probe Sequence
ttaatgcctacctaagtgggataga

SEQ ID NO: 73323 - DNA, 25 bp, Probe Sequence
tttagtagagacagagtttcaccat

SEQ ID NO: 73324 - DNA, 25 bp, Probe Sequence
ttagtagagacagagtttcaccatg

SEQ ID NO: 73325 - DNA, 25 bp, Probe Sequence
cagtgtcctctctgagtatatcttt

SEQ ID NO: 73326 - DNA, 25 bp, Probe Sequence
attaatgcctacctaagtgggatag

SEQ ID NO: 73327 - DNA, 25 bp, Probe Sequence
ctacctaagtgggatagaggatgag

SEQ ID NO: 73328 - DNA, 25 bp, Probe Sequence
tagtagagacagagtttcaccatgt

SEQ ID NO: 73329 - DNA, 25 bp, Probe Sequence
gtagagacagagtttcaccatgttg

SEQ ID NO: 73330 - DNA, 25 bp, Probe Sequence
agtagagacagagtttcaccatgtt

SEQ ID NO: 73331 - DNA, 25 bp, Probe Sequence
gatagaggatgaggtggaaaggact

SEQ ID NO: 73332 - DNA, 25 bp, Probe Sequence
tacctaagtgggatagaggatgagg

SEQ ID NO: 73333 - DNA, 25 bp, Probe Sequence
cctacctaagtgggatagaggatga

SEQ ID NO: 73334 - DNA, 25 bp, Probe Sequence
tttgacttctaggaatctaccctgc

SEQ ID NO: 73335 - DNA, 25 bp, Probe Sequence
ctaagtgggatagaggatgaggtgg

SEQ ID NO: 73336 - DNA, 25 bp, Probe Sequence
cttgaacatctgacctcaggtgatc

SEQ ID NO: 73337 - DNA, 25 bp, Probe Sequence
tcagtgtcctctctgagtatatctt

SEQ ID NO: 73338 - DNA, 25 bp, Probe Sequence
atagaggatgaggtggaaaggactc

SEQ ID NO: 73339 - DNA, 25 bp, Probe Sequence
ttttagtagagacagagtttcacca

SEQ ID NO: 73340 - DNA, 25 bp, Probe Sequence
taagtgggatagaggatgaggtgga

SEQ ID NO: 73341 - DNA, 25 bp, Probe Sequence
cctatcaggttcaagcgattctcct

SEQ ID NO: 73342 - DNA, 25 bp, Probe Sequence
caacttctgcctatcaggttcaagc

SEQ ID NO: 73343 - DNA, 25 bp, Probe Sequence
tcttgaacatctgacctcaggtgat

SEQ ID NO: 73344 - DNA, 25 bp, Probe Sequence
aatgcctacctaagtgggatagagg

SEQ ID NO: 73345 - DNA, 25 bp, Probe Sequence
ttctggctatgatattattgctggt

SEQ ID NO: 73346 - DNA, 25 bp, Probe Sequence
tctggctatgatattattgctggta

SEQ ID NO: 73347 - DNA, 25 bp, Probe Sequence
ctggctatgatattattgctggtat

SEQ ID NO: 73348 - DNA, 25 bp, Probe Sequence
ccaagatcctgaagacaagtgaatt

SEQ ID NO: 73349 - DNA, 25 bp, Probe Sequence
caagatcctgaagacaagtgaattg

SEQ ID NO: 73350 - DNA, 25 bp, Probe Sequence
tggctatgatattattgctggtatt

SEQ ID NO: 73351 - DNA, 25 bp, Probe Sequence
tccaagatcctgaagacaagtgaat

SEQ ID NO: 73352 - DNA, 25 bp, Probe Sequence
caggtccttgactgattcacatatc

SEQ ID NO: 73353 - DNA, 25 bp, Probe Sequence
cagagctatcaagacagacatcatt

SEQ ID NO: 73354 - DNA, 25 bp, Probe Sequence
aagatcctgaagacaagtgaattgc

SEQ ID NO: 73355 - DNA, 25 bp, Probe Sequence
gttcagagctatcaagacagacatc

SEQ ID NO: 73356 - DNA, 25 bp, Probe Sequence
tcagagctatcaagacagacatcat

SEQ ID NO: 73357 - DNA, 25 bp, Probe Sequence
ttcagagctatcaagacagacatca

SEQ ID NO: 73358 - DNA, 25 bp, Probe Sequence
agttcagagctatcaagacagacat

SEQ ID NO: 73359 - DNA, 25 bp, Probe Sequence
cattaaggtccaagatcctgaagac

SEQ ID NO: 73360 - DNA, 25 bp, Probe Sequence
gacattaaggtccaagatcctgaag

SEQ ID NO: 73361 - DNA, 25 bp, Probe Sequence
attaaggtccaagatcctgaagaca

SEQ ID NO: 73362 - DNA, 25 bp, Probe Sequence
acattaaggtccaagatcctgaaga

SEQ ID NO: 73363 - DNA, 25 bp, Probe Sequence
agacattaaggtccaagatcctgaa

SEQ ID NO: 73364 - DNA, 25 bp, Probe Sequence
gaaagaaactaaagcaaccagacat

SEQ ID NO: 73365 - DNA, 25 bp, Probe Sequence
aaagaaactaaagcaaccagacatt

SEQ ID NO: 73366 - DNA, 25 bp, Probe Sequence
ttaaggtccaagatcctgaagacaa

SEQ ID NO: 73367 - DNA, 25 bp, Probe Sequence
aaactaaagcaaccagacattaagg

SEQ ID NO: 73368 - DNA, 25 bp, Probe Sequence
acagacatcatttgaggaagaaaga

SEQ ID NO: 73369 - DNA, 25 bp, Probe Sequence
atacttgagaggctgagtctaggaa

SEQ ID NO: 73370 - DNA, 25 bp, Probe Sequence
cagatacttgagaggctgagtctag

SEQ ID NO: 73371 - DNA, 25 bp, Probe Sequence
catggaactagaagctgttgaatca

SEQ ID NO: 73372 - DNA, 25 bp, Probe Sequence
gatacttgagaggctgagtctagga

SEQ ID NO: 73373 - DNA, 25 bp, Probe Sequence
agatacttgagaggctgagtctagg

SEQ ID NO: 73374 - DNA, 25 bp, Probe Sequence
tacttgagaggctgagtctaggaag

SEQ ID NO: 73375 - DNA, 25 bp, Probe Sequence
acatggaactagaagctgttgaatc

SEQ ID NO: 73376 - DNA, 25 bp, Probe Sequence
gaactagaagctgttgaatcagaca

SEQ ID NO: 73377 - DNA, 25 bp, Probe Sequence
atggaactagaagctgttgaatcag

SEQ ID NO: 73378 - DNA, 25 bp, Probe Sequence
cacatggaactagaagctgttgaat

SEQ ID NO: 73379 - DNA, 25 bp, Probe Sequence
ccagatacttgagaggctgagtcta

SEQ ID NO: 73380 - DNA, 25 bp, Probe Sequence
ggaactagaagctgttgaatcagac

SEQ ID NO: 73381 - DNA, 25 bp, Probe Sequence
atattcccatcatcacagaaagttt

SEQ ID NO: 73382 - DNA, 25 bp, Probe Sequence
aggcatactagagacatttcaagtg

SEQ ID NO: 73383 - DNA, 25 bp, Probe Sequence
agtaagtttagtcatctgtgtttca

SEQ ID NO: 73384 - DNA, 25 bp, Probe Sequence
gatcacatggaactagaagctgttg

SEQ ID NO: 73385 - DNA, 25 bp, Probe Sequence
tactagagacatttcaagtgctcag

SEQ ID NO: 73386 - DNA, 25 bp, Probe Sequence
tggaactagaagctgttgaatcaga

SEQ ID NO: 73387 - DNA, 25 bp, Probe Sequence
atactagagacatttcaagtgctca

SEQ ID NO: 73388 - DNA, 25 bp, Probe Sequence
tgtctaacgtcaacatggaagaatg

SEQ ID NO: 73389 - DNA, 25 bp, Probe Sequence
catactagagacatttcaagtgctc

SEQ ID NO: 73390 - DNA, 25 bp, Probe Sequence
atcacatggaactagaagctgttga

SEQ ID NO: 73391 - DNA, 25 bp, Probe Sequence
taggcatactagagacatttcaagt

SEQ ID NO: 73392 - DNA, 25 bp, Probe Sequence
cttgagaggctgagtctaggaagtt

SEQ ID NO: 73393 - DNA, 25 bp, Probe Sequence
tcatagaggctcaaccaatatagga

SEQ ID NO: 73394 - DNA, 25 bp, Probe Sequence
catagaggctcaaccaatataggat

SEQ ID NO: 73395 - DNA, 25 bp, Probe Sequence
atcatagaggctcaaccaatatagg

SEQ ID NO: 73396 - DNA, 25 bp, Probe Sequence
aggctcaaccaatataggatatagt

SEQ ID NO: 73397 - DNA, 25 bp, Probe Sequence
atagaggctcaaccaatataggata

SEQ ID NO: 73398 - DNA, 25 bp, Probe Sequence
agaggctcaaccaatataggatata

SEQ ID NO: 73399 - DNA, 25 bp, Probe Sequence
tagaggctcaaccaatataggatat

SEQ ID NO: 73400 - DNA, 25 bp, Probe Sequence
gaggctcaaccaatataggatatag

SEQ ID NO: 73401 - DNA, 25 bp, Probe Sequence
gcatggtagctcatacttgtaattc

SEQ ID NO: 73402 - DNA, 25 bp, Probe Sequence
catggtagctcatacttgtaattcc

SEQ ID NO: 73403 - DNA, 25 bp, Probe Sequence
ggcatggtagctcatacttgtaatt

SEQ ID NO: 73404 - DNA, 25 bp, Probe Sequence
ggtagctcatacttgtaattccagt

SEQ ID NO: 73405 - DNA, 25 bp, Probe Sequence
agctcatacttgtaattccagtgtt

SEQ ID NO: 73406 - DNA, 25 bp, Probe Sequence
tagctcatacttgtaattccagtgt

SEQ ID NO: 73407 - DNA, 25 bp, Probe Sequence
gtagctcatacttgtaattccagtg

SEQ ID NO: 73408 - DNA, 25 bp, Probe Sequence
ggctcaaccaatataggatatagta

SEQ ID NO: 73409 - DNA, 25 bp, Probe Sequence
ttgcccagagacataaatatgaaga

SEQ ID NO: 73410 - DNA, 25 bp, Probe Sequence
tgcccagagacataaatatgaagat

SEQ ID NO: 73411 - DNA, 25 bp, Probe Sequence
cttgcccagagacataaatatgaag

SEQ ID NO: 73412 - DNA, 25 bp, Probe Sequence
gctcatacttgtaattccagtgttt

SEQ ID NO: 73413 - DNA, 25 bp, Probe Sequence
gcttgcccagagacataaatatgaa

SEQ ID NO: 73414 - DNA, 25 bp, Probe Sequence
tggtagctcatacttgtaattccag

SEQ ID NO: 73415 - DNA, 25 bp, Probe Sequence
atggtagctcatacttgtaattcca

SEQ ID NO: 73416 - DNA, 25 bp, Probe Sequence
caaaggcaaagattgttagatcaga

SEQ ID NO: 73417 - DNA, 25 bp, Probe Sequence
gagatgggagaatagcttgaacctg

SEQ ID NO: 73418 - DNA, 25 bp, Probe Sequence
ctgagatgggagaatagcttgaacc

SEQ ID NO: 73419 - DNA, 25 bp, Probe Sequence
tatgtctatagtcccagctagttgg

SEQ ID NO: 73420 - DNA, 25 bp, Probe Sequence
tgagatgggagaatagcttgaacct

SEQ ID NO: 73421 - DNA, 25 bp, Probe Sequence
agatgggagaatagcttgaacctgg

SEQ ID NO: 73422 - DNA, 25 bp, Probe Sequence
gctgagatgggagaatagcttgaac

SEQ ID NO: 73423 - DNA, 25 bp, Probe Sequence
ttgggaggctgagatgggagaatag

SEQ ID NO: 73424 - DNA, 25 bp, Probe Sequence
gggagaatagcttgaacctgggaag

SEQ ID NO: 73425 - DNA, 25 bp, Probe Sequence
gatgggagaatagcttgaacctggg

SEQ ID NO: 73426 - DNA, 25 bp, Probe Sequence
atgggagaatagcttgaacctggga

SEQ ID NO: 73427 - DNA, 25 bp, Probe Sequence
ggctgagatgggagaatagcttgaa

SEQ ID NO: 73428 - DNA, 25 bp, Probe Sequence
gaggctgagatgggagaatagcttg

SEQ ID NO: 73429 - DNA, 25 bp, Probe Sequence
aggctgagatgggagaatagcttga

SEQ ID NO: 73430 - DNA, 25 bp, Probe Sequence
aatagcttgaacctgggaagcagag

SEQ ID NO: 73431 - DNA, 25 bp, Probe Sequence
gaatagcttgaacctgggaagcaga

SEQ ID NO: 73432 - DNA, 25 bp, Probe Sequence
agaatagcttgaacctgggaagcag

SEQ ID NO: 73433 - DNA, 25 bp, Probe Sequence
gagaatagcttgaacctgggaagca

SEQ ID NO: 73434 - DNA, 25 bp, Probe Sequence
cctaattctactatgtggctctcaa

SEQ ID NO: 73435 - DNA, 25 bp, Probe Sequence
ctaattctactatgtggctctcaac

SEQ ID NO: 73436 - DNA, 25 bp, Probe Sequence
gatcaactctgctagataccacatc

SEQ ID NO: 73437 - DNA, 25 bp, Probe Sequence
taattctactatgtggctctcaaca

SEQ ID NO: 73438 - DNA, 25 bp, Probe Sequence
aattctactatgtggctctcaacac

SEQ ID NO: 73439 - DNA, 25 bp, Probe Sequence
ggatcaactctgctagataccacat

SEQ ID NO: 73440 - DNA, 25 bp, Probe Sequence
cctatccctaattctactatgtggc

SEQ ID NO: 73441 - DNA, 25 bp, Probe Sequence
tatgtggctctcaacaccttgtatt

SEQ ID NO: 73442 - DNA, 25 bp, Probe Sequence
atccctaattctactatgtggctct

SEQ ID NO: 73443 - DNA, 25 bp, Probe Sequence
ccttggatcaactctgctagatacc

SEQ ID NO: 73444 - DNA, 25 bp, Probe Sequence
aactctgctagataccacatctcta

SEQ ID NO: 73445 - DNA, 25 bp, Probe Sequence
ccctatccctaattctactatgtgg

SEQ ID NO: 73446 - DNA, 25 bp, Probe Sequence
tccctaattctactatgtggctctc

SEQ ID NO: 73447 - DNA, 25 bp, Probe Sequence
attctactatgtggctctcaacacc

SEQ ID NO: 73448 - DNA, 25 bp, Probe Sequence
atcaactctgctagataccacatct

SEQ ID NO: 73449 - DNA, 25 bp, Probe Sequence
ccctaattctactatgtggctctca

SEQ ID NO: 73450 - DNA, 25 bp, Probe Sequence
tatccctaattctactatgtggctc

SEQ ID NO: 73451 - DNA, 25 bp, Probe Sequence
ctatccctaattctactatgtggct

SEQ ID NO: 73452 - DNA, 25 bp, Probe Sequence
tctactagagagtctgccagatgag

SEQ ID NO: 73453 - DNA, 25 bp, Probe Sequence
ctatgtggctctcaacaccttgtat

SEQ ID NO: 73454 - DNA, 25 bp, Probe Sequence
cttggatcaactctgctagatacca

SEQ ID NO: 73455 - DNA, 25 bp, Probe Sequence
caactctgctagataccacatctct

SEQ ID NO: 73456 - DNA, 25 bp, Probe Sequence
tcaactctgctagataccacatctc

SEQ ID NO: 73457 - DNA, 25 bp, Probe Sequence
aatacgccttctgtccagtcctaat

SEQ ID NO: 73458 - DNA, 25 bp, Probe Sequence
gtttgacctccgatgagtagtgaca

SEQ ID NO: 73459 - DNA, 25 bp, Probe Sequence
tgtttgacctccgatgagtagtgac

SEQ ID NO: 73460 - DNA, 25 bp, Probe Sequence
tttgacctccgatgagtagtgacac

SEQ ID NO: 73461 - DNA, 25 bp, Probe Sequence
actcttctacagattgttgttgact

SEQ ID NO: 73462 - DNA, 25 bp, Probe Sequence
aactcttctacagattgttgttgac

SEQ ID NO: 73463 - DNA, 25 bp, Probe Sequence
caggaatatccagacaagagagaag

SEQ ID NO: 73464 - DNA, 25 bp, Probe Sequence
ctcttctacagattgttgttgacta

SEQ ID NO: 73465 - DNA, 25 bp, Probe Sequence
acaggaatatccagacaagagagaa

SEQ ID NO: 73466 - DNA, 25 bp, Probe Sequence
aggaatatccagacaagagagaagg

SEQ ID NO: 73467 - DNA, 25 bp, Probe Sequence
cacaggaatatccagacaagagaga

SEQ ID NO: 73468 - DNA, 25 bp, Probe Sequence
gaaaccatcaaatccagaatacagg

SEQ ID NO: 73469 - DNA, 25 bp, Probe Sequence
gcaataataactaacctaagcaaga

SEQ ID NO: 73470 - DNA, 25 bp, Probe Sequence
aataatgggaaggctatgagtgaag

SEQ ID NO: 73471 - DNA, 25 bp, Probe Sequence
tcttctacagattgttgttgactaa

SEQ ID NO: 73472 - DNA, 25 bp, Probe Sequence
tctcaacatatttccagtctacagg

SEQ ID NO: 73473 - DNA, 25 bp, Probe Sequence
cctctcaacatatttccagtctaca

SEQ ID NO: 73474 - DNA, 25 bp, Probe Sequence
acctctcaacatatttccagtctac

SEQ ID NO: 73475 - DNA, 25 bp, Probe Sequence
aaacctctcaacatatttccagtct

SEQ ID NO: 73476 - DNA, 25 bp, Probe Sequence
caaacctctcaacatatttccagtc

SEQ ID NO: 73477 - DNA, 25 bp, Probe Sequence
tcaaacctctcaacatatttccagt

SEQ ID NO: 73478 - DNA, 25 bp, Probe Sequence
ctaataatgggaaggctatgagtga

SEQ ID NO: 73479 - DNA, 25 bp, Probe Sequence
gagagaaaggaacaagttaaagcat

SEQ ID NO: 73480 - DNA, 25 bp, Probe Sequence
taataatgggaaggctatgagtgaa

SEQ ID NO: 73481 - DNA, 25 bp, Probe Sequence
aacctctcaacatatttccagtcta

SEQ ID NO: 73482 - DNA, 25 bp, Probe Sequence
aacttggcttcactaataatgggaa

SEQ ID NO: 73483 - DNA, 25 bp, Probe Sequence
atcaaacctctcaacatatttccag

SEQ ID NO: 73484 - DNA, 25 bp, Probe Sequence
aggagagaaaggaacaagttaaagc

SEQ ID NO: 73485 - DNA, 25 bp, Probe Sequence
cagaacctatctactcgttgttgaa

SEQ ID NO: 73486 - DNA, 25 bp, Probe Sequence
acagaacctatctactcgttgttga

SEQ ID NO: 73487 - DNA, 25 bp, Probe Sequence
cacagaacctatctactcgttgttg

SEQ ID NO: 73488 - DNA, 25 bp, Probe Sequence
ccacagaacctatctactcgttgtt

SEQ ID NO: 73489 - DNA, 25 bp, Probe Sequence
gggaatacacatacaaacacacaat

SEQ ID NO: 73490 - DNA, 25 bp, Probe Sequence
ctcaagggaatacacatacaaacac

SEQ ID NO: 73491 - DNA, 25 bp, Probe Sequence
tctcaagggaatacacatacaaaca

SEQ ID NO: 73492 - DNA, 25 bp, Probe Sequence
ccatctcaagggaatacacatacaa

SEQ ID NO: 73493 - DNA, 25 bp, Probe Sequence
caagggaatacacatacaaacacac

SEQ ID NO: 73494 - DNA, 25 bp, Probe Sequence
tcaagggaatacacatacaaacaca

SEQ ID NO: 73495 - DNA, 25 bp, Probe Sequence
agggaatacacatacaaacacacaa

SEQ ID NO: 73496 - DNA, 25 bp, Probe Sequence
aagggaatacacatacaaacacaca

SEQ ID NO: 73497 - DNA, 25 bp, Probe Sequence
caccatctcaagggaatacacatac

SEQ ID NO: 73498 - DNA, 25 bp, Probe Sequence
agaacctatctactcgttgttgaaa

SEQ ID NO: 73499 - DNA, 25 bp, Probe Sequence
atctcaagggaatacacatacaaac

SEQ ID NO: 73500 - DNA, 25 bp, Probe Sequence
catctcaagggaatacacatacaaa

SEQ ID NO: 73501 - DNA, 25 bp, Probe Sequence
accatctcaagggaatacacataca

SEQ ID NO: 73502 - DNA, 25 bp, Probe Sequence
gaacctatctactcgttgttgaaat

SEQ ID NO: 73503 - DNA, 25 bp, Probe Sequence
aacctatctactcgttgttgaaatt

SEQ ID NO: 73504 - DNA, 25 bp, Probe Sequence
gcaccatctcaagggaatacacata

SEQ ID NO: 73505 - DNA, 25 bp, Probe Sequence
ggaatacacatacaaacacacaata

SEQ ID NO: 73506 - DNA, 25 bp, Probe Sequence
acctatctactcgttgttgaaattt

SEQ ID NO: 73507 - DNA, 25 bp, Probe Sequence
gaatacacatacaaacacacaataa

SEQ ID NO: 73508 - DNA, 25 bp, Probe Sequence
cccacagaacctatctactcgttgt

SEQ ID NO: 73509 - DNA, 25 bp, Probe Sequence
catctcctctactatgttcgtcctt

SEQ ID NO: 73510 - DNA, 25 bp, Probe Sequence
ggtcctcatctcctctactatgttc

SEQ ID NO: 73511 - DNA, 25 bp, Probe Sequence
ctcatctcctctactatgttcgtcc

SEQ ID NO: 73512 - DNA, 25 bp, Probe Sequence
cctcatctcctctactatgttcgtc

SEQ ID NO: 73513 - DNA, 25 bp, Probe Sequence
gtcctcatctcctctactatgttcg

SEQ ID NO: 73514 - DNA, 25 bp, Probe Sequence
tcatctcctctactatgttcgtcct

SEQ ID NO: 73515 - DNA, 25 bp, Probe Sequence
tcctcatctcctctactatgttcgt

SEQ ID NO: 73516 - DNA, 25 bp, Probe Sequence
taaggtcctcatctcctctactatg

SEQ ID NO: 73517 - DNA, 25 bp, Probe Sequence
ctaaggtcctcatctcctctactat

SEQ ID NO: 73518 - DNA, 25 bp, Probe Sequence
ttgtactattaagtcatgtcctggt

SEQ ID NO: 73519 - DNA, 25 bp, Probe Sequence
catgtagacagctatgaccattagg

SEQ ID NO: 73520 - DNA, 25 bp, Probe Sequence
aggtcctcatctcctctactatgtt

SEQ ID NO: 73521 - DNA, 25 bp, Probe Sequence
aaggtcctcatctcctctactatgt

SEQ ID NO: 73522 - DNA, 25 bp, Probe Sequence
tgtactattaagtcatgtcctggta

SEQ ID NO: 73523 - DNA, 25 bp, Probe Sequence
atctcctctactatgttcgtccttt

SEQ ID NO: 73524 - DNA, 25 bp, Probe Sequence
gctaaggtcctcatctcctctacta

SEQ ID NO: 73525 - DNA, 25 bp, Probe Sequence
tctcctctactatgttcgtcctttg

SEQ ID NO: 73526 - DNA, 25 bp, Probe Sequence
atgtagacagctatgaccattaggc

SEQ ID NO: 73527 - DNA, 25 bp, Probe Sequence
ctcctctactatgttcgtcctttgg

SEQ ID NO: 73528 - DNA, 25 bp, Probe Sequence
gatgtgatctatcagacaaaggagt

SEQ ID NO: 73529 - DNA, 25 bp, Probe Sequence
ggatgtgatctatcagacaaaggag

SEQ ID NO: 73530 - DNA, 25 bp, Probe Sequence
atctatcagacaaaggagtcaacct

SEQ ID NO: 73531 - DNA, 25 bp, Probe Sequence
tgatctatcagacaaaggagtcaac

SEQ ID NO: 73532 - DNA, 25 bp, Probe Sequence
gtgatctatcagacaaaggagtcaa

SEQ ID NO: 73533 - DNA, 25 bp, Probe Sequence
ctaattcaagcaccacaaccttatt

SEQ ID NO: 73534 - DNA, 25 bp, Probe Sequence
taattcaagcaccacaaccttattg

SEQ ID NO: 73535 - DNA, 25 bp, Probe Sequence
cctaattcaagcaccacaaccttat

SEQ ID NO: 73536 - DNA, 25 bp, Probe Sequence
tatgactccaaattatccaaactgc

SEQ ID NO: 73537 - DNA, 25 bp, Probe Sequence
atgactccaaattatccaaactgct

SEQ ID NO: 73538 - DNA, 25 bp, Probe Sequence
gactccaaattatccaaactgctct

SEQ ID NO: 73539 - DNA, 25 bp, Probe Sequence
tggaaggcatcaataaagttgttag

SEQ ID NO: 73540 - DNA, 25 bp, Probe Sequence
ctggaaggcatcaataaagttgtta

SEQ ID NO: 73541 - DNA, 25 bp, Probe Sequence
ggaaggcatcaataaagttgttagc

SEQ ID NO: 73542 - DNA, 25 bp, Probe Sequence
actccaaattatccaaactgctctg

SEQ ID NO: 73543 - DNA, 25 bp, Probe Sequence
tgactccaaattatccaaactgctc

SEQ ID NO: 73544 - DNA, 25 bp, Probe Sequence
atctcgtgcctgaaacaattaacat

SEQ ID NO: 73545 - DNA, 25 bp, Probe Sequence
tctggaaggcatcaataaagttgtt

SEQ ID NO: 73546 - DNA, 25 bp, Probe Sequence
cattatgatttcacacactggtcca

SEQ ID NO: 73547 - DNA, 25 bp, Probe Sequence
ctctggaaggcatcaataaagttgt

SEQ ID NO: 73548 - DNA, 25 bp, Probe Sequence
cgtgcctgaaacaattaacatgatt

SEQ ID NO: 73549 - DNA, 25 bp, Probe Sequence
aacatgattaacatccctgatccta

SEQ ID NO: 73550 - DNA, 25 bp, Probe Sequence
taacatgattaacatccctgatcct

SEQ ID NO: 73551 - DNA, 25 bp, Probe Sequence
aacgctagtgagaatttaatgaact

SEQ ID NO: 73552 - DNA, 25 bp, Probe Sequence
acatgattaacatccctgatcctat

SEQ ID NO: 73553 - DNA, 25 bp, Probe Sequence
catctcgtgcctgaaacaattaaca

SEQ ID NO: 73554 - DNA, 25 bp, Probe Sequence
gcctaattcaagcaccacaacctta

SEQ ID NO: 73555 - DNA, 25 bp, Probe Sequence
aagcaccacaaccttattgaccatc

SEQ ID NO: 73556 - DNA, 25 bp, Probe Sequence
tcgtgcctgaaacaattaacatgat

SEQ ID NO: 73557 - DNA, 25 bp, Probe Sequence
agtgagagtataatatgtggctgac

SEQ ID NO: 73558 - DNA, 25 bp, Probe Sequence
cgtgactacttatgtgtactggata

SEQ ID NO: 73559 - DNA, 25 bp, Probe Sequence
tagtgagagtataatatgtggctga

SEQ ID NO: 73560 - DNA, 25 bp, Probe Sequence
gtgagagtataatatgtggctgaca

SEQ ID NO: 73561 - DNA, 25 bp, Probe Sequence
actgaacttactctaacctcactaa

SEQ ID NO: 73562 - DNA, 25 bp, Probe Sequence
aactgaacttactctaacctcacta

SEQ ID NO: 73563 - DNA, 25 bp, Probe Sequence
ttagtgagagtataatatgtggctg

SEQ ID NO: 73564 - DNA, 25 bp, Probe Sequence
gttagtgagagtataatatgtggct

SEQ ID NO: 73565 - DNA, 25 bp, Probe Sequence
agttagtgagagtataatatgtggc

SEQ ID NO: 73566 - DNA, 25 bp, Probe Sequence
gtgactacttatgtgtactggatac

SEQ ID NO: 73567 - DNA, 25 bp, Probe Sequence
taagaagtgggaagagaagacaatg

SEQ ID NO: 73568 - DNA, 25 bp, Probe Sequence
ctaagaagtgggaagagaagacaat

SEQ ID NO: 73569 - DNA, 25 bp, Probe Sequence
aatgttgaaggacgtgactacttat

SEQ ID NO: 73570 - DNA, 25 bp, Probe Sequence
atgttgaaggacgtgactacttatg

SEQ ID NO: 73571 - DNA, 25 bp, Probe Sequence
gaatgttgaaggacgtgactactta

SEQ ID NO: 73572 - DNA, 25 bp, Probe Sequence
acgtgactacttatgtgtactggat

SEQ ID NO: 73573 - DNA, 25 bp, Probe Sequence
gaaggacgtgactacttatgtgtac

SEQ ID NO: 73574 - DNA, 25 bp, Probe Sequence
agcaaatactgtatgttctcactca

SEQ ID NO: 73575 - DNA, 25 bp, Probe Sequence
gagaggagcaggaaagataactact

SEQ ID NO: 73576 - DNA, 25 bp, Probe Sequence
aaggacgtgactacttatgtgtact

SEQ ID NO: 73577 - DNA, 25 bp, Probe Sequence
tgaaggacgtgactacttatgtgta

SEQ ID NO: 73578 - DNA, 25 bp, Probe Sequence
ggattcagatatttgagcaggtagt

SEQ ID NO: 73579 - DNA, 25 bp, Probe Sequence
tggattcagatatttgagcaggtag

SEQ ID NO: 73580 - DNA, 25 bp, Probe Sequence
gttgaaggacgtgactacttatgtg

SEQ ID NO: 73581 - DNA, 25 bp, Probe Sequence
ttagagtacatcctcctgttattgc

SEQ ID NO: 73582 - DNA, 25 bp, Probe Sequence
tagagtacatcctcctgttattgct

SEQ ID NO: 73583 - DNA, 25 bp, Probe Sequence
agagtacatcctcctgttattgctt

SEQ ID NO: 73584 - DNA, 25 bp, Probe Sequence
gtattcttagagtacatcctcctgt

SEQ ID NO: 73585 - DNA, 25 bp, Probe Sequence
agtattcttagagtacatcctcctg

SEQ ID NO: 73586 - DNA, 25 bp, Probe Sequence
ccaggtttaatgctaagacacacta

SEQ ID NO: 73587 - DNA, 25 bp, Probe Sequence
cttagagtacatcctcctgttattg

SEQ ID NO: 73588 - DNA, 25 bp, Probe Sequence
tcttagagtacatcctcctgttatt

SEQ ID NO: 73589 - DNA, 25 bp, Probe Sequence
ttcttagagtacatcctcctgttat

SEQ ID NO: 73590 - DNA, 25 bp, Probe Sequence
attcttagagtacatcctcctgtta

SEQ ID NO: 73591 - DNA, 25 bp, Probe Sequence
tattcttagagtacatcctcctgtt

SEQ ID NO: 73592 - DNA, 25 bp, Probe Sequence
attaccaggcatattccaaagcatt

SEQ ID NO: 73593 - DNA, 25 bp, Probe Sequence
atatgcttcccacactgtcattatt

SEQ ID NO: 73594 - DNA, 25 bp, Probe Sequence
aatatgcttcccacactgtcattat

SEQ ID NO: 73595 - DNA, 25 bp, Probe Sequence
caggtttaatgctaagacacactat

SEQ ID NO: 73596 - DNA, 25 bp, Probe Sequence
tatgcttcccacactgtcattattt

SEQ ID NO: 73597 - DNA, 25 bp, Probe Sequence
aaatatgcttcccacactgtcatta

SEQ ID NO: 73598 - DNA, 25 bp, Probe Sequence
aattaccaggcatattccaaagcat

SEQ ID NO: 73599 - DNA, 25 bp, Probe Sequence
ttaaatcgtaattccctctagcagc

SEQ ID NO: 73600 - DNA, 25 bp, Probe Sequence
aggtttaatgctaagacacactatc

SEQ ID NO: 73601 - DNA, 25 bp, Probe Sequence
atattgtgaaagagtatgttgcctt

SEQ ID NO: 73602 - DNA, 25 bp, Probe Sequence
acgcaaatgatttaacgagtacaaa

SEQ ID NO: 73603 - DNA, 25 bp, Probe Sequence
aacgcaaatgatttaacgagtacaa

SEQ ID NO: 73604 - DNA, 25 bp, Probe Sequence
aaacgcaaatgatttaacgagtaca

SEQ ID NO: 73605 - DNA, 25 bp, Probe Sequence
ttgaggaagaggatgactaagaagt

SEQ ID NO: 73606 - DNA, 25 bp, Probe Sequence
aggaagaggatgactaagaagtgtt

SEQ ID NO: 73607 - DNA, 25 bp, Probe Sequence
tactgtgtaggaagttgttggtagt

SEQ ID NO: 73608 - DNA, 25 bp, Probe Sequence
gaggaagaggatgactaagaagtgt

SEQ ID NO: 73609 - DNA, 25 bp, Probe Sequence
tgaggaagaggatgactaagaagtg

SEQ ID NO: 73610 - DNA, 25 bp, Probe Sequence
ctgtgtaggaagttgttggtagtca

SEQ ID NO: 73611 - DNA, 25 bp, Probe Sequence
tgtgtaggaagttgttggtagtcaa

SEQ ID NO: 73612 - DNA, 25 bp, Probe Sequence
actgtgtaggaagttgttggtagtc

SEQ ID NO: 73613 - DNA, 25 bp, Probe Sequence
ctggttctttattgggttatgtgtg

SEQ ID NO: 73614 - DNA, 25 bp, Probe Sequence
tctggttctttattgggttatgtgt

SEQ ID NO: 73615 - DNA, 25 bp, Probe Sequence
gcttctggttctttattgggttatg

SEQ ID NO: 73616 - DNA, 25 bp, Probe Sequence
tggagttgaggaaagaatgattaca

SEQ ID NO: 73617 - DNA, 25 bp, Probe Sequence
atttgatgagggaagaagacagatt

SEQ ID NO: 73618 - DNA, 25 bp, Probe Sequence
ggttctttattgggttatgtgtgtt

SEQ ID NO: 73619 - DNA, 25 bp, Probe Sequence
tttgaggaagaggatgactaagaag

SEQ ID NO: 73620 - DNA, 25 bp, Probe Sequence
tggttctttattgggttatgtgtgt

SEQ ID NO: 73621 - DNA, 25 bp, Probe Sequence
tgaggaaagaatgattacagatgga

SEQ ID NO: 73622 - DNA, 25 bp, Probe Sequence
ggagttgaggaaagaatgattacag

SEQ ID NO: 73623 - DNA, 25 bp, Probe Sequence
ctggagttgaggaaagaatgattac

SEQ ID NO: 73624 - DNA, 25 bp, Probe Sequence
cacattatagccttcttgcacttat

SEQ ID NO: 73625 - DNA, 25 bp, Probe Sequence
agccttcttgcacttatgaatacta

SEQ ID NO: 73626 - DNA, 25 bp, Probe Sequence
tagccttcttgcacttatgaatact

SEQ ID NO: 73627 - DNA, 25 bp, Probe Sequence
gcacttatgaatactatacagcaat

SEQ ID NO: 73628 - DNA, 25 bp, Probe Sequence
ttctggttctttattgggttatgtg

SEQ ID NO: 73629 - DNA, 25 bp, Probe Sequence
tacaacaacaacaacaataacagca

SEQ ID NO: 73630 - DNA, 25 bp, Probe Sequence
atacaacaacaacaacaataacagc

SEQ ID NO: 73631 - DNA, 25 bp, Probe Sequence
acaacaacaacaacaataacagcag

SEQ ID NO: 73632 - DNA, 25 bp, Probe Sequence
caacaacaacaacaataacagcagc

SEQ ID NO: 73633 - DNA, 25 bp, Probe Sequence
aacaacaacaacaataacagcagca

SEQ ID NO: 73634 - DNA, 25 bp, Probe Sequence
cagaagaaatgaaccaagaggaaag

SEQ ID NO: 73635 - DNA, 25 bp, Probe Sequence
gaaatgaaccaagaggaaaggaaac

SEQ ID NO: 73636 - DNA, 25 bp, Probe Sequence
agaaatgaaccaagaggaaaggaaa

SEQ ID NO: 73637 - DNA, 25 bp, Probe Sequence
aagaaatgaaccaagaggaaaggaa

SEQ ID NO: 73638 - DNA, 25 bp, Probe Sequence
acaacaacaacaataacagcagcag

SEQ ID NO: 73639 - DNA, 25 bp, Probe Sequence
atctcggaaattactcaaaccatca

SEQ ID NO: 73640 - DNA, 25 bp, Probe Sequence
gaagaaatgaaccaagaggaaagga

SEQ ID NO: 73641 - DNA, 25 bp, Probe Sequence
agaagaaatgaaccaagaggaaagg

SEQ ID NO: 73642 - DNA, 25 bp, Probe Sequence
tgaaccaagaggaaaggaaacattt

SEQ ID NO: 73643 - DNA, 25 bp, Probe Sequence
aaatgaaccaagaggaaaggaaaca

SEQ ID NO: 73644 - DNA, 25 bp, Probe Sequence
aatctcggaaattactcaaaccatc

SEQ ID NO: 73645 - DNA, 25 bp, Probe Sequence
gaatctcggaaattactcaaaccat

SEQ ID NO: 73646 - DNA, 25 bp, Probe Sequence
ccagaagaaatgaaccaagaggaaa

SEQ ID NO: 73647 - DNA, 25 bp, Probe Sequence
aatacaacaacaacaacaataacag

SEQ ID NO: 73648 - DNA, 25 bp, Probe Sequence
tctcggaaattactcaaaccatcag

SEQ ID NO: 73649 - DNA, 25 bp, Probe Sequence
atgaaccaagaggaaaggaaacatt

SEQ ID NO: 73650 - DNA, 25 bp, Probe Sequence
aatgaaccaagaggaaaggaaacat

SEQ ID NO: 73651 - DNA, 25 bp, Probe Sequence
gaaattactcaaaccatcagcctct

SEQ ID NO: 73652 - DNA, 25 bp, Probe Sequence
tgaatctcggaaattactcaaacca

SEQ ID NO: 73653 - DNA, 25 bp, Probe Sequence
catcaagtgtatcaatatgccagta

SEQ ID NO: 73654 - DNA, 25 bp, Probe Sequence
tcaagtgtatcaatatgccagtacg

SEQ ID NO: 73655 - DNA, 25 bp, Probe Sequence
acatcaagtgtatcaatatgccagt

SEQ ID NO: 73656 - DNA, 25 bp, Probe Sequence
atcaagtgtatcaatatgccagtac

SEQ ID NO: 73657 - DNA, 25 bp, Probe Sequence
gtcaatggtgaagattacggtaacg

SEQ ID NO: 73658 - DNA, 25 bp, Probe Sequence
caagtgtatcaatatgccagtacgc

SEQ ID NO: 73659 - DNA, 25 bp, Probe Sequence
tacatcaagtgtatcaatatgccag

SEQ ID NO: 73660 - DNA, 25 bp, Probe Sequence
gtacatcaagtgtatcaatatgcca

SEQ ID NO: 73661 - DNA, 25 bp, Probe Sequence
tcaatggtgaagattacggtaacgg

SEQ ID NO: 73662 - DNA, 25 bp, Probe Sequence
aagtgtatcaatatgccagtacgcc

SEQ ID NO: 73663 - DNA, 25 bp, Probe Sequence
agtacatcaagtgtatcaatatgcc

SEQ ID NO: 73664 - DNA, 25 bp, Probe Sequence
gccagtacatcaagtgtatcaatat

SEQ ID NO: 73665 - DNA, 25 bp, Probe Sequence
ccagtacatcaagtgtatcaatatg

SEQ ID NO: 73666 - DNA, 25 bp, Probe Sequence
cgtcaatggtgaagattacggtaac

SEQ ID NO: 73667 - DNA, 25 bp, Probe Sequence
caatggtgaagattacggtaacggc

SEQ ID NO: 73668 - DNA, 25 bp, Probe Sequence
ggccagtacatcaagtgtatcaata

SEQ ID NO: 73669 - DNA, 25 bp, Probe Sequence
acgtcaatggtgaagattacggtaa

SEQ ID NO: 73670 - DNA, 25 bp, Probe Sequence
agtgtatcaatatgccagtacgccc

SEQ ID NO: 73671 - DNA, 25 bp, Probe Sequence
tgaagattacggtaacggccacttg

SEQ ID NO: 73672 - DNA, 25 bp, Probe Sequence
gtgaagattacggtaacggccactt

SEQ ID NO: 73673 - DNA, 25 bp, Probe Sequence
tatatcggagagagttacaaccaga

SEQ ID NO: 73674 - DNA, 25 bp, Probe Sequence
atatcggagagagttacaaccagaa

SEQ ID NO: 73675 - DNA, 25 bp, Probe Sequence
tatcggagagagttacaaccagaag

SEQ ID NO: 73676 - DNA, 25 bp, Probe Sequence
atatatcggagagagttacaaccag

SEQ ID NO: 73677 - DNA, 25 bp, Probe Sequence
tatatatcggagagagttacaacca

SEQ ID NO: 73678 - DNA, 25 bp, Probe Sequence
cctatgattgacagacaggttgtac

SEQ ID NO: 73679 - DNA, 25 bp, Probe Sequence
atcggagagagttacaaccagaaga

SEQ ID NO: 73680 - DNA, 25 bp, Probe Sequence
tgctaacaagtattctctaaacacc

SEQ ID NO: 73681 - DNA, 25 bp, Probe Sequence
aacaagtattctctaaacacctgac

SEQ ID NO: 73682 - DNA, 25 bp, Probe Sequence
gctaacaagtattctctaaacacct

SEQ ID NO: 73683 - DNA, 25 bp, Probe Sequence
ccgcccattctaaataagatgttat

SEQ ID NO: 73684 - DNA, 25 bp, Probe Sequence
gcctatgattgacagacaggttgta

SEQ ID NO: 73685 - DNA, 25 bp, Probe Sequence
gccgcccattctaaataagatgtta

SEQ ID NO: 73686 - DNA, 25 bp, Probe Sequence
acaagtattctctaaacacctgact

SEQ ID NO: 73687 - DNA, 25 bp, Probe Sequence
aagtattctctaaacacctgactct

SEQ ID NO: 73688 - DNA, 25 bp, Probe Sequence
caagtattctctaaacacctgactc

SEQ ID NO: 73689 - DNA, 25 bp, Probe Sequence
gaaataatgacacatgccttgaagt

SEQ ID NO: 73690 - DNA, 25 bp, Probe Sequence
aataatgacacatgccttgaagttt

SEQ ID NO: 73691 - DNA, 25 bp, Probe Sequence
aaataatgacacatgccttgaagtt

SEQ ID NO: 73692 - DNA, 25 bp, Probe Sequence
ggaaataatgacacatgccttgaag

SEQ ID NO: 73693 - DNA, 25 bp, Probe Sequence
tcggagagagttacaaccagaagac

SEQ ID NO: 73694 - DNA, 25 bp, Probe Sequence
agtattctctaaacacctgactcta

SEQ ID NO: 73695 - DNA, 25 bp, Probe Sequence
attctctaaacacctgactctagga

SEQ ID NO: 73696 - DNA, 25 bp, Probe Sequence
gtattctctaaacacctgactctag

SEQ ID NO: 73697 - DNA, 25 bp, Probe Sequence
tctgtcctctaacttatggcttcta

SEQ ID NO: 73698 - DNA, 25 bp, Probe Sequence
ctgtcctctaacttatggcttctat

SEQ ID NO: 73699 - DNA, 25 bp, Probe Sequence
tgtcctctaacttatggcttctatt

SEQ ID NO: 73700 - DNA, 25 bp, Probe Sequence
gtctgtcctctaacttatggcttct

SEQ ID NO: 73701 - DNA, 25 bp, Probe Sequence
taatggctacaagtctgtcctctaa

SEQ ID NO: 73702 - DNA, 25 bp, Probe Sequence
ttaatggctacaagtctgtcctcta

SEQ ID NO: 73703 - DNA, 25 bp, Probe Sequence
agtctgtcctctaacttatggcttc

SEQ ID NO: 73704 - DNA, 25 bp, Probe Sequence
tgctattatctgtgctattaatggc

SEQ ID NO: 73705 - DNA, 25 bp, Probe Sequence
gctattatctgtgctattaatggct

SEQ ID NO: 73706 - DNA, 25 bp, Probe Sequence
aatggctacaagtctgtcctctaac

SEQ ID NO: 73707 - DNA, 25 bp, Probe Sequence
tattaatggctacaagtctgtcctc

SEQ ID NO: 73708 - DNA, 25 bp, Probe Sequence
atctgtgctattaatggctacaagt

SEQ ID NO: 73709 - DNA, 25 bp, Probe Sequence
ctattaatggctacaagtctgtcct

SEQ ID NO: 73710 - DNA, 25 bp, Probe Sequence
cttatggcttctatttgcttcttgg

SEQ ID NO: 73711 - DNA, 25 bp, Probe Sequence
tgctattaatggctacaagtctgtc

SEQ ID NO: 73712 - DNA, 25 bp, Probe Sequence
ctgtgctattaatggctacaagtct

SEQ ID NO: 73713 - DNA, 25 bp, Probe Sequence
tctgtgctattaatggctacaagtc

SEQ ID NO: 73714 - DNA, 25 bp, Probe Sequence
tggtttctattgctctttactggat

SEQ ID NO: 73715 - DNA, 25 bp, Probe Sequence
ttggtttctattgctctttactgga

SEQ ID NO: 73716 - DNA, 25 bp, Probe Sequence
caaatatgaaagagagccaaagtgt

SEQ ID NO: 73717 - DNA, 25 bp, Probe Sequence
acttatggcttctatttgcttcttg

SEQ ID NO: 73718 - DNA, 25 bp, Probe Sequence
ccaaatatgaaagagagccaaagtg

SEQ ID NO: 73719 - DNA, 25 bp, Probe Sequence
ttatggcttctatttgcttcttgga

SEQ ID NO: 73720 - DNA, 25 bp, Probe Sequence
cctctaacttatggcttctatttgc

SEQ ID NO: 73721 - DNA, 25 bp, Probe Sequence
cctaatagtattcaactcagcctct

SEQ ID NO: 73722 - DNA, 25 bp, Probe Sequence
gcctaatagtattcaactcagcctc

SEQ ID NO: 73723 - DNA, 25 bp, Probe Sequence
taacctcctatctccatgtctcatt

SEQ ID NO: 73724 - DNA, 25 bp, Probe Sequence
ttaacctcctatctccatgtctcat

SEQ ID NO: 73725 - DNA, 25 bp, Probe Sequence
taatagtattcaactcagcctcttg

SEQ ID NO: 73726 - DNA, 25 bp, Probe Sequence
ctaatagtattcaactcagcctctt

SEQ ID NO: 73727 - DNA, 25 bp, Probe Sequence
tctctaagagttctcaggaagttgg

SEQ ID NO: 73728 - DNA, 25 bp, Probe Sequence
cgcctaatagtattcaactcagcct

SEQ ID NO: 73729 - DNA, 25 bp, Probe Sequence
acactgaccataactagaaaggaaa

SEQ ID NO: 73730 - DNA, 25 bp, Probe Sequence
aacactgaccataactagaaaggaa

SEQ ID NO: 73731 - DNA, 25 bp, Probe Sequence
aaacactgaccataactagaaagga

SEQ ID NO: 73732 - DNA, 25 bp, Probe Sequence
aactgctttaacctcctatctccat

SEQ ID NO: 73733 - DNA, 25 bp, Probe Sequence
cactgaccataactagaaaggaaac

SEQ ID NO: 73734 - DNA, 25 bp, Probe Sequence
actgaccataactagaaaggaaact

SEQ ID NO: 73735 - DNA, 25 bp, Probe Sequence
taactagaaaggaaacttaggtgcc

SEQ ID NO: 73736 - DNA, 25 bp, Probe Sequence
taagagttctcaggaagttgggtag

SEQ ID NO: 73737 - DNA, 25 bp, Probe Sequence
ctaagagttctcaggaagttgggta

SEQ ID NO: 73738 - DNA, 25 bp, Probe Sequence
ctttaacctcctatctccatgtctc

SEQ ID NO: 73739 - DNA, 25 bp, Probe Sequence
ccgcctaatagtattcaactcagcc

SEQ ID NO: 73740 - DNA, 25 bp, Probe Sequence
tttaacctcctatctccatgtctca

SEQ ID NO: 73741 - DNA, 25 bp, Probe Sequence
ctatctccatgtctcatttcccttc

SEQ ID NO: 73742 - DNA, 25 bp, Probe Sequence
caactgctttaacctcctatctcca

SEQ ID NO: 73743 - DNA, 25 bp, Probe Sequence
ataactagaaaggaaacttaggtgc

SEQ ID NO: 73744 - DNA, 25 bp, Probe Sequence
ctgaccataactagaaaggaaactt

SEQ ID NO: 73745 - DNA, 25 bp, Probe Sequence
agttagtacgcttcttagtgttgag

SEQ ID NO: 73746 - DNA, 25 bp, Probe Sequence
attgtggaggtgttctctacttatg

SEQ ID NO: 73747 - DNA, 25 bp, Probe Sequence
aagttagtacgcttcttagtgttga

SEQ ID NO: 73748 - DNA, 25 bp, Probe Sequence
tcaagttagtacgcttcttagtgtt

SEQ ID NO: 73749 - DNA, 25 bp, Probe Sequence
ttcaagttagtacgcttcttagtgt

SEQ ID NO: 73750 - DNA, 25 bp, Probe Sequence
aattgtggaggtgttctctacttat

SEQ ID NO: 73751 - DNA, 25 bp, Probe Sequence
ttagtacgcttcttagtgttgagag

SEQ ID NO: 73752 - DNA, 25 bp, Probe Sequence
gttagtacgcttcttagtgttgaga

SEQ ID NO: 73753 - DNA, 25 bp, Probe Sequence
caagttagtacgcttcttagtgttg

SEQ ID NO: 73754 - DNA, 25 bp, Probe Sequence
tagtacgcttcttagtgttgagaga

SEQ ID NO: 73755 - DNA, 25 bp, Probe Sequence
atacattgacacgatctcttcactt

SEQ ID NO: 73756 - DNA, 25 bp, Probe Sequence
attcaagttagtacgcttcttagtg

SEQ ID NO: 73757 - DNA, 25 bp, Probe Sequence
tacattgacacgatctcttcacttc

SEQ ID NO: 73758 - DNA, 25 bp, Probe Sequence
catacattgacacgatctcttcact

SEQ ID NO: 73759 - DNA, 25 bp, Probe Sequence
aattcaagttagtacgcttcttagt

SEQ ID NO: 73760 - DNA, 25 bp, Probe Sequence
ccatacattgacacgatctcttcac

SEQ ID NO: 73761 - DNA, 25 bp, Probe Sequence
ttgtggaggtgttctctacttatgc

SEQ ID NO: 73762 - DNA, 25 bp, Probe Sequence
atgagaagccagagaacagataaag

SEQ ID NO: 73763 - DNA, 25 bp, Probe Sequence
gaagccagagaacagataaagagag

SEQ ID NO: 73764 - DNA, 25 bp, Probe Sequence
gagaagccagagaacagataaagag

SEQ ID NO: 73765 - DNA, 25 bp, Probe Sequence
attgacacgatctcttcacttccat

SEQ ID NO: 73766 - DNA, 25 bp, Probe Sequence
atccctatatcctaacattgccctt

SEQ ID NO: 73767 - DNA, 25 bp, Probe Sequence
agaagccagagaacagataaagaga

SEQ ID NO: 73768 - DNA, 25 bp, Probe Sequence
aaccaagaacatggattaacaggaa

SEQ ID NO: 73769 - DNA, 25 bp, Probe Sequence
atcgcaataggagagagatactgag

SEQ ID NO: 73770 - DNA, 25 bp, Probe Sequence
ttactaagaggagaagtgaaggaca

SEQ ID NO: 73771 - DNA, 25 bp, Probe Sequence
aagacctagttgagaagatggctaa

SEQ ID NO: 73772 - DNA, 25 bp, Probe Sequence
ctaagaggagaagtgaaggacagag

SEQ ID NO: 73773 - DNA, 25 bp, Probe Sequence
tactaagaggagaagtgaaggacag

SEQ ID NO: 73774 - DNA, 25 bp, Probe Sequence
attactaagaggagaagtgaaggac

SEQ ID NO: 73775 - DNA, 25 bp, Probe Sequence
agtgaaggacagaggcattgatatt

SEQ ID NO: 73776 - DNA, 25 bp, Probe Sequence
aagtgaaggacagaggcattgatat

SEQ ID NO: 73777 - DNA, 25 bp, Probe Sequence
gtgaaggacagaggcattgatattc

SEQ ID NO: 73778 - DNA, 25 bp, Probe Sequence
tatcgcaataggagagagatactga

SEQ ID NO: 73779 - DNA, 25 bp, Probe Sequence
actatcgcaataggagagagatact

SEQ ID NO: 73780 - DNA, 25 bp, Probe Sequence
taagactatcgcaataggagagaga

SEQ ID NO: 73781 - DNA, 25 bp, Probe Sequence
gtaagactatcgcaataggagagag

SEQ ID NO: 73782 - DNA, 25 bp, Probe Sequence
ctatcgcaataggagagagatactg

SEQ ID NO: 73783 - DNA, 25 bp, Probe Sequence
gactatcgcaataggagagagatac

SEQ ID NO: 73784 - DNA, 25 bp, Probe Sequence
agactatcgcaataggagagagata

SEQ ID NO: 73785 - DNA, 25 bp, Probe Sequence
aagactatcgcaataggagagagat

SEQ ID NO: 73786 - DNA, 25 bp, Probe Sequence
tgtaagactatcgcaataggagaga

SEQ ID NO: 73787 - DNA, 25 bp, Probe Sequence
atgtaagactatcgcaataggagag

SEQ ID NO: 73788 - DNA, 25 bp, Probe Sequence
taacgacttagatgtcaatggtcag

SEQ ID NO: 73789 - DNA, 25 bp, Probe Sequence
aattactaagaggagaagtgaagga

SEQ ID NO: 73790 - DNA, 25 bp, Probe Sequence
gtaacgacttagatgtcaatggtca

SEQ ID NO: 73791 - DNA, 25 bp, Probe Sequence
agacctagttgagaagatggctaac

SEQ ID NO: 73792 - DNA, 25 bp, Probe Sequence
caagacctagttgagaagatggcta

SEQ ID NO: 73793 - DNA, 25 bp, Probe Sequence
gcaagttactccttacctatcaaca

SEQ ID NO: 73794 - DNA, 25 bp, Probe Sequence
actccttacctatcaacaatgactt

SEQ ID NO: 73795 - DNA, 25 bp, Probe Sequence
tactccttacctatcaacaatgact

SEQ ID NO: 73796 - DNA, 25 bp, Probe Sequence
caagttactccttacctatcaacaa

SEQ ID NO: 73797 - DNA, 25 bp, Probe Sequence
agttactccttacctatcaacaatg

SEQ ID NO: 73798 - DNA, 25 bp, Probe Sequence
ttactccttacctatcaacaatgac

SEQ ID NO: 73799 - DNA, 25 bp, Probe Sequence
gttactccttacctatcaacaatga

SEQ ID NO: 73800 - DNA, 25 bp, Probe Sequence
tggatagaacatctaggcaggaata

SEQ ID NO: 73801 - DNA, 25 bp, Probe Sequence
taatggatagaacatctaggcagga

SEQ ID NO: 73802 - DNA, 25 bp, Probe Sequence
ataatggatagaacatctaggcagg

SEQ ID NO: 73803 - DNA, 25 bp, Probe Sequence
ggatagaacatctaggcaggaataa

SEQ ID NO: 73804 - DNA, 25 bp, Probe Sequence
atggatagaacatctaggcaggaat

SEQ ID NO: 73805 - DNA, 25 bp, Probe Sequence
aatggatagaacatctaggcaggaa

SEQ ID NO: 73806 - DNA, 25 bp, Probe Sequence
gaaataacccaactaagaagacagc

SEQ ID NO: 73807 - DNA, 25 bp, Probe Sequence
aataatagtagccaacttcagtacc

SEQ ID NO: 73808 - DNA, 25 bp, Probe Sequence
tatatccacccaacattagaacacc

SEQ ID NO: 73809 - DNA, 25 bp, Probe Sequence
aagttactccttacctatcaacaat

SEQ ID NO: 73810 - DNA, 25 bp, Probe Sequence
tatccacccaacattagaacaccta

SEQ ID NO: 73811 - DNA, 25 bp, Probe Sequence
atgcaagttactccttacctatcaa

SEQ ID NO: 73812 - DNA, 25 bp, Probe Sequence
aatgcaagttactccttacctatca

SEQ ID NO: 73813 - DNA, 25 bp, Probe Sequence
tgcaagttactccttacctatcaac

SEQ ID NO: 73814 - DNA, 25 bp, Probe Sequence
aaataacccaactaagaagacagcc

SEQ ID NO: 73815 - DNA, 25 bp, Probe Sequence
gaaacccaaccgttacaagaaataa

SEQ ID NO: 73816 - DNA, 25 bp, Probe Sequence
ataaatgaaacccaaccgttacaag

SEQ ID NO: 73817 - DNA, 25 bp, Probe Sequence
aagagttcttagacttgacaccaga

SEQ ID NO: 73818 - DNA, 25 bp, Probe Sequence
cagaacagtgtaatatgcttcacaa

SEQ ID NO: 73819 - DNA, 25 bp, Probe Sequence
caattcagtggaagaaggtttgata

SEQ ID NO: 73820 - DNA, 25 bp, Probe Sequence
agagttcttagacttgacaccagaa

SEQ ID NO: 73821 - DNA, 25 bp, Probe Sequence
attcagtggaagaaggtttgatagc

SEQ ID NO: 73822 - DNA, 25 bp, Probe Sequence
ttagacttgacaccagaaacatgat

SEQ ID NO: 73823 - DNA, 25 bp, Probe Sequence
aattcagtggaagaaggtttgatag

SEQ ID NO: 73824 - DNA, 25 bp, Probe Sequence
tagacttgacaccagaaacatgatc

SEQ ID NO: 73825 - DNA, 25 bp, Probe Sequence
aaagcaattcagtggaagaaggttt

SEQ ID NO: 73826 - DNA, 25 bp, Probe Sequence
cttagacttgacaccagaaacatga

SEQ ID NO: 73827 - DNA, 25 bp, Probe Sequence
aaagagttcttagacttgacaccag

SEQ ID NO: 73828 - DNA, 25 bp, Probe Sequence
gcaaaggatctgttaagaggatgaa

SEQ ID NO: 73829 - DNA, 25 bp, Probe Sequence
caaagagttcttagacttgacacca

SEQ ID NO: 73830 - DNA, 25 bp, Probe Sequence
tcttagacttgacaccagaaacatg

SEQ ID NO: 73831 - DNA, 25 bp, Probe Sequence
caaaggatctgttaagaggatgaaa

SEQ ID NO: 73832 - DNA, 25 bp, Probe Sequence
cagaaacatgatccattgaagcaaa

SEQ ID NO: 73833 - DNA, 25 bp, Probe Sequence
ccaaagagttcttagacttgacacc

SEQ ID NO: 73834 - DNA, 25 bp, Probe Sequence
acagtgtaatatgcttcacaaagaa

SEQ ID NO: 73835 - DNA, 25 bp, Probe Sequence
aacagtgtaatatgcttcacaaaga

SEQ ID NO: 73836 - DNA, 25 bp, Probe Sequence
agaacagtgtaatatgcttcacaaa

SEQ ID NO: 73837 - DNA, 25 bp, Probe Sequence
acaccagaaacatgatccattgaag

SEQ ID NO: 73838 - DNA, 25 bp, Probe Sequence
gacaccagaaacatgatccattgaa

SEQ ID NO: 73839 - DNA, 25 bp, Probe Sequence
cttgacaccagaaacatgatccatt

SEQ ID NO: 73840 - DNA, 25 bp, Probe Sequence
atgacagatcaagaccttggctcta

SEQ ID NO: 73841 - DNA, 25 bp, Probe Sequence
aagcagagtgaagatacaacttaca

SEQ ID NO: 73842 - DNA, 25 bp, Probe Sequence
atcaagcagagtgaagatacaactt

SEQ ID NO: 73843 - DNA, 25 bp, Probe Sequence
gcagagtgaagatacaacttacaga

SEQ ID NO: 73844 - DNA, 25 bp, Probe Sequence
agcagagtgaagatacaacttacag

SEQ ID NO: 73845 - DNA, 25 bp, Probe Sequence
caagcagagtgaagatacaacttac

SEQ ID NO: 73846 - DNA, 25 bp, Probe Sequence
tcaagcagagtgaagatacaactta

SEQ ID NO: 73847 - DNA, 25 bp, Probe Sequence
aacggaataatgacaccagaattaa

SEQ ID NO: 73848 - DNA, 25 bp, Probe Sequence
tatcaagcagagtgaagatacaact

SEQ ID NO: 73849 - DNA, 25 bp, Probe Sequence
actatcaagcagagtgaagatacaa

SEQ ID NO: 73850 - DNA, 25 bp, Probe Sequence
aactatcaagcagagtgaagataca

SEQ ID NO: 73851 - DNA, 25 bp, Probe Sequence
ctatcaagcagagtgaagatacaac

SEQ ID NO: 73852 - DNA, 25 bp, Probe Sequence
cagagtgaagatacaacttacagaa

SEQ ID NO: 73853 - DNA, 25 bp, Probe Sequence
gcataagaatagactgaacacctat

SEQ ID NO: 73854 - DNA, 25 bp, Probe Sequence
tgaagatacaacttacagaatgaga

SEQ ID NO: 73855 - DNA, 25 bp, Probe Sequence
gtgaagatacaacttacagaatgag

SEQ ID NO: 73856 - DNA, 25 bp, Probe Sequence
agtgaagatacaacttacagaatga

SEQ ID NO: 73857 - DNA, 25 bp, Probe Sequence
agatacaacttacagaatgagagaa

SEQ ID NO: 73858 - DNA, 25 bp, Probe Sequence
ccacaacaaataggcaaataggatt

SEQ ID NO: 73859 - DNA, 25 bp, Probe Sequence
acaaccacaacaaataggcaaatag

SEQ ID NO: 73860 - DNA, 25 bp, Probe Sequence
atagaccagtgaaacggaataatga

SEQ ID NO: 73861 - DNA, 25 bp, Probe Sequence
acatagaccagtgaaacggaataat

SEQ ID NO: 73862 - DNA, 25 bp, Probe Sequence
gacaaccacaacaaataggcaaata

SEQ ID NO: 73863 - DNA, 25 bp, Probe Sequence
gctgaaggcatcatctatctcactt

SEQ ID NO: 73864 - DNA, 25 bp, Probe Sequence
tcaataaaggtgccaagaacataca

SEQ ID NO: 73865 - DNA, 25 bp, Probe Sequence
gattcagagcaggtgattctatgtc

SEQ ID NO: 73866 - DNA, 25 bp, Probe Sequence
attcagagcaggtgattctatgtcc

SEQ ID NO: 73867 - DNA, 25 bp, Probe Sequence
ggattcagagcaggtgattctatgt

SEQ ID NO: 73868 - DNA, 25 bp, Probe Sequence
ggtgattctatgtccaagacttgat

SEQ ID NO: 73869 - DNA, 25 bp, Probe Sequence
tgctactctcacagaagtatatcct

SEQ ID NO: 73870 - DNA, 25 bp, Probe Sequence
ctgctactctcacagaagtatatcc

SEQ ID NO: 73871 - DNA, 25 bp, Probe Sequence
gctgctactctcacagaagtatatc

SEQ ID NO: 73872 - DNA, 25 bp, Probe Sequence
gctactctcacagaagtatatcctt

SEQ ID NO: 73873 - DNA, 25 bp, Probe Sequence
tgctgctactctcacagaagtatat

SEQ ID NO: 73874 - DNA, 25 bp, Probe Sequence
aggtgattctatgtccaagacttga

SEQ ID NO: 73875 - DNA, 25 bp, Probe Sequence
caggtgattctatgtccaagacttg

SEQ ID NO: 73876 - DNA, 25 bp, Probe Sequence
cgtctactgtaaacatcaagcctat

SEQ ID NO: 73877 - DNA, 25 bp, Probe Sequence
ctgctgctactctcacagaagtata

SEQ ID NO: 73878 - DNA, 25 bp, Probe Sequence
cagagcaggtgattctatgtccaag

SEQ ID NO: 73879 - DNA, 25 bp, Probe Sequence
atgagtatgggattcctttctgaag

SEQ ID NO: 73880 - DNA, 25 bp, Probe Sequence
agagcaggtgattctatgtccaaga

SEQ ID NO: 73881 - DNA, 25 bp, Probe Sequence
gtgattctatgtccaagacttgata

SEQ ID NO: 73882 - DNA, 25 bp, Probe Sequence
gcaggtgattctatgtccaagactt

SEQ ID NO: 73883 - DNA, 25 bp, Probe Sequence
tcacagaagtatatcctttgacaca

SEQ ID NO: 73884 - DNA, 25 bp, Probe Sequence
cacagaagtatatcctttgacacat

SEQ ID NO: 73885 - DNA, 25 bp, Probe Sequence
ctcacagaagtatatcctttgacac

SEQ ID NO: 73886 - DNA, 25 bp, Probe Sequence
aaatatctgagagtgtcatccatct

SEQ ID NO: 73887 - DNA, 25 bp, Probe Sequence
tctcacagaagtatatcctttgaca

SEQ ID NO: 73888 - DNA, 25 bp, Probe Sequence
actctcacagaagtatatcctttga

SEQ ID NO: 73889 - DNA, 25 bp, Probe Sequence
cgtgcaggtttgttacataggtata

SEQ ID NO: 73890 - DNA, 25 bp, Probe Sequence
tacgtgcaggtttgttacataggta

SEQ ID NO: 73891 - DNA, 25 bp, Probe Sequence
cagtacgtgcaggtttgttacatag

SEQ ID NO: 73892 - DNA, 25 bp, Probe Sequence
acgtgcaggtttgttacataggtat

SEQ ID NO: 73893 - DNA, 25 bp, Probe Sequence
ctgtgctacttggcagtacatctac

SEQ ID NO: 73894 - DNA, 25 bp, Probe Sequence
agtacgtgcaggtttgttacatagg

SEQ ID NO: 73895 - DNA, 25 bp, Probe Sequence
acagtacgtgcaggtttgttacata

SEQ ID NO: 73896 - DNA, 25 bp, Probe Sequence
tacagtacgtgcaggtttgttacat

SEQ ID NO: 73897 - DNA, 25 bp, Probe Sequence
gctacttggcagtacatctacgtat

SEQ ID NO: 73898 - DNA, 25 bp, Probe Sequence
gtacgtgcaggtttgttacataggt

SEQ ID NO: 73899 - DNA, 25 bp, Probe Sequence
gtacagtacgtgcaggtttgttaca

SEQ ID NO: 73900 - DNA, 25 bp, Probe Sequence
tatactttaagttctgggatacatg

SEQ ID NO: 73901 - DNA, 25 bp, Probe Sequence
tgtgctacttggcagtacatctacg

SEQ ID NO: 73902 - DNA, 25 bp, Probe Sequence
atgtacagtacgtgcaggtttgtta

SEQ ID NO: 73903 - DNA, 25 bp, Probe Sequence
actgtgctacttggcagtacatcta

SEQ ID NO: 73904 - DNA, 25 bp, Probe Sequence
atactttaagttctgggatacatgt

SEQ ID NO: 73905 - DNA, 25 bp, Probe Sequence
tgctacttggcagtacatctacgta

SEQ ID NO: 73906 - DNA, 25 bp, Probe Sequence
ttatactttaagttctgggatacat

SEQ ID NO: 73907 - DNA, 25 bp, Probe Sequence
attatactttaagttctgggataca

SEQ ID NO: 73908 - DNA, 25 bp, Probe Sequence
gtgctacttggcagtacatctacgt

SEQ ID NO: 73909 - DNA, 25 bp, Probe Sequence
tgtacagtacgtgcaggtttgttac

SEQ ID NO: 73910 - DNA, 25 bp, Probe Sequence
catgtacagtacgtgcaggtttgtt

SEQ ID NO: 73911 - DNA, 25 bp, Probe Sequence
gactgtgctacttggcagtacatct

SEQ ID NO: 73912 - DNA, 25 bp, Probe Sequence
acatgtacagtacgtgcaggtttgt

SEQ ID NO: 73913 - DNA, 25 bp, Probe Sequence
tacaggatgttattgttcttgtggt

SEQ ID NO: 73914 - DNA, 25 bp, Probe Sequence
acaggatgttattgttcttgtggtt

SEQ ID NO: 73915 - DNA, 25 bp, Probe Sequence
atacaggatgttattgttcttgtgg

SEQ ID NO: 73916 - DNA, 25 bp, Probe Sequence
aattctaagaaggcaactgcgtaac

SEQ ID NO: 73917 - DNA, 25 bp, Probe Sequence
tgatacaggatgttattgttcttgt

SEQ ID NO: 73918 - DNA, 25 bp, Probe Sequence
gatacaggatgttattgttcttgtg

SEQ ID NO: 73919 - DNA, 25 bp, Probe Sequence
caggatgttattgttcttgtggttt

SEQ ID NO: 73920 - DNA, 25 bp, Probe Sequence
tcttggtctctgcatgatgatatat

SEQ ID NO: 73921 - DNA, 25 bp, Probe Sequence
catctgtgtatactgtcctggttag

SEQ ID NO: 73922 - DNA, 25 bp, Probe Sequence
atcttggtctctgcatgatgatata

SEQ ID NO: 73923 - DNA, 25 bp, Probe Sequence
tatatcttggtctctgcatgatgat

SEQ ID NO: 73924 - DNA, 25 bp, Probe Sequence
atatatcttggtctctgcatgatga

SEQ ID NO: 73925 - DNA, 25 bp, Probe Sequence
tgcgtaaccagtggatatttaatct

SEQ ID NO: 73926 - DNA, 25 bp, Probe Sequence
cttggtctctgcatgatgatatatt

SEQ ID NO: 73927 - DNA, 25 bp, Probe Sequence
aatatatcttggtctctgcatgatg

SEQ ID NO: 73928 - DNA, 25 bp, Probe Sequence
gcgtaaccagtggatatttaatctt

SEQ ID NO: 73929 - DNA, 25 bp, Probe Sequence
gagaaacttcacctgttgatttagc

SEQ ID NO: 73930 - DNA, 25 bp, Probe Sequence
atctgtgtatactgtcctggttagt

SEQ ID NO: 73931 - DNA, 25 bp, Probe Sequence
agaaacttcacctgttgatttagca

SEQ ID NO: 73932 - DNA, 25 bp, Probe Sequence
tctgtgtatactgtcctggttagtt

SEQ ID NO: 73933 - DNA, 25 bp, Probe Sequence
tgttatagagaaacttcacctgttg

SEQ ID NO: 73934 - DNA, 25 bp, Probe Sequence
tttgaatttgttgtgtaactttgct

SEQ ID NO: 73935 - DNA, 25 bp, Probe Sequence
agagaaacttcacctgttgatttag

SEQ ID NO: 73936 - DNA, 25 bp, Probe Sequence
tatcttggtctctgcatgatgatat

SEQ ID NO: 73937 - DNA, 25 bp, Probe Sequence
atgttgtcttccagcaattcttgta

SEQ ID NO: 73938 - DNA, 25 bp, Probe Sequence
gctctgataataagatgttcaccat

SEQ ID NO: 73939 - DNA, 25 bp, Probe Sequence
tgttgtcttccagcaattcttgtag

SEQ ID NO: 73940 - DNA, 25 bp, Probe Sequence
aatgttgtcttccagcaattcttgt

SEQ ID NO: 73941 - DNA, 25 bp, Probe Sequence
ttgttctacgcagtctcctaacttc

SEQ ID NO: 73942 - DNA, 25 bp, Probe Sequence
cttgttctacgcagtctcctaactt

SEQ ID NO: 73943 - DNA, 25 bp, Probe Sequence
agctctgataataagatgttcacca

SEQ ID NO: 73944 - DNA, 25 bp, Probe Sequence
attaacaaccaaggagaaacacaac

SEQ ID NO: 73945 - DNA, 25 bp, Probe Sequence
cattaacaaccaaggagaaacacaa

SEQ ID NO: 73946 - DNA, 25 bp, Probe Sequence
cagctctgataataagatgttcacc

SEQ ID NO: 73947 - DNA, 25 bp, Probe Sequence
ccagctctgataataagatgttcac

SEQ ID NO: 73948 - DNA, 25 bp, Probe Sequence
gccagctctgataataagatgttca

SEQ ID NO: 73949 - DNA, 25 bp, Probe Sequence
aaagcattaacaaccaaggagaaac

SEQ ID NO: 73950 - DNA, 25 bp, Probe Sequence
caaagcattaacaaccaaggagaaa

SEQ ID NO: 73951 - DNA, 25 bp, Probe Sequence
aatcagtcacctattacggtcctac

SEQ ID NO: 73952 - DNA, 25 bp, Probe Sequence
gttgtcttccagcaattcttgtagc

SEQ ID NO: 73953 - DNA, 25 bp, Probe Sequence
gttctacgcagtctcctaacttcag

SEQ ID NO: 73954 - DNA, 25 bp, Probe Sequence
ttaacaaccaaggagaaacacaaca

SEQ ID NO: 73955 - DNA, 25 bp, Probe Sequence
ttccttgttctacgcagtctcctaa

SEQ ID NO: 73956 - DNA, 25 bp, Probe Sequence
aagcattaacaaccaaggagaaaca

SEQ ID NO: 73957 - DNA, 25 bp, Probe Sequence
tctgataataagatgttcaccatgt

SEQ ID NO: 73958 - DNA, 25 bp, Probe Sequence
aaatgttgtcttccagcaattcttg

SEQ ID NO: 73959 - DNA, 25 bp, Probe Sequence
aaccttaggagtagcagtagcagtt

SEQ ID NO: 73960 - DNA, 25 bp, Probe Sequence
tcctctcaccatatatttaaccacg

SEQ ID NO: 73961 - DNA, 25 bp, Probe Sequence
tacatacattaccagtatctcacgc

SEQ ID NO: 73962 - DNA, 25 bp, Probe Sequence
cttactttcccttattcctcttgct

SEQ ID NO: 73963 - DNA, 25 bp, Probe Sequence
acttactttcccttattcctcttgc

SEQ ID NO: 73964 - DNA, 25 bp, Probe Sequence
tttcgtaggcacttacaaataccaa

SEQ ID NO: 73965 - DNA, 25 bp, Probe Sequence
tactttcccttattcctcttgctaa

SEQ ID NO: 73966 - DNA, 25 bp, Probe Sequence
ttactttcccttattcctcttgcta

SEQ ID NO: 73967 - DNA, 25 bp, Probe Sequence
atacattaccagtatctcacgcctg

SEQ ID NO: 73968 - DNA, 25 bp, Probe Sequence
catacattaccagtatctcacgcct

SEQ ID NO: 73969 - DNA, 25 bp, Probe Sequence
ttacatacattaccagtatctcacg

SEQ ID NO: 73970 - DNA, 25 bp, Probe Sequence
gagatttctgtttctgatgggagta

SEQ ID NO: 73971 - DNA, 25 bp, Probe Sequence
agatttctgtttctgatgggagtat

SEQ ID NO: 73972 - DNA, 25 bp, Probe Sequence
ttaccagtatctcacgcctgtaatc

SEQ ID NO: 73973 - DNA, 25 bp, Probe Sequence
acatacattaccagtatctcacgcc

SEQ ID NO: 73974 - DNA, 25 bp, Probe Sequence
ttcgtaggcacttacaaataccaag

SEQ ID NO: 73975 - DNA, 25 bp, Probe Sequence
aaactctgaaaggtgtagtgaagaa

SEQ ID NO: 73976 - DNA, 25 bp, Probe Sequence
aggcacttacaaataccaagagtag

SEQ ID NO: 73977 - DNA, 25 bp, Probe Sequence
aactctgaaaggtgtagtgaagaag

SEQ ID NO: 73978 - DNA, 25 bp, Probe Sequence
cattaccagtatctcacgcctgtaa

SEQ ID NO: 73979 - DNA, 25 bp, Probe Sequence
ggcacttacaaataccaagagtagt

SEQ ID NO: 73980 - DNA, 25 bp, Probe Sequence
gtaggcacttacaaataccaagagt

SEQ ID NO: 73981 - DNA, 25 bp, Probe Sequence
tatatcccagtctgacagttcaaga

SEQ ID NO: 73982 - DNA, 25 bp, Probe Sequence
gctttatatatcccagtctgacagt

SEQ ID NO: 73983 - DNA, 25 bp, Probe Sequence
tgctttatatatcccagtctgacag

SEQ ID NO: 73984 - DNA, 25 bp, Probe Sequence
taggcacttacaaataccaagagta

SEQ ID NO: 73985 - DNA, 25 bp, Probe Sequence
gctaacatcataatgacaggatcaa

SEQ ID NO: 73986 - DNA, 25 bp, Probe Sequence
agctaacatcataatgacaggatca

SEQ ID NO: 73987 - DNA, 25 bp, Probe Sequence
ggaagcactaaatatggaaaggaac

SEQ ID NO: 73988 - DNA, 25 bp, Probe Sequence
aggaagcactaaatatggaaaggaa

SEQ ID NO: 73989 - DNA, 25 bp, Probe Sequence
aaggaagcactaaatatggaaagga

SEQ ID NO: 73990 - DNA, 25 bp, Probe Sequence
ctatattcaggaaacccatctcaca

SEQ ID NO: 73991 - DNA, 25 bp, Probe Sequence
catcagtgtgctatattcaggaaac

SEQ ID NO: 73992 - DNA, 25 bp, Probe Sequence
gaaggaagcactaaatatggaaagg

SEQ ID NO: 73993 - DNA, 25 bp, Probe Sequence
gcactaaatatggaaaggaacaacc

SEQ ID NO: 73994 - DNA, 25 bp, Probe Sequence
agcactaaatatggaaaggaacaac

SEQ ID NO: 73995 - DNA, 25 bp, Probe Sequence
atcagtgtgctatattcaggaaacc

SEQ ID NO: 73996 - DNA, 25 bp, Probe Sequence
ccatcagtgtgctatattcaggaaa

SEQ ID NO: 73997 - DNA, 25 bp, Probe Sequence
gaagcactaaatatggaaaggaaca

SEQ ID NO: 73998 - DNA, 25 bp, Probe Sequence
tatattcaggaaacccatctcacat

SEQ ID NO: 73999 - DNA, 25 bp, Probe Sequence
tgaaggaagcactaaatatggaaag

SEQ ID NO: 74000 - DNA, 25 bp, Probe Sequence
ctgaaggaagcactaaatatggaaa

SEQ ID NO: 74001 - DNA, 25 bp, Probe Sequence
gctatattcaggaaacccatctcac

SEQ ID NO: 74002 - DNA, 25 bp, Probe Sequence
gtgctatattcaggaaacccatctc

SEQ ID NO: 74003 - DNA, 25 bp, Probe Sequence
cctgaaggaagcactaaatatggaa

SEQ ID NO: 74004 - DNA, 25 bp, Probe Sequence
aagcactaaatatggaaaggaacaa

SEQ ID NO: 74005 - DNA, 25 bp, Probe Sequence
atagacgggcaaattggataaagag

SEQ ID NO: 74006 - DNA, 25 bp, Probe Sequence
aagctaacatcataatgacaggatc

SEQ ID NO: 74007 - DNA, 25 bp, Probe Sequence
caagacccatcagtgtgctatattc

SEQ ID NO: 74008 - DNA, 25 bp, Probe Sequence
ttgtaaagaccattgatgctaggaa

SEQ ID NO: 74009 - DNA, 25 bp, Probe Sequence
aacgtattagtcatcgctattacca

SEQ ID NO: 74010 - DNA, 25 bp, Probe Sequence
caacgtattagtcatcgctattacc

SEQ ID NO: 74011 - DNA, 25 bp, Probe Sequence
tcaacgtattagtcatcgctattac

SEQ ID NO: 74012 - DNA, 25 bp, Probe Sequence
aatcaacgtattagtcatcgctatt

SEQ ID NO: 74013 - DNA, 25 bp, Probe Sequence
atcaacgtattagtcatcgctatta

SEQ ID NO: 74014 - DNA, 25 bp, Probe Sequence
caggaaatcaacgtattagtcatcg

SEQ ID NO: 74015 - DNA, 25 bp, Probe Sequence
gcaggaaatcaacgtattagtcatc

SEQ ID NO: 74016 - DNA, 25 bp, Probe Sequence
gaaatcaacgtattagtcatcgcta

SEQ ID NO: 74017 - DNA, 25 bp, Probe Sequence
ggaaatcaacgtattagtcatcgct

SEQ ID NO: 74018 - DNA, 25 bp, Probe Sequence
aggaaatcaacgtattagtcatcgc

SEQ ID NO: 74019 - DNA, 25 bp, Probe Sequence
aaatcaacgtattagtcatcgctat

SEQ ID NO: 74020 - DNA, 25 bp, Probe Sequence
ctaagtcaaatcccagtggtgtgtg

SEQ ID NO: 74021 - DNA, 25 bp, Probe Sequence
catgaacgtcaatgggagtttgttt

SEQ ID NO: 74022 - DNA, 25 bp, Probe Sequence
aaagctaagtcaaatcccagtggtg

SEQ ID NO: 74023 - DNA, 25 bp, Probe Sequence
agagaaaagctaagtcaaatcccag

SEQ ID NO: 74024 - DNA, 25 bp, Probe Sequence
taagtcaaatcccagtggtgtgtgt

SEQ ID NO: 74025 - DNA, 25 bp, Probe Sequence
gagaaaagctaagtcaaatcccagt

SEQ ID NO: 74026 - DNA, 25 bp, Probe Sequence
cagagaaaagctaagtcaaatccca

SEQ ID NO: 74027 - DNA, 25 bp, Probe Sequence
agaaaagctaagtcaaatcccagtg

SEQ ID NO: 74028 - DNA, 25 bp, Probe Sequence
ccagagaaaagctaagtcaaatccc

SEQ ID NO: 74029 - DNA, 25 bp, Probe Sequence
gaaaagctaagtcaaatcccagtgg

SEQ ID NO: 74030 - DNA, 25 bp, Probe Sequence
gccagagaaaagctaagtcaaatcc

SEQ ID NO: 74031 - DNA, 25 bp, Probe Sequence
aagctaagtcaaatcccagtggtgt

SEQ ID NO: 74032 - DNA, 25 bp, Probe Sequence
aaaagctaagtcaaatcccagtggt

SEQ ID NO: 74033 - DNA, 25 bp, Probe Sequence
atcttggttgagtgaatgaagtaca

SEQ ID NO: 74034 - DNA, 25 bp, Probe Sequence
aatcttggttgagtgaatgaagtac

SEQ ID NO: 74035 - DNA, 25 bp, Probe Sequence
aagaattgagtgaagtggtcctgat

SEQ ID NO: 74036 - DNA, 25 bp, Probe Sequence
tcttggttgagtgaatgaagtacaa

SEQ ID NO: 74037 - DNA, 25 bp, Probe Sequence
attgcctcaccagccagaatataag

SEQ ID NO: 74038 - DNA, 25 bp, Probe Sequence
agaattgagtgaagtggtcctgatg

SEQ ID NO: 74039 - DNA, 25 bp, Probe Sequence
cagccagaatataagttgcatgaag

SEQ ID NO: 74040 - DNA, 25 bp, Probe Sequence
agaatataagttgcatgaaggagga

SEQ ID NO: 74041 - DNA, 25 bp, Probe Sequence
cagaatataagttgcatgaaggagg

SEQ ID NO: 74042 - DNA, 25 bp, Probe Sequence
ccagaatataagttgcatgaaggag

SEQ ID NO: 74043 - DNA, 25 bp, Probe Sequence
cattgcctcaccagccagaatataa

SEQ ID NO: 74044 - DNA, 25 bp, Probe Sequence
gaatataagttgcatgaaggaggaa

SEQ ID NO: 74045 - DNA, 25 bp, Probe Sequence
gccagaatataagttgcatgaagga

SEQ ID NO: 74046 - DNA, 25 bp, Probe Sequence
agccagaatataagttgcatgaagg

SEQ ID NO: 74047 - DNA, 25 bp, Probe Sequence
gtttatcacccatacaaccaacatt

SEQ ID NO: 74048 - DNA, 25 bp, Probe Sequence
agtttatcacccatacaaccaacat

SEQ ID NO: 74049 - DNA, 25 bp, Probe Sequence
ccagccagaatataagttgcatgaa

SEQ ID NO: 74050 - DNA, 25 bp, Probe Sequence
tttatcacccatacaaccaacattg

SEQ ID NO: 74051 - DNA, 25 bp, Probe Sequence
gagtttatcacccatacaaccaaca

SEQ ID NO: 74052 - DNA, 25 bp, Probe Sequence
atataagttgcatgaaggaggaatt

SEQ ID NO: 74053 - DNA, 25 bp, Probe Sequence
aatataagttgcatgaaggaggaat

SEQ ID NO: 74054 - DNA, 25 bp, Probe Sequence
aaatcttggttgagtgaatgaagta

SEQ ID NO: 74055 - DNA, 25 bp, Probe Sequence
taaatcttggttgagtgaatgaagt

SEQ ID NO: 74056 - DNA, 25 bp, Probe Sequence
atgaaggaggaatttgtgtcagttt

SEQ ID NO: 74057 - DNA, 25 bp, Probe Sequence
caggggacagttatttaaacgagtg

SEQ ID NO: 74058 - DNA, 25 bp, Probe Sequence
cttcctcggaggtgtttattgatgc

SEQ ID NO: 74059 - DNA, 25 bp, Probe Sequence
gcttcctcggaggtgtttattgatg

SEQ ID NO: 74060 - DNA, 25 bp, Probe Sequence
agcttcctcggaggtgtttattgat

SEQ ID NO: 74061 - DNA, 25 bp, Probe Sequence
acacaaccagaaaaggcgtaaacat

SEQ ID NO: 74062 - DNA, 25 bp, Probe Sequence
aggggacagttatttaaacgagtgg

SEQ ID NO: 74063 - DNA, 25 bp, Probe Sequence
ccaggggacagttatttaaacgagt

SEQ ID NO: 74064 - DNA, 25 bp, Probe Sequence
cacaaccagaaaaggcgtaaacatg

SEQ ID NO: 74065 - DNA, 25 bp, Probe Sequence
tccaggggacagttatttaaacgag

SEQ ID NO: 74066 - DNA, 25 bp, Probe Sequence
ctccaggggacagttatttaaacga

SEQ ID NO: 74067 - DNA, 25 bp, Probe Sequence
gacacaaccagaaaaggcgtaaaca

SEQ ID NO: 74068 - DNA, 25 bp, Probe Sequence
tgacacaaccagaaaaggcgtaaac

SEQ ID NO: 74069 - DNA, 25 bp, Probe Sequence
gggacagttatttaaacgagtggcc

SEQ ID NO: 74070 - DNA, 25 bp, Probe Sequence
cagcttcctcggaggtgtttattga

SEQ ID NO: 74071 - DNA, 25 bp, Probe Sequence
ctgacacaaccagaaaaggcgtaaa

SEQ ID NO: 74072 - DNA, 25 bp, Probe Sequence
gacagttatttaaacgagtggccgg

SEQ ID NO: 74073 - DNA, 25 bp, Probe Sequence
ggacagttatttaaacgagtggccg

SEQ ID NO: 74074 - DNA, 25 bp, Probe Sequence
cctccaggggacagttatttaaacg

SEQ ID NO: 74075 - DNA, 25 bp, Probe Sequence
ggggacagttatttaaacgagtggc

SEQ ID NO: 74076 - DNA, 25 bp, Probe Sequence
ttcctcggaggtgtttattgatgcc

SEQ ID NO: 74077 - DNA, 25 bp, Probe Sequence
ccctccaggggacagttatttaaac

SEQ ID NO: 74078 - DNA, 25 bp, Probe Sequence
acaaccagaaaaggcgtaaacatgc

SEQ ID NO: 74079 - DNA, 25 bp, Probe Sequence
agttatttaaacgagtggccgggag

SEQ ID NO: 74080 - DNA, 25 bp, Probe Sequence
actgacacaaccagaaaaggcgtaa

SEQ ID NO: 74081 - DNA, 25 bp, Probe Sequence
gctcactggagtagaattagatgtt

SEQ ID NO: 74082 - DNA, 25 bp, Probe Sequence
ggagtagaattagatgttaggttgg

SEQ ID NO: 74083 - DNA, 25 bp, Probe Sequence
actggagtagaattagatgttaggt

SEQ ID NO: 74084 - DNA, 25 bp, Probe Sequence
cactggagtagaattagatgttagg

SEQ ID NO: 74085 - DNA, 25 bp, Probe Sequence
attagatgttaggttggagacagaa

SEQ ID NO: 74086 - DNA, 25 bp, Probe Sequence
aattagatgttaggttggagacaga

SEQ ID NO: 74087 - DNA, 25 bp, Probe Sequence
agaattagatgttaggttggagaca

SEQ ID NO: 74088 - DNA, 25 bp, Probe Sequence
gaattagatgttaggttggagacag

SEQ ID NO: 74089 - DNA, 25 bp, Probe Sequence
tggagtagaattagatgttaggttg

SEQ ID NO: 74090 - DNA, 25 bp, Probe Sequence
tagaattagatgttaggttggagac

SEQ ID NO: 74091 - DNA, 25 bp, Probe Sequence
gtagaattagatgttaggttggaga

SEQ ID NO: 74092 - DNA, 25 bp, Probe Sequence
agtagaattagatgttaggttggag

SEQ ID NO: 74093 - DNA, 25 bp, Probe Sequence
gagtagaattagatgttaggttgga

SEQ ID NO: 74094 - DNA, 25 bp, Probe Sequence
ctggagtagaattagatgttaggtt

SEQ ID NO: 74095 - DNA, 25 bp, Probe Sequence
tcactggagtagaattagatgttag

SEQ ID NO: 74096 - DNA, 25 bp, Probe Sequence
ggtagtaatctagctcactggagta

SEQ ID NO: 74097 - DNA, 25 bp, Probe Sequence
agctcactggagtagaattagatgt

SEQ ID NO: 74098 - DNA, 25 bp, Probe Sequence
gtagtaatctagctcactggagtag

SEQ ID NO: 74099 - DNA, 25 bp, Probe Sequence
tagctcactggagtagaattagatg

SEQ ID NO: 74100 - DNA, 25 bp, Probe Sequence
aaggtagtaatctagctcactggag

SEQ ID NO: 74101 - DNA, 25 bp, Probe Sequence
ctagctcactggagtagaattagat

SEQ ID NO: 74102 - DNA, 25 bp, Probe Sequence
ctcactggagtagaattagatgtta

SEQ ID NO: 74103 - DNA, 25 bp, Probe Sequence
gaaacaagaagtacacacacatacc

SEQ ID NO: 74104 - DNA, 25 bp, Probe Sequence
agtaatctagctcactggagtagaa

SEQ ID NO: 74105 - DNA, 25 bp, Probe Sequence
aagtaagagaaggaattaagcaggt

SEQ ID NO: 74106 - DNA, 25 bp, Probe Sequence
agtaagagaaggaattaagcaggta

SEQ ID NO: 74107 - DNA, 25 bp, Probe Sequence
taagagaaggaattaagcaggtact

SEQ ID NO: 74108 - DNA, 25 bp, Probe Sequence
gtaagagaaggaattaagcaggtac

SEQ ID NO: 74109 - DNA, 25 bp, Probe Sequence
aagagaaggaattaagcaggtactg

SEQ ID NO: 74110 - DNA, 25 bp, Probe Sequence
ttctctgctgattgtgatgtacctc

SEQ ID NO: 74111 - DNA, 25 bp, Probe Sequence
cttctctgctgattgtgatgtacct

SEQ ID NO: 74112 - DNA, 25 bp, Probe Sequence
agagtgaataaagaagaaacccagg

SEQ ID NO: 74113 - DNA, 25 bp, Probe Sequence
ggaagagtgaataaagaagaaaccc

SEQ ID NO: 74114 - DNA, 25 bp, Probe Sequence
agagaaggaattaagcaggtactgg

SEQ ID NO: 74115 - DNA, 25 bp, Probe Sequence
tcctgttctgtttcgttctgattac

SEQ ID NO: 74116 - DNA, 25 bp, Probe Sequence
gtcctgttctgtttcgttctgatta

SEQ ID NO: 74117 - DNA, 25 bp, Probe Sequence
aagagtgaataaagaagaaacccag

SEQ ID NO: 74118 - DNA, 25 bp, Probe Sequence
gaagagtgaataaagaagaaaccca

SEQ ID NO: 74119 - DNA, 25 bp, Probe Sequence
aggaagagtgaataaagaagaaacc

SEQ ID NO: 74120 - DNA, 25 bp, Probe Sequence
aaagtaagagaaggaattaagcagg

SEQ ID NO: 74121 - DNA, 25 bp, Probe Sequence
gagtgaataaagaagaaacccaggc

SEQ ID NO: 74122 - DNA, 25 bp, Probe Sequence
cctgttctgtttcgttctgattacc

SEQ ID NO: 74123 - DNA, 25 bp, Probe Sequence
cagacattatatggaaaggcattgt

SEQ ID NO: 74124 - DNA, 25 bp, Probe Sequence
cggttatgttatctatggattccag

SEQ ID NO: 74125 - DNA, 25 bp, Probe Sequence
ctgttctgtttcgttctgattaccg

SEQ ID NO: 74126 - DNA, 25 bp, Probe Sequence
cttccttctttaactccgtgtctga

SEQ ID NO: 74127 - DNA, 25 bp, Probe Sequence
tctctgctgattgtgatgtacctca

SEQ ID NO: 74128 - DNA, 25 bp, Probe Sequence
tgtcctgttctgtttcgttctgatt

SEQ ID NO: 74129 - DNA, 25 bp, Probe Sequence
ttggaggattaatagcagattagca

SEQ ID NO: 74130 - DNA, 25 bp, Probe Sequence
tggaggattaatagcagattagcat

SEQ ID NO: 74131 - DNA, 25 bp, Probe Sequence
ggaggattaatagcagattagcatg

SEQ ID NO: 74132 - DNA, 25 bp, Probe Sequence
agtcttggaggattaatagcagatt

SEQ ID NO: 74133 - DNA, 25 bp, Probe Sequence
aagtcttggaggattaatagcagat

SEQ ID NO: 74134 - DNA, 25 bp, Probe Sequence
cttggaggattaatagcagattagc

SEQ ID NO: 74135 - DNA, 25 bp, Probe Sequence
gcatttgaaagtcttggaggattaa

SEQ ID NO: 74136 - DNA, 25 bp, Probe Sequence
gaggattaatagcagattagcatga

SEQ ID NO: 74137 - DNA, 25 bp, Probe Sequence
aatacaaagaaattagccgagcgta

SEQ ID NO: 74138 - DNA, 25 bp, Probe Sequence
gtcttggaggattaatagcagatta

SEQ ID NO: 74139 - DNA, 25 bp, Probe Sequence
atagtcatttgcccgtcaagttatt

SEQ ID NO: 74140 - DNA, 25 bp, Probe Sequence
atacaaagaaattagccgagcgtag

SEQ ID NO: 74141 - DNA, 25 bp, Probe Sequence
tgcccgtcaagttatttactgttaa

SEQ ID NO: 74142 - DNA, 25 bp, Probe Sequence
ttgcccgtcaagttatttactgtta

SEQ ID NO: 74143 - DNA, 25 bp, Probe Sequence
gtcatttgcccgtcaagttatttac

SEQ ID NO: 74144 - DNA, 25 bp, Probe Sequence
agtcatttgcccgtcaagttattta

SEQ ID NO: 74145 - DNA, 25 bp, Probe Sequence
tagtcatttgcccgtcaagttattt

SEQ ID NO: 74146 - DNA, 25 bp, Probe Sequence
gatagtcatttgcccgtcaagttat

SEQ ID NO: 74147 - DNA, 25 bp, Probe Sequence
catttgcccgtcaagttatttactg

SEQ ID NO: 74148 - DNA, 25 bp, Probe Sequence
tcatttgcccgtcaagttatttact

SEQ ID NO: 74149 - DNA, 25 bp, Probe Sequence
aggattaatagcagattagcatgat

SEQ ID NO: 74150 - DNA, 25 bp, Probe Sequence
tcttggaggattaatagcagattag

SEQ ID NO: 74151 - DNA, 25 bp, Probe Sequence
aaatacaaagaaattagccgagcgt

SEQ ID NO: 74152 - DNA, 25 bp, Probe Sequence
atttgcccgtcaagttatttactgt

SEQ ID NO: 74153 - DNA, 25 bp, Probe Sequence
aaccatatcaatcaccaagacaagt

SEQ ID NO: 74154 - DNA, 25 bp, Probe Sequence
tatcaatcaccaagacaagtgtagc

SEQ ID NO: 74155 - DNA, 25 bp, Probe Sequence
ccatatcaatcaccaagacaagtgt

SEQ ID NO: 74156 - DNA, 25 bp, Probe Sequence
accatatcaatcaccaagacaagtg

SEQ ID NO: 74157 - DNA, 25 bp, Probe Sequence
catatcaatcaccaagacaagtgta

SEQ ID NO: 74158 - DNA, 25 bp, Probe Sequence
atatcaatcaccaagacaagtgtag

SEQ ID NO: 74159 - DNA, 25 bp, Probe Sequence
tcatttcattgtcactgttgttgtt

SEQ ID NO: 74160 - DNA, 25 bp, Probe Sequence
tctcatttcattgtcactgttgttg

SEQ ID NO: 74161 - DNA, 25 bp, Probe Sequence
caaaccatatcaatcaccaagacaa

SEQ ID NO: 74162 - DNA, 25 bp, Probe Sequence
catttcattgtcactgttgttgttt

SEQ ID NO: 74163 - DNA, 25 bp, Probe Sequence
ctcatttcattgtcactgttgttgt

SEQ ID NO: 74164 - DNA, 25 bp, Probe Sequence
atctcatttcattgtcactgttgtt

SEQ ID NO: 74165 - DNA, 25 bp, Probe Sequence
aaaccatatcaatcaccaagacaag

SEQ ID NO: 74166 - DNA, 25 bp, Probe Sequence
aaacagagccaaaccatatcaatca

SEQ ID NO: 74167 - DNA, 25 bp, Probe Sequence
ccaaaccatatcaatcaccaagaca

SEQ ID NO: 74168 - DNA, 25 bp, Probe Sequence
tctctgaatgtcttggtgtcaaata

SEQ ID NO: 74169 - DNA, 25 bp, Probe Sequence
gatctcatttcattgtcactgttgt

SEQ ID NO: 74170 - DNA, 25 bp, Probe Sequence
ttctctgaatgtcttggtgtcaaat

SEQ ID NO: 74171 - DNA, 25 bp, Probe Sequence
ctctgaatgtcttggtgtcaaataa

SEQ ID NO: 74172 - DNA, 25 bp, Probe Sequence
aacagagccaaaccatatcaatcac

SEQ ID NO: 74173 - DNA, 25 bp, Probe Sequence
tgaatgtcttggtgtcaaataatgt

SEQ ID NO: 74174 - DNA, 25 bp, Probe Sequence
tttctctgaatgtcttggtgtcaaa

SEQ ID NO: 74175 - DNA, 25 bp, Probe Sequence
ctgaatgtcttggtgtcaaataatg

SEQ ID NO: 74176 - DNA, 25 bp, Probe Sequence
tctgaatgtcttggtgtcaaataat

SEQ ID NO: 74177 - DNA, 25 bp, Probe Sequence
gacacaggtactctcatattcaact

SEQ ID NO: 74178 - DNA, 25 bp, Probe Sequence
acacaggtactctcatattcaactt

SEQ ID NO: 74179 - DNA, 25 bp, Probe Sequence
cacaggtactctcatattcaacttg

SEQ ID NO: 74180 - DNA, 25 bp, Probe Sequence
gtacaagtacggaagtagtagcaac

SEQ ID NO: 74181 - DNA, 25 bp, Probe Sequence
tgacacaggtactctcatattcaac

SEQ ID NO: 74182 - DNA, 25 bp, Probe Sequence
tacaagtacggaagtagtagcaact

SEQ ID NO: 74183 - DNA, 25 bp, Probe Sequence
acaggtactctcatattcaacttgt

SEQ ID NO: 74184 - DNA, 25 bp, Probe Sequence
tccaattctaggaatctgtcatcag

SEQ ID NO: 74185 - DNA, 25 bp, Probe Sequence
ctccaattctaggaatctgtcatca

SEQ ID NO: 74186 - DNA, 25 bp, Probe Sequence
actccaattctaggaatctgtcatc

SEQ ID NO: 74187 - DNA, 25 bp, Probe Sequence
caggtactctcatattcaacttgta

SEQ ID NO: 74188 - DNA, 25 bp, Probe Sequence
aactccaattctaggaatctgtcat

SEQ ID NO: 74189 - DNA, 25 bp, Probe Sequence
ggataatgacttgaaatgacacagg

SEQ ID NO: 74190 - DNA, 25 bp, Probe Sequence
gggataatgacttgaaatgacacag

SEQ ID NO: 74191 - DNA, 25 bp, Probe Sequence
attagaaatgtaggcaaatgtaggc

SEQ ID NO: 74192 - DNA, 25 bp, Probe Sequence
taactccaattctaggaatctgtca

SEQ ID NO: 74193 - DNA, 25 bp, Probe Sequence
gataatgacttgaaatgacacaggt

SEQ ID NO: 74194 - DNA, 25 bp, Probe Sequence
cgggataatgacttgaaatgacaca

SEQ ID NO: 74195 - DNA, 25 bp, Probe Sequence
aatgacttgaaatgacacaggtact

SEQ ID NO: 74196 - DNA, 25 bp, Probe Sequence
atgacttgaaatgacacaggtactc

SEQ ID NO: 74197 - DNA, 25 bp, Probe Sequence
ataatgacttgaaatgacacaggta

SEQ ID NO: 74198 - DNA, 25 bp, Probe Sequence
taatgacttgaaatgacacaggtac

SEQ ID NO: 74199 - DNA, 25 bp, Probe Sequence
ataactccaattctaggaatctgtc

SEQ ID NO: 74200 - DNA, 25 bp, Probe Sequence
gacttgaaatgacacaggtactctc

SEQ ID NO: 74201 - DNA, 25 bp, Probe Sequence
tagtatcgttatgtccgttaatagc

SEQ ID NO: 74202 - DNA, 25 bp, Probe Sequence
agtgttctacaactaatgagacctt

SEQ ID NO: 74203 - DNA, 25 bp, Probe Sequence
aagtgttctacaactaatgagacct

SEQ ID NO: 74204 - DNA, 25 bp, Probe Sequence
tggagttcacaggtgttgtataata

SEQ ID NO: 74205 - DNA, 25 bp, Probe Sequence
ctggagttcacaggtgttgtataat

SEQ ID NO: 74206 - DNA, 25 bp, Probe Sequence
ggagttcacaggtgttgtataataa

SEQ ID NO: 74207 - DNA, 25 bp, Probe Sequence
tctggagttcacaggtgttgtataa

SEQ ID NO: 74208 - DNA, 25 bp, Probe Sequence
ttctggagttcacaggtgttgtata

SEQ ID NO: 74209 - DNA, 25 bp, Probe Sequence
tattctggagttcacaggtgttgta

SEQ ID NO: 74210 - DNA, 25 bp, Probe Sequence
tcatgtagctctagttctcttcagt

SEQ ID NO: 74211 - DNA, 25 bp, Probe Sequence
agtatcgttatgtccgttaatagct

SEQ ID NO: 74212 - DNA, 25 bp, Probe Sequence
atcatgtagctctagttctcttcag

SEQ ID NO: 74213 - DNA, 25 bp, Probe Sequence
ttgctgataccatgctagtcttgat

SEQ ID NO: 74214 - DNA, 25 bp, Probe Sequence
catgtagctctagttctcttcagta

SEQ ID NO: 74215 - DNA, 25 bp, Probe Sequence
ttacgcacttgtattctggagttca

SEQ ID NO: 74216 - DNA, 25 bp, Probe Sequence
gtatcgttatgtccgttaatagctt

SEQ ID NO: 74217 - DNA, 25 bp, Probe Sequence
tgtagctctagttctcttcagtaag

SEQ ID NO: 74218 - DNA, 25 bp, Probe Sequence
taagtgttctacaactaatgagacc

SEQ ID NO: 74219 - DNA, 25 bp, Probe Sequence
gaagtctataaagttgcctctcagt

SEQ ID NO: 74220 - DNA, 25 bp, Probe Sequence
tctgaagtctataaagttgcctctc

SEQ ID NO: 74221 - DNA, 25 bp, Probe Sequence
attctggagttcacaggtgttgtat

SEQ ID NO: 74222 - DNA, 25 bp, Probe Sequence
agtctataaagttgcctctcagttt

SEQ ID NO: 74223 - DNA, 25 bp, Probe Sequence
aagtctataaagttgcctctcagtt

SEQ ID NO: 74224 - DNA, 25 bp, Probe Sequence
atgtagctctagttctcttcagtaa

SEQ ID NO: 74225 - DNA, 25 bp, Probe Sequence
tagcagctacatggtgaattgaatc

SEQ ID NO: 74226 - DNA, 25 bp, Probe Sequence
tttgcctatttcccagatgataaca

SEQ ID NO: 74227 - DNA, 25 bp, Probe Sequence
tatgtttcctctcctttgcctattt

SEQ ID NO: 74228 - DNA, 25 bp, Probe Sequence
ttatgtttcctctcctttgcctatt

SEQ ID NO: 74229 - DNA, 25 bp, Probe Sequence
ctttgcctatttcccagatgataac

SEQ ID NO: 74230 - DNA, 25 bp, Probe Sequence
gttatgtttcctctcctttgcctat

SEQ ID NO: 74231 - DNA, 25 bp, Probe Sequence
cctttgcctatttcccagatgataa

SEQ ID NO: 74232 - DNA, 25 bp, Probe Sequence
tgcctatttcccagatgataacatt

SEQ ID NO: 74233 - DNA, 25 bp, Probe Sequence
ttgcctatttcccagatgataacat

SEQ ID NO: 74234 - DNA, 25 bp, Probe Sequence
gcctatttcccagatgataacattg

SEQ ID NO: 74235 - DNA, 25 bp, Probe Sequence
atgtttcctctcctttgcctatttc

SEQ ID NO: 74236 - DNA, 25 bp, Probe Sequence
tcctttgcctatttcccagatgata

SEQ ID NO: 74237 - DNA, 25 bp, Probe Sequence
atttcccagatgataacattgaggc

SEQ ID NO: 74238 - DNA, 25 bp, Probe Sequence
ctgacaccaacaaacaaacaacaaa

SEQ ID NO: 74239 - DNA, 25 bp, Probe Sequence
tgttatgtttcctctcctttgccta

SEQ ID NO: 74240 - DNA, 25 bp, Probe Sequence
tatttcccagatgataacattgagg

SEQ ID NO: 74241 - DNA, 25 bp, Probe Sequence
cctatttcccagatgataacattga

SEQ ID NO: 74242 - DNA, 25 bp, Probe Sequence
ttccatgttatgtttcctctccttt

SEQ ID NO: 74243 - DNA, 25 bp, Probe Sequence
attccatgttatgtttcctctcctt

SEQ ID NO: 74244 - DNA, 25 bp, Probe Sequence
aattccatgttatgtttcctctcct

SEQ ID NO: 74245 - DNA, 25 bp, Probe Sequence
tctgacaccaacaaacaaacaacaa

SEQ ID NO: 74246 - DNA, 25 bp, Probe Sequence
atgttatgtttcctctcctttgcct

SEQ ID NO: 74247 - DNA, 25 bp, Probe Sequence
aagtctgacaccaacaaacaaacaa

SEQ ID NO: 74248 - DNA, 25 bp, Probe Sequence
aaagtctgacaccaacaaacaaaca

SEQ ID NO: 74249 - DNA, 25 bp, Probe Sequence
ccacacacacacacataatagtcta

SEQ ID NO: 74250 - DNA, 25 bp, Probe Sequence
agtctatcctcattattcacggtaa

SEQ ID NO: 74251 - DNA, 25 bp, Probe Sequence
acacacacacataatagtctatcct

SEQ ID NO: 74252 - DNA, 25 bp, Probe Sequence
cacacacacacataatagtctatcc

SEQ ID NO: 74253 - DNA, 25 bp, Probe Sequence
acacacacataatagtctatcctca

SEQ ID NO: 74254 - DNA, 25 bp, Probe Sequence
cacacacacacacataatagtctat

SEQ ID NO: 74255 - DNA, 25 bp, Probe Sequence
atagtctatcctcattattcacggt

SEQ ID NO: 74256 - DNA, 25 bp, Probe Sequence
cacacacacataatagtctatcctc

SEQ ID NO: 74257 - DNA, 25 bp, Probe Sequence
acacacacacacataatagtctatc

SEQ ID NO: 74258 - DNA, 25 bp, Probe Sequence
tagtctatcctcattattcacggta

SEQ ID NO: 74259 - DNA, 25 bp, Probe Sequence
attgtcaattcattaacactgccat

SEQ ID NO: 74260 - DNA, 25 bp, Probe Sequence
taacactgccatgacattataactc

SEQ ID NO: 74261 - DNA, 25 bp, Probe Sequence
tattgtcaattcattaacactgcca

SEQ ID NO: 74262 - DNA, 25 bp, Probe Sequence
gtctatcctcattattcacggtaat

SEQ ID NO: 74263 - DNA, 25 bp, Probe Sequence
gtattgtcaattcattaacactgcc

SEQ ID NO: 74264 - DNA, 25 bp, Probe Sequence
tgacattataactcatgcctgaaca

SEQ ID NO: 74265 - DNA, 25 bp, Probe Sequence
cacacacataatagtctatcctcat

SEQ ID NO: 74266 - DNA, 25 bp, Probe Sequence
aacactgccatgacattataactca

SEQ ID NO: 74267 - DNA, 25 bp, Probe Sequence
gacattataactcatgcctgaacaa

SEQ ID NO: 74268 - DNA, 25 bp, Probe Sequence
ttaacactgccatgacattataact

SEQ ID NO: 74269 - DNA, 25 bp, Probe Sequence
ttgtcaattcattaacactgccatg

SEQ ID NO: 74270 - DNA, 25 bp, Probe Sequence
aatagtctatcctcattattcacgg

SEQ ID NO: 74271 - DNA, 25 bp, Probe Sequence
tgtattgtcaattcattaacactgc

SEQ ID NO: 74272 - DNA, 25 bp, Probe Sequence
tagaggcaatacaggtttagattcc

SEQ ID NO: 74273 - DNA, 25 bp, Probe Sequence
actgactgcttatgtatcttgttct

SEQ ID NO: 74274 - DNA, 25 bp, Probe Sequence
actgcttatgtatcttgttctctga

SEQ ID NO: 74275 - DNA, 25 bp, Probe Sequence
tgactgcttatgtatcttgttctct

SEQ ID NO: 74276 - DNA, 25 bp, Probe Sequence
gactgcttatgtatcttgttctctg

SEQ ID NO: 74277 - DNA, 25 bp, Probe Sequence
ctgactgcttatgtatcttgttctc

SEQ ID NO: 74278 - DNA, 25 bp, Probe Sequence
ctgcttatgtatcttgttctctgat

SEQ ID NO: 74279 - DNA, 25 bp, Probe Sequence
tactgactgcttatgtatcttgttc

SEQ ID NO: 74280 - DNA, 25 bp, Probe Sequence
ttactgactgcttatgtatcttgtt

SEQ ID NO: 74281 - DNA, 25 bp, Probe Sequence
tgcttatgtatcttgttctctgatc

SEQ ID NO: 74282 - DNA, 25 bp, Probe Sequence
attactgactgcttatgtatcttgt

SEQ ID NO: 74283 - DNA, 25 bp, Probe Sequence
cattactgactgcttatgtatcttg

SEQ ID NO: 74284 - DNA, 25 bp, Probe Sequence
tcggtttgtaaattcatttcagcat

SEQ ID NO: 74285 - DNA, 25 bp, Probe Sequence
cggtttgtaaattcatttcagcatt

SEQ ID NO: 74286 - DNA, 25 bp, Probe Sequence
gtcggtttgtaaattcatttcagca

SEQ ID NO: 74287 - DNA, 25 bp, Probe Sequence
cgtcggtttgtaaattcatttcagc

SEQ ID NO: 74288 - DNA, 25 bp, Probe Sequence
ttcagtgtgtttctacagtatgttt

SEQ ID NO: 74289 - DNA, 25 bp, Probe Sequence
gcattactgactgcttatgtatctt

SEQ ID NO: 74290 - DNA, 25 bp, Probe Sequence
attcagtgtgtttctacagtatgtt

SEQ ID NO: 74291 - DNA, 25 bp, Probe Sequence
aattcagtgtgtttctacagtatgt

SEQ ID NO: 74292 - DNA, 25 bp, Probe Sequence
tacgtcggtttgtaaattcatttca

SEQ ID NO: 74293 - DNA, 25 bp, Probe Sequence
acgtcggtttgtaaattcatttcag

SEQ ID NO: 74294 - DNA, 25 bp, Probe Sequence
aaattcagtgtgtttctacagtatg

SEQ ID NO: 74295 - DNA, 25 bp, Probe Sequence
gcttatgtatcttgttctctgatca

SEQ ID NO: 74296 - DNA, 25 bp, Probe Sequence
ggtttgtaaattcatttcagcatta

SEQ ID NO: 74297 - DNA, 25 bp, Probe Sequence
atgagcatataacccagacttgaaa

SEQ ID NO: 74298 - DNA, 25 bp, Probe Sequence
aatgagcatataacccagacttgaa

SEQ ID NO: 74299 - DNA, 25 bp, Probe Sequence
aaatgagcatataacccagacttga

SEQ ID NO: 74300 - DNA, 25 bp, Probe Sequence
ccctaattcaagttgtgtttctgtt

SEQ ID NO: 74301 - DNA, 25 bp, Probe Sequence
ttccctaattcaagttgtgtttctg

SEQ ID NO: 74302 - DNA, 25 bp, Probe Sequence
tccctaattcaagttgtgtttctgt

SEQ ID NO: 74303 - DNA, 25 bp, Probe Sequence
ggataaatgagcatataacccagac

SEQ ID NO: 74304 - DNA, 25 bp, Probe Sequence
acaactcttggacatttcagataca

SEQ ID NO: 74305 - DNA, 25 bp, Probe Sequence
cacaactcttggacatttcagatac

SEQ ID NO: 74306 - DNA, 25 bp, Probe Sequence
taaatgagcatataacccagacttg

SEQ ID NO: 74307 - DNA, 25 bp, Probe Sequence
attccctaattcaagttgtgtttct

SEQ ID NO: 74308 - DNA, 25 bp, Probe Sequence
gagaatgaatccaaattgaagttcg

SEQ ID NO: 74309 - DNA, 25 bp, Probe Sequence
caactcttggacatttcagatacat

SEQ ID NO: 74310 - DNA, 25 bp, Probe Sequence
gggcatttagatacaggaattactt

SEQ ID NO: 74311 - DNA, 25 bp, Probe Sequence
gcacaactcttggacatttcagata

SEQ ID NO: 74312 - DNA, 25 bp, Probe Sequence
gataaatgagcatataacccagact

SEQ ID NO: 74313 - DNA, 25 bp, Probe Sequence
aaagtcctgatgacattgtttgaac

SEQ ID NO: 74314 - DNA, 25 bp, Probe Sequence
gaaagtcctgatgacattgtttgaa

SEQ ID NO: 74315 - DNA, 25 bp, Probe Sequence
agagaaagtcctgatgacattgttt

SEQ ID NO: 74316 - DNA, 25 bp, Probe Sequence
gagaaagtcctgatgacattgtttg

SEQ ID NO: 74317 - DNA, 25 bp, Probe Sequence
ctcttggacatttcagatacatgga

SEQ ID NO: 74318 - DNA, 25 bp, Probe Sequence
agaaagtcctgatgacattgtttga

SEQ ID NO: 74319 - DNA, 25 bp, Probe Sequence
ggacatttcagatacatggaccaat

SEQ ID NO: 74320 - DNA, 25 bp, Probe Sequence
tcttggacatttcagatacatggac

SEQ ID NO: 74321 - DNA, 25 bp, Probe Sequence
taagttgttaagacctataccaggc

SEQ ID NO: 74322 - DNA, 25 bp, Probe Sequence
aagttgttaagacctataccaggct

SEQ ID NO: 74323 - DNA, 25 bp, Probe Sequence
gtaagttgttaagacctataccagg

SEQ ID NO: 74324 - DNA, 25 bp, Probe Sequence
agttgttaagacctataccaggctg

SEQ ID NO: 74325 - DNA, 25 bp, Probe Sequence
cacaaagcaagactgtctcaaataa

SEQ ID NO: 74326 - DNA, 25 bp, Probe Sequence
acaaagcaagactgtctcaaataaa

SEQ ID NO: 74327 - DNA, 25 bp, Probe Sequence
caaagcaagactgtctcaaataaat

SEQ ID NO: 74328 - DNA, 25 bp, Probe Sequence
catggcttgtaatcacagcacttag

SEQ ID NO: 74329 - DNA, 25 bp, Probe Sequence
ccacaaagcaagactgtctcaaata

SEQ ID NO: 74330 - DNA, 25 bp, Probe Sequence
cgacaggatgaggtaagaggatctc

SEQ ID NO: 74331 - DNA, 25 bp, Probe Sequence
ggtaagttgttaagacctataccag

SEQ ID NO: 74332 - DNA, 25 bp, Probe Sequence
ctggtaagttgttaagacctatacc

SEQ ID NO: 74333 - DNA, 25 bp, Probe Sequence
gttgttaagacctataccaggctgg

SEQ ID NO: 74334 - DNA, 25 bp, Probe Sequence
ctactcgacaggatgaggtaagagg

SEQ ID NO: 74335 - DNA, 25 bp, Probe Sequence
acatggcttgtaatcacagcactta

SEQ ID NO: 74336 - DNA, 25 bp, Probe Sequence
atggcttgtaatcacagcacttagg

SEQ ID NO: 74337 - DNA, 25 bp, Probe Sequence
agacgccatctctacaaaagtatat

SEQ ID NO: 74338 - DNA, 25 bp, Probe Sequence
acttgtaatcccagcattttgagag

SEQ ID NO: 74339 - DNA, 25 bp, Probe Sequence
gacaggatgaggtaagaggatctct

SEQ ID NO: 74340 - DNA, 25 bp, Probe Sequence
ctcgacaggatgaggtaagaggatc

SEQ ID NO: 74341 - DNA, 25 bp, Probe Sequence
tactcgacaggatgaggtaagagga

SEQ ID NO: 74342 - DNA, 25 bp, Probe Sequence
cacttgtaatcccagcattttgaga

SEQ ID NO: 74343 - DNA, 25 bp, Probe Sequence
agaccagcctagacaacatgacaag

SEQ ID NO: 74344 - DNA, 25 bp, Probe Sequence
gagaccagcctagacaacatgacaa

SEQ ID NO: 74345 - DNA, 25 bp, Probe Sequence
tagtattattctagcacctggttcc

SEQ ID NO: 74346 - DNA, 25 bp, Probe Sequence
gtcagcaatgttaaggaagagagtc

SEQ ID NO: 74347 - DNA, 25 bp, Probe Sequence
cagtcagcaatgttaaggaagagag

SEQ ID NO: 74348 - DNA, 25 bp, Probe Sequence
agtattattctagcacctggttcca

SEQ ID NO: 74349 - DNA, 25 bp, Probe Sequence
agtcagcaatgttaaggaagagagt

SEQ ID NO: 74350 - DNA, 25 bp, Probe Sequence
acatagtattattctagcacctggt

SEQ ID NO: 74351 - DNA, 25 bp, Probe Sequence
actcacatgaattacactgactcaa

SEQ ID NO: 74352 - DNA, 25 bp, Probe Sequence
cactcacatgaattacactgactca

SEQ ID NO: 74353 - DNA, 25 bp, Probe Sequence
caatgttaaggaagagagtccagaa

SEQ ID NO: 74354 - DNA, 25 bp, Probe Sequence
ctcacatgaattacactgactcaat

SEQ ID NO: 74355 - DNA, 25 bp, Probe Sequence
catagtattattctagcacctggtt

SEQ ID NO: 74356 - DNA, 25 bp, Probe Sequence
atagtattattctagcacctggttc

SEQ ID NO: 74357 - DNA, 25 bp, Probe Sequence
ccactcacatgaattacactgactc

SEQ ID NO: 74358 - DNA, 25 bp, Probe Sequence
tcacatgaattacactgactcaatt

SEQ ID NO: 74359 - DNA, 25 bp, Probe Sequence
tttatttcttggagcataggtcaca

SEQ ID NO: 74360 - DNA, 25 bp, Probe Sequence
ttatttcttggagcataggtcacac

SEQ ID NO: 74361 - DNA, 25 bp, Probe Sequence
catcagcaagaaatacaggtgttaa

SEQ ID NO: 74362 - DNA, 25 bp, Probe Sequence
tcagcaagaaatacaggtgttaaag

SEQ ID NO: 74363 - DNA, 25 bp, Probe Sequence
tccaggaggtaagacaaatgatatg

SEQ ID NO: 74364 - DNA, 25 bp, Probe Sequence
gttccaggaggtaagacaaatgata

SEQ ID NO: 74365 - DNA, 25 bp, Probe Sequence
gttacgccactcacatgaattacac

SEQ ID NO: 74366 - DNA, 25 bp, Probe Sequence
gagaagagcagaggttagtagcatg

SEQ ID NO: 74367 - DNA, 25 bp, Probe Sequence
cagcaagaaatacaggtgttaaagc

SEQ ID NO: 74368 - DNA, 25 bp, Probe Sequence
gcagtcagcaatgttaaggaagaga

SEQ ID NO: 74369 - DNA, 25 bp, Probe Sequence
aagtaaagaaagacagaggacgaat

SEQ ID NO: 74370 - DNA, 25 bp, Probe Sequence
tgacaagtaaagaaagacagaggac

SEQ ID NO: 74371 - DNA, 25 bp, Probe Sequence
atgacaagtaaagaaagacagagga

SEQ ID NO: 74372 - DNA, 25 bp, Probe Sequence
caagtaaagaaagacagaggacgaa

SEQ ID NO: 74373 - DNA, 25 bp, Probe Sequence
agtaaagaaagacagaggacgaata

SEQ ID NO: 74374 - DNA, 25 bp, Probe Sequence
gaggtgtcttaaatgaaagttgagg

SEQ ID NO: 74375 - DNA, 25 bp, Probe Sequence
gacaagtaaagaaagacagaggacg

SEQ ID NO: 74376 - DNA, 25 bp, Probe Sequence
aggtgtcttaaatgaaagttgaggg

SEQ ID NO: 74377 - DNA, 25 bp, Probe Sequence
gtaaagaaagacagaggacgaataa

SEQ ID NO: 74378 - DNA, 25 bp, Probe Sequence
cagaggtgtcttaaatgaaagttga

SEQ ID NO: 74379 - DNA, 25 bp, Probe Sequence
agaggtgtcttaaatgaaagttgag

SEQ ID NO: 74380 - DNA, 25 bp, Probe Sequence
acaagtaaagaaagacagaggacga

SEQ ID NO: 74381 - DNA, 25 bp, Probe Sequence
gcatgacaagtaaagaaagacagag

SEQ ID NO: 74382 - DNA, 25 bp, Probe Sequence
catgacaagtaaagaaagacagagg

SEQ ID NO: 74383 - DNA, 25 bp, Probe Sequence
acagaggtgtcttaaatgaaagttg

SEQ ID NO: 74384 - DNA, 25 bp, Probe Sequence
taaagaaagacagaggacgaataaa

SEQ ID NO: 74385 - DNA, 25 bp, Probe Sequence
tgctagagtttatcaacacagaggt

SEQ ID NO: 74386 - DNA, 25 bp, Probe Sequence
ggcatgacaagtaaagaaagacaga

SEQ ID NO: 74387 - DNA, 25 bp, Probe Sequence
aggcatgacaagtaaagaaagacag

SEQ ID NO: 74388 - DNA, 25 bp, Probe Sequence
gaggcatgacaagtaaagaaagaca

SEQ ID NO: 74389 - DNA, 25 bp, Probe Sequence
cacagaggtgtcttaaatgaaagtt

SEQ ID NO: 74390 - DNA, 25 bp, Probe Sequence
ctgctagagtttatcaacacagagg

SEQ ID NO: 74391 - DNA, 25 bp, Probe Sequence
ggaggcatgacaagtaaagaaagac

SEQ ID NO: 74392 - DNA, 25 bp, Probe Sequence
gctagagtttatcaacacagaggtg

SEQ ID NO: 74393 - DNA, 25 bp, Probe Sequence
ctgagatggagaggattacttgacc

SEQ ID NO: 74394 - DNA, 25 bp, Probe Sequence
cattgttattgtcaccatgttgtac

SEQ ID NO: 74395 - DNA, 25 bp, Probe Sequence
gctgagatggagaggattacttgac

SEQ ID NO: 74396 - DNA, 25 bp, Probe Sequence
aaggctgagatggagaggattactt

SEQ ID NO: 74397 - DNA, 25 bp, Probe Sequence
gacacttaaatctaccctcttagca

SEQ ID NO: 74398 - DNA, 25 bp, Probe Sequence
ggacacttaaatctaccctcttagc

SEQ ID NO: 74399 - DNA, 25 bp, Probe Sequence
acacttaaatctaccctcttagcaa

SEQ ID NO: 74400 - DNA, 25 bp, Probe Sequence
tgttgtaaagaaataactgaggctg

SEQ ID NO: 74401 - DNA, 25 bp, Probe Sequence
tctcttgaacttatttctcctgtct

SEQ ID NO: 74402 - DNA, 25 bp, Probe Sequence
ttcaaggctgagatggagaggatta

SEQ ID NO: 74403 - DNA, 25 bp, Probe Sequence
gttgtaaagaaataactgaggctgc

SEQ ID NO: 74404 - DNA, 25 bp, Probe Sequence
ttgttgtaaagaaataactgaggct

SEQ ID NO: 74405 - DNA, 25 bp, Probe Sequence
ggctgagatggagaggattacttga

SEQ ID NO: 74406 - DNA, 25 bp, Probe Sequence
aggctgagatggagaggattacttg

SEQ ID NO: 74407 - DNA, 25 bp, Probe Sequence
caaggctgagatggagaggattact

SEQ ID NO: 74408 - DNA, 25 bp, Probe Sequence
cacttaaatctaccctcttagcaat

SEQ ID NO: 74409 - DNA, 25 bp, Probe Sequence
tttgtatcctttgaccaacatcttc

SEQ ID NO: 74410 - DNA, 25 bp, Probe Sequence
atctcttgaacttatttctcctgtc

SEQ ID NO: 74411 - DNA, 25 bp, Probe Sequence
tttgttgtaaagaaataactgaggc

SEQ ID NO: 74412 - DNA, 25 bp, Probe Sequence
ttgtatcctttgaccaacatcttcc

SEQ ID NO: 74413 - DNA, 25 bp, Probe Sequence
tatcctttgaccaacatcttcccaa

SEQ ID NO: 74414 - DNA, 25 bp, Probe Sequence
tcaaggctgagatggagaggattac

SEQ ID NO: 74415 - DNA, 25 bp, Probe Sequence
ctcttgaacttatttctcctgtcta

SEQ ID NO: 74416 - DNA, 25 bp, Probe Sequence
tacacctgtaatcctagcactttgg

SEQ ID NO: 74417 - DNA, 25 bp, Probe Sequence
cattatgtggagcaacttcgtgatg

SEQ ID NO: 74418 - DNA, 25 bp, Probe Sequence
attatgtggagcaacttcgtgatgt

SEQ ID NO: 74419 - DNA, 25 bp, Probe Sequence
tcattatgtggagcaacttcgtgat

SEQ ID NO: 74420 - DNA, 25 bp, Probe Sequence
aaagaaagggagggtaagtgtagtt

SEQ ID NO: 74421 - DNA, 25 bp, Probe Sequence
ggtaatgataggtcaacagagcagg

SEQ ID NO: 74422 - DNA, 25 bp, Probe Sequence
attacaagttgggttggtgatgaaa

SEQ ID NO: 74423 - DNA, 25 bp, Probe Sequence
aagaaagggagggtaagtgtagttc

SEQ ID NO: 74424 - DNA, 25 bp, Probe Sequence
aaagggagggtaagtgtagttcaag

SEQ ID NO: 74425 - DNA, 25 bp, Probe Sequence
gattacaagttgggttggtgatgaa

SEQ ID NO: 74426 - DNA, 25 bp, Probe Sequence
aagattacaagttgggttggtgatg

SEQ ID NO: 74427 - DNA, 25 bp, Probe Sequence
caagattacaagttgggttggtgat

SEQ ID NO: 74428 - DNA, 25 bp, Probe Sequence
ttacaagttgggttggtgatgaaag

SEQ ID NO: 74429 - DNA, 25 bp, Probe Sequence
ttatgtggagcaacttcgtgatgtg

SEQ ID NO: 74430 - DNA, 25 bp, Probe Sequence
gaaagggagggtaagtgtagttcaa

SEQ ID NO: 74431 - DNA, 25 bp, Probe Sequence
ctcattatgtggagcaacttcgtga

SEQ ID NO: 74432 - DNA, 25 bp, Probe Sequence
gtaatgataggtcaacagagcaggc

SEQ ID NO: 74433 - DNA, 25 bp, Probe Sequence
agattacaagttgggttggtgatga

SEQ ID NO: 74434 - DNA, 25 bp, Probe Sequence
ccagggtaatgataggtcaacagag

SEQ ID NO: 74435 - DNA, 25 bp, Probe Sequence
ggagggtaagtgtagttcaagcaaa

SEQ ID NO: 74436 - DNA, 25 bp, Probe Sequence
agaaagggagggtaagtgtagttca

SEQ ID NO: 74437 - DNA, 25 bp, Probe Sequence
aaatgagctgagaaccttctttacc

SEQ ID NO: 74438 - DNA, 25 bp, Probe Sequence
gggtaatgataggtcaacagagcag

SEQ ID NO: 74439 - DNA, 25 bp, Probe Sequence
cagggtaatgataggtcaacagagc

SEQ ID NO: 74440 - DNA, 25 bp, Probe Sequence
accttctttacccaagattacaagt

SEQ ID NO: 74441 - DNA, 25 bp, Probe Sequence
atataagaaggagccacagagtaga

SEQ ID NO: 74442 - DNA, 25 bp, Probe Sequence
tataagaaggagccacagagtagag

SEQ ID NO: 74443 - DNA, 25 bp, Probe Sequence
aatataagaaggagccacagagtag

SEQ ID NO: 74444 - DNA, 25 bp, Probe Sequence
agtagagtagtgagtctccaatacc

SEQ ID NO: 74445 - DNA, 25 bp, Probe Sequence
taagaaggagccacagagtagagta

SEQ ID NO: 74446 - DNA, 25 bp, Probe Sequence
cagagtagagtagtgagtctccaat

SEQ ID NO: 74447 - DNA, 25 bp, Probe Sequence
gagtagagtagtgagtctccaatac

SEQ ID NO: 74448 - DNA, 25 bp, Probe Sequence
agagtagagtagtgagtctccaata

SEQ ID NO: 74449 - DNA, 25 bp, Probe Sequence
ataagaaggagccacagagtagagt

SEQ ID NO: 74450 - DNA, 25 bp, Probe Sequence
gtagagtagtgagtctccaataccg

SEQ ID NO: 74451 - DNA, 25 bp, Probe Sequence
acagagtagagtagtgagtctccaa

SEQ ID NO: 74452 - DNA, 25 bp, Probe Sequence
aagaaggagccacagagtagagtag

SEQ ID NO: 74453 - DNA, 25 bp, Probe Sequence
aaatataagaaggagccacagagta

SEQ ID NO: 74454 - DNA, 25 bp, Probe Sequence
ttaataaagacaaggttccaggcag

SEQ ID NO: 74455 - DNA, 25 bp, Probe Sequence
agttaataaagacaaggttccaggc

SEQ ID NO: 74456 - DNA, 25 bp, Probe Sequence
aagttaataaagacaaggttccagg

SEQ ID NO: 74457 - DNA, 25 bp, Probe Sequence
gttaataaagacaaggttccaggca

SEQ ID NO: 74458 - DNA, 25 bp, Probe Sequence
cacagagtagagtagtgagtctcca

SEQ ID NO: 74459 - DNA, 25 bp, Probe Sequence
ctttactgctttagtttcttctccg

SEQ ID NO: 74460 - DNA, 25 bp, Probe Sequence
gctttactgctttagtttcttctcc

SEQ ID NO: 74461 - DNA, 25 bp, Probe Sequence
tactgctttagtttcttctccgtaa

SEQ ID NO: 74462 - DNA, 25 bp, Probe Sequence
ttactgctttagtttcttctccgta

SEQ ID NO: 74463 - DNA, 25 bp, Probe Sequence
actgctttagtttcttctccgtaaa

SEQ ID NO: 74464 - DNA, 25 bp, Probe Sequence
tttactgctttagtttcttctccgt

SEQ ID NO: 74465 - DNA, 25 bp, Probe Sequence
gagccattgtagatcatagaaggtc

SEQ ID NO: 74466 - DNA, 25 bp, Probe Sequence
gccattgtagatcatagaaggtctt

SEQ ID NO: 74467 - DNA, 25 bp, Probe Sequence
ttagttcagagttgtgtgtcaggaa

SEQ ID NO: 74468 - DNA, 25 bp, Probe Sequence
agccattgtagatcatagaaggtct

SEQ ID NO: 74469 - DNA, 25 bp, Probe Sequence
cttagttcagagttgtgtgtcagga

SEQ ID NO: 74470 - DNA, 25 bp, Probe Sequence
tgagccattgtagatcatagaaggt

SEQ ID NO: 74471 - DNA, 25 bp, Probe Sequence
cattgtagatcatagaaggtcttcc

SEQ ID NO: 74472 - DNA, 25 bp, Probe Sequence
ccattgtagatcatagaaggtcttc

SEQ ID NO: 74473 - DNA, 25 bp, Probe Sequence
attgtagatcatagaaggtcttcct

SEQ ID NO: 74474 - DNA, 25 bp, Probe Sequence
cttccaggatgagccattgtagatc

SEQ ID NO: 74475 - DNA, 25 bp, Probe Sequence
ttcagagttgtgtgtcaggaaattc

SEQ ID NO: 74476 - DNA, 25 bp, Probe Sequence
tcttccaggatgagccattgtagat

SEQ ID NO: 74477 - DNA, 25 bp, Probe Sequence
atgagccattgtagatcatagaagg

SEQ ID NO: 74478 - DNA, 25 bp, Probe Sequence
ggatgagccattgtagatcatagaa

SEQ ID NO: 74479 - DNA, 25 bp, Probe Sequence
gttcagagttgtgtgtcaggaaatt

SEQ ID NO: 74480 - DNA, 25 bp, Probe Sequence
aggatgagccattgtagatcataga

SEQ ID NO: 74481 - DNA, 25 bp, Probe Sequence
caggatgagccattgtagatcatag

SEQ ID NO: 74482 - DNA, 25 bp, Probe Sequence
tagttcagagttgtgtgtcaggaaa

SEQ ID NO: 74483 - DNA, 25 bp, Probe Sequence
gccttagttcagagttgtgtgtcag

SEQ ID NO: 74484 - DNA, 25 bp, Probe Sequence
gatgagccattgtagatcatagaag

SEQ ID NO: 74485 - DNA, 25 bp, Probe Sequence
agttcagagttgtgtgtcaggaaat

SEQ ID NO: 74486 - DNA, 25 bp, Probe Sequence
ccttagttcagagttgtgtgtcagg

SEQ ID NO: 74487 - DNA, 25 bp, Probe Sequence
ccaggatgagccattgtagatcata

SEQ ID NO: 74488 - DNA, 25 bp, Probe Sequence
ttccaggatgagccattgtagatca

SEQ ID NO: 74489 - DNA, 25 bp, Probe Sequence
acatagagccatattgactacttgc

SEQ ID NO: 74490 - DNA, 25 bp, Probe Sequence
catagagccatattgactacttgcc

SEQ ID NO: 74491 - DNA, 25 bp, Probe Sequence
atagagccatattgactacttgcca

SEQ ID NO: 74492 - DNA, 25 bp, Probe Sequence
aacatagagccatattgactacttg

SEQ ID NO: 74493 - DNA, 25 bp, Probe Sequence
tagagccatattgactacttgccaa

SEQ ID NO: 74494 - DNA, 25 bp, Probe Sequence
tgaagttcagtgctagtagtaggaa

SEQ ID NO: 74495 - DNA, 25 bp, Probe Sequence
atattgactacttgccaagacacaa

SEQ ID NO: 74496 - DNA, 25 bp, Probe Sequence
catattgactacttgccaagacaca

SEQ ID NO: 74497 - DNA, 25 bp, Probe Sequence
ccatattgactacttgccaagacac

SEQ ID NO: 74498 - DNA, 25 bp, Probe Sequence
gctctgtttatgggtattgtgtttc

SEQ ID NO: 74499 - DNA, 25 bp, Probe Sequence
ataggctttactttagttcgctgta

SEQ ID NO: 74500 - DNA, 25 bp, Probe Sequence
taggctttactttagttcgctgtag

SEQ ID NO: 74501 - DNA, 25 bp, Probe Sequence
tcttactctgttaatacacatcagg

SEQ ID NO: 74502 - DNA, 25 bp, Probe Sequence
ggatattcacctgggactgttaatt

SEQ ID NO: 74503 - DNA, 25 bp, Probe Sequence
ataatctcttcttcccaagcatagg

SEQ ID NO: 74504 - DNA, 25 bp, Probe Sequence
ctctgtttatgggtattgtgtttct

SEQ ID NO: 74505 - DNA, 25 bp, Probe Sequence
acctgggactgttaatttgagattc

SEQ ID NO: 74506 - DNA, 25 bp, Probe Sequence
cacctgggactgttaatttgagatt

SEQ ID NO: 74507 - DNA, 25 bp, Probe Sequence
agtgctagtagtaggaaagggatat

SEQ ID NO: 74508 - DNA, 25 bp, Probe Sequence
cataggctttactttagttcgctgt

SEQ ID NO: 74509 - DNA, 25 bp, Probe Sequence
atattcacctgggactgttaatttg

SEQ ID NO: 74510 - DNA, 25 bp, Probe Sequence
ttaagttgtctttatttgtgaggca

SEQ ID NO: 74511 - DNA, 25 bp, Probe Sequence
cagtgctagtagtaggaaagggata

SEQ ID NO: 74512 - DNA, 25 bp, Probe Sequence
tctgtttatgggtattgtgtttctt

SEQ ID NO: 74513 - DNA, 25 bp, Probe Sequence
tgtatctctagtcagttcagtagga

SEQ ID NO: 74514 - DNA, 25 bp, Probe Sequence
ctctggtctgttgtatctctagtca

SEQ ID NO: 74515 - DNA, 25 bp, Probe Sequence
ttgtatctctagtcagttcagtagg

SEQ ID NO: 74516 - DNA, 25 bp, Probe Sequence
tatctctagtcagttcagtaggagc

SEQ ID NO: 74517 - DNA, 25 bp, Probe Sequence
tgttgtatctctagtcagttcagta

SEQ ID NO: 74518 - DNA, 25 bp, Probe Sequence
gtatctctagtcagttcagtaggag

SEQ ID NO: 74519 - DNA, 25 bp, Probe Sequence
ggtctgttgtatctctagtcagttc

SEQ ID NO: 74520 - DNA, 25 bp, Probe Sequence
accttagaatctcaggaacatcttc

SEQ ID NO: 74521 - DNA, 25 bp, Probe Sequence
gtctgttgtatctctagtcagttca

SEQ ID NO: 74522 - DNA, 25 bp, Probe Sequence
ctgttgtatctctagtcagttcagt

SEQ ID NO: 74523 - DNA, 25 bp, Probe Sequence
gctctggtctgttgtatctctagtc

SEQ ID NO: 74524 - DNA, 25 bp, Probe Sequence
tggtctgttgtatctctagtcagtt

SEQ ID NO: 74525 - DNA, 25 bp, Probe Sequence
aaccttagaatctcaggaacatctt

SEQ ID NO: 74526 - DNA, 25 bp, Probe Sequence
tctgttgtatctctagtcagttcag

SEQ ID NO: 74527 - DNA, 25 bp, Probe Sequence
ctctagtcagttcagtaggagcatt

SEQ ID NO: 74528 - DNA, 25 bp, Probe Sequence
gttgtatctctagtcagttcagtag

SEQ ID NO: 74529 - DNA, 25 bp, Probe Sequence
tctggtctgttgtatctctagtcag

SEQ ID NO: 74530 - DNA, 25 bp, Probe Sequence
ctggtctgttgtatctctagtcagt

SEQ ID NO: 74531 - DNA, 25 bp, Probe Sequence
taaccttagaatctcaggaacatct

SEQ ID NO: 74532 - DNA, 25 bp, Probe Sequence
tctctagtcagttcagtaggagcat

SEQ ID NO: 74533 - DNA, 25 bp, Probe Sequence
atctctagtcagttcagtaggagca

SEQ ID NO: 74534 - DNA, 25 bp, Probe Sequence
aacatcttctgacattcccaacttc

SEQ ID NO: 74535 - DNA, 25 bp, Probe Sequence
ataaccttagaatctcaggaacatc

SEQ ID NO: 74536 - DNA, 25 bp, Probe Sequence
gaacatcttctgacattcccaactt

SEQ ID NO: 74537 - DNA, 25 bp, Probe Sequence
cagttatgattgtgaagtgtgctat

SEQ ID NO: 74538 - DNA, 25 bp, Probe Sequence
agttatgattgtgaagtgtgctatt

SEQ ID NO: 74539 - DNA, 25 bp, Probe Sequence
ttacagttatgattgtgaagtgtgc

SEQ ID NO: 74540 - DNA, 25 bp, Probe Sequence
acagttatgattgtgaagtgtgcta

SEQ ID NO: 74541 - DNA, 25 bp, Probe Sequence
tacagttatgattgtgaagtgtgct

SEQ ID NO: 74542 - DNA, 25 bp, Probe Sequence
atgttaattgccttcctaatctagt

SEQ ID NO: 74543 - DNA, 25 bp, Probe Sequence
ggattacagttatgattgtgaagtg

SEQ ID NO: 74544 - DNA, 25 bp, Probe Sequence
aggattacagttatgattgtgaagt

SEQ ID NO: 74545 - DNA, 25 bp, Probe Sequence
taattgccttcctaatctagtatcc

SEQ ID NO: 74546 - DNA, 25 bp, Probe Sequence
gatgttaattgccttcctaatctag

SEQ ID NO: 74547 - DNA, 25 bp, Probe Sequence
attacagttatgattgtgaagtgtg

SEQ ID NO: 74548 - DNA, 25 bp, Probe Sequence
tgttaattgccttcctaatctagta

SEQ ID NO: 74549 - DNA, 25 bp, Probe Sequence
gtattgtcacttaatcccaaagcaa

SEQ ID NO: 74550 - DNA, 25 bp, Probe Sequence
ctgtattgtcacttaatcccaaagc

SEQ ID NO: 74551 - DNA, 25 bp, Probe Sequence
gccttcctaatctagtatcccattt

SEQ ID NO: 74552 - DNA, 25 bp, Probe Sequence
aattgccttcctaatctagtatccc

SEQ ID NO: 74553 - DNA, 25 bp, Probe Sequence
tgccttcctaatctagtatcccatt

SEQ ID NO: 74554 - DNA, 25 bp, Probe Sequence
ttgccttcctaatctagtatcccat

SEQ ID NO: 74555 - DNA, 25 bp, Probe Sequence
attgccttcctaatctagtatccca

SEQ ID NO: 74556 - DNA, 25 bp, Probe Sequence
cataagatgttaattgccttcctaa

SEQ ID NO: 74557 - DNA, 25 bp, Probe Sequence
tgtattgtcacttaatcccaaagca

SEQ ID NO: 74558 - DNA, 25 bp, Probe Sequence
acttaatcccaaagcaatctgagta

SEQ ID NO: 74559 - DNA, 25 bp, Probe Sequence
gattacagttatgattgtgaagtgt

SEQ ID NO: 74560 - DNA, 25 bp, Probe Sequence
ttgtcacttaatcccaaagcaatct

SEQ ID NO: 74561 - DNA, 25 bp, Probe Sequence
aagacagttactcagaacagcatct

SEQ ID NO: 74562 - DNA, 25 bp, Probe Sequence
caagacagttactcagaacagcatc

SEQ ID NO: 74563 - DNA, 25 bp, Probe Sequence
acaagacagttactcagaacagcat

SEQ ID NO: 74564 - DNA, 25 bp, Probe Sequence
aacaagacagttactcagaacagca

SEQ ID NO: 74565 - DNA, 25 bp, Probe Sequence
ggtaaccacttgttatatgttagca

SEQ ID NO: 74566 - DNA, 25 bp, Probe Sequence
agttactcacatctttcagccttag

SEQ ID NO: 74567 - DNA, 25 bp, Probe Sequence
aagttactcacatctttcagcctta

SEQ ID NO: 74568 - DNA, 25 bp, Probe Sequence
gaaacaagacagttactcagaacag

SEQ ID NO: 74569 - DNA, 25 bp, Probe Sequence
tctgttgaatgaaatgttctgatgt

SEQ ID NO: 74570 - DNA, 25 bp, Probe Sequence
gatgataccaagattcccaaatgta

SEQ ID NO: 74571 - DNA, 25 bp, Probe Sequence
gttactcacatctttcagccttagg

SEQ ID NO: 74572 - DNA, 25 bp, Probe Sequence
tgaaacaagacagttactcagaaca

SEQ ID NO: 74573 - DNA, 25 bp, Probe Sequence
tgttgaatgaaatgttctgatgttg

SEQ ID NO: 74574 - DNA, 25 bp, Probe Sequence
caagttactcacatctttcagcctt

SEQ ID NO: 74575 - DNA, 25 bp, Probe Sequence
ttcaggcaagttactcacatctttc

SEQ ID NO: 74576 - DNA, 25 bp, Probe Sequence
cttcaggcaagttactcacatcttt

SEQ ID NO: 74577 - DNA, 25 bp, Probe Sequence
tgataccaagattcccaaatgtaaa

SEQ ID NO: 74578 - DNA, 25 bp, Probe Sequence
atgaaacaagacagttactcagaac

SEQ ID NO: 74579 - DNA, 25 bp, Probe Sequence
gttgaatgaaatgttctgatgttga

SEQ ID NO: 74580 - DNA, 25 bp, Probe Sequence
ctgttgaatgaaatgttctgatgtt

SEQ ID NO: 74581 - DNA, 25 bp, Probe Sequence
tactcacatctttcagccttaggtt

SEQ ID NO: 74582 - DNA, 25 bp, Probe Sequence
ttactcacatctttcagccttaggt

SEQ ID NO: 74583 - DNA, 25 bp, Probe Sequence
tgacacatggtaaccacttgttata

SEQ ID NO: 74584 - DNA, 25 bp, Probe Sequence
atgataccaagattcccaaatgtaa

SEQ ID NO: 74585 - DNA, 25 bp, Probe Sequence
tggtaggagatatagtgacagaaca

SEQ ID NO: 74586 - DNA, 25 bp, Probe Sequence
ggagatatagtgacagaacaacagt

SEQ ID NO: 74587 - DNA, 25 bp, Probe Sequence
gtggtaggagatatagtgacagaac

SEQ ID NO: 74588 - DNA, 25 bp, Probe Sequence
agtggtaggagatatagtgacagaa

SEQ ID NO: 74589 - DNA, 25 bp, Probe Sequence
aggagatatagtgacagaacaacag

SEQ ID NO: 74590 - DNA, 25 bp, Probe Sequence
ggaagtgattaggttaaggatgttg

SEQ ID NO: 74591 - DNA, 25 bp, Probe Sequence
aggaagtgattaggttaaggatgtt

SEQ ID NO: 74592 - DNA, 25 bp, Probe Sequence
aaggaagtgattaggttaaggatgt

SEQ ID NO: 74593 - DNA, 25 bp, Probe Sequence
ggtaggagatatagtgacagaacaa

SEQ ID NO: 74594 - DNA, 25 bp, Probe Sequence
tagtggtaggagatatagtgacaga

SEQ ID NO: 74595 - DNA, 25 bp, Probe Sequence
caaggaagtgattaggttaaggatg

SEQ ID NO: 74596 - DNA, 25 bp, Probe Sequence
gttagtggtaggagatatagtgaca

SEQ ID NO: 74597 - DNA, 25 bp, Probe Sequence
taggagatatagtgacagaacaaca

SEQ ID NO: 74598 - DNA, 25 bp, Probe Sequence
gaagtgattaggttaaggatgttga

SEQ ID NO: 74599 - DNA, 25 bp, Probe Sequence
ttagtggtaggagatatagtgacag

SEQ ID NO: 74600 - DNA, 25 bp, Probe Sequence
agttagtggtaggagatatagtgac

SEQ ID NO: 74601 - DNA, 25 bp, Probe Sequence
ttcaaggaagtgattaggttaagga

SEQ ID NO: 74602 - DNA, 25 bp, Probe Sequence
ccttggaacttgtgaatatgtacct

SEQ ID NO: 74603 - DNA, 25 bp, Probe Sequence
tccttggaacttgtgaatatgtacc

SEQ ID NO: 74604 - DNA, 25 bp, Probe Sequence
gtaggagatatagtgacagaacaac

SEQ ID NO: 74605 - DNA, 25 bp, Probe Sequence
tcaaggaagtgattaggttaaggat

SEQ ID NO: 74606 - DNA, 25 bp, Probe Sequence
tcatccttggaacttgtgaatatgt

SEQ ID NO: 74607 - DNA, 25 bp, Probe Sequence
ctcatccttggaacttgtgaatatg

SEQ ID NO: 74608 - DNA, 25 bp, Probe Sequence
cctcatccttggaacttgtgaatat

SEQ ID NO: 74609 - DNA, 25 bp, Probe Sequence
tgtccatattgatgttgtagtgagt

SEQ ID NO: 74610 - DNA, 25 bp, Probe Sequence
tccatattgatgttgtagtgagtga

SEQ ID NO: 74611 - DNA, 25 bp, Probe Sequence
gtccatattgatgttgtagtgagtg

SEQ ID NO: 74612 - DNA, 25 bp, Probe Sequence
cgttctatgtccatattgatgttgt

SEQ ID NO: 74613 - DNA, 25 bp, Probe Sequence
ccatattgatgttgtagtgagtgat

SEQ ID NO: 74614 - DNA, 25 bp, Probe Sequence
atgtccatattgatgttgtagtgag

SEQ ID NO: 74615 - DNA, 25 bp, Probe Sequence
ttaacagaggactagaggcataatt

SEQ ID NO: 74616 - DNA, 25 bp, Probe Sequence
tcgttctatgtccatattgatgttg

SEQ ID NO: 74617 - DNA, 25 bp, Probe Sequence
tattgatgttgtagtgagtgatgtt

SEQ ID NO: 74618 - DNA, 25 bp, Probe Sequence
atattgatgttgtagtgagtgatgt

SEQ ID NO: 74619 - DNA, 25 bp, Probe Sequence
ttcgttctatgtccatattgatgtt

SEQ ID NO: 74620 - DNA, 25 bp, Probe Sequence
catattgatgttgtagtgagtgatg

SEQ ID NO: 74621 - DNA, 25 bp, Probe Sequence
gcagtgaacttcattataacttggt

SEQ ID NO: 74622 - DNA, 25 bp, Probe Sequence
agcagtgaacttcattataacttgg

SEQ ID NO: 74623 - DNA, 25 bp, Probe Sequence
acagcagtgaacttcattataactt

SEQ ID NO: 74624 - DNA, 25 bp, Probe Sequence
ttgatgttgtagtgagtgatgtttg

SEQ ID NO: 74625 - DNA, 25 bp, Probe Sequence
tatgtccatattgatgttgtagtga

SEQ ID NO: 74626 - DNA, 25 bp, Probe Sequence
cagcagtgaacttcattataacttg

SEQ ID NO: 74627 - DNA, 25 bp, Probe Sequence
cacagcagtgaacttcattataact

SEQ ID NO: 74628 - DNA, 25 bp, Probe Sequence
ctatgtccatattgatgttgtagtg

SEQ ID NO: 74629 - DNA, 25 bp, Probe Sequence
gagtgatgtttgctgtgatttgaaa

SEQ ID NO: 74630 - DNA, 25 bp, Probe Sequence
agtgatgtttgctgtgatttgaaat

SEQ ID NO: 74631 - DNA, 25 bp, Probe Sequence
tagtgagtgatgtttgctgtgattt

SEQ ID NO: 74632 - DNA, 25 bp, Probe Sequence
ttgcccttatgttggaatacttcta

SEQ ID NO: 74633 - DNA, 25 bp, Probe Sequence
tcagttagtgacagatgttgttgat

SEQ ID NO: 74634 - DNA, 25 bp, Probe Sequence
ctcagttagtgacagatgttgttga

SEQ ID NO: 74635 - DNA, 25 bp, Probe Sequence
tctcagttagtgacagatgttgttg

SEQ ID NO: 74636 - DNA, 25 bp, Probe Sequence
cagttagtgacagatgttgttgatc

SEQ ID NO: 74637 - DNA, 25 bp, Probe Sequence
gataggaacttcagagcttattgga

SEQ ID NO: 74638 - DNA, 25 bp, Probe Sequence
agataggaacttcagagcttattgg

SEQ ID NO: 74639 - DNA, 25 bp, Probe Sequence
ttaacagataggaacttcagagctt

SEQ ID NO: 74640 - DNA, 25 bp, Probe Sequence
acagataggaacttcagagcttatt

SEQ ID NO: 74641 - DNA, 25 bp, Probe Sequence
aacagataggaacttcagagcttat

SEQ ID NO: 74642 - DNA, 25 bp, Probe Sequence
cagataggaacttcagagcttattg

SEQ ID NO: 74643 - DNA, 25 bp, Probe Sequence
ataggaacttcagagcttattggaa

SEQ ID NO: 74644 - DNA, 25 bp, Probe Sequence
taacagataggaacttcagagctta

SEQ ID NO: 74645 - DNA, 25 bp, Probe Sequence
atctcagttagtgacagatgttgtt

SEQ ID NO: 74646 - DNA, 25 bp, Probe Sequence
tatctcagttagtgacagatgttgt

SEQ ID NO: 74647 - DNA, 25 bp, Probe Sequence
atttaacagataggaacttcagagc

SEQ ID NO: 74648 - DNA, 25 bp, Probe Sequence
tggaaatatctcagttagtgacaga

SEQ ID NO: 74649 - DNA, 25 bp, Probe Sequence
agtgatgtgggaactatttaacaga

SEQ ID NO: 74650 - DNA, 25 bp, Probe Sequence
atatctcagttagtgacagatgttg

SEQ ID NO: 74651 - DNA, 25 bp, Probe Sequence
tgtgggaactatttaacagatagga

SEQ ID NO: 74652 - DNA, 25 bp, Probe Sequence
gtgatgtgggaactatttaacagat

SEQ ID NO: 74653 - DNA, 25 bp, Probe Sequence
ttggaaatatctcagttagtgacag

SEQ ID NO: 74654 - DNA, 25 bp, Probe Sequence
tttaacagataggaacttcagagct

SEQ ID NO: 74655 - DNA, 25 bp, Probe Sequence
aggaacttcagagcttattggaaat

SEQ ID NO: 74656 - DNA, 25 bp, Probe Sequence
taggaacttcagagcttattggaaa

SEQ ID NO: 74657 - DNA, 25 bp, Probe Sequence
cttatgcctctaatcccaacacttt

SEQ ID NO: 74658 - DNA, 25 bp, Probe Sequence
aaacaaacaagtaattctagggcag

SEQ ID NO: 74659 - DNA, 25 bp, Probe Sequence
cttagaaggtcacactcacagttcc

SEQ ID NO: 74660 - DNA, 25 bp, Probe Sequence
aacaaacaagtaattctagggcagt

SEQ ID NO: 74661 - DNA, 25 bp, Probe Sequence
atgatgaaacaccattgctactgaa

SEQ ID NO: 74662 - DNA, 25 bp, Probe Sequence
tcttatgcctctaatcccaacactt

SEQ ID NO: 74663 - DNA, 25 bp, Probe Sequence
tgatgaaacaccattgctactgaaa

SEQ ID NO: 74664 - DNA, 25 bp, Probe Sequence
ttatgcctctaatcccaacactttg

SEQ ID NO: 74665 - DNA, 25 bp, Probe Sequence
acaaacaagtaattctagggcagtt

SEQ ID NO: 74666 - DNA, 25 bp, Probe Sequence
cccatcgtagaatacaaactatgaa

SEQ ID NO: 74667 - DNA, 25 bp, Probe Sequence
atacaaactatgaaatgtgaccacg

SEQ ID NO: 74668 - DNA, 25 bp, Probe Sequence
gtcttatgcctctaatcccaacact

SEQ ID NO: 74669 - DNA, 25 bp, Probe Sequence
ttagaaggtcacactcacagttcca

SEQ ID NO: 74670 - DNA, 25 bp, Probe Sequence
aacatgatgaaacaccattgctact

SEQ ID NO: 74671 - DNA, 25 bp, Probe Sequence
caacatgatgaaacaccattgctac

SEQ ID NO: 74672 - DNA, 25 bp, Probe Sequence
acaagtaattctagggcagtttaca

SEQ ID NO: 74673 - DNA, 25 bp, Probe Sequence
catgatgaaacaccattgctactga

SEQ ID NO: 74674 - DNA, 25 bp, Probe Sequence
aacaagtaattctagggcagtttac

SEQ ID NO: 74675 - DNA, 25 bp, Probe Sequence
acatgatgaaacaccattgctactg

SEQ ID NO: 74676 - DNA, 25 bp, Probe Sequence
tagaaggtcacactcacagttccag

SEQ ID NO: 74677 - DNA, 25 bp, Probe Sequence
ccttagaaggtcacactcacagttc

SEQ ID NO: 74678 - DNA, 25 bp, Probe Sequence
caagtaattctagggcagtttacat

SEQ ID NO: 74679 - DNA, 25 bp, Probe Sequence
aatacaaactatgaaatgtgaccac

SEQ ID NO: 74680 - DNA, 25 bp, Probe Sequence
ccaacatgatgaaacaccattgcta

SEQ ID NO: 74681 - DNA, 25 bp, Probe Sequence
gtaacaaacatttctgggtgacaaa

SEQ ID NO: 74682 - DNA, 25 bp, Probe Sequence
accaggaatctttatgaaatgtgtt

SEQ ID NO: 74683 - DNA, 25 bp, Probe Sequence
ctttcaggtcattcccaagtaaatt

SEQ ID NO: 74684 - DNA, 25 bp, Probe Sequence
ttgatagttcccgtaacacttgtaa

SEQ ID NO: 74685 - DNA, 25 bp, Probe Sequence
gatagttcccgtaacacttgtaaca

SEQ ID NO: 74686 - DNA, 25 bp, Probe Sequence
tgatagttcccgtaacacttgtaac

SEQ ID NO: 74687 - DNA, 25 bp, Probe Sequence
gttgatagttcccgtaacacttgta

SEQ ID NO: 74688 - DNA, 25 bp, Probe Sequence
taccaggaatctttatgaaatgtgt

SEQ ID NO: 74689 - DNA, 25 bp, Probe Sequence
gaattacaggagcgaggaaacattt

SEQ ID NO: 74690 - DNA, 25 bp, Probe Sequence
ccaggaatctttatgaaatgtgttt

SEQ ID NO: 74691 - DNA, 25 bp, Probe Sequence
tgtaacaaacatttctgggtgacaa

SEQ ID NO: 74692 - DNA, 25 bp, Probe Sequence
tagttcccgtaacacttgtaacaaa

SEQ ID NO: 74693 - DNA, 25 bp, Probe Sequence
atagttcccgtaacacttgtaacaa

SEQ ID NO: 74694 - DNA, 25 bp, Probe Sequence
aataatttgcctttcaggtcattcc

SEQ ID NO: 74695 - DNA, 25 bp, Probe Sequence
ctaccaggaatctttatgaaatgtg

SEQ ID NO: 74696 - DNA, 25 bp, Probe Sequence
tctaccaggaatctttatgaaatgt

SEQ ID NO: 74697 - DNA, 25 bp, Probe Sequence
cctttcaggtcattcccaagtaaat

SEQ ID NO: 74698 - DNA, 25 bp, Probe Sequence
aacacttgtaacaaacatttctggg

SEQ ID NO: 74699 - DNA, 25 bp, Probe Sequence
cccgtaacacttgtaacaaacattt

SEQ ID NO: 74700 - DNA, 25 bp, Probe Sequence
agttgatagttcccgtaacacttgt

SEQ ID NO: 74701 - DNA, 25 bp, Probe Sequence
ccgtaacacttgtaacaaacatttc

SEQ ID NO: 74702 - DNA, 25 bp, Probe Sequence
ccagcatgtgtttcctcatcttaaa

SEQ ID NO: 74703 - DNA, 25 bp, Probe Sequence
cttgtaacaaacatttctgggtgac

SEQ ID NO: 74704 - DNA, 25 bp, Probe Sequence
aggaatctttatgaaatgtgtttgt

SEQ ID NO: 74705 - DNA, 25 bp, Probe Sequence
agaaaggtgtttgagaaatactgtt

SEQ ID NO: 74706 - DNA, 25 bp, Probe Sequence
tagaaaggtgtttgagaaatactgt

SEQ ID NO: 74707 - DNA, 25 bp, Probe Sequence
gaaaggtgtttgagaaatactgtta

SEQ ID NO: 74708 - DNA, 25 bp, Probe Sequence
cctacatagaaaggtgtttgagaaa

SEQ ID NO: 74709 - DNA, 25 bp, Probe Sequence
aaaggtgtttgagaaatactgttaa

SEQ ID NO: 74710 - DNA, 25 bp, Probe Sequence
atagaaaggtgtttgagaaatactg

SEQ ID NO: 74711 - DNA, 25 bp, Probe Sequence
catagaaaggtgtttgagaaatact

SEQ ID NO: 74712 - DNA, 25 bp, Probe Sequence
aaggtgtttgagaaatactgttaat

SEQ ID NO: 74713 - DNA, 25 bp, Probe Sequence
aggtgtttgagaaatactgttaatt

SEQ ID NO: 74714 - DNA, 25 bp, Probe Sequence
acatagaaaggtgtttgagaaatac

SEQ ID NO: 74715 - DNA, 25 bp, Probe Sequence
ctacatagaaaggtgtttgagaaat

SEQ ID NO: 74716 - DNA, 25 bp, Probe Sequence
atactgttaattaaacgagacgggt

SEQ ID NO: 74717 - DNA, 25 bp, Probe Sequence
aatactgttaattaaacgagacggg

SEQ ID NO: 74718 - DNA, 25 bp, Probe Sequence
tactgttaattaaacgagacgggtg

SEQ ID NO: 74719 - DNA, 25 bp, Probe Sequence
taattaaacgagacgggtgcatctg

SEQ ID NO: 74720 - DNA, 25 bp, Probe Sequence
tacatagaaaggtgtttgagaaata

SEQ ID NO: 74721 - DNA, 25 bp, Probe Sequence
aaatactgttaattaaacgagacgg

SEQ ID NO: 74722 - DNA, 25 bp, Probe Sequence
ttaattaaacgagacgggtgcatct

SEQ ID NO: 74723 - DNA, 25 bp, Probe Sequence
gttaattaaacgagacgggtgcatc

SEQ ID NO: 74724 - DNA, 25 bp, Probe Sequence
ggtgtttgagaaatactgttaatta

SEQ ID NO: 74725 - DNA, 25 bp, Probe Sequence
tgttaattaaacgagacgggtgcat

SEQ ID NO: 74726 - DNA, 25 bp, Probe Sequence
gattatgaaatgcacgacaccctgg

SEQ ID NO: 74727 - DNA, 25 bp, Probe Sequence
ggattatgaaatgcacgacaccctg

SEQ ID NO: 74728 - DNA, 25 bp, Probe Sequence
acctacatagaaaggtgtttgagaa

SEQ ID NO: 74729 - DNA, 25 bp, Probe Sequence
gtattaacttgggacctgaatgaaa

SEQ ID NO: 74730 - DNA, 25 bp, Probe Sequence
gatgaccattagaaattagggcagg

SEQ ID NO: 74731 - DNA, 25 bp, Probe Sequence
tattaacttgggacctgaatgaaag

SEQ ID NO: 74732 - DNA, 25 bp, Probe Sequence
cgatgaccattagaaattagggcag

SEQ ID NO: 74733 - DNA, 25 bp, Probe Sequence
atctccgttaaggaccttatgttac

SEQ ID NO: 74734 - DNA, 25 bp, Probe Sequence
gttaaggaccttatgttaccgacac

SEQ ID NO: 74735 - DNA, 25 bp, Probe Sequence
gatctccgttaaggaccttatgtta

SEQ ID NO: 74736 - DNA, 25 bp, Probe Sequence
tgttgtgttcaaatgttctgtactt

SEQ ID NO: 74737 - DNA, 25 bp, Probe Sequence
ttgttgtgttcaaatgttctgtact

SEQ ID NO: 74738 - DNA, 25 bp, Probe Sequence
ctgaatgaaagggaatccaaggttc

SEQ ID NO: 74739 - DNA, 25 bp, Probe Sequence
tctccgttaaggaccttatgttacc

SEQ ID NO: 74740 - DNA, 25 bp, Probe Sequence
gttgtgttcaaatgttctgtacttt

SEQ ID NO: 74741 - DNA, 25 bp, Probe Sequence
attaacttgggacctgaatgaaagg

SEQ ID NO: 74742 - DNA, 25 bp, Probe Sequence
ttaaggaccttatgttaccgacacc

SEQ ID NO: 74743 - DNA, 25 bp, Probe Sequence
atgaccattagaaattagggcaggg

SEQ ID NO: 74744 - DNA, 25 bp, Probe Sequence
cttatgttaccgacaccacctgttc

SEQ ID NO: 74745 - DNA, 25 bp, Probe Sequence
ggtattaacttgggacctgaatgaa

SEQ ID NO: 74746 - DNA, 25 bp, Probe Sequence
cgttaaggaccttatgttaccgaca

SEQ ID NO: 74747 - DNA, 25 bp, Probe Sequence
cgatctccgttaaggaccttatgtt

SEQ ID NO: 74748 - DNA, 25 bp, Probe Sequence
tcgatgaccattagaaattagggca

SEQ ID NO: 74749 - DNA, 25 bp, Probe Sequence
tgtcgatgaccattagaaattaggg

SEQ ID NO: 74750 - DNA, 25 bp, Probe Sequence
taaggaccttatgttaccgacacca

SEQ ID NO: 74751 - DNA, 25 bp, Probe Sequence
ccgttaaggaccttatgttaccgac

SEQ ID NO: 74752 - DNA, 25 bp, Probe Sequence
ctccgttaaggaccttatgttaccg

SEQ ID NO: 74753 - DNA, 25 bp, Probe Sequence
atctcagcagcctccttctcaaatt

SEQ ID NO: 74754 - DNA, 25 bp, Probe Sequence
ttttcaatggttcttttgtcgatgc

SEQ ID NO: 74755 - DNA, 25 bp, Probe Sequence
catctcagcagcctccttctcaaat

SEQ ID NO: 74756 - DNA, 25 bp, Probe Sequence
ccaccgcatttatagatcagatggc

SEQ ID NO: 74757 - DNA, 25 bp, Probe Sequence
gccaccgcatttatagatcagatgg

SEQ ID NO: 74758 - DNA, 25 bp, Probe Sequence
tgccaccgcatttatagatcagatg

SEQ ID NO: 74759 - DNA, 25 bp, Probe Sequence
tctcagcagcctccttctcaaattt

SEQ ID NO: 74760 - DNA, 25 bp, Probe Sequence
gaatctacgtgtccaatgacgacat

SEQ ID NO: 74761 - DNA, 25 bp, Probe Sequence
tttcaatggttcttttgtcgatgcc

SEQ ID NO: 74762 - DNA, 25 bp, Probe Sequence
caccgcatttatagatcagatggcc

SEQ ID NO: 74763 - DNA, 25 bp, Probe Sequence
aatctacgtgtccaatgacgacatg

SEQ ID NO: 74764 - DNA, 25 bp, Probe Sequence
ctcagcagcctccttctcaaatttt

SEQ ID NO: 74765 - DNA, 25 bp, Probe Sequence
atgccaccgcatttatagatcagat

SEQ ID NO: 74766 - DNA, 25 bp, Probe Sequence
gatgccaccgcatttatagatcaga

SEQ ID NO: 74767 - DNA, 25 bp, Probe Sequence
ttcaatggttcttttgtcgatgcca

SEQ ID NO: 74768 - DNA, 25 bp, Probe Sequence
atacttgaaggagccctttcccatc

SEQ ID NO: 74769 - DNA, 25 bp, Probe Sequence
catacttgaaggagccctttcccat

SEQ ID NO: 74770 - DNA, 25 bp, Probe Sequence
cgaatctacgtgtccaatgacgaca

SEQ ID NO: 74771 - DNA, 25 bp, Probe Sequence
tcaatggttcttttgtcgatgccac

SEQ ID NO: 74772 - DNA, 25 bp, Probe Sequence
cgatgccaccgcatttatagatcag

SEQ ID NO: 74773 - DNA, 25 bp, Probe Sequence
atctacgtgtccaatgacgacatgt

SEQ ID NO: 74774 - DNA, 25 bp, Probe Sequence
gtcgatgccaccgcatttatagatc

SEQ ID NO: 74775 - DNA, 25 bp, Probe Sequence
tttgtcgatgccaccgcatttatag

SEQ ID NO: 74776 - DNA, 25 bp, Probe Sequence
ctacgtgtccaatgacgacatgttg

SEQ ID NO: 74777 - DNA, 25 bp, Probe Sequence
aatatacggtaatcacatggcagag

SEQ ID NO: 74778 - DNA, 25 bp, Probe Sequence
atatacggtaatcacatggcagagg

SEQ ID NO: 74779 - DNA, 25 bp, Probe Sequence
gccattgacacagtagcagtagaat

SEQ ID NO: 74780 - DNA, 25 bp, Probe Sequence
acatacaaacaaataccagggaagg

SEQ ID NO: 74781 - DNA, 25 bp, Probe Sequence
tacatacaaacaaataccagggaag

SEQ ID NO: 74782 - DNA, 25 bp, Probe Sequence
gggcaattacatacaaacaaatacc

SEQ ID NO: 74783 - DNA, 25 bp, Probe Sequence
cattgacacagtagcagtagaatgt

SEQ ID NO: 74784 - DNA, 25 bp, Probe Sequence
catacaaacaaataccagggaaggg

SEQ ID NO: 74785 - DNA, 25 bp, Probe Sequence
atacaaacaaataccagggaaggga

SEQ ID NO: 74786 - DNA, 25 bp, Probe Sequence
ttacatacaaacaaataccagggaa

SEQ ID NO: 74787 - DNA, 25 bp, Probe Sequence
ccattgacacagtagcagtagaatg

SEQ ID NO: 74788 - DNA, 25 bp, Probe Sequence
ggcaattacatacaaacaaatacca

SEQ ID NO: 74789 - DNA, 25 bp, Probe Sequence
tatacggtaatcacatggcagagga

SEQ ID NO: 74790 - DNA, 25 bp, Probe Sequence
aaatatacggtaatcacatggcaga

SEQ ID NO: 74791 - DNA, 25 bp, Probe Sequence
attacatacaaacaaataccaggga

SEQ ID NO: 74792 - DNA, 25 bp, Probe Sequence
taaatatacggtaatcacatggcag

SEQ ID NO: 74793 - DNA, 25 bp, Probe Sequence
tacaaacaaataccagggaagggac

SEQ ID NO: 74794 - DNA, 25 bp, Probe Sequence
ataaatatacggtaatcacatggca

SEQ ID NO: 74795 - DNA, 25 bp, Probe Sequence
aattacatacaaacaaataccaggg

SEQ ID NO: 74796 - DNA, 25 bp, Probe Sequence
gcaattacatacaaacaaataccag

SEQ ID NO: 74797 - DNA, 25 bp, Probe Sequence
ctaattgtatgcttctgatacttca

SEQ ID NO: 74798 - DNA, 25 bp, Probe Sequence
actaattgtatgcttctgatacttc

SEQ ID NO: 74799 - DNA, 25 bp, Probe Sequence
gtctgagacacacataatattcatt

SEQ ID NO: 74800 - DNA, 25 bp, Probe Sequence
gtatgcttctgatacttcaggagaa

SEQ ID NO: 74801 - DNA, 25 bp, Probe Sequence
aggctgacttgtatgttatgtgaat

SEQ ID NO: 74802 - DNA, 25 bp, Probe Sequence
ggctgacttgtatgttatgtgaatg

SEQ ID NO: 74803 - DNA, 25 bp, Probe Sequence
gctgacttgtatgttatgtgaatgt

SEQ ID NO: 74804 - DNA, 25 bp, Probe Sequence
aaggctgacttgtatgttatgtgaa

SEQ ID NO: 74805 - DNA, 25 bp, Probe Sequence
gttaccaacaggacatctcacataa

SEQ ID NO: 74806 - DNA, 25 bp, Probe Sequence
agttaccaacaggacatctcacata

SEQ ID NO: 74807 - DNA, 25 bp, Probe Sequence
tagttaccaacaggacatctcacat

SEQ ID NO: 74808 - DNA, 25 bp, Probe Sequence
gttagttaccaacaggacatctcac

SEQ ID NO: 74809 - DNA, 25 bp, Probe Sequence
agttagttaccaacaggacatctca

SEQ ID NO: 74810 - DNA, 25 bp, Probe Sequence
tgagttagttaccaacaggacatct

SEQ ID NO: 74811 - DNA, 25 bp, Probe Sequence
ttagttaccaacaggacatctcaca

SEQ ID NO: 74812 - DNA, 25 bp, Probe Sequence
gagttagttaccaacaggacatctc

SEQ ID NO: 74813 - DNA, 25 bp, Probe Sequence
ctgagttagttaccaacaggacatc

SEQ ID NO: 74814 - DNA, 25 bp, Probe Sequence
actgagttagttaccaacaggacat

SEQ ID NO: 74815 - DNA, 25 bp, Probe Sequence
agtggtctgaattgaatggagtctg

SEQ ID NO: 74816 - DNA, 25 bp, Probe Sequence
aacaggacatctcacataaacatct

SEQ ID NO: 74817 - DNA, 25 bp, Probe Sequence
caacaggacatctcacataaacatc

SEQ ID NO: 74818 - DNA, 25 bp, Probe Sequence
ttaccaacaggacatctcacataaa

SEQ ID NO: 74819 - DNA, 25 bp, Probe Sequence
taccaacaggacatctcacataaac

SEQ ID NO: 74820 - DNA, 25 bp, Probe Sequence
acaggacatctcacataaacatcta

SEQ ID NO: 74821 - DNA, 25 bp, Probe Sequence
ccaacaggacatctcacataaacat

SEQ ID NO: 74822 - DNA, 25 bp, Probe Sequence
aaaggctgacttgtatgttatgtga

SEQ ID NO: 74823 - DNA, 25 bp, Probe Sequence
ctcacataaacatctatatcccagc

SEQ ID NO: 74824 - DNA, 25 bp, Probe Sequence
taaaggctgacttgtatgttatgtg

SEQ ID NO: 74825 - DNA, 25 bp, Probe Sequence
cagagtaagaatcacacgaagagat

SEQ ID NO: 74826 - DNA, 25 bp, Probe Sequence
aacagagtaagaatcacacgaagag

SEQ ID NO: 74827 - DNA, 25 bp, Probe Sequence
caacagagtaagaatcacacgaaga

SEQ ID NO: 74828 - DNA, 25 bp, Probe Sequence
acagagtaagaatcacacgaagaga

SEQ ID NO: 74829 - DNA, 25 bp, Probe Sequence
ccataattcacaaggagagaagagg

SEQ ID NO: 74830 - DNA, 25 bp, Probe Sequence
acaacaccagttacactcattgata

SEQ ID NO: 74831 - DNA, 25 bp, Probe Sequence
caccagttacactcattgataagga

SEQ ID NO: 74832 - DNA, 25 bp, Probe Sequence
acaccagttacactcattgataagg

SEQ ID NO: 74833 - DNA, 25 bp, Probe Sequence
accagttacactcattgataaggat

SEQ ID NO: 74834 - DNA, 25 bp, Probe Sequence
ccaacagagtaagaatcacacgaag

SEQ ID NO: 74835 - DNA, 25 bp, Probe Sequence
caacaccagttacactcattgataa

SEQ ID NO: 74836 - DNA, 25 bp, Probe Sequence
agagtaagaatcacacgaagagatc

SEQ ID NO: 74837 - DNA, 25 bp, Probe Sequence
cataattcacaaggagagaagaggc

SEQ ID NO: 74838 - DNA, 25 bp, Probe Sequence
aacaccagttacactcattgataag

SEQ ID NO: 74839 - DNA, 25 bp, Probe Sequence
ataattcacaaggagagaagaggca

SEQ ID NO: 74840 - DNA, 25 bp, Probe Sequence
actagaagtcagaggttaggaagtt

SEQ ID NO: 74841 - DNA, 25 bp, Probe Sequence
aactagaagtcagaggttaggaagt

SEQ ID NO: 74842 - DNA, 25 bp, Probe Sequence
taattcacaaggagagaagaggcaa

SEQ ID NO: 74843 - DNA, 25 bp, Probe Sequence
cacaacaccagttacactcattgat

SEQ ID NO: 74844 - DNA, 25 bp, Probe Sequence
gaacacaacaccagttacactcatt

SEQ ID NO: 74845 - DNA, 25 bp, Probe Sequence
aacagagtagtaagaagacaatacc

SEQ ID NO: 74846 - DNA, 25 bp, Probe Sequence
aacacaacaccagttacactcattg

SEQ ID NO: 74847 - DNA, 25 bp, Probe Sequence
tccataattcacaaggagagaagag

SEQ ID NO: 74848 - DNA, 25 bp, Probe Sequence
gtccataattcacaaggagagaaga

SEQ ID NO: 74849 - DNA, 25 bp, Probe Sequence
taatcaagtggagtggatgtaggat

SEQ ID NO: 74850 - DNA, 25 bp, Probe Sequence
ctaatcaagtggagtggatgtagga

SEQ ID NO: 74851 - DNA, 25 bp, Probe Sequence
gactaatcaagtggagtggatgtag

SEQ ID NO: 74852 - DNA, 25 bp, Probe Sequence
agactaatcaagtggagtggatgta

SEQ ID NO: 74853 - DNA, 25 bp, Probe Sequence
gtgatataagaatctcaggctggtc

SEQ ID NO: 74854 - DNA, 25 bp, Probe Sequence
ttcagactaatcaagtggagtggat

SEQ ID NO: 74855 - DNA, 25 bp, Probe Sequence
tgtgatataagaatctcaggctggt

SEQ ID NO: 74856 - DNA, 25 bp, Probe Sequence
actgtgatataagaatctcaggctg

SEQ ID NO: 74857 - DNA, 25 bp, Probe Sequence
aatcaagtggagtggatgtaggatg

SEQ ID NO: 74858 - DNA, 25 bp, Probe Sequence
ctgtgatataagaatctcaggctgg

SEQ ID NO: 74859 - DNA, 25 bp, Probe Sequence
actaatcaagtggagtggatgtagg

SEQ ID NO: 74860 - DNA, 25 bp, Probe Sequence
tgctggaatgctatacacataatat

SEQ ID NO: 74861 - DNA, 25 bp, Probe Sequence
atgctggaatgctatacacataata

SEQ ID NO: 74862 - DNA, 25 bp, Probe Sequence
tcagactaatcaagtggagtggatg

SEQ ID NO: 74863 - DNA, 25 bp, Probe Sequence
tgatataagaatctcaggctggtcg

SEQ ID NO: 74864 - DNA, 25 bp, Probe Sequence
tgtaggatgacattatctgccttat

SEQ ID NO: 74865 - DNA, 25 bp, Probe Sequence
gatgacattatctgccttattaagc

SEQ ID NO: 74866 - DNA, 25 bp, Probe Sequence
tactgtgatataagaatctcaggct

SEQ ID NO: 74867 - DNA, 25 bp, Probe Sequence
cagactaatcaagtggagtggatgt

SEQ ID NO: 74868 - DNA, 25 bp, Probe Sequence
acattatctgccttattaagctcca

SEQ ID NO: 74869 - DNA, 25 bp, Probe Sequence
gacattatctgccttattaagctcc

SEQ ID NO: 74870 - DNA, 25 bp, Probe Sequence
gtactgtgatataagaatctcaggc

SEQ ID NO: 74871 - DNA, 25 bp, Probe Sequence
tctttatgctggaatgctatacaca

SEQ ID NO: 74872 - DNA, 25 bp, Probe Sequence
gtctttatgctggaatgctatacac

SEQ ID NO: 74873 - DNA, 25 bp, Probe Sequence
cattgcctcattccttcttcagtag

SEQ ID NO: 74874 - DNA, 25 bp, Probe Sequence
cattccttcttcagtagcttcctta

SEQ ID NO: 74875 - DNA, 25 bp, Probe Sequence
attccttcttcagtagcttccttac

SEQ ID NO: 74876 - DNA, 25 bp, Probe Sequence
tcattccttcttcagtagcttcctt

SEQ ID NO: 74877 - DNA, 25 bp, Probe Sequence
attgcctcattccttcttcagtagc

SEQ ID NO: 74878 - DNA, 25 bp, Probe Sequence
gagtccatctgtctatttcctttcc

SEQ ID NO: 74879 - DNA, 25 bp, Probe Sequence
agagataataaatcccacaactgct

SEQ ID NO: 74880 - DNA, 25 bp, Probe Sequence
tactctgtccctttatttctcaagc

SEQ ID NO: 74881 - DNA, 25 bp, Probe Sequence
ctcattccttcttcagtagcttcct

SEQ ID NO: 74882 - DNA, 25 bp, Probe Sequence
gagataataaatcccacaactgcta

SEQ ID NO: 74883 - DNA, 25 bp, Probe Sequence
tagagataataaatcccacaactgc

SEQ ID NO: 74884 - DNA, 25 bp, Probe Sequence
tgtactctgtccctttatttctcaa

SEQ ID NO: 74885 - DNA, 25 bp, Probe Sequence
ttgtactctgtccctttatttctca

SEQ ID NO: 74886 - DNA, 25 bp, Probe Sequence
taaatcccacaactgctatttctgt

SEQ ID NO: 74887 - DNA, 25 bp, Probe Sequence
tcttcagtagcttccttactcgtat

SEQ ID NO: 74888 - DNA, 25 bp, Probe Sequence
gcattgcctcattccttcttcagta

SEQ ID NO: 74889 - DNA, 25 bp, Probe Sequence
ataaatcccacaactgctatttctg

SEQ ID NO: 74890 - DNA, 25 bp, Probe Sequence
ttcttcagtagcttccttactcgta

SEQ ID NO: 74891 - DNA, 25 bp, Probe Sequence
ttccttgtccttaacagcactcttg

SEQ ID NO: 74892 - DNA, 25 bp, Probe Sequence
cttcagtagcttccttactcgtata

SEQ ID NO: 74893 - DNA, 25 bp, Probe Sequence
ttccttcttcagtagcttccttact

SEQ ID NO: 74894 - DNA, 25 bp, Probe Sequence
actttatatcatttgcgtagtgtga

SEQ ID NO: 74895 - DNA, 25 bp, Probe Sequence
agtccatctgtctatttcctttccg

SEQ ID NO: 74896 - DNA, 25 bp, Probe Sequence
gtactctgtccctttatttctcaag

SEQ ID NO: 74897 - DNA, 25 bp, Probe Sequence
gagagatgacttgagaagagaagag

SEQ ID NO: 74898 - DNA, 25 bp, Probe Sequence
agagagatgacttgagaagagaaga

SEQ ID NO: 74899 - DNA, 25 bp, Probe Sequence
gagagagatgacttgagaagagaag

SEQ ID NO: 74900 - DNA, 25 bp, Probe Sequence
agagagagatgacttgagaagagaa

SEQ ID NO: 74901 - DNA, 25 bp, Probe Sequence
tagagagagatgacttgagaagaga

SEQ ID NO: 74902 - DNA, 25 bp, Probe Sequence
gcaataggctaaccagaacacttaa

SEQ ID NO: 74903 - DNA, 25 bp, Probe Sequence
agagatgacttgagaagagaagagg

SEQ ID NO: 74904 - DNA, 25 bp, Probe Sequence
ccatctcagaatgatagtccaagtt

SEQ ID NO: 74905 - DNA, 25 bp, Probe Sequence
ttagagagagatgacttgagaagag

SEQ ID NO: 74906 - DNA, 25 bp, Probe Sequence
gcagtacataatagttaagccaagc

SEQ ID NO: 74907 - DNA, 25 bp, Probe Sequence
caccatctcagaatgatagtccaag

SEQ ID NO: 74908 - DNA, 25 bp, Probe Sequence
ctaccagaggcagtacataatagtt

SEQ ID NO: 74909 - DNA, 25 bp, Probe Sequence
catctcagaatgatagtccaagttc

SEQ ID NO: 74910 - DNA, 25 bp, Probe Sequence
accatctcagaatgatagtccaagt

SEQ ID NO: 74911 - DNA, 25 bp, Probe Sequence
cagaggcagtacataatagttaagc

SEQ ID NO: 74912 - DNA, 25 bp, Probe Sequence
accagaggcagtacataatagttaa

SEQ ID NO: 74913 - DNA, 25 bp, Probe Sequence
caagttctattggacattggtggtt

SEQ ID NO: 74914 - DNA, 25 bp, Probe Sequence
cagtacataatagttaagccaagca

SEQ ID NO: 74915 - DNA, 25 bp, Probe Sequence
gtgatagcaggtgatactggataac

SEQ ID NO: 74916 - DNA, 25 bp, Probe Sequence
gctaccagaggcagtacataatagt

SEQ ID NO: 74917 - DNA, 25 bp, Probe Sequence
actcttacatattccttggaacctg

SEQ ID NO: 74918 - DNA, 25 bp, Probe Sequence
cactcttacatattccttggaacct

SEQ ID NO: 74919 - DNA, 25 bp, Probe Sequence
acactcttacatattccttggaacc

SEQ ID NO: 74920 - DNA, 25 bp, Probe Sequence
cataatagttaagccaagcaatagg

SEQ ID NO: 74921 - DNA, 25 bp, Probe Sequence
atatgtcatctcctattcattgctt

SEQ ID NO: 74922 - DNA, 25 bp, Probe Sequence
tacaaacccaactactcatttcctt

SEQ ID NO: 74923 - DNA, 25 bp, Probe Sequence
ttacaaacccaactactcatttcct

SEQ ID NO: 74924 - DNA, 25 bp, Probe Sequence
tacacactttctcacaaacttccta

SEQ ID NO: 74925 - DNA, 25 bp, Probe Sequence
atacacactttctcacaaacttcct

SEQ ID NO: 74926 - DNA, 25 bp, Probe Sequence
cactttctcacaaacttcctaaaca

SEQ ID NO: 74927 - DNA, 25 bp, Probe Sequence
acactttctcacaaacttcctaaac

SEQ ID NO: 74928 - DNA, 25 bp, Probe Sequence
cacactttctcacaaacttcctaaa

SEQ ID NO: 74929 - DNA, 25 bp, Probe Sequence
acacactttctcacaaacttcctaa

SEQ ID NO: 74930 - DNA, 25 bp, Probe Sequence
gcatatacacactttctcacaaact

SEQ ID NO: 74931 - DNA, 25 bp, Probe Sequence
ggcatatacacactttctcacaaac

SEQ ID NO: 74932 - DNA, 25 bp, Probe Sequence
aggcatatacacactttctcacaaa

SEQ ID NO: 74933 - DNA, 25 bp, Probe Sequence
tttacaaacccaactactcatttcc

SEQ ID NO: 74934 - DNA, 25 bp, Probe Sequence
actttctcacaaacttcctaaacag

SEQ ID NO: 74935 - DNA, 25 bp, Probe Sequence
taattagtgccagatgtattccatt

SEQ ID NO: 74936 - DNA, 25 bp, Probe Sequence
ttaattagtgccagatgtattccat

SEQ ID NO: 74937 - DNA, 25 bp, Probe Sequence
aacccaactactcatttccttccta

SEQ ID NO: 74938 - DNA, 25 bp, Probe Sequence
tatacacactttctcacaaacttcc

SEQ ID NO: 74939 - DNA, 25 bp, Probe Sequence
aaggcatatacacactttctcacaa

SEQ ID NO: 74940 - DNA, 25 bp, Probe Sequence
acaaacccaactactcatttccttc

SEQ ID NO: 74941 - DNA, 25 bp, Probe Sequence
gggtttaatatgtccaactcctcat

SEQ ID NO: 74942 - DNA, 25 bp, Probe Sequence
tatatgtcatctcctattcattgct

SEQ ID NO: 74943 - DNA, 25 bp, Probe Sequence
tcaaggcatatacacactttctcac

SEQ ID NO: 74944 - DNA, 25 bp, Probe Sequence
gtcaaggcatatacacactttctca

SEQ ID NO: 74945 - DNA, 25 bp, Probe Sequence
atatgtcatctcctattcattgctt

SEQ ID NO: 74946 - DNA, 25 bp, Probe Sequence
tacaaacccaactactcatttcctt

SEQ ID NO: 74947 - DNA, 25 bp, Probe Sequence
ttacaaacccaactactcatttcct

SEQ ID NO: 74948 - DNA, 25 bp, Probe Sequence
tacacactttctcacaaacttccta

SEQ ID NO: 74949 - DNA, 25 bp, Probe Sequence
atacacactttctcacaaacttcct

SEQ ID NO: 74950 - DNA, 25 bp, Probe Sequence
cactttctcacaaacttcctaaaca

SEQ ID NO: 74951 - DNA, 25 bp, Probe Sequence
acactttctcacaaacttcctaaac

SEQ ID NO: 74952 - DNA, 25 bp, Probe Sequence
cacactttctcacaaacttcctaaa

SEQ ID NO: 74953 - DNA, 25 bp, Probe Sequence
acacactttctcacaaacttcctaa

SEQ ID NO: 74954 - DNA, 25 bp, Probe Sequence
gcatatacacactttctcacaaact

SEQ ID NO: 74955 - DNA, 25 bp, Probe Sequence
ggcatatacacactttctcacaaac

SEQ ID NO: 74956 - DNA, 25 bp, Probe Sequence
aggcatatacacactttctcacaaa

SEQ ID NO: 74957 - DNA, 25 bp, Probe Sequence
tttacaaacccaactactcatttcc

SEQ ID NO: 74958 - DNA, 25 bp, Probe Sequence
actttctcacaaacttcctaaacag

SEQ ID NO: 74959 - DNA, 25 bp, Probe Sequence
taattagtgccagatgtattccatt

SEQ ID NO: 74960 - DNA, 25 bp, Probe Sequence
ttaattagtgccagatgtattccat

SEQ ID NO: 74961 - DNA, 25 bp, Probe Sequence
aacccaactactcatttccttccta

SEQ ID NO: 74962 - DNA, 25 bp, Probe Sequence
tatacacactttctcacaaacttcc

SEQ ID NO: 74963 - DNA, 25 bp, Probe Sequence
aaggcatatacacactttctcacaa

SEQ ID NO: 74964 - DNA, 25 bp, Probe Sequence
acaaacccaactactcatttccttc

SEQ ID NO: 74965 - DNA, 25 bp, Probe Sequence
gggtttaatatgtccaactcctcat

SEQ ID NO: 74966 - DNA, 25 bp, Probe Sequence
tatatgtcatctcctattcattgct

SEQ ID NO: 74967 - DNA, 25 bp, Probe Sequence
tcaaggcatatacacactttctcac

SEQ ID NO: 74968 - DNA, 25 bp, Probe Sequence
gtcaaggcatatacacactttctca

SEQ ID NO: 74969 - DNA, 25 bp, Probe Sequence
aattctcagtcttgtctattcacca

SEQ ID NO: 74970 - DNA, 25 bp, Probe Sequence
attctcagtcttgtctattcaccaa

SEQ ID NO: 74971 - DNA, 25 bp, Probe Sequence
gtaagatcctgtatgtgtgttgaga

SEQ ID NO: 74972 - DNA, 25 bp, Probe Sequence
tgtaagatcctgtatgtgtgttgag

SEQ ID NO: 74973 - DNA, 25 bp, Probe Sequence
atgtaagatcctgtatgtgtgttga

SEQ ID NO: 74974 - DNA, 25 bp, Probe Sequence
aagatcctgtatgtgtgttgagatt

SEQ ID NO: 74975 - DNA, 25 bp, Probe Sequence
taagatcctgtatgtgtgttgagat

SEQ ID NO: 74976 - DNA, 25 bp, Probe Sequence
agtgccttgatgtaattccatgtaa

SEQ ID NO: 74977 - DNA, 25 bp, Probe Sequence
aagtgccttgatgtaattccatgta

SEQ ID NO: 74978 - DNA, 25 bp, Probe Sequence
tatgtaagatcctgtatgtgtgttg

SEQ ID NO: 74979 - DNA, 25 bp, Probe Sequence
accaatctatgtaataggctacctt

SEQ ID NO: 74980 - DNA, 25 bp, Probe Sequence
ttatgtaagatcctgtatgtgtgtt

SEQ ID NO: 74981 - DNA, 25 bp, Probe Sequence
tgtatgtgtgttgagatttagaggt

SEQ ID NO: 74982 - DNA, 25 bp, Probe Sequence
tcctgtatgtgtgttgagatttaga

SEQ ID NO: 74983 - DNA, 25 bp, Probe Sequence
atgtgtgttgagatttagaggtttc

SEQ ID NO: 74984 - DNA, 25 bp, Probe Sequence
ctgtatgtgtgttgagatttagagg

SEQ ID NO: 74985 - DNA, 25 bp, Probe Sequence
cctgtatgtgtgttgagatttagag

SEQ ID NO: 74986 - DNA, 25 bp, Probe Sequence
tacacaaaccaagacaatatcaggg

SEQ ID NO: 74987 - DNA, 25 bp, Probe Sequence
ggtgacaggtgaatgaacttaaatt

SEQ ID NO: 74988 - DNA, 25 bp, Probe Sequence
attatgtaagatcctgtatgtgtgt

SEQ ID NO: 74989 - DNA, 25 bp, Probe Sequence
taccaatctatgtaataggctacct

SEQ ID NO: 74990 - DNA, 25 bp, Probe Sequence
gtatgtgtgttgagatttagaggtt

SEQ ID NO: 74991 - DNA, 25 bp, Probe Sequence
aaatcattgcttaaccctcttatgg

SEQ ID NO: 74992 - DNA, 25 bp, Probe Sequence
tcttatgggatgaggatgagttatt

SEQ ID NO: 74993 - DNA, 25 bp, Probe Sequence
aatcaccacctcatcacaatcaaat

SEQ ID NO: 74994 - DNA, 25 bp, Probe Sequence
aatcaaatcaccacctcatcacaat

SEQ ID NO: 74995 - DNA, 25 bp, Probe Sequence
ggctattgttaatttcttgttgtgc

SEQ ID NO: 74996 - DNA, 25 bp, Probe Sequence
aaatcaccacctcatcacaatcaaa

SEQ ID NO: 74997 - DNA, 25 bp, Probe Sequence
aaatcaaatcaccacctcatcacaa

SEQ ID NO: 74998 - DNA, 25 bp, Probe Sequence
ttgaatgtgaatcctttccttatgg

SEQ ID NO: 74999 - DNA, 25 bp, Probe Sequence
attgttgaatgtgaatcctttcctt

SEQ ID NO: 75000 - DNA, 25 bp, Probe Sequence
atcaccacctcatcacaatcaaatt

SEQ ID NO: 75001 - DNA, 25 bp, Probe Sequence
atcaaatcaccacctcatcacaatc

SEQ ID NO: 75002 - DNA, 25 bp, Probe Sequence
gaaatcaaatcaccacctcatcaca

SEQ ID NO: 75003 - DNA, 25 bp, Probe Sequence
ttgttgaatgtgaatcctttcctta

SEQ ID NO: 75004 - DNA, 25 bp, Probe Sequence
tgaatgtgaatcctttccttatggc

SEQ ID NO: 75005 - DNA, 25 bp, Probe Sequence
tggctattgttaatttcttgttgtg

SEQ ID NO: 75006 - DNA, 25 bp, Probe Sequence
tgttgaatgtgaatcctttccttat

SEQ ID NO: 75007 - DNA, 25 bp, Probe Sequence
tattgttgaatgtgaatcctttcct

SEQ ID NO: 75008 - DNA, 25 bp, Probe Sequence
caaatcaccacctcatcacaatcaa

SEQ ID NO: 75009 - DNA, 25 bp, Probe Sequence
gttgaatgtgaatcctttccttatg

SEQ ID NO: 75010 - DNA, 25 bp, Probe Sequence
atcatattgttgaatgtgaatcctt

SEQ ID NO: 75011 - DNA, 25 bp, Probe Sequence
tatgtcttgttgaaacgactttgtc

SEQ ID NO: 75012 - DNA, 25 bp, Probe Sequence
ttatgtcttgttgaaacgactttgt

SEQ ID NO: 75013 - DNA, 25 bp, Probe Sequence
tgaaatcaaatcaccacctcatcac

SEQ ID NO: 75014 - DNA, 25 bp, Probe Sequence
gactttgtcctgctacagtgataaa

SEQ ID NO: 75015 - DNA, 25 bp, Probe Sequence
tttatgtcttgttgaaacgactttg

SEQ ID NO: 75016 - DNA, 25 bp, Probe Sequence
atattgttgaatgtgaatcctttcc

SEQ ID NO: 75017 - DNA, 25 bp, Probe Sequence
atatgactttacccttgactttgct

SEQ ID NO: 75018 - DNA, 25 bp, Probe Sequence
aatatgactttacccttgactttgc

SEQ ID NO: 75019 - DNA, 25 bp, Probe Sequence
ccttcttccaaatatgactttaccc

SEQ ID NO: 75020 - DNA, 25 bp, Probe Sequence
cccttcttccaaatatgactttacc

SEQ ID NO: 75021 - DNA, 25 bp, Probe Sequence
ctttacccttgactttgctgaaatt

SEQ ID NO: 75022 - DNA, 25 bp, Probe Sequence
actttacccttgactttgctgaaat

SEQ ID NO: 75023 - DNA, 25 bp, Probe Sequence
tatgactttacccttgactttgctg

SEQ ID NO: 75024 - DNA, 25 bp, Probe Sequence
tccaaatatgactttacccttgact

SEQ ID NO: 75025 - DNA, 25 bp, Probe Sequence
cttcttccaaatatgactttaccct

SEQ ID NO: 75026 - DNA, 25 bp, Probe Sequence
tcccttcttccaaatatgactttac

SEQ ID NO: 75027 - DNA, 25 bp, Probe Sequence
gactttacccttgactttgctgaaa

SEQ ID NO: 75028 - DNA, 25 bp, Probe Sequence
ccaaatatgactttacccttgactt

SEQ ID NO: 75029 - DNA, 25 bp, Probe Sequence
ttccaaatatgactttacccttgac

SEQ ID NO: 75030 - DNA, 25 bp, Probe Sequence
attcccttcttccaaatatgacttt

SEQ ID NO: 75031 - DNA, 25 bp, Probe Sequence
cttccaaatatgactttacccttga

SEQ ID NO: 75032 - DNA, 25 bp, Probe Sequence
tcttccaaatatgactttacccttg

SEQ ID NO: 75033 - DNA, 25 bp, Probe Sequence
ttcttccaaatatgactttaccctt

SEQ ID NO: 75034 - DNA, 25 bp, Probe Sequence
aatttgctgatgaaacactgacctc

SEQ ID NO: 75035 - DNA, 25 bp, Probe Sequence
ctattcccttcttccaaatatgact

SEQ ID NO: 75036 - DNA, 25 bp, Probe Sequence
tctattcccttcttccaaatatgac

SEQ ID NO: 75037 - DNA, 25 bp, Probe Sequence
ttcccttcttccaaatatgacttta

SEQ ID NO: 75038 - DNA, 25 bp, Probe Sequence
atgactttacccttgactttgctga

SEQ ID NO: 75039 - DNA, 25 bp, Probe Sequence
tgactttacccttgactttgctgaa

SEQ ID NO: 75040 - DNA, 25 bp, Probe Sequence
aaatatgactttacccttgactttg

SEQ ID NO: 75041 - DNA, 25 bp, Probe Sequence
ttcatcaggtaggtactctcaactc

SEQ ID NO: 75042 - DNA, 25 bp, Probe Sequence
cttcatcaggtaggtactctcaact

SEQ ID NO: 75043 - DNA, 25 bp, Probe Sequence
tcatcaggtaggtactctcaactct

SEQ ID NO: 75044 - DNA, 25 bp, Probe Sequence
atcagccatctttctcccaataaat

SEQ ID NO: 75045 - DNA, 25 bp, Probe Sequence
gcttcatcaggtaggtactctcaac

SEQ ID NO: 75046 - DNA, 25 bp, Probe Sequence
catcaggtaggtactctcaactctg

SEQ ID NO: 75047 - DNA, 25 bp, Probe Sequence
tcagccatctttctcccaataaatt

SEQ ID NO: 75048 - DNA, 25 bp, Probe Sequence
aggtaggtactctcaactctggatg

SEQ ID NO: 75049 - DNA, 25 bp, Probe Sequence
gctctttcaatcaatgggtattcta

SEQ ID NO: 75050 - DNA, 25 bp, Probe Sequence
catcagccatctttctcccaataaa

SEQ ID NO: 75051 - DNA, 25 bp, Probe Sequence
ggtggaagggattgtttgagaatag

SEQ ID NO: 75052 - DNA, 25 bp, Probe Sequence
ggtaggtactctcaactctggatga

SEQ ID NO: 75053 - DNA, 25 bp, Probe Sequence
ggaagggattgtttgagaatagcaa

SEQ ID NO: 75054 - DNA, 25 bp, Probe Sequence
gtggaagggattgtttgagaatagc

SEQ ID NO: 75055 - DNA, 25 bp, Probe Sequence
agcttcatcaggtaggtactctcaa

SEQ ID NO: 75056 - DNA, 25 bp, Probe Sequence
caggtaggtactctcaactctggat

SEQ ID NO: 75057 - DNA, 25 bp, Probe Sequence
atcaggtaggtactctcaactctgg

SEQ ID NO: 75058 - DNA, 25 bp, Probe Sequence
tggaagggattgtttgagaatagca

SEQ ID NO: 75059 - DNA, 25 bp, Probe Sequence
gagaatagcaaatacgcatgttgat

SEQ ID NO: 75060 - DNA, 25 bp, Probe Sequence
gaatagcaaatacgcatgttgattg

SEQ ID NO: 75061 - DNA, 25 bp, Probe Sequence
agaatagcaaatacgcatgttgatt

SEQ ID NO: 75062 - DNA, 25 bp, Probe Sequence
ttgagaatagcaaatacgcatgttg

SEQ ID NO: 75063 - DNA, 25 bp, Probe Sequence
gggtggaagggattgtttgagaata

SEQ ID NO: 75064 - DNA, 25 bp, Probe Sequence
agctctttcaatcaatgggtattct

SEQ ID NO: 75065 - DNA, 25 bp, Probe Sequence
gttacataggtatagacatgccatg

SEQ ID NO: 75066 - DNA, 25 bp, Probe Sequence
ttgttacataggtatagacatgcca

SEQ ID NO: 75067 - DNA, 25 bp, Probe Sequence
tgttacataggtatagacatgccat

SEQ ID NO: 75068 - DNA, 25 bp, Probe Sequence
tatttcttctaatgctatccctccc

SEQ ID NO: 75069 - DNA, 25 bp, Probe Sequence
gccaacttctctgtgtaacctcatt

SEQ ID NO: 75070 - DNA, 25 bp, Probe Sequence
aacttctctgtgtaacctcatttgg

SEQ ID NO: 75071 - DNA, 25 bp, Probe Sequence
ccaacttctctgtgtaacctcattt

SEQ ID NO: 75072 - DNA, 25 bp, Probe Sequence
atttcttctaatgctatccctccca

SEQ ID NO: 75073 - DNA, 25 bp, Probe Sequence
caacttctctgtgtaacctcatttg

SEQ ID NO: 75074 - DNA, 25 bp, Probe Sequence
gcaggtttgttacataggtatagac

SEQ ID NO: 75075 - DNA, 25 bp, Probe Sequence
gtatttcttctaatgctatccctcc

SEQ ID NO: 75076 - DNA, 25 bp, Probe Sequence
ggtatttcttctaatgctatccctc

SEQ ID NO: 75077 - DNA, 25 bp, Probe Sequence
tggtttcagttcaaagtcattcact

SEQ ID NO: 75078 - DNA, 25 bp, Probe Sequence
tttcttctaatgctatccctcccac

SEQ ID NO: 75079 - DNA, 25 bp, Probe Sequence
ggtggtttcagttcaaagtcattca

SEQ ID NO: 75080 - DNA, 25 bp, Probe Sequence
acttctctgtgtaacctcatttggg

SEQ ID NO: 75081 - DNA, 25 bp, Probe Sequence
gggtggtttcagttcaaagtcattc

SEQ ID NO: 75082 - DNA, 25 bp, Probe Sequence
gtggtttcagttcaaagtcattcac

SEQ ID NO: 75083 - DNA, 25 bp, Probe Sequence
tgccaacttctctgtgtaacctcat

SEQ ID NO: 75084 - DNA, 25 bp, Probe Sequence
aggtatttcttctaatgctatccct

SEQ ID NO: 75085 - DNA, 25 bp, Probe Sequence
taggtatttcttctaatgctatccc

SEQ ID NO: 75086 - DNA, 25 bp, Probe Sequence
ttcttctaatgctatccctcccaca

SEQ ID NO: 75087 - DNA, 25 bp, Probe Sequence
gtgcaggtttgttacataggtatag

SEQ ID NO: 75088 - DNA, 25 bp, Probe Sequence
caggtttgttacataggtatagaca

SEQ ID NO: 75089 - DNA, 25 bp, Probe Sequence
atgaatctacaacatgatgcctctt

SEQ ID NO: 75090 - DNA, 25 bp, Probe Sequence
aatgaatctacaacatgatgcctct

SEQ ID NO: 75091 - DNA, 25 bp, Probe Sequence
tgaatctacaacatgatgcctcttg

SEQ ID NO: 75092 - DNA, 25 bp, Probe Sequence
tgcgattgaggagatgtaaatgaat

SEQ ID NO: 75093 - DNA, 25 bp, Probe Sequence
ttgcgattgaggagatgtaaatgaa

SEQ ID NO: 75094 - DNA, 25 bp, Probe Sequence
cttgcgattgaggagatgtaaatga

SEQ ID NO: 75095 - DNA, 25 bp, Probe Sequence
aaggaaagtttagagcaatctgacc

SEQ ID NO: 75096 - DNA, 25 bp, Probe Sequence
atgatgcctcttgtagccatatcct

SEQ ID NO: 75097 - DNA, 25 bp, Probe Sequence
aacatgatgcctcttgtagccatat

SEQ ID NO: 75098 - DNA, 25 bp, Probe Sequence
taaggaaagtttagagcaatctgac

SEQ ID NO: 75099 - DNA, 25 bp, Probe Sequence
tggtaataaggaaagtttagagcaa

SEQ ID NO: 75100 - DNA, 25 bp, Probe Sequence
aagtcccttgtcttgataaattggc

SEQ ID NO: 75101 - DNA, 25 bp, Probe Sequence
gaaagtttagagcaatctgaccctg

SEQ ID NO: 75102 - DNA, 25 bp, Probe Sequence
tgatgcctcttgtagccatatcctt

SEQ ID NO: 75103 - DNA, 25 bp, Probe Sequence
aaatgaatctacaacatgatgcctc

SEQ ID NO: 75104 - DNA, 25 bp, Probe Sequence
atggtaataaggaaagtttagagca

SEQ ID NO: 75105 - DNA, 25 bp, Probe Sequence
acatgatgcctcttgtagccatatc

SEQ ID NO: 75106 - DNA, 25 bp, Probe Sequence
ttcaggaacatagagcagtggacaa

SEQ ID NO: 75107 - DNA, 25 bp, Probe Sequence
ataaggaaagtttagagcaatctga

SEQ ID NO: 75108 - DNA, 25 bp, Probe Sequence
catgatgcctcttgtagccatatcc

SEQ ID NO: 75109 - DNA, 25 bp, Probe Sequence
gtaaatgaatctacaacatgatgcc

SEQ ID NO: 75110 - DNA, 25 bp, Probe Sequence
gcttgcgattgaggagatgtaaatg

SEQ ID NO: 75111 - DNA, 25 bp, Probe Sequence
taaatgaatctacaacatgatgcct

SEQ ID NO: 75112 - DNA, 25 bp, Probe Sequence
gatgcctcttgtagccatatccttt

SEQ ID NO: 75113 - DNA, 25 bp, Probe Sequence
ctgacagcacaagagaaactcctag

SEQ ID NO: 75114 - DNA, 25 bp, Probe Sequence
ctcctagtttagacaactggtaagc

SEQ ID NO: 75115 - DNA, 25 bp, Probe Sequence
actcctagtttagacaactggtaag

SEQ ID NO: 75116 - DNA, 25 bp, Probe Sequence
aactcctagtttagacaactggtaa

SEQ ID NO: 75117 - DNA, 25 bp, Probe Sequence
tgacagcacaagagaaactcctagt

SEQ ID NO: 75118 - DNA, 25 bp, Probe Sequence
tcctagtttagacaactggtaagcc

SEQ ID NO: 75119 - DNA, 25 bp, Probe Sequence
cctagtttagacaactggtaagcca

SEQ ID NO: 75120 - DNA, 25 bp, Probe Sequence
gacagcacaagagaaactcctagtt

SEQ ID NO: 75121 - DNA, 25 bp, Probe Sequence
ctagtttagacaactggtaagccag

SEQ ID NO: 75122 - DNA, 25 bp, Probe Sequence
gaaactcctagtttagacaactggt

SEQ ID NO: 75123 - DNA, 25 bp, Probe Sequence
agaaactcctagtttagacaactgg

SEQ ID NO: 75124 - DNA, 25 bp, Probe Sequence
gcacaagagaaactcctagtttaga

SEQ ID NO: 75125 - DNA, 25 bp, Probe Sequence
agcacaagagaaactcctagtttag

SEQ ID NO: 75126 - DNA, 25 bp, Probe Sequence
cagcacaagagaaactcctagttta

SEQ ID NO: 75127 - DNA, 25 bp, Probe Sequence
acaagagaaactcctagtttagaca

SEQ ID NO: 75128 - DNA, 25 bp, Probe Sequence
aaactcctagtttagacaactggta

SEQ ID NO: 75129 - DNA, 25 bp, Probe Sequence
gagaaactcctagtttagacaactg

SEQ ID NO: 75130 - DNA, 25 bp, Probe Sequence
cacaagagaaactcctagtttagac

SEQ ID NO: 75131 - DNA, 25 bp, Probe Sequence
agagaaactcctagtttagacaact

SEQ ID NO: 75132 - DNA, 25 bp, Probe Sequence
aagagaaactcctagtttagacaac

SEQ ID NO: 75133 - DNA, 25 bp, Probe Sequence
caagagaaactcctagtttagacaa

SEQ ID NO: 75134 - DNA, 25 bp, Probe Sequence
acagcacaagagaaactcctagttt

SEQ ID NO: 75135 - DNA, 25 bp, Probe Sequence
tagtttagacaactggtaagccagc

SEQ ID NO: 75136 - DNA, 25 bp, Probe Sequence
gctgacagcacaagagaaactccta

SEQ ID NO: 75137 - DNA, 25 bp, Probe Sequence
ttacacagactggcattctctctat

SEQ ID NO: 75138 - DNA, 25 bp, Probe Sequence
attacacagactggcattctctcta

SEQ ID NO: 75139 - DNA, 25 bp, Probe Sequence
aattaaggttgtggagtaacaggaa

SEQ ID NO: 75140 - DNA, 25 bp, Probe Sequence
tacacagactggcattctctctatg

SEQ ID NO: 75141 - DNA, 25 bp, Probe Sequence
actatcttccaggaatacatcagaa

SEQ ID NO: 75142 - DNA, 25 bp, Probe Sequence
aactatcttccaggaatacatcaga

SEQ ID NO: 75143 - DNA, 25 bp, Probe Sequence
tgaactatcttccaggaatacatca

SEQ ID NO: 75144 - DNA, 25 bp, Probe Sequence
gaactatcttccaggaatacatcag

SEQ ID NO: 75145 - DNA, 25 bp, Probe Sequence
cattacacagactggcattctctct

SEQ ID NO: 75146 - DNA, 25 bp, Probe Sequence
taattaaggttgtggagtaacagga

SEQ ID NO: 75147 - DNA, 25 bp, Probe Sequence
gtaattaaggttgtggagtaacagg

SEQ ID NO: 75148 - DNA, 25 bp, Probe Sequence
ggtaattaaggttgtggagtaacag

SEQ ID NO: 75149 - DNA, 25 bp, Probe Sequence
gctgaactatcttccaggaatacat

SEQ ID NO: 75150 - DNA, 25 bp, Probe Sequence
ttgctgaactatcttccaggaatac

SEQ ID NO: 75151 - DNA, 25 bp, Probe Sequence
gttgctgaactatcttccaggaata

SEQ ID NO: 75152 - DNA, 25 bp, Probe Sequence
tttaccattctatttgcctgcctta

SEQ ID NO: 75153 - DNA, 25 bp, Probe Sequence
ttaccattctatttgcctgccttag

SEQ ID NO: 75154 - DNA, 25 bp, Probe Sequence
tgctgaactatcttccaggaataca

SEQ ID NO: 75155 - DNA, 25 bp, Probe Sequence
ctgaactatcttccaggaatacatc

SEQ ID NO: 75156 - DNA, 25 bp, Probe Sequence
agtttaattcacccttcacatttct

SEQ ID NO: 75157 - DNA, 25 bp, Probe Sequence
gagtttaattcacccttcacatttc

SEQ ID NO: 75158 - DNA, 25 bp, Probe Sequence
ggaaatgagtttaattcacccttca

SEQ ID NO: 75159 - DNA, 25 bp, Probe Sequence
taccattctatttgcctgccttagt

SEQ ID NO: 75160 - DNA, 25 bp, Probe Sequence
aataagcaaataatgaaacacagca

SEQ ID NO: 75161 - DNA, 25 bp, Probe Sequence
cctctgattctgatgtctaatgctt

SEQ ID NO: 75162 - DNA, 25 bp, Probe Sequence
ggtcctctgattctgatgtctaatg

SEQ ID NO: 75163 - DNA, 25 bp, Probe Sequence
tcctctgattctgatgtctaatgct

SEQ ID NO: 75164 - DNA, 25 bp, Probe Sequence
gtcctctgattctgatgtctaatgc

SEQ ID NO: 75165 - DNA, 25 bp, Probe Sequence
aggtcctctgattctgatgtctaat

SEQ ID NO: 75166 - DNA, 25 bp, Probe Sequence
tgaatcgtgctgtatgcttactaac

SEQ ID NO: 75167 - DNA, 25 bp, Probe Sequence
gtgaatcgtgctgtatgcttactaa

SEQ ID NO: 75168 - DNA, 25 bp, Probe Sequence
ttactcaaggctcttaccagtgaat

SEQ ID NO: 75169 - DNA, 25 bp, Probe Sequence
tggcatgtctcaggattctaagtaa

SEQ ID NO: 75170 - DNA, 25 bp, Probe Sequence
gaatcgtgctgtatgcttactaaca

SEQ ID NO: 75171 - DNA, 25 bp, Probe Sequence
tactcaaggctcttaccagtgaatc

SEQ ID NO: 75172 - DNA, 25 bp, Probe Sequence
agtgaatcgtgctgtatgcttacta

SEQ ID NO: 75173 - DNA, 25 bp, Probe Sequence
ccaagattacagaggtaagaagtcc

SEQ ID NO: 75174 - DNA, 25 bp, Probe Sequence
aagattacagaggtaagaagtcctg

SEQ ID NO: 75175 - DNA, 25 bp, Probe Sequence
caagattacagaggtaagaagtcct

SEQ ID NO: 75176 - DNA, 25 bp, Probe Sequence
tatgcttactaacagatagtgaggc

SEQ ID NO: 75177 - DNA, 25 bp, Probe Sequence
actcttagaactgtactaatccagg

SEQ ID NO: 75178 - DNA, 25 bp, Probe Sequence
attacagaggtaagaagtcctggag

SEQ ID NO: 75179 - DNA, 25 bp, Probe Sequence
gattacagaggtaagaagtcctgga

SEQ ID NO: 75180 - DNA, 25 bp, Probe Sequence
agattacagaggtaagaagtcctgg

SEQ ID NO: 75181 - DNA, 25 bp, Probe Sequence
gttactcaaggctcttaccagtgaa

SEQ ID NO: 75182 - DNA, 25 bp, Probe Sequence
ttactaacagatagtgaggcgagaa

SEQ ID NO: 75183 - DNA, 25 bp, Probe Sequence
atcttgtggcaatctaatctggcat

SEQ ID NO: 75184 - DNA, 25 bp, Probe Sequence
ttgttactcaaggctcttaccagtg

SEQ ID NO: 75185 - DNA, 25 bp, Probe Sequence
aggttctaataataaagccaggagg

SEQ ID NO: 75186 - DNA, 25 bp, Probe Sequence
ggaaggttctaataataaagccagg

SEQ ID NO: 75187 - DNA, 25 bp, Probe Sequence
gggaaggttctaataataaagccag

SEQ ID NO: 75188 - DNA, 25 bp, Probe Sequence
ttgggaaggttctaataataaagcc

SEQ ID NO: 75189 - DNA, 25 bp, Probe Sequence
cggttgggaaggttctaataataaa

SEQ ID NO: 75190 - DNA, 25 bp, Probe Sequence
aaggttctaataataaagccaggag

SEQ ID NO: 75191 - DNA, 25 bp, Probe Sequence
gaaggttctaataataaagccagga

SEQ ID NO: 75192 - DNA, 25 bp, Probe Sequence
gttgggaaggttctaataataaagc

SEQ ID NO: 75193 - DNA, 25 bp, Probe Sequence
tgggaaggttctaataataaagcca

SEQ ID NO: 75194 - DNA, 25 bp, Probe Sequence
ggttgggaaggttctaataataaag

SEQ ID NO: 75195 - DNA, 25 bp, Probe Sequence
ccggttgggaaggttctaataataa

SEQ ID NO: 75196 - DNA, 25 bp, Probe Sequence
gtgacagagcaagactccatctcaa

SEQ ID NO: 75197 - DNA, 25 bp, Probe Sequence
agcaagactccatctcaaaataaaa

SEQ ID NO: 75198 - DNA, 25 bp, Probe Sequence
agagcaagactccatctcaaaataa

SEQ ID NO: 75199 - DNA, 25 bp, Probe Sequence
cagagcaagactccatctcaaaata

SEQ ID NO: 75200 - DNA, 25 bp, Probe Sequence
gagcaagactccatctcaaaataaa

SEQ ID NO: 75201 - DNA, 25 bp, Probe Sequence
gaagaattgcttgaacccaggagac

SEQ ID NO: 75202 - DNA, 25 bp, Probe Sequence
cagaagaattgcttgaacccaggag

SEQ ID NO: 75203 - DNA, 25 bp, Probe Sequence
gcaagactccatctcaaaataaaat

SEQ ID NO: 75204 - DNA, 25 bp, Probe Sequence
tgacagagcaagactccatctcaaa

SEQ ID NO: 75205 - DNA, 25 bp, Probe Sequence
agaagaattgcttgaacccaggaga

SEQ ID NO: 75206 - DNA, 25 bp, Probe Sequence
acagagcaagactccatctcaaaat

SEQ ID NO: 75207 - DNA, 25 bp, Probe Sequence
aagaattgcttgaacccaggagaca

SEQ ID NO: 75208 - DNA, 25 bp, Probe Sequence
ggttctaataataaagccaggaggc

SEQ ID NO: 75209 - DNA, 25 bp, Probe Sequence
gagaatggaatggaatgtggttgaa

SEQ ID NO: 75210 - DNA, 25 bp, Probe Sequence
gaatggaatggaatgtggttgaaat

SEQ ID NO: 75211 - DNA, 25 bp, Probe Sequence
aatggaatggaatgtggttgaaatt

SEQ ID NO: 75212 - DNA, 25 bp, Probe Sequence
agaatggaatggaatgtggttgaaa

SEQ ID NO: 75213 - DNA, 25 bp, Probe Sequence
cgagaatggaatggaatgtggttga

SEQ ID NO: 75214 - DNA, 25 bp, Probe Sequence
atggaatggaatgtggttgaaattt

SEQ ID NO: 75215 - DNA, 25 bp, Probe Sequence
attacaacattgtttctcacacttg

SEQ ID NO: 75216 - DNA, 25 bp, Probe Sequence
aattacaacattgtttctcacactt

SEQ ID NO: 75217 - DNA, 25 bp, Probe Sequence
aaattacaacattgtttctcacact

SEQ ID NO: 75218 - DNA, 25 bp, Probe Sequence
caccaaagtgatacaaatcgcagag

SEQ ID NO: 75219 - DNA, 25 bp, Probe Sequence
gcgagaatggaatggaatgtggttg

SEQ ID NO: 75220 - DNA, 25 bp, Probe Sequence
caaagtgatacaaatcgcagagctg

SEQ ID NO: 75221 - DNA, 25 bp, Probe Sequence
aaagtgatacaaatcgcagagctga

SEQ ID NO: 75222 - DNA, 25 bp, Probe Sequence
accaaagtgatacaaatcgcagagc

SEQ ID NO: 75223 - DNA, 25 bp, Probe Sequence
ttctgcgagaatggaatggaatgtg

SEQ ID NO: 75224 - DNA, 25 bp, Probe Sequence
tacaacattgtttctcacacttgtt

SEQ ID NO: 75225 - DNA, 25 bp, Probe Sequence
ttacaacattgtttctcacacttgt

SEQ ID NO: 75226 - DNA, 25 bp, Probe Sequence
aagtgatacaaatcgcagagctgag

SEQ ID NO: 75227 - DNA, 25 bp, Probe Sequence
tgcgagaatggaatggaatgtggtt

SEQ ID NO: 75228 - DNA, 25 bp, Probe Sequence
gtttctgcgagaatggaatggaatg

SEQ ID NO: 75229 - DNA, 25 bp, Probe Sequence
tgttgcaccaaagtgatacaaatcg

SEQ ID NO: 75230 - DNA, 25 bp, Probe Sequence
ggaatggaatgtggttgaaattttg

SEQ ID NO: 75231 - DNA, 25 bp, Probe Sequence
tggaatggaatgtggttgaaatttt

SEQ ID NO: 75232 - DNA, 25 bp, Probe Sequence
gaatgtggttgaaattttgtgttgt

SEQ ID NO: 75233 - DNA, 25 bp, Probe Sequence
tcacttagcataatgtcattcaggt

SEQ ID NO: 75234 - DNA, 25 bp, Probe Sequence
cacttagcataatgtcattcaggtt

SEQ ID NO: 75235 - DNA, 25 bp, Probe Sequence
gttgtatggctgagtaatggctaag

SEQ ID NO: 75236 - DNA, 25 bp, Probe Sequence
cttagcataatgtcattcaggttca

SEQ ID NO: 75237 - DNA, 25 bp, Probe Sequence
acttagcataatgtcattcaggttc

SEQ ID NO: 75238 - DNA, 25 bp, Probe Sequence
ttcacttagcataatgtcattcagg

SEQ ID NO: 75239 - DNA, 25 bp, Probe Sequence
gctctacttgaatctgatccttacc

SEQ ID NO: 75240 - DNA, 25 bp, Probe Sequence
ttgtatggctgagtaatggctaagt

SEQ ID NO: 75241 - DNA, 25 bp, Probe Sequence
cataatgtcattcaggttcatccat

SEQ ID NO: 75242 - DNA, 25 bp, Probe Sequence
tagcataatgtcattcaggttcatc

SEQ ID NO: 75243 - DNA, 25 bp, Probe Sequence
agcataatgtcattcaggttcatcc

SEQ ID NO: 75244 - DNA, 25 bp, Probe Sequence
tgttgtatggctgagtaatggctaa

SEQ ID NO: 75245 - DNA, 25 bp, Probe Sequence
ttgttgtatggctgagtaatggcta

SEQ ID NO: 75246 - DNA, 25 bp, Probe Sequence
taatgtcattcaggttcatccatgt

SEQ ID NO: 75247 - DNA, 25 bp, Probe Sequence
tatggctgagtaatggctaagtgtc

SEQ ID NO: 75248 - DNA, 25 bp, Probe Sequence
gcataatgtcattcaggttcatcca

SEQ ID NO: 75249 - DNA, 25 bp, Probe Sequence
ataatgtcattcaggttcatccatg

SEQ ID NO: 75250 - DNA, 25 bp, Probe Sequence
ttagcataatgtcattcaggttcat

SEQ ID NO: 75251 - DNA, 25 bp, Probe Sequence
aatgtcattcaggttcatccatgtt

SEQ ID NO: 75252 - DNA, 25 bp, Probe Sequence
gtatggctgagtaatggctaagtgt

SEQ ID NO: 75253 - DNA, 25 bp, Probe Sequence
tgtatggctgagtaatggctaagtg

SEQ ID NO: 75254 - DNA, 25 bp, Probe Sequence
agctctacttgaatctgatccttac

SEQ ID NO: 75255 - DNA, 25 bp, Probe Sequence
aagctctacttgaatctgatcctta

SEQ ID NO: 75256 - DNA, 25 bp, Probe Sequence
ttcctttgttgtatggctgagtaat

SEQ ID NO: 75257 - DNA, 25 bp, Probe Sequence
gcaagttagttacctcctagataca

SEQ ID NO: 75258 - DNA, 25 bp, Probe Sequence
agcaagttagttacctcctagatac

SEQ ID NO: 75259 - DNA, 25 bp, Probe Sequence
aagcaagttagttacctcctagata

SEQ ID NO: 75260 - DNA, 25 bp, Probe Sequence
gttagttacctcctagatacaatgg

SEQ ID NO: 75261 - DNA, 25 bp, Probe Sequence
acttcatgtctcatatccaggtcac

SEQ ID NO: 75262 - DNA, 25 bp, Probe Sequence
tacaaacctcagcaacaaacaatac

SEQ ID NO: 75263 - DNA, 25 bp, Probe Sequence
atacaaacctcagcaacaaacaata

SEQ ID NO: 75264 - DNA, 25 bp, Probe Sequence
ttgacttcatgtctcatatccaggt

SEQ ID NO: 75265 - DNA, 25 bp, Probe Sequence
catacaaacctcagcaacaaacaat

SEQ ID NO: 75266 - DNA, 25 bp, Probe Sequence
caagttagttacctcctagatacaa

SEQ ID NO: 75267 - DNA, 25 bp, Probe Sequence
cttcatacaaacctcagcaacaaac

SEQ ID NO: 75268 - DNA, 25 bp, Probe Sequence
atgggagtataggcattggataaat

SEQ ID NO: 75269 - DNA, 25 bp, Probe Sequence
tgggagtataggcattggataaata

SEQ ID NO: 75270 - DNA, 25 bp, Probe Sequence
gacttcatgtctcatatccaggtca

SEQ ID NO: 75271 - DNA, 25 bp, Probe Sequence
tgacttcatgtctcatatccaggtc

SEQ ID NO: 75272 - DNA, 25 bp, Probe Sequence
cttcatgtctcatatccaggtcaca

SEQ ID NO: 75273 - DNA, 25 bp, Probe Sequence
caaacaatacacccaggtaacaaac

SEQ ID NO: 75274 - DNA, 25 bp, Probe Sequence
gtctcatatccaggtcacactgatg

SEQ ID NO: 75275 - DNA, 25 bp, Probe Sequence
agttagttacctcctagatacaatg

SEQ ID NO: 75276 - DNA, 25 bp, Probe Sequence
caaacctcagcaacaaacaatacac

SEQ ID NO: 75277 - DNA, 25 bp, Probe Sequence
aaactaacacttgggttctatgctc

SEQ ID NO: 75278 - DNA, 25 bp, Probe Sequence
aaagcaagttagttacctcctagat

SEQ ID NO: 75279 - DNA, 25 bp, Probe Sequence
acaaacaatacacccaggtaacaaa

SEQ ID NO: 75280 - DNA, 25 bp, Probe Sequence
aacaaacaatacacccaggtaacaa

SEQ ID NO: 75281 - DNA, 25 bp, Probe Sequence
tgaaattagagagaatcccttgtgg

SEQ ID NO: 75282 - DNA, 25 bp, Probe Sequence
ctgaaattagagagaatcccttgtg

SEQ ID NO: 75283 - DNA, 25 bp, Probe Sequence
gctccagttgtttcccaataataaa

SEQ ID NO: 75284 - DNA, 25 bp, Probe Sequence
tgctccagttgtttcccaataataa

SEQ ID NO: 75285 - DNA, 25 bp, Probe Sequence
ttgctccagttgtttcccaataata

SEQ ID NO: 75286 - DNA, 25 bp, Probe Sequence
tctgaaattagagagaatcccttgt

SEQ ID NO: 75287 - DNA, 25 bp, Probe Sequence
tttgctccagttgtttcccaataat

SEQ ID NO: 75288 - DNA, 25 bp, Probe Sequence
agactgggatctgaaattagagaga

SEQ ID NO: 75289 - DNA, 25 bp, Probe Sequence
gactgggatctgaaattagagagaa

SEQ ID NO: 75290 - DNA, 25 bp, Probe Sequence
actgggatctgaaattagagagaat

SEQ ID NO: 75291 - DNA, 25 bp, Probe Sequence
ctttgctccagttgtttcccaataa

SEQ ID NO: 75292 - DNA, 25 bp, Probe Sequence
atctgaaattagagagaatcccttg

SEQ ID NO: 75293 - DNA, 25 bp, Probe Sequence
ccagttgtttcccaataataaatgt

SEQ ID NO: 75294 - DNA, 25 bp, Probe Sequence
ctgggatctgaaattagagagaatc

SEQ ID NO: 75295 - DNA, 25 bp, Probe Sequence
aaattagagagaatcccttgtggac

SEQ ID NO: 75296 - DNA, 25 bp, Probe Sequence
gaaattagagagaatcccttgtgga

SEQ ID NO: 75297 - DNA, 25 bp, Probe Sequence
gtgccaggttagttccttctgtaag

SEQ ID NO: 75298 - DNA, 25 bp, Probe Sequence
tccagttgtttcccaataataaatg

SEQ ID NO: 75299 - DNA, 25 bp, Probe Sequence
ttagttccttctgtaagctccacct

SEQ ID NO: 75300 - DNA, 25 bp, Probe Sequence
gttagttccttctgtaagctccacc

SEQ ID NO: 75301 - DNA, 25 bp, Probe Sequence
ggttagttccttctgtaagctccac

SEQ ID NO: 75302 - DNA, 25 bp, Probe Sequence
aattagagagaatcccttgtggact

SEQ ID NO: 75303 - DNA, 25 bp, Probe Sequence
ctccagttgtttcccaataataaat

SEQ ID NO: 75304 - DNA, 25 bp, Probe Sequence
attagagagaatcccttgtggactg

SEQ ID NO: 75305 - DNA, 25 bp, Probe Sequence
gtagttcagaagaggtttggctttc

SEQ ID NO: 75306 - DNA, 25 bp, Probe Sequence
ttaactactacgttgacactgctgt

SEQ ID NO: 75307 - DNA, 25 bp, Probe Sequence
tgtagttcagaagaggtttggcttt

SEQ ID NO: 75308 - DNA, 25 bp, Probe Sequence
cagagggctaaatccatgaagtttg

SEQ ID NO: 75309 - DNA, 25 bp, Probe Sequence
tgactgctgtagttcagaagaggtt

SEQ ID NO: 75310 - DNA, 25 bp, Probe Sequence
tagttcagaagaggtttggctttcc

SEQ ID NO: 75311 - DNA, 25 bp, Probe Sequence
gttaactactacgttgacactgctg

SEQ ID NO: 75312 - DNA, 25 bp, Probe Sequence
gagggctaaatccatgaagtttgtg

SEQ ID NO: 75313 - DNA, 25 bp, Probe Sequence
agagggctaaatccatgaagtttgt

SEQ ID NO: 75314 - DNA, 25 bp, Probe Sequence
acagagggctaaatccatgaagttt

SEQ ID NO: 75315 - DNA, 25 bp, Probe Sequence
cctgttaactactacgttgacactg

SEQ ID NO: 75316 - DNA, 25 bp, Probe Sequence
ctgttaactactacgttgacactgc

SEQ ID NO: 75317 - DNA, 25 bp, Probe Sequence
gacagagggctaaatccatgaagtt

SEQ ID NO: 75318 - DNA, 25 bp, Probe Sequence
taactactacgttgacactgctgtg

SEQ ID NO: 75319 - DNA, 25 bp, Probe Sequence
gactgctgtagttcagaagaggttt

SEQ ID NO: 75320 - DNA, 25 bp, Probe Sequence
tgttaactactacgttgacactgct

SEQ ID NO: 75321 - DNA, 25 bp, Probe Sequence
ctgtagttcagaagaggtttggctt

SEQ ID NO: 75322 - DNA, 25 bp, Probe Sequence
actgctgtagttcagaagaggtttg

SEQ ID NO: 75323 - DNA, 25 bp, Probe Sequence
ctgctgtagttcagaagaggtttgg

SEQ ID NO: 75324 - DNA, 25 bp, Probe Sequence
gagaccctgttaactactacgttga

SEQ ID NO: 75325 - DNA, 25 bp, Probe Sequence
agaccctgttaactactacgttgac

SEQ ID NO: 75326 - DNA, 25 bp, Probe Sequence
aactggtaagattggccctaagaag

SEQ ID NO: 75327 - DNA, 25 bp, Probe Sequence
ggagaccctgttaactactacgttg

SEQ ID NO: 75328 - DNA, 25 bp, Probe Sequence
ccctgttaactactacgttgacact

SEQ ID NO: 75329 - DNA, 25 bp, Probe Sequence
gtagttcagaagaggtttggctttc

SEQ ID NO: 75330 - DNA, 25 bp, Probe Sequence
ttaactactacgttgacactgctgt

SEQ ID NO: 75331 - DNA, 25 bp, Probe Sequence
tgtagttcagaagaggtttggcttt

SEQ ID NO: 75332 - DNA, 25 bp, Probe Sequence
cagagggctaaatccatgaagtttg

SEQ ID NO: 75333 - DNA, 25 bp, Probe Sequence
tgactgctgtagttcagaagaggtt

SEQ ID NO: 75334 - DNA, 25 bp, Probe Sequence
tagttcagaagaggtttggctttcc

SEQ ID NO: 75335 - DNA, 25 bp, Probe Sequence
gttaactactacgttgacactgctg

SEQ ID NO: 75336 - DNA, 25 bp, Probe Sequence
gagggctaaatccatgaagtttgtg

SEQ ID NO: 75337 - DNA, 25 bp, Probe Sequence
agagggctaaatccatgaagtttgt

SEQ ID NO: 75338 - DNA, 25 bp, Probe Sequence
acagagggctaaatccatgaagttt

SEQ ID NO: 75339 - DNA, 25 bp, Probe Sequence
cctgttaactactacgttgacactg

SEQ ID NO: 75340 - DNA, 25 bp, Probe Sequence
ctgttaactactacgttgacactgc

SEQ ID NO: 75341 - DNA, 25 bp, Probe Sequence
gacagagggctaaatccatgaagtt

SEQ ID NO: 75342 - DNA, 25 bp, Probe Sequence
taactactacgttgacactgctgtg

SEQ ID NO: 75343 - DNA, 25 bp, Probe Sequence
gactgctgtagttcagaagaggttt

SEQ ID NO: 75344 - DNA, 25 bp, Probe Sequence
tgttaactactacgttgacactgct

SEQ ID NO: 75345 - DNA, 25 bp, Probe Sequence
ctgtagttcagaagaggtttggctt

SEQ ID NO: 75346 - DNA, 25 bp, Probe Sequence
actgctgtagttcagaagaggtttg

SEQ ID NO: 75347 - DNA, 25 bp, Probe Sequence
ctgctgtagttcagaagaggtttgg

SEQ ID NO: 75348 - DNA, 25 bp, Probe Sequence
gagaccctgttaactactacgttga

SEQ ID NO: 75349 - DNA, 25 bp, Probe Sequence
agaccctgttaactactacgttgac

SEQ ID NO: 75350 - DNA, 25 bp, Probe Sequence
aactggtaagattggccctaagaag

SEQ ID NO: 75351 - DNA, 25 bp, Probe Sequence
ggagaccctgttaactactacgttg

SEQ ID NO: 75352 - DNA, 25 bp, Probe Sequence
ccctgttaactactacgttgacact

SEQ ID NO: 75353 - DNA, 25 bp, Probe Sequence
tatgtgcttcttctgattcttgcta

SEQ ID NO: 75354 - DNA, 25 bp, Probe Sequence
gatatgtgcttcttctgattcttgc

SEQ ID NO: 75355 - DNA, 25 bp, Probe Sequence
atatgtgcttcttctgattcttgct

SEQ ID NO: 75356 - DNA, 25 bp, Probe Sequence
tgtgcttcttctgattcttgctaat

SEQ ID NO: 75357 - DNA, 25 bp, Probe Sequence
atgtgcttcttctgattcttgctaa

SEQ ID NO: 75358 - DNA, 25 bp, Probe Sequence
gtgcttcttctgattcttgctaatt

SEQ ID NO: 75359 - DNA, 25 bp, Probe Sequence
tgatatgtgcttcttctgattcttg

SEQ ID NO: 75360 - DNA, 25 bp, Probe Sequence
tgattgatatgtgcttcttctgatt

SEQ ID NO: 75361 - DNA, 25 bp, Probe Sequence
ttgattgatatgtgcttcttctgat

SEQ ID NO: 75362 - DNA, 25 bp, Probe Sequence
ttgatatgtgcttcttctgattctt

SEQ ID NO: 75363 - DNA, 25 bp, Probe Sequence
attgatatgtgcttcttctgattct

SEQ ID NO: 75364 - DNA, 25 bp, Probe Sequence
gattgatatgtgcttcttctgattc

SEQ ID NO: 75365 - DNA, 25 bp, Probe Sequence
agttgtttgttgctaagaggtagta

SEQ ID NO: 75366 - DNA, 25 bp, Probe Sequence
atttgagttgtttgttgctaagagg

SEQ ID NO: 75367 - DNA, 25 bp, Probe Sequence
ggctgtatttgattgatatgtgctt

SEQ ID NO: 75368 - DNA, 25 bp, Probe Sequence
tgtggttgttacagaataagtctaa

SEQ ID NO: 75369 - DNA, 25 bp, Probe Sequence
tgtggctgtatttgattgatatgtg

SEQ ID NO: 75370 - DNA, 25 bp, Probe Sequence
ttgagttgtttgttgctaagaggta

SEQ ID NO: 75371 - DNA, 25 bp, Probe Sequence
catttgagttgtttgttgctaagag

SEQ ID NO: 75372 - DNA, 25 bp, Probe Sequence
ttcactgtagacactatctcggaga

SEQ ID NO: 75373 - DNA, 25 bp, Probe Sequence
gttgtttgttgctaagaggtagtaa

SEQ ID NO: 75374 - DNA, 25 bp, Probe Sequence
tggctgtatttgattgatatgtgct

SEQ ID NO: 75375 - DNA, 25 bp, Probe Sequence
gtggctgtatttgattgatatgtgc

SEQ ID NO: 75376 - DNA, 25 bp, Probe Sequence
aaattagcctttgccttattctgtg

SEQ ID NO: 75377 - DNA, 25 bp, Probe Sequence
tatgtgcttcttctgattcttgcta

SEQ ID NO: 75378 - DNA, 25 bp, Probe Sequence
gatatgtgcttcttctgattcttgc

SEQ ID NO: 75379 - DNA, 25 bp, Probe Sequence
atatgtgcttcttctgattcttgct

SEQ ID NO: 75380 - DNA, 25 bp, Probe Sequence
tgtgcttcttctgattcttgctaat

SEQ ID NO: 75381 - DNA, 25 bp, Probe Sequence
atgtgcttcttctgattcttgctaa

SEQ ID NO: 75382 - DNA, 25 bp, Probe Sequence
gtgcttcttctgattcttgctaatt

SEQ ID NO: 75383 - DNA, 25 bp, Probe Sequence
tgatatgtgcttcttctgattcttg

SEQ ID NO: 75384 - DNA, 25 bp, Probe Sequence
tgattgatatgtgcttcttctgatt

SEQ ID NO: 75385 - DNA, 25 bp, Probe Sequence
ttgattgatatgtgcttcttctgat

SEQ ID NO: 75386 - DNA, 25 bp, Probe Sequence
ttgatatgtgcttcttctgattctt

SEQ ID NO: 75387 - DNA, 25 bp, Probe Sequence
attgatatgtgcttcttctgattct

SEQ ID NO: 75388 - DNA, 25 bp, Probe Sequence
gattgatatgtgcttcttctgattc

SEQ ID NO: 75389 - DNA, 25 bp, Probe Sequence
agttgtttgttgctaagaggtagta

SEQ ID NO: 75390 - DNA, 25 bp, Probe Sequence
atttgagttgtttgttgctaagagg

SEQ ID NO: 75391 - DNA, 25 bp, Probe Sequence
ggctgtatttgattgatatgtgctt

SEQ ID NO: 75392 - DNA, 25 bp, Probe Sequence
tgtggttgttacagaataagtctaa

SEQ ID NO: 75393 - DNA, 25 bp, Probe Sequence
tgtggctgtatttgattgatatgtg

SEQ ID NO: 75394 - DNA, 25 bp, Probe Sequence
ttgagttgtttgttgctaagaggta

SEQ ID NO: 75395 - DNA, 25 bp, Probe Sequence
catttgagttgtttgttgctaagag

SEQ ID NO: 75396 - DNA, 25 bp, Probe Sequence
ttcactgtagacactatctcggaga

SEQ ID NO: 75397 - DNA, 25 bp, Probe Sequence
gttgtttgttgctaagaggtagtaa

SEQ ID NO: 75398 - DNA, 25 bp, Probe Sequence
tggctgtatttgattgatatgtgct

SEQ ID NO: 75399 - DNA, 25 bp, Probe Sequence
gtggctgtatttgattgatatgtgc

SEQ ID NO: 75400 - DNA, 25 bp, Probe Sequence
aaattagcctttgccttattctgtg

SEQ ID NO: 75401 - DNA, 25 bp, Probe Sequence
atgcctacggatcatctattcctaa

SEQ ID NO: 75402 - DNA, 25 bp, Probe Sequence
atttctctctctctctctctctctc

SEQ ID NO: 75403 - DNA, 25 bp, Probe Sequence
atgggttatttctctctctctctct

SEQ ID NO: 75404 - DNA, 25 bp, Probe Sequence
gggttatttctctctctctctctct

SEQ ID NO: 75405 - DNA, 25 bp, Probe Sequence
tgggttatttctctctctctctctc

SEQ ID NO: 75406 - DNA, 25 bp, Probe Sequence
aatgggttatttctctctctctctc

SEQ ID NO: 75407 - DNA, 25 bp, Probe Sequence
ggttatttctctctctctctctctc

SEQ ID NO: 75408 - DNA, 25 bp, Probe Sequence
gaatgggttatttctctctctctct

SEQ ID NO: 75409 - DNA, 25 bp, Probe Sequence
tatttctctctctctctctctctct

SEQ ID NO: 75410 - DNA, 25 bp, Probe Sequence
gttatttctctctctctctctctct

SEQ ID NO: 75411 - DNA, 25 bp, Probe Sequence
ttatttctctctctctctctctctc

SEQ ID NO: 75412 - DNA, 25 bp, Probe Sequence
tacaccatctacaatccctccgtta

SEQ ID NO: 75413 - DNA, 25 bp, Probe Sequence
gggcttctcgaatttatgtatttca

SEQ ID NO: 75414 - DNA, 25 bp, Probe Sequence
gcctacggatcatctattcctaaag

SEQ ID NO: 75415 - DNA, 25 bp, Probe Sequence
gatgcctacggatcatctattccta

SEQ ID NO: 75416 - DNA, 25 bp, Probe Sequence
acggatcatctattcctaaagttgt

SEQ ID NO: 75417 - DNA, 25 bp, Probe Sequence
gttgatgcctacggatcatctattc

SEQ ID NO: 75418 - DNA, 25 bp, Probe Sequence
tctacaatccctccgttagattaaa

SEQ ID NO: 75419 - DNA, 25 bp, Probe Sequence
cctacggatcatctattcctaaagt

SEQ ID NO: 75420 - DNA, 25 bp, Probe Sequence
tgcctacggatcatctattcctaaa

SEQ ID NO: 75421 - DNA, 25 bp, Probe Sequence
agttgatgcctacggatcatctatt

SEQ ID NO: 75422 - DNA, 25 bp, Probe Sequence
aagttgatgcctacggatcatctat

SEQ ID NO: 75423 - DNA, 25 bp, Probe Sequence
cggatcatctattcctaaagttgtt

SEQ ID NO: 75424 - DNA, 25 bp, Probe Sequence
ttgatgcctacggatcatctattcc

SEQ ID NO: 75425 - DNA, 25 bp, Probe Sequence
gagagacatccatcatctgcttaat

SEQ ID NO: 75426 - DNA, 25 bp, Probe Sequence
agagacatccatcatctgcttaatt

SEQ ID NO: 75427 - DNA, 25 bp, Probe Sequence
agatcctcttcaactaccgatattg

SEQ ID NO: 75428 - DNA, 25 bp, Probe Sequence
gatcctcttcaactaccgatattgc

SEQ ID NO: 75429 - DNA, 25 bp, Probe Sequence
cgagagacatccatcatctgcttaa

SEQ ID NO: 75430 - DNA, 25 bp, Probe Sequence
tagatcctcttcaactaccgatatt

SEQ ID NO: 75431 - DNA, 25 bp, Probe Sequence
ttagatcctcttcaactaccgatat

SEQ ID NO: 75432 - DNA, 25 bp, Probe Sequence
agaaatgagaagtatgaaagcagga

SEQ ID NO: 75433 - DNA, 25 bp, Probe Sequence
aacaaagcagaaagaaagaagacaa

SEQ ID NO: 75434 - DNA, 25 bp, Probe Sequence
gaacaaagcagaaagaaagaagaca

SEQ ID NO: 75435 - DNA, 25 bp, Probe Sequence
agaacaaagcagaaagaaagaagac

SEQ ID NO: 75436 - DNA, 25 bp, Probe Sequence
tgagaacaaagcagaaagaaagaag

SEQ ID NO: 75437 - DNA, 25 bp, Probe Sequence
gagaaatgagaagtatgaaagcagg

SEQ ID NO: 75438 - DNA, 25 bp, Probe Sequence
tgctgagagaaatgagaagtatgaa

SEQ ID NO: 75439 - DNA, 25 bp, Probe Sequence
gagaacaaagcagaaagaaagaaga

SEQ ID NO: 75440 - DNA, 25 bp, Probe Sequence
gtgctgagagaaatgagaagtatga

SEQ ID NO: 75441 - DNA, 25 bp, Probe Sequence
acaaagcagaaagaaagaagacaat

SEQ ID NO: 75442 - DNA, 25 bp, Probe Sequence
attatacccgagagacatccatcat

SEQ ID NO: 75443 - DNA, 25 bp, Probe Sequence
aaatgagaagtatgaaagcaggaag

SEQ ID NO: 75444 - DNA, 25 bp, Probe Sequence
gaaatgagaagtatgaaagcaggaa

SEQ ID NO: 75445 - DNA, 25 bp, Probe Sequence
atgagaacaaagcagaaagaaagaa

SEQ ID NO: 75446 - DNA, 25 bp, Probe Sequence
aaagtattcacaggcaattatggga

SEQ ID NO: 75447 - DNA, 25 bp, Probe Sequence
agagaaatgagaagtatgaaagcag

SEQ ID NO: 75448 - DNA, 25 bp, Probe Sequence
gagagaaatgagaagtatgaaagca

SEQ ID NO: 75449 - DNA, 25 bp, Probe Sequence
aggtgacactatagaacaaagtttg

SEQ ID NO: 75450 - DNA, 25 bp, Probe Sequence
attaaagagcctgaatgcctttgaa

SEQ ID NO: 75451 - DNA, 25 bp, Probe Sequence
ttaaagagcctgaatgcctttgaaa

SEQ ID NO: 75452 - DNA, 25 bp, Probe Sequence
cattaaagagcctgaatgcctttga

SEQ ID NO: 75453 - DNA, 25 bp, Probe Sequence
acattaaagagcctgaatgcctttg

SEQ ID NO: 75454 - DNA, 25 bp, Probe Sequence
atcaccgtttgacctccatagagac

SEQ ID NO: 75455 - DNA, 25 bp, Probe Sequence
catcaccgtttgacctccatagaga

SEQ ID NO: 75456 - DNA, 25 bp, Probe Sequence
acaggaaaacagctatgaccattag

SEQ ID NO: 75457 - DNA, 25 bp, Probe Sequence
cacaggaaaacagctatgaccatta

SEQ ID NO: 75458 - DNA, 25 bp, Probe Sequence
atttaggtgacactatagaacaaag

SEQ ID NO: 75459 - DNA, 25 bp, Probe Sequence
caggaaaacagctatgaccattagg

SEQ ID NO: 75460 - DNA, 25 bp, Probe Sequence
cggataacaatttcacacaggaaaa

SEQ ID NO: 75461 - DNA, 25 bp, Probe Sequence
ggtgacactatagaacaaagtttgt

SEQ ID NO: 75462 - DNA, 25 bp, Probe Sequence
taacaatttcacacaggaaaacagc

SEQ ID NO: 75463 - DNA, 25 bp, Probe Sequence
ggataacaatttcacacaggaaaac

SEQ ID NO: 75464 - DNA, 25 bp, Probe Sequence
taaagagcctgaatgcctttgaaaa

SEQ ID NO: 75465 - DNA, 25 bp, Probe Sequence
ataacaatttcacacaggaaaacag

SEQ ID NO: 75466 - DNA, 25 bp, Probe Sequence
gataacaatttcacacaggaaaaca

SEQ ID NO: 75467 - DNA, 25 bp, Probe Sequence
acacaggaaaacagctatgaccatt

SEQ ID NO: 75468 - DNA, 25 bp, Probe Sequence
aatttcacacaggaaaacagctatg

SEQ ID NO: 75469 - DNA, 25 bp, Probe Sequence
caatttcacacaggaaaacagctat

SEQ ID NO: 75470 - DNA, 25 bp, Probe Sequence
aggaaaacagctatgaccattaggc

SEQ ID NO: 75471 - DNA, 25 bp, Probe Sequence
atttcacacaggaaaacagctatga

SEQ ID NO: 75472 - DNA, 25 bp, Probe Sequence
acaatttcacacaggaaaacagcta

SEQ ID NO: 75473 - DNA, 25 bp, Probe Sequence
taggcttcatagtatatctctgtcc

SEQ ID NO: 75474 - DNA, 25 bp, Probe Sequence
ccattccaataggcttcatagtata

SEQ ID NO: 75475 - DNA, 25 bp, Probe Sequence
aagtccaaagtccaaagtatcatct

SEQ ID NO: 75476 - DNA, 25 bp, Probe Sequence
caagtccaaagtccaaagtatcatc

SEQ ID NO: 75477 - DNA, 25 bp, Probe Sequence
tcaagtccaaagtccaaagtatcat

SEQ ID NO: 75478 - DNA, 25 bp, Probe Sequence
agtccaaagtccaaagtatcatctg

SEQ ID NO: 75479 - DNA, 25 bp, Probe Sequence
catttcagcattaactcaagtccaa

SEQ ID NO: 75480 - DNA, 25 bp, Probe Sequence
ctcaagtccaaagtccaaagtatca

SEQ ID NO: 75481 - DNA, 25 bp, Probe Sequence
tttcagcattaactcaagtccaaag

SEQ ID NO: 75482 - DNA, 25 bp, Probe Sequence
ctcatttcagcattaactcaagtcc

SEQ ID NO: 75483 - DNA, 25 bp, Probe Sequence
ccaaagtccaaagtatcatctgaga

SEQ ID NO: 75484 - DNA, 25 bp, Probe Sequence
tccaaagtccaaagtatcatctgag

SEQ ID NO: 75485 - DNA, 25 bp, Probe Sequence
aggcttcatagtatatctctgtccc

SEQ ID NO: 75486 - DNA, 25 bp, Probe Sequence
gtccaaagtccaaagtatcatctga

SEQ ID NO: 75487 - DNA, 25 bp, Probe Sequence
atttcagcattaactcaagtccaaa

SEQ ID NO: 75488 - DNA, 25 bp, Probe Sequence
tcatttcagcattaactcaagtcca

SEQ ID NO: 75489 - DNA, 25 bp, Probe Sequence
ccaataggcttcatagtatatctct

SEQ ID NO: 75490 - DNA, 25 bp, Probe Sequence
tccaataggcttcatagtatatctc

SEQ ID NO: 75491 - DNA, 25 bp, Probe Sequence
gggtaaatacagccattccaatagg

SEQ ID NO: 75492 - DNA, 25 bp, Probe Sequence
aactcaagtccaaagtccaaagtat

SEQ ID NO: 75493 - DNA, 25 bp, Probe Sequence
taactcaagtccaaagtccaaagta

SEQ ID NO: 75494 - DNA, 25 bp, Probe Sequence
cattaactcaagtccaaagtccaaa

SEQ ID NO: 75495 - DNA, 25 bp, Probe Sequence
ccaaagtcttaactcatttcagcat

SEQ ID NO: 75496 - DNA, 25 bp, Probe Sequence
actcatttcagcattaactcaagtc

SEQ ID NO: 75497 - DNA, 25 bp, Probe Sequence
aaattcagaaattagctgggcgtgg

SEQ ID NO: 75498 - DNA, 25 bp, Probe Sequence
aaaattcagaaattagctgggcgtg

SEQ ID NO: 75499 - DNA, 25 bp, Probe Sequence
aattcagaaattagctgggcgtggt

SEQ ID NO: 75500 - DNA, 25 bp, Probe Sequence
cgctcataataacagtaggcataag

SEQ ID NO: 75501 - DNA, 25 bp, Probe Sequence
ccgctcataataacagtaggcataa

SEQ ID NO: 75502 - DNA, 25 bp, Probe Sequence
gctcataataacagtaggcataagg

SEQ ID NO: 75503 - DNA, 25 bp, Probe Sequence
tccgctcataataacagtaggcata

SEQ ID NO: 75504 - DNA, 25 bp, Probe Sequence
cataataacagtaggcataaggagg

SEQ ID NO: 75505 - DNA, 25 bp, Probe Sequence
ttccgctcataataacagtaggcat

SEQ ID NO: 75506 - DNA, 25 bp, Probe Sequence
tcataataacagtaggcataaggag

SEQ ID NO: 75507 - DNA, 25 bp, Probe Sequence
ctcataataacagtaggcataagga

SEQ ID NO: 75508 - DNA, 25 bp, Probe Sequence
catgagaatcacttgaacctgagag

SEQ ID NO: 75509 - DNA, 25 bp, Probe Sequence
gggaaggaatgaatgagtaaggaaa

SEQ ID NO: 75510 - DNA, 25 bp, Probe Sequence
gggaaggaatgaatgagtaaggaaa

SEQ ID NO: 75511 - DNA, 25 bp, Probe Sequence
ataataacagtaggcataaggaggg

SEQ ID NO: 75512 - DNA, 25 bp, Probe Sequence
gttccgctcataataacagtaggca

SEQ ID NO: 75513 - DNA, 25 bp, Probe Sequence
tttgcttctgatgaaatgtgctaag

SEQ ID NO: 75514 - DNA, 25 bp, Probe Sequence
atgagaatcacttgaacctgagagg

SEQ ID NO: 75515 - DNA, 25 bp, Probe Sequence
agggaaggaatgaatgagtaaggaa

SEQ ID NO: 75516 - DNA, 25 bp, Probe Sequence
ccctgtctctactaaagatacgaaa

SEQ ID NO: 75517 - DNA, 25 bp, Probe Sequence
tctgatgaaatgtgctaagaagagg

SEQ ID NO: 75518 - DNA, 25 bp, Probe Sequence
ctgatgaaatgtgctaagaagaggg

SEQ ID NO: 75519 - DNA, 25 bp, Probe Sequence
atcagggaaggaatgaatgagtaag

SEQ ID NO: 75520 - DNA, 25 bp, Probe Sequence
ttgcttctgatgaaatgtgctaaga

SEQ ID NO: 75521 - DNA, 25 bp, Probe Sequence
catcagggaaggaatgaatgagtaa

SEQ ID NO: 75522 - DNA, 25 bp, Probe Sequence
cagggaaggaatgaatgagtaagga

SEQ ID NO: 75523 - DNA, 25 bp, Probe Sequence
gttgaggcatgagaatcacttgaac

SEQ ID NO: 75524 - DNA, 25 bp, Probe Sequence
gatggaataatgtgagcaagttagc

SEQ ID NO: 75525 - DNA, 25 bp, Probe Sequence
tgatggaataatgtgagcaagttag

SEQ ID NO: 75526 - DNA, 25 bp, Probe Sequence
gttgatggaataatgtgagcaagtt

SEQ ID NO: 75527 - DNA, 25 bp, Probe Sequence
tatctccacaatctgctgacatagg

SEQ ID NO: 75528 - DNA, 25 bp, Probe Sequence
cctatctccacaatctgctgacata

SEQ ID NO: 75529 - DNA, 25 bp, Probe Sequence
atggttgatggaataatgtgagcaa

SEQ ID NO: 75530 - DNA, 25 bp, Probe Sequence
ttgatggaataatgtgagcaagtta

SEQ ID NO: 75531 - DNA, 25 bp, Probe Sequence
ctatctccacaatctgctgacatag

SEQ ID NO: 75532 - DNA, 25 bp, Probe Sequence
ggttgatggaataatgtgagcaagt

SEQ ID NO: 75533 - DNA, 25 bp, Probe Sequence
tggttgatggaataatgtgagcaag

SEQ ID NO: 75534 - DNA, 25 bp, Probe Sequence
catggttgatggaataatgtgagca

SEQ ID NO: 75535 - DNA, 25 bp, Probe Sequence
gacattgcatggttgatggaataat

SEQ ID NO: 75536 - DNA, 25 bp, Probe Sequence
ttatagtgacattgcatggttgatg

SEQ ID NO: 75537 - DNA, 25 bp, Probe Sequence
ggcaaatctccctaaactatgtgat

SEQ ID NO: 75538 - DNA, 25 bp, Probe Sequence
attgcatggttgatggaataatgtg

SEQ ID NO: 75539 - DNA, 25 bp, Probe Sequence
caccaccttagataaatgacttagc

SEQ ID NO: 75540 - DNA, 25 bp, Probe Sequence
tacttggcaaatctccctaaactat

SEQ ID NO: 75541 - DNA, 25 bp, Probe Sequence
tgtggacttaactcattcttggctg

SEQ ID NO: 75542 - DNA, 25 bp, Probe Sequence
gtgtggacttaactcattcttggct

SEQ ID NO: 75543 - DNA, 25 bp, Probe Sequence
cttggcaaatctccctaaactatgt

SEQ ID NO: 75544 - DNA, 25 bp, Probe Sequence
acttggcaaatctccctaaactatg

SEQ ID NO: 75545 - DNA, 25 bp, Probe Sequence
ggtaattatagtgacattgcatggt

SEQ ID NO: 75546 - DNA, 25 bp, Probe Sequence
tggtaattatagtgacattgcatgg

SEQ ID NO: 75547 - DNA, 25 bp, Probe Sequence
tcctatctccacaatctgctgacat

SEQ ID NO: 75548 - DNA, 25 bp, Probe Sequence
tgaagaacacactctcctgtattag

SEQ ID NO: 75549 - DNA, 25 bp, Probe Sequence
ctgaagaacacactctcctgtatta

SEQ ID NO: 75550 - DNA, 25 bp, Probe Sequence
atctgaagaacacactctcctgtat

SEQ ID NO: 75551 - DNA, 25 bp, Probe Sequence
tctgaagaacacactctcctgtatt

SEQ ID NO: 75552 - DNA, 25 bp, Probe Sequence
gaagaacacactctcctgtattagg

SEQ ID NO: 75553 - DNA, 25 bp, Probe Sequence
catctgaagaacacactctcctgta

SEQ ID NO: 75554 - DNA, 25 bp, Probe Sequence
agggctcagttcactaaacattcta

SEQ ID NO: 75555 - DNA, 25 bp, Probe Sequence
gcttctgccagtaaacaataatgta

SEQ ID NO: 75556 - DNA, 25 bp, Probe Sequence
gggctcagttcactaaacattctag

SEQ ID NO: 75557 - DNA, 25 bp, Probe Sequence
ctacccagcattctctacagttgta

SEQ ID NO: 75558 - DNA, 25 bp, Probe Sequence
aacattctagtaatcagccaattgc

SEQ ID NO: 75559 - DNA, 25 bp, Probe Sequence
cccatttatcactgtccacaacaat

SEQ ID NO: 75560 - DNA, 25 bp, Probe Sequence
cttggcatctgaagaacacactctc

SEQ ID NO: 75561 - DNA, 25 bp, Probe Sequence
tacccagcattctctacagttgtac

SEQ ID NO: 75562 - DNA, 25 bp, Probe Sequence
gagcttctgccagtaaacaataatg

SEQ ID NO: 75563 - DNA, 25 bp, Probe Sequence
cattctagtaatcagccaattgcct

SEQ ID NO: 75564 - DNA, 25 bp, Probe Sequence
cattgaactgcacagaccaatataa

SEQ ID NO: 75565 - DNA, 25 bp, Probe Sequence
agagcttctgccagtaaacaataat

SEQ ID NO: 75566 - DNA, 25 bp, Probe Sequence
acattgaactgcacagaccaatata

SEQ ID NO: 75567 - DNA, 25 bp, Probe Sequence
tacattgaactgcacagaccaatat

SEQ ID NO: 75568 - DNA, 25 bp, Probe Sequence
ggctcagttcactaaacattctagt

SEQ ID NO: 75569 - DNA, 25 bp, Probe Sequence
acattctagtaatcagccaattgcc

SEQ ID NO: 75570 - DNA, 25 bp, Probe Sequence
gagggctcagttcactaaacattct

SEQ ID NO: 75571 - DNA, 25 bp, Probe Sequence
agagggctcagttcactaaacattc

SEQ ID NO: 75572 - DNA, 25 bp, Probe Sequence
aagtgctggaattataggtgtgagt

SEQ ID NO: 75573 - DNA, 25 bp, Probe Sequence
cagaatgtcactgaattggaatcat

SEQ ID NO: 75574 - DNA, 25 bp, Probe Sequence
atgtcactgaattggaatcatacag

SEQ ID NO: 75575 - DNA, 25 bp, Probe Sequence
aatgtcactgaattggaatcataca

SEQ ID NO: 75576 - DNA, 25 bp, Probe Sequence
agtgctggaattataggtgtgagtc

SEQ ID NO: 75577 - DNA, 25 bp, Probe Sequence
gaatgtcactgaattggaatcatac

SEQ ID NO: 75578 - DNA, 25 bp, Probe Sequence
agaatgtcactgaattggaatcata

SEQ ID NO: 75579 - DNA, 25 bp, Probe Sequence
ccttacagtgccgtacagaatagtt

SEQ ID NO: 75580 - DNA, 25 bp, Probe Sequence
cttcacttctttatcctttccctcc

SEQ ID NO: 75581 - DNA, 25 bp, Probe Sequence
ccagaatgtcactgaattggaatca

SEQ ID NO: 75582 - DNA, 25 bp, Probe Sequence
aaagtgctggaattataggtgtgag

SEQ ID NO: 75583 - DNA, 25 bp, Probe Sequence
gcttcacttctttatcctttccctc

SEQ ID NO: 75584 - DNA, 25 bp, Probe Sequence
caaagtgctggaattataggtgtga

SEQ ID NO: 75585 - DNA, 25 bp, Probe Sequence
ctggaattataggtgtgagtcgctg

SEQ ID NO: 75586 - DNA, 25 bp, Probe Sequence
ggaattataggtgtgagtcgctgtg

SEQ ID NO: 75587 - DNA, 25 bp, Probe Sequence
gtgctggaattataggtgtgagtcg

SEQ ID NO: 75588 - DNA, 25 bp, Probe Sequence
tgcttcacttctttatcctttccct

SEQ ID NO: 75589 - DNA, 25 bp, Probe Sequence
cttacagtgccgtacagaatagttt

SEQ ID NO: 75590 - DNA, 25 bp, Probe Sequence
ttcacttctttatcctttccctccc

SEQ ID NO: 75591 - DNA, 25 bp, Probe Sequence
ttacagtgccgtacagaatagtttc

SEQ ID NO: 75592 - DNA, 25 bp, Probe Sequence
ctgtgcttcacttctttatcctttc

SEQ ID NO: 75593 - DNA, 25 bp, Probe Sequence
catacattgaggttcactctttgtg

SEQ ID NO: 75594 - DNA, 25 bp, Probe Sequence
tggaattataggtgtgagtcgctgt

SEQ ID NO: 75595 - DNA, 25 bp, Probe Sequence
gcatacattgaggttcactctttgt

SEQ ID NO: 75596 - DNA, 25 bp, Probe Sequence
acaacaggaggaatgtaggtaataa

SEQ ID NO: 75597 - DNA, 25 bp, Probe Sequence
ttctctaacagtccacataggtctg

SEQ ID NO: 75598 - DNA, 25 bp, Probe Sequence
tttctctaacagtccacataggtct

SEQ ID NO: 75599 - DNA, 25 bp, Probe Sequence
tgtaacatcacgttgcataccttaa

SEQ ID NO: 75600 - DNA, 25 bp, Probe Sequence
ttgtaacatcacgttgcatacctta

SEQ ID NO: 75601 - DNA, 25 bp, Probe Sequence
gtacaacaggaggaatgtaggtaat

SEQ ID NO: 75602 - DNA, 25 bp, Probe Sequence
agttcctgctaaatgactagacttc

SEQ ID NO: 75603 - DNA, 25 bp, Probe Sequence
gagttcctgctaaatgactagactt

SEQ ID NO: 75604 - DNA, 25 bp, Probe Sequence
gttcctgctaaatgactagacttca

SEQ ID NO: 75605 - DNA, 25 bp, Probe Sequence
tacaacaggaggaatgtaggtaata

SEQ ID NO: 75606 - DNA, 25 bp, Probe Sequence
ttcctgctaaatgactagacttcag

SEQ ID NO: 75607 - DNA, 25 bp, Probe Sequence
tttgggagttcctgctaaatgacta

SEQ ID NO: 75608 - DNA, 25 bp, Probe Sequence
ggagttcctgctaaatgactagact

SEQ ID NO: 75609 - DNA, 25 bp, Probe Sequence
caacaggaggaatgtaggtaataaa

SEQ ID NO: 75610 - DNA, 25 bp, Probe Sequence
gaggtgatgggaatgttaattgctc

SEQ ID NO: 75611 - DNA, 25 bp, Probe Sequence
ctgggaggtgatgggaatgttaatt

SEQ ID NO: 75612 - DNA, 25 bp, Probe Sequence
ttgggagttcctgctaaatgactag

SEQ ID NO: 75613 - DNA, 25 bp, Probe Sequence
tctctaacagtccacataggtctgc

SEQ ID NO: 75614 - DNA, 25 bp, Probe Sequence
tgggaggtgatgggaatgttaattg

SEQ ID NO: 75615 - DNA, 25 bp, Probe Sequence
ttgctatctgtttgtactttgtaac

SEQ ID NO: 75616 - DNA, 25 bp, Probe Sequence
gtaacatcacgttgcataccttaaa

SEQ ID NO: 75617 - DNA, 25 bp, Probe Sequence
tactttgtaacatcacgttgcatac

SEQ ID NO: 75618 - DNA, 25 bp, Probe Sequence
gtactttgtaacatcacgttgcata

SEQ ID NO: 75619 - DNA, 25 bp, Probe Sequence
acatcacgttgcataccttaaatat

SEQ ID NO: 75620 - DNA, 25 bp, Probe Sequence
agtgttcatagcagtagcattcata

SEQ ID NO: 75621 - DNA, 25 bp, Probe Sequence
gtgttcatagcagtagcattcataa

SEQ ID NO: 75622 - DNA, 25 bp, Probe Sequence
gagtgttcatagcagtagcattcat

SEQ ID NO: 75623 - DNA, 25 bp, Probe Sequence
tgttcatagcagtagcattcataat

SEQ ID NO: 75624 - DNA, 25 bp, Probe Sequence
gcagtagcattcataattacaacca

SEQ ID NO: 75625 - DNA, 25 bp, Probe Sequence
agcagtagcattcataattacaacc

SEQ ID NO: 75626 - DNA, 25 bp, Probe Sequence
gctgcgacataagaatatgaatgaa

SEQ ID NO: 75627 - DNA, 25 bp, Probe Sequence
gtgagtgttcatagcagtagcattc

SEQ ID NO: 75628 - DNA, 25 bp, Probe Sequence
gttagaaggagccaacaatgtaagc

SEQ ID NO: 75629 - DNA, 25 bp, Probe Sequence
tgagtgttcatagcagtagcattca

SEQ ID NO: 75630 - DNA, 25 bp, Probe Sequence
agtgagtgttcatagcagtagcatt

SEQ ID NO: 75631 - DNA, 25 bp, Probe Sequence
gttcatagcagtagcattcataatt

SEQ ID NO: 75632 - DNA, 25 bp, Probe Sequence
ttcataattacaaccattcaatgcc

SEQ ID NO: 75633 - DNA, 25 bp, Probe Sequence
aatatgaatgaatctttgctctgcc

SEQ ID NO: 75634 - DNA, 25 bp, Probe Sequence
cagtgagtgttcatagcagtagcat

SEQ ID NO: 75635 - DNA, 25 bp, Probe Sequence
gaatatgaatgaatctttgctctgc

SEQ ID NO: 75636 - DNA, 25 bp, Probe Sequence
atatgaatgaatctttgctctgccc

SEQ ID NO: 75637 - DNA, 25 bp, Probe Sequence
agctgcgacataagaatatgaatga

SEQ ID NO: 75638 - DNA, 25 bp, Probe Sequence
tgcgacataagaatatgaatgaatc

SEQ ID NO: 75639 - DNA, 25 bp, Probe Sequence
ctgcgacataagaatatgaatgaat

SEQ ID NO: 75640 - DNA, 25 bp, Probe Sequence
agcattcataattacaaccattcaa

SEQ ID NO: 75641 - DNA, 25 bp, Probe Sequence
cagtagcattcataattacaaccat

SEQ ID NO: 75642 - DNA, 25 bp, Probe Sequence
tagctgcgacataagaatatgaatg

SEQ ID NO: 75643 - DNA, 25 bp, Probe Sequence
tagcagtagcattcataattacaac

SEQ ID NO: 75644 - DNA, 25 bp, Probe Sequence
tacatacatgatgatggcttgagtc

SEQ ID NO: 75645 - DNA, 25 bp, Probe Sequence
gtacatacatgatgatggcttgagt

SEQ ID NO: 75646 - DNA, 25 bp, Probe Sequence
cgtacatacatgatgatggcttgag

SEQ ID NO: 75647 - DNA, 25 bp, Probe Sequence
catacatgatgatggcttgagtcag

SEQ ID NO: 75648 - DNA, 25 bp, Probe Sequence
atacacgtacatacatgatgatggc

SEQ ID NO: 75649 - DNA, 25 bp, Probe Sequence
acatacatgatgatggcttgagtca

SEQ ID NO: 75650 - DNA, 25 bp, Probe Sequence
tacacgtacatacatgatgatggct

SEQ ID NO: 75651 - DNA, 25 bp, Probe Sequence
ggcttaatgagagggatctttgtaa

SEQ ID NO: 75652 - DNA, 25 bp, Probe Sequence
tatacacgtacatacatgatgatgg

SEQ ID NO: 75653 - DNA, 25 bp, Probe Sequence
acgtacatacatgatgatggcttga

SEQ ID NO: 75654 - DNA, 25 bp, Probe Sequence
cacgtacatacatgatgatggcttg

SEQ ID NO: 75655 - DNA, 25 bp, Probe Sequence
gcttaatgagagggatctttgtaaa

SEQ ID NO: 75656 - DNA, 25 bp, Probe Sequence
tgtatgtggagctaatgtttacctt

SEQ ID NO: 75657 - DNA, 25 bp, Probe Sequence
tggagctaatgtttaccttggaaat

SEQ ID NO: 75658 - DNA, 25 bp, Probe Sequence
tatgtggagctaatgtttaccttgg

SEQ ID NO: 75659 - DNA, 25 bp, Probe Sequence
gtatgtggagctaatgtttaccttg

SEQ ID NO: 75660 - DNA, 25 bp, Probe Sequence
ctgtatgtggagctaatgtttacct

SEQ ID NO: 75661 - DNA, 25 bp, Probe Sequence
tctgtatgtggagctaatgtttacc

SEQ ID NO: 75662 - DNA, 25 bp, Probe Sequence
ggagctaatgtttaccttggaaatt

SEQ ID NO: 75663 - DNA, 25 bp, Probe Sequence
acacgtacatacatgatgatggctt

SEQ ID NO: 75664 - DNA, 25 bp, Probe Sequence
gggcttaatgagagggatctttgta

SEQ ID NO: 75665 - DNA, 25 bp, Probe Sequence
ttctgtatgtggagctaatgtttac

SEQ ID NO: 75666 - DNA, 25 bp, Probe Sequence
gtggagctaatgtttaccttggaaa

SEQ ID NO: 75667 - DNA, 25 bp, Probe Sequence
atttctgtatgtggagctaatgttt

SEQ ID NO: 75668 - DNA, 25 bp, Probe Sequence
gattttcccaagtctccaccccatt

SEQ ID NO: 75669 - DNA, 25 bp, Probe Sequence
attttcccaagtctccaccccattg

SEQ ID NO: 75670 - DNA, 25 bp, Probe Sequence
gatccggttttgcaagtacatcaat

SEQ ID NO: 75671 - DNA, 25 bp, Probe Sequence
atccggttttgcaagtacatcaatg

SEQ ID NO: 75672 - DNA, 25 bp, Probe Sequence
ctataccatcgtgatccggttttgc

SEQ ID NO: 75673 - DNA, 25 bp, Probe Sequence
gctataccatcgtgatccggttttg

SEQ ID NO: 75674 - DNA, 25 bp, Probe Sequence
tataccatcgtgatccggttttgca

SEQ ID NO: 75675 - DNA, 25 bp, Probe Sequence
tgatccggttttgcaagtacatcaa

SEQ ID NO: 75676 - DNA, 25 bp, Probe Sequence
cgctataccatcgtgatccggtttt

SEQ ID NO: 75677 - DNA, 25 bp, Probe Sequence
catcgtgatccggttttgcaagtac

SEQ ID NO: 75678 - DNA, 25 bp, Probe Sequence
cgtgatccggttttgcaagtacatc

SEQ ID NO: 75679 - DNA, 25 bp, Probe Sequence
gtgatccggttttgcaagtacatca

SEQ ID NO: 75680 - DNA, 25 bp, Probe Sequence
tcgtgatccggttttgcaagtacat

SEQ ID NO: 75681 - DNA, 25 bp, Probe Sequence
atcgtgatccggttttgcaagtaca

SEQ ID NO: 75682 - DNA, 25 bp, Probe Sequence
ataccatcgtgatccggttttgcaa

SEQ ID NO: 75683 - DNA, 25 bp, Probe Sequence
ctgttagattctccaccatcactta

SEQ ID NO: 75684 - DNA, 25 bp, Probe Sequence
tgttagattctccaccatcacttaa

SEQ ID NO: 75685 - DNA, 25 bp, Probe Sequence
gactacgaactgttagattctccac

SEQ ID NO: 75686 - DNA, 25 bp, Probe Sequence
agactacgaactgttagattctcca

SEQ ID NO: 75687 - DNA, 25 bp, Probe Sequence
gaactgttagattctccaccatcac

SEQ ID NO: 75688 - DNA, 25 bp, Probe Sequence
tacgaactgttagattctccaccat

SEQ ID NO: 75689 - DNA, 25 bp, Probe Sequence
actgttagattctccaccatcactt

SEQ ID NO: 75690 - DNA, 25 bp, Probe Sequence
aactgttagattctccaccatcact

SEQ ID NO: 75691 - DNA, 25 bp, Probe Sequence
aagtagagaggataccaagaagatt

SEQ ID NO: 75692 - DNA, 25 bp, Probe Sequence
gaagcaacaccagagaattacagac

SEQ ID NO: 75693 - DNA, 25 bp, Probe Sequence
cagaagcaacaccagagaattacag

SEQ ID NO: 75694 - DNA, 25 bp, Probe Sequence
ctacgaactgttagattctccacca

SEQ ID NO: 75695 - DNA, 25 bp, Probe Sequence
actacgaactgttagattctccacc

SEQ ID NO: 75696 - DNA, 25 bp, Probe Sequence
agaagcaacaccagagaattacaga

SEQ ID NO: 75697 - DNA, 25 bp, Probe Sequence
tagaacagagtacagactacgaact

SEQ ID NO: 75698 - DNA, 25 bp, Probe Sequence
cagactacgaactgttagattctcc

SEQ ID NO: 75699 - DNA, 25 bp, Probe Sequence
ttagaacagagtacagactacgaac

SEQ ID NO: 75700 - DNA, 25 bp, Probe Sequence
caacaccagagaattacagacaacg

SEQ ID NO: 75701 - DNA, 25 bp, Probe Sequence
agtagagaggataccaagaagatta

SEQ ID NO: 75702 - DNA, 25 bp, Probe Sequence
attagaacagagtacagactacgaa

SEQ ID NO: 75703 - DNA, 25 bp, Probe Sequence
gcaacaccagagaattacagacaac

SEQ ID NO: 75704 - DNA, 25 bp, Probe Sequence
agcaacaccagagaattacagacaa

SEQ ID NO: 75705 - DNA, 25 bp, Probe Sequence
aagcaacaccagagaattacagaca

SEQ ID NO: 75706 - DNA, 25 bp, Probe Sequence
cgaactgttagattctccaccatca

SEQ ID NO: 75707 - DNA, 25 bp, Probe Sequence
gatttctcaacccttactttcaccc

SEQ ID NO: 75708 - DNA, 25 bp, Probe Sequence
ggatttctcaacccttactttcacc

SEQ ID NO: 75709 - DNA, 25 bp, Probe Sequence
gaggatttctcaacccttactttca

SEQ ID NO: 75710 - DNA, 25 bp, Probe Sequence
aggatttctcaacccttactttcac

SEQ ID NO: 75711 - DNA, 25 bp, Probe Sequence
atgactttatgggacgttctacttg

SEQ ID NO: 75712 - DNA, 25 bp, Probe Sequence
catgactttatgggacgttctactt

SEQ ID NO: 75713 - DNA, 25 bp, Probe Sequence
gacgttctacttggcagtacatcta

SEQ ID NO: 75714 - DNA, 25 bp, Probe Sequence
gttctacttggcagtacatctacgt

SEQ ID NO: 75715 - DNA, 25 bp, Probe Sequence
acgttctacttggcagtacatctac

SEQ ID NO: 75716 - DNA, 25 bp, Probe Sequence
tgactttatgggacgttctacttgg

SEQ ID NO: 75717 - DNA, 25 bp, Probe Sequence
cgttctacttggcagtacatctacg

SEQ ID NO: 75718 - DNA, 25 bp, Probe Sequence
atttctcaacccttactttcacccc

SEQ ID NO: 75719 - DNA, 25 bp, Probe Sequence
tgaggatttctcaacccttactttc

SEQ ID NO: 75720 - DNA, 25 bp, Probe Sequence
gtgaggatttctcaacccttacttt

SEQ ID NO: 75721 - DNA, 25 bp, Probe Sequence
ctttatgggacgttctacttggcag

SEQ ID NO: 75722 - DNA, 25 bp, Probe Sequence
gactttatgggacgttctacttggc

SEQ ID NO: 75723 - DNA, 25 bp, Probe Sequence
agtgaggatttctcaacccttactt

SEQ ID NO: 75724 - DNA, 25 bp, Probe Sequence
ggacgttctacttggcagtacatct

SEQ ID NO: 75725 - DNA, 25 bp, Probe Sequence
aaaatcacgggactttccaaatgtc

SEQ ID NO: 75726 - DNA, 25 bp, Probe Sequence
cagtgaggatttctcaacccttact

SEQ ID NO: 75727 - DNA, 25 bp, Probe Sequence
caaaatcacgggactttccaaatgt

SEQ ID NO: 75728 - DNA, 25 bp, Probe Sequence
actttatgggacgttctacttggca

SEQ ID NO: 75729 - DNA, 25 bp, Probe Sequence
ttatgggacgttctacttggcagta

SEQ ID NO: 75730 - DNA, 25 bp, Probe Sequence
tttatgggacgttctacttggcagt

SEQ ID NO: 75731 - DNA, 25 bp, Probe Sequence
cttaactgatgacattccaccattg

SEQ ID NO: 75732 - DNA, 25 bp, Probe Sequence
ccttaactgatgacattccaccatt

SEQ ID NO: 75733 - DNA, 25 bp, Probe Sequence
gtagccttaactgatgacattccac

SEQ ID NO: 75734 - DNA, 25 bp, Probe Sequence
aagtagccttaactgatgacattcc

SEQ ID NO: 75735 - DNA, 25 bp, Probe Sequence
ccacgctaactgataccatatattc

SEQ ID NO: 75736 - DNA, 25 bp, Probe Sequence
ttaactgatgacattccaccattgt

SEQ ID NO: 75737 - DNA, 25 bp, Probe Sequence
gaatatacagccttgttgtctcaca

SEQ ID NO: 75738 - DNA, 25 bp, Probe Sequence
tgaatatacagccttgttgtctcac

SEQ ID NO: 75739 - DNA, 25 bp, Probe Sequence
gtgaatatacagccttgttgtctca

SEQ ID NO: 75740 - DNA, 25 bp, Probe Sequence
agtagccttaactgatgacattcca

SEQ ID NO: 75741 - DNA, 25 bp, Probe Sequence
aatatacagccttgttgtctcacac

SEQ ID NO: 75742 - DNA, 25 bp, Probe Sequence
aagaactaatgataatcctaccacc

SEQ ID NO: 75743 - DNA, 25 bp, Probe Sequence
aatcaggtgaatatacagccttgtt

SEQ ID NO: 75744 - DNA, 25 bp, Probe Sequence
ggtgaatatacagccttgttgtctc

SEQ ID NO: 75745 - DNA, 25 bp, Probe Sequence
tagccttaactgatgacattccacc

SEQ ID NO: 75746 - DNA, 25 bp, Probe Sequence
atcaggtgaatatacagccttgttg

SEQ ID NO: 75747 - DNA, 25 bp, Probe Sequence
caatcaggtgaatatacagccttgt

SEQ ID NO: 75748 - DNA, 25 bp, Probe Sequence
cacgctaactgataccatatattct

SEQ ID NO: 75749 - DNA, 25 bp, Probe Sequence
taactgatgacattccaccattgtg

SEQ ID NO: 75750 - DNA, 25 bp, Probe Sequence
atatacagccttgttgtctcacaca

SEQ ID NO: 75751 - DNA, 25 bp, Probe Sequence
ctgatgacattccaccattgtgatt

SEQ ID NO: 75752 - DNA, 25 bp, Probe Sequence
acacctatcccaaacctataagaac

SEQ ID NO: 75753 - DNA, 25 bp, Probe Sequence
aggtgaatatacagccttgttgtct

SEQ ID NO: 75754 - DNA, 25 bp, Probe Sequence
caggtgaatatacagccttgttgtc

SEQ ID NO: 75755 - DNA, 25 bp, Probe Sequence
tctaagaactctacacacacacaat

SEQ ID NO: 75756 - DNA, 25 bp, Probe Sequence
aagaactctacacacacacaatatg

SEQ ID NO: 75757 - DNA, 25 bp, Probe Sequence
caacctgtagacttacttctcaaga

SEQ ID NO: 75758 - DNA, 25 bp, Probe Sequence
ttctaagaactctacacacacacaa

SEQ ID NO: 75759 - DNA, 25 bp, Probe Sequence
ctaagaactctacacacacacaata

SEQ ID NO: 75760 - DNA, 25 bp, Probe Sequence
ggtcattaagtgagtatcattgtgt

SEQ ID NO: 75761 - DNA, 25 bp, Probe Sequence
tggtcattaagtgagtatcattgtg

SEQ ID NO: 75762 - DNA, 25 bp, Probe Sequence
gtggtcattaagtgagtatcattgt

SEQ ID NO: 75763 - DNA, 25 bp, Probe Sequence
agaactctacacacacacaatatgt

SEQ ID NO: 75764 - DNA, 25 bp, Probe Sequence
acaacctgtagacttacttctcaag

SEQ ID NO: 75765 - DNA, 25 bp, Probe Sequence
aacctgtagacttacttctcaagaa

SEQ ID NO: 75766 - DNA, 25 bp, Probe Sequence
agtggtcattaagtgagtatcattg

SEQ ID NO: 75767 - DNA, 25 bp, Probe Sequence
tcattaagtgagtatcattgtgtgt

SEQ ID NO: 75768 - DNA, 25 bp, Probe Sequence
taagaactctacacacacacaatat

SEQ ID NO: 75769 - DNA, 25 bp, Probe Sequence
gtcattaagtgagtatcattgtgtg

SEQ ID NO: 75770 - DNA, 25 bp, Probe Sequence
aagtggtcattaagtgagtatcatt

SEQ ID NO: 75771 - DNA, 25 bp, Probe Sequence
cattaagtgagtatcattgtgtgtt

SEQ ID NO: 75772 - DNA, 25 bp, Probe Sequence
gagtgagtcaccttaccttgttaag

SEQ ID NO: 75773 - DNA, 25 bp, Probe Sequence
agagtgagtcaccttaccttgttaa

SEQ ID NO: 75774 - DNA, 25 bp, Probe Sequence
aagagtgagtcaccttaccttgtta

SEQ ID NO: 75775 - DNA, 25 bp, Probe Sequence
atcattgtgtgtttctagttccgta

SEQ ID NO: 75776 - DNA, 25 bp, Probe Sequence
tatcattgtgtgtttctagttccgt

SEQ ID NO: 75777 - DNA, 25 bp, Probe Sequence
gtatcattgtgtgtttctagttccg

SEQ ID NO: 75778 - DNA, 25 bp, Probe Sequence
ccagtacaacctgtagacttacttc

SEQ ID NO: 75779 - DNA, 25 bp, Probe Sequence
gctaactcctgatctaactgatgaa

SEQ ID NO: 75780 - DNA, 25 bp, Probe Sequence
ctgctaactcctgatctaactgatg

SEQ ID NO: 75781 - DNA, 25 bp, Probe Sequence
tgctaactcctgatctaactgatga

SEQ ID NO: 75782 - DNA, 25 bp, Probe Sequence
gctgctaactcctgatctaactgat

SEQ ID NO: 75783 - DNA, 25 bp, Probe Sequence
aagctgctaactcctgatctaactg

SEQ ID NO: 75784 - DNA, 25 bp, Probe Sequence
agctgctaactcctgatctaactga

SEQ ID NO: 75785 - DNA, 25 bp, Probe Sequence
taaagctgctaactcctgatctaac

SEQ ID NO: 75786 - DNA, 25 bp, Probe Sequence
gataaagctgctaactcctgatcta

SEQ ID NO: 75787 - DNA, 25 bp, Probe Sequence
ataaagctgctaactcctgatctaa

SEQ ID NO: 75788 - DNA, 25 bp, Probe Sequence
ctaactcctgatctaactgatgaaa

SEQ ID NO: 75789 - DNA, 25 bp, Probe Sequence
aaagctgctaactcctgatctaact

SEQ ID NO: 75790 - DNA, 25 bp, Probe Sequence
ttacagataaagctgctaactcctg

SEQ ID NO: 75791 - DNA, 25 bp, Probe Sequence
tttacagataaagctgctaactcct

SEQ ID NO: 75792 - DNA, 25 bp, Probe Sequence
cagataaagctgctaactcctgatc

SEQ ID NO: 75793 - DNA, 25 bp, Probe Sequence
tacagataaagctgctaactcctga

SEQ ID NO: 75794 - DNA, 25 bp, Probe Sequence
acagataaagctgctaactcctgat

SEQ ID NO: 75795 - DNA, 25 bp, Probe Sequence
agataaagctgctaactcctgatct

SEQ ID NO: 75796 - DNA, 25 bp, Probe Sequence
actcctgatctaactgatgaaaatt

SEQ ID NO: 75797 - DNA, 25 bp, Probe Sequence
aactcctgatctaactgatgaaaat

SEQ ID NO: 75798 - DNA, 25 bp, Probe Sequence
taactcctgatctaactgatgaaaa

SEQ ID NO: 75799 - DNA, 25 bp, Probe Sequence
ttttacagataaagctgctaactcc

SEQ ID NO: 75800 - DNA, 25 bp, Probe Sequence
tacatgactatctgaccttttacag

SEQ ID NO: 75801 - DNA, 25 bp, Probe Sequence
atacatgactatctgaccttttaca

SEQ ID NO: 75802 - DNA, 25 bp, Probe Sequence
tctaactgatgaaaatttctctcca

SEQ ID NO: 75803 - DNA, 25 bp, Probe Sequence
caacttggagagagagaaacctttg

SEQ ID NO: 75804 - DNA, 25 bp, Probe Sequence
aacttggagagagagaaacctttgg

SEQ ID NO: 75805 - DNA, 25 bp, Probe Sequence
aaggttccctagagaggataagaaa

SEQ ID NO: 75806 - DNA, 25 bp, Probe Sequence
aaaggttccctagagaggataagaa

SEQ ID NO: 75807 - DNA, 25 bp, Probe Sequence
ttggagagagagaaacctttgggaa

SEQ ID NO: 75808 - DNA, 25 bp, Probe Sequence
cttggagagagagaaacctttggga

SEQ ID NO: 75809 - DNA, 25 bp, Probe Sequence
tggagagagagaaacctttgggaag

SEQ ID NO: 75810 - DNA, 25 bp, Probe Sequence
gaaagctgaaacccatatgcaaaga

SEQ ID NO: 75811 - DNA, 25 bp, Probe Sequence
acttggagagagagaaacctttggg

SEQ ID NO: 75812 - DNA, 25 bp, Probe Sequence
ccaacttggagagagagaaaccttt

SEQ ID NO: 75813 - DNA, 25 bp, Probe Sequence
aaagctgaaacccatatgcaaagac

SEQ ID NO: 75814 - DNA, 25 bp, Probe Sequence
ctgaaacccatatgcaaagaccatg

SEQ ID NO: 75815 - DNA, 25 bp, Probe Sequence
gttccctagagaggataagaaaacc

SEQ ID NO: 75816 - DNA, 25 bp, Probe Sequence
ggttccctagagaggataagaaaac

SEQ ID NO: 75817 - DNA, 25 bp, Probe Sequence
aggttccctagagaggataagaaaa

SEQ ID NO: 75818 - DNA, 25 bp, Probe Sequence
aaaaggttccctagagaggataaga

SEQ ID NO: 75819 - DNA, 25 bp, Probe Sequence
ggaaagctgaaacccatatgcaaag

SEQ ID NO: 75820 - DNA, 25 bp, Probe Sequence
ttccctagagaggataagaaaaccc

SEQ ID NO: 75821 - DNA, 25 bp, Probe Sequence
gagagaaacctttgggaaggaaatg

SEQ ID NO: 75822 - DNA, 25 bp, Probe Sequence
agagagaaacctttgggaaggaaat

SEQ ID NO: 75823 - DNA, 25 bp, Probe Sequence
tccctagagaggataagaaaacccc

SEQ ID NO: 75824 - DNA, 25 bp, Probe Sequence
aagctgaaacccatatgcaaagacc

SEQ ID NO: 75825 - DNA, 25 bp, Probe Sequence
cccaacttggagagagagaaacctt

SEQ ID NO: 75826 - DNA, 25 bp, Probe Sequence
gctgaaacccatatgcaaagaccat

SEQ ID NO: 75827 - DNA, 25 bp, Probe Sequence
caacttggagagagagaaacctttg

SEQ ID NO: 75828 - DNA, 25 bp, Probe Sequence
aacttggagagagagaaacctttgg

SEQ ID NO: 75829 - DNA, 25 bp, Probe Sequence
aaggttccctagagaggataagaaa

SEQ ID NO: 75830 - DNA, 25 bp, Probe Sequence
aaaggttccctagagaggataagaa

SEQ ID NO: 75831 - DNA, 25 bp, Probe Sequence
ttggagagagagaaacctttgggaa

SEQ ID NO: 75832 - DNA, 25 bp, Probe Sequence
cttggagagagagaaacctttggga

SEQ ID NO: 75833 - DNA, 25 bp, Probe Sequence
tggagagagagaaacctttgggaag

SEQ ID NO: 75834 - DNA, 25 bp, Probe Sequence
gaaagctgaaacccatatgcaaaga

SEQ ID NO: 75835 - DNA, 25 bp, Probe Sequence
acttggagagagagaaacctttggg

SEQ ID NO: 75836 - DNA, 25 bp, Probe Sequence
ccaacttggagagagagaaaccttt

SEQ ID NO: 75837 - DNA, 25 bp, Probe Sequence
aaagctgaaacccatatgcaaagac

SEQ ID NO: 75838 - DNA, 25 bp, Probe Sequence
ctgaaacccatatgcaaagaccatg

SEQ ID NO: 75839 - DNA, 25 bp, Probe Sequence
gttccctagagaggataagaaaacc

SEQ ID NO: 75840 - DNA, 25 bp, Probe Sequence
ggttccctagagaggataagaaaac

SEQ ID NO: 75841 - DNA, 25 bp, Probe Sequence
aggttccctagagaggataagaaaa

SEQ ID NO: 75842 - DNA, 25 bp, Probe Sequence
aaaaggttccctagagaggataaga

SEQ ID NO: 75843 - DNA, 25 bp, Probe Sequence
ggaaagctgaaacccatatgcaaag

SEQ ID NO: 75844 - DNA, 25 bp, Probe Sequence
ttccctagagaggataagaaaaccc

SEQ ID NO: 75845 - DNA, 25 bp, Probe Sequence
gagagaaacctttgggaaggaaatg

SEQ ID NO: 75846 - DNA, 25 bp, Probe Sequence
agagagaaacctttgggaaggaaat

SEQ ID NO: 75847 - DNA, 25 bp, Probe Sequence
tccctagagaggataagaaaacccc

SEQ ID NO: 75848 - DNA, 25 bp, Probe Sequence
aagctgaaacccatatgcaaagacc

SEQ ID NO: 75849 - DNA, 25 bp, Probe Sequence
cccaacttggagagagagaaacctt

SEQ ID NO: 75850 - DNA, 25 bp, Probe Sequence
gctgaaacccatatgcaaagaccat

SEQ ID NO: 75851 - DNA, 25 bp, Probe Sequence
acaattcaagccgattctagttctg

SEQ ID NO: 75852 - DNA, 25 bp, Probe Sequence
cacaattcaagccgattctagttct

SEQ ID NO: 75853 - DNA, 25 bp, Probe Sequence
aacacaattcaagccgattctagtt

SEQ ID NO: 75854 - DNA, 25 bp, Probe Sequence
acacaattcaagccgattctagttc

SEQ ID NO: 75855 - DNA, 25 bp, Probe Sequence
gaacacaattcaagccgattctagt

SEQ ID NO: 75856 - DNA, 25 bp, Probe Sequence
ggaacacaattcaagccgattctag

SEQ ID NO: 75857 - DNA, 25 bp, Probe Sequence
aggttgaggcaagtgtagaagttac

SEQ ID NO: 75858 - DNA, 25 bp, Probe Sequence
caggttgaggcaagtgtagaagtta

SEQ ID NO: 75859 - DNA, 25 bp, Probe Sequence
caattcaagccgattctagttctgc

SEQ ID NO: 75860 - DNA, 25 bp, Probe Sequence
atcaattagcaaagacaagaaccag

SEQ ID NO: 75861 - DNA, 25 bp, Probe Sequence
catcaattagcaaagacaagaacca

SEQ ID NO: 75862 - DNA, 25 bp, Probe Sequence
caattagcaaagacaagaaccagag

SEQ ID NO: 75863 - DNA, 25 bp, Probe Sequence
tggaacacaattcaagccgattcta

SEQ ID NO: 75864 - DNA, 25 bp, Probe Sequence
tcaattagcaaagacaagaaccaga

SEQ ID NO: 75865 - DNA, 25 bp, Probe Sequence
ggcaagtgtagaagttacatctcta

SEQ ID NO: 75866 - DNA, 25 bp, Probe Sequence
ttacatctctatttcccacagacag

SEQ ID NO: 75867 - DNA, 25 bp, Probe Sequence
gttacatctctatttcccacagaca

SEQ ID NO: 75868 - DNA, 25 bp, Probe Sequence
agttacatctctatttcccacagac

SEQ ID NO: 75869 - DNA, 25 bp, Probe Sequence
ttgaagatgtaactattagagctgg

SEQ ID NO: 75870 - DNA, 25 bp, Probe Sequence
ttgaggcaagtgtagaagttacatc

SEQ ID NO: 75871 - DNA, 25 bp, Probe Sequence
gaggcaagtgtagaagttacatctc

SEQ ID NO: 75872 - DNA, 25 bp, Probe Sequence
aagttacatctctatttcccacaga

SEQ ID NO: 75873 - DNA, 25 bp, Probe Sequence
gaagttacatctctatttcccacag

SEQ ID NO: 75874 - DNA, 25 bp, Probe Sequence
agaagttacatctctatttcccaca

SEQ ID NO: 75875 - DNA, 25 bp, Probe Sequence
attgaggataactgttacgaatgaa

SEQ ID NO: 75876 - DNA, 25 bp, Probe Sequence
aattgaggataactgttacgaatga

SEQ ID NO: 75877 - DNA, 25 bp, Probe Sequence
aactgtgaatcttctggataatgaa

SEQ ID NO: 75878 - DNA, 25 bp, Probe Sequence
ggctaacacaatgaaactccatatc

SEQ ID NO: 75879 - DNA, 25 bp, Probe Sequence
gctaacacaatgaaactccatatct

SEQ ID NO: 75880 - DNA, 25 bp, Probe Sequence
ttgaggataactgttacgaatgaaa

SEQ ID NO: 75881 - DNA, 25 bp, Probe Sequence
aaactgtgaatcttctggataatga

SEQ ID NO: 75882 - DNA, 25 bp, Probe Sequence
caaactgtgaatcttctggataatg

SEQ ID NO: 75883 - DNA, 25 bp, Probe Sequence
tgaacaaactgtgaatcttctggat

SEQ ID NO: 75884 - DNA, 25 bp, Probe Sequence
ttgaacaaactgtgaatcttctgga

SEQ ID NO: 75885 - DNA, 25 bp, Probe Sequence
gttgaacaaactgtgaatcttctgg

SEQ ID NO: 75886 - DNA, 25 bp, Probe Sequence
gaacaaactgtgaatcttctggata

SEQ ID NO: 75887 - DNA, 25 bp, Probe Sequence
aacacaatgaaactccatatctact

SEQ ID NO: 75888 - DNA, 25 bp, Probe Sequence
catcctggctaacacaatgaaactc

SEQ ID NO: 75889 - DNA, 25 bp, Probe Sequence
taatgaagtactaagcagctacgaa

SEQ ID NO: 75890 - DNA, 25 bp, Probe Sequence
aacaaactgtgaatcttctggataa

SEQ ID NO: 75891 - DNA, 25 bp, Probe Sequence
ataatgaagtactaagcagctacga

SEQ ID NO: 75892 - DNA, 25 bp, Probe Sequence
gataatgaagtactaagcagctacg

SEQ ID NO: 75893 - DNA, 25 bp, Probe Sequence
tggataatgaagtactaagcagcta

SEQ ID NO: 75894 - DNA, 25 bp, Probe Sequence
acaaactgtgaatcttctggataat

SEQ ID NO: 75895 - DNA, 25 bp, Probe Sequence
ggataatgaagtactaagcagctac

SEQ ID NO: 75896 - DNA, 25 bp, Probe Sequence
aaattgaggataactgttacgaatg

SEQ ID NO: 75897 - DNA, 25 bp, Probe Sequence
tggctaacacaatgaaactccatat

SEQ ID NO: 75898 - DNA, 25 bp, Probe Sequence
ctggcaggattcacttatgggtaaa

SEQ ID NO: 75899 - DNA, 25 bp, Probe Sequence
gtaactcaatcaggaggaagagaag

SEQ ID NO: 75900 - DNA, 25 bp, Probe Sequence
taactcaatcaggaggaagagaagg

SEQ ID NO: 75901 - DNA, 25 bp, Probe Sequence
cgtaactcaatcaggaggaagagaa

SEQ ID NO: 75902 - DNA, 25 bp, Probe Sequence
gaacaagcagtgaatgtggatctaa

SEQ ID NO: 75903 - DNA, 25 bp, Probe Sequence
aacaagcagtgaatgtggatctaac

SEQ ID NO: 75904 - DNA, 25 bp, Probe Sequence
aagcagtgaatgtggatctaacgaa

SEQ ID NO: 75905 - DNA, 25 bp, Probe Sequence
actcaatagatttatctcaggctgg

SEQ ID NO: 75906 - DNA, 25 bp, Probe Sequence
cagtgaatgtggatctaacgaaatc

SEQ ID NO: 75907 - DNA, 25 bp, Probe Sequence
ctcaatagatttatctcaggctggg

SEQ ID NO: 75908 - DNA, 25 bp, Probe Sequence
aatcacaacgtaactcaatcaggag

SEQ ID NO: 75909 - DNA, 25 bp, Probe Sequence
caagcagtgaatgtggatctaacga

SEQ ID NO: 75910 - DNA, 25 bp, Probe Sequence
agtgaatgtggatctaacgaaatca

SEQ ID NO: 75911 - DNA, 25 bp, Probe Sequence
aactcaatagatttatctcaggctg

SEQ ID NO: 75912 - DNA, 25 bp, Probe Sequence
ggaacaagcagtgaatgtggatcta

SEQ ID NO: 75913 - DNA, 25 bp, Probe Sequence
gcagtgaatgtggatctaacgaaat

SEQ ID NO: 75914 - DNA, 25 bp, Probe Sequence
aacgtaactcaatcaggaggaagag

SEQ ID NO: 75915 - DNA, 25 bp, Probe Sequence
gagctacatcctcattgttcacagt

SEQ ID NO: 75916 - DNA, 25 bp, Probe Sequence
gctacatcctcattgttcacagtga

SEQ ID NO: 75917 - DNA, 25 bp, Probe Sequence
caacgtaactcaatcaggaggaaga

SEQ ID NO: 75918 - DNA, 25 bp, Probe Sequence
tcaatagatttatctcaggctgggc

SEQ ID NO: 75919 - DNA, 25 bp, Probe Sequence
gaaatcacaacgtaactcaatcagg

SEQ ID NO: 75920 - DNA, 25 bp, Probe Sequence
aaactcaatagatttatctcaggct

SEQ ID NO: 75921 - DNA, 25 bp, Probe Sequence
aaatcacaacgtaactcaatcagga

SEQ ID NO: 75922 - DNA, 25 bp, Probe Sequence
cgaaatcacaacgtaactcaatcag

SEQ ID NO: 75923 - DNA, 25 bp, Probe Sequence
catctagccaggaatctattgtgtt

SEQ ID NO: 75924 - DNA, 25 bp, Probe Sequence
tactatgattgtgtatgtgccgcta

SEQ ID NO: 75925 - DNA, 25 bp, Probe Sequence
ccatctagccaggaatctattgtgt

SEQ ID NO: 75926 - DNA, 25 bp, Probe Sequence
ttactatgattgtgtatgtgccgct

SEQ ID NO: 75927 - DNA, 25 bp, Probe Sequence
atttactatgattgtgtatgtgccg

SEQ ID NO: 75928 - DNA, 25 bp, Probe Sequence
actatgattgtgtatgtgccgctac

SEQ ID NO: 75929 - DNA, 25 bp, Probe Sequence
atctagccaggaatctattgtgttt

SEQ ID NO: 75930 - DNA, 25 bp, Probe Sequence
tttactatgattgtgtatgtgccgc

SEQ ID NO: 75931 - DNA, 25 bp, Probe Sequence
ctatgattgtgtatgtgccgctacc

SEQ ID NO: 75932 - DNA, 25 bp, Probe Sequence
aatttactatgattgtgtatgtgcc

SEQ ID NO: 75933 - DNA, 25 bp, Probe Sequence
cccatctagccaggaatctattgtg

SEQ ID NO: 75934 - DNA, 25 bp, Probe Sequence
tatgattgtgtatgtgccgctacca

SEQ ID NO: 75935 - DNA, 25 bp, Probe Sequence
tttcttctgccaatttactatgatt

SEQ ID NO: 75936 - DNA, 25 bp, Probe Sequence
ttctgccaatttactatgattgtgt

SEQ ID NO: 75937 - DNA, 25 bp, Probe Sequence
tctaccttggaactgtattagataa

SEQ ID NO: 75938 - DNA, 25 bp, Probe Sequence
ttctaccttggaactgtattagata

SEQ ID NO: 75939 - DNA, 25 bp, Probe Sequence
cttctgccaatttactatgattgtg

SEQ ID NO: 75940 - DNA, 25 bp, Probe Sequence
tcttctgccaatttactatgattgt

SEQ ID NO: 75941 - DNA, 25 bp, Probe Sequence
tctgccaatttactatgattgtgta

SEQ ID NO: 75942 - DNA, 25 bp, Probe Sequence
tctagccaggaatctattgtgtttt

SEQ ID NO: 75943 - DNA, 25 bp, Probe Sequence
gccaatttactatgattgtgtatgt

SEQ ID NO: 75944 - DNA, 25 bp, Probe Sequence
tgccaatttactatgattgtgtatg

SEQ ID NO: 75945 - DNA, 25 bp, Probe Sequence
tttctaccttggaactgtattagat

SEQ ID NO: 75946 - DNA, 25 bp, Probe Sequence
ttcttctgccaatttactatgattg

SEQ ID NO: 75947 - DNA, 25 bp, Probe Sequence
catctagccaggaatctattgtgtt

SEQ ID NO: 75948 - DNA, 25 bp, Probe Sequence
tactatgattgtgtatgtgccgcta

SEQ ID NO: 75949 - DNA, 25 bp, Probe Sequence
ccatctagccaggaatctattgtgt

SEQ ID NO: 75950 - DNA, 25 bp, Probe Sequence
ttactatgattgtgtatgtgccgct

SEQ ID NO: 75951 - DNA, 25 bp, Probe Sequence
atttactatgattgtgtatgtgccg

SEQ ID NO: 75952 - DNA, 25 bp, Probe Sequence
actatgattgtgtatgtgccgctac

SEQ ID NO: 75953 - DNA, 25 bp, Probe Sequence
atctagccaggaatctattgtgttt

SEQ ID NO: 75954 - DNA, 25 bp, Probe Sequence
tttactatgattgtgtatgtgccgc

SEQ ID NO: 75955 - DNA, 25 bp, Probe Sequence
ctatgattgtgtatgtgccgctacc

SEQ ID NO: 75956 - DNA, 25 bp, Probe Sequence
aatttactatgattgtgtatgtgcc

SEQ ID NO: 75957 - DNA, 25 bp, Probe Sequence
cccatctagccaggaatctattgtg

SEQ ID NO: 75958 - DNA, 25 bp, Probe Sequence
tatgattgtgtatgtgccgctacca

SEQ ID NO: 75959 - DNA, 25 bp, Probe Sequence
tttcttctgccaatttactatgatt

SEQ ID NO: 75960 - DNA, 25 bp, Probe Sequence
ttctgccaatttactatgattgtgt

SEQ ID NO: 75961 - DNA, 25 bp, Probe Sequence
tctaccttggaactgtattagataa

SEQ ID NO: 75962 - DNA, 25 bp, Probe Sequence
ttctaccttggaactgtattagata

SEQ ID NO: 75963 - DNA, 25 bp, Probe Sequence
cttctgccaatttactatgattgtg

SEQ ID NO: 75964 - DNA, 25 bp, Probe Sequence
tcttctgccaatttactatgattgt

SEQ ID NO: 75965 - DNA, 25 bp, Probe Sequence
tctgccaatttactatgattgtgta

SEQ ID NO: 75966 - DNA, 25 bp, Probe Sequence
tctagccaggaatctattgtgtttt

SEQ ID NO: 75967 - DNA, 25 bp, Probe Sequence
gccaatttactatgattgtgtatgt

SEQ ID NO: 75968 - DNA, 25 bp, Probe Sequence
tgccaatttactatgattgtgtatg

SEQ ID NO: 75969 - DNA, 25 bp, Probe Sequence
tttctaccttggaactgtattagat

SEQ ID NO: 75970 - DNA, 25 bp, Probe Sequence
ttcttctgccaatttactatgattg

SEQ ID NO: 75971 - DNA, 25 bp, Probe Sequence
atcttggattgtgatgctattggta

SEQ ID NO: 75972 - DNA, 25 bp, Probe Sequence
tgtgatgctattggtacttgagaat

SEQ ID NO: 75973 - DNA, 25 bp, Probe Sequence
ttgtgatgctattggtacttgagaa

SEQ ID NO: 75974 - DNA, 25 bp, Probe Sequence
attgtgatgctattggtacttgaga

SEQ ID NO: 75975 - DNA, 25 bp, Probe Sequence
gattgtgatgctattggtacttgag

SEQ ID NO: 75976 - DNA, 25 bp, Probe Sequence
ttggattgtgatgctattggtactt

SEQ ID NO: 75977 - DNA, 25 bp, Probe Sequence
aatgaagcagttatgtgttgtccag

SEQ ID NO: 75978 - DNA, 25 bp, Probe Sequence
cttggattgtgatgctattggtact

SEQ ID NO: 75979 - DNA, 25 bp, Probe Sequence
ggattgtgatgctattggtacttga

SEQ ID NO: 75980 - DNA, 25 bp, Probe Sequence
tcttggattgtgatgctattggtac

SEQ ID NO: 75981 - DNA, 25 bp, Probe Sequence
tggattgtgatgctattggtacttg

SEQ ID NO: 75982 - DNA, 25 bp, Probe Sequence
atgtcctcacttcaaggttatcaat

SEQ ID NO: 75983 - DNA, 25 bp, Probe Sequence
gtcctcacttcaaggttatcaatct

SEQ ID NO: 75984 - DNA, 25 bp, Probe Sequence
tcctcacttcaaggttatcaatctt

SEQ ID NO: 75985 - DNA, 25 bp, Probe Sequence
tgtcctcacttcaaggttatcaatc

SEQ ID NO: 75986 - DNA, 25 bp, Probe Sequence
tgatgctattggtacttgagaatac

SEQ ID NO: 75987 - DNA, 25 bp, Probe Sequence
gtgatgctattggtacttgagaata

SEQ ID NO: 75988 - DNA, 25 bp, Probe Sequence
atgaagcagttatgtgttgtccagt

SEQ ID NO: 75989 - DNA, 25 bp, Probe Sequence
aatcttggattgtgatgctattggt

SEQ ID NO: 75990 - DNA, 25 bp, Probe Sequence
catgtcctcacttcaaggttatcaa

SEQ ID NO: 75991 - DNA, 25 bp, Probe Sequence
tgaagcagttatgtgttgtccagtt

SEQ ID NO: 75992 - DNA, 25 bp, Probe Sequence
tcggctccctgtataataaatcaag

SEQ ID NO: 75993 - DNA, 25 bp, Probe Sequence
ttgatgtttatgaggatgattgctg

SEQ ID NO: 75994 - DNA, 25 bp, Probe Sequence
atcggctccctgtataataaatcaa

SEQ ID NO: 75995 - DNA, 25 bp, Probe Sequence
cactacagtgaagtattacagttgt

SEQ ID NO: 75996 - DNA, 25 bp, Probe Sequence
gtttcatctttcctggatcactaca

SEQ ID NO: 75997 - DNA, 25 bp, Probe Sequence
cgtttcatctttcctggatcactac

SEQ ID NO: 75998 - DNA, 25 bp, Probe Sequence
tttcatctttcctggatcactacag

SEQ ID NO: 75999 - DNA, 25 bp, Probe Sequence
ttcatctttcctggatcactacagt

SEQ ID NO: 76000 - DNA, 25 bp, Probe Sequence
tctatattgtaatgatgtcctatgc

SEQ ID NO: 76001 - DNA, 25 bp, Probe Sequence
aaggaggcactactgagcaactatg

SEQ ID NO: 76002 - DNA, 25 bp, Probe Sequence
actacagtgaagtattacagttgta

SEQ ID NO: 76003 - DNA, 25 bp, Probe Sequence
cagtgaagtattacagttgtacagt

SEQ ID NO: 76004 - DNA, 25 bp, Probe Sequence
tgaagtattacagttgtacagttcc

SEQ ID NO: 76005 - DNA, 25 bp, Probe Sequence
acgtttcatctttcctggatcacta

SEQ ID NO: 76006 - DNA, 25 bp, Probe Sequence
ctacagtgaagtattacagttgtac

SEQ ID NO: 76007 - DNA, 25 bp, Probe Sequence
tttaaccagcacccaccataattcc

SEQ ID NO: 76008 - DNA, 25 bp, Probe Sequence
cttgctcggataaaactttgtatgt

SEQ ID NO: 76009 - DNA, 25 bp, Probe Sequence
tcatctttcctggatcactacagtg

SEQ ID NO: 76010 - DNA, 25 bp, Probe Sequence
aaaggaggcactactgagcaactat

SEQ ID NO: 76011 - DNA, 25 bp, Probe Sequence
gcttgctcggataaaactttgtatg

SEQ ID NO: 76012 - DNA, 25 bp, Probe Sequence
agtgaagtattacagttgtacagtt

SEQ ID NO: 76013 - DNA, 25 bp, Probe Sequence
ttgctcggataaaactttgtatgta

SEQ ID NO: 76014 - DNA, 25 bp, Probe Sequence
acagtgaagtattacagttgtacag

SEQ ID NO: 76015 - DNA, 25 bp, Probe Sequence
tgctcggataaaactttgtatgtat

SEQ ID NO: 76016 - DNA, 25 bp, Probe Sequence
ctatattgtaatgatgtcctatgca

SEQ ID NO: 76017 - DNA, 25 bp, Probe Sequence
gtgaagtattacagttgtacagttc

SEQ ID NO: 76018 - DNA, 25 bp, Probe Sequence
attggtggagcttctctggaatcat

SEQ ID NO: 76019 - DNA, 25 bp, Probe Sequence
ctaactgatgtgtgtgttggagtct

SEQ ID NO: 76020 - DNA, 25 bp, Probe Sequence
taactgatgtgtgtgttggagtctc

SEQ ID NO: 76021 - DNA, 25 bp, Probe Sequence
ctgatgtgtgtgttggagtctcttc

SEQ ID NO: 76022 - DNA, 25 bp, Probe Sequence
gctcagaatgacaaggtaaaggaaa

SEQ ID NO: 76023 - DNA, 25 bp, Probe Sequence
tttgctcagaatgacaaggtaaagg

SEQ ID NO: 76024 - DNA, 25 bp, Probe Sequence
tgctcagaatgacaaggtaaaggaa

SEQ ID NO: 76025 - DNA, 25 bp, Probe Sequence
ttgctcagaatgacaaggtaaagga

SEQ ID NO: 76026 - DNA, 25 bp, Probe Sequence
ttacagaggtgcatgactaaataca

SEQ ID NO: 76027 - DNA, 25 bp, Probe Sequence
acttacagaggtgcatgactaaata

SEQ ID NO: 76028 - DNA, 25 bp, Probe Sequence
cttacagaggtgcatgactaaatac

SEQ ID NO: 76029 - DNA, 25 bp, Probe Sequence
agaggtgcatgactaaatacattgt

SEQ ID NO: 76030 - DNA, 25 bp, Probe Sequence
cagaggtgcatgactaaatacattg

SEQ ID NO: 76031 - DNA, 25 bp, Probe Sequence
acagaggtgcatgactaaatacatt

SEQ ID NO: 76032 - DNA, 25 bp, Probe Sequence
tacagaggtgcatgactaaatacat

SEQ ID NO: 76033 - DNA, 25 bp, Probe Sequence
gctaactgatgtgtgtgttggagtc

SEQ ID NO: 76034 - DNA, 25 bp, Probe Sequence
actgatgtgtgtgttggagtctctt

SEQ ID NO: 76035 - DNA, 25 bp, Probe Sequence
aactgatgtgtgtgttggagtctct

SEQ ID NO: 76036 - DNA, 25 bp, Probe Sequence
tgactaaatacattgtccctcgatg

SEQ ID NO: 76037 - DNA, 25 bp, Probe Sequence
atgactaaatacattgtccctcgat

SEQ ID NO: 76038 - DNA, 25 bp, Probe Sequence
catgactaaatacattgtccctcga

SEQ ID NO: 76039 - DNA, 25 bp, Probe Sequence
gcatgactaaatacattgtccctcg

SEQ ID NO: 76040 - DNA, 25 bp, Probe Sequence
gaggtgcatgactaaatacattgtc

SEQ ID NO: 76041 - DNA, 25 bp, Probe Sequence
gtggtagatgttattttcagggttg

SEQ ID NO: 76042 - DNA, 25 bp, Probe Sequence
ggtggtagatgttattttcagggtt

SEQ ID NO: 76043 - DNA, 25 bp, Probe Sequence
caatagtgataatctgatgctgaag

SEQ ID NO: 76044 - DNA, 25 bp, Probe Sequence
ttcaactgtgtagagaggcaagtag

SEQ ID NO: 76045 - DNA, 25 bp, Probe Sequence
cttcaactgtgtagagaggcaagta

SEQ ID NO: 76046 - DNA, 25 bp, Probe Sequence
aatagtgataatctgatgctgaaga

SEQ ID NO: 76047 - DNA, 25 bp, Probe Sequence
acctctgcaatagtgataatctgat

SEQ ID NO: 76048 - DNA, 25 bp, Probe Sequence
cctctgcaatagtgataatctgatg

SEQ ID NO: 76049 - DNA, 25 bp, Probe Sequence
tttcgtgaatttgcttgtttgtttc

SEQ ID NO: 76050 - DNA, 25 bp, Probe Sequence
actgtcacttggttaatttaagcac

SEQ ID NO: 76051 - DNA, 25 bp, Probe Sequence
ctgtcacttggttaatttaagcact

SEQ ID NO: 76052 - DNA, 25 bp, Probe Sequence
cgtgaatttgcttgtttgtttcttc

SEQ ID NO: 76053 - DNA, 25 bp, Probe Sequence
tgtcacttggttaatttaagcactt

SEQ ID NO: 76054 - DNA, 25 bp, Probe Sequence
tcgtgaatttgcttgtttgtttctt

SEQ ID NO: 76055 - DNA, 25 bp, Probe Sequence
ttcgtgaatttgcttgtttgtttct

SEQ ID NO: 76056 - DNA, 25 bp, Probe Sequence
acttggttaatttaagcacttctgt

SEQ ID NO: 76057 - DNA, 25 bp, Probe Sequence
aactgtcacttggttaatttaagca

SEQ ID NO: 76058 - DNA, 25 bp, Probe Sequence
cacttggttaatttaagcacttctg

SEQ ID NO: 76059 - DNA, 25 bp, Probe Sequence
tcacttggttaatttaagcacttct

SEQ ID NO: 76060 - DNA, 25 bp, Probe Sequence
gtcacttggttaatttaagcacttc

SEQ ID NO: 76061 - DNA, 25 bp, Probe Sequence
tttacttactttgtcccatgctact

SEQ ID NO: 76062 - DNA, 25 bp, Probe Sequence
cttcatgcctttacttactttgtcc

SEQ ID NO: 76063 - DNA, 25 bp, Probe Sequence
tgtttgtttcttcatgcctttactt

SEQ ID NO: 76064 - DNA, 25 bp, Probe Sequence
ttgtttgtttcttcatgcctttact

SEQ ID NO: 76065 - DNA, 25 bp, Probe Sequence
ctttacttactttgtcccatgctac

SEQ ID NO: 76066 - DNA, 25 bp, Probe Sequence
aatttgcttgtttgtttcttcatgc

SEQ ID NO: 76067 - DNA, 25 bp, Probe Sequence
tgaataaatgctatggcttatcaca

SEQ ID NO: 76068 - DNA, 25 bp, Probe Sequence
gacttaaacctgagagataaggacc

SEQ ID NO: 76069 - DNA, 25 bp, Probe Sequence
cttaaacctgagagataaggaccac

SEQ ID NO: 76070 - DNA, 25 bp, Probe Sequence
tgacttaaacctgagagataaggac

SEQ ID NO: 76071 - DNA, 25 bp, Probe Sequence
acttaaacctgagagataaggacca

SEQ ID NO: 76072 - DNA, 25 bp, Probe Sequence
acacatgaataaatgctatggctta

SEQ ID NO: 76073 - DNA, 25 bp, Probe Sequence
tacacatgaataaatgctatggctt

SEQ ID NO: 76074 - DNA, 25 bp, Probe Sequence
atacacatgaataaatgctatggct

SEQ ID NO: 76075 - DNA, 25 bp, Probe Sequence
gaataaatgctatggcttatcacaa

SEQ ID NO: 76076 - DNA, 25 bp, Probe Sequence
gttgacttaaacctgagagataagg

SEQ ID NO: 76077 - DNA, 25 bp, Probe Sequence
ttgacttaaacctgagagataagga

SEQ ID NO: 76078 - DNA, 25 bp, Probe Sequence
ttaaacctgagagataaggaccacc

SEQ ID NO: 76079 - DNA, 25 bp, Probe Sequence
atgaataaatgctatggcttatcac

SEQ ID NO: 76080 - DNA, 25 bp, Probe Sequence
aataaatgctatggcttatcacaaa

SEQ ID NO: 76081 - DNA, 25 bp, Probe Sequence
cacatgaataaatgctatggcttat

SEQ ID NO: 76082 - DNA, 25 bp, Probe Sequence
acatgaataaatgctatggcttatc

SEQ ID NO: 76083 - DNA, 25 bp, Probe Sequence
tatacacatgaataaatgctatggc

SEQ ID NO: 76084 - DNA, 25 bp, Probe Sequence
catgaataaatgctatggcttatca

SEQ ID NO: 76085 - DNA, 25 bp, Probe Sequence
gtgagtggaagaagctggcatattc

SEQ ID NO: 76086 - DNA, 25 bp, Probe Sequence
taaacctgagagataaggaccaccc

SEQ ID NO: 76087 - DNA, 25 bp, Probe Sequence
caggctggaaaattgaaacataatt

SEQ ID NO: 76088 - DNA, 25 bp, Probe Sequence
ggttcaaatgattctcgtgcctcag

SEQ ID NO: 76089 - DNA, 25 bp, Probe Sequence
ataaatgctatggcttatcacaaaa

SEQ ID NO: 76090 - DNA, 25 bp, Probe Sequence
gggttgacttaaacctgagagataa

SEQ ID NO: 76091 - DNA, 25 bp, Probe Sequence
gtagatataggtgaagaggaacagc

SEQ ID NO: 76092 - DNA, 25 bp, Probe Sequence
tagatataggtgaagaggaacagca

SEQ ID NO: 76093 - DNA, 25 bp, Probe Sequence
aggtagatataggtgaagaggaaca

SEQ ID NO: 76094 - DNA, 25 bp, Probe Sequence
ccaaggtagatataggtgaagagga

SEQ ID NO: 76095 - DNA, 25 bp, Probe Sequence
ggtagatataggtgaagaggaacag

SEQ ID NO: 76096 - DNA, 25 bp, Probe Sequence
aaggtagatataggtgaagaggaac

SEQ ID NO: 76097 - DNA, 25 bp, Probe Sequence
caaggtagatataggtgaagaggaa

SEQ ID NO: 76098 - DNA, 25 bp, Probe Sequence
agatataggtgaagaggaacagcag

SEQ ID NO: 76099 - DNA, 25 bp, Probe Sequence
gatataggtgaagaggaacagcagc

SEQ ID NO: 76100 - DNA, 25 bp, Probe Sequence
cccaaggtagatataggtgaagagg

SEQ ID NO: 76101 - DNA, 25 bp, Probe Sequence
tataggtgaagaggaacagcagcat

SEQ ID NO: 76102 - DNA, 25 bp, Probe Sequence
atataggtgaagaggaacagcagca

SEQ ID NO: 76103 - DNA, 25 bp, Probe Sequence
tagatgagctgtccattcttctctg

SEQ ID NO: 76104 - DNA, 25 bp, Probe Sequence
gtagatgagctgtccattcttctct

SEQ ID NO: 76105 - DNA, 25 bp, Probe Sequence
gtgtagatgagctgtccattcttct

SEQ ID NO: 76106 - DNA, 25 bp, Probe Sequence
tgtagatgagctgtccattcttctc

SEQ ID NO: 76107 - DNA, 25 bp, Probe Sequence
ctcatttctctcctggcagtttcta

SEQ ID NO: 76108 - DNA, 25 bp, Probe Sequence
cacattgtaggtcttgagcacttcc

SEQ ID NO: 76109 - DNA, 25 bp, Probe Sequence
ccacattgtaggtcttgagcacttc

SEQ ID NO: 76110 - DNA, 25 bp, Probe Sequence
tcatttctctcctggcagtttctac

SEQ ID NO: 76111 - DNA, 25 bp, Probe Sequence
gaacttgtagcagcggtacttgtag

SEQ ID NO: 76112 - DNA, 25 bp, Probe Sequence
ctgggaggtacttgatgaacactag

SEQ ID NO: 76113 - DNA, 25 bp, Probe Sequence
gagctgtccattcttctctgtgtag

SEQ ID NO: 76114 - DNA, 25 bp, Probe Sequence
agctgtccattcttctctgtgtaga

SEQ ID NO: 76115 - DNA, 25 bp, Probe Sequence
ctggataatgctgagatagaatggt

SEQ ID NO: 76116 - DNA, 25 bp, Probe Sequence
actggataatgctgagatagaatgg

SEQ ID NO: 76117 - DNA, 25 bp, Probe Sequence
cactggataatgctgagatagaatg

SEQ ID NO: 76118 - DNA, 25 bp, Probe Sequence
ccactggataatgctgagatagaat

SEQ ID NO: 76119 - DNA, 25 bp, Probe Sequence
tggataatgctgagatagaatggta

SEQ ID NO: 76120 - DNA, 25 bp, Probe Sequence
ggataatgctgagatagaatggtat

SEQ ID NO: 76121 - DNA, 25 bp, Probe Sequence
tcctactagaggtaattgaagccaa

SEQ ID NO: 76122 - DNA, 25 bp, Probe Sequence
ttcctactagaggtaattgaagcca

SEQ ID NO: 76123 - DNA, 25 bp, Probe Sequence
gccactggataatgctgagatagaa

SEQ ID NO: 76124 - DNA, 25 bp, Probe Sequence
tggaaagagagaggatatttaaccc

SEQ ID NO: 76125 - DNA, 25 bp, Probe Sequence
ggatgttatggaaagagagaggata

SEQ ID NO: 76126 - DNA, 25 bp, Probe Sequence
tactagaggtaattgaagccaatcc

SEQ ID NO: 76127 - DNA, 25 bp, Probe Sequence
cctactagaggtaattgaagccaat

SEQ ID NO: 76128 - DNA, 25 bp, Probe Sequence
aaacatttacactgacagccactat

SEQ ID NO: 76129 - DNA, 25 bp, Probe Sequence
atgactgggatgttatggaaagaga

SEQ ID NO: 76130 - DNA, 25 bp, Probe Sequence
agtatcagagttgttagaagctgtt

SEQ ID NO: 76131 - DNA, 25 bp, Probe Sequence
aagtatcagagttgttagaagctgt

SEQ ID NO: 76132 - DNA, 25 bp, Probe Sequence
gtatcagagttgttagaagctgttc

SEQ ID NO: 76133 - DNA, 25 bp, Probe Sequence
caagtatcagagttgttagaagctg

SEQ ID NO: 76134 - DNA, 25 bp, Probe Sequence
gggatgttatggaaagagagaggat

SEQ ID NO: 76135 - DNA, 25 bp, Probe Sequence
gatatgctgtggtttcctactagag

SEQ ID NO: 76136 - DNA, 25 bp, Probe Sequence
actgggatgttatggaaagagagag

SEQ ID NO: 76137 - DNA, 25 bp, Probe Sequence
gactgggatgttatggaaagagaga

SEQ ID NO: 76138 - DNA, 25 bp, Probe Sequence
actagaggtaattgaagccaatcct

SEQ ID NO: 76139 - DNA, 25 bp, Probe Sequence
gtgtacggtgtgaggtctatataag

SEQ ID NO: 76140 - DNA, 25 bp, Probe Sequence
tacggtgtgaggtctatataagcag

SEQ ID NO: 76141 - DNA, 25 bp, Probe Sequence
gtacggtgtgaggtctatataagca

SEQ ID NO: 76142 - DNA, 25 bp, Probe Sequence
tgtacggtgtgaggtctatataagc

SEQ ID NO: 76143 - DNA, 25 bp, Probe Sequence
cgtgtacggtgtgaggtctatataa

SEQ ID NO: 76144 - DNA, 25 bp, Probe Sequence
ggtctatataagcagagccttcgtt

SEQ ID NO: 76145 - DNA, 25 bp, Probe Sequence
tgaggtctatataagcagagccttc

SEQ ID NO: 76146 - DNA, 25 bp, Probe Sequence
cggtgtgaggtctatataagcagag

SEQ ID NO: 76147 - DNA, 25 bp, Probe Sequence
gtgaggtctatataagcagagcctt

SEQ ID NO: 76148 - DNA, 25 bp, Probe Sequence
gtgtgaggtctatataagcagagcc

SEQ ID NO: 76149 - DNA, 25 bp, Probe Sequence
ggtgtgaggtctatataagcagagc

SEQ ID NO: 76150 - DNA, 25 bp, Probe Sequence
atataagcagagccttcgtttagtg

SEQ ID NO: 76151 - DNA, 25 bp, Probe Sequence
acggtgtgaggtctatataagcaga

SEQ ID NO: 76152 - DNA, 25 bp, Probe Sequence
gaggtctatataagcagagccttcg

SEQ ID NO: 76153 - DNA, 25 bp, Probe Sequence
tataagcagagccttcgtttagtga

SEQ ID NO: 76154 - DNA, 25 bp, Probe Sequence
tatataagcagagccttcgtttagt

SEQ ID NO: 76155 - DNA, 25 bp, Probe Sequence
gtctatataagcagagccttcgttt

SEQ ID NO: 76156 - DNA, 25 bp, Probe Sequence
tgtgaggtctatataagcagagcct

SEQ ID NO: 76157 - DNA, 25 bp, Probe Sequence
tctatataagcagagccttcgttta

SEQ ID NO: 76158 - DNA, 25 bp, Probe Sequence
ctatataagcagagccttcgtttag

SEQ ID NO: 76159 - DNA, 25 bp, Probe Sequence
aggtctatataagcagagccttcgt

SEQ ID NO: 76160 - DNA, 25 bp, Probe Sequence
ataagcagagccttcgtttagtgaa

SEQ ID NO: 76161 - DNA, 25 bp, Probe Sequence
gcgtgtacggtgtgaggtctatata

SEQ ID NO: 76162 - DNA, 25 bp, Probe Sequence
taagcagagccttcgtttagtgaac

SEQ ID NO: 76163 - DNA, 25 bp, Probe Sequence
agaataaacagagagagtccctacc

SEQ ID NO: 76164 - DNA, 25 bp, Probe Sequence
aagaataaacagagagagtccctac

SEQ ID NO: 76165 - DNA, 25 bp, Probe Sequence
gctatctttaggcagttatttccaa

SEQ ID NO: 76166 - DNA, 25 bp, Probe Sequence
aaagaataaacagagagagtcccta

SEQ ID NO: 76167 - DNA, 25 bp, Probe Sequence
taaagaataaacagagagagtccct

SEQ ID NO: 76168 - DNA, 25 bp, Probe Sequence
agccaatggagaaacaacatctata

SEQ ID NO: 76169 - DNA, 25 bp, Probe Sequence
tagccaatggagaaacaacatctat

SEQ ID NO: 76170 - DNA, 25 bp, Probe Sequence
ttagccaatggagaaacaacatcta

SEQ ID NO: 76171 - DNA, 25 bp, Probe Sequence
aaggaacttacagccaatgaacaaa

SEQ ID NO: 76172 - DNA, 25 bp, Probe Sequence
aaaggaacttacagccaatgaacaa

SEQ ID NO: 76173 - DNA, 25 bp, Probe Sequence
agtaatgtaggatgatctggaaacc

SEQ ID NO: 76174 - DNA, 25 bp, Probe Sequence
gaataaacagagagagtccctaccc

SEQ ID NO: 76175 - DNA, 25 bp, Probe Sequence
gccaatggagaaacaacatctataa

SEQ ID NO: 76176 - DNA, 25 bp, Probe Sequence
gggatgctgatctggagatattatt

SEQ ID NO: 76177 - DNA, 25 bp, Probe Sequence
gtaatgtaggatgatctggaaaccc

SEQ ID NO: 76178 - DNA, 25 bp, Probe Sequence
tgggatgctgatctggagatattat

SEQ ID NO: 76179 - DNA, 25 bp, Probe Sequence
tttagccaatggagaaacaacatct

SEQ ID NO: 76180 - DNA, 25 bp, Probe Sequence
tttccatttctcacctctcaattaa

SEQ ID NO: 76181 - DNA, 25 bp, Probe Sequence
ctgggatgctgatctggagatatta

SEQ ID NO: 76182 - DNA, 25 bp, Probe Sequence
atttccagaactatatttgacccat

SEQ ID NO: 76183 - DNA, 25 bp, Probe Sequence
ataaagaataaacagagagagtccc

SEQ ID NO: 76184 - DNA, 25 bp, Probe Sequence
ggatgctgatctggagatattattt

SEQ ID NO: 76185 - DNA, 25 bp, Probe Sequence
agctatctttaggcagttatttcca

SEQ ID NO: 76186 - DNA, 25 bp, Probe Sequence
ggacagctatctttaggcagttatt

SEQ ID NO: 76187 - DNA, 25 bp, Probe Sequence
gccacactacttgagttgaagataa

SEQ ID NO: 76188 - DNA, 25 bp, Probe Sequence
gcaacaggtcttcataattacacaa

SEQ ID NO: 76189 - DNA, 25 bp, Probe Sequence
aaggcaacaggtcttcataattaca

SEQ ID NO: 76190 - DNA, 25 bp, Probe Sequence
aggcaacaggtcttcataattacac

SEQ ID NO: 76191 - DNA, 25 bp, Probe Sequence
ggcaacaggtcttcataattacaca

SEQ ID NO: 76192 - DNA, 25 bp, Probe Sequence
aacaggtcttcataattacacaaca

SEQ ID NO: 76193 - DNA, 25 bp, Probe Sequence
taaggcaacaggtcttcataattac

SEQ ID NO: 76194 - DNA, 25 bp, Probe Sequence
acaggtcttcataattacacaacat

SEQ ID NO: 76195 - DNA, 25 bp, Probe Sequence
caacaggtcttcataattacacaac

SEQ ID NO: 76196 - DNA, 25 bp, Probe Sequence
tcacagcacagagataacacaaata

SEQ ID NO: 76197 - DNA, 25 bp, Probe Sequence
ttaaggcaacaggtcttcataatta

SEQ ID NO: 76198 - DNA, 25 bp, Probe Sequence
cacagcacagagataacacaaataa

SEQ ID NO: 76199 - DNA, 25 bp, Probe Sequence
ttcacagcacagagataacacaaat

SEQ ID NO: 76200 - DNA, 25 bp, Probe Sequence
atttcacagcacagagataacacaa

SEQ ID NO: 76201 - DNA, 25 bp, Probe Sequence
taatttcacagcacagagataacac

SEQ ID NO: 76202 - DNA, 25 bp, Probe Sequence
cgccacactacttgagttgaagata

SEQ ID NO: 76203 - DNA, 25 bp, Probe Sequence
tttcacagcacagagataacacaaa

SEQ ID NO: 76204 - DNA, 25 bp, Probe Sequence
acagcacagagataacacaaataat

SEQ ID NO: 76205 - DNA, 25 bp, Probe Sequence
aatttcacagcacagagataacaca

SEQ ID NO: 76206 - DNA, 25 bp, Probe Sequence
ctaatttcacagcacagagataaca

SEQ ID NO: 76207 - DNA, 25 bp, Probe Sequence
caggtcttcataattacacaacatt

SEQ ID NO: 76208 - DNA, 25 bp, Probe Sequence
gaagataaagtcagcctatttggat

SEQ ID NO: 76209 - DNA, 25 bp, Probe Sequence
tgaagataaagtcagcctatttgga

SEQ ID NO: 76210 - DNA, 25 bp, Probe Sequence
ttgagttgaagataaagtcagccta

SEQ ID NO: 76211 - DNA, 25 bp, Probe Sequence
tgtcattaagtctccagaatccttg

SEQ ID NO: 76212 - DNA, 25 bp, Probe Sequence
ctgtcattaagtctccagaatcctt

SEQ ID NO: 76213 - DNA, 25 bp, Probe Sequence
gacaggtgcttggttatcttcaatt

SEQ ID NO: 76214 - DNA, 25 bp, Probe Sequence
gaatccagattaacatgccttcttg

SEQ ID NO: 76215 - DNA, 25 bp, Probe Sequence
gaatgacaggtgcttggttatcttc

SEQ ID NO: 76216 - DNA, 25 bp, Probe Sequence
gaagaatgacaggtgcttggttatc

SEQ ID NO: 76217 - DNA, 25 bp, Probe Sequence
attcttcctgcttgttcagttaatt

SEQ ID NO: 76218 - DNA, 25 bp, Probe Sequence
aattcttcctgcttgttcagttaat

SEQ ID NO: 76219 - DNA, 25 bp, Probe Sequence
agaatgacaggtgcttggttatctt

SEQ ID NO: 76220 - DNA, 25 bp, Probe Sequence
aagaatgacaggtgcttggttatct

SEQ ID NO: 76221 - DNA, 25 bp, Probe Sequence
cttcctgcttgttcagttaattaca

SEQ ID NO: 76222 - DNA, 25 bp, Probe Sequence
gtcattaagtctccagaatccttgg

SEQ ID NO: 76223 - DNA, 25 bp, Probe Sequence
tcttcctgcttgttcagttaattac

SEQ ID NO: 76224 - DNA, 25 bp, Probe Sequence
tgacaggtgcttggttatcttcaat

SEQ ID NO: 76225 - DNA, 25 bp, Probe Sequence
atgacaggtgcttggttatcttcaa

SEQ ID NO: 76226 - DNA, 25 bp, Probe Sequence
aatgacaggtgcttggttatcttca

SEQ ID NO: 76227 - DNA, 25 bp, Probe Sequence
ttcctgcttgttcagttaattacat

SEQ ID NO: 76228 - DNA, 25 bp, Probe Sequence
gcacccaaaggaatttaagacattt

SEQ ID NO: 76229 - DNA, 25 bp, Probe Sequence
ttcttcctgcttgttcagttaatta

SEQ ID NO: 76230 - DNA, 25 bp, Probe Sequence
ggaagaatgacaggtgcttggttat

SEQ ID NO: 76231 - DNA, 25 bp, Probe Sequence
caggtgcttggttatcttcaattta

SEQ ID NO: 76232 - DNA, 25 bp, Probe Sequence
tctaacaggaaatacaagtctcaga

SEQ ID NO: 76233 - DNA, 25 bp, Probe Sequence
aatccagattaacatgccttcttgg

SEQ ID NO: 76234 - DNA, 25 bp, Probe Sequence
tcctgcttgttcagttaattacata

SEQ ID NO: 76235 - DNA, 25 bp, Probe Sequence
tttaagaagaaagcaagagacacca

SEQ ID NO: 76236 - DNA, 25 bp, Probe Sequence
taaggaggcaattaaggtgaaatgt

SEQ ID NO: 76237 - DNA, 25 bp, Probe Sequence
ttaagaagaaagcaagagacaccag

SEQ ID NO: 76238 - DNA, 25 bp, Probe Sequence
ttaaggaggcaattaaggtgaaatg

SEQ ID NO: 76239 - DNA, 25 bp, Probe Sequence
ctttaaggaggcaattaaggtgaaa

SEQ ID NO: 76240 - DNA, 25 bp, Probe Sequence
tttaaggaggcaattaaggtgaaat

SEQ ID NO: 76241 - DNA, 25 bp, Probe Sequence
aaggaggcaattaaggtgaaatgtg

SEQ ID NO: 76242 - DNA, 25 bp, Probe Sequence
ggaagagagctgtagcaaccattaa

SEQ ID NO: 76243 - DNA, 25 bp, Probe Sequence
ttaaatcatgttccattagcccagg

SEQ ID NO: 76244 - DNA, 25 bp, Probe Sequence
taagaagaaagcaagagacaccagg

SEQ ID NO: 76245 - DNA, 25 bp, Probe Sequence
gaggcaattaaggtgaaatgtggtc

SEQ ID NO: 76246 - DNA, 25 bp, Probe Sequence
gcccatgtgagtgtattcaaagata

SEQ ID NO: 76247 - DNA, 25 bp, Probe Sequence
aagagagctgtagcaaccattaaat

SEQ ID NO: 76248 - DNA, 25 bp, Probe Sequence
atataacagcccatgtgagtgtatt

SEQ ID NO: 76249 - DNA, 25 bp, Probe Sequence
tataacagcccatgtgagtgtattc

SEQ ID NO: 76250 - DNA, 25 bp, Probe Sequence
catataacagcccatgtgagtgtat

SEQ ID NO: 76251 - DNA, 25 bp, Probe Sequence
ggcaattaaggtgaaatgtggtcat

SEQ ID NO: 76252 - DNA, 25 bp, Probe Sequence
tttaaatcatgttccattagcccag

SEQ ID NO: 76253 - DNA, 25 bp, Probe Sequence
ctttaaatcatgttccattagccca

SEQ ID NO: 76254 - DNA, 25 bp, Probe Sequence
actttaaatcatgttccattagccc

SEQ ID NO: 76255 - DNA, 25 bp, Probe Sequence
gaagagagctgtagcaaccattaaa

SEQ ID NO: 76256 - DNA, 25 bp, Probe Sequence
cccatgtgagtgtattcaaagatac

SEQ ID NO: 76257 - DNA, 25 bp, Probe Sequence
taaatcatgttccattagcccaggt

SEQ ID NO: 76258 - DNA, 25 bp, Probe Sequence
agagagctgtagcaaccattaaatg

SEQ ID NO: 76259 - DNA, 25 bp, Probe Sequence
ggcattgattagttactgacttgac

SEQ ID NO: 76260 - DNA, 25 bp, Probe Sequence
gcattgattagttactgacttgaca

SEQ ID NO: 76261 - DNA, 25 bp, Probe Sequence
cctaactcttaatgagccatacaca

SEQ ID NO: 76262 - DNA, 25 bp, Probe Sequence
ttgattagttactgacttgacacaa

SEQ ID NO: 76263 - DNA, 25 bp, Probe Sequence
ctaactcttaatgagccatacacaa

SEQ ID NO: 76264 - DNA, 25 bp, Probe Sequence
ctaacttctgttccatcaagacacc

SEQ ID NO: 76265 - DNA, 25 bp, Probe Sequence
cctaacttctgttccatcaagacac

SEQ ID NO: 76266 - DNA, 25 bp, Probe Sequence
ggttcatgtggcttaatgttataga

SEQ ID NO: 76267 - DNA, 25 bp, Probe Sequence
attgattagttactgacttgacaca

SEQ ID NO: 76268 - DNA, 25 bp, Probe Sequence
cattgattagttactgacttgacac

SEQ ID NO: 76269 - DNA, 25 bp, Probe Sequence
ctagccttaacaacttggtccatct

SEQ ID NO: 76270 - DNA, 25 bp, Probe Sequence
tctagccttaacaacttggtccatc

SEQ ID NO: 76271 - DNA, 25 bp, Probe Sequence
atccttcagttcttacacgtatcag

SEQ ID NO: 76272 - DNA, 25 bp, Probe Sequence
aatccttcagttcttacacgtatca

SEQ ID NO: 76273 - DNA, 25 bp, Probe Sequence
tagccttaacaacttggtccatctg

SEQ ID NO: 76274 - DNA, 25 bp, Probe Sequence
gtctagccttaacaacttggtccat

SEQ ID NO: 76275 - DNA, 25 bp, Probe Sequence
gggacaaggagatttctaaggtaat

SEQ ID NO: 76276 - DNA, 25 bp, Probe Sequence
actgttctattcatttagggcattg

SEQ ID NO: 76277 - DNA, 25 bp, Probe Sequence
agggacaaggagatttctaaggtaa

SEQ ID NO: 76278 - DNA, 25 bp, Probe Sequence
aagggacaaggagatttctaaggta

SEQ ID NO: 76279 - DNA, 25 bp, Probe Sequence
gactgttctattcatttagggcatt

SEQ ID NO: 76280 - DNA, 25 bp, Probe Sequence
gaatccttcagttcttacacgtatc

SEQ ID NO: 76281 - DNA, 25 bp, Probe Sequence
tccttcagttcttacacgtatcagt

SEQ ID NO: 76282 - DNA, 25 bp, Probe Sequence
agagactgttctattcatttagggc

SEQ ID NO: 76283 - DNA, 25 bp, Probe Sequence
acacatccaataagaccatcagaat

SEQ ID NO: 76284 - DNA, 25 bp, Probe Sequence
aacacatccaataagaccatcagaa

SEQ ID NO: 76285 - DNA, 25 bp, Probe Sequence
taacacatccaataagaccatcaga

SEQ ID NO: 76286 - DNA, 25 bp, Probe Sequence
ataacacatccaataagaccatcag

SEQ ID NO: 76287 - DNA, 25 bp, Probe Sequence
cacatccaataagaccatcagaata

SEQ ID NO: 76288 - DNA, 25 bp, Probe Sequence
acatccaataagaccatcagaatag

SEQ ID NO: 76289 - DNA, 25 bp, Probe Sequence
catccaataagaccatcagaataga

SEQ ID NO: 76290 - DNA, 25 bp, Probe Sequence
acatataacacatccaataagacca

SEQ ID NO: 76291 - DNA, 25 bp, Probe Sequence
tataacacatccaataagaccatca

SEQ ID NO: 76292 - DNA, 25 bp, Probe Sequence
gctcctcaagatcataacatactat

SEQ ID NO: 76293 - DNA, 25 bp, Probe Sequence
agatagctcctcaagatcataacat

SEQ ID NO: 76294 - DNA, 25 bp, Probe Sequence
agctcctcaagatcataacatacta

SEQ ID NO: 76295 - DNA, 25 bp, Probe Sequence
tagctcctcaagatcataacatact

SEQ ID NO: 76296 - DNA, 25 bp, Probe Sequence
atccaataagaccatcagaatagaa

SEQ ID NO: 76297 - DNA, 25 bp, Probe Sequence
caagaaacactatatcaaagcctca

SEQ ID NO: 76298 - DNA, 25 bp, Probe Sequence
acaagaaacactatatcaaagcctc

SEQ ID NO: 76299 - DNA, 25 bp, Probe Sequence
gacaagaaacactatatcaaagcct

SEQ ID NO: 76300 - DNA, 25 bp, Probe Sequence
agacaagaaacactatatcaaagcc

SEQ ID NO: 76301 - DNA, 25 bp, Probe Sequence
tagatagctcctcaagatcataaca

SEQ ID NO: 76302 - DNA, 25 bp, Probe Sequence
tcctttgatttaagactgtggtttc

SEQ ID NO: 76303 - DNA, 25 bp, Probe Sequence
cctttgatttaagactgtggtttct

SEQ ID NO: 76304 - DNA, 25 bp, Probe Sequence
tttaagactgtggtttctatgagcc

SEQ ID NO: 76305 - DNA, 25 bp, Probe Sequence
aacatataacacatccaataagacc

SEQ ID NO: 76306 - DNA, 25 bp, Probe Sequence
atttaagactgtggtttctatgagc

SEQ ID NO: 76307 - DNA, 25 bp, Probe Sequence
gcctgaattatgctcttatgtgaag

SEQ ID NO: 76308 - DNA, 25 bp, Probe Sequence
cctgaattatgctcttatgtgaagt

SEQ ID NO: 76309 - DNA, 25 bp, Probe Sequence
acctattgactgtattctgtgtatt

SEQ ID NO: 76310 - DNA, 25 bp, Probe Sequence
aacctattgactgtattctgtgtat

SEQ ID NO: 76311 - DNA, 25 bp, Probe Sequence
ataacctattgactgtattctgtgt

SEQ ID NO: 76312 - DNA, 25 bp, Probe Sequence
taacctattgactgtattctgtgta

SEQ ID NO: 76313 - DNA, 25 bp, Probe Sequence
tgtgtttcatactttagcatcaacg

SEQ ID NO: 76314 - DNA, 25 bp, Probe Sequence
gaggatgtgtttcatactttagcat

SEQ ID NO: 76315 - DNA, 25 bp, Probe Sequence
tgaggatgtgtttcatactttagca

SEQ ID NO: 76316 - DNA, 25 bp, Probe Sequence
ctgaggatgtgtttcatactttagc

SEQ ID NO: 76317 - DNA, 25 bp, Probe Sequence
gaagtttcttggtctgtggatatgg

SEQ ID NO: 76318 - DNA, 25 bp, Probe Sequence
ggaagtttcttggtctgtggatatg

SEQ ID NO: 76319 - DNA, 25 bp, Probe Sequence
gtgtttcatactttagcatcaacgc

SEQ ID NO: 76320 - DNA, 25 bp, Probe Sequence
ctgaattatgctcttatgtgaagta

SEQ ID NO: 76321 - DNA, 25 bp, Probe Sequence
atgtgtttcatactttagcatcaac

SEQ ID NO: 76322 - DNA, 25 bp, Probe Sequence
aatctgaggatgtgtttcatacttt

SEQ ID NO: 76323 - DNA, 25 bp, Probe Sequence
gccttgtagaattgcattgtctata

SEQ ID NO: 76324 - DNA, 25 bp, Probe Sequence
tctgaggatgtgtttcatactttag

SEQ ID NO: 76325 - DNA, 25 bp, Probe Sequence
tttgctaataaaggaaatggttctc

SEQ ID NO: 76326 - DNA, 25 bp, Probe Sequence
ggcctgaattatgctcttatgtgaa

SEQ ID NO: 76327 - DNA, 25 bp, Probe Sequence
ttgctaataaaggaaatggttctcc

SEQ ID NO: 76328 - DNA, 25 bp, Probe Sequence
tgctaataaaggaaatggttctccc

SEQ ID NO: 76329 - DNA, 25 bp, Probe Sequence
aagtttcttggtctgtggatatggg

SEQ ID NO: 76330 - DNA, 25 bp, Probe Sequence
tgaattatgctcttatgtgaagtaa

SEQ ID NO: 76331 - DNA, 25 bp, Probe Sequence
gcttaatactgaggtgatgagttga

SEQ ID NO: 76332 - DNA, 25 bp, Probe Sequence
tactgaggtgatgagttgatagatg

SEQ ID NO: 76333 - DNA, 25 bp, Probe Sequence
ggcttaatactgaggtgatgagttg

SEQ ID NO: 76334 - DNA, 25 bp, Probe Sequence
aatactgaggtgatgagttgataga

SEQ ID NO: 76335 - DNA, 25 bp, Probe Sequence
atactgaggtgatgagttgatagat

SEQ ID NO: 76336 - DNA, 25 bp, Probe Sequence
cttaatactgaggtgatgagttgat

SEQ ID NO: 76337 - DNA, 25 bp, Probe Sequence
tgccttctacatattccattctatt

SEQ ID NO: 76338 - DNA, 25 bp, Probe Sequence
actgaggtgatgagttgatagatgc

SEQ ID NO: 76339 - DNA, 25 bp, Probe Sequence
aaaccaccaagatacacatttacct

SEQ ID NO: 76340 - DNA, 25 bp, Probe Sequence
caaaccaccaagatacacatttacc

SEQ ID NO: 76341 - DNA, 25 bp, Probe Sequence
gcgaggaagagcattaggataaata

SEQ ID NO: 76342 - DNA, 25 bp, Probe Sequence
taaatcaaagaggagaacaacacac

SEQ ID NO: 76343 - DNA, 25 bp, Probe Sequence
aatagtctaatgtatgtctgggctt

SEQ ID NO: 76344 - DNA, 25 bp, Probe Sequence
aaatagtctaatgtatgtctgggct

SEQ ID NO: 76345 - DNA, 25 bp, Probe Sequence
ctagtaatactacaaccaacggtga

SEQ ID NO: 76346 - DNA, 25 bp, Probe Sequence
tctagtaatactacaaccaacggtg

SEQ ID NO: 76347 - DNA, 25 bp, Probe Sequence
gcaaaccaccaagatacacatttac

SEQ ID NO: 76348 - DNA, 25 bp, Probe Sequence
agcaaaccaccaagatacacattta

SEQ ID NO: 76349 - DNA, 25 bp, Probe Sequence
agtctaatgtatgtctgggcttaat

SEQ ID NO: 76350 - DNA, 25 bp, Probe Sequence
tagtaatactacaaccaacggtgaa

SEQ ID NO: 76351 - DNA, 25 bp, Probe Sequence
aaccaccaagatacacatttacctg

SEQ ID NO: 76352 - DNA, 25 bp, Probe Sequence
aaatcaaagaggagaacaacacaca

SEQ ID NO: 76353 - DNA, 25 bp, Probe Sequence
taatactgaggtgatgagttgatag

SEQ ID NO: 76354 - DNA, 25 bp, Probe Sequence
atctcatcagacctttatcatagcc

SEQ ID NO: 76355 - DNA, 25 bp, Probe Sequence
agtacatctacgtatagtcatcgct

SEQ ID NO: 76356 - DNA, 25 bp, Probe Sequence
cagtacatctacgtatagtcatcgc

SEQ ID NO: 76357 - DNA, 25 bp, Probe Sequence
gtacatctacgtatagtcatcgcta

SEQ ID NO: 76358 - DNA, 25 bp, Probe Sequence
ccagtacatctacgtatagtcatcg

SEQ ID NO: 76359 - DNA, 25 bp, Probe Sequence
gccagtacatctacgtatagtcatc

SEQ ID NO: 76360 - DNA, 25 bp, Probe Sequence
tacatctacgtatagtcatcgctat

SEQ ID NO: 76361 - DNA, 25 bp, Probe Sequence
tgccagtacatctacgtatagtcat

SEQ ID NO: 76362 - DNA, 25 bp, Probe Sequence
gtgccagtacatctacgtatagtca

SEQ ID NO: 76363 - DNA, 25 bp, Probe Sequence
cagtacaatcaatgggcgtggatag

SEQ ID NO: 76364 - DNA, 25 bp, Probe Sequence
cgtgccagtacatctacgtatagtc

SEQ ID NO: 76365 - DNA, 25 bp, Probe Sequence
agtacaatcaatgggcgtggatagc

SEQ ID NO: 76366 - DNA, 25 bp, Probe Sequence
ccagtacaatcaatgggcgtggata

SEQ ID NO: 76367 - DNA, 25 bp, Probe Sequence
ctgccactgttcatattcaggttaa

SEQ ID NO: 76368 - DNA, 25 bp, Probe Sequence
gttcatattcaggttaaagtctccg

SEQ ID NO: 76369 - DNA, 25 bp, Probe Sequence
gttattccagttcatgccgttatcg

SEQ ID NO: 76370 - DNA, 25 bp, Probe Sequence
cgttattccagttcatgccgttatc

SEQ ID NO: 76371 - DNA, 25 bp, Probe Sequence
tgttcatattcaggttaaagtctcc

SEQ ID NO: 76372 - DNA, 25 bp, Probe Sequence
ttattccagttcatgccgttatcga

SEQ ID NO: 76373 - DNA, 25 bp, Probe Sequence
gccactgttcatattcaggttaaag

SEQ ID NO: 76374 - DNA, 25 bp, Probe Sequence
atccagattcagcgaactttctttg

SEQ ID NO: 76375 - DNA, 25 bp, Probe Sequence
catccagattcagcgaactttcttt

SEQ ID NO: 76376 - DNA, 25 bp, Probe Sequence
tgccactgttcatattcaggttaaa

SEQ ID NO: 76377 - DNA, 25 bp, Probe Sequence
tattccagttcatgccgttatcgaa

SEQ ID NO: 76378 - DNA, 25 bp, Probe Sequence
ccactgttcatattcaggttaaagt

SEQ ID NO: 76379 - DNA, 25 bp, Probe Sequence
gctgccactgttcatattcaggtta

SEQ ID NO: 76380 - DNA, 25 bp, Probe Sequence
gaactttctttgctgctgtacttca

SEQ ID NO: 76381 - DNA, 25 bp, Probe Sequence
aactttctttgctgctgtacttcac

SEQ ID NO: 76382 - DNA, 25 bp, Probe Sequence
cactgttcatattcaggttaaagtc

SEQ ID NO: 76383 - DNA, 25 bp, Probe Sequence
actgttcatattcaggttaaagtct

SEQ ID NO: 76384 - DNA, 25 bp, Probe Sequence
ctgttcatattcaggttaaagtctc

SEQ ID NO: 76385 - DNA, 25 bp, Probe Sequence
gcgttattccagttcatgccgttat

SEQ ID NO: 76386 - DNA, 25 bp, Probe Sequence
cgaactttctttgctgctgtacttc

SEQ ID NO: 76387 - DNA, 25 bp, Probe Sequence
atatggcgtaaccttcagtccttcg

SEQ ID NO: 76388 - DNA, 25 bp, Probe Sequence
ttcatattcaggttaaagtctccgg

SEQ ID NO: 76389 - DNA, 25 bp, Probe Sequence
ttccagttgtacgcatccagattca

SEQ ID NO: 76390 - DNA, 25 bp, Probe Sequence
catatggcgtaaccttcagtccttc

SEQ ID NO: 76391 - DNA, 25 bp, Probe Sequence
actgtgttctcggacatagtaagta

SEQ ID NO: 76392 - DNA, 25 bp, Probe Sequence
gttctcggacatagtaagtacactg

SEQ ID NO: 76393 - DNA, 25 bp, Probe Sequence
tctcggacatagtaagtacactgta

SEQ ID NO: 76394 - DNA, 25 bp, Probe Sequence
ctgtgttctcggacatagtaagtac

SEQ ID NO: 76395 - DNA, 25 bp, Probe Sequence
ttctcggacatagtaagtacactgt

SEQ ID NO: 76396 - DNA, 25 bp, Probe Sequence
tgttctcggacatagtaagtacact

SEQ ID NO: 76397 - DNA, 25 bp, Probe Sequence
ctcggacatagtaagtacactgtat

SEQ ID NO: 76398 - DNA, 25 bp, Probe Sequence
tgtgttctcggacatagtaagtaca

SEQ ID NO: 76399 - DNA, 25 bp, Probe Sequence
tcggacatagtaagtacactgtatt

SEQ ID NO: 76400 - DNA, 25 bp, Probe Sequence
attggaattggagaccttcacagag

SEQ ID NO: 76401 - DNA, 25 bp, Probe Sequence
gattggaattggagaccttcacaga

SEQ ID NO: 76402 - DNA, 25 bp, Probe Sequence
cactgtgttctcggacatagtaagt

SEQ ID NO: 76403 - DNA, 25 bp, Probe Sequence
atcacctagatagattattgcacgt

SEQ ID NO: 76404 - DNA, 25 bp, Probe Sequence
catcacctagatagattattgcacg

SEQ ID NO: 76405 - DNA, 25 bp, Probe Sequence
acagtgattggaattggagaccttc

SEQ ID NO: 76406 - DNA, 25 bp, Probe Sequence
ccatcacctagatagattattgcac

SEQ ID NO: 76407 - DNA, 25 bp, Probe Sequence
cacagtgattggaattggagacctt

SEQ ID NO: 76408 - DNA, 25 bp, Probe Sequence
acccatcacctagatagattattgc

SEQ ID NO: 76409 - DNA, 25 bp, Probe Sequence
tggacccatcacctagatagattat

SEQ ID NO: 76410 - DNA, 25 bp, Probe Sequence
tgattggaattggagaccttcacag

SEQ ID NO: 76411 - DNA, 25 bp, Probe Sequence
cagtgattggaattggagaccttca

SEQ ID NO: 76412 - DNA, 25 bp, Probe Sequence
gctcagtcatagaaacacacttaaa

SEQ ID NO: 76413 - DNA, 25 bp, Probe Sequence
ggctcagtcatagaaacacacttaa

SEQ ID NO: 76414 - DNA, 25 bp, Probe Sequence
gaaacacagtgattggaattggaga

SEQ ID NO: 76415 - DNA, 25 bp, Probe Sequence
ccaggatactgtgattctagtgatt

SEQ ID NO: 76416 - DNA, 25 bp, Probe Sequence
agagagtcttgaaggagagtgagaa

SEQ ID NO: 76417 - DNA, 25 bp, Probe Sequence
cagaaagcaacaggaaacattaaga

SEQ ID NO: 76418 - DNA, 25 bp, Probe Sequence
tcagaaagcaacaggaaacattaag

SEQ ID NO: 76419 - DNA, 25 bp, Probe Sequence
ctgagcattaaccacaaagtctatc

SEQ ID NO: 76420 - DNA, 25 bp, Probe Sequence
agaaagcaacaggaaacattaagaa

SEQ ID NO: 76421 - DNA, 25 bp, Probe Sequence
gagcattaaccacaaagtctatcca

SEQ ID NO: 76422 - DNA, 25 bp, Probe Sequence
tgagcattaaccacaaagtctatcc

SEQ ID NO: 76423 - DNA, 25 bp, Probe Sequence
tttattcactgttgttcccactgtt

SEQ ID NO: 76424 - DNA, 25 bp, Probe Sequence
cattaaccacaaagtctatccacat

SEQ ID NO: 76425 - DNA, 25 bp, Probe Sequence
ttcagaaagcaacaggaaacattaa

SEQ ID NO: 76426 - DNA, 25 bp, Probe Sequence
gttcagaaagcaacaggaaacatta

SEQ ID NO: 76427 - DNA, 25 bp, Probe Sequence
agcattaaccacaaagtctatccac

SEQ ID NO: 76428 - DNA, 25 bp, Probe Sequence
attggaatgacaccacagtaagaga

SEQ ID NO: 76429 - DNA, 25 bp, Probe Sequence
cattggaatgacaccacagtaagag

SEQ ID NO: 76430 - DNA, 25 bp, Probe Sequence
ttattcactgttgttcccactgttc

SEQ ID NO: 76431 - DNA, 25 bp, Probe Sequence
gcattaaccacaaagtctatccaca

SEQ ID NO: 76432 - DNA, 25 bp, Probe Sequence
gaaagcaacaggaaacattaagaaa

SEQ ID NO: 76433 - DNA, 25 bp, Probe Sequence
ttggaatgacaccacagtaagagaa

SEQ ID NO: 76434 - DNA, 25 bp, Probe Sequence
actgagcattaaccacaaagtctat

SEQ ID NO: 76435 - DNA, 25 bp, Probe Sequence
gagagtcttgaaggagagtgagaaa

SEQ ID NO: 76436 - DNA, 25 bp, Probe Sequence
cactgagcattaaccacaaagtcta

SEQ ID NO: 76437 - DNA, 25 bp, Probe Sequence
caataccctgtcactgagcattaac

SEQ ID NO: 76438 - DNA, 25 bp, Probe Sequence
gaaatcccattgaaatgagcacatc

SEQ ID NO: 76439 - DNA, 25 bp, Probe Sequence
ttagaattataggcatgagcaactg

SEQ ID NO: 76440 - DNA, 25 bp, Probe Sequence
cgttagaattataggcatgagcaac

SEQ ID NO: 76441 - DNA, 25 bp, Probe Sequence
gttagaattataggcatgagcaact

SEQ ID NO: 76442 - DNA, 25 bp, Probe Sequence
aagacattacagctataccagaact

SEQ ID NO: 76443 - DNA, 25 bp, Probe Sequence
ctagagtacaggcgttcactatcag

SEQ ID NO: 76444 - DNA, 25 bp, Probe Sequence
ttgtgttcttcatacagtatcagat

SEQ ID NO: 76445 - DNA, 25 bp, Probe Sequence
agacattacagctataccagaactg

SEQ ID NO: 76446 - DNA, 25 bp, Probe Sequence
tcatttcttctacctgagactcttt

SEQ ID NO: 76447 - DNA, 25 bp, Probe Sequence
tgctaccatttaggatctatgtgag

SEQ ID NO: 76448 - DNA, 25 bp, Probe Sequence
tgttgctaccatttaggatctatgt

SEQ ID NO: 76449 - DNA, 25 bp, Probe Sequence
ttgctaccatttaggatctatgtga

SEQ ID NO: 76450 - DNA, 25 bp, Probe Sequence
gttgctaccatttaggatctatgtg

SEQ ID NO: 76451 - DNA, 25 bp, Probe Sequence
gacattacagctataccagaactgg

SEQ ID NO: 76452 - DNA, 25 bp, Probe Sequence
cctgcttataaatcatgttgctacc

SEQ ID NO: 76453 - DNA, 25 bp, Probe Sequence
atcatgttgctaccatttaggatct

SEQ ID NO: 76454 - DNA, 25 bp, Probe Sequence
gtcatttcttctacctgagactctt

SEQ ID NO: 76455 - DNA, 25 bp, Probe Sequence
ctgcttataaatcatgttgctacca

SEQ ID NO: 76456 - DNA, 25 bp, Probe Sequence
gcctgcttataaatcatgttgctac

SEQ ID NO: 76457 - DNA, 25 bp, Probe Sequence
tcatgttgctaccatttaggatcta

SEQ ID NO: 76458 - DNA, 25 bp, Probe Sequence
gacttcgtgtgtgtgtaaggttgaa

SEQ ID NO: 76459 - DNA, 25 bp, Probe Sequence
aatcatgttgctaccatttaggatc

SEQ ID NO: 76460 - DNA, 25 bp, Probe Sequence
tgtgttcttcatacagtatcagata

SEQ ID NO: 76461 - DNA, 25 bp, Probe Sequence
atgttgctaccatttaggatctatg

SEQ ID NO: 76462 - DNA, 25 bp, Probe Sequence
acttctgtatataggagtcagggaa

SEQ ID NO: 76463 - DNA, 25 bp, Probe Sequence
cgtattagtcatctgctagttacca

SEQ ID NO: 76464 - DNA, 25 bp, Probe Sequence
attatgcctcagtacatgacctatg

SEQ ID NO: 76465 - DNA, 25 bp, Probe Sequence
cattatgcctcagtacatgacctat

SEQ ID NO: 76466 - DNA, 25 bp, Probe Sequence
gtattagtcatctgctagttaccat

SEQ ID NO: 76467 - DNA, 25 bp, Probe Sequence
ttatgcctcagtacatgacctatgg

SEQ ID NO: 76468 - DNA, 25 bp, Probe Sequence
acgtattagtcatctgctagttacc

SEQ ID NO: 76469 - DNA, 25 bp, Probe Sequence
gagtttgtttctggcatcctaaatc

SEQ ID NO: 76470 - DNA, 25 bp, Probe Sequence
agtttgtttctggcatcctaaatca

SEQ ID NO: 76471 - DNA, 25 bp, Probe Sequence
tattagtcatctgctagttaccatg

SEQ ID NO: 76472 - DNA, 25 bp, Probe Sequence
tttgtttctggcatcctaaatcaac

SEQ ID NO: 76473 - DNA, 25 bp, Probe Sequence
gtttgtttctggcatcctaaatcaa

SEQ ID NO: 76474 - DNA, 25 bp, Probe Sequence
gtcggataacaatttcacacaggaa

SEQ ID NO: 76475 - DNA, 25 bp, Probe Sequence
ttgtttctggcatcctaaatcaacg

SEQ ID NO: 76476 - DNA, 25 bp, Probe Sequence
gctacgtattagtcatctgctagtt

SEQ ID NO: 76477 - DNA, 25 bp, Probe Sequence
tcagtacatgacctatgggactttc

SEQ ID NO: 76478 - DNA, 25 bp, Probe Sequence
ctcagtacatgacctatgggacttt

SEQ ID NO: 76479 - DNA, 25 bp, Probe Sequence
atgctacgtattagtcatctgctag

SEQ ID NO: 76480 - DNA, 25 bp, Probe Sequence
catgctacgtattagtcatctgcta

SEQ ID NO: 76481 - DNA, 25 bp, Probe Sequence
tgctacgtattagtcatctgctagt

SEQ ID NO: 76482 - DNA, 25 bp, Probe Sequence
tacatgctacgtattagtcatctgc

SEQ ID NO: 76483 - DNA, 25 bp, Probe Sequence
ggagtttgtttctggcatcctaaat

SEQ ID NO: 76484 - DNA, 25 bp, Probe Sequence
atgacctatgggactttcctacttg

SEQ ID NO: 76485 - DNA, 25 bp, Probe Sequence
gtacatgctacgtattagtcatctg

SEQ ID NO: 76486 - DNA, 25 bp, Probe Sequence
agtacatgctacgtattagtcatct

SEQ ID NO: 76487 - DNA, 25 bp, Probe Sequence
gtagatcacttgaggtcaggagttc

SEQ ID NO: 76488 - DNA, 25 bp, Probe Sequence
tacttagcctcaagacaactgtcat

SEQ ID NO: 76489 - DNA, 25 bp, Probe Sequence
ctcaaagcctgtaatcttagcactt

SEQ ID NO: 76490 - DNA, 25 bp, Probe Sequence
gccgagattaagttaaacaaatgaa

SEQ ID NO: 76491 - DNA, 25 bp, Probe Sequence
caactgtcatgcgtagaaatctaag

SEQ ID NO: 76492 - DNA, 25 bp, Probe Sequence
acaactgtcatgcgtagaaatctaa

SEQ ID NO: 76493 - DNA, 25 bp, Probe Sequence
ctacttagcctcaagacaactgtca

SEQ ID NO: 76494 - DNA, 25 bp, Probe Sequence
aatctaagctcagtgttgtcaggtc

SEQ ID NO: 76495 - DNA, 25 bp, Probe Sequence
ggttgtggcttctggcttaaattaa

SEQ ID NO: 76496 - DNA, 25 bp, Probe Sequence
aactgtcatgcgtagaaatctaagc

SEQ ID NO: 76497 - DNA, 25 bp, Probe Sequence
gaggtagatcacttgaggtcaggag

SEQ ID NO: 76498 - DNA, 25 bp, Probe Sequence
tagaaatctaagctcagtgttgtca

SEQ ID NO: 76499 - DNA, 25 bp, Probe Sequence
gtagaaatctaagctcagtgttgtc

SEQ ID NO: 76500 - DNA, 25 bp, Probe Sequence
agaaatctaagctcagtgttgtcag

SEQ ID NO: 76501 - DNA, 25 bp, Probe Sequence
ggtagatcacttgaggtcaggagtt

SEQ ID NO: 76502 - DNA, 25 bp, Probe Sequence
cgtagaaatctaagctcagtgttgt

SEQ ID NO: 76503 - DNA, 25 bp, Probe Sequence
gcttctggcttaaattaagagacat

SEQ ID NO: 76504 - DNA, 25 bp, Probe Sequence
acttagcctcaagacaactgtcatg

SEQ ID NO: 76505 - DNA, 25 bp, Probe Sequence
tagatcacttgaggtcaggagttcg

SEQ ID NO: 76506 - DNA, 25 bp, Probe Sequence
ttctggcttaaattaagagacatgg

SEQ ID NO: 76507 - DNA, 25 bp, Probe Sequence
ttgtggcttctggcttaaattaaga

SEQ ID NO: 76508 - DNA, 25 bp, Probe Sequence
gttgtggcttctggcttaaattaag

SEQ ID NO: 76509 - DNA, 25 bp, Probe Sequence
ggcttctggcttaaattaagagaca

SEQ ID NO: 76510 - DNA, 25 bp, Probe Sequence
tggcttctggcttaaattaagagac

SEQ ID NO: 76511 - DNA, 25 bp, Probe Sequence
ttacctcttagcacatcttcgactt

SEQ ID NO: 76512 - DNA, 25 bp, Probe Sequence
gaagatcaaatgaaatactgccctg

SEQ ID NO: 76513 - DNA, 25 bp, Probe Sequence
aagatcaaatgaaatactgccctga

SEQ ID NO: 76514 - DNA, 25 bp, Probe Sequence
tgaagatcaaatgaaatactgccct

SEQ ID NO: 76515 - DNA, 25 bp, Probe Sequence
agatcaaatgaaatactgccctgag

SEQ ID NO: 76516 - DNA, 25 bp, Probe Sequence
gatcaaatgaaatactgccctgagg

SEQ ID NO: 76517 - DNA, 25 bp, Probe Sequence
ctcttagcacatcttcgactttagg

SEQ ID NO: 76518 - DNA, 25 bp, Probe Sequence
cctcttagcacatcttcgactttag

SEQ ID NO: 76519 - DNA, 25 bp, Probe Sequence
ctttacctcttagcacatcttcgac

SEQ ID NO: 76520 - DNA, 25 bp, Probe Sequence
tcttagcacatcttcgactttaggt

SEQ ID NO: 76521 - DNA, 25 bp, Probe Sequence
acctcttagcacatcttcgacttta

SEQ ID NO: 76522 - DNA, 25 bp, Probe Sequence
tacctcttagcacatcttcgacttt

SEQ ID NO: 76523 - DNA, 25 bp, Probe Sequence
tttacctcttagcacatcttcgact

SEQ ID NO: 76524 - DNA, 25 bp, Probe Sequence
ctatattccccacactcttttcaga

SEQ ID NO: 76525 - DNA, 25 bp, Probe Sequence
acataactcaagcaaaatcttcact

SEQ ID NO: 76526 - DNA, 25 bp, Probe Sequence
cttagcacatcttcgactttaggtg

SEQ ID NO: 76527 - DNA, 25 bp, Probe Sequence
gctatattccccacactcttttcag

SEQ ID NO: 76528 - DNA, 25 bp, Probe Sequence
ttgaagatcaaatgaaatactgccc

SEQ ID NO: 76529 - DNA, 25 bp, Probe Sequence
cataactcaagcaaaatcttcactg

SEQ ID NO: 76530 - DNA, 25 bp, Probe Sequence
taactcaagcaaaatcttcactgac

SEQ ID NO: 76531 - DNA, 25 bp, Probe Sequence
aacataactcaagcaaaatcttcac

SEQ ID NO: 76532 - DNA, 25 bp, Probe Sequence
ctcaagcaaaatcttcactgaccta

SEQ ID NO: 76533 - DNA, 25 bp, Probe Sequence
ataactcaagcaaaatcttcactga

SEQ ID NO: 76534 - DNA, 25 bp, Probe Sequence
gagctttacctcttagcacatcttc

SEQ ID NO: 76535 - DNA, 25 bp, Probe Sequence
ccagaggacatcgtagattaagagt

SEQ ID NO: 76536 - DNA, 25 bp, Probe Sequence
cagaggacatcgtagattaagagtc

SEQ ID NO: 76537 - DNA, 25 bp, Probe Sequence
aatgcttgctgaatgactctgaatg

SEQ ID NO: 76538 - DNA, 25 bp, Probe Sequence
aatacccagaggacatcgtagatta

SEQ ID NO: 76539 - DNA, 25 bp, Probe Sequence
atacccagaggacatcgtagattaa

SEQ ID NO: 76540 - DNA, 25 bp, Probe Sequence
aaatacccagaggacatcgtagatt

SEQ ID NO: 76541 - DNA, 25 bp, Probe Sequence
tacccagaggacatcgtagattaag

SEQ ID NO: 76542 - DNA, 25 bp, Probe Sequence
aaatgcttgctgaatgactctgaat

SEQ ID NO: 76543 - DNA, 25 bp, Probe Sequence
aggtccttggtgtcaaattcataat

SEQ ID NO: 76544 - DNA, 25 bp, Probe Sequence
caaatacccagaggacatcgtagat

SEQ ID NO: 76545 - DNA, 25 bp, Probe Sequence
cccagaggacatcgtagattaagag

SEQ ID NO: 76546 - DNA, 25 bp, Probe Sequence
ggtccttggtgtcaaattcataatt

SEQ ID NO: 76547 - DNA, 25 bp, Probe Sequence
cataattgatgatctcttccttgtt

SEQ ID NO: 76548 - DNA, 25 bp, Probe Sequence
caggtccttggtgtcaaattcataa

SEQ ID NO: 76549 - DNA, 25 bp, Probe Sequence
gtccttggtgtcaaattcataattg

SEQ ID NO: 76550 - DNA, 25 bp, Probe Sequence
acccagaggacatcgtagattaaga

SEQ ID NO: 76551 - DNA, 25 bp, Probe Sequence
gttgatgtactcctgggagaatatt

SEQ ID NO: 76552 - DNA, 25 bp, Probe Sequence
ttgatgtactcctgggagaatattt

SEQ ID NO: 76553 - DNA, 25 bp, Probe Sequence
gattcccagcacgaagaaatacatg

SEQ ID NO: 76554 - DNA, 25 bp, Probe Sequence
atgcttgctgaatgactctgaatgc

SEQ ID NO: 76555 - DNA, 25 bp, Probe Sequence
tcataattgatgatctcttccttgt

SEQ ID NO: 76556 - DNA, 25 bp, Probe Sequence
aatacatggacagcaggaggttgat

SEQ ID NO: 76557 - DNA, 25 bp, Probe Sequence
ggttgatgtactcctgggagaatat

SEQ ID NO: 76558 - DNA, 25 bp, Probe Sequence
ctcatgtcaaacgtaaaggtcattg

SEQ ID NO: 76559 - DNA, 25 bp, Probe Sequence
aatgtggtgagacctgtctctataa

SEQ ID NO: 76560 - DNA, 25 bp, Probe Sequence
cgggatgagatgttaaaatatgaaa

SEQ ID NO: 76561 - DNA, 25 bp, Probe Sequence
caatgtggtgagacctgtctctata

SEQ ID NO: 76562 - DNA, 25 bp, Probe Sequence
aaattgaaatatgcgcctgtaatcc

SEQ ID NO: 76563 - DNA, 25 bp, Probe Sequence
aaccatgtgcatcttaaaattgaaa

SEQ ID NO: 76564 - DNA, 25 bp, Probe Sequence
aaaccatgtgcatcttaaaattgaa

SEQ ID NO: 76565 - DNA, 25 bp, Probe Sequence
aaaaccatgtgcatcttaaaattga

SEQ ID NO: 76566 - DNA, 25 bp, Probe Sequence
tgaaaaccatgtgcatcttaaaatt

SEQ ID NO: 76567 - DNA, 25 bp, Probe Sequence
accatgtgcatcttaaaattgaaat

SEQ ID NO: 76568 - DNA, 25 bp, Probe Sequence
gaaaaccatgtgcatcttaaaattg

SEQ ID NO: 76569 - DNA, 25 bp, Probe Sequence
aattgaaatatgcgcctgtaatccc

SEQ ID NO: 76570 - DNA, 25 bp, Probe Sequence
atgaaaaccatgtgcatcttaaaat

SEQ ID NO: 76571 - DNA, 25 bp, Probe Sequence
aaaatatgaaaaccatgtgcatctt

SEQ ID NO: 76572 - DNA, 25 bp, Probe Sequence
tgttaaaatatgaaaaccatgtgca

SEQ ID NO: 76573 - DNA, 25 bp, Probe Sequence
atgttaaaatatgaaaaccatgtgc

SEQ ID NO: 76574 - DNA, 25 bp, Probe Sequence
atgtggtgagacctgtctctataaa

SEQ ID NO: 76575 - DNA, 25 bp, Probe Sequence
tatgaaaaccatgtgcatcttaaaa

SEQ ID NO: 76576 - DNA, 25 bp, Probe Sequence
ccgggatgagatgttaaaatatgaa

SEQ ID NO: 76577 - DNA, 25 bp, Probe Sequence
atatgaaaaccatgtgcatcttaaa

SEQ ID NO: 76578 - DNA, 25 bp, Probe Sequence
aatatgaaaaccatgtgcatcttaa

SEQ ID NO: 76579 - DNA, 25 bp, Probe Sequence
aaatatgaaaaccatgtgcatctta

SEQ ID NO: 76580 - DNA, 25 bp, Probe Sequence
taaaatatgaaaaccatgtgcatct

SEQ ID NO: 76581 - DNA, 25 bp, Probe Sequence
attgaaatatgcgcctgtaatccca

SEQ ID NO: 76582 - DNA, 25 bp, Probe Sequence
gttaaaatatgaaaaccatgtgcat

SEQ ID NO: 76583 - DNA, 25 bp, Probe Sequence
ttgattgttcatagttgcttctcag

SEQ ID NO: 76584 - DNA, 25 bp, Probe Sequence
attgattgttcatagttgcttctca

SEQ ID NO: 76585 - DNA, 25 bp, Probe Sequence
gcttattgattgttcatagttgctt

SEQ ID NO: 76586 - DNA, 25 bp, Probe Sequence
ttatcctaaggttcactaactgtgg

SEQ ID NO: 76587 - DNA, 25 bp, Probe Sequence
tatcctaaggttcactaactgtggt

SEQ ID NO: 76588 - DNA, 25 bp, Probe Sequence
gaatggagtgaatacacagtagcat

SEQ ID NO: 76589 - DNA, 25 bp, Probe Sequence
aagaatggagtgaatacacagtagc

SEQ ID NO: 76590 - DNA, 25 bp, Probe Sequence
gccaagacattaagattccttagaa

SEQ ID NO: 76591 - DNA, 25 bp, Probe Sequence
cctaaggttcactaactgtggttaa

SEQ ID NO: 76592 - DNA, 25 bp, Probe Sequence
tcctaaggttcactaactgtggtta

SEQ ID NO: 76593 - DNA, 25 bp, Probe Sequence
atcctaaggttcactaactgtggtt

SEQ ID NO: 76594 - DNA, 25 bp, Probe Sequence
agaatggagtgaatacacagtagca

SEQ ID NO: 76595 - DNA, 25 bp, Probe Sequence
ttattgccaatgagtaatgctgtgc

SEQ ID NO: 76596 - DNA, 25 bp, Probe Sequence
ctaaggttcactaactgtggttaat

SEQ ID NO: 76597 - DNA, 25 bp, Probe Sequence
aatggagtgaatacacagtagcatg

SEQ ID NO: 76598 - DNA, 25 bp, Probe Sequence
tattgattgttcatagttgcttctc

SEQ ID NO: 76599 - DNA, 25 bp, Probe Sequence
ttctcttcctttcctcatctgaatg

SEQ ID NO: 76600 - DNA, 25 bp, Probe Sequence
tagaataaacatcatctgggcatca

SEQ ID NO: 76601 - DNA, 25 bp, Probe Sequence
tttctcttcctttcctcatctgaat

SEQ ID NO: 76602 - DNA, 25 bp, Probe Sequence
tccttagaataaacatcatctgggc

SEQ ID NO: 76603 - DNA, 25 bp, Probe Sequence
ccttagaataaacatcatctgggca

SEQ ID NO: 76604 - DNA, 25 bp, Probe Sequence
taagaatggagtgaatacacagtag

SEQ ID NO: 76605 - DNA, 25 bp, Probe Sequence
attaagaatggagtgaatacacagt

SEQ ID NO: 76606 - DNA, 25 bp, Probe Sequence
cactaactgtggttaatattgagcc

SEQ ID NO: 76607 - DNA, 25 bp, Probe Sequence
ttcttgattagtctgatgagaggtt

SEQ ID NO: 76608 - DNA, 25 bp, Probe Sequence
tttctttcctcctacttactttggg

SEQ ID NO: 76609 - DNA, 25 bp, Probe Sequence
tctgctctttatctgtttctttcct

SEQ ID NO: 76610 - DNA, 25 bp, Probe Sequence
ctgctctttatctgtttctttcctc

SEQ ID NO: 76611 - DNA, 25 bp, Probe Sequence
gctctttatctgtttctttcctcct

SEQ ID NO: 76612 - DNA, 25 bp, Probe Sequence
gtttctttcctcctacttactttgg

SEQ ID NO: 76613 - DNA, 25 bp, Probe Sequence
tgctctttatctgtttctttcctcc

SEQ ID NO: 76614 - DNA, 25 bp, Probe Sequence
ttctgctctttatctgtttctttcc

SEQ ID NO: 76615 - DNA, 25 bp, Probe Sequence
atgtgacaacttggattaaatggac

SEQ ID NO: 76616 - DNA, 25 bp, Probe Sequence
tctgtttctttcctcctacttactt

SEQ ID NO: 76617 - DNA, 25 bp, Probe Sequence
atctgtttctttcctcctacttact

SEQ ID NO: 76618 - DNA, 25 bp, Probe Sequence
aatgtgacaacttggattaaatgga

SEQ ID NO: 76619 - DNA, 25 bp, Probe Sequence
tgtttctttcctcctacttactttg

SEQ ID NO: 76620 - DNA, 25 bp, Probe Sequence
gtccgatttaatcctatgttgtcac

SEQ ID NO: 76621 - DNA, 25 bp, Probe Sequence
tgtccgatttaatcctatgttgtca

SEQ ID NO: 76622 - DNA, 25 bp, Probe Sequence
gtgacaacttggattaaatggacaa

SEQ ID NO: 76623 - DNA, 25 bp, Probe Sequence
tacttactttgggaagacaacagaa

SEQ ID NO: 76624 - DNA, 25 bp, Probe Sequence
ctacttactttgggaagacaacaga

SEQ ID NO: 76625 - DNA, 25 bp, Probe Sequence
tgttgaatttctgctctttatctgt

SEQ ID NO: 76626 - DNA, 25 bp, Probe Sequence
tcttgattagtctgatgagaggttt

SEQ ID NO: 76627 - DNA, 25 bp, Probe Sequence
tttcttgattagtctgatgagaggt

SEQ ID NO: 76628 - DNA, 25 bp, Probe Sequence
acttactttgggaagacaacagaaa

SEQ ID NO: 76629 - DNA, 25 bp, Probe Sequence
gttgtccgatttaatcctatgttgt

SEQ ID NO: 76630 - DNA, 25 bp, Probe Sequence
tgttgtccgatttaatcctatgttg

SEQ ID NO: 76631 - DNA, 25 bp, Probe Sequence
ctctgtatctctctctctctcactc

SEQ ID NO: 76632 - DNA, 25 bp, Probe Sequence
ctctctgtatctctctctctctcac

SEQ ID NO: 76633 - DNA, 25 bp, Probe Sequence
tctctgtatctctctctctctcact

SEQ ID NO: 76634 - DNA, 25 bp, Probe Sequence
ctgtatctctctctctctcactcac

SEQ ID NO: 76635 - DNA, 25 bp, Probe Sequence
tctgtatctctctctctctcactca

SEQ ID NO: 76636 - DNA, 25 bp, Probe Sequence
gtatctctctctctctcactcacac

SEQ ID NO: 76637 - DNA, 25 bp, Probe Sequence
tatctctctctctctcactcacaca

SEQ ID NO: 76638 - DNA, 25 bp, Probe Sequence
gctctctgtatctctctctctctca

SEQ ID NO: 76639 - DNA, 25 bp, Probe Sequence
tactcgctctctgtatctctctctc

SEQ ID NO: 76640 - DNA, 25 bp, Probe Sequence
gcttagttaccattcttacctgcta

SEQ ID NO: 76641 - DNA, 25 bp, Probe Sequence
tgtatctctctctctctcactcaca

SEQ ID NO: 76642 - DNA, 25 bp, Probe Sequence
accattcttacctgctatatgtgaa

SEQ ID NO: 76643 - DNA, 25 bp, Probe Sequence
atactcgctctctgtatctctctct

SEQ ID NO: 76644 - DNA, 25 bp, Probe Sequence
taccattcttacctgctatatgtga

SEQ ID NO: 76645 - DNA, 25 bp, Probe Sequence
atctctctctctctcactcacacac

SEQ ID NO: 76646 - DNA, 25 bp, Probe Sequence
cgctctctgtatctctctctctctc

SEQ ID NO: 76647 - DNA, 25 bp, Probe Sequence
ctcgctctctgtatctctctctctc

SEQ ID NO: 76648 - DNA, 25 bp, Probe Sequence
ttaccattcttacctgctatatgtg

SEQ ID NO: 76649 - DNA, 25 bp, Probe Sequence
gttaccattcttacctgctatatgt

SEQ ID NO: 76650 - DNA, 25 bp, Probe Sequence
cttagttaccattcttacctgctat

SEQ ID NO: 76651 - DNA, 25 bp, Probe Sequence
aacacctacttagagcattatcatt

SEQ ID NO: 76652 - DNA, 25 bp, Probe Sequence
tcgctctctgtatctctctctctct

SEQ ID NO: 76653 - DNA, 25 bp, Probe Sequence
agttaccattcttacctgctatatg

SEQ ID NO: 76654 - DNA, 25 bp, Probe Sequence
actcgctctctgtatctctctctct

SEQ ID NO: 76655 - DNA, 25 bp, Probe Sequence
ctacaatctcacagaagtccactaa

SEQ ID NO: 76656 - DNA, 25 bp, Probe Sequence
ctactacaatctcacagaagtccac

SEQ ID NO: 76657 - DNA, 25 bp, Probe Sequence
actacaatctcacagaagtccacta

SEQ ID NO: 76658 - DNA, 25 bp, Probe Sequence
tactacaatctcacagaagtccact

SEQ ID NO: 76659 - DNA, 25 bp, Probe Sequence
actactacaatctcacagaagtcca

SEQ ID NO: 76660 - DNA, 25 bp, Probe Sequence
tactactacaatctcacagaagtcc

SEQ ID NO: 76661 - DNA, 25 bp, Probe Sequence
gtactactacaatctcacagaagtc

SEQ ID NO: 76662 - DNA, 25 bp, Probe Sequence
atctcacagaagtccactaaagttc

SEQ ID NO: 76663 - DNA, 25 bp, Probe Sequence
aatctcacagaagtccactaaagtt

SEQ ID NO: 76664 - DNA, 25 bp, Probe Sequence
caatctcacagaagtccactaaagt

SEQ ID NO: 76665 - DNA, 25 bp, Probe Sequence
acaatctcacagaagtccactaaag

SEQ ID NO: 76666 - DNA, 25 bp, Probe Sequence
tacaatctcacagaagtccactaaa

SEQ ID NO: 76667 - DNA, 25 bp, Probe Sequence
cagaagtccactaaagttcaccaaa

SEQ ID NO: 76668 - DNA, 25 bp, Probe Sequence
ctcacagaagtccactaaagttcac

SEQ ID NO: 76669 - DNA, 25 bp, Probe Sequence
ttagatcagaaaggagagcagattt

SEQ ID NO: 76670 - DNA, 25 bp, Probe Sequence
tttagatcagaaaggagagcagatt

SEQ ID NO: 76671 - DNA, 25 bp, Probe Sequence
tctcacagaagtccactaaagttca

SEQ ID NO: 76672 - DNA, 25 bp, Probe Sequence
acagaagtccactaaagttcaccaa

SEQ ID NO: 76673 - DNA, 25 bp, Probe Sequence
tcacagaagtccactaaagttcacc

SEQ ID NO: 76674 - DNA, 25 bp, Probe Sequence
cacagaagtccactaaagttcacca

SEQ ID NO: 76675 - DNA, 25 bp, Probe Sequence
agtactactacaatctcacagaagt

SEQ ID NO: 76676 - DNA, 25 bp, Probe Sequence
agaagtccactaaagttcaccaaaa

SEQ ID NO: 76677 - DNA, 25 bp, Probe Sequence
gagcagattttctttgggagtttta

SEQ ID NO: 76678 - DNA, 25 bp, Probe Sequence
aagtactactacaatctcacagaag

SEQ ID NO: 76679 - DNA, 25 bp, Probe Sequence
ctaatataggcattgttgtgaaggt

SEQ ID NO: 76680 - DNA, 25 bp, Probe Sequence
actaatataggcattgttgtgaagg

SEQ ID NO: 76681 - DNA, 25 bp, Probe Sequence
ttacaatctcataagcgagttcctt

SEQ ID NO: 76682 - DNA, 25 bp, Probe Sequence
attacaatctcataagcgagttcct

SEQ ID NO: 76683 - DNA, 25 bp, Probe Sequence
atataggcattgttgtgaaggtatt

SEQ ID NO: 76684 - DNA, 25 bp, Probe Sequence
aatataggcattgttgtgaaggtat

SEQ ID NO: 76685 - DNA, 25 bp, Probe Sequence
tacaatctcataagcgagttccttg

SEQ ID NO: 76686 - DNA, 25 bp, Probe Sequence
aattacaatctcataagcgagttcc

SEQ ID NO: 76687 - DNA, 25 bp, Probe Sequence
taatataggcattgttgtgaaggta

SEQ ID NO: 76688 - DNA, 25 bp, Probe Sequence
ttctctggttagaccttgattgatg

SEQ ID NO: 76689 - DNA, 25 bp, Probe Sequence
acactaatataggcattgttgtgaa

SEQ ID NO: 76690 - DNA, 25 bp, Probe Sequence
ggagagtttcaatggagttataggg

SEQ ID NO: 76691 - DNA, 25 bp, Probe Sequence
ttcaggagagtttcaatggagttat

SEQ ID NO: 76692 - DNA, 25 bp, Probe Sequence
attcaggagagtttcaatggagtta

SEQ ID NO: 76693 - DNA, 25 bp, Probe Sequence
tattcaggagagtttcaatggagtt

SEQ ID NO: 76694 - DNA, 25 bp, Probe Sequence
ttattcaggagagtttcaatggagt

SEQ ID NO: 76695 - DNA, 25 bp, Probe Sequence
aggagagtttcaatggagttatagg

SEQ ID NO: 76696 - DNA, 25 bp, Probe Sequence
tttcaatggagttatagggcaagtc

SEQ ID NO: 76697 - DNA, 25 bp, Probe Sequence
agtttcaatggagttatagggcaag

SEQ ID NO: 76698 - DNA, 25 bp, Probe Sequence
gagtttcaatggagttatagggcaa

SEQ ID NO: 76699 - DNA, 25 bp, Probe Sequence
cttattcaggagagtttcaatggag

SEQ ID NO: 76700 - DNA, 25 bp, Probe Sequence
ggagttatagggcaagtctgaatta

SEQ ID NO: 76701 - DNA, 25 bp, Probe Sequence
gagagtttcaatggagttatagggc

SEQ ID NO: 76702 - DNA, 25 bp, Probe Sequence
cactaatataggcattgttgtgaag

SEQ ID NO: 76703 - DNA, 25 bp, Probe Sequence
ttgttgttgagttataggagttctt

SEQ ID NO: 76704 - DNA, 25 bp, Probe Sequence
acacatctatagtctcagctactca

SEQ ID NO: 76705 - DNA, 25 bp, Probe Sequence
cacacatctatagtctcagctactc

SEQ ID NO: 76706 - DNA, 25 bp, Probe Sequence
cacatctatagtctcagctactcag

SEQ ID NO: 76707 - DNA, 25 bp, Probe Sequence
attgttgttgagttataggagttct

SEQ ID NO: 76708 - DNA, 25 bp, Probe Sequence
gctattgttgttgagttataggagt

SEQ ID NO: 76709 - DNA, 25 bp, Probe Sequence
tgctattgttgttgagttataggag

SEQ ID NO: 76710 - DNA, 25 bp, Probe Sequence
ctgctattgttgttgagttatagga

SEQ ID NO: 76711 - DNA, 25 bp, Probe Sequence
tctgctattgttgttgagttatagg

SEQ ID NO: 76712 - DNA, 25 bp, Probe Sequence
gcacacatctatagtctcagctact

SEQ ID NO: 76713 - DNA, 25 bp, Probe Sequence
ccatctctacaggaagcaagaacaa

SEQ ID NO: 76714 - DNA, 25 bp, Probe Sequence
ttgtttctgctattgttgttgagtt

SEQ ID NO: 76715 - DNA, 25 bp, Probe Sequence
ttgttgtttctgctattgttgttga

SEQ ID NO: 76716 - DNA, 25 bp, Probe Sequence
gggtattgttgtttctgctattgtt

SEQ ID NO: 76717 - DNA, 25 bp, Probe Sequence
gttgtttctgctattgttgttgagt

SEQ ID NO: 76718 - DNA, 25 bp, Probe Sequence
tgttgtttctgctattgttgttgag

SEQ ID NO: 76719 - DNA, 25 bp, Probe Sequence
attgttgtttctgctattgttgttg

SEQ ID NO: 76720 - DNA, 25 bp, Probe Sequence
ggtattgttgtttctgctattgttg

SEQ ID NO: 76721 - DNA, 25 bp, Probe Sequence
tgtttctgctattgttgttgagtta

SEQ ID NO: 76722 - DNA, 25 bp, Probe Sequence
catctatagtctcagctactcagga

SEQ ID NO: 76723 - DNA, 25 bp, Probe Sequence
acatctatagtctcagctactcagg

SEQ ID NO: 76724 - DNA, 25 bp, Probe Sequence
atctatagtctcagctactcaggag

SEQ ID NO: 76725 - DNA, 25 bp, Probe Sequence
gtattgttgtttctgctattgttgt

SEQ ID NO: 76726 - DNA, 25 bp, Probe Sequence
catctctacaggaagcaagaacaaa

SEQ ID NO: 76727 - DNA, 25 bp, Probe Sequence
cttgctggtgtagagttagatgtta

SEQ ID NO: 76728 - DNA, 25 bp, Probe Sequence
ttgctggtgtagagttagatgttac

SEQ ID NO: 76729 - DNA, 25 bp, Probe Sequence
gcaattccagtcctaagtattacct

SEQ ID NO: 76730 - DNA, 25 bp, Probe Sequence
agcaattccagtcctaagtattacc

SEQ ID NO: 76731 - DNA, 25 bp, Probe Sequence
ctcagcaattccagtcctaagtatt

SEQ ID NO: 76732 - DNA, 25 bp, Probe Sequence
gattcttgctggtgtagagttagat

SEQ ID NO: 76733 - DNA, 25 bp, Probe Sequence
cagcaattccagtcctaagtattac

SEQ ID NO: 76734 - DNA, 25 bp, Probe Sequence
tcagcaattccagtcctaagtatta

SEQ ID NO: 76735 - DNA, 25 bp, Probe Sequence
attcttgctggtgtagagttagatg

SEQ ID NO: 76736 - DNA, 25 bp, Probe Sequence
tcttgctggtgtagagttagatgtt

SEQ ID NO: 76737 - DNA, 25 bp, Probe Sequence
ttcttgctggtgtagagttagatgt

SEQ ID NO: 76738 - DNA, 25 bp, Probe Sequence
aaggattcttgctggtgtagagtta

SEQ ID NO: 76739 - DNA, 25 bp, Probe Sequence
actcagcaattccagtcctaagtat

SEQ ID NO: 76740 - DNA, 25 bp, Probe Sequence
aactcagcaattccagtcctaagta

SEQ ID NO: 76741 - DNA, 25 bp, Probe Sequence
ggattcttgctggtgtagagttaga

SEQ ID NO: 76742 - DNA, 25 bp, Probe Sequence
aggattcttgctggtgtagagttag

SEQ ID NO: 76743 - DNA, 25 bp, Probe Sequence
cacattctaccatcagacaagtcta

SEQ ID NO: 76744 - DNA, 25 bp, Probe Sequence
tacaactcagcaattccagtcctaa

SEQ ID NO: 76745 - DNA, 25 bp, Probe Sequence
acattctaccatcagacaagtctaa

SEQ ID NO: 76746 - DNA, 25 bp, Probe Sequence
caattccagtcctaagtattacctg

SEQ ID NO: 76747 - DNA, 25 bp, Probe Sequence
attccagtcctaagtattacctgaa

SEQ ID NO: 76748 - DNA, 25 bp, Probe Sequence
aattccagtcctaagtattacctga

SEQ ID NO: 76749 - DNA, 25 bp, Probe Sequence
ctacaactcagcaattccagtccta

SEQ ID NO: 76750 - DNA, 25 bp, Probe Sequence
aagtctaaattcatctgttgccatt

SEQ ID NO: 76751 - DNA, 25 bp, Probe Sequence
ctatggcttactgaatggtgatact

SEQ ID NO: 76752 - DNA, 25 bp, Probe Sequence
tatggcttactgaatggtgatactt

SEQ ID NO: 76753 - DNA, 25 bp, Probe Sequence
cctatggcttactgaatggtgatac

SEQ ID NO: 76754 - DNA, 25 bp, Probe Sequence
cattatagagtgctcacagaaggaa

SEQ ID NO: 76755 - DNA, 25 bp, Probe Sequence
atcattatagagtgctcacagaagg

SEQ ID NO: 76756 - DNA, 25 bp, Probe Sequence
agcagttctaacagataggaatgac

SEQ ID NO: 76757 - DNA, 25 bp, Probe Sequence
gaatgacctatggcttactgaatgg

SEQ ID NO: 76758 - DNA, 25 bp, Probe Sequence
ggaatgacctatggcttactgaatg

SEQ ID NO: 76759 - DNA, 25 bp, Probe Sequence
tcattatagagtgctcacagaagga

SEQ ID NO: 76760 - DNA, 25 bp, Probe Sequence
gcagttctaacagataggaatgacc

SEQ ID NO: 76761 - DNA, 25 bp, Probe Sequence
tagcagttctaacagataggaatga

SEQ ID NO: 76762 - DNA, 25 bp, Probe Sequence
agtaatataggtgtgagatccagac

SEQ ID NO: 76763 - DNA, 25 bp, Probe Sequence
tgaagtaatataggtgtgagatcca

SEQ ID NO: 76764 - DNA, 25 bp, Probe Sequence
gttatcattatagagtgctcacaga

SEQ ID NO: 76765 - DNA, 25 bp, Probe Sequence
cagttctaacagataggaatgacct

SEQ ID NO: 76766 - DNA, 25 bp, Probe Sequence
atggactaatataaggcagtgtact

SEQ ID NO: 76767 - DNA, 25 bp, Probe Sequence
aagtaatataggtgtgagatccaga

SEQ ID NO: 76768 - DNA, 25 bp, Probe Sequence
tatcattatagagtgctcacagaag

SEQ ID NO: 76769 - DNA, 25 bp, Probe Sequence
gaagtaatataggtgtgagatccag

SEQ ID NO: 76770 - DNA, 25 bp, Probe Sequence
aggaatgacctatggcttactgaat

SEQ ID NO: 76771 - DNA, 25 bp, Probe Sequence
tgttatcattatagagtgctcacag

SEQ ID NO: 76772 - DNA, 25 bp, Probe Sequence
tggactaatataaggcagtgtacta

SEQ ID NO: 76773 - DNA, 25 bp, Probe Sequence
aatggactaatataaggcagtgtac

SEQ ID NO: 76774 - DNA, 25 bp, Probe Sequence
atggcttactgaatggtgatacttt

SEQ ID NO: 76775 - DNA, 25 bp, Probe Sequence
aagacacgatgagaattagacactg

SEQ ID NO: 76776 - DNA, 25 bp, Probe Sequence
acacgatgagaattagacactggaa

SEQ ID NO: 76777 - DNA, 25 bp, Probe Sequence
gacacgatgagaattagacactgga

SEQ ID NO: 76778 - DNA, 25 bp, Probe Sequence
agacacgatgagaattagacactgg

SEQ ID NO: 76779 - DNA, 25 bp, Probe Sequence
gaagtgtgagactgatgtcaatgag

SEQ ID NO: 76780 - DNA, 25 bp, Probe Sequence
agaagtgtgagactgatgtcaatga

SEQ ID NO: 76781 - DNA, 25 bp, Probe Sequence
cagaagtgtgagactgatgtcaatg

SEQ ID NO: 76782 - DNA, 25 bp, Probe Sequence
aagtgtgagactgatgtcaatgagt

SEQ ID NO: 76783 - DNA, 25 bp, Probe Sequence
aaagacacgatgagaattagacact

SEQ ID NO: 76784 - DNA, 25 bp, Probe Sequence
cacgatgagaattagacactggaaa

SEQ ID NO: 76785 - DNA, 25 bp, Probe Sequence
agtgtgagactgatgtcaatgagtg

SEQ ID NO: 76786 - DNA, 25 bp, Probe Sequence
agaaacagtgagaagaggaacagag

SEQ ID NO: 76787 - DNA, 25 bp, Probe Sequence
gtgtgagactgatgtcaatgagtgt

SEQ ID NO: 76788 - DNA, 25 bp, Probe Sequence
cagaaacagtgagaagaggaacaga

SEQ ID NO: 76789 - DNA, 25 bp, Probe Sequence
gtttaacaggtaaggagtgccaatg

SEQ ID NO: 76790 - DNA, 25 bp, Probe Sequence
gcagaagtgtgagactgatgtcaat

SEQ ID NO: 76791 - DNA, 25 bp, Probe Sequence
ttaacaggtaaggagtgccaatgga

SEQ ID NO: 76792 - DNA, 25 bp, Probe Sequence
ggtttaacaggtaaggagtgccaat

SEQ ID NO: 76793 - DNA, 25 bp, Probe Sequence
ccagaaacagtgagaagaggaacag

SEQ ID NO: 76794 - DNA, 25 bp, Probe Sequence
caagtcgggtttaacaggtaaggag

SEQ ID NO: 76795 - DNA, 25 bp, Probe Sequence
tttaacaggtaaggagtgccaatgg

SEQ ID NO: 76796 - DNA, 25 bp, Probe Sequence
gaaacagtgagaagaggaacagagc

SEQ ID NO: 76797 - DNA, 25 bp, Probe Sequence
gtcaagtcgggtttaacaggtaagg

SEQ ID NO: 76798 - DNA, 25 bp, Probe Sequence
tgtcaagtcgggtttaacaggtaag

SEQ ID NO: 76799 - DNA, 25 bp, Probe Sequence
aaaagtgaaaagtccagttcagcaa

SEQ ID NO: 76800 - DNA, 25 bp, Probe Sequence
aaagtgaaaagtccagttcagcaag

SEQ ID NO: 76801 - DNA, 25 bp, Probe Sequence
aagtgaaaagtccagttcagcaagg

SEQ ID NO: 76802 - DNA, 25 bp, Probe Sequence
agtcaggattattactgtagttgaa

SEQ ID NO: 76803 - DNA, 25 bp, Probe Sequence
caatggaagactggttacatggagg

SEQ ID NO: 76804 - DNA, 25 bp, Probe Sequence
tgtagtcaggattattactgtagtt

SEQ ID NO: 76805 - DNA, 25 bp, Probe Sequence
ttgtagtcaggattattactgtagt

SEQ ID NO: 76806 - DNA, 25 bp, Probe Sequence
gtagtcaggattattactgtagttg

SEQ ID NO: 76807 - DNA, 25 bp, Probe Sequence
atgacctatggactttcctacttgg

SEQ ID NO: 76808 - DNA, 25 bp, Probe Sequence
tacatgacctatggactttcctact

SEQ ID NO: 76809 - DNA, 25 bp, Probe Sequence
gtacatgacctatggactttcctac

SEQ ID NO: 76810 - DNA, 25 bp, Probe Sequence
agtacatgacctatggactttccta

SEQ ID NO: 76811 - DNA, 25 bp, Probe Sequence
catgacctatggactttcctacttg

SEQ ID NO: 76812 - DNA, 25 bp, Probe Sequence
tagtcaggattattactgtagttga

SEQ ID NO: 76813 - DNA, 25 bp, Probe Sequence
aggattattactgtagttgaaagga

SEQ ID NO: 76814 - DNA, 25 bp, Probe Sequence
acatgacctatggactttcctactt

SEQ ID NO: 76815 - DNA, 25 bp, Probe Sequence
ctatggactttcctacttggcagta

SEQ ID NO: 76816 - DNA, 25 bp, Probe Sequence
gcaatggaagactggttacatggag

SEQ ID NO: 76817 - DNA, 25 bp, Probe Sequence
ggattattactgtagttgaaaggag

SEQ ID NO: 76818 - DNA, 25 bp, Probe Sequence
cagtacatgacctatggactttcct

SEQ ID NO: 76819 - DNA, 25 bp, Probe Sequence
agtggcaatggaagactggttacat

SEQ ID NO: 76820 - DNA, 25 bp, Probe Sequence
tatggactttcctacttggcagtac

SEQ ID NO: 76821 - DNA, 25 bp, Probe Sequence
caggattattactgtagttgaaagg

SEQ ID NO: 76822 - DNA, 25 bp, Probe Sequence
gagcaagatggagagggtatctatg

SEQ ID NO: 76823 - DNA, 25 bp, Probe Sequence
agagcaagatggagagggtatctat

SEQ ID NO: 76824 - DNA, 25 bp, Probe Sequence
gtggcaatggaagactggttacatg

SEQ ID NO: 76825 - DNA, 25 bp, Probe Sequence
ccagtacatgacctatggactttcc

SEQ ID NO: 76826 - DNA, 25 bp, Probe Sequence
gtcgggcaggttgacatatttattt

SEQ ID NO: 76827 - DNA, 25 bp, Probe Sequence
atgctgatctactataaggtattct

SEQ ID NO: 76828 - DNA, 25 bp, Probe Sequence
acttcagagatcgcgtatgtaataa

SEQ ID NO: 76829 - DNA, 25 bp, Probe Sequence
gacttcagagatcgcgtatgtaata

SEQ ID NO: 76830 - DNA, 25 bp, Probe Sequence
tatatgacttcagagatcgcgtatg

SEQ ID NO: 76831 - DNA, 25 bp, Probe Sequence
ttatatgacttcagagatcgcgtat

SEQ ID NO: 76832 - DNA, 25 bp, Probe Sequence
tatgacttcagagatcgcgtatgta

SEQ ID NO: 76833 - DNA, 25 bp, Probe Sequence
tcgggcaggttgacatatttatttt

SEQ ID NO: 76834 - DNA, 25 bp, Probe Sequence
tgctgatctactataaggtattcta

SEQ ID NO: 76835 - DNA, 25 bp, Probe Sequence
aatgctgatctactataaggtattc

SEQ ID NO: 76836 - DNA, 25 bp, Probe Sequence
atatgacttcagagatcgcgtatgt

SEQ ID NO: 76837 - DNA, 25 bp, Probe Sequence
tgacttcagagatcgcgtatgtaat

SEQ ID NO: 76838 - DNA, 25 bp, Probe Sequence
atgacttcagagatcgcgtatgtaa

SEQ ID NO: 76839 - DNA, 25 bp, Probe Sequence
ggtcgggcaggttgacatatttatt

SEQ ID NO: 76840 - DNA, 25 bp, Probe Sequence
atatttatatgacttcagagatcgc

SEQ ID NO: 76841 - DNA, 25 bp, Probe Sequence
tatgtaataaaggacgccctccctc

SEQ ID NO: 76842 - DNA, 25 bp, Probe Sequence
atttatatgacttcagagatcgcgt

SEQ ID NO: 76843 - DNA, 25 bp, Probe Sequence
agagatcgcgtatgtaataaaggac

SEQ ID NO: 76844 - DNA, 25 bp, Probe Sequence
cagagatcgcgtatgtaataaagga

SEQ ID NO: 76845 - DNA, 25 bp, Probe Sequence
tcagagatcgcgtatgtaataaagg

SEQ ID NO: 76846 - DNA, 25 bp, Probe Sequence
tttatatgacttcagagatcgcgta

SEQ ID NO: 76847 - DNA, 25 bp, Probe Sequence
ctggtatttaatgctgatctactat

SEQ ID NO: 76848 - DNA, 25 bp, Probe Sequence
gtatgtaataaaggacgccctccct

SEQ ID NO: 76849 - DNA, 25 bp, Probe Sequence
ttcagagatcgcgtatgtaataaag

SEQ ID NO: 76850 - DNA, 25 bp, Probe Sequence
gacttctttgctgatgaggtaatag

SEQ ID NO: 76851 - DNA, 25 bp, Probe Sequence
agacttctttgctgatgaggtaata

SEQ ID NO: 76852 - DNA, 25 bp, Probe Sequence
gagacttctttgctgatgaggtaat

SEQ ID NO: 76853 - DNA, 25 bp, Probe Sequence
cttctttgctgatgaggtaatagtt

SEQ ID NO: 76854 - DNA, 25 bp, Probe Sequence
caaggtcacatcccagaacatttaa

SEQ ID NO: 76855 - DNA, 25 bp, Probe Sequence
acttctttgctgatgaggtaatagt

SEQ ID NO: 76856 - DNA, 25 bp, Probe Sequence
aatgatgtcttcctcctcctccttc

SEQ ID NO: 76857 - DNA, 25 bp, Probe Sequence
ttctttgctgatgaggtaatagttt

SEQ ID NO: 76858 - DNA, 25 bp, Probe Sequence
agagacttctttgctgatgaggtaa

SEQ ID NO: 76859 - DNA, 25 bp, Probe Sequence
ctaggagtaggcttaagtatgtgct

SEQ ID NO: 76860 - DNA, 25 bp, Probe Sequence
tctaggagtaggcttaagtatgtgc

SEQ ID NO: 76861 - DNA, 25 bp, Probe Sequence
agtaggcttaagtatgtgctggtaa

SEQ ID NO: 76862 - DNA, 25 bp, Probe Sequence
aaatgcttgactactgtccaaattc

SEQ ID NO: 76863 - DNA, 25 bp, Probe Sequence
taggagtaggcttaagtatgtgctg

SEQ ID NO: 76864 - DNA, 25 bp, Probe Sequence
taatcacatgagagacttctttgct

SEQ ID NO: 76865 - DNA, 25 bp, Probe Sequence
caaataaatgcttgactactgtcca

SEQ ID NO: 76866 - DNA, 25 bp, Probe Sequence
acaaataaatgcttgactactgtcc

SEQ ID NO: 76867 - DNA, 25 bp, Probe Sequence
gagagacttctttgctgatgaggta

SEQ ID NO: 76868 - DNA, 25 bp, Probe Sequence
tctttattatagaatgctctcctgc

SEQ ID NO: 76869 - DNA, 25 bp, Probe Sequence
ttaatcacatgagagacttctttgc

SEQ ID NO: 76870 - DNA, 25 bp, Probe Sequence
ctctaggagtaggcttaagtatgtg

SEQ ID NO: 76871 - DNA, 25 bp, Probe Sequence
tctctaggagtaggcttaagtatgt

SEQ ID NO: 76872 - DNA, 25 bp, Probe Sequence
gagtaggcttaagtatgtgctggta

SEQ ID NO: 76873 - DNA, 25 bp, Probe Sequence
aatgcttgactactgtccaaattca

SEQ ID NO: 76874 - DNA, 25 bp, Probe Sequence
ttatccacatcctcaccaacattag

SEQ ID NO: 76875 - DNA, 25 bp, Probe Sequence
catcattctactgttctctctccat

SEQ ID NO: 76876 - DNA, 25 bp, Probe Sequence
tagccatcattctactgttctctct

SEQ ID NO: 76877 - DNA, 25 bp, Probe Sequence
tatccacatcctcaccaacattagt

SEQ ID NO: 76878 - DNA, 25 bp, Probe Sequence
ccatcattctactgttctctctcca

SEQ ID NO: 76879 - DNA, 25 bp, Probe Sequence
ttggctaccgaatactagaccttat

SEQ ID NO: 76880 - DNA, 25 bp, Probe Sequence
attggctaccgaatactagacctta

SEQ ID NO: 76881 - DNA, 25 bp, Probe Sequence
ccacatcctcaccaacattagttag

SEQ ID NO: 76882 - DNA, 25 bp, Probe Sequence
agccatcattctactgttctctctc

SEQ ID NO: 76883 - DNA, 25 bp, Probe Sequence
tggctaccgaatactagaccttatt

SEQ ID NO: 76884 - DNA, 25 bp, Probe Sequence
tattggctaccgaatactagacctt

SEQ ID NO: 76885 - DNA, 25 bp, Probe Sequence
tccacatcctcaccaacattagtta

SEQ ID NO: 76886 - DNA, 25 bp, Probe Sequence
aattatccattcgtccgttgataga

SEQ ID NO: 76887 - DNA, 25 bp, Probe Sequence
ctattggctaccgaatactagacct

SEQ ID NO: 76888 - DNA, 25 bp, Probe Sequence
atcattctactgttctctctccatg

SEQ ID NO: 76889 - DNA, 25 bp, Probe Sequence
attatccattcgtccgttgatagac

SEQ ID NO: 76890 - DNA, 25 bp, Probe Sequence
atccacatcctcaccaacattagtt

SEQ ID NO: 76891 - DNA, 25 bp, Probe Sequence
cattctactgttctctctccatgag

SEQ ID NO: 76892 - DNA, 25 bp, Probe Sequence
attctactgttctctctccatgagt

SEQ ID NO: 76893 - DNA, 25 bp, Probe Sequence
gccatcattctactgttctctctcc

SEQ ID NO: 76894 - DNA, 25 bp, Probe Sequence
cctattggctaccgaatactagacc

SEQ ID NO: 76895 - DNA, 25 bp, Probe Sequence
ctgttctctctccatgagttcaatt

SEQ ID NO: 76896 - DNA, 25 bp, Probe Sequence
tgttctctctccatgagttcaatta

SEQ ID NO: 76897 - DNA, 25 bp, Probe Sequence
ttctactgttctctctccatgagtt

SEQ ID NO: 76898 - DNA, 25 bp, Probe Sequence
atggtgaaaccccatctctacaaaa

SEQ ID NO: 76899 - DNA, 25 bp, Probe Sequence
cacatggtgaaaccccatctctaca

SEQ ID NO: 76900 - DNA, 25 bp, Probe Sequence
tcacatggtgaaaccccatctctac

SEQ ID NO: 76901 - DNA, 25 bp, Probe Sequence
gtcacatggtgaaaccccatctcta

SEQ ID NO: 76902 - DNA, 25 bp, Probe Sequence
attcagtccattgccttaacacaag

SEQ ID NO: 76903 - DNA, 25 bp, Probe Sequence
ctcattcagtccattgccttaacac

SEQ ID NO: 76904 - DNA, 25 bp, Probe Sequence
cattcagtccattgccttaacacaa

SEQ ID NO: 76905 - DNA, 25 bp, Probe Sequence
cactcattcagtccattgccttaac

SEQ ID NO: 76906 - DNA, 25 bp, Probe Sequence
tcattcagtccattgccttaacaca

SEQ ID NO: 76907 - DNA, 25 bp, Probe Sequence
actcattcagtccattgccttaaca

SEQ ID NO: 76908 - DNA, 25 bp, Probe Sequence
ataaacgaataaagtgtcttctggc

SEQ ID NO: 76909 - DNA, 25 bp, Probe Sequence
ttcagtccattgccttaacacaagc

SEQ ID NO: 76910 - DNA, 25 bp, Probe Sequence
tataaacgaataaagtgtcttctgg

SEQ ID NO: 76911 - DNA, 25 bp, Probe Sequence
cattgccttaacacaagcctgatgg

SEQ ID NO: 76912 - DNA, 25 bp, Probe Sequence
ccattgccttaacacaagcctgatg

SEQ ID NO: 76913 - DNA, 25 bp, Probe Sequence
atggggctgttttctcacaatataa

SEQ ID NO: 76914 - DNA, 25 bp, Probe Sequence
tggggctgttttctcacaatataaa

SEQ ID NO: 76915 - DNA, 25 bp, Probe Sequence
gatggggctgttttctcacaatata

SEQ ID NO: 76916 - DNA, 25 bp, Probe Sequence
tccattgccttaacacaagcctgat

SEQ ID NO: 76917 - DNA, 25 bp, Probe Sequence
taaacgaataaagtgtcttctggcc

SEQ ID NO: 76918 - DNA, 25 bp, Probe Sequence
gcactcattcagtccattgccttaa

SEQ ID NO: 76919 - DNA, 25 bp, Probe Sequence
aacgaataaagtgtcttctggccta

SEQ ID NO: 76920 - DNA, 25 bp, Probe Sequence
acgaataaagtgtcttctggcctac

SEQ ID NO: 76921 - DNA, 25 bp, Probe Sequence
cgaataaagtgtcttctggcctact

SEQ ID NO: 76922 - DNA, 25 bp, Probe Sequence
tgatggggctgttttctcacaatat

SEQ ID NO: 76923 - DNA, 25 bp, Probe Sequence
aaacgaataaagtgtcttctggcct

SEQ ID NO: 76924 - DNA, 25 bp, Probe Sequence
ggctgttttctcacaatataaacga

SEQ ID NO: 76925 - DNA, 25 bp, Probe Sequence
ggggctgttttctcacaatataaac

SEQ ID NO: 76926 - DNA, 25 bp, Probe Sequence
tctcagccaaatactcatcgtcttt

SEQ ID NO: 76927 - DNA, 25 bp, Probe Sequence
ttctcagccaaatactcatcgtctt

SEQ ID NO: 76928 - DNA, 25 bp, Probe Sequence
tttctcagccaaatactcatcgtct

SEQ ID NO: 76929 - DNA, 25 bp, Probe Sequence
atttctcagccaaatactcatcgtc

SEQ ID NO: 76930 - DNA, 25 bp, Probe Sequence
gttccatttctcagccaaatactca

SEQ ID NO: 76931 - DNA, 25 bp, Probe Sequence
catttctcagccaaatactcatcgt

SEQ ID NO: 76932 - DNA, 25 bp, Probe Sequence
ccatttctcagccaaatactcatcg

SEQ ID NO: 76933 - DNA, 25 bp, Probe Sequence
ctgtgacgtgaataaagttccattt

SEQ ID NO: 76934 - DNA, 25 bp, Probe Sequence
cgttccatttctcagccaaatactc

SEQ ID NO: 76935 - DNA, 25 bp, Probe Sequence
tctgtgacgtgaataaagttccatt

SEQ ID NO: 76936 - DNA, 25 bp, Probe Sequence
atccgttccatttctcagccaaata

SEQ ID NO: 76937 - DNA, 25 bp, Probe Sequence
tatccgttccatttctcagccaaat

SEQ ID NO: 76938 - DNA, 25 bp, Probe Sequence
gtatccgttccatttctcagccaaa

SEQ ID NO: 76939 - DNA, 25 bp, Probe Sequence
cactgttgactctgcatatttattt

SEQ ID NO: 76940 - DNA, 25 bp, Probe Sequence
tctttgagactgaaatcacactggc

SEQ ID NO: 76941 - DNA, 25 bp, Probe Sequence
gtctgtgacgtgaataaagttccat

SEQ ID NO: 76942 - DNA, 25 bp, Probe Sequence
agtgtctgtgacgtgaataaagttc

SEQ ID NO: 76943 - DNA, 25 bp, Probe Sequence
cagtgtctgtgacgtgaataaagtt

SEQ ID NO: 76944 - DNA, 25 bp, Probe Sequence
ccgttccatttctcagccaaatact

SEQ ID NO: 76945 - DNA, 25 bp, Probe Sequence
tccgttccatttctcagccaaatac

SEQ ID NO: 76946 - DNA, 25 bp, Probe Sequence
ctcagccaaatactcatcgtctttg

SEQ ID NO: 76947 - DNA, 25 bp, Probe Sequence
gtgtctgtgacgtgaataaagttcc

SEQ ID NO: 76948 - DNA, 25 bp, Probe Sequence
tcagtgtctgtgacgtgaataaagt

SEQ ID NO: 76949 - DNA, 25 bp, Probe Sequence
agtatccgttccatttctcagccaa

SEQ ID NO: 76950 - DNA, 25 bp, Probe Sequence
tgttcttctctacttgttcactctg

SEQ ID NO: 76951 - DNA, 25 bp, Probe Sequence
ttgttcttctctacttgttcactct

SEQ ID NO: 76952 - DNA, 25 bp, Probe Sequence
tcttgttcttctctacttgttcact

SEQ ID NO: 76953 - DNA, 25 bp, Probe Sequence
cttgttcttctctacttgttcactc

SEQ ID NO: 76954 - DNA, 25 bp, Probe Sequence
gttcttctctacttgttcactctgg

SEQ ID NO: 76955 - DNA, 25 bp, Probe Sequence
atcttgttcttctctacttgttcac

SEQ ID NO: 76956 - DNA, 25 bp, Probe Sequence
ggttgttgatcttgttcttctctac

SEQ ID NO: 76957 - DNA, 25 bp, Probe Sequence
cggttgttgatcttgttcttctcta

SEQ ID NO: 76958 - DNA, 25 bp, Probe Sequence
gttgatcttgttcttctctacttgt

SEQ ID NO: 76959 - DNA, 25 bp, Probe Sequence
tgttgatcttgttcttctctacttg

SEQ ID NO: 76960 - DNA, 25 bp, Probe Sequence
gttgttgatcttgttcttctctact

SEQ ID NO: 76961 - DNA, 25 bp, Probe Sequence
gatcttgttcttctctacttgttca

SEQ ID NO: 76962 - DNA, 25 bp, Probe Sequence
tgatcttgttcttctctacttgttc

SEQ ID NO: 76963 - DNA, 25 bp, Probe Sequence
ttcttctctacttgttcactctggc

SEQ ID NO: 76964 - DNA, 25 bp, Probe Sequence
ttgatcttgttcttctctacttgtt

SEQ ID NO: 76965 - DNA, 25 bp, Probe Sequence
ttgttgatcttgttcttctctactt

SEQ ID NO: 76966 - DNA, 25 bp, Probe Sequence
cattcctgttccgtgaccttagatg

SEQ ID NO: 76967 - DNA, 25 bp, Probe Sequence
ctcctgaaacacatctccattgact

SEQ ID NO: 76968 - DNA, 25 bp, Probe Sequence
tcctgaaacacatctccattgactg

SEQ ID NO: 76969 - DNA, 25 bp, Probe Sequence
ccattcctgttccgtgaccttagat

SEQ ID NO: 76970 - DNA, 25 bp, Probe Sequence
tcttctctacttgttcactctggcg

SEQ ID NO: 76971 - DNA, 25 bp, Probe Sequence
cctcctgaaacacatctccattgac

SEQ ID NO: 76972 - DNA, 25 bp, Probe Sequence
cctgaaacacatctccattgactgt

SEQ ID NO: 76973 - DNA, 25 bp, Probe Sequence
attcctgttccgtgaccttagatgc

SEQ ID NO: 76974 - DNA, 25 bp, Probe Sequence
ccattactcactcttgctcttacat

SEQ ID NO: 76975 - DNA, 25 bp, Probe Sequence
ttccattactcactcttgctcttac

SEQ ID NO: 76976 - DNA, 25 bp, Probe Sequence
cattactcactcttgctcttacatt

SEQ ID NO: 76977 - DNA, 25 bp, Probe Sequence
tccattactcactcttgctcttaca

SEQ ID NO: 76978 - DNA, 25 bp, Probe Sequence
ttactcactcttgctcttacattaa

SEQ ID NO: 76979 - DNA, 25 bp, Probe Sequence
attactcactcttgctcttacatta

SEQ ID NO: 76980 - DNA, 25 bp, Probe Sequence
atttccattactcactcttgctctt

SEQ ID NO: 76981 - DNA, 25 bp, Probe Sequence
tttccattactcactcttgctctta

SEQ ID NO: 76982 - DNA, 25 bp, Probe Sequence
gatttccattactcactcttgctct

SEQ ID NO: 76983 - DNA, 25 bp, Probe Sequence
aacctttatcctccgattcttacag

SEQ ID NO: 76984 - DNA, 25 bp, Probe Sequence
cctttatcctccgattcttacagtg

SEQ ID NO: 76985 - DNA, 25 bp, Probe Sequence
acctttatcctccgattcttacagt

SEQ ID NO: 76986 - DNA, 25 bp, Probe Sequence
taacctttatcctccgattcttaca

SEQ ID NO: 76987 - DNA, 25 bp, Probe Sequence
tgaatgatttaacctttatcctccg

SEQ ID NO: 76988 - DNA, 25 bp, Probe Sequence
ctttatcctccgattcttacagtgc

SEQ ID NO: 76989 - DNA, 25 bp, Probe Sequence
tgatttaacctttatcctccgattc

SEQ ID NO: 76990 - DNA, 25 bp, Probe Sequence
gaatgatttaacctttatcctccga

SEQ ID NO: 76991 - DNA, 25 bp, Probe Sequence
actcactcttgctcttacattaaag

SEQ ID NO: 76992 - DNA, 25 bp, Probe Sequence
ggatttccattactcactcttgctc

SEQ ID NO: 76993 - DNA, 25 bp, Probe Sequence
gatttaacctttatcctccgattct

SEQ ID NO: 76994 - DNA, 25 bp, Probe Sequence
tctcctgtgctatctttgctttgta

SEQ ID NO: 76995 - DNA, 25 bp, Probe Sequence
ctcactcttgctcttacattaaagt

SEQ ID NO: 76996 - DNA, 25 bp, Probe Sequence
ttaacctttatcctccgattcttac

SEQ ID NO: 76997 - DNA, 25 bp, Probe Sequence
tgtaatgtgttcatctcattcttct

SEQ ID NO: 76998 - DNA, 25 bp, Probe Sequence
gtggaacattatcaggaattgaaga

SEQ ID NO: 76999 - DNA, 25 bp, Probe Sequence
tgtggaacattatcaggaattgaag

SEQ ID NO: 77000 - DNA, 25 bp, Probe Sequence
tggaacattatcaggaattgaagaa

SEQ ID NO: 77001 - DNA, 25 bp, Probe Sequence
aacctagaatctaatgcagaagaga

SEQ ID NO: 77002 - DNA, 25 bp, Probe Sequence
ttacagaacagctctaccgatatgt

SEQ ID NO: 77003 - DNA, 25 bp, Probe Sequence
ttatgacgagagagtcctggagaat

SEQ ID NO: 77004 - DNA, 25 bp, Probe Sequence
ctctaccgatatgttaccaaactgc

SEQ ID NO: 77005 - DNA, 25 bp, Probe Sequence
gctctaccgatatgttaccaaactg

SEQ ID NO: 77006 - DNA, 25 bp, Probe Sequence
ctaccgatatgttaccaaactgctg

SEQ ID NO: 77007 - DNA, 25 bp, Probe Sequence
tctaccgatatgttaccaaactgct

SEQ ID NO: 77008 - DNA, 25 bp, Probe Sequence
caaactgctggtataatcagattgt

SEQ ID NO: 77009 - DNA, 25 bp, Probe Sequence
tatgacgagagagtcctggagaatg

SEQ ID NO: 77010 - DNA, 25 bp, Probe Sequence
gttatgacgagagagtcctggagaa

SEQ ID NO: 77011 - DNA, 25 bp, Probe Sequence
aactgctggtataatcagattgttt

SEQ ID NO: 77012 - DNA, 25 bp, Probe Sequence
aaactgctggtataatcagattgtt

SEQ ID NO: 77013 - DNA, 25 bp, Probe Sequence
atgtggaacattatcaggaattgaa

SEQ ID NO: 77014 - DNA, 25 bp, Probe Sequence
ccaaactgctggtataatcagattg

SEQ ID NO: 77015 - DNA, 25 bp, Probe Sequence
tttacagaacagctctaccgatatg

SEQ ID NO: 77016 - DNA, 25 bp, Probe Sequence
catttacagaacagctctaccgata

SEQ ID NO: 77017 - DNA, 25 bp, Probe Sequence
atttacagaacagctctaccgatat

SEQ ID NO: 77018 - DNA, 25 bp, Probe Sequence
acctagaatctaatgcagaagagat

SEQ ID NO: 77019 - DNA, 25 bp, Probe Sequence
ggaacattatcaggaattgaagaaa

SEQ ID NO: 77020 - DNA, 25 bp, Probe Sequence
agctctaccgatatgttaccaaact

SEQ ID NO: 77021 - DNA, 25 bp, Probe Sequence
cagctctaccgatatgttaccaaac

SEQ ID NO: 77022 - DNA, 25 bp, Probe Sequence
tctgtgttatattctgcttggtgat

SEQ ID NO: 77023 - DNA, 25 bp, Probe Sequence
ttctgtgttatattctgcttggtga

SEQ ID NO: 77024 - DNA, 25 bp, Probe Sequence
ctgtgttatattctgcttggtgatt

SEQ ID NO: 77025 - DNA, 25 bp, Probe Sequence
attgtgaaggtcggagtagttagat

SEQ ID NO: 77026 - DNA, 25 bp, Probe Sequence
gaattgtgaaggtcggagtagttag

SEQ ID NO: 77027 - DNA, 25 bp, Probe Sequence
aattgtgaaggtcggagtagttaga

SEQ ID NO: 77028 - DNA, 25 bp, Probe Sequence
tgtgttatattctgcttggtgatta

SEQ ID NO: 77029 - DNA, 25 bp, Probe Sequence
ggaattgtgaaggtcggagtagtta

SEQ ID NO: 77030 - DNA, 25 bp, Probe Sequence
gtgttatattctgcttggtgattag

SEQ ID NO: 77031 - DNA, 25 bp, Probe Sequence
ttgtgaaggtcggagtagttagatc

SEQ ID NO: 77032 - DNA, 25 bp, Probe Sequence
tatcaagtagctggaattgtgaagg

SEQ ID NO: 77033 - DNA, 25 bp, Probe Sequence
tttctgtgttatattctgcttggtg

SEQ ID NO: 77034 - DNA, 25 bp, Probe Sequence
ttatcaagtagctggaattgtgaag

SEQ ID NO: 77035 - DNA, 25 bp, Probe Sequence
tttgtgacagtctctaattcccttc

SEQ ID NO: 77036 - DNA, 25 bp, Probe Sequence
ctttgtgacagtctctaattccctt

SEQ ID NO: 77037 - DNA, 25 bp, Probe Sequence
tctaattcccttcccttctcgttaa

SEQ ID NO: 77038 - DNA, 25 bp, Probe Sequence
ctaattcccttcccttctcgttaag

SEQ ID NO: 77039 - DNA, 25 bp, Probe Sequence
gctttcagaccatacagtattcatt

SEQ ID NO: 77040 - DNA, 25 bp, Probe Sequence
attatcaagtagctggaattgtgaa

SEQ ID NO: 77041 - DNA, 25 bp, Probe Sequence
ctctaattcccttcccttctcgtta

SEQ ID NO: 77042 - DNA, 25 bp, Probe Sequence
taattcccttcccttctcgttaaga

SEQ ID NO: 77043 - DNA, 25 bp, Probe Sequence
tgttatattctgcttggtgattagc

SEQ ID NO: 77044 - DNA, 25 bp, Probe Sequence
cagtctctaattcccttcccttctc

SEQ ID NO: 77045 - DNA, 25 bp, Probe Sequence
atcaagtagctggaattgtgaaggt

SEQ ID NO: 77046 - DNA, 25 bp, Probe Sequence
tgagagcaagtgagattgttagaat

SEQ ID NO: 77047 - DNA, 25 bp, Probe Sequence
ttgagagcaagtgagattgttagaa

SEQ ID NO: 77048 - DNA, 25 bp, Probe Sequence
gagagcaagtgagattgttagaatt

SEQ ID NO: 77049 - DNA, 25 bp, Probe Sequence
aatgtagcctctgtccttgtaagtc

SEQ ID NO: 77050 - DNA, 25 bp, Probe Sequence
agagcaagtgagattgttagaatta

SEQ ID NO: 77051 - DNA, 25 bp, Probe Sequence
gcaagtgagattgttagaattaagt

SEQ ID NO: 77052 - DNA, 25 bp, Probe Sequence
ctggagtttgtgacattgatttgaa

SEQ ID NO: 77053 - DNA, 25 bp, Probe Sequence
ttctggagtttgtgacattgatttg

SEQ ID NO: 77054 - DNA, 25 bp, Probe Sequence
cttctggagtttgtgacattgattt

SEQ ID NO: 77055 - DNA, 25 bp, Probe Sequence
tggagtttgtgacattgatttgaaa

SEQ ID NO: 77056 - DNA, 25 bp, Probe Sequence
atgtagcctctgtccttgtaagtca

SEQ ID NO: 77057 - DNA, 25 bp, Probe Sequence
agcaagtgagattgttagaattaag

SEQ ID NO: 77058 - DNA, 25 bp, Probe Sequence
gagcaagtgagattgttagaattaa

SEQ ID NO: 77059 - DNA, 25 bp, Probe Sequence
tcttctggagtttgtgacattgatt

SEQ ID NO: 77060 - DNA, 25 bp, Probe Sequence
cttgttgctgtttgtgataactgat

SEQ ID NO: 77061 - DNA, 25 bp, Probe Sequence
tctggagtttgtgacattgatttga

SEQ ID NO: 77062 - DNA, 25 bp, Probe Sequence
tgttgctgtttgtgataactgatag

SEQ ID NO: 77063 - DNA, 25 bp, Probe Sequence
atttgaaatggatggtgttctcttg

SEQ ID NO: 77064 - DNA, 25 bp, Probe Sequence
gatttgaaatggatggtgttctctt

SEQ ID NO: 77065 - DNA, 25 bp, Probe Sequence
ttgatttgaaatggatggtgttctc

SEQ ID NO: 77066 - DNA, 25 bp, Probe Sequence
gaaatgtagcctctgtccttgtaag

SEQ ID NO: 77067 - DNA, 25 bp, Probe Sequence
tttgaaatggatggtgttctcttga

SEQ ID NO: 77068 - DNA, 25 bp, Probe Sequence
ggataacaatttcacacaggaacag

SEQ ID NO: 77069 - DNA, 25 bp, Probe Sequence
gttgctgtttgtgataactgataga

SEQ ID NO: 77070 - DNA, 25 bp, Probe Sequence
ttatacttgccttggactgtagaac

SEQ ID NO: 77071 - DNA, 25 bp, Probe Sequence
atcagcctaaccatacaactctcat

SEQ ID NO: 77072 - DNA, 25 bp, Probe Sequence
tcagcctaaccatacaactctcatt

SEQ ID NO: 77073 - DNA, 25 bp, Probe Sequence
aatcagcctaaccatacaactctca

SEQ ID NO: 77074 - DNA, 25 bp, Probe Sequence
agttccttgttacatcatggtcatt

SEQ ID NO: 77075 - DNA, 25 bp, Probe Sequence
taagttccttgttacatcatggtca

SEQ ID NO: 77076 - DNA, 25 bp, Probe Sequence
aagttccttgttacatcatggtcat

SEQ ID NO: 77077 - DNA, 25 bp, Probe Sequence
tatacttgccttggactgtagaaca

SEQ ID NO: 77078 - DNA, 25 bp, Probe Sequence
ttaagttccttgttacatcatggtc

SEQ ID NO: 77079 - DNA, 25 bp, Probe Sequence
cctaaccatacaactctcatttcct

SEQ ID NO: 77080 - DNA, 25 bp, Probe Sequence
aagaaatcagcctaaccatacaact

SEQ ID NO: 77081 - DNA, 25 bp, Probe Sequence
agcctaaccatacaactctcatttc

SEQ ID NO: 77082 - DNA, 25 bp, Probe Sequence
aaatcagcctaaccatacaactctc

SEQ ID NO: 77083 - DNA, 25 bp, Probe Sequence
gaaatcagcctaaccatacaactct

SEQ ID NO: 77084 - DNA, 25 bp, Probe Sequence
agaaatcagcctaaccatacaactc

SEQ ID NO: 77085 - DNA, 25 bp, Probe Sequence
tttatacttgccttggactgtagaa

SEQ ID NO: 77086 - DNA, 25 bp, Probe Sequence
catttatacttgccttggactgtag

SEQ ID NO: 77087 - DNA, 25 bp, Probe Sequence
atttatacttgccttggactgtaga

SEQ ID NO: 77088 - DNA, 25 bp, Probe Sequence
cagcctaaccatacaactctcattt

SEQ ID NO: 77089 - DNA, 25 bp, Probe Sequence
taacatttatacttgccttggactg

SEQ ID NO: 77090 - DNA, 25 bp, Probe Sequence
tgttcctgtattcatgtatgtaagt

SEQ ID NO: 77091 - DNA, 25 bp, Probe Sequence
tatgtcttcaaacctggcagtatta

SEQ ID NO: 77092 - DNA, 25 bp, Probe Sequence
atgtcttcaaacctggcagtattaa

SEQ ID NO: 77093 - DNA, 25 bp, Probe Sequence
taagaaatcagcctaaccatacaac

SEQ ID NO: 77094 - DNA, 25 bp, Probe Sequence
tgagtatagagagaatggcttgaac

SEQ ID NO: 77095 - DNA, 25 bp, Probe Sequence
ctgagtatagagagaatggcttgaa

SEQ ID NO: 77096 - DNA, 25 bp, Probe Sequence
atagcaaccaccacagtatattctt

SEQ ID NO: 77097 - DNA, 25 bp, Probe Sequence
gagtatagagagaatggcttgaacc

SEQ ID NO: 77098 - DNA, 25 bp, Probe Sequence
ttcatatagcaaccaccacagtata

SEQ ID NO: 77099 - DNA, 25 bp, Probe Sequence
tatagcaaccaccacagtatattct

SEQ ID NO: 77100 - DNA, 25 bp, Probe Sequence
tctgagtatagagagaatggcttga

SEQ ID NO: 77101 - DNA, 25 bp, Probe Sequence
gtctgagtatagagagaatggcttg

SEQ ID NO: 77102 - DNA, 25 bp, Probe Sequence
agtctgagtatagagagaatggctt

SEQ ID NO: 77103 - DNA, 25 bp, Probe Sequence
gagtctgagtatagagagaatggct

SEQ ID NO: 77104 - DNA, 25 bp, Probe Sequence
tagcaagtgtaacataatcaggaac

SEQ ID NO: 77105 - DNA, 25 bp, Probe Sequence
tagcaaccaccacagtatattcttg

SEQ ID NO: 77106 - DNA, 25 bp, Probe Sequence
cttagcaagtgtaacataatcagga

SEQ ID NO: 77107 - DNA, 25 bp, Probe Sequence
tcttagcaagtgtaacataatcagg

SEQ ID NO: 77108 - DNA, 25 bp, Probe Sequence
gcaagtgtaacataatcaggaacaa

SEQ ID NO: 77109 - DNA, 25 bp, Probe Sequence
ggagtctgagtatagagagaatggc

SEQ ID NO: 77110 - DNA, 25 bp, Probe Sequence
agcaagtgtaacataatcaggaaca

SEQ ID NO: 77111 - DNA, 25 bp, Probe Sequence
ttagcaagtgtaacataatcaggaa

SEQ ID NO: 77112 - DNA, 25 bp, Probe Sequence
agtgtaacataatcaggaacaatgg

SEQ ID NO: 77113 - DNA, 25 bp, Probe Sequence
tcatatagcaaccaccacagtatat

SEQ ID NO: 77114 - DNA, 25 bp, Probe Sequence
catatagcaaccaccacagtatatt

SEQ ID NO: 77115 - DNA, 25 bp, Probe Sequence
atatagcaaccaccacagtatattc

SEQ ID NO: 77116 - DNA, 25 bp, Probe Sequence
tttcatatagcaaccaccacagtat

SEQ ID NO: 77117 - DNA, 25 bp, Probe Sequence
ccacagtatattcttggtgcttaat

SEQ ID NO: 77118 - DNA, 25 bp, Probe Sequence
taggattcaacaaccaccacaactt

SEQ ID NO: 77119 - DNA, 25 bp, Probe Sequence
cttagaggtgtctgcctatgcttaa

SEQ ID NO: 77120 - DNA, 25 bp, Probe Sequence
tgtcctaatcctggaattaagtaca

SEQ ID NO: 77121 - DNA, 25 bp, Probe Sequence
tgttgtgtttcagtggaatgtattt

SEQ ID NO: 77122 - DNA, 25 bp, Probe Sequence
gtaggattcaacaaccaccacaact

SEQ ID NO: 77123 - DNA, 25 bp, Probe Sequence
gtcctaatcctggaattaagtacag

SEQ ID NO: 77124 - DNA, 25 bp, Probe Sequence
ttgtcctaatcctggaattaagtac

SEQ ID NO: 77125 - DNA, 25 bp, Probe Sequence
ctgttgtgtttcagtggaatgtatt

SEQ ID NO: 77126 - DNA, 25 bp, Probe Sequence
caacttgaatttgtatcatgggagg

SEQ ID NO: 77127 - DNA, 25 bp, Probe Sequence
aacttgaatttgtatcatgggaggt

SEQ ID NO: 77128 - DNA, 25 bp, Probe Sequence
caacaaccaccacaacttgaatttg

SEQ ID NO: 77129 - DNA, 25 bp, Probe Sequence
acttgaatttgtatcatgggaggtg

SEQ ID NO: 77130 - DNA, 25 bp, Probe Sequence
tcctttgtcctaatcctggaattaa

SEQ ID NO: 77131 - DNA, 25 bp, Probe Sequence
tgtaggattcaacaaccaccacaac

SEQ ID NO: 77132 - DNA, 25 bp, Probe Sequence
cctttgtcctaatcctggaattaag

SEQ ID NO: 77133 - DNA, 25 bp, Probe Sequence
ttagaggtgtctgcctatgcttaaa

SEQ ID NO: 77134 - DNA, 25 bp, Probe Sequence
aaattcttacagtacaaacaggact

SEQ ID NO: 77135 - DNA, 25 bp, Probe Sequence
ggtttataggttctatttcttccca

SEQ ID NO: 77136 - DNA, 25 bp, Probe Sequence
cttgaatttgtatcatgggaggtgg

SEQ ID NO: 77137 - DNA, 25 bp, Probe Sequence
ctttgtcctaatcctggaattaagt

SEQ ID NO: 77138 - DNA, 25 bp, Probe Sequence
tagaggtgtctgcctatgcttaaag

SEQ ID NO: 77139 - DNA, 25 bp, Probe Sequence
aggattcaacaaccaccacaacttg

SEQ ID NO: 77140 - DNA, 25 bp, Probe Sequence
ataggttctatttcttcccaagagc

SEQ ID NO: 77141 - DNA, 25 bp, Probe Sequence
gcttagaggtgtctgcctatgctta

SEQ ID NO: 77142 - DNA, 25 bp, Probe Sequence
ctctgagtattactgagaagcaaca

SEQ ID NO: 77143 - DNA, 25 bp, Probe Sequence
ctgagtattactgagaagcaacaga

SEQ ID NO: 77144 - DNA, 25 bp, Probe Sequence
tctgagtattactgagaagcaacag

SEQ ID NO: 77145 - DNA, 25 bp, Probe Sequence
tgagtattactgagaagcaacagaa

SEQ ID NO: 77146 - DNA, 25 bp, Probe Sequence
tctttattcaacctcattcccttct

SEQ ID NO: 77147 - DNA, 25 bp, Probe Sequence
gctttctttattcaacctcattccc

SEQ ID NO: 77148 - DNA, 25 bp, Probe Sequence
tttattcaacctcattcccttctcc

SEQ ID NO: 77149 - DNA, 25 bp, Probe Sequence
ctttattcaacctcattcccttctc

SEQ ID NO: 77150 - DNA, 25 bp, Probe Sequence
caacctcattcccttctccaaataa

SEQ ID NO: 77151 - DNA, 25 bp, Probe Sequence
aacctcattcccttctccaaataag

SEQ ID NO: 77152 - DNA, 25 bp, Probe Sequence
ttctttattcaacctcattcccttc

SEQ ID NO: 77153 - DNA, 25 bp, Probe Sequence
ctttctttattcaacctcattccct

SEQ ID NO: 77154 - DNA, 25 bp, Probe Sequence
tcaacctcattcccttctccaaata

SEQ ID NO: 77155 - DNA, 25 bp, Probe Sequence
tattcaacctcattcccttctccaa

SEQ ID NO: 77156 - DNA, 25 bp, Probe Sequence
ttattcaacctcattcccttctcca

SEQ ID NO: 77157 - DNA, 25 bp, Probe Sequence
tttctttattcaacctcattccctt

SEQ ID NO: 77158 - DNA, 25 bp, Probe Sequence
gtcatttattggctgtgagaagttc

SEQ ID NO: 77159 - DNA, 25 bp, Probe Sequence
agtcatttattggctgtgagaagtt

SEQ ID NO: 77160 - DNA, 25 bp, Probe Sequence
ctgtctgtgtttgaaatgggagttt

SEQ ID NO: 77161 - DNA, 25 bp, Probe Sequence
ttctccaaataagccacttgtgtag

SEQ ID NO: 77162 - DNA, 25 bp, Probe Sequence
cttctccaaataagccacttgtgta

SEQ ID NO: 77163 - DNA, 25 bp, Probe Sequence
tcatttattggctgtgagaagttct

SEQ ID NO: 77164 - DNA, 25 bp, Probe Sequence
ctccaaataagccacttgtgtagtt

SEQ ID NO: 77165 - DNA, 25 bp, Probe Sequence
tatcagtcatttattggctgtgaga

SEQ ID NO: 77166 - DNA, 25 bp, Probe Sequence
acggataacaatttcacaacaggaa

SEQ ID NO: 77167 - DNA, 25 bp, Probe Sequence
gacggataacaatttcacaacagga

SEQ ID NO: 77168 - DNA, 25 bp, Probe Sequence
ggacggataacaatttcacaacagg

SEQ ID NO: 77169 - DNA, 25 bp, Probe Sequence
gggacggataacaatttcacaacag

SEQ ID NO: 77170 - DNA, 25 bp, Probe Sequence
aacaggaaacagctatgaccattag

SEQ ID NO: 77171 - DNA, 25 bp, Probe Sequence
caacaggaaacagctatgaccatta

SEQ ID NO: 77172 - DNA, 25 bp, Probe Sequence
cggataacaatttcacaacaggaaa

SEQ ID NO: 77173 - DNA, 25 bp, Probe Sequence
taacaatttcacaacaggaaacagc

SEQ ID NO: 77174 - DNA, 25 bp, Probe Sequence
ggataacaatttcacaacaggaaac

SEQ ID NO: 77175 - DNA, 25 bp, Probe Sequence
ataacaatttcacaacaggaaacag

SEQ ID NO: 77176 - DNA, 25 bp, Probe Sequence
gataacaatttcacaacaggaaaca

SEQ ID NO: 77177 - DNA, 25 bp, Probe Sequence
acaacaggaaacagctatgaccatt

SEQ ID NO: 77178 - DNA, 25 bp, Probe Sequence
aatttcacaacaggaaacagctatg

SEQ ID NO: 77179 - DNA, 25 bp, Probe Sequence
caatttcacaacaggaaacagctat

SEQ ID NO: 77180 - DNA, 25 bp, Probe Sequence
atttcacaacaggaaacagctatga

SEQ ID NO: 77181 - DNA, 25 bp, Probe Sequence
acaatttcacaacaggaaacagcta

SEQ ID NO: 77182 - DNA, 25 bp, Probe Sequence
ggatgttaacctacctaccattgcg

SEQ ID NO: 77183 - DNA, 25 bp, Probe Sequence
cgggacggataacaatttcacaaca

SEQ ID NO: 77184 - DNA, 25 bp, Probe Sequence
tttcacaacaggaaacagctatgac

SEQ ID NO: 77185 - DNA, 25 bp, Probe Sequence
cacaacaggaaacagctatgaccat

SEQ ID NO: 77186 - DNA, 25 bp, Probe Sequence
aacaatttcacaacaggaaacagct

SEQ ID NO: 77187 - DNA, 25 bp, Probe Sequence
ttcacaacaggaaacagctatgacc

SEQ ID NO: 77188 - DNA, 25 bp, Probe Sequence
cgggatgttaacctacctaccattg

SEQ ID NO: 77189 - DNA, 25 bp, Probe Sequence
gggatgttaacctacctaccattgc

SEQ ID NO: 77190 - DNA, 25 bp, Probe Sequence
gatcttgtgtctactctaggactgg

SEQ ID NO: 77191 - DNA, 25 bp, Probe Sequence
cgatcttgtgtctactctaggactg

SEQ ID NO: 77192 - DNA, 25 bp, Probe Sequence
ttgtatatgctgcattgagacttac

SEQ ID NO: 77193 - DNA, 25 bp, Probe Sequence
tgtatatgctgcattgagacttacg

SEQ ID NO: 77194 - DNA, 25 bp, Probe Sequence
actggttgccgaatttacttgtatt

SEQ ID NO: 77195 - DNA, 25 bp, Probe Sequence
cactgagcatcacaataaagagaac

SEQ ID NO: 77196 - DNA, 25 bp, Probe Sequence
actgcctttgtttagaagagagtag

SEQ ID NO: 77197 - DNA, 25 bp, Probe Sequence
tgagcatcacaataaagagaaccat

SEQ ID NO: 77198 - DNA, 25 bp, Probe Sequence
cactgcctttgtttagaagagagta

SEQ ID NO: 77199 - DNA, 25 bp, Probe Sequence
tttccactgagcatcacaataaaga

SEQ ID NO: 77200 - DNA, 25 bp, Probe Sequence
gtctttctcactgcctttgtttaga

SEQ ID NO: 77201 - DNA, 25 bp, Probe Sequence
ctgcctttgtttagaagagagtagc

SEQ ID NO: 77202 - DNA, 25 bp, Probe Sequence
gtatatgctgcattgagacttacgg

SEQ ID NO: 77203 - DNA, 25 bp, Probe Sequence
gcaccgttgactcagtatagtttaa

SEQ ID NO: 77204 - DNA, 25 bp, Probe Sequence
ctgagcatcacaataaagagaacca

SEQ ID NO: 77205 - DNA, 25 bp, Probe Sequence
actgagcatcacaataaagagaacc

SEQ ID NO: 77206 - DNA, 25 bp, Probe Sequence
ccactgagcatcacaataaagagaa

SEQ ID NO: 77207 - DNA, 25 bp, Probe Sequence
ttccactgagcatcacaataaagag

SEQ ID NO: 77208 - DNA, 25 bp, Probe Sequence
agtctttctcactgcctttgtttag

SEQ ID NO: 77209 - DNA, 25 bp, Probe Sequence
cactggttgccgaatttacttgtat

SEQ ID NO: 77210 - DNA, 25 bp, Probe Sequence
gagcatcacaataaagagaaccatg

SEQ ID NO: 77211 - DNA, 25 bp, Probe Sequence
gagtctttctcactgcctttgttta

SEQ ID NO: 77212 - DNA, 25 bp, Probe Sequence
ctcactgcctttgtttagaagagag

SEQ ID NO: 77213 - DNA, 25 bp, Probe Sequence
tccactgagcatcacaataaagaga

SEQ ID NO: 77214 - DNA, 25 bp, Probe Sequence
taacagaaggacaaacttagggaaa

SEQ ID NO: 77215 - DNA, 25 bp, Probe Sequence
ttaacagaaggacaaacttagggaa

SEQ ID NO: 77216 - DNA, 25 bp, Probe Sequence
cattaacagaaggacaaacttaggg

SEQ ID NO: 77217 - DNA, 25 bp, Probe Sequence
attaacagaaggacaaacttaggga

SEQ ID NO: 77218 - DNA, 25 bp, Probe Sequence
cagaaggacaaacttagggaaactt

SEQ ID NO: 77219 - DNA, 25 bp, Probe Sequence
aaggacaaacttagggaaacttgat

SEQ ID NO: 77220 - DNA, 25 bp, Probe Sequence
aggacaaacttagggaaacttgata

SEQ ID NO: 77221 - DNA, 25 bp, Probe Sequence
aacagaaggacaaacttagggaaac

SEQ ID NO: 77222 - DNA, 25 bp, Probe Sequence
gaaggacaaacttagggaaacttga

SEQ ID NO: 77223 - DNA, 25 bp, Probe Sequence
agaaggacaaacttagggaaacttg

SEQ ID NO: 77224 - DNA, 25 bp, Probe Sequence
tcattaacagaaggacaaacttagg

SEQ ID NO: 77225 - DNA, 25 bp, Probe Sequence
ggacaaacttagggaaacttgataa

SEQ ID NO: 77226 - DNA, 25 bp, Probe Sequence
acagaaggacaaacttagggaaact

SEQ ID NO: 77227 - DNA, 25 bp, Probe Sequence
tcccgaaacacacattggtactaaa

SEQ ID NO: 77228 - DNA, 25 bp, Probe Sequence
ttcccgaaacacacattggtactaa

SEQ ID NO: 77229 - DNA, 25 bp, Probe Sequence
tttcccgaaacacacattggtacta

SEQ ID NO: 77230 - DNA, 25 bp, Probe Sequence
ttcattaacagaaggacaaacttag

SEQ ID NO: 77231 - DNA, 25 bp, Probe Sequence
gtaatacttttcccgaaacacacat

SEQ ID NO: 77232 - DNA, 25 bp, Probe Sequence
aatacttttcccgaaacacacattg

SEQ ID NO: 77233 - DNA, 25 bp, Probe Sequence
taatacttttcccgaaacacacatt

SEQ ID NO: 77234 - DNA, 25 bp, Probe Sequence
cgaaacacacattggtactaaaact

SEQ ID NO: 77235 - DNA, 25 bp, Probe Sequence
ccgaaacacacattggtactaaaac

SEQ ID NO: 77236 - DNA, 25 bp, Probe Sequence
agtaatacttttcccgaaacacaca

SEQ ID NO: 77237 - DNA, 25 bp, Probe Sequence
acttcattaacagaaggacaaactt

SEQ ID NO: 77238 - DNA, 25 bp, Probe Sequence
atatgagagagacaagactagcctg

SEQ ID NO: 77239 - DNA, 25 bp, Probe Sequence
caataaccatcagcctatctgtact

SEQ ID NO: 77240 - DNA, 25 bp, Probe Sequence
aataaccatcagcctatctgtactt

SEQ ID NO: 77241 - DNA, 25 bp, Probe Sequence
tattcaggaatggaacaaccagtaa

SEQ ID NO: 77242 - DNA, 25 bp, Probe Sequence
atattcaggaatggaacaaccagta

SEQ ID NO: 77243 - DNA, 25 bp, Probe Sequence
gcaataaccatcagcctatctgtac

SEQ ID NO: 77244 - DNA, 25 bp, Probe Sequence
catattcaggaatggaacaaccagt

SEQ ID NO: 77245 - DNA, 25 bp, Probe Sequence
aatcggcatttccttaccacatata

SEQ ID NO: 77246 - DNA, 25 bp, Probe Sequence
tatgagagagacaagactagcctgt

SEQ ID NO: 77247 - DNA, 25 bp, Probe Sequence
tacctagcatatgagagagacaaga

SEQ ID NO: 77248 - DNA, 25 bp, Probe Sequence
gaatcggcatttccttaccacatat

SEQ ID NO: 77249 - DNA, 25 bp, Probe Sequence
ctacctagcatatgagagagacaag

SEQ ID NO: 77250 - DNA, 25 bp, Probe Sequence
atcggcatttccttaccacatatat

SEQ ID NO: 77251 - DNA, 25 bp, Probe Sequence
catatgagagagacaagactagcct

SEQ ID NO: 77252 - DNA, 25 bp, Probe Sequence
cctagcatatgagagagacaagact

SEQ ID NO: 77253 - DNA, 25 bp, Probe Sequence
cggcatttccttaccacatatatac

SEQ ID NO: 77254 - DNA, 25 bp, Probe Sequence
tcggcatttccttaccacatatata

SEQ ID NO: 77255 - DNA, 25 bp, Probe Sequence
acctagcatatgagagagacaagac

SEQ ID NO: 77256 - DNA, 25 bp, Probe Sequence
gcatattcaggaatggaacaaccag

SEQ ID NO: 77257 - DNA, 25 bp, Probe Sequence
tctgtattccttaatccctatctgt

SEQ ID NO: 77258 - DNA, 25 bp, Probe Sequence
tagcatatgagagagacaagactag

SEQ ID NO: 77259 - DNA, 25 bp, Probe Sequence
ctagcatatgagagagacaagacta

SEQ ID NO: 77260 - DNA, 25 bp, Probe Sequence
agcatatgagagagacaagactagc

SEQ ID NO: 77261 - DNA, 25 bp, Probe Sequence
gtctgtattccttaatccctatctg

SEQ ID NO: 77262 - DNA, 25 bp, Probe Sequence
ggaccctgaagacatttatcaagat

SEQ ID NO: 77263 - DNA, 25 bp, Probe Sequence
aaaggaccctgaagacatttatcaa

SEQ ID NO: 77264 - DNA, 25 bp, Probe Sequence
aaggaccctgaagacatttatcaag

SEQ ID NO: 77265 - DNA, 25 bp, Probe Sequence
gaccctgaagacatttatcaagatt

SEQ ID NO: 77266 - DNA, 25 bp, Probe Sequence
aggaccctgaagacatttatcaaga

SEQ ID NO: 77267 - DNA, 25 bp, Probe Sequence
accctgaagacatttatcaagatta

SEQ ID NO: 77268 - DNA, 25 bp, Probe Sequence
tttcaggcttactctaagaatttca

SEQ ID NO: 77269 - DNA, 25 bp, Probe Sequence
tcaggcttactctaagaatttcatt

SEQ ID NO: 77270 - DNA, 25 bp, Probe Sequence
ttcaggcttactctaagaatttcat

SEQ ID NO: 77271 - DNA, 25 bp, Probe Sequence
ggcactagatgatcaatgtatatcc

SEQ ID NO: 77272 - DNA, 25 bp, Probe Sequence
aatacaggcactagatgatcaatgt

SEQ ID NO: 77273 - DNA, 25 bp, Probe Sequence
ttggggtaatgaaacttttagccta

SEQ ID NO: 77274 - DNA, 25 bp, Probe Sequence
caggcactagatgatcaatgtatat

SEQ ID NO: 77275 - DNA, 25 bp, Probe Sequence
acaggcactagatgatcaatgtata

SEQ ID NO: 77276 - DNA, 25 bp, Probe Sequence
ctttggggtaatgaaacttttagcc

SEQ ID NO: 77277 - DNA, 25 bp, Probe Sequence
gcactagatgatcaatgtatatcca

SEQ ID NO: 77278 - DNA, 25 bp, Probe Sequence
tttggggtaatgaaacttttagcct

SEQ ID NO: 77279 - DNA, 25 bp, Probe Sequence
agtaacaaattacaaatggttagca

SEQ ID NO: 77280 - DNA, 25 bp, Probe Sequence
aggcactagatgatcaatgtatatc

SEQ ID NO: 77281 - DNA, 25 bp, Probe Sequence
tggggtaatgaaacttttagcctag

SEQ ID NO: 77282 - DNA, 25 bp, Probe Sequence
ccctgaagacatttatcaagattat

SEQ ID NO: 77283 - DNA, 25 bp, Probe Sequence
aaaaggaccctgaagacatttatca

SEQ ID NO: 77284 - DNA, 25 bp, Probe Sequence
aaatattattcccaccctgactagt

SEQ ID NO: 77285 - DNA, 25 bp, Probe Sequence
tcattagtataaagttcccaaagtt

SEQ ID NO: 77286 - DNA, 25 bp, Probe Sequence
ggagactaaggtacaagaattgctt

SEQ ID NO: 77287 - DNA, 25 bp, Probe Sequence
gaggttacagtgaactgagatcatg

SEQ ID NO: 77288 - DNA, 25 bp, Probe Sequence
aaccatcaagaacaatttcaagaca

SEQ ID NO: 77289 - DNA, 25 bp, Probe Sequence
accatcaagaacaatttcaagacat

SEQ ID NO: 77290 - DNA, 25 bp, Probe Sequence
cctctcttggttccactagaaatag

SEQ ID NO: 77291 - DNA, 25 bp, Probe Sequence
cttggttccactagaaatagagagc

SEQ ID NO: 77292 - DNA, 25 bp, Probe Sequence
tcttggttccactagaaatagagag

SEQ ID NO: 77293 - DNA, 25 bp, Probe Sequence
ctctcttggttccactagaaataga

SEQ ID NO: 77294 - DNA, 25 bp, Probe Sequence
aaaccatcaagaacaatttcaagac

SEQ ID NO: 77295 - DNA, 25 bp, Probe Sequence
ggaggttacagtgaactgagatcat

SEQ ID NO: 77296 - DNA, 25 bp, Probe Sequence
ttgggagactaaggtacaagaattg

SEQ ID NO: 77297 - DNA, 25 bp, Probe Sequence
ccctctcttggttccactagaaata

SEQ ID NO: 77298 - DNA, 25 bp, Probe Sequence
gaggaggttacagtgaactgagatc

SEQ ID NO: 77299 - DNA, 25 bp, Probe Sequence
ccatcaagaacaatttcaagacatg

SEQ ID NO: 77300 - DNA, 25 bp, Probe Sequence
ttggttccactagaaatagagagcc

SEQ ID NO: 77301 - DNA, 25 bp, Probe Sequence
aggttacagtgaactgagatcatgc

SEQ ID NO: 77302 - DNA, 25 bp, Probe Sequence
aaagggaggatctggaatatggttc

SEQ ID NO: 77303 - DNA, 25 bp, Probe Sequence
aggaggttacagtgaactgagatca

SEQ ID NO: 77304 - DNA, 25 bp, Probe Sequence
gttacagtgaactgagatcatgcca

SEQ ID NO: 77305 - DNA, 25 bp, Probe Sequence
gggagactaaggtacaagaattgct

SEQ ID NO: 77306 - DNA, 25 bp, Probe Sequence
caagaaagccacaaagattggattc

SEQ ID NO: 77307 - DNA, 25 bp, Probe Sequence
gttccactagaaatagagagcccac

SEQ ID NO: 77308 - DNA, 25 bp, Probe Sequence
catcaagaacaatttcaagacatga

SEQ ID NO: 77309 - DNA, 25 bp, Probe Sequence
aaagtagaagtgcagaagagaaagg

SEQ ID NO: 77310 - DNA, 25 bp, Probe Sequence
ttctctaactctgaatggctctaac

SEQ ID NO: 77311 - DNA, 25 bp, Probe Sequence
gttctctaactctgaatggctctaa

SEQ ID NO: 77312 - DNA, 25 bp, Probe Sequence
tctctaactctgaatggctctaacc

SEQ ID NO: 77313 - DNA, 25 bp, Probe Sequence
ggttctctaactctgaatggctcta

SEQ ID NO: 77314 - DNA, 25 bp, Probe Sequence
attgctgattatacttgagtggaat

SEQ ID NO: 77315 - DNA, 25 bp, Probe Sequence
tattgctgattatacttgagtggaa

SEQ ID NO: 77316 - DNA, 25 bp, Probe Sequence
aaggttctctaactctgaatggctc

SEQ ID NO: 77317 - DNA, 25 bp, Probe Sequence
gctgattatacttgagtggaatcct

SEQ ID NO: 77318 - DNA, 25 bp, Probe Sequence
tgctgattatacttgagtggaatcc

SEQ ID NO: 77319 - DNA, 25 bp, Probe Sequence
gtattgctgattatacttgagtgga

SEQ ID NO: 77320 - DNA, 25 bp, Probe Sequence
ttgctgattatacttgagtggaatc

SEQ ID NO: 77321 - DNA, 25 bp, Probe Sequence
tgggtggaatggttaaggtaattta

SEQ ID NO: 77322 - DNA, 25 bp, Probe Sequence
aggttctctaactctgaatggctct

SEQ ID NO: 77323 - DNA, 25 bp, Probe Sequence
ttgggtggaatggttaaggtaattt

SEQ ID NO: 77324 - DNA, 25 bp, Probe Sequence
aattcaatgtgacagttaagaatgc

SEQ ID NO: 77325 - DNA, 25 bp, Probe Sequence
tctaactctgaatggctctaaccag

SEQ ID NO: 77326 - DNA, 25 bp, Probe Sequence
ctctaactctgaatggctctaacca

SEQ ID NO: 77327 - DNA, 25 bp, Probe Sequence
gttgggtggaatggttaaggtaatt

SEQ ID NO: 77328 - DNA, 25 bp, Probe Sequence
ctgattatacttgagtggaatcctt

SEQ ID NO: 77329 - DNA, 25 bp, Probe Sequence
gggtggaatggttaaggtaatttaa

SEQ ID NO: 77330 - DNA, 25 bp, Probe Sequence
aaaggttctctaactctgaatggct

SEQ ID NO: 77331 - DNA, 25 bp, Probe Sequence
ttcaatgtgacagttaagaatgcac

SEQ ID NO: 77332 - DNA, 25 bp, Probe Sequence
tgttgggtggaatggttaaggtaat

SEQ ID NO: 77333 - DNA, 25 bp, Probe Sequence
ctaactctgaatggctctaaccagg

SEQ ID NO: 77334 - DNA, 25 bp, Probe Sequence
ccaccagtgacatgaaaattttgag

SEQ ID NO: 77335 - DNA, 25 bp, Probe Sequence
ccagtgacatgaaaattttgagcat

SEQ ID NO: 77336 - DNA, 25 bp, Probe Sequence
atgaaaattttgagcatgaagaccg

SEQ ID NO: 77337 - DNA, 25 bp, Probe Sequence
accaccagtgacatgaaaattttga

SEQ ID NO: 77338 - DNA, 25 bp, Probe Sequence
caccagtgacatgaaaattttgagc

SEQ ID NO: 77339 - DNA, 25 bp, Probe Sequence
accagtgacatgaaaattttgagca

SEQ ID NO: 77340 - DNA, 25 bp, Probe Sequence
cccaccaccagtgacatgaaaattt

SEQ ID NO: 77341 - DNA, 25 bp, Probe Sequence
caccaccagtgacatgaaaattttg

SEQ ID NO: 77342 - DNA, 25 bp, Probe Sequence
aaattttgagcatgaagaccgccac

SEQ ID NO: 77343 - DNA, 25 bp, Probe Sequence
tgaaaattttgagcatgaagaccgc

SEQ ID NO: 77344 - DNA, 25 bp, Probe Sequence
ccaccaccagtgacatgaaaatttt

SEQ ID NO: 77345 - DNA, 25 bp, Probe Sequence
caaagaggggtccgtcttagtcatg

SEQ ID NO: 77346 - DNA, 25 bp, Probe Sequence
gaaaattttgagcatgaagaccgcc

SEQ ID NO: 77347 - DNA, 25 bp, Probe Sequence
agtgacatgaaaattttgagcatga

SEQ ID NO: 77348 - DNA, 25 bp, Probe Sequence
cagtgacatgaaaattttgagcatg

SEQ ID NO: 77349 - DNA, 25 bp, Probe Sequence
catgaaaattttgagcatgaagacc

SEQ ID NO: 77350 - DNA, 25 bp, Probe Sequence
gtgacatgaaaattttgagcatgaa

SEQ ID NO: 77351 - DNA, 25 bp, Probe Sequence
acatgaaaattttgagcatgaagac

SEQ ID NO: 77352 - DNA, 25 bp, Probe Sequence
tgacatgaaaattttgagcatgaag

SEQ ID NO: 77353 - DNA, 25 bp, Probe Sequence
gacatgaaaattttgagcatgaaga

SEQ ID NO: 77354 - DNA, 25 bp, Probe Sequence
aaagaggggtccgtcttagtcatgt

SEQ ID NO: 77355 - DNA, 25 bp, Probe Sequence
aaaattttgagcatgaagaccgcca

SEQ ID NO: 77356 - DNA, 25 bp, Probe Sequence
aatcaccactacggaacttattcac

SEQ ID NO: 77357 - DNA, 25 bp, Probe Sequence
attggagaccgttattctaactcag

SEQ ID NO: 77358 - DNA, 25 bp, Probe Sequence
aattggagaccgttattctaactca

SEQ ID NO: 77359 - DNA, 25 bp, Probe Sequence
attgtatgttctcactcataagcgg

SEQ ID NO: 77360 - DNA, 25 bp, Probe Sequence
tattgtatgttctcactcataagcg

SEQ ID NO: 77361 - DNA, 25 bp, Probe Sequence
ggaattggagaccgttattctaact

SEQ ID NO: 77362 - DNA, 25 bp, Probe Sequence
atggaattggagaccgttattctaa

SEQ ID NO: 77363 - DNA, 25 bp, Probe Sequence
gatggaattggagaccgttattcta

SEQ ID NO: 77364 - DNA, 25 bp, Probe Sequence
tggaattggagaccgttattctaac

SEQ ID NO: 77365 - DNA, 25 bp, Probe Sequence
gaattggagaccgttattctaactc

SEQ ID NO: 77366 - DNA, 25 bp, Probe Sequence
ctggatggaattggagaccgttatt

SEQ ID NO: 77367 - DNA, 25 bp, Probe Sequence
atcaccactacggaacttattcacg

SEQ ID NO: 77368 - DNA, 25 bp, Probe Sequence
agaaatcaccactacggaacttatt

SEQ ID NO: 77369 - DNA, 25 bp, Probe Sequence
cagaaatcaccactacggaacttat

SEQ ID NO: 77370 - DNA, 25 bp, Probe Sequence
aggcataagaatgatacaatagact

SEQ ID NO: 77371 - DNA, 25 bp, Probe Sequence
aaatcaccactacggaacttattca

SEQ ID NO: 77372 - DNA, 25 bp, Probe Sequence
gaaatcaccactacggaacttattc

SEQ ID NO: 77373 - DNA, 25 bp, Probe Sequence
tgaggacataaaggcataagaatga

SEQ ID NO: 77374 - DNA, 25 bp, Probe Sequence
ttggagaccgttattctaactcagg

SEQ ID NO: 77375 - DNA, 25 bp, Probe Sequence
tcagaaatcaccactacggaactta

SEQ ID NO: 77376 - DNA, 25 bp, Probe Sequence
atgaggacataaaggcataagaatg

SEQ ID NO: 77377 - DNA, 25 bp, Probe Sequence
gaggacataaaggcataagaatgat

SEQ ID NO: 77378 - DNA, 25 bp, Probe Sequence
aatctcagaaatcaccactacggaa

SEQ ID NO: 77379 - DNA, 25 bp, Probe Sequence
aaatctcagaaatcaccactacgga

SEQ ID NO: 77380 - DNA, 25 bp, Probe Sequence
ggctactgatacaccttaacaagaa

SEQ ID NO: 77381 - DNA, 25 bp, Probe Sequence
ctactgatacaccttaacaagaagc

SEQ ID NO: 77382 - DNA, 25 bp, Probe Sequence
gctactgatacaccttaacaagaag

SEQ ID NO: 77383 - DNA, 25 bp, Probe Sequence
ctggctactgatacaccttaacaag

SEQ ID NO: 77384 - DNA, 25 bp, Probe Sequence
tggctactgatacaccttaacaaga

SEQ ID NO: 77385 - DNA, 25 bp, Probe Sequence
ttacatcttatacctggtgttctgg

SEQ ID NO: 77386 - DNA, 25 bp, Probe Sequence
ctggtgttctggcatgattattaac

SEQ ID NO: 77387 - DNA, 25 bp, Probe Sequence
ccttacatcttatacctggtgttct

SEQ ID NO: 77388 - DNA, 25 bp, Probe Sequence
cctggtgttctggcatgattattaa

SEQ ID NO: 77389 - DNA, 25 bp, Probe Sequence
tatacctggtgttctggcatgatta

SEQ ID NO: 77390 - DNA, 25 bp, Probe Sequence
cttacatcttatacctggtgttctg

SEQ ID NO: 77391 - DNA, 25 bp, Probe Sequence
atacctggtgttctggcatgattat

SEQ ID NO: 77392 - DNA, 25 bp, Probe Sequence
catcttatacctggtgttctggcat

SEQ ID NO: 77393 - DNA, 25 bp, Probe Sequence
tactgatacaccttaacaagaagct

SEQ ID NO: 77394 - DNA, 25 bp, Probe Sequence
acctggtgttctggcatgattatta

SEQ ID NO: 77395 - DNA, 25 bp, Probe Sequence
tacctggtgttctggcatgattatt

SEQ ID NO: 77396 - DNA, 25 bp, Probe Sequence
ttatacctggtgttctggcatgatt

SEQ ID NO: 77397 - DNA, 25 bp, Probe Sequence
tacatcttatacctggtgttctggc

SEQ ID NO: 77398 - DNA, 25 bp, Probe Sequence
ttctccatgccttagttagatgacc

SEQ ID NO: 77399 - DNA, 25 bp, Probe Sequence
gacttgcccttacatcttatacctg

SEQ ID NO: 77400 - DNA, 25 bp, Probe Sequence
ctgacttgcccttacatcttatacc

SEQ ID NO: 77401 - DNA, 25 bp, Probe Sequence
cctgacttgcccttacatcttatac

SEQ ID NO: 77402 - DNA, 25 bp, Probe Sequence
aaattgctgtccgtcttcattaaat

SEQ ID NO: 77403 - DNA, 25 bp, Probe Sequence
tgacttgcccttacatcttatacct

SEQ ID NO: 77404 - DNA, 25 bp, Probe Sequence
gacggataacaatttcaacacaggg

SEQ ID NO: 77405 - DNA, 25 bp, Probe Sequence
ggacggataacaatttcaacacagg

SEQ ID NO: 77406 - DNA, 25 bp, Probe Sequence
gggacggataacaatttcaacacag

SEQ ID NO: 77407 - DNA, 25 bp, Probe Sequence
gaatggaagatgtgaggacttctaa

SEQ ID NO: 77408 - DNA, 25 bp, Probe Sequence
atggaagatgtgaggacttctaatt

SEQ ID NO: 77409 - DNA, 25 bp, Probe Sequence
aatggaagatgtgaggacttctaat

SEQ ID NO: 77410 - DNA, 25 bp, Probe Sequence
ccattagggacactatagaacaagg

SEQ ID NO: 77411 - DNA, 25 bp, Probe Sequence
cattagggacactatagaacaaggt

SEQ ID NO: 77412 - DNA, 25 bp, Probe Sequence
ccattaaattctaacccagggcatg

SEQ ID NO: 77413 - DNA, 25 bp, Probe Sequence
ttagggacactatagaacaaggttg

SEQ ID NO: 77414 - DNA, 25 bp, Probe Sequence
ggaatggaagatgtgaggacttcta

SEQ ID NO: 77415 - DNA, 25 bp, Probe Sequence
attagggacactatagaacaaggtt

SEQ ID NO: 77416 - DNA, 25 bp, Probe Sequence
ggacactatagaacaaggttgtaca

SEQ ID NO: 77417 - DNA, 25 bp, Probe Sequence
gggacactatagaacaaggttgtac

SEQ ID NO: 77418 - DNA, 25 bp, Probe Sequence
agggacactatagaacaaggttgta

SEQ ID NO: 77419 - DNA, 25 bp, Probe Sequence
tagggacactatagaacaaggttgt

SEQ ID NO: 77420 - DNA, 25 bp, Probe Sequence
acactatagaacaaggttgtacaca

SEQ ID NO: 77421 - DNA, 25 bp, Probe Sequence
gacactatagaacaaggttgtacac

SEQ ID NO: 77422 - DNA, 25 bp, Probe Sequence
ggtagagtgagacttcagacgttct

SEQ ID NO: 77423 - DNA, 25 bp, Probe Sequence
cactatagaacaaggttgtacacaa

SEQ ID NO: 77424 - DNA, 25 bp, Probe Sequence
cattaaattctaacccagggcatgg

SEQ ID NO: 77425 - DNA, 25 bp, Probe Sequence
catccccaccccattaaattctaac

SEQ ID NO: 77426 - DNA, 25 bp, Probe Sequence
ataacaatttcaacacaggggacag

SEQ ID NO: 77427 - DNA, 25 bp, Probe Sequence
gataacaatttcaacacaggggaca

SEQ ID NO: 77428 - DNA, 25 bp, Probe Sequence
ttccaatcgtattacagagttgtca

SEQ ID NO: 77429 - DNA, 25 bp, Probe Sequence
tccaatcgtattacagagttgtcat

SEQ ID NO: 77430 - DNA, 25 bp, Probe Sequence
gttccaatcgtattacagagttgtc

SEQ ID NO: 77431 - DNA, 25 bp, Probe Sequence
tgttccaatcgtattacagagttgt

SEQ ID NO: 77432 - DNA, 25 bp, Probe Sequence
atgttccaatcgtattacagagttg

SEQ ID NO: 77433 - DNA, 25 bp, Probe Sequence
tattagtcatcgctatcaccatgtt

SEQ ID NO: 77434 - DNA, 25 bp, Probe Sequence
gtattagtcatcgctatcaccatgt

SEQ ID NO: 77435 - DNA, 25 bp, Probe Sequence
gaatgttccaatcgtattacagagt

SEQ ID NO: 77436 - DNA, 25 bp, Probe Sequence
attagtcatcgctatcaccatgttg

SEQ ID NO: 77437 - DNA, 25 bp, Probe Sequence
aatgttccaatcgtattacagagtt

SEQ ID NO: 77438 - DNA, 25 bp, Probe Sequence
cgtattagtcatcgctatcaccatg

SEQ ID NO: 77439 - DNA, 25 bp, Probe Sequence
tattacagagttgtcatgccttgaa

SEQ ID NO: 77440 - DNA, 25 bp, Probe Sequence
ccaatcgtattacagagttgtcatg

SEQ ID NO: 77441 - DNA, 25 bp, Probe Sequence
caatcgtattacagagttgtcatgc

SEQ ID NO: 77442 - DNA, 25 bp, Probe Sequence
gtattacagagttgtcatgccttga

SEQ ID NO: 77443 - DNA, 25 bp, Probe Sequence
aatcgtattacagagttgtcatgcc

SEQ ID NO: 77444 - DNA, 25 bp, Probe Sequence
attacagagttgtcatgccttgaag

SEQ ID NO: 77445 - DNA, 25 bp, Probe Sequence
ttagtcatcgctatcaccatgttga

SEQ ID NO: 77446 - DNA, 25 bp, Probe Sequence
ggaatgttccaatcgtattacagag

SEQ ID NO: 77447 - DNA, 25 bp, Probe Sequence
atcgtattacagagttgtcatgcct

SEQ ID NO: 77448 - DNA, 25 bp, Probe Sequence
acgtattagtcatcgctatcaccat

SEQ ID NO: 77449 - DNA, 25 bp, Probe Sequence
taagagagactaaacagaagtgagc

SEQ ID NO: 77450 - DNA, 25 bp, Probe Sequence
cgtattacagagttgtcatgccttg

SEQ ID NO: 77451 - DNA, 25 bp, Probe Sequence
tcgtattacagagttgtcatgcctt

SEQ ID NO: 77452 - DNA, 25 bp, Probe Sequence
catggtgagaccctatctctattaa

SEQ ID NO: 77453 - DNA, 25 bp, Probe Sequence
atggtgagaccctatctctattaaa

SEQ ID NO: 77454 - DNA, 25 bp, Probe Sequence
ctgtgaaaccccacctctactaaaa

SEQ ID NO: 77455 - DNA, 25 bp, Probe Sequence
ctgagtcaggagaatggtgtgaacc

SEQ ID NO: 77456 - DNA, 25 bp, Probe Sequence
actgtgaaaccccacctctactaaa

SEQ ID NO: 77457 - DNA, 25 bp, Probe Sequence
gaccatcctggctaacactgtgaaa

SEQ ID NO: 77458 - DNA, 25 bp, Probe Sequence
cactgtgaaaccccacctctactaa

SEQ ID NO: 77459 - DNA, 25 bp, Probe Sequence
ctaacactgtgaaaccccacctcta

SEQ ID NO: 77460 - DNA, 25 bp, Probe Sequence
tggtgagaccctatctctattaaaa

SEQ ID NO: 77461 - DNA, 25 bp, Probe Sequence
taacactgtgaaaccccacctctac

SEQ ID NO: 77462 - DNA, 25 bp, Probe Sequence
accatcctggctaacactgtgaaac

SEQ ID NO: 77463 - DNA, 25 bp, Probe Sequence
acactgtgaaaccccacctctacta

SEQ ID NO: 77464 - DNA, 25 bp, Probe Sequence
ccatggtgagaccctatctctatta

SEQ ID NO: 77465 - DNA, 25 bp, Probe Sequence
gacagagcgagactccgtcttaaaa

SEQ ID NO: 77466 - DNA, 25 bp, Probe Sequence
gactctacatacctctctgatctca

SEQ ID NO: 77467 - DNA, 25 bp, Probe Sequence
actctacatacctctctgatctcat

SEQ ID NO: 77468 - DNA, 25 bp, Probe Sequence
ttcttattcactccagcaacacaac

SEQ ID NO: 77469 - DNA, 25 bp, Probe Sequence
cgactctacatacctctctgatctc

SEQ ID NO: 77470 - DNA, 25 bp, Probe Sequence
gaacaactgagatgtgctaacctaa

SEQ ID NO: 77471 - DNA, 25 bp, Probe Sequence
tgtgaatgatattgaggcagaataa

SEQ ID NO: 77472 - DNA, 25 bp, Probe Sequence
ttgtgaatgatattgaggcagaata

SEQ ID NO: 77473 - DNA, 25 bp, Probe Sequence
tacatacctctctgatctcatgctt

SEQ ID NO: 77474 - DNA, 25 bp, Probe Sequence
aagagaacaactgagatgtgctaac

SEQ ID NO: 77475 - DNA, 25 bp, Probe Sequence
ctctacatacctctctgatctcatg

SEQ ID NO: 77476 - DNA, 25 bp, Probe Sequence
ctacatacctctctgatctcatgct

SEQ ID NO: 77477 - DNA, 25 bp, Probe Sequence
tctacatacctctctgatctcatgc

SEQ ID NO: 77478 - DNA, 25 bp, Probe Sequence
agaacaactgagatgtgctaaccta

SEQ ID NO: 77479 - DNA, 25 bp, Probe Sequence
ttgcgactctacatacctctctgat

SEQ ID NO: 77480 - DNA, 25 bp, Probe Sequence
acatacctctctgatctcatgcttg

SEQ ID NO: 77481 - DNA, 25 bp, Probe Sequence
gggttatgttgtgtttgtgaatgat

SEQ ID NO: 77482 - DNA, 25 bp, Probe Sequence
gtttgtgaatgatattgaggcagaa

SEQ ID NO: 77483 - DNA, 25 bp, Probe Sequence
ttgtgtttgtgaatgatattgaggc

SEQ ID NO: 77484 - DNA, 25 bp, Probe Sequence
tagtagtagagggaaatatgggagc

SEQ ID NO: 77485 - DNA, 25 bp, Probe Sequence
tgtttgtgaatgatattgaggcaga

SEQ ID NO: 77486 - DNA, 25 bp, Probe Sequence
gtgtttgtgaatgatattgaggcag

SEQ ID NO: 77487 - DNA, 25 bp, Probe Sequence
ttattcactccagcaacacaaccat

SEQ ID NO: 77488 - DNA, 25 bp, Probe Sequence
tttgtgaatgatattgaggcagaat

SEQ ID NO: 77489 - DNA, 25 bp, Probe Sequence
gttgtgtttgtgaatgatattgagg

SEQ ID NO: 77490 - DNA, 25 bp, Probe Sequence
gtttccttacagacacccataataa

SEQ ID NO: 77491 - DNA, 25 bp, Probe Sequence
ttgtttccttacagacacccataat

SEQ ID NO: 77492 - DNA, 25 bp, Probe Sequence
tttgtttccttacagacacccataa

SEQ ID NO: 77493 - DNA, 25 bp, Probe Sequence
tgtttccttacagacacccataata

SEQ ID NO: 77494 - DNA, 25 bp, Probe Sequence
tttccttacagacacccataataaa

SEQ ID NO: 77495 - DNA, 25 bp, Probe Sequence
ttttgtttccttacagacacccata

SEQ ID NO: 77496 - DNA, 25 bp, Probe Sequence
ttccttacagacacccataataaaa

SEQ ID NO: 77497 - DNA, 25 bp, Probe Sequence
tccttacagacacccataataaaat

SEQ ID NO: 77498 - DNA, 25 bp, Probe Sequence
ccttacagacacccataataaaata

SEQ ID NO: 77499 - DNA, 25 bp, Probe Sequence
acagacacccataataaaatatcat

SEQ ID NO: 77500 - DNA, 25 bp, Probe Sequence
tacagacacccataataaaatatca

SEQ ID NO: 77501 - DNA, 25 bp, Probe Sequence
tggaacctgggaaagaatatttgat

SEQ ID NO: 77502 - DNA, 25 bp, Probe Sequence
ttggaacctgggaaagaatatttga

SEQ ID NO: 77503 - DNA, 25 bp, Probe Sequence
ggaacctgggaaagaatatttgatc

SEQ ID NO: 77504 - DNA, 25 bp, Probe Sequence
cttggaacctgggaaagaatatttg

SEQ ID NO: 77505 - DNA, 25 bp, Probe Sequence
gcttggaacctgggaaagaatattt

SEQ ID NO: 77506 - DNA, 25 bp, Probe Sequence
gaggatggctacaggatgaagtttg

SEQ ID NO: 77507 - DNA, 25 bp, Probe Sequence
tgggaaagaatatttgatcatgggt

SEQ ID NO: 77508 - DNA, 25 bp, Probe Sequence
gggaaagaatatttgatcatgggtc

SEQ ID NO: 77509 - DNA, 25 bp, Probe Sequence
ctgggaaagaatatttgatcatggg

SEQ ID NO: 77510 - DNA, 25 bp, Probe Sequence
cctgggaaagaatatttgatcatgg

SEQ ID NO: 77511 - DNA, 25 bp, Probe Sequence
tcgcttggaacctgggaaagaatat

SEQ ID NO: 77512 - DNA, 25 bp, Probe Sequence
atatttgatcatgggtctagatggg

SEQ ID NO: 77513 - DNA, 25 bp, Probe Sequence
acctgggaaagaatatttgatcatg

SEQ ID NO: 77514 - DNA, 25 bp, Probe Sequence
ctttgagaccaagatcacccaagtc

SEQ ID NO: 77515 - DNA, 25 bp, Probe Sequence
cgcttggaacctgggaaagaatatt

SEQ ID NO: 77516 - DNA, 25 bp, Probe Sequence
gaacctgggaaagaatatttgatca

SEQ ID NO: 77517 - DNA, 25 bp, Probe Sequence
ttcgcttggaacctgggaaagaata

SEQ ID NO: 77518 - DNA, 25 bp, Probe Sequence
ggaaagaatatttgatcatgggtct

SEQ ID NO: 77519 - DNA, 25 bp, Probe Sequence
aacctgggaaagaatatttgatcat

SEQ ID NO: 77520 - DNA, 25 bp, Probe Sequence
gtacggcttccaggttaaggttctc

SEQ ID NO: 77521 - DNA, 25 bp, Probe Sequence
gagtacggcttccaggttaaggttc

SEQ ID NO: 77522 - DNA, 25 bp, Probe Sequence
gaccagggcatattaaaggcttttg

SEQ ID NO: 77523 - DNA, 25 bp, Probe Sequence
cgaggatggctacaggatgaagttt

SEQ ID NO: 77524 - DNA, 25 bp, Probe Sequence
ctcaacgacttcctccaggagtatg

SEQ ID NO: 77525 - DNA, 25 bp, Probe Sequence
tggaacctgggaaagaatatttgat

SEQ ID NO: 77526 - DNA, 25 bp, Probe Sequence
ttggaacctgggaaagaatatttga

SEQ ID NO: 77527 - DNA, 25 bp, Probe Sequence
ggaacctgggaaagaatatttgatc

SEQ ID NO: 77528 - DNA, 25 bp, Probe Sequence
cttggaacctgggaaagaatatttg

SEQ ID NO: 77529 - DNA, 25 bp, Probe Sequence
gcttggaacctgggaaagaatattt

SEQ ID NO: 77530 - DNA, 25 bp, Probe Sequence
gaggatggctacaggatgaagtttg

SEQ ID NO: 77531 - DNA, 25 bp, Probe Sequence
tgggaaagaatatttgatcatgggt

SEQ ID NO: 77532 - DNA, 25 bp, Probe Sequence
gggaaagaatatttgatcatgggtc

SEQ ID NO: 77533 - DNA, 25 bp, Probe Sequence
ctgggaaagaatatttgatcatggg

SEQ ID NO: 77534 - DNA, 25 bp, Probe Sequence
cctgggaaagaatatttgatcatgg

SEQ ID NO: 77535 - DNA, 25 bp, Probe Sequence
tcgcttggaacctgggaaagaatat

SEQ ID NO: 77536 - DNA, 25 bp, Probe Sequence
atatttgatcatgggtctagatggg

SEQ ID NO: 77537 - DNA, 25 bp, Probe Sequence
acctgggaaagaatatttgatcatg

SEQ ID NO: 77538 - DNA, 25 bp, Probe Sequence
ctttgagaccaagatcacccaagtc

SEQ ID NO: 77539 - DNA, 25 bp, Probe Sequence
cgcttggaacctgggaaagaatatt

SEQ ID NO: 77540 - DNA, 25 bp, Probe Sequence
gaacctgggaaagaatatttgatca

SEQ ID NO: 77541 - DNA, 25 bp, Probe Sequence
ttcgcttggaacctgggaaagaata

SEQ ID NO: 77542 - DNA, 25 bp, Probe Sequence
ggaaagaatatttgatcatgggtct

SEQ ID NO: 77543 - DNA, 25 bp, Probe Sequence
aacctgggaaagaatatttgatcat

SEQ ID NO: 77544 - DNA, 25 bp, Probe Sequence
gtacggcttccaggttaaggttctc

SEQ ID NO: 77545 - DNA, 25 bp, Probe Sequence
gagtacggcttccaggttaaggttc

SEQ ID NO: 77546 - DNA, 25 bp, Probe Sequence
gaccagggcatattaaaggcttttg

SEQ ID NO: 77547 - DNA, 25 bp, Probe Sequence
cgaggatggctacaggatgaagttt

SEQ ID NO: 77548 - DNA, 25 bp, Probe Sequence
ctcaacgacttcctccaggagtatg

SEQ ID NO: 77549 - DNA, 25 bp, Probe Sequence
ctctatgttgaggactcaggtggag

SEQ ID NO: 77550 - DNA, 25 bp, Probe Sequence
agaagaaaatctgtccctgagtatc

SEQ ID NO: 77551 - DNA, 25 bp, Probe Sequence
gagaagaaaatctgtccctgagtat

SEQ ID NO: 77552 - DNA, 25 bp, Probe Sequence
agagaagaaaatctgtccctgagta

SEQ ID NO: 77553 - DNA, 25 bp, Probe Sequence
ttcctcaagagaagaaaatctgtcc

SEQ ID NO: 77554 - DNA, 25 bp, Probe Sequence
gaagaaaatctgtccctgagtatca

SEQ ID NO: 77555 - DNA, 25 bp, Probe Sequence
caagagaagaaaatctgtccctgag

SEQ ID NO: 77556 - DNA, 25 bp, Probe Sequence
ctcaagagaagaaaatctgtccctg

SEQ ID NO: 77557 - DNA, 25 bp, Probe Sequence
aagagaagaaaatctgtccctgagt

SEQ ID NO: 77558 - DNA, 25 bp, Probe Sequence
tcaagagaagaaaatctgtccctga

SEQ ID NO: 77559 - DNA, 25 bp, Probe Sequence
cctcaagagaagaaaatctgtccct

SEQ ID NO: 77560 - DNA, 25 bp, Probe Sequence
tcctcaagagaagaaaatctgtccc

SEQ ID NO: 77561 - DNA, 25 bp, Probe Sequence
cactggctctatgttgaggactcag

SEQ ID NO: 77562 - DNA, 25 bp, Probe Sequence
ttgacccctggattaaagtcctaat

SEQ ID NO: 77563 - DNA, 25 bp, Probe Sequence
gctttcctcaagagaagaaaatctg

SEQ ID NO: 77564 - DNA, 25 bp, Probe Sequence
gttgacccctggattaaagtcctaa

SEQ ID NO: 77565 - DNA, 25 bp, Probe Sequence
tttcctcaagagaagaaaatctgtc

SEQ ID NO: 77566 - DNA, 25 bp, Probe Sequence
ctttcctcaagagaagaaaatctgt

SEQ ID NO: 77567 - DNA, 25 bp, Probe Sequence
ggctttcctcaagagaagaaaatct

SEQ ID NO: 77568 - DNA, 25 bp, Probe Sequence
aggctttcctcaagagaagaaaatc

SEQ ID NO: 77569 - DNA, 25 bp, Probe Sequence
ttaaagtcctaatcaggaatgaccc

SEQ ID NO: 77570 - DNA, 25 bp, Probe Sequence
tttggttgacccctggattaaagtc

SEQ ID NO: 77571 - DNA, 25 bp, Probe Sequence
gtctttggttgacccctggattaaa

SEQ ID NO: 77572 - DNA, 25 bp, Probe Sequence
attaaagtcctaatcaggaatgacc

SEQ ID NO: 77573 - DNA, 25 bp, Probe Sequence
ggtcttacgatgttatgagtctgat

SEQ ID NO: 77574 - DNA, 25 bp, Probe Sequence
aggtcttacgatgttatgagtctga

SEQ ID NO: 77575 - DNA, 25 bp, Probe Sequence
gtcttacgatgttatgagtctgatt

SEQ ID NO: 77576 - DNA, 25 bp, Probe Sequence
tcttacgatgttatgagtctgattc

SEQ ID NO: 77577 - DNA, 25 bp, Probe Sequence
tagcaggataacaggtcttacgatg

SEQ ID NO: 77578 - DNA, 25 bp, Probe Sequence
gtagcaggataacaggtcttacgat

SEQ ID NO: 77579 - DNA, 25 bp, Probe Sequence
tagtggattgcctacaactggatta

SEQ ID NO: 77580 - DNA, 25 bp, Probe Sequence
cttacgatgttatgagtctgattca

SEQ ID NO: 77581 - DNA, 25 bp, Probe Sequence
acaggtcttacgatgttatgagtct

SEQ ID NO: 77582 - DNA, 25 bp, Probe Sequence
caggtcttacgatgttatgagtctg

SEQ ID NO: 77583 - DNA, 25 bp, Probe Sequence
atagtggattgcctacaactggatt

SEQ ID NO: 77584 - DNA, 25 bp, Probe Sequence
agtggattgcctacaactggattaa

SEQ ID NO: 77585 - DNA, 25 bp, Probe Sequence
ttatgagtctgattcaggtatgacg

SEQ ID NO: 77586 - DNA, 25 bp, Probe Sequence
cgatgttatgagtctgattcaggta

SEQ ID NO: 77587 - DNA, 25 bp, Probe Sequence
tacgatgttatgagtctgattcagg

SEQ ID NO: 77588 - DNA, 25 bp, Probe Sequence
tggattgcctacaactggattaatg

SEQ ID NO: 77589 - DNA, 25 bp, Probe Sequence
gtggattgcctacaactggattaat

SEQ ID NO: 77590 - DNA, 25 bp, Probe Sequence
gattgcctacaactggattaatgtg

SEQ ID NO: 77591 - DNA, 25 bp, Probe Sequence
catagtggattgcctacaactggat

SEQ ID NO: 77592 - DNA, 25 bp, Probe Sequence
ttattgtgtactgactccatctgcc

SEQ ID NO: 77593 - DNA, 25 bp, Probe Sequence
tgttatgagtctgattcaggtatga

SEQ ID NO: 77594 - DNA, 25 bp, Probe Sequence
ctacaactggattaatgtggacctc

SEQ ID NO: 77595 - DNA, 25 bp, Probe Sequence
gttatgagtctgattcaggtatgac

SEQ ID NO: 77596 - DNA, 25 bp, Probe Sequence
ggattgcctacaactggattaatgt

SEQ ID NO: 77597 - DNA, 25 bp, Probe Sequence
tgtcacctagcagatatgtattact

SEQ ID NO: 77598 - DNA, 25 bp, Probe Sequence
ccagaattaggtcaagttcatagtt

SEQ ID NO: 77599 - DNA, 25 bp, Probe Sequence
tgatattgtcacctagcagatatgt

SEQ ID NO: 77600 - DNA, 25 bp, Probe Sequence
ttgtcacctagcagatatgtattac

SEQ ID NO: 77601 - DNA, 25 bp, Probe Sequence
ttgatattgtcacctagcagatatg

SEQ ID NO: 77602 - DNA, 25 bp, Probe Sequence
gtcacctagcagatatgtattactt

SEQ ID NO: 77603 - DNA, 25 bp, Probe Sequence
accagaattaggtcaagttcatagt

SEQ ID NO: 77604 - DNA, 25 bp, Probe Sequence
atattgcataggacagacttaggag

SEQ ID NO: 77605 - DNA, 25 bp, Probe Sequence
gcattctgtatttcgtgtctcataa

SEQ ID NO: 77606 - DNA, 25 bp, Probe Sequence
aggttggagatgacagaaatatgat

SEQ ID NO: 77607 - DNA, 25 bp, Probe Sequence
gatattgtcacctagcagatatgta

SEQ ID NO: 77608 - DNA, 25 bp, Probe Sequence
tgaatcaaagaatagggagaccatc

SEQ ID NO: 77609 - DNA, 25 bp, Probe Sequence
tatctgactgaaattaaacgagcga

SEQ ID NO: 77610 - DNA, 25 bp, Probe Sequence
atatctgactgaaattaaacgagcg

SEQ ID NO: 77611 - DNA, 25 bp, Probe Sequence
ctgaaattaaacgagcgaagatgag

SEQ ID NO: 77612 - DNA, 25 bp, Probe Sequence
taggttggagatgacagaaatatga

SEQ ID NO: 77613 - DNA, 25 bp, Probe Sequence
caaagaatagggagaccatctgaaa

SEQ ID NO: 77614 - DNA, 25 bp, Probe Sequence
aatcaaagaatagggagaccatctg

SEQ ID NO: 77615 - DNA, 25 bp, Probe Sequence
gaatcaaagaatagggagaccatct

SEQ ID NO: 77616 - DNA, 25 bp, Probe Sequence
aaccagaattaggtcaagttcatag

SEQ ID NO: 77617 - DNA, 25 bp, Probe Sequence
gactgaaattaaacgagcgaagatg

SEQ ID NO: 77618 - DNA, 25 bp, Probe Sequence
ggttggagatgacagaaatatgatt

SEQ ID NO: 77619 - DNA, 25 bp, Probe Sequence
tattgcataggacagacttaggagt

SEQ ID NO: 77620 - DNA, 25 bp, Probe Sequence
actgaaattaaacgagcgaagatga

SEQ ID NO: 77621 - DNA, 25 bp, Probe Sequence
tgtcacctagcagatatgtattact

SEQ ID NO: 77622 - DNA, 25 bp, Probe Sequence
ccagaattaggtcaagttcatagtt

SEQ ID NO: 77623 - DNA, 25 bp, Probe Sequence
tgatattgtcacctagcagatatgt

SEQ ID NO: 77624 - DNA, 25 bp, Probe Sequence
ttgtcacctagcagatatgtattac

SEQ ID NO: 77625 - DNA, 25 bp, Probe Sequence
ttgatattgtcacctagcagatatg

SEQ ID NO: 77626 - DNA, 25 bp, Probe Sequence
gtcacctagcagatatgtattactt

SEQ ID NO: 77627 - DNA, 25 bp, Probe Sequence
accagaattaggtcaagttcatagt

SEQ ID NO: 77628 - DNA, 25 bp, Probe Sequence
atattgcataggacagacttaggag

SEQ ID NO: 77629 - DNA, 25 bp, Probe Sequence
gcattctgtatttcgtgtctcataa

SEQ ID NO: 77630 - DNA, 25 bp, Probe Sequence
aggttggagatgacagaaatatgat

SEQ ID NO: 77631 - DNA, 25 bp, Probe Sequence
gatattgtcacctagcagatatgta

SEQ ID NO: 77632 - DNA, 25 bp, Probe Sequence
tgaatcaaagaatagggagaccatc

SEQ ID NO: 77633 - DNA, 25 bp, Probe Sequence
tatctgactgaaattaaacgagcga

SEQ ID NO: 77634 - DNA, 25 bp, Probe Sequence
atatctgactgaaattaaacgagcg

SEQ ID NO: 77635 - DNA, 25 bp, Probe Sequence
ctgaaattaaacgagcgaagatgag

SEQ ID NO: 77636 - DNA, 25 bp, Probe Sequence
taggttggagatgacagaaatatga

SEQ ID NO: 77637 - DNA, 25 bp, Probe Sequence
caaagaatagggagaccatctgaaa

SEQ ID NO: 77638 - DNA, 25 bp, Probe Sequence
aatcaaagaatagggagaccatctg

SEQ ID NO: 77639 - DNA, 25 bp, Probe Sequence
gaatcaaagaatagggagaccatct

SEQ ID NO: 77640 - DNA, 25 bp, Probe Sequence
aaccagaattaggtcaagttcatag

SEQ ID NO: 77641 - DNA, 25 bp, Probe Sequence
gactgaaattaaacgagcgaagatg

SEQ ID NO: 77642 - DNA, 25 bp, Probe Sequence
ggttggagatgacagaaatatgatt

SEQ ID NO: 77643 - DNA, 25 bp, Probe Sequence
tattgcataggacagacttaggagt

SEQ ID NO: 77644 - DNA, 25 bp, Probe Sequence
actgaaattaaacgagcgaagatga

SEQ ID NO: 77645 - DNA, 25 bp, Probe Sequence
aatgtattatcaccagcagacactg

SEQ ID NO: 77646 - DNA, 25 bp, Probe Sequence
ccctccctgtgtgaaatgtattatc

SEQ ID NO: 77647 - DNA, 25 bp, Probe Sequence
atcgtgtgttagtgttagtggcatc

SEQ ID NO: 77648 - DNA, 25 bp, Probe Sequence
cctccctgtgtgaaatgtattatca

SEQ ID NO: 77649 - DNA, 25 bp, Probe Sequence
catcgtgtgttagtgttagtggcat

SEQ ID NO: 77650 - DNA, 25 bp, Probe Sequence
gaaatgtattatcaccagcagacac

SEQ ID NO: 77651 - DNA, 25 bp, Probe Sequence
aaatgtattatcaccagcagacact

SEQ ID NO: 77652 - DNA, 25 bp, Probe Sequence
tgaaatgtattatcaccagcagaca

SEQ ID NO: 77653 - DNA, 25 bp, Probe Sequence
cgtatgacctagtaaactttgtacc

SEQ ID NO: 77654 - DNA, 25 bp, Probe Sequence
gttctgtagatggataaatcacacc

SEQ ID NO: 77655 - DNA, 25 bp, Probe Sequence
tgtgttagtgttagtggcatccatt

SEQ ID NO: 77656 - DNA, 25 bp, Probe Sequence
atgacctagtaaactttgtaccagt

SEQ ID NO: 77657 - DNA, 25 bp, Probe Sequence
tgtcgtatgacctagtaaactttgt

SEQ ID NO: 77658 - DNA, 25 bp, Probe Sequence
gtgtcgtatgacctagtaaactttg

SEQ ID NO: 77659 - DNA, 25 bp, Probe Sequence
cgtgtcgtatgacctagtaaacttt

SEQ ID NO: 77660 - DNA, 25 bp, Probe Sequence
tgttctgtagatggataaatcacac

SEQ ID NO: 77661 - DNA, 25 bp, Probe Sequence
tcgtatgacctagtaaactttgtac

SEQ ID NO: 77662 - DNA, 25 bp, Probe Sequence
gtatgacctagtaaactttgtacca

SEQ ID NO: 77663 - DNA, 25 bp, Probe Sequence
tctgtagatggataaatcacaccac

SEQ ID NO: 77664 - DNA, 25 bp, Probe Sequence
ttctgtagatggataaatcacacca

SEQ ID NO: 77665 - DNA, 25 bp, Probe Sequence
tatgacctagtaaactttgtaccag

SEQ ID NO: 77666 - DNA, 25 bp, Probe Sequence
ttgttctgtagatggataaatcaca

SEQ ID NO: 77667 - DNA, 25 bp, Probe Sequence
tagatggataaatcacaccacctga

SEQ ID NO: 77668 - DNA, 25 bp, Probe Sequence
gtagatggataaatcacaccacctg

SEQ ID NO: 77669 - DNA, 25 bp, Probe Sequence
aatgtattatcaccagcagacactg

SEQ ID NO: 77670 - DNA, 25 bp, Probe Sequence
ccctccctgtgtgaaatgtattatc

SEQ ID NO: 77671 - DNA, 25 bp, Probe Sequence
atcgtgtgttagtgttagtggcatc

SEQ ID NO: 77672 - DNA, 25 bp, Probe Sequence
cctccctgtgtgaaatgtattatca

SEQ ID NO: 77673 - DNA, 25 bp, Probe Sequence
catcgtgtgttagtgttagtggcat

SEQ ID NO: 77674 - DNA, 25 bp, Probe Sequence
gaaatgtattatcaccagcagacac

SEQ ID NO: 77675 - DNA, 25 bp, Probe Sequence
aaatgtattatcaccagcagacact

SEQ ID NO: 77676 - DNA, 25 bp, Probe Sequence
tgaaatgtattatcaccagcagaca

SEQ ID NO: 77677 - DNA, 25 bp, Probe Sequence
cgtatgacctagtaaactttgtacc

SEQ ID NO: 77678 - DNA, 25 bp, Probe Sequence
gttctgtagatggataaatcacacc

SEQ ID NO: 77679 - DNA, 25 bp, Probe Sequence
tgtgttagtgttagtggcatccatt

SEQ ID NO: 77680 - DNA, 25 bp, Probe Sequence
atgacctagtaaactttgtaccagt

SEQ ID NO: 77681 - DNA, 25 bp, Probe Sequence
tgtcgtatgacctagtaaactttgt

SEQ ID NO: 77682 - DNA, 25 bp, Probe Sequence
gtgtcgtatgacctagtaaactttg

SEQ ID NO: 77683 - DNA, 25 bp, Probe Sequence
cgtgtcgtatgacctagtaaacttt

SEQ ID NO: 77684 - DNA, 25 bp, Probe Sequence
tgttctgtagatggataaatcacac

SEQ ID NO: 77685 - DNA, 25 bp, Probe Sequence
tcgtatgacctagtaaactttgtac

SEQ ID NO: 77686 - DNA, 25 bp, Probe Sequence
gtatgacctagtaaactttgtacca

SEQ ID NO: 77687 - DNA, 25 bp, Probe Sequence
tctgtagatggataaatcacaccac

SEQ ID NO: 77688 - DNA, 25 bp, Probe Sequence
ttctgtagatggataaatcacacca

SEQ ID NO: 77689 - DNA, 25 bp, Probe Sequence
tatgacctagtaaactttgtaccag

SEQ ID NO: 77690 - DNA, 25 bp, Probe Sequence
ttgttctgtagatggataaatcaca

SEQ ID NO: 77691 - DNA, 25 bp, Probe Sequence
tagatggataaatcacaccacctga

SEQ ID NO: 77692 - DNA, 25 bp, Probe Sequence
gtagatggataaatcacaccacctg

SEQ ID NO: 77693 - DNA, 25 bp, Probe Sequence
tcttcttcatcagcactaccataac

SEQ ID NO: 77694 - DNA, 25 bp, Probe Sequence
atcttcttcatcagcactaccataa

SEQ ID NO: 77695 - DNA, 25 bp, Probe Sequence
atatcttcttcatcagcactaccat

SEQ ID NO: 77696 - DNA, 25 bp, Probe Sequence
cttcttcatcagcactaccataacc

SEQ ID NO: 77697 - DNA, 25 bp, Probe Sequence
tatcttcttcatcagcactaccata

SEQ ID NO: 77698 - DNA, 25 bp, Probe Sequence
ttcttcatcagcactaccataacca

SEQ ID NO: 77699 - DNA, 25 bp, Probe Sequence
tcttcatcagcactaccataaccag

SEQ ID NO: 77700 - DNA, 25 bp, Probe Sequence
ttcatcagcactaccataaccagtt

SEQ ID NO: 77701 - DNA, 25 bp, Probe Sequence
cttcatcagcactaccataaccagt

SEQ ID NO: 77702 - DNA, 25 bp, Probe Sequence
gatatcttcttcatcagcactacca

SEQ ID NO: 77703 - DNA, 25 bp, Probe Sequence
ggatatcttcttcatcagcactacc

SEQ ID NO: 77704 - DNA, 25 bp, Probe Sequence
atccacctgtttgacttccatagaa

SEQ ID NO: 77705 - DNA, 25 bp, Probe Sequence
gcctatctaggtgacactatagaac

SEQ ID NO: 77706 - DNA, 25 bp, Probe Sequence
catccacctgtttgacttccataga

SEQ ID NO: 77707 - DNA, 25 bp, Probe Sequence
cggataacatttcacacaggaacag

SEQ ID NO: 77708 - DNA, 25 bp, Probe Sequence
gacggataacatttcacacaggaac

SEQ ID NO: 77709 - DNA, 25 bp, Probe Sequence
tcacctggattattgatattctact

SEQ ID NO: 77710 - DNA, 25 bp, Probe Sequence
catcagcactaccataaccagtttg

SEQ ID NO: 77711 - DNA, 25 bp, Probe Sequence
tcatcagcactaccataaccagttt

SEQ ID NO: 77712 - DNA, 25 bp, Probe Sequence
tctaggtgacactatagaacaagtt

SEQ ID NO: 77713 - DNA, 25 bp, Probe Sequence
ggataacatttcacacaggaacagc

SEQ ID NO: 77714 - DNA, 25 bp, Probe Sequence
atctaggtgacactatagaacaagt

SEQ ID NO: 77715 - DNA, 25 bp, Probe Sequence
cctatctaggtgacactatagaaca

SEQ ID NO: 77716 - DNA, 25 bp, Probe Sequence
taacatttcacacaggaacagctat

SEQ ID NO: 77717 - DNA, 25 bp, Probe Sequence
attgctctgtgtatatctcttggaa

SEQ ID NO: 77718 - DNA, 25 bp, Probe Sequence
aattgctctgtgtatatctcttgga

SEQ ID NO: 77719 - DNA, 25 bp, Probe Sequence
gagccagattaacaggaatgaagaa

SEQ ID NO: 77720 - DNA, 25 bp, Probe Sequence
gccagattaacaggaatgaagaact

SEQ ID NO: 77721 - DNA, 25 bp, Probe Sequence
agccagattaacaggaatgaagaac

SEQ ID NO: 77722 - DNA, 25 bp, Probe Sequence
tgagccagattaacaggaatgaaga

SEQ ID NO: 77723 - DNA, 25 bp, Probe Sequence
ccagattaacaggaatgaagaactg

SEQ ID NO: 77724 - DNA, 25 bp, Probe Sequence
ctgagccagattaacaggaatgaag

SEQ ID NO: 77725 - DNA, 25 bp, Probe Sequence
ccaactctaatattgcttcttgtgt

SEQ ID NO: 77726 - DNA, 25 bp, Probe Sequence
accaactctaatattgcttcttgtg

SEQ ID NO: 77727 - DNA, 25 bp, Probe Sequence
aaccaactctaatattgcttcttgt

SEQ ID NO: 77728 - DNA, 25 bp, Probe Sequence
tgggataactgatttctatggcttt

SEQ ID NO: 77729 - DNA, 25 bp, Probe Sequence
ctgggataactgatttctatggctt

SEQ ID NO: 77730 - DNA, 25 bp, Probe Sequence
ttgctctgtgtatatctcttggaaa

SEQ ID NO: 77731 - DNA, 25 bp, Probe Sequence
gggataactgatttctatggctttc

SEQ ID NO: 77732 - DNA, 25 bp, Probe Sequence
aactgggataactgatttctatggc

SEQ ID NO: 77733 - DNA, 25 bp, Probe Sequence
actgggataactgatttctatggct

SEQ ID NO: 77734 - DNA, 25 bp, Probe Sequence
gcattccagacctcagagataaatc

SEQ ID NO: 77735 - DNA, 25 bp, Probe Sequence
aaattgctctgtgtatatctcttgg

SEQ ID NO: 77736 - DNA, 25 bp, Probe Sequence
agcattccagacctcagagataaat

SEQ ID NO: 77737 - DNA, 25 bp, Probe Sequence
aaactgggataactgatttctatgg

SEQ ID NO: 77738 - DNA, 25 bp, Probe Sequence
caactctaatattgcttcttgtgtt

SEQ ID NO: 77739 - DNA, 25 bp, Probe Sequence
cattccagacctcagagataaatct

SEQ ID NO: 77740 - DNA, 25 bp, Probe Sequence
ggataactgatttctatggctttca

SEQ ID NO: 77741 - DNA, 25 bp, Probe Sequence
attgctctgtgtatatctcttggaa

SEQ ID NO: 77742 - DNA, 25 bp, Probe Sequence
aattgctctgtgtatatctcttgga

SEQ ID NO: 77743 - DNA, 25 bp, Probe Sequence
gagccagattaacaggaatgaagaa

SEQ ID NO: 77744 - DNA, 25 bp, Probe Sequence
gccagattaacaggaatgaagaact

SEQ ID NO: 77745 - DNA, 25 bp, Probe Sequence
agccagattaacaggaatgaagaac

SEQ ID NO: 77746 - DNA, 25 bp, Probe Sequence
tgagccagattaacaggaatgaaga

SEQ ID NO: 77747 - DNA, 25 bp, Probe Sequence
ccagattaacaggaatgaagaactg

SEQ ID NO: 77748 - DNA, 25 bp, Probe Sequence
ctgagccagattaacaggaatgaag

SEQ ID NO: 77749 - DNA, 25 bp, Probe Sequence
ccaactctaatattgcttcttgtgt

SEQ ID NO: 77750 - DNA, 25 bp, Probe Sequence
accaactctaatattgcttcttgtg

SEQ ID NO: 77751 - DNA, 25 bp, Probe Sequence
aaccaactctaatattgcttcttgt

SEQ ID NO: 77752 - DNA, 25 bp, Probe Sequence
tgggataactgatttctatggcttt

SEQ ID NO: 77753 - DNA, 25 bp, Probe Sequence
ctgggataactgatttctatggctt

SEQ ID NO: 77754 - DNA, 25 bp, Probe Sequence
ttgctctgtgtatatctcttggaaa

SEQ ID NO: 77755 - DNA, 25 bp, Probe Sequence
gggataactgatttctatggctttc

SEQ ID NO: 77756 - DNA, 25 bp, Probe Sequence
aactgggataactgatttctatggc

SEQ ID NO: 77757 - DNA, 25 bp, Probe Sequence
actgggataactgatttctatggct

SEQ ID NO: 77758 - DNA, 25 bp, Probe Sequence
gcattccagacctcagagataaatc

SEQ ID NO: 77759 - DNA, 25 bp, Probe Sequence
aaattgctctgtgtatatctcttgg

SEQ ID NO: 77760 - DNA, 25 bp, Probe Sequence
agcattccagacctcagagataaat

SEQ ID NO: 77761 - DNA, 25 bp, Probe Sequence
aaactgggataactgatttctatgg

SEQ ID NO: 77762 - DNA, 25 bp, Probe Sequence
caactctaatattgcttcttgtgtt

SEQ ID NO: 77763 - DNA, 25 bp, Probe Sequence
cattccagacctcagagataaatct

SEQ ID NO: 77764 - DNA, 25 bp, Probe Sequence
ggataactgatttctatggctttca

SEQ ID NO: 77765 - DNA, 25 bp, Probe Sequence
agtgttctaacagtgtaaccatcta

SEQ ID NO: 77766 - DNA, 25 bp, Probe Sequence
tagtgttctaacagtgtaaccatct

SEQ ID NO: 77767 - DNA, 25 bp, Probe Sequence
gtgttctaacagtgtaaccatctaa

SEQ ID NO: 77768 - DNA, 25 bp, Probe Sequence
atagtgttctaacagtgtaaccatc

SEQ ID NO: 77769 - DNA, 25 bp, Probe Sequence
caaagaaagacactggcaatgaaag

SEQ ID NO: 77770 - DNA, 25 bp, Probe Sequence
aatagtgttctaacagtgtaaccat

SEQ ID NO: 77771 - DNA, 25 bp, Probe Sequence
aaagaaagacactggcaatgaaagt

SEQ ID NO: 77772 - DNA, 25 bp, Probe Sequence
aataggagatttagcagctttgtcg

SEQ ID NO: 77773 - DNA, 25 bp, Probe Sequence
atttagcagctttgtcgtcatgtag

SEQ ID NO: 77774 - DNA, 25 bp, Probe Sequence
gatttagcagctttgtcgtcatgta

SEQ ID NO: 77775 - DNA, 25 bp, Probe Sequence
aaataggagatttagcagctttgtc

SEQ ID NO: 77776 - DNA, 25 bp, Probe Sequence
tgtagcacaaagtttctctttactg

SEQ ID NO: 77777 - DNA, 25 bp, Probe Sequence
cgtcatgtagcacaaagtttctctt

SEQ ID NO: 77778 - DNA, 25 bp, Probe Sequence
aaatagtgttctaacagtgtaacca

SEQ ID NO: 77779 - DNA, 25 bp, Probe Sequence
aggctaagaatgctgaacaggaaag

SEQ ID NO: 77780 - DNA, 25 bp, Probe Sequence
ataggagatttagcagctttgtcgt

SEQ ID NO: 77781 - DNA, 25 bp, Probe Sequence
tgttctaacagtgtaaccatctaaa

SEQ ID NO: 77782 - DNA, 25 bp, Probe Sequence
gtcatgtagcacaaagtttctcttt

SEQ ID NO: 77783 - DNA, 25 bp, Probe Sequence
atgtagcacaaagtttctctttact

SEQ ID NO: 77784 - DNA, 25 bp, Probe Sequence
acaaagtttctctttactgccacag

SEQ ID NO: 77785 - DNA, 25 bp, Probe Sequence
tgctctgaaaacactttattacaca

SEQ ID NO: 77786 - DNA, 25 bp, Probe Sequence
tcgtcatgtagcacaaagtttctct

SEQ ID NO: 77787 - DNA, 25 bp, Probe Sequence
gtcgtcatgtagcacaaagtttctc

SEQ ID NO: 77788 - DNA, 25 bp, Probe Sequence
gagatttagcagctttgtcgtcatg

SEQ ID NO: 77789 - DNA, 25 bp, Probe Sequence
agataaaccagaaagtgtattgcca

SEQ ID NO: 77790 - DNA, 25 bp, Probe Sequence
ataaaccagaaagtgtattgccaac

SEQ ID NO: 77791 - DNA, 25 bp, Probe Sequence
gataaaccagaaagtgtattgccaa

SEQ ID NO: 77792 - DNA, 25 bp, Probe Sequence
ggaggatgctaaaccattgagatat

SEQ ID NO: 77793 - DNA, 25 bp, Probe Sequence
aggatgctaaaccattgagatatga

SEQ ID NO: 77794 - DNA, 25 bp, Probe Sequence
gaggatgctaaaccattgagatatg

SEQ ID NO: 77795 - DNA, 25 bp, Probe Sequence
ggatgctaaaccattgagatatgaa

SEQ ID NO: 77796 - DNA, 25 bp, Probe Sequence
taaaccagaaagtgtattgccaact

SEQ ID NO: 77797 - DNA, 25 bp, Probe Sequence
gtacatatcattaagcattggctga

SEQ ID NO: 77798 - DNA, 25 bp, Probe Sequence
tacatatcattaagcattggctgaa

SEQ ID NO: 77799 - DNA, 25 bp, Probe Sequence
tgctaaaccattgagatatgaagat

SEQ ID NO: 77800 - DNA, 25 bp, Probe Sequence
atgctaaaccattgagatatgaaga

SEQ ID NO: 77801 - DNA, 25 bp, Probe Sequence
gatgctaaaccattgagatatgaag

SEQ ID NO: 77802 - DNA, 25 bp, Probe Sequence
agtgtacatatcattaagcattggc

SEQ ID NO: 77803 - DNA, 25 bp, Probe Sequence
tggaggatgctaaaccattgagata

SEQ ID NO: 77804 - DNA, 25 bp, Probe Sequence
gctaaaccattgagatatgaagatt

SEQ ID NO: 77805 - DNA, 25 bp, Probe Sequence
acatatcattaagcattggctgaaa

SEQ ID NO: 77806 - DNA, 25 bp, Probe Sequence
aatcacttaaatggagatccagtcg

SEQ ID NO: 77807 - DNA, 25 bp, Probe Sequence
aaatcacttaaatggagatccagtc

SEQ ID NO: 77808 - DNA, 25 bp, Probe Sequence
agtgtattgccaactttgttaagtg

SEQ ID NO: 77809 - DNA, 25 bp, Probe Sequence
aagtgtattgccaactttgttaagt

SEQ ID NO: 77810 - DNA, 25 bp, Probe Sequence
ttggctgaaaatcacttaaatggag

SEQ ID NO: 77811 - DNA, 25 bp, Probe Sequence
atcacttaaatggagatccagtcga

SEQ ID NO: 77812 - DNA, 25 bp, Probe Sequence
ggctgaaaatcacttaaatggagat

SEQ ID NO: 77813 - DNA, 25 bp, Probe Sequence
accttggaagattgagaagatgtta

SEQ ID NO: 77814 - DNA, 25 bp, Probe Sequence
ccttggaagattgagaagatgttag

SEQ ID NO: 77815 - DNA, 25 bp, Probe Sequence
caccttggaagattgagaagatgtt

SEQ ID NO: 77816 - DNA, 25 bp, Probe Sequence
cgtattaagtcatcgctattaccat

SEQ ID NO: 77817 - DNA, 25 bp, Probe Sequence
cttggaagattgagaagatgttaga

SEQ ID NO: 77818 - DNA, 25 bp, Probe Sequence
ttggaagattgagaagatgttagaa

SEQ ID NO: 77819 - DNA, 25 bp, Probe Sequence
gagcaccttggaagattgagaagat

SEQ ID NO: 77820 - DNA, 25 bp, Probe Sequence
acgtattaagtcatcgctattacca

SEQ ID NO: 77821 - DNA, 25 bp, Probe Sequence
agcaccttggaagattgagaagatg

SEQ ID NO: 77822 - DNA, 25 bp, Probe Sequence
atgaaacaggacaacacaaggtaag

SEQ ID NO: 77823 - DNA, 25 bp, Probe Sequence
gcaccttggaagattgagaagatgt

SEQ ID NO: 77824 - DNA, 25 bp, Probe Sequence
gaagtgactctatgacccagtttag

SEQ ID NO: 77825 - DNA, 25 bp, Probe Sequence
gtattaagtcatcgctattaccatg

SEQ ID NO: 77826 - DNA, 25 bp, Probe Sequence
tggaagattgagaagatgttagaaa

SEQ ID NO: 77827 - DNA, 25 bp, Probe Sequence
aagtgactctatgacccagtttagg

SEQ ID NO: 77828 - DNA, 25 bp, Probe Sequence
cgaagtgactctatgacccagttta

SEQ ID NO: 77829 - DNA, 25 bp, Probe Sequence
catgaaacaggacaacacaaggtaa

SEQ ID NO: 77830 - DNA, 25 bp, Probe Sequence
gtgactctatgacccagtttaggag

SEQ ID NO: 77831 - DNA, 25 bp, Probe Sequence
tgaaacaggacaacacaaggtaagt

SEQ ID NO: 77832 - DNA, 25 bp, Probe Sequence
agtgactctatgacccagtttagga

SEQ ID NO: 77833 - DNA, 25 bp, Probe Sequence
gagaagatgttagaaatgattgtgt

SEQ ID NO: 77834 - DNA, 25 bp, Probe Sequence
tgagaagatgttagaaatgattgtg

SEQ ID NO: 77835 - DNA, 25 bp, Probe Sequence
taggagcaccttggaagattgagaa

SEQ ID NO: 77836 - DNA, 25 bp, Probe Sequence
ttaggagcaccttggaagattgaga

SEQ ID NO: 77837 - DNA, 25 bp, Probe Sequence
gagagaaagagtgagaatctgagtt

SEQ ID NO: 77838 - DNA, 25 bp, Probe Sequence
aggagagaaagagtgagaatctgag

SEQ ID NO: 77839 - DNA, 25 bp, Probe Sequence
gaggagagaaagagtgagaatctga

SEQ ID NO: 77840 - DNA, 25 bp, Probe Sequence
ggagagaaagagtgagaatctgagt

SEQ ID NO: 77841 - DNA, 25 bp, Probe Sequence
agagaaagagtgagaatctgagtta

SEQ ID NO: 77842 - DNA, 25 bp, Probe Sequence
ggaggagagaaagagtgagaatctg

SEQ ID NO: 77843 - DNA, 25 bp, Probe Sequence
gagaaagagtgagaatctgagttat

SEQ ID NO: 77844 - DNA, 25 bp, Probe Sequence
agtgatcctgaagctgttaaagtaa

SEQ ID NO: 77845 - DNA, 25 bp, Probe Sequence
gtgatcctgaagctgttaaagtaaa

SEQ ID NO: 77846 - DNA, 25 bp, Probe Sequence
tgatcctgaagctgttaaagtaaag

SEQ ID NO: 77847 - DNA, 25 bp, Probe Sequence
gatcctgaagctgttaaagtaaaga

SEQ ID NO: 77848 - DNA, 25 bp, Probe Sequence
tttctttccactaccctgacccata

SEQ ID NO: 77849 - DNA, 25 bp, Probe Sequence
agaaagagtgagaatctgagttatt

SEQ ID NO: 77850 - DNA, 25 bp, Probe Sequence
tcctgaagctgttaaagtaaagaat

SEQ ID NO: 77851 - DNA, 25 bp, Probe Sequence
atcctgaagctgttaaagtaaagaa

SEQ ID NO: 77852 - DNA, 25 bp, Probe Sequence
gggaggagagaaagagtgagaatct

SEQ ID NO: 77853 - DNA, 25 bp, Probe Sequence
tgggaggagagaaagagtgagaatc

SEQ ID NO: 77854 - DNA, 25 bp, Probe Sequence
ctgggaggagagaaagagtgagaat

SEQ ID NO: 77855 - DNA, 25 bp, Probe Sequence
cttctctgctttctttccactaccc

SEQ ID NO: 77856 - DNA, 25 bp, Probe Sequence
ccttctctgctttctttccactacc

SEQ ID NO: 77857 - DNA, 25 bp, Probe Sequence
cccttctctgctttctttccactac

SEQ ID NO: 77858 - DNA, 25 bp, Probe Sequence
cagtgatcctgaagctgttaaagta

SEQ ID NO: 77859 - DNA, 25 bp, Probe Sequence
aaactcctaaattgcatcagtgatc

SEQ ID NO: 77860 - DNA, 25 bp, Probe Sequence
gaaactcctaaattgcatcagtgat

SEQ ID NO: 77861 - DNA, 25 bp, Probe Sequence
attcattccttcttccatcctaacc

SEQ ID NO: 77862 - DNA, 25 bp, Probe Sequence
aattcattccttcttccatcctaac

SEQ ID NO: 77863 - DNA, 25 bp, Probe Sequence
actggtgatgtagtatgttgtctta

SEQ ID NO: 77864 - DNA, 25 bp, Probe Sequence
ctggtgatgtagtatgttgtcttat

SEQ ID NO: 77865 - DNA, 25 bp, Probe Sequence
tggtgatgtagtatgttgtcttatt

SEQ ID NO: 77866 - DNA, 25 bp, Probe Sequence
ctagagcattagttctggtctggag

SEQ ID NO: 77867 - DNA, 25 bp, Probe Sequence
gttacttccaggttatggcatctat

SEQ ID NO: 77868 - DNA, 25 bp, Probe Sequence
tagagcattagttctggtctggagt

SEQ ID NO: 77869 - DNA, 25 bp, Probe Sequence
tggttgaatacctagatgtggaatg

SEQ ID NO: 77870 - DNA, 25 bp, Probe Sequence
ttggttgaatacctagatgtggaat

SEQ ID NO: 77871 - DNA, 25 bp, Probe Sequence
tactggtgatgtagtatgttgtctt

SEQ ID NO: 77872 - DNA, 25 bp, Probe Sequence
taattcattccttcttccatcctaa

SEQ ID NO: 77873 - DNA, 25 bp, Probe Sequence
ttaattcattccttcttccatccta

SEQ ID NO: 77874 - DNA, 25 bp, Probe Sequence
gtatgtcgaattacgttgattggtt

SEQ ID NO: 77875 - DNA, 25 bp, Probe Sequence
gtactggtgatgtagtatgttgtct

SEQ ID NO: 77876 - DNA, 25 bp, Probe Sequence
tgtactggtgatgtagtatgttgtc

SEQ ID NO: 77877 - DNA, 25 bp, Probe Sequence
ctgtactggtgatgtagtatgttgt

SEQ ID NO: 77878 - DNA, 25 bp, Probe Sequence
actgtactggtgatgtagtatgttg

SEQ ID NO: 77879 - DNA, 25 bp, Probe Sequence
gactgtactggtgatgtagtatgtt

SEQ ID NO: 77880 - DNA, 25 bp, Probe Sequence
agtatgtcgaattacgttgattggt

SEQ ID NO: 77881 - DNA, 25 bp, Probe Sequence
tacttccaggttatggcatctataa

SEQ ID NO: 77882 - DNA, 25 bp, Probe Sequence
ttacttccaggttatggcatctata

SEQ ID NO: 77883 - DNA, 25 bp, Probe Sequence
tgttacttccaggttatggcatcta

SEQ ID NO: 77884 - DNA, 25 bp, Probe Sequence
agactgtactggtgatgtagtatgt

SEQ ID NO: 77885 - DNA, 25 bp, Probe Sequence
ggagtatgagtcttctgtaattcat

SEQ ID NO: 77886 - DNA, 25 bp, Probe Sequence
atcaactccagataagaactgctct

SEQ ID NO: 77887 - DNA, 25 bp, Probe Sequence
gatcaactccagataagaactgctc

SEQ ID NO: 77888 - DNA, 25 bp, Probe Sequence
aattaacaaggaccatcttctatcc

SEQ ID NO: 77889 - DNA, 25 bp, Probe Sequence
tgtaatttgccagattccatttcat

SEQ ID NO: 77890 - DNA, 25 bp, Probe Sequence
ataagaactgctctgggactgtaat

SEQ ID NO: 77891 - DNA, 25 bp, Probe Sequence
taagaactgctctgggactgtaatt

SEQ ID NO: 77892 - DNA, 25 bp, Probe Sequence
ggatcaactccagataagaactgct

SEQ ID NO: 77893 - DNA, 25 bp, Probe Sequence
ttgccagattccatttcatgttaaa

SEQ ID NO: 77894 - DNA, 25 bp, Probe Sequence
tttgccagattccatttcatgttaa

SEQ ID NO: 77895 - DNA, 25 bp, Probe Sequence
aatttgccagattccatttcatgtt

SEQ ID NO: 77896 - DNA, 25 bp, Probe Sequence
ctgtaatttgccagattccatttca

SEQ ID NO: 77897 - DNA, 25 bp, Probe Sequence
actgtaatttgccagattccatttc

SEQ ID NO: 77898 - DNA, 25 bp, Probe Sequence
gactgtaatttgccagattccattt

SEQ ID NO: 77899 - DNA, 25 bp, Probe Sequence
atttgccagattccatttcatgtta

SEQ ID NO: 77900 - DNA, 25 bp, Probe Sequence
taatttgccagattccatttcatgt

SEQ ID NO: 77901 - DNA, 25 bp, Probe Sequence
gataagaactgctctgggactgtaa

SEQ ID NO: 77902 - DNA, 25 bp, Probe Sequence
gtaatttgccagattccatttcatg

SEQ ID NO: 77903 - DNA, 25 bp, Probe Sequence
gcactcctagcccaatatttatttc

SEQ ID NO: 77904 - DNA, 25 bp, Probe Sequence
agcactcctagcccaatatttattt

SEQ ID NO: 77905 - DNA, 25 bp, Probe Sequence
aagcactcctagcccaatatttatt

SEQ ID NO: 77906 - DNA, 25 bp, Probe Sequence
cctaattaacaaggaccatcttcta

SEQ ID NO: 77907 - DNA, 25 bp, Probe Sequence
taagcactcctagcccaatatttat

SEQ ID NO: 77908 - DNA, 25 bp, Probe Sequence
ataagcactcctagcccaatattta

SEQ ID NO: 77909 - DNA, 25 bp, Probe Sequence
aataagcactcctagcccaatattt

SEQ ID NO: 77910 - DNA, 25 bp, Probe Sequence
ctggagttaatagagtgagttcaca

SEQ ID NO: 77911 - DNA, 25 bp, Probe Sequence
cctggagttaatagagtgagttcac

SEQ ID NO: 77912 - DNA, 25 bp, Probe Sequence
tggagttaatagagtgagttcacaa

SEQ ID NO: 77913 - DNA, 25 bp, Probe Sequence
cctatctagtcaactgggcataatg

SEQ ID NO: 77914 - DNA, 25 bp, Probe Sequence
ccctggagttaatagagtgagttca

SEQ ID NO: 77915 - DNA, 25 bp, Probe Sequence
agttccctcattcttattaccagta

SEQ ID NO: 77916 - DNA, 25 bp, Probe Sequence
cattcttgccctggagttaatagag

SEQ ID NO: 77917 - DNA, 25 bp, Probe Sequence
attcttgccctggagttaatagagt

SEQ ID NO: 77918 - DNA, 25 bp, Probe Sequence
tcattcttgccctggagttaataga

SEQ ID NO: 77919 - DNA, 25 bp, Probe Sequence
gagttccctcattcttattaccagt

SEQ ID NO: 77920 - DNA, 25 bp, Probe Sequence
ctatctagtcaactgggcataatga

SEQ ID NO: 77921 - DNA, 25 bp, Probe Sequence
ggagttaatagagtgagttcacaat

SEQ ID NO: 77922 - DNA, 25 bp, Probe Sequence
ctcattcttgccctggagttaatag

SEQ ID NO: 77923 - DNA, 25 bp, Probe Sequence
gcaaagtacccttgagattgaattt

SEQ ID NO: 77924 - DNA, 25 bp, Probe Sequence
tctcattcttgccctggagttaata

SEQ ID NO: 77925 - DNA, 25 bp, Probe Sequence
gttccctcattcttattaccagtaa

SEQ ID NO: 77926 - DNA, 25 bp, Probe Sequence
ttcttgccctggagttaatagagtg

SEQ ID NO: 77927 - DNA, 25 bp, Probe Sequence
tcctgatttaatgtagactttgact

SEQ ID NO: 77928 - DNA, 25 bp, Probe Sequence
gccctggagttaatagagtgagttc

SEQ ID NO: 77929 - DNA, 25 bp, Probe Sequence
cttgccctggagttaatagagtgag

SEQ ID NO: 77930 - DNA, 25 bp, Probe Sequence
agttaatagagtgagttcacaatct

SEQ ID NO: 77931 - DNA, 25 bp, Probe Sequence
gagttaatagagtgagttcacaatc

SEQ ID NO: 77932 - DNA, 25 bp, Probe Sequence
atagagtgagttcacaatctttggg

SEQ ID NO: 77933 - DNA, 25 bp, Probe Sequence
tcttgccctggagttaatagagtga

SEQ ID NO: 77934 - DNA, 25 bp, Probe Sequence
ttgggaggtgtgtggaataaattat

SEQ ID NO: 77935 - DNA, 25 bp, Probe Sequence
cttgggaggtgtgtggaataaatta

SEQ ID NO: 77936 - DNA, 25 bp, Probe Sequence
tgggaggtgtgtggaataaattatt

SEQ ID NO: 77937 - DNA, 25 bp, Probe Sequence
gggaggtgtgtggaataaattattt

SEQ ID NO: 77938 - DNA, 25 bp, Probe Sequence
ccttgggaggtgtgtggaataaatt

SEQ ID NO: 77939 - DNA, 25 bp, Probe Sequence
gagtgtcttctctctccaggtttca

SEQ ID NO: 77940 - DNA, 25 bp, Probe Sequence
agtgtcttctctctccaggtttcac

SEQ ID NO: 77941 - DNA, 25 bp, Probe Sequence
cagtgccttacacatgcttgattcc

SEQ ID NO: 77942 - DNA, 25 bp, Probe Sequence
ggaggtgtgtggaataaattatttt

SEQ ID NO: 77943 - DNA, 25 bp, Probe Sequence
cttccagtgtgcagaagttagaagg

SEQ ID NO: 77944 - DNA, 25 bp, Probe Sequence
ccttccagtgtgcagaagttagaag

SEQ ID NO: 77945 - DNA, 25 bp, Probe Sequence
ttacacatgcttgattcccacgcta

SEQ ID NO: 77946 - DNA, 25 bp, Probe Sequence
cagtgtgcagaagttagaagggtct

SEQ ID NO: 77947 - DNA, 25 bp, Probe Sequence
accttccagtgtgcagaagttagaa

SEQ ID NO: 77948 - DNA, 25 bp, Probe Sequence
gtgtcttctctctccaggtttcacc

SEQ ID NO: 77949 - DNA, 25 bp, Probe Sequence
atgggaaggatgtgggtctctagtg

SEQ ID NO: 77950 - DNA, 25 bp, Probe Sequence
ttcaccttccagtgtgcagaagtta

SEQ ID NO: 77951 - DNA, 25 bp, Probe Sequence
tttggtctccaagatgaatgctcat

SEQ ID NO: 77952 - DNA, 25 bp, Probe Sequence
ttccagtgtgcagaagttagaaggg

SEQ ID NO: 77953 - DNA, 25 bp, Probe Sequence
caggagaagatggctgctttcactt

SEQ ID NO: 77954 - DNA, 25 bp, Probe Sequence
tctgagcctggtcttttgtcctttt

SEQ ID NO: 77955 - DNA, 25 bp, Probe Sequence
gcagtgccttacacatgcttgattc

SEQ ID NO: 77956 - DNA, 25 bp, Probe Sequence
gccttgggaggtgtgtggaataaat

SEQ ID NO: 77957 - DNA, 25 bp, Probe Sequence
catgggaaggatgtgggtctctagt

SEQ ID NO: 77958 - DNA, 25 bp, Probe Sequence
gaccaatgtgcctcaatatcttatt

SEQ ID NO: 77959 - DNA, 25 bp, Probe Sequence
tgaccaatgtgcctcaatatcttat

SEQ ID NO: 77960 - DNA, 25 bp, Probe Sequence
attaactacttcctctgaccatact

SEQ ID NO: 77961 - DNA, 25 bp, Probe Sequence
gtgaccaatgtgcctcaatatctta

SEQ ID NO: 77962 - DNA, 25 bp, Probe Sequence
aattcagaatacacagtgaccaatg

SEQ ID NO: 77963 - DNA, 25 bp, Probe Sequence
aagaggatctatgagaatgccattg

SEQ ID NO: 77964 - DNA, 25 bp, Probe Sequence
attcagaatacacagtgaccaatgt

SEQ ID NO: 77965 - DNA, 25 bp, Probe Sequence
taactacttcctctgaccatactaa

SEQ ID NO: 77966 - DNA, 25 bp, Probe Sequence
ttaactacttcctctgaccatacta

SEQ ID NO: 77967 - DNA, 25 bp, Probe Sequence
gctattaagtggtaatgaatgttcc

SEQ ID NO: 77968 - DNA, 25 bp, Probe Sequence
gattcaagagcactgtgtatgactg

SEQ ID NO: 77969 - DNA, 25 bp, Probe Sequence
attcaagagcactgtgtatgactga

SEQ ID NO: 77970 - DNA, 25 bp, Probe Sequence
agtgaccaatgtgcctcaatatctt

SEQ ID NO: 77971 - DNA, 25 bp, Probe Sequence
ttggattcaagagcactgtgtatga

SEQ ID NO: 77972 - DNA, 25 bp, Probe Sequence
tcaagagtagccaaagaatcaacat

SEQ ID NO: 77973 - DNA, 25 bp, Probe Sequence
atcaagagtagccaaagaatcaaca

SEQ ID NO: 77974 - DNA, 25 bp, Probe Sequence
aatcaagagtagccaaagaatcaac

SEQ ID NO: 77975 - DNA, 25 bp, Probe Sequence
tgctattaagtggtaatgaatgttc

SEQ ID NO: 77976 - DNA, 25 bp, Probe Sequence
cttgctattaagtggtaatgaatgt

SEQ ID NO: 77977 - DNA, 25 bp, Probe Sequence
gctattaaatgtggcaatgaaggat

SEQ ID NO: 77978 - DNA, 25 bp, Probe Sequence
tattaactacttcctctgaccatac

SEQ ID NO: 77979 - DNA, 25 bp, Probe Sequence
ggattcaagagcactgtgtatgact

SEQ ID NO: 77980 - DNA, 25 bp, Probe Sequence
aaatcaagagtagccaaagaatcaa

SEQ ID NO: 77981 - DNA, 25 bp, Probe Sequence
tcttgctattaagtggtaatgaatg

SEQ ID NO: 77982 - DNA, 25 bp, Probe Sequence
tattaggcacaatgaacttccatct

SEQ ID NO: 77983 - DNA, 25 bp, Probe Sequence
atagagcaagatggacacatagaac

SEQ ID NO: 77984 - DNA, 25 bp, Probe Sequence
caagatggacacatagaacacacta

SEQ ID NO: 77985 - DNA, 25 bp, Probe Sequence
ttattaggcacaatgaacttccatc

SEQ ID NO: 77986 - DNA, 25 bp, Probe Sequence
attaggcacaatgaacttccatctt

SEQ ID NO: 77987 - DNA, 25 bp, Probe Sequence
atgaacttccatcttgtaatgctac

SEQ ID NO: 77988 - DNA, 25 bp, Probe Sequence
caatgaacttccatcttgtaatgct

SEQ ID NO: 77989 - DNA, 25 bp, Probe Sequence
aattattaggcacaatgaacttcca

SEQ ID NO: 77990 - DNA, 25 bp, Probe Sequence
tagagcaagatggacacatagaaca

SEQ ID NO: 77991 - DNA, 25 bp, Probe Sequence
tatagagcaagatggacacatagaa

SEQ ID NO: 77992 - DNA, 25 bp, Probe Sequence
ttatagagcaagatggacacataga

SEQ ID NO: 77993 - DNA, 25 bp, Probe Sequence
attattaggcacaatgaacttccat

SEQ ID NO: 77994 - DNA, 25 bp, Probe Sequence
aatgaacttccatcttgtaatgcta

SEQ ID NO: 77995 - DNA, 25 bp, Probe Sequence
agatggacacatagaacacactatt

SEQ ID NO: 77996 - DNA, 25 bp, Probe Sequence
aagatggacacatagaacacactat

SEQ ID NO: 77997 - DNA, 25 bp, Probe Sequence
ttaggcacaatgaacttccatcttg

SEQ ID NO: 77998 - DNA, 25 bp, Probe Sequence
agagcaagatggacacatagaacac

SEQ ID NO: 77999 - DNA, 25 bp, Probe Sequence
gagcaagatggacacatagaacaca

SEQ ID NO: 78000 - DNA, 25 bp, Probe Sequence
actttatagagcaagatggacacat

SEQ ID NO: 78001 - DNA, 25 bp, Probe Sequence
tcactttatagagcaagatggacac

SEQ ID NO: 78002 - DNA, 25 bp, Probe Sequence
tgaacttccatcttgtaatgctaca

SEQ ID NO: 78003 - DNA, 25 bp, Probe Sequence
cactttatagagcaagatggacaca

SEQ ID NO: 78004 - DNA, 25 bp, Probe Sequence
ggtgttctgtgatattatgtattgt

SEQ ID NO: 78005 - DNA, 25 bp, Probe Sequence
gcaagatggacacatagaacacact

SEQ ID NO: 78006 - DNA, 25 bp, Probe Sequence
ttgacttgctcacctatgaacctat

SEQ ID NO: 78007 - DNA, 25 bp, Probe Sequence
cctagcatagtacctgactcaataa

SEQ ID NO: 78008 - DNA, 25 bp, Probe Sequence
tgacttgctcacctatgaacctatc

SEQ ID NO: 78009 - DNA, 25 bp, Probe Sequence
gcctagcatagtacctgactcaata

SEQ ID NO: 78010 - DNA, 25 bp, Probe Sequence
cttgacttgctcacctatgaaccta

SEQ ID NO: 78011 - DNA, 25 bp, Probe Sequence
gatcttgacttgctcacctatgaac

SEQ ID NO: 78012 - DNA, 25 bp, Probe Sequence
gttggtgcagaatatagtcatagga

SEQ ID NO: 78013 - DNA, 25 bp, Probe Sequence
tgttggtgcagaatatagtcatagg

SEQ ID NO: 78014 - DNA, 25 bp, Probe Sequence
taaaccagaggctatgcttagattt

SEQ ID NO: 78015 - DNA, 25 bp, Probe Sequence
gtaaaccagaggctatgcttagatt

SEQ ID NO: 78016 - DNA, 25 bp, Probe Sequence
gacttgctcacctatgaacctatcc

SEQ ID NO: 78017 - DNA, 25 bp, Probe Sequence
ttggtgcagaatatagtcataggaa

SEQ ID NO: 78018 - DNA, 25 bp, Probe Sequence
gcctataatatcagcactttgggaa

SEQ ID NO: 78019 - DNA, 25 bp, Probe Sequence
atcttgacttgctcacctatgaacc

SEQ ID NO: 78020 - DNA, 25 bp, Probe Sequence
gagtgggatttaacagatgtcttca

SEQ ID NO: 78021 - DNA, 25 bp, Probe Sequence
atacaaagagagccaacttacagat

SEQ ID NO: 78022 - DNA, 25 bp, Probe Sequence
ctataatatcagcactttgggaagc

SEQ ID NO: 78023 - DNA, 25 bp, Probe Sequence
aaagagagccaacttacagatgaaa

SEQ ID NO: 78024 - DNA, 25 bp, Probe Sequence
tacaaagagagccaacttacagatg

SEQ ID NO: 78025 - DNA, 25 bp, Probe Sequence
tataatatcagcactttgggaagcc

SEQ ID NO: 78026 - DNA, 25 bp, Probe Sequence
agtgggatttaacagatgtcttcat

SEQ ID NO: 78027 - DNA, 25 bp, Probe Sequence
tatacaaagagagccaacttacaga

SEQ ID NO: 78028 - DNA, 25 bp, Probe Sequence
tgtaaaccagaggctatgcttagat

SEQ ID NO: 78029 - DNA, 25 bp, Probe Sequence
atgtaaaccagaggctatgcttaga

SEQ ID NO: 78030 - DNA, 25 bp, Probe Sequence
tggattacacaatgacatggagaat

SEQ ID NO: 78031 - DNA, 25 bp, Probe Sequence
gattacacaatgacatggagaatgg

SEQ ID NO: 78032 - DNA, 25 bp, Probe Sequence
ggattacacaatgacatggagaatg

SEQ ID NO: 78033 - DNA, 25 bp, Probe Sequence
ttggattacacaatgacatggagaa

SEQ ID NO: 78034 - DNA, 25 bp, Probe Sequence
atctctatgagccaccattggatta

SEQ ID NO: 78035 - DNA, 25 bp, Probe Sequence
attccatctctatgagccaccattg

SEQ ID NO: 78036 - DNA, 25 bp, Probe Sequence
cattccatctctatgagccaccatt

SEQ ID NO: 78037 - DNA, 25 bp, Probe Sequence
tctctatgagccaccattggattac

SEQ ID NO: 78038 - DNA, 25 bp, Probe Sequence
attggattacacaatgacatggaga

SEQ ID NO: 78039 - DNA, 25 bp, Probe Sequence
ctctatgagccaccattggattaca

SEQ ID NO: 78040 - DNA, 25 bp, Probe Sequence
tatgagccaccattggattacacaa

SEQ ID NO: 78041 - DNA, 25 bp, Probe Sequence
tctatgagccaccattggattacac

SEQ ID NO: 78042 - DNA, 25 bp, Probe Sequence
catctctatgagccaccattggatt

SEQ ID NO: 78043 - DNA, 25 bp, Probe Sequence
aagaacagagtatgggtcatctcag

SEQ ID NO: 78044 - DNA, 25 bp, Probe Sequence
gaagaacagagtatgggtcatctca

SEQ ID NO: 78045 - DNA, 25 bp, Probe Sequence
attacacaatgacatggagaatggg

SEQ ID NO: 78046 - DNA, 25 bp, Probe Sequence
ctatgagccaccattggattacaca

SEQ ID NO: 78047 - DNA, 25 bp, Probe Sequence
ggaagaacagagtatgggtcatctc

SEQ ID NO: 78048 - DNA, 25 bp, Probe Sequence
ttacacaatgacatggagaatggga

SEQ ID NO: 78049 - DNA, 25 bp, Probe Sequence
atgagccaccattggattacacaat

SEQ ID NO: 78050 - DNA, 25 bp, Probe Sequence
aaccgtaacttctgatttctttgca

SEQ ID NO: 78051 - DNA, 25 bp, Probe Sequence
tacacaatgacatggagaatgggac

SEQ ID NO: 78052 - DNA, 25 bp, Probe Sequence
agggaagaacagagtatgggtcatc

SEQ ID NO: 78053 - DNA, 25 bp, Probe Sequence
gggaagaacagagtatgggtcatct

SEQ ID NO: 78054 - DNA, 25 bp, Probe Sequence
tgcttatgtattgacagaacacttc

SEQ ID NO: 78055 - DNA, 25 bp, Probe Sequence
atgcttatgtattgacagaacactt

SEQ ID NO: 78056 - DNA, 25 bp, Probe Sequence
aatgcttatgtattgacagaacact

SEQ ID NO: 78057 - DNA, 25 bp, Probe Sequence
gccatcttagacagttggtgtaata

SEQ ID NO: 78058 - DNA, 25 bp, Probe Sequence
ccatcttagacagttggtgtaataa

SEQ ID NO: 78059 - DNA, 25 bp, Probe Sequence
gcttatgtattgacagaacacttct

SEQ ID NO: 78060 - DNA, 25 bp, Probe Sequence
aaaccctgtctctactaagaatact

SEQ ID NO: 78061 - DNA, 25 bp, Probe Sequence
acacactgttctactgtttgaattt

SEQ ID NO: 78062 - DNA, 25 bp, Probe Sequence
gaaaccctgtctctactaagaatac

SEQ ID NO: 78063 - DNA, 25 bp, Probe Sequence
tgtgtgtgtgtgtgtttgaatgaaa

SEQ ID NO: 78064 - DNA, 25 bp, Probe Sequence
agaaaccctgtctctactaagaata

SEQ ID NO: 78065 - DNA, 25 bp, Probe Sequence
tacacactgttctactgtttgaatt

SEQ ID NO: 78066 - DNA, 25 bp, Probe Sequence
gtacacactgttctactgtttgaat

SEQ ID NO: 78067 - DNA, 25 bp, Probe Sequence
agaatactaaattagctgggcatgg

SEQ ID NO: 78068 - DNA, 25 bp, Probe Sequence
gatcaattcacaaggccatcttaga

SEQ ID NO: 78069 - DNA, 25 bp, Probe Sequence
aagaatactaaattagctgggcatg

SEQ ID NO: 78070 - DNA, 25 bp, Probe Sequence
cgtacacactgttctactgtttgaa

SEQ ID NO: 78071 - DNA, 25 bp, Probe Sequence
aaatgcttatgtattgacagaacac

SEQ ID NO: 78072 - DNA, 25 bp, Probe Sequence
gaatactaaattagctgggcatggt

SEQ ID NO: 78073 - DNA, 25 bp, Probe Sequence
atcaattcacaaggccatcttagac

SEQ ID NO: 78074 - DNA, 25 bp, Probe Sequence
aatactaaattagctgggcatggtg

SEQ ID NO: 78075 - DNA, 25 bp, Probe Sequence
accctgtctctactaagaatactaa

SEQ ID NO: 78076 - DNA, 25 bp, Probe Sequence
aaccctgtctctactaagaatacta

SEQ ID NO: 78077 - DNA, 25 bp, Probe Sequence
gtgtgtgtgtgtgtgtttgaatgaa

SEQ ID NO: 78078 - DNA, 25 bp, Probe Sequence
ggacagttcacaatctagtaatagc

SEQ ID NO: 78079 - DNA, 25 bp, Probe Sequence
gacagttcacaatctagtaatagca

SEQ ID NO: 78080 - DNA, 25 bp, Probe Sequence
gtataatgttctcacagttcatcca

SEQ ID NO: 78081 - DNA, 25 bp, Probe Sequence
acagttcacaatctagtaatagcaa

SEQ ID NO: 78082 - DNA, 25 bp, Probe Sequence
agtataatgttctcacagttcatcc

SEQ ID NO: 78083 - DNA, 25 bp, Probe Sequence
tcacagttcatccatgttatagcat

SEQ ID NO: 78084 - DNA, 25 bp, Probe Sequence
tgttctcacagttcatccatgttat

SEQ ID NO: 78085 - DNA, 25 bp, Probe Sequence
atgttctcacagttcatccatgtta

SEQ ID NO: 78086 - DNA, 25 bp, Probe Sequence
taatgttctcacagttcatccatgt

SEQ ID NO: 78087 - DNA, 25 bp, Probe Sequence
tctcacagttcatccatgttatagc

SEQ ID NO: 78088 - DNA, 25 bp, Probe Sequence
ctcacagttcatccatgttatagca

SEQ ID NO: 78089 - DNA, 25 bp, Probe Sequence
aatgttctcacagttcatccatgtt

SEQ ID NO: 78090 - DNA, 25 bp, Probe Sequence
ataatgttctcacagttcatccatg

SEQ ID NO: 78091 - DNA, 25 bp, Probe Sequence
aggacagttcacaatctagtaatag

SEQ ID NO: 78092 - DNA, 25 bp, Probe Sequence
ttctgtctctatgatccgtgactac

SEQ ID NO: 78093 - DNA, 25 bp, Probe Sequence
cacatttcgctttcagtagtcattt

SEQ ID NO: 78094 - DNA, 25 bp, Probe Sequence
gttctcacagttcatccatgttata

SEQ ID NO: 78095 - DNA, 25 bp, Probe Sequence
ccaccattctactttctgtctctat

SEQ ID NO: 78096 - DNA, 25 bp, Probe Sequence
tataatgttctcacagttcatccat

SEQ ID NO: 78097 - DNA, 25 bp, Probe Sequence
ttctcacagttcatccatgttatag

SEQ ID NO: 78098 - DNA, 25 bp, Probe Sequence
cccaccattctactttctgtctcta

SEQ ID NO: 78099 - DNA, 25 bp, Probe Sequence
aaggacagttcacaatctagtaata

SEQ ID NO: 78100 - DNA, 25 bp, Probe Sequence
tctcatataagtggaatcattcagt

SEQ ID NO: 78101 - DNA, 25 bp, Probe Sequence
tccgtgactaccctatctcatataa

SEQ ID NO: 78102 - DNA, 25 bp, Probe Sequence
gtatcttcattggttcatcctcttg

SEQ ID NO: 78103 - DNA, 25 bp, Probe Sequence
agtatcttcattggttcatcctctt

SEQ ID NO: 78104 - DNA, 25 bp, Probe Sequence
tatcttcattggttcatcctcttgc

SEQ ID NO: 78105 - DNA, 25 bp, Probe Sequence
aagtatcttcattggttcatcctct

SEQ ID NO: 78106 - DNA, 25 bp, Probe Sequence
ttgaattactgtaactgattggtcc

SEQ ID NO: 78107 - DNA, 25 bp, Probe Sequence
taattggcataaggacatatctacg

SEQ ID NO: 78108 - DNA, 25 bp, Probe Sequence
cctgataatctgcctcttctccatt

SEQ ID NO: 78109 - DNA, 25 bp, Probe Sequence
tccatcttaattggcataaggacat

SEQ ID NO: 78110 - DNA, 25 bp, Probe Sequence
atccatcttaattggcataaggaca

SEQ ID NO: 78111 - DNA, 25 bp, Probe Sequence
catccatcttaattggcataaggac

SEQ ID NO: 78112 - DNA, 25 bp, Probe Sequence
tcatccatcttaattggcataagga

SEQ ID NO: 78113 - DNA, 25 bp, Probe Sequence
gttcatcatccatcttaattggcat

SEQ ID NO: 78114 - DNA, 25 bp, Probe Sequence
attggcataaggacatatctacgtt

SEQ ID NO: 78115 - DNA, 25 bp, Probe Sequence
aattggcataaggacatatctacgt

SEQ ID NO: 78116 - DNA, 25 bp, Probe Sequence
ggtaagtttcaaatctatgccagtc

SEQ ID NO: 78117 - DNA, 25 bp, Probe Sequence
aggtaagtttcaaatctatgccagt

SEQ ID NO: 78118 - DNA, 25 bp, Probe Sequence
ggtgggagataggtaagtttcaaat

SEQ ID NO: 78119 - DNA, 25 bp, Probe Sequence
catttctccttcccttactaccttt

SEQ ID NO: 78120 - DNA, 25 bp, Probe Sequence
ataatctgcctcttctccatttctc

SEQ ID NO: 78121 - DNA, 25 bp, Probe Sequence
ggcataaggacatatctacgttgaa

SEQ ID NO: 78122 - DNA, 25 bp, Probe Sequence
taggtgggagataggtaagtttcaa

SEQ ID NO: 78123 - DNA, 25 bp, Probe Sequence
atttctccttcccttactacctttc

SEQ ID NO: 78124 - DNA, 25 bp, Probe Sequence
ttctccatttctccttcccttacta

SEQ ID NO: 78125 - DNA, 25 bp, Probe Sequence
gataatctgcctcttctccatttct

SEQ ID NO: 78126 - DNA, 25 bp, Probe Sequence
tgttgattctgaagtgctctgtaat

SEQ ID NO: 78127 - DNA, 25 bp, Probe Sequence
atgttgattctgaagtgctctgtaa

SEQ ID NO: 78128 - DNA, 25 bp, Probe Sequence
aatgttgattctgaagtgctctgta

SEQ ID NO: 78129 - DNA, 25 bp, Probe Sequence
atggaggacagatgacaagatatac

SEQ ID NO: 78130 - DNA, 25 bp, Probe Sequence
gatggaggacagatgacaagatata

SEQ ID NO: 78131 - DNA, 25 bp, Probe Sequence
tgatggaggacagatgacaagatat

SEQ ID NO: 78132 - DNA, 25 bp, Probe Sequence
tggaggacagatgacaagatatacc

SEQ ID NO: 78133 - DNA, 25 bp, Probe Sequence
ctactccaagttgaccatcttcaga

SEQ ID NO: 78134 - DNA, 25 bp, Probe Sequence
tactccaagttgaccatcttcagag

SEQ ID NO: 78135 - DNA, 25 bp, Probe Sequence
ctgatggaggacagatgacaagata

SEQ ID NO: 78136 - DNA, 25 bp, Probe Sequence
gttgattctgaagtgctctgtaatc

SEQ ID NO: 78137 - DNA, 25 bp, Probe Sequence
ttgattctgaagtgctctgtaatcg

SEQ ID NO: 78138 - DNA, 25 bp, Probe Sequence
cctactccaagttgaccatcttcag

SEQ ID NO: 78139 - DNA, 25 bp, Probe Sequence
aaatgttgattctgaagtgctctgt

SEQ ID NO: 78140 - DNA, 25 bp, Probe Sequence
tactcactggatcttcacacactct

SEQ ID NO: 78141 - DNA, 25 bp, Probe Sequence
gtactcactggatcttcacacactc

SEQ ID NO: 78142 - DNA, 25 bp, Probe Sequence
ccctaccttaaagacaaacatctcg

SEQ ID NO: 78143 - DNA, 25 bp, Probe Sequence
caaatgttgattctgaagtgctctg

SEQ ID NO: 78144 - DNA, 25 bp, Probe Sequence
gccctaccttaaagacaaacatctc

SEQ ID NO: 78145 - DNA, 25 bp, Probe Sequence
ggaggacagatgacaagatataccc

SEQ ID NO: 78146 - DNA, 25 bp, Probe Sequence
acaaatgttgattctgaagtgctct

SEQ ID NO: 78147 - DNA, 25 bp, Probe Sequence
ctaccttaaagacaaacatctcgcc

SEQ ID NO: 78148 - DNA, 25 bp, Probe Sequence
cctaccttaaagacaaacatctcgc

SEQ ID NO: 78149 - DNA, 25 bp, Probe Sequence
ccctcacaaatgttgattctgaagt

SEQ ID NO: 78150 - DNA, 25 bp, Probe Sequence
attaactggcactactaactgaagg

SEQ ID NO: 78151 - DNA, 25 bp, Probe Sequence
ccacaggagatgctatcaatgttat

SEQ ID NO: 78152 - DNA, 25 bp, Probe Sequence
tattaactggcactactaactgaag

SEQ ID NO: 78153 - DNA, 25 bp, Probe Sequence
cacaggagatgctatcaatgttatt

SEQ ID NO: 78154 - DNA, 25 bp, Probe Sequence
ttaactggcactactaactgaaggc

SEQ ID NO: 78155 - DNA, 25 bp, Probe Sequence
atattaactggcactactaactgaa

SEQ ID NO: 78156 - DNA, 25 bp, Probe Sequence
tgcttggtatatgcctttactactt

SEQ ID NO: 78157 - DNA, 25 bp, Probe Sequence
atgcttggtatatgcctttactact

SEQ ID NO: 78158 - DNA, 25 bp, Probe Sequence
cgtatgcttggtatatgcctttact

SEQ ID NO: 78159 - DNA, 25 bp, Probe Sequence
gcttggtatatgcctttactacttt

SEQ ID NO: 78160 - DNA, 25 bp, Probe Sequence
aaattatagccagcactttgagagg

SEQ ID NO: 78161 - DNA, 25 bp, Probe Sequence
acaatattaactggcactactaact

SEQ ID NO: 78162 - DNA, 25 bp, Probe Sequence
agttctacagtttattacttgccca

SEQ ID NO: 78163 - DNA, 25 bp, Probe Sequence
gccacaggagatgctatcaatgtta

SEQ ID NO: 78164 - DNA, 25 bp, Probe Sequence
atctgaagattgaacaaggctgtga

SEQ ID NO: 78165 - DNA, 25 bp, Probe Sequence
caatattaactggcactactaactg

SEQ ID NO: 78166 - DNA, 25 bp, Probe Sequence
gtaatctgaagattgaacaaggctg

SEQ ID NO: 78167 - DNA, 25 bp, Probe Sequence
gttctacagtttattacttgcccaa

SEQ ID NO: 78168 - DNA, 25 bp, Probe Sequence
tgcttgcatattggaagatgttgaa

SEQ ID NO: 78169 - DNA, 25 bp, Probe Sequence
taatctgaagattgaacaaggctgt

SEQ ID NO: 78170 - DNA, 25 bp, Probe Sequence
tgtaatctgaagattgaacaaggct

SEQ ID NO: 78171 - DNA, 25 bp, Probe Sequence
attatagccagcactttgagaggaa

SEQ ID NO: 78172 - DNA, 25 bp, Probe Sequence
ttgcccaagtgttactaaatccttt

SEQ ID NO: 78173 - DNA, 25 bp, Probe Sequence
aatattaactggcactactaactga

SEQ ID NO: 78174 - DNA, 25 bp, Probe Sequence
ttgacattgtgaagagacatagagg

SEQ ID NO: 78175 - DNA, 25 bp, Probe Sequence
atagagggtgtagaataagtgggag

SEQ ID NO: 78176 - DNA, 25 bp, Probe Sequence
catagagggtgtagaataagtggga

SEQ ID NO: 78177 - DNA, 25 bp, Probe Sequence
ttgactctagtttgacattgtgaag

SEQ ID NO: 78178 - DNA, 25 bp, Probe Sequence
cttgactctagtttgacattgtgaa

SEQ ID NO: 78179 - DNA, 25 bp, Probe Sequence
tgactctagtttgacattgtgaaga

SEQ ID NO: 78180 - DNA, 25 bp, Probe Sequence
gcttgactctagtttgacattgtga

SEQ ID NO: 78181 - DNA, 25 bp, Probe Sequence
gacatagagggtgtagaataagtgg

SEQ ID NO: 78182 - DNA, 25 bp, Probe Sequence
ctttacttattcaatgaagcggagc

SEQ ID NO: 78183 - DNA, 25 bp, Probe Sequence
tgaagagacatagagggtgtagaat

SEQ ID NO: 78184 - DNA, 25 bp, Probe Sequence
tctttacttattcaatgaagcggag

SEQ ID NO: 78185 - DNA, 25 bp, Probe Sequence
attgtgaagagacatagagggtgta

SEQ ID NO: 78186 - DNA, 25 bp, Probe Sequence
agacatagagggtgtagaataagtg

SEQ ID NO: 78187 - DNA, 25 bp, Probe Sequence
gtttgacattgtgaagagacataga

SEQ ID NO: 78188 - DNA, 25 bp, Probe Sequence
agtttgacattgtgaagagacatag

SEQ ID NO: 78189 - DNA, 25 bp, Probe Sequence
tctagtttgacattgtgaagagaca

SEQ ID NO: 78190 - DNA, 25 bp, Probe Sequence
acatagagggtgtagaataagtggg

SEQ ID NO: 78191 - DNA, 25 bp, Probe Sequence
gtgaagagacatagagggtgtagaa

SEQ ID NO: 78192 - DNA, 25 bp, Probe Sequence
ttctttacttattcaatgaagcgga

SEQ ID NO: 78193 - DNA, 25 bp, Probe Sequence
gagacatagagggtgtagaataagt

SEQ ID NO: 78194 - DNA, 25 bp, Probe Sequence
ttgtgaagagacatagagggtgtag

SEQ ID NO: 78195 - DNA, 25 bp, Probe Sequence
tttgacattgtgaagagacatagag

SEQ ID NO: 78196 - DNA, 25 bp, Probe Sequence
ctagtttgacattgtgaagagacat

SEQ ID NO: 78197 - DNA, 25 bp, Probe Sequence
agagacatagagggtgtagaataag

SEQ ID NO: 78198 - DNA, 25 bp, Probe Sequence
caactatggtgctcaggtgattatc

SEQ ID NO: 78199 - DNA, 25 bp, Probe Sequence
aactatggtgctcaggtgattatcc

SEQ ID NO: 78200 - DNA, 25 bp, Probe Sequence
ttatccttcgctcgtttatccaata

SEQ ID NO: 78201 - DNA, 25 bp, Probe Sequence
attatccttcgctcgtttatccaat

SEQ ID NO: 78202 - DNA, 25 bp, Probe Sequence
tatggtgctcaggtgattatccttc

SEQ ID NO: 78203 - DNA, 25 bp, Probe Sequence
ctatggtgctcaggtgattatcctt

SEQ ID NO: 78204 - DNA, 25 bp, Probe Sequence
tatccttcgctcgtttatccaataa

SEQ ID NO: 78205 - DNA, 25 bp, Probe Sequence
gattatccttcgctcgtttatccaa

SEQ ID NO: 78206 - DNA, 25 bp, Probe Sequence
gtgattatccttcgctcgtttatcc

SEQ ID NO: 78207 - DNA, 25 bp, Probe Sequence
ggtgattatccttcgctcgtttatc

SEQ ID NO: 78208 - DNA, 25 bp, Probe Sequence
aatgggaaattacatattgctgtgc

SEQ ID NO: 78209 - DNA, 25 bp, Probe Sequence
tgattatccttcgctcgtttatcca

SEQ ID NO: 78210 - DNA, 25 bp, Probe Sequence
ccgttctttggagcattgttctaaa

SEQ ID NO: 78211 - DNA, 25 bp, Probe Sequence
gaaattacatattgctgtgccaagg

SEQ ID NO: 78212 - DNA, 25 bp, Probe Sequence
ggaaattacatattgctgtgccaag

SEQ ID NO: 78213 - DNA, 25 bp, Probe Sequence
actatggtgctcaggtgattatcct

SEQ ID NO: 78214 - DNA, 25 bp, Probe Sequence
aaatgggaaattacatattgctgtg

SEQ ID NO: 78215 - DNA, 25 bp, Probe Sequence
atgggaaattacatattgctgtgcc

SEQ ID NO: 78216 - DNA, 25 bp, Probe Sequence
aaattacatattgctgtgccaaggg

SEQ ID NO: 78217 - DNA, 25 bp, Probe Sequence
gggaaattacatattgctgtgccaa

SEQ ID NO: 78218 - DNA, 25 bp, Probe Sequence
accgttctttggagcattgttctaa

SEQ ID NO: 78219 - DNA, 25 bp, Probe Sequence
aggtgattatccttcgctcgtttat

SEQ ID NO: 78220 - DNA, 25 bp, Probe Sequence
gaccgttctttggagcattgttcta

SEQ ID NO: 78221 - DNA, 25 bp, Probe Sequence
tccaataaacatttatcaagcatca

SEQ ID NO: 78222 - DNA, 25 bp, Probe Sequence
caactatggtgctcaggtgattatc

SEQ ID NO: 78223 - DNA, 25 bp, Probe Sequence
aactatggtgctcaggtgattatcc

SEQ ID NO: 78224 - DNA, 25 bp, Probe Sequence
ttatccttcgctcgtttatccaata

SEQ ID NO: 78225 - DNA, 25 bp, Probe Sequence
attatccttcgctcgtttatccaat

SEQ ID NO: 78226 - DNA, 25 bp, Probe Sequence
tatggtgctcaggtgattatccttc

SEQ ID NO: 78227 - DNA, 25 bp, Probe Sequence
ctatggtgctcaggtgattatcctt

SEQ ID NO: 78228 - DNA, 25 bp, Probe Sequence
tatccttcgctcgtttatccaataa

SEQ ID NO: 78229 - DNA, 25 bp, Probe Sequence
gattatccttcgctcgtttatccaa

SEQ ID NO: 78230 - DNA, 25 bp, Probe Sequence
gtgattatccttcgctcgtttatcc

SEQ ID NO: 78231 - DNA, 25 bp, Probe Sequence
ggtgattatccttcgctcgtttatc

SEQ ID NO: 78232 - DNA, 25 bp, Probe Sequence
aatgggaaattacatattgctgtgc

SEQ ID NO: 78233 - DNA, 25 bp, Probe Sequence
tgattatccttcgctcgtttatcca

SEQ ID NO: 78234 - DNA, 25 bp, Probe Sequence
ccgttctttggagcattgttctaaa

SEQ ID NO: 78235 - DNA, 25 bp, Probe Sequence
gaaattacatattgctgtgccaagg

SEQ ID NO: 78236 - DNA, 25 bp, Probe Sequence
ggaaattacatattgctgtgccaag

SEQ ID NO: 78237 - DNA, 25 bp, Probe Sequence
actatggtgctcaggtgattatcct

SEQ ID NO: 78238 - DNA, 25 bp, Probe Sequence
aaatgggaaattacatattgctgtg

SEQ ID NO: 78239 - DNA, 25 bp, Probe Sequence
atgggaaattacatattgctgtgcc

SEQ ID NO: 78240 - DNA, 25 bp, Probe Sequence
aaattacatattgctgtgccaaggg

SEQ ID NO: 78241 - DNA, 25 bp, Probe Sequence
gggaaattacatattgctgtgccaa

SEQ ID NO: 78242 - DNA, 25 bp, Probe Sequence
accgttctttggagcattgttctaa

SEQ ID NO: 78243 - DNA, 25 bp, Probe Sequence
aggtgattatccttcgctcgtttat

SEQ ID NO: 78244 - DNA, 25 bp, Probe Sequence
gaccgttctttggagcattgttcta

SEQ ID NO: 78245 - DNA, 25 bp, Probe Sequence
tccaataaacatttatcaagcatca

SEQ ID NO: 78246 - DNA, 25 bp, Probe Sequence
ccttccatagtcaataccaacaatg

SEQ ID NO: 78247 - DNA, 25 bp, Probe Sequence
actgaatctctctgacttcctcttc

SEQ ID NO: 78248 - DNA, 25 bp, Probe Sequence
cactgaatctctctgacttcctctt

SEQ ID NO: 78249 - DNA, 25 bp, Probe Sequence
ttctcacactgaatctctctgactt

SEQ ID NO: 78250 - DNA, 25 bp, Probe Sequence
ctgaatctctctgacttcctcttcc

SEQ ID NO: 78251 - DNA, 25 bp, Probe Sequence
atcaactccttctcacactgaatct

SEQ ID NO: 78252 - DNA, 25 bp, Probe Sequence
catcaactccttctcacactgaatc

SEQ ID NO: 78253 - DNA, 25 bp, Probe Sequence
tctcacactgaatctctctgacttc

SEQ ID NO: 78254 - DNA, 25 bp, Probe Sequence
cttctcacactgaatctctctgact

SEQ ID NO: 78255 - DNA, 25 bp, Probe Sequence
tatctcatcatattcacagtcctga

SEQ ID NO: 78256 - DNA, 25 bp, Probe Sequence
aactccttctcacactgaatctctc

SEQ ID NO: 78257 - DNA, 25 bp, Probe Sequence
gaatctctctgacttcctcttccac

SEQ ID NO: 78258 - DNA, 25 bp, Probe Sequence
atctctctgacttcctcttccacat

SEQ ID NO: 78259 - DNA, 25 bp, Probe Sequence
acatcaactccttctcacactgaat

SEQ ID NO: 78260 - DNA, 25 bp, Probe Sequence
atatctcatcatattcacagtcctg

SEQ ID NO: 78261 - DNA, 25 bp, Probe Sequence
cacactgaatctctctgacttcctc

SEQ ID NO: 78262 - DNA, 25 bp, Probe Sequence
caactccttctcacactgaatctct

SEQ ID NO: 78263 - DNA, 25 bp, Probe Sequence
tcaactccttctcacactgaatctc

SEQ ID NO: 78264 - DNA, 25 bp, Probe Sequence
tgaatctctctgacttcctcttcca

SEQ ID NO: 78265 - DNA, 25 bp, Probe Sequence
acactgaatctctctgacttcctct

SEQ ID NO: 78266 - DNA, 25 bp, Probe Sequence
ctccttctcacactgaatctctctg

SEQ ID NO: 78267 - DNA, 25 bp, Probe Sequence
aatctctctgacttcctcttccaca

SEQ ID NO: 78268 - DNA, 25 bp, Probe Sequence
tcatcatattcacagtcctgagaat

SEQ ID NO: 78269 - DNA, 25 bp, Probe Sequence
atagtcaataccaacaatggcacat

SEQ ID NO: 78270 - DNA, 25 bp, Probe Sequence
cctgcctggtaagataagatagtat

SEQ ID NO: 78271 - DNA, 25 bp, Probe Sequence
gcctgcctggtaagataagatagta

SEQ ID NO: 78272 - DNA, 25 bp, Probe Sequence
tggagacacttatggatacattggt

SEQ ID NO: 78273 - DNA, 25 bp, Probe Sequence
acttcagtctcattattattgcctt

SEQ ID NO: 78274 - DNA, 25 bp, Probe Sequence
atgaatccattgtcctctgcctatt

SEQ ID NO: 78275 - DNA, 25 bp, Probe Sequence
ggagacacttatggatacattggtg

SEQ ID NO: 78276 - DNA, 25 bp, Probe Sequence
gtggagacacttatggatacattgg

SEQ ID NO: 78277 - DNA, 25 bp, Probe Sequence
gagacacttatggatacattggtgc

SEQ ID NO: 78278 - DNA, 25 bp, Probe Sequence
atactgggcttgatatgactttgag

SEQ ID NO: 78279 - DNA, 25 bp, Probe Sequence
acattaaacaagggaacactgaatc

SEQ ID NO: 78280 - DNA, 25 bp, Probe Sequence
cattaaacaagggaacactgaatct

SEQ ID NO: 78281 - DNA, 25 bp, Probe Sequence
gacttcagtctcattattattgcct

SEQ ID NO: 78282 - DNA, 25 bp, Probe Sequence
gttaaacctgaccagtctttctaca

SEQ ID NO: 78283 - DNA, 25 bp, Probe Sequence
taaacaagggaacactgaatctttc

SEQ ID NO: 78284 - DNA, 25 bp, Probe Sequence
cattccagaaaccataagactcagg

SEQ ID NO: 78285 - DNA, 25 bp, Probe Sequence
ccattccagaaaccataagactcag

SEQ ID NO: 78286 - DNA, 25 bp, Probe Sequence
ccttccaccctttacattaaacaag

SEQ ID NO: 78287 - DNA, 25 bp, Probe Sequence
ttacattaaacaagggaacactgaa

SEQ ID NO: 78288 - DNA, 25 bp, Probe Sequence
ttaaacaagggaacactgaatcttt

SEQ ID NO: 78289 - DNA, 25 bp, Probe Sequence
tacattaaacaagggaacactgaat

SEQ ID NO: 78290 - DNA, 25 bp, Probe Sequence
attaaacaagggaacactgaatctt

SEQ ID NO: 78291 - DNA, 25 bp, Probe Sequence
ataagactcaggcagttcttgattc

SEQ ID NO: 78292 - DNA, 25 bp, Probe Sequence
cataagactcaggcagttcttgatt

SEQ ID NO: 78293 - DNA, 25 bp, Probe Sequence
cccttccaccctttacattaaacaa

SEQ ID NO: 78294 - DNA, 25 bp, Probe Sequence
gaccacatctctacaggatacatta

SEQ ID NO: 78295 - DNA, 25 bp, Probe Sequence
gaactcataggatggatacacacac

SEQ ID NO: 78296 - DNA, 25 bp, Probe Sequence
agaccacatctctacaggatacatt

SEQ ID NO: 78297 - DNA, 25 bp, Probe Sequence
aagaccacatctctacaggatacat

SEQ ID NO: 78298 - DNA, 25 bp, Probe Sequence
atattagtctaggctatggtcgtgg

SEQ ID NO: 78299 - DNA, 25 bp, Probe Sequence
accacatctctacaggatacattat

SEQ ID NO: 78300 - DNA, 25 bp, Probe Sequence
caagaccacatctctacaggataca

SEQ ID NO: 78301 - DNA, 25 bp, Probe Sequence
aactcataggatggatacacacacc

SEQ ID NO: 78302 - DNA, 25 bp, Probe Sequence
cgaactcataggatggatacacaca

SEQ ID NO: 78303 - DNA, 25 bp, Probe Sequence
aatattagtctaggctatggtcgtg

SEQ ID NO: 78304 - DNA, 25 bp, Probe Sequence
gcaagaccacatctctacaggatac

SEQ ID NO: 78305 - DNA, 25 bp, Probe Sequence
ccgaactcataggatggatacacac

SEQ ID NO: 78306 - DNA, 25 bp, Probe Sequence
caccgaactcataggatggatacac

SEQ ID NO: 78307 - DNA, 25 bp, Probe Sequence
ccacatctctacaggatacattatc

SEQ ID NO: 78308 - DNA, 25 bp, Probe Sequence
accgaactcataggatggatacaca

SEQ ID NO: 78309 - DNA, 25 bp, Probe Sequence
aagcagagttaagttgtctttcttc

SEQ ID NO: 78310 - DNA, 25 bp, Probe Sequence
gaagcagagttaagttgtctttctt

SEQ ID NO: 78311 - DNA, 25 bp, Probe Sequence
gcagagttaagttgtctttcttcct

SEQ ID NO: 78312 - DNA, 25 bp, Probe Sequence
agcagagttaagttgtctttcttcc

SEQ ID NO: 78313 - DNA, 25 bp, Probe Sequence
cgaagcagagttaagttgtctttct

SEQ ID NO: 78314 - DNA, 25 bp, Probe Sequence
ccctgtcttctcactaaatactaca

SEQ ID NO: 78315 - DNA, 25 bp, Probe Sequence
ggcaagaccacatctctacaggata

SEQ ID NO: 78316 - DNA, 25 bp, Probe Sequence
cagagttaagttgtctttcttccta

SEQ ID NO: 78317 - DNA, 25 bp, Probe Sequence
aaatattagtctaggctatggtcgt

SEQ ID NO: 78318 - DNA, 25 bp, Probe Sequence
agtagagagatgactgatgtactca

SEQ ID NO: 78319 - DNA, 25 bp, Probe Sequence
atcagcagtccagaatagagtctag

SEQ ID NO: 78320 - DNA, 25 bp, Probe Sequence
catcagcagtccagaatagagtcta

SEQ ID NO: 78321 - DNA, 25 bp, Probe Sequence
gtagagagatgactgatgtactcaa

SEQ ID NO: 78322 - DNA, 25 bp, Probe Sequence
tagtagagagatgactgatgtactc

SEQ ID NO: 78323 - DNA, 25 bp, Probe Sequence
ttcctgtctaactcaagagctaatc

SEQ ID NO: 78324 - DNA, 25 bp, Probe Sequence
cttcctgtctaactcaagagctaat

SEQ ID NO: 78325 - DNA, 25 bp, Probe Sequence
ctaactcaagagctaatcctgtgtt

SEQ ID NO: 78326 - DNA, 25 bp, Probe Sequence
ctgtctaactcaagagctaatcctg

SEQ ID NO: 78327 - DNA, 25 bp, Probe Sequence
gtctaactcaagagctaatcctgtg

SEQ ID NO: 78328 - DNA, 25 bp, Probe Sequence
tctaactcaagagctaatcctgtgt

SEQ ID NO: 78329 - DNA, 25 bp, Probe Sequence
tgtctaactcaagagctaatcctgt

SEQ ID NO: 78330 - DNA, 25 bp, Probe Sequence
tatgttcttatgcgggtttcctaaa

SEQ ID NO: 78331 - DNA, 25 bp, Probe Sequence
tggacacaaattaaatgagcagttt

SEQ ID NO: 78332 - DNA, 25 bp, Probe Sequence
cctgtctaactcaagagctaatcct

SEQ ID NO: 78333 - DNA, 25 bp, Probe Sequence
tcctgtctaactcaagagctaatcc

SEQ ID NO: 78334 - DNA, 25 bp, Probe Sequence
atggacacaaattaaatgagcagtt

SEQ ID NO: 78335 - DNA, 25 bp, Probe Sequence
aatggacacaaattaaatgagcagt

SEQ ID NO: 78336 - DNA, 25 bp, Probe Sequence
gtatgttcttatgcgggtttcctaa

SEQ ID NO: 78337 - DNA, 25 bp, Probe Sequence
tagagtatgttcttatgcgggtttc

SEQ ID NO: 78338 - DNA, 25 bp, Probe Sequence
aaatggacacaaattaaatgagcag

SEQ ID NO: 78339 - DNA, 25 bp, Probe Sequence
gaaatggacacaaattaaatgagca

SEQ ID NO: 78340 - DNA, 25 bp, Probe Sequence
agtatgttcttatgcgggtttccta

SEQ ID NO: 78341 - DNA, 25 bp, Probe Sequence
agaaatggacacaaattaaatgagc

SEQ ID NO: 78342 - DNA, 25 bp, Probe Sequence
gacttcctaactggcagtacatcta

SEQ ID NO: 78343 - DNA, 25 bp, Probe Sequence
acttcctaactggcagtacatctac

SEQ ID NO: 78344 - DNA, 25 bp, Probe Sequence
atgaccttatgggacttcctaactg

SEQ ID NO: 78345 - DNA, 25 bp, Probe Sequence
cttcctaactggcagtacatctacg

SEQ ID NO: 78346 - DNA, 25 bp, Probe Sequence
catgaccttatgggacttcctaact

SEQ ID NO: 78347 - DNA, 25 bp, Probe Sequence
gacatgaccttatgggacttcctaa

SEQ ID NO: 78348 - DNA, 25 bp, Probe Sequence
acatgaccttatgggacttcctaac

SEQ ID NO: 78349 - DNA, 25 bp, Probe Sequence
aactggcagtacatctacgtattag

SEQ ID NO: 78350 - DNA, 25 bp, Probe Sequence
ctaactggcagtacatctacgtatt

SEQ ID NO: 78351 - DNA, 25 bp, Probe Sequence
taactggcagtacatctacgtatta

SEQ ID NO: 78352 - DNA, 25 bp, Probe Sequence
ttcctaactggcagtacatctacgt

SEQ ID NO: 78353 - DNA, 25 bp, Probe Sequence
cctaactggcagtacatctacgtat

SEQ ID NO: 78354 - DNA, 25 bp, Probe Sequence
ggacttcctaactggcagtacatct

SEQ ID NO: 78355 - DNA, 25 bp, Probe Sequence
tgaccttatgggacttcctaactgg

SEQ ID NO: 78356 - DNA, 25 bp, Probe Sequence
ttatgggacttcctaactggcagta

SEQ ID NO: 78357 - DNA, 25 bp, Probe Sequence
accaataaaatcctctgctgagaaa

SEQ ID NO: 78358 - DNA, 25 bp, Probe Sequence
ccaataaaatcctctgctgagaaaa

SEQ ID NO: 78359 - DNA, 25 bp, Probe Sequence
tcctaactggcagtacatctacgta

SEQ ID NO: 78360 - DNA, 25 bp, Probe Sequence
caccaataaaatcctctgctgagaa

SEQ ID NO: 78361 - DNA, 25 bp, Probe Sequence
tatgggacttcctaactggcagtac

SEQ ID NO: 78362 - DNA, 25 bp, Probe Sequence
ggacatgaccttatgggacttccta

SEQ ID NO: 78363 - DNA, 25 bp, Probe Sequence
ccttatgggacttcctaactggcag

SEQ ID NO: 78364 - DNA, 25 bp, Probe Sequence
gaccttatgggacttcctaactggc

SEQ ID NO: 78365 - DNA, 25 bp, Probe Sequence
cttatgggacttcctaactggcagt

SEQ ID NO: 78366 - DNA, 25 bp, Probe Sequence
ataagacaccagcagtagatacaac

SEQ ID NO: 78367 - DNA, 25 bp, Probe Sequence
acagtataagacaccagcagtagat

SEQ ID NO: 78368 - DNA, 25 bp, Probe Sequence
cagtataagacaccagcagtagata

SEQ ID NO: 78369 - DNA, 25 bp, Probe Sequence
atgacagtataagacaccagcagta

SEQ ID NO: 78370 - DNA, 25 bp, Probe Sequence
tataagacaccagcagtagatacaa

SEQ ID NO: 78371 - DNA, 25 bp, Probe Sequence
cctgatgtgtaatacggaatacttc

SEQ ID NO: 78372 - DNA, 25 bp, Probe Sequence
gacagtataagacaccagcagtaga

SEQ ID NO: 78373 - DNA, 25 bp, Probe Sequence
accagcagtagatacaactatgatg

SEQ ID NO: 78374 - DNA, 25 bp, Probe Sequence
caccagcagtagatacaactatgat

SEQ ID NO: 78375 - DNA, 25 bp, Probe Sequence
ccagcagtagatacaactatgatga

SEQ ID NO: 78376 - DNA, 25 bp, Probe Sequence
tgacagtataagacaccagcagtag

SEQ ID NO: 78377 - DNA, 25 bp, Probe Sequence
gacaccagcagtagatacaactatg

SEQ ID NO: 78378 - DNA, 25 bp, Probe Sequence
agacaccagcagtagatacaactat

SEQ ID NO: 78379 - DNA, 25 bp, Probe Sequence
agcagtagatacaactatgatgaca

SEQ ID NO: 78380 - DNA, 25 bp, Probe Sequence
aagacaccagcagtagatacaacta

SEQ ID NO: 78381 - DNA, 25 bp, Probe Sequence
taagacaccagcagtagatacaact

SEQ ID NO: 78382 - DNA, 25 bp, Probe Sequence
acaccagcagtagatacaactatga

SEQ ID NO: 78383 - DNA, 25 bp, Probe Sequence
acagtagcatgacagtataagacac

SEQ ID NO: 78384 - DNA, 25 bp, Probe Sequence
cacagtagcatgacagtataagaca

SEQ ID NO: 78385 - DNA, 25 bp, Probe Sequence
cagcagtagatacaactatgatgac

SEQ ID NO: 78386 - DNA, 25 bp, Probe Sequence
gtagcatgacagtataagacaccag

SEQ ID NO: 78387 - DNA, 25 bp, Probe Sequence
cagtagcatgacagtataagacacc

SEQ ID NO: 78388 - DNA, 25 bp, Probe Sequence
agtagcatgacagtataagacacca

SEQ ID NO: 78389 - DNA, 25 bp, Probe Sequence
ctgatgtgtaatacggaatacttca

SEQ ID NO: 78390 - DNA, 25 bp, Probe Sequence
gaaccttggaagtctatcactctaa

SEQ ID NO: 78391 - DNA, 25 bp, Probe Sequence
ggaaccttggaagtctatcactcta

SEQ ID NO: 78392 - DNA, 25 bp, Probe Sequence
ttgttaccatgtgtgaagattagtt

SEQ ID NO: 78393 - DNA, 25 bp, Probe Sequence
tggtcgtgtgatatgctaaatgtta

SEQ ID NO: 78394 - DNA, 25 bp, Probe Sequence
aggaaccttggaagtctatcactct

SEQ ID NO: 78395 - DNA, 25 bp, Probe Sequence
ggtcgtgtgatatgctaaatgttaa

SEQ ID NO: 78396 - DNA, 25 bp, Probe Sequence
aaagtggtcgtgtgatatgctaaat

SEQ ID NO: 78397 - DNA, 25 bp, Probe Sequence
aaggaaccttggaagtctatcactc

SEQ ID NO: 78398 - DNA, 25 bp, Probe Sequence
agtctgtcactctacatgaattatg

SEQ ID NO: 78399 - DNA, 25 bp, Probe Sequence
aagtggtcgtgtgatatgctaaatg

SEQ ID NO: 78400 - DNA, 25 bp, Probe Sequence
tgtttcagttatctatccaagcact

SEQ ID NO: 78401 - DNA, 25 bp, Probe Sequence
ttgtttcagttatctatccaagcac

SEQ ID NO: 78402 - DNA, 25 bp, Probe Sequence
tcactctaaatgaaagtctgtcact

SEQ ID NO: 78403 - DNA, 25 bp, Probe Sequence
gattgggataaagggcttgtactat

SEQ ID NO: 78404 - DNA, 25 bp, Probe Sequence
attgggataaagggcttgtactatg

SEQ ID NO: 78405 - DNA, 25 bp, Probe Sequence
actctaaatgaaagtctgtcactct

SEQ ID NO: 78406 - DNA, 25 bp, Probe Sequence
cactctaaatgaaagtctgtcactc

SEQ ID NO: 78407 - DNA, 25 bp, Probe Sequence
atttactgggagtgagttcattgac

SEQ ID NO: 78408 - DNA, 25 bp, Probe Sequence
catttactgggagtgagttcattga

SEQ ID NO: 78409 - DNA, 25 bp, Probe Sequence
tcatttactgggagtgagttcattg

SEQ ID NO: 78410 - DNA, 25 bp, Probe Sequence
cagcaagtcatatttcataatgtgg

SEQ ID NO: 78411 - DNA, 25 bp, Probe Sequence
gtggtcgtgtgatatgctaaatgtt

SEQ ID NO: 78412 - DNA, 25 bp, Probe Sequence
aaccttggaagtctatcactctaaa

SEQ ID NO: 78413 - DNA, 25 bp, Probe Sequence
agcaagtcatatttcataatgtgga

SEQ ID NO: 78414 - DNA, 25 bp, Probe Sequence
atcactctttctggttctttctcaa

SEQ ID NO: 78415 - DNA, 25 bp, Probe Sequence
aatcactctttctggttctttctca

SEQ ID NO: 78416 - DNA, 25 bp, Probe Sequence
tatttgccattagtgattaccgagt

SEQ ID NO: 78417 - DNA, 25 bp, Probe Sequence
acaaatcactctttctggttctttc

SEQ ID NO: 78418 - DNA, 25 bp, Probe Sequence
atttgccattagtgattaccgagta

SEQ ID NO: 78419 - DNA, 25 bp, Probe Sequence
caaatcactctttctggttctttct

SEQ ID NO: 78420 - DNA, 25 bp, Probe Sequence
aaatcactctttctggttctttctc

SEQ ID NO: 78421 - DNA, 25 bp, Probe Sequence
aagatagcttcataaggagacttga

SEQ ID NO: 78422 - DNA, 25 bp, Probe Sequence
atatttgccattagtgattaccgag

SEQ ID NO: 78423 - DNA, 25 bp, Probe Sequence
agatagcttcataaggagacttgat

SEQ ID NO: 78424 - DNA, 25 bp, Probe Sequence
actctttctggttctttctcaacat

SEQ ID NO: 78425 - DNA, 25 bp, Probe Sequence
tctttctggttctttctcaacattg

SEQ ID NO: 78426 - DNA, 25 bp, Probe Sequence
ctctttctggttctttctcaacatt

SEQ ID NO: 78427 - DNA, 25 bp, Probe Sequence
ggagcaaactagggaataaatgaga

SEQ ID NO: 78428 - DNA, 25 bp, Probe Sequence
aacaaatcactctttctggttcttt

SEQ ID NO: 78429 - DNA, 25 bp, Probe Sequence
tttctaaagactgggagcaaactag

SEQ ID NO: 78430 - DNA, 25 bp, Probe Sequence
actaagatagcttcataaggagact

SEQ ID NO: 78431 - DNA, 25 bp, Probe Sequence
tcactctttctggttctttctcaac

SEQ ID NO: 78432 - DNA, 25 bp, Probe Sequence
cactctttctggttctttctcaaca

SEQ ID NO: 78433 - DNA, 25 bp, Probe Sequence
ctttctggttctttctcaacattgc

SEQ ID NO: 78434 - DNA, 25 bp, Probe Sequence
ccacagcaaacatacctagttagta

SEQ ID NO: 78435 - DNA, 25 bp, Probe Sequence
gggagcaaactagggaataaatgag

SEQ ID NO: 78436 - DNA, 25 bp, Probe Sequence
gatagcttcataaggagacttgatt

SEQ ID NO: 78437 - DNA, 25 bp, Probe Sequence
acctgtagtctcagctattcagaag

SEQ ID NO: 78438 - DNA, 25 bp, Probe Sequence
accttcaagctgtgtaatattccaa

SEQ ID NO: 78439 - DNA, 25 bp, Probe Sequence
aaccttcaagctgtgtaatattcca

SEQ ID NO: 78440 - DNA, 25 bp, Probe Sequence
ccttcaagctgtgtaatattccaat

SEQ ID NO: 78441 - DNA, 25 bp, Probe Sequence
tcaagctgtgtaatattccaatgtt

SEQ ID NO: 78442 - DNA, 25 bp, Probe Sequence
ttcaagctgtgtaatattccaatgt

SEQ ID NO: 78443 - DNA, 25 bp, Probe Sequence
cttcaagctgtgtaatattccaatg

SEQ ID NO: 78444 - DNA, 25 bp, Probe Sequence
aatgcgtctgatgtgtcattaagtg

SEQ ID NO: 78445 - DNA, 25 bp, Probe Sequence
caatgcgtctgatgtgtcattaagt

SEQ ID NO: 78446 - DNA, 25 bp, Probe Sequence
gcaaaccttcaagctgtgtaatatt

SEQ ID NO: 78447 - DNA, 25 bp, Probe Sequence
aaaccttcaagctgtgtaatattcc

SEQ ID NO: 78448 - DNA, 25 bp, Probe Sequence
caaaccttcaagctgtgtaatattc

SEQ ID NO: 78449 - DNA, 25 bp, Probe Sequence
tgcaaaccttcaagctgtgtaatat

SEQ ID NO: 78450 - DNA, 25 bp, Probe Sequence
atgcgtctgatgtgtcattaagtgc

SEQ ID NO: 78451 - DNA, 25 bp, Probe Sequence
tgtgtcattaagtgcagaaataact

SEQ ID NO: 78452 - DNA, 25 bp, Probe Sequence
tgatgtgtcattaagtgcagaaata

SEQ ID NO: 78453 - DNA, 25 bp, Probe Sequence
ctgatgtgtcattaagtgcagaaat

SEQ ID NO: 78454 - DNA, 25 bp, Probe Sequence
atgtgtcattaagtgcagaaataac

SEQ ID NO: 78455 - DNA, 25 bp, Probe Sequence
gatgtgtcattaagtgcagaaataa

SEQ ID NO: 78456 - DNA, 25 bp, Probe Sequence
agtgcagaaataactaagacacaaa

SEQ ID NO: 78457 - DNA, 25 bp, Probe Sequence
aagtgcagaaataactaagacacaa

SEQ ID NO: 78458 - DNA, 25 bp, Probe Sequence
taagtgcagaaataactaagacaca

SEQ ID NO: 78459 - DNA, 25 bp, Probe Sequence
gtgcagaaataactaagacacaaat

SEQ ID NO: 78460 - DNA, 25 bp, Probe Sequence
taactaagacacaaataacctttgc

SEQ ID NO: 78461 - DNA, 25 bp, Probe Sequence
gtgtcattaagtgcagaaataacta

SEQ ID NO: 78462 - DNA, 25 bp, Probe Sequence
accttcaagctgtgtaatattccaa

SEQ ID NO: 78463 - DNA, 25 bp, Probe Sequence
aaccttcaagctgtgtaatattcca

SEQ ID NO: 78464 - DNA, 25 bp, Probe Sequence
ccttcaagctgtgtaatattccaat

SEQ ID NO: 78465 - DNA, 25 bp, Probe Sequence
tcaagctgtgtaatattccaatgtt

SEQ ID NO: 78466 - DNA, 25 bp, Probe Sequence
ttcaagctgtgtaatattccaatgt

SEQ ID NO: 78467 - DNA, 25 bp, Probe Sequence
cttcaagctgtgtaatattccaatg

SEQ ID NO: 78468 - DNA, 25 bp, Probe Sequence
aatgcgtctgatgtgtcattaagtg

SEQ ID NO: 78469 - DNA, 25 bp, Probe Sequence
caatgcgtctgatgtgtcattaagt

SEQ ID NO: 78470 - DNA, 25 bp, Probe Sequence
gcaaaccttcaagctgtgtaatatt

SEQ ID NO: 78471 - DNA, 25 bp, Probe Sequence
aaaccttcaagctgtgtaatattcc

SEQ ID NO: 78472 - DNA, 25 bp, Probe Sequence
caaaccttcaagctgtgtaatattc

SEQ ID NO: 78473 - DNA, 25 bp, Probe Sequence
tgcaaaccttcaagctgtgtaatat

SEQ ID NO: 78474 - DNA, 25 bp, Probe Sequence
atgcgtctgatgtgtcattaagtgc

SEQ ID NO: 78475 - DNA, 25 bp, Probe Sequence
tgtgtcattaagtgcagaaataact

SEQ ID NO: 78476 - DNA, 25 bp, Probe Sequence
tgatgtgtcattaagtgcagaaata

SEQ ID NO: 78477 - DNA, 25 bp, Probe Sequence
ctgatgtgtcattaagtgcagaaat

SEQ ID NO: 78478 - DNA, 25 bp, Probe Sequence
atgtgtcattaagtgcagaaataac

SEQ ID NO: 78479 - DNA, 25 bp, Probe Sequence
gatgtgtcattaagtgcagaaataa

SEQ ID NO: 78480 - DNA, 25 bp, Probe Sequence
agtgcagaaataactaagacacaaa

SEQ ID NO: 78481 - DNA, 25 bp, Probe Sequence
aagtgcagaaataactaagacacaa

SEQ ID NO: 78482 - DNA, 25 bp, Probe Sequence
taagtgcagaaataactaagacaca

SEQ ID NO: 78483 - DNA, 25 bp, Probe Sequence
gtgcagaaataactaagacacaaat

SEQ ID NO: 78484 - DNA, 25 bp, Probe Sequence
taactaagacacaaataacctttgc

SEQ ID NO: 78485 - DNA, 25 bp, Probe Sequence
gtgtcattaagtgcagaaataacta

SEQ ID NO: 78486 - DNA, 25 bp, Probe Sequence
ataatagcagatgtcagcagaatgg

SEQ ID NO: 78487 - DNA, 25 bp, Probe Sequence
tataatagcagatgtcagcagaatg

SEQ ID NO: 78488 - DNA, 25 bp, Probe Sequence
taatagcagatgtcagcagaatggt

SEQ ID NO: 78489 - DNA, 25 bp, Probe Sequence
atgttagcctacagagatgacaatg

SEQ ID NO: 78490 - DNA, 25 bp, Probe Sequence
aatataatagcagatgtcagcagaa

SEQ ID NO: 78491 - DNA, 25 bp, Probe Sequence
cttcctataatacaggcttccgatt

SEQ ID NO: 78492 - DNA, 25 bp, Probe Sequence
tgtgacttcctataatacaggcttc

SEQ ID NO: 78493 - DNA, 25 bp, Probe Sequence
gtgacttcctataatacaggcttcc

SEQ ID NO: 78494 - DNA, 25 bp, Probe Sequence
ttgtgacttcctataatacaggctt

SEQ ID NO: 78495 - DNA, 25 bp, Probe Sequence
atataatagcagatgtcagcagaat

SEQ ID NO: 78496 - DNA, 25 bp, Probe Sequence
attgtgacttcctataatacaggct

SEQ ID NO: 78497 - DNA, 25 bp, Probe Sequence
acttcctataatacaggcttccgat

SEQ ID NO: 78498 - DNA, 25 bp, Probe Sequence
tgttagcctacagagatgacaatgt

SEQ ID NO: 78499 - DNA, 25 bp, Probe Sequence
aatagcagatgtcagcagaatggtt

SEQ ID NO: 78500 - DNA, 25 bp, Probe Sequence
catgttagcctacagagatgacaat

SEQ ID NO: 78501 - DNA, 25 bp, Probe Sequence
actaatataatagcagatgtcagca

SEQ ID NO: 78502 - DNA, 25 bp, Probe Sequence
gacttcctataatacaggcttccga

SEQ ID NO: 78503 - DNA, 25 bp, Probe Sequence
aattgtgacttcctataatacaggc

SEQ ID NO: 78504 - DNA, 25 bp, Probe Sequence
cacttcatgttagcctacagagatg

SEQ ID NO: 78505 - DNA, 25 bp, Probe Sequence
tgaattaacaggctcacctagacat

SEQ ID NO: 78506 - DNA, 25 bp, Probe Sequence
atgaattaacaggctcacctagaca

SEQ ID NO: 78507 - DNA, 25 bp, Probe Sequence
acacttcatgttagcctacagagat

SEQ ID NO: 78508 - DNA, 25 bp, Probe Sequence
taaatggcaagtaaagcaaacaagt

SEQ ID NO: 78509 - DNA, 25 bp, Probe Sequence
taatataatagcagatgtcagcaga

SEQ ID NO: 78510 - DNA, 25 bp, Probe Sequence
aatcacaccatttcatacttcaact

SEQ ID NO: 78511 - DNA, 25 bp, Probe Sequence
cagtcaatgagttggagtttaccta

SEQ ID NO: 78512 - DNA, 25 bp, Probe Sequence
agtcaatgagttggagtttacctaa

SEQ ID NO: 78513 - DNA, 25 bp, Probe Sequence
actttcttcttgagtaatcacacca

SEQ ID NO: 78514 - DNA, 25 bp, Probe Sequence
tcacaccatttcatacttcaactaa

SEQ ID NO: 78515 - DNA, 25 bp, Probe Sequence
cttcttgagtaatcacaccatttca

SEQ ID NO: 78516 - DNA, 25 bp, Probe Sequence
gtcaatgagttggagtttacctaaa

SEQ ID NO: 78517 - DNA, 25 bp, Probe Sequence
tcttcttgagtaatcacaccatttc

SEQ ID NO: 78518 - DNA, 25 bp, Probe Sequence
ctttcttcttgagtaatcacaccat

SEQ ID NO: 78519 - DNA, 25 bp, Probe Sequence
atcacaccatttcatacttcaacta

SEQ ID NO: 78520 - DNA, 25 bp, Probe Sequence
ttcttgagtaatcacaccatttcat

SEQ ID NO: 78521 - DNA, 25 bp, Probe Sequence
ttcttcttgagtaatcacaccattt

SEQ ID NO: 78522 - DNA, 25 bp, Probe Sequence
tttcttcttgagtaatcacaccatt

SEQ ID NO: 78523 - DNA, 25 bp, Probe Sequence
gttctgtaatatttgggcaatgact

SEQ ID NO: 78524 - DNA, 25 bp, Probe Sequence
ggttctgtaatatttgggcaatgac

SEQ ID NO: 78525 - DNA, 25 bp, Probe Sequence
aggttctgtaatatttgggcaatga

SEQ ID NO: 78526 - DNA, 25 bp, Probe Sequence
acagtcaatgagttggagtttacct

SEQ ID NO: 78527 - DNA, 25 bp, Probe Sequence
cacagtcaatgagttggagtttacc

SEQ ID NO: 78528 - DNA, 25 bp, Probe Sequence
tcaatgagttggagtttacctaaat

SEQ ID NO: 78529 - DNA, 25 bp, Probe Sequence
cacaccatttcatacttcaactaat

SEQ ID NO: 78530 - DNA, 25 bp, Probe Sequence
taatcacaccatttcatacttcaac

SEQ ID NO: 78531 - DNA, 25 bp, Probe Sequence
gtaatcacaccatttcatacttcaa

SEQ ID NO: 78532 - DNA, 25 bp, Probe Sequence
cttgagtaatcacaccatttcatac

SEQ ID NO: 78533 - DNA, 25 bp, Probe Sequence
tcttgagtaatcacaccatttcata

SEQ ID NO: 78534 - DNA, 25 bp, Probe Sequence
tatggcaatagtatctctctctggt

SEQ ID NO: 78535 - DNA, 25 bp, Probe Sequence
ttatggcaatagtatctctctctgg

SEQ ID NO: 78536 - DNA, 25 bp, Probe Sequence
ggcaatagtatctctctctggtcat

SEQ ID NO: 78537 - DNA, 25 bp, Probe Sequence
atggcaatagtatctctctctggtc

SEQ ID NO: 78538 - DNA, 25 bp, Probe Sequence
gcaatagtatctctctctggtcatg

SEQ ID NO: 78539 - DNA, 25 bp, Probe Sequence
tggcaatagtatctctctctggtca

SEQ ID NO: 78540 - DNA, 25 bp, Probe Sequence
tgtcacttgtctctataactacaga

SEQ ID NO: 78541 - DNA, 25 bp, Probe Sequence
aattcactagcacagtagttgacag

SEQ ID NO: 78542 - DNA, 25 bp, Probe Sequence
ttaagaatcagttattgcccagtcc

SEQ ID NO: 78543 - DNA, 25 bp, Probe Sequence
tcacctttatggcaatagtatctct

SEQ ID NO: 78544 - DNA, 25 bp, Probe Sequence
attcactagcacagtagttgacaga

SEQ ID NO: 78545 - DNA, 25 bp, Probe Sequence
tgacatcacctttatggcaatagta

SEQ ID NO: 78546 - DNA, 25 bp, Probe Sequence
atgacatcacctttatggcaatagt

SEQ ID NO: 78547 - DNA, 25 bp, Probe Sequence
atgtcacttgtctctataactacag

SEQ ID NO: 78548 - DNA, 25 bp, Probe Sequence
acctttatggcaatagtatctctct

SEQ ID NO: 78549 - DNA, 25 bp, Probe Sequence
cacctttatggcaatagtatctctc

SEQ ID NO: 78550 - DNA, 25 bp, Probe Sequence
agtgtcaaataagcaggcagatatt

SEQ ID NO: 78551 - DNA, 25 bp, Probe Sequence
aatgacatcacctttatggcaatag

SEQ ID NO: 78552 - DNA, 25 bp, Probe Sequence
gaatgacatcacctttatggcaata

SEQ ID NO: 78553 - DNA, 25 bp, Probe Sequence
cagtgtcaaataagcaggcagatat

SEQ ID NO: 78554 - DNA, 25 bp, Probe Sequence
gtgtcaaataagcaggcagatattg

SEQ ID NO: 78555 - DNA, 25 bp, Probe Sequence
gtcaaataagcaggcagatattgta

SEQ ID NO: 78556 - DNA, 25 bp, Probe Sequence
tgtcaaataagcaggcagatattgt

SEQ ID NO: 78557 - DNA, 25 bp, Probe Sequence
gtcacttgtctctataactacagat

SEQ ID NO: 78558 - DNA, 25 bp, Probe Sequence
ttaagtagaagaagcacatcagacc

SEQ ID NO: 78559 - DNA, 25 bp, Probe Sequence
gttaagtagaagaagcacatcagac

SEQ ID NO: 78560 - DNA, 25 bp, Probe Sequence
agttaagtagaagaagcacatcaga

SEQ ID NO: 78561 - DNA, 25 bp, Probe Sequence
aagttaagtagaagaagcacatcag

SEQ ID NO: 78562 - DNA, 25 bp, Probe Sequence
gcttagactagactggactgatgaa

SEQ ID NO: 78563 - DNA, 25 bp, Probe Sequence
atgcttagactagactggactgatg

SEQ ID NO: 78564 - DNA, 25 bp, Probe Sequence
attacatgcttagactagactggac

SEQ ID NO: 78565 - DNA, 25 bp, Probe Sequence
ttacatgcttagactagactggact

SEQ ID NO: 78566 - DNA, 25 bp, Probe Sequence
tacatgcttagactagactggactg

SEQ ID NO: 78567 - DNA, 25 bp, Probe Sequence
catgcttagactagactggactgat

SEQ ID NO: 78568 - DNA, 25 bp, Probe Sequence
tattacatgcttagactagactgga

SEQ ID NO: 78569 - DNA, 25 bp, Probe Sequence
gtattacatgcttagactagactgg

SEQ ID NO: 78570 - DNA, 25 bp, Probe Sequence
tgcttagactagactggactgatga

SEQ ID NO: 78571 - DNA, 25 bp, Probe Sequence
tgatgaaagggagaagtagaggata

SEQ ID NO: 78572 - DNA, 25 bp, Probe Sequence
aggaaagttaagtagaagaagcaca

SEQ ID NO: 78573 - DNA, 25 bp, Probe Sequence
ctggtgaggaaagttaagtagaaga

SEQ ID NO: 78574 - DNA, 25 bp, Probe Sequence
tgaggaaagttaagtagaagaagca

SEQ ID NO: 78575 - DNA, 25 bp, Probe Sequence
gaggaaagttaagtagaagaagcac

SEQ ID NO: 78576 - DNA, 25 bp, Probe Sequence
gtgaggaaagttaagtagaagaagc

SEQ ID NO: 78577 - DNA, 25 bp, Probe Sequence
tggtgaggaaagttaagtagaagaa

SEQ ID NO: 78578 - DNA, 25 bp, Probe Sequence
ctgatgaaagggagaagtagaggat

SEQ ID NO: 78579 - DNA, 25 bp, Probe Sequence
gcccaatagtgcttctaatagtgaa

SEQ ID NO: 78580 - DNA, 25 bp, Probe Sequence
ggaaagttaagtagaagaagcacat

SEQ ID NO: 78581 - DNA, 25 bp, Probe Sequence
acatgcttagactagactggactga

SEQ ID NO: 78582 - DNA, 25 bp, Probe Sequence
cagtgtgtatattatctcttgctct

SEQ ID NO: 78583 - DNA, 25 bp, Probe Sequence
tgttgtatgacacatataggtgagg

SEQ ID NO: 78584 - DNA, 25 bp, Probe Sequence
acagtgtgtatattatctcttgctc

SEQ ID NO: 78585 - DNA, 25 bp, Probe Sequence
taaatggcagaagtaggattgtgaa

SEQ ID NO: 78586 - DNA, 25 bp, Probe Sequence
cttgctctaaatgatatgtgtgctc

SEQ ID NO: 78587 - DNA, 25 bp, Probe Sequence
ctcttgctctaaatgatatgtgtgc

SEQ ID NO: 78588 - DNA, 25 bp, Probe Sequence
tcttgctctaaatgatatgtgtgct

SEQ ID NO: 78589 - DNA, 25 bp, Probe Sequence
tagtaaatggcagaagtaggattgt

SEQ ID NO: 78590 - DNA, 25 bp, Probe Sequence
gcctctgtgtaaccatgatgttata

SEQ ID NO: 78591 - DNA, 25 bp, Probe Sequence
ggtctccacatttacttaacacttg

SEQ ID NO: 78592 - DNA, 25 bp, Probe Sequence
gtaaatggcagaagtaggattgtga

SEQ ID NO: 78593 - DNA, 25 bp, Probe Sequence
agtaaatggcagaagtaggattgtg

SEQ ID NO: 78594 - DNA, 25 bp, Probe Sequence
gggtctccacatttacttaacactt

SEQ ID NO: 78595 - DNA, 25 bp, Probe Sequence
aatggcagaagtaggattgtgaacc

SEQ ID NO: 78596 - DNA, 25 bp, Probe Sequence
gtgagaggctacagtgtgtatatta

SEQ ID NO: 78597 - DNA, 25 bp, Probe Sequence
gctagtaaatggcagaagtaggatt

SEQ ID NO: 78598 - DNA, 25 bp, Probe Sequence
tctcttgctctaaatgatatgtgtg

SEQ ID NO: 78599 - DNA, 25 bp, Probe Sequence
agtagaacattgtcattatctctgt

SEQ ID NO: 78600 - DNA, 25 bp, Probe Sequence
agggtctccacatttacttaacact

SEQ ID NO: 78601 - DNA, 25 bp, Probe Sequence
aaatggcagaagtaggattgtgaac

SEQ ID NO: 78602 - DNA, 25 bp, Probe Sequence
ctagtaaatggcagaagtaggattg

SEQ ID NO: 78603 - DNA, 25 bp, Probe Sequence
ttgctctaaatgatatgtgtgctca

SEQ ID NO: 78604 - DNA, 25 bp, Probe Sequence
tgagaggctacagtgtgtatattat

SEQ ID NO: 78605 - DNA, 25 bp, Probe Sequence
agcctctgtgtaaccatgatgttat

SEQ ID NO: 78606 - DNA, 25 bp, Probe Sequence
gagataaggaggtagaatgatggtt

SEQ ID NO: 78607 - DNA, 25 bp, Probe Sequence
ggagataaggaggtagaatgatggt

SEQ ID NO: 78608 - DNA, 25 bp, Probe Sequence
gataaggaggtagaatgatggttac

SEQ ID NO: 78609 - DNA, 25 bp, Probe Sequence
agataaggaggtagaatgatggtta

SEQ ID NO: 78610 - DNA, 25 bp, Probe Sequence
atgggagataaggaggtagaatgat

SEQ ID NO: 78611 - DNA, 25 bp, Probe Sequence
agaatggataaatgcttgaggtgaa

SEQ ID NO: 78612 - DNA, 25 bp, Probe Sequence
tagccctgatatgattactatgagc

SEQ ID NO: 78613 - DNA, 25 bp, Probe Sequence
tgggagataaggaggtagaatgatg

SEQ ID NO: 78614 - DNA, 25 bp, Probe Sequence
cccatttagccctgatatgattact

SEQ ID NO: 78615 - DNA, 25 bp, Probe Sequence
gaatggataaatgcttgaggtgaag

SEQ ID NO: 78616 - DNA, 25 bp, Probe Sequence
aaagaatggataaatgcttgaggtg

SEQ ID NO: 78617 - DNA, 25 bp, Probe Sequence
aagaatggataaatgcttgaggtga

SEQ ID NO: 78618 - DNA, 25 bp, Probe Sequence
caaagaatggataaatgcttgaggt

SEQ ID NO: 78619 - DNA, 25 bp, Probe Sequence
acaaagaatggataaatgcttgagg

SEQ ID NO: 78620 - DNA, 25 bp, Probe Sequence
gggagataaggaggtagaatgatgg

SEQ ID NO: 78621 - DNA, 25 bp, Probe Sequence
acacaaagaatggataaatgcttga

SEQ ID NO: 78622 - DNA, 25 bp, Probe Sequence
aatggataaatgcttgaggtgaagg

SEQ ID NO: 78623 - DNA, 25 bp, Probe Sequence
cacaaagaatggataaatgcttgag

SEQ ID NO: 78624 - DNA, 25 bp, Probe Sequence
aacacaaagaatggataaatgcttg

SEQ ID NO: 78625 - DNA, 25 bp, Probe Sequence
tagaatgatggttaccagagactga

SEQ ID NO: 78626 - DNA, 25 bp, Probe Sequence
gtagaatgatggttaccagagactg

SEQ ID NO: 78627 - DNA, 25 bp, Probe Sequence
gtaacacaaagaatggataaatgct

SEQ ID NO: 78628 - DNA, 25 bp, Probe Sequence
aatgatggttaccagagactgagat

SEQ ID NO: 78629 - DNA, 25 bp, Probe Sequence
atggataaatgcttgaggtgaagga

SEQ ID NO: 78630 - DNA, 25 bp, Probe Sequence
agaagtctacagtgagtctgagatg

SEQ ID NO: 78631 - DNA, 25 bp, Probe Sequence
gaagtctacagtgagtctgagatgg

SEQ ID NO: 78632 - DNA, 25 bp, Probe Sequence
aagtctacagtgagtctgagatggc

SEQ ID NO: 78633 - DNA, 25 bp, Probe Sequence
gtgacagagcaagattccatctcaa

SEQ ID NO: 78634 - DNA, 25 bp, Probe Sequence
cagaagtctacagtgagtctgagat

SEQ ID NO: 78635 - DNA, 25 bp, Probe Sequence
ctaaggaaggagaatcgctggaacc

SEQ ID NO: 78636 - DNA, 25 bp, Probe Sequence
tgacagagcaagattccatctcaaa

SEQ ID NO: 78637 - DNA, 25 bp, Probe Sequence
gtctacagtgagtctgagatggcac

SEQ ID NO: 78638 - DNA, 25 bp, Probe Sequence
agtctacagtgagtctgagatggca

SEQ ID NO: 78639 - DNA, 25 bp, Probe Sequence
ggaggcagaagtctacagtgagtct

SEQ ID NO: 78640 - DNA, 25 bp, Probe Sequence
ggtgacagagcaagattccatctca

SEQ ID NO: 78641 - DNA, 25 bp, Probe Sequence
gcagaagtctacagtgagtctgaga

SEQ ID NO: 78642 - DNA, 25 bp, Probe Sequence
taaggaaggagaatcgctggaacct

SEQ ID NO: 78643 - DNA, 25 bp, Probe Sequence
gacagagcaagattccatctcaaaa

SEQ ID NO: 78644 - DNA, 25 bp, Probe Sequence
ggcagaagtctacagtgagtctgag

SEQ ID NO: 78645 - DNA, 25 bp, Probe Sequence
gaggcagaagtctacagtgagtctg

SEQ ID NO: 78646 - DNA, 25 bp, Probe Sequence
aggcagaagtctacagtgagtctga

SEQ ID NO: 78647 - DNA, 25 bp, Probe Sequence
gggtgacagagcaagattccatctc

SEQ ID NO: 78648 - DNA, 25 bp, Probe Sequence
ataaacttggtatttgtctgggaaa

SEQ ID NO: 78649 - DNA, 25 bp, Probe Sequence
aataaacttggtatttgtctgggaa

SEQ ID NO: 78650 - DNA, 25 bp, Probe Sequence
attatgcccagtacatgacgttatg

SEQ ID NO: 78651 - DNA, 25 bp, Probe Sequence
cattatgcccagtacatgacgttat

SEQ ID NO: 78652 - DNA, 25 bp, Probe Sequence
aaataaacttggtatttgtctggga

SEQ ID NO: 78653 - DNA, 25 bp, Probe Sequence
taaacttggtatttgtctgggaaaa

SEQ ID NO: 78654 - DNA, 25 bp, Probe Sequence
tacatgacgttatgggactgtccta

SEQ ID NO: 78655 - DNA, 25 bp, Probe Sequence
ttatgcccagtacatgacgttatgg

SEQ ID NO: 78656 - DNA, 25 bp, Probe Sequence
atgacgttatgggactgtcctactt

SEQ ID NO: 78657 - DNA, 25 bp, Probe Sequence
tcaagtgtatcatatgccccaagta

SEQ ID NO: 78658 - DNA, 25 bp, Probe Sequence
caagtgtatcatatgccccaagtac

SEQ ID NO: 78659 - DNA, 25 bp, Probe Sequence
atcaagtgtatcatatgccccaagt

SEQ ID NO: 78660 - DNA, 25 bp, Probe Sequence
catgacgttatgggactgtcctact

SEQ ID NO: 78661 - DNA, 25 bp, Probe Sequence
tgacgttatgggactgtcctacttg

SEQ ID NO: 78662 - DNA, 25 bp, Probe Sequence
acatgacgttatgggactgtcctac

SEQ ID NO: 78663 - DNA, 25 bp, Probe Sequence
gtacatgacgttatgggactgtcct

SEQ ID NO: 78664 - DNA, 25 bp, Probe Sequence
agtacatgacgttatgggactgtcc

SEQ ID NO: 78665 - DNA, 25 bp, Probe Sequence
aagtgtatcatatgccccaagtacg

SEQ ID NO: 78666 - DNA, 25 bp, Probe Sequence
gcattatgcccagtacatgacgtta

SEQ ID NO: 78667 - DNA, 25 bp, Probe Sequence
gacgttatgggactgtcctacttgg

SEQ ID NO: 78668 - DNA, 25 bp, Probe Sequence
gttatgggactgtcctacttggcag

SEQ ID NO: 78669 - DNA, 25 bp, Probe Sequence
cagtacatgacgttatgggactgtc

SEQ ID NO: 78670 - DNA, 25 bp, Probe Sequence
agtgtatcatatgccccaagtacgc

SEQ ID NO: 78671 - DNA, 25 bp, Probe Sequence
aacgaggaatcatcaagaataaggt

SEQ ID NO: 78672 - DNA, 25 bp, Probe Sequence
aaggaatgagaatgaggcagaatat

SEQ ID NO: 78673 - DNA, 25 bp, Probe Sequence
acgaggaatcatcaagaataaggta

SEQ ID NO: 78674 - DNA, 25 bp, Probe Sequence
cgaggaatcatcaagaataaggtat

SEQ ID NO: 78675 - DNA, 25 bp, Probe Sequence
aggaatgagaatgaggcagaatatt

SEQ ID NO: 78676 - DNA, 25 bp, Probe Sequence
cactatgatgactacaagctgatct

SEQ ID NO: 78677 - DNA, 25 bp, Probe Sequence
actatgatgactacaagctgatctc

SEQ ID NO: 78678 - DNA, 25 bp, Probe Sequence
ggaatgagaatgaggcagaatatta

SEQ ID NO: 78679 - DNA, 25 bp, Probe Sequence
tcactatgatgactacaagctgatc

SEQ ID NO: 78680 - DNA, 25 bp, Probe Sequence
ctatgatgactacaagctgatctca

SEQ ID NO: 78681 - DNA, 25 bp, Probe Sequence
aaaggaatgagaatgaggcagaata

SEQ ID NO: 78682 - DNA, 25 bp, Probe Sequence
ttcactatgatgactacaagctgat

SEQ ID NO: 78683 - DNA, 25 bp, Probe Sequence
aggaatcatcaagaataaggtatca

SEQ ID NO: 78684 - DNA, 25 bp, Probe Sequence
ggatcagtcctaatctattggagaa

SEQ ID NO: 78685 - DNA, 25 bp, Probe Sequence
agagtagaaaggaatgagaatgagg

SEQ ID NO: 78686 - DNA, 25 bp, Probe Sequence
tatgatgactacaagctgatctcaa

SEQ ID NO: 78687 - DNA, 25 bp, Probe Sequence
actgtttgaggtctactgtattgat

SEQ ID NO: 78688 - DNA, 25 bp, Probe Sequence
gagtagaaaggaatgagaatgaggc

SEQ ID NO: 78689 - DNA, 25 bp, Probe Sequence
aaacgaggaatcatcaagaataagg

SEQ ID NO: 78690 - DNA, 25 bp, Probe Sequence
tgagcatagagtagaaaggaatgag

SEQ ID NO: 78691 - DNA, 25 bp, Probe Sequence
gaaaggaatgagaatgaggcagaat

SEQ ID NO: 78692 - DNA, 25 bp, Probe Sequence
gagcatagagtagaaaggaatgaga

SEQ ID NO: 78693 - DNA, 25 bp, Probe Sequence
tactgtttgaggtctactgtattga

SEQ ID NO: 78694 - DNA, 25 bp, Probe Sequence
tagaaaggaatgagaatgaggcaga

SEQ ID NO: 78695 - DNA, 25 bp, Probe Sequence
ggtggttagcattcaagttaagaaa

SEQ ID NO: 78696 - DNA, 25 bp, Probe Sequence
gggtggttagcattcaagttaagaa

SEQ ID NO: 78697 - DNA, 25 bp, Probe Sequence
ctgggtggttagcattcaagttaag

SEQ ID NO: 78698 - DNA, 25 bp, Probe Sequence
atctgggtggttagcattcaagtta

SEQ ID NO: 78699 - DNA, 25 bp, Probe Sequence
gtggttagcattcaagttaagaaat

SEQ ID NO: 78700 - DNA, 25 bp, Probe Sequence
tgggtggttagcattcaagttaaga

SEQ ID NO: 78701 - DNA, 25 bp, Probe Sequence
tctgggtggttagcattcaagttaa

SEQ ID NO: 78702 - DNA, 25 bp, Probe Sequence
catgagatgtaatctacctacagaa

SEQ ID NO: 78703 - DNA, 25 bp, Probe Sequence
catctgggtggttagcattcaagtt

SEQ ID NO: 78704 - DNA, 25 bp, Probe Sequence
aacatctgggtggttagcattcaag

SEQ ID NO: 78705 - DNA, 25 bp, Probe Sequence
gaacatctgggtggttagcattcaa

SEQ ID NO: 78706 - DNA, 25 bp, Probe Sequence
tggttagcattcaagttaagaaata

SEQ ID NO: 78707 - DNA, 25 bp, Probe Sequence
gtaatctacctacagaaaagtgccc

SEQ ID NO: 78708 - DNA, 25 bp, Probe Sequence
taatctacctacagaaaagtgccca

SEQ ID NO: 78709 - DNA, 25 bp, Probe Sequence
acatctgggtggttagcattcaagt

SEQ ID NO: 78710 - DNA, 25 bp, Probe Sequence
aatctacctacagaaaagtgcccag

SEQ ID NO: 78711 - DNA, 25 bp, Probe Sequence
ggttagcattcaagttaagaaataa

SEQ ID NO: 78712 - DNA, 25 bp, Probe Sequence
tcatgagatgtaatctacctacaga

SEQ ID NO: 78713 - DNA, 25 bp, Probe Sequence
atgagatgtaatctacctacagaaa

SEQ ID NO: 78714 - DNA, 25 bp, Probe Sequence
tgtaatctacctacagaaaagtgcc

SEQ ID NO: 78715 - DNA, 25 bp, Probe Sequence
gttaagaaataaaacactgcacccc

SEQ ID NO: 78716 - DNA, 25 bp, Probe Sequence
agttaagaaataaaacactgcaccc

SEQ ID NO: 78717 - DNA, 25 bp, Probe Sequence
atctacctacagaaaagtgcccaga

SEQ ID NO: 78718 - DNA, 25 bp, Probe Sequence
atgtaatctacctacagaaaagtgc

SEQ ID NO: 78719 - DNA, 25 bp, Probe Sequence
gtcatgtgtgtgtgtatgtgttatt

SEQ ID NO: 78720 - DNA, 25 bp, Probe Sequence
agtcatgtgtgtgtgtatgtgttat

SEQ ID NO: 78721 - DNA, 25 bp, Probe Sequence
ccagttcctagattaatgcctaaca

SEQ ID NO: 78722 - DNA, 25 bp, Probe Sequence
cagtcatgtgtgtgtgtatgtgtta

SEQ ID NO: 78723 - DNA, 25 bp, Probe Sequence
ctactatcttctgttgtctcattct

SEQ ID NO: 78724 - DNA, 25 bp, Probe Sequence
tctactatcttctgttgtctcattc

SEQ ID NO: 78725 - DNA, 25 bp, Probe Sequence
tgtgtgtgtatgtgttatttgcttt

SEQ ID NO: 78726 - DNA, 25 bp, Probe Sequence
tgttgtctcattctttctcatcctt

SEQ ID NO: 78727 - DNA, 25 bp, Probe Sequence
tcttctgttgtctcattctttctca

SEQ ID NO: 78728 - DNA, 25 bp, Probe Sequence
tactatcttctgttgtctcattctt

SEQ ID NO: 78729 - DNA, 25 bp, Probe Sequence
ttctactatcttctgttgtctcatt

SEQ ID NO: 78730 - DNA, 25 bp, Probe Sequence
tgtgtgtatgtgttatttgctttca

SEQ ID NO: 78731 - DNA, 25 bp, Probe Sequence
gtgtgtgtatgtgttatttgctttc

SEQ ID NO: 78732 - DNA, 25 bp, Probe Sequence
gtgtgtgtgtatgtgttatttgctt

SEQ ID NO: 78733 - DNA, 25 bp, Probe Sequence
ctgttgtctcattctttctcatcct

SEQ ID NO: 78734 - DNA, 25 bp, Probe Sequence
tctgttgtctcattctttctcatcc

SEQ ID NO: 78735 - DNA, 25 bp, Probe Sequence
atgtgtgtgtgtatgtgttatttgc

SEQ ID NO: 78736 - DNA, 25 bp, Probe Sequence
cagttcctagattaatgcctaacat

SEQ ID NO: 78737 - DNA, 25 bp, Probe Sequence
tgtctcattctttctcatcctttgg

SEQ ID NO: 78738 - DNA, 25 bp, Probe Sequence
ttgtctcattctttctcatcctttg

SEQ ID NO: 78739 - DNA, 25 bp, Probe Sequence
gttgtctcattctttctcatccttt

SEQ ID NO: 78740 - DNA, 25 bp, Probe Sequence
aattctactatcttctgttgtctca

SEQ ID NO: 78741 - DNA, 25 bp, Probe Sequence
ttctgttgtctcattctttctcatc

SEQ ID NO: 78742 - DNA, 25 bp, Probe Sequence
aaacagttagccctaattctcaaga

SEQ ID NO: 78743 - DNA, 25 bp, Probe Sequence
cattattaagttgaagtgtgaagca

SEQ ID NO: 78744 - DNA, 25 bp, Probe Sequence
tcattattaagttgaagtgtgaagc

SEQ ID NO: 78745 - DNA, 25 bp, Probe Sequence
gtaaacaagtccaaggtgaagattt

SEQ ID NO: 78746 - DNA, 25 bp, Probe Sequence
tgaggcggctatatttaatgaagaa

SEQ ID NO: 78747 - DNA, 25 bp, Probe Sequence
tatgtgaggcggctatatttaatga

SEQ ID NO: 78748 - DNA, 25 bp, Probe Sequence
atgtgaggcggctatatttaatgaa

SEQ ID NO: 78749 - DNA, 25 bp, Probe Sequence
ctatgtgaggcggctatatttaatg

SEQ ID NO: 78750 - DNA, 25 bp, Probe Sequence
tctatgtgaggcggctatatttaat

SEQ ID NO: 78751 - DNA, 25 bp, Probe Sequence
attattaagttgaagtgtgaagcaa

SEQ ID NO: 78752 - DNA, 25 bp, Probe Sequence
gtgaggcggctatatttaatgaaga

SEQ ID NO: 78753 - DNA, 25 bp, Probe Sequence
aggcggctatatttaatgaagaatc

SEQ ID NO: 78754 - DNA, 25 bp, Probe Sequence
gaggcggctatatttaatgaagaat

SEQ ID NO: 78755 - DNA, 25 bp, Probe Sequence
ggtaaacaagtccaaggtgaagatt

SEQ ID NO: 78756 - DNA, 25 bp, Probe Sequence
tgtgaggcggctatatttaatgaag

SEQ ID NO: 78757 - DNA, 25 bp, Probe Sequence
gtaggtaaacaagtccaaggtgaag

SEQ ID NO: 78758 - DNA, 25 bp, Probe Sequence
taggtaaacaagtccaaggtgaaga

SEQ ID NO: 78759 - DNA, 25 bp, Probe Sequence
tgggtaacagagtgagacattatct

SEQ ID NO: 78760 - DNA, 25 bp, Probe Sequence
gcagtaattggtaggtaaacaagtc

SEQ ID NO: 78761 - DNA, 25 bp, Probe Sequence
cagtaattggtaggtaaacaagtcc

SEQ ID NO: 78762 - DNA, 25 bp, Probe Sequence
ggcggctatatttaatgaagaatca

SEQ ID NO: 78763 - DNA, 25 bp, Probe Sequence
ctctatgtgaggcggctatatttaa

SEQ ID NO: 78764 - DNA, 25 bp, Probe Sequence
aggtaaacaagtccaaggtgaagat

SEQ ID NO: 78765 - DNA, 25 bp, Probe Sequence
actctatgtgaggcggctatattta

SEQ ID NO: 78766 - DNA, 25 bp, Probe Sequence
caactagagcttcttagtggatgtg

SEQ ID NO: 78767 - DNA, 25 bp, Probe Sequence
gttagattagcagaacgctcttgaa

SEQ ID NO: 78768 - DNA, 25 bp, Probe Sequence
ttagattagcagaacgctcttgaaa

SEQ ID NO: 78769 - DNA, 25 bp, Probe Sequence
tagattagcagaacgctcttgaaac

SEQ ID NO: 78770 - DNA, 25 bp, Probe Sequence
tgaaacaagtaatgactggtttagt

SEQ ID NO: 78771 - DNA, 25 bp, Probe Sequence
gattagcagaacgctcttgaaacaa

SEQ ID NO: 78772 - DNA, 25 bp, Probe Sequence
aaactgccgaaaacttacgagaaaa

SEQ ID NO: 78773 - DNA, 25 bp, Probe Sequence
ttgaaacaagtaatgactggtttag

SEQ ID NO: 78774 - DNA, 25 bp, Probe Sequence
gaaactgccgaaaacttacgagaaa

SEQ ID NO: 78775 - DNA, 25 bp, Probe Sequence
ctcttgaaacaagtaatgactggtt

SEQ ID NO: 78776 - DNA, 25 bp, Probe Sequence
agattagcagaacgctcttgaaaca

SEQ ID NO: 78777 - DNA, 25 bp, Probe Sequence
gaacgctcttgaaacaagtaatgac

SEQ ID NO: 78778 - DNA, 25 bp, Probe Sequence
agaacgctcttgaaacaagtaatga

SEQ ID NO: 78779 - DNA, 25 bp, Probe Sequence
cagaacgctcttgaaacaagtaatg

SEQ ID NO: 78780 - DNA, 25 bp, Probe Sequence
tcttgaaacaagtaatgactggttt

SEQ ID NO: 78781 - DNA, 25 bp, Probe Sequence
aacgctcttgaaacaagtaatgact

SEQ ID NO: 78782 - DNA, 25 bp, Probe Sequence
gctcttgaaacaagtaatgactggt

SEQ ID NO: 78783 - DNA, 25 bp, Probe Sequence
acaagtaatgactggtttagtctgc

SEQ ID NO: 78784 - DNA, 25 bp, Probe Sequence
aacaagtaatgactggtttagtctg

SEQ ID NO: 78785 - DNA, 25 bp, Probe Sequence
acgctcttgaaacaagtaatgactg

SEQ ID NO: 78786 - DNA, 25 bp, Probe Sequence
attagcagaacgctcttgaaacaag

SEQ ID NO: 78787 - DNA, 25 bp, Probe Sequence
aaacaagtaatgactggtttagtct

SEQ ID NO: 78788 - DNA, 25 bp, Probe Sequence
gaaacaagtaatgactggtttagtc

SEQ ID NO: 78789 - DNA, 25 bp, Probe Sequence
cttgaaacaagtaatgactggttta

SEQ ID NO: 78790 - DNA, 25 bp, Probe Sequence
gcagaacgctcttgaaacaagtaat

SEQ ID NO: 78791 - DNA, 25 bp, Probe Sequence
gatagtaatattggacatggcacac

SEQ ID NO: 78792 - DNA, 25 bp, Probe Sequence
cgatagtaatattggacatggcaca

SEQ ID NO: 78793 - DNA, 25 bp, Probe Sequence
atggcgatagtaatattggacatgg

SEQ ID NO: 78794 - DNA, 25 bp, Probe Sequence
atagtaatattggacatggcacact

SEQ ID NO: 78795 - DNA, 25 bp, Probe Sequence
tagtaatattggacatggcacactg

SEQ ID NO: 78796 - DNA, 25 bp, Probe Sequence
gcgatagtaatattggacatggcac

SEQ ID NO: 78797 - DNA, 25 bp, Probe Sequence
gagtaatcattgggtcattcgtctg

SEQ ID NO: 78798 - DNA, 25 bp, Probe Sequence
ttctagggaatggaggagtaatcat

SEQ ID NO: 78799 - DNA, 25 bp, Probe Sequence
atggaggagtaatcattgggtcatt

SEQ ID NO: 78800 - DNA, 25 bp, Probe Sequence
agttctagggaatggaggagtaatc

SEQ ID NO: 78801 - DNA, 25 bp, Probe Sequence
gagttctagggaatggaggagtaat

SEQ ID NO: 78802 - DNA, 25 bp, Probe Sequence
gttctagggaatggaggagtaatca

SEQ ID NO: 78803 - DNA, 25 bp, Probe Sequence
gtaatcattgggtcattcgtctgtg

SEQ ID NO: 78804 - DNA, 25 bp, Probe Sequence
agtaatcattgggtcattcgtctgt

SEQ ID NO: 78805 - DNA, 25 bp, Probe Sequence
tggaggagtaatcattgggtcattc

SEQ ID NO: 78806 - DNA, 25 bp, Probe Sequence
ggcgatagtaatattggacatggca

SEQ ID NO: 78807 - DNA, 25 bp, Probe Sequence
tggcgatagtaatattggacatggc

SEQ ID NO: 78808 - DNA, 25 bp, Probe Sequence
agagttctagggaatggaggagtaa

SEQ ID NO: 78809 - DNA, 25 bp, Probe Sequence
ggagtaatcattgggtcattcgtct

SEQ ID NO: 78810 - DNA, 25 bp, Probe Sequence
aggagtaatcattgggtcattcgtc

SEQ ID NO: 78811 - DNA, 25 bp, Probe Sequence
gaggagtaatcattgggtcattcgt

SEQ ID NO: 78812 - DNA, 25 bp, Probe Sequence
gtaatattggacatggcacactggt

SEQ ID NO: 78813 - DNA, 25 bp, Probe Sequence
gagagttctagggaatggaggagta

SEQ ID NO: 78814 - DNA, 25 bp, Probe Sequence
agtaatattggacatggcacactgg

SEQ ID NO: 78815 - DNA, 25 bp, Probe Sequence
tcacttgtaaggttagacttcactc

SEQ ID NO: 78816 - DNA, 25 bp, Probe Sequence
ttcacttgtaaggttagacttcact

SEQ ID NO: 78817 - DNA, 25 bp, Probe Sequence
cttcacttgtaaggttagacttcac

SEQ ID NO: 78818 - DNA, 25 bp, Probe Sequence
gcttcacttgtaaggttagacttca

SEQ ID NO: 78819 - DNA, 25 bp, Probe Sequence
ctaccagtctctacctcaacatcaa

SEQ ID NO: 78820 - DNA, 25 bp, Probe Sequence
cacttgtaaggttagacttcactcc

SEQ ID NO: 78821 - DNA, 25 bp, Probe Sequence
ggcttcacttgtaaggttagacttc

SEQ ID NO: 78822 - DNA, 25 bp, Probe Sequence
cgcttcattcaagaacctacatcat

SEQ ID NO: 78823 - DNA, 25 bp, Probe Sequence
aactaccagtctctacctcaacatc

SEQ ID NO: 78824 - DNA, 25 bp, Probe Sequence
gcttcattcaagaacctacatcatg

SEQ ID NO: 78825 - DNA, 25 bp, Probe Sequence
cttcattcaagaacctacatcatgg

SEQ ID NO: 78826 - DNA, 25 bp, Probe Sequence
tatgctgctagaattacgacagatt

SEQ ID NO: 78827 - DNA, 25 bp, Probe Sequence
aatatgctgctagaattacgacaga

SEQ ID NO: 78828 - DNA, 25 bp, Probe Sequence
caatatgctgctagaattacgacag

SEQ ID NO: 78829 - DNA, 25 bp, Probe Sequence
atatgctgctagaattacgacagat

SEQ ID NO: 78830 - DNA, 25 bp, Probe Sequence
ttacgacagattctccacctcctat

SEQ ID NO: 78831 - DNA, 25 bp, Probe Sequence
attacgacagattctccacctccta

SEQ ID NO: 78832 - DNA, 25 bp, Probe Sequence
actaccagtctctacctcaacatca

SEQ ID NO: 78833 - DNA, 25 bp, Probe Sequence
tgttcatttcttcgctatctctctt

SEQ ID NO: 78834 - DNA, 25 bp, Probe Sequence
gagagaatgaatagggtgcttagaa

SEQ ID NO: 78835 - DNA, 25 bp, Probe Sequence
ctctaaatcaatgttcctgttcctg

SEQ ID NO: 78836 - DNA, 25 bp, Probe Sequence
tctctaaatcaatgttcctgttcct

SEQ ID NO: 78837 - DNA, 25 bp, Probe Sequence
gagaatgaatagggtgcttagaaga

SEQ ID NO: 78838 - DNA, 25 bp, Probe Sequence
agagaatgaatagggtgcttagaag

SEQ ID NO: 78839 - DNA, 25 bp, Probe Sequence
gattccaagattatgtccactctga

SEQ ID NO: 78840 - DNA, 25 bp, Probe Sequence
agattccaagattatgtccactctg

SEQ ID NO: 78841 - DNA, 25 bp, Probe Sequence
cagattccaagattatgtccactct

SEQ ID NO: 78842 - DNA, 25 bp, Probe Sequence
ttccaagattatgtccactctgatg

SEQ ID NO: 78843 - DNA, 25 bp, Probe Sequence
attccaagattatgtccactctgat

SEQ ID NO: 78844 - DNA, 25 bp, Probe Sequence
acagattccaagattatgtccactc

SEQ ID NO: 78845 - DNA, 25 bp, Probe Sequence
cacagattccaagattatgtccact

SEQ ID NO: 78846 - DNA, 25 bp, Probe Sequence
ctccacagattccaagattatgtcc

SEQ ID NO: 78847 - DNA, 25 bp, Probe Sequence
cctccacagattccaagattatgtc

SEQ ID NO: 78848 - DNA, 25 bp, Probe Sequence
agcctccacagattccaagattatg

SEQ ID NO: 78849 - DNA, 25 bp, Probe Sequence
cagcctccacagattccaagattat

SEQ ID NO: 78850 - DNA, 25 bp, Probe Sequence
ccacagattccaagattatgtccac

SEQ ID NO: 78851 - DNA, 25 bp, Probe Sequence
tccacagattccaagattatgtcca

SEQ ID NO: 78852 - DNA, 25 bp, Probe Sequence
ctcctcatcttcatgttgtctctct

SEQ ID NO: 78853 - DNA, 25 bp, Probe Sequence
tctcctcatcttcatgttgtctctc

SEQ ID NO: 78854 - DNA, 25 bp, Probe Sequence
gcatgacaatgatactggactatgt

SEQ ID NO: 78855 - DNA, 25 bp, Probe Sequence
tcctcatcttcatgttgtctctctg

SEQ ID NO: 78856 - DNA, 25 bp, Probe Sequence
gtctcctcatcttcatgttgtctct

SEQ ID NO: 78857 - DNA, 25 bp, Probe Sequence
ctcatcttcatgttgtctctctgac

SEQ ID NO: 78858 - DNA, 25 bp, Probe Sequence
cctcatcttcatgttgtctctctga

SEQ ID NO: 78859 - DNA, 25 bp, Probe Sequence
tgcatgacaatgatactggactatg

SEQ ID NO: 78860 - DNA, 25 bp, Probe Sequence
ttgcatgacaatgatactggactat

SEQ ID NO: 78861 - DNA, 25 bp, Probe Sequence
tccaagattatgtccactctgatgg

SEQ ID NO: 78862 - DNA, 25 bp, Probe Sequence
gcctccacagattccaagattatgt

SEQ ID NO: 78863 - DNA, 25 bp, Probe Sequence
ataatgtggctggtaatactgtctg

SEQ ID NO: 78864 - DNA, 25 bp, Probe Sequence
ttcataatgtggctggtaatactgt

SEQ ID NO: 78865 - DNA, 25 bp, Probe Sequence
cataatgtggctggtaatactgtct

SEQ ID NO: 78866 - DNA, 25 bp, Probe Sequence
tcataatgtggctggtaatactgtc

SEQ ID NO: 78867 - DNA, 25 bp, Probe Sequence
ctggtggatgattatctgctaagta

SEQ ID NO: 78868 - DNA, 25 bp, Probe Sequence
ctctggtggatgattatctgctaag

SEQ ID NO: 78869 - DNA, 25 bp, Probe Sequence
atctactattcataatgtggctggt

SEQ ID NO: 78870 - DNA, 25 bp, Probe Sequence
tggtggatgattatctgctaagtaa

SEQ ID NO: 78871 - DNA, 25 bp, Probe Sequence
tctggtggatgattatctgctaagt

SEQ ID NO: 78872 - DNA, 25 bp, Probe Sequence
attcataatgtggctggtaatactg

SEQ ID NO: 78873 - DNA, 25 bp, Probe Sequence
tctactattcataatgtggctggta

SEQ ID NO: 78874 - DNA, 25 bp, Probe Sequence
ggtggatgattatctgctaagtaag

SEQ ID NO: 78875 - DNA, 25 bp, Probe Sequence
taatgtggctggtaatactgtctgt

SEQ ID NO: 78876 - DNA, 25 bp, Probe Sequence
ctactattcataatgtggctggtaa

SEQ ID NO: 78877 - DNA, 25 bp, Probe Sequence
gtggatgattatctgctaagtaagt

SEQ ID NO: 78878 - DNA, 25 bp, Probe Sequence
tggatgattatctgctaagtaagtc

SEQ ID NO: 78879 - DNA, 25 bp, Probe Sequence
gctctggtggatgattatctgctaa

SEQ ID NO: 78880 - DNA, 25 bp, Probe Sequence
tatctactattcataatgtggctgg

SEQ ID NO: 78881 - DNA, 25 bp, Probe Sequence
ggatgattatctgctaagtaagtct

SEQ ID NO: 78882 - DNA, 25 bp, Probe Sequence
tactattcataatgtggctggtaat

SEQ ID NO: 78883 - DNA, 25 bp, Probe Sequence
ttaagctctggtggatgattatctg

SEQ ID NO: 78884 - DNA, 25 bp, Probe Sequence
atggtggtgttgagctgattattaa

SEQ ID NO: 78885 - DNA, 25 bp, Probe Sequence
aatggtggtgttgagctgattatta

SEQ ID NO: 78886 - DNA, 25 bp, Probe Sequence
tattcataatgtggctggtaatact

SEQ ID NO: 78887 - DNA, 25 bp, Probe Sequence
acagagccagatcctatctcaataa

SEQ ID NO: 78888 - DNA, 25 bp, Probe Sequence
gacagagccagatcctatctcaata

SEQ ID NO: 78889 - DNA, 25 bp, Probe Sequence
tgacagagccagatcctatctcaat

SEQ ID NO: 78890 - DNA, 25 bp, Probe Sequence
cagagccagatcctatctcaataaa

SEQ ID NO: 78891 - DNA, 25 bp, Probe Sequence
gtgacagagccagatcctatctcaa

SEQ ID NO: 78892 - DNA, 25 bp, Probe Sequence
agagccagatcctatctcaataaaa

SEQ ID NO: 78893 - DNA, 25 bp, Probe Sequence
ggtgacagagccagatcctatctca

SEQ ID NO: 78894 - DNA, 25 bp, Probe Sequence
tggtgacagagccagatcctatctc

SEQ ID NO: 78895 - DNA, 25 bp, Probe Sequence
ctggtgacagagccagatcctatct

SEQ ID NO: 78896 - DNA, 25 bp, Probe Sequence
taattggttaatggaagagaaggca

SEQ ID NO: 78897 - DNA, 25 bp, Probe Sequence
gtaattggttaatggaagagaaggc

SEQ ID NO: 78898 - DNA, 25 bp, Probe Sequence
tgttcttgattgacttgtaattggt

SEQ ID NO: 78899 - DNA, 25 bp, Probe Sequence
tgtaattggttaatggaagagaagg

SEQ ID NO: 78900 - DNA, 25 bp, Probe Sequence
aattggttaatggaagagaaggcaa

SEQ ID NO: 78901 - DNA, 25 bp, Probe Sequence
attggttaatggaagagaaggcaag

SEQ ID NO: 78902 - DNA, 25 bp, Probe Sequence
tgacttgtaattggttaatggaaga

SEQ ID NO: 78903 - DNA, 25 bp, Probe Sequence
gttcttgattgacttgtaattggtt

SEQ ID NO: 78904 - DNA, 25 bp, Probe Sequence
agtgatgttcttgattgacttgtaa

SEQ ID NO: 78905 - DNA, 25 bp, Probe Sequence
gttaatggaagagaaggcaagttgg

SEQ ID NO: 78906 - DNA, 25 bp, Probe Sequence
ggttaatggaagagaaggcaagttg

SEQ ID NO: 78907 - DNA, 25 bp, Probe Sequence
atgttcttgattgacttgtaattgg

SEQ ID NO: 78908 - DNA, 25 bp, Probe Sequence
gtgatgttcttgattgacttgtaat

SEQ ID NO: 78909 - DNA, 25 bp, Probe Sequence
acttgtaattggttaatggaagaga

SEQ ID NO: 78910 - DNA, 25 bp, Probe Sequence
tgattgacttgtaattggttaatgg

SEQ ID NO: 78911 - DNA, 25 bp, Probe Sequence
tggttaatggaagagaaggcaagtt

SEQ ID NO: 78912 - DNA, 25 bp, Probe Sequence
tctccaagttagattcgtactgtat

SEQ ID NO: 78913 - DNA, 25 bp, Probe Sequence
gacttgtaattggttaatggaagag

SEQ ID NO: 78914 - DNA, 25 bp, Probe Sequence
gattgacttgtaattggttaatgga

SEQ ID NO: 78915 - DNA, 25 bp, Probe Sequence
ttgacttgtaattggttaatggaag

SEQ ID NO: 78916 - DNA, 25 bp, Probe Sequence
attcgtggaagatagatgttagatc

SEQ ID NO: 78917 - DNA, 25 bp, Probe Sequence
ttggttaatggaagagaaggcaagt

SEQ ID NO: 78918 - DNA, 25 bp, Probe Sequence
aattcgtggaagatagatgttagat

SEQ ID NO: 78919 - DNA, 25 bp, Probe Sequence
tcgtggaagatagatgttagatcct

SEQ ID NO: 78920 - DNA, 25 bp, Probe Sequence
ttctgttgacttgtaggagttcttc

SEQ ID NO: 78921 - DNA, 25 bp, Probe Sequence
ctgttgacttgtaggagttcttcat

SEQ ID NO: 78922 - DNA, 25 bp, Probe Sequence
tgttgacttgtaggagttcttcata

SEQ ID NO: 78923 - DNA, 25 bp, Probe Sequence
tctgttgacttgtaggagttcttca

SEQ ID NO: 78924 - DNA, 25 bp, Probe Sequence
gttgacttgtaggagttcttcatat

SEQ ID NO: 78925 - DNA, 25 bp, Probe Sequence
tttctgttgacttgtaggagttctt

SEQ ID NO: 78926 - DNA, 25 bp, Probe Sequence
ttgacttgtaggagttcttcatata

SEQ ID NO: 78927 - DNA, 25 bp, Probe Sequence
acggtgaaatcctgtctccattaaa

SEQ ID NO: 78928 - DNA, 25 bp, Probe Sequence
tgacttgtaggagttcttcatatat

SEQ ID NO: 78929 - DNA, 25 bp, Probe Sequence
gatcacgaggtcagaagttcaagac

SEQ ID NO: 78930 - DNA, 25 bp, Probe Sequence
cacggtgaaatcctgtctccattaa

SEQ ID NO: 78931 - DNA, 25 bp, Probe Sequence
catgattggcaaatgttgtctctca

SEQ ID NO: 78932 - DNA, 25 bp, Probe Sequence
gattggcaaatgttgtctctcattg

SEQ ID NO: 78933 - DNA, 25 bp, Probe Sequence
cccatatttagatacatgattggca

SEQ ID NO: 78934 - DNA, 25 bp, Probe Sequence
ggatcacgaggtcagaagttcaaga

SEQ ID NO: 78935 - DNA, 25 bp, Probe Sequence
atgttgtctctcattgccgtaggtt

SEQ ID NO: 78936 - DNA, 25 bp, Probe Sequence
tgattggcaaatgttgtctctcatt

SEQ ID NO: 78937 - DNA, 25 bp, Probe Sequence
tttatttgatatttgagacggagtc

SEQ ID NO: 78938 - DNA, 25 bp, Probe Sequence
tggatcacgaggtcagaagttcaag

SEQ ID NO: 78939 - DNA, 25 bp, Probe Sequence
atgattggcaaatgttgtctctcat

SEQ ID NO: 78940 - DNA, 25 bp, Probe Sequence
cggtgaaatcctgtctccattaaaa

SEQ ID NO: 78941 - DNA, 25 bp, Probe Sequence
aagaaacaagagtttagaagtcact

SEQ ID NO: 78942 - DNA, 25 bp, Probe Sequence
ttttctgttgacttgtaggagttct

SEQ ID NO: 78943 - DNA, 25 bp, Probe Sequence
gttttctgttgacttgtaggagttc

SEQ ID NO: 78944 - DNA, 25 bp, Probe Sequence
ttcttacatgagttgaatctgtgtt

SEQ ID NO: 78945 - DNA, 25 bp, Probe Sequence
tgaggaatatgtgtgtgtgtacctt

SEQ ID NO: 78946 - DNA, 25 bp, Probe Sequence
ttgaggaatatgtgtgtgtgtacct

SEQ ID NO: 78947 - DNA, 25 bp, Probe Sequence
tggttcatactcttcaaacacttca

SEQ ID NO: 78948 - DNA, 25 bp, Probe Sequence
ggttcatactcttcaaacacttcaa

SEQ ID NO: 78949 - DNA, 25 bp, Probe Sequence
ttgtggattcttacatgagttgaat

SEQ ID NO: 78950 - DNA, 25 bp, Probe Sequence
gaatatgtgtgtgtgtacctttgtg

SEQ ID NO: 78951 - DNA, 25 bp, Probe Sequence
catactcttcaaacacttcaatctg

SEQ ID NO: 78952 - DNA, 25 bp, Probe Sequence
tcatactcttcaaacacttcaatct

SEQ ID NO: 78953 - DNA, 25 bp, Probe Sequence
attcttacatgagttgaatctgtgt

SEQ ID NO: 78954 - DNA, 25 bp, Probe Sequence
gtgtgtgtacctttgtggattctta

SEQ ID NO: 78955 - DNA, 25 bp, Probe Sequence
tttcggatttgtcatttctgtggag

SEQ ID NO: 78956 - DNA, 25 bp, Probe Sequence
tgtgtgtacctttgtggattcttac

SEQ ID NO: 78957 - DNA, 25 bp, Probe Sequence
tttgaggaatatgtgtgtgtgtacc

SEQ ID NO: 78958 - DNA, 25 bp, Probe Sequence
ggaatatgtgtgtgtgtacctttgt

SEQ ID NO: 78959 - DNA, 25 bp, Probe Sequence
atttgtcatttctgtggagccattt

SEQ ID NO: 78960 - DNA, 25 bp, Probe Sequence
aatatgtgtgtgtgtacctttgtgg

SEQ ID NO: 78961 - DNA, 25 bp, Probe Sequence
gtggttcatactcttcaaacacttc

SEQ ID NO: 78962 - DNA, 25 bp, Probe Sequence
gatttgtcatttctgtggagccatt

SEQ ID NO: 78963 - DNA, 25 bp, Probe Sequence
atactcttcaaacacttcaatctga

SEQ ID NO: 78964 - DNA, 25 bp, Probe Sequence
taacatatcctggcctcactaagaa

SEQ ID NO: 78965 - DNA, 25 bp, Probe Sequence
ttcatactcttcaaacacttcaatc

SEQ ID NO: 78966 - DNA, 25 bp, Probe Sequence
atagaaagtcaaccaataaagctgc

SEQ ID NO: 78967 - DNA, 25 bp, Probe Sequence
gttcatactcttcaaacacttcaat

SEQ ID NO: 78968 - DNA, 25 bp, Probe Sequence
ttaggtggtgaatgtgactaagaag

SEQ ID NO: 78969 - DNA, 25 bp, Probe Sequence
taggtggtgaatgtgactaagaagc

SEQ ID NO: 78970 - DNA, 25 bp, Probe Sequence
cctcctagatacatacaatcttgga

SEQ ID NO: 78971 - DNA, 25 bp, Probe Sequence
tcctagatacatacaatcttggact

SEQ ID NO: 78972 - DNA, 25 bp, Probe Sequence
gtggtgaatgtgactaagaagcctg

SEQ ID NO: 78973 - DNA, 25 bp, Probe Sequence
gcacttaggtggtgaatgtgactaa

SEQ ID NO: 78974 - DNA, 25 bp, Probe Sequence
ctcctagatacatacaatcttggac

SEQ ID NO: 78975 - DNA, 25 bp, Probe Sequence
cctagatacatacaatcttggactt

SEQ ID NO: 78976 - DNA, 25 bp, Probe Sequence
gatacatacaatcttggactttctc

SEQ ID NO: 78977 - DNA, 25 bp, Probe Sequence
atacatacaatcttggactttctcc

SEQ ID NO: 78978 - DNA, 25 bp, Probe Sequence
ccctcctagatacatacaatcttgg

SEQ ID NO: 78979 - DNA, 25 bp, Probe Sequence
ctctggagtaaatggttggctctac

SEQ ID NO: 78980 - DNA, 25 bp, Probe Sequence
tggtgaatgtgactaagaagcctgg

SEQ ID NO: 78981 - DNA, 25 bp, Probe Sequence
ggtggtgaatgtgactaagaagcct

SEQ ID NO: 78982 - DNA, 25 bp, Probe Sequence
aggtggtgaatgtgactaagaagcc

SEQ ID NO: 78983 - DNA, 25 bp, Probe Sequence
agatacatacaatcttggactttct

SEQ ID NO: 78984 - DNA, 25 bp, Probe Sequence
cttaggtggtgaatgtgactaagaa

SEQ ID NO: 78985 - DNA, 25 bp, Probe Sequence
ctgacagctctggagtaaatggttg

SEQ ID NO: 78986 - DNA, 25 bp, Probe Sequence
tgcacttaggtggtgaatgtgacta

SEQ ID NO: 78987 - DNA, 25 bp, Probe Sequence
acttaggtggtgaatgtgactaaga

SEQ ID NO: 78988 - DNA, 25 bp, Probe Sequence
cacttaggtggtgaatgtgactaag

SEQ ID NO: 78989 - DNA, 25 bp, Probe Sequence
gatgcacttaggtggtgaatgtgac

SEQ ID NO: 78990 - DNA, 25 bp, Probe Sequence
tctggagtaaatggttggctctacg

SEQ ID NO: 78991 - DNA, 25 bp, Probe Sequence
gctctggagtaaatggttggctcta

SEQ ID NO: 78992 - DNA, 25 bp, Probe Sequence
ttcatccttctgtctctttgtttct

SEQ ID NO: 78993 - DNA, 25 bp, Probe Sequence
ctggactcatcatcaataaacactg

SEQ ID NO: 78994 - DNA, 25 bp, Probe Sequence
cctggactcatcatcaataaacact

SEQ ID NO: 78995 - DNA, 25 bp, Probe Sequence
tttcatccttctgtctctttgtttc

SEQ ID NO: 78996 - DNA, 25 bp, Probe Sequence
catccttctgtctctttgtttctga

SEQ ID NO: 78997 - DNA, 25 bp, Probe Sequence
tcatccttctgtctctttgtttctg

SEQ ID NO: 78998 - DNA, 25 bp, Probe Sequence
tggactcatcatcaataaacactgt

SEQ ID NO: 78999 - DNA, 25 bp, Probe Sequence
atccttctgtctctttgtttctgag

SEQ ID NO: 79000 - DNA, 25 bp, Probe Sequence
gcctggactcatcatcaataaacac

SEQ ID NO: 79001 - DNA, 25 bp, Probe Sequence
agcctggactcatcatcaataaaca

SEQ ID NO: 79002 - DNA, 25 bp, Probe Sequence
aggagcctggactcatcatcaataa

SEQ ID NO: 79003 - DNA, 25 bp, Probe Sequence
ggactcatcatcaataaacactgtt

SEQ ID NO: 79004 - DNA, 25 bp, Probe Sequence
gagcctggactcatcatcaataaac

SEQ ID NO: 79005 - DNA, 25 bp, Probe Sequence
ccttctagcttggaaatgaatatgc

SEQ ID NO: 79006 - DNA, 25 bp, Probe Sequence
caaaccttctagcttggaaatgaat

SEQ ID NO: 79007 - DNA, 25 bp, Probe Sequence
tttgtttctgagctttcctgtcttt

SEQ ID NO: 79008 - DNA, 25 bp, Probe Sequence
cccgtcccttctgaatttaatttgc

SEQ ID NO: 79009 - DNA, 25 bp, Probe Sequence
gtcccttctgaatttaatttgcact

SEQ ID NO: 79010 - DNA, 25 bp, Probe Sequence
ggaaatgaatatgctgcactttaca

SEQ ID NO: 79011 - DNA, 25 bp, Probe Sequence
tggaaatgaatatgctgcactttac

SEQ ID NO: 79012 - DNA, 25 bp, Probe Sequence
aatgaatatgctgcactttacaacc

SEQ ID NO: 79013 - DNA, 25 bp, Probe Sequence
accttctagcttggaaatgaatatg

SEQ ID NO: 79014 - DNA, 25 bp, Probe Sequence
ttggaaatgaatatgctgcacttta

SEQ ID NO: 79015 - DNA, 25 bp, Probe Sequence
acaaaccttctagcttggaaatgaa

SEQ ID NO: 79016 - DNA, 25 bp, Probe Sequence
ttggagggtgagaacataattgaaa

SEQ ID NO: 79017 - DNA, 25 bp, Probe Sequence
cttggagggtgagaacataattgaa

SEQ ID NO: 79018 - DNA, 25 bp, Probe Sequence
tggtggattatgaggtcaggagttc

SEQ ID NO: 79019 - DNA, 25 bp, Probe Sequence
atgcttggagggtgagaacataatt

SEQ ID NO: 79020 - DNA, 25 bp, Probe Sequence
gattatgaggtcaggagttcgagac

SEQ ID NO: 79021 - DNA, 25 bp, Probe Sequence
gcttggagggtgagaacataattga

SEQ ID NO: 79022 - DNA, 25 bp, Probe Sequence
ggattatgaggtcaggagttcgaga

SEQ ID NO: 79023 - DNA, 25 bp, Probe Sequence
ctggtggattatgaggtcaggagtt

SEQ ID NO: 79024 - DNA, 25 bp, Probe Sequence
tggattatgaggtcaggagttcgag

SEQ ID NO: 79025 - DNA, 25 bp, Probe Sequence
tgcttggagggtgagaacataattg

SEQ ID NO: 79026 - DNA, 25 bp, Probe Sequence
agcttctagtaaatcctggcagatc

SEQ ID NO: 79027 - DNA, 25 bp, Probe Sequence
gtggattatgaggtcaggagttcga

SEQ ID NO: 79028 - DNA, 25 bp, Probe Sequence
tggagggtgagaacataattgaaaa

SEQ ID NO: 79029 - DNA, 25 bp, Probe Sequence
catgcttggagggtgagaacataat

SEQ ID NO: 79030 - DNA, 25 bp, Probe Sequence
ggtggattatgaggtcaggagttcg

SEQ ID NO: 79031 - DNA, 25 bp, Probe Sequence
ggagggtgagaacataattgaaaat

SEQ ID NO: 79032 - DNA, 25 bp, Probe Sequence
aaatacaaataattagtccgggcgt

SEQ ID NO: 79033 - DNA, 25 bp, Probe Sequence
cagcttctagtaaatcctggcagat

SEQ ID NO: 79034 - DNA, 25 bp, Probe Sequence
ttctagtaaatcctggcagatcttg

SEQ ID NO: 79035 - DNA, 25 bp, Probe Sequence
cttctagtaaatcctggcagatctt

SEQ ID NO: 79036 - DNA, 25 bp, Probe Sequence
aatacaaataattagtccgggcgtg

SEQ ID NO: 79037 - DNA, 25 bp, Probe Sequence
cctcacagcttctagtaaatcctgg

SEQ ID NO: 79038 - DNA, 25 bp, Probe Sequence
ggaaaccaagggatgaaatgtgctt

SEQ ID NO: 79039 - DNA, 25 bp, Probe Sequence
gagcaggaaaccaagggatgaaatg

SEQ ID NO: 79040 - DNA, 25 bp, Probe Sequence
agcaagactctgtccaaatatacaa

SEQ ID NO: 79041 - DNA, 25 bp, Probe Sequence
gagcaagactctgtccaaatataca

SEQ ID NO: 79042 - DNA, 25 bp, Probe Sequence
gcaagactctgtccaaatatacaaa

SEQ ID NO: 79043 - DNA, 25 bp, Probe Sequence
aaatctcaatcagaccctcttccac

SEQ ID NO: 79044 - DNA, 25 bp, Probe Sequence
agactctgtccaaatatacaaagtt

SEQ ID NO: 79045 - DNA, 25 bp, Probe Sequence
aagactctgtccaaatatacaaagt

SEQ ID NO: 79046 - DNA, 25 bp, Probe Sequence
caagactctgtccaaatatacaaag

SEQ ID NO: 79047 - DNA, 25 bp, Probe Sequence
gactctgtccaaatatacaaagttt

SEQ ID NO: 79048 - DNA, 25 bp, Probe Sequence
atgggaagtttaactaagagtatct

SEQ ID NO: 79049 - DNA, 25 bp, Probe Sequence
caaaatctcaatcagaccctcttcc

SEQ ID NO: 79050 - DNA, 25 bp, Probe Sequence
ccaaaatctcaatcagaccctcttc

SEQ ID NO: 79051 - DNA, 25 bp, Probe Sequence
tatctttagaaagttttggacaggc

SEQ ID NO: 79052 - DNA, 25 bp, Probe Sequence
aaaatctcaatcagaccctcttcca

SEQ ID NO: 79053 - DNA, 25 bp, Probe Sequence
aatctcaatcagaccctcttccacc

SEQ ID NO: 79054 - DNA, 25 bp, Probe Sequence
cttcccaaagtgctgagattacagg

SEQ ID NO: 79055 - DNA, 25 bp, Probe Sequence
agagcaagactctgtccaaatatac

SEQ ID NO: 79056 - DNA, 25 bp, Probe Sequence
cattcccagacccaaaatctcaatc

SEQ ID NO: 79057 - DNA, 25 bp, Probe Sequence
tttagtcattcccagacccaaaatc

SEQ ID NO: 79058 - DNA, 25 bp, Probe Sequence
ctttagtcattcccagacccaaaat

SEQ ID NO: 79059 - DNA, 25 bp, Probe Sequence
ccgtttcagtcttcaatctgttttg

SEQ ID NO: 79060 - DNA, 25 bp, Probe Sequence
attcccagacccaaaatctcaatca

SEQ ID NO: 79061 - DNA, 25 bp, Probe Sequence
tcattcccagacccaaaatctcaat

SEQ ID NO: 79062 - DNA, 25 bp, Probe Sequence
atctttagaaagttttggacaggcg

SEQ ID NO: 79063 - DNA, 25 bp, Probe Sequence
ttgtcttatgggaagtttaactaag

SEQ ID NO: 79064 - DNA, 25 bp, Probe Sequence
aataagttccaatgagcaagtgtcc

SEQ ID NO: 79065 - DNA, 25 bp, Probe Sequence
gaacattcttgtgtcaggctaatat

SEQ ID NO: 79066 - DNA, 25 bp, Probe Sequence
cgaacattcttgtgtcaggctaata

SEQ ID NO: 79067 - DNA, 25 bp, Probe Sequence
ataagttccaatgagcaagtgtcca

SEQ ID NO: 79068 - DNA, 25 bp, Probe Sequence
atcaagtaacagaatgaggaattgt

SEQ ID NO: 79069 - DNA, 25 bp, Probe Sequence
taagttccaatgagcaagtgtccat

SEQ ID NO: 79070 - DNA, 25 bp, Probe Sequence
ttatgtgggtggtaaaggaagaaat

SEQ ID NO: 79071 - DNA, 25 bp, Probe Sequence
aaataagttccaatgagcaagtgtc

SEQ ID NO: 79072 - DNA, 25 bp, Probe Sequence
gggtggtaaaggaagaaatcaagta

SEQ ID NO: 79073 - DNA, 25 bp, Probe Sequence
tatgtgggtggtaaaggaagaaatc

SEQ ID NO: 79074 - DNA, 25 bp, Probe Sequence
aatcaagtaacagaatgaggaattg

SEQ ID NO: 79075 - DNA, 25 bp, Probe Sequence
aaccatgtctaagcaccatagaata

SEQ ID NO: 79076 - DNA, 25 bp, Probe Sequence
accatgtctaagcaccatagaatat

SEQ ID NO: 79077 - DNA, 25 bp, Probe Sequence
gaaataagttccaatgagcaagtgt

SEQ ID NO: 79078 - DNA, 25 bp, Probe Sequence
caaccatgtctaagcaccatagaat

SEQ ID NO: 79079 - DNA, 25 bp, Probe Sequence
agaaataagttccaatgagcaagtg

SEQ ID NO: 79080 - DNA, 25 bp, Probe Sequence
cagaaataagttccaatgagcaagt

SEQ ID NO: 79081 - DNA, 25 bp, Probe Sequence
tgaagcagaaataagttccaatgag

SEQ ID NO: 79082 - DNA, 25 bp, Probe Sequence
gtttctcttccacttcttgctacat

SEQ ID NO: 79083 - DNA, 25 bp, Probe Sequence
ggtggtaaaggaagaaatcaagtaa

SEQ ID NO: 79084 - DNA, 25 bp, Probe Sequence
gaagcagaaataagttccaatgagc

SEQ ID NO: 79085 - DNA, 25 bp, Probe Sequence
aacattcttgtgtcaggctaatatt

SEQ ID NO: 79086 - DNA, 25 bp, Probe Sequence
gcagaaataagttccaatgagcaag

SEQ ID NO: 79087 - DNA, 25 bp, Probe Sequence
tttatgtgggtggtaaaggaagaaa

SEQ ID NO: 79088 - DNA, 25 bp, Probe Sequence
cttggcagctactagcattatctgt

SEQ ID NO: 79089 - DNA, 25 bp, Probe Sequence
ttggcagctactagcattatctgtg

SEQ ID NO: 79090 - DNA, 25 bp, Probe Sequence
gcttggcagctactagcattatctg

SEQ ID NO: 79091 - DNA, 25 bp, Probe Sequence
tggcagctactagcattatctgtgg

SEQ ID NO: 79092 - DNA, 25 bp, Probe Sequence
gcagctactagcattatctgtggct

SEQ ID NO: 79093 - DNA, 25 bp, Probe Sequence
ggcctggttttattagaattcattt

SEQ ID NO: 79094 - DNA, 25 bp, Probe Sequence
agctactagcattatctgtggctgc

SEQ ID NO: 79095 - DNA, 25 bp, Probe Sequence
gcctggttttattagaattcatttt

SEQ ID NO: 79096 - DNA, 25 bp, Probe Sequence
agaattcattttgtaataaaagcct

SEQ ID NO: 79097 - DNA, 25 bp, Probe Sequence
gagctcttctagccctttataaaag

SEQ ID NO: 79098 - DNA, 25 bp, Probe Sequence
cctggttttattagaattcattttg

SEQ ID NO: 79099 - DNA, 25 bp, Probe Sequence
gaattcattttgtaataaaagcctt

SEQ ID NO: 79100 - DNA, 25 bp, Probe Sequence
ttagatagtgtggaatagaggctga

SEQ ID NO: 79101 - DNA, 25 bp, Probe Sequence
gttagatagtgtggaatagaggctg

SEQ ID NO: 79102 - DNA, 25 bp, Probe Sequence
gaggttagatagtgtggaatagagg

SEQ ID NO: 79103 - DNA, 25 bp, Probe Sequence
tagatagtgtggaatagaggctgac

SEQ ID NO: 79104 - DNA, 25 bp, Probe Sequence
ggttagatagtgtggaatagaggct

SEQ ID NO: 79105 - DNA, 25 bp, Probe Sequence
aggttagatagtgtggaatagaggc

SEQ ID NO: 79106 - DNA, 25 bp, Probe Sequence
ttggttgttcctcagttagaattgt

SEQ ID NO: 79107 - DNA, 25 bp, Probe Sequence
attggtctatcaagtatgctgtctt

SEQ ID NO: 79108 - DNA, 25 bp, Probe Sequence
agaggttagatagtgtggaatagag

SEQ ID NO: 79109 - DNA, 25 bp, Probe Sequence
aattggtctatcaagtatgctgtct

SEQ ID NO: 79110 - DNA, 25 bp, Probe Sequence
tggttgttcctcagttagaattgtg

SEQ ID NO: 79111 - DNA, 25 bp, Probe Sequence
aagaggttagatagtgtggaataga

SEQ ID NO: 79112 - DNA, 25 bp, Probe Sequence
ctaatgcttcttcttcttgtcaggc

SEQ ID NO: 79113 - DNA, 25 bp, Probe Sequence
gctaatgcttcttcttcttgtcagg

SEQ ID NO: 79114 - DNA, 25 bp, Probe Sequence
ggctaatgcttcttcttcttgtcag

SEQ ID NO: 79115 - DNA, 25 bp, Probe Sequence
gtggctaatgcttcttcttcttgtc

SEQ ID NO: 79116 - DNA, 25 bp, Probe Sequence
cagtggctaatgcttcttcttcttg

SEQ ID NO: 79117 - DNA, 25 bp, Probe Sequence
ggttgttcctcagttagaattgtgg

SEQ ID NO: 79118 - DNA, 25 bp, Probe Sequence
tggctaatgcttcttcttcttgtca

SEQ ID NO: 79119 - DNA, 25 bp, Probe Sequence
agtggctaatgcttcttcttcttgt

SEQ ID NO: 79120 - DNA, 25 bp, Probe Sequence
cgtaaagaggttagatagtgtggaa

SEQ ID NO: 79121 - DNA, 25 bp, Probe Sequence
gatagtgtggaatagaggctgacag

SEQ ID NO: 79122 - DNA, 25 bp, Probe Sequence
aacaggagatttcacaatttagcac

SEQ ID NO: 79123 - DNA, 25 bp, Probe Sequence
ggcaaacaggagatttcacaattta

SEQ ID NO: 79124 - DNA, 25 bp, Probe Sequence
tgtccactacttctattcagcatta

SEQ ID NO: 79125 - DNA, 25 bp, Probe Sequence
atgtccactacttctattcagcatt

SEQ ID NO: 79126 - DNA, 25 bp, Probe Sequence
gatgtccactacttctattcagcat

SEQ ID NO: 79127 - DNA, 25 bp, Probe Sequence
agatgtccactacttctattcagca

SEQ ID NO: 79128 - DNA, 25 bp, Probe Sequence
gtccactacttctattcagcattat

SEQ ID NO: 79129 - DNA, 25 bp, Probe Sequence
tagatgtccactacttctattcagc

SEQ ID NO: 79130 - DNA, 25 bp, Probe Sequence
ctacagctaaccgtgaacacttaat

SEQ ID NO: 79131 - DNA, 25 bp, Probe Sequence
tacagctaaccgtgaacacttaatg

SEQ ID NO: 79132 - DNA, 25 bp, Probe Sequence
tagaatagtatttgctcaacccagt

SEQ ID NO: 79133 - DNA, 25 bp, Probe Sequence
atagtatttgctcaacccagttaca

SEQ ID NO: 79134 - DNA, 25 bp, Probe Sequence
agaatagtatttgctcaacccagtt

SEQ ID NO: 79135 - DNA, 25 bp, Probe Sequence
tagtatttgctcaacccagttacag

SEQ ID NO: 79136 - DNA, 25 bp, Probe Sequence
cacttaatgttgaaagactgaaagc

SEQ ID NO: 79137 - DNA, 25 bp, Probe Sequence
aatagtatttgctcaacccagttac

SEQ ID NO: 79138 - DNA, 25 bp, Probe Sequence
tccactacttctattcagcattata

SEQ ID NO: 79139 - DNA, 25 bp, Probe Sequence
ctagaatagtatttgctcaacccag

SEQ ID NO: 79140 - DNA, 25 bp, Probe Sequence
gaatagtatttgctcaacccagtta

SEQ ID NO: 79141 - DNA, 25 bp, Probe Sequence
aaggtatagatgtccactacttcta

SEQ ID NO: 79142 - DNA, 25 bp, Probe Sequence
aaaggtatagatgtccactacttct

SEQ ID NO: 79143 - DNA, 25 bp, Probe Sequence
cctacagctaaccgtgaacacttaa

SEQ ID NO: 79144 - DNA, 25 bp, Probe Sequence
ggaagtcttaatgtcttattcagaa

SEQ ID NO: 79145 - DNA, 25 bp, Probe Sequence
agggaagtcttaatgtcttattcag

SEQ ID NO: 79146 - DNA, 25 bp, Probe Sequence
gggaagtcttaatgtcttattcaga

SEQ ID NO: 79147 - DNA, 25 bp, Probe Sequence
tctattcagcattatagggaagtct

SEQ ID NO: 79148 - DNA, 25 bp, Probe Sequence
caatatgcccagtacatgacttatg

SEQ ID NO: 79149 - DNA, 25 bp, Probe Sequence
gatttagaacgaattggagcttgag

SEQ ID NO: 79150 - DNA, 25 bp, Probe Sequence
agatttagaacgaattggagcttga

SEQ ID NO: 79151 - DNA, 25 bp, Probe Sequence
cagatttagaacgaattggagcttg

SEQ ID NO: 79152 - DNA, 25 bp, Probe Sequence
cgggataacctggtaaagtaacact

SEQ ID NO: 79153 - DNA, 25 bp, Probe Sequence
agcttccagagattaaagtttgtac

SEQ ID NO: 79154 - DNA, 25 bp, Probe Sequence
cagcttccagagattaaagtttgta

SEQ ID NO: 79155 - DNA, 25 bp, Probe Sequence
gaactgtgcagatttagaacgaatt

SEQ ID NO: 79156 - DNA, 25 bp, Probe Sequence
aactgtgcagatttagaacgaattg

SEQ ID NO: 79157 - DNA, 25 bp, Probe Sequence
ccagcttccagagattaaagtttgt

SEQ ID NO: 79158 - DNA, 25 bp, Probe Sequence
accagcttccagagattaaagtttg

SEQ ID NO: 79159 - DNA, 25 bp, Probe Sequence
caccagcttccagagattaaagttt

SEQ ID NO: 79160 - DNA, 25 bp, Probe Sequence
caaaggaactgtgcagatttagaac

SEQ ID NO: 79161 - DNA, 25 bp, Probe Sequence
tcaaaggaactgtgcagatttagaa

SEQ ID NO: 79162 - DNA, 25 bp, Probe Sequence
acatgacttatggactttcctactg

SEQ ID NO: 79163 - DNA, 25 bp, Probe Sequence
cagtacatgacttatggactttcct

SEQ ID NO: 79164 - DNA, 25 bp, Probe Sequence
ctctctggattagtgcgggtataga

SEQ ID NO: 79165 - DNA, 25 bp, Probe Sequence
ttcaaaggaactgtgcagatttaga

SEQ ID NO: 79166 - DNA, 25 bp, Probe Sequence
aatatgcccagtacatgacttatgg

SEQ ID NO: 79167 - DNA, 25 bp, Probe Sequence
atttagaacgaattggagcttgagc

SEQ ID NO: 79168 - DNA, 25 bp, Probe Sequence
gcagatttagaacgaattggagctt

SEQ ID NO: 79169 - DNA, 25 bp, Probe Sequence
catgacttatggactttcctactgc

SEQ ID NO: 79170 - DNA, 25 bp, Probe Sequence
ccagtacatgacttatggactttcc

SEQ ID NO: 79171 - DNA, 25 bp, Probe Sequence
tctctggattagtgcgggtatagac

SEQ ID NO: 79172 - DNA, 25 bp, Probe Sequence
gtgaaaccgtgtctctactaaatac

SEQ ID NO: 79173 - DNA, 25 bp, Probe Sequence
tgaaaccgtgtctctactaaataca

SEQ ID NO: 79174 - DNA, 25 bp, Probe Sequence
aaatacaaattagtccgagcatggt

SEQ ID NO: 79175 - DNA, 25 bp, Probe Sequence
taaatacaaattagtccgagcatgg

SEQ ID NO: 79176 - DNA, 25 bp, Probe Sequence
aatacaaattagtccgagcatggtg

SEQ ID NO: 79177 - DNA, 25 bp, Probe Sequence
gaaaccgtgtctctactaaatacaa

SEQ ID NO: 79178 - DNA, 25 bp, Probe Sequence
aaaccgtgtctctactaaatacaaa

SEQ ID NO: 79179 - DNA, 25 bp, Probe Sequence
ggtgaaaccgtgtctctactaaata

SEQ ID NO: 79180 - DNA, 25 bp, Probe Sequence
ataaggtgaaaccgtgtctctacta

SEQ ID NO: 79181 - DNA, 25 bp, Probe Sequence
accgtgtctctactaaatacaaatt

SEQ ID NO: 79182 - DNA, 25 bp, Probe Sequence
aaccgtgtctctactaaatacaaat

SEQ ID NO: 79183 - DNA, 25 bp, Probe Sequence
aggtgaaaccgtgtctctactaaat

SEQ ID NO: 79184 - DNA, 25 bp, Probe Sequence
aaggtgaaaccgtgtctctactaaa

SEQ ID NO: 79185 - DNA, 25 bp, Probe Sequence
ctaaatacaaattagtccgagcatg

SEQ ID NO: 79186 - DNA, 25 bp, Probe Sequence
cataaggtgaaaccgtgtctctact

SEQ ID NO: 79187 - DNA, 25 bp, Probe Sequence
atacaaattagtccgagcatggtgg

SEQ ID NO: 79188 - DNA, 25 bp, Probe Sequence
ccataaggtgaaaccgtgtctctac

SEQ ID NO: 79189 - DNA, 25 bp, Probe Sequence
ccgtgtctctactaaatacaaatta

SEQ ID NO: 79190 - DNA, 25 bp, Probe Sequence
tgtgttgcttttgtaataggaaaat

SEQ ID NO: 79191 - DNA, 25 bp, Probe Sequence
atgtgttgcttttgtaataggaaaa

SEQ ID NO: 79192 - DNA, 25 bp, Probe Sequence
cccataaggtgaaaccgtgtctcta

SEQ ID NO: 79193 - DNA, 25 bp, Probe Sequence
actaaatacaaattagtccgagcat

SEQ ID NO: 79194 - DNA, 25 bp, Probe Sequence
cgtgtctctactaaatacaaattag

SEQ ID NO: 79195 - DNA, 25 bp, Probe Sequence
tactaaatacaaattagtccgagca

SEQ ID NO: 79196 - DNA, 25 bp, Probe Sequence
gtgaaaccgtgtctctactaaatac

SEQ ID NO: 79197 - DNA, 25 bp, Probe Sequence
tgaaaccgtgtctctactaaataca

SEQ ID NO: 79198 - DNA, 25 bp, Probe Sequence
aaatacaaattagtccgagcatggt

SEQ ID NO: 79199 - DNA, 25 bp, Probe Sequence
taaatacaaattagtccgagcatgg

SEQ ID NO: 79200 - DNA, 25 bp, Probe Sequence
aatacaaattagtccgagcatggtg

SEQ ID NO: 79201 - DNA, 25 bp, Probe Sequence
gaaaccgtgtctctactaaatacaa

SEQ ID NO: 79202 - DNA, 25 bp, Probe Sequence
aaaccgtgtctctactaaatacaaa

SEQ ID NO: 79203 - DNA, 25 bp, Probe Sequence
ggtgaaaccgtgtctctactaaata

SEQ ID NO: 79204 - DNA, 25 bp, Probe Sequence
ataaggtgaaaccgtgtctctacta

SEQ ID NO: 79205 - DNA, 25 bp, Probe Sequence
accgtgtctctactaaatacaaatt

SEQ ID NO: 79206 - DNA, 25 bp, Probe Sequence
aaccgtgtctctactaaatacaaat

SEQ ID NO: 79207 - DNA, 25 bp, Probe Sequence
aggtgaaaccgtgtctctactaaat

SEQ ID NO: 79208 - DNA, 25 bp, Probe Sequence
aaggtgaaaccgtgtctctactaaa

SEQ ID NO: 79209 - DNA, 25 bp, Probe Sequence
ctaaatacaaattagtccgagcatg

SEQ ID NO: 79210 - DNA, 25 bp, Probe Sequence
cataaggtgaaaccgtgtctctact

SEQ ID NO: 79211 - DNA, 25 bp, Probe Sequence
atacaaattagtccgagcatggtgg

SEQ ID NO: 79212 - DNA, 25 bp, Probe Sequence
ccataaggtgaaaccgtgtctctac

SEQ ID NO: 79213 - DNA, 25 bp, Probe Sequence
ccgtgtctctactaaatacaaatta

SEQ ID NO: 79214 - DNA, 25 bp, Probe Sequence
tgtgttgcttttgtaataggaaaat

SEQ ID NO: 79215 - DNA, 25 bp, Probe Sequence
atgtgttgcttttgtaataggaaaa

SEQ ID NO: 79216 - DNA, 25 bp, Probe Sequence
cccataaggtgaaaccgtgtctcta

SEQ ID NO: 79217 - DNA, 25 bp, Probe Sequence
actaaatacaaattagtccgagcat

SEQ ID NO: 79218 - DNA, 25 bp, Probe Sequence
cgtgtctctactaaatacaaattag

SEQ ID NO: 79219 - DNA, 25 bp, Probe Sequence
tactaaatacaaattagtccgagca

SEQ ID NO: 79220 - DNA, 25 bp, Probe Sequence
ttgagtatatgagacttcctccact

SEQ ID NO: 79221 - DNA, 25 bp, Probe Sequence
agtatatgagacttcctccactaca

SEQ ID NO: 79222 - DNA, 25 bp, Probe Sequence
tgagtatatgagacttcctccacta

SEQ ID NO: 79223 - DNA, 25 bp, Probe Sequence
gagtatatgagacttcctccactac

SEQ ID NO: 79224 - DNA, 25 bp, Probe Sequence
gtatatgagacttcctccactacaa

SEQ ID NO: 79225 - DNA, 25 bp, Probe Sequence
ggaagatggtcagctatgaagtaat

SEQ ID NO: 79226 - DNA, 25 bp, Probe Sequence
tgggatggattactggattgttaaa

SEQ ID NO: 79227 - DNA, 25 bp, Probe Sequence
ctgggatggattactggattgttaa

SEQ ID NO: 79228 - DNA, 25 bp, Probe Sequence
tctgggatggattactggattgtta

SEQ ID NO: 79229 - DNA, 25 bp, Probe Sequence
tggtatattcacagactgtagactt

SEQ ID NO: 79230 - DNA, 25 bp, Probe Sequence
ttggtatattcacagactgtagact

SEQ ID NO: 79231 - DNA, 25 bp, Probe Sequence
tggaagatggtcagctatgaagtaa

SEQ ID NO: 79232 - DNA, 25 bp, Probe Sequence
gactaatcatgctgttctgcttgtg

SEQ ID NO: 79233 - DNA, 25 bp, Probe Sequence
tggtcagctatgaagtaatagagtt

SEQ ID NO: 79234 - DNA, 25 bp, Probe Sequence
ctgactaatcatgctgttctgcttg

SEQ ID NO: 79235 - DNA, 25 bp, Probe Sequence
atggtcagctatgaagtaatagagt

SEQ ID NO: 79236 - DNA, 25 bp, Probe Sequence
agatggtcagctatgaagtaataga

SEQ ID NO: 79237 - DNA, 25 bp, Probe Sequence
tttgagtatatgagacttcctccac

SEQ ID NO: 79238 - DNA, 25 bp, Probe Sequence
gatggtcagctatgaagtaatagag

SEQ ID NO: 79239 - DNA, 25 bp, Probe Sequence
attggtatattcacagactgtagac

SEQ ID NO: 79240 - DNA, 25 bp, Probe Sequence
gaagatggtcagctatgaagtaata

SEQ ID NO: 79241 - DNA, 25 bp, Probe Sequence
ctggaagatggtcagctatgaagta

SEQ ID NO: 79242 - DNA, 25 bp, Probe Sequence
ctctgggatggattactggattgtt

SEQ ID NO: 79243 - DNA, 25 bp, Probe Sequence
tgactaatcatgctgttctgcttgt

SEQ ID NO: 79244 - DNA, 25 bp, Probe Sequence
gatccataatcactccttctgtacc

SEQ ID NO: 79245 - DNA, 25 bp, Probe Sequence
aacctatacttactgacacactcaa

SEQ ID NO: 79246 - DNA, 25 bp, Probe Sequence
atccataatcactccttctgtacca

SEQ ID NO: 79247 - DNA, 25 bp, Probe Sequence
tccataatcactccttctgtaccac

SEQ ID NO: 79248 - DNA, 25 bp, Probe Sequence
ttggcagcagtcacataattaagtt

SEQ ID NO: 79249 - DNA, 25 bp, Probe Sequence
taagtgtagaagctcatgcctgtaa

SEQ ID NO: 79250 - DNA, 25 bp, Probe Sequence
ccataatcactccttctgtaccaca

SEQ ID NO: 79251 - DNA, 25 bp, Probe Sequence
ctaagtgtagaagctcatgcctgta

SEQ ID NO: 79252 - DNA, 25 bp, Probe Sequence
aagtgtagaagctcatgcctgtaat

SEQ ID NO: 79253 - DNA, 25 bp, Probe Sequence
atacttactgacacactcaaagaca

SEQ ID NO: 79254 - DNA, 25 bp, Probe Sequence
acctatacttactgacacactcaaa

SEQ ID NO: 79255 - DNA, 25 bp, Probe Sequence
aaacctatacttactgacacactca

SEQ ID NO: 79256 - DNA, 25 bp, Probe Sequence
agtgtagaagctcatgcctgtaatc

SEQ ID NO: 79257 - DNA, 25 bp, Probe Sequence
gtgtagtggaacaatcgtttatcat

SEQ ID NO: 79258 - DNA, 25 bp, Probe Sequence
tgatccataatcactccttctgtac

SEQ ID NO: 79259 - DNA, 25 bp, Probe Sequence
cctatacttactgacacactcaaag

SEQ ID NO: 79260 - DNA, 25 bp, Probe Sequence
tacttactgacacactcaaagacag

SEQ ID NO: 79261 - DNA, 25 bp, Probe Sequence
ggtgtagtggaacaatcgtttatca

SEQ ID NO: 79262 - DNA, 25 bp, Probe Sequence
aatataattagcagggcatggtgtc

SEQ ID NO: 79263 - DNA, 25 bp, Probe Sequence
tgtagtggaacaatcgtttatcatt

SEQ ID NO: 79264 - DNA, 25 bp, Probe Sequence
taatataattagcagggcatggtgt

SEQ ID NO: 79265 - DNA, 25 bp, Probe Sequence
ctttggcagcagtcacataattaag

SEQ ID NO: 79266 - DNA, 25 bp, Probe Sequence
tggcagcagtcacataattaagttt

SEQ ID NO: 79267 - DNA, 25 bp, Probe Sequence
tttggcagcagtcacataattaagt

SEQ ID NO: 79268 - DNA, 25 bp, Probe Sequence
caagtctgagtagttatgaatcgca

SEQ ID NO: 79269 - DNA, 25 bp, Probe Sequence
acaagtctgagtagttatgaatcgc

SEQ ID NO: 79270 - DNA, 25 bp, Probe Sequence
gacaagtctgagtagttatgaatcg

SEQ ID NO: 79271 - DNA, 25 bp, Probe Sequence
aagtctgagtagttatgaatcgcag

SEQ ID NO: 79272 - DNA, 25 bp, Probe Sequence
atctagcgataatgacgatgaggac

SEQ ID NO: 79273 - DNA, 25 bp, Probe Sequence
gatctagcgataatgacgatgagga

SEQ ID NO: 79274 - DNA, 25 bp, Probe Sequence
aattagatgacgacaagaaggatat

SEQ ID NO: 79275 - DNA, 25 bp, Probe Sequence
aaacccacataaacacttctcctta

SEQ ID NO: 79276 - DNA, 25 bp, Probe Sequence
taaacccacataaacacttctcctt

SEQ ID NO: 79277 - DNA, 25 bp, Probe Sequence
aacccacataaacacttctccttaa

SEQ ID NO: 79278 - DNA, 25 bp, Probe Sequence
ttaaacccacataaacacttctcct

SEQ ID NO: 79279 - DNA, 25 bp, Probe Sequence
cttaaacccacataaacacttctcc

SEQ ID NO: 79280 - DNA, 25 bp, Probe Sequence
gataatgacgatgaggacctgacac

SEQ ID NO: 79281 - DNA, 25 bp, Probe Sequence
ggacaagaaattagatgacgacaag

SEQ ID NO: 79282 - DNA, 25 bp, Probe Sequence
aggacaagaaattagatgacgacaa

SEQ ID NO: 79283 - DNA, 25 bp, Probe Sequence
ggtttcagcattcccaattatcaaa

SEQ ID NO: 79284 - DNA, 25 bp, Probe Sequence
agaaattagatgacgacaagaagga

SEQ ID NO: 79285 - DNA, 25 bp, Probe Sequence
acccacataaacacttctccttaac

SEQ ID NO: 79286 - DNA, 25 bp, Probe Sequence
gaggacaagaaattagatgacgaca

SEQ ID NO: 79287 - DNA, 25 bp, Probe Sequence
aagaggtttcagcattcccaattat

SEQ ID NO: 79288 - DNA, 25 bp, Probe Sequence
tagttatgaatcgcagacgcaagag

SEQ ID NO: 79289 - DNA, 25 bp, Probe Sequence
ccaagttgccacattgcttcattaa

SEQ ID NO: 79290 - DNA, 25 bp, Probe Sequence
agacaagtctgagtagttatgaatc

SEQ ID NO: 79291 - DNA, 25 bp, Probe Sequence
tcttaaacccacataaacacttctc

SEQ ID NO: 79292 - DNA, 25 bp, Probe Sequence
cagtgagtgatggtcagaatagaat

SEQ ID NO: 79293 - DNA, 25 bp, Probe Sequence
agtgagtgatggtcagaatagaatt

SEQ ID NO: 79294 - DNA, 25 bp, Probe Sequence
tcagtgagtgatggtcagaatagaa

SEQ ID NO: 79295 - DNA, 25 bp, Probe Sequence
atctcagtgagtgatggtcagaata

SEQ ID NO: 79296 - DNA, 25 bp, Probe Sequence
ctcagtgagtgatggtcagaataga

SEQ ID NO: 79297 - DNA, 25 bp, Probe Sequence
tctcagtgagtgatggtcagaatag

SEQ ID NO: 79298 - DNA, 25 bp, Probe Sequence
aatctcagtgagtgatggtcagaat

SEQ ID NO: 79299 - DNA, 25 bp, Probe Sequence
aagacactcattcatgtacttcatt

SEQ ID NO: 79300 - DNA, 25 bp, Probe Sequence
gcttgaatatagggagatggaaaga

SEQ ID NO: 79301 - DNA, 25 bp, Probe Sequence
agggagatggaaagatattagacaa

SEQ ID NO: 79302 - DNA, 25 bp, Probe Sequence
aaatagaattacccttcaacccagc

SEQ ID NO: 79303 - DNA, 25 bp, Probe Sequence
tctatgctcagagaattaccagaaa

SEQ ID NO: 79304 - DNA, 25 bp, Probe Sequence
agacactcattcatgtacttcatta

SEQ ID NO: 79305 - DNA, 25 bp, Probe Sequence
gggagatggaaagatattagacaaa

SEQ ID NO: 79306 - DNA, 25 bp, Probe Sequence
tagggagatggaaagatattagaca

SEQ ID NO: 79307 - DNA, 25 bp, Probe Sequence
caacatagtgaaactctgtctcttt

SEQ ID NO: 79308 - DNA, 25 bp, Probe Sequence
gcaacatagtgaaactctgtctctt

SEQ ID NO: 79309 - DNA, 25 bp, Probe Sequence
tagaattacccttcaacccagcaat

SEQ ID NO: 79310 - DNA, 25 bp, Probe Sequence
atagaattacccttcaacccagcaa

SEQ ID NO: 79311 - DNA, 25 bp, Probe Sequence
aatagaattacccttcaacccagca

SEQ ID NO: 79312 - DNA, 25 bp, Probe Sequence
gtacaattctgaagacactcattca

SEQ ID NO: 79313 - DNA, 25 bp, Probe Sequence
tctgaagacactcattcatgtactt

SEQ ID NO: 79314 - DNA, 25 bp, Probe Sequence
ttctgaagacactcattcatgtact

SEQ ID NO: 79315 - DNA, 25 bp, Probe Sequence
caattctgaagacactcattcatgt

SEQ ID NO: 79316 - DNA, 25 bp, Probe Sequence
attcaacacctctcacatcttacag

SEQ ID NO: 79317 - DNA, 25 bp, Probe Sequence
tattcaacacctctcacatcttaca

SEQ ID NO: 79318 - DNA, 25 bp, Probe Sequence
gattattcaacacctctcacatctt

SEQ ID NO: 79319 - DNA, 25 bp, Probe Sequence
ttattcaacacctctcacatcttac

SEQ ID NO: 79320 - DNA, 25 bp, Probe Sequence
aagattattcaacacctctcacatc

SEQ ID NO: 79321 - DNA, 25 bp, Probe Sequence
ttcaacacctctcacatcttacaga

SEQ ID NO: 79322 - DNA, 25 bp, Probe Sequence
aattgcttcactgtcttagaaccac

SEQ ID NO: 79323 - DNA, 25 bp, Probe Sequence
ccttgtggaagatatgattagactt

SEQ ID NO: 79324 - DNA, 25 bp, Probe Sequence
attattcaacacctctcacatctta

SEQ ID NO: 79325 - DNA, 25 bp, Probe Sequence
tagacttcgttagtaatgttcactt

SEQ ID NO: 79326 - DNA, 25 bp, Probe Sequence
ttagacttcgttagtaatgttcact

SEQ ID NO: 79327 - DNA, 25 bp, Probe Sequence
tgtagaactgtgtatttgattggga

SEQ ID NO: 79328 - DNA, 25 bp, Probe Sequence
gaactgtgtatttgattgggaatgg

SEQ ID NO: 79329 - DNA, 25 bp, Probe Sequence
ctgtagaactgtgtatttgattggg

SEQ ID NO: 79330 - DNA, 25 bp, Probe Sequence
agaactgtgtatttgattgggaatg

SEQ ID NO: 79331 - DNA, 25 bp, Probe Sequence
agggttgaagataaataaggtagca

SEQ ID NO: 79332 - DNA, 25 bp, Probe Sequence
cttagaaccacagcaagattcacct

SEQ ID NO: 79333 - DNA, 25 bp, Probe Sequence
aactgtgtatttgattgggaatggt

SEQ ID NO: 79334 - DNA, 25 bp, Probe Sequence
attgcttcactgtcttagaaccaca

SEQ ID NO: 79335 - DNA, 25 bp, Probe Sequence
acccttgtggaagatatgattagac

SEQ ID NO: 79336 - DNA, 25 bp, Probe Sequence
tgacccttgtggaagatatgattag

SEQ ID NO: 79337 - DNA, 25 bp, Probe Sequence
gtagaactgtgtatttgattgggaa

SEQ ID NO: 79338 - DNA, 25 bp, Probe Sequence
actgtagaactgtgtatttgattgg

SEQ ID NO: 79339 - DNA, 25 bp, Probe Sequence
cccttgtggaagatatgattagact

SEQ ID NO: 79340 - DNA, 25 bp, Probe Sequence
tatacacacacacacacacacgata

SEQ ID NO: 79341 - DNA, 25 bp, Probe Sequence
atatatacacacacacacacacacg

SEQ ID NO: 79342 - DNA, 25 bp, Probe Sequence
gaagagcaatgaatactgacatagc

SEQ ID NO: 79343 - DNA, 25 bp, Probe Sequence
acgaagagcaatgaatactgacata

SEQ ID NO: 79344 - DNA, 25 bp, Probe Sequence
cgaagagcaatgaatactgacatag

SEQ ID NO: 79345 - DNA, 25 bp, Probe Sequence
tatatacacacacacacacacacga

SEQ ID NO: 79346 - DNA, 25 bp, Probe Sequence
atacacacacacacacacacgatat

SEQ ID NO: 79347 - DNA, 25 bp, Probe Sequence
atatacacacacacacacacacgat

SEQ ID NO: 79348 - DNA, 25 bp, Probe Sequence
cacgaagagcaatgaatactgacat

SEQ ID NO: 79349 - DNA, 25 bp, Probe Sequence
acacacacacgatatgttacgatat

SEQ ID NO: 79350 - DNA, 25 bp, Probe Sequence
tgaatcacaagtagcagaagaggag

SEQ ID NO: 79351 - DNA, 25 bp, Probe Sequence
cacacacacacgatatgttacgata

SEQ ID NO: 79352 - DNA, 25 bp, Probe Sequence
tatatatacacacacacacacacac

SEQ ID NO: 79353 - DNA, 25 bp, Probe Sequence
cacacacacgatatgttacgatata

SEQ ID NO: 79354 - DNA, 25 bp, Probe Sequence
caggatgaagtataatggatctagc

SEQ ID NO: 79355 - DNA, 25 bp, Probe Sequence
tacacacacacacacacacgatatg

SEQ ID NO: 79356 - DNA, 25 bp, Probe Sequence
gcaatgaatactgacatagctgaac

SEQ ID NO: 79357 - DNA, 25 bp, Probe Sequence
gaatcacaagtagcagaagaggagg

SEQ ID NO: 79358 - DNA, 25 bp, Probe Sequence
acacacacgatatgttacgatataa

SEQ ID NO: 79359 - DNA, 25 bp, Probe Sequence
caatgaatactgacatagctgaact

SEQ ID NO: 79360 - DNA, 25 bp, Probe Sequence
gaagcctggaaagaatatcaaagaa

SEQ ID NO: 79361 - DNA, 25 bp, Probe Sequence
aatcacaagtagcagaagaggagga

SEQ ID NO: 79362 - DNA, 25 bp, Probe Sequence
ggaagcctggaaagaatatcaaaga

SEQ ID NO: 79363 - DNA, 25 bp, Probe Sequence
aagtataatggatctagcttgatgc

SEQ ID NO: 79364 - DNA, 25 bp, Probe Sequence
cctcatccaaactgtatcttccttt

SEQ ID NO: 79365 - DNA, 25 bp, Probe Sequence
tccaaactgtatcttcctttactgt

SEQ ID NO: 79366 - DNA, 25 bp, Probe Sequence
ccaatcccttctccacttactataa

SEQ ID NO: 79367 - DNA, 25 bp, Probe Sequence
cttctccacttactataatggttgg

SEQ ID NO: 79368 - DNA, 25 bp, Probe Sequence
ccttctccacttactataatggttg

SEQ ID NO: 79369 - DNA, 25 bp, Probe Sequence
gccaatcccttctccacttactata

SEQ ID NO: 79370 - DNA, 25 bp, Probe Sequence
atccaaactgtatcttcctttactg

SEQ ID NO: 79371 - DNA, 25 bp, Probe Sequence
catccaaactgtatcttcctttact

SEQ ID NO: 79372 - DNA, 25 bp, Probe Sequence
tcatccaaactgtatcttcctttac

SEQ ID NO: 79373 - DNA, 25 bp, Probe Sequence
ccaaactgtatcttcctttactgtt

SEQ ID NO: 79374 - DNA, 25 bp, Probe Sequence
ctcatccaaactgtatcttccttta

SEQ ID NO: 79375 - DNA, 25 bp, Probe Sequence
tgtttatatcttcaccctgtaatgg

SEQ ID NO: 79376 - DNA, 25 bp, Probe Sequence
tatcatttatggaggctctgtgact

SEQ ID NO: 79377 - DNA, 25 bp, Probe Sequence
gtatcatttatggaggctctgtgac

SEQ ID NO: 79378 - DNA, 25 bp, Probe Sequence
ccacttactataatggttggaacta

SEQ ID NO: 79379 - DNA, 25 bp, Probe Sequence
cctttactgtttatatcttcaccct

SEQ ID NO: 79380 - DNA, 25 bp, Probe Sequence
tcctttactgtttatatcttcaccc

SEQ ID NO: 79381 - DNA, 25 bp, Probe Sequence
aatcccttctccacttactataatg

SEQ ID NO: 79382 - DNA, 25 bp, Probe Sequence
caatcccttctccacttactataat

SEQ ID NO: 79383 - DNA, 25 bp, Probe Sequence
tttactgtttatatcttcaccctgt

SEQ ID NO: 79384 - DNA, 25 bp, Probe Sequence
cacttactataatggttggaactaa

SEQ ID NO: 79385 - DNA, 25 bp, Probe Sequence
gcctcatccaaactgtatcttcctt

SEQ ID NO: 79386 - DNA, 25 bp, Probe Sequence
tcccttctccacttactataatggt

SEQ ID NO: 79387 - DNA, 25 bp, Probe Sequence
tatatcttcaccctgtaatggttgg

SEQ ID NO: 79388 - DNA, 25 bp, Probe Sequence
tgagcagatattacaagaagacaca

SEQ ID NO: 79389 - DNA, 25 bp, Probe Sequence
gagcagatattacaagaagacacaa

SEQ ID NO: 79390 - DNA, 25 bp, Probe Sequence
atgagcagatattacaagaagacac

SEQ ID NO: 79391 - DNA, 25 bp, Probe Sequence
cagatattacaagaagacacaatgc

SEQ ID NO: 79392 - DNA, 25 bp, Probe Sequence
gcagatattacaagaagacacaatg

SEQ ID NO: 79393 - DNA, 25 bp, Probe Sequence
agcagatattacaagaagacacaat

SEQ ID NO: 79394 - DNA, 25 bp, Probe Sequence
ccatgagcagatattacaagaagac

SEQ ID NO: 79395 - DNA, 25 bp, Probe Sequence
tccatgagcagatattacaagaaga

SEQ ID NO: 79396 - DNA, 25 bp, Probe Sequence
catgagcagatattacaagaagaca

SEQ ID NO: 79397 - DNA, 25 bp, Probe Sequence
agaagatcaagttgagtaccatgaa

SEQ ID NO: 79398 - DNA, 25 bp, Probe Sequence
aagaagatcaagttgagtaccatga

SEQ ID NO: 79399 - DNA, 25 bp, Probe Sequence
aagatcaagttgagtaccatgaagg

SEQ ID NO: 79400 - DNA, 25 bp, Probe Sequence
gaagatcaagttgagtaccatgaag

SEQ ID NO: 79401 - DNA, 25 bp, Probe Sequence
atccatgagcagatattacaagaag

SEQ ID NO: 79402 - DNA, 25 bp, Probe Sequence
aattatctgacattatccatgagca

SEQ ID NO: 79403 - DNA, 25 bp, Probe Sequence
ctgacattatccatgagcagatatt

SEQ ID NO: 79404 - DNA, 25 bp, Probe Sequence
attatctgacattatccatgagcag

SEQ ID NO: 79405 - DNA, 25 bp, Probe Sequence
tgcaattagtggtacatcaagtgac

SEQ ID NO: 79406 - DNA, 25 bp, Probe Sequence
gtgcaattagtggtacatcaagtga

SEQ ID NO: 79407 - DNA, 25 bp, Probe Sequence
gaattatctgacattatccatgagc

SEQ ID NO: 79408 - DNA, 25 bp, Probe Sequence
agatattacaagaagacacaatgca

SEQ ID NO: 79409 - DNA, 25 bp, Probe Sequence
acggataacaatgtcacaacaggaa

SEQ ID NO: 79410 - DNA, 25 bp, Probe Sequence
gttccaacagggtgcttacatattt

SEQ ID NO: 79411 - DNA, 25 bp, Probe Sequence
aattagtggtacatcaagtgaccga

SEQ ID NO: 79412 - DNA, 25 bp, Probe Sequence
agagagagtgtatgtgtgtgtgtag

SEQ ID NO: 79413 - DNA, 25 bp, Probe Sequence
gagagagagtgtatgtgtgtgtgta

SEQ ID NO: 79414 - DNA, 25 bp, Probe Sequence
gagagagagagtgtatgtgtgtgtg

SEQ ID NO: 79415 - DNA, 25 bp, Probe Sequence
gagagagtgtatgtgtgtgtgtagc

SEQ ID NO: 79416 - DNA, 25 bp, Probe Sequence
agagagagagtgtatgtgtgtgtgt

SEQ ID NO: 79417 - DNA, 25 bp, Probe Sequence
aatgtagattgtaacagcctccttg

SEQ ID NO: 79418 - DNA, 25 bp, Probe Sequence
gagagtgtatgtgtgtgtgtagcag

SEQ ID NO: 79419 - DNA, 25 bp, Probe Sequence
agagagtgtatgtgtgtgtgtagca

SEQ ID NO: 79420 - DNA, 25 bp, Probe Sequence
tataaatggcacctatactggcttt

SEQ ID NO: 79421 - DNA, 25 bp, Probe Sequence
gtgctgtcacactatatattgatgt

SEQ ID NO: 79422 - DNA, 25 bp, Probe Sequence
agagtgtatgtgtgtgtgtagcagt

SEQ ID NO: 79423 - DNA, 25 bp, Probe Sequence
actgattgatccaggacatccatag

SEQ ID NO: 79424 - DNA, 25 bp, Probe Sequence
agggaatggatgtataaattgtggt

SEQ ID NO: 79425 - DNA, 25 bp, Probe Sequence
atgtagattgtaacagcctccttgg

SEQ ID NO: 79426 - DNA, 25 bp, Probe Sequence
gagtgtatgtgtgtgtgtagcagtt

SEQ ID NO: 79427 - DNA, 25 bp, Probe Sequence
gtagattgtaacagcctccttggac

SEQ ID NO: 79428 - DNA, 25 bp, Probe Sequence
gattgtaacagcctccttggactac

SEQ ID NO: 79429 - DNA, 25 bp, Probe Sequence
aagggaatggatgtataaattgtgg

SEQ ID NO: 79430 - DNA, 25 bp, Probe Sequence
ctccaaacttctctaggtcaaatga

SEQ ID NO: 79431 - DNA, 25 bp, Probe Sequence
aactccaaacttctctaggtcaaat

SEQ ID NO: 79432 - DNA, 25 bp, Probe Sequence
aaactccaaacttctctaggtcaaa

SEQ ID NO: 79433 - DNA, 25 bp, Probe Sequence
cactgattgatccaggacatccata

SEQ ID NO: 79434 - DNA, 25 bp, Probe Sequence
actccaaacttctctaggtcaaatg

SEQ ID NO: 79435 - DNA, 25 bp, Probe Sequence
agattgtaacagcctccttggacta

SEQ ID NO: 79436 - DNA, 25 bp, Probe Sequence
cttgactcaggctgtagtgttgtaa

SEQ ID NO: 79437 - DNA, 25 bp, Probe Sequence
ttgactcaggctgtagtgttgtaac

SEQ ID NO: 79438 - DNA, 25 bp, Probe Sequence
ttaacagaatgatttgagatgggat

SEQ ID NO: 79439 - DNA, 25 bp, Probe Sequence
tggaatggtggttaacagaatgatt

SEQ ID NO: 79440 - DNA, 25 bp, Probe Sequence
ttggaatggtggttaacagaatgat

SEQ ID NO: 79441 - DNA, 25 bp, Probe Sequence
taacagaatgatttgagatgggatc

SEQ ID NO: 79442 - DNA, 25 bp, Probe Sequence
aaatcaatccctggttgtagacaag

SEQ ID NO: 79443 - DNA, 25 bp, Probe Sequence
aaagagaaacaaggcagaggaagaa

SEQ ID NO: 79444 - DNA, 25 bp, Probe Sequence
tacatgggaataactgttcgtttga

SEQ ID NO: 79445 - DNA, 25 bp, Probe Sequence
atacatgggaataactgttcgtttg

SEQ ID NO: 79446 - DNA, 25 bp, Probe Sequence
gatacatgggaataactgttcgttt

SEQ ID NO: 79447 - DNA, 25 bp, Probe Sequence
aagagaaacaaggcagaggaagaag

SEQ ID NO: 79448 - DNA, 25 bp, Probe Sequence
gttggaatggtggttaacagaatga

SEQ ID NO: 79449 - DNA, 25 bp, Probe Sequence
ggatacatgggaataactgttcgtt

SEQ ID NO: 79450 - DNA, 25 bp, Probe Sequence
aaggcagaggaagaaggtgtttaag

SEQ ID NO: 79451 - DNA, 25 bp, Probe Sequence
atcaatccctggttgtagacaagtt

SEQ ID NO: 79452 - DNA, 25 bp, Probe Sequence
aatcaatccctggttgtagacaagt

SEQ ID NO: 79453 - DNA, 25 bp, Probe Sequence
caatgttatgcaccacttcaatttc

SEQ ID NO: 79454 - DNA, 25 bp, Probe Sequence
aatgttatgcaccacttcaatttcc

SEQ ID NO: 79455 - DNA, 25 bp, Probe Sequence
ttgacccacccatctccttcatata

SEQ ID NO: 79456 - DNA, 25 bp, Probe Sequence
acatgggaataactgttcgtttgag

SEQ ID NO: 79457 - DNA, 25 bp, Probe Sequence
cacggatacatgggaataactgttc

SEQ ID NO: 79458 - DNA, 25 bp, Probe Sequence
caaggcagaggaagaaggtgtttaa

SEQ ID NO: 79459 - DNA, 25 bp, Probe Sequence
catgggaataactgttcgtttgagg

SEQ ID NO: 79460 - DNA, 25 bp, Probe Sequence
ttaacccagacctcaataaagacac

SEQ ID NO: 79461 - DNA, 25 bp, Probe Sequence
tttaacccagacctcaataaagaca

SEQ ID NO: 79462 - DNA, 25 bp, Probe Sequence
taacccagacctcaataaagacacc

SEQ ID NO: 79463 - DNA, 25 bp, Probe Sequence
cctgactgcttgcctcatatttaag

SEQ ID NO: 79464 - DNA, 25 bp, Probe Sequence
ccctgactgcttgcctcatatttaa

SEQ ID NO: 79465 - DNA, 25 bp, Probe Sequence
aacccagacctcaataaagacacct

SEQ ID NO: 79466 - DNA, 25 bp, Probe Sequence
acccagacctcaataaagacacctt

SEQ ID NO: 79467 - DNA, 25 bp, Probe Sequence
tacgatgccaaggtgaagaagtgag

SEQ ID NO: 79468 - DNA, 25 bp, Probe Sequence
ctacgatgccaaggtgaagaagtga

SEQ ID NO: 79469 - DNA, 25 bp, Probe Sequence
gcctaattttaacccagacctcaat

SEQ ID NO: 79470 - DNA, 25 bp, Probe Sequence
ttttaacccagacctcaataaagac

SEQ ID NO: 79471 - DNA, 25 bp, Probe Sequence
cccagacctcaataaagacaccttt

SEQ ID NO: 79472 - DNA, 25 bp, Probe Sequence
cctaattttaacccagacctcaata

SEQ ID NO: 79473 - DNA, 25 bp, Probe Sequence
caagtgcctaattttaacccagacc

SEQ ID NO: 79474 - DNA, 25 bp, Probe Sequence
ccaagtgcctaattttaacccagac

SEQ ID NO: 79475 - DNA, 25 bp, Probe Sequence
tgcctaattttaacccagacctcaa

SEQ ID NO: 79476 - DNA, 25 bp, Probe Sequence
aagtgcctaattttaacccagacct

SEQ ID NO: 79477 - DNA, 25 bp, Probe Sequence
attttaacccagacctcaataaaga

SEQ ID NO: 79478 - DNA, 25 bp, Probe Sequence
agtgcctaattttaacccagacctc

SEQ ID NO: 79479 - DNA, 25 bp, Probe Sequence
gtgcctaattttaacccagacctca

SEQ ID NO: 79480 - DNA, 25 bp, Probe Sequence
aattttaacccagacctcaataaag

SEQ ID NO: 79481 - DNA, 25 bp, Probe Sequence
agacctcaataaagacaccttttgt

SEQ ID NO: 79482 - DNA, 25 bp, Probe Sequence
cagacctcaataaagacaccttttg

SEQ ID NO: 79483 - DNA, 25 bp, Probe Sequence
cctcaataaagacaccttttgtacc

SEQ ID NO: 79484 - DNA, 25 bp, Probe Sequence
agctaatcagaagttctcagatgaa

SEQ ID NO: 79485 - DNA, 25 bp, Probe Sequence
tatgcgtaatgaagtcttatgggaa

SEQ ID NO: 79486 - DNA, 25 bp, Probe Sequence
ttatgcgtaatgaagtcttatggga

SEQ ID NO: 79487 - DNA, 25 bp, Probe Sequence
gagctaatcagaagttctcagatga

SEQ ID NO: 79488 - DNA, 25 bp, Probe Sequence
agagctaatcagaagttctcagatg

SEQ ID NO: 79489 - DNA, 25 bp, Probe Sequence
tttatgcgtaatgaagtcttatggg

SEQ ID NO: 79490 - DNA, 25 bp, Probe Sequence
atgcgtaatgaagtcttatgggaac

SEQ ID NO: 79491 - DNA, 25 bp, Probe Sequence
taatgaagtcttatgggaactgagg

SEQ ID NO: 79492 - DNA, 25 bp, Probe Sequence
cgtaatgaagtcttatgggaactga

SEQ ID NO: 79493 - DNA, 25 bp, Probe Sequence
gtaatgaagtcttatgggaactgag

SEQ ID NO: 79494 - DNA, 25 bp, Probe Sequence
ctttatgcgtaatgaagtcttatgg

SEQ ID NO: 79495 - DNA, 25 bp, Probe Sequence
atccagtggtcatcatttcctttct

SEQ ID NO: 79496 - DNA, 25 bp, Probe Sequence
gctaatcagaagttctcagatgaaa

SEQ ID NO: 79497 - DNA, 25 bp, Probe Sequence
gagaagggcaattaaactcctaaga

SEQ ID NO: 79498 - DNA, 25 bp, Probe Sequence
agagaagggcaattaaactcctaag

SEQ ID NO: 79499 - DNA, 25 bp, Probe Sequence
gagagaagggcaattaaactcctaa

SEQ ID NO: 79500 - DNA, 25 bp, Probe Sequence
gcgtaatgaagtcttatgggaactg

SEQ ID NO: 79501 - DNA, 25 bp, Probe Sequence
agaagggcaattaaactcctaagat

SEQ ID NO: 79502 - DNA, 25 bp, Probe Sequence
gatccagtggtcatcatttcctttc

SEQ ID NO: 79503 - DNA, 25 bp, Probe Sequence
aagtcttatgggaactgagggaaag

SEQ ID NO: 79504 - DNA, 25 bp, Probe Sequence
gaagtcttatgggaactgagggaaa

SEQ ID NO: 79505 - DNA, 25 bp, Probe Sequence
aatgaagtcttatgggaactgaggg

SEQ ID NO: 79506 - DNA, 25 bp, Probe Sequence
tgcgtaatgaagtcttatgggaact

SEQ ID NO: 79507 - DNA, 25 bp, Probe Sequence
cttatgggaactgagggaaagatgg

SEQ ID NO: 79508 - DNA, 25 bp, Probe Sequence
ctctttgtaatatcggatgggtgtg

SEQ ID NO: 79509 - DNA, 25 bp, Probe Sequence
gatgctctttgtaatatcggatggg

SEQ ID NO: 79510 - DNA, 25 bp, Probe Sequence
ggatgctctttgtaatatcggatgg

SEQ ID NO: 79511 - DNA, 25 bp, Probe Sequence
gggatgctctttgtaatatcggatg

SEQ ID NO: 79512 - DNA, 25 bp, Probe Sequence
agggatgctctttgtaatatcggat

SEQ ID NO: 79513 - DNA, 25 bp, Probe Sequence
atgctctttgtaatatcggatgggt

SEQ ID NO: 79514 - DNA, 25 bp, Probe Sequence
cagggatgctctttgtaatatcgga

SEQ ID NO: 79515 - DNA, 25 bp, Probe Sequence
tctttgtaatatcggatgggtgtgg

SEQ ID NO: 79516 - DNA, 25 bp, Probe Sequence
gctctttgtaatatcggatgggtgt

SEQ ID NO: 79517 - DNA, 25 bp, Probe Sequence
tgctctttgtaatatcggatgggtg

SEQ ID NO: 79518 - DNA, 25 bp, Probe Sequence
ccagggatgctctttgtaatatcgg

SEQ ID NO: 79519 - DNA, 25 bp, Probe Sequence
ctttgtaatatcggatgggtgtggg

SEQ ID NO: 79520 - DNA, 25 bp, Probe Sequence
cccagggatgctctttgtaatatcg

SEQ ID NO: 79521 - DNA, 25 bp, Probe Sequence
tttgtaatatcggatgggtgtggga

SEQ ID NO: 79522 - DNA, 25 bp, Probe Sequence
atgaataaattccttcaacgccaaa

SEQ ID NO: 79523 - DNA, 25 bp, Probe Sequence
catgaataaattccttcaacgccaa

SEQ ID NO: 79524 - DNA, 25 bp, Probe Sequence
ttgtaatatcggatgggtgtgggag

SEQ ID NO: 79525 - DNA, 25 bp, Probe Sequence
tcccagggatgctctttgtaatatc

SEQ ID NO: 79526 - DNA, 25 bp, Probe Sequence
gtcccagggatgctctttgtaatat

SEQ ID NO: 79527 - DNA, 25 bp, Probe Sequence
accctcagtcttctcatgaataaat

SEQ ID NO: 79528 - DNA, 25 bp, Probe Sequence
gaccctcagtcttctcatgaataaa

SEQ ID NO: 79529 - DNA, 25 bp, Probe Sequence
ctgcactttaaccctagataggtgg

SEQ ID NO: 79530 - DNA, 25 bp, Probe Sequence
ccctcagtcttctcatgaataaatt

SEQ ID NO: 79531 - DNA, 25 bp, Probe Sequence
gtaatatcggatgggtgtgggagtg

SEQ ID NO: 79532 - DNA, 25 bp, Probe Sequence
ctagcatcctgacatcactgttatt

SEQ ID NO: 79533 - DNA, 25 bp, Probe Sequence
tctagcatcctgacatcactgttat

SEQ ID NO: 79534 - DNA, 25 bp, Probe Sequence
ttctagcatcctgacatcactgtta

SEQ ID NO: 79535 - DNA, 25 bp, Probe Sequence
gaaagaaagggaaaggaaaggaaag

SEQ ID NO: 79536 - DNA, 25 bp, Probe Sequence
gaaagaaagaaagggaaaggaaagg

SEQ ID NO: 79537 - DNA, 25 bp, Probe Sequence
agagaaagaaagaaagggaaaggaa

SEQ ID NO: 79538 - DNA, 25 bp, Probe Sequence
aagagaaagaaagaaagggaaagga

SEQ ID NO: 79539 - DNA, 25 bp, Probe Sequence
aggaaagagaaagaaagaaagggaa

SEQ ID NO: 79540 - DNA, 25 bp, Probe Sequence
aaggaaagagaaagaaagaaaggga

SEQ ID NO: 79541 - DNA, 25 bp, Probe Sequence
aaggaaggaaggaaagagaaagaaa

SEQ ID NO: 79542 - DNA, 25 bp, Probe Sequence
agagagagtgagagagaaagaaaga

SEQ ID NO: 79543 - DNA, 25 bp, Probe Sequence
gagagagagtgagagagaaagaaag

SEQ ID NO: 79544 - DNA, 25 bp, Probe Sequence
agagagagagtgagagagaaagaaa

SEQ ID NO: 79545 - DNA, 25 bp, Probe Sequence
aaagagagagagagtgagagagaaa

SEQ ID NO: 79546 - DNA, 25 bp, Probe Sequence
aaagaaagagagagagagtgagaga

SEQ ID NO: 79547 - DNA, 25 bp, Probe Sequence
gaaagaaagagagagagagtgagag

SEQ ID NO: 79548 - DNA, 25 bp, Probe Sequence
agaaagaaagagagagagagtgaga

SEQ ID NO: 79549 - DNA, 25 bp, Probe Sequence
gaaggaaagagaaagaaagaaaggg

SEQ ID NO: 79550 - DNA, 25 bp, Probe Sequence
ggaaggaaagagaaagaaagaaagg

SEQ ID NO: 79551 - DNA, 25 bp, Probe Sequence
aggaaggaaggaaagagaaagaaag

SEQ ID NO: 79552 - DNA, 25 bp, Probe Sequence
agaaagggaaaggaaaggaaagaaa

SEQ ID NO: 79553 - DNA, 25 bp, Probe Sequence
aagaaagggaaaggaaaggaaagaa

SEQ ID NO: 79554 - DNA, 25 bp, Probe Sequence
aaagaaagggaaaggaaaggaaaga

SEQ ID NO: 79555 - DNA, 25 bp, Probe Sequence
agaaagaaagggaaaggaaaggaaa

SEQ ID NO: 79556 - DNA, 25 bp, Probe Sequence
attctgtaagagattgagcctgaac

SEQ ID NO: 79557 - DNA, 25 bp, Probe Sequence
cattctgtaagagattgagcctgaa

SEQ ID NO: 79558 - DNA, 25 bp, Probe Sequence
gatgtcacagttgaagtatctcctt

SEQ ID NO: 79559 - DNA, 25 bp, Probe Sequence
atgatgtcacagttgaagtatctcc

SEQ ID NO: 79560 - DNA, 25 bp, Probe Sequence
gatgatgtcacagttgaagtatctc

SEQ ID NO: 79561 - DNA, 25 bp, Probe Sequence
ttctgtaagagattgagcctgaact

SEQ ID NO: 79562 - DNA, 25 bp, Probe Sequence
tgagcctgaactctcttagtcataa

SEQ ID NO: 79563 - DNA, 25 bp, Probe Sequence
ttgagcctgaactctcttagtcata

SEQ ID NO: 79564 - DNA, 25 bp, Probe Sequence
cctagatgatgtcacagttgaagta

SEQ ID NO: 79565 - DNA, 25 bp, Probe Sequence
tgatgtcacagttgaagtatctcct

SEQ ID NO: 79566 - DNA, 25 bp, Probe Sequence
attgagcctgaactctcttagtcat

SEQ ID NO: 79567 - DNA, 25 bp, Probe Sequence
agattgagcctgaactctcttagtc

SEQ ID NO: 79568 - DNA, 25 bp, Probe Sequence
acattctgtaagagattgagcctga

SEQ ID NO: 79569 - DNA, 25 bp, Probe Sequence
tagatgatgtcacagttgaagtatc

SEQ ID NO: 79570 - DNA, 25 bp, Probe Sequence
gattgagcctgaactctcttagtca

SEQ ID NO: 79571 - DNA, 25 bp, Probe Sequence
tctgtaagagattgagcctgaactc

SEQ ID NO: 79572 - DNA, 25 bp, Probe Sequence
aatatcttaactgtagccaaggatc

SEQ ID NO: 79573 - DNA, 25 bp, Probe Sequence
ctagatgatgtcacagttgaagtat

SEQ ID NO: 79574 - DNA, 25 bp, Probe Sequence
gaacagtacacaagactctggacta

SEQ ID NO: 79575 - DNA, 25 bp, Probe Sequence
cctttcacttcgtatccaacaaatt

SEQ ID NO: 79576 - DNA, 25 bp, Probe Sequence
acctttcacttcgtatccaacaaat

SEQ ID NO: 79577 - DNA, 25 bp, Probe Sequence
tgtagaagaaagttcagatagcgaa

SEQ ID NO: 79578 - DNA, 25 bp, Probe Sequence
aacagtacacaagactctggactac

SEQ ID NO: 79579 - DNA, 25 bp, Probe Sequence
tacattctgtaagagattgagcctg

SEQ ID NO: 79580 - DNA, 25 bp, Probe Sequence
catcctaatcagtcagcagtaatca

SEQ ID NO: 79581 - DNA, 25 bp, Probe Sequence
gagaagatgctgtgtattgttgaag

SEQ ID NO: 79582 - DNA, 25 bp, Probe Sequence
tcctaatcagtcagcagtaatcaac

SEQ ID NO: 79583 - DNA, 25 bp, Probe Sequence
atcagtcagcagtaatcaacatcaa

SEQ ID NO: 79584 - DNA, 25 bp, Probe Sequence
aatcagtcagcagtaatcaacatca

SEQ ID NO: 79585 - DNA, 25 bp, Probe Sequence
atcctaatcagtcagcagtaatcaa

SEQ ID NO: 79586 - DNA, 25 bp, Probe Sequence
cctaatcagtcagcagtaatcaaca

SEQ ID NO: 79587 - DNA, 25 bp, Probe Sequence
cagtaatcaacatcaaggcaagaac

SEQ ID NO: 79588 - DNA, 25 bp, Probe Sequence
gaagatgctgtgtattgttgaagtg

SEQ ID NO: 79589 - DNA, 25 bp, Probe Sequence
agaagatgctgtgtattgttgaagt

SEQ ID NO: 79590 - DNA, 25 bp, Probe Sequence
ccatcctaatcagtcagcagtaatc

SEQ ID NO: 79591 - DNA, 25 bp, Probe Sequence
taccatcctaatcagtcagcagtaa

SEQ ID NO: 79592 - DNA, 25 bp, Probe Sequence
aagatgctgtgtattgttgaagtga

SEQ ID NO: 79593 - DNA, 25 bp, Probe Sequence
agagaagtagaattagaagtggacg

SEQ ID NO: 79594 - DNA, 25 bp, Probe Sequence
gaattagaagtggacgcctgaatat

SEQ ID NO: 79595 - DNA, 25 bp, Probe Sequence
tcagtcagcagtaatcaacatcaag

SEQ ID NO: 79596 - DNA, 25 bp, Probe Sequence
taatcagtcagcagtaatcaacatc

SEQ ID NO: 79597 - DNA, 25 bp, Probe Sequence
ctaatcagtcagcagtaatcaacat

SEQ ID NO: 79598 - DNA, 25 bp, Probe Sequence
ttatgtgttaatggctcagatgacc

SEQ ID NO: 79599 - DNA, 25 bp, Probe Sequence
ctaccatcctaatcagtcagcagta

SEQ ID NO: 79600 - DNA, 25 bp, Probe Sequence
gcaagagaagtagaattagaagtgg

SEQ ID NO: 79601 - DNA, 25 bp, Probe Sequence
cgattatgtgttaatggctcagatg

SEQ ID NO: 79602 - DNA, 25 bp, Probe Sequence
acgattatgtgttaatggctcagat

SEQ ID NO: 79603 - DNA, 25 bp, Probe Sequence
aattagaagtggacgcctgaatatg

SEQ ID NO: 79604 - DNA, 25 bp, Probe Sequence
taacacctagaagaatcagaagcac

SEQ ID NO: 79605 - DNA, 25 bp, Probe Sequence
ttaacacctagaagaatcagaagca

SEQ ID NO: 79606 - DNA, 25 bp, Probe Sequence
ttcactgtacctcctctgttcaatc

SEQ ID NO: 79607 - DNA, 25 bp, Probe Sequence
cttcactgtacctcctctgttcaat

SEQ ID NO: 79608 - DNA, 25 bp, Probe Sequence
cactgtacctcctctgttcaatcat

SEQ ID NO: 79609 - DNA, 25 bp, Probe Sequence
actgtacctcctctgttcaatcatg

SEQ ID NO: 79610 - DNA, 25 bp, Probe Sequence
aacacctagaagaatcagaagcacc

SEQ ID NO: 79611 - DNA, 25 bp, Probe Sequence
gtcctacagaaatgcctatgctata

SEQ ID NO: 79612 - DNA, 25 bp, Probe Sequence
taaactggaatctcaaagggtatgt

SEQ ID NO: 79613 - DNA, 25 bp, Probe Sequence
atggcattaaactggaatctcaaag

SEQ ID NO: 79614 - DNA, 25 bp, Probe Sequence
aaatgtttgtgatagacggctaagt

SEQ ID NO: 79615 - DNA, 25 bp, Probe Sequence
aataaagcagtaaaggatgatggca

SEQ ID NO: 79616 - DNA, 25 bp, Probe Sequence
gatggcattaaactggaatctcaaa

SEQ ID NO: 79617 - DNA, 25 bp, Probe Sequence
taataaagcagtaaaggatgatggc

SEQ ID NO: 79618 - DNA, 25 bp, Probe Sequence
aaactggaatctcaaagggtatgtg

SEQ ID NO: 79619 - DNA, 25 bp, Probe Sequence
gatgatggcattaaactggaatctc

SEQ ID NO: 79620 - DNA, 25 bp, Probe Sequence
taaaggatgatggcattaaactgga

SEQ ID NO: 79621 - DNA, 25 bp, Probe Sequence
gtaaaggatgatggcattaaactgg

SEQ ID NO: 79622 - DNA, 25 bp, Probe Sequence
ataaagcagtaaaggatgatggcat

SEQ ID NO: 79623 - DNA, 25 bp, Probe Sequence
aaagcagtaaaggatgatggcatta

SEQ ID NO: 79624 - DNA, 25 bp, Probe Sequence
taaagcagtaaaggatgatggcatt

SEQ ID NO: 79625 - DNA, 25 bp, Probe Sequence
cgaaattagcatcagatagccatta

SEQ ID NO: 79626 - DNA, 25 bp, Probe Sequence
aaggatgatggcattaaactggaat

SEQ ID NO: 79627 - DNA, 25 bp, Probe Sequence
agcagtaaaggatgatggcattaaa

SEQ ID NO: 79628 - DNA, 25 bp, Probe Sequence
acgtataagtcatcgctataccatg

SEQ ID NO: 79629 - DNA, 25 bp, Probe Sequence
ctaaaccaaaccactttcaccgcta

SEQ ID NO: 79630 - DNA, 25 bp, Probe Sequence
taaaccaaaccactttcaccgctac

SEQ ID NO: 79631 - DNA, 25 bp, Probe Sequence
ttacgtataagtcatcgctatacca

SEQ ID NO: 79632 - DNA, 25 bp, Probe Sequence
agaaatttacgtataagtcatcgct

SEQ ID NO: 79633 - DNA, 25 bp, Probe Sequence
tacgtataagtcatcgctataccat

SEQ ID NO: 79634 - DNA, 25 bp, Probe Sequence
cgtctaaaccaaaccactttcaccg

SEQ ID NO: 79635 - DNA, 25 bp, Probe Sequence
acgtctaaaccaaaccactttcacc

SEQ ID NO: 79636 - DNA, 25 bp, Probe Sequence
gtctaaaccaaaccactttcaccgc

SEQ ID NO: 79637 - DNA, 25 bp, Probe Sequence
gaaatttacgtataagtcatcgcta

SEQ ID NO: 79638 - DNA, 25 bp, Probe Sequence
tctaaaccaaaccactttcaccgct

SEQ ID NO: 79639 - DNA, 25 bp, Probe Sequence
aaatttacgtataagtcatcgctat

SEQ ID NO: 79640 - DNA, 25 bp, Probe Sequence
cgtataagtcatcgctataccatgg

SEQ ID NO: 79641 - DNA, 25 bp, Probe Sequence
tttacgtataagtcatcgctatacc

SEQ ID NO: 79642 - DNA, 25 bp, Probe Sequence
aatttacgtataagtcatcgctata

SEQ ID NO: 79643 - DNA, 25 bp, Probe Sequence
atttacgtataagtcatcgctatac

SEQ ID NO: 79644 - DNA, 25 bp, Probe Sequence
gatgcgtttggcagtacatcaatgg

SEQ ID NO: 79645 - DNA, 25 bp, Probe Sequence
tcttaacaccttaatgtagcacctt

SEQ ID NO: 79646 - DNA, 25 bp, Probe Sequence
cttaacaccttaatgtagcaccttc

SEQ ID NO: 79647 - DNA, 25 bp, Probe Sequence
ctcttaacaccttaatgtagcacct

SEQ ID NO: 79648 - DNA, 25 bp, Probe Sequence
actcttaacaccttaatgtagcacc

SEQ ID NO: 79649 - DNA, 25 bp, Probe Sequence
gactcttaacaccttaatgtagcac

SEQ ID NO: 79650 - DNA, 25 bp, Probe Sequence
cgactcttaacaccttaatgtagca

SEQ ID NO: 79651 - DNA, 25 bp, Probe Sequence
ttaacaccttaatgtagcaccttcc

SEQ ID NO: 79652 - DNA, 25 bp, Probe Sequence
accttaatgtagcaccttccaactt

SEQ ID NO: 79653 - DNA, 25 bp, Probe Sequence
ggcgactcttaacaccttaatgtag

SEQ ID NO: 79654 - DNA, 25 bp, Probe Sequence
taacaccttaatgtagcaccttcca

SEQ ID NO: 79655 - DNA, 25 bp, Probe Sequence
tggcgactcttaacaccttaatgta

SEQ ID NO: 79656 - DNA, 25 bp, Probe Sequence
gcgactcttaacaccttaatgtagc

SEQ ID NO: 79657 - DNA, 25 bp, Probe Sequence
caccttaatgtagcaccttccaact

SEQ ID NO: 79658 - DNA, 25 bp, Probe Sequence
atggcgactcttaacaccttaatgt

SEQ ID NO: 79659 - DNA, 25 bp, Probe Sequence
gctattagtgacctatgacagtttg

SEQ ID NO: 79660 - DNA, 25 bp, Probe Sequence
aacactcttaaattctcacatcagc

SEQ ID NO: 79661 - DNA, 25 bp, Probe Sequence
aacaccttaatgtagcaccttccaa

SEQ ID NO: 79662 - DNA, 25 bp, Probe Sequence
catggcgactcttaacaccttaatg

SEQ ID NO: 79663 - DNA, 25 bp, Probe Sequence
actcttaaattctcacatcagccac

SEQ ID NO: 79664 - DNA, 25 bp, Probe Sequence
cactcttaaattctcacatcagcca

SEQ ID NO: 79665 - DNA, 25 bp, Probe Sequence
acactcttaaattctcacatcagcc

SEQ ID NO: 79666 - DNA, 25 bp, Probe Sequence
ccttaatgtagcaccttccaacttt

SEQ ID NO: 79667 - DNA, 25 bp, Probe Sequence
ctcttaaattctcacatcagccacc

SEQ ID NO: 79668 - DNA, 25 bp, Probe Sequence
acaccttaatgtagcaccttccaac

SEQ ID NO: 79669 - DNA, 25 bp, Probe Sequence
gaacttcactgtctctgctcaataa

SEQ ID NO: 79670 - DNA, 25 bp, Probe Sequence
ccaggactaattcttaatcggcatt

SEQ ID NO: 79671 - DNA, 25 bp, Probe Sequence
aactgcttattcattctggacactg

SEQ ID NO: 79672 - DNA, 25 bp, Probe Sequence
attccaggactaattcttaatcggc

SEQ ID NO: 79673 - DNA, 25 bp, Probe Sequence
gaactgcttattcattctggacact

SEQ ID NO: 79674 - DNA, 25 bp, Probe Sequence
ggtcacctagatactcatattctcg

SEQ ID NO: 79675 - DNA, 25 bp, Probe Sequence
caggactaattcttaatcggcatta

SEQ ID NO: 79676 - DNA, 25 bp, Probe Sequence
tccaggactaattcttaatcggcat

SEQ ID NO: 79677 - DNA, 25 bp, Probe Sequence
acattggtcacctagatactcatat

SEQ ID NO: 79678 - DNA, 25 bp, Probe Sequence
atacattggtcacctagatactcat

SEQ ID NO: 79679 - DNA, 25 bp, Probe Sequence
ttccaggactaattcttaatcggca

SEQ ID NO: 79680 - DNA, 25 bp, Probe Sequence
tggtcacctagatactcatattctc

SEQ ID NO: 79681 - DNA, 25 bp, Probe Sequence
aataacagcataaggaacttcactg

SEQ ID NO: 79682 - DNA, 25 bp, Probe Sequence
ataaggaacttcactgtctctgctc

SEQ ID NO: 79683 - DNA, 25 bp, Probe Sequence
ggaacttcactgtctctgctcaata

SEQ ID NO: 79684 - DNA, 25 bp, Probe Sequence
tacattggtcacctagatactcata

SEQ ID NO: 79685 - DNA, 25 bp, Probe Sequence
tatacattggtcacctagatactca

SEQ ID NO: 79686 - DNA, 25 bp, Probe Sequence
tattccaggactaattcttaatcgg

SEQ ID NO: 79687 - DNA, 25 bp, Probe Sequence
cataaggaacttcactgtctctgct

SEQ ID NO: 79688 - DNA, 25 bp, Probe Sequence
agcataaggaacttcactgtctctg

SEQ ID NO: 79689 - DNA, 25 bp, Probe Sequence
ttggtcacctagatactcatattct

SEQ ID NO: 79690 - DNA, 25 bp, Probe Sequence
aggactaattcttaatcggcattat

SEQ ID NO: 79691 - DNA, 25 bp, Probe Sequence
cattggtcacctagatactcatatt

SEQ ID NO: 79692 - DNA, 25 bp, Probe Sequence
ctatacattggtcacctagatactc

SEQ ID NO: 79693 - DNA, 25 bp, Probe Sequence
caagtcgttactgtgtccattattg

SEQ ID NO: 79694 - DNA, 25 bp, Probe Sequence
acaagtcgttactgtgtccattatt

SEQ ID NO: 79695 - DNA, 25 bp, Probe Sequence
aacaagtcgttactgtgtccattat

SEQ ID NO: 79696 - DNA, 25 bp, Probe Sequence
gaacaagtcgttactgtgtccatta

SEQ ID NO: 79697 - DNA, 25 bp, Probe Sequence
attggaatggaattatcactactgt

SEQ ID NO: 79698 - DNA, 25 bp, Probe Sequence
ttccagttaagagactcagttgctt

SEQ ID NO: 79699 - DNA, 25 bp, Probe Sequence
ttggaatggaattatcactactgta

SEQ ID NO: 79700 - DNA, 25 bp, Probe Sequence
aagtcgttactgtgtccattattgg

SEQ ID NO: 79701 - DNA, 25 bp, Probe Sequence
gcatcattcaagcatatcgtgtaaa

SEQ ID NO: 79702 - DNA, 25 bp, Probe Sequence
tccagttaagagactcagttgcttg

SEQ ID NO: 79703 - DNA, 25 bp, Probe Sequence
tggaatggaattatcactactgtat

SEQ ID NO: 79704 - DNA, 25 bp, Probe Sequence
atggttccctcagtattacatcttg

SEQ ID NO: 79705 - DNA, 25 bp, Probe Sequence
attataggttggttaaagtgatggc

SEQ ID NO: 79706 - DNA, 25 bp, Probe Sequence
atttatctgtccaatgtgccataac

SEQ ID NO: 79707 - DNA, 25 bp, Probe Sequence
gtgccataacagatttaggtttctt

SEQ ID NO: 79708 - DNA, 25 bp, Probe Sequence
atgacagtgtaactctacagtctca

SEQ ID NO: 79709 - DNA, 25 bp, Probe Sequence
gtctatgacagtgtaactctacagt

SEQ ID NO: 79710 - DNA, 25 bp, Probe Sequence
ctatggttccctcagtattacatct

SEQ ID NO: 79711 - DNA, 25 bp, Probe Sequence
tctatggttccctcagtattacatc

SEQ ID NO: 79712 - DNA, 25 bp, Probe Sequence
attctatggttccctcagtattaca

SEQ ID NO: 79713 - DNA, 25 bp, Probe Sequence
tgacagtgtaactctacagtctcaa

SEQ ID NO: 79714 - DNA, 25 bp, Probe Sequence
tatgacagtgtaactctacagtctc

SEQ ID NO: 79715 - DNA, 25 bp, Probe Sequence
ctatgacagtgtaactctacagtct

SEQ ID NO: 79716 - DNA, 25 bp, Probe Sequence
tctatgacagtgtaactctacagtc

SEQ ID NO: 79717 - DNA, 25 bp, Probe Sequence
gtacggtgggagtctatataagcag

SEQ ID NO: 79718 - DNA, 25 bp, Probe Sequence
cgtgtacggtgggagtctatataag

SEQ ID NO: 79719 - DNA, 25 bp, Probe Sequence
tacggtgggagtctatataagcaga

SEQ ID NO: 79720 - DNA, 25 bp, Probe Sequence
gtgtacggtgggagtctatataagc

SEQ ID NO: 79721 - DNA, 25 bp, Probe Sequence
tgtacggtgggagtctatataagca

SEQ ID NO: 79722 - DNA, 25 bp, Probe Sequence
acggtgggagtctatataagcagag

SEQ ID NO: 79723 - DNA, 25 bp, Probe Sequence
gcgtgtacggtgggagtctatataa

SEQ ID NO: 79724 - DNA, 25 bp, Probe Sequence
cggtgggagtctatataagcagagc

SEQ ID NO: 79725 - DNA, 25 bp, Probe Sequence
ggtgggagtctatataagcagagct

SEQ ID NO: 79726 - DNA, 25 bp, Probe Sequence
ggcgtgtacggtgggagtctatata

SEQ ID NO: 79727 - DNA, 25 bp, Probe Sequence
ggagtctatataagcagagctcgtt

SEQ ID NO: 79728 - DNA, 25 bp, Probe Sequence
gagtctatataagcagagctcgttt

SEQ ID NO: 79729 - DNA, 25 bp, Probe Sequence
agtctatataagcagagctcgttta

SEQ ID NO: 79730 - DNA, 25 bp, Probe Sequence
gtgggagtctatataagcagagctc

SEQ ID NO: 79731 - DNA, 25 bp, Probe Sequence
gggagtctatataagcagagctcgt

SEQ ID NO: 79732 - DNA, 25 bp, Probe Sequence
tgggagtctatataagcagagctcg

SEQ ID NO: 79733 - DNA, 25 bp, Probe Sequence
gcagttggactagaagtgtattgaa

SEQ ID NO: 79734 - DNA, 25 bp, Probe Sequence
aagcagttggactagaagtgtattg

SEQ ID NO: 79735 - DNA, 25 bp, Probe Sequence
agcagttggactagaagtgtattga

SEQ ID NO: 79736 - DNA, 25 bp, Probe Sequence
cctatattgagcttcagtggagaat

SEQ ID NO: 79737 - DNA, 25 bp, Probe Sequence
aagtgtattgaaatggtaaagcctg

SEQ ID NO: 79738 - DNA, 25 bp, Probe Sequence
gaagtgtattgaaatggtaaagcct

SEQ ID NO: 79739 - DNA, 25 bp, Probe Sequence
agaagtgtattgaaatggtaaagcc

SEQ ID NO: 79740 - DNA, 25 bp, Probe Sequence
atagttaaggcttgtgttatttcgc

SEQ ID NO: 79741 - DNA, 25 bp, Probe Sequence
aatcctatattgagcttcagtggag

SEQ ID NO: 79742 - DNA, 25 bp, Probe Sequence
atcctatattgagcttcagtggaga

SEQ ID NO: 79743 - DNA, 25 bp, Probe Sequence
tcctatattgagcttcagtggagaa

SEQ ID NO: 79744 - DNA, 25 bp, Probe Sequence
agtgtattgaaatggtaaagcctgc

SEQ ID NO: 79745 - DNA, 25 bp, Probe Sequence
aaagcagttggactagaagtgtatt

SEQ ID NO: 79746 - DNA, 25 bp, Probe Sequence
tggactagaagtgtattgaaatggt

SEQ ID NO: 79747 - DNA, 25 bp, Probe Sequence
gaaagcagttggactagaagtgtat

SEQ ID NO: 79748 - DNA, 25 bp, Probe Sequence
ataatcctatattgagcttcagtgg

SEQ ID NO: 79749 - DNA, 25 bp, Probe Sequence
taatcctatattgagcttcagtgga

SEQ ID NO: 79750 - DNA, 25 bp, Probe Sequence
ttggactagaagtgtattgaaatgg

SEQ ID NO: 79751 - DNA, 25 bp, Probe Sequence
ctatattgagcttcagtggagaata

SEQ ID NO: 79752 - DNA, 25 bp, Probe Sequence
cagttggactagaagtgtattgaaa

SEQ ID NO: 79753 - DNA, 25 bp, Probe Sequence
aatagttaaggcttgtgttatttcg

SEQ ID NO: 79754 - DNA, 25 bp, Probe Sequence
agtgtgattacagtgcagagaagaa

SEQ ID NO: 79755 - DNA, 25 bp, Probe Sequence
agaagaactcattgccttcatcaat

SEQ ID NO: 79756 - DNA, 25 bp, Probe Sequence
tagaagtgtattgaaatggtaaagc

SEQ ID NO: 79757 - DNA, 25 bp, Probe Sequence
tctggacaggataatgagtaaggat

SEQ ID NO: 79758 - DNA, 25 bp, Probe Sequence
atctggacaggataatgagtaagga

SEQ ID NO: 79759 - DNA, 25 bp, Probe Sequence
aatctggacaggataatgagtaagg

SEQ ID NO: 79760 - DNA, 25 bp, Probe Sequence
ctggacaggataatgagtaaggata

SEQ ID NO: 79761 - DNA, 25 bp, Probe Sequence
agaatctggacaggataatgagtaa

SEQ ID NO: 79762 - DNA, 25 bp, Probe Sequence
agtgaatagaatctggacaggataa

SEQ ID NO: 79763 - DNA, 25 bp, Probe Sequence
gagattcaaggatggttcaacagac

SEQ ID NO: 79764 - DNA, 25 bp, Probe Sequence
agagattcaaggatggttcaacaga

SEQ ID NO: 79765 - DNA, 25 bp, Probe Sequence
cagagattcaaggatggttcaacag

SEQ ID NO: 79766 - DNA, 25 bp, Probe Sequence
tggacaggataatgagtaaggatat

SEQ ID NO: 79767 - DNA, 25 bp, Probe Sequence
ctaaggacaagagccagacaagtat

SEQ ID NO: 79768 - DNA, 25 bp, Probe Sequence
gaatctggacaggataatgagtaag

SEQ ID NO: 79769 - DNA, 25 bp, Probe Sequence
atagaatctggacaggataatgagt

SEQ ID NO: 79770 - DNA, 25 bp, Probe Sequence
atagtgaatagaatctggacaggat

SEQ ID NO: 79771 - DNA, 25 bp, Probe Sequence
taaggacaagagccagacaagtatg

SEQ ID NO: 79772 - DNA, 25 bp, Probe Sequence
caaggatggttcaacagacacaatt

SEQ ID NO: 79773 - DNA, 25 bp, Probe Sequence
gattcaaggatggttcaacagacac

SEQ ID NO: 79774 - DNA, 25 bp, Probe Sequence
agattcaaggatggttcaacagaca

SEQ ID NO: 79775 - DNA, 25 bp, Probe Sequence
tatagtgaatagaatctggacagga

SEQ ID NO: 79776 - DNA, 25 bp, Probe Sequence
tagaatctggacaggataatgagta

SEQ ID NO: 79777 - DNA, 25 bp, Probe Sequence
tagtgaatagaatctggacaggata

SEQ ID NO: 79778 - DNA, 25 bp, Probe Sequence
tgaatagaatctggacaggataatg

SEQ ID NO: 79779 - DNA, 25 bp, Probe Sequence
gtgaatagaatctggacaggataat

SEQ ID NO: 79780 - DNA, 25 bp, Probe Sequence
aatagaatctggacaggataatgag

SEQ ID NO: 79781 - DNA, 25 bp, Probe Sequence
tattcccacttgtcgtagtcatttc

SEQ ID NO: 79782 - DNA, 25 bp, Probe Sequence
gtattcccacttgtcgtagtcattt

SEQ ID NO: 79783 - DNA, 25 bp, Probe Sequence
tagtcatttcggttctgatcttgtc

SEQ ID NO: 79784 - DNA, 25 bp, Probe Sequence
gtagtcatttcggttctgatcttgt

SEQ ID NO: 79785 - DNA, 25 bp, Probe Sequence
ttaatgtgtaagtaaagcacctcct

SEQ ID NO: 79786 - DNA, 25 bp, Probe Sequence
gttaatgtgtaagtaaagcacctcc

SEQ ID NO: 79787 - DNA, 25 bp, Probe Sequence
catttcggttctgatcttgtcaaac

SEQ ID NO: 79788 - DNA, 25 bp, Probe Sequence
tcatttcggttctgatcttgtcaaa

SEQ ID NO: 79789 - DNA, 25 bp, Probe Sequence
cgttaatgtgtaagtaaagcacctc

SEQ ID NO: 79790 - DNA, 25 bp, Probe Sequence
tcgctggacgttaatgtgtaagtaa

SEQ ID NO: 79791 - DNA, 25 bp, Probe Sequence
ttcgctggacgttaatgtgtaagta

SEQ ID NO: 79792 - DNA, 25 bp, Probe Sequence
ctgagaggttcttgaagatgtttat

SEQ ID NO: 79793 - DNA, 25 bp, Probe Sequence
taatgtgtaagtaaagcacctcctg

SEQ ID NO: 79794 - DNA, 25 bp, Probe Sequence
cctgagaggttcttgaagatgttta

SEQ ID NO: 79795 - DNA, 25 bp, Probe Sequence
gtttctgagtgtagtgtggtaggac

SEQ ID NO: 79796 - DNA, 25 bp, Probe Sequence
gtcatttcggttctgatcttgtcaa

SEQ ID NO: 79797 - DNA, 25 bp, Probe Sequence
tgagaggttcttgaagatgtttatt

SEQ ID NO: 79798 - DNA, 25 bp, Probe Sequence
cgtagtcatttcggttctgatcttg

SEQ ID NO: 79799 - DNA, 25 bp, Probe Sequence
tcgtagtcatttcggttctgatctt

SEQ ID NO: 79800 - DNA, 25 bp, Probe Sequence
ttgtcgtagtcatttcggttctgat

SEQ ID NO: 79801 - DNA, 25 bp, Probe Sequence
ggtattcccacttgtcgtagtcatt

SEQ ID NO: 79802 - DNA, 25 bp, Probe Sequence
gtaagtaaagcacctcctggtattc

SEQ ID NO: 79803 - DNA, 25 bp, Probe Sequence
ctggacgttaatgtgtaagtaaagc

SEQ ID NO: 79804 - DNA, 25 bp, Probe Sequence
gctggacgttaatgtgtaagtaaag

SEQ ID NO: 79805 - DNA, 25 bp, Probe Sequence
tattcccacttgtcgtagtcatttc

SEQ ID NO: 79806 - DNA, 25 bp, Probe Sequence
gtattcccacttgtcgtagtcattt

SEQ ID NO: 79807 - DNA, 25 bp, Probe Sequence
tagtcatttcggttctgatcttgtc

SEQ ID NO: 79808 - DNA, 25 bp, Probe Sequence
gtagtcatttcggttctgatcttgt

SEQ ID NO: 79809 - DNA, 25 bp, Probe Sequence
ttaatgtgtaagtaaagcacctcct

SEQ ID NO: 79810 - DNA, 25 bp, Probe Sequence
gttaatgtgtaagtaaagcacctcc

SEQ ID NO: 79811 - DNA, 25 bp, Probe Sequence
catttcggttctgatcttgtcaaac

SEQ ID NO: 79812 - DNA, 25 bp, Probe Sequence
tcatttcggttctgatcttgtcaaa

SEQ ID NO: 79813 - DNA, 25 bp, Probe Sequence
cgttaatgtgtaagtaaagcacctc

SEQ ID NO: 79814 - DNA, 25 bp, Probe Sequence
tcgctggacgttaatgtgtaagtaa

SEQ ID NO: 79815 - DNA, 25 bp, Probe Sequence
ttcgctggacgttaatgtgtaagta

SEQ ID NO: 79816 - DNA, 25 bp, Probe Sequence
ctgagaggttcttgaagatgtttat

SEQ ID NO: 79817 - DNA, 25 bp, Probe Sequence
taatgtgtaagtaaagcacctcctg

SEQ ID NO: 79818 - DNA, 25 bp, Probe Sequence
cctgagaggttcttgaagatgttta

SEQ ID NO: 79819 - DNA, 25 bp, Probe Sequence
gtttctgagtgtagtgtggtaggac

SEQ ID NO: 79820 - DNA, 25 bp, Probe Sequence
gtcatttcggttctgatcttgtcaa

SEQ ID NO: 79821 - DNA, 25 bp, Probe Sequence
tgagaggttcttgaagatgtttatt

SEQ ID NO: 79822 - DNA, 25 bp, Probe Sequence
cgtagtcatttcggttctgatcttg

SEQ ID NO: 79823 - DNA, 25 bp, Probe Sequence
tcgtagtcatttcggttctgatctt

SEQ ID NO: 79824 - DNA, 25 bp, Probe Sequence
ttgtcgtagtcatttcggttctgat

SEQ ID NO: 79825 - DNA, 25 bp, Probe Sequence
ggtattcccacttgtcgtagtcatt

SEQ ID NO: 79826 - DNA, 25 bp, Probe Sequence
gtaagtaaagcacctcctggtattc

SEQ ID NO: 79827 - DNA, 25 bp, Probe Sequence
ctggacgttaatgtgtaagtaaagc

SEQ ID NO: 79828 - DNA, 25 bp, Probe Sequence
gctggacgttaatgtgtaagtaaag

SEQ ID NO: 79829 - DNA, 25 bp, Probe Sequence
gttcagtgaatcctcctaatctgtt

SEQ ID NO: 79830 - DNA, 25 bp, Probe Sequence
tgaaaggtagtatgtagagcagaaa

SEQ ID NO: 79831 - DNA, 25 bp, Probe Sequence
ttgaaaggtagtatgtagagcagaa

SEQ ID NO: 79832 - DNA, 25 bp, Probe Sequence
catttgctactgtgtctggttaatt

SEQ ID NO: 79833 - DNA, 25 bp, Probe Sequence
ggttcagtgaatcctcctaatctgt

SEQ ID NO: 79834 - DNA, 25 bp, Probe Sequence
aggttcagtgaatcctcctaatctg

SEQ ID NO: 79835 - DNA, 25 bp, Probe Sequence
caggttcagtgaatcctcctaatct

SEQ ID NO: 79836 - DNA, 25 bp, Probe Sequence
attgaaaggtagtatgtagagcaga

SEQ ID NO: 79837 - DNA, 25 bp, Probe Sequence
aaagcaagttctataaacaagggtg

SEQ ID NO: 79838 - DNA, 25 bp, Probe Sequence
atttgctactgtgtctggttaattt

SEQ ID NO: 79839 - DNA, 25 bp, Probe Sequence
gaaagcaagttctataaacaagggt

SEQ ID NO: 79840 - DNA, 25 bp, Probe Sequence
tcattgaaaggtagtatgtagagca

SEQ ID NO: 79841 - DNA, 25 bp, Probe Sequence
cattgaaaggtagtatgtagagcag

SEQ ID NO: 79842 - DNA, 25 bp, Probe Sequence
aaggtagtatgtagagcagaaatct

SEQ ID NO: 79843 - DNA, 25 bp, Probe Sequence
aaaggtagtatgtagagcagaaatc

SEQ ID NO: 79844 - DNA, 25 bp, Probe Sequence
gaaaggtagtatgtagagcagaaat

SEQ ID NO: 79845 - DNA, 25 bp, Probe Sequence
aagcaagttctataaacaagggtgt

SEQ ID NO: 79846 - DNA, 25 bp, Probe Sequence
ccaggttcagtgaatcctcctaatc

SEQ ID NO: 79847 - DNA, 25 bp, Probe Sequence
ctcattgaaaggtagtatgtagagc

SEQ ID NO: 79848 - DNA, 25 bp, Probe Sequence
gtgttaaagtgctgaggtgaaagag

SEQ ID NO: 79849 - DNA, 25 bp, Probe Sequence
gagtcctcattgaaaggtagtatgt

SEQ ID NO: 79850 - DNA, 25 bp, Probe Sequence
ttgagaggctgaggtaggagaattg

SEQ ID NO: 79851 - DNA, 25 bp, Probe Sequence
ttaaatagagtggttggcagagtcc

SEQ ID NO: 79852 - DNA, 25 bp, Probe Sequence
agagtcctcattgaaaggtagtatg

SEQ ID NO: 79853 - DNA, 25 bp, Probe Sequence
taacttatgtggactgtaaatgttt

SEQ ID NO: 79854 - DNA, 25 bp, Probe Sequence
ttaacttatgtggactgtaaatgtt

SEQ ID NO: 79855 - DNA, 25 bp, Probe Sequence
attaacttatgtggactgtaaatgt

SEQ ID NO: 79856 - DNA, 25 bp, Probe Sequence
tttccttcctttaatcttatgcaaa

SEQ ID NO: 79857 - DNA, 25 bp, Probe Sequence
acttttccttcctttaatcttatgc

SEQ ID NO: 79858 - DNA, 25 bp, Probe Sequence
gagaaaattaacttatgtggactgt

SEQ ID NO: 79859 - DNA, 25 bp, Probe Sequence
aacttatgtggactgtaaatgtttt

SEQ ID NO: 79860 - DNA, 25 bp, Probe Sequence
tgtggactgtaaatgttttatttgt

SEQ ID NO: 79861 - DNA, 25 bp, Probe Sequence
aattaacttatgtggactgtaaatg

SEQ ID NO: 79862 - DNA, 25 bp, Probe Sequence
agagaaaattaacttatgtggactg

SEQ ID NO: 79863 - DNA, 25 bp, Probe Sequence
acttatgtggactgtaaatgtttta

SEQ ID NO: 79864 - DNA, 25 bp, Probe Sequence
cttttccttcctttaatcttatgca

SEQ ID NO: 79865 - DNA, 25 bp, Probe Sequence
aagagaaaattaacttatgtggact

SEQ ID NO: 79866 - DNA, 25 bp, Probe Sequence
atgtggactgtaaatgttttatttg

SEQ ID NO: 79867 - DNA, 25 bp, Probe Sequence
agaaaattaacttatgtggactgta

SEQ ID NO: 79868 - DNA, 25 bp, Probe Sequence
ttttccttcctttaatcttatgcaa

SEQ ID NO: 79869 - DNA, 25 bp, Probe Sequence
ttccttcctttaatcttatgcaaaa

SEQ ID NO: 79870 - DNA, 25 bp, Probe Sequence
gtggactgtaaatgttttatttgta

SEQ ID NO: 79871 - DNA, 25 bp, Probe Sequence
aaagagaaaattaacttatgtggac

SEQ ID NO: 79872 - DNA, 25 bp, Probe Sequence
gcaaaagagaaaattaacttatgtg

SEQ ID NO: 79873 - DNA, 25 bp, Probe Sequence
gaaaattaacttatgtggactgtaa

SEQ ID NO: 79874 - DNA, 25 bp, Probe Sequence
tccttcctttaatcttatgcaaaag

SEQ ID NO: 79875 - DNA, 25 bp, Probe Sequence
cttatgtggactgtaaatgttttat

SEQ ID NO: 79876 - DNA, 25 bp, Probe Sequence
ccttcctttaatcttatgcaaaaga

SEQ ID NO: 79877 - DNA, 25 bp, Probe Sequence
acaggataacagctatgaccattag

SEQ ID NO: 79878 - DNA, 25 bp, Probe Sequence
cacaggataacagctatgaccatta

SEQ ID NO: 79879 - DNA, 25 bp, Probe Sequence
caggataacagctatgaccattagg

SEQ ID NO: 79880 - DNA, 25 bp, Probe Sequence
ggataacaatgttcacacaggataa

SEQ ID NO: 79881 - DNA, 25 bp, Probe Sequence
cggataacaatgttcacacaggata

SEQ ID NO: 79882 - DNA, 25 bp, Probe Sequence
gaagatttataggtagaggcgacaa

SEQ ID NO: 79883 - DNA, 25 bp, Probe Sequence
agatttataggtagaggcgacaaac

SEQ ID NO: 79884 - DNA, 25 bp, Probe Sequence
aagatttataggtagaggcgacaaa

SEQ ID NO: 79885 - DNA, 25 bp, Probe Sequence
acacaggataacagctatgaccatt

SEQ ID NO: 79886 - DNA, 25 bp, Probe Sequence
gataacaatgttcacacaggataac

SEQ ID NO: 79887 - DNA, 25 bp, Probe Sequence
agtgggaagatttataggtagaggc

SEQ ID NO: 79888 - DNA, 25 bp, Probe Sequence
gctaccaatatcatacgggactttc

SEQ ID NO: 79889 - DNA, 25 bp, Probe Sequence
aggataacagctatgaccattaggc

SEQ ID NO: 79890 - DNA, 25 bp, Probe Sequence
gttcacacaggataacagctatgac

SEQ ID NO: 79891 - DNA, 25 bp, Probe Sequence
ggaagatttataggtagaggcgaca

SEQ ID NO: 79892 - DNA, 25 bp, Probe Sequence
tgctaccaatatcatacgggacttt

SEQ ID NO: 79893 - DNA, 25 bp, Probe Sequence
tagtgggaagatttataggtagagg

SEQ ID NO: 79894 - DNA, 25 bp, Probe Sequence
cacacaggataacagctatgaccat

SEQ ID NO: 79895 - DNA, 25 bp, Probe Sequence
atagctggttgtccaagatagaatc

SEQ ID NO: 79896 - DNA, 25 bp, Probe Sequence
gatagctggttgtccaagatagaat

SEQ ID NO: 79897 - DNA, 25 bp, Probe Sequence
gggaagatttataggtagaggcgac

SEQ ID NO: 79898 - DNA, 25 bp, Probe Sequence
acggataacaatgttcacacaggat

SEQ ID NO: 79899 - DNA, 25 bp, Probe Sequence
ttgctaccaatatcatacgggactt

SEQ ID NO: 79900 - DNA, 25 bp, Probe Sequence
tttgctaccaatatcatacgggact

SEQ ID NO: 79901 - DNA, 25 bp, Probe Sequence
caagagaactgtgagaataaggact

SEQ ID NO: 79902 - DNA, 25 bp, Probe Sequence
aggatacggagattcacaatacaag

SEQ ID NO: 79903 - DNA, 25 bp, Probe Sequence
gaggatacggagattcacaatacaa

SEQ ID NO: 79904 - DNA, 25 bp, Probe Sequence
atacggagattcacaatacaaggtc

SEQ ID NO: 79905 - DNA, 25 bp, Probe Sequence
gatacggagattcacaatacaaggt

SEQ ID NO: 79906 - DNA, 25 bp, Probe Sequence
atggaggatacggagattcacaata

SEQ ID NO: 79907 - DNA, 25 bp, Probe Sequence
ggatacggagattcacaatacaagg

SEQ ID NO: 79908 - DNA, 25 bp, Probe Sequence
aagagaactgtgagaataaggactt

SEQ ID NO: 79909 - DNA, 25 bp, Probe Sequence
tcaagagaactgtgagaataaggac

SEQ ID NO: 79910 - DNA, 25 bp, Probe Sequence
tacggagattcacaatacaaggtca

SEQ ID NO: 79911 - DNA, 25 bp, Probe Sequence
atcaagagaactgtgagaataagga

SEQ ID NO: 79912 - DNA, 25 bp, Probe Sequence
ggaggatacggagattcacaataca

SEQ ID NO: 79913 - DNA, 25 bp, Probe Sequence
tggaggatacggagattcacaatac

SEQ ID NO: 79914 - DNA, 25 bp, Probe Sequence
gatggaggatacggagattcacaat

SEQ ID NO: 79915 - DNA, 25 bp, Probe Sequence
aatcaagagaactgtgagaataagg

SEQ ID NO: 79916 - DNA, 25 bp, Probe Sequence
tagctccgtaatgaatgttgtctta

SEQ ID NO: 79917 - DNA, 25 bp, Probe Sequence
agctccgtaatgaatgttgtcttaa

SEQ ID NO: 79918 - DNA, 25 bp, Probe Sequence
acggagattcacaatacaaggtcag

SEQ ID NO: 79919 - DNA, 25 bp, Probe Sequence
ctagctccgtaatgaatgttgtctt

SEQ ID NO: 79920 - DNA, 25 bp, Probe Sequence
ctaaataagggcacaaatgggaaat

SEQ ID NO: 79921 - DNA, 25 bp, Probe Sequence
tctaaataagggcacaaatgggaaa

SEQ ID NO: 79922 - DNA, 25 bp, Probe Sequence
agaactgtgagaataaggactttga

SEQ ID NO: 79923 - DNA, 25 bp, Probe Sequence
gctccgtaatgaatgttgtcttaaa

SEQ ID NO: 79924 - DNA, 25 bp, Probe Sequence
gagaactgtgagaataaggactttg

SEQ ID NO: 79925 - DNA, 25 bp, Probe Sequence
ctcttgcttccttcttaacctctac

SEQ ID NO: 79926 - DNA, 25 bp, Probe Sequence
tctcttgcttccttcttaacctcta

SEQ ID NO: 79927 - DNA, 25 bp, Probe Sequence
cttccttcttaacctctaccactta

SEQ ID NO: 79928 - DNA, 25 bp, Probe Sequence
tgttcttgtggtagtgaataagtct

SEQ ID NO: 79929 - DNA, 25 bp, Probe Sequence
gttcttgtggtagtgaataagtctc

SEQ ID NO: 79930 - DNA, 25 bp, Probe Sequence
ttgttcttgtggtagtgaataagtc

SEQ ID NO: 79931 - DNA, 25 bp, Probe Sequence
ggtagtgaataagtctcatcaacga

SEQ ID NO: 79932 - DNA, 25 bp, Probe Sequence
tggtagtgaataagtctcatcaacg

SEQ ID NO: 79933 - DNA, 25 bp, Probe Sequence
tgtggtagtgaataagtctcatcaa

SEQ ID NO: 79934 - DNA, 25 bp, Probe Sequence
ttgtggtagtgaataagtctcatca

SEQ ID NO: 79935 - DNA, 25 bp, Probe Sequence
ttcttgtggtagtgaataagtctca

SEQ ID NO: 79936 - DNA, 25 bp, Probe Sequence
gtggtagtgaataagtctcatcaac

SEQ ID NO: 79937 - DNA, 25 bp, Probe Sequence
tcttgtggtagtgaataagtctcat

SEQ ID NO: 79938 - DNA, 25 bp, Probe Sequence
ttccttcttaacctctaccacttaa

SEQ ID NO: 79939 - DNA, 25 bp, Probe Sequence
cttgtggtagtgaataagtctcatc

SEQ ID NO: 79940 - DNA, 25 bp, Probe Sequence
tcttgcttccttcttaacctctacc

SEQ ID NO: 79941 - DNA, 25 bp, Probe Sequence
attgttcttgtggtagtgaataagt

SEQ ID NO: 79942 - DNA, 25 bp, Probe Sequence
gcttccttcttaacctctaccactt

SEQ ID NO: 79943 - DNA, 25 bp, Probe Sequence
cttgcttccttcttaacctctacca

SEQ ID NO: 79944 - DNA, 25 bp, Probe Sequence
gtctcttgcttccttcttaacctct

SEQ ID NO: 79945 - DNA, 25 bp, Probe Sequence
tgaataagtctcatcaacgatctga

SEQ ID NO: 79946 - DNA, 25 bp, Probe Sequence
gtgaataagtctcatcaacgatctg

SEQ ID NO: 79947 - DNA, 25 bp, Probe Sequence
agtgaataagtctcatcaacgatct

SEQ ID NO: 79948 - DNA, 25 bp, Probe Sequence
gtagtgaataagtctcatcaacgat

SEQ ID NO: 79949 - DNA, 25 bp, Probe Sequence
gaggtggtagtagacagtgatattg

SEQ ID NO: 79950 - DNA, 25 bp, Probe Sequence
aggtggtagtagacagtgatattga

SEQ ID NO: 79951 - DNA, 25 bp, Probe Sequence
ggtggtagtagacagtgatattgat

SEQ ID NO: 79952 - DNA, 25 bp, Probe Sequence
tggtggtgctaatgttaatggtatt

SEQ ID NO: 79953 - DNA, 25 bp, Probe Sequence
ttggtggtgctaatgttaatggtat

SEQ ID NO: 79954 - DNA, 25 bp, Probe Sequence
ggaggtggtagtagacagtgatatt

SEQ ID NO: 79955 - DNA, 25 bp, Probe Sequence
gaagaaggcactgttaccatagaag

SEQ ID NO: 79956 - DNA, 25 bp, Probe Sequence
agaaggcactgttaccatagaagat

SEQ ID NO: 79957 - DNA, 25 bp, Probe Sequence
aagaaggcactgttaccatagaaga

SEQ ID NO: 79958 - DNA, 25 bp, Probe Sequence
gtggtagtagacagtgatattgatg

SEQ ID NO: 79959 - DNA, 25 bp, Probe Sequence
gaaggcactgttaccatagaagatg

SEQ ID NO: 79960 - DNA, 25 bp, Probe Sequence
tggtagtagacagtgatattgatga

SEQ ID NO: 79961 - DNA, 25 bp, Probe Sequence
ggtggtgctaatgttaatggtatta

SEQ ID NO: 79962 - DNA, 25 bp, Probe Sequence
aaggcactgttaccatagaagatga

SEQ ID NO: 79963 - DNA, 25 bp, Probe Sequence
tggaggtggtagtagacagtgatat

SEQ ID NO: 79964 - DNA, 25 bp, Probe Sequence
gcactgttaccatagaagatgacat

SEQ ID NO: 79965 - DNA, 25 bp, Probe Sequence
ggaagaaggcactgttaccatagaa

SEQ ID NO: 79966 - DNA, 25 bp, Probe Sequence
agtagacagtgatattgatgatcct

SEQ ID NO: 79967 - DNA, 25 bp, Probe Sequence
aggcactgttaccatagaagatgac

SEQ ID NO: 79968 - DNA, 25 bp, Probe Sequence
ggagttcaacagctattcataggta

SEQ ID NO: 79969 - DNA, 25 bp, Probe Sequence
agacagtgatattgatgatcctgac

SEQ ID NO: 79970 - DNA, 25 bp, Probe Sequence
agttcaacagctattcataggtaca

SEQ ID NO: 79971 - DNA, 25 bp, Probe Sequence
gtggaggtggtagtagacagtgata

SEQ ID NO: 79972 - DNA, 25 bp, Probe Sequence
ggtagtagacagtgatattgatgat

SEQ ID NO: 79973 - DNA, 25 bp, Probe Sequence
ctattgagattccagtggtgacttc

SEQ ID NO: 79974 - DNA, 25 bp, Probe Sequence
tattgagattccagtggtgacttca

SEQ ID NO: 79975 - DNA, 25 bp, Probe Sequence
aatgtgctattgagattccagtggt

SEQ ID NO: 79976 - DNA, 25 bp, Probe Sequence
atgtgctattgagattccagtggtg

SEQ ID NO: 79977 - DNA, 25 bp, Probe Sequence
gctattgagattccagtggtgactt

SEQ ID NO: 79978 - DNA, 25 bp, Probe Sequence
aaatgtgctattgagattccagtgg

SEQ ID NO: 79979 - DNA, 25 bp, Probe Sequence
gtgctattgagattccagtggtgac

SEQ ID NO: 79980 - DNA, 25 bp, Probe Sequence
ttcaatggttagcagaagggagaaa

SEQ ID NO: 79981 - DNA, 25 bp, Probe Sequence
tgctattgagattccagtggtgact

SEQ ID NO: 79982 - DNA, 25 bp, Probe Sequence
tgtgctattgagattccagtggtga

SEQ ID NO: 79983 - DNA, 25 bp, Probe Sequence
attgagattccagtggtgacttcac

SEQ ID NO: 79984 - DNA, 25 bp, Probe Sequence
aaaatgtgctattgagattccagtg

SEQ ID NO: 79985 - DNA, 25 bp, Probe Sequence
ggagaaaagaaagcaggaaaatgtg

SEQ ID NO: 79986 - DNA, 25 bp, Probe Sequence
aagggagaaaagaaagcaggaaaat

SEQ ID NO: 79987 - DNA, 25 bp, Probe Sequence
gaaaatgtgctattgagattccagt

SEQ ID NO: 79988 - DNA, 25 bp, Probe Sequence
ggttagcagaagggagaaaagaaag

SEQ ID NO: 79989 - DNA, 25 bp, Probe Sequence
agggagaaaagaaagcaggaaaatg

SEQ ID NO: 79990 - DNA, 25 bp, Probe Sequence
gaagggagaaaagaaagcaggaaaa

SEQ ID NO: 79991 - DNA, 25 bp, Probe Sequence
atggttagcagaagggagaaaagaa

SEQ ID NO: 79992 - DNA, 25 bp, Probe Sequence
aatggttagcagaagggagaaaaga

SEQ ID NO: 79993 - DNA, 25 bp, Probe Sequence
caatggttagcagaagggagaaaag

SEQ ID NO: 79994 - DNA, 25 bp, Probe Sequence
gggagaaaagaaagcaggaaaatgt

SEQ ID NO: 79995 - DNA, 25 bp, Probe Sequence
tggttagcagaagggagaaaagaaa

SEQ ID NO: 79996 - DNA, 25 bp, Probe Sequence
gttagcagaagggagaaaagaaagc

SEQ ID NO: 79997 - DNA, 25 bp, Probe Sequence
ctattgagattccagtggtgacttc

SEQ ID NO: 79998 - DNA, 25 bp, Probe Sequence
tattgagattccagtggtgacttca

SEQ ID NO: 79999 - DNA, 25 bp, Probe Sequence
aatgtgctattgagattccagtggt

SEQ ID NO: 80000 - DNA, 25 bp, Probe Sequence
atgtgctattgagattccagtggtg

SEQ ID NO: 80001 - DNA, 25 bp, Probe Sequence
gctattgagattccagtggtgactt

SEQ ID NO: 80002 - DNA, 25 bp, Probe Sequence
aaatgtgctattgagattccagtgg

SEQ ID NO: 80003 - DNA, 25 bp, Probe Sequence
gtgctattgagattccagtggtgac

SEQ ID NO: 80004 - DNA, 25 bp, Probe Sequence
ttcaatggttagcagaagggagaaa

SEQ ID NO: 80005 - DNA, 25 bp, Probe Sequence
tgctattgagattccagtggtgact

SEQ ID NO: 80006 - DNA, 25 bp, Probe Sequence
tgtgctattgagattccagtggtga

SEQ ID NO: 80007 - DNA, 25 bp, Probe Sequence
attgagattccagtggtgacttcac

SEQ ID NO: 80008 - DNA, 25 bp, Probe Sequence
aaaatgtgctattgagattccagtg

SEQ ID NO: 80009 - DNA, 25 bp, Probe Sequence
ggagaaaagaaagcaggaaaatgtg

SEQ ID NO: 80010 - DNA, 25 bp, Probe Sequence
aagggagaaaagaaagcaggaaaat

SEQ ID NO: 80011 - DNA, 25 bp, Probe Sequence
gaaaatgtgctattgagattccagt

SEQ ID NO: 80012 - DNA, 25 bp, Probe Sequence
ggttagcagaagggagaaaagaaag

SEQ ID NO: 80013 - DNA, 25 bp, Probe Sequence
agggagaaaagaaagcaggaaaatg

SEQ ID NO: 80014 - DNA, 25 bp, Probe Sequence
gaagggagaaaagaaagcaggaaaa

SEQ ID NO: 80015 - DNA, 25 bp, Probe Sequence
atggttagcagaagggagaaaagaa

SEQ ID NO: 80016 - DNA, 25 bp, Probe Sequence
aatggttagcagaagggagaaaaga

SEQ ID NO: 80017 - DNA, 25 bp, Probe Sequence
caatggttagcagaagggagaaaag

SEQ ID NO: 80018 - DNA, 25 bp, Probe Sequence
gggagaaaagaaagcaggaaaatgt

SEQ ID NO: 80019 - DNA, 25 bp, Probe Sequence
tggttagcagaagggagaaaagaaa

SEQ ID NO: 80020 - DNA, 25 bp, Probe Sequence
gttagcagaagggagaaaagaaagc

SEQ ID NO: 80021 - DNA, 25 bp, Probe Sequence
agatgtatgtactgcctgatagaga

SEQ ID NO: 80022 - DNA, 25 bp, Probe Sequence
gtatgtactgcctgatagagaatcc

SEQ ID NO: 80023 - DNA, 25 bp, Probe Sequence
gatgtatgtactgcctgatagagaa

SEQ ID NO: 80024 - DNA, 25 bp, Probe Sequence
aagatgtatgtactgcctgatagag

SEQ ID NO: 80025 - DNA, 25 bp, Probe Sequence
tatgtactgcctgatagagaatcca

SEQ ID NO: 80026 - DNA, 25 bp, Probe Sequence
tgtatgtactgcctgatagagaatc

SEQ ID NO: 80027 - DNA, 25 bp, Probe Sequence
atgtatgtactgcctgatagagaat

SEQ ID NO: 80028 - DNA, 25 bp, Probe Sequence
atgtactgcctgatagagaatccaa

SEQ ID NO: 80029 - DNA, 25 bp, Probe Sequence
tgactgaccataaagagacaaagat

SEQ ID NO: 80030 - DNA, 25 bp, Probe Sequence
gtgactgaccataaagagacaaaga

SEQ ID NO: 80031 - DNA, 25 bp, Probe Sequence
agtgactgaccataaagagacaaag

SEQ ID NO: 80032 - DNA, 25 bp, Probe Sequence
tagtgactgaccataaagagacaaa

SEQ ID NO: 80033 - DNA, 25 bp, Probe Sequence
gactgaccataaagagacaaagatg

SEQ ID NO: 80034 - DNA, 25 bp, Probe Sequence
ctagtgactgaccataaagagacaa

SEQ ID NO: 80035 - DNA, 25 bp, Probe Sequence
tagaaactctgaacaggcttacttt

SEQ ID NO: 80036 - DNA, 25 bp, Probe Sequence
aaggtgctcaataaacaattcaatg

SEQ ID NO: 80037 - DNA, 25 bp, Probe Sequence
ctagaaactctgaacaggcttactt

SEQ ID NO: 80038 - DNA, 25 bp, Probe Sequence
aggtgctcaataaacaattcaatga

SEQ ID NO: 80039 - DNA, 25 bp, Probe Sequence
caaagatgtatgtactgcctgatag

SEQ ID NO: 80040 - DNA, 25 bp, Probe Sequence
actgaccataaagagacaaagatgt

SEQ ID NO: 80041 - DNA, 25 bp, Probe Sequence
aaagatgtatgtactgcctgataga

SEQ ID NO: 80042 - DNA, 25 bp, Probe Sequence
aaaggtgctcaataaacaattcaat

SEQ ID NO: 80043 - DNA, 25 bp, Probe Sequence
tgtactgcctgatagagaatccaaa

SEQ ID NO: 80044 - DNA, 25 bp, Probe Sequence
tgagaaacataataagtgaccagaa

SEQ ID NO: 80045 - DNA, 25 bp, Probe Sequence
atgcctgccatgtcttgtcttattc

SEQ ID NO: 80046 - DNA, 25 bp, Probe Sequence
actgtcctcaaagaccatctgtatg

SEQ ID NO: 80047 - DNA, 25 bp, Probe Sequence
cactgtcctcaaagaccatctgtat

SEQ ID NO: 80048 - DNA, 25 bp, Probe Sequence
ataaatttccttggtcatttctgcc

SEQ ID NO: 80049 - DNA, 25 bp, Probe Sequence
ccatgtcttgtcttattccctgagg

SEQ ID NO: 80050 - DNA, 25 bp, Probe Sequence
cataaatttccttggtcatttctgc

SEQ ID NO: 80051 - DNA, 25 bp, Probe Sequence
atgtcttgtcttattccctgaggct

SEQ ID NO: 80052 - DNA, 25 bp, Probe Sequence
caggttcataaatttccttggtcat

SEQ ID NO: 80053 - DNA, 25 bp, Probe Sequence
atcaggcaggttcataaatttcctt

SEQ ID NO: 80054 - DNA, 25 bp, Probe Sequence
aatttccttggtcatttctgccctc

SEQ ID NO: 80055 - DNA, 25 bp, Probe Sequence
gatcaggcaggttcataaatttcct

SEQ ID NO: 80056 - DNA, 25 bp, Probe Sequence
aggttcataaatttccttggtcatt

SEQ ID NO: 80057 - DNA, 25 bp, Probe Sequence
taaatttccttggtcatttctgccc

SEQ ID NO: 80058 - DNA, 25 bp, Probe Sequence
tttccttggtcatttctgccctcta

SEQ ID NO: 80059 - DNA, 25 bp, Probe Sequence
catgtcttgtcttattccctgaggc

SEQ ID NO: 80060 - DNA, 25 bp, Probe Sequence
gccatgtcttgtcttattccctgag

SEQ ID NO: 80061 - DNA, 25 bp, Probe Sequence
ggttcataaatttccttggtcattt

SEQ ID NO: 80062 - DNA, 25 bp, Probe Sequence
tcaggcaggttcataaatttccttg

SEQ ID NO: 80063 - DNA, 25 bp, Probe Sequence
ctgtcctcaaagaccatctgtatgc

SEQ ID NO: 80064 - DNA, 25 bp, Probe Sequence
gcaggttcataaatttccttggtca

SEQ ID NO: 80065 - DNA, 25 bp, Probe Sequence
ctgccatgtcttgtcttattccctg

SEQ ID NO: 80066 - DNA, 25 bp, Probe Sequence
ttttcctgtcagtgcttttctcttc

SEQ ID NO: 80067 - DNA, 25 bp, Probe Sequence
cttttcctgtcagtgcttttctctt

SEQ ID NO: 80068 - DNA, 25 bp, Probe Sequence
tcataaatttccttggtcatttctg

SEQ ID NO: 80069 - DNA, 25 bp, Probe Sequence
cccagctaattctttgttgttgttt

SEQ ID NO: 80070 - DNA, 25 bp, Probe Sequence
gcctatatatcagggaccacattat

SEQ ID NO: 80071 - DNA, 25 bp, Probe Sequence
atagagatgaggtttcaccatgttg

SEQ ID NO: 80072 - DNA, 25 bp, Probe Sequence
tatagagatgaggtttcaccatgtt

SEQ ID NO: 80073 - DNA, 25 bp, Probe Sequence
gtgacagagcgagactccatatcaa

SEQ ID NO: 80074 - DNA, 25 bp, Probe Sequence
acactgcctctactgaaaatacaag

SEQ ID NO: 80075 - DNA, 25 bp, Probe Sequence
gacactgcctctactgaaaatacaa

SEQ ID NO: 80076 - DNA, 25 bp, Probe Sequence
atgcccagctaattctttgttgttg

SEQ ID NO: 80077 - DNA, 25 bp, Probe Sequence
catgcccagctaattctttgttgtt

SEQ ID NO: 80078 - DNA, 25 bp, Probe Sequence
ctatagagatgaggtttcaccatgt

SEQ ID NO: 80079 - DNA, 25 bp, Probe Sequence
gcccagctaattctttgttgttgtt

SEQ ID NO: 80080 - DNA, 25 bp, Probe Sequence
tgacagagcgagactccatatcaaa

SEQ ID NO: 80081 - DNA, 25 bp, Probe Sequence
caagatcatctcaccattgcactcc

SEQ ID NO: 80082 - DNA, 25 bp, Probe Sequence
ccaagatcatctcaccattgcactc

SEQ ID NO: 80083 - DNA, 25 bp, Probe Sequence
agacactgcctctactgaaaataca

SEQ ID NO: 80084 - DNA, 25 bp, Probe Sequence
gagacactgcctctactgaaaatac

SEQ ID NO: 80085 - DNA, 25 bp, Probe Sequence
cctatatatcagggaccacattatt

SEQ ID NO: 80086 - DNA, 25 bp, Probe Sequence
ctctactgaaaatacaaggtgagcc

SEQ ID NO: 80087 - DNA, 25 bp, Probe Sequence
tgagacactgcctctactgaaaata

SEQ ID NO: 80088 - DNA, 25 bp, Probe Sequence
aagatcatctcaccattgcactcca

SEQ ID NO: 80089 - DNA, 25 bp, Probe Sequence
tttgtgacaaggtttcgttttcatt

SEQ ID NO: 80090 - DNA, 25 bp, Probe Sequence
ttttgtgacaaggtttcgttttcat

SEQ ID NO: 80091 - DNA, 25 bp, Probe Sequence
ttgtgacaaggtttcgttttcattc

SEQ ID NO: 80092 - DNA, 25 bp, Probe Sequence
tagagatgaggtttcaccatgttgc

SEQ ID NO: 80093 - DNA, 25 bp, Probe Sequence
gacacagagcgagactccgttttaa

SEQ ID NO: 80094 - DNA, 25 bp, Probe Sequence
acacagagcgagactccgttttaaa

SEQ ID NO: 80095 - DNA, 25 bp, Probe Sequence
cacagagcgagactccgttttaaaa

SEQ ID NO: 80096 - DNA, 25 bp, Probe Sequence
ttcactggaagatcattgtaattca

SEQ ID NO: 80097 - DNA, 25 bp, Probe Sequence
tcactggaagatcattgtaattcaa

SEQ ID NO: 80098 - DNA, 25 bp, Probe Sequence
gctaagtttaagtagtgtatcctgc

SEQ ID NO: 80099 - DNA, 25 bp, Probe Sequence
aattcaaatccattcagtgctgttt

SEQ ID NO: 80100 - DNA, 25 bp, Probe Sequence
gtaattcaaatccattcagtgctgt

SEQ ID NO: 80101 - DNA, 25 bp, Probe Sequence
tgtaattcaaatccattcagtgctg

SEQ ID NO: 80102 - DNA, 25 bp, Probe Sequence
attcaaatccattcagtgctgtttc

SEQ ID NO: 80103 - DNA, 25 bp, Probe Sequence
taattcaaatccattcagtgctgtt

SEQ ID NO: 80104 - DNA, 25 bp, Probe Sequence
gcacctactttaatgatatagcaca

SEQ ID NO: 80105 - DNA, 25 bp, Probe Sequence
ttgtaattcaaatccattcagtgct

SEQ ID NO: 80106 - DNA, 25 bp, Probe Sequence
ttcaaatccattcagtgctgtttca

SEQ ID NO: 80107 - DNA, 25 bp, Probe Sequence
attgtaattcaaatccattcagtgc

SEQ ID NO: 80108 - DNA, 25 bp, Probe Sequence
actttcactggaagatcattgtaat

SEQ ID NO: 80109 - DNA, 25 bp, Probe Sequence
tactttcactggaagatcattgtaa

SEQ ID NO: 80110 - DNA, 25 bp, Probe Sequence
tgtatcctgcacctactttaatgat

SEQ ID NO: 80111 - DNA, 25 bp, Probe Sequence
cctgcacctactttaatgatatagc

SEQ ID NO: 80112 - DNA, 25 bp, Probe Sequence
atactttcactggaagatcattgta

SEQ ID NO: 80113 - DNA, 25 bp, Probe Sequence
tatactttcactggaagatcattgt

SEQ ID NO: 80114 - DNA, 25 bp, Probe Sequence
cactggaagatcattgtaattcaaa

SEQ ID NO: 80115 - DNA, 25 bp, Probe Sequence
tttcactggaagatcattgtaattc

SEQ ID NO: 80116 - DNA, 25 bp, Probe Sequence
ctttcactggaagatcattgtaatt

SEQ ID NO: 80117 - DNA, 25 bp, Probe Sequence
atttaaagcaatgtttacccacagc

SEQ ID NO: 80118 - DNA, 25 bp, Probe Sequence
cattgtaattcaaatccattcagtg

SEQ ID NO: 80119 - DNA, 25 bp, Probe Sequence
tcaaatccattcagtgctgtttcac

SEQ ID NO: 80120 - DNA, 25 bp, Probe Sequence
aacagactaatacaccacacctata

SEQ ID NO: 80121 - DNA, 25 bp, Probe Sequence
atcaatgctaactatacacctcagt

SEQ ID NO: 80122 - DNA, 25 bp, Probe Sequence
gatcaatgctaactatacacctcag

SEQ ID NO: 80123 - DNA, 25 bp, Probe Sequence
aatgctaactatacacctcagtgac

SEQ ID NO: 80124 - DNA, 25 bp, Probe Sequence
caatgctaactatacacctcagtga

SEQ ID NO: 80125 - DNA, 25 bp, Probe Sequence
tcaatgctaactatacacctcagtg

SEQ ID NO: 80126 - DNA, 25 bp, Probe Sequence
atgctaactatacacctcagtgact

SEQ ID NO: 80127 - DNA, 25 bp, Probe Sequence
tgctaactatacacctcagtgactt

SEQ ID NO: 80128 - DNA, 25 bp, Probe Sequence
acagactaatacaccacacctatag

SEQ ID NO: 80129 - DNA, 25 bp, Probe Sequence
aaacagactaatacaccacacctat

SEQ ID NO: 80130 - DNA, 25 bp, Probe Sequence
tttccaccatttcgtaatcaacttg

SEQ ID NO: 80131 - DNA, 25 bp, Probe Sequence
tatagggagtttatctgaggatggc

SEQ ID NO: 80132 - DNA, 25 bp, Probe Sequence
tctttgtgccattgtttagaaatca

SEQ ID NO: 80133 - DNA, 25 bp, Probe Sequence
gatgattctttgtgccattgtttag

SEQ ID NO: 80134 - DNA, 25 bp, Probe Sequence
atgattctttgtgccattgtttaga

SEQ ID NO: 80135 - DNA, 25 bp, Probe Sequence
agatgattctttgtgccattgttta

SEQ ID NO: 80136 - DNA, 25 bp, Probe Sequence
cttctttagtagacattcaggcaaa

SEQ ID NO: 80137 - DNA, 25 bp, Probe Sequence
acttctttagtagacattcaggcaa

SEQ ID NO: 80138 - DNA, 25 bp, Probe Sequence
ctttgtgccattgtttagaaatcaa

SEQ ID NO: 80139 - DNA, 25 bp, Probe Sequence
agtttgtctggcgatacttctttag

SEQ ID NO: 80140 - DNA, 25 bp, Probe Sequence
gtttgtctggcgatacttctttagt

SEQ ID NO: 80141 - DNA, 25 bp, Probe Sequence
atgaactaaagtttgtctggcgata

SEQ ID NO: 80142 - DNA, 25 bp, Probe Sequence
atcaatgaactaaagtttgtctggc

SEQ ID NO: 80143 - DNA, 25 bp, Probe Sequence
ctgagacaggagaatcacttgaacc

SEQ ID NO: 80144 - DNA, 25 bp, Probe Sequence
ctgtgttcagagtagtaagatgctt

SEQ ID NO: 80145 - DNA, 25 bp, Probe Sequence
aagaagacaagatcctaattcctgt

SEQ ID NO: 80146 - DNA, 25 bp, Probe Sequence
tgtatgaacaggtatcctattgtct

SEQ ID NO: 80147 - DNA, 25 bp, Probe Sequence
tgtgttcagagtagtaagatgcttt

SEQ ID NO: 80148 - DNA, 25 bp, Probe Sequence
gaacaggtatcctattgtctaatgt

SEQ ID NO: 80149 - DNA, 25 bp, Probe Sequence
tgaacaggtatcctattgtctaatg

SEQ ID NO: 80150 - DNA, 25 bp, Probe Sequence
atgtatgaacaggtatcctattgtc

SEQ ID NO: 80151 - DNA, 25 bp, Probe Sequence
cctttgagtggctttgaaacttaat

SEQ ID NO: 80152 - DNA, 25 bp, Probe Sequence
tgaacaagaaagaagacaagatcct

SEQ ID NO: 80153 - DNA, 25 bp, Probe Sequence
atgaacaagaaagaagacaagatcc

SEQ ID NO: 80154 - DNA, 25 bp, Probe Sequence
aatgtatgaacaggtatcctattgt

SEQ ID NO: 80155 - DNA, 25 bp, Probe Sequence
gtgttcagagtagtaagatgcttta

SEQ ID NO: 80156 - DNA, 25 bp, Probe Sequence
gaacaagaaagaagacaagatccta

SEQ ID NO: 80157 - DNA, 25 bp, Probe Sequence
caggtgaaacattaagccacaaata

SEQ ID NO: 80158 - DNA, 25 bp, Probe Sequence
gtatgaacaggtatcctattgtcta

SEQ ID NO: 80159 - DNA, 25 bp, Probe Sequence
aaagaagacaagatcctaattcctg

SEQ ID NO: 80160 - DNA, 25 bp, Probe Sequence
aggtgaaacattaagccacaaatat

SEQ ID NO: 80161 - DNA, 25 bp, Probe Sequence
tttatgagcaagggaaggtagcatt

SEQ ID NO: 80162 - DNA, 25 bp, Probe Sequence
atacaggtgaaacattaagccacaa

SEQ ID NO: 80163 - DNA, 25 bp, Probe Sequence
gcattgattcccatagctttctaat

SEQ ID NO: 80164 - DNA, 25 bp, Probe Sequence
gacagaagggctttgaaagacattt

SEQ ID NO: 80165 - DNA, 25 bp, Probe Sequence
gaaagaagacaagatcctaattcct

SEQ ID NO: 80166 - DNA, 25 bp, Probe Sequence
agaaagaagacaagatcctaattcc

SEQ ID NO: 80167 - DNA, 25 bp, Probe Sequence
aacaagaaagaagacaagatcctaa

SEQ ID NO: 80168 - DNA, 25 bp, Probe Sequence
ttgacggaataagtatctcggaaga

SEQ ID NO: 80169 - DNA, 25 bp, Probe Sequence
cggaataagtatctcggaagaggta

SEQ ID NO: 80170 - DNA, 25 bp, Probe Sequence
gaataagtatctcggaagaggtacg

SEQ ID NO: 80171 - DNA, 25 bp, Probe Sequence
ggaataagtatctcggaagaggtac

SEQ ID NO: 80172 - DNA, 25 bp, Probe Sequence
tgacggaataagtatctcggaagag

SEQ ID NO: 80173 - DNA, 25 bp, Probe Sequence
gacggaataagtatctcggaagagg

SEQ ID NO: 80174 - DNA, 25 bp, Probe Sequence
atttgacggaataagtatctcggaa

SEQ ID NO: 80175 - DNA, 25 bp, Probe Sequence
tttgacggaataagtatctcggaag

SEQ ID NO: 80176 - DNA, 25 bp, Probe Sequence
ccataaagacaaaccaatcaaccac

SEQ ID NO: 80177 - DNA, 25 bp, Probe Sequence
aatttgacggaataagtatctcgga

SEQ ID NO: 80178 - DNA, 25 bp, Probe Sequence
gaatttgacggaataagtatctcgg

SEQ ID NO: 80179 - DNA, 25 bp, Probe Sequence
ataaagacaaaccaatcaaccacga

SEQ ID NO: 80180 - DNA, 25 bp, Probe Sequence
cataaagacaaaccaatcaaccacg

SEQ ID NO: 80181 - DNA, 25 bp, Probe Sequence
acggaataagtatctcggaagaggt

SEQ ID NO: 80182 - DNA, 25 bp, Probe Sequence
aaagtgttaaaccaggagttgagag

SEQ ID NO: 80183 - DNA, 25 bp, Probe Sequence
caggagaatttgacggaataagtat

SEQ ID NO: 80184 - DNA, 25 bp, Probe Sequence
cccataaagacaaaccaatcaacca

SEQ ID NO: 80185 - DNA, 25 bp, Probe Sequence
aagatcaaagtgttaaaccaggagt

SEQ ID NO: 80186 - DNA, 25 bp, Probe Sequence
ggaaagatcaaagtgttaaaccagg

SEQ ID NO: 80187 - DNA, 25 bp, Probe Sequence
aagaggtacgaaattgagaagatcc

SEQ ID NO: 80188 - DNA, 25 bp, Probe Sequence
ggaagaggtacgaaattgagaagat

SEQ ID NO: 80189 - DNA, 25 bp, Probe Sequence
tcctgacttctaataacattgatgt

SEQ ID NO: 80190 - DNA, 25 bp, Probe Sequence
aaagatcaaagtgttaaaccaggag

SEQ ID NO: 80191 - DNA, 25 bp, Probe Sequence
gaaagatcaaagtgttaaaccagga

SEQ ID NO: 80192 - DNA, 25 bp, Probe Sequence
tgctacatcaagagaagaaggttaa

SEQ ID NO: 80193 - DNA, 25 bp, Probe Sequence
cattcacaactcaactattacacct

SEQ ID NO: 80194 - DNA, 25 bp, Probe Sequence
tcattcacaactcaactattacacc

SEQ ID NO: 80195 - DNA, 25 bp, Probe Sequence
cacaactcaactattacacctaaca

SEQ ID NO: 80196 - DNA, 25 bp, Probe Sequence
ttgctacatcaagagaagaaggtta

SEQ ID NO: 80197 - DNA, 25 bp, Probe Sequence
tcacaactcaactattacacctaac

SEQ ID NO: 80198 - DNA, 25 bp, Probe Sequence
acaactcaactattacacctaacat

SEQ ID NO: 80199 - DNA, 25 bp, Probe Sequence
ttcacaactcaactattacacctaa

SEQ ID NO: 80200 - DNA, 25 bp, Probe Sequence
attcacaactcaactattacaccta

SEQ ID NO: 80201 - DNA, 25 bp, Probe Sequence
atcattcacaactcaactattacac

SEQ ID NO: 80202 - DNA, 25 bp, Probe Sequence
tctgtagagagtcatgtctaagagg

SEQ ID NO: 80203 - DNA, 25 bp, Probe Sequence
ctgttaagggcttgatatggatttc

SEQ ID NO: 80204 - DNA, 25 bp, Probe Sequence
gtctgtagagagtcatgtctaagag

SEQ ID NO: 80205 - DNA, 25 bp, Probe Sequence
ggtctgtagagagtcatgtctaaga

SEQ ID NO: 80206 - DNA, 25 bp, Probe Sequence
accgtatcaagaggattaaagagag

SEQ ID NO: 80207 - DNA, 25 bp, Probe Sequence
agaggattaaagagagagagagaga

SEQ ID NO: 80208 - DNA, 25 bp, Probe Sequence
ccgtatcaagaggattaaagagaga

SEQ ID NO: 80209 - DNA, 25 bp, Probe Sequence
ttgcccacatagaaacagaaagaaa

SEQ ID NO: 80210 - DNA, 25 bp, Probe Sequence
aaccgtatcaagaggattaaagaga

SEQ ID NO: 80211 - DNA, 25 bp, Probe Sequence
catcaagagaagaaggttaaactgt

SEQ ID NO: 80212 - DNA, 25 bp, Probe Sequence
acatcaagagaagaaggttaaactg

SEQ ID NO: 80213 - DNA, 25 bp, Probe Sequence
gctacatcaagagaagaaggttaaa

SEQ ID NO: 80214 - DNA, 25 bp, Probe Sequence
actcaactattacacctaacatact

SEQ ID NO: 80215 - DNA, 25 bp, Probe Sequence
caagaggattaaagagagagagaga

SEQ ID NO: 80216 - DNA, 25 bp, Probe Sequence
aactgttcaattctgtaatgtgctt

SEQ ID NO: 80217 - DNA, 25 bp, Probe Sequence
ctcctccaatagagtcagaatcttg

SEQ ID NO: 80218 - DNA, 25 bp, Probe Sequence
ctccaatagagtcagaatcttgcta

SEQ ID NO: 80219 - DNA, 25 bp, Probe Sequence
gtatccacagagttccttcagagag

SEQ ID NO: 80220 - DNA, 25 bp, Probe Sequence
tccaatagagtcagaatcttgctat

SEQ ID NO: 80221 - DNA, 25 bp, Probe Sequence
ttaatgagtcgcaggaatgagaaca

SEQ ID NO: 80222 - DNA, 25 bp, Probe Sequence
gctcctccaatagagtcagaatctt

SEQ ID NO: 80223 - DNA, 25 bp, Probe Sequence
cctccaatagagtcagaatcttgct

SEQ ID NO: 80224 - DNA, 25 bp, Probe Sequence
tcctccaatagagtcagaatcttgc

SEQ ID NO: 80225 - DNA, 25 bp, Probe Sequence
taatgagtcgcaggaatgagaacag

SEQ ID NO: 80226 - DNA, 25 bp, Probe Sequence
atcaatcttggtaggtatccacaga

SEQ ID NO: 80227 - DNA, 25 bp, Probe Sequence
aatcttggtaggtatccacagagtt

SEQ ID NO: 80228 - DNA, 25 bp, Probe Sequence
gtaggtatccacagagttccttcag

SEQ ID NO: 80229 - DNA, 25 bp, Probe Sequence
gatcaatcttggtaggtatccacag

SEQ ID NO: 80230 - DNA, 25 bp, Probe Sequence
ttctgtaatgtgctttaatgagtcg

SEQ ID NO: 80231 - DNA, 25 bp, Probe Sequence
atcttggtaggtatccacagagttc

SEQ ID NO: 80232 - DNA, 25 bp, Probe Sequence
tcaatcttggtaggtatccacagag

SEQ ID NO: 80233 - DNA, 25 bp, Probe Sequence
taggtatccacagagttccttcaga

SEQ ID NO: 80234 - DNA, 25 bp, Probe Sequence
actgttcaattctgtaatgtgcttt

SEQ ID NO: 80235 - DNA, 25 bp, Probe Sequence
aaactgttcaattctgtaatgtgct

SEQ ID NO: 80236 - DNA, 25 bp, Probe Sequence
ggtatccacagagttccttcagaga

SEQ ID NO: 80237 - DNA, 25 bp, Probe Sequence
caatcttggtaggtatccacagagt

SEQ ID NO: 80238 - DNA, 25 bp, Probe Sequence
gcagcaacaatctaagaagaaatga

SEQ ID NO: 80239 - DNA, 25 bp, Probe Sequence
ctttaatgagtcgcaggaatgagaa

SEQ ID NO: 80240 - DNA, 25 bp, Probe Sequence
attgcttcttgttcacttggtctta

SEQ ID NO: 80241 - DNA, 25 bp, Probe Sequence
gcttcttgttcacttggtcttaatt

SEQ ID NO: 80242 - DNA, 25 bp, Probe Sequence
tgcttcttgttcacttggtcttaat

SEQ ID NO: 80243 - DNA, 25 bp, Probe Sequence
ttgcttcttgttcacttggtcttaa

SEQ ID NO: 80244 - DNA, 25 bp, Probe Sequence
gacaactcacatcagagaataggaa

SEQ ID NO: 80245 - DNA, 25 bp, Probe Sequence
caactcacatcagagaataggaaca

SEQ ID NO: 80246 - DNA, 25 bp, Probe Sequence
acaactcacatcagagaataggaac

SEQ ID NO: 80247 - DNA, 25 bp, Probe Sequence
aactcacatcagagaataggaacat

SEQ ID NO: 80248 - DNA, 25 bp, Probe Sequence
cattgcttcttgttcacttggtctt

SEQ ID NO: 80249 - DNA, 25 bp, Probe Sequence
ggacaactcacatcagagaatagga

SEQ ID NO: 80250 - DNA, 25 bp, Probe Sequence
tcacatcagagaataggaacatgaa

SEQ ID NO: 80251 - DNA, 25 bp, Probe Sequence
ctcacatcagagaataggaacatga

SEQ ID NO: 80252 - DNA, 25 bp, Probe Sequence
actcacatcagagaataggaacatg

SEQ ID NO: 80253 - DNA, 25 bp, Probe Sequence
aagtatgtaggaaagtcagtgtgtc

SEQ ID NO: 80254 - DNA, 25 bp, Probe Sequence
ctccactctatatttgtattgccct

SEQ ID NO: 80255 - DNA, 25 bp, Probe Sequence
tctccactctatatttgtattgccc

SEQ ID NO: 80256 - DNA, 25 bp, Probe Sequence
ccacaacactttctccactctatat

SEQ ID NO: 80257 - DNA, 25 bp, Probe Sequence
aaaggagactgtttatcaccaagat

SEQ ID NO: 80258 - DNA, 25 bp, Probe Sequence
acacattattaagggacaactcaca

SEQ ID NO: 80259 - DNA, 25 bp, Probe Sequence
gacacattattaagggacaactcac

SEQ ID NO: 80260 - DNA, 25 bp, Probe Sequence
ctctatatttgtattgccctaccca

SEQ ID NO: 80261 - DNA, 25 bp, Probe Sequence
actctatatttgtattgccctaccc

SEQ ID NO: 80262 - DNA, 25 bp, Probe Sequence
cttgtacttcagtgtgagagtaagg

SEQ ID NO: 80263 - DNA, 25 bp, Probe Sequence
ttattaagggacaactcacatcaga

SEQ ID NO: 80264 - DNA, 25 bp, Probe Sequence
ttcactatattgccatgctgttctc

SEQ ID NO: 80265 - DNA, 25 bp, Probe Sequence
aagaagagtgagcaactaggactag

SEQ ID NO: 80266 - DNA, 25 bp, Probe Sequence
cccgtcactacttacaaatcaaatt

SEQ ID NO: 80267 - DNA, 25 bp, Probe Sequence
gatgagaaagaagagtgagcaacta

SEQ ID NO: 80268 - DNA, 25 bp, Probe Sequence
atcttcagtataatgggctttcact

SEQ ID NO: 80269 - DNA, 25 bp, Probe Sequence
tatcttcagtataatgggctttcac

SEQ ID NO: 80270 - DNA, 25 bp, Probe Sequence
gtatcttcagtataatgggctttca

SEQ ID NO: 80271 - DNA, 25 bp, Probe Sequence
tgtatcttcagtataatgggctttc

SEQ ID NO: 80272 - DNA, 25 bp, Probe Sequence
cactacttacaaatcaaattagccg

SEQ ID NO: 80273 - DNA, 25 bp, Probe Sequence
tcttcagtataatgggctttcacta

SEQ ID NO: 80274 - DNA, 25 bp, Probe Sequence
atgagaaagaagagtgagcaactag

SEQ ID NO: 80275 - DNA, 25 bp, Probe Sequence
ctttcactatattgccatgctgttc

SEQ ID NO: 80276 - DNA, 25 bp, Probe Sequence
ctatattgccatgctgttctcgaac

SEQ ID NO: 80277 - DNA, 25 bp, Probe Sequence
tttcactatattgccatgctgttct

SEQ ID NO: 80278 - DNA, 25 bp, Probe Sequence
ttgtatcttcagtataatgggcttt

SEQ ID NO: 80279 - DNA, 25 bp, Probe Sequence
tttgtatcttcagtataatgggctt

SEQ ID NO: 80280 - DNA, 25 bp, Probe Sequence
aaagaagagtgagcaactaggacta

SEQ ID NO: 80281 - DNA, 25 bp, Probe Sequence
gaaatgtggacctggattcttgaag

SEQ ID NO: 80282 - DNA, 25 bp, Probe Sequence
actatattgccatgctgttctcgaa

SEQ ID NO: 80283 - DNA, 25 bp, Probe Sequence
tcactatattgccatgctgttctcg

SEQ ID NO: 80284 - DNA, 25 bp, Probe Sequence
gtataatgggctttcactatattgc

SEQ ID NO: 80285 - DNA, 25 bp, Probe Sequence
cttcagtataatgggctttcactat

SEQ ID NO: 80286 - DNA, 25 bp, Probe Sequence
tatattgccatgctgttctcgaact

SEQ ID NO: 80287 - DNA, 25 bp, Probe Sequence
gagaaagaagagtgagcaactagga

SEQ ID NO: 80288 - DNA, 25 bp, Probe Sequence
ttctgctccttcactactaactgtt

SEQ ID NO: 80289 - DNA, 25 bp, Probe Sequence
ctccttcactactaactgttgagac

SEQ ID NO: 80290 - DNA, 25 bp, Probe Sequence
tctgctccttcactactaactgttg

SEQ ID NO: 80291 - DNA, 25 bp, Probe Sequence
tccttcactactaactgttgagacg

SEQ ID NO: 80292 - DNA, 25 bp, Probe Sequence
gctccttcactactaactgttgaga

SEQ ID NO: 80293 - DNA, 25 bp, Probe Sequence
ctgctccttcactactaactgttga

SEQ ID NO: 80294 - DNA, 25 bp, Probe Sequence
tgctccttcactactaactgttgag

SEQ ID NO: 80295 - DNA, 25 bp, Probe Sequence
gtacactcactctattcgccttagg

SEQ ID NO: 80296 - DNA, 25 bp, Probe Sequence
ggtacactcactctattcgccttag

SEQ ID NO: 80297 - DNA, 25 bp, Probe Sequence
gctcatcgcctgtaatcctagaatt

SEQ ID NO: 80298 - DNA, 25 bp, Probe Sequence
tttctgctccttcactactaactgt

SEQ ID NO: 80299 - DNA, 25 bp, Probe Sequence
ctcatcgcctgtaatcctagaattt

SEQ ID NO: 80300 - DNA, 25 bp, Probe Sequence
cttccatctcgtaatgcctcttgac

SEQ ID NO: 80301 - DNA, 25 bp, Probe Sequence
catctcgtaatgcctcttgacttgg

SEQ ID NO: 80302 - DNA, 25 bp, Probe Sequence
ccatctcgtaatgcctcttgacttg

SEQ ID NO: 80303 - DNA, 25 bp, Probe Sequence
cttcactactaactgttgagacgtg

SEQ ID NO: 80304 - DNA, 25 bp, Probe Sequence
aggtacactcactctattcgcctta

SEQ ID NO: 80305 - DNA, 25 bp, Probe Sequence
tccatctcgtaatgcctcttgactt

SEQ ID NO: 80306 - DNA, 25 bp, Probe Sequence
ttccatctcgtaatgcctcttgact

SEQ ID NO: 80307 - DNA, 25 bp, Probe Sequence
ccttcactactaactgttgagacgt

SEQ ID NO: 80308 - DNA, 25 bp, Probe Sequence
actactaactgttgagacgtgcttc

SEQ ID NO: 80309 - DNA, 25 bp, Probe Sequence
ctactaactgttgagacgtgcttcc

SEQ ID NO: 80310 - DNA, 25 bp, Probe Sequence
cttttctgctccttcactactaact

SEQ ID NO: 80311 - DNA, 25 bp, Probe Sequence
cactactaactgttgagacgtgctt

SEQ ID NO: 80312 - DNA, 25 bp, Probe Sequence
tgagttatgatcgcaccactgtact

SEQ ID NO: 80313 - DNA, 25 bp, Probe Sequence
gtgagttatgatcgcaccactgtac

SEQ ID NO: 80314 - DNA, 25 bp, Probe Sequence
gttatgatcgcaccactgtactcca

SEQ ID NO: 80315 - DNA, 25 bp, Probe Sequence
agttatgatcgcaccactgtactcc

SEQ ID NO: 80316 - DNA, 25 bp, Probe Sequence
ttatgatcgcaccactgtactccag

SEQ ID NO: 80317 - DNA, 25 bp, Probe Sequence
gagttatgatcgcaccactgtactc

SEQ ID NO: 80318 - DNA, 25 bp, Probe Sequence
agtgagttatgatcgcaccactgta

SEQ ID NO: 80319 - DNA, 25 bp, Probe Sequence
tgggcaacagagtaagacctgtaaa

SEQ ID NO: 80320 - DNA, 25 bp, Probe Sequence
gtgggcaacagagtaagacctgtaa

SEQ ID NO: 80321 - DNA, 25 bp, Probe Sequence
gggcaacagagtaagacctgtaaaa

SEQ ID NO: 80322 - DNA, 25 bp, Probe Sequence
tgctaagacagtagatgttaagtgt

SEQ ID NO: 80323 - DNA, 25 bp, Probe Sequence
ttgctaagacagtagatgttaagtg

SEQ ID NO: 80324 - DNA, 25 bp, Probe Sequence
attgctaagacagtagatgttaagt

SEQ ID NO: 80325 - DNA, 25 bp, Probe Sequence
aattgctaagacagtagatgttaag

SEQ ID NO: 80326 - DNA, 25 bp, Probe Sequence
tagatgttaagtgtctttatcaccc

SEQ ID NO: 80327 - DNA, 25 bp, Probe Sequence
ataaccaatatatcgtgtatccgaa

SEQ ID NO: 80328 - DNA, 25 bp, Probe Sequence
aataaccaatatatcgtgtatccga

SEQ ID NO: 80329 - DNA, 25 bp, Probe Sequence
taataaccaatatatcgtgtatccg

SEQ ID NO: 80330 - DNA, 25 bp, Probe Sequence
ccgaaaattgctaagacagtagatg

SEQ ID NO: 80331 - DNA, 25 bp, Probe Sequence
tccgaaaattgctaagacagtagat

SEQ ID NO: 80332 - DNA, 25 bp, Probe Sequence
atccgaaaattgctaagacagtaga

SEQ ID NO: 80333 - DNA, 25 bp, Probe Sequence
gtagatgttaagtgtctttatcacc

SEQ ID NO: 80334 - DNA, 25 bp, Probe Sequence
gtatccgaaaattgctaagacagta

SEQ ID NO: 80335 - DNA, 25 bp, Probe Sequence
tatccgaaaattgctaagacagtag

SEQ ID NO: 80336 - DNA, 25 bp, Probe Sequence
cagtagatgttaagtgtctttatca

SEQ ID NO: 80337 - DNA, 25 bp, Probe Sequence
gtgtatccgaaaattgctaagacag

SEQ ID NO: 80338 - DNA, 25 bp, Probe Sequence
tgtatccgaaaattgctaagacagt

SEQ ID NO: 80339 - DNA, 25 bp, Probe Sequence
cgaaaattgctaagacagtagatgt

SEQ ID NO: 80340 - DNA, 25 bp, Probe Sequence
gctaagacagtagatgttaagtgtc

SEQ ID NO: 80341 - DNA, 25 bp, Probe Sequence
aaattgctaagacagtagatgttaa

SEQ ID NO: 80342 - DNA, 25 bp, Probe Sequence
agatgttaagtgtctttatcacccc

SEQ ID NO: 80343 - DNA, 25 bp, Probe Sequence
taaccaatatatcgtgtatccgaaa

SEQ ID NO: 80344 - DNA, 25 bp, Probe Sequence
acagtagatgttaagtgtctttatc

SEQ ID NO: 80345 - DNA, 25 bp, Probe Sequence
cgtgtatccgaaaattgctaagaca

SEQ ID NO: 80346 - DNA, 25 bp, Probe Sequence
gactcttgttatctctgtgctctac

SEQ ID NO: 80347 - DNA, 25 bp, Probe Sequence
gttatctctgtgctctactacttca

SEQ ID NO: 80348 - DNA, 25 bp, Probe Sequence
tgttatctctgtgctctactacttc

SEQ ID NO: 80349 - DNA, 25 bp, Probe Sequence
cttgttatctctgtgctctactact

SEQ ID NO: 80350 - DNA, 25 bp, Probe Sequence
tcttgttatctctgtgctctactac

SEQ ID NO: 80351 - DNA, 25 bp, Probe Sequence
actcttgttatctctgtgctctact

SEQ ID NO: 80352 - DNA, 25 bp, Probe Sequence
ctcttgttatctctgtgctctacta

SEQ ID NO: 80353 - DNA, 25 bp, Probe Sequence
ttgttatctctgtgctctactactt

SEQ ID NO: 80354 - DNA, 25 bp, Probe Sequence
ggactcttgttatctctgtgctcta

SEQ ID NO: 80355 - DNA, 25 bp, Probe Sequence
tgctctactacttcacacattatag

SEQ ID NO: 80356 - DNA, 25 bp, Probe Sequence
ttggactcttgttatctctgtgctc

SEQ ID NO: 80357 - DNA, 25 bp, Probe Sequence
ttatctctgtgctctactacttcac

SEQ ID NO: 80358 - DNA, 25 bp, Probe Sequence
gttggactcttgttatctctgtgct

SEQ ID NO: 80359 - DNA, 25 bp, Probe Sequence
tggactcttgttatctctgtgctct

SEQ ID NO: 80360 - DNA, 25 bp, Probe Sequence
agttggactcttgttatctctgtgc

SEQ ID NO: 80361 - DNA, 25 bp, Probe Sequence
cttctatagcatcttcttctgttcc

SEQ ID NO: 80362 - DNA, 25 bp, Probe Sequence
gtgctctactacttcacacattata

SEQ ID NO: 80363 - DNA, 25 bp, Probe Sequence
gatgtgaacacctctcttggattgt

SEQ ID NO: 80364 - DNA, 25 bp, Probe Sequence
tcttctatagcatcttcttctgttc

SEQ ID NO: 80365 - DNA, 25 bp, Probe Sequence
ctcttctatagcatcttcttctgtt

SEQ ID NO: 80366 - DNA, 25 bp, Probe Sequence
ggatgtgaacacctctcttggattg

SEQ ID NO: 80367 - DNA, 25 bp, Probe Sequence
gctctactacttcacacattataga

SEQ ID NO: 80368 - DNA, 25 bp, Probe Sequence
cacaagagtgaactccatctcagaa

SEQ ID NO: 80369 - DNA, 25 bp, Probe Sequence
atggatgtgaacacctctcttggat

SEQ ID NO: 80370 - DNA, 25 bp, Probe Sequence
tggataagttgaagcgtaatcattc

SEQ ID NO: 80371 - DNA, 25 bp, Probe Sequence
ctggataagttgaagcgtaatcatt

SEQ ID NO: 80372 - DNA, 25 bp, Probe Sequence
ctaatcagagacacttcaccctttg

SEQ ID NO: 80373 - DNA, 25 bp, Probe Sequence
aagtgtagagtgtttgctttagaag

SEQ ID NO: 80374 - DNA, 25 bp, Probe Sequence
caatgataatggcttgggatattca

SEQ ID NO: 80375 - DNA, 25 bp, Probe Sequence
taatcagagacacttcaccctttga

SEQ ID NO: 80376 - DNA, 25 bp, Probe Sequence
taatggcttgggatattcatgtttc

SEQ ID NO: 80377 - DNA, 25 bp, Probe Sequence
gctggataagttgaagcgtaatcat

SEQ ID NO: 80378 - DNA, 25 bp, Probe Sequence
gataatggcttgggatattcatgtt

SEQ ID NO: 80379 - DNA, 25 bp, Probe Sequence
taagttgaagcgtaatcattcatcg

SEQ ID NO: 80380 - DNA, 25 bp, Probe Sequence
ggataagttgaagcgtaatcattca

SEQ ID NO: 80381 - DNA, 25 bp, Probe Sequence
ttgctggataagttgaagcgtaatc

SEQ ID NO: 80382 - DNA, 25 bp, Probe Sequence
cttgctggataagttgaagcgtaat

SEQ ID NO: 80383 - DNA, 25 bp, Probe Sequence
tgataatggcttgggatattcatgt

SEQ ID NO: 80384 - DNA, 25 bp, Probe Sequence
ataatggcttgggatattcatgttt

SEQ ID NO: 80385 - DNA, 25 bp, Probe Sequence
tcatgtttccacaaatcaagacaag

SEQ ID NO: 80386 - DNA, 25 bp, Probe Sequence
ttcatgtttccacaaatcaagacaa

SEQ ID NO: 80387 - DNA, 25 bp, Probe Sequence
gctaatcagagacacttcacccttt

SEQ ID NO: 80388 - DNA, 25 bp, Probe Sequence
attcatgtttccacaaatcaagaca

SEQ ID NO: 80389 - DNA, 25 bp, Probe Sequence
aagttgaagcgtaatcattcatcgt

SEQ ID NO: 80390 - DNA, 25 bp, Probe Sequence
ttgtcctgtgtagatatttacttca

SEQ ID NO: 80391 - DNA, 25 bp, Probe Sequence
tgtcctgtgtagatatttacttcat

SEQ ID NO: 80392 - DNA, 25 bp, Probe Sequence
gggatattcatgtttccacaaatca

SEQ ID NO: 80393 - DNA, 25 bp, Probe Sequence
ccaagctaatcagagacacttcacc

SEQ ID NO: 80394 - DNA, 25 bp, Probe Sequence
tgcgtgctaataacagtagtatagg

SEQ ID NO: 80395 - DNA, 25 bp, Probe Sequence
aggataatgcgtgctaataacagta

SEQ ID NO: 80396 - DNA, 25 bp, Probe Sequence
taggataatgcgtgctaataacagt

SEQ ID NO: 80397 - DNA, 25 bp, Probe Sequence
cgtgctaataacagtagtataggct

SEQ ID NO: 80398 - DNA, 25 bp, Probe Sequence
ggataatgcgtgctaataacagtag

SEQ ID NO: 80399 - DNA, 25 bp, Probe Sequence
gataatgcgtgctaataacagtagt

SEQ ID NO: 80400 - DNA, 25 bp, Probe Sequence
gcgtgctaataacagtagtataggc

SEQ ID NO: 80401 - DNA, 25 bp, Probe Sequence
actaggataatgcgtgctaataaca

SEQ ID NO: 80402 - DNA, 25 bp, Probe Sequence
gctaataacagtagtataggcttcg

SEQ ID NO: 80403 - DNA, 25 bp, Probe Sequence
ctaggataatgcgtgctaataacag

SEQ ID NO: 80404 - DNA, 25 bp, Probe Sequence
atgcgtgctaataacagtagtatag

SEQ ID NO: 80405 - DNA, 25 bp, Probe Sequence
gtgctaataacagtagtataggctt

SEQ ID NO: 80406 - DNA, 25 bp, Probe Sequence
aatgcgtgctaataacagtagtata

SEQ ID NO: 80407 - DNA, 25 bp, Probe Sequence
taatgcgtgctaataacagtagtat

SEQ ID NO: 80408 - DNA, 25 bp, Probe Sequence
ataatgcgtgctaataacagtagta

SEQ ID NO: 80409 - DNA, 25 bp, Probe Sequence
atctgttgagtaatccaggaatgtt

SEQ ID NO: 80410 - DNA, 25 bp, Probe Sequence
aatctgttgagtaatccaggaatgt

SEQ ID NO: 80411 - DNA, 25 bp, Probe Sequence
tctgttgagtaatccaggaatgtta

SEQ ID NO: 80412 - DNA, 25 bp, Probe Sequence
tgctaataacagtagtataggcttc

SEQ ID NO: 80413 - DNA, 25 bp, Probe Sequence
attcactaggataatgcgtgctaat

SEQ ID NO: 80414 - DNA, 25 bp, Probe Sequence
cactaggataatgcgtgctaataac

SEQ ID NO: 80415 - DNA, 25 bp, Probe Sequence
tcactaggataatgcgtgctaataa

SEQ ID NO: 80416 - DNA, 25 bp, Probe Sequence
ttcactaggataatgcgtgctaata

SEQ ID NO: 80417 - DNA, 25 bp, Probe Sequence
ctgttgagtaatccaggaatgttac

SEQ ID NO: 80418 - DNA, 25 bp, Probe Sequence
cttatgctgtgttagtttcgttgtc

SEQ ID NO: 80419 - DNA, 25 bp, Probe Sequence
tatatgtgtgtccctcattcctttc

SEQ ID NO: 80420 - DNA, 25 bp, Probe Sequence
ttatatgtgtgtccctcattccttt

SEQ ID NO: 80421 - DNA, 25 bp, Probe Sequence
gttatatgtgtgtccctcattcctt

SEQ ID NO: 80422 - DNA, 25 bp, Probe Sequence
ttatgctgtgttagtttcgttgtca

SEQ ID NO: 80423 - DNA, 25 bp, Probe Sequence
aagtccttatgctgtgttagtttcg

SEQ ID NO: 80424 - DNA, 25 bp, Probe Sequence
tccttatgctgtgttagtttcgttg

SEQ ID NO: 80425 - DNA, 25 bp, Probe Sequence
gtccttatgctgtgttagtttcgtt

SEQ ID NO: 80426 - DNA, 25 bp, Probe Sequence
taagtccttatgctgtgttagtttc

SEQ ID NO: 80427 - DNA, 25 bp, Probe Sequence
gcttaagtccttatgctgtgttagt

SEQ ID NO: 80428 - DNA, 25 bp, Probe Sequence
ccttatgctgtgttagtttcgttgt

SEQ ID NO: 80429 - DNA, 25 bp, Probe Sequence
ttaagtccttatgctgtgttagttt

SEQ ID NO: 80430 - DNA, 25 bp, Probe Sequence
cttaagtccttatgctgtgttagtt

SEQ ID NO: 80431 - DNA, 25 bp, Probe Sequence
ggttatatgtgtgtccctcattcct

SEQ ID NO: 80432 - DNA, 25 bp, Probe Sequence
ggcttaagtccttatgctgtgttag

SEQ ID NO: 80433 - DNA, 25 bp, Probe Sequence
agtccttatgctgtgttagtttcgt

SEQ ID NO: 80434 - DNA, 25 bp, Probe Sequence
atatgtgtgtccctcattcctttcc

SEQ ID NO: 80435 - DNA, 25 bp, Probe Sequence
acggttatatgtgtgtccctcattc

SEQ ID NO: 80436 - DNA, 25 bp, Probe Sequence
tatgctgtgttagtttcgttgtcag

SEQ ID NO: 80437 - DNA, 25 bp, Probe Sequence
ataattccacgagaaagggcatctt

SEQ ID NO: 80438 - DNA, 25 bp, Probe Sequence
tccttctttaagacacagacgtaag

SEQ ID NO: 80439 - DNA, 25 bp, Probe Sequence
cggttatatgtgtgtccctcattcc

SEQ ID NO: 80440 - DNA, 25 bp, Probe Sequence
taattccacgagaaagggcatcttc

SEQ ID NO: 80441 - DNA, 25 bp, Probe Sequence
agggcatcttctgtccttctttaag

SEQ ID NO: 80442 - DNA, 25 bp, Probe Sequence
atccagtaagcataagaagcctaag

SEQ ID NO: 80443 - DNA, 25 bp, Probe Sequence
agtgacattgagataaccagtgaat

SEQ ID NO: 80444 - DNA, 25 bp, Probe Sequence
aagtgacattgagataaccagtgaa

SEQ ID NO: 80445 - DNA, 25 bp, Probe Sequence
aatccagtaagcataagaagcctaa

SEQ ID NO: 80446 - DNA, 25 bp, Probe Sequence
caatccagtaagcataagaagccta

SEQ ID NO: 80447 - DNA, 25 bp, Probe Sequence
taagtgacattgagataaccagtga

SEQ ID NO: 80448 - DNA, 25 bp, Probe Sequence
ccagtaagcataagaagcctaagag

SEQ ID NO: 80449 - DNA, 25 bp, Probe Sequence
accacaatccagtaagcataagaag

SEQ ID NO: 80450 - DNA, 25 bp, Probe Sequence
ctaagtgacattgagataaccagtg

SEQ ID NO: 80451 - DNA, 25 bp, Probe Sequence
tccagtaagcataagaagcctaaga

SEQ ID NO: 80452 - DNA, 25 bp, Probe Sequence
caccacaatccagtaagcataagaa

SEQ ID NO: 80453 - DNA, 25 bp, Probe Sequence
gtgacattgagataaccagtgaatt

SEQ ID NO: 80454 - DNA, 25 bp, Probe Sequence
actaagtgacattgagataaccagt

SEQ ID NO: 80455 - DNA, 25 bp, Probe Sequence
cacaatccagtaagcataagaagcc

SEQ ID NO: 80456 - DNA, 25 bp, Probe Sequence
ccacaatccagtaagcataagaagc

SEQ ID NO: 80457 - DNA, 25 bp, Probe Sequence
acattgagataaccagtgaattaca

SEQ ID NO: 80458 - DNA, 25 bp, Probe Sequence
acaatccagtaagcataagaagcct

SEQ ID NO: 80459 - DNA, 25 bp, Probe Sequence
attccaccacaatccagtaagcata

SEQ ID NO: 80460 - DNA, 25 bp, Probe Sequence
ttccaccacaatccagtaagcataa

SEQ ID NO: 80461 - DNA, 25 bp, Probe Sequence
tgacattgagataaccagtgaatta

SEQ ID NO: 80462 - DNA, 25 bp, Probe Sequence
ccaactaatatgtctctatctcagg

SEQ ID NO: 80463 - DNA, 25 bp, Probe Sequence
gtaagcataagaagcctaagaggaa

SEQ ID NO: 80464 - DNA, 25 bp, Probe Sequence
taagcataagaagcctaagaggaag

SEQ ID NO: 80465 - DNA, 25 bp, Probe Sequence
tgagataaccagtgaattacacagg

SEQ ID NO: 80466 - DNA, 25 bp, Probe Sequence
caactcagtgcttcaggtcttaatg

SEQ ID NO: 80467 - DNA, 25 bp, Probe Sequence
taagaagacattagatgatgctgaa

SEQ ID NO: 80468 - DNA, 25 bp, Probe Sequence
cttaatgcctccatacctcttcctc

SEQ ID NO: 80469 - DNA, 25 bp, Probe Sequence
ataagaagacattagatgatgctga

SEQ ID NO: 80470 - DNA, 25 bp, Probe Sequence
ggaataagaagacattagatgatgc

SEQ ID NO: 80471 - DNA, 25 bp, Probe Sequence
gtcttaatgcctccatacctcttcc

SEQ ID NO: 80472 - DNA, 25 bp, Probe Sequence
tcttaatgcctccatacctcttcct

SEQ ID NO: 80473 - DNA, 25 bp, Probe Sequence
ccaactcagtgcttcaggtcttaat

SEQ ID NO: 80474 - DNA, 25 bp, Probe Sequence
attagatgatgctgaaagaccaaga

SEQ ID NO: 80475 - DNA, 25 bp, Probe Sequence
tacctcttcctcaccaactttacta

SEQ ID NO: 80476 - DNA, 25 bp, Probe Sequence
ttaatgcctccatacctcttcctca

SEQ ID NO: 80477 - DNA, 25 bp, Probe Sequence
atacctcttcctcaccaactttact

SEQ ID NO: 80478 - DNA, 25 bp, Probe Sequence
catacctcttcctcaccaactttac

SEQ ID NO: 80479 - DNA, 25 bp, Probe Sequence
ttagatgatgctgaaagaccaagac

SEQ ID NO: 80480 - DNA, 25 bp, Probe Sequence
agtggaatgtttggaataagaagac

SEQ ID NO: 80481 - DNA, 25 bp, Probe Sequence
cagtggaatgtttggaataagaaga

SEQ ID NO: 80482 - DNA, 25 bp, Probe Sequence
tcagtggaatgtttggaataagaag

SEQ ID NO: 80483 - DNA, 25 bp, Probe Sequence
cattagatgatgctgaaagaccaag

SEQ ID NO: 80484 - DNA, 25 bp, Probe Sequence
acattagatgatgctgaaagaccaa

SEQ ID NO: 80485 - DNA, 25 bp, Probe Sequence
agacattagatgatgctgaaagacc

SEQ ID NO: 80486 - DNA, 25 bp, Probe Sequence
aagacattagatgatgctgaaagac

SEQ ID NO: 80487 - DNA, 25 bp, Probe Sequence
gacattagatgatgctgaaagacca

SEQ ID NO: 80488 - DNA, 25 bp, Probe Sequence
gctgagatttaatgggcacctatta

SEQ ID NO: 80489 - DNA, 25 bp, Probe Sequence
atctgctttgttctatttctcccaa

SEQ ID NO: 80490 - DNA, 25 bp, Probe Sequence
ggagagggtattacaatcaacaaga

SEQ ID NO: 80491 - DNA, 25 bp, Probe Sequence
aggagagggtattacaatcaacaag

SEQ ID NO: 80492 - DNA, 25 bp, Probe Sequence
gaggagagggtattacaatcaacaa

SEQ ID NO: 80493 - DNA, 25 bp, Probe Sequence
agcatattaaagggttatccactgt

SEQ ID NO: 80494 - DNA, 25 bp, Probe Sequence
gagggtattacaatcaacaagactg

SEQ ID NO: 80495 - DNA, 25 bp, Probe Sequence
agagggtattacaatcaacaagact

SEQ ID NO: 80496 - DNA, 25 bp, Probe Sequence
gagagggtattacaatcaacaagac

SEQ ID NO: 80497 - DNA, 25 bp, Probe Sequence
ttgcttgtaacagttgtgaggtgat

SEQ ID NO: 80498 - DNA, 25 bp, Probe Sequence
ccattcttctctgtctaaagtccat

SEQ ID NO: 80499 - DNA, 25 bp, Probe Sequence
gcatattaaagggttatccactgtg

SEQ ID NO: 80500 - DNA, 25 bp, Probe Sequence
ttctctgtctaaagtccataagtca

SEQ ID NO: 80501 - DNA, 25 bp, Probe Sequence
ttacaatcaacaagactgaaacacc

SEQ ID NO: 80502 - DNA, 25 bp, Probe Sequence
agtgtggattgtatttagtgactca

SEQ ID NO: 80503 - DNA, 25 bp, Probe Sequence
ggaggagagggtattacaatcaaca

SEQ ID NO: 80504 - DNA, 25 bp, Probe Sequence
agggtattacaatcaacaagactga

SEQ ID NO: 80505 - DNA, 25 bp, Probe Sequence
gtaaatatgggatctggaaaggcta

SEQ ID NO: 80506 - DNA, 25 bp, Probe Sequence
taaatatgggatctggaaaggctag

SEQ ID NO: 80507 - DNA, 25 bp, Probe Sequence
ctccttacaatgccattccattctt

SEQ ID NO: 80508 - DNA, 25 bp, Probe Sequence
atgtaaatatgggatctggaaaggc

SEQ ID NO: 80509 - DNA, 25 bp, Probe Sequence
tcttctctgtctaaagtccataagt

SEQ ID NO: 80510 - DNA, 25 bp, Probe Sequence
gggtattacaatcaacaagactgaa

SEQ ID NO: 80511 - DNA, 25 bp, Probe Sequence
tccttacaatgccattccattcttg

SEQ ID NO: 80512 - DNA, 25 bp, Probe Sequence
cttctctgtctaaagtccataagtc

SEQ ID NO: 80513 - DNA, 25 bp, Probe Sequence
atatcacactcctgaatacatggcg

SEQ ID NO: 80514 - DNA, 25 bp, Probe Sequence
gatcctgtcgagaaggaagtgttct

SEQ ID NO: 80515 - DNA, 25 bp, Probe Sequence
taaccaattctcctggaccccattc

SEQ ID NO: 80516 - DNA, 25 bp, Probe Sequence
ctaaccaattctcctggaccccatt

SEQ ID NO: 80517 - DNA, 25 bp, Probe Sequence
caattctcctggaccccattctgag

SEQ ID NO: 80518 - DNA, 25 bp, Probe Sequence
cgatcctgtcgagaaggaagtgttc

SEQ ID NO: 80519 - DNA, 25 bp, Probe Sequence
tcaataaagtttgtacactttccaa

SEQ ID NO: 80520 - DNA, 25 bp, Probe Sequence
ttcaataaagtttgtacactttcca

SEQ ID NO: 80521 - DNA, 25 bp, Probe Sequence
caataaagtttgtacactttccaaa

SEQ ID NO: 80522 - DNA, 25 bp, Probe Sequence
tttcaataaagtttgtacactttcc

SEQ ID NO: 80523 - DNA, 25 bp, Probe Sequence
aataaagtttgtacactttccaaaa

SEQ ID NO: 80524 - DNA, 25 bp, Probe Sequence
gcatctatttgaaagcatactgtga

SEQ ID NO: 80525 - DNA, 25 bp, Probe Sequence
atgtatgagtatgacagggaacttg

SEQ ID NO: 80526 - DNA, 25 bp, Probe Sequence
aatgtatgagtatgacagggaactt

SEQ ID NO: 80527 - DNA, 25 bp, Probe Sequence
aaatgtatgagtatgacagggaact

SEQ ID NO: 80528 - DNA, 25 bp, Probe Sequence
catctatttgaaagcatactgtgaa

SEQ ID NO: 80529 - DNA, 25 bp, Probe Sequence
aatgtcattgtttgctgttattagt

SEQ ID NO: 80530 - DNA, 25 bp, Probe Sequence
aagtataatgtcattgtttgctgtt

SEQ ID NO: 80531 - DNA, 25 bp, Probe Sequence
aaagtataatgtcattgtttgctgt

SEQ ID NO: 80532 - DNA, 25 bp, Probe Sequence
tgtcattgtttgctgttattagtaa

SEQ ID NO: 80533 - DNA, 25 bp, Probe Sequence
tgtatgagtatgacagggaacttgc

SEQ ID NO: 80534 - DNA, 25 bp, Probe Sequence
atctatttgaaagcatactgtgaaa

SEQ ID NO: 80535 - DNA, 25 bp, Probe Sequence
atgtcattgtttgctgttattagta

SEQ ID NO: 80536 - DNA, 25 bp, Probe Sequence
gagatcgagatcatcctggctaaca

SEQ ID NO: 80537 - DNA, 25 bp, Probe Sequence
gtatgagtatgacagggaacttgcc

SEQ ID NO: 80538 - DNA, 25 bp, Probe Sequence
agtataatgtcattgtttgctgtta

SEQ ID NO: 80539 - DNA, 25 bp, Probe Sequence
acagaagattcatagtgtaatatgg

SEQ ID NO: 80540 - DNA, 25 bp, Probe Sequence
agatcgagatcatcctggctaacac

SEQ ID NO: 80541 - DNA, 25 bp, Probe Sequence
cagaagattcatagtgtaatatgga

SEQ ID NO: 80542 - DNA, 25 bp, Probe Sequence
tgtaaagtataatgtcattgtttgc

SEQ ID NO: 80543 - DNA, 25 bp, Probe Sequence
tgaaaatgtatgagtatgacaggga

SEQ ID NO: 80544 - DNA, 25 bp, Probe Sequence
gtcattgtttgctgttattagtaat

SEQ ID NO: 80545 - DNA, 25 bp, Probe Sequence
tctcgatttataatttcaatgcagt

SEQ ID NO: 80546 - DNA, 25 bp, Probe Sequence
aaaatgtatgagtatgacagggaac

SEQ ID NO: 80547 - DNA, 25 bp, Probe Sequence
tgtcattttctgctattatcactga

SEQ ID NO: 80548 - DNA, 25 bp, Probe Sequence
aagagtacaatgatagttgccagag

SEQ ID NO: 80549 - DNA, 25 bp, Probe Sequence
aatggagaatgtggaagagacagtt

SEQ ID NO: 80550 - DNA, 25 bp, Probe Sequence
agagtacaatgatagttgccagagg

SEQ ID NO: 80551 - DNA, 25 bp, Probe Sequence
gaagcaatggagaatgtggaagaga

SEQ ID NO: 80552 - DNA, 25 bp, Probe Sequence
ttcaaataaaccaacaacagaccaa

SEQ ID NO: 80553 - DNA, 25 bp, Probe Sequence
tcaaataaaccaacaacagaccaac

SEQ ID NO: 80554 - DNA, 25 bp, Probe Sequence
aaaccaatgtgacaagtgctttaat

SEQ ID NO: 80555 - DNA, 25 bp, Probe Sequence
agccataaacaacgaaattctcaaa

SEQ ID NO: 80556 - DNA, 25 bp, Probe Sequence
aaacagccataaacaacgaaattct

SEQ ID NO: 80557 - DNA, 25 bp, Probe Sequence
cagccataaacaacgaaattctcaa

SEQ ID NO: 80558 - DNA, 25 bp, Probe Sequence
aacagccataaacaacgaaattctc

SEQ ID NO: 80559 - DNA, 25 bp, Probe Sequence
aaccaatgtgacaagtgctttaatg

SEQ ID NO: 80560 - DNA, 25 bp, Probe Sequence
aagcaatggagaatgtggaagagac

SEQ ID NO: 80561 - DNA, 25 bp, Probe Sequence
tgaagcaatggagaatgtggaagag

SEQ ID NO: 80562 - DNA, 25 bp, Probe Sequence
ctgaagcaatggagaatgtggaaga

SEQ ID NO: 80563 - DNA, 25 bp, Probe Sequence
ttctggacttacatttagatgaccc

SEQ ID NO: 80564 - DNA, 25 bp, Probe Sequence
gccataaacaacgaaattctcaaat

SEQ ID NO: 80565 - DNA, 25 bp, Probe Sequence
caaataaaccaacaacagaccaacc

SEQ ID NO: 80566 - DNA, 25 bp, Probe Sequence
gttcaaataaaccaacaacagacca

SEQ ID NO: 80567 - DNA, 25 bp, Probe Sequence
aatgtgacaagtgctttaatggaga

SEQ ID NO: 80568 - DNA, 25 bp, Probe Sequence
caatgtgacaagtgctttaatggag

SEQ ID NO: 80569 - DNA, 25 bp, Probe Sequence
ttacatttagatgacccaggctttc

SEQ ID NO: 80570 - DNA, 25 bp, Probe Sequence
cttacatttagatgacccaggcttt

SEQ ID NO: 80571 - DNA, 25 bp, Probe Sequence
gcttctggacttacatttagatgac

SEQ ID NO: 80572 - DNA, 25 bp, Probe Sequence
aataataatgctgaccacttaccgt

SEQ ID NO: 80573 - DNA, 25 bp, Probe Sequence
ccaagatgaatacacagccaatagt

SEQ ID NO: 80574 - DNA, 25 bp, Probe Sequence
taataataatgctgaccacttaccg

SEQ ID NO: 80575 - DNA, 25 bp, Probe Sequence
caagatgaatacacagccaatagta

SEQ ID NO: 80576 - DNA, 25 bp, Probe Sequence
aatgatgccaagatgaatacacagc

SEQ ID NO: 80577 - DNA, 25 bp, Probe Sequence
caagtcaacattgtagtaacacact

SEQ ID NO: 80578 - DNA, 25 bp, Probe Sequence
gccaagatgaatacacagccaatag

SEQ ID NO: 80579 - DNA, 25 bp, Probe Sequence
ataataatgctgaccacttaccgtc

SEQ ID NO: 80580 - DNA, 25 bp, Probe Sequence
tgccaagatgaatacacagccaata

SEQ ID NO: 80581 - DNA, 25 bp, Probe Sequence
aaatgatgccaagatgaatacacag

SEQ ID NO: 80582 - DNA, 25 bp, Probe Sequence
gaaatgatgccaagatgaatacaca

SEQ ID NO: 80583 - DNA, 25 bp, Probe Sequence
ggaaatgatgccaagatgaatacac

SEQ ID NO: 80584 - DNA, 25 bp, Probe Sequence
atgccaagatgaatacacagccaat

SEQ ID NO: 80585 - DNA, 25 bp, Probe Sequence
gcataaacaaattcggactctctat

SEQ ID NO: 80586 - DNA, 25 bp, Probe Sequence
aatcagtcattatggtttggagatg

SEQ ID NO: 80587 - DNA, 25 bp, Probe Sequence
gagccttgatcgtacctaattccaa

SEQ ID NO: 80588 - DNA, 25 bp, Probe Sequence
atcagtcattatggtttggagatgc

SEQ ID NO: 80589 - DNA, 25 bp, Probe Sequence
aagatgaatacacagccaatagtat

SEQ ID NO: 80590 - DNA, 25 bp, Probe Sequence
ctatgagtctccacgcaatttctac

SEQ ID NO: 80591 - DNA, 25 bp, Probe Sequence
tctatgagtctccacgcaatttcta

SEQ ID NO: 80592 - DNA, 25 bp, Probe Sequence
tcgtacctaattccaaatcagtcat

SEQ ID NO: 80593 - DNA, 25 bp, Probe Sequence
atcgtacctaattccaaatcagtca

SEQ ID NO: 80594 - DNA, 25 bp, Probe Sequence
aaatcagtcattatggtttggagat

SEQ ID NO: 80595 - DNA, 25 bp, Probe Sequence
cgtacctaattccaaatcagtcatt

SEQ ID NO: 80596 - DNA, 25 bp, Probe Sequence
ccagcaattccattactagataggt

SEQ ID NO: 80597 - DNA, 25 bp, Probe Sequence
accagcaattccattactagatagg

SEQ ID NO: 80598 - DNA, 25 bp, Probe Sequence
atactatctcacaccagtcagaatg

SEQ ID NO: 80599 - DNA, 25 bp, Probe Sequence
ttactagataggtctggatgtctgg

SEQ ID NO: 80600 - DNA, 25 bp, Probe Sequence
gatactatctcacaccagtcagaat

SEQ ID NO: 80601 - DNA, 25 bp, Probe Sequence
cagcaattccattactagataggtc

SEQ ID NO: 80602 - DNA, 25 bp, Probe Sequence
tactagataggtctggatgtctgga

SEQ ID NO: 80603 - DNA, 25 bp, Probe Sequence
gcaattccattactagataggtctg

SEQ ID NO: 80604 - DNA, 25 bp, Probe Sequence
agcaattccattactagataggtct

SEQ ID NO: 80605 - DNA, 25 bp, Probe Sequence
atagaatgccatagatccatgttcc

SEQ ID NO: 80606 - DNA, 25 bp, Probe Sequence
aaccagcaattccattactagatag

SEQ ID NO: 80607 - DNA, 25 bp, Probe Sequence
tcatagaatgccatagatccatgtt

SEQ ID NO: 80608 - DNA, 25 bp, Probe Sequence
catagaatgccatagatccatgttc

SEQ ID NO: 80609 - DNA, 25 bp, Probe Sequence
atcatagaatgccatagatccatgt

SEQ ID NO: 80610 - DNA, 25 bp, Probe Sequence
attactagataggtctggatgtctg

SEQ ID NO: 80611 - DNA, 25 bp, Probe Sequence
cattactagataggtctggatgtct

SEQ ID NO: 80612 - DNA, 25 bp, Probe Sequence
actagataggtctggatgtctggaa

SEQ ID NO: 80613 - DNA, 25 bp, Probe Sequence
aatcatagaatgccatagatccatg

SEQ ID NO: 80614 - DNA, 25 bp, Probe Sequence
ccattactagataggtctggatgtc

SEQ ID NO: 80615 - DNA, 25 bp, Probe Sequence
agtttggaaagaagtgagagttgaa

SEQ ID NO: 80616 - DNA, 25 bp, Probe Sequence
gagagtttggaaagaagtgagagtt

SEQ ID NO: 80617 - DNA, 25 bp, Probe Sequence
tactatctcacaccagtcagaatgg

SEQ ID NO: 80618 - DNA, 25 bp, Probe Sequence
cattcaaaccagcaattccattact

SEQ ID NO: 80619 - DNA, 25 bp, Probe Sequence
gagtttggaaagaagtgagagttga

SEQ ID NO: 80620 - DNA, 25 bp, Probe Sequence
agacatggagttagtggtagaagaa

SEQ ID NO: 80621 - DNA, 25 bp, Probe Sequence
cagacatggagttagtggtagaaga

SEQ ID NO: 80622 - DNA, 25 bp, Probe Sequence
tcagacatggagttagtggtagaag

SEQ ID NO: 80623 - DNA, 25 bp, Probe Sequence
gtcagacatggagttagtggtagaa

SEQ ID NO: 80624 - DNA, 25 bp, Probe Sequence
ttgtcatgcttatctcctgtctctt

SEQ ID NO: 80625 - DNA, 25 bp, Probe Sequence
agtcagacatggagttagtggtaga

SEQ ID NO: 80626 - DNA, 25 bp, Probe Sequence
cagtcagacatggagttagtggtag

SEQ ID NO: 80627 - DNA, 25 bp, Probe Sequence
gcttatctcctgtctctttctgttt

SEQ ID NO: 80628 - DNA, 25 bp, Probe Sequence
agttagtggtagaagaaacagaagg

SEQ ID NO: 80629 - DNA, 25 bp, Probe Sequence
ggagttagtggtagaagaaacagaa

SEQ ID NO: 80630 - DNA, 25 bp, Probe Sequence
atggagttagtggtagaagaaacag

SEQ ID NO: 80631 - DNA, 25 bp, Probe Sequence
atgcttatctcctgtctctttctgt

SEQ ID NO: 80632 - DNA, 25 bp, Probe Sequence
gttagtggtagaagaaacagaaggg

SEQ ID NO: 80633 - DNA, 25 bp, Probe Sequence
tggagttagtggtagaagaaacaga

SEQ ID NO: 80634 - DNA, 25 bp, Probe Sequence
tgcttatctcctgtctctttctgtt

SEQ ID NO: 80635 - DNA, 25 bp, Probe Sequence
gagttagtggtagaagaaacagaag

SEQ ID NO: 80636 - DNA, 25 bp, Probe Sequence
gacatggagttagtggtagaagaaa

SEQ ID NO: 80637 - DNA, 25 bp, Probe Sequence
catggagttagtggtagaagaaaca

SEQ ID NO: 80638 - DNA, 25 bp, Probe Sequence
acatggagttagtggtagaagaaac

SEQ ID NO: 80639 - DNA, 25 bp, Probe Sequence
catgcttatctcctgtctctttctg

SEQ ID NO: 80640 - DNA, 25 bp, Probe Sequence
tcatgcttatctcctgtctctttct

SEQ ID NO: 80641 - DNA, 25 bp, Probe Sequence
gtcatgcttatctcctgtctctttc

SEQ ID NO: 80642 - DNA, 25 bp, Probe Sequence
cttcttatttgagaggtgtgctaag

SEQ ID NO: 80643 - DNA, 25 bp, Probe Sequence
gatgacatactttgagagttacagt

SEQ ID NO: 80644 - DNA, 25 bp, Probe Sequence
atgaagtatgtgtgtgtgtctatgt

SEQ ID NO: 80645 - DNA, 25 bp, Probe Sequence
ttgtgtagatgaagtatgtgtgtgt

SEQ ID NO: 80646 - DNA, 25 bp, Probe Sequence
tgaagtatgtgtgtgtgtctatgta

SEQ ID NO: 80647 - DNA, 25 bp, Probe Sequence
gatgaagtatgtgtgtgtgtctatg

SEQ ID NO: 80648 - DNA, 25 bp, Probe Sequence
tgtagatgaagtatgtgtgtgtgtc

SEQ ID NO: 80649 - DNA, 25 bp, Probe Sequence
gtgtagatgaagtatgtgtgtgtgt

SEQ ID NO: 80650 - DNA, 25 bp, Probe Sequence
tgtgtagatgaagtatgtgtgtgtg

SEQ ID NO: 80651 - DNA, 25 bp, Probe Sequence
gcctcctatgtgtaattgtgtagat

SEQ ID NO: 80652 - DNA, 25 bp, Probe Sequence
attgtgtagatgaagtatgtgtgtg

SEQ ID NO: 80653 - DNA, 25 bp, Probe Sequence
gtagatgaagtatgtgtgtgtgtct

SEQ ID NO: 80654 - DNA, 25 bp, Probe Sequence
agatgaagtatgtgtgtgtgtctat

SEQ ID NO: 80655 - DNA, 25 bp, Probe Sequence
agcctcctatgtgtaattgtgtaga

SEQ ID NO: 80656 - DNA, 25 bp, Probe Sequence
cagcctcctatgtgtaattgtgtag

SEQ ID NO: 80657 - DNA, 25 bp, Probe Sequence
gaagtatgtgtgtgtgtctatgtaa

SEQ ID NO: 80658 - DNA, 25 bp, Probe Sequence
cctcctatgtgtaattgtgtagatg

SEQ ID NO: 80659 - DNA, 25 bp, Probe Sequence
aattgtgtagatgaagtatgtgtgt

SEQ ID NO: 80660 - DNA, 25 bp, Probe Sequence
acacagtggattcttacatactctt

SEQ ID NO: 80661 - DNA, 25 bp, Probe Sequence
cacacagtggattcttacatactct

SEQ ID NO: 80662 - DNA, 25 bp, Probe Sequence
acacacagtggattcttacatactc

SEQ ID NO: 80663 - DNA, 25 bp, Probe Sequence
ctcctatgtgtaattgtgtagatga

SEQ ID NO: 80664 - DNA, 25 bp, Probe Sequence
taatagtgaagagcgatcagcattg

SEQ ID NO: 80665 - DNA, 25 bp, Probe Sequence
gtaatagtgaagagcgatcagcatt

SEQ ID NO: 80666 - DNA, 25 bp, Probe Sequence
cacacacagtggattcttacatact

SEQ ID NO: 80667 - DNA, 25 bp, Probe Sequence
acagcctcctatgtgtaattgtgta

SEQ ID NO: 80668 - DNA, 25 bp, Probe Sequence
gtgaagatggaggtatgagttagta

SEQ ID NO: 80669 - DNA, 25 bp, Probe Sequence
ggtgaagatggaggtatgagttagt

SEQ ID NO: 80670 - DNA, 25 bp, Probe Sequence
tggtgaagatggaggtatgagttag

SEQ ID NO: 80671 - DNA, 25 bp, Probe Sequence
ctggtgaagatggaggtatgagtta

SEQ ID NO: 80672 - DNA, 25 bp, Probe Sequence
gatggaggtatgagttagtaacgag

SEQ ID NO: 80673 - DNA, 25 bp, Probe Sequence
atggaggtatgagttagtaacgaga

SEQ ID NO: 80674 - DNA, 25 bp, Probe Sequence
agatggaggtatgagttagtaacga

SEQ ID NO: 80675 - DNA, 25 bp, Probe Sequence
aagatggaggtatgagttagtaacg

SEQ ID NO: 80676 - DNA, 25 bp, Probe Sequence
tgaagatggaggtatgagttagtaa

SEQ ID NO: 80677 - DNA, 25 bp, Probe Sequence
ggaggtatgagttagtaacgagagt

SEQ ID NO: 80678 - DNA, 25 bp, Probe Sequence
tggaggtatgagttagtaacgagag

SEQ ID NO: 80679 - DNA, 25 bp, Probe Sequence
gaggtatgagttagtaacgagagta

SEQ ID NO: 80680 - DNA, 25 bp, Probe Sequence
aggtatgagttagtaacgagagtaa

SEQ ID NO: 80681 - DNA, 25 bp, Probe Sequence
gaagatggaggtatgagttagtaac

SEQ ID NO: 80682 - DNA, 25 bp, Probe Sequence
agcaaagtctcagaaacacataaag

SEQ ID NO: 80683 - DNA, 25 bp, Probe Sequence
gcaaagtctcagaaacacataaaga

SEQ ID NO: 80684 - DNA, 25 bp, Probe Sequence
cttagcaaagtctcagaaacacata

SEQ ID NO: 80685 - DNA, 25 bp, Probe Sequence
tagcaaagtctcagaaacacataaa

SEQ ID NO: 80686 - DNA, 25 bp, Probe Sequence
ttagcaaagtctcagaaacacataa

SEQ ID NO: 80687 - DNA, 25 bp, Probe Sequence
ccttagcaaagtctcagaaacacat

SEQ ID NO: 80688 - DNA, 25 bp, Probe Sequence
atgagttagtaacgagagtaaaggg

SEQ ID NO: 80689 - DNA, 25 bp, Probe Sequence
ttgagtctatttgggaaattgaggt

SEQ ID NO: 80690 - DNA, 25 bp, Probe Sequence
aaacacacacacaaacaagtaataa

SEQ ID NO: 80691 - DNA, 25 bp, Probe Sequence
tgagtctatttgggaaattgaggtc

SEQ ID NO: 80692 - DNA, 25 bp, Probe Sequence
ttgaaccttaatgagagtctgtctt

SEQ ID NO: 80693 - DNA, 25 bp, Probe Sequence
agttctggaagatgctaattctcat

SEQ ID NO: 80694 - DNA, 25 bp, Probe Sequence
ttcagttctggaagatgctaattct

SEQ ID NO: 80695 - DNA, 25 bp, Probe Sequence
gttcagttctggaagatgctaattc

SEQ ID NO: 80696 - DNA, 25 bp, Probe Sequence
tcagttctggaagatgctaattctc

SEQ ID NO: 80697 - DNA, 25 bp, Probe Sequence
tatgaatctgtcctgtgagtgtgaa

SEQ ID NO: 80698 - DNA, 25 bp, Probe Sequence
ttatgaatctgtcctgtgagtgtga

SEQ ID NO: 80699 - DNA, 25 bp, Probe Sequence
cagttctggaagatgctaattctca

SEQ ID NO: 80700 - DNA, 25 bp, Probe Sequence
tgaaccttaatgagagtctgtctta

SEQ ID NO: 80701 - DNA, 25 bp, Probe Sequence
ggttcagttctggaagatgctaatt

SEQ ID NO: 80702 - DNA, 25 bp, Probe Sequence
gagtagttcattaagacctgattgg

SEQ ID NO: 80703 - DNA, 25 bp, Probe Sequence
atgaatctgtcctgtgagtgtgaat

SEQ ID NO: 80704 - DNA, 25 bp, Probe Sequence
agaagagtagttcattaagacctga

SEQ ID NO: 80705 - DNA, 25 bp, Probe Sequence
aggttcagttctggaagatgctaat

SEQ ID NO: 80706 - DNA, 25 bp, Probe Sequence
aagaagagtagttcattaagacctg

SEQ ID NO: 80707 - DNA, 25 bp, Probe Sequence
tgaatctgtcctgtgagtgtgaatt

SEQ ID NO: 80708 - DNA, 25 bp, Probe Sequence
gaaccttaatgagagtctgtcttaa

SEQ ID NO: 80709 - DNA, 25 bp, Probe Sequence
ctctgaagtcaccatacatgaacaa

SEQ ID NO: 80710 - DNA, 25 bp, Probe Sequence
agagtagttcattaagacctgattg

SEQ ID NO: 80711 - DNA, 25 bp, Probe Sequence
acacctgtactaagtatgacatctt

SEQ ID NO: 80712 - DNA, 25 bp, Probe Sequence
aacacctgtactaagtatgacatct

SEQ ID NO: 80713 - DNA, 25 bp, Probe Sequence
gaagagtagttcattaagacctgat

SEQ ID NO: 80714 - DNA, 25 bp, Probe Sequence
agtagttcattaagacctgattggt

SEQ ID NO: 80715 - DNA, 25 bp, Probe Sequence
gtttccatttattcccttgttagca

SEQ ID NO: 80716 - DNA, 25 bp, Probe Sequence
gaccttctcttcataatcttgctct

SEQ ID NO: 80717 - DNA, 25 bp, Probe Sequence
accttctcttcataatcttgctctg

SEQ ID NO: 80718 - DNA, 25 bp, Probe Sequence
agaccttctcttcataatcttgctc

SEQ ID NO: 80719 - DNA, 25 bp, Probe Sequence
gaacagaacacacaagtatgaagtt

SEQ ID NO: 80720 - DNA, 25 bp, Probe Sequence
ggaacagaacacacaagtatgaagt

SEQ ID NO: 80721 - DNA, 25 bp, Probe Sequence
aagtggttacctgttcaagaatcaa

SEQ ID NO: 80722 - DNA, 25 bp, Probe Sequence
agtggttacctgttcaagaatcaag

SEQ ID NO: 80723 - DNA, 25 bp, Probe Sequence
tcaagtggttacctgttcaagaatc

SEQ ID NO: 80724 - DNA, 25 bp, Probe Sequence
ctcaagtggttacctgttcaagaat

SEQ ID NO: 80725 - DNA, 25 bp, Probe Sequence
ccttctcttcataatcttgctctga

SEQ ID NO: 80726 - DNA, 25 bp, Probe Sequence
tagaccttctcttcataatcttgct

SEQ ID NO: 80727 - DNA, 25 bp, Probe Sequence
caagtggttacctgttcaagaatca

SEQ ID NO: 80728 - DNA, 25 bp, Probe Sequence
cttctcttcataatcttgctctgag

SEQ ID NO: 80729 - DNA, 25 bp, Probe Sequence
ttagaccttctcttcataatcttgc

SEQ ID NO: 80730 - DNA, 25 bp, Probe Sequence
tctcaagtggttacctgttcaagaa

SEQ ID NO: 80731 - DNA, 25 bp, Probe Sequence
gttacctgttcaagaatcaagcaca

SEQ ID NO: 80732 - DNA, 25 bp, Probe Sequence
ggttacctgttcaagaatcaagcac

SEQ ID NO: 80733 - DNA, 25 bp, Probe Sequence
gtggttacctgttcaagaatcaagc

SEQ ID NO: 80734 - DNA, 25 bp, Probe Sequence
ctctcaagtggttacctgttcaaga

SEQ ID NO: 80735 - DNA, 25 bp, Probe Sequence
tggttacctgttcaagaatcaagca

SEQ ID NO: 80736 - DNA, 25 bp, Probe Sequence
tcttcataatcttgctctgagatgg

SEQ ID NO: 80737 - DNA, 25 bp, Probe Sequence
acagaacacacaagtatgaagtttc

SEQ ID NO: 80738 - DNA, 25 bp, Probe Sequence
catcctctcaagtggttacctgttc

SEQ ID NO: 80739 - DNA, 25 bp, Probe Sequence
aacagaacacacaagtatgaagttt

SEQ ID NO: 80740 - DNA, 25 bp, Probe Sequence
agctctcccttggtaagacttattt

SEQ ID NO: 80741 - DNA, 25 bp, Probe Sequence
ttgttaataaatggaatacttggct

SEQ ID NO: 80742 - DNA, 25 bp, Probe Sequence
gcgaagtgcattatagtccttgttt

SEQ ID NO: 80743 - DNA, 25 bp, Probe Sequence
tctcccttggtaagacttattttgt

SEQ ID NO: 80744 - DNA, 25 bp, Probe Sequence
gctctcccttggtaagacttatttt

SEQ ID NO: 80745 - DNA, 25 bp, Probe Sequence
tttgttaataaatggaatacttggc

SEQ ID NO: 80746 - DNA, 25 bp, Probe Sequence
ctctcccttggtaagacttattttg

SEQ ID NO: 80747 - DNA, 25 bp, Probe Sequence
ctcccttggtaagacttattttgtt

SEQ ID NO: 80748 - DNA, 25 bp, Probe Sequence
tgttaataaatggaatacttggcta

SEQ ID NO: 80749 - DNA, 25 bp, Probe Sequence
tcccttggtaagacttattttgtta

SEQ ID NO: 80750 - DNA, 25 bp, Probe Sequence
tgcgaagtgcattatagtccttgtt

SEQ ID NO: 80751 - DNA, 25 bp, Probe Sequence
ttgcgaagtgcattatagtccttgt

SEQ ID NO: 80752 - DNA, 25 bp, Probe Sequence
cgaagtgcattatagtccttgtttt

SEQ ID NO: 80753 - DNA, 25 bp, Probe Sequence
cccttggtaagacttattttgttaa

SEQ ID NO: 80754 - DNA, 25 bp, Probe Sequence
tttgcgaagtgcattatagtccttg

SEQ ID NO: 80755 - DNA, 25 bp, Probe Sequence
gttaataaatggaatacttggctat

SEQ ID NO: 80756 - DNA, 25 bp, Probe Sequence
aatggaatacttggctatattcaaa

SEQ ID NO: 80757 - DNA, 25 bp, Probe Sequence
aaatggaatacttggctatattcaa

SEQ ID NO: 80758 - DNA, 25 bp, Probe Sequence
gagctctcccttggtaagacttatt

SEQ ID NO: 80759 - DNA, 25 bp, Probe Sequence
acattttgcgaagtgcattatagtc

SEQ ID NO: 80760 - DNA, 25 bp, Probe Sequence
tacattttgcgaagtgcattatagt

SEQ ID NO: 80761 - DNA, 25 bp, Probe Sequence
ccttacattttgcgaagtgcattat

SEQ ID NO: 80762 - DNA, 25 bp, Probe Sequence
attttgcgaagtgcattatagtcct

SEQ ID NO: 80763 - DNA, 25 bp, Probe Sequence
cattttgcgaagtgcattatagtcc

SEQ ID NO: 80764 - DNA, 25 bp, Probe Sequence
gcaaggattagtgtattgtcaagtg

SEQ ID NO: 80765 - DNA, 25 bp, Probe Sequence
agcaaggattagtgtattgtcaagt

SEQ ID NO: 80766 - DNA, 25 bp, Probe Sequence
caaggattagtgtattgtcaagtgg

SEQ ID NO: 80767 - DNA, 25 bp, Probe Sequence
ggaggagacaagaagtagagagatg

SEQ ID NO: 80768 - DNA, 25 bp, Probe Sequence
tggaggagacaagaagtagagagat

SEQ ID NO: 80769 - DNA, 25 bp, Probe Sequence
atggaggagacaagaagtagagaga

SEQ ID NO: 80770 - DNA, 25 bp, Probe Sequence
tacacactctgttaggtcattcttg

SEQ ID NO: 80771 - DNA, 25 bp, Probe Sequence
agacaagaagtagagagatgtgaga

SEQ ID NO: 80772 - DNA, 25 bp, Probe Sequence
gagacaagaagtagagagatgtgag

SEQ ID NO: 80773 - DNA, 25 bp, Probe Sequence
ttacacactctgttaggtcattctt

SEQ ID NO: 80774 - DNA, 25 bp, Probe Sequence
tagcaaggattagtgtattgtcaag

SEQ ID NO: 80775 - DNA, 25 bp, Probe Sequence
gacaagaagtagagagatgtgagat

SEQ ID NO: 80776 - DNA, 25 bp, Probe Sequence
gaggagacaagaagtagagagatgt

SEQ ID NO: 80777 - DNA, 25 bp, Probe Sequence
gaagagataactgtggcttggacta

SEQ ID NO: 80778 - DNA, 25 bp, Probe Sequence
gatagcaaggattagtgtattgtca

SEQ ID NO: 80779 - DNA, 25 bp, Probe Sequence
tgatagcaaggattagtgtattgtc

SEQ ID NO: 80780 - DNA, 25 bp, Probe Sequence
ctgatagcaaggattagtgtattgt

SEQ ID NO: 80781 - DNA, 25 bp, Probe Sequence
ggagacaagaagtagagagatgtga

SEQ ID NO: 80782 - DNA, 25 bp, Probe Sequence
aggagacaagaagtagagagatgtg

SEQ ID NO: 80783 - DNA, 25 bp, Probe Sequence
gagataactgtggcttggactagaa

SEQ ID NO: 80784 - DNA, 25 bp, Probe Sequence
gcctgatagcaaggattagtgtatt

SEQ ID NO: 80785 - DNA, 25 bp, Probe Sequence
aagagataactgtggcttggactag

SEQ ID NO: 80786 - DNA, 25 bp, Probe Sequence
gataactgtggcttggactagaact

SEQ ID NO: 80787 - DNA, 25 bp, Probe Sequence
agataactgtggcttggactagaac

SEQ ID NO: 80788 - DNA, 25 bp, Probe Sequence
gattccacagaaccacaagagactt

SEQ ID NO: 80789 - DNA, 25 bp, Probe Sequence
tatcactacctggcacaaatcttta

SEQ ID NO: 80790 - DNA, 25 bp, Probe Sequence
ttatcactacctggcacaaatcttt

SEQ ID NO: 80791 - DNA, 25 bp, Probe Sequence
tttatcactacctggcacaaatctt

SEQ ID NO: 80792 - DNA, 25 bp, Probe Sequence
ctgggcacatttatttaatcctcat

SEQ ID NO: 80793 - DNA, 25 bp, Probe Sequence
tgtgttgtatacttactacctgctg

SEQ ID NO: 80794 - DNA, 25 bp, Probe Sequence
atcactacctggcacaaatctttac

SEQ ID NO: 80795 - DNA, 25 bp, Probe Sequence
ttgtgttgtatacttactacctgct

SEQ ID NO: 80796 - DNA, 25 bp, Probe Sequence
cttgacctcctggaaatgaattaac

SEQ ID NO: 80797 - DNA, 25 bp, Probe Sequence
acttgacctcctggaaatgaattaa

SEQ ID NO: 80798 - DNA, 25 bp, Probe Sequence
gaaccattagatgctttgtgttgta

SEQ ID NO: 80799 - DNA, 25 bp, Probe Sequence
gtgttgtatacttactacctgctgg

SEQ ID NO: 80800 - DNA, 25 bp, Probe Sequence
atgaaccattagatgctttgtgttg

SEQ ID NO: 80801 - DNA, 25 bp, Probe Sequence
gtttggagaggtgaagtgatttgat

SEQ ID NO: 80802 - DNA, 25 bp, Probe Sequence
gacttgacctcctggaaatgaatta

SEQ ID NO: 80803 - DNA, 25 bp, Probe Sequence
aaccattagatgctttgtgttgtat

SEQ ID NO: 80804 - DNA, 25 bp, Probe Sequence
ttgacctcctggaaatgaattaacc

SEQ ID NO: 80805 - DNA, 25 bp, Probe Sequence
ttgattccacagaaccacaagagac

SEQ ID NO: 80806 - DNA, 25 bp, Probe Sequence
gttgattccacagaaccacaagaga

SEQ ID NO: 80807 - DNA, 25 bp, Probe Sequence
gctgggcacatttatttaatcctca

SEQ ID NO: 80808 - DNA, 25 bp, Probe Sequence
accattagatgctttgtgttgtata

SEQ ID NO: 80809 - DNA, 25 bp, Probe Sequence
agataaagactctgaggtttggaga

SEQ ID NO: 80810 - DNA, 25 bp, Probe Sequence
tgaaccattagatgctttgtgttgt

SEQ ID NO: 80811 - DNA, 25 bp, Probe Sequence
tgtatgaatgaaccattagatgctt

SEQ ID NO: 80812 - DNA, 25 bp, Probe Sequence
ctaactgacagaatctgaggtgata

SEQ ID NO: 80813 - DNA, 25 bp, Probe Sequence
taactgacagaatctgaggtgataa

SEQ ID NO: 80814 - DNA, 25 bp, Probe Sequence
tactaaattgtagggtagagagacg

SEQ ID NO: 80815 - DNA, 25 bp, Probe Sequence
cctaactgacagaatctgaggtgat

SEQ ID NO: 80816 - DNA, 25 bp, Probe Sequence
ctaaattgtagggtagagagacgct

SEQ ID NO: 80817 - DNA, 25 bp, Probe Sequence
agaatctgaggtgataaatgttgtt

SEQ ID NO: 80818 - DNA, 25 bp, Probe Sequence
taaattgtagggtagagagacgctg

SEQ ID NO: 80819 - DNA, 25 bp, Probe Sequence
actaaattgtagggtagagagacgc

SEQ ID NO: 80820 - DNA, 25 bp, Probe Sequence
tctgaggtgataaatgttgtttcaa

SEQ ID NO: 80821 - DNA, 25 bp, Probe Sequence
atctgaggtgataaatgttgtttca

SEQ ID NO: 80822 - DNA, 25 bp, Probe Sequence
ctcctaactgacagaatctgaggtg

SEQ ID NO: 80823 - DNA, 25 bp, Probe Sequence
ctgaggtgataaatgttgtttcaaa

SEQ ID NO: 80824 - DNA, 25 bp, Probe Sequence
aatctgaggtgataaatgttgtttc

SEQ ID NO: 80825 - DNA, 25 bp, Probe Sequence
gaatctgaggtgataaatgttgttt

SEQ ID NO: 80826 - DNA, 25 bp, Probe Sequence
tcctaactgacagaatctgaggtga

SEQ ID NO: 80827 - DNA, 25 bp, Probe Sequence
tgacagaatctgaggtgataaatgt

SEQ ID NO: 80828 - DNA, 25 bp, Probe Sequence
aactgacagaatctgaggtgataaa

SEQ ID NO: 80829 - DNA, 25 bp, Probe Sequence
actgacagaatctgaggtgataaat

SEQ ID NO: 80830 - DNA, 25 bp, Probe Sequence
ctgacagaatctgaggtgataaatg

SEQ ID NO: 80831 - DNA, 25 bp, Probe Sequence
cagaatctgaggtgataaatgttgt

SEQ ID NO: 80832 - DNA, 25 bp, Probe Sequence
acagaatctgaggtgataaatgttg

SEQ ID NO: 80833 - DNA, 25 bp, Probe Sequence
tgaggtgataaatgttgtttcaaat

SEQ ID NO: 80834 - DNA, 25 bp, Probe Sequence
gacagaatctgaggtgataaatgtt

SEQ ID NO: 80835 - DNA, 25 bp, Probe Sequence
ttactaaattgtagggtagagagac

SEQ ID NO: 80836 - DNA, 25 bp, Probe Sequence
catagaatcatagagaccagcacat

SEQ ID NO: 80837 - DNA, 25 bp, Probe Sequence
atagaatcatagagaccagcacatt

SEQ ID NO: 80838 - DNA, 25 bp, Probe Sequence
tcatagaatcatagagaccagcaca

SEQ ID NO: 80839 - DNA, 25 bp, Probe Sequence
aacatactgtgattctatctggtca

SEQ ID NO: 80840 - DNA, 25 bp, Probe Sequence
acatactgtgattctatctggtcat

SEQ ID NO: 80841 - DNA, 25 bp, Probe Sequence
gtcatagaatcatagagaccagcac

SEQ ID NO: 80842 - DNA, 25 bp, Probe Sequence
tagaatcatagagaccagcacattc

SEQ ID NO: 80843 - DNA, 25 bp, Probe Sequence
atttggctcttatcccttcctttat

SEQ ID NO: 80844 - DNA, 25 bp, Probe Sequence
gggataagcaagttgacatttagac

SEQ ID NO: 80845 - DNA, 25 bp, Probe Sequence
tgggataagcaagttgacatttaga

SEQ ID NO: 80846 - DNA, 25 bp, Probe Sequence
gtgggataagcaagttgacatttag

SEQ ID NO: 80847 - DNA, 25 bp, Probe Sequence
catactgtgattctatctggtcata

SEQ ID NO: 80848 - DNA, 25 bp, Probe Sequence
gatggaggtttaattgtaatggcag

SEQ ID NO: 80849 - DNA, 25 bp, Probe Sequence
aatttggctcttatcccttccttta

SEQ ID NO: 80850 - DNA, 25 bp, Probe Sequence
tttggctcttatcccttcctttata

SEQ ID NO: 80851 - DNA, 25 bp, Probe Sequence
ggataagcaagttgacatttagaca

SEQ ID NO: 80852 - DNA, 25 bp, Probe Sequence
gaggtttaattgtaatggcagtctt

SEQ ID NO: 80853 - DNA, 25 bp, Probe Sequence
tgaatgttaagataagtcagcttcc

SEQ ID NO: 80854 - DNA, 25 bp, Probe Sequence
atggaggtttaattgtaatggcagt

SEQ ID NO: 80855 - DNA, 25 bp, Probe Sequence
gttgacatttagacataactgaggc

SEQ ID NO: 80856 - DNA, 25 bp, Probe Sequence
aggtttaattgtaatggcagtcttt

SEQ ID NO: 80857 - DNA, 25 bp, Probe Sequence
aatcatagagaccagcacattcctg

SEQ ID NO: 80858 - DNA, 25 bp, Probe Sequence
ggaggtttaattgtaatggcagtct

SEQ ID NO: 80859 - DNA, 25 bp, Probe Sequence
ggcttatgtgtgaagttagtcaaat

SEQ ID NO: 80860 - DNA, 25 bp, Probe Sequence
ttagtggttagccatagatcattcc

SEQ ID NO: 80861 - DNA, 25 bp, Probe Sequence
tagtggttagccatagatcattcct

SEQ ID NO: 80862 - DNA, 25 bp, Probe Sequence
aatgagtagaagagtttccctgaga

SEQ ID NO: 80863 - DNA, 25 bp, Probe Sequence
caatgagtagaagagtttccctgag

SEQ ID NO: 80864 - DNA, 25 bp, Probe Sequence
agtggttagccatagatcattcctt

SEQ ID NO: 80865 - DNA, 25 bp, Probe Sequence
gagtagaagagtttccctgagacat

SEQ ID NO: 80866 - DNA, 25 bp, Probe Sequence
atgagtagaagagtttccctgagac

SEQ ID NO: 80867 - DNA, 25 bp, Probe Sequence
ggttagccatagatcattcctttca

SEQ ID NO: 80868 - DNA, 25 bp, Probe Sequence
tagccatagatcattcctttcaact

SEQ ID NO: 80869 - DNA, 25 bp, Probe Sequence
agccatagatcattcctttcaactg

SEQ ID NO: 80870 - DNA, 25 bp, Probe Sequence
ttagccatagatcattcctttcaac

SEQ ID NO: 80871 - DNA, 25 bp, Probe Sequence
gttagccatagatcattcctttcaa

SEQ ID NO: 80872 - DNA, 25 bp, Probe Sequence
ccaatgagtagaagagtttccctga

SEQ ID NO: 80873 - DNA, 25 bp, Probe Sequence
tccaatgagtagaagagtttccctg

SEQ ID NO: 80874 - DNA, 25 bp, Probe Sequence
ctccaatgagtagaagagtttccct

SEQ ID NO: 80875 - DNA, 25 bp, Probe Sequence
tctccaatgagtagaagagtttccc

SEQ ID NO: 80876 - DNA, 25 bp, Probe Sequence
catagttcgatgttgatgctcttgc

SEQ ID NO: 80877 - DNA, 25 bp, Probe Sequence
tagaagagtttccctgagacatgag

SEQ ID NO: 80878 - DNA, 25 bp, Probe Sequence
tgagtagaagagtttccctgagaca

SEQ ID NO: 80879 - DNA, 25 bp, Probe Sequence
cggttctccaatgagtagaagagtt

SEQ ID NO: 80880 - DNA, 25 bp, Probe Sequence
gtagaagagtttccctgagacatga

SEQ ID NO: 80881 - DNA, 25 bp, Probe Sequence
agtagaagagtttccctgagacatg

SEQ ID NO: 80882 - DNA, 25 bp, Probe Sequence
atagatcattcctttcaactggacc

SEQ ID NO: 80883 - DNA, 25 bp, Probe Sequence
catagatcattcctttcaactggac

SEQ ID NO: 80884 - DNA, 25 bp, Probe Sequence
taggagactgtatatgtgatgtgga

SEQ ID NO: 80885 - DNA, 25 bp, Probe Sequence
ggagactgtatatgtgatgtggatg

SEQ ID NO: 80886 - DNA, 25 bp, Probe Sequence
aggagactgtatatgtgatgtggat

SEQ ID NO: 80887 - DNA, 25 bp, Probe Sequence
ttaggagactgtatatgtgatgtgg

SEQ ID NO: 80888 - DNA, 25 bp, Probe Sequence
ggttaggagactgtatatgtgatgt

SEQ ID NO: 80889 - DNA, 25 bp, Probe Sequence
aggttaggagactgtatatgtgatg

SEQ ID NO: 80890 - DNA, 25 bp, Probe Sequence
gagactgtatatgtgatgtggatgc

SEQ ID NO: 80891 - DNA, 25 bp, Probe Sequence
cgataggttaggagactgtatatgt

SEQ ID NO: 80892 - DNA, 25 bp, Probe Sequence
acgataggttaggagactgtatatg

SEQ ID NO: 80893 - DNA, 25 bp, Probe Sequence
gtgttcttgatatagcctaaggtgt

SEQ ID NO: 80894 - DNA, 25 bp, Probe Sequence
agtgttcttgatatagcctaaggtg

SEQ ID NO: 80895 - DNA, 25 bp, Probe Sequence
tgttcttgatatagcctaaggtgtt

SEQ ID NO: 80896 - DNA, 25 bp, Probe Sequence
gttaggagactgtatatgtgatgtg

SEQ ID NO: 80897 - DNA, 25 bp, Probe Sequence
tagtgttcttgatatagcctaaggt

SEQ ID NO: 80898 - DNA, 25 bp, Probe Sequence
aacgataggttaggagactgtatat

SEQ ID NO: 80899 - DNA, 25 bp, Probe Sequence
taggttaggagactgtatatgtgat

SEQ ID NO: 80900 - DNA, 25 bp, Probe Sequence
ataggttaggagactgtatatgtga

SEQ ID NO: 80901 - DNA, 25 bp, Probe Sequence
actatataaggaactgctaacatgc

SEQ ID NO: 80902 - DNA, 25 bp, Probe Sequence
gataggttaggagactgtatatgtg

SEQ ID NO: 80903 - DNA, 25 bp, Probe Sequence
cctagagctgctatgattaagtcaa

SEQ ID NO: 80904 - DNA, 25 bp, Probe Sequence
atctggtcagaatatggacttcctt

SEQ ID NO: 80905 - DNA, 25 bp, Probe Sequence
ttatgcttcatcacacatacagtaa

SEQ ID NO: 80906 - DNA, 25 bp, Probe Sequence
aaatcggatgagaatgtgggaaata

SEQ ID NO: 80907 - DNA, 25 bp, Probe Sequence
gctgctatgattaagtcaatacatt

SEQ ID NO: 80908 - DNA, 25 bp, Probe Sequence
catctgtgctgaatgtcttatatgc

SEQ ID NO: 80909 - DNA, 25 bp, Probe Sequence
acttactatgtatcaggcatctgtg

SEQ ID NO: 80910 - DNA, 25 bp, Probe Sequence
tacttactatgtatcaggcatctgt

SEQ ID NO: 80911 - DNA, 25 bp, Probe Sequence
atacttactatgtatcaggcatctg

SEQ ID NO: 80912 - DNA, 25 bp, Probe Sequence
gcatctgtgctgaatgtcttatatg

SEQ ID NO: 80913 - DNA, 25 bp, Probe Sequence
tgaatacttactatgtatcaggcat

SEQ ID NO: 80914 - DNA, 25 bp, Probe Sequence
ggcatctgtgctgaatgtcttatat

SEQ ID NO: 80915 - DNA, 25 bp, Probe Sequence
cttactatgtatcaggcatctgtgc

SEQ ID NO: 80916 - DNA, 25 bp, Probe Sequence
ttactatgtatcaggcatctgtgct

SEQ ID NO: 80917 - DNA, 25 bp, Probe Sequence
aatacttactatgtatcaggcatct

SEQ ID NO: 80918 - DNA, 25 bp, Probe Sequence
aggcatctgtgctgaatgtcttata

SEQ ID NO: 80919 - DNA, 25 bp, Probe Sequence
gaatacttactatgtatcaggcatc

SEQ ID NO: 80920 - DNA, 25 bp, Probe Sequence
tactatgtatcaggcatctgtgctg

SEQ ID NO: 80921 - DNA, 25 bp, Probe Sequence
atctgtgctgaatgtcttatatgca

SEQ ID NO: 80922 - DNA, 25 bp, Probe Sequence
tatgtatcaggcatctgtgctgaat

SEQ ID NO: 80923 - DNA, 25 bp, Probe Sequence
caggcatctgtgctgaatgtcttat

SEQ ID NO: 80924 - DNA, 25 bp, Probe Sequence
ctgaatacttactatgtatcaggca

SEQ ID NO: 80925 - DNA, 25 bp, Probe Sequence
actgaatacttactatgtatcaggc

SEQ ID NO: 80926 - DNA, 25 bp, Probe Sequence
ctatgtatcaggcatctgtgctgaa

SEQ ID NO: 80927 - DNA, 25 bp, Probe Sequence
atgtatcaggcatctgtgctgaatg

SEQ ID NO: 80928 - DNA, 25 bp, Probe Sequence
ctgtgctgaatgtcttatatgcatt

SEQ ID NO: 80929 - DNA, 25 bp, Probe Sequence
tctgtgctgaatgtcttatatgcat

SEQ ID NO: 80930 - DNA, 25 bp, Probe Sequence
actatgtatcaggcatctgtgctga

SEQ ID NO: 80931 - DNA, 25 bp, Probe Sequence
tgtgctgaatgtcttatatgcatta

SEQ ID NO: 80932 - DNA, 25 bp, Probe Sequence
actgacagatatgttcttgcttctt

SEQ ID NO: 80933 - DNA, 25 bp, Probe Sequence
aactgacagatatgttcttgcttct

SEQ ID NO: 80934 - DNA, 25 bp, Probe Sequence
ttattaaacgggtgatgaactgaca

SEQ ID NO: 80935 - DNA, 25 bp, Probe Sequence
attattaaacgggtgatgaactgac

SEQ ID NO: 80936 - DNA, 25 bp, Probe Sequence
ccctatgcttctcatttctacacta

SEQ ID NO: 80937 - DNA, 25 bp, Probe Sequence
tattaaacgggtgatgaactgacag

SEQ ID NO: 80938 - DNA, 25 bp, Probe Sequence
ccagcaatttacaaagaaacttcag

SEQ ID NO: 80939 - DNA, 25 bp, Probe Sequence
cctatgcttctcatttctacactac

SEQ ID NO: 80940 - DNA, 25 bp, Probe Sequence
gccagcaatttacaaagaaacttca

SEQ ID NO: 80941 - DNA, 25 bp, Probe Sequence
atgcttctcatttctacactactga

SEQ ID NO: 80942 - DNA, 25 bp, Probe Sequence
cagcaatttacaaagaaacttcagt

SEQ ID NO: 80943 - DNA, 25 bp, Probe Sequence
taaacgggtgatgaactgacagata

SEQ ID NO: 80944 - DNA, 25 bp, Probe Sequence
agcaatttacaaagaaacttcagtc

SEQ ID NO: 80945 - DNA, 25 bp, Probe Sequence
gcaatttacaaagaaacttcagtct

SEQ ID NO: 80946 - DNA, 25 bp, Probe Sequence
tatgcttctcatttctacactactg

SEQ ID NO: 80947 - DNA, 25 bp, Probe Sequence
ctgacagatatgttcttgcttcttt

SEQ ID NO: 80948 - DNA, 25 bp, Probe Sequence
gctgttaatttctcagttgttcaca

SEQ ID NO: 80949 - DNA, 25 bp, Probe Sequence
tgctgttaatttctcagttgttcac

SEQ ID NO: 80950 - DNA, 25 bp, Probe Sequence
ttgctgttaatttctcagttgttca

SEQ ID NO: 80951 - DNA, 25 bp, Probe Sequence
tattattaaacgggtgatgaactga

SEQ ID NO: 80952 - DNA, 25 bp, Probe Sequence
aaacgggtgatgaactgacagatat

SEQ ID NO: 80953 - DNA, 25 bp, Probe Sequence
ctatgcttctcatttctacactact

SEQ ID NO: 80954 - DNA, 25 bp, Probe Sequence
acaggtctcactcttgtcatctagg

SEQ ID NO: 80955 - DNA, 25 bp, Probe Sequence
tttgctgttaatttctcagttgttc

SEQ ID NO: 80956 - DNA, 25 bp, Probe Sequence
ggtggatcatctaaggtcaggaatt

SEQ ID NO: 80957 - DNA, 25 bp, Probe Sequence
ggatcatctaaggtcaggaattcaa

SEQ ID NO: 80958 - DNA, 25 bp, Probe Sequence
gtggatcatctaaggtcaggaattc

SEQ ID NO: 80959 - DNA, 25 bp, Probe Sequence
tggatcatctaaggtcaggaattca

SEQ ID NO: 80960 - DNA, 25 bp, Probe Sequence
gatcatctaaggtcaggaattcaag

SEQ ID NO: 80961 - DNA, 25 bp, Probe Sequence
tcatctaaggtcaggaattcaagaa

SEQ ID NO: 80962 - DNA, 25 bp, Probe Sequence
atcatctaaggtcaggaattcaaga

SEQ ID NO: 80963 - DNA, 25 bp, Probe Sequence
gggtggatcatctaaggtcaggaat

SEQ ID NO: 80964 - DNA, 25 bp, Probe Sequence
catctaaggtcaggaattcaagaaa

SEQ ID NO: 80965 - DNA, 25 bp, Probe Sequence
ctcgtgtatagtgacccgtcagatc

SEQ ID NO: 80966 - DNA, 25 bp, Probe Sequence
ggagacagaaagagactgtatctta

SEQ ID NO: 80967 - DNA, 25 bp, Probe Sequence
ctaaggtcaggaattcaagaaaagc

SEQ ID NO: 80968 - DNA, 25 bp, Probe Sequence
gggagacagaaagagactgtatctt

SEQ ID NO: 80969 - DNA, 25 bp, Probe Sequence
ctggctaaaccccatctctacaaaa

SEQ ID NO: 80970 - DNA, 25 bp, Probe Sequence
taaggtcaggaattcaagaaaagcc

SEQ ID NO: 80971 - DNA, 25 bp, Probe Sequence
atataagcagagctcgtgtatagtg

SEQ ID NO: 80972 - DNA, 25 bp, Probe Sequence
ctgggagacagaaagagactgtatc

SEQ ID NO: 80973 - DNA, 25 bp, Probe Sequence
tctaaggtcaggaattcaagaaaag

SEQ ID NO: 80974 - DNA, 25 bp, Probe Sequence
gtctatataagcagagctcgtgtat

SEQ ID NO: 80975 - DNA, 25 bp, Probe Sequence
tataagcagagctcgtgtatagtga

SEQ ID NO: 80976 - DNA, 25 bp, Probe Sequence
tgggagacagaaagagactgtatct

SEQ ID NO: 80977 - DNA, 25 bp, Probe Sequence
ggtctatataagcagagctcgtgta

SEQ ID NO: 80978 - DNA, 25 bp, Probe Sequence
ggggactttccaaaatgtcgtaact

SEQ ID NO: 80979 - DNA, 25 bp, Probe Sequence
atctaaggtcaggaattcaagaaaa

SEQ ID NO: 80980 - DNA, 25 bp, Probe Sequence
tggtgactcttattggtaatgatgg

SEQ ID NO: 80981 - DNA, 25 bp, Probe Sequence
gtgactcttattggtaatgatggca

SEQ ID NO: 80982 - DNA, 25 bp, Probe Sequence
tgactcttattggtaatgatggcat

SEQ ID NO: 80983 - DNA, 25 bp, Probe Sequence
ttggtgactcttattggtaatgatg

SEQ ID NO: 80984 - DNA, 25 bp, Probe Sequence
gctcagttaccatagaatacttcca

SEQ ID NO: 80985 - DNA, 25 bp, Probe Sequence
ggtgactcttattggtaatgatggc

SEQ ID NO: 80986 - DNA, 25 bp, Probe Sequence
cagttaccatagaatacttccaagc

SEQ ID NO: 80987 - DNA, 25 bp, Probe Sequence
cttctgtaacatcacaatcttcctg

SEQ ID NO: 80988 - DNA, 25 bp, Probe Sequence
tcttctgtaacatcacaatcttcct

SEQ ID NO: 80989 - DNA, 25 bp, Probe Sequence
ttctgtaacatcacaatcttcctgg

SEQ ID NO: 80990 - DNA, 25 bp, Probe Sequence
ctgtaacatcacaatcttcctggtt

SEQ ID NO: 80991 - DNA, 25 bp, Probe Sequence
ttcttctgtaacatcacaatcttcc

SEQ ID NO: 80992 - DNA, 25 bp, Probe Sequence
tggactggaattattgaatcttctt

SEQ ID NO: 80993 - DNA, 25 bp, Probe Sequence
atggactggaattattgaatcttct

SEQ ID NO: 80994 - DNA, 25 bp, Probe Sequence
tctgtaacatcacaatcttcctggt

SEQ ID NO: 80995 - DNA, 25 bp, Probe Sequence
tgaatcttcttctgtaacatcacaa

SEQ ID NO: 80996 - DNA, 25 bp, Probe Sequence
ttgaatcttcttctgtaacatcaca

SEQ ID NO: 80997 - DNA, 25 bp, Probe Sequence
ggactggaattattgaatcttcttc

SEQ ID NO: 80998 - DNA, 25 bp, Probe Sequence
tcttcttctgtaacatcacaatctt

SEQ ID NO: 80999 - DNA, 25 bp, Probe Sequence
tcagttaccatagaatacttccaag

SEQ ID NO: 81000 - DNA, 25 bp, Probe Sequence
ctcagttaccatagaatacttccaa

SEQ ID NO: 81001 - DNA, 25 bp, Probe Sequence
cttcttctgtaacatcacaatcttc

SEQ ID NO: 81002 - DNA, 25 bp, Probe Sequence
atcttcttctgtaacatcacaatct

SEQ ID NO: 81003 - DNA, 25 bp, Probe Sequence
agctcagttaccatagaatacttcc

SEQ ID NO: 81004 - DNA, 25 bp, Probe Sequence
gattatattcaagaggctggatact

SEQ ID NO: 81005 - DNA, 25 bp, Probe Sequence
agattatattcaagaggctggatac

SEQ ID NO: 81006 - DNA, 25 bp, Probe Sequence
aagattatattcaagaggctggata

SEQ ID NO: 81007 - DNA, 25 bp, Probe Sequence
ttatattcaagaggctggatactag

SEQ ID NO: 81008 - DNA, 25 bp, Probe Sequence
gctctatttccctgatcttctgatt

SEQ ID NO: 81009 - DNA, 25 bp, Probe Sequence
tctatttccctgatcttctgattgc

SEQ ID NO: 81010 - DNA, 25 bp, Probe Sequence
attatattcaagaggctggatacta

SEQ ID NO: 81011 - DNA, 25 bp, Probe Sequence
ctatttccctgatcttctgattgcc

SEQ ID NO: 81012 - DNA, 25 bp, Probe Sequence
ctctatttccctgatcttctgattg

SEQ ID NO: 81013 - DNA, 25 bp, Probe Sequence
taatcattgtaatcattctgctgaa

SEQ ID NO: 81014 - DNA, 25 bp, Probe Sequence
atgacattacatgaaataggacacg

SEQ ID NO: 81015 - DNA, 25 bp, Probe Sequence
aaagattatattcaagaggctggat

SEQ ID NO: 81016 - DNA, 25 bp, Probe Sequence
ggctggatactagttacatgattct

SEQ ID NO: 81017 - DNA, 25 bp, Probe Sequence
aggctggatactagttacatgattc

SEQ ID NO: 81018 - DNA, 25 bp, Probe Sequence
gaggctggatactagttacatgatt

SEQ ID NO: 81019 - DNA, 25 bp, Probe Sequence
agaggctggatactagttacatgat

SEQ ID NO: 81020 - DNA, 25 bp, Probe Sequence
attcaagaggctggatactagttac

SEQ ID NO: 81021 - DNA, 25 bp, Probe Sequence
aagaggctggatactagttacatga

SEQ ID NO: 81022 - DNA, 25 bp, Probe Sequence
caagaggctggatactagttacatg

SEQ ID NO: 81023 - DNA, 25 bp, Probe Sequence
tcaagaggctggatactagttacat

SEQ ID NO: 81024 - DNA, 25 bp, Probe Sequence
ggctctatttccctgatcttctgat

SEQ ID NO: 81025 - DNA, 25 bp, Probe Sequence
ttcaagaggctggatactagttaca

SEQ ID NO: 81026 - DNA, 25 bp, Probe Sequence
tccctgatcttctgattgccataaa

SEQ ID NO: 81027 - DNA, 25 bp, Probe Sequence
ttccctgatcttctgattgccataa

SEQ ID NO: 81028 - DNA, 25 bp, Probe Sequence
catatctgctgtaaggttctgttct

SEQ ID NO: 81029 - DNA, 25 bp, Probe Sequence
atatctgctgtaaggttctgttctt

SEQ ID NO: 81030 - DNA, 25 bp, Probe Sequence
acatatctgctgtaaggttctgttc

SEQ ID NO: 81031 - DNA, 25 bp, Probe Sequence
ttacagaaccacctccaataccaag

SEQ ID NO: 81032 - DNA, 25 bp, Probe Sequence
cttacagaaccacctccaataccaa

SEQ ID NO: 81033 - DNA, 25 bp, Probe Sequence
tatctgctgtaaggttctgttctta

SEQ ID NO: 81034 - DNA, 25 bp, Probe Sequence
aggtctttatcattcagggttcaat

SEQ ID NO: 81035 - DNA, 25 bp, Probe Sequence
agtccatttaggctgctataacaaa

SEQ ID NO: 81036 - DNA, 25 bp, Probe Sequence
ggtctttatcattcagggttcaatc

SEQ ID NO: 81037 - DNA, 25 bp, Probe Sequence
aaggtctttatcattcagggttcaa

SEQ ID NO: 81038 - DNA, 25 bp, Probe Sequence
tagtccatttaggctgctataacaa

SEQ ID NO: 81039 - DNA, 25 bp, Probe Sequence
ttagtccatttaggctgctataaca

SEQ ID NO: 81040 - DNA, 25 bp, Probe Sequence
ttatcattcagggttcaatcagaga

SEQ ID NO: 81041 - DNA, 25 bp, Probe Sequence
ccactggaactggagtccttatata

SEQ ID NO: 81042 - DNA, 25 bp, Probe Sequence
caaggtctttatcattcagggttca

SEQ ID NO: 81043 - DNA, 25 bp, Probe Sequence
agtgttctgaagtcaaatcccatag

SEQ ID NO: 81044 - DNA, 25 bp, Probe Sequence
cttagtccatttaggctgctataac

SEQ ID NO: 81045 - DNA, 25 bp, Probe Sequence
tagtgttctgaagtcaaatcccata

SEQ ID NO: 81046 - DNA, 25 bp, Probe Sequence
gtctttatcattcagggttcaatca

SEQ ID NO: 81047 - DNA, 25 bp, Probe Sequence
atcattcagggttcaatcagagaaa

SEQ ID NO: 81048 - DNA, 25 bp, Probe Sequence
tgttctgaagtcaaatcccatagtg

SEQ ID NO: 81049 - DNA, 25 bp, Probe Sequence
gtgttctgaagtcaaatcccatagt

SEQ ID NO: 81050 - DNA, 25 bp, Probe Sequence
gtagtgttctgaagtcaaatcccat

SEQ ID NO: 81051 - DNA, 25 bp, Probe Sequence
tatcattcagggttcaatcagagaa

SEQ ID NO: 81052 - DNA, 25 bp, Probe Sequence
tatactgcgttgttctcctattacc

SEQ ID NO: 81053 - DNA, 25 bp, Probe Sequence
atactgcgttgttctcctattacct

SEQ ID NO: 81054 - DNA, 25 bp, Probe Sequence
tactgcgttgttctcctattacctt

SEQ ID NO: 81055 - DNA, 25 bp, Probe Sequence
gtcaggattctgtggatatggataa

SEQ ID NO: 81056 - DNA, 25 bp, Probe Sequence
ggtcaggattctgtggatatggata

SEQ ID NO: 81057 - DNA, 25 bp, Probe Sequence
ctgcgttgttctcctattaccttga

SEQ ID NO: 81058 - DNA, 25 bp, Probe Sequence
tgcgttgttctcctattaccttgac

SEQ ID NO: 81059 - DNA, 25 bp, Probe Sequence
actgcgttgttctcctattaccttg

SEQ ID NO: 81060 - DNA, 25 bp, Probe Sequence
ctgtatactgcgttgttctcctatt

SEQ ID NO: 81061 - DNA, 25 bp, Probe Sequence
tgtatactgcgttgttctcctatta

SEQ ID NO: 81062 - DNA, 25 bp, Probe Sequence
ttctagtttatacatccaaggcagg

SEQ ID NO: 81063 - DNA, 25 bp, Probe Sequence
gtatactgcgttgttctcctattac

SEQ ID NO: 81064 - DNA, 25 bp, Probe Sequence
tctgtatactgcgttgttctcctat

SEQ ID NO: 81065 - DNA, 25 bp, Probe Sequence
gtgttgaattaggtcaggaaatacg

SEQ ID NO: 81066 - DNA, 25 bp, Probe Sequence
aattctcagtttctccttgaccttt

SEQ ID NO: 81067 - DNA, 25 bp, Probe Sequence
aggtcaggattctgtggatatggat

SEQ ID NO: 81068 - DNA, 25 bp, Probe Sequence
tgaaagcaacattaaatctcacaga

SEQ ID NO: 81069 - DNA, 25 bp, Probe Sequence
caaggtcaggattctgtggatatgg

SEQ ID NO: 81070 - DNA, 25 bp, Probe Sequence
ctctgtatactgcgttgttctccta

SEQ ID NO: 81071 - DNA, 25 bp, Probe Sequence
ttgtaataatagggatttgtcagca

SEQ ID NO: 81072 - DNA, 25 bp, Probe Sequence
aaatgtgttgaattaggtcaggaaa

SEQ ID NO: 81073 - DNA, 25 bp, Probe Sequence
aggaagtcaaagagttattcacatt

SEQ ID NO: 81074 - DNA, 25 bp, Probe Sequence
tgtgttgaattaggtcaggaaatac

SEQ ID NO: 81075 - DNA, 25 bp, Probe Sequence
gcgttgttctcctattaccttgaca

SEQ ID NO: 81076 - DNA, 25 bp, Probe Sequence
tacaagaccaccctagacaacatag

SEQ ID NO: 81077 - DNA, 25 bp, Probe Sequence
cacaagaatcacttaaacctgggag

SEQ ID NO: 81078 - DNA, 25 bp, Probe Sequence
gtacaagaccaccctagacaacata

SEQ ID NO: 81079 - DNA, 25 bp, Probe Sequence
aagaatctgtttcacacacacacat

SEQ ID NO: 81080 - DNA, 25 bp, Probe Sequence
tgagacaggagaatcgcttgaatct

SEQ ID NO: 81081 - DNA, 25 bp, Probe Sequence
gagacaggagaatcgcttgaatctg

SEQ ID NO: 81082 - DNA, 25 bp, Probe Sequence
ctgagacaggagaatcgcttgaatc

SEQ ID NO: 81083 - DNA, 25 bp, Probe Sequence
ccaaggcacaagaatcacttaaacc

SEQ ID NO: 81084 - DNA, 25 bp, Probe Sequence
caagaatctgtttcacacacacaca

SEQ ID NO: 81085 - DNA, 25 bp, Probe Sequence
aaggcacaagaatcacttaaacctg

SEQ ID NO: 81086 - DNA, 25 bp, Probe Sequence
caaggcacaagaatcacttaaacct

SEQ ID NO: 81087 - DNA, 25 bp, Probe Sequence
acaagaccaccctagacaacatagt

SEQ ID NO: 81088 - DNA, 25 bp, Probe Sequence
agaatctgtttcacacacacacatg

SEQ ID NO: 81089 - DNA, 25 bp, Probe Sequence
agtacaagaccaccctagacaacat

SEQ ID NO: 81090 - DNA, 25 bp, Probe Sequence
acaagaatcacttaaacctgggagg

SEQ ID NO: 81091 - DNA, 25 bp, Probe Sequence
gcacaagaatcacttaaacctggga

SEQ ID NO: 81092 - DNA, 25 bp, Probe Sequence
gtagtcccagaactttggaaggtag

SEQ ID NO: 81093 - DNA, 25 bp, Probe Sequence
atcatctgaggttgggagttcaaga

SEQ ID NO: 81094 - DNA, 25 bp, Probe Sequence
caagaccaccctagacaacatagtg

SEQ ID NO: 81095 - DNA, 25 bp, Probe Sequence
gatcatctgaggttgggagttcaag

SEQ ID NO: 81096 - DNA, 25 bp, Probe Sequence
tagtcccagaactttggaaggtaga

SEQ ID NO: 81097 - DNA, 25 bp, Probe Sequence
aagaccaccctagacaacatagtga

SEQ ID NO: 81098 - DNA, 25 bp, Probe Sequence
cagcaagaatctgtttcacacacac

SEQ ID NO: 81099 - DNA, 25 bp, Probe Sequence
gcaagaatctgtttcacacacacac

SEQ ID NO: 81100 - DNA, 25 bp, Probe Sequence
gtacactgaaacataaatccgcaag

SEQ ID NO: 81101 - DNA, 25 bp, Probe Sequence
tacactgaaacataaatccgcaagt

SEQ ID NO: 81102 - DNA, 25 bp, Probe Sequence
agtacactgaaacataaatccgcaa

SEQ ID NO: 81103 - DNA, 25 bp, Probe Sequence
aaacttcctctttaatcaaggcttt

SEQ ID NO: 81104 - DNA, 25 bp, Probe Sequence
ataaatccgcaagtcaccacacata

SEQ ID NO: 81105 - DNA, 25 bp, Probe Sequence
actgaaacataaatccgcaagtcac

SEQ ID NO: 81106 - DNA, 25 bp, Probe Sequence
cactgaaacataaatccgcaagtca

SEQ ID NO: 81107 - DNA, 25 bp, Probe Sequence
acactgaaacataaatccgcaagtc

SEQ ID NO: 81108 - DNA, 25 bp, Probe Sequence
tccagtacactgaaacataaatccg

SEQ ID NO: 81109 - DNA, 25 bp, Probe Sequence
gaaacataaatccgcaagtcaccac

SEQ ID NO: 81110 - DNA, 25 bp, Probe Sequence
ttccagtacactgaaacataaatcc

SEQ ID NO: 81111 - DNA, 25 bp, Probe Sequence
ctgaaacataaatccgcaagtcacc

SEQ ID NO: 81112 - DNA, 25 bp, Probe Sequence
cagtacactgaaacataaatccgca

SEQ ID NO: 81113 - DNA, 25 bp, Probe Sequence
taaatccgcaagtcaccacacatac

SEQ ID NO: 81114 - DNA, 25 bp, Probe Sequence
aaacataaatccgcaagtcaccaca

SEQ ID NO: 81115 - DNA, 25 bp, Probe Sequence
tgaaacataaatccgcaagtcacca

SEQ ID NO: 81116 - DNA, 25 bp, Probe Sequence
ccagtacactgaaacataaatccgc

SEQ ID NO: 81117 - DNA, 25 bp, Probe Sequence
cataaatccgcaagtcaccacacat

SEQ ID NO: 81118 - DNA, 25 bp, Probe Sequence
caaggcttttaacatgaacagattt

SEQ ID NO: 81119 - DNA, 25 bp, Probe Sequence
aggcttttaacatgaacagatttct

SEQ ID NO: 81120 - DNA, 25 bp, Probe Sequence
aacataaatccgcaagtcaccacac

SEQ ID NO: 81121 - DNA, 25 bp, Probe Sequence
tcaaggcttttaacatgaacagatt

SEQ ID NO: 81122 - DNA, 25 bp, Probe Sequence
aatcaaggcttttaacatgaacaga

SEQ ID NO: 81123 - DNA, 25 bp, Probe Sequence
atcaaggcttttaacatgaacagat

SEQ ID NO: 81124 - DNA, 25 bp, Probe Sequence
ttaggtatcaccactgtaatctcca

SEQ ID NO: 81125 - DNA, 25 bp, Probe Sequence
taggtatcaccactgtaatctccag

SEQ ID NO: 81126 - DNA, 25 bp, Probe Sequence
gctttaggtatcaccactgtaatct

SEQ ID NO: 81127 - DNA, 25 bp, Probe Sequence
tttaggtatcaccactgtaatctcc

SEQ ID NO: 81128 - DNA, 25 bp, Probe Sequence
ggctttaggtatcaccactgtaatc

SEQ ID NO: 81129 - DNA, 25 bp, Probe Sequence
aggtatcaccactgtaatctccagg

SEQ ID NO: 81130 - DNA, 25 bp, Probe Sequence
tggctttaggtatcaccactgtaat

SEQ ID NO: 81131 - DNA, 25 bp, Probe Sequence
atggctttaggtatcaccactgtaa

SEQ ID NO: 81132 - DNA, 25 bp, Probe Sequence
ctttaggtatcaccactgtaatctc

SEQ ID NO: 81133 - DNA, 25 bp, Probe Sequence
catggctttaggtatcaccactgta

SEQ ID NO: 81134 - DNA, 25 bp, Probe Sequence
ggtatcaccactgtaatctccaggg

SEQ ID NO: 81135 - DNA, 25 bp, Probe Sequence
taatctccaggggcaccattgaaat

SEQ ID NO: 81136 - DNA, 25 bp, Probe Sequence
gtatcaccactgtaatctccagggg

SEQ ID NO: 81137 - DNA, 25 bp, Probe Sequence
gtaatctccaggggcaccattgaaa

SEQ ID NO: 81138 - DNA, 25 bp, Probe Sequence
tttccatggctttaggtatcaccac

SEQ ID NO: 81139 - DNA, 25 bp, Probe Sequence
ttccatggctttaggtatcaccact

SEQ ID NO: 81140 - DNA, 25 bp, Probe Sequence
ttttccatggctttaggtatcacca

SEQ ID NO: 81141 - DNA, 25 bp, Probe Sequence
tccatggctttaggtatcaccactg

SEQ ID NO: 81142 - DNA, 25 bp, Probe Sequence
ccatggctttaggtatcaccactgt

SEQ ID NO: 81143 - DNA, 25 bp, Probe Sequence
gactgttgcatcagtaccccattct

SEQ ID NO: 81144 - DNA, 25 bp, Probe Sequence
atgatctatgcctgtgctctctatt

SEQ ID NO: 81145 - DNA, 25 bp, Probe Sequence
cagtggctcatgctataatcctatc

SEQ ID NO: 81146 - DNA, 25 bp, Probe Sequence
gtggctcatgctataatcctatcat

SEQ ID NO: 81147 - DNA, 25 bp, Probe Sequence
tgccattcacttctgtcatgtatta

SEQ ID NO: 81148 - DNA, 25 bp, Probe Sequence
agtggctcatgctataatcctatca

SEQ ID NO: 81149 - DNA, 25 bp, Probe Sequence
atccatacttccttcaatgattgcc

SEQ ID NO: 81150 - DNA, 25 bp, Probe Sequence
tggctcatgctataatcctatcatt

SEQ ID NO: 81151 - DNA, 25 bp, Probe Sequence
acagtggctcatgctataatcctat

SEQ ID NO: 81152 - DNA, 25 bp, Probe Sequence
gccattcacttctgtcatgtattat

SEQ ID NO: 81153 - DNA, 25 bp, Probe Sequence
attgccattcacttctgtcatgtat

SEQ ID NO: 81154 - DNA, 25 bp, Probe Sequence
ttgccattcacttctgtcatgtatt

SEQ ID NO: 81155 - DNA, 25 bp, Probe Sequence
ccatacttccttcaatgattgccat

SEQ ID NO: 81156 - DNA, 25 bp, Probe Sequence
gattgccattcacttctgtcatgta

SEQ ID NO: 81157 - DNA, 25 bp, Probe Sequence
tgatctatgcctgtgctctctattg

SEQ ID NO: 81158 - DNA, 25 bp, Probe Sequence
cacagtggctcatgctataatccta

SEQ ID NO: 81159 - DNA, 25 bp, Probe Sequence
catgatctatgcctgtgctctctat

SEQ ID NO: 81160 - DNA, 25 bp, Probe Sequence
aatccatacttccttcaatgattgc

SEQ ID NO: 81161 - DNA, 25 bp, Probe Sequence
gtgctctctattggtgtgtttattt

SEQ ID NO: 81162 - DNA, 25 bp, Probe Sequence
tgtgctctctattggtgtgtttatt

SEQ ID NO: 81163 - DNA, 25 bp, Probe Sequence
tccatacttccttcaatgattgcca

SEQ ID NO: 81164 - DNA, 25 bp, Probe Sequence
ctgtgctctctattggtgtgtttat

SEQ ID NO: 81165 - DNA, 25 bp, Probe Sequence
gatctatgcctgtgctctctattgg

SEQ ID NO: 81166 - DNA, 25 bp, Probe Sequence
catacttccttcaatgattgccatt

SEQ ID NO: 81167 - DNA, 25 bp, Probe Sequence
atacttccttcaatgattgccattc

SEQ ID NO: 81168 - DNA, 25 bp, Probe Sequence
catctgtttgaatgtgctgttgacc

SEQ ID NO: 81169 - DNA, 25 bp, Probe Sequence
cagtgatggcatctgtttgaatgtg

SEQ ID NO: 81170 - DNA, 25 bp, Probe Sequence
gaacttctcttggtggaaggtgatg

SEQ ID NO: 81171 - DNA, 25 bp, Probe Sequence
tgaacagatagagaggctggaggag

SEQ ID NO: 81172 - DNA, 25 bp, Probe Sequence
agaacttctcttggtggaaggtgat

SEQ ID NO: 81173 - DNA, 25 bp, Probe Sequence
atctgtttgaatgtgctgttgaccg

SEQ ID NO: 81174 - DNA, 25 bp, Probe Sequence
gtgaacagatagagaggctggagga

SEQ ID NO: 81175 - DNA, 25 bp, Probe Sequence
cacgttgctgagtaaagaggtgtta

SEQ ID NO: 81176 - DNA, 25 bp, Probe Sequence
acgttgctgagtaaagaggtgttac

SEQ ID NO: 81177 - DNA, 25 bp, Probe Sequence
ctttaaccaagcgaggagtccaaag

SEQ ID NO: 81178 - DNA, 25 bp, Probe Sequence
gagcattcctctagattgcacaagg

SEQ ID NO: 81179 - DNA, 25 bp, Probe Sequence
ggagcattcctctagattgcacaag

SEQ ID NO: 81180 - DNA, 25 bp, Probe Sequence
aacttctcttggtggaaggtgatgg

SEQ ID NO: 81181 - DNA, 25 bp, Probe Sequence
gcatctgtttgaatgtgctgttgac

SEQ ID NO: 81182 - DNA, 25 bp, Probe Sequence
cattcctctagattgcacaagggac

SEQ ID NO: 81183 - DNA, 25 bp, Probe Sequence
cttctcttggtggaaggtgatggag

SEQ ID NO: 81184 - DNA, 25 bp, Probe Sequence
gagaacttctcttggtggaaggtga

SEQ ID NO: 81185 - DNA, 25 bp, Probe Sequence
atggcatctgtttgaatgtgctgtt

SEQ ID NO: 81186 - DNA, 25 bp, Probe Sequence
attcctctagattgcacaagggaca

SEQ ID NO: 81187 - DNA, 25 bp, Probe Sequence
cgttgctgagtaaagaggtgttact

SEQ ID NO: 81188 - DNA, 25 bp, Probe Sequence
cctttaaccaagcgaggagtccaaa

SEQ ID NO: 81189 - DNA, 25 bp, Probe Sequence
tgagaacttctcttggtggaaggtg

SEQ ID NO: 81190 - DNA, 25 bp, Probe Sequence
gtgagaacttctcttggtggaaggt

SEQ ID NO: 81191 - DNA, 25 bp, Probe Sequence
cacagtgatggcatctgtttgaatg

SEQ ID NO: 81192 - DNA, 25 bp, Probe Sequence
catctgtttgaatgtgctgttgacc

SEQ ID NO: 81193 - DNA, 25 bp, Probe Sequence
cagtgatggcatctgtttgaatgtg

SEQ ID NO: 81194 - DNA, 25 bp, Probe Sequence
gaacttctcttggtggaaggtgatg

SEQ ID NO: 81195 - DNA, 25 bp, Probe Sequence
tgaacagatagagaggctggaggag

SEQ ID NO: 81196 - DNA, 25 bp, Probe Sequence
agaacttctcttggtggaaggtgat

SEQ ID NO: 81197 - DNA, 25 bp, Probe Sequence
atctgtttgaatgtgctgttgaccg

SEQ ID NO: 81198 - DNA, 25 bp, Probe Sequence
gtgaacagatagagaggctggagga

SEQ ID NO: 81199 - DNA, 25 bp, Probe Sequence
cacgttgctgagtaaagaggtgtta

SEQ ID NO: 81200 - DNA, 25 bp, Probe Sequence
acgttgctgagtaaagaggtgttac

SEQ ID NO: 81201 - DNA, 25 bp, Probe Sequence
ctttaaccaagcgaggagtccaaag

SEQ ID NO: 81202 - DNA, 25 bp, Probe Sequence
gagcattcctctagattgcacaagg

SEQ ID NO: 81203 - DNA, 25 bp, Probe Sequence
ggagcattcctctagattgcacaag

SEQ ID NO: 81204 - DNA, 25 bp, Probe Sequence
aacttctcttggtggaaggtgatgg

SEQ ID NO: 81205 - DNA, 25 bp, Probe Sequence
gcatctgtttgaatgtgctgttgac

SEQ ID NO: 81206 - DNA, 25 bp, Probe Sequence
cattcctctagattgcacaagggac

SEQ ID NO: 81207 - DNA, 25 bp, Probe Sequence
cttctcttggtggaaggtgatggag

SEQ ID NO: 81208 - DNA, 25 bp, Probe Sequence
gagaacttctcttggtggaaggtga

SEQ ID NO: 81209 - DNA, 25 bp, Probe Sequence
atggcatctgtttgaatgtgctgtt

SEQ ID NO: 81210 - DNA, 25 bp, Probe Sequence
attcctctagattgcacaagggaca

SEQ ID NO: 81211 - DNA, 25 bp, Probe Sequence
cgttgctgagtaaagaggtgttact

SEQ ID NO: 81212 - DNA, 25 bp, Probe Sequence
cctttaaccaagcgaggagtccaaa

SEQ ID NO: 81213 - DNA, 25 bp, Probe Sequence
tgagaacttctcttggtggaaggtg

SEQ ID NO: 81214 - DNA, 25 bp, Probe Sequence
gtgagaacttctcttggtggaaggt

SEQ ID NO: 81215 - DNA, 25 bp, Probe Sequence
cacagtgatggcatctgtttgaatg

SEQ ID NO: 81216 - DNA, 25 bp, Probe Sequence
ttctgtcatatctcatcctgtaacg

SEQ ID NO: 81217 - DNA, 25 bp, Probe Sequence
gagaagtgtcaatatcctggtgtta

SEQ ID NO: 81218 - DNA, 25 bp, Probe Sequence
agaagtgtcaatatcctggtgttaa

SEQ ID NO: 81219 - DNA, 25 bp, Probe Sequence
gactcaagactcacaagaaccttat

SEQ ID NO: 81220 - DNA, 25 bp, Probe Sequence
gaagagaagtgtcaatatcctggtg

SEQ ID NO: 81221 - DNA, 25 bp, Probe Sequence
actcaagactcacaagaaccttata

SEQ ID NO: 81222 - DNA, 25 bp, Probe Sequence
acttctgtcatatctcatcctgtaa

SEQ ID NO: 81223 - DNA, 25 bp, Probe Sequence
aacttctgtcatatctcatcctgta

SEQ ID NO: 81224 - DNA, 25 bp, Probe Sequence
taacttctgtcatatctcatcctgt

SEQ ID NO: 81225 - DNA, 25 bp, Probe Sequence
cttctgtcatatctcatcctgtaac

SEQ ID NO: 81226 - DNA, 25 bp, Probe Sequence
agagaagtgtcaatatcctggtgtt

SEQ ID NO: 81227 - DNA, 25 bp, Probe Sequence
aagagaagtgtcaatatcctggtgt

SEQ ID NO: 81228 - DNA, 25 bp, Probe Sequence
cgtgaaggaagagaagtgtcaatat

SEQ ID NO: 81229 - DNA, 25 bp, Probe Sequence
ttaataatgtcacgagcaccaatga

SEQ ID NO: 81230 - DNA, 25 bp, Probe Sequence
gtgaaggaagagaagtgtcaatatc

SEQ ID NO: 81231 - DNA, 25 bp, Probe Sequence
taataatgtcacgagcaccaatgag

SEQ ID NO: 81232 - DNA, 25 bp, Probe Sequence
tgactcaagactcacaagaacctta

SEQ ID NO: 81233 - DNA, 25 bp, Probe Sequence
aattgtgtgcgtgtgtattctcatt

SEQ ID NO: 81234 - DNA, 25 bp, Probe Sequence
tctgtcatatctcatcctgtaacgc

SEQ ID NO: 81235 - DNA, 25 bp, Probe Sequence
aggactctaacaataacttctgtca

SEQ ID NO: 81236 - DNA, 25 bp, Probe Sequence
ataacttctgtcatatctcatcctg

SEQ ID NO: 81237 - DNA, 25 bp, Probe Sequence
atgactcaagactcacaagaacctt

SEQ ID NO: 81238 - DNA, 25 bp, Probe Sequence
aatgactcaagactcacaagaacct

SEQ ID NO: 81239 - DNA, 25 bp, Probe Sequence
tgaaggaagagaagtgtcaatatcc

SEQ ID NO: 81240 - DNA, 25 bp, Probe Sequence
ttctgtcatatctcatcctgtaacg

SEQ ID NO: 81241 - DNA, 25 bp, Probe Sequence
gagaagtgtcaatatcctggtgtta

SEQ ID NO: 81242 - DNA, 25 bp, Probe Sequence
agaagtgtcaatatcctggtgttaa

SEQ ID NO: 81243 - DNA, 25 bp, Probe Sequence
gactcaagactcacaagaaccttat

SEQ ID NO: 81244 - DNA, 25 bp, Probe Sequence
gaagagaagtgtcaatatcctggtg

SEQ ID NO: 81245 - DNA, 25 bp, Probe Sequence
actcaagactcacaagaaccttata

SEQ ID NO: 81246 - DNA, 25 bp, Probe Sequence
acttctgtcatatctcatcctgtaa

SEQ ID NO: 81247 - DNA, 25 bp, Probe Sequence
aacttctgtcatatctcatcctgta

SEQ ID NO: 81248 - DNA, 25 bp, Probe Sequence
taacttctgtcatatctcatcctgt

SEQ ID NO: 81249 - DNA, 25 bp, Probe Sequence
cttctgtcatatctcatcctgtaac

SEQ ID NO: 81250 - DNA, 25 bp, Probe Sequence
agagaagtgtcaatatcctggtgtt

SEQ ID NO: 81251 - DNA, 25 bp, Probe Sequence
aagagaagtgtcaatatcctggtgt

SEQ ID NO: 81252 - DNA, 25 bp, Probe Sequence
cgtgaaggaagagaagtgtcaatat

SEQ ID NO: 81253 - DNA, 25 bp, Probe Sequence
ttaataatgtcacgagcaccaatga

SEQ ID NO: 81254 - DNA, 25 bp, Probe Sequence
gtgaaggaagagaagtgtcaatatc

SEQ ID NO: 81255 - DNA, 25 bp, Probe Sequence
taataatgtcacgagcaccaatgag

SEQ ID NO: 81256 - DNA, 25 bp, Probe Sequence
tgactcaagactcacaagaacctta

SEQ ID NO: 81257 - DNA, 25 bp, Probe Sequence
aattgtgtgcgtgtgtattctcatt

SEQ ID NO: 81258 - DNA, 25 bp, Probe Sequence
tctgtcatatctcatcctgtaacgc

SEQ ID NO: 81259 - DNA, 25 bp, Probe Sequence
aggactctaacaataacttctgtca

SEQ ID NO: 81260 - DNA, 25 bp, Probe Sequence
ataacttctgtcatatctcatcctg

SEQ ID NO: 81261 - DNA, 25 bp, Probe Sequence
atgactcaagactcacaagaacctt

SEQ ID NO: 81262 - DNA, 25 bp, Probe Sequence
aatgactcaagactcacaagaacct

SEQ ID NO: 81263 - DNA, 25 bp, Probe Sequence
tgaaggaagagaagtgtcaatatcc

SEQ ID NO: 81264 - DNA, 25 bp, Probe Sequence
ctacatctaagccagagagagacag

SEQ ID NO: 81265 - DNA, 25 bp, Probe Sequence
tgtaagacaacgatgatatgaaggc

SEQ ID NO: 81266 - DNA, 25 bp, Probe Sequence
tacatctaagccagagagagacagg

SEQ ID NO: 81267 - DNA, 25 bp, Probe Sequence
cctacatctaagccagagagagaca

SEQ ID NO: 81268 - DNA, 25 bp, Probe Sequence
tttcaaactcagagacaaggacttt

SEQ ID NO: 81269 - DNA, 25 bp, Probe Sequence
aaagaaactggaaaggaagatgctt

SEQ ID NO: 81270 - DNA, 25 bp, Probe Sequence
aagagatcctttcccatttattctg

SEQ ID NO: 81271 - DNA, 25 bp, Probe Sequence
aactcagagacaaggactttggttt

SEQ ID NO: 81272 - DNA, 25 bp, Probe Sequence
aaactcagagacaaggactttggtt

SEQ ID NO: 81273 - DNA, 25 bp, Probe Sequence
gtaagacaacgatgatatgaaggcc

SEQ ID NO: 81274 - DNA, 25 bp, Probe Sequence
agagatcctttcccatttattctgg

SEQ ID NO: 81275 - DNA, 25 bp, Probe Sequence
ttgtaagacaacgatgatatgaagg

SEQ ID NO: 81276 - DNA, 25 bp, Probe Sequence
gaaactggaaaggaagatgctttag

SEQ ID NO: 81277 - DNA, 25 bp, Probe Sequence
agaaactggaaaggaagatgcttta

SEQ ID NO: 81278 - DNA, 25 bp, Probe Sequence
ggaaaggaagatgctttaggaacat

SEQ ID NO: 81279 - DNA, 25 bp, Probe Sequence
aagaaactggaaaggaagatgcttt

SEQ ID NO: 81280 - DNA, 25 bp, Probe Sequence
aaactggaaaggaagatgctttagg

SEQ ID NO: 81281 - DNA, 25 bp, Probe Sequence
gaaaggaagatgctttaggaacatg

SEQ ID NO: 81282 - DNA, 25 bp, Probe Sequence
acaaaagaaactggaaaggaagatg

SEQ ID NO: 81283 - DNA, 25 bp, Probe Sequence
gaacaaaagaaactggaaaggaaga

SEQ ID NO: 81284 - DNA, 25 bp, Probe Sequence
ggaacaaaagaaactggaaaggaag

SEQ ID NO: 81285 - DNA, 25 bp, Probe Sequence
gaaggaacaaaagaaactggaaagg

SEQ ID NO: 81286 - DNA, 25 bp, Probe Sequence
ctggaaaggaagatgctttaggaac

SEQ ID NO: 81287 - DNA, 25 bp, Probe Sequence
ccctacatctaagccagagagagac

SEQ ID NO: 81288 - DNA, 25 bp, Probe Sequence
ctacatctaagccagagagagacag

SEQ ID NO: 81289 - DNA, 25 bp, Probe Sequence
tgtaagacaacgatgatatgaaggc

SEQ ID NO: 81290 - DNA, 25 bp, Probe Sequence
tacatctaagccagagagagacagg

SEQ ID NO: 81291 - DNA, 25 bp, Probe Sequence
cctacatctaagccagagagagaca

SEQ ID NO: 81292 - DNA, 25 bp, Probe Sequence
tttcaaactcagagacaaggacttt

SEQ ID NO: 81293 - DNA, 25 bp, Probe Sequence
aaagaaactggaaaggaagatgctt

SEQ ID NO: 81294 - DNA, 25 bp, Probe Sequence
aagagatcctttcccatttattctg

SEQ ID NO: 81295 - DNA, 25 bp, Probe Sequence
aactcagagacaaggactttggttt

SEQ ID NO: 81296 - DNA, 25 bp, Probe Sequence
aaactcagagacaaggactttggtt

SEQ ID NO: 81297 - DNA, 25 bp, Probe Sequence
gtaagacaacgatgatatgaaggcc

SEQ ID NO: 81298 - DNA, 25 bp, Probe Sequence
agagatcctttcccatttattctgg

SEQ ID NO: 81299 - DNA, 25 bp, Probe Sequence
ttgtaagacaacgatgatatgaagg

SEQ ID NO: 81300 - DNA, 25 bp, Probe Sequence
gaaactggaaaggaagatgctttag

SEQ ID NO: 81301 - DNA, 25 bp, Probe Sequence
agaaactggaaaggaagatgcttta

SEQ ID NO: 81302 - DNA, 25 bp, Probe Sequence
ggaaaggaagatgctttaggaacat

SEQ ID NO: 81303 - DNA, 25 bp, Probe Sequence
aagaaactggaaaggaagatgcttt

SEQ ID NO: 81304 - DNA, 25 bp, Probe Sequence
aaactggaaaggaagatgctttagg

SEQ ID NO: 81305 - DNA, 25 bp, Probe Sequence
gaaaggaagatgctttaggaacatg

SEQ ID NO: 81306 - DNA, 25 bp, Probe Sequence
acaaaagaaactggaaaggaagatg

SEQ ID NO: 81307 - DNA, 25 bp, Probe Sequence
gaacaaaagaaactggaaaggaaga

SEQ ID NO: 81308 - DNA, 25 bp, Probe Sequence
ggaacaaaagaaactggaaaggaag

SEQ ID NO: 81309 - DNA, 25 bp, Probe Sequence
gaaggaacaaaagaaactggaaagg

SEQ ID NO: 81310 - DNA, 25 bp, Probe Sequence
ctggaaaggaagatgctttaggaac

SEQ ID NO: 81311 - DNA, 25 bp, Probe Sequence
ccctacatctaagccagagagagac

SEQ ID NO: 81312 - DNA, 25 bp, Probe Sequence
tcttagtaacttctcgtgaatccag

SEQ ID NO: 81313 - DNA, 25 bp, Probe Sequence
ttcttagtaacttctcgtgaatcca

SEQ ID NO: 81314 - DNA, 25 bp, Probe Sequence
cttagtaacttctcgtgaatccagt

SEQ ID NO: 81315 - DNA, 25 bp, Probe Sequence
ataatcatagcctgctgacactaag

SEQ ID NO: 81316 - DNA, 25 bp, Probe Sequence
aataatcatagcctgctgacactaa

SEQ ID NO: 81317 - DNA, 25 bp, Probe Sequence
acataataatcatagcctgctgaca

SEQ ID NO: 81318 - DNA, 25 bp, Probe Sequence
cataataatcatagcctgctgacac

SEQ ID NO: 81319 - DNA, 25 bp, Probe Sequence
ataataatcatagcctgctgacact

SEQ ID NO: 81320 - DNA, 25 bp, Probe Sequence
taataatcatagcctgctgacacta

SEQ ID NO: 81321 - DNA, 25 bp, Probe Sequence
aacataataatcatagcctgctgac

SEQ ID NO: 81322 - DNA, 25 bp, Probe Sequence
ttggtgattgagggaaataatgtct

SEQ ID NO: 81323 - DNA, 25 bp, Probe Sequence
tgatttactggtccctactgatttc

SEQ ID NO: 81324 - DNA, 25 bp, Probe Sequence
gtgatttactggtccctactgattt

SEQ ID NO: 81325 - DNA, 25 bp, Probe Sequence
tttggtgattgagggaaataatgtc

SEQ ID NO: 81326 - DNA, 25 bp, Probe Sequence
ctttggtgattgagggaaataatgt

SEQ ID NO: 81327 - DNA, 25 bp, Probe Sequence
gatttactggtccctactgatttcc

SEQ ID NO: 81328 - DNA, 25 bp, Probe Sequence
agcatttcttagtaacttctcgtga

SEQ ID NO: 81329 - DNA, 25 bp, Probe Sequence
cagcatttcttagtaacttctcgtg

SEQ ID NO: 81330 - DNA, 25 bp, Probe Sequence
tcagcatttcttagtaacttctcgt

SEQ ID NO: 81331 - DNA, 25 bp, Probe Sequence
gtcagcatttcttagtaacttctcg

SEQ ID NO: 81332 - DNA, 25 bp, Probe Sequence
tctttggtgattgagggaaataatg

SEQ ID NO: 81333 - DNA, 25 bp, Probe Sequence
ataaatgctaatgtagggctcagag

SEQ ID NO: 81334 - DNA, 25 bp, Probe Sequence
cataaatgctaatgtagggctcaga

SEQ ID NO: 81335 - DNA, 25 bp, Probe Sequence
ttgatggtgtgaaattggaagtatc

SEQ ID NO: 81336 - DNA, 25 bp, Probe Sequence
gtggatggactgaagtgtgtatatt

SEQ ID NO: 81337 - DNA, 25 bp, Probe Sequence
ggtggatggactgaagtgtgtatat

SEQ ID NO: 81338 - DNA, 25 bp, Probe Sequence
tggatggactgaagtgtgtatattt

SEQ ID NO: 81339 - DNA, 25 bp, Probe Sequence
tggtggatggactgaagtgtgtata

SEQ ID NO: 81340 - DNA, 25 bp, Probe Sequence
atggtggatggactgaagtgtgtat

SEQ ID NO: 81341 - DNA, 25 bp, Probe Sequence
ctgctctcatactgctcagtgacat

SEQ ID NO: 81342 - DNA, 25 bp, Probe Sequence
tgctctcatactgctcagtgacatg

SEQ ID NO: 81343 - DNA, 25 bp, Probe Sequence
ggatggactgaagtgtgtatatttt

SEQ ID NO: 81344 - DNA, 25 bp, Probe Sequence
catggtggatggactgaagtgtgta

SEQ ID NO: 81345 - DNA, 25 bp, Probe Sequence
tggactgaagtgtgtatattttctt

SEQ ID NO: 81346 - DNA, 25 bp, Probe Sequence
ggactgaagtgtgtatattttcttg

SEQ ID NO: 81347 - DNA, 25 bp, Probe Sequence
atggactgaagtgtgtatattttct

SEQ ID NO: 81348 - DNA, 25 bp, Probe Sequence
gatggactgaagtgtgtatattttc

SEQ ID NO: 81349 - DNA, 25 bp, Probe Sequence
gactgaagtgtgtatattttcttga

SEQ ID NO: 81350 - DNA, 25 bp, Probe Sequence
ctctcatactgctcagtgacatggc

SEQ ID NO: 81351 - DNA, 25 bp, Probe Sequence
gctctcatactgctcagtgacatgg

SEQ ID NO: 81352 - DNA, 25 bp, Probe Sequence
actgaagtgtgtatattttcttgat

SEQ ID NO: 81353 - DNA, 25 bp, Probe Sequence
tgaagtgtgtatattttcttgatct

SEQ ID NO: 81354 - DNA, 25 bp, Probe Sequence
ctgaagtgtgtatattttcttgatc

SEQ ID NO: 81355 - DNA, 25 bp, Probe Sequence
gaaacaggaggagccagatgtacac

SEQ ID NO: 81356 - DNA, 25 bp, Probe Sequence
gtggatggactgaagtgtgtatatt

SEQ ID NO: 81357 - DNA, 25 bp, Probe Sequence
ggtggatggactgaagtgtgtatat

SEQ ID NO: 81358 - DNA, 25 bp, Probe Sequence
tggatggactgaagtgtgtatattt

SEQ ID NO: 81359 - DNA, 25 bp, Probe Sequence
tggtggatggactgaagtgtgtata

SEQ ID NO: 81360 - DNA, 25 bp, Probe Sequence
atggtggatggactgaagtgtgtat

SEQ ID NO: 81361 - DNA, 25 bp, Probe Sequence
ctgctctcatactgctcagtgacat

SEQ ID NO: 81362 - DNA, 25 bp, Probe Sequence
tgctctcatactgctcagtgacatg

SEQ ID NO: 81363 - DNA, 25 bp, Probe Sequence
ggatggactgaagtgtgtatatttt

SEQ ID NO: 81364 - DNA, 25 bp, Probe Sequence
catggtggatggactgaagtgtgta

SEQ ID NO: 81365 - DNA, 25 bp, Probe Sequence
tggactgaagtgtgtatattttctt

SEQ ID NO: 81366 - DNA, 25 bp, Probe Sequence
ggactgaagtgtgtatattttcttg

SEQ ID NO: 81367 - DNA, 25 bp, Probe Sequence
atggactgaagtgtgtatattttct

SEQ ID NO: 81368 - DNA, 25 bp, Probe Sequence
gatggactgaagtgtgtatattttc

SEQ ID NO: 81369 - DNA, 25 bp, Probe Sequence
gactgaagtgtgtatattttcttga

SEQ ID NO: 81370 - DNA, 25 bp, Probe Sequence
ctctcatactgctcagtgacatggc

SEQ ID NO: 81371 - DNA, 25 bp, Probe Sequence
gctctcatactgctcagtgacatgg

SEQ ID NO: 81372 - DNA, 25 bp, Probe Sequence
actgaagtgtgtatattttcttgat

SEQ ID NO: 81373 - DNA, 25 bp, Probe Sequence
tgaagtgtgtatattttcttgatct

SEQ ID NO: 81374 - DNA, 25 bp, Probe Sequence
ctgaagtgtgtatattttcttgatc

SEQ ID NO: 81375 - DNA, 25 bp, Probe Sequence
gaaacaggaggagccagatgtacac

SEQ ID NO: 81376 - DNA, 25 bp, Probe Sequence
attcttgtaacacctctcaatggtt

SEQ ID NO: 81377 - DNA, 25 bp, Probe Sequence
ttaactgcattcttgtaacacctct

SEQ ID NO: 81378 - DNA, 25 bp, Probe Sequence
attaactgcattcttgtaacacctc

SEQ ID NO: 81379 - DNA, 25 bp, Probe Sequence
ttcttgtaacacctctcaatggttg

SEQ ID NO: 81380 - DNA, 25 bp, Probe Sequence
taactgcattcttgtaacacctctc

SEQ ID NO: 81381 - DNA, 25 bp, Probe Sequence
aattaactgcattcttgtaacacct

SEQ ID NO: 81382 - DNA, 25 bp, Probe Sequence
tagccaaacttcaaattctgtcact

SEQ ID NO: 81383 - DNA, 25 bp, Probe Sequence
ctagccaaacttcaaattctgtcac

SEQ ID NO: 81384 - DNA, 25 bp, Probe Sequence
cattcttgtaacacctctcaatggt

SEQ ID NO: 81385 - DNA, 25 bp, Probe Sequence
ctgcattcttgtaacacctctcaat

SEQ ID NO: 81386 - DNA, 25 bp, Probe Sequence
gcacaataatagaagcaacattctg

SEQ ID NO: 81387 - DNA, 25 bp, Probe Sequence
cttgtaacacctctcaatggttgtg

SEQ ID NO: 81388 - DNA, 25 bp, Probe Sequence
tcttgtaacacctctcaatggttgt

SEQ ID NO: 81389 - DNA, 25 bp, Probe Sequence
cacaataatagaagcaacattctgg

SEQ ID NO: 81390 - DNA, 25 bp, Probe Sequence
aactgcattcttgtaacacctctca

SEQ ID NO: 81391 - DNA, 25 bp, Probe Sequence
agccaaacttcaaattctgtcactg

SEQ ID NO: 81392 - DNA, 25 bp, Probe Sequence
gcattcttgtaacacctctcaatgg

SEQ ID NO: 81393 - DNA, 25 bp, Probe Sequence
actgcattcttgtaacacctctcaa

SEQ ID NO: 81394 - DNA, 25 bp, Probe Sequence
catcaaggatagctagaggagagtg

SEQ ID NO: 81395 - DNA, 25 bp, Probe Sequence
tcatcaaggatagctagaggagagt

SEQ ID NO: 81396 - DNA, 25 bp, Probe Sequence
acagaatgaatttatgcacacacaa

SEQ ID NO: 81397 - DNA, 25 bp, Probe Sequence
cctacagaatgaatttatgcacaca

SEQ ID NO: 81398 - DNA, 25 bp, Probe Sequence
tcctacagaatgaatttatgcacac

SEQ ID NO: 81399 - DNA, 25 bp, Probe Sequence
tacagaatgaatttatgcacacaca

SEQ ID NO: 81400 - DNA, 25 bp, Probe Sequence
gcgtaggtaatgttctgtgagttat

SEQ ID NO: 81401 - DNA, 25 bp, Probe Sequence
cgtaggtaatgttctgtgagttatc

SEQ ID NO: 81402 - DNA, 25 bp, Probe Sequence
agcgtaggtaatgttctgtgagtta

SEQ ID NO: 81403 - DNA, 25 bp, Probe Sequence
aatgttctgtgagttatctcgtgat

SEQ ID NO: 81404 - DNA, 25 bp, Probe Sequence
aggtaatgttctgtgagttatctcg

SEQ ID NO: 81405 - DNA, 25 bp, Probe Sequence
gtaatgttctgtgagttatctcgtg

SEQ ID NO: 81406 - DNA, 25 bp, Probe Sequence
ggtaatgttctgtgagttatctcgt

SEQ ID NO: 81407 - DNA, 25 bp, Probe Sequence
taatgttctgtgagttatctcgtga

SEQ ID NO: 81408 - DNA, 25 bp, Probe Sequence
gaatgagcgtaggtaatgttctgtg

SEQ ID NO: 81409 - DNA, 25 bp, Probe Sequence
atgttctgtgagttatctcgtgata

SEQ ID NO: 81410 - DNA, 25 bp, Probe Sequence
aatgagcgtaggtaatgttctgtga

SEQ ID NO: 81411 - DNA, 25 bp, Probe Sequence
cctatggagtagtaagtggcgaatt

SEQ ID NO: 81412 - DNA, 25 bp, Probe Sequence
gtaggtaatgttctgtgagttatct

SEQ ID NO: 81413 - DNA, 25 bp, Probe Sequence
atgagcgtaggtaatgttctgtgag

SEQ ID NO: 81414 - DNA, 25 bp, Probe Sequence
gagcgtaggtaatgttctgtgagtt

SEQ ID NO: 81415 - DNA, 25 bp, Probe Sequence
cagagtcctatggagtagtaagtgg

SEQ ID NO: 81416 - DNA, 25 bp, Probe Sequence
taggtaatgttctgtgagttatctc

SEQ ID NO: 81417 - DNA, 25 bp, Probe Sequence
gcagagtcctatggagtagtaagtg

SEQ ID NO: 81418 - DNA, 25 bp, Probe Sequence
cgaatgagcgtaggtaatgttctgt

SEQ ID NO: 81419 - DNA, 25 bp, Probe Sequence
aatatgctgaatagtgctttggctt

SEQ ID NO: 81420 - DNA, 25 bp, Probe Sequence
ctaaggcaggagaatcacttgaacc

SEQ ID NO: 81421 - DNA, 25 bp, Probe Sequence
gaatatgctgaatagtgctttggct

SEQ ID NO: 81422 - DNA, 25 bp, Probe Sequence
atcactttaggtcaggagttcaaga

SEQ ID NO: 81423 - DNA, 25 bp, Probe Sequence
atatgctgaatagtgctttggcttg

SEQ ID NO: 81424 - DNA, 25 bp, Probe Sequence
aatggaggaatgttctgtgttctta

SEQ ID NO: 81425 - DNA, 25 bp, Probe Sequence
taatgaatggaggaatgttctgtgt

SEQ ID NO: 81426 - DNA, 25 bp, Probe Sequence
atggaggaatgttctgtgttcttaa

SEQ ID NO: 81427 - DNA, 25 bp, Probe Sequence
aactccgtctcaagcatattaacag

SEQ ID NO: 81428 - DNA, 25 bp, Probe Sequence
ttaatgaatggaggaatgttctgtg

SEQ ID NO: 81429 - DNA, 25 bp, Probe Sequence
caactccgtctcaagcatattaaca

SEQ ID NO: 81430 - DNA, 25 bp, Probe Sequence
aatgaatggaggaatgttctgtgtt

SEQ ID NO: 81431 - DNA, 25 bp, Probe Sequence
cttaatgaatggaggaatgttctgt

SEQ ID NO: 81432 - DNA, 25 bp, Probe Sequence
gaatggaggaatgttctgtgttctt

SEQ ID NO: 81433 - DNA, 25 bp, Probe Sequence
gaatcactaaggtcaggaagttcaa

SEQ ID NO: 81434 - DNA, 25 bp, Probe Sequence
atgaatggaggaatgttctgtgttc

SEQ ID NO: 81435 - DNA, 25 bp, Probe Sequence
ccaactccgtctcaagcatattaac

SEQ ID NO: 81436 - DNA, 25 bp, Probe Sequence
accttaatgaatggaggaatgttct

SEQ ID NO: 81437 - DNA, 25 bp, Probe Sequence
agaccttaatgaatggaggaatgtt

SEQ ID NO: 81438 - DNA, 25 bp, Probe Sequence
ccttaatgaatggaggaatgttctg

SEQ ID NO: 81439 - DNA, 25 bp, Probe Sequence
gaccttaatgaatggaggaatgttc

SEQ ID NO: 81440 - DNA, 25 bp, Probe Sequence
tgaatggaggaatgttctgtgttct

SEQ ID NO: 81441 - DNA, 25 bp, Probe Sequence
tagaccttaatgaatggaggaatgt

SEQ ID NO: 81442 - DNA, 25 bp, Probe Sequence
actccgtctcaagcatattaacagg

SEQ ID NO: 81443 - DNA, 25 bp, Probe Sequence
tattaacagggagggaagaagaaag

SEQ ID NO: 81444 - DNA, 25 bp, Probe Sequence
catattaacagggagggaagaagaa

SEQ ID NO: 81445 - DNA, 25 bp, Probe Sequence
agtctaacatagctgagagattgat

SEQ ID NO: 81446 - DNA, 25 bp, Probe Sequence
atagaccttaatgaatggaggaatg

SEQ ID NO: 81447 - DNA, 25 bp, Probe Sequence
tggaggaatgttctgtgttcttaaa

SEQ ID NO: 81448 - DNA, 25 bp, Probe Sequence
aacactacatccacattattgactt

SEQ ID NO: 81449 - DNA, 25 bp, Probe Sequence
ataaagtctcatcattctgttggct

SEQ ID NO: 81450 - DNA, 25 bp, Probe Sequence
cataaagtctcatcattctgttggc

SEQ ID NO: 81451 - DNA, 25 bp, Probe Sequence
gaaatagcctccctttagaatgtca

SEQ ID NO: 81452 - DNA, 25 bp, Probe Sequence
tgaaatagcctccctttagaatgtc

SEQ ID NO: 81453 - DNA, 25 bp, Probe Sequence
ctgaaatagcctccctttagaatgt

SEQ ID NO: 81454 - DNA, 25 bp, Probe Sequence
actgaaatagcctccctttagaatg

SEQ ID NO: 81455 - DNA, 25 bp, Probe Sequence
aaactgaaatagcctccctttagaa

SEQ ID NO: 81456 - DNA, 25 bp, Probe Sequence
taaagtctcatcattctgttggcta

SEQ ID NO: 81457 - DNA, 25 bp, Probe Sequence
aactgaaatagcctccctttagaat

SEQ ID NO: 81458 - DNA, 25 bp, Probe Sequence
ataatgctctttacaatatgctggc

SEQ ID NO: 81459 - DNA, 25 bp, Probe Sequence
aagtctcatcattctgttggctaaa

SEQ ID NO: 81460 - DNA, 25 bp, Probe Sequence
aaagtctcatcattctgttggctaa

SEQ ID NO: 81461 - DNA, 25 bp, Probe Sequence
aaatagcctccctttagaatgtcac

SEQ ID NO: 81462 - DNA, 25 bp, Probe Sequence
aatgctctttacaatatgctggcta

SEQ ID NO: 81463 - DNA, 25 bp, Probe Sequence
taatgctctttacaatatgctggct

SEQ ID NO: 81464 - DNA, 25 bp, Probe Sequence
tcataaagtctcatcattctgttgg

SEQ ID NO: 81465 - DNA, 25 bp, Probe Sequence
atgctctttacaatatgctggctac

SEQ ID NO: 81466 - DNA, 25 bp, Probe Sequence
acactacatccacattattgacttt

SEQ ID NO: 81467 - DNA, 25 bp, Probe Sequence
aaacactacatccacattattgact

SEQ ID NO: 81468 - DNA, 25 bp, Probe Sequence
aatagcctccctttagaatgtcaca

SEQ ID NO: 81469 - DNA, 25 bp, Probe Sequence
atttagtaatttgccaaagccacaa

SEQ ID NO: 81470 - DNA, 25 bp, Probe Sequence
atagcctccctttagaatgtcacat

SEQ ID NO: 81471 - DNA, 25 bp, Probe Sequence
tttagtaatttgccaaagccacaac

SEQ ID NO: 81472 - DNA, 25 bp, Probe Sequence
atcttactgcttgtcacttgaatcc

SEQ ID NO: 81473 - DNA, 25 bp, Probe Sequence
agtgtgtagaccatctcttcatatt

SEQ ID NO: 81474 - DNA, 25 bp, Probe Sequence
aagtgtgtagaccatctcttcatat

SEQ ID NO: 81475 - DNA, 25 bp, Probe Sequence
gatcttactgcttgtcacttgaatc

SEQ ID NO: 81476 - DNA, 25 bp, Probe Sequence
ttatacttcatctgacatccaggtg

SEQ ID NO: 81477 - DNA, 25 bp, Probe Sequence
atacttcatctgacatccaggtgta

SEQ ID NO: 81478 - DNA, 25 bp, Probe Sequence
tatacttcatctgacatccaggtgt

SEQ ID NO: 81479 - DNA, 25 bp, Probe Sequence
ttgtcatacatctctggtataagcc

SEQ ID NO: 81480 - DNA, 25 bp, Probe Sequence
cttcatctgacatccaggtgtaatc

SEQ ID NO: 81481 - DNA, 25 bp, Probe Sequence
tacttcatctgacatccaggtgtaa

SEQ ID NO: 81482 - DNA, 25 bp, Probe Sequence
cgtgattgtcatacatctctggtat

SEQ ID NO: 81483 - DNA, 25 bp, Probe Sequence
ttcatctgacatccaggtgtaatct

SEQ ID NO: 81484 - DNA, 25 bp, Probe Sequence
acttcatctgacatccaggtgtaat

SEQ ID NO: 81485 - DNA, 25 bp, Probe Sequence
catacatctctggtataagccacat

SEQ ID NO: 81486 - DNA, 25 bp, Probe Sequence
ccgtgattgtcatacatctctggta

SEQ ID NO: 81487 - DNA, 25 bp, Probe Sequence
gtcatacatctctggtataagccac

SEQ ID NO: 81488 - DNA, 25 bp, Probe Sequence
atacatctctggtataagccacatt

SEQ ID NO: 81489 - DNA, 25 bp, Probe Sequence
tcatacatctctggtataagccaca

SEQ ID NO: 81490 - DNA, 25 bp, Probe Sequence
tgtcatacatctctggtataagcca

SEQ ID NO: 81491 - DNA, 25 bp, Probe Sequence
atctgacatccaggtgtaatctgac

SEQ ID NO: 81492 - DNA, 25 bp, Probe Sequence
catctgacatccaggtgtaatctga

SEQ ID NO: 81493 - DNA, 25 bp, Probe Sequence
tcatctgacatccaggtgtaatctg

SEQ ID NO: 81494 - DNA, 25 bp, Probe Sequence
gagaacttgattgaacgtgagattg

SEQ ID NO: 81495 - DNA, 25 bp, Probe Sequence
atactgcttatatctgtggattcac

SEQ ID NO: 81496 - DNA, 25 bp, Probe Sequence
atcttactgcttgtcacttgaatcc

SEQ ID NO: 81497 - DNA, 25 bp, Probe Sequence
agtgtgtagaccatctcttcatatt

SEQ ID NO: 81498 - DNA, 25 bp, Probe Sequence
aagtgtgtagaccatctcttcatat

SEQ ID NO: 81499 - DNA, 25 bp, Probe Sequence
gatcttactgcttgtcacttgaatc

SEQ ID NO: 81500 - DNA, 25 bp, Probe Sequence
ttatacttcatctgacatccaggtg

SEQ ID NO: 81501 - DNA, 25 bp, Probe Sequence
atacttcatctgacatccaggtgta

SEQ ID NO: 81502 - DNA, 25 bp, Probe Sequence
tatacttcatctgacatccaggtgt

SEQ ID NO: 81503 - DNA, 25 bp, Probe Sequence
ttgtcatacatctctggtataagcc

SEQ ID NO: 81504 - DNA, 25 bp, Probe Sequence
cttcatctgacatccaggtgtaatc

SEQ ID NO: 81505 - DNA, 25 bp, Probe Sequence
tacttcatctgacatccaggtgtaa

SEQ ID NO: 81506 - DNA, 25 bp, Probe Sequence
cgtgattgtcatacatctctggtat

SEQ ID NO: 81507 - DNA, 25 bp, Probe Sequence
ttcatctgacatccaggtgtaatct

SEQ ID NO: 81508 - DNA, 25 bp, Probe Sequence
acttcatctgacatccaggtgtaat

SEQ ID NO: 81509 - DNA, 25 bp, Probe Sequence
catacatctctggtataagccacat

SEQ ID NO: 81510 - DNA, 25 bp, Probe Sequence
ccgtgattgtcatacatctctggta

SEQ ID NO: 81511 - DNA, 25 bp, Probe Sequence
gtcatacatctctggtataagccac

SEQ ID NO: 81512 - DNA, 25 bp, Probe Sequence
atacatctctggtataagccacatt

SEQ ID NO: 81513 - DNA, 25 bp, Probe Sequence
tcatacatctctggtataagccaca

SEQ ID NO: 81514 - DNA, 25 bp, Probe Sequence
tgtcatacatctctggtataagcca

SEQ ID NO: 81515 - DNA, 25 bp, Probe Sequence
atctgacatccaggtgtaatctgac

SEQ ID NO: 81516 - DNA, 25 bp, Probe Sequence
catctgacatccaggtgtaatctga

SEQ ID NO: 81517 - DNA, 25 bp, Probe Sequence
tcatctgacatccaggtgtaatctg

SEQ ID NO: 81518 - DNA, 25 bp, Probe Sequence
gagaacttgattgaacgtgagattg

SEQ ID NO: 81519 - DNA, 25 bp, Probe Sequence
atactgcttatatctgtggattcac

SEQ ID NO: 81520 - DNA, 25 bp, Probe Sequence
cttaacctcttactccagcctactt

SEQ ID NO: 81521 - DNA, 25 bp, Probe Sequence
cttcctgattgtgcctagtatatcc

SEQ ID NO: 81522 - DNA, 25 bp, Probe Sequence
tcttcctgattgtgcctagtatatc

SEQ ID NO: 81523 - DNA, 25 bp, Probe Sequence
taagtcctgtcagttctacctcaag

SEQ ID NO: 81524 - DNA, 25 bp, Probe Sequence
ctaagtcctgtcagttctacctcaa

SEQ ID NO: 81525 - DNA, 25 bp, Probe Sequence
ttcttcctgattgtgcctagtatat

SEQ ID NO: 81526 - DNA, 25 bp, Probe Sequence
tattccatgtatgtgttctctctcc

SEQ ID NO: 81527 - DNA, 25 bp, Probe Sequence
tgtattccatgtatgtgttctctct

SEQ ID NO: 81528 - DNA, 25 bp, Probe Sequence
acttaacctcttactccagcctact

SEQ ID NO: 81529 - DNA, 25 bp, Probe Sequence
cacttaacctcttactccagcctac

SEQ ID NO: 81530 - DNA, 25 bp, Probe Sequence
tcacttaacctcttactccagccta

SEQ ID NO: 81531 - DNA, 25 bp, Probe Sequence
gtattccatgtatgtgttctctctc

SEQ ID NO: 81532 - DNA, 25 bp, Probe Sequence
ctcagcttcacttaacctcttactc

SEQ ID NO: 81533 - DNA, 25 bp, Probe Sequence
ctctcagcttcacttaacctcttac

SEQ ID NO: 81534 - DNA, 25 bp, Probe Sequence
tctctcagcttcacttaacctctta

SEQ ID NO: 81535 - DNA, 25 bp, Probe Sequence
atgtattccatgtatgtgttctctc

SEQ ID NO: 81536 - DNA, 25 bp, Probe Sequence
cttcacttaacctcttactccagcc

SEQ ID NO: 81537 - DNA, 25 bp, Probe Sequence
tctcagcttcacttaacctcttact

SEQ ID NO: 81538 - DNA, 25 bp, Probe Sequence
tcctgtcagttctacctcaagtctt

SEQ ID NO: 81539 - DNA, 25 bp, Probe Sequence
acctcttactccagcctactttata

SEQ ID NO: 81540 - DNA, 25 bp, Probe Sequence
taacctcttactccagcctacttta

SEQ ID NO: 81541 - DNA, 25 bp, Probe Sequence
cgtctttcttcctcacctatgtaat

SEQ ID NO: 81542 - DNA, 25 bp, Probe Sequence
actccagcctactttatacacaatg

SEQ ID NO: 81543 - DNA, 25 bp, Probe Sequence
cctcttactccagcctactttatac

SEQ ID NO: 81544 - DNA, 25 bp, Probe Sequence
tttctaaagtaaccataaaagcacg

SEQ ID NO: 81545 - DNA, 25 bp, Probe Sequence
tccaaaatatgtgaccttaatgaga

SEQ ID NO: 81546 - DNA, 25 bp, Probe Sequence
ttctaaagtaaccataaaagcacgt

SEQ ID NO: 81547 - DNA, 25 bp, Probe Sequence
ccaaaatatgtgaccttaatgagat

SEQ ID NO: 81548 - DNA, 25 bp, Probe Sequence
atccaaaatatgtgaccttaatgag

SEQ ID NO: 81549 - DNA, 25 bp, Probe Sequence
tctaaagtaaccataaaagcacgtt

SEQ ID NO: 81550 - DNA, 25 bp, Probe Sequence
gatccaaaatatgtgaccttaatga

SEQ ID NO: 81551 - DNA, 25 bp, Probe Sequence
ctaaagtaaccataaaagcacgttt

SEQ ID NO: 81552 - DNA, 25 bp, Probe Sequence
aaataacatctattgagtgcttaaa

SEQ ID NO: 81553 - DNA, 25 bp, Probe Sequence
taaagtaaccataaaagcacgtttt

SEQ ID NO: 81554 - DNA, 25 bp, Probe Sequence
ttttctaaagtaaccataaaagcac

SEQ ID NO: 81555 - DNA, 25 bp, Probe Sequence
caaaatatgtgaccttaatgagatt

SEQ ID NO: 81556 - DNA, 25 bp, Probe Sequence
ggggatccaaaatatgtgaccttaa

SEQ ID NO: 81557 - DNA, 25 bp, Probe Sequence
gggatccaaaatatgtgaccttaat

SEQ ID NO: 81558 - DNA, 25 bp, Probe Sequence
ttttagagttgagttcccgagaggg

SEQ ID NO: 81559 - DNA, 25 bp, Probe Sequence
attttctaaagtaaccataaaagca

SEQ ID NO: 81560 - DNA, 25 bp, Probe Sequence
aataacatctattgagtgcttaaaa

SEQ ID NO: 81561 - DNA, 25 bp, Probe Sequence
ggatccaaaatatgtgaccttaatg

SEQ ID NO: 81562 - DNA, 25 bp, Probe Sequence
gattttctaaagtaaccataaaagc

SEQ ID NO: 81563 - DNA, 25 bp, Probe Sequence
tggggatccaaaatatgtgacctta

SEQ ID NO: 81564 - DNA, 25 bp, Probe Sequence
tagttggggatccaaaatatgtgac

SEQ ID NO: 81565 - DNA, 25 bp, Probe Sequence
gtagttggggatccaaaatatgtga

SEQ ID NO: 81566 - DNA, 25 bp, Probe Sequence
atggtagttggggatccaaaatatg

SEQ ID NO: 81567 - DNA, 25 bp, Probe Sequence
catggtagttggggatccaaaatat

SEQ ID NO: 81568 - DNA, 25 bp, Probe Sequence
atagttaggaatacacaagccgtaa

SEQ ID NO: 81569 - DNA, 25 bp, Probe Sequence
tatagttaggaatacacaagccgta

SEQ ID NO: 81570 - DNA, 25 bp, Probe Sequence
ctatagttaggaatacacaagccgt

SEQ ID NO: 81571 - DNA, 25 bp, Probe Sequence
tagttaggaatacacaagccgtaaa

SEQ ID NO: 81572 - DNA, 25 bp, Probe Sequence
agttcctatttcagcataaagaggc

SEQ ID NO: 81573 - DNA, 25 bp, Probe Sequence
tttgaggaatagtttggaccttgtg

SEQ ID NO: 81574 - DNA, 25 bp, Probe Sequence
aagttcctatttcagcataaagagg

SEQ ID NO: 81575 - DNA, 25 bp, Probe Sequence
aaagttcctatttcagcataaagag

SEQ ID NO: 81576 - DNA, 25 bp, Probe Sequence
agctatagttaggaatacacaagcc

SEQ ID NO: 81577 - DNA, 25 bp, Probe Sequence
tcttctaggtaaagctgagatcaca

SEQ ID NO: 81578 - DNA, 25 bp, Probe Sequence
ctcttctaggtaaagctgagatcac

SEQ ID NO: 81579 - DNA, 25 bp, Probe Sequence
gactacaagaagagcttcctttaaa

SEQ ID NO: 81580 - DNA, 25 bp, Probe Sequence
gctatagttaggaatacacaagccg

SEQ ID NO: 81581 - DNA, 25 bp, Probe Sequence
cttctaggtaaagctgagatcacag

SEQ ID NO: 81582 - DNA, 25 bp, Probe Sequence
ccatttggactacaagaagagcttc

SEQ ID NO: 81583 - DNA, 25 bp, Probe Sequence
ggactacaagaagagcttcctttaa

SEQ ID NO: 81584 - DNA, 25 bp, Probe Sequence
gttcctatttcagcataaagaggct

SEQ ID NO: 81585 - DNA, 25 bp, Probe Sequence
gttaggaatacacaagccgtaaaat

SEQ ID NO: 81586 - DNA, 25 bp, Probe Sequence
agttaggaatacacaagccgtaaaa

SEQ ID NO: 81587 - DNA, 25 bp, Probe Sequence
gctattcattccagattttcgtgta

SEQ ID NO: 81588 - DNA, 25 bp, Probe Sequence
ttaggaatacacaagccgtaaaatc

SEQ ID NO: 81589 - DNA, 25 bp, Probe Sequence
ctaggtaaagctgagatcacaggaa

SEQ ID NO: 81590 - DNA, 25 bp, Probe Sequence
ttctaggtaaagctgagatcacagg

SEQ ID NO: 81591 - DNA, 25 bp, Probe Sequence
tggactacaagaagagcttccttta

SEQ ID NO: 81592 - DNA, 25 bp, Probe Sequence
atagttaggaatacacaagccgtaa

SEQ ID NO: 81593 - DNA, 25 bp, Probe Sequence
tatagttaggaatacacaagccgta

SEQ ID NO: 81594 - DNA, 25 bp, Probe Sequence
ctatagttaggaatacacaagccgt

SEQ ID NO: 81595 - DNA, 25 bp, Probe Sequence
tagttaggaatacacaagccgtaaa

SEQ ID NO: 81596 - DNA, 25 bp, Probe Sequence
agttcctatttcagcataaagaggc

SEQ ID NO: 81597 - DNA, 25 bp, Probe Sequence
tttgaggaatagtttggaccttgtg

SEQ ID NO: 81598 - DNA, 25 bp, Probe Sequence
aagttcctatttcagcataaagagg

SEQ ID NO: 81599 - DNA, 25 bp, Probe Sequence
aaagttcctatttcagcataaagag

SEQ ID NO: 81600 - DNA, 25 bp, Probe Sequence
agctatagttaggaatacacaagcc

SEQ ID NO: 81601 - DNA, 25 bp, Probe Sequence
tcttctaggtaaagctgagatcaca

SEQ ID NO: 81602 - DNA, 25 bp, Probe Sequence
ctcttctaggtaaagctgagatcac

SEQ ID NO: 81603 - DNA, 25 bp, Probe Sequence
gactacaagaagagcttcctttaaa

SEQ ID NO: 81604 - DNA, 25 bp, Probe Sequence
gctatagttaggaatacacaagccg

SEQ ID NO: 81605 - DNA, 25 bp, Probe Sequence
cttctaggtaaagctgagatcacag

SEQ ID NO: 81606 - DNA, 25 bp, Probe Sequence
ccatttggactacaagaagagcttc

SEQ ID NO: 81607 - DNA, 25 bp, Probe Sequence
ggactacaagaagagcttcctttaa

SEQ ID NO: 81608 - DNA, 25 bp, Probe Sequence
gttcctatttcagcataaagaggct

SEQ ID NO: 81609 - DNA, 25 bp, Probe Sequence
gttaggaatacacaagccgtaaaat

SEQ ID NO: 81610 - DNA, 25 bp, Probe Sequence
agttaggaatacacaagccgtaaaa

SEQ ID NO: 81611 - DNA, 25 bp, Probe Sequence
gctattcattccagattttcgtgta

SEQ ID NO: 81612 - DNA, 25 bp, Probe Sequence
ttaggaatacacaagccgtaaaatc

SEQ ID NO: 81613 - DNA, 25 bp, Probe Sequence
ctaggtaaagctgagatcacaggaa

SEQ ID NO: 81614 - DNA, 25 bp, Probe Sequence
ttctaggtaaagctgagatcacagg

SEQ ID NO: 81615 - DNA, 25 bp, Probe Sequence
tggactacaagaagagcttccttta

SEQ ID NO: 81616 - DNA, 25 bp, Probe Sequence
gcatcttggtcatcagttcataatc

SEQ ID NO: 81617 - DNA, 25 bp, Probe Sequence
agcatcttggtcatcagttcataat

SEQ ID NO: 81618 - DNA, 25 bp, Probe Sequence
gagcatcttggtcatcagttcataa

SEQ ID NO: 81619 - DNA, 25 bp, Probe Sequence
catcttggtcatcagttcataatca

SEQ ID NO: 81620 - DNA, 25 bp, Probe Sequence
aataatgtccttctccagatcagtc

SEQ ID NO: 81621 - DNA, 25 bp, Probe Sequence
catactgagcaggtgtcttcaatag

SEQ ID NO: 81622 - DNA, 25 bp, Probe Sequence
ataatgtccttctccagatcagtct

SEQ ID NO: 81623 - DNA, 25 bp, Probe Sequence
taatgtccttctccagatcagtctt

SEQ ID NO: 81624 - DNA, 25 bp, Probe Sequence
tcatactgagcaggtgtcttcaata

SEQ ID NO: 81625 - DNA, 25 bp, Probe Sequence
cataatcaatgacagagccatcctc

SEQ ID NO: 81626 - DNA, 25 bp, Probe Sequence
cttggtcatcagttcataatcaatg

SEQ ID NO: 81627 - DNA, 25 bp, Probe Sequence
tcttggtcatcagttcataatcaat

SEQ ID NO: 81628 - DNA, 25 bp, Probe Sequence
atcttggtcatcagttcataatcaa

SEQ ID NO: 81629 - DNA, 25 bp, Probe Sequence
atactgagcaggtgtcttcaatagg

SEQ ID NO: 81630 - DNA, 25 bp, Probe Sequence
cgagcatcttggtcatcagttcata

SEQ ID NO: 81631 - DNA, 25 bp, Probe Sequence
aatgtccttctccagatcagtcttg

SEQ ID NO: 81632 - DNA, 25 bp, Probe Sequence
tagtataggctttgacagacccata

SEQ ID NO: 81633 - DNA, 25 bp, Probe Sequence
gtccttctccagatcagtcttgtac

SEQ ID NO: 81634 - DNA, 25 bp, Probe Sequence
aggatttcgtgaacagtagacattt

SEQ ID NO: 81635 - DNA, 25 bp, Probe Sequence
agtataggctttgacagacccatat

SEQ ID NO: 81636 - DNA, 25 bp, Probe Sequence
ttagtataggctttgacagacccat

SEQ ID NO: 81637 - DNA, 25 bp, Probe Sequence
cttgtagactctgttaatttcctgc

SEQ ID NO: 81638 - DNA, 25 bp, Probe Sequence
aagttagtataggctttgacagacc

SEQ ID NO: 81639 - DNA, 25 bp, Probe Sequence
gtcatactgagcaggtgtcttcaat

SEQ ID NO: 81640 - DNA, 25 bp, Probe Sequence
gtgtgcctgctgaatgacttctatc

SEQ ID NO: 81641 - DNA, 25 bp, Probe Sequence
cgaactggagattaacgtactgtgg

SEQ ID NO: 81642 - DNA, 25 bp, Probe Sequence
tgtgtgcctgctgaatgacttctat

SEQ ID NO: 81643 - DNA, 25 bp, Probe Sequence
gaactggagattaacgtactgtggc

SEQ ID NO: 81644 - DNA, 25 bp, Probe Sequence
ttgtgtgcctgctgaatgacttcta

SEQ ID NO: 81645 - DNA, 25 bp, Probe Sequence
tgtgcctgctgaatgacttctatcc

SEQ ID NO: 81646 - DNA, 25 bp, Probe Sequence
aactggagattaacgtactgtggct

SEQ ID NO: 81647 - DNA, 25 bp, Probe Sequence
gacacgaactggagattaacgtact

SEQ ID NO: 81648 - DNA, 25 bp, Probe Sequence
tctacgagataaccccaagtttacg

SEQ ID NO: 81649 - DNA, 25 bp, Probe Sequence
atctgatgagccgttgaaatctgga

SEQ ID NO: 81650 - DNA, 25 bp, Probe Sequence
acgaactggagattaacgtactgtg

SEQ ID NO: 81651 - DNA, 25 bp, Probe Sequence
cacgaactggagattaacgtactgt

SEQ ID NO: 81652 - DNA, 25 bp, Probe Sequence
acacgaactggagattaacgtactg

SEQ ID NO: 81653 - DNA, 25 bp, Probe Sequence
tctgatgagccgttgaaatctggaa

SEQ ID NO: 81654 - DNA, 25 bp, Probe Sequence
gatgagccgttgaaatctggaactg

SEQ ID NO: 81655 - DNA, 25 bp, Probe Sequence
ctgatgagccgttgaaatctggaac

SEQ ID NO: 81656 - DNA, 25 bp, Probe Sequence
actggagattaacgtactgtggctg

SEQ ID NO: 81657 - DNA, 25 bp, Probe Sequence
catctgatgagccgttgaaatctgg

SEQ ID NO: 81658 - DNA, 25 bp, Probe Sequence
ccatctgatgagccgttgaaatctg

SEQ ID NO: 81659 - DNA, 25 bp, Probe Sequence
atctacgagataaccccaagtttac

SEQ ID NO: 81660 - DNA, 25 bp, Probe Sequence
ggacacgaactggagattaacgtac

SEQ ID NO: 81661 - DNA, 25 bp, Probe Sequence
tgatgagccgttgaaatctggaact

SEQ ID NO: 81662 - DNA, 25 bp, Probe Sequence
gatctacgagataaccccaagttta

SEQ ID NO: 81663 - DNA, 25 bp, Probe Sequence
gaataaataaagtgaatctttgcca

SEQ ID NO: 81664 - DNA, 25 bp, Probe Sequence
ttagatactcatcaggacctcacag

SEQ ID NO: 81665 - DNA, 25 bp, Probe Sequence
cttgtagagttggttgtggtatgtg

SEQ ID NO: 81666 - DNA, 25 bp, Probe Sequence
gagacttatcagccagaatgtgttc

SEQ ID NO: 81667 - DNA, 25 bp, Probe Sequence
tgtagagttggttgtggtatgtgtt

SEQ ID NO: 81668 - DNA, 25 bp, Probe Sequence
ttgtagagttggttgtggtatgtgt

SEQ ID NO: 81669 - DNA, 25 bp, Probe Sequence
tccttgtagagttggttgtggtatg

SEQ ID NO: 81670 - DNA, 25 bp, Probe Sequence
ccttgtagagttggttgtggtatgt

SEQ ID NO: 81671 - DNA, 25 bp, Probe Sequence
tgagacttatcagccagaatgtgtt

SEQ ID NO: 81672 - DNA, 25 bp, Probe Sequence
ctccttgtagagttggttgtggtat

SEQ ID NO: 81673 - DNA, 25 bp, Probe Sequence
ggacagtcgtacacatcttacagaa

SEQ ID NO: 81674 - DNA, 25 bp, Probe Sequence
gttgtggtatgtgtttgatgctata

SEQ ID NO: 81675 - DNA, 25 bp, Probe Sequence
aggttgtttagatactcatcaggac

SEQ ID NO: 81676 - DNA, 25 bp, Probe Sequence
attcgtttgaaagagagtaagatgc

SEQ ID NO: 81677 - DNA, 25 bp, Probe Sequence
aatgattagactaccagatgttact

SEQ ID NO: 81678 - DNA, 25 bp, Probe Sequence
gtttagatactcatcaggacctcac

SEQ ID NO: 81679 - DNA, 25 bp, Probe Sequence
gttgtttagatactcatcaggacct

SEQ ID NO: 81680 - DNA, 25 bp, Probe Sequence
ttgtggtatgtgtttgatgctataa

SEQ ID NO: 81681 - DNA, 25 bp, Probe Sequence
tagagttggttgtggtatgtgtttg

SEQ ID NO: 81682 - DNA, 25 bp, Probe Sequence
gtagagttggttgtggtatgtgttt

SEQ ID NO: 81683 - DNA, 25 bp, Probe Sequence
tttagatactcatcaggacctcaca

SEQ ID NO: 81684 - DNA, 25 bp, Probe Sequence
tgtttagatactcatcaggacctca

SEQ ID NO: 81685 - DNA, 25 bp, Probe Sequence
ttgtttagatactcatcaggacctc

SEQ ID NO: 81686 - DNA, 25 bp, Probe Sequence
tgtggtatgtgtttgatgctataaa

SEQ ID NO: 81687 - DNA, 25 bp, Probe Sequence
tagatactcatcaggacctcacagg

SEQ ID NO: 81688 - DNA, 25 bp, Probe Sequence
gtctcttgtcttcactgatactgga

SEQ ID NO: 81689 - DNA, 25 bp, Probe Sequence
tacacttataattcactggtcctgc

SEQ ID NO: 81690 - DNA, 25 bp, Probe Sequence
cttgtcttcactgatactggagtct

SEQ ID NO: 81691 - DNA, 25 bp, Probe Sequence
tcttgtcttcactgatactggagtc

SEQ ID NO: 81692 - DNA, 25 bp, Probe Sequence
tctcttgtcttcactgatactggag

SEQ ID NO: 81693 - DNA, 25 bp, Probe Sequence
ttgtcttcactgatactggagtctc

SEQ ID NO: 81694 - DNA, 25 bp, Probe Sequence
ctcttgtcttcactgatactggagt

SEQ ID NO: 81695 - DNA, 25 bp, Probe Sequence
cgtctcttgtcttcactgatactgg

SEQ ID NO: 81696 - DNA, 25 bp, Probe Sequence
atacacttataattcactggtcctg

SEQ ID NO: 81697 - DNA, 25 bp, Probe Sequence
aactgacaggtgtgtatatgtaatt

SEQ ID NO: 81698 - DNA, 25 bp, Probe Sequence
cttataattcactggtcctgcatca

SEQ ID NO: 81699 - DNA, 25 bp, Probe Sequence
acttataattcactggtcctgcatc

SEQ ID NO: 81700 - DNA, 25 bp, Probe Sequence
cagtttgtgttgttcagagatgttt

SEQ ID NO: 81701 - DNA, 25 bp, Probe Sequence
cacttataattcactggtcctgcat

SEQ ID NO: 81702 - DNA, 25 bp, Probe Sequence
gatacacttataattcactggtcct

SEQ ID NO: 81703 - DNA, 25 bp, Probe Sequence
agtttgtgttgttcagagatgttta

SEQ ID NO: 81704 - DNA, 25 bp, Probe Sequence
tctagttacagacacaatcatactg

SEQ ID NO: 81705 - DNA, 25 bp, Probe Sequence
tgatacacttataattcactggtcc

SEQ ID NO: 81706 - DNA, 25 bp, Probe Sequence
cgatttcccagttatgatgagtatt

SEQ ID NO: 81707 - DNA, 25 bp, Probe Sequence
gtttgtgttgttcagagatgtttaa

SEQ ID NO: 81708 - DNA, 25 bp, Probe Sequence
cgagtttctagttacagacacaatc

SEQ ID NO: 81709 - DNA, 25 bp, Probe Sequence
gcgtctcttgtcttcactgatactg

SEQ ID NO: 81710 - DNA, 25 bp, Probe Sequence
agcgtctcttgtcttcactgatact

SEQ ID NO: 81711 - DNA, 25 bp, Probe Sequence
acacttataattcactggtcctgca

SEQ ID NO: 81712 - DNA, 25 bp, Probe Sequence
tgtatattccagttactcaggagga

SEQ ID NO: 81713 - DNA, 25 bp, Probe Sequence
ctgtatattccagttactcaggagg

SEQ ID NO: 81714 - DNA, 25 bp, Probe Sequence
acttgagcatgtcacttaatctctc

SEQ ID NO: 81715 - DNA, 25 bp, Probe Sequence
gacttgagcatgtcacttaatctct

SEQ ID NO: 81716 - DNA, 25 bp, Probe Sequence
acgcctgtatattccagttactcag

SEQ ID NO: 81717 - DNA, 25 bp, Probe Sequence
gacgcctgtatattccagttactca

SEQ ID NO: 81718 - DNA, 25 bp, Probe Sequence
tgacgcctgtatattccagttactc

SEQ ID NO: 81719 - DNA, 25 bp, Probe Sequence
aacgaatactacaaacttagccagg

SEQ ID NO: 81720 - DNA, 25 bp, Probe Sequence
gtgaaaccctgtctttattaacgaa

SEQ ID NO: 81721 - DNA, 25 bp, Probe Sequence
taaatgaggataaatatggctgggc

SEQ ID NO: 81722 - DNA, 25 bp, Probe Sequence
gtgacgcctgtatattccagttact

SEQ ID NO: 81723 - DNA, 25 bp, Probe Sequence
ggacttgagcatgtcacttaatctc

SEQ ID NO: 81724 - DNA, 25 bp, Probe Sequence
taacgaatactacaaacttagccag

SEQ ID NO: 81725 - DNA, 25 bp, Probe Sequence
cgaatactacaaacttagccaggtg

SEQ ID NO: 81726 - DNA, 25 bp, Probe Sequence
tgaaaccctgtctttattaacgaat

SEQ ID NO: 81727 - DNA, 25 bp, Probe Sequence
tgtgacgcctgtatattccagttac

SEQ ID NO: 81728 - DNA, 25 bp, Probe Sequence
gtgtgacgcctgtatattccagtta

SEQ ID NO: 81729 - DNA, 25 bp, Probe Sequence
tggacttgagcatgtcacttaatct

SEQ ID NO: 81730 - DNA, 25 bp, Probe Sequence
ataaatgaggataaatatggctggg

SEQ ID NO: 81731 - DNA, 25 bp, Probe Sequence
gagcatgtcacttaatctctcagat

SEQ ID NO: 81732 - DNA, 25 bp, Probe Sequence
acgaatactacaaacttagccaggt

SEQ ID NO: 81733 - DNA, 25 bp, Probe Sequence
ttaacgaatactacaaacttagcca

SEQ ID NO: 81734 - DNA, 25 bp, Probe Sequence
gtggacttgagcatgtcacttaatc

SEQ ID NO: 81735 - DNA, 25 bp, Probe Sequence
gaatactacaaacttagccaggtgt

SEQ ID NO: 81736 - DNA, 25 bp, Probe Sequence
gacaacgcatacacaactacttatt

SEQ ID NO: 81737 - DNA, 25 bp, Probe Sequence
tgacaacgcatacacaactacttat

SEQ ID NO: 81738 - DNA, 25 bp, Probe Sequence
cgcatacacaactacttattactcc

SEQ ID NO: 81739 - DNA, 25 bp, Probe Sequence
acgcatacacaactacttattactc

SEQ ID NO: 81740 - DNA, 25 bp, Probe Sequence
acaacgcatacacaactacttatta

SEQ ID NO: 81741 - DNA, 25 bp, Probe Sequence
caacgcatacacaactacttattac

SEQ ID NO: 81742 - DNA, 25 bp, Probe Sequence
aacgcatacacaactacttattact

SEQ ID NO: 81743 - DNA, 25 bp, Probe Sequence
gcatacacaactacttattactcct

SEQ ID NO: 81744 - DNA, 25 bp, Probe Sequence
gtgacaacgcatacacaactactta

SEQ ID NO: 81745 - DNA, 25 bp, Probe Sequence
tttatattatgccgctttcaatccc

SEQ ID NO: 81746 - DNA, 25 bp, Probe Sequence
ttatattatgccgctttcaatccca

SEQ ID NO: 81747 - DNA, 25 bp, Probe Sequence
ctgtagaagtctttgctttgttgat

SEQ ID NO: 81748 - DNA, 25 bp, Probe Sequence
atgaatttcccagtgttccagtaaa

SEQ ID NO: 81749 - DNA, 25 bp, Probe Sequence
tatattatgccgctttcaatcccac

SEQ ID NO: 81750 - DNA, 25 bp, Probe Sequence
ttactcctgtagaagtctttgcttt

SEQ ID NO: 81751 - DNA, 25 bp, Probe Sequence
ctcctgtagaagtctttgctttgtt

SEQ ID NO: 81752 - DNA, 25 bp, Probe Sequence
attactcctgtagaagtctttgctt

SEQ ID NO: 81753 - DNA, 25 bp, Probe Sequence
tactcctgtagaagtctttgctttg

SEQ ID NO: 81754 - DNA, 25 bp, Probe Sequence
catacacaactacttattactcctg

SEQ ID NO: 81755 - DNA, 25 bp, Probe Sequence
ctttgttgatctgagccttctatga

SEQ ID NO: 81756 - DNA, 25 bp, Probe Sequence
cctgtagaagtctttgctttgttga

SEQ ID NO: 81757 - DNA, 25 bp, Probe Sequence
tcctgtagaagtctttgctttgttg

SEQ ID NO: 81758 - DNA, 25 bp, Probe Sequence
ttgttgatctgagccttctatgaaa

SEQ ID NO: 81759 - DNA, 25 bp, Probe Sequence
tttgttgatctgagccttctatgaa

SEQ ID NO: 81760 - DNA, 25 bp, Probe Sequence
gacaacgcatacacaactacttatt

SEQ ID NO: 81761 - DNA, 25 bp, Probe Sequence
tgacaacgcatacacaactacttat

SEQ ID NO: 81762 - DNA, 25 bp, Probe Sequence
cgcatacacaactacttattactcc

SEQ ID NO: 81763 - DNA, 25 bp, Probe Sequence
acgcatacacaactacttattactc

SEQ ID NO: 81764 - DNA, 25 bp, Probe Sequence
acaacgcatacacaactacttatta

SEQ ID NO: 81765 - DNA, 25 bp, Probe Sequence
caacgcatacacaactacttattac

SEQ ID NO: 81766 - DNA, 25 bp, Probe Sequence
aacgcatacacaactacttattact

SEQ ID NO: 81767 - DNA, 25 bp, Probe Sequence
gcatacacaactacttattactcct

SEQ ID NO: 81768 - DNA, 25 bp, Probe Sequence
gtgacaacgcatacacaactactta

SEQ ID NO: 81769 - DNA, 25 bp, Probe Sequence
tttatattatgccgctttcaatccc

SEQ ID NO: 81770 - DNA, 25 bp, Probe Sequence
ttatattatgccgctttcaatccca

SEQ ID NO: 81771 - DNA, 25 bp, Probe Sequence
ctgtagaagtctttgctttgttgat

SEQ ID NO: 81772 - DNA, 25 bp, Probe Sequence
atgaatttcccagtgttccagtaaa

SEQ ID NO: 81773 - DNA, 25 bp, Probe Sequence
tatattatgccgctttcaatcccac

SEQ ID NO: 81774 - DNA, 25 bp, Probe Sequence
ttactcctgtagaagtctttgcttt

SEQ ID NO: 81775 - DNA, 25 bp, Probe Sequence
ctcctgtagaagtctttgctttgtt

SEQ ID NO: 81776 - DNA, 25 bp, Probe Sequence
attactcctgtagaagtctttgctt

SEQ ID NO: 81777 - DNA, 25 bp, Probe Sequence
tactcctgtagaagtctttgctttg

SEQ ID NO: 81778 - DNA, 25 bp, Probe Sequence
catacacaactacttattactcctg

SEQ ID NO: 81779 - DNA, 25 bp, Probe Sequence
ctttgttgatctgagccttctatga

SEQ ID NO: 81780 - DNA, 25 bp, Probe Sequence
cctgtagaagtctttgctttgttga

SEQ ID NO: 81781 - DNA, 25 bp, Probe Sequence
tcctgtagaagtctttgctttgttg

SEQ ID NO: 81782 - DNA, 25 bp, Probe Sequence
ttgttgatctgagccttctatgaaa

SEQ ID NO: 81783 - DNA, 25 bp, Probe Sequence
tttgttgatctgagccttctatgaa

SEQ ID NO: 81784 - DNA, 25 bp, Probe Sequence
tgacaggagaacaatgttggtgaac

SEQ ID NO: 81785 - DNA, 25 bp, Probe Sequence
gtgacaggagaacaatgttggtgaa

SEQ ID NO: 81786 - DNA, 25 bp, Probe Sequence
gagaacaatgttggtgaacgtcaaa

SEQ ID NO: 81787 - DNA, 25 bp, Probe Sequence
gacaggagaacaatgttggtgaacg

SEQ ID NO: 81788 - DNA, 25 bp, Probe Sequence
ggagaacaatgttggtgaacgtcaa

SEQ ID NO: 81789 - DNA, 25 bp, Probe Sequence
caggagaacaatgttggtgaacgtc

SEQ ID NO: 81790 - DNA, 25 bp, Probe Sequence
ggtgacaggagaacaatgttggtga

SEQ ID NO: 81791 - DNA, 25 bp, Probe Sequence
ctggtgacaggagaacaatgttggt

SEQ ID NO: 81792 - DNA, 25 bp, Probe Sequence
aggagaacaatgttggtgaacgtca

SEQ ID NO: 81793 - DNA, 25 bp, Probe Sequence
agaacaatgttggtgaacgtcaaaa

SEQ ID NO: 81794 - DNA, 25 bp, Probe Sequence
ctaggcagaagaggattcccaggat

SEQ ID NO: 81795 - DNA, 25 bp, Probe Sequence
acaggagaacaatgttggtgaacgt

SEQ ID NO: 81796 - DNA, 25 bp, Probe Sequence
taggcagaagaggattcccaggatc

SEQ ID NO: 81797 - DNA, 25 bp, Probe Sequence
caaagctaggcagaagaggattccc

SEQ ID NO: 81798 - DNA, 25 bp, Probe Sequence
caaatgggagccctccagacataag

SEQ ID NO: 81799 - DNA, 25 bp, Probe Sequence
atcaaatgggagccctccagacata

SEQ ID NO: 81800 - DNA, 25 bp, Probe Sequence
ctccgttttcttccgttgtgaatgc

SEQ ID NO: 81801 - DNA, 25 bp, Probe Sequence
gctccgttttcttccgttgtgaatg

SEQ ID NO: 81802 - DNA, 25 bp, Probe Sequence
tgacaggagaacaatgttggtgaac

SEQ ID NO: 81803 - DNA, 25 bp, Probe Sequence
gtgacaggagaacaatgttggtgaa

SEQ ID NO: 81804 - DNA, 25 bp, Probe Sequence
gagaacaatgttggtgaacgtcaaa

SEQ ID NO: 81805 - DNA, 25 bp, Probe Sequence
gacaggagaacaatgttggtgaacg

SEQ ID NO: 81806 - DNA, 25 bp, Probe Sequence
ggagaacaatgttggtgaacgtcaa

SEQ ID NO: 81807 - DNA, 25 bp, Probe Sequence
caggagaacaatgttggtgaacgtc

SEQ ID NO: 81808 - DNA, 25 bp, Probe Sequence
ggtgacaggagaacaatgttggtga

SEQ ID NO: 81809 - DNA, 25 bp, Probe Sequence
ctggtgacaggagaacaatgttggt

SEQ ID NO: 81810 - DNA, 25 bp, Probe Sequence
aggagaacaatgttggtgaacgtca

SEQ ID NO: 81811 - DNA, 25 bp, Probe Sequence
agaacaatgttggtgaacgtcaaaa

SEQ ID NO: 81812 - DNA, 25 bp, Probe Sequence
ctaggcagaagaggattcccaggat

SEQ ID NO: 81813 - DNA, 25 bp, Probe Sequence
acaggagaacaatgttggtgaacgt

SEQ ID NO: 81814 - DNA, 25 bp, Probe Sequence
taggcagaagaggattcccaggatc

SEQ ID NO: 81815 - DNA, 25 bp, Probe Sequence
caaagctaggcagaagaggattccc

SEQ ID NO: 81816 - DNA, 25 bp, Probe Sequence
caaatgggagccctccagacataag

SEQ ID NO: 81817 - DNA, 25 bp, Probe Sequence
atcaaatgggagccctccagacata

SEQ ID NO: 81818 - DNA, 25 bp, Probe Sequence
ctccgttttcttccgttgtgaatgc

SEQ ID NO: 81819 - DNA, 25 bp, Probe Sequence
gctccgttttcttccgttgtgaatg

SEQ ID NO: 81820 - DNA, 25 bp, Probe Sequence
gaggttagactggagatgtgattac

SEQ ID NO: 81821 - DNA, 25 bp, Probe Sequence
ggaggttagactggagatgtgatta

SEQ ID NO: 81822 - DNA, 25 bp, Probe Sequence
cagagttgatagtgacgagttgatc

SEQ ID NO: 81823 - DNA, 25 bp, Probe Sequence
aggttagactggagatgtgattaca

SEQ ID NO: 81824 - DNA, 25 bp, Probe Sequence
gttagactggagatgtgattacagg

SEQ ID NO: 81825 - DNA, 25 bp, Probe Sequence
ggttagactggagatgtgattacag

SEQ ID NO: 81826 - DNA, 25 bp, Probe Sequence
agtgaagccaataatccatataaga

SEQ ID NO: 81827 - DNA, 25 bp, Probe Sequence
gcagagttgatagtgacgagttgat

SEQ ID NO: 81828 - DNA, 25 bp, Probe Sequence
aaggtctggactggagatgtagatt

SEQ ID NO: 81829 - DNA, 25 bp, Probe Sequence
atagtccagaaaggttagagtgaga

SEQ ID NO: 81830 - DNA, 25 bp, Probe Sequence
gatagtccagaaaggttagagtgag

SEQ ID NO: 81831 - DNA, 25 bp, Probe Sequence
agatagtccagaaaggttagagtga

SEQ ID NO: 81832 - DNA, 25 bp, Probe Sequence
gagatgtagatttgggtgttaggat

SEQ ID NO: 81833 - DNA, 25 bp, Probe Sequence
cctacagatagaacccagaaagaat

SEQ ID NO: 81834 - DNA, 25 bp, Probe Sequence
aagatagtccagaaaggttagagtg

SEQ ID NO: 81835 - DNA, 25 bp, Probe Sequence
ctggagatgtagatttgggtgttag

SEQ ID NO: 81836 - DNA, 25 bp, Probe Sequence
tagtccagaaaggttagagtgagag

SEQ ID NO: 81837 - DNA, 25 bp, Probe Sequence
acagatagaacccagaaagaatcat

SEQ ID NO: 81838 - DNA, 25 bp, Probe Sequence
agatagaacccagaaagaatcatca

SEQ ID NO: 81839 - DNA, 25 bp, Probe Sequence
actggagatgtagatttgggtgtta

SEQ ID NO: 81840 - DNA, 25 bp, Probe Sequence
cagatagaacccagaaagaatcatc

SEQ ID NO: 81841 - DNA, 25 bp, Probe Sequence
ccctacagatagaacccagaaagaa

SEQ ID NO: 81842 - DNA, 25 bp, Probe Sequence
tacagatagaacccagaaagaatca

SEQ ID NO: 81843 - DNA, 25 bp, Probe Sequence
gtgagggattagtgaagccaataat

SEQ ID NO: 81844 - DNA, 25 bp, Probe Sequence
gattcttgtaggtgtatgcttactg

SEQ ID NO: 81845 - DNA, 25 bp, Probe Sequence
attcttgtaggtgtatgcttactgc

SEQ ID NO: 81846 - DNA, 25 bp, Probe Sequence
agattcttgtaggtgtatgcttact

SEQ ID NO: 81847 - DNA, 25 bp, Probe Sequence
ggaagattcttgtaggtgtatgctt

SEQ ID NO: 81848 - DNA, 25 bp, Probe Sequence
aagattcttgtaggtgtatgcttac

SEQ ID NO: 81849 - DNA, 25 bp, Probe Sequence
gaagattcttgtaggtgtatgctta

SEQ ID NO: 81850 - DNA, 25 bp, Probe Sequence
ttggtcattcctgctcagatagtac

SEQ ID NO: 81851 - DNA, 25 bp, Probe Sequence
tttggtcattcctgctcagatagta

SEQ ID NO: 81852 - DNA, 25 bp, Probe Sequence
gatctacttggaggaatgggatttg

SEQ ID NO: 81853 - DNA, 25 bp, Probe Sequence
atctacttggaggaatgggatttgg

SEQ ID NO: 81854 - DNA, 25 bp, Probe Sequence
ggatctacttggaggaatgggattt

SEQ ID NO: 81855 - DNA, 25 bp, Probe Sequence
tcgggaagattcttgtaggtgtatg

SEQ ID NO: 81856 - DNA, 25 bp, Probe Sequence
gtcgggaagattcttgtaggtgtat

SEQ ID NO: 81857 - DNA, 25 bp, Probe Sequence
ctttggtcattcctgctcagatagt

SEQ ID NO: 81858 - DNA, 25 bp, Probe Sequence
gggaagattcttgtaggtgtatgct

SEQ ID NO: 81859 - DNA, 25 bp, Probe Sequence
gagttgtttaagtggttctagcttt

SEQ ID NO: 81860 - DNA, 25 bp, Probe Sequence
agagttgtttaagtggttctagctt

SEQ ID NO: 81861 - DNA, 25 bp, Probe Sequence
gcagagttgtttaagtggttctagc

SEQ ID NO: 81862 - DNA, 25 bp, Probe Sequence
cagagttgtttaagtggttctagct

SEQ ID NO: 81863 - DNA, 25 bp, Probe Sequence
atagtgaaaccctgtctctactaaa

SEQ ID NO: 81864 - DNA, 25 bp, Probe Sequence
aatagtgaaaccctgtctctactaa

SEQ ID NO: 81865 - DNA, 25 bp, Probe Sequence
aaatagtgaaaccctgtctctacta

SEQ ID NO: 81866 - DNA, 25 bp, Probe Sequence
cctttggtcattcctgctcagatag

SEQ ID NO: 81867 - DNA, 25 bp, Probe Sequence
tgcagagttgtttaagtggttctag

SEQ ID NO: 81868 - DNA, 25 bp, Probe Sequence
ttaacacaccattgctaacttgaag

SEQ ID NO: 81869 - DNA, 25 bp, Probe Sequence
gatgagacttcacaaccacttagat

SEQ ID NO: 81870 - DNA, 25 bp, Probe Sequence
atgagacttcacaaccacttagatc

SEQ ID NO: 81871 - DNA, 25 bp, Probe Sequence
aaggatgagacttcacaaccactta

SEQ ID NO: 81872 - DNA, 25 bp, Probe Sequence
ggatgagacttcacaaccacttaga

SEQ ID NO: 81873 - DNA, 25 bp, Probe Sequence
aggatgagacttcacaaccacttag

SEQ ID NO: 81874 - DNA, 25 bp, Probe Sequence
catgtactatcctggacttagcctg

SEQ ID NO: 81875 - DNA, 25 bp, Probe Sequence
ctggatgaaagatatgtgggaaatc

SEQ ID NO: 81876 - DNA, 25 bp, Probe Sequence
aatctccagctagaccaagtagaag

SEQ ID NO: 81877 - DNA, 25 bp, Probe Sequence
gaatctccagctagaccaagtagaa

SEQ ID NO: 81878 - DNA, 25 bp, Probe Sequence
aagaatctccagctagaccaagtag

SEQ ID NO: 81879 - DNA, 25 bp, Probe Sequence
ttgtctcgtacctacagatatgtgc

SEQ ID NO: 81880 - DNA, 25 bp, Probe Sequence
gctggatgaaagatatgtgggaaat

SEQ ID NO: 81881 - DNA, 25 bp, Probe Sequence
aatgccatgtactatcctggactta

SEQ ID NO: 81882 - DNA, 25 bp, Probe Sequence
cattgctaacttgaagccattagat

SEQ ID NO: 81883 - DNA, 25 bp, Probe Sequence
atgtactatcctggacttagcctgg

SEQ ID NO: 81884 - DNA, 25 bp, Probe Sequence
agaatctccagctagaccaagtaga

SEQ ID NO: 81885 - DNA, 25 bp, Probe Sequence
atgccatgtactatcctggacttag

SEQ ID NO: 81886 - DNA, 25 bp, Probe Sequence
ttcccgtatatttgtctcgtaccta

SEQ ID NO: 81887 - DNA, 25 bp, Probe Sequence
attgctaacttgaagccattagatc

SEQ ID NO: 81888 - DNA, 25 bp, Probe Sequence
atctccagctagaccaagtagaagt

SEQ ID NO: 81889 - DNA, 25 bp, Probe Sequence
ccattgctaacttgaagccattaga

SEQ ID NO: 81890 - DNA, 25 bp, Probe Sequence
tcccgtatatttgtctcgtacctac

SEQ ID NO: 81891 - DNA, 25 bp, Probe Sequence
gctctaaatgccatgtactatcctg

SEQ ID NO: 81892 - DNA, 25 bp, Probe Sequence
aatcagtagcacagagttagcatag

SEQ ID NO: 81893 - DNA, 25 bp, Probe Sequence
tagcacagagttagcatagtcgtat

SEQ ID NO: 81894 - DNA, 25 bp, Probe Sequence
tatggagatggagagtgttgttgta

SEQ ID NO: 81895 - DNA, 25 bp, Probe Sequence
atcagtagcacagagttagcatagt

SEQ ID NO: 81896 - DNA, 25 bp, Probe Sequence
cttatggagatggagagtgttgttg

SEQ ID NO: 81897 - DNA, 25 bp, Probe Sequence
tctaaggtcactgagaataggagag

SEQ ID NO: 81898 - DNA, 25 bp, Probe Sequence
gaatacatatctaggttcaagtgcg

SEQ ID NO: 81899 - DNA, 25 bp, Probe Sequence
tcagtagcacagagttagcatagtc

SEQ ID NO: 81900 - DNA, 25 bp, Probe Sequence
atggagatggagagtgttgttgtaa

SEQ ID NO: 81901 - DNA, 25 bp, Probe Sequence
ttatggagatggagagtgttgttgt

SEQ ID NO: 81902 - DNA, 25 bp, Probe Sequence
aaggaactcagagaacagtatcaga

SEQ ID NO: 81903 - DNA, 25 bp, Probe Sequence
caaggaactcagagaacagtatcag

SEQ ID NO: 81904 - DNA, 25 bp, Probe Sequence
gtcaaggaactcagagaacagtatc

SEQ ID NO: 81905 - DNA, 25 bp, Probe Sequence
gtagcacagagttagcatagtcgta

SEQ ID NO: 81906 - DNA, 25 bp, Probe Sequence
ctctaaggtcactgagaataggaga

SEQ ID NO: 81907 - DNA, 25 bp, Probe Sequence
tcaaggaactcagagaacagtatca

SEQ ID NO: 81908 - DNA, 25 bp, Probe Sequence
ctaaggtcactgagaataggagagc

SEQ ID NO: 81909 - DNA, 25 bp, Probe Sequence
aggaactcagagaacagtatcagag

SEQ ID NO: 81910 - DNA, 25 bp, Probe Sequence
ccttatggagatggagagtgttgtt

SEQ ID NO: 81911 - DNA, 25 bp, Probe Sequence
tgtcaaggaactcagagaacagtat

SEQ ID NO: 81912 - DNA, 25 bp, Probe Sequence
ttgctctaaggtcactgagaatagg

SEQ ID NO: 81913 - DNA, 25 bp, Probe Sequence
cacagagttagcatagtcgtatgtt

SEQ ID NO: 81914 - DNA, 25 bp, Probe Sequence
gctctaaggtcactgagaataggag

SEQ ID NO: 81915 - DNA, 25 bp, Probe Sequence
actgagaataggagagcgtgaattg

SEQ ID NO: 81916 - DNA, 25 bp, Probe Sequence
agcgattccattcctactatatacc

SEQ ID NO: 81917 - DNA, 25 bp, Probe Sequence
ccagcgattccattcctactatata

SEQ ID NO: 81918 - DNA, 25 bp, Probe Sequence
cagcgattccattcctactatatac

SEQ ID NO: 81919 - DNA, 25 bp, Probe Sequence
tatgctacaacatggataaccttga

SEQ ID NO: 81920 - DNA, 25 bp, Probe Sequence
atgctacaacatggataaccttgaa

SEQ ID NO: 81921 - DNA, 25 bp, Probe Sequence
atatgctacaacatggataaccttg

SEQ ID NO: 81922 - DNA, 25 bp, Probe Sequence
gcattatccacaaggtagaaatcac

SEQ ID NO: 81923 - DNA, 25 bp, Probe Sequence
agcattatccacaaggtagaaatca

SEQ ID NO: 81924 - DNA, 25 bp, Probe Sequence
cagcattatccacaaggtagaaatc

SEQ ID NO: 81925 - DNA, 25 bp, Probe Sequence
cagcagcattatccacaaggtagaa

SEQ ID NO: 81926 - DNA, 25 bp, Probe Sequence
attattcagccatatcccaaggtag

SEQ ID NO: 81927 - DNA, 25 bp, Probe Sequence
ttacatataacccagcgattccatt

SEQ ID NO: 81928 - DNA, 25 bp, Probe Sequence
actgctaatgggtatatggtttctt

SEQ ID NO: 81929 - DNA, 25 bp, Probe Sequence
tacatataacccagcgattccattc

SEQ ID NO: 81930 - DNA, 25 bp, Probe Sequence
gtgagaagtaactgctaatgggtat

SEQ ID NO: 81931 - DNA, 25 bp, Probe Sequence
aacattatgctcagtgaaagaagtc

SEQ ID NO: 81932 - DNA, 25 bp, Probe Sequence
ttattcagccatatcccaaggtaga

SEQ ID NO: 81933 - DNA, 25 bp, Probe Sequence
tatacccatagaactgaacacacat

SEQ ID NO: 81934 - DNA, 25 bp, Probe Sequence
atatacccatagaactgaacacaca

SEQ ID NO: 81935 - DNA, 25 bp, Probe Sequence
atattattcagccatatcccaaggt

SEQ ID NO: 81936 - DNA, 25 bp, Probe Sequence
aagtaactgctaatgggtatatggt

SEQ ID NO: 81937 - DNA, 25 bp, Probe Sequence
aaacattatgctcagtgaaagaagt

SEQ ID NO: 81938 - DNA, 25 bp, Probe Sequence
aactgctaatgggtatatggtttct

SEQ ID NO: 81939 - DNA, 25 bp, Probe Sequence
tattcagccatatcccaaggtagaa

SEQ ID NO: 81940 - DNA, 25 bp, Probe Sequence
ttcttcagtgtgtaaggttcagatc

SEQ ID NO: 81941 - DNA, 25 bp, Probe Sequence
ttagaatcagaatgtcttggttcaa

SEQ ID NO: 81942 - DNA, 25 bp, Probe Sequence
cttcagtgtgtaaggttcagatcag

SEQ ID NO: 81943 - DNA, 25 bp, Probe Sequence
cagtgtgtaaggttcagatcagttg

SEQ ID NO: 81944 - DNA, 25 bp, Probe Sequence
tcagtgtgtaaggttcagatcagtt

SEQ ID NO: 81945 - DNA, 25 bp, Probe Sequence
ttcagtgtgtaaggttcagatcagt

SEQ ID NO: 81946 - DNA, 25 bp, Probe Sequence
tcttcagtgtgtaaggttcagatca

SEQ ID NO: 81947 - DNA, 25 bp, Probe Sequence
caaattctacctccaccacttacta

SEQ ID NO: 81948 - DNA, 25 bp, Probe Sequence
ttcaaattctacctccaccacttac

SEQ ID NO: 81949 - DNA, 25 bp, Probe Sequence
gttcaaattctacctccaccactta

SEQ ID NO: 81950 - DNA, 25 bp, Probe Sequence
catttcttcagtgtgtaaggttcag

SEQ ID NO: 81951 - DNA, 25 bp, Probe Sequence
tttcttcagtgtgtaaggttcagat

SEQ ID NO: 81952 - DNA, 25 bp, Probe Sequence
atttcttcagtgtgtaaggttcaga

SEQ ID NO: 81953 - DNA, 25 bp, Probe Sequence
gatcatggtggtattaacctcacag

SEQ ID NO: 81954 - DNA, 25 bp, Probe Sequence
aaattctacctccaccacttactag

SEQ ID NO: 81955 - DNA, 25 bp, Probe Sequence
tcaaattctacctccaccacttact

SEQ ID NO: 81956 - DNA, 25 bp, Probe Sequence
ctgaagaaggagggactgaatagag

SEQ ID NO: 81957 - DNA, 25 bp, Probe Sequence
atgggagatgatgacatttcttcag

SEQ ID NO: 81958 - DNA, 25 bp, Probe Sequence
acttaacctcagtttcattgtttgt

SEQ ID NO: 81959 - DNA, 25 bp, Probe Sequence
aacaggatcatggtggtattaacct

SEQ ID NO: 81960 - DNA, 25 bp, Probe Sequence
agaatcagaatgtcttggttcaaat

SEQ ID NO: 81961 - DNA, 25 bp, Probe Sequence
agtgtgtaaggttcagatcagttgc

SEQ ID NO: 81962 - DNA, 25 bp, Probe Sequence
gacatttcttcagtgtgtaaggttc

SEQ ID NO: 81963 - DNA, 25 bp, Probe Sequence
gatgacatttcttcagtgtgtaagg

SEQ ID NO: 81964 - DNA, 25 bp, Probe Sequence
ggtagagacggtaaggagatataga

SEQ ID NO: 81965 - DNA, 25 bp, Probe Sequence
aggtagagacggtaaggagatatag

SEQ ID NO: 81966 - DNA, 25 bp, Probe Sequence
gaggtagagacggtaaggagatata

SEQ ID NO: 81967 - DNA, 25 bp, Probe Sequence
agagacggtaaggagatatagagtt

SEQ ID NO: 81968 - DNA, 25 bp, Probe Sequence
tagagacggtaaggagatatagagt

SEQ ID NO: 81969 - DNA, 25 bp, Probe Sequence
gtagagacggtaaggagatatagag

SEQ ID NO: 81970 - DNA, 25 bp, Probe Sequence
ggaggtagagacggtaaggagatat

SEQ ID NO: 81971 - DNA, 25 bp, Probe Sequence
atgaagaggaggtagagacggtaag

SEQ ID NO: 81972 - DNA, 25 bp, Probe Sequence
aggaggtagagacggtaaggagata

SEQ ID NO: 81973 - DNA, 25 bp, Probe Sequence
aaactaaagggaaacattgaaagca

SEQ ID NO: 81974 - DNA, 25 bp, Probe Sequence
gctgaaactaaagggaaacattgaa

SEQ ID NO: 81975 - DNA, 25 bp, Probe Sequence
gaaactaaagggaaacattgaaagc

SEQ ID NO: 81976 - DNA, 25 bp, Probe Sequence
atagggaaattattgaaaccactgc

SEQ ID NO: 81977 - DNA, 25 bp, Probe Sequence
gagacggtaaggagatatagagttt

SEQ ID NO: 81978 - DNA, 25 bp, Probe Sequence
agggaaacattgaaagcaagttaaa

SEQ ID NO: 81979 - DNA, 25 bp, Probe Sequence
aagggaaacattgaaagcaagttaa

SEQ ID NO: 81980 - DNA, 25 bp, Probe Sequence
aaagggaaacattgaaagcaagtta

SEQ ID NO: 81981 - DNA, 25 bp, Probe Sequence
taaagggaaacattgaaagcaagtt

SEQ ID NO: 81982 - DNA, 25 bp, Probe Sequence
ctaaagggaaacattgaaagcaagt

SEQ ID NO: 81983 - DNA, 25 bp, Probe Sequence
actaaagggaaacattgaaagcaag

SEQ ID NO: 81984 - DNA, 25 bp, Probe Sequence
aactaaagggaaacattgaaagcaa

SEQ ID NO: 81985 - DNA, 25 bp, Probe Sequence
cagcagaatgttaaattggttggtg

SEQ ID NO: 81986 - DNA, 25 bp, Probe Sequence
gggaaacattgaaagcaagttaaat

SEQ ID NO: 81987 - DNA, 25 bp, Probe Sequence
tatacggtgactttcctgtgttgat

SEQ ID NO: 81988 - DNA, 25 bp, Probe Sequence
ccaatgaacgatgatagtgacctac

SEQ ID NO: 81989 - DNA, 25 bp, Probe Sequence
accaatgaacgatgatagtgaccta

SEQ ID NO: 81990 - DNA, 25 bp, Probe Sequence
caatgaacgatgatagtgacctact

SEQ ID NO: 81991 - DNA, 25 bp, Probe Sequence
cagaccaatgaacgatgatagtgac

SEQ ID NO: 81992 - DNA, 25 bp, Probe Sequence
aatgaacgatgatagtgacctactt

SEQ ID NO: 81993 - DNA, 25 bp, Probe Sequence
gaccaatgaacgatgatagtgacct

SEQ ID NO: 81994 - DNA, 25 bp, Probe Sequence
agaccaatgaacgatgatagtgacc

SEQ ID NO: 81995 - DNA, 25 bp, Probe Sequence
ccagaccaatgaacgatgatagtga

SEQ ID NO: 81996 - DNA, 25 bp, Probe Sequence
gctaaaggctgatttggaagtctat

SEQ ID NO: 81997 - DNA, 25 bp, Probe Sequence
aaggctgatttggaagtctattctt

SEQ ID NO: 81998 - DNA, 25 bp, Probe Sequence
aaaggctgatttggaagtctattct

SEQ ID NO: 81999 - DNA, 25 bp, Probe Sequence
aggctgatttggaagtctattcttg

SEQ ID NO: 82000 - DNA, 25 bp, Probe Sequence
ctaaaggctgatttggaagtctatt

SEQ ID NO: 82001 - DNA, 25 bp, Probe Sequence
ccctcaatttggcagtaaagaagta

SEQ ID NO: 82002 - DNA, 25 bp, Probe Sequence
tgatagtgacctactttctacctca

SEQ ID NO: 82003 - DNA, 25 bp, Probe Sequence
cgatgatagtgacctactttctacc

SEQ ID NO: 82004 - DNA, 25 bp, Probe Sequence
gaacgatgatagtgacctactttct

SEQ ID NO: 82005 - DNA, 25 bp, Probe Sequence
taaaggctgatttggaagtctattc

SEQ ID NO: 82006 - DNA, 25 bp, Probe Sequence
tgaacgatgatagtgacctactttc

SEQ ID NO: 82007 - DNA, 25 bp, Probe Sequence
atgaacgatgatagtgacctacttt

SEQ ID NO: 82008 - DNA, 25 bp, Probe Sequence
ctcaatttggcagtaaagaagtacc

SEQ ID NO: 82009 - DNA, 25 bp, Probe Sequence
cctcaatttggcagtaaagaagtac

SEQ ID NO: 82010 - DNA, 25 bp, Probe Sequence
acgatgatagtgacctactttctac

SEQ ID NO: 82011 - DNA, 25 bp, Probe Sequence
tcaatttggcagtaaagaagtacct

SEQ ID NO: 82012 - DNA, 25 bp, Probe Sequence
aagccacctaatcagttatgagtac

SEQ ID NO: 82013 - DNA, 25 bp, Probe Sequence
cacctaatcagttatgagtaccaca

SEQ ID NO: 82014 - DNA, 25 bp, Probe Sequence
ccacctaatcagttatgagtaccac

SEQ ID NO: 82015 - DNA, 25 bp, Probe Sequence
ggtgtggtggctcattcttataatt

SEQ ID NO: 82016 - DNA, 25 bp, Probe Sequence
acctaatcagttatgagtaccacat

SEQ ID NO: 82017 - DNA, 25 bp, Probe Sequence
ctaatcagttatgagtaccacatcg

SEQ ID NO: 82018 - DNA, 25 bp, Probe Sequence
cctaatcagttatgagtaccacatc

SEQ ID NO: 82019 - DNA, 25 bp, Probe Sequence
agccacctaatcagttatgagtacc

SEQ ID NO: 82020 - DNA, 25 bp, Probe Sequence
gccacctaatcagttatgagtacca

SEQ ID NO: 82021 - DNA, 25 bp, Probe Sequence
cccttggaaatatgtgattatgctc

SEQ ID NO: 82022 - DNA, 25 bp, Probe Sequence
acccttggaaatatgtgattatgct

SEQ ID NO: 82023 - DNA, 25 bp, Probe Sequence
aatcagttatgagtaccacatcgag

SEQ ID NO: 82024 - DNA, 25 bp, Probe Sequence
atcagttatgagtaccacatcgaga

SEQ ID NO: 82025 - DNA, 25 bp, Probe Sequence
taatcagttatgagtaccacatcga

SEQ ID NO: 82026 - DNA, 25 bp, Probe Sequence
tcagttatgagtaccacatcgagaa

SEQ ID NO: 82027 - DNA, 25 bp, Probe Sequence
ccttggaaatatgtgattatgctct

SEQ ID NO: 82028 - DNA, 25 bp, Probe Sequence
ttcatgtgtgtacttgacaaccaac

SEQ ID NO: 82029 - DNA, 25 bp, Probe Sequence
aaagccacctaatcagttatgagta

SEQ ID NO: 82030 - DNA, 25 bp, Probe Sequence
gaaagccacctaatcagttatgagt

SEQ ID NO: 82031 - DNA, 25 bp, Probe Sequence
tgaaagccacctaatcagttatgag

SEQ ID NO: 82032 - DNA, 25 bp, Probe Sequence
cttataatttcagcactttgggagg

SEQ ID NO: 82033 - DNA, 25 bp, Probe Sequence
gtgtggtggctcattcttataattt

SEQ ID NO: 82034 - DNA, 25 bp, Probe Sequence
gtggtggctcattcttataatttca

SEQ ID NO: 82035 - DNA, 25 bp, Probe Sequence
tgtggtggctcattcttataatttc

SEQ ID NO: 82036 - DNA, 25 bp, Probe Sequence
ccgaacagttacatcattagtctct

SEQ ID NO: 82037 - DNA, 25 bp, Probe Sequence
cgaacagttacatcattagtctctg

SEQ ID NO: 82038 - DNA, 25 bp, Probe Sequence
gaacagttacatcattagtctctga

SEQ ID NO: 82039 - DNA, 25 bp, Probe Sequence
gaaagaggatgtcagaatcgtagaa

SEQ ID NO: 82040 - DNA, 25 bp, Probe Sequence
aaagaggatgtcagaatcgtagaaa

SEQ ID NO: 82041 - DNA, 25 bp, Probe Sequence
aagaggatgtcagaatcgtagaaat

SEQ ID NO: 82042 - DNA, 25 bp, Probe Sequence
gattctgtaactgtacgttcctctt

SEQ ID NO: 82043 - DNA, 25 bp, Probe Sequence
agaaagaggatgtcagaatcgtaga

SEQ ID NO: 82044 - DNA, 25 bp, Probe Sequence
cagaaagaggatgtcagaatcgtag

SEQ ID NO: 82045 - DNA, 25 bp, Probe Sequence
attctgtaactgtacgttcctcttg

SEQ ID NO: 82046 - DNA, 25 bp, Probe Sequence
gaggatgtcagaatcgtagaaattg

SEQ ID NO: 82047 - DNA, 25 bp, Probe Sequence
agaggatgtcagaatcgtagaaatt

SEQ ID NO: 82048 - DNA, 25 bp, Probe Sequence
cccgaacagttacatcattagtctc

SEQ ID NO: 82049 - DNA, 25 bp, Probe Sequence
aacagttacatcattagtctctgaa

SEQ ID NO: 82050 - DNA, 25 bp, Probe Sequence
gatgtcagaatcgtagaaattgcta

SEQ ID NO: 82051 - DNA, 25 bp, Probe Sequence
tgtcagaatcgtagaaattgctaaa

SEQ ID NO: 82052 - DNA, 25 bp, Probe Sequence
gatcataatgaggtgaccttggatg

SEQ ID NO: 82053 - DNA, 25 bp, Probe Sequence
ggatgtcagaatcgtagaaattgct

SEQ ID NO: 82054 - DNA, 25 bp, Probe Sequence
aggatgtcagaatcgtagaaattgc

SEQ ID NO: 82055 - DNA, 25 bp, Probe Sequence
agaatcgtagaaattgctaaactga

SEQ ID NO: 82056 - DNA, 25 bp, Probe Sequence
tcagaatcgtagaaattgctaaact

SEQ ID NO: 82057 - DNA, 25 bp, Probe Sequence
gtcagaatcgtagaaattgctaaac

SEQ ID NO: 82058 - DNA, 25 bp, Probe Sequence
atgtcagaatcgtagaaattgctaa

SEQ ID NO: 82059 - DNA, 25 bp, Probe Sequence
gtacaggctatggactttctacttg

SEQ ID NO: 82060 - DNA, 25 bp, Probe Sequence
caaggtgttcaatacagtagaatcc

SEQ ID NO: 82061 - DNA, 25 bp, Probe Sequence
tcaaggtgttcaatacagtagaatc

SEQ ID NO: 82062 - DNA, 25 bp, Probe Sequence
aatcaaggtgttcaatacagtagaa

SEQ ID NO: 82063 - DNA, 25 bp, Probe Sequence
atcccaatagagaacataagaaccc

SEQ ID NO: 82064 - DNA, 25 bp, Probe Sequence
atcaaggtgttcaatacagtagaat

SEQ ID NO: 82065 - DNA, 25 bp, Probe Sequence
cctgaaacatcccaatagagaacat

SEQ ID NO: 82066 - DNA, 25 bp, Probe Sequence
tcccaatagagaacataagaaccct

SEQ ID NO: 82067 - DNA, 25 bp, Probe Sequence
aatatcatcatcgttgctaaaggac

SEQ ID NO: 82068 - DNA, 25 bp, Probe Sequence
atatcatcatcgttgctaaaggacc

SEQ ID NO: 82069 - DNA, 25 bp, Probe Sequence
cccaatagagaacataagaaccctt

SEQ ID NO: 82070 - DNA, 25 bp, Probe Sequence
ggaaacctcttattcacatttgctt

SEQ ID NO: 82071 - DNA, 25 bp, Probe Sequence
catcccaatagagaacataagaacc

SEQ ID NO: 82072 - DNA, 25 bp, Probe Sequence
atcgttgctaaaggaccagaaatac

SEQ ID NO: 82073 - DNA, 25 bp, Probe Sequence
catcgttgctaaaggaccagaaata

SEQ ID NO: 82074 - DNA, 25 bp, Probe Sequence
aaacctcttattcacatttgctttg

SEQ ID NO: 82075 - DNA, 25 bp, Probe Sequence
tggaaacctcttattcacatttgct

SEQ ID NO: 82076 - DNA, 25 bp, Probe Sequence
tcctgaaacatcccaatagagaaca

SEQ ID NO: 82077 - DNA, 25 bp, Probe Sequence
aaatatcatcatcgttgctaaagga

SEQ ID NO: 82078 - DNA, 25 bp, Probe Sequence
gttcaatacagtagaatcccaggac

SEQ ID NO: 82079 - DNA, 25 bp, Probe Sequence
aacctcttattcacatttgctttga

SEQ ID NO: 82080 - DNA, 25 bp, Probe Sequence
acatcccaatagagaacataagaac

SEQ ID NO: 82081 - DNA, 25 bp, Probe Sequence
ctgaaacatcccaatagagaacata

SEQ ID NO: 82082 - DNA, 25 bp, Probe Sequence
cttattcacatttgctttgattccc

SEQ ID NO: 82083 - DNA, 25 bp, Probe Sequence
acctcttattcacatttgctttgat

SEQ ID NO: 82084 - DNA, 25 bp, Probe Sequence
ggagaagaggttgttcaccatataa

SEQ ID NO: 82085 - DNA, 25 bp, Probe Sequence
tggagaagaggttgttcaccatata

SEQ ID NO: 82086 - DNA, 25 bp, Probe Sequence
ggaagaaacagaaagaaatcacgaa

SEQ ID NO: 82087 - DNA, 25 bp, Probe Sequence
agaaacagaaagaaatcacgaaagc

SEQ ID NO: 82088 - DNA, 25 bp, Probe Sequence
gaaacagaaagaaatcacgaaagca

SEQ ID NO: 82089 - DNA, 25 bp, Probe Sequence
catataaacaggtatccagcacgag

SEQ ID NO: 82090 - DNA, 25 bp, Probe Sequence
ttggagaagaggttgttcaccatat

SEQ ID NO: 82091 - DNA, 25 bp, Probe Sequence
ggaaccacatcatggagaatacatt

SEQ ID NO: 82092 - DNA, 25 bp, Probe Sequence
gaagaaacagaaagaaatcacgaaa

SEQ ID NO: 82093 - DNA, 25 bp, Probe Sequence
aagaaacagaaagaaatcacgaaag

SEQ ID NO: 82094 - DNA, 25 bp, Probe Sequence
gggaagaaacagaaagaaatcacga

SEQ ID NO: 82095 - DNA, 25 bp, Probe Sequence
tgggaagaaacagaaagaaatcacg

SEQ ID NO: 82096 - DNA, 25 bp, Probe Sequence
gggatgaaaggaagtggaagaaatg

SEQ ID NO: 82097 - DNA, 25 bp, Probe Sequence
gatttgggatgaaaggaagtggaag

SEQ ID NO: 82098 - DNA, 25 bp, Probe Sequence
ttgtgggaagaaacagaaagaaatc

SEQ ID NO: 82099 - DNA, 25 bp, Probe Sequence
aaatccatgtagcaactgtccttta

SEQ ID NO: 82100 - DNA, 25 bp, Probe Sequence
tttgtgggaagaaacagaaagaaat

SEQ ID NO: 82101 - DNA, 25 bp, Probe Sequence
atataaacaggtatccagcacgagg

SEQ ID NO: 82102 - DNA, 25 bp, Probe Sequence
ccatgtagcaactgtcctttactaa

SEQ ID NO: 82103 - DNA, 25 bp, Probe Sequence
aatctgaaatccatgtagcaactgt

SEQ ID NO: 82104 - DNA, 25 bp, Probe Sequence
tggaaccacatcatggagaatacat

SEQ ID NO: 82105 - DNA, 25 bp, Probe Sequence
aactggaaccacatcatggagaata

SEQ ID NO: 82106 - DNA, 25 bp, Probe Sequence
tgtgggaagaaacagaaagaaatca

SEQ ID NO: 82107 - DNA, 25 bp, Probe Sequence
taatctgaaatccatgtagcaactg

SEQ ID NO: 82108 - DNA, 25 bp, Probe Sequence
tagatgaatgaaggaacacaccaag

SEQ ID NO: 82109 - DNA, 25 bp, Probe Sequence
tactagatgaatgaaggaacacacc

SEQ ID NO: 82110 - DNA, 25 bp, Probe Sequence
ctagatgaatgaaggaacacaccaa

SEQ ID NO: 82111 - DNA, 25 bp, Probe Sequence
ctactagatgaatgaaggaacacac

SEQ ID NO: 82112 - DNA, 25 bp, Probe Sequence
tctactagatgaatgaaggaacaca

SEQ ID NO: 82113 - DNA, 25 bp, Probe Sequence
actagatgaatgaaggaacacacca

SEQ ID NO: 82114 - DNA, 25 bp, Probe Sequence
gcctaaattctttcctccttctcat

SEQ ID NO: 82115 - DNA, 25 bp, Probe Sequence
gaatctatgggatctacagtgctag

SEQ ID NO: 82116 - DNA, 25 bp, Probe Sequence
tgaatctatgggatctacagtgcta

SEQ ID NO: 82117 - DNA, 25 bp, Probe Sequence
ctaaattctttcctccttctcatgc

SEQ ID NO: 82118 - DNA, 25 bp, Probe Sequence
atgaatgaaggaacacaccaagcta

SEQ ID NO: 82119 - DNA, 25 bp, Probe Sequence
agatgaatgaaggaacacaccaagc

SEQ ID NO: 82120 - DNA, 25 bp, Probe Sequence
cctaaattctttcctccttctcatg

SEQ ID NO: 82121 - DNA, 25 bp, Probe Sequence
ctctgaatctatgggatctacagtg

SEQ ID NO: 82122 - DNA, 25 bp, Probe Sequence
cctctgaatctatgggatctacagt

SEQ ID NO: 82123 - DNA, 25 bp, Probe Sequence
atctactagatgaatgaaggaacac

SEQ ID NO: 82124 - DNA, 25 bp, Probe Sequence
taaattctttcctccttctcatgca

SEQ ID NO: 82125 - DNA, 25 bp, Probe Sequence
ctgaatctatgggatctacagtgct

SEQ ID NO: 82126 - DNA, 25 bp, Probe Sequence
tctgaatctatgggatctacagtgc

SEQ ID NO: 82127 - DNA, 25 bp, Probe Sequence
aatgaaggaacacaccaagctacag

SEQ ID NO: 82128 - DNA, 25 bp, Probe Sequence
gaatgaaggaacacaccaagctaca

SEQ ID NO: 82129 - DNA, 25 bp, Probe Sequence
tgaatgaaggaacacaccaagctac

SEQ ID NO: 82130 - DNA, 25 bp, Probe Sequence
tgcaataaggctgtgatgttctaaa

SEQ ID NO: 82131 - DNA, 25 bp, Probe Sequence
cccaatcaagagatttctcacctta

SEQ ID NO: 82132 - DNA, 25 bp, Probe Sequence
catcactaaccagactccttacaag

SEQ ID NO: 82133 - DNA, 25 bp, Probe Sequence
tcatcactaaccagactccttacaa

SEQ ID NO: 82134 - DNA, 25 bp, Probe Sequence
ttctcatcactaaccagactcctta

SEQ ID NO: 82135 - DNA, 25 bp, Probe Sequence
ctcatcactaaccagactccttaca

SEQ ID NO: 82136 - DNA, 25 bp, Probe Sequence
agtaacattctaatcttctgccagc

SEQ ID NO: 82137 - DNA, 25 bp, Probe Sequence
tctcatcactaaccagactccttac

SEQ ID NO: 82138 - DNA, 25 bp, Probe Sequence
atcactaaccagactccttacaagt

SEQ ID NO: 82139 - DNA, 25 bp, Probe Sequence
aagtaacattctaatcttctgccag

SEQ ID NO: 82140 - DNA, 25 bp, Probe Sequence
gtaacattctaatcttctgccagcc

SEQ ID NO: 82141 - DNA, 25 bp, Probe Sequence
tactataattctgtcaccactgtgc

SEQ ID NO: 82142 - DNA, 25 bp, Probe Sequence
cgtatcagatttatagacccagcaa

SEQ ID NO: 82143 - DNA, 25 bp, Probe Sequence
agcagccaaagtaacattctaatct

SEQ ID NO: 82144 - DNA, 25 bp, Probe Sequence
cagcagccaaagtaacattctaatc

SEQ ID NO: 82145 - DNA, 25 bp, Probe Sequence
gttaaacttctgctcctctcatttg

SEQ ID NO: 82146 - DNA, 25 bp, Probe Sequence
gctggtctatttgaggaagttaaac

SEQ ID NO: 82147 - DNA, 25 bp, Probe Sequence
tataattctgtcaccactgtgcgta

SEQ ID NO: 82148 - DNA, 25 bp, Probe Sequence
ttaaacttctgctcctctcatttga

SEQ ID NO: 82149 - DNA, 25 bp, Probe Sequence
acagcagccaaagtaacattctaat

SEQ ID NO: 82150 - DNA, 25 bp, Probe Sequence
atactataattctgtcaccactgtg

SEQ ID NO: 82151 - DNA, 25 bp, Probe Sequence
gcagccaaagtaacattctaatctt

SEQ ID NO: 82152 - DNA, 25 bp, Probe Sequence
gtgcgtatcagatttatagacccag

SEQ ID NO: 82153 - DNA, 25 bp, Probe Sequence
cttactgaaggcaggtaatccagaa

SEQ ID NO: 82154 - DNA, 25 bp, Probe Sequence
tgtgcgtatcagatttatagaccca

SEQ ID NO: 82155 - DNA, 25 bp, Probe Sequence
gacagcagccaaagtaacattctaa

SEQ ID NO: 82156 - DNA, 25 bp, Probe Sequence
ctacagagcgagactccttcttaaa

SEQ ID NO: 82157 - DNA, 25 bp, Probe Sequence
tacagagcgagactccttcttaaaa

SEQ ID NO: 82158 - DNA, 25 bp, Probe Sequence
gctacagagcgagactccttcttaa

SEQ ID NO: 82159 - DNA, 25 bp, Probe Sequence
agctacagagcgagactccttctta

SEQ ID NO: 82160 - DNA, 25 bp, Probe Sequence
actattgtgtgaggatgttgttaga

SEQ ID NO: 82161 - DNA, 25 bp, Probe Sequence
ctattgtgtgaggatgttgttagac

SEQ ID NO: 82162 - DNA, 25 bp, Probe Sequence
tactattgtgtgaggatgttgttag

SEQ ID NO: 82163 - DNA, 25 bp, Probe Sequence
tgacagaatactcaggttagaatga

SEQ ID NO: 82164 - DNA, 25 bp, Probe Sequence
tattgtgtgaggatgttgttagaca

SEQ ID NO: 82165 - DNA, 25 bp, Probe Sequence
atactcaggttagaatgaactgtgg

SEQ ID NO: 82166 - DNA, 25 bp, Probe Sequence
ttactattgtgtgaggatgttgtta

SEQ ID NO: 82167 - DNA, 25 bp, Probe Sequence
attgtgtgaggatgttgttagacag

SEQ ID NO: 82168 - DNA, 25 bp, Probe Sequence
acagaatactcaggttagaatgaac

SEQ ID NO: 82169 - DNA, 25 bp, Probe Sequence
cagaatactcaggttagaatgaact

SEQ ID NO: 82170 - DNA, 25 bp, Probe Sequence
gacagaatactcaggttagaatgaa

SEQ ID NO: 82171 - DNA, 25 bp, Probe Sequence
aatactcaggttagaatgaactgtg

SEQ ID NO: 82172 - DNA, 25 bp, Probe Sequence
gaatactcaggttagaatgaactgt

SEQ ID NO: 82173 - DNA, 25 bp, Probe Sequence
agaatactcaggttagaatgaactg

SEQ ID NO: 82174 - DNA, 25 bp, Probe Sequence
tactcaggttagaatgaactgtggc

SEQ ID NO: 82175 - DNA, 25 bp, Probe Sequence
tttactattgtgtgaggatgttgtt

SEQ ID NO: 82176 - DNA, 25 bp, Probe Sequence
ttgtgtgaggatgttgttagacagg

SEQ ID NO: 82177 - DNA, 25 bp, Probe Sequence
ctcaggttagaatgaactgtggctt

SEQ ID NO: 82178 - DNA, 25 bp, Probe Sequence
ctagcagtgagtgagctgtatagtg

SEQ ID NO: 82179 - DNA, 25 bp, Probe Sequence
ctgagtagctaggactataggcatg

SEQ ID NO: 82180 - DNA, 25 bp, Probe Sequence
actcaggttagaatgaactgtggct

SEQ ID NO: 82181 - DNA, 25 bp, Probe Sequence
tcaggttagaatgaactgtggcttt

SEQ ID NO: 82182 - DNA, 25 bp, Probe Sequence
ctgtatagtgcctgctgacttaggt

SEQ ID NO: 82183 - DNA, 25 bp, Probe Sequence
atgaactgtggcttttactattgtg

SEQ ID NO: 82184 - DNA, 25 bp, Probe Sequence
cacctcaatctgacatagagacaat

SEQ ID NO: 82185 - DNA, 25 bp, Probe Sequence
acctcaatctgacatagagacaatt

SEQ ID NO: 82186 - DNA, 25 bp, Probe Sequence
atcaccacctcaatctgacatagag

SEQ ID NO: 82187 - DNA, 25 bp, Probe Sequence
catcaccacctcaatctgacataga

SEQ ID NO: 82188 - DNA, 25 bp, Probe Sequence
ccacctcaatctgacatagagacaa

SEQ ID NO: 82189 - DNA, 25 bp, Probe Sequence
aatatcaggactgaggaagaggtac

SEQ ID NO: 82190 - DNA, 25 bp, Probe Sequence
caatatcaggactgaggaagaggta

SEQ ID NO: 82191 - DNA, 25 bp, Probe Sequence
tcaatctgacatagagacaattagg

SEQ ID NO: 82192 - DNA, 25 bp, Probe Sequence
cctcaatctgacatagagacaatta

SEQ ID NO: 82193 - DNA, 25 bp, Probe Sequence
agtaaagaccaatgagttatgaccc

SEQ ID NO: 82194 - DNA, 25 bp, Probe Sequence
aaatagtcaaatgtggtctcaatcc

SEQ ID NO: 82195 - DNA, 25 bp, Probe Sequence
ccctcttatcacttggactttcatc

SEQ ID NO: 82196 - DNA, 25 bp, Probe Sequence
caccacctcaatctgacatagagac

SEQ ID NO: 82197 - DNA, 25 bp, Probe Sequence
tcaccacctcaatctgacatagaga

SEQ ID NO: 82198 - DNA, 25 bp, Probe Sequence
aattcctttcctcttgctcttacag

SEQ ID NO: 82199 - DNA, 25 bp, Probe Sequence
aagtaaagaccaatgagttatgacc

SEQ ID NO: 82200 - DNA, 25 bp, Probe Sequence
aatctgacatagagacaattagggc

SEQ ID NO: 82201 - DNA, 25 bp, Probe Sequence
ggataaatagtcaaatgtggtctca

SEQ ID NO: 82202 - DNA, 25 bp, Probe Sequence
caggataaatagtcaaatgtggtct

SEQ ID NO: 82203 - DNA, 25 bp, Probe Sequence
accacctcaatctgacatagagaca

SEQ ID NO: 82204 - DNA, 25 bp, Probe Sequence
ctgcctaagaatcagtggttcatca

SEQ ID NO: 82205 - DNA, 25 bp, Probe Sequence
aatcctgcctaagaatcagtggttc

SEQ ID NO: 82206 - DNA, 25 bp, Probe Sequence
aggataaatagtcaaatgtggtctc

SEQ ID NO: 82207 - DNA, 25 bp, Probe Sequence
caattcctttcctcttgctcttaca

SEQ ID NO: 82208 - DNA, 25 bp, Probe Sequence
catgagaattgcttgaacctggtag

SEQ ID NO: 82209 - DNA, 25 bp, Probe Sequence
ctttgagcagtgatagttgtgtatt

SEQ ID NO: 82210 - DNA, 25 bp, Probe Sequence
cctttgagcagtgatagttgtgtat

SEQ ID NO: 82211 - DNA, 25 bp, Probe Sequence
tttgagcagtgatagttgtgtattt

SEQ ID NO: 82212 - DNA, 25 bp, Probe Sequence
tttcctttgagcagtgatagttgtg

SEQ ID NO: 82213 - DNA, 25 bp, Probe Sequence
gtttcctttgagcagtgatagttgt

SEQ ID NO: 82214 - DNA, 25 bp, Probe Sequence
tgtttcctttgagcagtgatagttg

SEQ ID NO: 82215 - DNA, 25 bp, Probe Sequence
gtgtttcctttgagcagtgatagtt

SEQ ID NO: 82216 - DNA, 25 bp, Probe Sequence
tcctttgagcagtgatagttgtgta

SEQ ID NO: 82217 - DNA, 25 bp, Probe Sequence
taattcttcagtgtttcctttgagc

SEQ ID NO: 82218 - DNA, 25 bp, Probe Sequence
cacgctgacaaccattcatatttac

SEQ ID NO: 82219 - DNA, 25 bp, Probe Sequence
gcattctgaggatagcatatttcat

SEQ ID NO: 82220 - DNA, 25 bp, Probe Sequence
acgctgacaaccattcatatttaca

SEQ ID NO: 82221 - DNA, 25 bp, Probe Sequence
cagtgtttcctttgagcagtgatag

SEQ ID NO: 82222 - DNA, 25 bp, Probe Sequence
aattcttcagtgtttcctttgagca

SEQ ID NO: 82223 - DNA, 25 bp, Probe Sequence
agtgtttcctttgagcagtgatagt

SEQ ID NO: 82224 - DNA, 25 bp, Probe Sequence
gctgacaaccattcatatttacaga

SEQ ID NO: 82225 - DNA, 25 bp, Probe Sequence
cgctgacaaccattcatatttacag

SEQ ID NO: 82226 - DNA, 25 bp, Probe Sequence
atgagaattgcttgaacctggtagg

SEQ ID NO: 82227 - DNA, 25 bp, Probe Sequence
ccacgctgacaaccattcatattta

SEQ ID NO: 82228 - DNA, 25 bp, Probe Sequence
attcttcagtgtttcctttgagcag

SEQ ID NO: 82229 - DNA, 25 bp, Probe Sequence
ttcctttgagcagtgatagttgtgt

SEQ ID NO: 82230 - DNA, 25 bp, Probe Sequence
atatatacccacgctgacaaccatt

SEQ ID NO: 82231 - DNA, 25 bp, Probe Sequence
tcagtgtttcctttgagcagtgata

SEQ ID NO: 82232 - DNA, 25 bp, Probe Sequence
acttggcgtatccttctacttattt

SEQ ID NO: 82233 - DNA, 25 bp, Probe Sequence
ttggcgtatccttctacttatttag

SEQ ID NO: 82234 - DNA, 25 bp, Probe Sequence
cttggcgtatccttctacttattta

SEQ ID NO: 82235 - DNA, 25 bp, Probe Sequence
tggcgtatccttctacttatttaga

SEQ ID NO: 82236 - DNA, 25 bp, Probe Sequence
ggcgtatccttctacttatttagat

SEQ ID NO: 82237 - DNA, 25 bp, Probe Sequence
tggtgttttagagtttctgtgtagt

SEQ ID NO: 82238 - DNA, 25 bp, Probe Sequence
ggtgttttagagtttctgtgtagtt

SEQ ID NO: 82239 - DNA, 25 bp, Probe Sequence
atggtgttttagagtttctgtgtag

SEQ ID NO: 82240 - DNA, 25 bp, Probe Sequence
ttttgaaaatgttttggtccagaaa

SEQ ID NO: 82241 - DNA, 25 bp, Probe Sequence
catggtgttttagagtttctgtgta

SEQ ID NO: 82242 - DNA, 25 bp, Probe Sequence
gtgttttagagtttctgtgtagttt

SEQ ID NO: 82243 - DNA, 25 bp, Probe Sequence
gcgtatccttctacttatttagatc

SEQ ID NO: 82244 - DNA, 25 bp, Probe Sequence
tttgaaaatgttttggtccagaaaa

SEQ ID NO: 82245 - DNA, 25 bp, Probe Sequence
tgttttagagtttctgtgtagtttt

SEQ ID NO: 82246 - DNA, 25 bp, Probe Sequence
agagtttctgtgtagttttaacatt

SEQ ID NO: 82247 - DNA, 25 bp, Probe Sequence
gagtttctgtgtagttttaacattt

SEQ ID NO: 82248 - DNA, 25 bp, Probe Sequence
ttagagtttctgtgtagttttaaca

SEQ ID NO: 82249 - DNA, 25 bp, Probe Sequence
tagagtttctgtgtagttttaacat

SEQ ID NO: 82250 - DNA, 25 bp, Probe Sequence
agtttctgtgtagttttaacatttt

SEQ ID NO: 82251 - DNA, 25 bp, Probe Sequence
gttttagagtttctgtgtagtttta

SEQ ID NO: 82252 - DNA, 25 bp, Probe Sequence
tttagagtttctgtgtagttttaac

SEQ ID NO: 82253 - DNA, 25 bp, Probe Sequence
acttagattttctcctaggtgtttg

SEQ ID NO: 82254 - DNA, 25 bp, Probe Sequence
cttagattttctcctaggtgtttga

SEQ ID NO: 82255 - DNA, 25 bp, Probe Sequence
ccttctacttatttagatctttcca

SEQ ID NO: 82256 - DNA, 25 bp, Probe Sequence
tgttatgtgttattgatgttgcctt

SEQ ID NO: 82257 - DNA, 25 bp, Probe Sequence
ttgttatgtgttattgatgttgcct

SEQ ID NO: 82258 - DNA, 25 bp, Probe Sequence
cttgttatgtgttattgatgttgcc

SEQ ID NO: 82259 - DNA, 25 bp, Probe Sequence
acttgttatgtgttattgatgttgc

SEQ ID NO: 82260 - DNA, 25 bp, Probe Sequence
ttagtctcgtgtgacatgatgttat

SEQ ID NO: 82261 - DNA, 25 bp, Probe Sequence
cctagtcttgatagcgagcgttatt

SEQ ID NO: 82262 - DNA, 25 bp, Probe Sequence
tagtctcgtgtgacatgatgttatg

SEQ ID NO: 82263 - DNA, 25 bp, Probe Sequence
attgatgttgcctttgtatgtcttt

SEQ ID NO: 82264 - DNA, 25 bp, Probe Sequence
tgttattgatgttgcctttgtatgt

SEQ ID NO: 82265 - DNA, 25 bp, Probe Sequence
tgtgttattgatgttgcctttgtat

SEQ ID NO: 82266 - DNA, 25 bp, Probe Sequence
atgtgttattgatgttgcctttgta

SEQ ID NO: 82267 - DNA, 25 bp, Probe Sequence
tatgtgttattgatgttgcctttgt

SEQ ID NO: 82268 - DNA, 25 bp, Probe Sequence
gtgttattgatgttgcctttgtatg

SEQ ID NO: 82269 - DNA, 25 bp, Probe Sequence
tattgatgttgcctttgtatgtctt

SEQ ID NO: 82270 - DNA, 25 bp, Probe Sequence
ttattgatgttgcctttgtatgtct

SEQ ID NO: 82271 - DNA, 25 bp, Probe Sequence
gttattgatgttgcctttgtatgtc

SEQ ID NO: 82272 - DNA, 25 bp, Probe Sequence
ttatgtgttattgatgttgcctttg

SEQ ID NO: 82273 - DNA, 25 bp, Probe Sequence
gttatgtgttattgatgttgccttt

SEQ ID NO: 82274 - DNA, 25 bp, Probe Sequence
tcctagtcttgatagcgagcgttat

SEQ ID NO: 82275 - DNA, 25 bp, Probe Sequence
ctagtcttgatagcgagcgttattt

SEQ ID NO: 82276 - DNA, 25 bp, Probe Sequence
tctcgtgtgacatgatgttatgtta

SEQ ID NO: 82277 - DNA, 25 bp, Probe Sequence
cgtgtgacatgatgttatgttatgt

SEQ ID NO: 82278 - DNA, 25 bp, Probe Sequence
tcgtgtgacatgatgttatgttatg

SEQ ID NO: 82279 - DNA, 25 bp, Probe Sequence
ctcgtgtgacatgatgttatgttat

SEQ ID NO: 82280 - DNA, 25 bp, Probe Sequence
tgttatgtgttattgatgttgcctt

SEQ ID NO: 82281 - DNA, 25 bp, Probe Sequence
ttgttatgtgttattgatgttgcct

SEQ ID NO: 82282 - DNA, 25 bp, Probe Sequence
cttgttatgtgttattgatgttgcc

SEQ ID NO: 82283 - DNA, 25 bp, Probe Sequence
acttgttatgtgttattgatgttgc

SEQ ID NO: 82284 - DNA, 25 bp, Probe Sequence
ttagtctcgtgtgacatgatgttat

SEQ ID NO: 82285 - DNA, 25 bp, Probe Sequence
cctagtcttgatagcgagcgttatt

SEQ ID NO: 82286 - DNA, 25 bp, Probe Sequence
tagtctcgtgtgacatgatgttatg

SEQ ID NO: 82287 - DNA, 25 bp, Probe Sequence
attgatgttgcctttgtatgtcttt

SEQ ID NO: 82288 - DNA, 25 bp, Probe Sequence
tgttattgatgttgcctttgtatgt

SEQ ID NO: 82289 - DNA, 25 bp, Probe Sequence
tgtgttattgatgttgcctttgtat

SEQ ID NO: 82290 - DNA, 25 bp, Probe Sequence
atgtgttattgatgttgcctttgta

SEQ ID NO: 82291 - DNA, 25 bp, Probe Sequence
tatgtgttattgatgttgcctttgt

SEQ ID NO: 82292 - DNA, 25 bp, Probe Sequence
gtgttattgatgttgcctttgtatg

SEQ ID NO: 82293 - DNA, 25 bp, Probe Sequence
tattgatgttgcctttgtatgtctt

SEQ ID NO: 82294 - DNA, 25 bp, Probe Sequence
ttattgatgttgcctttgtatgtct

SEQ ID NO: 82295 - DNA, 25 bp, Probe Sequence
gttattgatgttgcctttgtatgtc

SEQ ID NO: 82296 - DNA, 25 bp, Probe Sequence
ttatgtgttattgatgttgcctttg

SEQ ID NO: 82297 - DNA, 25 bp, Probe Sequence
gttatgtgttattgatgttgccttt

SEQ ID NO: 82298 - DNA, 25 bp, Probe Sequence
tcctagtcttgatagcgagcgttat

SEQ ID NO: 82299 - DNA, 25 bp, Probe Sequence
ctagtcttgatagcgagcgttattt

SEQ ID NO: 82300 - DNA, 25 bp, Probe Sequence
tctcgtgtgacatgatgttatgtta

SEQ ID NO: 82301 - DNA, 25 bp, Probe Sequence
cgtgtgacatgatgttatgttatgt

SEQ ID NO: 82302 - DNA, 25 bp, Probe Sequence
tcgtgtgacatgatgttatgttatg

SEQ ID NO: 82303 - DNA, 25 bp, Probe Sequence
ctcgtgtgacatgatgttatgttat

SEQ ID NO: 82304 - DNA, 25 bp, Probe Sequence
aacatctgtcacactcttccatatt

SEQ ID NO: 82305 - DNA, 25 bp, Probe Sequence
acatctgtcacactcttccatattg

SEQ ID NO: 82306 - DNA, 25 bp, Probe Sequence
gataacatctgtcacactcttccat

SEQ ID NO: 82307 - DNA, 25 bp, Probe Sequence
cacaatggagcaatgataacatctg

SEQ ID NO: 82308 - DNA, 25 bp, Probe Sequence
tacacaatggagcaatgataacatc

SEQ ID NO: 82309 - DNA, 25 bp, Probe Sequence
taacatctgtcacactcttccatat

SEQ ID NO: 82310 - DNA, 25 bp, Probe Sequence
ataacatctgtcacactcttccata

SEQ ID NO: 82311 - DNA, 25 bp, Probe Sequence
caatggagcaatgataacatctgtc

SEQ ID NO: 82312 - DNA, 25 bp, Probe Sequence
acacaatggagcaatgataacatct

SEQ ID NO: 82313 - DNA, 25 bp, Probe Sequence
atgataacatctgtcacactcttcc

SEQ ID NO: 82314 - DNA, 25 bp, Probe Sequence
aatggagcaatgataacatctgtca

SEQ ID NO: 82315 - DNA, 25 bp, Probe Sequence
aatgtggttgctcatcttaatagtt

SEQ ID NO: 82316 - DNA, 25 bp, Probe Sequence
caatgataacatctgtcacactctt

SEQ ID NO: 82317 - DNA, 25 bp, Probe Sequence
gtacacaatggagcaatgataacat

SEQ ID NO: 82318 - DNA, 25 bp, Probe Sequence
atctgtcacactcttccatattgtc

SEQ ID NO: 82319 - DNA, 25 bp, Probe Sequence
ggtcaacttactgtataattctggt

SEQ ID NO: 82320 - DNA, 25 bp, Probe Sequence
aatgataacatctgtcacactcttc

SEQ ID NO: 82321 - DNA, 25 bp, Probe Sequence
gcaatgataacatctgtcacactct

SEQ ID NO: 82322 - DNA, 25 bp, Probe Sequence
agcaatgataacatctgtcacactc

SEQ ID NO: 82323 - DNA, 25 bp, Probe Sequence
gagcaatgataacatctgtcacact

SEQ ID NO: 82324 - DNA, 25 bp, Probe Sequence
catctgtcacactcttccatattgt

SEQ ID NO: 82325 - DNA, 25 bp, Probe Sequence
atggagcaatgataacatctgtcac

SEQ ID NO: 82326 - DNA, 25 bp, Probe Sequence
acaatggagcaatgataacatctgt

SEQ ID NO: 82327 - DNA, 25 bp, Probe Sequence
tgataacatctgtcacactcttcca

SEQ ID NO: 82328 - DNA, 25 bp, Probe Sequence
tcaactcacaccattccattctatc

SEQ ID NO: 82329 - DNA, 25 bp, Probe Sequence
gtcaactcacaccattccattctat

SEQ ID NO: 82330 - DNA, 25 bp, Probe Sequence
caactcacaccattccattctatcc

SEQ ID NO: 82331 - DNA, 25 bp, Probe Sequence
gagttcaagacacagattggaagat

SEQ ID NO: 82332 - DNA, 25 bp, Probe Sequence
cagagttcaagacacagattggaag

SEQ ID NO: 82333 - DNA, 25 bp, Probe Sequence
agagttcaagacacagattggaaga

SEQ ID NO: 82334 - DNA, 25 bp, Probe Sequence
agttcaagacacagattggaagatc

SEQ ID NO: 82335 - DNA, 25 bp, Probe Sequence
tcagagttcaagacacagattggaa

SEQ ID NO: 82336 - DNA, 25 bp, Probe Sequence
gtacaggaagaggcacatacaagaa

SEQ ID NO: 82337 - DNA, 25 bp, Probe Sequence
cgtcaactcacaccattccattcta

SEQ ID NO: 82338 - DNA, 25 bp, Probe Sequence
caatgacagatttccctttagaccc

SEQ ID NO: 82339 - DNA, 25 bp, Probe Sequence
ccaatgacagatttccctttagacc

SEQ ID NO: 82340 - DNA, 25 bp, Probe Sequence
cccaatgacagatttccctttagac

SEQ ID NO: 82341 - DNA, 25 bp, Probe Sequence
taaactacagatgtcaactccttgg

SEQ ID NO: 82342 - DNA, 25 bp, Probe Sequence
gtcagagttcaagacacagattgga

SEQ ID NO: 82343 - DNA, 25 bp, Probe Sequence
tctaaactacagatgtcaactcctt

SEQ ID NO: 82344 - DNA, 25 bp, Probe Sequence
ttctaaactacagatgtcaactcct

SEQ ID NO: 82345 - DNA, 25 bp, Probe Sequence
aatgacagatttccctttagaccca

SEQ ID NO: 82346 - DNA, 25 bp, Probe Sequence
tacaggaagaggcacatacaagaaa

SEQ ID NO: 82347 - DNA, 25 bp, Probe Sequence
ctaaactacagatgtcaactccttg

SEQ ID NO: 82348 - DNA, 25 bp, Probe Sequence
atcgtcaactcacaccattccattc

SEQ ID NO: 82349 - DNA, 25 bp, Probe Sequence
tttctgattgtggtgttgagagttg

SEQ ID NO: 82350 - DNA, 25 bp, Probe Sequence
tttctaaactacagatgtcaactcc

SEQ ID NO: 82351 - DNA, 25 bp, Probe Sequence
atgacagatttccctttagacccag

SEQ ID NO: 82352 - DNA, 25 bp, Probe Sequence
gatatgctgtcctcaatagatccac

SEQ ID NO: 82353 - DNA, 25 bp, Probe Sequence
tgatatgctgtcctcaatagatcca

SEQ ID NO: 82354 - DNA, 25 bp, Probe Sequence
atgacactatgaagcaaccacataa

SEQ ID NO: 82355 - DNA, 25 bp, Probe Sequence
atatgctgtcctcaatagatccacc

SEQ ID NO: 82356 - DNA, 25 bp, Probe Sequence
ctcaatagatccacctcaagtgtaa

SEQ ID NO: 82357 - DNA, 25 bp, Probe Sequence
ctgtcctcaatagatccacctcaag

SEQ ID NO: 82358 - DNA, 25 bp, Probe Sequence
cctcaatagatccacctcaagtgta

SEQ ID NO: 82359 - DNA, 25 bp, Probe Sequence
catgacactatgaagcaaccacata

SEQ ID NO: 82360 - DNA, 25 bp, Probe Sequence
tatgctgtcctcaatagatccacct

SEQ ID NO: 82361 - DNA, 25 bp, Probe Sequence
ccttaaatgtaaatgggctaaatgc

SEQ ID NO: 82362 - DNA, 25 bp, Probe Sequence
tgtcctcaatagatccacctcaagt

SEQ ID NO: 82363 - DNA, 25 bp, Probe Sequence
atgaagcaaccacataaacaagtct

SEQ ID NO: 82364 - DNA, 25 bp, Probe Sequence
gataaaccatttaccagccactaaa

SEQ ID NO: 82365 - DNA, 25 bp, Probe Sequence
ggataaaccatttaccagccactaa

SEQ ID NO: 82366 - DNA, 25 bp, Probe Sequence
tgaagcaaccacataaacaagtctg

SEQ ID NO: 82367 - DNA, 25 bp, Probe Sequence
tggcaggatcaaattcacacataaa

SEQ ID NO: 82368 - DNA, 25 bp, Probe Sequence
atggcaggatcaaattcacacataa

SEQ ID NO: 82369 - DNA, 25 bp, Probe Sequence
gtcctcaatagatccacctcaagtg

SEQ ID NO: 82370 - DNA, 25 bp, Probe Sequence
ttgatatgctgtcctcaatagatcc

SEQ ID NO: 82371 - DNA, 25 bp, Probe Sequence
cactatgaagcaaccacataaacaa

SEQ ID NO: 82372 - DNA, 25 bp, Probe Sequence
tatgaagcaaccacataaacaagtc

SEQ ID NO: 82373 - DNA, 25 bp, Probe Sequence
ctatgaagcaaccacataaacaagt

SEQ ID NO: 82374 - DNA, 25 bp, Probe Sequence
actatgaagcaaccacataaacaag

SEQ ID NO: 82375 - DNA, 25 bp, Probe Sequence
accttaaatgtaaatgggctaaatg

SEQ ID NO: 82376 - DNA, 25 bp, Probe Sequence
ctccgtttgtgtttgtactaatcag

SEQ ID NO: 82377 - DNA, 25 bp, Probe Sequence
ttgctccgtttgtgtttgtactaat

SEQ ID NO: 82378 - DNA, 25 bp, Probe Sequence
attgctccgtttgtgtttgtactaa

SEQ ID NO: 82379 - DNA, 25 bp, Probe Sequence
tccgtttgtgtttgtactaatcagt

SEQ ID NO: 82380 - DNA, 25 bp, Probe Sequence
gctccgtttgtgtttgtactaatca

SEQ ID NO: 82381 - DNA, 25 bp, Probe Sequence
tgctccgtttgtgtttgtactaatc

SEQ ID NO: 82382 - DNA, 25 bp, Probe Sequence
cattgctccgtttgtgtttgtacta

SEQ ID NO: 82383 - DNA, 25 bp, Probe Sequence
ccgtttgtgtttgtactaatcagta

SEQ ID NO: 82384 - DNA, 25 bp, Probe Sequence
atggaaccatcaacctctctgagtt

SEQ ID NO: 82385 - DNA, 25 bp, Probe Sequence
aaccatcaacctctctgagttccag

SEQ ID NO: 82386 - DNA, 25 bp, Probe Sequence
ctttgccagctcctttaagattgtc

SEQ ID NO: 82387 - DNA, 25 bp, Probe Sequence
gactttgccagctcctttaagattg

SEQ ID NO: 82388 - DNA, 25 bp, Probe Sequence
agactttgccagctcctttaagatt

SEQ ID NO: 82389 - DNA, 25 bp, Probe Sequence
cgtttgtgtttgtactaatcagtaa

SEQ ID NO: 82390 - DNA, 25 bp, Probe Sequence
tgtcattgctccgtttgtgtttgta

SEQ ID NO: 82391 - DNA, 25 bp, Probe Sequence
tcattgctccgtttgtgtttgtact

SEQ ID NO: 82392 - DNA, 25 bp, Probe Sequence
gtcattgctccgtttgtgtttgtac

SEQ ID NO: 82393 - DNA, 25 bp, Probe Sequence
actttgccagctcctttaagattgt

SEQ ID NO: 82394 - DNA, 25 bp, Probe Sequence
gttgtcattgctccgtttgtgtttg

SEQ ID NO: 82395 - DNA, 25 bp, Probe Sequence
agctcctttaagattgtcctgtgac

SEQ ID NO: 82396 - DNA, 25 bp, Probe Sequence
cagctcctttaagattgtcctgtga

SEQ ID NO: 82397 - DNA, 25 bp, Probe Sequence
cagactttgccagctcctttaagat

SEQ ID NO: 82398 - DNA, 25 bp, Probe Sequence
aacatcctggaggagtctgacattg

SEQ ID NO: 82399 - DNA, 25 bp, Probe Sequence
caacatcctggaggagtctgacatt

SEQ ID NO: 82400 - DNA, 25 bp, Probe Sequence
ttaaccttaattggaccattggaac

SEQ ID NO: 82401 - DNA, 25 bp, Probe Sequence
taaccttaattggaccattggaacc

SEQ ID NO: 82402 - DNA, 25 bp, Probe Sequence
gagatgtgtcaggtaattgaaggaa

SEQ ID NO: 82403 - DNA, 25 bp, Probe Sequence
agatgtgtcaggtaattgaaggaac

SEQ ID NO: 82404 - DNA, 25 bp, Probe Sequence
ccaccttgaaccattaaccttaatt

SEQ ID NO: 82405 - DNA, 25 bp, Probe Sequence
cattaaccttaattggaccattgga

SEQ ID NO: 82406 - DNA, 25 bp, Probe Sequence
aagacacttggagtcattagtcatt

SEQ ID NO: 82407 - DNA, 25 bp, Probe Sequence
ctaagacacttggagtcattagtca

SEQ ID NO: 82408 - DNA, 25 bp, Probe Sequence
cctaagacacttggagtcattagtc

SEQ ID NO: 82409 - DNA, 25 bp, Probe Sequence
taagacacttggagtcattagtcat

SEQ ID NO: 82410 - DNA, 25 bp, Probe Sequence
attaaccttaattggaccattggaa

SEQ ID NO: 82411 - DNA, 25 bp, Probe Sequence
caccttgaaccattaaccttaattg

SEQ ID NO: 82412 - DNA, 25 bp, Probe Sequence
gttcctaagacacttggagtcatta

SEQ ID NO: 82413 - DNA, 25 bp, Probe Sequence
ttcctaagacacttggagtcattag

SEQ ID NO: 82414 - DNA, 25 bp, Probe Sequence
tcctaagacacttggagtcattagt

SEQ ID NO: 82415 - DNA, 25 bp, Probe Sequence
tacacggacctccttcatctgatat

SEQ ID NO: 82416 - DNA, 25 bp, Probe Sequence
ttacacggacctccttcatctgata

SEQ ID NO: 82417 - DNA, 25 bp, Probe Sequence
ccattaaccttaattggaccattgg

SEQ ID NO: 82418 - DNA, 25 bp, Probe Sequence
tgaaccattaaccttaattggacca

SEQ ID NO: 82419 - DNA, 25 bp, Probe Sequence
accattaaccttaattggaccattg

SEQ ID NO: 82420 - DNA, 25 bp, Probe Sequence
cgagatgtgtcaggtaattgaagga

SEQ ID NO: 82421 - DNA, 25 bp, Probe Sequence
ttgaaccattaaccttaattggacc

SEQ ID NO: 82422 - DNA, 25 bp, Probe Sequence
accttgaaccattaaccttaattgg

SEQ ID NO: 82423 - DNA, 25 bp, Probe Sequence
gaaccattaaccttaattggaccat

SEQ ID NO: 82424 - DNA, 25 bp, Probe Sequence
tttatctttgaccaaccgaacatga

SEQ ID NO: 82425 - DNA, 25 bp, Probe Sequence
ttatctttgaccaaccgaacatgac

SEQ ID NO: 82426 - DNA, 25 bp, Probe Sequence
agacaatttcacatggactttggaa

SEQ ID NO: 82427 - DNA, 25 bp, Probe Sequence
gattgaatcactaacacccaccaag

SEQ ID NO: 82428 - DNA, 25 bp, Probe Sequence
attgaatcactaacacccaccaaga

SEQ ID NO: 82429 - DNA, 25 bp, Probe Sequence
gagacaatttcacatggactttgga

SEQ ID NO: 82430 - DNA, 25 bp, Probe Sequence
aaatgggagacaatttcacatggac

SEQ ID NO: 82431 - DNA, 25 bp, Probe Sequence
tgggagacaatttcacatggacttt

SEQ ID NO: 82432 - DNA, 25 bp, Probe Sequence
atgggagacaatttcacatggactt

SEQ ID NO: 82433 - DNA, 25 bp, Probe Sequence
aatgggagacaatttcacatggact

SEQ ID NO: 82434 - DNA, 25 bp, Probe Sequence
ggagacaatttcacatggactttgg

SEQ ID NO: 82435 - DNA, 25 bp, Probe Sequence
gggagacaatttcacatggactttg

SEQ ID NO: 82436 - DNA, 25 bp, Probe Sequence
ttgcattcatctctcaaacttagtt

SEQ ID NO: 82437 - DNA, 25 bp, Probe Sequence
ttgaatcactaacacccaccaagac

SEQ ID NO: 82438 - DNA, 25 bp, Probe Sequence
gacaatttcacatggactttggaaa

SEQ ID NO: 82439 - DNA, 25 bp, Probe Sequence
tatctttgaccaaccgaacatgacc

SEQ ID NO: 82440 - DNA, 25 bp, Probe Sequence
ccaaagtgcattcaaccttaccaaa

SEQ ID NO: 82441 - DNA, 25 bp, Probe Sequence
aaaccaaagtgcattcaaccttacc

SEQ ID NO: 82442 - DNA, 25 bp, Probe Sequence
ttttatctttgaccaaccgaacatg

SEQ ID NO: 82443 - DNA, 25 bp, Probe Sequence
cctttgcattcatctctcaaactta

SEQ ID NO: 82444 - DNA, 25 bp, Probe Sequence
tttcctttgcattcatctctcaaac

SEQ ID NO: 82445 - DNA, 25 bp, Probe Sequence
tgcattcatctctcaaacttagttt

SEQ ID NO: 82446 - DNA, 25 bp, Probe Sequence
aatcactaacacccaccaagacctc

SEQ ID NO: 82447 - DNA, 25 bp, Probe Sequence
gaatcactaacacccaccaagacct

SEQ ID NO: 82448 - DNA, 25 bp, Probe Sequence
cttggatgaacgtgttgatgattag

SEQ ID NO: 82449 - DNA, 25 bp, Probe Sequence
gatgaacgtgttgatgattaggatt

SEQ ID NO: 82450 - DNA, 25 bp, Probe Sequence
tcttggatgaacgtgttgatgatta

SEQ ID NO: 82451 - DNA, 25 bp, Probe Sequence
cgtgttgatgattaggattatacct

SEQ ID NO: 82452 - DNA, 25 bp, Probe Sequence
ggatgaacgtgttgatgattaggat

SEQ ID NO: 82453 - DNA, 25 bp, Probe Sequence
ttggatgaacgtgttgatgattagg

SEQ ID NO: 82454 - DNA, 25 bp, Probe Sequence
ttcttggatgaacgtgttgatgatt

SEQ ID NO: 82455 - DNA, 25 bp, Probe Sequence
acgtgttgatgattaggattatacc

SEQ ID NO: 82456 - DNA, 25 bp, Probe Sequence
tgaacgtgttgatgattaggattat

SEQ ID NO: 82457 - DNA, 25 bp, Probe Sequence
atgaacgtgttgatgattaggatta

SEQ ID NO: 82458 - DNA, 25 bp, Probe Sequence
tactagatcacttgtcctcttgcca

SEQ ID NO: 82459 - DNA, 25 bp, Probe Sequence
cttcttggatgaacgtgttgatgat

SEQ ID NO: 82460 - DNA, 25 bp, Probe Sequence
tggatgaacgtgttgatgattagga

SEQ ID NO: 82461 - DNA, 25 bp, Probe Sequence
gtgttgatgattaggattatacctg

SEQ ID NO: 82462 - DNA, 25 bp, Probe Sequence
ctcttgccagctcatttgttaataa

SEQ ID NO: 82463 - DNA, 25 bp, Probe Sequence
tcttgccagctcatttgttaataaa

SEQ ID NO: 82464 - DNA, 25 bp, Probe Sequence
tgttgatgattaggattatacctga

SEQ ID NO: 82465 - DNA, 25 bp, Probe Sequence
cctcttgccagctcatttgttaata

SEQ ID NO: 82466 - DNA, 25 bp, Probe Sequence
aacgtgttgatgattaggattatac

SEQ ID NO: 82467 - DNA, 25 bp, Probe Sequence
actagatcacttgtcctcttgccag

SEQ ID NO: 82468 - DNA, 25 bp, Probe Sequence
gaacgtgttgatgattaggattata

SEQ ID NO: 82469 - DNA, 25 bp, Probe Sequence
gttgatgattaggattatacctgaa

SEQ ID NO: 82470 - DNA, 25 bp, Probe Sequence
tcctcttgccagctcatttgttaat

SEQ ID NO: 82471 - DNA, 25 bp, Probe Sequence
gcttcttggatgaacgtgttgatga

SEQ ID NO: 82472 - DNA, 25 bp, Probe Sequence
atgtgaacaccatcatgcctttata

SEQ ID NO: 82473 - DNA, 25 bp, Probe Sequence
tgtgaacaccatcatgcctttataa

SEQ ID NO: 82474 - DNA, 25 bp, Probe Sequence
tggctaacctgaccataaagttatt

SEQ ID NO: 82475 - DNA, 25 bp, Probe Sequence
ggctaacctgaccataaagttattt

SEQ ID NO: 82476 - DNA, 25 bp, Probe Sequence
ccctgatactgtgtatgctttgaag

SEQ ID NO: 82477 - DNA, 25 bp, Probe Sequence
gtggctaacctgaccataaagttat

SEQ ID NO: 82478 - DNA, 25 bp, Probe Sequence
atccctgatactgtgtatgctttga

SEQ ID NO: 82479 - DNA, 25 bp, Probe Sequence
catccctgatactgtgtatgctttg

SEQ ID NO: 82480 - DNA, 25 bp, Probe Sequence
tccctgatactgtgtatgctttgaa

SEQ ID NO: 82481 - DNA, 25 bp, Probe Sequence
acatccctgatactgtgtatgcttt

SEQ ID NO: 82482 - DNA, 25 bp, Probe Sequence
ggaggagagttagcccaagtatagg

SEQ ID NO: 82483 - DNA, 25 bp, Probe Sequence
caaaccagctcatttcaacaaagga

SEQ ID NO: 82484 - DNA, 25 bp, Probe Sequence
ggtggctaacctgaccataaagtta

SEQ ID NO: 82485 - DNA, 25 bp, Probe Sequence
aaaccagctcatttcaacaaaggag

SEQ ID NO: 82486 - DNA, 25 bp, Probe Sequence
tggaggagagttagcccaagtatag

SEQ ID NO: 82487 - DNA, 25 bp, Probe Sequence
ggtgaccctatagtaccagtttgta

SEQ ID NO: 82488 - DNA, 25 bp, Probe Sequence
ttattacaggaaaagcatgagtggt

SEQ ID NO: 82489 - DNA, 25 bp, Probe Sequence
caaggactgttggaggagagttagc

SEQ ID NO: 82490 - DNA, 25 bp, Probe Sequence
gcaaggactgttggaggagagttag

SEQ ID NO: 82491 - DNA, 25 bp, Probe Sequence
cttattacaggaaaagcatgagtgg

SEQ ID NO: 82492 - DNA, 25 bp, Probe Sequence
tattacaggaaaagcatgagtggtg

SEQ ID NO: 82493 - DNA, 25 bp, Probe Sequence
ccaaaccagctcatttcaacaaagg

SEQ ID NO: 82494 - DNA, 25 bp, Probe Sequence
gtgaacaccatcatgcctttataaa

SEQ ID NO: 82495 - DNA, 25 bp, Probe Sequence
gtgaccctatagtaccagtttgtac

SEQ ID NO: 82496 - DNA, 25 bp, Probe Sequence
ttccactcagattaatatgaagcaa

SEQ ID NO: 82497 - DNA, 25 bp, Probe Sequence
catatggatgttactctcttgcacc

SEQ ID NO: 82498 - DNA, 25 bp, Probe Sequence
gcaccaaattatcttgatacattca

SEQ ID NO: 82499 - DNA, 25 bp, Probe Sequence
atatggatgttactctcttgcacca

SEQ ID NO: 82500 - DNA, 25 bp, Probe Sequence
tatggatgttactctcttgcaccaa

SEQ ID NO: 82501 - DNA, 25 bp, Probe Sequence
cactctaagtcatgtatgtttctct

SEQ ID NO: 82502 - DNA, 25 bp, Probe Sequence
tcactctaagtcatgtatgtttctc

SEQ ID NO: 82503 - DNA, 25 bp, Probe Sequence
actctcttgcaccaaattatcttga

SEQ ID NO: 82504 - DNA, 25 bp, Probe Sequence
ctctcttgcaccaaattatcttgat

SEQ ID NO: 82505 - DNA, 25 bp, Probe Sequence
tgttactctcttgcaccaaattatc

SEQ ID NO: 82506 - DNA, 25 bp, Probe Sequence
gatgttactctcttgcaccaaatta

SEQ ID NO: 82507 - DNA, 25 bp, Probe Sequence
tccactcagattaatatgaagcaaa

SEQ ID NO: 82508 - DNA, 25 bp, Probe Sequence
tttccactcagattaatatgaagca

SEQ ID NO: 82509 - DNA, 25 bp, Probe Sequence
tactctcttgcaccaaattatcttg

SEQ ID NO: 82510 - DNA, 25 bp, Probe Sequence
gttactctcttgcaccaaattatct

SEQ ID NO: 82511 - DNA, 25 bp, Probe Sequence
ttcactctaagtcatgtatgtttct

SEQ ID NO: 82512 - DNA, 25 bp, Probe Sequence
gtggtagatattgaggccaagaata

SEQ ID NO: 82513 - DNA, 25 bp, Probe Sequence
tcttgcaccaaattatcttgataca

SEQ ID NO: 82514 - DNA, 25 bp, Probe Sequence
atgttactctcttgcaccaaattat

SEQ ID NO: 82515 - DNA, 25 bp, Probe Sequence
ggatgttactctcttgcaccaaatt

SEQ ID NO: 82516 - DNA, 25 bp, Probe Sequence
agatattgaggccaagaatattgca

SEQ ID NO: 82517 - DNA, 25 bp, Probe Sequence
gcccttttattttccactcagatta

SEQ ID NO: 82518 - DNA, 25 bp, Probe Sequence
aataggtggtagatattgaggccaa

SEQ ID NO: 82519 - DNA, 25 bp, Probe Sequence
ttactctcttgcaccaaattatctt

SEQ ID NO: 82520 - DNA, 25 bp, Probe Sequence
atgtctgaagatagatcgccatcat

SEQ ID NO: 82521 - DNA, 25 bp, Probe Sequence
atagaacaagtttgtacgagaaagc

SEQ ID NO: 82522 - DNA, 25 bp, Probe Sequence
tagaacaagtttgtacgagaaagca

SEQ ID NO: 82523 - DNA, 25 bp, Probe Sequence
agaacaagtttgtacgagaaagcag

SEQ ID NO: 82524 - DNA, 25 bp, Probe Sequence
gatgtctgaagatagatcgccatca

SEQ ID NO: 82525 - DNA, 25 bp, Probe Sequence
tgacactatagaacaagtttgtacg

SEQ ID NO: 82526 - DNA, 25 bp, Probe Sequence
acagggaaacagctatgaccattag

SEQ ID NO: 82527 - DNA, 25 bp, Probe Sequence
gagtaaaggtgctgcatgatgttag

SEQ ID NO: 82528 - DNA, 25 bp, Probe Sequence
gacactatagaacaagtttgtacga

SEQ ID NO: 82529 - DNA, 25 bp, Probe Sequence
acactatagaacaagtttgtacgag

SEQ ID NO: 82530 - DNA, 25 bp, Probe Sequence
gaacaagtttgtacgagaaagcagg

SEQ ID NO: 82531 - DNA, 25 bp, Probe Sequence
cacagggaaacagctatgaccatta

SEQ ID NO: 82532 - DNA, 25 bp, Probe Sequence
cactatagaacaagtttgtacgaga

SEQ ID NO: 82533 - DNA, 25 bp, Probe Sequence
ggatgtctgaagatagatcgccatc

SEQ ID NO: 82534 - DNA, 25 bp, Probe Sequence
gctatgaccattagggcctatttag

SEQ ID NO: 82535 - DNA, 25 bp, Probe Sequence
agctatgaccattagggcctattta

SEQ ID NO: 82536 - DNA, 25 bp, Probe Sequence
cagggaaacagctatgaccattagg

SEQ ID NO: 82537 - DNA, 25 bp, Probe Sequence
actatagaacaagtttgtacgagaa

SEQ ID NO: 82538 - DNA, 25 bp, Probe Sequence
tatagaacaagtttgtacgagaaag

SEQ ID NO: 82539 - DNA, 25 bp, Probe Sequence
ctttggcatgatttatgattcccct

SEQ ID NO: 82540 - DNA, 25 bp, Probe Sequence
ctatgaccattagggcctatttagg

SEQ ID NO: 82541 - DNA, 25 bp, Probe Sequence
gatttatgattcccctggattatgc

SEQ ID NO: 82542 - DNA, 25 bp, Probe Sequence
tagggcctatttaggtgacactata

SEQ ID NO: 82543 - DNA, 25 bp, Probe Sequence
ttagggcctatttaggtgacactat

SEQ ID NO: 82544 - DNA, 25 bp, Probe Sequence
atgtctgaagatagatcgccatcat

SEQ ID NO: 82545 - DNA, 25 bp, Probe Sequence
atagaacaagtttgtacgagaaagc

SEQ ID NO: 82546 - DNA, 25 bp, Probe Sequence
tagaacaagtttgtacgagaaagca

SEQ ID NO: 82547 - DNA, 25 bp, Probe Sequence
agaacaagtttgtacgagaaagcag

SEQ ID NO: 82548 - DNA, 25 bp, Probe Sequence
gatgtctgaagatagatcgccatca

SEQ ID NO: 82549 - DNA, 25 bp, Probe Sequence
tgacactatagaacaagtttgtacg

SEQ ID NO: 82550 - DNA, 25 bp, Probe Sequence
acagggaaacagctatgaccattag

SEQ ID NO: 82551 - DNA, 25 bp, Probe Sequence
gagtaaaggtgctgcatgatgttag

SEQ ID NO: 82552 - DNA, 25 bp, Probe Sequence
gacactatagaacaagtttgtacga

SEQ ID NO: 82553 - DNA, 25 bp, Probe Sequence
acactatagaacaagtttgtacgag

SEQ ID NO: 82554 - DNA, 25 bp, Probe Sequence
gaacaagtttgtacgagaaagcagg

SEQ ID NO: 82555 - DNA, 25 bp, Probe Sequence
cacagggaaacagctatgaccatta

SEQ ID NO: 82556 - DNA, 25 bp, Probe Sequence
cactatagaacaagtttgtacgaga

SEQ ID NO: 82557 - DNA, 25 bp, Probe Sequence
ggatgtctgaagatagatcgccatc

SEQ ID NO: 82558 - DNA, 25 bp, Probe Sequence
gctatgaccattagggcctatttag

SEQ ID NO: 82559 - DNA, 25 bp, Probe Sequence
agctatgaccattagggcctattta

SEQ ID NO: 82560 - DNA, 25 bp, Probe Sequence
cagggaaacagctatgaccattagg

SEQ ID NO: 82561 - DNA, 25 bp, Probe Sequence
actatagaacaagtttgtacgagaa

SEQ ID NO: 82562 - DNA, 25 bp, Probe Sequence
tatagaacaagtttgtacgagaaag

SEQ ID NO: 82563 - DNA, 25 bp, Probe Sequence
ctttggcatgatttatgattcccct

SEQ ID NO: 82564 - DNA, 25 bp, Probe Sequence
ctatgaccattagggcctatttagg

SEQ ID NO: 82565 - DNA, 25 bp, Probe Sequence
gatttatgattcccctggattatgc

SEQ ID NO: 82566 - DNA, 25 bp, Probe Sequence
tagggcctatttaggtgacactata

SEQ ID NO: 82567 - DNA, 25 bp, Probe Sequence
ttagggcctatttaggtgacactat

SEQ ID NO: 82568 - DNA, 25 bp, Probe Sequence
cagaatggttatgatagcactcagc

SEQ ID NO: 82569 - DNA, 25 bp, Probe Sequence
caatggtatgaacctacaggcatat

SEQ ID NO: 82570 - DNA, 25 bp, Probe Sequence
actcagctatacggaagtaatgttc

SEQ ID NO: 82571 - DNA, 25 bp, Probe Sequence
cactcagctatacggaagtaatgtt

SEQ ID NO: 82572 - DNA, 25 bp, Probe Sequence
ccagaatggttatgatagcactcag

SEQ ID NO: 82573 - DNA, 25 bp, Probe Sequence
ttaatacctttagagacacgggaaa

SEQ ID NO: 82574 - DNA, 25 bp, Probe Sequence
acaatggtatgaacctacaggcata

SEQ ID NO: 82575 - DNA, 25 bp, Probe Sequence
ttatgacatgaggttactcctagcc

SEQ ID NO: 82576 - DNA, 25 bp, Probe Sequence
tatgacatgaggttactcctagcct

SEQ ID NO: 82577 - DNA, 25 bp, Probe Sequence
cattaatacctttagagacacggga

SEQ ID NO: 82578 - DNA, 25 bp, Probe Sequence
atatgcacaatggtatgaacctaca

SEQ ID NO: 82579 - DNA, 25 bp, Probe Sequence
attaatacctttagagacacgggaa

SEQ ID NO: 82580 - DNA, 25 bp, Probe Sequence
tatgcacaatggtatgaacctacag

SEQ ID NO: 82581 - DNA, 25 bp, Probe Sequence
atgaggttactcctagcctgcttaa

SEQ ID NO: 82582 - DNA, 25 bp, Probe Sequence
gcactcagctatacggaagtaatgt

SEQ ID NO: 82583 - DNA, 25 bp, Probe Sequence
aatatgcacaatggtatgaacctac

SEQ ID NO: 82584 - DNA, 25 bp, Probe Sequence
gcattaatacctttagagacacggg

SEQ ID NO: 82585 - DNA, 25 bp, Probe Sequence
cacaatggtatgaacctacaggcat

SEQ ID NO: 82586 - DNA, 25 bp, Probe Sequence
gaaatacaataaatgaaggcaatgc

SEQ ID NO: 82587 - DNA, 25 bp, Probe Sequence
tttatgacatgaggttactcctagc

SEQ ID NO: 82588 - DNA, 25 bp, Probe Sequence
ttaagaaacatgggaattgcagaaa

SEQ ID NO: 82589 - DNA, 25 bp, Probe Sequence
tttaagaaacatgggaattgcagaa

SEQ ID NO: 82590 - DNA, 25 bp, Probe Sequence
aatggtatgaacctacaggcatatg

SEQ ID NO: 82591 - DNA, 25 bp, Probe Sequence
taagaaacatgggaattgcagaaat

SEQ ID NO: 82592 - DNA, 25 bp, Probe Sequence
cagaatggttatgatagcactcagc

SEQ ID NO: 82593 - DNA, 25 bp, Probe Sequence
caatggtatgaacctacaggcatat

SEQ ID NO: 82594 - DNA, 25 bp, Probe Sequence
actcagctatacggaagtaatgttc

SEQ ID NO: 82595 - DNA, 25 bp, Probe Sequence
cactcagctatacggaagtaatgtt

SEQ ID NO: 82596 - DNA, 25 bp, Probe Sequence
ccagaatggttatgatagcactcag

SEQ ID NO: 82597 - DNA, 25 bp, Probe Sequence
ttaatacctttagagacacgggaaa

SEQ ID NO: 82598 - DNA, 25 bp, Probe Sequence
acaatggtatgaacctacaggcata

SEQ ID NO: 82599 - DNA, 25 bp, Probe Sequence
ttatgacatgaggttactcctagcc

SEQ ID NO: 82600 - DNA, 25 bp, Probe Sequence
tatgacatgaggttactcctagcct

SEQ ID NO: 82601 - DNA, 25 bp, Probe Sequence
cattaatacctttagagacacggga

SEQ ID NO: 82602 - DNA, 25 bp, Probe Sequence
atatgcacaatggtatgaacctaca

SEQ ID NO: 82603 - DNA, 25 bp, Probe Sequence
attaatacctttagagacacgggaa

SEQ ID NO: 82604 - DNA, 25 bp, Probe Sequence
tatgcacaatggtatgaacctacag

SEQ ID NO: 82605 - DNA, 25 bp, Probe Sequence
atgaggttactcctagcctgcttaa

SEQ ID NO: 82606 - DNA, 25 bp, Probe Sequence
gcactcagctatacggaagtaatgt

SEQ ID NO: 82607 - DNA, 25 bp, Probe Sequence
aatatgcacaatggtatgaacctac

SEQ ID NO: 82608 - DNA, 25 bp, Probe Sequence
gcattaatacctttagagacacggg

SEQ ID NO: 82609 - DNA, 25 bp, Probe Sequence
cacaatggtatgaacctacaggcat

SEQ ID NO: 82610 - DNA, 25 bp, Probe Sequence
gaaatacaataaatgaaggcaatgc

SEQ ID NO: 82611 - DNA, 25 bp, Probe Sequence
tttatgacatgaggttactcctagc

SEQ ID NO: 82612 - DNA, 25 bp, Probe Sequence
ttaagaaacatgggaattgcagaaa

SEQ ID NO: 82613 - DNA, 25 bp, Probe Sequence
tttaagaaacatgggaattgcagaa

SEQ ID NO: 82614 - DNA, 25 bp, Probe Sequence
aatggtatgaacctacaggcatatg

SEQ ID NO: 82615 - DNA, 25 bp, Probe Sequence
taagaaacatgggaattgcagaaat

SEQ ID NO: 82616 - DNA, 25 bp, Probe Sequence
acatctgtaccattcttgagtgatc

SEQ ID NO: 82617 - DNA, 25 bp, Probe Sequence
tgatcgcttaggaatgaatgtgatt

SEQ ID NO: 82618 - DNA, 25 bp, Probe Sequence
cttgagtgatcgcttaggaatgaat

SEQ ID NO: 82619 - DNA, 25 bp, Probe Sequence
ttgagtgatcgcttaggaatgaatg

SEQ ID NO: 82620 - DNA, 25 bp, Probe Sequence
gtgatcgcttaggaatgaatgtgat

SEQ ID NO: 82621 - DNA, 25 bp, Probe Sequence
gtaccattcttgagtgatcgcttag

SEQ ID NO: 82622 - DNA, 25 bp, Probe Sequence
cgagatgacagaagccaagtaatta

SEQ ID NO: 82623 - DNA, 25 bp, Probe Sequence
catctgtaccattcttgagtgatcg

SEQ ID NO: 82624 - DNA, 25 bp, Probe Sequence
aacgagatgacagaagccaagtaat

SEQ ID NO: 82625 - DNA, 25 bp, Probe Sequence
atgttgatgatatacacaatggctt

SEQ ID NO: 82626 - DNA, 25 bp, Probe Sequence
agatgacagaagccaagtaattatg

SEQ ID NO: 82627 - DNA, 25 bp, Probe Sequence
acgagatgacagaagccaagtaatt

SEQ ID NO: 82628 - DNA, 25 bp, Probe Sequence
gagatgacagaagccaagtaattat

SEQ ID NO: 82629 - DNA, 25 bp, Probe Sequence
gagtgatcgcttaggaatgaatgtg

SEQ ID NO: 82630 - DNA, 25 bp, Probe Sequence
tcttgagtgatcgcttaggaatgaa

SEQ ID NO: 82631 - DNA, 25 bp, Probe Sequence
tgtaccattcttgagtgatcgctta

SEQ ID NO: 82632 - DNA, 25 bp, Probe Sequence
atactccacacatctgtaccattct

SEQ ID NO: 82633 - DNA, 25 bp, Probe Sequence
catactccacacatctgtaccattc

SEQ ID NO: 82634 - DNA, 25 bp, Probe Sequence
catgttgatgatatacacaatggct

SEQ ID NO: 82635 - DNA, 25 bp, Probe Sequence
ttcttgagtgatcgcttaggaatga

SEQ ID NO: 82636 - DNA, 25 bp, Probe Sequence
tactccacacatctgtaccattctt

SEQ ID NO: 82637 - DNA, 25 bp, Probe Sequence
agtgatcgcttaggaatgaatgtga

SEQ ID NO: 82638 - DNA, 25 bp, Probe Sequence
tgagtgatcgcttaggaatgaatgt

SEQ ID NO: 82639 - DNA, 25 bp, Probe Sequence
taccattcttgagtgatcgcttagg

SEQ ID NO: 82640 - DNA, 25 bp, Probe Sequence
gtatgagtaaccagatagagcacaa

SEQ ID NO: 82641 - DNA, 25 bp, Probe Sequence
gcatgagttcttgttcttcagttaa

SEQ ID NO: 82642 - DNA, 25 bp, Probe Sequence
agcatgagttcttgttcttcagtta

SEQ ID NO: 82643 - DNA, 25 bp, Probe Sequence
aagcatgagttcttgttcttcagtt

SEQ ID NO: 82644 - DNA, 25 bp, Probe Sequence
tgttgtgcaatatccatctactgta

SEQ ID NO: 82645 - DNA, 25 bp, Probe Sequence
tgtgcaatatccatctactgtagtt

SEQ ID NO: 82646 - DNA, 25 bp, Probe Sequence
ttgtgcaatatccatctactgtagt

SEQ ID NO: 82647 - DNA, 25 bp, Probe Sequence
atgagtaaccagatagagcacaaag

SEQ ID NO: 82648 - DNA, 25 bp, Probe Sequence
gttgtgcaatatccatctactgtag

SEQ ID NO: 82649 - DNA, 25 bp, Probe Sequence
atgttgtgcaatatccatctactgt

SEQ ID NO: 82650 - DNA, 25 bp, Probe Sequence
tatgagtaaccagatagagcacaaa

SEQ ID NO: 82651 - DNA, 25 bp, Probe Sequence
ggtatgagtaaccagatagagcaca

SEQ ID NO: 82652 - DNA, 25 bp, Probe Sequence
gcaatatccatctactgtagttaag

SEQ ID NO: 82653 - DNA, 25 bp, Probe Sequence
gtgcaatatccatctactgtagtta

SEQ ID NO: 82654 - DNA, 25 bp, Probe Sequence
tctttcacagtgttgatgacaaatg

SEQ ID NO: 82655 - DNA, 25 bp, Probe Sequence
cttctttcacagtgttgatgacaaa

SEQ ID NO: 82656 - DNA, 25 bp, Probe Sequence
ttctttcacagtgttgatgacaaat

SEQ ID NO: 82657 - DNA, 25 bp, Probe Sequence
agtaaccagatagagcacaaagcat

SEQ ID NO: 82658 - DNA, 25 bp, Probe Sequence
caaagcatgagttcttgttcttcag

SEQ ID NO: 82659 - DNA, 25 bp, Probe Sequence
gagtaaccagatagagcacaaagca

SEQ ID NO: 82660 - DNA, 25 bp, Probe Sequence
tgagtaaccagatagagcacaaagc

SEQ ID NO: 82661 - DNA, 25 bp, Probe Sequence
ctttcacagtgttgatgacaaatgc

SEQ ID NO: 82662 - DNA, 25 bp, Probe Sequence
aaagcatgagttcttgttcttcagt

SEQ ID NO: 82663 - DNA, 25 bp, Probe Sequence
gatagagcacaaagcatgagttctt

SEQ ID NO: 82664 - DNA, 25 bp, Probe Sequence
aatggagactcagaagtaggacatg

SEQ ID NO: 82665 - DNA, 25 bp, Probe Sequence
aaatggagactcagaagtaggacat

SEQ ID NO: 82666 - DNA, 25 bp, Probe Sequence
atttggatgtatatcagtggagaaa

SEQ ID NO: 82667 - DNA, 25 bp, Probe Sequence
tatttggatgtatatcagtggagaa

SEQ ID NO: 82668 - DNA, 25 bp, Probe Sequence
ttatttggatgtatatcagtggaga

SEQ ID NO: 82669 - DNA, 25 bp, Probe Sequence
atggagactcagaagtaggacatgc

SEQ ID NO: 82670 - DNA, 25 bp, Probe Sequence
tgtatatcagtggagaaaatggaga

SEQ ID NO: 82671 - DNA, 25 bp, Probe Sequence
ggatgtatatcagtggagaaaatgg

SEQ ID NO: 82672 - DNA, 25 bp, Probe Sequence
gtatatcagtggagaaaatggagac

SEQ ID NO: 82673 - DNA, 25 bp, Probe Sequence
gaaaatggagactcagaagtaggac

SEQ ID NO: 82674 - DNA, 25 bp, Probe Sequence
agaaaatggagactcagaagtagga

SEQ ID NO: 82675 - DNA, 25 bp, Probe Sequence
atatcagtggagaaaatggagactc

SEQ ID NO: 82676 - DNA, 25 bp, Probe Sequence
gagaaaatggagactcagaagtagg

SEQ ID NO: 82677 - DNA, 25 bp, Probe Sequence
ggagaaaatggagactcagaagtag

SEQ ID NO: 82678 - DNA, 25 bp, Probe Sequence
tggatgtatatcagtggagaaaatg

SEQ ID NO: 82679 - DNA, 25 bp, Probe Sequence
gagactcagaagtaggacatgccag

SEQ ID NO: 82680 - DNA, 25 bp, Probe Sequence
tggagaaaatggagactcagaagta

SEQ ID NO: 82681 - DNA, 25 bp, Probe Sequence
aaaatggagactcagaagtaggaca

SEQ ID NO: 82682 - DNA, 25 bp, Probe Sequence
tatcagtggagaaaatggagactca

SEQ ID NO: 82683 - DNA, 25 bp, Probe Sequence
gatgtatatcagtggagaaaatgga

SEQ ID NO: 82684 - DNA, 25 bp, Probe Sequence
atgtatatcagtggagaaaatggag

SEQ ID NO: 82685 - DNA, 25 bp, Probe Sequence
tatatcagtggagaaaatggagact

SEQ ID NO: 82686 - DNA, 25 bp, Probe Sequence
tttggatgtatatcagtggagaaaa

SEQ ID NO: 82687 - DNA, 25 bp, Probe Sequence
ttggatgtatatcagtggagaaaat

SEQ ID NO: 82688 - DNA, 25 bp, Probe Sequence
tgtcaacttcctgattatgtaacaa

SEQ ID NO: 82689 - DNA, 25 bp, Probe Sequence
ttgtcaacttcctgattatgtaaca

SEQ ID NO: 82690 - DNA, 25 bp, Probe Sequence
tttgtcaacttcctgattatgtaac

SEQ ID NO: 82691 - DNA, 25 bp, Probe Sequence
gtcaacttcctgattatgtaacaaa

SEQ ID NO: 82692 - DNA, 25 bp, Probe Sequence
tcaacttcctgattatgtaacaaag

SEQ ID NO: 82693 - DNA, 25 bp, Probe Sequence
cgttggtttctgcttttaatttact

SEQ ID NO: 82694 - DNA, 25 bp, Probe Sequence
tcttttgtcaacttcctgattatgt

SEQ ID NO: 82695 - DNA, 25 bp, Probe Sequence
gtacaattcattgttactgttctgt

SEQ ID NO: 82696 - DNA, 25 bp, Probe Sequence
tggtttctgcttttaatttacttgt

SEQ ID NO: 82697 - DNA, 25 bp, Probe Sequence
ttcctgattatgtaacaaagtatgt

SEQ ID NO: 82698 - DNA, 25 bp, Probe Sequence
tacaattcattgttactgttctgtt

SEQ ID NO: 82699 - DNA, 25 bp, Probe Sequence
tcacgttggtttctgcttttaattt

SEQ ID NO: 82700 - DNA, 25 bp, Probe Sequence
ttcacgttggtttctgcttttaatt

SEQ ID NO: 82701 - DNA, 25 bp, Probe Sequence
tttcacgttggtttctgcttttaat

SEQ ID NO: 82702 - DNA, 25 bp, Probe Sequence
caacttcctgattatgtaacaaagt

SEQ ID NO: 82703 - DNA, 25 bp, Probe Sequence
ttttcacgttggtttctgcttttaa

SEQ ID NO: 82704 - DNA, 25 bp, Probe Sequence
atcttttgtcaacttcctgattatg

SEQ ID NO: 82705 - DNA, 25 bp, Probe Sequence
cttcctgattatgtaacaaagtatg

SEQ ID NO: 82706 - DNA, 25 bp, Probe Sequence
acgttggtttctgcttttaatttac

SEQ ID NO: 82707 - DNA, 25 bp, Probe Sequence
cacgttggtttctgcttttaattta

SEQ ID NO: 82708 - DNA, 25 bp, Probe Sequence
cttttcacgttggtttctgctttta

SEQ ID NO: 82709 - DNA, 25 bp, Probe Sequence
cttttgtcaacttcctgattatgta

SEQ ID NO: 82710 - DNA, 25 bp, Probe Sequence
ttggtttctgcttttaatttacttg

SEQ ID NO: 82711 - DNA, 25 bp, Probe Sequence
gttggtttctgcttttaatttactt

SEQ ID NO: 82712 - DNA, 25 bp, Probe Sequence
ttggattgtatcgtatgcttagatt

SEQ ID NO: 82713 - DNA, 25 bp, Probe Sequence
ctgttgttatagtagagctgttcca

SEQ ID NO: 82714 - DNA, 25 bp, Probe Sequence
ttcacacttgttaagatggagttat

SEQ ID NO: 82715 - DNA, 25 bp, Probe Sequence
tgttgttatagtagagctgttccat

SEQ ID NO: 82716 - DNA, 25 bp, Probe Sequence
tctgttgttatagtagagctgttcc

SEQ ID NO: 82717 - DNA, 25 bp, Probe Sequence
agttagtctgttgttatagtagagc

SEQ ID NO: 82718 - DNA, 25 bp, Probe Sequence
agtctgttgttatagtagagctgtt

SEQ ID NO: 82719 - DNA, 25 bp, Probe Sequence
gttgttatagtagagctgttccatt

SEQ ID NO: 82720 - DNA, 25 bp, Probe Sequence
gtctgttgttatagtagagctgttc

SEQ ID NO: 82721 - DNA, 25 bp, Probe Sequence
ttcctgttactgagttagctctact

SEQ ID NO: 82722 - DNA, 25 bp, Probe Sequence
tttgtcccgaaggtctaaataaaga

SEQ ID NO: 82723 - DNA, 25 bp, Probe Sequence
tagtctgttgttatagtagagctgt

SEQ ID NO: 82724 - DNA, 25 bp, Probe Sequence
ttgtcccgaaggtctaaataaagag

SEQ ID NO: 82725 - DNA, 25 bp, Probe Sequence
tcacacttgttaagatggagttata

SEQ ID NO: 82726 - DNA, 25 bp, Probe Sequence
aggtctaaataaagagcagtttccc

SEQ ID NO: 82727 - DNA, 25 bp, Probe Sequence
cgaaggtctaaataaagagcagttt

SEQ ID NO: 82728 - DNA, 25 bp, Probe Sequence
ggtctaaataaagagcagtttccca

SEQ ID NO: 82729 - DNA, 25 bp, Probe Sequence
gtctaaataaagagcagtttcccaa

SEQ ID NO: 82730 - DNA, 25 bp, Probe Sequence
ccgaaggtctaaataaagagcagtt

SEQ ID NO: 82731 - DNA, 25 bp, Probe Sequence
aaggtctaaataaagagcagtttcc

SEQ ID NO: 82732 - DNA, 25 bp, Probe Sequence
gtattctgttaagttagtctgttgt

SEQ ID NO: 82733 - DNA, 25 bp, Probe Sequence
tctaaataaagagcagtttcccaaa

SEQ ID NO: 82734 - DNA, 25 bp, Probe Sequence
tggattgtatcgtatgcttagattt

SEQ ID NO: 82735 - DNA, 25 bp, Probe Sequence
tttggattgtatcgtatgcttagat

SEQ ID NO: 82736 - DNA, 25 bp, Probe Sequence
tcaacattggcttagaggtgaagag

SEQ ID NO: 82737 - DNA, 25 bp, Probe Sequence
tttggtaacaagacttagaaggagg

SEQ ID NO: 82738 - DNA, 25 bp, Probe Sequence
gtcaacattggcttagaggtgaaga

SEQ ID NO: 82739 - DNA, 25 bp, Probe Sequence
gtatagtctcccttcccagaatttg

SEQ ID NO: 82740 - DNA, 25 bp, Probe Sequence
atagtctcccttcccagaatttgta

SEQ ID NO: 82741 - DNA, 25 bp, Probe Sequence
tatagtctcccttcccagaatttgt

SEQ ID NO: 82742 - DNA, 25 bp, Probe Sequence
agttgtggactttatagatgaaggg

SEQ ID NO: 82743 - DNA, 25 bp, Probe Sequence
tagtctcccttcccagaatttgtaa

SEQ ID NO: 82744 - DNA, 25 bp, Probe Sequence
ggagagttgtggactttatagatga

SEQ ID NO: 82745 - DNA, 25 bp, Probe Sequence
tatccatcactgccaacaagaacac

SEQ ID NO: 82746 - DNA, 25 bp, Probe Sequence
gtatccatcactgccaacaagaaca

SEQ ID NO: 82747 - DNA, 25 bp, Probe Sequence
cggagagttgtggactttatagatg

SEQ ID NO: 82748 - DNA, 25 bp, Probe Sequence
cacagactcaaagttactctccttc

SEQ ID NO: 82749 - DNA, 25 bp, Probe Sequence
ggtatagtctcccttcccagaattt

SEQ ID NO: 82750 - DNA, 25 bp, Probe Sequence
gagttgtggactttatagatgaagg

SEQ ID NO: 82751 - DNA, 25 bp, Probe Sequence
ttcccagaatttgtaactgagaaga

SEQ ID NO: 82752 - DNA, 25 bp, Probe Sequence
ttggtaacaagacttagaaggaggg

SEQ ID NO: 82753 - DNA, 25 bp, Probe Sequence
tcccagaatttgtaactgagaagat

SEQ ID NO: 82754 - DNA, 25 bp, Probe Sequence
ccttcccagaatttgtaactgagaa

SEQ ID NO: 82755 - DNA, 25 bp, Probe Sequence
acagactcaaagttactctccttcc

SEQ ID NO: 82756 - DNA, 25 bp, Probe Sequence
ccacagactcaaagttactctcctt

SEQ ID NO: 82757 - DNA, 25 bp, Probe Sequence
agagttgtggactttatagatgaag

SEQ ID NO: 82758 - DNA, 25 bp, Probe Sequence
gagagttgtggactttatagatgaa

SEQ ID NO: 82759 - DNA, 25 bp, Probe Sequence
tgtatccatcactgccaacaagaac

SEQ ID NO: 82760 - DNA, 25 bp, Probe Sequence
tcaccaaagatccaccatatcaaag

SEQ ID NO: 82761 - DNA, 25 bp, Probe Sequence
ctcaccaaagatccaccatatcaaa

SEQ ID NO: 82762 - DNA, 25 bp, Probe Sequence
tctcaattgcattaagtcctccata

SEQ ID NO: 82763 - DNA, 25 bp, Probe Sequence
gcattaagtcctccatatgaccatt

SEQ ID NO: 82764 - DNA, 25 bp, Probe Sequence
attgcattaagtcctccatatgacc

SEQ ID NO: 82765 - DNA, 25 bp, Probe Sequence
aattgcattaagtcctccatatgac

SEQ ID NO: 82766 - DNA, 25 bp, Probe Sequence
ctctcaattgcattaagtcctccat

SEQ ID NO: 82767 - DNA, 25 bp, Probe Sequence
ttatttaaagaatgggatgctcacc

SEQ ID NO: 82768 - DNA, 25 bp, Probe Sequence
ctcaattgcattaagtcctccatat

SEQ ID NO: 82769 - DNA, 25 bp, Probe Sequence
caattgcattaagtcctccatatga

SEQ ID NO: 82770 - DNA, 25 bp, Probe Sequence
tcaattgcattaagtcctccatatg

SEQ ID NO: 82771 - DNA, 25 bp, Probe Sequence
caccaaagatccaccatatcaaagc

SEQ ID NO: 82772 - DNA, 25 bp, Probe Sequence
ttaaattccaagagctgcgttaaat

SEQ ID NO: 82773 - DNA, 25 bp, Probe Sequence
attaagctgcgttaaattccaagag

SEQ ID NO: 82774 - DNA, 25 bp, Probe Sequence
gttaaattccaagagctgcgttaaa

SEQ ID NO: 82775 - DNA, 25 bp, Probe Sequence
tgcattaagtcctccatatgaccat

SEQ ID NO: 82776 - DNA, 25 bp, Probe Sequence
ttgcattaagtcctccatatgacca

SEQ ID NO: 82777 - DNA, 25 bp, Probe Sequence
aactctcaattgcattaagtcctcc

SEQ ID NO: 82778 - DNA, 25 bp, Probe Sequence
taaattccaagagctgcgttaaatt

SEQ ID NO: 82779 - DNA, 25 bp, Probe Sequence
aattaagctgcgttaaattccaaga

SEQ ID NO: 82780 - DNA, 25 bp, Probe Sequence
taactctcaattgcattaagtcctc

SEQ ID NO: 82781 - DNA, 25 bp, Probe Sequence
ttaaagaatgggatgctcaccaaag

SEQ ID NO: 82782 - DNA, 25 bp, Probe Sequence
aaatgtgaattaagctgcgttaaat

SEQ ID NO: 82783 - DNA, 25 bp, Probe Sequence
aaattccaagagctgcgttaaattc

SEQ ID NO: 82784 - DNA, 25 bp, Probe Sequence
taactccatcttagtgtatagcctg

SEQ ID NO: 82785 - DNA, 25 bp, Probe Sequence
cctaactccatcttagtgtatagcc

SEQ ID NO: 82786 - DNA, 25 bp, Probe Sequence
ctaactccatcttagtgtatagcct

SEQ ID NO: 82787 - DNA, 25 bp, Probe Sequence
tcctaactccatcttagtgtatagc

SEQ ID NO: 82788 - DNA, 25 bp, Probe Sequence
aactccatcttagtgtatagcctgg

SEQ ID NO: 82789 - DNA, 25 bp, Probe Sequence
gtgggaaattaaaggaacctaatgg

SEQ ID NO: 82790 - DNA, 25 bp, Probe Sequence
tgtgggaaattaaaggaacctaatg

SEQ ID NO: 82791 - DNA, 25 bp, Probe Sequence
tttgtgggaaattaaaggaacctaa

SEQ ID NO: 82792 - DNA, 25 bp, Probe Sequence
actacttcttccctctctcttccat

SEQ ID NO: 82793 - DNA, 25 bp, Probe Sequence
ttgtgggaaattaaaggaacctaat

SEQ ID NO: 82794 - DNA, 25 bp, Probe Sequence
ctacttcttccctctctcttccatg

SEQ ID NO: 82795 - DNA, 25 bp, Probe Sequence
ttcctaactccatcttagtgtatag

SEQ ID NO: 82796 - DNA, 25 bp, Probe Sequence
tgggaaattaaaggaacctaatggt

SEQ ID NO: 82797 - DNA, 25 bp, Probe Sequence
gggaaattaaaggaacctaatggtg

SEQ ID NO: 82798 - DNA, 25 bp, Probe Sequence
ggaaattaaaggaacctaatggtgc

SEQ ID NO: 82799 - DNA, 25 bp, Probe Sequence
ccatcttagtgtatagcctggaaag

SEQ ID NO: 82800 - DNA, 25 bp, Probe Sequence
gaaattaaaggaacctaatggtgct

SEQ ID NO: 82801 - DNA, 25 bp, Probe Sequence
aaattaaaggaacctaatggtgctt

SEQ ID NO: 82802 - DNA, 25 bp, Probe Sequence
tacttcttccctctctcttccatgt

SEQ ID NO: 82803 - DNA, 25 bp, Probe Sequence
taaaggaacctaatggtgcttattt

SEQ ID NO: 82804 - DNA, 25 bp, Probe Sequence
ttaaaggaacctaatggtgcttatt

SEQ ID NO: 82805 - DNA, 25 bp, Probe Sequence
aattaaaggaacctaatggtgctta

SEQ ID NO: 82806 - DNA, 25 bp, Probe Sequence
attaaaggaacctaatggtgcttat

SEQ ID NO: 82807 - DNA, 25 bp, Probe Sequence
atcttagtgtatagcctggaaagac

SEQ ID NO: 82808 - DNA, 25 bp, Probe Sequence
actatgtgtgatgtcctctgatatt

SEQ ID NO: 82809 - DNA, 25 bp, Probe Sequence
ttacattattgatcctccagacctg

SEQ ID NO: 82810 - DNA, 25 bp, Probe Sequence
attattgatcctccagacctgtgtt

SEQ ID NO: 82811 - DNA, 25 bp, Probe Sequence
gtaattgtcaccatcactatgtgtg

SEQ ID NO: 82812 - DNA, 25 bp, Probe Sequence
agtaattgtcaccatcactatgtgt

SEQ ID NO: 82813 - DNA, 25 bp, Probe Sequence
cactatgtgtgatgtcctctgatat

SEQ ID NO: 82814 - DNA, 25 bp, Probe Sequence
acttaattcaagccttcatgtcctc

SEQ ID NO: 82815 - DNA, 25 bp, Probe Sequence
tacattattgatcctccagacctgt

SEQ ID NO: 82816 - DNA, 25 bp, Probe Sequence
cacttaattcaagccttcatgtcct

SEQ ID NO: 82817 - DNA, 25 bp, Probe Sequence
aagtaattgtcaccatcactatgtg

SEQ ID NO: 82818 - DNA, 25 bp, Probe Sequence
gcataattagagtgaagcattctcc

SEQ ID NO: 82819 - DNA, 25 bp, Probe Sequence
ggcataattagagtgaagcattctc

SEQ ID NO: 82820 - DNA, 25 bp, Probe Sequence
gtacacttaattcaagccttcatgt

SEQ ID NO: 82821 - DNA, 25 bp, Probe Sequence
cattattgatcctccagacctgtgt

SEQ ID NO: 82822 - DNA, 25 bp, Probe Sequence
tacacttaattcaagccttcatgtc

SEQ ID NO: 82823 - DNA, 25 bp, Probe Sequence
gttctcgaaccttcataatcatgtc

SEQ ID NO: 82824 - DNA, 25 bp, Probe Sequence
catctagtacatatgcagacactct

SEQ ID NO: 82825 - DNA, 25 bp, Probe Sequence
gtgtgatgtcctctgatatttccta

SEQ ID NO: 82826 - DNA, 25 bp, Probe Sequence
atgtgtgatgtcctctgatatttcc

SEQ ID NO: 82827 - DNA, 25 bp, Probe Sequence
gaaccttcataatcatgtcgcagtc

SEQ ID NO: 82828 - DNA, 25 bp, Probe Sequence
cttaattcaagccttcatgtcctcg

SEQ ID NO: 82829 - DNA, 25 bp, Probe Sequence
attccgttctcgaaccttcataatc

SEQ ID NO: 82830 - DNA, 25 bp, Probe Sequence
acacttaattcaagccttcatgtcc

SEQ ID NO: 82831 - DNA, 25 bp, Probe Sequence
cgttctcgaaccttcataatcatgt

SEQ ID NO: 82832 - DNA, 25 bp, Probe Sequence
accttggaattgtaccgcctaataa

SEQ ID NO: 82833 - DNA, 25 bp, Probe Sequence
tggctaggtgttgttgaggaataag

SEQ ID NO: 82834 - DNA, 25 bp, Probe Sequence
gaagagttaagaagtcgtggctagg

SEQ ID NO: 82835 - DNA, 25 bp, Probe Sequence
ggaagagttaagaagtcgtggctag

SEQ ID NO: 82836 - DNA, 25 bp, Probe Sequence
gtgttgttgaggaataagggagaaa

SEQ ID NO: 82837 - DNA, 25 bp, Probe Sequence
gctgtccttgaatgtaaagttgttt

SEQ ID NO: 82838 - DNA, 25 bp, Probe Sequence
gtggctaggtgttgttgaggaataa

SEQ ID NO: 82839 - DNA, 25 bp, Probe Sequence
caccttggaattgtaccgcctaata

SEQ ID NO: 82840 - DNA, 25 bp, Probe Sequence
aatttgaaggaacagaatgctcttg

SEQ ID NO: 82841 - DNA, 25 bp, Probe Sequence
ctcaataatgtatttgcctgccttc

SEQ ID NO: 82842 - DNA, 25 bp, Probe Sequence
ggctaggtgttgttgaggaataagg

SEQ ID NO: 82843 - DNA, 25 bp, Probe Sequence
taggtgttgttgaggaataagggag

SEQ ID NO: 82844 - DNA, 25 bp, Probe Sequence
aagagttaagaagtcgtggctaggt

SEQ ID NO: 82845 - DNA, 25 bp, Probe Sequence
ccttggaattgtaccgcctaataaa

SEQ ID NO: 82846 - DNA, 25 bp, Probe Sequence
aatcacagtttacaaatctgagagc

SEQ ID NO: 82847 - DNA, 25 bp, Probe Sequence
ctaggtgttgttgaggaataaggga

SEQ ID NO: 82848 - DNA, 25 bp, Probe Sequence
tcaataatgtatttgcctgccttcg

SEQ ID NO: 82849 - DNA, 25 bp, Probe Sequence
ggtgttgttgaggaataagggagaa

SEQ ID NO: 82850 - DNA, 25 bp, Probe Sequence
gtttacaaatctgagagctgaatcc

SEQ ID NO: 82851 - DNA, 25 bp, Probe Sequence
gttaagaagtcgtggctaggtgttg

SEQ ID NO: 82852 - DNA, 25 bp, Probe Sequence
gctcaataatgtatttgcctgcctt

SEQ ID NO: 82853 - DNA, 25 bp, Probe Sequence
atttgaaggaacagaatgctcttgc

SEQ ID NO: 82854 - DNA, 25 bp, Probe Sequence
agtttacaaatctgagagctgaatc

SEQ ID NO: 82855 - DNA, 25 bp, Probe Sequence
agttaagaagtcgtggctaggtgtt

SEQ ID NO: 82856 - DNA, 25 bp, Probe Sequence
caatctgctctgaatctctctgaac

SEQ ID NO: 82857 - DNA, 25 bp, Probe Sequence
aatctgctctgaatctctctgaaca

SEQ ID NO: 82858 - DNA, 25 bp, Probe Sequence
tcaatctgctctgaatctctctgaa

SEQ ID NO: 82859 - DNA, 25 bp, Probe Sequence
atctgctctgaatctctctgaacac

SEQ ID NO: 82860 - DNA, 25 bp, Probe Sequence
gtcaatctgctctgaatctctctga

SEQ ID NO: 82861 - DNA, 25 bp, Probe Sequence
tgtcaatctgctctgaatctctctg

SEQ ID NO: 82862 - DNA, 25 bp, Probe Sequence
gtgtcaatctgctctgaatctctct

SEQ ID NO: 82863 - DNA, 25 bp, Probe Sequence
ctaggatataggatcactgtccaac

SEQ ID NO: 82864 - DNA, 25 bp, Probe Sequence
taggatataggatcactgtccaacc

SEQ ID NO: 82865 - DNA, 25 bp, Probe Sequence
aaggtgtcaatctgctctgaatctc

SEQ ID NO: 82866 - DNA, 25 bp, Probe Sequence
gatataggatcactgtccaacctca

SEQ ID NO: 82867 - DNA, 25 bp, Probe Sequence
atataggatcactgtccaacctcac

SEQ ID NO: 82868 - DNA, 25 bp, Probe Sequence
ccctcagtcttggtttcttaatatg

SEQ ID NO: 82869 - DNA, 25 bp, Probe Sequence
tttataccctcctctttgtgtcagt

SEQ ID NO: 82870 - DNA, 25 bp, Probe Sequence
gttattcctgacagagtgatgaaag

SEQ ID NO: 82871 - DNA, 25 bp, Probe Sequence
ggatataggatcactgtccaacctc

SEQ ID NO: 82872 - DNA, 25 bp, Probe Sequence
gtggttgtgattaaaggcattcatt

SEQ ID NO: 82873 - DNA, 25 bp, Probe Sequence
cctcagtcttggtttcttaatatgt

SEQ ID NO: 82874 - DNA, 25 bp, Probe Sequence
ggtgtcaatctgctctgaatctctc

SEQ ID NO: 82875 - DNA, 25 bp, Probe Sequence
tggttgtgattaaaggcattcatta

SEQ ID NO: 82876 - DNA, 25 bp, Probe Sequence
ttataccctcctctttgtgtcagtg

SEQ ID NO: 82877 - DNA, 25 bp, Probe Sequence
aggatataggatcactgtccaacct

SEQ ID NO: 82878 - DNA, 25 bp, Probe Sequence
tgttattcctgacagagtgatgaaa

SEQ ID NO: 82879 - DNA, 25 bp, Probe Sequence
tataggatcactgtccaacctcact

SEQ ID NO: 82880 - DNA, 25 bp, Probe Sequence
taataccctggtttctttctgtctg

SEQ ID NO: 82881 - DNA, 25 bp, Probe Sequence
gtaataccctggtttctttctgtct

SEQ ID NO: 82882 - DNA, 25 bp, Probe Sequence
atgaggtaataccctggtttctttc

SEQ ID NO: 82883 - DNA, 25 bp, Probe Sequence
gatgaggtaataccctggtttcttt

SEQ ID NO: 82884 - DNA, 25 bp, Probe Sequence
gaggtaataccctggtttctttctg

SEQ ID NO: 82885 - DNA, 25 bp, Probe Sequence
ggtaataccctggtttctttctgtc

SEQ ID NO: 82886 - DNA, 25 bp, Probe Sequence
tgaggtaataccctggtttctttct

SEQ ID NO: 82887 - DNA, 25 bp, Probe Sequence
aataccctggtttctttctgtctgc

SEQ ID NO: 82888 - DNA, 25 bp, Probe Sequence
aggtaataccctggtttctttctgt

SEQ ID NO: 82889 - DNA, 25 bp, Probe Sequence
ttgtttatttgttttgagacggagt

SEQ ID NO: 82890 - DNA, 25 bp, Probe Sequence
ggatgaggtaataccctggtttctt

SEQ ID NO: 82891 - DNA, 25 bp, Probe Sequence
tgtttgtttatttgttttgagacgg

SEQ ID NO: 82892 - DNA, 25 bp, Probe Sequence
gtttgtttatttgttttgagacgga

SEQ ID NO: 82893 - DNA, 25 bp, Probe Sequence
tttgtttatttgttttgagacggag

SEQ ID NO: 82894 - DNA, 25 bp, Probe Sequence
ttacatcagtgatggagagtgagag

SEQ ID NO: 82895 - DNA, 25 bp, Probe Sequence
ctgttctcaatcctagcactttggg

SEQ ID NO: 82896 - DNA, 25 bp, Probe Sequence
ttgtccaggctgttctcaatcctag

SEQ ID NO: 82897 - DNA, 25 bp, Probe Sequence
atgtttgtccaggctgttctcaatc

SEQ ID NO: 82898 - DNA, 25 bp, Probe Sequence
tttagtagagacagggttttgccat

SEQ ID NO: 82899 - DNA, 25 bp, Probe Sequence
gttacatcagtgatggagagtgaga

SEQ ID NO: 82900 - DNA, 25 bp, Probe Sequence
ttttagtagagacagggttttgcca

SEQ ID NO: 82901 - DNA, 25 bp, Probe Sequence
tgtttatttgttttgagacggagtc

SEQ ID NO: 82902 - DNA, 25 bp, Probe Sequence
ttgtttgtttatttgttttgagacg

SEQ ID NO: 82903 - DNA, 25 bp, Probe Sequence
gttctcaatcctagcactttgggag

SEQ ID NO: 82904 - DNA, 25 bp, Probe Sequence
tcatcactcccacattgtttcttac

SEQ ID NO: 82905 - DNA, 25 bp, Probe Sequence
gtcatcactcccacattgtttctta

SEQ ID NO: 82906 - DNA, 25 bp, Probe Sequence
actgtgtggactaagatgccattaa

SEQ ID NO: 82907 - DNA, 25 bp, Probe Sequence
catcactcccacattgtttcttacg

SEQ ID NO: 82908 - DNA, 25 bp, Probe Sequence
cactgtgtggactaagatgccatta

SEQ ID NO: 82909 - DNA, 25 bp, Probe Sequence
ctgtgtggactaagatgccattaaa

SEQ ID NO: 82910 - DNA, 25 bp, Probe Sequence
atcactcccacattgtttcttacgg

SEQ ID NO: 82911 - DNA, 25 bp, Probe Sequence
tgtcatcactcccacattgtttctt

SEQ ID NO: 82912 - DNA, 25 bp, Probe Sequence
gcctaccaactgtagatgtatatat

SEQ ID NO: 82913 - DNA, 25 bp, Probe Sequence
ctgtcatcactcccacattgtttct

SEQ ID NO: 82914 - DNA, 25 bp, Probe Sequence
gcattttctgattttatacccactg

SEQ ID NO: 82915 - DNA, 25 bp, Probe Sequence
tggcctaccaactgtagatgtatat

SEQ ID NO: 82916 - DNA, 25 bp, Probe Sequence
ttgtttcttacggtcggagcatcta

SEQ ID NO: 82917 - DNA, 25 bp, Probe Sequence
ttttctgattttatacccactgtgt

SEQ ID NO: 82918 - DNA, 25 bp, Probe Sequence
ggcctaccaactgtagatgtatata

SEQ ID NO: 82919 - DNA, 25 bp, Probe Sequence
cactcccacattgtttcttacggtc

SEQ ID NO: 82920 - DNA, 25 bp, Probe Sequence
tttctgattttatacccactgtgtg

SEQ ID NO: 82921 - DNA, 25 bp, Probe Sequence
cattttctgattttatacccactgt

SEQ ID NO: 82922 - DNA, 25 bp, Probe Sequence
cctgtcatcactcccacattgtttc

SEQ ID NO: 82923 - DNA, 25 bp, Probe Sequence
ataaagcctgtcatcactcccacat

SEQ ID NO: 82924 - DNA, 25 bp, Probe Sequence
tcactcccacattgtttcttacggt

SEQ ID NO: 82925 - DNA, 25 bp, Probe Sequence
cattgtttcttacggtcggagcatc

SEQ ID NO: 82926 - DNA, 25 bp, Probe Sequence
tcataaagcctgtcatcactcccac

SEQ ID NO: 82927 - DNA, 25 bp, Probe Sequence
attttctgattttatacccactgtg

SEQ ID NO: 82928 - DNA, 25 bp, Probe Sequence
tcaatctagtgagacacagacatat

SEQ ID NO: 82929 - DNA, 25 bp, Probe Sequence
caatctagtgagacacagacatatt

SEQ ID NO: 82930 - DNA, 25 bp, Probe Sequence
atatgggaactctactagatgtggt

SEQ ID NO: 82931 - DNA, 25 bp, Probe Sequence
tatgggaactctactagatgtggtt

SEQ ID NO: 82932 - DNA, 25 bp, Probe Sequence
catggtagcttaagatgacaacatt

SEQ ID NO: 82933 - DNA, 25 bp, Probe Sequence
atgggaactctactagatgtggttt

SEQ ID NO: 82934 - DNA, 25 bp, Probe Sequence
gggtatatgggaactctactagatg

SEQ ID NO: 82935 - DNA, 25 bp, Probe Sequence
atggtagcttaagatgacaacattc

SEQ ID NO: 82936 - DNA, 25 bp, Probe Sequence
tggtagcttaagatgacaacattca

SEQ ID NO: 82937 - DNA, 25 bp, Probe Sequence
ggagtctagagtacagttgagagta

SEQ ID NO: 82938 - DNA, 25 bp, Probe Sequence
tatatgggaactctactagatgtgg

SEQ ID NO: 82939 - DNA, 25 bp, Probe Sequence
ggtatatgggaactctactagatgt

SEQ ID NO: 82940 - DNA, 25 bp, Probe Sequence
tgacaacattcatagaaacagcgtg

SEQ ID NO: 82941 - DNA, 25 bp, Probe Sequence
gagtctagagtacagttgagagtat

SEQ ID NO: 82942 - DNA, 25 bp, Probe Sequence
aaatgttgggattacaggcatgaaa

SEQ ID NO: 82943 - DNA, 25 bp, Probe Sequence
gacaacattcatagaaacagcgtgg

SEQ ID NO: 82944 - DNA, 25 bp, Probe Sequence
gtatatgggaactctactagatgtg

SEQ ID NO: 82945 - DNA, 25 bp, Probe Sequence
gtctagagtacagttgagagtattg

SEQ ID NO: 82946 - DNA, 25 bp, Probe Sequence
agtctagagtacagttgagagtatt

SEQ ID NO: 82947 - DNA, 25 bp, Probe Sequence
cccaatactggtttcttaactgacg

SEQ ID NO: 82948 - DNA, 25 bp, Probe Sequence
cagaagactaaagatacatgacaac

SEQ ID NO: 82949 - DNA, 25 bp, Probe Sequence
aatactggtttcttaactgacgtac

SEQ ID NO: 82950 - DNA, 25 bp, Probe Sequence
caatactggtttcttaactgacgta

SEQ ID NO: 82951 - DNA, 25 bp, Probe Sequence
tctagagtacagttgagagtattgt

SEQ ID NO: 82952 - DNA, 25 bp, Probe Sequence
cgttcaaccttacctacttctctgg

SEQ ID NO: 82953 - DNA, 25 bp, Probe Sequence
cactcgggtatcttcctattcctta

SEQ ID NO: 82954 - DNA, 25 bp, Probe Sequence
actcgggtatcttcctattccttac

SEQ ID NO: 82955 - DNA, 25 bp, Probe Sequence
ttgcgttcaaccttacctacttctc

SEQ ID NO: 82956 - DNA, 25 bp, Probe Sequence
cttgcgttcaaccttacctacttct

SEQ ID NO: 82957 - DNA, 25 bp, Probe Sequence
gttcaaccttacctacttctctggt

SEQ ID NO: 82958 - DNA, 25 bp, Probe Sequence
gcgttcaaccttacctacttctctg

SEQ ID NO: 82959 - DNA, 25 bp, Probe Sequence
acttgcgttcaaccttacctacttc

SEQ ID NO: 82960 - DNA, 25 bp, Probe Sequence
gacttgcgttcaaccttacctactt

SEQ ID NO: 82961 - DNA, 25 bp, Probe Sequence
ctcgggtatcttcctattccttacg

SEQ ID NO: 82962 - DNA, 25 bp, Probe Sequence
tgcgttcaaccttacctacttctct

SEQ ID NO: 82963 - DNA, 25 bp, Probe Sequence
cagacttgcgttcaaccttacctac

SEQ ID NO: 82964 - DNA, 25 bp, Probe Sequence
ctaagactccagacttgcgttcaac

SEQ ID NO: 82965 - DNA, 25 bp, Probe Sequence
agacttgcgttcaaccttacctact

SEQ ID NO: 82966 - DNA, 25 bp, Probe Sequence
tctaagactccagacttgcgttcaa

SEQ ID NO: 82967 - DNA, 25 bp, Probe Sequence
ttcaaccttacctacttctctggta

SEQ ID NO: 82968 - DNA, 25 bp, Probe Sequence
aaccttacctacttctctggtacaa

SEQ ID NO: 82969 - DNA, 25 bp, Probe Sequence
accttacctacttctctggtacaag

SEQ ID NO: 82970 - DNA, 25 bp, Probe Sequence
tcaaccttacctacttctctggtac

SEQ ID NO: 82971 - DNA, 25 bp, Probe Sequence
tcgggtatcttcctattccttacgg

SEQ ID NO: 82972 - DNA, 25 bp, Probe Sequence
caaccttacctacttctctggtaca

SEQ ID NO: 82973 - DNA, 25 bp, Probe Sequence
ccactcgggtatcttcctattcctt

SEQ ID NO: 82974 - DNA, 25 bp, Probe Sequence
gtatcttcctattccttacggccac

SEQ ID NO: 82975 - DNA, 25 bp, Probe Sequence
ccagacttgcgttcaaccttaccta

SEQ ID NO: 82976 - DNA, 25 bp, Probe Sequence
ctgtatgtgtattgtcgctatgttg

SEQ ID NO: 82977 - DNA, 25 bp, Probe Sequence
tctgtatgtgtattgtcgctatgtt

SEQ ID NO: 82978 - DNA, 25 bp, Probe Sequence
ttctgtatgtgtattgtcgctatgt

SEQ ID NO: 82979 - DNA, 25 bp, Probe Sequence
gtatgtgtattgtcgctatgttgtg

SEQ ID NO: 82980 - DNA, 25 bp, Probe Sequence
tgtatgtgtattgtcgctatgttgt

SEQ ID NO: 82981 - DNA, 25 bp, Probe Sequence
tatgtgtattgtcgctatgttgtgc

SEQ ID NO: 82982 - DNA, 25 bp, Probe Sequence
cttactgtactgtggtgtcaacatt

SEQ ID NO: 82983 - DNA, 25 bp, Probe Sequence
tttgagaaataggcagggtatgaat

SEQ ID NO: 82984 - DNA, 25 bp, Probe Sequence
tcttactgtactgtggtgtcaacat

SEQ ID NO: 82985 - DNA, 25 bp, Probe Sequence
gggtattgctgcttatttcttactg

SEQ ID NO: 82986 - DNA, 25 bp, Probe Sequence
agggtattgctgcttatttcttact

SEQ ID NO: 82987 - DNA, 25 bp, Probe Sequence
tttctgtatgtgtattgtcgctatg

SEQ ID NO: 82988 - DNA, 25 bp, Probe Sequence
ggtattgctgcttatttcttactgt

SEQ ID NO: 82989 - DNA, 25 bp, Probe Sequence
atgcttagggtattgctgcttattt

SEQ ID NO: 82990 - DNA, 25 bp, Probe Sequence
aatgcttagggtattgctgcttatt

SEQ ID NO: 82991 - DNA, 25 bp, Probe Sequence
ttgagaaataggcagggtatgaatt

SEQ ID NO: 82992 - DNA, 25 bp, Probe Sequence
ttcttactgtactgtggtgtcaaca

SEQ ID NO: 82993 - DNA, 25 bp, Probe Sequence
cttagggtattgctgcttatttctt

SEQ ID NO: 82994 - DNA, 25 bp, Probe Sequence
gcttagggtattgctgcttatttct

SEQ ID NO: 82995 - DNA, 25 bp, Probe Sequence
ctacccgttctatttgtaactccat

SEQ ID NO: 82996 - DNA, 25 bp, Probe Sequence
ttctacccgttctatttgtaactcc

SEQ ID NO: 82997 - DNA, 25 bp, Probe Sequence
tgagaaataggcagggtatgaatta

SEQ ID NO: 82998 - DNA, 25 bp, Probe Sequence
tacccgttctatttgtaactccatt

SEQ ID NO: 82999 - DNA, 25 bp, Probe Sequence
acccgttctatttgtaactccattt

SEQ ID NO: 83000 - DNA, 25 bp, Probe Sequence
ttgatgactcatgttatgctcagag

SEQ ID NO: 83001 - DNA, 25 bp, Probe Sequence
gaagatgttaataagggctgtttgg

SEQ ID NO: 83002 - DNA, 25 bp, Probe Sequence
gatgttaataagggctgtttggaaa

SEQ ID NO: 83003 - DNA, 25 bp, Probe Sequence
agcctgtagatttcttgtgtgtaaa

SEQ ID NO: 83004 - DNA, 25 bp, Probe Sequence
agatgttaataagggctgtttggaa

SEQ ID NO: 83005 - DNA, 25 bp, Probe Sequence
aagatgttaataagggctgtttgga

SEQ ID NO: 83006 - DNA, 25 bp, Probe Sequence
agaagatgttaataagggctgtttg

SEQ ID NO: 83007 - DNA, 25 bp, Probe Sequence
gagcctgtagatttcttgtgtgtaa

SEQ ID NO: 83008 - DNA, 25 bp, Probe Sequence
ttaataagggctgtttggaaattgc

SEQ ID NO: 83009 - DNA, 25 bp, Probe Sequence
gcctgtagatttcttgtgtgtaaag

SEQ ID NO: 83010 - DNA, 25 bp, Probe Sequence
tgttaataagggctgtttggaaatt

SEQ ID NO: 83011 - DNA, 25 bp, Probe Sequence
atgttaataagggctgtttggaaat

SEQ ID NO: 83012 - DNA, 25 bp, Probe Sequence
attccaaggctttcacacttctaat

SEQ ID NO: 83013 - DNA, 25 bp, Probe Sequence
tttcttgagagcctgtagatttctt

SEQ ID NO: 83014 - DNA, 25 bp, Probe Sequence
taattccaaggctttcacacttcta

SEQ ID NO: 83015 - DNA, 25 bp, Probe Sequence
gttaataagggctgtttggaaattg

SEQ ID NO: 83016 - DNA, 25 bp, Probe Sequence
ttcttgagagcctgtagatttcttg

SEQ ID NO: 83017 - DNA, 25 bp, Probe Sequence
ataattccaaggctttcacacttct

SEQ ID NO: 83018 - DNA, 25 bp, Probe Sequence
tataattccaaggctttcacacttc

SEQ ID NO: 83019 - DNA, 25 bp, Probe Sequence
cctgtagatttcttgtgtgtaaagt

SEQ ID NO: 83020 - DNA, 25 bp, Probe Sequence
gcacattgttagagtattatcaagt

SEQ ID NO: 83021 - DNA, 25 bp, Probe Sequence
tccaaggctttcacacttctaattt

SEQ ID NO: 83022 - DNA, 25 bp, Probe Sequence
ttccaaggctttcacacttctaatt

SEQ ID NO: 83023 - DNA, 25 bp, Probe Sequence
aattccaaggctttcacacttctaa

SEQ ID NO: 83024 - DNA, 25 bp, Probe Sequence
cttgtcattctcacctcttatggaa

SEQ ID NO: 83025 - DNA, 25 bp, Probe Sequence
gtgagatatgaggtcttacaggaga

SEQ ID NO: 83026 - DNA, 25 bp, Probe Sequence
gtccttgtcattctcacctcttatg

SEQ ID NO: 83027 - DNA, 25 bp, Probe Sequence
ttcttagtccttgcctgtgagatat

SEQ ID NO: 83028 - DNA, 25 bp, Probe Sequence
attcttagtccttgcctgtgagata

SEQ ID NO: 83029 - DNA, 25 bp, Probe Sequence
catacacagttacagagatcagtca

SEQ ID NO: 83030 - DNA, 25 bp, Probe Sequence
ttagtccttgcctgtgagatatgag

SEQ ID NO: 83031 - DNA, 25 bp, Probe Sequence
cttagtccttgcctgtgagatatga

SEQ ID NO: 83032 - DNA, 25 bp, Probe Sequence
acactcttacctcttacttcctaga

SEQ ID NO: 83033 - DNA, 25 bp, Probe Sequence
ccatacacagttacagagatcagtc

SEQ ID NO: 83034 - DNA, 25 bp, Probe Sequence
taattcttagtccttgcctgtgaga

SEQ ID NO: 83035 - DNA, 25 bp, Probe Sequence
cactcttacctcttacttcctagac

SEQ ID NO: 83036 - DNA, 25 bp, Probe Sequence
actcttacctcttacttcctagact

SEQ ID NO: 83037 - DNA, 25 bp, Probe Sequence
atacacagttacagagatcagtcaa

SEQ ID NO: 83038 - DNA, 25 bp, Probe Sequence
ccttgtcattctcacctcttatgga

SEQ ID NO: 83039 - DNA, 25 bp, Probe Sequence
tccttgtcattctcacctcttatgg

SEQ ID NO: 83040 - DNA, 25 bp, Probe Sequence
tcttagtccttgcctgtgagatatg

SEQ ID NO: 83041 - DNA, 25 bp, Probe Sequence
tgtgagatatgaggtcttacaggag

SEQ ID NO: 83042 - DNA, 25 bp, Probe Sequence
aatcctaattcttagtccttgcctg

SEQ ID NO: 83043 - DNA, 25 bp, Probe Sequence
tacactcttacctcttacttcctag

SEQ ID NO: 83044 - DNA, 25 bp, Probe Sequence
aattcttagtccttgcctgtgagat

SEQ ID NO: 83045 - DNA, 25 bp, Probe Sequence
ctcttacctcttacttcctagactt

SEQ ID NO: 83046 - DNA, 25 bp, Probe Sequence
gtacactcttacctcttacttccta

SEQ ID NO: 83047 - DNA, 25 bp, Probe Sequence
ctaattcttagtccttgcctgtgag

SEQ ID NO: 83048 - DNA, 25 bp, Probe Sequence
tgaatgccttaattgttgaatgtgt

SEQ ID NO: 83049 - DNA, 25 bp, Probe Sequence
cactgattattcttggctgaacttc

SEQ ID NO: 83050 - DNA, 25 bp, Probe Sequence
ctgaatgccttaattgttgaatgtg

SEQ ID NO: 83051 - DNA, 25 bp, Probe Sequence
tctgaatgccttaattgttgaatgt

SEQ ID NO: 83052 - DNA, 25 bp, Probe Sequence
gaatgccttaattgttgaatgtgtt

SEQ ID NO: 83053 - DNA, 25 bp, Probe Sequence
atctgaatgccttaattgttgaatg

SEQ ID NO: 83054 - DNA, 25 bp, Probe Sequence
actgattattcttggctgaacttca

SEQ ID NO: 83055 - DNA, 25 bp, Probe Sequence
ctgattattcttggctgaacttcat

SEQ ID NO: 83056 - DNA, 25 bp, Probe Sequence
aatgccttaattgttgaatgtgtta

SEQ ID NO: 83057 - DNA, 25 bp, Probe Sequence
tgattattcttggctgaacttcatt

SEQ ID NO: 83058 - DNA, 25 bp, Probe Sequence
aatctgaatgccttaattgttgaat

SEQ ID NO: 83059 - DNA, 25 bp, Probe Sequence
atgccttaattgttgaatgtgttaa

SEQ ID NO: 83060 - DNA, 25 bp, Probe Sequence
ggcatcatagtagttggaataatac

SEQ ID NO: 83061 - DNA, 25 bp, Probe Sequence
cgggcatcatagtagttggaataat

SEQ ID NO: 83062 - DNA, 25 bp, Probe Sequence
gatggtagcctggaaagtaatgaat

SEQ ID NO: 83063 - DNA, 25 bp, Probe Sequence
taaagatggtagcctggaaagtaat

SEQ ID NO: 83064 - DNA, 25 bp, Probe Sequence
ttaaagatggtagcctggaaagtaa

SEQ ID NO: 83065 - DNA, 25 bp, Probe Sequence
gtagcctggaaagtaatgaatgaca

SEQ ID NO: 83066 - DNA, 25 bp, Probe Sequence
atggtagcctggaaagtaatgaatg

SEQ ID NO: 83067 - DNA, 25 bp, Probe Sequence
aaagatggtagcctggaaagtaatg

SEQ ID NO: 83068 - DNA, 25 bp, Probe Sequence
aatttctatttcttgccgagttgac

SEQ ID NO: 83069 - DNA, 25 bp, Probe Sequence
gctaatttctatttcttgccgagtt

SEQ ID NO: 83070 - DNA, 25 bp, Probe Sequence
tagaatcgcctggagaatttaagaa

SEQ ID NO: 83071 - DNA, 25 bp, Probe Sequence
ccactgattattcttggctgaactt

SEQ ID NO: 83072 - DNA, 25 bp, Probe Sequence
gaacgagaacaagaatcagaagaag

SEQ ID NO: 83073 - DNA, 25 bp, Probe Sequence
acgagaacaagaatcagaagaagaa

SEQ ID NO: 83074 - DNA, 25 bp, Probe Sequence
aacgagaacaagaatcagaagaaga

SEQ ID NO: 83075 - DNA, 25 bp, Probe Sequence
tgaacgagaacaagaatcagaagaa

SEQ ID NO: 83076 - DNA, 25 bp, Probe Sequence
ctggctaaggatgactctaagtgta

SEQ ID NO: 83077 - DNA, 25 bp, Probe Sequence
gctaaggatgactctaagtgtactg

SEQ ID NO: 83078 - DNA, 25 bp, Probe Sequence
ctaaggatgactctaagtgtactgt

SEQ ID NO: 83079 - DNA, 25 bp, Probe Sequence
ggctaaggatgactctaagtgtact

SEQ ID NO: 83080 - DNA, 25 bp, Probe Sequence
tggctaaggatgactctaagtgtac

SEQ ID NO: 83081 - DNA, 25 bp, Probe Sequence
taaggatgactctaagtgtactgtt

SEQ ID NO: 83082 - DNA, 25 bp, Probe Sequence
ggaacaatgtacttctggagctatt

SEQ ID NO: 83083 - DNA, 25 bp, Probe Sequence
cctttatcttctacaaccacactca

SEQ ID NO: 83084 - DNA, 25 bp, Probe Sequence
cgagaacaagaatcagaagaagaaa

SEQ ID NO: 83085 - DNA, 25 bp, Probe Sequence
cattatgcagtaaccattgtcatcg

SEQ ID NO: 83086 - DNA, 25 bp, Probe Sequence
aagaagaaatgtgactttgatgagc

SEQ ID NO: 83087 - DNA, 25 bp, Probe Sequence
ttatcttctacaaccacactcatgg

SEQ ID NO: 83088 - DNA, 25 bp, Probe Sequence
attatgcagtaaccattgtcatcgt

SEQ ID NO: 83089 - DNA, 25 bp, Probe Sequence
tcttatgtttcaaccatcagttcac

SEQ ID NO: 83090 - DNA, 25 bp, Probe Sequence
cagtaaccattgtcatcgttggaat

SEQ ID NO: 83091 - DNA, 25 bp, Probe Sequence
catcgttggaatgaattatgctttc

SEQ ID NO: 83092 - DNA, 25 bp, Probe Sequence
ttatgcagtaaccattgtcatcgtt

SEQ ID NO: 83093 - DNA, 25 bp, Probe Sequence
ccaagttaagttgtcaaatgcctaa

SEQ ID NO: 83094 - DNA, 25 bp, Probe Sequence
tatgtttcaaccatcagttcacttc

SEQ ID NO: 83095 - DNA, 25 bp, Probe Sequence
cttatgtttcaaccatcagttcact

SEQ ID NO: 83096 - DNA, 25 bp, Probe Sequence
agcacagtaagaataatagaaggca

SEQ ID NO: 83097 - DNA, 25 bp, Probe Sequence
agaaccagataagcacagtaagaat

SEQ ID NO: 83098 - DNA, 25 bp, Probe Sequence
tagaaccagataagcacagtaagaa

SEQ ID NO: 83099 - DNA, 25 bp, Probe Sequence
gcacagtaagaataatagaaggcat

SEQ ID NO: 83100 - DNA, 25 bp, Probe Sequence
atagaaccagataagcacagtaaga

SEQ ID NO: 83101 - DNA, 25 bp, Probe Sequence
aagcacagtaagaataatagaaggc

SEQ ID NO: 83102 - DNA, 25 bp, Probe Sequence
gaaccagataagcacagtaagaata

SEQ ID NO: 83103 - DNA, 25 bp, Probe Sequence
tagaaggcattcaagatcaagatca

SEQ ID NO: 83104 - DNA, 25 bp, Probe Sequence
ctaacttgaactctcagtctcttgc

SEQ ID NO: 83105 - DNA, 25 bp, Probe Sequence
gctaacttgaactctcagtctcttg

SEQ ID NO: 83106 - DNA, 25 bp, Probe Sequence
aaccagataagcacagtaagaataa

SEQ ID NO: 83107 - DNA, 25 bp, Probe Sequence
taacttgaactctcagtctcttgct

SEQ ID NO: 83108 - DNA, 25 bp, Probe Sequence
agaaggcattcaagatcaagatcac

SEQ ID NO: 83109 - DNA, 25 bp, Probe Sequence
atagaaggcattcaagatcaagatc

SEQ ID NO: 83110 - DNA, 25 bp, Probe Sequence
accagataagcacagtaagaataat

SEQ ID NO: 83111 - DNA, 25 bp, Probe Sequence
gtcacattctaagtctaggagtcgg

SEQ ID NO: 83112 - DNA, 25 bp, Probe Sequence
ggtcacattctaagtctaggagtcg

SEQ ID NO: 83113 - DNA, 25 bp, Probe Sequence
cggtcacattctaagtctaggagtc

SEQ ID NO: 83114 - DNA, 25 bp, Probe Sequence
tatagaaccagataagcacagtaag

SEQ ID NO: 83115 - DNA, 25 bp, Probe Sequence
aatagaaggcattcaagatcaagat

SEQ ID NO: 83116 - DNA, 25 bp, Probe Sequence
gaaggcattcaagatcaagatcacg

SEQ ID NO: 83117 - DNA, 25 bp, Probe Sequence
taatagaaggcattcaagatcaaga

SEQ ID NO: 83118 - DNA, 25 bp, Probe Sequence
ttcaagatcaagatcacgttctagg

SEQ ID NO: 83119 - DNA, 25 bp, Probe Sequence
aaggagcacatcaaatacaagagac

SEQ ID NO: 83120 - DNA, 25 bp, Probe Sequence
ttaatatgtccaacctgcttgtgct

SEQ ID NO: 83121 - DNA, 25 bp, Probe Sequence
gtcctttaatatgtccaacctgctt

SEQ ID NO: 83122 - DNA, 25 bp, Probe Sequence
ctttaatatgtccaacctgcttgtg

SEQ ID NO: 83123 - DNA, 25 bp, Probe Sequence
tttctctctctccctttctttctcc

SEQ ID NO: 83124 - DNA, 25 bp, Probe Sequence
tcctttaatatgtccaacctgcttg

SEQ ID NO: 83125 - DNA, 25 bp, Probe Sequence
cctttaatatgtccaacctgcttgt

SEQ ID NO: 83126 - DNA, 25 bp, Probe Sequence
taatatgtccaacctgcttgtgctc

SEQ ID NO: 83127 - DNA, 25 bp, Probe Sequence
tttaatatgtccaacctgcttgtgc

SEQ ID NO: 83128 - DNA, 25 bp, Probe Sequence
gttcagtcggctttactacaacaag

SEQ ID NO: 83129 - DNA, 25 bp, Probe Sequence
ttactacaacaagctgacgagacag

SEQ ID NO: 83130 - DNA, 25 bp, Probe Sequence
aacacctgtacctcgactacaatag

SEQ ID NO: 83131 - DNA, 25 bp, Probe Sequence
gaacacctgtacctcgactacaata

SEQ ID NO: 83132 - DNA, 25 bp, Probe Sequence
cgtcctttaatatgtccaacctgct

SEQ ID NO: 83133 - DNA, 25 bp, Probe Sequence
gaacgtcctttaatatgtccaacct

SEQ ID NO: 83134 - DNA, 25 bp, Probe Sequence
agaacgtcctttaatatgtccaacc

SEQ ID NO: 83135 - DNA, 25 bp, Probe Sequence
ttctctctctccctttctttctccc

SEQ ID NO: 83136 - DNA, 25 bp, Probe Sequence
aacgtcctttaatatgtccaacctg

SEQ ID NO: 83137 - DNA, 25 bp, Probe Sequence
aagaacgtcctttaatatgtccaac

SEQ ID NO: 83138 - DNA, 25 bp, Probe Sequence
caagaacgtcctttaatatgtccaa

SEQ ID NO: 83139 - DNA, 25 bp, Probe Sequence
ccaagaacgtcctttaatatgtcca

SEQ ID NO: 83140 - DNA, 25 bp, Probe Sequence
ctttactacaacaagctgacgagac

SEQ ID NO: 83141 - DNA, 25 bp, Probe Sequence
cccaagaacgtcctttaatatgtcc

SEQ ID NO: 83142 - DNA, 25 bp, Probe Sequence
tttactacaacaagctgacgagaca

SEQ ID NO: 83143 - DNA, 25 bp, Probe Sequence
cctgtacctcgactacaatagcatc

SEQ ID NO: 83144 - DNA, 25 bp, Probe Sequence
ttaatatgtccaacctgcttgtgct

SEQ ID NO: 83145 - DNA, 25 bp, Probe Sequence
gtcctttaatatgtccaacctgctt

SEQ ID NO: 83146 - DNA, 25 bp, Probe Sequence
ctttaatatgtccaacctgcttgtg

SEQ ID NO: 83147 - DNA, 25 bp, Probe Sequence
tttctctctctccctttctttctcc

SEQ ID NO: 83148 - DNA, 25 bp, Probe Sequence
tcctttaatatgtccaacctgcttg

SEQ ID NO: 83149 - DNA, 25 bp, Probe Sequence
cctttaatatgtccaacctgcttgt

SEQ ID NO: 83150 - DNA, 25 bp, Probe Sequence
taatatgtccaacctgcttgtgctc

SEQ ID NO: 83151 - DNA, 25 bp, Probe Sequence
tttaatatgtccaacctgcttgtgc

SEQ ID NO: 83152 - DNA, 25 bp, Probe Sequence
gttcagtcggctttactacaacaag

SEQ ID NO: 83153 - DNA, 25 bp, Probe Sequence
ttactacaacaagctgacgagacag

SEQ ID NO: 83154 - DNA, 25 bp, Probe Sequence
aacacctgtacctcgactacaatag

SEQ ID NO: 83155 - DNA, 25 bp, Probe Sequence
gaacacctgtacctcgactacaata

SEQ ID NO: 83156 - DNA, 25 bp, Probe Sequence
cgtcctttaatatgtccaacctgct

SEQ ID NO: 83157 - DNA, 25 bp, Probe Sequence
gaacgtcctttaatatgtccaacct

SEQ ID NO: 83158 - DNA, 25 bp, Probe Sequence
agaacgtcctttaatatgtccaacc

SEQ ID NO: 83159 - DNA, 25 bp, Probe Sequence
ttctctctctccctttctttctccc

SEQ ID NO: 83160 - DNA, 25 bp, Probe Sequence
aacgtcctttaatatgtccaacctg

SEQ ID NO: 83161 - DNA, 25 bp, Probe Sequence
aagaacgtcctttaatatgtccaac

SEQ ID NO: 83162 - DNA, 25 bp, Probe Sequence
caagaacgtcctttaatatgtccaa

SEQ ID NO: 83163 - DNA, 25 bp, Probe Sequence
ccaagaacgtcctttaatatgtcca

SEQ ID NO: 83164 - DNA, 25 bp, Probe Sequence
ctttactacaacaagctgacgagac

SEQ ID NO: 83165 - DNA, 25 bp, Probe Sequence
cccaagaacgtcctttaatatgtcc

SEQ ID NO: 83166 - DNA, 25 bp, Probe Sequence
tttactacaacaagctgacgagaca

SEQ ID NO: 83167 - DNA, 25 bp, Probe Sequence
cctgtacctcgactacaatagcatc

SEQ ID NO: 83168 - DNA, 25 bp, Probe Sequence
ttcttatctgagagacctggattaa

SEQ ID NO: 83169 - DNA, 25 bp, Probe Sequence
ctggatttcttatctgagagacctg

SEQ ID NO: 83170 - DNA, 25 bp, Probe Sequence
atgctggatttcttatctgagagac

SEQ ID NO: 83171 - DNA, 25 bp, Probe Sequence
gatttcttatctgagagacctggat

SEQ ID NO: 83172 - DNA, 25 bp, Probe Sequence
ggatttcttatctgagagacctgga

SEQ ID NO: 83173 - DNA, 25 bp, Probe Sequence
atttcttatctgagagacctggatt

SEQ ID NO: 83174 - DNA, 25 bp, Probe Sequence
tggatttcttatctgagagacctgg

SEQ ID NO: 83175 - DNA, 25 bp, Probe Sequence
tttcttatctgagagacctggatta

SEQ ID NO: 83176 - DNA, 25 bp, Probe Sequence
gctggatttcttatctgagagacct

SEQ ID NO: 83177 - DNA, 25 bp, Probe Sequence
tcttatctgagagacctggattaaa

SEQ ID NO: 83178 - DNA, 25 bp, Probe Sequence
catgctggatttcttatctgagaga

SEQ ID NO: 83179 - DNA, 25 bp, Probe Sequence
tgctggatttcttatctgagagacc

SEQ ID NO: 83180 - DNA, 25 bp, Probe Sequence
ccatgctggatttcttatctgagag

SEQ ID NO: 83181 - DNA, 25 bp, Probe Sequence
cagtaacatcaatgggcgtggatag

SEQ ID NO: 83182 - DNA, 25 bp, Probe Sequence
tacagaccttaggggactttctact

SEQ ID NO: 83183 - DNA, 25 bp, Probe Sequence
gagagacctggattaaaaggatgat

SEQ ID NO: 83184 - DNA, 25 bp, Probe Sequence
agagacctggattaaaaggatgatt

SEQ ID NO: 83185 - DNA, 25 bp, Probe Sequence
ctgagagacctggattaaaaggatg

SEQ ID NO: 83186 - DNA, 25 bp, Probe Sequence
tctgagagacctggattaaaaggat

SEQ ID NO: 83187 - DNA, 25 bp, Probe Sequence
atctgagagacctggattaaaagga

SEQ ID NO: 83188 - DNA, 25 bp, Probe Sequence
tatctgagagacctggattaaaagg

SEQ ID NO: 83189 - DNA, 25 bp, Probe Sequence
gtacagaccttaggggactttctac

SEQ ID NO: 83190 - DNA, 25 bp, Probe Sequence
tgagagacctggattaaaaggatga

SEQ ID NO: 83191 - DNA, 25 bp, Probe Sequence
cagaccttaggggactttctacttg

SEQ ID NO: 83192 - DNA, 25 bp, Probe Sequence
cagaataacccaaagtaaccctaca

SEQ ID NO: 83193 - DNA, 25 bp, Probe Sequence
agaataacccaaagtaaccctacat

SEQ ID NO: 83194 - DNA, 25 bp, Probe Sequence
gcagaataacccaaagtaaccctac

SEQ ID NO: 83195 - DNA, 25 bp, Probe Sequence
caacgagggagagaagtcataattc

SEQ ID NO: 83196 - DNA, 25 bp, Probe Sequence
aacgagggagagaagtcataattca

SEQ ID NO: 83197 - DNA, 25 bp, Probe Sequence
taacccaaagtaaccctacatgatg

SEQ ID NO: 83198 - DNA, 25 bp, Probe Sequence
aataacccaaagtaaccctacatga

SEQ ID NO: 83199 - DNA, 25 bp, Probe Sequence
ataacccaaagtaaccctacatgat

SEQ ID NO: 83200 - DNA, 25 bp, Probe Sequence
gaataacccaaagtaaccctacatg

SEQ ID NO: 83201 - DNA, 25 bp, Probe Sequence
ataattcagggcttccagacatcat

SEQ ID NO: 83202 - DNA, 25 bp, Probe Sequence
acgagggagagaagtcataattcag

SEQ ID NO: 83203 - DNA, 25 bp, Probe Sequence
taattcagggcttccagacatcatt

SEQ ID NO: 83204 - DNA, 25 bp, Probe Sequence
ctttgctgccaatagtttcttctca

SEQ ID NO: 83205 - DNA, 25 bp, Probe Sequence
ggcagaataacccaaagtaacccta

SEQ ID NO: 83206 - DNA, 25 bp, Probe Sequence
gagggagagaagtcataattcaggg

SEQ ID NO: 83207 - DNA, 25 bp, Probe Sequence
ccaacgagggagagaagtcataatt

SEQ ID NO: 83208 - DNA, 25 bp, Probe Sequence
ggagagaagtcataattcagggctt

SEQ ID NO: 83209 - DNA, 25 bp, Probe Sequence
tttgctgccaatagtttcttctcac

SEQ ID NO: 83210 - DNA, 25 bp, Probe Sequence
tcataattcagggcttccagacatc

SEQ ID NO: 83211 - DNA, 25 bp, Probe Sequence
cgagggagagaagtcataattcagg

SEQ ID NO: 83212 - DNA, 25 bp, Probe Sequence
aatgatgtgtaaactgaggcatgtg

SEQ ID NO: 83213 - DNA, 25 bp, Probe Sequence
caatgatgtgtaaactgaggcatgt

SEQ ID NO: 83214 - DNA, 25 bp, Probe Sequence
cataattcagggcttccagacatca

SEQ ID NO: 83215 - DNA, 25 bp, Probe Sequence
gagatgcaatgatgtgtaaactgag

SEQ ID NO: 83216 - DNA, 25 bp, Probe Sequence
atctgactcaagcatatcctctatt

SEQ ID NO: 83217 - DNA, 25 bp, Probe Sequence
atgagtcttagcaatgttgatctga

SEQ ID NO: 83218 - DNA, 25 bp, Probe Sequence
aatgagtcttagcaatgttgatctg

SEQ ID NO: 83219 - DNA, 25 bp, Probe Sequence
gatctgactcaagcatatcctctat

SEQ ID NO: 83220 - DNA, 25 bp, Probe Sequence
tctgactcaagcatatcctctatta

SEQ ID NO: 83221 - DNA, 25 bp, Probe Sequence
tgatctgactcaagcatatcctcta

SEQ ID NO: 83222 - DNA, 25 bp, Probe Sequence
gtcttagcaatgttgatctgactca

SEQ ID NO: 83223 - DNA, 25 bp, Probe Sequence
tgagtcttagcaatgttgatctgac

SEQ ID NO: 83224 - DNA, 25 bp, Probe Sequence
acatagctcaatgcctggaatatta

SEQ ID NO: 83225 - DNA, 25 bp, Probe Sequence
tacatagctcaatgcctggaatatt

SEQ ID NO: 83226 - DNA, 25 bp, Probe Sequence
ctgactcaagcatatcctctattat

SEQ ID NO: 83227 - DNA, 25 bp, Probe Sequence
gtacatagctcaatgcctggaatat

SEQ ID NO: 83228 - DNA, 25 bp, Probe Sequence
catagctcaatgcctggaatattaa

SEQ ID NO: 83229 - DNA, 25 bp, Probe Sequence
aaagtgctgggattataggtatgag

SEQ ID NO: 83230 - DNA, 25 bp, Probe Sequence
caaagtgctgggattataggtatga

SEQ ID NO: 83231 - DNA, 25 bp, Probe Sequence
agtacatagctcaatgcctggaata

SEQ ID NO: 83232 - DNA, 25 bp, Probe Sequence
aagtgctgggattataggtatgagt

SEQ ID NO: 83233 - DNA, 25 bp, Probe Sequence
agctcaatgcctggaatattaatta

SEQ ID NO: 83234 - DNA, 25 bp, Probe Sequence
tagctcaatgcctggaatattaatt

SEQ ID NO: 83235 - DNA, 25 bp, Probe Sequence
tgactcaagcatatcctctattatt

SEQ ID NO: 83236 - DNA, 25 bp, Probe Sequence
attataggtatgagtcaccatgctc

SEQ ID NO: 83237 - DNA, 25 bp, Probe Sequence
gattataggtatgagtcaccatgct

SEQ ID NO: 83238 - DNA, 25 bp, Probe Sequence
ggattataggtatgagtcaccatgc

SEQ ID NO: 83239 - DNA, 25 bp, Probe Sequence
agtgctgggattataggtatgagtc

SEQ ID NO: 83240 - DNA, 25 bp, Probe Sequence
tgaatactcgtaacagatgagagac

SEQ ID NO: 83241 - DNA, 25 bp, Probe Sequence
ttgaatcctgcctgaatactcgtaa

SEQ ID NO: 83242 - DNA, 25 bp, Probe Sequence
cctgaatactcgtaacagatgagag

SEQ ID NO: 83243 - DNA, 25 bp, Probe Sequence
ctgaatactcgtaacagatgagaga

SEQ ID NO: 83244 - DNA, 25 bp, Probe Sequence
ttgactgctactgacttgttgaact

SEQ ID NO: 83245 - DNA, 25 bp, Probe Sequence
gaatcctgcctgaatactcgtaaca

SEQ ID NO: 83246 - DNA, 25 bp, Probe Sequence
tgaatcctgcctgaatactcgtaac

SEQ ID NO: 83247 - DNA, 25 bp, Probe Sequence
gcatagatttacgctgtcattagtc

SEQ ID NO: 83248 - DNA, 25 bp, Probe Sequence
gcctgaatactcgtaacagatgaga

SEQ ID NO: 83249 - DNA, 25 bp, Probe Sequence
tgactgctactgacttgttgaactg

SEQ ID NO: 83250 - DNA, 25 bp, Probe Sequence
gggtatgaaagatgagtgtctgtaa

SEQ ID NO: 83251 - DNA, 25 bp, Probe Sequence
tgcctgaatactcgtaacagatgag

SEQ ID NO: 83252 - DNA, 25 bp, Probe Sequence
ctgcctgaatactcgtaacagatga

SEQ ID NO: 83253 - DNA, 25 bp, Probe Sequence
catagatttacgctgtcattagtca

SEQ ID NO: 83254 - DNA, 25 bp, Probe Sequence
tatttgaatcctgcctgaatactcg

SEQ ID NO: 83255 - DNA, 25 bp, Probe Sequence
tgggtatgaaagatgagtgtctgta

SEQ ID NO: 83256 - DNA, 25 bp, Probe Sequence
aatcctgcctgaatactcgtaacag

SEQ ID NO: 83257 - DNA, 25 bp, Probe Sequence
atatttgaatcctgcctgaatactc

SEQ ID NO: 83258 - DNA, 25 bp, Probe Sequence
tttgactgctactgacttgttgaac

SEQ ID NO: 83259 - DNA, 25 bp, Probe Sequence
ggtatgaaagatgagtgtctgtaaa

SEQ ID NO: 83260 - DNA, 25 bp, Probe Sequence
gttgggtatgaaagatgagtgtctg

SEQ ID NO: 83261 - DNA, 25 bp, Probe Sequence
tttgaatcctgcctgaatactcgta

SEQ ID NO: 83262 - DNA, 25 bp, Probe Sequence
ctcttgggacgaaagtaattggttt

SEQ ID NO: 83263 - DNA, 25 bp, Probe Sequence
ttgggtatgaaagatgagtgtctgt

SEQ ID NO: 83264 - DNA, 25 bp, Probe Sequence
ttccttatctgagttgtaatagcct

SEQ ID NO: 83265 - DNA, 25 bp, Probe Sequence
gttccttatctgagttgtaatagcc

SEQ ID NO: 83266 - DNA, 25 bp, Probe Sequence
agagaatgttccttatctgagttgt

SEQ ID NO: 83267 - DNA, 25 bp, Probe Sequence
tgaagagaatgttccttatctgagt

SEQ ID NO: 83268 - DNA, 25 bp, Probe Sequence
tgttccttatctgagttgtaatagc

SEQ ID NO: 83269 - DNA, 25 bp, Probe Sequence
atctgagttgtaatagcctacttgt

SEQ ID NO: 83270 - DNA, 25 bp, Probe Sequence
ccttatctgagttgtaatagcctac

SEQ ID NO: 83271 - DNA, 25 bp, Probe Sequence
tccttatctgagttgtaatagccta

SEQ ID NO: 83272 - DNA, 25 bp, Probe Sequence
aagagaatgttccttatctgagttg

SEQ ID NO: 83273 - DNA, 25 bp, Probe Sequence
tctgagttgtaatagcctacttgta

SEQ ID NO: 83274 - DNA, 25 bp, Probe Sequence
gaagagaatgttccttatctgagtt

SEQ ID NO: 83275 - DNA, 25 bp, Probe Sequence
gttagaacacaatcaacctgtaagt

SEQ ID NO: 83276 - DNA, 25 bp, Probe Sequence
tacctatggaatgaagagaatgttc

SEQ ID NO: 83277 - DNA, 25 bp, Probe Sequence
gagaatgttccttatctgagttgta

SEQ ID NO: 83278 - DNA, 25 bp, Probe Sequence
atgaagagaatgttccttatctgag

SEQ ID NO: 83279 - DNA, 25 bp, Probe Sequence
ctgagttgtaatagcctacttgtag

SEQ ID NO: 83280 - DNA, 25 bp, Probe Sequence
agaacacaatcaacctgtaagtatt

SEQ ID NO: 83281 - DNA, 25 bp, Probe Sequence
atacctatggaatgaagagaatgtt

SEQ ID NO: 83282 - DNA, 25 bp, Probe Sequence
tgttagaacacaatcaacctgtaag

SEQ ID NO: 83283 - DNA, 25 bp, Probe Sequence
aatgaagagaatgttccttatctga

SEQ ID NO: 83284 - DNA, 25 bp, Probe Sequence
agaatgttccttatctgagttgtaa

SEQ ID NO: 83285 - DNA, 25 bp, Probe Sequence
cggttatacctatggaatgaagaga

SEQ ID NO: 83286 - DNA, 25 bp, Probe Sequence
gaatgaagagaatgttccttatctg

SEQ ID NO: 83287 - DNA, 25 bp, Probe Sequence
tatctgagttgtaatagcctacttg

SEQ ID NO: 83288 - DNA, 25 bp, Probe Sequence
ctgaagtggatagaagctacaagta

SEQ ID NO: 83289 - DNA, 25 bp, Probe Sequence
agtggatagaagctacaagtaacaa

SEQ ID NO: 83290 - DNA, 25 bp, Probe Sequence
aagtggatagaagctacaagtaaca

SEQ ID NO: 83291 - DNA, 25 bp, Probe Sequence
tgaagtggatagaagctacaagtaa

SEQ ID NO: 83292 - DNA, 25 bp, Probe Sequence
gaagtggatagaagctacaagtaac

SEQ ID NO: 83293 - DNA, 25 bp, Probe Sequence
agaagctacaagtaacaatcagtct

SEQ ID NO: 83294 - DNA, 25 bp, Probe Sequence
gtggatagaagctacaagtaacaat

SEQ ID NO: 83295 - DNA, 25 bp, Probe Sequence
gaagctacaagtaacaatcagtcta

SEQ ID NO: 83296 - DNA, 25 bp, Probe Sequence
tagaagctacaagtaacaatcagtc

SEQ ID NO: 83297 - DNA, 25 bp, Probe Sequence
cttgttcacagcatgtatctgactt

SEQ ID NO: 83298 - DNA, 25 bp, Probe Sequence
aaggaaactttgggcttatgtaaac

SEQ ID NO: 83299 - DNA, 25 bp, Probe Sequence
ggatagaagctacaagtaacaatca

SEQ ID NO: 83300 - DNA, 25 bp, Probe Sequence
tggatagaagctacaagtaacaatc

SEQ ID NO: 83301 - DNA, 25 bp, Probe Sequence
cagcatgtatctgacttgaaggaag

SEQ ID NO: 83302 - DNA, 25 bp, Probe Sequence
ttgttcacagcatgtatctgacttg

SEQ ID NO: 83303 - DNA, 25 bp, Probe Sequence
aggaaactttgggcttatgtaaaca

SEQ ID NO: 83304 - DNA, 25 bp, Probe Sequence
gaaatgaggctgaagtggatagaag

SEQ ID NO: 83305 - DNA, 25 bp, Probe Sequence
ggaaactttgggcttatgtaaacaa

SEQ ID NO: 83306 - DNA, 25 bp, Probe Sequence
aaattcaaagcagtcttagtcagag

SEQ ID NO: 83307 - DNA, 25 bp, Probe Sequence
aattcaaagcagtcttagtcagagg

SEQ ID NO: 83308 - DNA, 25 bp, Probe Sequence
aagctacaagtaacaatcagtctaa

SEQ ID NO: 83309 - DNA, 25 bp, Probe Sequence
acagcatgtatctgacttgaaggaa

SEQ ID NO: 83310 - DNA, 25 bp, Probe Sequence
tataatgaggtagggcaacaactgt

SEQ ID NO: 83311 - DNA, 25 bp, Probe Sequence
tggaagtcaatgaatggtactataa

SEQ ID NO: 83312 - DNA, 25 bp, Probe Sequence
ctaagttctggctcttctttctttg

SEQ ID NO: 83313 - DNA, 25 bp, Probe Sequence
tctaagttctggctcttctttcttt

SEQ ID NO: 83314 - DNA, 25 bp, Probe Sequence
gtctaagttctggctcttctttctt

SEQ ID NO: 83315 - DNA, 25 bp, Probe Sequence
taagttctggctcttctttctttgg

SEQ ID NO: 83316 - DNA, 25 bp, Probe Sequence
cgtctaagttctggctcttctttct

SEQ ID NO: 83317 - DNA, 25 bp, Probe Sequence
gtcatttgtcttgggtgtcctatcc

SEQ ID NO: 83318 - DNA, 25 bp, Probe Sequence
ggtcatttgtcttgggtgtcctatc

SEQ ID NO: 83319 - DNA, 25 bp, Probe Sequence
aagttctggctcttctttctttggg

SEQ ID NO: 83320 - DNA, 25 bp, Probe Sequence
tcttctttctttggggttctctgta

SEQ ID NO: 83321 - DNA, 25 bp, Probe Sequence
gcgtctaagttctggctcttctttc

SEQ ID NO: 83322 - DNA, 25 bp, Probe Sequence
cttctttctttggggttctctgtac

SEQ ID NO: 83323 - DNA, 25 bp, Probe Sequence
ctcttctttctttggggttctctgt

SEQ ID NO: 83324 - DNA, 25 bp, Probe Sequence
gggtcatttgtcttgggtgtcctat

SEQ ID NO: 83325 - DNA, 25 bp, Probe Sequence
atatggagaagaaaggggcgtctaa

SEQ ID NO: 83326 - DNA, 25 bp, Probe Sequence
ggcgtctaagttctggctcttcttt

SEQ ID NO: 83327 - DNA, 25 bp, Probe Sequence
gctcttctttctttggggttctctg

SEQ ID NO: 83328 - DNA, 25 bp, Probe Sequence
ttctttctttggggttctctgtacc

SEQ ID NO: 83329 - DNA, 25 bp, Probe Sequence
tatggagaagaaaggggcgtctaag

SEQ ID NO: 83330 - DNA, 25 bp, Probe Sequence
ctttctttggggttctctgtacctg

SEQ ID NO: 83331 - DNA, 25 bp, Probe Sequence
tcatttgtcttgggtgtcctatccc

SEQ ID NO: 83332 - DNA, 25 bp, Probe Sequence
tctttctttggggttctctgtacct

SEQ ID NO: 83333 - DNA, 25 bp, Probe Sequence
ttctggctcttctttctttggggtt

SEQ ID NO: 83334 - DNA, 25 bp, Probe Sequence
tttctttggggttctctgtacctga

SEQ ID NO: 83335 - DNA, 25 bp, Probe Sequence
ggctcttctttctttggggttctct

SEQ ID NO: 83336 - DNA, 25 bp, Probe Sequence
atagagagagagagagagagagagt

SEQ ID NO: 83337 - DNA, 25 bp, Probe Sequence
tatagagagagagagagagagagag

SEQ ID NO: 83338 - DNA, 25 bp, Probe Sequence
agagagagagagagagagagagtta

SEQ ID NO: 83339 - DNA, 25 bp, Probe Sequence
tagagagagagagagagagagagtt

SEQ ID NO: 83340 - DNA, 25 bp, Probe Sequence
gagagagagagagagagagttatca

SEQ ID NO: 83341 - DNA, 25 bp, Probe Sequence
atatagagagagagagagagagaga

SEQ ID NO: 83342 - DNA, 25 bp, Probe Sequence
agagagagagagagagagagttatc

SEQ ID NO: 83343 - DNA, 25 bp, Probe Sequence
gagagagagagagagagagagttat

SEQ ID NO: 83344 - DNA, 25 bp, Probe Sequence
agagagagagagagagagttatcaa

SEQ ID NO: 83345 - DNA, 25 bp, Probe Sequence
tacataaggagacaagatgagaagc

SEQ ID NO: 83346 - DNA, 25 bp, Probe Sequence
aagatgagaagctgaatgtaggatt

SEQ ID NO: 83347 - DNA, 25 bp, Probe Sequence
caagatgagaagctgaatgtaggat

SEQ ID NO: 83348 - DNA, 25 bp, Probe Sequence
atacataaggagacaagatgagaag

SEQ ID NO: 83349 - DNA, 25 bp, Probe Sequence
ataaggagacaagatgagaagctga

SEQ ID NO: 83350 - DNA, 25 bp, Probe Sequence
taaggagacaagatgagaagctgaa

SEQ ID NO: 83351 - DNA, 25 bp, Probe Sequence
cataaggagacaagatgagaagctg

SEQ ID NO: 83352 - DNA, 25 bp, Probe Sequence
acataaggagacaagatgagaagct

SEQ ID NO: 83353 - DNA, 25 bp, Probe Sequence
agacaagatgagaagctgaatgtag

SEQ ID NO: 83354 - DNA, 25 bp, Probe Sequence
gagacaagatgagaagctgaatgta

SEQ ID NO: 83355 - DNA, 25 bp, Probe Sequence
aaggagacaagatgagaagctgaat

SEQ ID NO: 83356 - DNA, 25 bp, Probe Sequence
gagagagagagagagagttatcaaa

SEQ ID NO: 83357 - DNA, 25 bp, Probe Sequence
tatatagagagagagagagagagag

SEQ ID NO: 83358 - DNA, 25 bp, Probe Sequence
gacaagatgagaagctgaatgtagg

SEQ ID NO: 83359 - DNA, 25 bp, Probe Sequence
ccgattcataatttggaagtgacaa

SEQ ID NO: 83360 - DNA, 25 bp, Probe Sequence
tcttcatcttcattgttagtcctca

SEQ ID NO: 83361 - DNA, 25 bp, Probe Sequence
tctcttcatcttcattgttagtcct

SEQ ID NO: 83362 - DNA, 25 bp, Probe Sequence
ctcttcatcttcattgttagtcctc

SEQ ID NO: 83363 - DNA, 25 bp, Probe Sequence
ttctcttcatcttcattgttagtcc

SEQ ID NO: 83364 - DNA, 25 bp, Probe Sequence
tcatcttcattgttagtcctcaact

SEQ ID NO: 83365 - DNA, 25 bp, Probe Sequence
ttcatcttcattgttagtcctcaac

SEQ ID NO: 83366 - DNA, 25 bp, Probe Sequence
tccttctatccatctactcattcat

SEQ ID NO: 83367 - DNA, 25 bp, Probe Sequence
atccttctatccatctactcattca

SEQ ID NO: 83368 - DNA, 25 bp, Probe Sequence
tcatccttctatccatctactcatt

SEQ ID NO: 83369 - DNA, 25 bp, Probe Sequence
ttcatccttctatccatctactcat

SEQ ID NO: 83370 - DNA, 25 bp, Probe Sequence
attcatccttctatccatctactca

SEQ ID NO: 83371 - DNA, 25 bp, Probe Sequence
cttcatcttcattgttagtcctcaa

SEQ ID NO: 83372 - DNA, 25 bp, Probe Sequence
catcttcattgttagtcctcaactt

SEQ ID NO: 83373 - DNA, 25 bp, Probe Sequence
catccttctatccatctactcattc

SEQ ID NO: 83374 - DNA, 25 bp, Probe Sequence
ccttctatccatctactcattcatt

SEQ ID NO: 83375 - DNA, 25 bp, Probe Sequence
atacagaacatgatcctactgaggt

SEQ ID NO: 83376 - DNA, 25 bp, Probe Sequence
tacagaacatgatcctactgaggtc

SEQ ID NO: 83377 - DNA, 25 bp, Probe Sequence
tatacagaacatgatcctactgagg

SEQ ID NO: 83378 - DNA, 25 bp, Probe Sequence
tccaagagtgatctaagctcagtaa

SEQ ID NO: 83379 - DNA, 25 bp, Probe Sequence
aaagccctatgaacgagtgaaatta

SEQ ID NO: 83380 - DNA, 25 bp, Probe Sequence
taaagccctatgaacgagtgaaatt

SEQ ID NO: 83381 - DNA, 25 bp, Probe Sequence
ttctatccatctactcattcattca

SEQ ID NO: 83382 - DNA, 25 bp, Probe Sequence
gtaaagccctatgaacgagtgaaat

SEQ ID NO: 83383 - DNA, 25 bp, Probe Sequence
ttacacacagttacaaacaggattc

SEQ ID NO: 83384 - DNA, 25 bp, Probe Sequence
catctctgtaatcctagttccttgg

SEQ ID NO: 83385 - DNA, 25 bp, Probe Sequence
tcatctctgtaatcctagttccttg

SEQ ID NO: 83386 - DNA, 25 bp, Probe Sequence
ctcatctctgtaatcctagttcctt

SEQ ID NO: 83387 - DNA, 25 bp, Probe Sequence
gctcatctctgtaatcctagttcct

SEQ ID NO: 83388 - DNA, 25 bp, Probe Sequence
agctcatctctgtaatcctagttcc

SEQ ID NO: 83389 - DNA, 25 bp, Probe Sequence
tacgttagatccagaattatgccag

SEQ ID NO: 83390 - DNA, 25 bp, Probe Sequence
ctacgttagatccagaattatgcca

SEQ ID NO: 83391 - DNA, 25 bp, Probe Sequence
ggatggtatatggtggatttgactt

SEQ ID NO: 83392 - DNA, 25 bp, Probe Sequence
cagctcatctctgtaatcctagttc

SEQ ID NO: 83393 - DNA, 25 bp, Probe Sequence
gatggtatatggtggatttgacttt

SEQ ID NO: 83394 - DNA, 25 bp, Probe Sequence
tggatggtatatggtggatttgact

SEQ ID NO: 83395 - DNA, 25 bp, Probe Sequence
gtggatggtatatggtggatttgac

SEQ ID NO: 83396 - DNA, 25 bp, Probe Sequence
agtggatggtatatggtggatttga

SEQ ID NO: 83397 - DNA, 25 bp, Probe Sequence
cagtggatggtatatggtggatttg

SEQ ID NO: 83398 - DNA, 25 bp, Probe Sequence
atctctgtaatcctagttccttggg

SEQ ID NO: 83399 - DNA, 25 bp, Probe Sequence
tttgtcttctgtattctccaacttt

SEQ ID NO: 83400 - DNA, 25 bp, Probe Sequence
aagaattagtctacggcattgctcc

SEQ ID NO: 83401 - DNA, 25 bp, Probe Sequence
tctacgttagatccagaattatgcc

SEQ ID NO: 83402 - DNA, 25 bp, Probe Sequence
gcagctcatctctgtaatcctagtt

SEQ ID NO: 83403 - DNA, 25 bp, Probe Sequence
aaagaattagtctacggcattgctc

SEQ ID NO: 83404 - DNA, 25 bp, Probe Sequence
acgttagatccagaattatgccagg

SEQ ID NO: 83405 - DNA, 25 bp, Probe Sequence
ctctacgttagatccagaattatgc

SEQ ID NO: 83406 - DNA, 25 bp, Probe Sequence
cagcagctcatctctgtaatcctag

SEQ ID NO: 83407 - DNA, 25 bp, Probe Sequence
gaattagtctacggcattgctccag

SEQ ID NO: 83408 - DNA, 25 bp, Probe Sequence
ttgagttcttgatgtaccagcatat

SEQ ID NO: 83409 - DNA, 25 bp, Probe Sequence
ttcagttcagttcattatccatctt

SEQ ID NO: 83410 - DNA, 25 bp, Probe Sequence
gagttcttgatgtaccagcatatct

SEQ ID NO: 83411 - DNA, 25 bp, Probe Sequence
tgagttcttgatgtaccagcatatc

SEQ ID NO: 83412 - DNA, 25 bp, Probe Sequence
agttcttgatgtaccagcatatcta

SEQ ID NO: 83413 - DNA, 25 bp, Probe Sequence
gttcttgatgtaccagcatatctaa

SEQ ID NO: 83414 - DNA, 25 bp, Probe Sequence
ttgtgataacagtggagagttacag

SEQ ID NO: 83415 - DNA, 25 bp, Probe Sequence
caccagaacctcatatctcacacaa

SEQ ID NO: 83416 - DNA, 25 bp, Probe Sequence
gacagtcaccagaacctcatatctc

SEQ ID NO: 83417 - DNA, 25 bp, Probe Sequence
tataagcacatccatgtcagtacac

SEQ ID NO: 83418 - DNA, 25 bp, Probe Sequence
atataagcacatccatgtcagtaca

SEQ ID NO: 83419 - DNA, 25 bp, Probe Sequence
ccatatataagcacatccatgtcag

SEQ ID NO: 83420 - DNA, 25 bp, Probe Sequence
gccatatataagcacatccatgtca

SEQ ID NO: 83421 - DNA, 25 bp, Probe Sequence
cagtcaccagaacctcatatctcac

SEQ ID NO: 83422 - DNA, 25 bp, Probe Sequence
ttatccatctttccttctctgttcc

SEQ ID NO: 83423 - DNA, 25 bp, Probe Sequence
gtaatcccacttgaaataacccttg

SEQ ID NO: 83424 - DNA, 25 bp, Probe Sequence
gtcaccagaacctcatatctcacac

SEQ ID NO: 83425 - DNA, 25 bp, Probe Sequence
ttcccttgtattgccttgtcattta

SEQ ID NO: 83426 - DNA, 25 bp, Probe Sequence
ataacagtggagagttacaggacag

SEQ ID NO: 83427 - DNA, 25 bp, Probe Sequence
gataacagtggagagttacaggaca

SEQ ID NO: 83428 - DNA, 25 bp, Probe Sequence
tgataacagtggagagttacaggac

SEQ ID NO: 83429 - DNA, 25 bp, Probe Sequence
gtgataacagtggagagttacagga

SEQ ID NO: 83430 - DNA, 25 bp, Probe Sequence
ccttgtattgccttgtcatttaact

SEQ ID NO: 83431 - DNA, 25 bp, Probe Sequence
tattgccttgtcatttaactctgtg

SEQ ID NO: 83432 - DNA, 25 bp, Probe Sequence
aatatcaccagtcctactcacttca

SEQ ID NO: 83433 - DNA, 25 bp, Probe Sequence
atatcaccagtcctactcacttcac

SEQ ID NO: 83434 - DNA, 25 bp, Probe Sequence
tatcaccagtcctactcacttcaca

SEQ ID NO: 83435 - DNA, 25 bp, Probe Sequence
atctgccatcacttagcttactaac

SEQ ID NO: 83436 - DNA, 25 bp, Probe Sequence
catctgccatcacttagcttactaa

SEQ ID NO: 83437 - DNA, 25 bp, Probe Sequence
ccatctgccatcacttagcttacta

SEQ ID NO: 83438 - DNA, 25 bp, Probe Sequence
aaatatcaccagtcctactcacttc

SEQ ID NO: 83439 - DNA, 25 bp, Probe Sequence
ctactcacttcacaagaccgtcaag

SEQ ID NO: 83440 - DNA, 25 bp, Probe Sequence
ctgccatcacttagcttactaactg

SEQ ID NO: 83441 - DNA, 25 bp, Probe Sequence
tctgccatcacttagcttactaact

SEQ ID NO: 83442 - DNA, 25 bp, Probe Sequence
atgggacactattagttgaaagcat

SEQ ID NO: 83443 - DNA, 25 bp, Probe Sequence
tgggacactattagttgaaagcatt

SEQ ID NO: 83444 - DNA, 25 bp, Probe Sequence
aatgggacactattagttgaaagca

SEQ ID NO: 83445 - DNA, 25 bp, Probe Sequence
gggacactattagttgaaagcattt

SEQ ID NO: 83446 - DNA, 25 bp, Probe Sequence
aaatgggacactattagttgaaagc

SEQ ID NO: 83447 - DNA, 25 bp, Probe Sequence
atcaccagtcctactcacttcacaa

SEQ ID NO: 83448 - DNA, 25 bp, Probe Sequence
tactcacttcacaagaccgtcaaga

SEQ ID NO: 83449 - DNA, 25 bp, Probe Sequence
agatcaaatgggacactattagttg

SEQ ID NO: 83450 - DNA, 25 bp, Probe Sequence
cagatcaaatgggacactattagtt

SEQ ID NO: 83451 - DNA, 25 bp, Probe Sequence
caaatgggacactattagttgaaag

SEQ ID NO: 83452 - DNA, 25 bp, Probe Sequence
caccagtcctactcacttcacaaga

SEQ ID NO: 83453 - DNA, 25 bp, Probe Sequence
tcaccagtcctactcacttcacaag

SEQ ID NO: 83454 - DNA, 25 bp, Probe Sequence
ccagatcaaatgggacactattagt

SEQ ID NO: 83455 - DNA, 25 bp, Probe Sequence
accagatcaaatgggacactattag

SEQ ID NO: 83456 - DNA, 25 bp, Probe Sequence
tcagaagggatacaattagatgtgc

SEQ ID NO: 83457 - DNA, 25 bp, Probe Sequence
atcagaagggatacaattagatgtg

SEQ ID NO: 83458 - DNA, 25 bp, Probe Sequence
catttacagaacagaactcctgctg

SEQ ID NO: 83459 - DNA, 25 bp, Probe Sequence
gtggaaagagggaagagattggaag

SEQ ID NO: 83460 - DNA, 25 bp, Probe Sequence
gagtgtggaaagagggaagagattg

SEQ ID NO: 83461 - DNA, 25 bp, Probe Sequence
aatcagaagggatacaattagatgt

SEQ ID NO: 83462 - DNA, 25 bp, Probe Sequence
agaagggatacaattagatgtgcat

SEQ ID NO: 83463 - DNA, 25 bp, Probe Sequence
gatgtgcatttacagaacagaactc

SEQ ID NO: 83464 - DNA, 25 bp, Probe Sequence
tagatgtgcatttacagaacagaac

SEQ ID NO: 83465 - DNA, 25 bp, Probe Sequence
cagaagggatacaattagatgtgca

SEQ ID NO: 83466 - DNA, 25 bp, Probe Sequence
agatgtgcatttacagaacagaact

SEQ ID NO: 83467 - DNA, 25 bp, Probe Sequence
tgtggaaagagggaagagattggaa

SEQ ID NO: 83468 - DNA, 25 bp, Probe Sequence
aacagcagggaaggtttagactttg

SEQ ID NO: 83469 - DNA, 25 bp, Probe Sequence
gaagggatacaattagatgtgcatt

SEQ ID NO: 83470 - DNA, 25 bp, Probe Sequence
atttacagaacagaactcctgctgg

SEQ ID NO: 83471 - DNA, 25 bp, Probe Sequence
atggagcataagcaaaggatctcag

SEQ ID NO: 83472 - DNA, 25 bp, Probe Sequence
ttagatgtgcatttacagaacagaa

SEQ ID NO: 83473 - DNA, 25 bp, Probe Sequence
aagggatacaattagatgtgcattt

SEQ ID NO: 83474 - DNA, 25 bp, Probe Sequence
aaatcagaagggatacaattagatg

SEQ ID NO: 83475 - DNA, 25 bp, Probe Sequence
tttatcttttaagccaccagagagg

SEQ ID NO: 83476 - DNA, 25 bp, Probe Sequence
atgtgcatttacagaacagaactcc

SEQ ID NO: 83477 - DNA, 25 bp, Probe Sequence
attagatgtgcatttacagaacaga

SEQ ID NO: 83478 - DNA, 25 bp, Probe Sequence
ctttatcttttaagccaccagagag

SEQ ID NO: 83479 - DNA, 25 bp, Probe Sequence
ggagagtgagagaggcaagaaattt

SEQ ID NO: 83480 - DNA, 25 bp, Probe Sequence
attgcctgaatgtctgaataatgaa

SEQ ID NO: 83481 - DNA, 25 bp, Probe Sequence
ttctgtcaacactaatgaagtcaac

SEQ ID NO: 83482 - DNA, 25 bp, Probe Sequence
tctgtcaacactaatgaagtcaaca

SEQ ID NO: 83483 - DNA, 25 bp, Probe Sequence
ctgtcaacactaatgaagtcaacat

SEQ ID NO: 83484 - DNA, 25 bp, Probe Sequence
gtaatgcaggtatgttcaggttaag

SEQ ID NO: 83485 - DNA, 25 bp, Probe Sequence
aataggtaatgcaggtatgttcagg

SEQ ID NO: 83486 - DNA, 25 bp, Probe Sequence
tgcctgaatgtctgaataatgaaac

SEQ ID NO: 83487 - DNA, 25 bp, Probe Sequence
ggtaatgcaggtatgttcaggttaa

SEQ ID NO: 83488 - DNA, 25 bp, Probe Sequence
tggtcaataataggtaatgcaggta

SEQ ID NO: 83489 - DNA, 25 bp, Probe Sequence
ttgcctgaatgtctgaataatgaaa

SEQ ID NO: 83490 - DNA, 25 bp, Probe Sequence
gtctgaataatgaaacacatccctg

SEQ ID NO: 83491 - DNA, 25 bp, Probe Sequence
taatgcaggtatgttcaggttaagc

SEQ ID NO: 83492 - DNA, 25 bp, Probe Sequence
taatgaagtcaacattgcctgaatg

SEQ ID NO: 83493 - DNA, 25 bp, Probe Sequence
ctaatgaagtcaacattgcctgaat

SEQ ID NO: 83494 - DNA, 25 bp, Probe Sequence
cattgcctgaatgtctgaataatga

SEQ ID NO: 83495 - DNA, 25 bp, Probe Sequence
tcaacactaatgaagtcaacattgc

SEQ ID NO: 83496 - DNA, 25 bp, Probe Sequence
ataggtaatgcaggtatgttcaggt

SEQ ID NO: 83497 - DNA, 25 bp, Probe Sequence
aggtaatgcaggtatgttcaggtta

SEQ ID NO: 83498 - DNA, 25 bp, Probe Sequence
taggtaatgcaggtatgttcaggtt

SEQ ID NO: 83499 - DNA, 25 bp, Probe Sequence
actaatgaagtcaacattgcctgaa

SEQ ID NO: 83500 - DNA, 25 bp, Probe Sequence
tgtcaacactaatgaagtcaacatt

SEQ ID NO: 83501 - DNA, 25 bp, Probe Sequence
aacactaatgaagtcaacattgcct

SEQ ID NO: 83502 - DNA, 25 bp, Probe Sequence
caacactaatgaagtcaacattgcc

SEQ ID NO: 83503 - DNA, 25 bp, Probe Sequence
gtcaacactaatgaagtcaacattg

SEQ ID NO: 83504 - DNA, 25 bp, Probe Sequence
gctgtgtgtataaggtgtatgtgaa

SEQ ID NO: 83505 - DNA, 25 bp, Probe Sequence
ctgtagtgactgttgctcttctatc

SEQ ID NO: 83506 - DNA, 25 bp, Probe Sequence
aattaccttcaggctgtgtgtataa

SEQ ID NO: 83507 - DNA, 25 bp, Probe Sequence
attaccttcaggctgtgtgtataag

SEQ ID NO: 83508 - DNA, 25 bp, Probe Sequence
ttcaggctgtgtgtataaggtgtat

SEQ ID NO: 83509 - DNA, 25 bp, Probe Sequence
ctagatccttatggctgtagtgact

SEQ ID NO: 83510 - DNA, 25 bp, Probe Sequence
tgtagtgactgttgctcttctatca

SEQ ID NO: 83511 - DNA, 25 bp, Probe Sequence
tagatccttatggctgtagtgactg

SEQ ID NO: 83512 - DNA, 25 bp, Probe Sequence
acatagaacaacatgacaagatgga

SEQ ID NO: 83513 - DNA, 25 bp, Probe Sequence
cacatagaacaacatgacaagatgg

SEQ ID NO: 83514 - DNA, 25 bp, Probe Sequence
gctacacatagaacaacatgacaag

SEQ ID NO: 83515 - DNA, 25 bp, Probe Sequence
acacatagaacaacatgacaagatg

SEQ ID NO: 83516 - DNA, 25 bp, Probe Sequence
tagtgactgttgctcttctatcaga

SEQ ID NO: 83517 - DNA, 25 bp, Probe Sequence
gtagtgactgttgctcttctatcag

SEQ ID NO: 83518 - DNA, 25 bp, Probe Sequence
catagaacaacatgacaagatggat

SEQ ID NO: 83519 - DNA, 25 bp, Probe Sequence
ggctgtgtgtataaggtgtatgtga

SEQ ID NO: 83520 - DNA, 25 bp, Probe Sequence
aggctgtgtgtataaggtgtatgtg

SEQ ID NO: 83521 - DNA, 25 bp, Probe Sequence
tcaggctgtgtgtataaggtgtatg

SEQ ID NO: 83522 - DNA, 25 bp, Probe Sequence
ctacacatagaacaacatgacaaga

SEQ ID NO: 83523 - DNA, 25 bp, Probe Sequence
cttcaggctgtgtgtataaggtgta

SEQ ID NO: 83524 - DNA, 25 bp, Probe Sequence
agaacaacatgacaagatggattaa

SEQ ID NO: 83525 - DNA, 25 bp, Probe Sequence
gctgtagtgactgttgctcttctat

SEQ ID NO: 83526 - DNA, 25 bp, Probe Sequence
atccttatggctgtagtgactgttg

SEQ ID NO: 83527 - DNA, 25 bp, Probe Sequence
caggctgtgtgtataaggtgtatgt

SEQ ID NO: 83528 - DNA, 25 bp, Probe Sequence
ggattacatctccaagtggctcaaa

SEQ ID NO: 83529 - DNA, 25 bp, Probe Sequence
gattacatctccaagtggctcaaaa

SEQ ID NO: 83530 - DNA, 25 bp, Probe Sequence
gggattacatctccaagtggctcaa

SEQ ID NO: 83531 - DNA, 25 bp, Probe Sequence
aatggataactagaataaccgatgc

SEQ ID NO: 83532 - DNA, 25 bp, Probe Sequence
ggataactagaataaccgatgcaga

SEQ ID NO: 83533 - DNA, 25 bp, Probe Sequence
tggataactagaataaccgatgcag

SEQ ID NO: 83534 - DNA, 25 bp, Probe Sequence
atggataactagaataaccgatgca

SEQ ID NO: 83535 - DNA, 25 bp, Probe Sequence
aactagaataaccgatgcagagaag

SEQ ID NO: 83536 - DNA, 25 bp, Probe Sequence
gcgatggaagatgaaatgaatgaaa

SEQ ID NO: 83537 - DNA, 25 bp, Probe Sequence
taactagaataaccgatgcagagaa

SEQ ID NO: 83538 - DNA, 25 bp, Probe Sequence
ctagaataaccgatgcagagaagtc

SEQ ID NO: 83539 - DNA, 25 bp, Probe Sequence
caatcaactggaagaaagggtatca

SEQ ID NO: 83540 - DNA, 25 bp, Probe Sequence
tgaatggataactagaataaccgat

SEQ ID NO: 83541 - DNA, 25 bp, Probe Sequence
atgaatggataactagaataaccga

SEQ ID NO: 83542 - DNA, 25 bp, Probe Sequence
ataactagaataaccgatgcagaga

SEQ ID NO: 83543 - DNA, 25 bp, Probe Sequence
gataactagaataaccgatgcagag

SEQ ID NO: 83544 - DNA, 25 bp, Probe Sequence
agcgatggaagatgaaatgaatgaa

SEQ ID NO: 83545 - DNA, 25 bp, Probe Sequence
gaatggataactagaataaccgatg

SEQ ID NO: 83546 - DNA, 25 bp, Probe Sequence
gatgaatggataactagaataaccg

SEQ ID NO: 83547 - DNA, 25 bp, Probe Sequence
ataaccgatgcagagaagtccttaa

SEQ ID NO: 83548 - DNA, 25 bp, Probe Sequence
aataaccgatgcagagaagtcctta

SEQ ID NO: 83549 - DNA, 25 bp, Probe Sequence
tatcagcgatggaagatgaaatgaa

SEQ ID NO: 83550 - DNA, 25 bp, Probe Sequence
cgatggaagatgaaatgaatgaaat

SEQ ID NO: 83551 - DNA, 25 bp, Probe Sequence
cagcgatggaagatgaaatgaatga

SEQ ID NO: 83552 - DNA, 25 bp, Probe Sequence
atcagcgatggaagatgaaatgaat

SEQ ID NO: 83553 - DNA, 25 bp, Probe Sequence
gtatcagcgatggaagatgaaatga

SEQ ID NO: 83554 - DNA, 25 bp, Probe Sequence
actagaataaccgatgcagagaagt

SEQ ID NO: 83555 - DNA, 25 bp, Probe Sequence
tgatgctcatcttctcaacctctag

SEQ ID NO: 83556 - DNA, 25 bp, Probe Sequence
ctgatgctcatcttctcaacctcta

SEQ ID NO: 83557 - DNA, 25 bp, Probe Sequence
tgagcctatgaaactatctggagag

SEQ ID NO: 83558 - DNA, 25 bp, Probe Sequence
gtgagcctatgaaactatctggaga

SEQ ID NO: 83559 - DNA, 25 bp, Probe Sequence
gcatttgtgttgagggaagataaat

SEQ ID NO: 83560 - DNA, 25 bp, Probe Sequence
ggtgagcctatgaaactatctggag

SEQ ID NO: 83561 - DNA, 25 bp, Probe Sequence
tccactgtgacttctaatttgtgta

SEQ ID NO: 83562 - DNA, 25 bp, Probe Sequence
ctgtccactgtgacttctaatttgt

SEQ ID NO: 83563 - DNA, 25 bp, Probe Sequence
ccactgtgacttctaatttgtgtaa

SEQ ID NO: 83564 - DNA, 25 bp, Probe Sequence
ggaccagacacagtaggacatctag

SEQ ID NO: 83565 - DNA, 25 bp, Probe Sequence
ctggtgagcctatgaaactatctgg

SEQ ID NO: 83566 - DNA, 25 bp, Probe Sequence
cctggtgagcctatgaaactatctg

SEQ ID NO: 83567 - DNA, 25 bp, Probe Sequence
tgtgttgagggaagataaatccttt

SEQ ID NO: 83568 - DNA, 25 bp, Probe Sequence
ttgtgttgagggaagataaatcctt

SEQ ID NO: 83569 - DNA, 25 bp, Probe Sequence
tttgtgttgagggaagataaatcct

SEQ ID NO: 83570 - DNA, 25 bp, Probe Sequence
gacacagtaggacatctagctttaa

SEQ ID NO: 83571 - DNA, 25 bp, Probe Sequence
tgttgagggaagataaatcctttct

SEQ ID NO: 83572 - DNA, 25 bp, Probe Sequence
gtgttgagggaagataaatcctttc

SEQ ID NO: 83573 - DNA, 25 bp, Probe Sequence
catttgtgttgagggaagataaatc

SEQ ID NO: 83574 - DNA, 25 bp, Probe Sequence
gttgagggaagataaatcctttctg

SEQ ID NO: 83575 - DNA, 25 bp, Probe Sequence
acacagtaggacatctagctttaaa

SEQ ID NO: 83576 - DNA, 25 bp, Probe Sequence
ttgagggaagataaatcctttctga

SEQ ID NO: 83577 - DNA, 25 bp, Probe Sequence
atttgtgttgagggaagataaatcc

SEQ ID NO: 83578 - DNA, 25 bp, Probe Sequence
gtccactgtgacttctaatttgtgt

SEQ ID NO: 83579 - DNA, 25 bp, Probe Sequence
gaagaagattcatacgcctctactg

SEQ ID NO: 83580 - DNA, 25 bp, Probe Sequence
gattcatacgcctctactgatacat

SEQ ID NO: 83581 - DNA, 25 bp, Probe Sequence
aagattcatacgcctctactgatac

SEQ ID NO: 83582 - DNA, 25 bp, Probe Sequence
atagagcctacctgtatgtcaataa

SEQ ID NO: 83583 - DNA, 25 bp, Probe Sequence
gaagattcatacgcctctactgata

SEQ ID NO: 83584 - DNA, 25 bp, Probe Sequence
agattcatacgcctctactgataca

SEQ ID NO: 83585 - DNA, 25 bp, Probe Sequence
agaagattcatacgcctctactgat

SEQ ID NO: 83586 - DNA, 25 bp, Probe Sequence
aagaagattcatacgcctctactga

SEQ ID NO: 83587 - DNA, 25 bp, Probe Sequence
ggaagaagattcatacgcctctact

SEQ ID NO: 83588 - DNA, 25 bp, Probe Sequence
tatagagcctacctgtatgtcaata

SEQ ID NO: 83589 - DNA, 25 bp, Probe Sequence
attcatacgcctctactgatacatg

SEQ ID NO: 83590 - DNA, 25 bp, Probe Sequence
agagcctacctgtatgtcaataaac

SEQ ID NO: 83591 - DNA, 25 bp, Probe Sequence
ctatagagcctacctgtatgtcaat

SEQ ID NO: 83592 - DNA, 25 bp, Probe Sequence
tagagcctacctgtatgtcaataaa

SEQ ID NO: 83593 - DNA, 25 bp, Probe Sequence
caatcaagggaagaaaggaggaatg

SEQ ID NO: 83594 - DNA, 25 bp, Probe Sequence
gcctacctgtatgtcaataaacaac

SEQ ID NO: 83595 - DNA, 25 bp, Probe Sequence
agcctacctgtatgtcaataaacaa

SEQ ID NO: 83596 - DNA, 25 bp, Probe Sequence
gagcctacctgtatgtcaataaaca

SEQ ID NO: 83597 - DNA, 25 bp, Probe Sequence
gtactctgtccagttcctttagaaa

SEQ ID NO: 83598 - DNA, 25 bp, Probe Sequence
cctacctgtatgtcaataaacaaca

SEQ ID NO: 83599 - DNA, 25 bp, Probe Sequence
tgtactctgtccagttcctttagaa

SEQ ID NO: 83600 - DNA, 25 bp, Probe Sequence
ccaatcaagggaagaaaggaggaat

SEQ ID NO: 83601 - DNA, 25 bp, Probe Sequence
cttacttgcttctctagctctctag

SEQ ID NO: 83602 - DNA, 25 bp, Probe Sequence
gtgtactctgtccagttcctttaga

SEQ ID NO: 83603 - DNA, 25 bp, Probe Sequence
gagcatagaagttcagaagtaatca

SEQ ID NO: 83604 - DNA, 25 bp, Probe Sequence
tgagcatagaagttcagaagtaatc

SEQ ID NO: 83605 - DNA, 25 bp, Probe Sequence
agcatagaagttcagaagtaatcat

SEQ ID NO: 83606 - DNA, 25 bp, Probe Sequence
gcatagaagttcagaagtaatcatc

SEQ ID NO: 83607 - DNA, 25 bp, Probe Sequence
gatatgagcatagaagttcagaagt

SEQ ID NO: 83608 - DNA, 25 bp, Probe Sequence
agatatgagcatagaagttcagaag

SEQ ID NO: 83609 - DNA, 25 bp, Probe Sequence
atgagcatagaagttcagaagtaat

SEQ ID NO: 83610 - DNA, 25 bp, Probe Sequence
agacactaagatatgagcatagaag

SEQ ID NO: 83611 - DNA, 25 bp, Probe Sequence
gacactaagatatgagcatagaagt

SEQ ID NO: 83612 - DNA, 25 bp, Probe Sequence
cgtagtagtcatcgctagtaccatg

SEQ ID NO: 83613 - DNA, 25 bp, Probe Sequence
aagatatgagcatagaagttcagaa

SEQ ID NO: 83614 - DNA, 25 bp, Probe Sequence
tatgagcatagaagttcagaagtaa

SEQ ID NO: 83615 - DNA, 25 bp, Probe Sequence
acactaagatatgagcatagaagtt

SEQ ID NO: 83616 - DNA, 25 bp, Probe Sequence
agaagtaatcatctgcaaccatgtg

SEQ ID NO: 83617 - DNA, 25 bp, Probe Sequence
gaagtaatcatctgcaaccatgtgt

SEQ ID NO: 83618 - DNA, 25 bp, Probe Sequence
atatgagcatagaagttcagaagta

SEQ ID NO: 83619 - DNA, 25 bp, Probe Sequence
actaagatatgagcatagaagttca

SEQ ID NO: 83620 - DNA, 25 bp, Probe Sequence
aagtaatcatctgcaaccatgtgtg

SEQ ID NO: 83621 - DNA, 25 bp, Probe Sequence
tctgcaaccatgtgtgtcctataat

SEQ ID NO: 83622 - DNA, 25 bp, Probe Sequence
atctgcaaccatgtgtgtcctataa

SEQ ID NO: 83623 - DNA, 25 bp, Probe Sequence
ctagacactaagatatgagcataga

SEQ ID NO: 83624 - DNA, 25 bp, Probe Sequence
ctgcaaccatgtgtgtcctataatg

SEQ ID NO: 83625 - DNA, 25 bp, Probe Sequence
cactaagatatgagcatagaagttc

SEQ ID NO: 83626 - DNA, 25 bp, Probe Sequence
caggcatgaatgattctagacacta

SEQ ID NO: 83627 - DNA, 25 bp, Probe Sequence
tgattatagaaggctgtcttagtgc

SEQ ID NO: 83628 - DNA, 25 bp, Probe Sequence
gaatctgagacatcttgcctacttg

SEQ ID NO: 83629 - DNA, 25 bp, Probe Sequence
agaatctgagacatcttgcctactt

SEQ ID NO: 83630 - DNA, 25 bp, Probe Sequence
gcattactctggtggattgttctag

SEQ ID NO: 83631 - DNA, 25 bp, Probe Sequence
cattactctggtggattgttctagt

SEQ ID NO: 83632 - DNA, 25 bp, Probe Sequence
gagaatctgagacatcttgcctact

SEQ ID NO: 83633 - DNA, 25 bp, Probe Sequence
agaagttgaactatgactggagtaa

SEQ ID NO: 83634 - DNA, 25 bp, Probe Sequence
aagaagttgaactatgactggagta

SEQ ID NO: 83635 - DNA, 25 bp, Probe Sequence
taagaagttgaactatgactggagt

SEQ ID NO: 83636 - DNA, 25 bp, Probe Sequence
taggttattcctgttaagcagcatt

SEQ ID NO: 83637 - DNA, 25 bp, Probe Sequence
atgattatagaaggctgtcttagtg

SEQ ID NO: 83638 - DNA, 25 bp, Probe Sequence
gtaggttattcctgttaagcagcat

SEQ ID NO: 83639 - DNA, 25 bp, Probe Sequence
tgttaagaagttgaactatgactgg

SEQ ID NO: 83640 - DNA, 25 bp, Probe Sequence
tcacatgattatagaaggctgtctt

SEQ ID NO: 83641 - DNA, 25 bp, Probe Sequence
atctgagacatcttgcctacttgtt

SEQ ID NO: 83642 - DNA, 25 bp, Probe Sequence
aatctgagacatcttgcctacttgt

SEQ ID NO: 83643 - DNA, 25 bp, Probe Sequence
gttaagaagttgaactatgactgga

SEQ ID NO: 83644 - DNA, 25 bp, Probe Sequence
atcacatgattatagaaggctgtct

SEQ ID NO: 83645 - DNA, 25 bp, Probe Sequence
ggagaatctgagacatcttgcctac

SEQ ID NO: 83646 - DNA, 25 bp, Probe Sequence
tgagacatcttgcctacttgttctt

SEQ ID NO: 83647 - DNA, 25 bp, Probe Sequence
ttaagaagttgaactatgactggag

SEQ ID NO: 83648 - DNA, 25 bp, Probe Sequence
aggttattcctgttaagcagcattg

SEQ ID NO: 83649 - DNA, 25 bp, Probe Sequence
tactgtattgggcttcttcgttaat

SEQ ID NO: 83650 - DNA, 25 bp, Probe Sequence
ttactctggtggattgttctagtac

SEQ ID NO: 83651 - DNA, 25 bp, Probe Sequence
tgattatagaaggctgtcttagtgc

SEQ ID NO: 83652 - DNA, 25 bp, Probe Sequence
gaatctgagacatcttgcctacttg

SEQ ID NO: 83653 - DNA, 25 bp, Probe Sequence
agaatctgagacatcttgcctactt

SEQ ID NO: 83654 - DNA, 25 bp, Probe Sequence
gcattactctggtggattgttctag

SEQ ID NO: 83655 - DNA, 25 bp, Probe Sequence
cattactctggtggattgttctagt

SEQ ID NO: 83656 - DNA, 25 bp, Probe Sequence
gagaatctgagacatcttgcctact

SEQ ID NO: 83657 - DNA, 25 bp, Probe Sequence
agaagttgaactatgactggagtaa

SEQ ID NO: 83658 - DNA, 25 bp, Probe Sequence
aagaagttgaactatgactggagta

SEQ ID NO: 83659 - DNA, 25 bp, Probe Sequence
taagaagttgaactatgactggagt

SEQ ID NO: 83660 - DNA, 25 bp, Probe Sequence
taggttattcctgttaagcagcatt

SEQ ID NO: 83661 - DNA, 25 bp, Probe Sequence
atgattatagaaggctgtcttagtg

SEQ ID NO: 83662 - DNA, 25 bp, Probe Sequence
gtaggttattcctgttaagcagcat

SEQ ID NO: 83663 - DNA, 25 bp, Probe Sequence
tgttaagaagttgaactatgactgg

SEQ ID NO: 83664 - DNA, 25 bp, Probe Sequence
tcacatgattatagaaggctgtctt

SEQ ID NO: 83665 - DNA, 25 bp, Probe Sequence
atctgagacatcttgcctacttgtt

SEQ ID NO: 83666 - DNA, 25 bp, Probe Sequence
aatctgagacatcttgcctacttgt

SEQ ID NO: 83667 - DNA, 25 bp, Probe Sequence
gttaagaagttgaactatgactgga

SEQ ID NO: 83668 - DNA, 25 bp, Probe Sequence
atcacatgattatagaaggctgtct

SEQ ID NO: 83669 - DNA, 25 bp, Probe Sequence
ggagaatctgagacatcttgcctac

SEQ ID NO: 83670 - DNA, 25 bp, Probe Sequence
tgagacatcttgcctacttgttctt

SEQ ID NO: 83671 - DNA, 25 bp, Probe Sequence
ttaagaagttgaactatgactggag

SEQ ID NO: 83672 - DNA, 25 bp, Probe Sequence
aggttattcctgttaagcagcattg

SEQ ID NO: 83673 - DNA, 25 bp, Probe Sequence
tactgtattgggcttcttcgttaat

SEQ ID NO: 83674 - DNA, 25 bp, Probe Sequence
ttactctggtggattgttctagtac

SEQ ID NO: 83675 - DNA, 25 bp, Probe Sequence
agaggaattgctgactagaataacc

SEQ ID NO: 83676 - DNA, 25 bp, Probe Sequence
gaggaattgctgactagaataacca

SEQ ID NO: 83677 - DNA, 25 bp, Probe Sequence
ggtagaggaattgctgactagaata

SEQ ID NO: 83678 - DNA, 25 bp, Probe Sequence
aggaattgctgactagaataaccag

SEQ ID NO: 83679 - DNA, 25 bp, Probe Sequence
ggaattgctgactagaataaccagt

SEQ ID NO: 83680 - DNA, 25 bp, Probe Sequence
tgaagcatacacaagtatcagtagc

SEQ ID NO: 83681 - DNA, 25 bp, Probe Sequence
gtgaagcatacacaagtatcagtag

SEQ ID NO: 83682 - DNA, 25 bp, Probe Sequence
cgtgaagcatacacaagtatcagta

SEQ ID NO: 83683 - DNA, 25 bp, Probe Sequence
gaattgctgactagaataaccagtt

SEQ ID NO: 83684 - DNA, 25 bp, Probe Sequence
ttgacgaactaacagaagtagcctt

SEQ ID NO: 83685 - DNA, 25 bp, Probe Sequence
tagaggaattgctgactagaataac

SEQ ID NO: 83686 - DNA, 25 bp, Probe Sequence
gtagaggaattgctgactagaataa

SEQ ID NO: 83687 - DNA, 25 bp, Probe Sequence
ttcgtgaagcatacacaagtatcag

SEQ ID NO: 83688 - DNA, 25 bp, Probe Sequence
gaagcatacacaagtatcagtagcc

SEQ ID NO: 83689 - DNA, 25 bp, Probe Sequence
acacaagtatcagtagccaaataga

SEQ ID NO: 83690 - DNA, 25 bp, Probe Sequence
aggtagatgaatccacaaagatgag

SEQ ID NO: 83691 - DNA, 25 bp, Probe Sequence
agcatacacaagtatcagtagccaa

SEQ ID NO: 83692 - DNA, 25 bp, Probe Sequence
aagcatacacaagtatcagtagcca

SEQ ID NO: 83693 - DNA, 25 bp, Probe Sequence
cttcgtgaagcatacacaagtatca

SEQ ID NO: 83694 - DNA, 25 bp, Probe Sequence
agatgaatccacaaagatgaggtaa

SEQ ID NO: 83695 - DNA, 25 bp, Probe Sequence
gtagatgaatccacaaagatgaggt

SEQ ID NO: 83696 - DNA, 25 bp, Probe Sequence
aaggtagatgaatccacaaagatga

SEQ ID NO: 83697 - DNA, 25 bp, Probe Sequence
ccaaaggtagatgaatccacaaaga

SEQ ID NO: 83698 - DNA, 25 bp, Probe Sequence
atgaatccacaaagatgaggtaaac

SEQ ID NO: 83699 - DNA, 25 bp, Probe Sequence
ggacttcatcttacctatcagtgac

SEQ ID NO: 83700 - DNA, 25 bp, Probe Sequence
gacttcatcttacctatcagtgacg

SEQ ID NO: 83701 - DNA, 25 bp, Probe Sequence
tccaccaagactgaaagaaactaat

SEQ ID NO: 83702 - DNA, 25 bp, Probe Sequence
ctccaccaagactgaaagaaactaa

SEQ ID NO: 83703 - DNA, 25 bp, Probe Sequence
caagatatgtggactctctcctgag

SEQ ID NO: 83704 - DNA, 25 bp, Probe Sequence
ccaccaagactgaaagaaactaatt

SEQ ID NO: 83705 - DNA, 25 bp, Probe Sequence
aagttaaaggcttgttctaagtgga

SEQ ID NO: 83706 - DNA, 25 bp, Probe Sequence
ataccgaaacagaacaagttaaagg

SEQ ID NO: 83707 - DNA, 25 bp, Probe Sequence
agttaaaggcttgttctaagtggac

SEQ ID NO: 83708 - DNA, 25 bp, Probe Sequence
tgataccgaaacagaacaagttaaa

SEQ ID NO: 83709 - DNA, 25 bp, Probe Sequence
acttcatcttacctatcagtgacgt

SEQ ID NO: 83710 - DNA, 25 bp, Probe Sequence
atatagatcgttacaaccgaacagg

SEQ ID NO: 83711 - DNA, 25 bp, Probe Sequence
ttgataccgaaacagaacaagttaa

SEQ ID NO: 83712 - DNA, 25 bp, Probe Sequence
catatagatcgttacaaccgaacag

SEQ ID NO: 83713 - DNA, 25 bp, Probe Sequence
ccatatagatcgttacaaccgaaca

SEQ ID NO: 83714 - DNA, 25 bp, Probe Sequence
acaagcccatatagatcgttacaac

SEQ ID NO: 83715 - DNA, 25 bp, Probe Sequence
cacaagcccatatagatcgttacaa

SEQ ID NO: 83716 - DNA, 25 bp, Probe Sequence
gggacttcatcttacctatcagtga

SEQ ID NO: 83717 - DNA, 25 bp, Probe Sequence
aattctgttcacagtggagtatggt

SEQ ID NO: 83718 - DNA, 25 bp, Probe Sequence
gataccgaaacagaacaagttaaag

SEQ ID NO: 83719 - DNA, 25 bp, Probe Sequence
ctatggagccaagatatgtggactc

SEQ ID NO: 83720 - DNA, 25 bp, Probe Sequence
tccattatttctactgcttacactt

SEQ ID NO: 83721 - DNA, 25 bp, Probe Sequence
ttccattatttctactgcttacact

SEQ ID NO: 83722 - DNA, 25 bp, Probe Sequence
tttatttctgtttctgtggagtttc

SEQ ID NO: 83723 - DNA, 25 bp, Probe Sequence
ggacttcatcttacctatcagtgac

SEQ ID NO: 83724 - DNA, 25 bp, Probe Sequence
gacttcatcttacctatcagtgacg

SEQ ID NO: 83725 - DNA, 25 bp, Probe Sequence
tccaccaagactgaaagaaactaat

SEQ ID NO: 83726 - DNA, 25 bp, Probe Sequence
ctccaccaagactgaaagaaactaa

SEQ ID NO: 83727 - DNA, 25 bp, Probe Sequence
caagatatgtggactctctcctgag

SEQ ID NO: 83728 - DNA, 25 bp, Probe Sequence
ccaccaagactgaaagaaactaatt

SEQ ID NO: 83729 - DNA, 25 bp, Probe Sequence
aagttaaaggcttgttctaagtgga

SEQ ID NO: 83730 - DNA, 25 bp, Probe Sequence
ataccgaaacagaacaagttaaagg

SEQ ID NO: 83731 - DNA, 25 bp, Probe Sequence
agttaaaggcttgttctaagtggac

SEQ ID NO: 83732 - DNA, 25 bp, Probe Sequence
tgataccgaaacagaacaagttaaa

SEQ ID NO: 83733 - DNA, 25 bp, Probe Sequence
acttcatcttacctatcagtgacgt

SEQ ID NO: 83734 - DNA, 25 bp, Probe Sequence
atatagatcgttacaaccgaacagg

SEQ ID NO: 83735 - DNA, 25 bp, Probe Sequence
ttgataccgaaacagaacaagttaa

SEQ ID NO: 83736 - DNA, 25 bp, Probe Sequence
catatagatcgttacaaccgaacag

SEQ ID NO: 83737 - DNA, 25 bp, Probe Sequence
ccatatagatcgttacaaccgaaca

SEQ ID NO: 83738 - DNA, 25 bp, Probe Sequence
acaagcccatatagatcgttacaac

SEQ ID NO: 83739 - DNA, 25 bp, Probe Sequence
cacaagcccatatagatcgttacaa

SEQ ID NO: 83740 - DNA, 25 bp, Probe Sequence
gggacttcatcttacctatcagtga

SEQ ID NO: 83741 - DNA, 25 bp, Probe Sequence
aattctgttcacagtggagtatggt

SEQ ID NO: 83742 - DNA, 25 bp, Probe Sequence
gataccgaaacagaacaagttaaag

SEQ ID NO: 83743 - DNA, 25 bp, Probe Sequence
ctatggagccaagatatgtggactc

SEQ ID NO: 83744 - DNA, 25 bp, Probe Sequence
tccattatttctactgcttacactt

SEQ ID NO: 83745 - DNA, 25 bp, Probe Sequence
ttccattatttctactgcttacact

SEQ ID NO: 83746 - DNA, 25 bp, Probe Sequence
tttatttctgtttctgtggagtttc

SEQ ID NO: 83747 - DNA, 25 bp, Probe Sequence
gatcaagaccctacttctaacctcc

SEQ ID NO: 83748 - DNA, 25 bp, Probe Sequence
ggatcaagaccctacttctaacctc

SEQ ID NO: 83749 - DNA, 25 bp, Probe Sequence
atcaagaccctacttctaacctccc

SEQ ID NO: 83750 - DNA, 25 bp, Probe Sequence
tcaagaccctacttctaacctccct

SEQ ID NO: 83751 - DNA, 25 bp, Probe Sequence
gggatcaagaccctacttctaacct

SEQ ID NO: 83752 - DNA, 25 bp, Probe Sequence
gtatcgttttgcagtacatcaatgg

SEQ ID NO: 83753 - DNA, 25 bp, Probe Sequence
ggtatcgttttgcagtacatcaatg

SEQ ID NO: 83754 - DNA, 25 bp, Probe Sequence
tggtatcgttttgcagtacatcaat

SEQ ID NO: 83755 - DNA, 25 bp, Probe Sequence
atggtatcgttttgcagtacatcaa

SEQ ID NO: 83756 - DNA, 25 bp, Probe Sequence
catggtatcgttttgcagtacatca

SEQ ID NO: 83757 - DNA, 25 bp, Probe Sequence
tatcgttttgcagtacatcaatggg

SEQ ID NO: 83758 - DNA, 25 bp, Probe Sequence
tatacggtttgactcacggggattt

SEQ ID NO: 83759 - DNA, 25 bp, Probe Sequence
cgggatcaagaccctacttctaacc

SEQ ID NO: 83760 - DNA, 25 bp, Probe Sequence
gcagtacatcaatgggcgtgtatac

SEQ ID NO: 83761 - DNA, 25 bp, Probe Sequence
cagtacatcaatgggcgtgtatacg

SEQ ID NO: 83762 - DNA, 25 bp, Probe Sequence
tgcagtacatcaatgggcgtgtata

SEQ ID NO: 83763 - DNA, 25 bp, Probe Sequence
tacatcaatgggcgtgtatacggtt

SEQ ID NO: 83764 - DNA, 25 bp, Probe Sequence
ccgggatcaagaccctacttctaac

SEQ ID NO: 83765 - DNA, 25 bp, Probe Sequence
ttgcagtacatcaatgggcgtgtat

SEQ ID NO: 83766 - DNA, 25 bp, Probe Sequence
gtatacggtttgactcacggggatt

SEQ ID NO: 83767 - DNA, 25 bp, Probe Sequence
catcaatgggcgtgtatacggtttg

SEQ ID NO: 83768 - DNA, 25 bp, Probe Sequence
agtacatcaatgggcgtgtatacgg

SEQ ID NO: 83769 - DNA, 25 bp, Probe Sequence
atcaatgggcgtgtatacggtttga

SEQ ID NO: 83770 - DNA, 25 bp, Probe Sequence
tttgcagtacatcaatgggcgtgta

SEQ ID NO: 83771 - DNA, 25 bp, Probe Sequence
gtaacctaatagtacattgactgct

SEQ ID NO: 83772 - DNA, 25 bp, Probe Sequence
agtaacctaatagtacattgactgc

SEQ ID NO: 83773 - DNA, 25 bp, Probe Sequence
aatgttgttgcacgagaatatgtat

SEQ ID NO: 83774 - DNA, 25 bp, Probe Sequence
tgttgttgcacgagaatatgtatag

SEQ ID NO: 83775 - DNA, 25 bp, Probe Sequence
gttgttgcacgagaatatgtataga

SEQ ID NO: 83776 - DNA, 25 bp, Probe Sequence
caatgttgttgcacgagaatatgta

SEQ ID NO: 83777 - DNA, 25 bp, Probe Sequence
atgttgttgcacgagaatatgtata

SEQ ID NO: 83778 - DNA, 25 bp, Probe Sequence
ttcaatgttgttgcacgagaatatg

SEQ ID NO: 83779 - DNA, 25 bp, Probe Sequence
ttgttgcacgagaatatgtatagaa

SEQ ID NO: 83780 - DNA, 25 bp, Probe Sequence
gctactaaccacagatcccttaatt

SEQ ID NO: 83781 - DNA, 25 bp, Probe Sequence
acctaatagtacattgactgcttaa

SEQ ID NO: 83782 - DNA, 25 bp, Probe Sequence
aacctaatagtacattgactgctta

SEQ ID NO: 83783 - DNA, 25 bp, Probe Sequence
taacctaatagtacattgactgctt

SEQ ID NO: 83784 - DNA, 25 bp, Probe Sequence
tgttgcacgagaatatgtatagaat

SEQ ID NO: 83785 - DNA, 25 bp, Probe Sequence
tgctactaaccacagatcccttaat

SEQ ID NO: 83786 - DNA, 25 bp, Probe Sequence
tcaatgttgttgcacgagaatatgt

SEQ ID NO: 83787 - DNA, 25 bp, Probe Sequence
ttgctactaaccacagatcccttaa

SEQ ID NO: 83788 - DNA, 25 bp, Probe Sequence
tttgctactaaccacagatccctta

SEQ ID NO: 83789 - DNA, 25 bp, Probe Sequence
aaagaataacaaagcagcactactg

SEQ ID NO: 83790 - DNA, 25 bp, Probe Sequence
taacaaagcagcactactgagaaat

SEQ ID NO: 83791 - DNA, 25 bp, Probe Sequence
ataacaaagcagcactactgagaaa

SEQ ID NO: 83792 - DNA, 25 bp, Probe Sequence
aataacaaagcagcactactgagaa

SEQ ID NO: 83793 - DNA, 25 bp, Probe Sequence
aagaataacaaagcagcactactga

SEQ ID NO: 83794 - DNA, 25 bp, Probe Sequence
cggttaatttattcaatgttgttgc

SEQ ID NO: 83795 - DNA, 25 bp, Probe Sequence
tactgtatgtgtggaatgtgatgaa

SEQ ID NO: 83796 - DNA, 25 bp, Probe Sequence
atactgtatgtgtggaatgtgatga

SEQ ID NO: 83797 - DNA, 25 bp, Probe Sequence
tgaagacagcaacttgaagacatat

SEQ ID NO: 83798 - DNA, 25 bp, Probe Sequence
atgaagacagcaacttgaagacata

SEQ ID NO: 83799 - DNA, 25 bp, Probe Sequence
gaagacagcaacttgaagacatata

SEQ ID NO: 83800 - DNA, 25 bp, Probe Sequence
aagacagcaacttgaagacatataa

SEQ ID NO: 83801 - DNA, 25 bp, Probe Sequence
tatccttcatgtaattgtcttgcct

SEQ ID NO: 83802 - DNA, 25 bp, Probe Sequence
ttcatgtaattgtcttgcctgttag

SEQ ID NO: 83803 - DNA, 25 bp, Probe Sequence
cttcatgtaattgtcttgcctgtta

SEQ ID NO: 83804 - DNA, 25 bp, Probe Sequence
ttatccttcatgtaattgtcttgcc

SEQ ID NO: 83805 - DNA, 25 bp, Probe Sequence
tgcttattatgttgacacttatcct

SEQ ID NO: 83806 - DNA, 25 bp, Probe Sequence
atccttcatgtaattgtcttgcctg

SEQ ID NO: 83807 - DNA, 25 bp, Probe Sequence
atagcaattcacatgaagacagcaa

SEQ ID NO: 83808 - DNA, 25 bp, Probe Sequence
aatagcaattcacatgaagacagca

SEQ ID NO: 83809 - DNA, 25 bp, Probe Sequence
tcatgtaattgtcttgcctgttagc

SEQ ID NO: 83810 - DNA, 25 bp, Probe Sequence
ccttcatgtaattgtcttgcctgtt

SEQ ID NO: 83811 - DNA, 25 bp, Probe Sequence
cttatccttcatgtaattgtcttgc

SEQ ID NO: 83812 - DNA, 25 bp, Probe Sequence
caattcacatgaagacagcaacttg

SEQ ID NO: 83813 - DNA, 25 bp, Probe Sequence
aattcacatgaagacagcaacttga

SEQ ID NO: 83814 - DNA, 25 bp, Probe Sequence
catgaagacagcaacttgaagacat

SEQ ID NO: 83815 - DNA, 25 bp, Probe Sequence
ttgcttattatgttgacacttatcc

SEQ ID NO: 83816 - DNA, 25 bp, Probe Sequence
tgtatgtgtggaatgtgatgaaatg

SEQ ID NO: 83817 - DNA, 25 bp, Probe Sequence
tcaccaaagtcgttatcagaatgta

SEQ ID NO: 83818 - DNA, 25 bp, Probe Sequence
atattcagaacgactggctcttagg

SEQ ID NO: 83819 - DNA, 25 bp, Probe Sequence
aagactagagtaagattgacaggca

SEQ ID NO: 83820 - DNA, 25 bp, Probe Sequence
tgacaggcaataatggttacaacag

SEQ ID NO: 83821 - DNA, 25 bp, Probe Sequence
ctctctatggtgttatcctgtcctg

SEQ ID NO: 83822 - DNA, 25 bp, Probe Sequence
ttgacaggcaataatggttacaaca

SEQ ID NO: 83823 - DNA, 25 bp, Probe Sequence
caagactagagtaagattgacaggc

SEQ ID NO: 83824 - DNA, 25 bp, Probe Sequence
gcaagactagagtaagattgacagg

SEQ ID NO: 83825 - DNA, 25 bp, Probe Sequence
agactagagtaagattgacaggcaa

SEQ ID NO: 83826 - DNA, 25 bp, Probe Sequence
gacaggcaataatggttacaacagg

SEQ ID NO: 83827 - DNA, 25 bp, Probe Sequence
tgtggtaatgcaagactagagtaag

SEQ ID NO: 83828 - DNA, 25 bp, Probe Sequence
gtggtaatgcaagactagagtaaga

SEQ ID NO: 83829 - DNA, 25 bp, Probe Sequence
tctctatggtgttatcctgtcctgg

SEQ ID NO: 83830 - DNA, 25 bp, Probe Sequence
atattggcttcactccctaatcatc

SEQ ID NO: 83831 - DNA, 25 bp, Probe Sequence
atcatcaagacttggaatatcctgg

SEQ ID NO: 83832 - DNA, 25 bp, Probe Sequence
gatattggcttcactccctaatcat

SEQ ID NO: 83833 - DNA, 25 bp, Probe Sequence
tggtaatgcaagactagagtaagat

SEQ ID NO: 83834 - DNA, 25 bp, Probe Sequence
cttcactccctaatcatcaagactt

SEQ ID NO: 83835 - DNA, 25 bp, Probe Sequence
aagatattggcttcactccctaatc

SEQ ID NO: 83836 - DNA, 25 bp, Probe Sequence
gaatgcttcaagaatagagggagaa

SEQ ID NO: 83837 - DNA, 25 bp, Probe Sequence
aaagatattggcttcactccctaat

SEQ ID NO: 83838 - DNA, 25 bp, Probe Sequence
tagaatgcttcaagaatagagggag

SEQ ID NO: 83839 - DNA, 25 bp, Probe Sequence
attgacaggcaataatggttacaac

SEQ ID NO: 83840 - DNA, 25 bp, Probe Sequence
gattgacaggcaataatggttacaa

SEQ ID NO: 83841 - DNA, 25 bp, Probe Sequence
agtaagattgacaggcaataatggt

SEQ ID NO: 83842 - DNA, 25 bp, Probe Sequence
gagtaagattgacaggcaataatgg

SEQ ID NO: 83843 - DNA, 25 bp, Probe Sequence
gacaacaagaatgaaactccatctc

SEQ ID NO: 83844 - DNA, 25 bp, Probe Sequence
caacaagaatgaaactccatctcaa

SEQ ID NO: 83845 - DNA, 25 bp, Probe Sequence
acaacaagaatgaaactccatctca

SEQ ID NO: 83846 - DNA, 25 bp, Probe Sequence
aacaagaatgaaactccatctcaaa

SEQ ID NO: 83847 - DNA, 25 bp, Probe Sequence
acaagaatgaaactccatctcaaat

SEQ ID NO: 83848 - DNA, 25 bp, Probe Sequence
ggacaacaagaatgaaactccatct

SEQ ID NO: 83849 - DNA, 25 bp, Probe Sequence
ctcacacttgtaatcccaccacttt

SEQ ID NO: 83850 - DNA, 25 bp, Probe Sequence
caagaatgaaactccatctcaaata

SEQ ID NO: 83851 - DNA, 25 bp, Probe Sequence
aagggaacactatagacaagtttgt

SEQ ID NO: 83852 - DNA, 25 bp, Probe Sequence
tcacacttgtaatcccaccactttg

SEQ ID NO: 83853 - DNA, 25 bp, Probe Sequence
gggaacactatagacaagtttgtac

SEQ ID NO: 83854 - DNA, 25 bp, Probe Sequence
agggaacactatagacaagtttgta

SEQ ID NO: 83855 - DNA, 25 bp, Probe Sequence
ctcatacctgtaatcccagctactt

SEQ ID NO: 83856 - DNA, 25 bp, Probe Sequence
gcctattaagggaacactatagaca

SEQ ID NO: 83857 - DNA, 25 bp, Probe Sequence
agcctggacaacaagaatgaaactc

SEQ ID NO: 83858 - DNA, 25 bp, Probe Sequence
acacaggaacagctaggaccattag

SEQ ID NO: 83859 - DNA, 25 bp, Probe Sequence
tcatacctgtaatcccagctacttg

SEQ ID NO: 83860 - DNA, 25 bp, Probe Sequence
taagggaacactatagacaagtttg

SEQ ID NO: 83861 - DNA, 25 bp, Probe Sequence
aagaatgaaactccatctcaaataa

SEQ ID NO: 83862 - DNA, 25 bp, Probe Sequence
cagcctggacaacaagaatgaaact

SEQ ID NO: 83863 - DNA, 25 bp, Probe Sequence
cacacaggaacagctaggaccatta

SEQ ID NO: 83864 - DNA, 25 bp, Probe Sequence
agaatgaaactccatctcaaataat

SEQ ID NO: 83865 - DNA, 25 bp, Probe Sequence
ttaagggaacactatagacaagttt

SEQ ID NO: 83866 - DNA, 25 bp, Probe Sequence
attaagggaacactatagacaagtt

SEQ ID NO: 83867 - DNA, 25 bp, Probe Sequence
tgaggcagcaagtaagaatctaata

SEQ ID NO: 83868 - DNA, 25 bp, Probe Sequence
ttgaggcagcaagtaagaatctaat

SEQ ID NO: 83869 - DNA, 25 bp, Probe Sequence
attgaggcagcaagtaagaatctaa

SEQ ID NO: 83870 - DNA, 25 bp, Probe Sequence
gaggcagcaagtaagaatctaataa

SEQ ID NO: 83871 - DNA, 25 bp, Probe Sequence
aagaatgagttattgtcacctgaac

SEQ ID NO: 83872 - DNA, 25 bp, Probe Sequence
agaatgagttattgtcacctgaaca

SEQ ID NO: 83873 - DNA, 25 bp, Probe Sequence
gaatgagttattgtcacctgaacat

SEQ ID NO: 83874 - DNA, 25 bp, Probe Sequence
ccacatggtacattcctagagttat

SEQ ID NO: 83875 - DNA, 25 bp, Probe Sequence
caagattgaggcagcaagtaagaat

SEQ ID NO: 83876 - DNA, 25 bp, Probe Sequence
tggtacattcctagagttatgaagt

SEQ ID NO: 83877 - DNA, 25 bp, Probe Sequence
cacatggtacattcctagagttatg

SEQ ID NO: 83878 - DNA, 25 bp, Probe Sequence
acatggtacattcctagagttatga

SEQ ID NO: 83879 - DNA, 25 bp, Probe Sequence
atgagttattgtcacctgaacataa

SEQ ID NO: 83880 - DNA, 25 bp, Probe Sequence
aatgagttattgtcacctgaacata

SEQ ID NO: 83881 - DNA, 25 bp, Probe Sequence
gattgaggcagcaagtaagaatcta

SEQ ID NO: 83882 - DNA, 25 bp, Probe Sequence
ttgacagattgacccagattattcc

SEQ ID NO: 83883 - DNA, 25 bp, Probe Sequence
ggtacattcctagagttatgaagtt

SEQ ID NO: 83884 - DNA, 25 bp, Probe Sequence
actttcacatatcttaggacccaaa

SEQ ID NO: 83885 - DNA, 25 bp, Probe Sequence
catggtacattcctagagttatgaa

SEQ ID NO: 83886 - DNA, 25 bp, Probe Sequence
aagattgaggcagcaagtaagaatc

SEQ ID NO: 83887 - DNA, 25 bp, Probe Sequence
agaaattgacagattgacccagatt

SEQ ID NO: 83888 - DNA, 25 bp, Probe Sequence
attgacagattgacccagattattc

SEQ ID NO: 83889 - DNA, 25 bp, Probe Sequence
atggtacattcctagagttatgaag

SEQ ID NO: 83890 - DNA, 25 bp, Probe Sequence
tactttcacatatcttaggacccaa

SEQ ID NO: 83891 - DNA, 25 bp, Probe Sequence
ggactctctacttcataaggaccat

SEQ ID NO: 83892 - DNA, 25 bp, Probe Sequence
cttattctgagtcctaactgccatc

SEQ ID NO: 83893 - DNA, 25 bp, Probe Sequence
ctggactctctacttcataaggacc

SEQ ID NO: 83894 - DNA, 25 bp, Probe Sequence
tctcagtgatacttgtgaccaatat

SEQ ID NO: 83895 - DNA, 25 bp, Probe Sequence
atctcagtgatacttgtgaccaata

SEQ ID NO: 83896 - DNA, 25 bp, Probe Sequence
tattctgagtcctaactgccatctt

SEQ ID NO: 83897 - DNA, 25 bp, Probe Sequence
ttattctgagtcctaactgccatct

SEQ ID NO: 83898 - DNA, 25 bp, Probe Sequence
acttattctgagtcctaactgccat

SEQ ID NO: 83899 - DNA, 25 bp, Probe Sequence
gactctctacttcataaggaccatg

SEQ ID NO: 83900 - DNA, 25 bp, Probe Sequence
tatctcagtgatacttgtgaccaat

SEQ ID NO: 83901 - DNA, 25 bp, Probe Sequence
atatctcagtgatacttgtgaccaa

SEQ ID NO: 83902 - DNA, 25 bp, Probe Sequence
aatatctcagtgatacttgtgacca

SEQ ID NO: 83903 - DNA, 25 bp, Probe Sequence
aacttattctgagtcctaactgcca

SEQ ID NO: 83904 - DNA, 25 bp, Probe Sequence
gctggactctctacttcataaggac

SEQ ID NO: 83905 - DNA, 25 bp, Probe Sequence
ctgctggactctctacttcataagg

SEQ ID NO: 83906 - DNA, 25 bp, Probe Sequence
cctgctggactctctacttcataag

SEQ ID NO: 83907 - DNA, 25 bp, Probe Sequence
tgctggactctctacttcataagga

SEQ ID NO: 83908 - DNA, 25 bp, Probe Sequence
attctgagtcctaactgccatcttc

SEQ ID NO: 83909 - DNA, 25 bp, Probe Sequence
aactggtaatgaactgaataggtat

SEQ ID NO: 83910 - DNA, 25 bp, Probe Sequence
ataactggtaatgaactgaataggt

SEQ ID NO: 83911 - DNA, 25 bp, Probe Sequence
actggtaatgaactgaataggtatt

SEQ ID NO: 83912 - DNA, 25 bp, Probe Sequence
gttgaacatggacaggagaatgatg

SEQ ID NO: 83913 - DNA, 25 bp, Probe Sequence
agtgatacttgtgaccaatattagc

SEQ ID NO: 83914 - DNA, 25 bp, Probe Sequence
atgcacattctgactggataacaat

SEQ ID NO: 83915 - DNA, 25 bp, Probe Sequence
gtctctcatcaaccactctcatcat

SEQ ID NO: 83916 - DNA, 25 bp, Probe Sequence
tctctcatcaaccactctcatcatg

SEQ ID NO: 83917 - DNA, 25 bp, Probe Sequence
agggtaaggaagcaaagaaatgaaa

SEQ ID NO: 83918 - DNA, 25 bp, Probe Sequence
tgtctctcatcaaccactctcatca

SEQ ID NO: 83919 - DNA, 25 bp, Probe Sequence
cagggtaaggaagcaaagaaatgaa

SEQ ID NO: 83920 - DNA, 25 bp, Probe Sequence
catctgagtgtgacaagagaaatca

SEQ ID NO: 83921 - DNA, 25 bp, Probe Sequence
atgtatatttagggaagagacagcc

SEQ ID NO: 83922 - DNA, 25 bp, Probe Sequence
ccatctgagtgtgacaagagaaatc

SEQ ID NO: 83923 - DNA, 25 bp, Probe Sequence
gtgtctctcatcaaccactctcatc

SEQ ID NO: 83924 - DNA, 25 bp, Probe Sequence
gtacatcactttaattactgcccaa

SEQ ID NO: 83925 - DNA, 25 bp, Probe Sequence
cacctcctggattcaagctattctc

SEQ ID NO: 83926 - DNA, 25 bp, Probe Sequence
tacatcactttaattactgcccaag

SEQ ID NO: 83927 - DNA, 25 bp, Probe Sequence
tttaattactgcccaagtgaggttt

SEQ ID NO: 83928 - DNA, 25 bp, Probe Sequence
ctctcatcaaccactctcatcatgc

SEQ ID NO: 83929 - DNA, 25 bp, Probe Sequence
ctttaattactgcccaagtgaggtt

SEQ ID NO: 83930 - DNA, 25 bp, Probe Sequence
ttaattactgcccaagtgaggtttg

SEQ ID NO: 83931 - DNA, 25 bp, Probe Sequence
ctcatcaaccactctcatcatgctg

SEQ ID NO: 83932 - DNA, 25 bp, Probe Sequence
tctcatcaaccactctcatcatgct

SEQ ID NO: 83933 - DNA, 25 bp, Probe Sequence
ctcctggattcaagctattctcctg

SEQ ID NO: 83934 - DNA, 25 bp, Probe Sequence
caaccactctcatcatgctgcttag

SEQ ID NO: 83935 - DNA, 25 bp, Probe Sequence
aggtatgtatatttagggaagagac

SEQ ID NO: 83936 - DNA, 25 bp, Probe Sequence
gattcaagctattctcctgcctcag

SEQ ID NO: 83937 - DNA, 25 bp, Probe Sequence
tatgtatatttagggaagagacagc

SEQ ID NO: 83938 - DNA, 25 bp, Probe Sequence
ctatttgcctgagccctggattaag

SEQ ID NO: 83939 - DNA, 25 bp, Probe Sequence
tgcttgtatatgcttgaactttctt

SEQ ID NO: 83940 - DNA, 25 bp, Probe Sequence
atgcttgtatatgcttgaactttct

SEQ ID NO: 83941 - DNA, 25 bp, Probe Sequence
aatgcttgtatatgcttgaactttc

SEQ ID NO: 83942 - DNA, 25 bp, Probe Sequence
caatgcttgtatatgcttgaacttt

SEQ ID NO: 83943 - DNA, 25 bp, Probe Sequence
gcttgtatatgcttgaactttctta

SEQ ID NO: 83944 - DNA, 25 bp, Probe Sequence
gatgttgaaccctttggtaaactaa

SEQ ID NO: 83945 - DNA, 25 bp, Probe Sequence
ggatgttgaaccctttggtaaacta

SEQ ID NO: 83946 - DNA, 25 bp, Probe Sequence
acaatgcttgtatatgcttgaactt

SEQ ID NO: 83947 - DNA, 25 bp, Probe Sequence
aacaatgcttgtatatgcttgaact

SEQ ID NO: 83948 - DNA, 25 bp, Probe Sequence
atgttgaaccctttggtaaactaaa

SEQ ID NO: 83949 - DNA, 25 bp, Probe Sequence
tgttgaaccctttggtaaactaaag

SEQ ID NO: 83950 - DNA, 25 bp, Probe Sequence
ttgaaccctttggtaaactaaagac

SEQ ID NO: 83951 - DNA, 25 bp, Probe Sequence
gttgaaccctttggtaaactaaaga

SEQ ID NO: 83952 - DNA, 25 bp, Probe Sequence
ccctttggtaaactaaagacccttt

SEQ ID NO: 83953 - DNA, 25 bp, Probe Sequence
tgaaccctttggtaaactaaagacc

SEQ ID NO: 83954 - DNA, 25 bp, Probe Sequence
gaaccctttggtaaactaaagaccc

SEQ ID NO: 83955 - DNA, 25 bp, Probe Sequence
accctttggtaaactaaagaccctt

SEQ ID NO: 83956 - DNA, 25 bp, Probe Sequence
aaccctttggtaaactaaagaccct

SEQ ID NO: 83957 - DNA, 25 bp, Probe Sequence
ttataatgcacatattcccaacaaa

SEQ ID NO: 83958 - DNA, 25 bp, Probe Sequence
tttataatgcacatattcccaacaa

SEQ ID NO: 83959 - DNA, 25 bp, Probe Sequence
tattattttcaaaagcactacaggc

SEQ ID NO: 83960 - DNA, 25 bp, Probe Sequence
cccatgaattacttcctcacttttg

SEQ ID NO: 83961 - DNA, 25 bp, Probe Sequence
ccatgaattacttcctcacttttgc

SEQ ID NO: 83962 - DNA, 25 bp, Probe Sequence
aaacaatgcttgtatatgcttgaac

SEQ ID NO: 83963 - DNA, 25 bp, Probe Sequence
tcactaccacaagaacaacactaag

SEQ ID NO: 83964 - DNA, 25 bp, Probe Sequence
ctcactaccacaagaacaacactaa

SEQ ID NO: 83965 - DNA, 25 bp, Probe Sequence
atccacacttgatactaccacttct

SEQ ID NO: 83966 - DNA, 25 bp, Probe Sequence
catccacacttgatactaccacttc

SEQ ID NO: 83967 - DNA, 25 bp, Probe Sequence
acacttgatactaccacttctcctc

SEQ ID NO: 83968 - DNA, 25 bp, Probe Sequence
acaagaacaacactaagccattcat

SEQ ID NO: 83969 - DNA, 25 bp, Probe Sequence
ttgatactaccacttctcctcattg

SEQ ID NO: 83970 - DNA, 25 bp, Probe Sequence
cacacttgatactaccacttctcct

SEQ ID NO: 83971 - DNA, 25 bp, Probe Sequence
tccacacttgatactaccacttctc

SEQ ID NO: 83972 - DNA, 25 bp, Probe Sequence
acttgatactaccacttctcctcat

SEQ ID NO: 83973 - DNA, 25 bp, Probe Sequence
cttgatactaccacttctcctcatt

SEQ ID NO: 83974 - DNA, 25 bp, Probe Sequence
tctcactaccacaagaacaacacta

SEQ ID NO: 83975 - DNA, 25 bp, Probe Sequence
gagtaattctctcactaccacaaga

SEQ ID NO: 83976 - DNA, 25 bp, Probe Sequence
tcatccacacttgatactaccactt

SEQ ID NO: 83977 - DNA, 25 bp, Probe Sequence
cacttgatactaccacttctcctca

SEQ ID NO: 83978 - DNA, 25 bp, Probe Sequence
cactaccacaagaacaacactaagc

SEQ ID NO: 83979 - DNA, 25 bp, Probe Sequence
cctgaggctgagtaagttataagag

SEQ ID NO: 83980 - DNA, 25 bp, Probe Sequence
acctgaggctgagtaagttataaga

SEQ ID NO: 83981 - DNA, 25 bp, Probe Sequence
ctcatccacacttgatactaccact

SEQ ID NO: 83982 - DNA, 25 bp, Probe Sequence
cacaagaacaacactaagccattca

SEQ ID NO: 83983 - DNA, 25 bp, Probe Sequence
ctgaggctgagtaagttataagaga

SEQ ID NO: 83984 - DNA, 25 bp, Probe Sequence
caagaacaacactaagccattcatg

SEQ ID NO: 83985 - DNA, 25 bp, Probe Sequence
tacctgaggctgagtaagttataag

SEQ ID NO: 83986 - DNA, 25 bp, Probe Sequence
ccacacttgatactaccacttctcc

SEQ ID NO: 83987 - DNA, 25 bp, Probe Sequence
agacctaagttctattccaagagtt

SEQ ID NO: 83988 - DNA, 25 bp, Probe Sequence
aagatgaactgagaccttctgagtc

SEQ ID NO: 83989 - DNA, 25 bp, Probe Sequence
tacacttctctgcatgaatacaact

SEQ ID NO: 83990 - DNA, 25 bp, Probe Sequence
ctacacttctctgcatgaatacaac

SEQ ID NO: 83991 - DNA, 25 bp, Probe Sequence
cctacacttctctgcatgaatacaa

SEQ ID NO: 83992 - DNA, 25 bp, Probe Sequence
aatacaactgcatgatacttactgg

SEQ ID NO: 83993 - DNA, 25 bp, Probe Sequence
cttcctggatagcctacacttctct

SEQ ID NO: 83994 - DNA, 25 bp, Probe Sequence
gaagattgctgtcagaatcaacact

SEQ ID NO: 83995 - DNA, 25 bp, Probe Sequence
agaagattgctgtcagaatcaacac

SEQ ID NO: 83996 - DNA, 25 bp, Probe Sequence
cagaagattgctgtcagaatcaaca

SEQ ID NO: 83997 - DNA, 25 bp, Probe Sequence
tagcctacacttctctgcatgaata

SEQ ID NO: 83998 - DNA, 25 bp, Probe Sequence
tagacctaagttctattccaagagt

SEQ ID NO: 83999 - DNA, 25 bp, Probe Sequence
actagacctaagttctattccaaga

SEQ ID NO: 84000 - DNA, 25 bp, Probe Sequence
acacttctctgcatgaatacaactg

SEQ ID NO: 84001 - DNA, 25 bp, Probe Sequence
aagattgctgtcagaatcaacactg

SEQ ID NO: 84002 - DNA, 25 bp, Probe Sequence
atagaccttgaatcataaccctcac

SEQ ID NO: 84003 - DNA, 25 bp, Probe Sequence
ttcatgttccagtagtcttgtaata

SEQ ID NO: 84004 - DNA, 25 bp, Probe Sequence
ttcctggatagcctacacttctctg

SEQ ID NO: 84005 - DNA, 25 bp, Probe Sequence
caaagatgaactgagaccttctgag

SEQ ID NO: 84006 - DNA, 25 bp, Probe Sequence
aagtcctgctcagaactagacctaa

SEQ ID NO: 84007 - DNA, 25 bp, Probe Sequence
atagcctacacttctctgcatgaat

SEQ ID NO: 84008 - DNA, 25 bp, Probe Sequence
aaatggatgtcctcaaagatgaact

SEQ ID NO: 84009 - DNA, 25 bp, Probe Sequence
tgaatacaactgcatgatacttact

SEQ ID NO: 84010 - DNA, 25 bp, Probe Sequence
tcatgttccagtagtcttgtaatat

SEQ ID NO: 84011 - DNA, 25 bp, Probe Sequence
atactacttgcacttgaatccatgt

SEQ ID NO: 84012 - DNA, 25 bp, Probe Sequence
tactacttgcacttgaatccatgtc

SEQ ID NO: 84013 - DNA, 25 bp, Probe Sequence
tatactacttgcacttgaatccatg

SEQ ID NO: 84014 - DNA, 25 bp, Probe Sequence
atcacctcccagatatactacttgc

SEQ ID NO: 84015 - DNA, 25 bp, Probe Sequence
aatctctgacacccaatttccattc

SEQ ID NO: 84016 - DNA, 25 bp, Probe Sequence
ttcagagaactttgcctacagtaaa

SEQ ID NO: 84017 - DNA, 25 bp, Probe Sequence
tttcagagaactttgcctacagtaa

SEQ ID NO: 84018 - DNA, 25 bp, Probe Sequence
ccagatatactacttgcacttgaat

SEQ ID NO: 84019 - DNA, 25 bp, Probe Sequence
gatttcatcaacatagtgagtgctt

SEQ ID NO: 84020 - DNA, 25 bp, Probe Sequence
ctttcagagaactttgcctacagta

SEQ ID NO: 84021 - DNA, 25 bp, Probe Sequence
ggcaacccaaactagaaataggatt

SEQ ID NO: 84022 - DNA, 25 bp, Probe Sequence
gatatactacttgcacttgaatcca

SEQ ID NO: 84023 - DNA, 25 bp, Probe Sequence
atttcatcaacatagtgagtgcttt

SEQ ID NO: 84024 - DNA, 25 bp, Probe Sequence
gatcacctcccagatatactacttg

SEQ ID NO: 84025 - DNA, 25 bp, Probe Sequence
gtctcacttctccactcctctacag

SEQ ID NO: 84026 - DNA, 25 bp, Probe Sequence
ctgtctcacttctccactcctctac

SEQ ID NO: 84027 - DNA, 25 bp, Probe Sequence
agatatactacttgcacttgaatcc

SEQ ID NO: 84028 - DNA, 25 bp, Probe Sequence
gtgcctatagtggtcacttaattga

SEQ ID NO: 84029 - DNA, 25 bp, Probe Sequence
ctgtgcctatagtggtcacttaatt

SEQ ID NO: 84030 - DNA, 25 bp, Probe Sequence
ggatttcatcaacatagtgagtgct

SEQ ID NO: 84031 - DNA, 25 bp, Probe Sequence
aggatttcatcaacatagtgagtgc

SEQ ID NO: 84032 - DNA, 25 bp, Probe Sequence
aaacaaatctctgacacccaatttc

SEQ ID NO: 84033 - DNA, 25 bp, Probe Sequence
tgtgcctatagtggtcacttaattg

SEQ ID NO: 84034 - DNA, 25 bp, Probe Sequence
aaatctctgacacccaatttccatt

SEQ ID NO: 84035 - DNA, 25 bp, Probe Sequence
atggtagtctctgatagttattggt

SEQ ID NO: 84036 - DNA, 25 bp, Probe Sequence
tggtagtctctgatagttattggta

SEQ ID NO: 84037 - DNA, 25 bp, Probe Sequence
gtgttcatggtagtctctgatagtt

SEQ ID NO: 84038 - DNA, 25 bp, Probe Sequence
catggtagtctctgatagttattgg

SEQ ID NO: 84039 - DNA, 25 bp, Probe Sequence
aggtgttcatggtagtctctgatag

SEQ ID NO: 84040 - DNA, 25 bp, Probe Sequence
ggtgttcatggtagtctctgatagt

SEQ ID NO: 84041 - DNA, 25 bp, Probe Sequence
gaggtgttcatggtagtctctgata

SEQ ID NO: 84042 - DNA, 25 bp, Probe Sequence
tgttcatggtagtctctgatagtta

SEQ ID NO: 84043 - DNA, 25 bp, Probe Sequence
tggcttcattctttctaattgtgtt

SEQ ID NO: 84044 - DNA, 25 bp, Probe Sequence
ggtagtctctgatagttattggtat

SEQ ID NO: 84045 - DNA, 25 bp, Probe Sequence
atggcttcattctttctaattgtgt

SEQ ID NO: 84046 - DNA, 25 bp, Probe Sequence
tgatagttattggtatttctgtggg

SEQ ID NO: 84047 - DNA, 25 bp, Probe Sequence
ggcttcattctttctaattgtgttt

SEQ ID NO: 84048 - DNA, 25 bp, Probe Sequence
gcatagaggtgttcatggtagtctc

SEQ ID NO: 84049 - DNA, 25 bp, Probe Sequence
tcatggtagtctctgatagttattg

SEQ ID NO: 84050 - DNA, 25 bp, Probe Sequence
gttcatggtagtctctgatagttat

SEQ ID NO: 84051 - DNA, 25 bp, Probe Sequence
gttacggtgggaggtcctatataag

SEQ ID NO: 84052 - DNA, 25 bp, Probe Sequence
ttgcatagaggtgttcatggtagtc

SEQ ID NO: 84053 - DNA, 25 bp, Probe Sequence
tgttacggtgggaggtcctatataa

SEQ ID NO: 84054 - DNA, 25 bp, Probe Sequence
acaggaaacagctattgaccattag

SEQ ID NO: 84055 - DNA, 25 bp, Probe Sequence
cacaggaaacagctattgaccatta

SEQ ID NO: 84056 - DNA, 25 bp, Probe Sequence
ctgatagttattggtatttctgtgg

SEQ ID NO: 84057 - DNA, 25 bp, Probe Sequence
acggataacaagtttcacacaggaa

SEQ ID NO: 84058 - DNA, 25 bp, Probe Sequence
caggaaacagctattgaccattagg

SEQ ID NO: 84059 - DNA, 25 bp, Probe Sequence
actcagatgtgtgatgaatgaatga

SEQ ID NO: 84060 - DNA, 25 bp, Probe Sequence
ctcagatgtgtgatgaatgaatgaa

SEQ ID NO: 84061 - DNA, 25 bp, Probe Sequence
tactcagatgtgtgatgaatgaatg

SEQ ID NO: 84062 - DNA, 25 bp, Probe Sequence
gtactcagatgtgtgatgaatgaat

SEQ ID NO: 84063 - DNA, 25 bp, Probe Sequence
tgaatgaatgaaacaatgactgagg

SEQ ID NO: 84064 - DNA, 25 bp, Probe Sequence
gaatgaatgaaacaatgactgaggc

SEQ ID NO: 84065 - DNA, 25 bp, Probe Sequence
cagatgtgtgatgaatgaatgaaac

SEQ ID NO: 84066 - DNA, 25 bp, Probe Sequence
aatgaatgaaacaatgactgaggct

SEQ ID NO: 84067 - DNA, 25 bp, Probe Sequence
tgatgaatgaatgaaacaatgactg

SEQ ID NO: 84068 - DNA, 25 bp, Probe Sequence
gtgatgaatgaatgaaacaatgact

SEQ ID NO: 84069 - DNA, 25 bp, Probe Sequence
tcagatgtgtgatgaatgaatgaaa

SEQ ID NO: 84070 - DNA, 25 bp, Probe Sequence
atgaatgaaacaatgactgaggctg

SEQ ID NO: 84071 - DNA, 25 bp, Probe Sequence
atgaatgaatgaaacaatgactgag

SEQ ID NO: 84072 - DNA, 25 bp, Probe Sequence
gatgaatgaatgaaacaatgactga

SEQ ID NO: 84073 - DNA, 25 bp, Probe Sequence
agatgtgtgatgaatgaatgaaaca

SEQ ID NO: 84074 - DNA, 25 bp, Probe Sequence
gaatgaaacaatgactgaggctgag

SEQ ID NO: 84075 - DNA, 25 bp, Probe Sequence
tgtgtgatgaatgaatgaaacaatg

SEQ ID NO: 84076 - DNA, 25 bp, Probe Sequence
tgtgatgaatgaatgaaacaatgac

SEQ ID NO: 84077 - DNA, 25 bp, Probe Sequence
gtgtgatgaatgaatgaaacaatga

SEQ ID NO: 84078 - DNA, 25 bp, Probe Sequence
gatgtgtgatgaatgaatgaaacaa

SEQ ID NO: 84079 - DNA, 25 bp, Probe Sequence
tgaatgaaacaatgactgaggctga

SEQ ID NO: 84080 - DNA, 25 bp, Probe Sequence
agtactcagatgtgtgatgaatgaa

SEQ ID NO: 84081 - DNA, 25 bp, Probe Sequence
cagtactcagatgtgtgatgaatga

SEQ ID NO: 84082 - DNA, 25 bp, Probe Sequence
atgtgtgatgaatgaatgaaacaat

SEQ ID NO: 84083 - DNA, 25 bp, Probe Sequence
ttccttggttaagctgtcttgtatt

SEQ ID NO: 84084 - DNA, 25 bp, Probe Sequence
cttccttggttaagctgtcttgtat

SEQ ID NO: 84085 - DNA, 25 bp, Probe Sequence
acttctttaggatgttattcagcca

SEQ ID NO: 84086 - DNA, 25 bp, Probe Sequence
gagattcgctgacttccttggttaa

SEQ ID NO: 84087 - DNA, 25 bp, Probe Sequence
agattcgctgacttccttggttaag

SEQ ID NO: 84088 - DNA, 25 bp, Probe Sequence
catttgttgccttctaagttgagag

SEQ ID NO: 84089 - DNA, 25 bp, Probe Sequence
actctaagctctctacttactgtga

SEQ ID NO: 84090 - DNA, 25 bp, Probe Sequence
ctctaagctctctacttactgtgag

SEQ ID NO: 84091 - DNA, 25 bp, Probe Sequence
tccctgacaatatctttggcattaa

SEQ ID NO: 84092 - DNA, 25 bp, Probe Sequence
atccctgacaatatctttggcatta

SEQ ID NO: 84093 - DNA, 25 bp, Probe Sequence
taatccctgacaatatctttggcat

SEQ ID NO: 84094 - DNA, 25 bp, Probe Sequence
ataatccctgacaatatctttggca

SEQ ID NO: 84095 - DNA, 25 bp, Probe Sequence
acttccttggttaagctgtcttgta

SEQ ID NO: 84096 - DNA, 25 bp, Probe Sequence
cttctttaggatgttattcagccat

SEQ ID NO: 84097 - DNA, 25 bp, Probe Sequence
aatccctgacaatatctttggcatt

SEQ ID NO: 84098 - DNA, 25 bp, Probe Sequence
aataatccctgacaatatctttggc

SEQ ID NO: 84099 - DNA, 25 bp, Probe Sequence
tacttctttaggatgttattcagcc

SEQ ID NO: 84100 - DNA, 25 bp, Probe Sequence
tcatttgttgccttctaagttgaga

SEQ ID NO: 84101 - DNA, 25 bp, Probe Sequence
gtcatttgttgccttctaagttgag

SEQ ID NO: 84102 - DNA, 25 bp, Probe Sequence
tttctatcaacgcaaacaccttagg

SEQ ID NO: 84103 - DNA, 25 bp, Probe Sequence
tactctaagctctctacttactgtg

SEQ ID NO: 84104 - DNA, 25 bp, Probe Sequence
gtactctaagctctctacttactgt

SEQ ID NO: 84105 - DNA, 25 bp, Probe Sequence
tggtcatttgttgccttctaagttg

SEQ ID NO: 84106 - DNA, 25 bp, Probe Sequence
gtggtcatttgttgccttctaagtt

SEQ ID NO: 84107 - DNA, 25 bp, Probe Sequence
cttggctatcttggacatacagtaa

SEQ ID NO: 84108 - DNA, 25 bp, Probe Sequence
ttggctatcttggacatacagtaat

SEQ ID NO: 84109 - DNA, 25 bp, Probe Sequence
acattagccttctggatacaagtag

SEQ ID NO: 84110 - DNA, 25 bp, Probe Sequence
cacattagccttctggatacaagta

SEQ ID NO: 84111 - DNA, 25 bp, Probe Sequence
tggctatcttggacatacagtaatt

SEQ ID NO: 84112 - DNA, 25 bp, Probe Sequence
ggctatcttggacatacagtaattg

SEQ ID NO: 84113 - DNA, 25 bp, Probe Sequence
cattagccttctggatacaagtaga

SEQ ID NO: 84114 - DNA, 25 bp, Probe Sequence
gatacaagtagaagccatcaacctg

SEQ ID NO: 84115 - DNA, 25 bp, Probe Sequence
gacacattagccttctggatacaag

SEQ ID NO: 84116 - DNA, 25 bp, Probe Sequence
gacatacagtaattgttccttgtgc

SEQ ID NO: 84117 - DNA, 25 bp, Probe Sequence
acacattagccttctggatacaagt

SEQ ID NO: 84118 - DNA, 25 bp, Probe Sequence
ggatacaagtagaagccatcaacct

SEQ ID NO: 84119 - DNA, 25 bp, Probe Sequence
gcttggctatcttggacatacagta

SEQ ID NO: 84120 - DNA, 25 bp, Probe Sequence
gctatcttggacatacagtaattgt

SEQ ID NO: 84121 - DNA, 25 bp, Probe Sequence
ggacacattagccttctggatacaa

SEQ ID NO: 84122 - DNA, 25 bp, Probe Sequence
ggacatacagtaattgttccttgtg

SEQ ID NO: 84123 - DNA, 25 bp, Probe Sequence
tggacatacagtaattgttccttgt

SEQ ID NO: 84124 - DNA, 25 bp, Probe Sequence
tcttggacatacagtaattgttcct

SEQ ID NO: 84125 - DNA, 25 bp, Probe Sequence
ttggacatacagtaattgttccttg

SEQ ID NO: 84126 - DNA, 25 bp, Probe Sequence
taggacacattagccttctggatac

SEQ ID NO: 84127 - DNA, 25 bp, Probe Sequence
gtaggacacattagccttctggata

SEQ ID NO: 84128 - DNA, 25 bp, Probe Sequence
cttggacatacagtaattgttcctt

SEQ ID NO: 84129 - DNA, 25 bp, Probe Sequence
atcttggacatacagtaattgttcc

SEQ ID NO: 84130 - DNA, 25 bp, Probe Sequence
ctgttactccactggtagtcatctg

SEQ ID NO: 84131 - DNA, 25 bp, Probe Sequence
cttggctatcttggacatacagtaa

SEQ ID NO: 84132 - DNA, 25 bp, Probe Sequence
ttggctatcttggacatacagtaat

SEQ ID NO: 84133 - DNA, 25 bp, Probe Sequence
acattagccttctggatacaagtag

SEQ ID NO: 84134 - DNA, 25 bp, Probe Sequence
cacattagccttctggatacaagta

SEQ ID NO: 84135 - DNA, 25 bp, Probe Sequence
tggctatcttggacatacagtaatt

SEQ ID NO: 84136 - DNA, 25 bp, Probe Sequence
ggctatcttggacatacagtaattg

SEQ ID NO: 84137 - DNA, 25 bp, Probe Sequence
cattagccttctggatacaagtaga

SEQ ID NO: 84138 - DNA, 25 bp, Probe Sequence
gatacaagtagaagccatcaacctg

SEQ ID NO: 84139 - DNA, 25 bp, Probe Sequence
gacacattagccttctggatacaag

SEQ ID NO: 84140 - DNA, 25 bp, Probe Sequence
gacatacagtaattgttccttgtgc

SEQ ID NO: 84141 - DNA, 25 bp, Probe Sequence
acacattagccttctggatacaagt

SEQ ID NO: 84142 - DNA, 25 bp, Probe Sequence
ggatacaagtagaagccatcaacct

SEQ ID NO: 84143 - DNA, 25 bp, Probe Sequence
gcttggctatcttggacatacagta

SEQ ID NO: 84144 - DNA, 25 bp, Probe Sequence
gctatcttggacatacagtaattgt

SEQ ID NO: 84145 - DNA, 25 bp, Probe Sequence
ggacacattagccttctggatacaa

SEQ ID NO: 84146 - DNA, 25 bp, Probe Sequence
ggacatacagtaattgttccttgtg

SEQ ID NO: 84147 - DNA, 25 bp, Probe Sequence
tggacatacagtaattgttccttgt

SEQ ID NO: 84148 - DNA, 25 bp, Probe Sequence
tcttggacatacagtaattgttcct

SEQ ID NO: 84149 - DNA, 25 bp, Probe Sequence
ttggacatacagtaattgttccttg

SEQ ID NO: 84150 - DNA, 25 bp, Probe Sequence
taggacacattagccttctggatac

SEQ ID NO: 84151 - DNA, 25 bp, Probe Sequence
gtaggacacattagccttctggata

SEQ ID NO: 84152 - DNA, 25 bp, Probe Sequence
cttggacatacagtaattgttcctt

SEQ ID NO: 84153 - DNA, 25 bp, Probe Sequence
atcttggacatacagtaattgttcc

SEQ ID NO: 84154 - DNA, 25 bp, Probe Sequence
ctgttactccactggtagtcatctg

SEQ ID NO: 84155 - DNA, 25 bp, Probe Sequence
tgttgaggaagtcaggtatatgatt

SEQ ID NO: 84156 - DNA, 25 bp, Probe Sequence
ttgttgaggaagtcaggtatatgat

SEQ ID NO: 84157 - DNA, 25 bp, Probe Sequence
ggacatgaacagtatgagaacttaa

SEQ ID NO: 84158 - DNA, 25 bp, Probe Sequence
tttgttgaggaagtcaggtatatga

SEQ ID NO: 84159 - DNA, 25 bp, Probe Sequence
tgaggaagtcaggtatatgatttca

SEQ ID NO: 84160 - DNA, 25 bp, Probe Sequence
ggaagtcaggtatatgatttcaagt

SEQ ID NO: 84161 - DNA, 25 bp, Probe Sequence
gttgaggaagtcaggtatatgattt

SEQ ID NO: 84162 - DNA, 25 bp, Probe Sequence
gggacatgaacagtatgagaactta

SEQ ID NO: 84163 - DNA, 25 bp, Probe Sequence
taacaaacttgaaagtgtgtgtacg

SEQ ID NO: 84164 - DNA, 25 bp, Probe Sequence
acctgtaattccagctacttaagag

SEQ ID NO: 84165 - DNA, 25 bp, Probe Sequence
cacctgtaattccagctacttaaga

SEQ ID NO: 84166 - DNA, 25 bp, Probe Sequence
aggaagtcaggtatatgatttcaag

SEQ ID NO: 84167 - DNA, 25 bp, Probe Sequence
gaggaagtcaggtatatgatttcaa

SEQ ID NO: 84168 - DNA, 25 bp, Probe Sequence
ttgaggaagtcaggtatatgatttc

SEQ ID NO: 84169 - DNA, 25 bp, Probe Sequence
tgctcaaagagttacactaacaaac

SEQ ID NO: 84170 - DNA, 25 bp, Probe Sequence
actaacaaacttgaaagtgtgtgta

SEQ ID NO: 84171 - DNA, 25 bp, Probe Sequence
cctgtaattccagctacttaagagg

SEQ ID NO: 84172 - DNA, 25 bp, Probe Sequence
aataataattagctgggtgtggtgg

SEQ ID NO: 84173 - DNA, 25 bp, Probe Sequence
ctgtaattccagctacttaagaggc

SEQ ID NO: 84174 - DNA, 25 bp, Probe Sequence
ctaacaaacttgaaagtgtgtgtac

SEQ ID NO: 84175 - DNA, 25 bp, Probe Sequence
aaactgtatgacacccagaatatgg

SEQ ID NO: 84176 - DNA, 25 bp, Probe Sequence
atgctcaaagagttacactaacaaa

SEQ ID NO: 84177 - DNA, 25 bp, Probe Sequence
agggacatgaacagtatgagaactt

SEQ ID NO: 84178 - DNA, 25 bp, Probe Sequence
taataattagctgggtgtggtggta

SEQ ID NO: 84179 - DNA, 25 bp, Probe Sequence
caatcttctctgacttctctcatca

SEQ ID NO: 84180 - DNA, 25 bp, Probe Sequence
tcaatcttctctgacttctctcatc

SEQ ID NO: 84181 - DNA, 25 bp, Probe Sequence
ctcaatcttctctgacttctctcat

SEQ ID NO: 84182 - DNA, 25 bp, Probe Sequence
cctcaatcttctctgacttctctca

SEQ ID NO: 84183 - DNA, 25 bp, Probe Sequence
ggaccttcttcagtctgtatgtaat

SEQ ID NO: 84184 - DNA, 25 bp, Probe Sequence
cattaatactgttcaaggcactctg

SEQ ID NO: 84185 - DNA, 25 bp, Probe Sequence
aatacagtgtcacaggtgctatgaa

SEQ ID NO: 84186 - DNA, 25 bp, Probe Sequence
gcattaatactgttcaaggcactct

SEQ ID NO: 84187 - DNA, 25 bp, Probe Sequence
agcattaatactgttcaaggcactc

SEQ ID NO: 84188 - DNA, 25 bp, Probe Sequence
gagcattaatactgttcaaggcact

SEQ ID NO: 84189 - DNA, 25 bp, Probe Sequence
agtggagcattaatactgttcaagg

SEQ ID NO: 84190 - DNA, 25 bp, Probe Sequence
gaccttcttcagtctgtatgtaatt

SEQ ID NO: 84191 - DNA, 25 bp, Probe Sequence
cggaccttcttcagtctgtatgtaa

SEQ ID NO: 84192 - DNA, 25 bp, Probe Sequence
tcccatagtttcattctctacccta

SEQ ID NO: 84193 - DNA, 25 bp, Probe Sequence
tttcatcccttcccatagtttcatt

SEQ ID NO: 84194 - DNA, 25 bp, Probe Sequence
atttcatcccttcccatagtttcat

SEQ ID NO: 84195 - DNA, 25 bp, Probe Sequence
ggagcacaaagaaaggaataatgat

SEQ ID NO: 84196 - DNA, 25 bp, Probe Sequence
aggagcacaaagaaaggaataatga

SEQ ID NO: 84197 - DNA, 25 bp, Probe Sequence
caggagcacaaagaaaggaataatg

SEQ ID NO: 84198 - DNA, 25 bp, Probe Sequence
cttcccatagtttcattctctaccc

SEQ ID NO: 84199 - DNA, 25 bp, Probe Sequence
ccttcccatagtttcattctctacc

SEQ ID NO: 84200 - DNA, 25 bp, Probe Sequence
cccttcccatagtttcattctctac

SEQ ID NO: 84201 - DNA, 25 bp, Probe Sequence
tcccttcccatagtttcattctcta

SEQ ID NO: 84202 - DNA, 25 bp, Probe Sequence
gcctcaatcttctctgacttctctc

SEQ ID NO: 84203 - DNA, 25 bp, Probe Sequence
ggcgtgtcaataatatcactctgta

SEQ ID NO: 84204 - DNA, 25 bp, Probe Sequence
gcgtgtcaataatatcactctgtac

SEQ ID NO: 84205 - DNA, 25 bp, Probe Sequence
gtacatccacaaacagacgataacg

SEQ ID NO: 84206 - DNA, 25 bp, Probe Sequence
tacatccacaaacagacgataacgg

SEQ ID NO: 84207 - DNA, 25 bp, Probe Sequence
gtgtaaaccttaaactgcattctag

SEQ ID NO: 84208 - DNA, 25 bp, Probe Sequence
gttcacgggagactttatctgacag

SEQ ID NO: 84209 - DNA, 25 bp, Probe Sequence
agttcacgggagactttatctgaca

SEQ ID NO: 84210 - DNA, 25 bp, Probe Sequence
acggctctctcttttataggtgtaa

SEQ ID NO: 84211 - DNA, 25 bp, Probe Sequence
aacggctctctcttttataggtgta

SEQ ID NO: 84212 - DNA, 25 bp, Probe Sequence
taacggctctctcttttataggtgt

SEQ ID NO: 84213 - DNA, 25 bp, Probe Sequence
ataacggctctctcttttataggtg

SEQ ID NO: 84214 - DNA, 25 bp, Probe Sequence
acgataacggctctctcttttatag

SEQ ID NO: 84215 - DNA, 25 bp, Probe Sequence
gacgataacggctctctcttttata

SEQ ID NO: 84216 - DNA, 25 bp, Probe Sequence
gataacggctctctcttttataggt

SEQ ID NO: 84217 - DNA, 25 bp, Probe Sequence
gggcgtgtcaataatatcactctgt

SEQ ID NO: 84218 - DNA, 25 bp, Probe Sequence
cggctctctcttttataggtgtaaa

SEQ ID NO: 84219 - DNA, 25 bp, Probe Sequence
cgataacggctctctcttttatagg

SEQ ID NO: 84220 - DNA, 25 bp, Probe Sequence
ggtgtaaaccttaaactgcattcta

SEQ ID NO: 84221 - DNA, 25 bp, Probe Sequence
cgtgtcaataatatcactctgtaca

SEQ ID NO: 84222 - DNA, 25 bp, Probe Sequence
ggctctctcttttataggtgtaaac

SEQ ID NO: 84223 - DNA, 25 bp, Probe Sequence
tgacatacttcgggtatacatatca

SEQ ID NO: 84224 - DNA, 25 bp, Probe Sequence
agacgataacggctctctcttttat

SEQ ID NO: 84225 - DNA, 25 bp, Probe Sequence
actttccaaaatgtcgttacaactc

SEQ ID NO: 84226 - DNA, 25 bp, Probe Sequence
acatacttcgggtatacatatcagt

SEQ ID NO: 84227 - DNA, 25 bp, Probe Sequence
attgagggactactttccagaattt

SEQ ID NO: 84228 - DNA, 25 bp, Probe Sequence
gattgagggactactttccagaatt

SEQ ID NO: 84229 - DNA, 25 bp, Probe Sequence
ttgagggactactttccagaatttg

SEQ ID NO: 84230 - DNA, 25 bp, Probe Sequence
agattgagggactactttccagaat

SEQ ID NO: 84231 - DNA, 25 bp, Probe Sequence
aagattgagggactactttccagaa

SEQ ID NO: 84232 - DNA, 25 bp, Probe Sequence
gaagattgagggactactttccaga

SEQ ID NO: 84233 - DNA, 25 bp, Probe Sequence
aaatcgaagattgagggactacttt

SEQ ID NO: 84234 - DNA, 25 bp, Probe Sequence
aatcgaagattgagggactactttc

SEQ ID NO: 84235 - DNA, 25 bp, Probe Sequence
gaaatcgaagattgagggactactt

SEQ ID NO: 84236 - DNA, 25 bp, Probe Sequence
agggactactttccagaatttgctc

SEQ ID NO: 84237 - DNA, 25 bp, Probe Sequence
gagggactactttccagaatttgct

SEQ ID NO: 84238 - DNA, 25 bp, Probe Sequence
cgaagattgagggactactttccag

SEQ ID NO: 84239 - DNA, 25 bp, Probe Sequence
tgagggactactttccagaatttgc

SEQ ID NO: 84240 - DNA, 25 bp, Probe Sequence
atcgaagattgagggactactttcc

SEQ ID NO: 84241 - DNA, 25 bp, Probe Sequence
ggaaatcgaagattgagggactact

SEQ ID NO: 84242 - DNA, 25 bp, Probe Sequence
gggactactttccagaatttgctcg

SEQ ID NO: 84243 - DNA, 25 bp, Probe Sequence
gggaaatcgaagattgagggactac

SEQ ID NO: 84244 - DNA, 25 bp, Probe Sequence
tcgaagattgagggactactttcca

SEQ ID NO: 84245 - DNA, 25 bp, Probe Sequence
ccatctcgtgatcctgttcctcaac

SEQ ID NO: 84246 - DNA, 25 bp, Probe Sequence
tgggaaatcgaagattgagggacta

SEQ ID NO: 84247 - DNA, 25 bp, Probe Sequence
atctcgtgatcctgttcctcaacaa

SEQ ID NO: 84248 - DNA, 25 bp, Probe Sequence
tctcgtgatcctgttcctcaacaag

SEQ ID NO: 84249 - DNA, 25 bp, Probe Sequence
catctcgtgatcctgttcctcaaca

SEQ ID NO: 84250 - DNA, 25 bp, Probe Sequence
ctgggaaatcgaagattgagggact

SEQ ID NO: 84251 - DNA, 25 bp, Probe Sequence
ttgctgggaaatcgaagattgaggg

SEQ ID NO: 84252 - DNA, 25 bp, Probe Sequence
tattgatagcataggacagaggaag

SEQ ID NO: 84253 - DNA, 25 bp, Probe Sequence
ttattgatagcataggacagaggaa

SEQ ID NO: 84254 - DNA, 25 bp, Probe Sequence
attgatagcataggacagaggaagg

SEQ ID NO: 84255 - DNA, 25 bp, Probe Sequence
ttgatagcataggacagaggaagga

SEQ ID NO: 84256 - DNA, 25 bp, Probe Sequence
tgatagcataggacagaggaaggag

SEQ ID NO: 84257 - DNA, 25 bp, Probe Sequence
tttattgatagcataggacagagga

SEQ ID NO: 84258 - DNA, 25 bp, Probe Sequence
gggctgggaaacttatttattgata

SEQ ID NO: 84259 - DNA, 25 bp, Probe Sequence
gatagcataggacagaggaaggagg

SEQ ID NO: 84260 - DNA, 25 bp, Probe Sequence
ctccttactctcaccaaagcaattt

SEQ ID NO: 84261 - DNA, 25 bp, Probe Sequence
atttattgatagcataggacagagg

SEQ ID NO: 84262 - DNA, 25 bp, Probe Sequence
ggctgggaaacttatttattgatag

SEQ ID NO: 84263 - DNA, 25 bp, Probe Sequence
cttcccagtcatcccttactcttac

SEQ ID NO: 84264 - DNA, 25 bp, Probe Sequence
catcccttactcttacagtagcaaa

SEQ ID NO: 84265 - DNA, 25 bp, Probe Sequence
cagtcatcccttactcttacagtag

SEQ ID NO: 84266 - DNA, 25 bp, Probe Sequence
aatttctggatgatgatgattgttt

SEQ ID NO: 84267 - DNA, 25 bp, Probe Sequence
cttacagtagcaaataagacgcctg

SEQ ID NO: 84268 - DNA, 25 bp, Probe Sequence
tcatcccttactcttacagtagcaa

SEQ ID NO: 84269 - DNA, 25 bp, Probe Sequence
atcccttactcttacagtagcaaat

SEQ ID NO: 84270 - DNA, 25 bp, Probe Sequence
ccagtcatcccttactcttacagta

SEQ ID NO: 84271 - DNA, 25 bp, Probe Sequence
ttcccagtcatcccttactcttaca

SEQ ID NO: 84272 - DNA, 25 bp, Probe Sequence
agtcatcccttactcttacagtagc

SEQ ID NO: 84273 - DNA, 25 bp, Probe Sequence
atttcggaataaatggatttagcca

SEQ ID NO: 84274 - DNA, 25 bp, Probe Sequence
gagacaaatgtgtagaccttagcca

SEQ ID NO: 84275 - DNA, 25 bp, Probe Sequence
ctgggaaacttatttattgatagca

SEQ ID NO: 84276 - DNA, 25 bp, Probe Sequence
tggtaaagaagaactcaaatcaaga

SEQ ID NO: 84277 - DNA, 25 bp, Probe Sequence
acaattctgagaggaaatgtatagc

SEQ ID NO: 84278 - DNA, 25 bp, Probe Sequence
tacatgacctatggactgtcctact

SEQ ID NO: 84279 - DNA, 25 bp, Probe Sequence
gtacatgacctatggactgtcctac

SEQ ID NO: 84280 - DNA, 25 bp, Probe Sequence
agtacatgacctatggactgtccta

SEQ ID NO: 84281 - DNA, 25 bp, Probe Sequence
ggtaaagaagaactcaaatcaagaa

SEQ ID NO: 84282 - DNA, 25 bp, Probe Sequence
ttggtaaagaagaactcaaatcaag

SEQ ID NO: 84283 - DNA, 25 bp, Probe Sequence
attctgagaggaaatgtatagctgt

SEQ ID NO: 84284 - DNA, 25 bp, Probe Sequence
gaacatctacgtattagtcatcgct

SEQ ID NO: 84285 - DNA, 25 bp, Probe Sequence
tctgagaggaaatgtatagctgtaa

SEQ ID NO: 84286 - DNA, 25 bp, Probe Sequence
gactgtcctactggcagaacatcta

SEQ ID NO: 84287 - DNA, 25 bp, Probe Sequence
aacatctacgtattagtcatcgcta

SEQ ID NO: 84288 - DNA, 25 bp, Probe Sequence
ttctgagaggaaatgtatagctgta

SEQ ID NO: 84289 - DNA, 25 bp, Probe Sequence
ggcagaacatctacgtattagtcat

SEQ ID NO: 84290 - DNA, 25 bp, Probe Sequence
tactggcagaacatctacgtattag

SEQ ID NO: 84291 - DNA, 25 bp, Probe Sequence
ctactggcagaacatctacgtatta

SEQ ID NO: 84292 - DNA, 25 bp, Probe Sequence
agaacatctacgtattagtcatcgc

SEQ ID NO: 84293 - DNA, 25 bp, Probe Sequence
gcagaacatctacgtattagtcatc

SEQ ID NO: 84294 - DNA, 25 bp, Probe Sequence
ctggcagaacatctacgtattagtc

SEQ ID NO: 84295 - DNA, 25 bp, Probe Sequence
actgtcctactggcagaacatctac

SEQ ID NO: 84296 - DNA, 25 bp, Probe Sequence
cagaacatctacgtattagtcatcg

SEQ ID NO: 84297 - DNA, 25 bp, Probe Sequence
aattctgagaggaaatgtatagctg

SEQ ID NO: 84298 - DNA, 25 bp, Probe Sequence
caattctgagaggaaatgtatagct

SEQ ID NO: 84299 - DNA, 25 bp, Probe Sequence
ctgagaggaaatgtatagctgtaaa

SEQ ID NO: 84300 - DNA, 25 bp, Probe Sequence
ttgtattgtgaaggtaatgtggttg

SEQ ID NO: 84301 - DNA, 25 bp, Probe Sequence
ttgtgaaggtaatgtggttgtgata

SEQ ID NO: 84302 - DNA, 25 bp, Probe Sequence
tattgtgaaggtaatgtggttgtga

SEQ ID NO: 84303 - DNA, 25 bp, Probe Sequence
gtattgtgaaggtaatgtggttgtg

SEQ ID NO: 84304 - DNA, 25 bp, Probe Sequence
tgtattgtgaaggtaatgtggttgt

SEQ ID NO: 84305 - DNA, 25 bp, Probe Sequence
tgtgaaggtaatgtggttgtgatag

SEQ ID NO: 84306 - DNA, 25 bp, Probe Sequence
attgtgaaggtaatgtggttgtgat

SEQ ID NO: 84307 - DNA, 25 bp, Probe Sequence
attgtattgtgaaggtaatgtggtt

SEQ ID NO: 84308 - DNA, 25 bp, Probe Sequence
tggttactcataagagaacacaaca

SEQ ID NO: 84309 - DNA, 25 bp, Probe Sequence
ggttactcataagagaacacaacag

SEQ ID NO: 84310 - DNA, 25 bp, Probe Sequence
ctggttactcataagagaacacaac

SEQ ID NO: 84311 - DNA, 25 bp, Probe Sequence
tctggttactcataagagaacacaa

SEQ ID NO: 84312 - DNA, 25 bp, Probe Sequence
tattgtattgtgaaggtaatgtggt

SEQ ID NO: 84313 - DNA, 25 bp, Probe Sequence
gtgaaggtaatgtggttgtgatagc

SEQ ID NO: 84314 - DNA, 25 bp, Probe Sequence
gttactcataagagaacacaacagt

SEQ ID NO: 84315 - DNA, 25 bp, Probe Sequence
tactcataagagaacacaacagtgg

SEQ ID NO: 84316 - DNA, 25 bp, Probe Sequence
ccttgtactcataagagaacacaca

SEQ ID NO: 84317 - DNA, 25 bp, Probe Sequence
ttgtactcataagagaacacacagt

SEQ ID NO: 84318 - DNA, 25 bp, Probe Sequence
cataagagaacacaacagtggagaa

SEQ ID NO: 84319 - DNA, 25 bp, Probe Sequence
tactcataagagaacacacagtgga

SEQ ID NO: 84320 - DNA, 25 bp, Probe Sequence
cttgtactcataagagaacacacag

SEQ ID NO: 84321 - DNA, 25 bp, Probe Sequence
ataagagaacacacagtggagagaa

SEQ ID NO: 84322 - DNA, 25 bp, Probe Sequence
ctcataagagaacacaacagtggag

SEQ ID NO: 84323 - DNA, 25 bp, Probe Sequence
ttactcataagagaacacaacagtg

SEQ ID NO: 84324 - DNA, 25 bp, Probe Sequence
aagtagaggaagtggaagaagtaga

SEQ ID NO: 84325 - DNA, 25 bp, Probe Sequence
atgaagatgaagaagaagaagcaga

SEQ ID NO: 84326 - DNA, 25 bp, Probe Sequence
ggaggatgaagatgaagaagaagaa

SEQ ID NO: 84327 - DNA, 25 bp, Probe Sequence
attgaagaagaggaggatgaagatg

SEQ ID NO: 84328 - DNA, 25 bp, Probe Sequence
ggaggatgaagagaagattgatgaa

SEQ ID NO: 84329 - DNA, 25 bp, Probe Sequence
acaacaataatcacaacaacgaagt

SEQ ID NO: 84330 - DNA, 25 bp, Probe Sequence
gaagtagaggaagtggaagaagtag

SEQ ID NO: 84331 - DNA, 25 bp, Probe Sequence
aatagaaggagatgaggaggatgaa

SEQ ID NO: 84332 - DNA, 25 bp, Probe Sequence
acaggacaacaataatcacaacaac

SEQ ID NO: 84333 - DNA, 25 bp, Probe Sequence
caacaggacaacaataatcacaaca

SEQ ID NO: 84334 - DNA, 25 bp, Probe Sequence
taagcaacaggacaacaataatcac

SEQ ID NO: 84335 - DNA, 25 bp, Probe Sequence
gtaagcaacaggacaacaataatca

SEQ ID NO: 84336 - DNA, 25 bp, Probe Sequence
agaatacggagatggatacagaatg

SEQ ID NO: 84337 - DNA, 25 bp, Probe Sequence
gatgaagatgaagaagaagaagcag

SEQ ID NO: 84338 - DNA, 25 bp, Probe Sequence
ggatgaagagaagattgatgaacct

SEQ ID NO: 84339 - DNA, 25 bp, Probe Sequence
aggatgaagagaagattgatgaacc

SEQ ID NO: 84340 - DNA, 25 bp, Probe Sequence
gaggaggatgaagatgaagaagaag

SEQ ID NO: 84341 - DNA, 25 bp, Probe Sequence
gaagaggaggatgaagatgaagaag

SEQ ID NO: 84342 - DNA, 25 bp, Probe Sequence
gaagaagaggaggatgaagatgaag

SEQ ID NO: 84343 - DNA, 25 bp, Probe Sequence
aacaggacaacaataatcacaacaa

SEQ ID NO: 84344 - DNA, 25 bp, Probe Sequence
ggtaagcaacaggacaacaataatc

SEQ ID NO: 84345 - DNA, 25 bp, Probe Sequence
agtagaggaagtggaagaagtagag

SEQ ID NO: 84346 - DNA, 25 bp, Probe Sequence
tgaagatgaagaagaagaagcagag

SEQ ID NO: 84347 - DNA, 25 bp, Probe Sequence
gaggaggatgaagagaagattgatg

SEQ ID NO: 84348 - DNA, 25 bp, Probe Sequence
ttgctcacaatactgaactatcgtt

SEQ ID NO: 84349 - DNA, 25 bp, Probe Sequence
tacagaatgaatgtgtgagactctt

SEQ ID NO: 84350 - DNA, 25 bp, Probe Sequence
ttacagaatgaatgtgtgagactct

SEQ ID NO: 84351 - DNA, 25 bp, Probe Sequence
gtcttacttatttctcggtgctttg

SEQ ID NO: 84352 - DNA, 25 bp, Probe Sequence
tagaaatacctcacactgggataac

SEQ ID NO: 84353 - DNA, 25 bp, Probe Sequence
tgtcttacttatttctcggtgcttt

SEQ ID NO: 84354 - DNA, 25 bp, Probe Sequence
ctgtcttacttatttctcggtgctt

SEQ ID NO: 84355 - DNA, 25 bp, Probe Sequence
gatagaaatacctcacactgggata

SEQ ID NO: 84356 - DNA, 25 bp, Probe Sequence
aaactgtcttacttatttctcggtg

SEQ ID NO: 84357 - DNA, 25 bp, Probe Sequence
tggacctgatatttaacaagcactc

SEQ ID NO: 84358 - DNA, 25 bp, Probe Sequence
ctggacctgatatttaacaagcact

SEQ ID NO: 84359 - DNA, 25 bp, Probe Sequence
cattgctcacaatactgaactatcg

SEQ ID NO: 84360 - DNA, 25 bp, Probe Sequence
aactgtcttacttatttctcggtgc

SEQ ID NO: 84361 - DNA, 25 bp, Probe Sequence
attgctcacaatactgaactatcgt

SEQ ID NO: 84362 - DNA, 25 bp, Probe Sequence
actggacctgatatttaacaagcac

SEQ ID NO: 84363 - DNA, 25 bp, Probe Sequence
cactggacctgatatttaacaagca

SEQ ID NO: 84364 - DNA, 25 bp, Probe Sequence
gaacattgctcacaatactgaacta

SEQ ID NO: 84365 - DNA, 25 bp, Probe Sequence
atagaaatacctcacactgggataa

SEQ ID NO: 84366 - DNA, 25 bp, Probe Sequence
taatttagccttacctagaccctgt

SEQ ID NO: 84367 - DNA, 25 bp, Probe Sequence
acattgctcacaatactgaactatc

SEQ ID NO: 84368 - DNA, 25 bp, Probe Sequence
tttcacaaaggtcctactaaacaag

SEQ ID NO: 84369 - DNA, 25 bp, Probe Sequence
ttaatttagccttacctagaccctg

SEQ ID NO: 84370 - DNA, 25 bp, Probe Sequence
cttaatttagccttacctagaccct

SEQ ID NO: 84371 - DNA, 25 bp, Probe Sequence
tttgatagaaatacctcacactggg

SEQ ID NO: 84372 - DNA, 25 bp, Probe Sequence
aggaagaatatctatcagccaacaa

SEQ ID NO: 84373 - DNA, 25 bp, Probe Sequence
aaggaagaatatctatcagccaaca

SEQ ID NO: 84374 - DNA, 25 bp, Probe Sequence
gaaggaagaatatctatcagccaac

SEQ ID NO: 84375 - DNA, 25 bp, Probe Sequence
agaaggaagaatatctatcagccaa

SEQ ID NO: 84376 - DNA, 25 bp, Probe Sequence
aagaaggaagaatatctatcagcca

SEQ ID NO: 84377 - DNA, 25 bp, Probe Sequence
tatggcagtggaacagatgtaagaa

SEQ ID NO: 84378 - DNA, 25 bp, Probe Sequence
aatctagtaagtggagaggcaagtc

SEQ ID NO: 84379 - DNA, 25 bp, Probe Sequence
ctatggcagtggaacagatgtaaga

SEQ ID NO: 84380 - DNA, 25 bp, Probe Sequence
gtctaattaccttcacgaatgatgg

SEQ ID NO: 84381 - DNA, 25 bp, Probe Sequence
tctatggcagtggaacagatgtaag

SEQ ID NO: 84382 - DNA, 25 bp, Probe Sequence
tctaattaccttcacgaatgatggc

SEQ ID NO: 84383 - DNA, 25 bp, Probe Sequence
tgctcattaatacagagaacacctc

SEQ ID NO: 84384 - DNA, 25 bp, Probe Sequence
atctagtaagtggagaggcaagtct

SEQ ID NO: 84385 - DNA, 25 bp, Probe Sequence
gatattgaagctcctcactctaaca

SEQ ID NO: 84386 - DNA, 25 bp, Probe Sequence
tattgaagctcctcactctaacaac

SEQ ID NO: 84387 - DNA, 25 bp, Probe Sequence
tcagatattgaagctcctcactcta

SEQ ID NO: 84388 - DNA, 25 bp, Probe Sequence
aatcagatattgaagctcctcactc

SEQ ID NO: 84389 - DNA, 25 bp, Probe Sequence
agatattgaagctcctcactctaac

SEQ ID NO: 84390 - DNA, 25 bp, Probe Sequence
cagatattgaagctcctcactctaa

SEQ ID NO: 84391 - DNA, 25 bp, Probe Sequence
atattgaagctcctcactctaacaa

SEQ ID NO: 84392 - DNA, 25 bp, Probe Sequence
gcccagaagagttagaggtataatg

SEQ ID NO: 84393 - DNA, 25 bp, Probe Sequence
atatggaatggtgagaagagaaaca

SEQ ID NO: 84394 - DNA, 25 bp, Probe Sequence
tgcccagaagagttagaggtataat

SEQ ID NO: 84395 - DNA, 25 bp, Probe Sequence
gatgctgctcattaatacagagaac

SEQ ID NO: 84396 - DNA, 25 bp, Probe Sequence
ccaccatacaatagagatagaggaa

SEQ ID NO: 84397 - DNA, 25 bp, Probe Sequence
tacggagtaagaagttaagatgctt

SEQ ID NO: 84398 - DNA, 25 bp, Probe Sequence
caattcaatcacatcactagcactt

SEQ ID NO: 84399 - DNA, 25 bp, Probe Sequence
ttcagcaattcaatcacatcactag

SEQ ID NO: 84400 - DNA, 25 bp, Probe Sequence
attcagcaattcaatcacatcacta

SEQ ID NO: 84401 - DNA, 25 bp, Probe Sequence
tcagcaattcaatcacatcactagc

SEQ ID NO: 84402 - DNA, 25 bp, Probe Sequence
acggagtaagaagttaagatgctta

SEQ ID NO: 84403 - DNA, 25 bp, Probe Sequence
acttctctggattcagcaattcaat

SEQ ID NO: 84404 - DNA, 25 bp, Probe Sequence
gcaattcaatcacatcactagcact

SEQ ID NO: 84405 - DNA, 25 bp, Probe Sequence
agcaattcaatcacatcactagcac

SEQ ID NO: 84406 - DNA, 25 bp, Probe Sequence
cagcaattcaatcacatcactagca

SEQ ID NO: 84407 - DNA, 25 bp, Probe Sequence
gacttctctggattcagcaattcaa

SEQ ID NO: 84408 - DNA, 25 bp, Probe Sequence
ttacggagtaagaagttaagatgct

SEQ ID NO: 84409 - DNA, 25 bp, Probe Sequence
gattcagcaattcaatcacatcact

SEQ ID NO: 84410 - DNA, 25 bp, Probe Sequence
cttctctggattcagcaattcaatc

SEQ ID NO: 84411 - DNA, 25 bp, Probe Sequence
ttctctggattcagcaattcaatca

SEQ ID NO: 84412 - DNA, 25 bp, Probe Sequence
ctggattcagcaattcaatcacatc

SEQ ID NO: 84413 - DNA, 25 bp, Probe Sequence
caccatacaatagagatagaggaat

SEQ ID NO: 84414 - DNA, 25 bp, Probe Sequence
ggattcagcaattcaatcacatcac

SEQ ID NO: 84415 - DNA, 25 bp, Probe Sequence
tctggattcagcaattcaatcacat

SEQ ID NO: 84416 - DNA, 25 bp, Probe Sequence
agacttctctggattcagcaattca

SEQ ID NO: 84417 - DNA, 25 bp, Probe Sequence
cccaccatacaatagagatagagga

SEQ ID NO: 84418 - DNA, 25 bp, Probe Sequence
acccaccatacaatagagatagagg

SEQ ID NO: 84419 - DNA, 25 bp, Probe Sequence
tggattcagcaattcaatcacatca

SEQ ID NO: 84420 - DNA, 25 bp, Probe Sequence
ttagcagacaggtgataactcagaa

SEQ ID NO: 84421 - DNA, 25 bp, Probe Sequence
gaacttgctgccattagtaaggatt

SEQ ID NO: 84422 - DNA, 25 bp, Probe Sequence
agaacttgctgccattagtaaggat

SEQ ID NO: 84423 - DNA, 25 bp, Probe Sequence
ctcagaacttgctgccattagtaag

SEQ ID NO: 84424 - DNA, 25 bp, Probe Sequence
gagacagataaattccaggcaacta

SEQ ID NO: 84425 - DNA, 25 bp, Probe Sequence
tagagacagataaattccaggcaac

SEQ ID NO: 84426 - DNA, 25 bp, Probe Sequence
cattagtaaggatttcgtgagtggg

SEQ ID NO: 84427 - DNA, 25 bp, Probe Sequence
ctagagacagataaattccaggcaa

SEQ ID NO: 84428 - DNA, 25 bp, Probe Sequence
agacagataaattccaggcaactag

SEQ ID NO: 84429 - DNA, 25 bp, Probe Sequence
ctgccattagtaaggatttcgtgag

SEQ ID NO: 84430 - DNA, 25 bp, Probe Sequence
gccattagtaaggatttcgtgagtg

SEQ ID NO: 84431 - DNA, 25 bp, Probe Sequence
ctttagcagacaggtgataactcag

SEQ ID NO: 84432 - DNA, 25 bp, Probe Sequence
aacttgctgccattagtaaggattt

SEQ ID NO: 84433 - DNA, 25 bp, Probe Sequence
agagacagataaattccaggcaact

SEQ ID NO: 84434 - DNA, 25 bp, Probe Sequence
tagcagacaggtgataactcagaaa

SEQ ID NO: 84435 - DNA, 25 bp, Probe Sequence
tttagcagacaggtgataactcaga

SEQ ID NO: 84436 - DNA, 25 bp, Probe Sequence
acttgctgccattagtaaggatttc

SEQ ID NO: 84437 - DNA, 25 bp, Probe Sequence
tgccattagtaaggatttcgtgagt

SEQ ID NO: 84438 - DNA, 25 bp, Probe Sequence
cagaacttgctgccattagtaagga

SEQ ID NO: 84439 - DNA, 25 bp, Probe Sequence
tcagaacttgctgccattagtaagg

SEQ ID NO: 84440 - DNA, 25 bp, Probe Sequence
cttgctgccattagtaaggatttcg

SEQ ID NO: 84441 - DNA, 25 bp, Probe Sequence
gctagagacagataaattccaggca

SEQ ID NO: 84442 - DNA, 25 bp, Probe Sequence
tcagctagagacagataaattccag

SEQ ID NO: 84443 - DNA, 25 bp, Probe Sequence
cagctagagacagataaattccagg

SEQ ID NO: 84444 - DNA, 25 bp, Probe Sequence
ccgagagattagtggatacaagtgg

SEQ ID NO: 84445 - DNA, 25 bp, Probe Sequence
ctccgagagattagtggatacaagt

SEQ ID NO: 84446 - DNA, 25 bp, Probe Sequence
tccgagagattagtggatacaagtg

SEQ ID NO: 84447 - DNA, 25 bp, Probe Sequence
atctgagagagaacttacccactat

SEQ ID NO: 84448 - DNA, 25 bp, Probe Sequence
aatctgagagagaacttacccacta

SEQ ID NO: 84449 - DNA, 25 bp, Probe Sequence
ctgagagagaacttacccactatct

SEQ ID NO: 84450 - DNA, 25 bp, Probe Sequence
tctgagagagaacttacccactatc

SEQ ID NO: 84451 - DNA, 25 bp, Probe Sequence
agagattagtggatacaagtgggtc

SEQ ID NO: 84452 - DNA, 25 bp, Probe Sequence
gagagattagtggatacaagtgggt

SEQ ID NO: 84453 - DNA, 25 bp, Probe Sequence
aaatctgagagagaacttacccact

SEQ ID NO: 84454 - DNA, 25 bp, Probe Sequence
gattaaatccattcctagaccctcc

SEQ ID NO: 84455 - DNA, 25 bp, Probe Sequence
accagattaaatccattcctagacc

SEQ ID NO: 84456 - DNA, 25 bp, Probe Sequence
gccagttagttaccagattaaatcc

SEQ ID NO: 84457 - DNA, 25 bp, Probe Sequence
ccagattaaatccattcctagaccc

SEQ ID NO: 84458 - DNA, 25 bp, Probe Sequence
attaaatccattcctagaccctcca

SEQ ID NO: 84459 - DNA, 25 bp, Probe Sequence
cagattaaatccattcctagaccct

SEQ ID NO: 84460 - DNA, 25 bp, Probe Sequence
agattaaatccattcctagaccctc

SEQ ID NO: 84461 - DNA, 25 bp, Probe Sequence
tatcatttgctaccagtttctttct

SEQ ID NO: 84462 - DNA, 25 bp, Probe Sequence
aggactttaattgagcaatgaatga

SEQ ID NO: 84463 - DNA, 25 bp, Probe Sequence
ttaaatccattcctagaccctccag

SEQ ID NO: 84464 - DNA, 25 bp, Probe Sequence
gctccgagagattagtggatacaag

SEQ ID NO: 84465 - DNA, 25 bp, Probe Sequence
ctcaaagaaactcagagaactcaaa

SEQ ID NO: 84466 - DNA, 25 bp, Probe Sequence
atcatttgctaccagtttctttctg

SEQ ID NO: 84467 - DNA, 25 bp, Probe Sequence
gctcaaagaaactcagagaactcaa

SEQ ID NO: 84468 - DNA, 25 bp, Probe Sequence
tgttggtcaatgaaataaagcatct

SEQ ID NO: 84469 - DNA, 25 bp, Probe Sequence
tgttgttggtcaatgaaataaagca

SEQ ID NO: 84470 - DNA, 25 bp, Probe Sequence
gttgttggtcaatgaaataaagcat

SEQ ID NO: 84471 - DNA, 25 bp, Probe Sequence
atgttgttggtcaatgaaataaagc

SEQ ID NO: 84472 - DNA, 25 bp, Probe Sequence
gttggtcaatgaaataaagcatctt

SEQ ID NO: 84473 - DNA, 25 bp, Probe Sequence
ttgttggtcaatgaaataaagcatc

SEQ ID NO: 84474 - DNA, 25 bp, Probe Sequence
ggtcaatgaaataaagcatcttaca

SEQ ID NO: 84475 - DNA, 25 bp, Probe Sequence
tggtcaatgaaataaagcatcttac

SEQ ID NO: 84476 - DNA, 25 bp, Probe Sequence
cccatgttgttggtcaatgaaataa

SEQ ID NO: 84477 - DNA, 25 bp, Probe Sequence
ttggtcaatgaaataaagcatctta

SEQ ID NO: 84478 - DNA, 25 bp, Probe Sequence
catgttgttggtcaatgaaataaag

SEQ ID NO: 84479 - DNA, 25 bp, Probe Sequence
ccatgttgttggtcaatgaaataaa

SEQ ID NO: 84480 - DNA, 25 bp, Probe Sequence
gtcaatgaaataaagcatcttacag

SEQ ID NO: 84481 - DNA, 25 bp, Probe Sequence
tcaatgaaataaagcatcttacaga

SEQ ID NO: 84482 - DNA, 25 bp, Probe Sequence
gtttgacaactccagtgaggactag

SEQ ID NO: 84483 - DNA, 25 bp, Probe Sequence
ctctgaggtgatgagtgtgtctgac

SEQ ID NO: 84484 - DNA, 25 bp, Probe Sequence
ctgaggtgatgagtgtgtctgactg

SEQ ID NO: 84485 - DNA, 25 bp, Probe Sequence
caatgaaataaagcatcttacagaa

SEQ ID NO: 84486 - DNA, 25 bp, Probe Sequence
tctgaggtgatgagtgtgtctgact

SEQ ID NO: 84487 - DNA, 25 bp, Probe Sequence
cttctgaaaggctttggacttcctc

SEQ ID NO: 84488 - DNA, 25 bp, Probe Sequence
ctgcctagatcagtccttctccaaa

SEQ ID NO: 84489 - DNA, 25 bp, Probe Sequence
tttgacaactccagtgaggactagg

SEQ ID NO: 84490 - DNA, 25 bp, Probe Sequence
ctgcttctgaaaggctttggacttc

SEQ ID NO: 84491 - DNA, 25 bp, Probe Sequence
gcctagatcagtccttctccaaaag

SEQ ID NO: 84492 - DNA, 25 bp, Probe Sequence
tgtctcaatagatgctgttagtgtt

SEQ ID NO: 84493 - DNA, 25 bp, Probe Sequence
atgtctcaatagatgctgttagtgt

SEQ ID NO: 84494 - DNA, 25 bp, Probe Sequence
tgcctaagattatccagtatgagaa

SEQ ID NO: 84495 - DNA, 25 bp, Probe Sequence
ttgcctaagattatccagtatgaga

SEQ ID NO: 84496 - DNA, 25 bp, Probe Sequence
gatgtctcaatagatgctgttagtg

SEQ ID NO: 84497 - DNA, 25 bp, Probe Sequence
tacaatgtaattccgtggagatgat

SEQ ID NO: 84498 - DNA, 25 bp, Probe Sequence
ggtgatgtctcaatagatgctgtta

SEQ ID NO: 84499 - DNA, 25 bp, Probe Sequence
tgatgtctcaatagatgctgttagt

SEQ ID NO: 84500 - DNA, 25 bp, Probe Sequence
gtgatgtctcaatagatgctgttag

SEQ ID NO: 84501 - DNA, 25 bp, Probe Sequence
ctactatgatggttctgagaaggtg

SEQ ID NO: 84502 - DNA, 25 bp, Probe Sequence
ctgtgctactatgatggttctgaga

SEQ ID NO: 84503 - DNA, 25 bp, Probe Sequence
cttgcctaagattatccagtatgag

SEQ ID NO: 84504 - DNA, 25 bp, Probe Sequence
gaggtaggtgatgtctcaatagatg

SEQ ID NO: 84505 - DNA, 25 bp, Probe Sequence
gtaggtgatgtctcaatagatgctg

SEQ ID NO: 84506 - DNA, 25 bp, Probe Sequence
gtacaatgtaattccgtggagatga

SEQ ID NO: 84507 - DNA, 25 bp, Probe Sequence
gtgctactatgatggttctgagaag

SEQ ID NO: 84508 - DNA, 25 bp, Probe Sequence
acttgcctaagattatccagtatga

SEQ ID NO: 84509 - DNA, 25 bp, Probe Sequence
taggtgatgtctcaatagatgctgt

SEQ ID NO: 84510 - DNA, 25 bp, Probe Sequence
actgtgctactatgatggttctgag

SEQ ID NO: 84511 - DNA, 25 bp, Probe Sequence
acaatgtaattccgtggagatgatc

SEQ ID NO: 84512 - DNA, 25 bp, Probe Sequence
tgtgctactatgatggttctgagaa

SEQ ID NO: 84513 - DNA, 25 bp, Probe Sequence
tactatgatggttctgagaaggtgg

SEQ ID NO: 84514 - DNA, 25 bp, Probe Sequence
aacttgcctaagattatccagtatg

SEQ ID NO: 84515 - DNA, 25 bp, Probe Sequence
caacttgcctaagattatccagtat

SEQ ID NO: 84516 - DNA, 25 bp, Probe Sequence
cgaacttaatgtactgtgaggctat

SEQ ID NO: 84517 - DNA, 25 bp, Probe Sequence
taatgtactgtgaggctatcttgaa

SEQ ID NO: 84518 - DNA, 25 bp, Probe Sequence
ttaatgtactgtgaggctatcttga

SEQ ID NO: 84519 - DNA, 25 bp, Probe Sequence
acttaatgtactgtgaggctatctt

SEQ ID NO: 84520 - DNA, 25 bp, Probe Sequence
aacttaatgtactgtgaggctatct

SEQ ID NO: 84521 - DNA, 25 bp, Probe Sequence
cttaatgtactgtgaggctatcttg

SEQ ID NO: 84522 - DNA, 25 bp, Probe Sequence
gaacttaatgtactgtgaggctatc

SEQ ID NO: 84523 - DNA, 25 bp, Probe Sequence
gaacctcgaacttaatgtactgtga

SEQ ID NO: 84524 - DNA, 25 bp, Probe Sequence
agaacctcgaacttaatgtactgtg

SEQ ID NO: 84525 - DNA, 25 bp, Probe Sequence
tcgaacttaatgtactgtgaggcta

SEQ ID NO: 84526 - DNA, 25 bp, Probe Sequence
gagaacctcgaacttaatgtactgt

SEQ ID NO: 84527 - DNA, 25 bp, Probe Sequence
tgagaacctcgaacttaatgtactg

SEQ ID NO: 84528 - DNA, 25 bp, Probe Sequence
atgagaacctcgaacttaatgtact

SEQ ID NO: 84529 - DNA, 25 bp, Probe Sequence
aacctcgaacttaatgtactgtgag

SEQ ID NO: 84530 - DNA, 25 bp, Probe Sequence
aagagggaacaacaagccattattt

SEQ ID NO: 84531 - DNA, 25 bp, Probe Sequence
aaagagggaacaacaagccattatt

SEQ ID NO: 84532 - DNA, 25 bp, Probe Sequence
tccaatgagaacctcgaacttaatg

SEQ ID NO: 84533 - DNA, 25 bp, Probe Sequence
gtccaatgagaacctcgaacttaat

SEQ ID NO: 84534 - DNA, 25 bp, Probe Sequence
aagccattatttccctgtctttgaa

SEQ ID NO: 84535 - DNA, 25 bp, Probe Sequence
atatagaaggtagggcaggtttgag

SEQ ID NO: 84536 - DNA, 25 bp, Probe Sequence
aatgagaacctcgaacttaatgtac

SEQ ID NO: 84537 - DNA, 25 bp, Probe Sequence
caatgagaacctcgaacttaatgta

SEQ ID NO: 84538 - DNA, 25 bp, Probe Sequence
ccaatgagaacctcgaacttaatgt

SEQ ID NO: 84539 - DNA, 25 bp, Probe Sequence
tatatagaaggtagggcaggtttga

SEQ ID NO: 84540 - DNA, 25 bp, Probe Sequence
atacagaacattccatccaatagca

SEQ ID NO: 84541 - DNA, 25 bp, Probe Sequence
tacagaacattccatccaatagcaa

SEQ ID NO: 84542 - DNA, 25 bp, Probe Sequence
gcatatacagaacattccatccaat

SEQ ID NO: 84543 - DNA, 25 bp, Probe Sequence
ggcatatacagaacattccatccaa

SEQ ID NO: 84544 - DNA, 25 bp, Probe Sequence
aacattccatccaatagcaacagaa

SEQ ID NO: 84545 - DNA, 25 bp, Probe Sequence
gaacattccatccaatagcaacaga

SEQ ID NO: 84546 - DNA, 25 bp, Probe Sequence
agaacattccatccaatagcaacag

SEQ ID NO: 84547 - DNA, 25 bp, Probe Sequence
gcagtaacagtaggagacttcaata

SEQ ID NO: 84548 - DNA, 25 bp, Probe Sequence
tatacagaacattccatccaatagc

SEQ ID NO: 84549 - DNA, 25 bp, Probe Sequence
agaagttatggttagcagagatcac

SEQ ID NO: 84550 - DNA, 25 bp, Probe Sequence
cagaagttatggttagcagagatca

SEQ ID NO: 84551 - DNA, 25 bp, Probe Sequence
gaagttatggttagcagagatcaca

SEQ ID NO: 84552 - DNA, 25 bp, Probe Sequence
cagaacattccatccaatagcaaca

SEQ ID NO: 84553 - DNA, 25 bp, Probe Sequence
acagaacattccatccaatagcaac

SEQ ID NO: 84554 - DNA, 25 bp, Probe Sequence
agtaacagtaggagacttcaatacc

SEQ ID NO: 84555 - DNA, 25 bp, Probe Sequence
aagttatggttagcagagatcacac

SEQ ID NO: 84556 - DNA, 25 bp, Probe Sequence
gcagaagttatggttagcagagatc

SEQ ID NO: 84557 - DNA, 25 bp, Probe Sequence
cagtaacagtaggagacttcaatac

SEQ ID NO: 84558 - DNA, 25 bp, Probe Sequence
ggcagaagttatggttagcagagat

SEQ ID NO: 84559 - DNA, 25 bp, Probe Sequence
acattccatccaatagcaacagaat

SEQ ID NO: 84560 - DNA, 25 bp, Probe Sequence
cattccatccaatagcaacagaata

SEQ ID NO: 84561 - DNA, 25 bp, Probe Sequence
ccatccaatagcaacagaataaaca

SEQ ID NO: 84562 - DNA, 25 bp, Probe Sequence
aatatgagaggagagactgaaatgc

SEQ ID NO: 84563 - DNA, 25 bp, Probe Sequence
tccatccaatagcaacagaataaac

SEQ ID NO: 84564 - DNA, 25 bp, Probe Sequence
tgctgagaataatgtgtatcctgtt

SEQ ID NO: 84565 - DNA, 25 bp, Probe Sequence
gctgagaataatgtgtatcctgttg

SEQ ID NO: 84566 - DNA, 25 bp, Probe Sequence
atgaggtgctgagaataatgtgtat

SEQ ID NO: 84567 - DNA, 25 bp, Probe Sequence
tgaggtgctgagaataatgtgtatc

SEQ ID NO: 84568 - DNA, 25 bp, Probe Sequence
gatgaggtgctgagaataatgtgta

SEQ ID NO: 84569 - DNA, 25 bp, Probe Sequence
gtgctgagaataatgtgtatcctgt

SEQ ID NO: 84570 - DNA, 25 bp, Probe Sequence
ttagaataagtgtgatgaggtgctg

SEQ ID NO: 84571 - DNA, 25 bp, Probe Sequence
gaggtgctgagaataatgtgtatcc

SEQ ID NO: 84572 - DNA, 25 bp, Probe Sequence
ggagagttctgtagatgtctgttag

SEQ ID NO: 84573 - DNA, 25 bp, Probe Sequence
tggagagttctgtagatgtctgtta

SEQ ID NO: 84574 - DNA, 25 bp, Probe Sequence
ggtgctgagaataatgtgtatcctg

SEQ ID NO: 84575 - DNA, 25 bp, Probe Sequence
taagtgtgatgaggtgctgagaata

SEQ ID NO: 84576 - DNA, 25 bp, Probe Sequence
tagaataagtgtgatgaggtgctga

SEQ ID NO: 84577 - DNA, 25 bp, Probe Sequence
gagagttctgtagatgtctgttaga

SEQ ID NO: 84578 - DNA, 25 bp, Probe Sequence
ctgagaataatgtgtatcctgttga

SEQ ID NO: 84579 - DNA, 25 bp, Probe Sequence
gtgatgaggtgctgagaataatgtg

SEQ ID NO: 84580 - DNA, 25 bp, Probe Sequence
gtgtgatgaggtgctgagaataatg

SEQ ID NO: 84581 - DNA, 25 bp, Probe Sequence
agtgtgatgaggtgctgagaataat

SEQ ID NO: 84582 - DNA, 25 bp, Probe Sequence
ataagtgtgatgaggtgctgagaat

SEQ ID NO: 84583 - DNA, 25 bp, Probe Sequence
agagttctgtagatgtctgttagat

SEQ ID NO: 84584 - DNA, 25 bp, Probe Sequence
aagtgtgatgaggtgctgagaataa

SEQ ID NO: 84585 - DNA, 25 bp, Probe Sequence
aataagtgtgatgaggtgctgagaa

SEQ ID NO: 84586 - DNA, 25 bp, Probe Sequence
tgatgaggtgctgagaataatgtgt

SEQ ID NO: 84587 - DNA, 25 bp, Probe Sequence
tgtgatgaggtgctgagaataatgt

SEQ ID NO: 84588 - DNA, 25 bp, Probe Sequence
aatgaggtaatacaagacaagtgct

SEQ ID NO: 84589 - DNA, 25 bp, Probe Sequence
caatgaggtaatacaagacaagtgc

SEQ ID NO: 84590 - DNA, 25 bp, Probe Sequence
gaggcagacttcagataatagcatt

SEQ ID NO: 84591 - DNA, 25 bp, Probe Sequence
atgaggtaatacaagacaagtgctt

SEQ ID NO: 84592 - DNA, 25 bp, Probe Sequence
agaggcagacttcagataatagcat

SEQ ID NO: 84593 - DNA, 25 bp, Probe Sequence
aggcagacttcagataatagcatta

SEQ ID NO: 84594 - DNA, 25 bp, Probe Sequence
tcaatgaggtaatacaagacaagtg

SEQ ID NO: 84595 - DNA, 25 bp, Probe Sequence
ttactcaagtaggttagaagcagaa

SEQ ID NO: 84596 - DNA, 25 bp, Probe Sequence
ggcattcaatgaggtaatacaagac

SEQ ID NO: 84597 - DNA, 25 bp, Probe Sequence
aggcattcaatgaggtaatacaaga

SEQ ID NO: 84598 - DNA, 25 bp, Probe Sequence
aagaggcagacttcagataatagca

SEQ ID NO: 84599 - DNA, 25 bp, Probe Sequence
attactcaagtaggttagaagcaga

SEQ ID NO: 84600 - DNA, 25 bp, Probe Sequence
gcattcaatgaggtaatacaagaca

SEQ ID NO: 84601 - DNA, 25 bp, Probe Sequence
caattactcaagtaggttagaagca

SEQ ID NO: 84602 - DNA, 25 bp, Probe Sequence
gtaggcattcaatgaggtaatacaa

SEQ ID NO: 84603 - DNA, 25 bp, Probe Sequence
ttcaatgaggtaatacaagacaagt

SEQ ID NO: 84604 - DNA, 25 bp, Probe Sequence
aattactcaagtaggttagaagcag

SEQ ID NO: 84605 - DNA, 25 bp, Probe Sequence
tcaattactcaagtaggttagaagc

SEQ ID NO: 84606 - DNA, 25 bp, Probe Sequence
ttgtaggcattcaatgaggtaatac

SEQ ID NO: 84607 - DNA, 25 bp, Probe Sequence
taggcattcaatgaggtaatacaag

SEQ ID NO: 84608 - DNA, 25 bp, Probe Sequence
accatatcattcttcacagtatctg

SEQ ID NO: 84609 - DNA, 25 bp, Probe Sequence
ccatatcattcttcacagtatctga

SEQ ID NO: 84610 - DNA, 25 bp, Probe Sequence
gcccacaggaaatacttaatgaatt

SEQ ID NO: 84611 - DNA, 25 bp, Probe Sequence
attcaatgaggtaatacaagacaag

SEQ ID NO: 84612 - DNA, 25 bp, Probe Sequence
gacggataacaatttcacacaggta

SEQ ID NO: 84613 - DNA, 25 bp, Probe Sequence
ggataacaatttcacacaggtacag

SEQ ID NO: 84614 - DNA, 25 bp, Probe Sequence
gataacaatttcacacaggtacagc

SEQ ID NO: 84615 - DNA, 25 bp, Probe Sequence
cggataacaatttcacacaggtaca

SEQ ID NO: 84616 - DNA, 25 bp, Probe Sequence
acggataacaatttcacacaggtac

SEQ ID NO: 84617 - DNA, 25 bp, Probe Sequence
taacaatttcacacaggtacagcta

SEQ ID NO: 84618 - DNA, 25 bp, Probe Sequence
aacaatttcacacaggtacagctat

SEQ ID NO: 84619 - DNA, 25 bp, Probe Sequence
ataacaatttcacacaggtacagct

SEQ ID NO: 84620 - DNA, 25 bp, Probe Sequence
acaatttcacacaggtacagctatg

SEQ ID NO: 84621 - DNA, 25 bp, Probe Sequence
aatttcacacaggtacagctatgac

SEQ ID NO: 84622 - DNA, 25 bp, Probe Sequence
caatttcacacaggtacagctatga

SEQ ID NO: 84623 - DNA, 25 bp, Probe Sequence
cacaggtacagctatgaccacttag

SEQ ID NO: 84624 - DNA, 25 bp, Probe Sequence
gacactataggacaagtttgtacca

SEQ ID NO: 84625 - DNA, 25 bp, Probe Sequence
tgacactataggacaagtttgtacc

SEQ ID NO: 84626 - DNA, 25 bp, Probe Sequence
acactataggacaagtttgtaccaa

SEQ ID NO: 84627 - DNA, 25 bp, Probe Sequence
ggacggataacaatttcacacaggt

SEQ ID NO: 84628 - DNA, 25 bp, Probe Sequence
acacaggtacagctatgaccactta

SEQ ID NO: 84629 - DNA, 25 bp, Probe Sequence
acaggtacagctatgaccacttagg

SEQ ID NO: 84630 - DNA, 25 bp, Probe Sequence
cactataggacaagtttgtaccaaa

SEQ ID NO: 84631 - DNA, 25 bp, Probe Sequence
ttttaggtgacactataggacaagt

SEQ ID NO: 84632 - DNA, 25 bp, Probe Sequence
cacacaggtacagctatgaccactt

SEQ ID NO: 84633 - DNA, 25 bp, Probe Sequence
ttcacacaggtacagctatgaccac

SEQ ID NO: 84634 - DNA, 25 bp, Probe Sequence
attttaggtgacactataggacaag

SEQ ID NO: 84635 - DNA, 25 bp, Probe Sequence
caggtacagctatgaccacttaggc

SEQ ID NO: 84636 - DNA, 25 bp, Probe Sequence
gcagaagaagatagagcatgagata

SEQ ID NO: 84637 - DNA, 25 bp, Probe Sequence
atagagcatgagataagaagaggtc

SEQ ID NO: 84638 - DNA, 25 bp, Probe Sequence
gatagagcatgagataagaagaggt

SEQ ID NO: 84639 - DNA, 25 bp, Probe Sequence
agatagagcatgagataagaagagg

SEQ ID NO: 84640 - DNA, 25 bp, Probe Sequence
ctgactgcctaagtgtacttgtatt

SEQ ID NO: 84641 - DNA, 25 bp, Probe Sequence
agcagaagaagatagagcatgagat

SEQ ID NO: 84642 - DNA, 25 bp, Probe Sequence
tctgactgcctaagtgtacttgtat

SEQ ID NO: 84643 - DNA, 25 bp, Probe Sequence
aagcagaagaagatagagcatgaga

SEQ ID NO: 84644 - DNA, 25 bp, Probe Sequence
gagcatgagataagaagaggtcaat

SEQ ID NO: 84645 - DNA, 25 bp, Probe Sequence
tagagcatgagataagaagaggtca

SEQ ID NO: 84646 - DNA, 25 bp, Probe Sequence
agcatgagataagaagaggtcaatg

SEQ ID NO: 84647 - DNA, 25 bp, Probe Sequence
agagcatgagataagaagaggtcaa

SEQ ID NO: 84648 - DNA, 25 bp, Probe Sequence
ctctgactgcctaagtgtacttgta

SEQ ID NO: 84649 - DNA, 25 bp, Probe Sequence
tactctgactgcctaagtgtacttg

SEQ ID NO: 84650 - DNA, 25 bp, Probe Sequence
gcatgagataagaagaggtcaatgg

SEQ ID NO: 84651 - DNA, 25 bp, Probe Sequence
agcataaagaaagaagcaggtagaa

SEQ ID NO: 84652 - DNA, 25 bp, Probe Sequence
aacagatgggaataagaggaaagag

SEQ ID NO: 84653 - DNA, 25 bp, Probe Sequence
gaacagatgggaataagaggaaaga

SEQ ID NO: 84654 - DNA, 25 bp, Probe Sequence
taaaggaacagatgggaataagagg

SEQ ID NO: 84655 - DNA, 25 bp, Probe Sequence
gcataaagaaagaagcaggtagaaa

SEQ ID NO: 84656 - DNA, 25 bp, Probe Sequence
gagataagaagaggtcaatgggaac

SEQ ID NO: 84657 - DNA, 25 bp, Probe Sequence
cagcataaagaaagaagcaggtaga

SEQ ID NO: 84658 - DNA, 25 bp, Probe Sequence
ggaacagatgggaataagaggaaag

SEQ ID NO: 84659 - DNA, 25 bp, Probe Sequence
aagttgagtgctaagaagttgattt

SEQ ID NO: 84660 - DNA, 25 bp, Probe Sequence
gcagttcataagcatattcttagca

SEQ ID NO: 84661 - DNA, 25 bp, Probe Sequence
ccacttcatcttctgactcattgtg

SEQ ID NO: 84662 - DNA, 25 bp, Probe Sequence
cacttcatcttctgactcattgtgc

SEQ ID NO: 84663 - DNA, 25 bp, Probe Sequence
agccacttcatcttctgactcattg

SEQ ID NO: 84664 - DNA, 25 bp, Probe Sequence
cagttcataagcatattcttagcaa

SEQ ID NO: 84665 - DNA, 25 bp, Probe Sequence
gttctcagatcatcgggactatttc

SEQ ID NO: 84666 - DNA, 25 bp, Probe Sequence
ttcttagcaaattccatgtcaacag

SEQ ID NO: 84667 - DNA, 25 bp, Probe Sequence
gccacttcatcttctgactcattgt

SEQ ID NO: 84668 - DNA, 25 bp, Probe Sequence
attcttagcaaattccatgtcaaca

SEQ ID NO: 84669 - DNA, 25 bp, Probe Sequence
gatcatcgggactatttcgtacttg

SEQ ID NO: 84670 - DNA, 25 bp, Probe Sequence
agatcatcgggactatttcgtactt

SEQ ID NO: 84671 - DNA, 25 bp, Probe Sequence
cagccacttcatcttctgactcatt

SEQ ID NO: 84672 - DNA, 25 bp, Probe Sequence
tgttctcagatcatcgggactattt

SEQ ID NO: 84673 - DNA, 25 bp, Probe Sequence
atcgggactatttcgtacttggtaa

SEQ ID NO: 84674 - DNA, 25 bp, Probe Sequence
atgttctcagatcatcgggactatt

SEQ ID NO: 84675 - DNA, 25 bp, Probe Sequence
ggactatttcgtacttggtaagcag

SEQ ID NO: 84676 - DNA, 25 bp, Probe Sequence
ctcagatcatcgggactatttcgta

SEQ ID NO: 84677 - DNA, 25 bp, Probe Sequence
agcatattcttagcaaattccatgt

SEQ ID NO: 84678 - DNA, 25 bp, Probe Sequence
gcatattcttagcaaattccatgtc

SEQ ID NO: 84679 - DNA, 25 bp, Probe Sequence
acttcatcttctgactcattgtgcg

SEQ ID NO: 84680 - DNA, 25 bp, Probe Sequence
cagatcatcgggactatttcgtact

SEQ ID NO: 84681 - DNA, 25 bp, Probe Sequence
tcagatcatcgggactatttcgtac

SEQ ID NO: 84682 - DNA, 25 bp, Probe Sequence
aattccatgtcaacagccacttcat

SEQ ID NO: 84683 - DNA, 25 bp, Probe Sequence
catcgggactatttcgtacttggta

SEQ ID NO: 84684 - DNA, 25 bp, Probe Sequence
catctacattgattgagacttggct

SEQ ID NO: 84685 - DNA, 25 bp, Probe Sequence
aacatctacattgattgagacttgg

SEQ ID NO: 84686 - DNA, 25 bp, Probe Sequence
acatctacattgattgagacttggc

SEQ ID NO: 84687 - DNA, 25 bp, Probe Sequence
atctacattgattgagacttggctc

SEQ ID NO: 84688 - DNA, 25 bp, Probe Sequence
tatacaatccagattcactgagcag

SEQ ID NO: 84689 - DNA, 25 bp, Probe Sequence
tatacaatccagattcactgagcag

SEQ ID NO: 84690 - DNA, 25 bp, Probe Sequence
atatacaatccagattcactgagca

SEQ ID NO: 84691 - DNA, 25 bp, Probe Sequence
atatacaatccagattcactgagca

SEQ ID NO: 84692 - DNA, 25 bp, Probe Sequence
aatgaatggcttatcttgacaggca

SEQ ID NO: 84693 - DNA, 25 bp, Probe Sequence
atatttgactgcttcctctactgtg

SEQ ID NO: 84694 - DNA, 25 bp, Probe Sequence
catatttgactgcttcctctactgt

SEQ ID NO: 84695 - DNA, 25 bp, Probe Sequence
tctacattgattgagacttggctcc

SEQ ID NO: 84696 - DNA, 25 bp, Probe Sequence
gctgacaatgtaaatgaatggctta

SEQ ID NO: 84697 - DNA, 25 bp, Probe Sequence
taaatgaatggcttatcttgacagg

SEQ ID NO: 84698 - DNA, 25 bp, Probe Sequence
aacactgattaaagcctggaaagaa

SEQ ID NO: 84699 - DNA, 25 bp, Probe Sequence
taaaccctctcctgtcacatctaaa

SEQ ID NO: 84700 - DNA, 25 bp, Probe Sequence
caccagaaacatctacattgattga

SEQ ID NO: 84701 - DNA, 25 bp, Probe Sequence
gcaccagaaacatctacattgattg

SEQ ID NO: 84702 - DNA, 25 bp, Probe Sequence
acactgattaaagcctggaaagaag

SEQ ID NO: 84703 - DNA, 25 bp, Probe Sequence
tatatacaatccagattcactgagc

SEQ ID NO: 84704 - DNA, 25 bp, Probe Sequence
tatatacaatccagattcactgagc

SEQ ID NO: 84705 - DNA, 25 bp, Probe Sequence
atgaatggcttatcttgacaggcag

SEQ ID NO: 84706 - DNA, 25 bp, Probe Sequence
atctttacccgaaaccattctcttg

SEQ ID NO: 84707 - DNA, 25 bp, Probe Sequence
tacattgattgagacttggctccag

SEQ ID NO: 84708 - DNA, 25 bp, Probe Sequence
tatgtgatctgcctgtctaccttaa

SEQ ID NO: 84709 - DNA, 25 bp, Probe Sequence
ctatgtgatctgcctgtctacctta

SEQ ID NO: 84710 - DNA, 25 bp, Probe Sequence
tgttgccatattacaagaagttacc

SEQ ID NO: 84711 - DNA, 25 bp, Probe Sequence
atgtgatctgcctgtctaccttaat

SEQ ID NO: 84712 - DNA, 25 bp, Probe Sequence
ttatgagcagaggatggatcttatt

SEQ ID NO: 84713 - DNA, 25 bp, Probe Sequence
tacctcctgtatgttgccatattac

SEQ ID NO: 84714 - DNA, 25 bp, Probe Sequence
attacctcctgtatgttgccatatt

SEQ ID NO: 84715 - DNA, 25 bp, Probe Sequence
aattacctcctgtatgttgccatat

SEQ ID NO: 84716 - DNA, 25 bp, Probe Sequence
gaattacctcctgtatgttgccata

SEQ ID NO: 84717 - DNA, 25 bp, Probe Sequence
ttacctcctgtatgttgccatatta

SEQ ID NO: 84718 - DNA, 25 bp, Probe Sequence
tgtgatctgcctgtctaccttaatc

SEQ ID NO: 84719 - DNA, 25 bp, Probe Sequence
ccgtaatatctaatatagcacctga

SEQ ID NO: 84720 - DNA, 25 bp, Probe Sequence
tgccatattacaagaagttacccta

SEQ ID NO: 84721 - DNA, 25 bp, Probe Sequence
atgttgccatattacaagaagttac

SEQ ID NO: 84722 - DNA, 25 bp, Probe Sequence
tcctgtatgttgccatattacaaga

SEQ ID NO: 84723 - DNA, 25 bp, Probe Sequence
atctgcctgtctaccttaatcaaag

SEQ ID NO: 84724 - DNA, 25 bp, Probe Sequence
ctcctgtatgttgccatattacaag

SEQ ID NO: 84725 - DNA, 25 bp, Probe Sequence
cctcctgtatgttgccatattacaa

SEQ ID NO: 84726 - DNA, 25 bp, Probe Sequence
ttgccatattacaagaagttaccct

SEQ ID NO: 84727 - DNA, 25 bp, Probe Sequence
gttgccatattacaagaagttaccc

SEQ ID NO: 84728 - DNA, 25 bp, Probe Sequence
tgctagtgatggttgtagtttctat

SEQ ID NO: 84729 - DNA, 25 bp, Probe Sequence
atgctagtgatggttgtagtttcta

SEQ ID NO: 84730 - DNA, 25 bp, Probe Sequence
cctgtatgttgccatattacaagaa

SEQ ID NO: 84731 - DNA, 25 bp, Probe Sequence
cgaattacctcctgtatgttgccat

SEQ ID NO: 84732 - DNA, 25 bp, Probe Sequence
ataataagagcagagagaagggaga

SEQ ID NO: 84733 - DNA, 25 bp, Probe Sequence
taataagagcagagagaagggagag

SEQ ID NO: 84734 - DNA, 25 bp, Probe Sequence
aataataagagcagagagaagggag

SEQ ID NO: 84735 - DNA, 25 bp, Probe Sequence
taataataagagcagagagaaggga

SEQ ID NO: 84736 - DNA, 25 bp, Probe Sequence
ttaataataagagcagagagaaggg

SEQ ID NO: 84737 - DNA, 25 bp, Probe Sequence
aataagagcagagagaagggagagc

SEQ ID NO: 84738 - DNA, 25 bp, Probe Sequence
tttacaatttcactttacgtggacc

SEQ ID NO: 84739 - DNA, 25 bp, Probe Sequence
ttacaatttcactttacgtggaccg

SEQ ID NO: 84740 - DNA, 25 bp, Probe Sequence
cactttaataataagagcagagaga

SEQ ID NO: 84741 - DNA, 25 bp, Probe Sequence
tcactttaataataagagcagagag

SEQ ID NO: 84742 - DNA, 25 bp, Probe Sequence
tttaataataagagcagagagaagg

SEQ ID NO: 84743 - DNA, 25 bp, Probe Sequence
atttcactttacgtggaccgttaaa

SEQ ID NO: 84744 - DNA, 25 bp, Probe Sequence
aatttcactttacgtggaccgttaa

SEQ ID NO: 84745 - DNA, 25 bp, Probe Sequence
caatttcactttacgtggaccgtta

SEQ ID NO: 84746 - DNA, 25 bp, Probe Sequence
actttaataataagagcagagagaa

SEQ ID NO: 84747 - DNA, 25 bp, Probe Sequence
atcactttaataataagagcagaga

SEQ ID NO: 84748 - DNA, 25 bp, Probe Sequence
cgtggaccgttaaaatcactttaat

SEQ ID NO: 84749 - DNA, 25 bp, Probe Sequence
ataagagcagagagaagggagagcc

SEQ ID NO: 84750 - DNA, 25 bp, Probe Sequence
ttttacaatttcactttacgtggac

SEQ ID NO: 84751 - DNA, 25 bp, Probe Sequence
tacaatttcactttacgtggaccgt

SEQ ID NO: 84752 - DNA, 25 bp, Probe Sequence
ctttaataataagagcagagagaag

SEQ ID NO: 84753 - DNA, 25 bp, Probe Sequence
aatcactttaataataagagcagag

SEQ ID NO: 84754 - DNA, 25 bp, Probe Sequence
gtggaccgttaaaatcactttaata

SEQ ID NO: 84755 - DNA, 25 bp, Probe Sequence
acaatttcactttacgtggaccgtt

SEQ ID NO: 84756 - DNA, 25 bp, Probe Sequence
tagtatggatagcagcattatgtgg

SEQ ID NO: 84757 - DNA, 25 bp, Probe Sequence
tatggatagcagcattatgtggaag

SEQ ID NO: 84758 - DNA, 25 bp, Probe Sequence
ggatagcagcattatgtggaagaat

SEQ ID NO: 84759 - DNA, 25 bp, Probe Sequence
gtatggatagcagcattatgtggaa

SEQ ID NO: 84760 - DNA, 25 bp, Probe Sequence
gtagtatggatagcagcattatgtg

SEQ ID NO: 84761 - DNA, 25 bp, Probe Sequence
agtagtatggatagcagcattatgt

SEQ ID NO: 84762 - DNA, 25 bp, Probe Sequence
cttctagtagtatggatagcagcat

SEQ ID NO: 84763 - DNA, 25 bp, Probe Sequence
agtatggatagcagcattatgtgga

SEQ ID NO: 84764 - DNA, 25 bp, Probe Sequence
cacttctagtagtatggatagcagc

SEQ ID NO: 84765 - DNA, 25 bp, Probe Sequence
agcaacttccacttctagtagtatg

SEQ ID NO: 84766 - DNA, 25 bp, Probe Sequence
cagcaacttccacttctagtagtat

SEQ ID NO: 84767 - DNA, 25 bp, Probe Sequence
ttctagtagtatggatagcagcatt

SEQ ID NO: 84768 - DNA, 25 bp, Probe Sequence
acttctagtagtatggatagcagca

SEQ ID NO: 84769 - DNA, 25 bp, Probe Sequence
atggatagcagcattatgtggaaga

SEQ ID NO: 84770 - DNA, 25 bp, Probe Sequence
tggatagcagcattatgtggaagaa

SEQ ID NO: 84771 - DNA, 25 bp, Probe Sequence
caggtgagtatctgtcttcattcag

SEQ ID NO: 84772 - DNA, 25 bp, Probe Sequence
cattaccaggtgagtatctgtcttc

SEQ ID NO: 84773 - DNA, 25 bp, Probe Sequence
taccaggtgagtatctgtcttcatt

SEQ ID NO: 84774 - DNA, 25 bp, Probe Sequence
ttaccaggtgagtatctgtcttcat

SEQ ID NO: 84775 - DNA, 25 bp, Probe Sequence
attaccaggtgagtatctgtcttca

SEQ ID NO: 84776 - DNA, 25 bp, Probe Sequence
tctagtagtatggatagcagcatta

SEQ ID NO: 84777 - DNA, 25 bp, Probe Sequence
aggtgagtatctgtcttcattcagg

SEQ ID NO: 84778 - DNA, 25 bp, Probe Sequence
tagtagtatggatagcagcattatg

SEQ ID NO: 84779 - DNA, 25 bp, Probe Sequence
ccattaccaggtgagtatctgtctt

SEQ ID NO: 84780 - DNA, 25 bp, Probe Sequence
ccttactgaactatacatgccaatc

SEQ ID NO: 84781 - DNA, 25 bp, Probe Sequence
tatgatgtggcttggaacaacaata

SEQ ID NO: 84782 - DNA, 25 bp, Probe Sequence
atatgatgtggcttggaacaacaat

SEQ ID NO: 84783 - DNA, 25 bp, Probe Sequence
atgatgtggcttggaacaacaataa

SEQ ID NO: 84784 - DNA, 25 bp, Probe Sequence
cttactgaactatacatgccaatca

SEQ ID NO: 84785 - DNA, 25 bp, Probe Sequence
ggttagaatgatccatcttgctaat

SEQ ID NO: 84786 - DNA, 25 bp, Probe Sequence
tggttagaatgatccatcttgctaa

SEQ ID NO: 84787 - DNA, 25 bp, Probe Sequence
gtggttagaatgatccatcttgcta

SEQ ID NO: 84788 - DNA, 25 bp, Probe Sequence
ttactgaactatacatgccaatcat

SEQ ID NO: 84789 - DNA, 25 bp, Probe Sequence
tttctctgtgggaataaaggttcaa

SEQ ID NO: 84790 - DNA, 25 bp, Probe Sequence
tgtgggaataaaggttcaacttaga

SEQ ID NO: 84791 - DNA, 25 bp, Probe Sequence
tctgtgggaataaaggttcaactta

SEQ ID NO: 84792 - DNA, 25 bp, Probe Sequence
ctgtgggaataaaggttcaacttag

SEQ ID NO: 84793 - DNA, 25 bp, Probe Sequence
tagtttctctgtgggaataaaggtt

SEQ ID NO: 84794 - DNA, 25 bp, Probe Sequence
ttagtttctctgtgggaataaaggt

SEQ ID NO: 84795 - DNA, 25 bp, Probe Sequence
catgtggttagaatgatccatcttg

SEQ ID NO: 84796 - DNA, 25 bp, Probe Sequence
ttaaagggcaggaatacatttggag

SEQ ID NO: 84797 - DNA, 25 bp, Probe Sequence
agtttctctgtgggaataaaggttc

SEQ ID NO: 84798 - DNA, 25 bp, Probe Sequence
atgtggttagaatgatccatcttgc

SEQ ID NO: 84799 - DNA, 25 bp, Probe Sequence
ctagcctacaaatcctactaatggg

SEQ ID NO: 84800 - DNA, 25 bp, Probe Sequence
gcaggaatacatttggaggaatttc

SEQ ID NO: 84801 - DNA, 25 bp, Probe Sequence
gtttctctgtgggaataaaggttca

SEQ ID NO: 84802 - DNA, 25 bp, Probe Sequence
ctctgtgggaataaaggttcaactt

SEQ ID NO: 84803 - DNA, 25 bp, Probe Sequence
ttctctgtgggaataaaggttcaac

SEQ ID NO: 84804 - DNA, 25 bp, Probe Sequence
cttcaccacatattagtgcttgacc

SEQ ID NO: 84805 - DNA, 25 bp, Probe Sequence
ccttcaccacatattagtgcttgac

SEQ ID NO: 84806 - DNA, 25 bp, Probe Sequence
gcctaccaccattccatatttaagt

SEQ ID NO: 84807 - DNA, 25 bp, Probe Sequence
tgcctaccaccattccatatttaag

SEQ ID NO: 84808 - DNA, 25 bp, Probe Sequence
ctgcctaccaccattccatatttaa

SEQ ID NO: 84809 - DNA, 25 bp, Probe Sequence
tctctgcctaccaccattccatatt

SEQ ID NO: 84810 - DNA, 25 bp, Probe Sequence
tctgcctaccaccattccatattta

SEQ ID NO: 84811 - DNA, 25 bp, Probe Sequence
ctctctgcctaccaccattccatat

SEQ ID NO: 84812 - DNA, 25 bp, Probe Sequence
ctctgcctaccaccattccatattt

SEQ ID NO: 84813 - DNA, 25 bp, Probe Sequence
cctaccaccattccatatttaagtg

SEQ ID NO: 84814 - DNA, 25 bp, Probe Sequence
gtttgctgccttcaccacatattag

SEQ ID NO: 84815 - DNA, 25 bp, Probe Sequence
ctgccttcaccacatattagtgctt

SEQ ID NO: 84816 - DNA, 25 bp, Probe Sequence
gccttcaccacatattagtgcttga

SEQ ID NO: 84817 - DNA, 25 bp, Probe Sequence
tttgctgccttcaccacatattagt

SEQ ID NO: 84818 - DNA, 25 bp, Probe Sequence
cttccatcctgctcctctgatactg

SEQ ID NO: 84819 - DNA, 25 bp, Probe Sequence
tgccttcaccacatattagtgcttg

SEQ ID NO: 84820 - DNA, 25 bp, Probe Sequence
ttgctgccttcaccacatattagtg

SEQ ID NO: 84821 - DNA, 25 bp, Probe Sequence
gtaatctggacttaaggattgctgg

SEQ ID NO: 84822 - DNA, 25 bp, Probe Sequence
ggtaatctggacttaaggattgctg

SEQ ID NO: 84823 - DNA, 25 bp, Probe Sequence
ctggtaatctggacttaaggattgc

SEQ ID NO: 84824 - DNA, 25 bp, Probe Sequence
gctggtaatctggacttaaggattg

SEQ ID NO: 84825 - DNA, 25 bp, Probe Sequence
agctggtaatctggacttaaggatt

SEQ ID NO: 84826 - DNA, 25 bp, Probe Sequence
tggtaatctggacttaaggattgct

SEQ ID NO: 84827 - DNA, 25 bp, Probe Sequence
ggggctttattttagtctccttttc

SEQ ID NO: 84828 - DNA, 25 bp, Probe Sequence
attggaatagtttcagaaggaatgg

SEQ ID NO: 84829 - DNA, 25 bp, Probe Sequence
tggtaagctattaattattgcctca

SEQ ID NO: 84830 - DNA, 25 bp, Probe Sequence
gttggtaagctattaattattgcct

SEQ ID NO: 84831 - DNA, 25 bp, Probe Sequence
agttggtaagctattaattattgcc

SEQ ID NO: 84832 - DNA, 25 bp, Probe Sequence
gattggaatagtttcagaaggaatg

SEQ ID NO: 84833 - DNA, 25 bp, Probe Sequence
ttgattggaatagtttcagaaggaa

SEQ ID NO: 84834 - DNA, 25 bp, Probe Sequence
ttggtaagctattaattattgcctc

SEQ ID NO: 84835 - DNA, 25 bp, Probe Sequence
tgattggaatagtttcagaaggaat

SEQ ID NO: 84836 - DNA, 25 bp, Probe Sequence
attgattggaatagtttcagaagga

SEQ ID NO: 84837 - DNA, 25 bp, Probe Sequence
ggtaagctattaattattgcctcaa

SEQ ID NO: 84838 - DNA, 25 bp, Probe Sequence
aattattgcctcaatttcagagcct

SEQ ID NO: 84839 - DNA, 25 bp, Probe Sequence
taattattgcctcaatttcagagcc

SEQ ID NO: 84840 - DNA, 25 bp, Probe Sequence
tgcctcaatttcagagcctgttatt

SEQ ID NO: 84841 - DNA, 25 bp, Probe Sequence
ttgcctcaatttcagagcctgttat

SEQ ID NO: 84842 - DNA, 25 bp, Probe Sequence
attattgcctcaatttcagagcctg

SEQ ID NO: 84843 - DNA, 25 bp, Probe Sequence
tcctccttgtacctctggtagaatt

SEQ ID NO: 84844 - DNA, 25 bp, Probe Sequence
cctcaatttcagagcctgttattgg

SEQ ID NO: 84845 - DNA, 25 bp, Probe Sequence
tattgattggaatagtttcagaagg

SEQ ID NO: 84846 - DNA, 25 bp, Probe Sequence
ctcctccttgtacctctggtagaat

SEQ ID NO: 84847 - DNA, 25 bp, Probe Sequence
ttaattattgcctcaatttcagagc

SEQ ID NO: 84848 - DNA, 25 bp, Probe Sequence
gcctcaatttcagagcctgttattg

SEQ ID NO: 84849 - DNA, 25 bp, Probe Sequence
attgcctcaatttcagagcctgtta

SEQ ID NO: 84850 - DNA, 25 bp, Probe Sequence
tattgcctcaatttcagagcctgtt

SEQ ID NO: 84851 - DNA, 25 bp, Probe Sequence
ttattgcctcaatttcagagcctgt

SEQ ID NO: 84852 - DNA, 25 bp, Probe Sequence
acacattatagcatatccacatcct

SEQ ID NO: 84853 - DNA, 25 bp, Probe Sequence
acatatacacatactgaggctaaca

SEQ ID NO: 84854 - DNA, 25 bp, Probe Sequence
acattatagcatatccacatcctca

SEQ ID NO: 84855 - DNA, 25 bp, Probe Sequence
cacattatagcatatccacatcctc

SEQ ID NO: 84856 - DNA, 25 bp, Probe Sequence
atagcatatccacatcctcaatgat

SEQ ID NO: 84857 - DNA, 25 bp, Probe Sequence
ccattccaactgtataattgacctg

SEQ ID NO: 84858 - DNA, 25 bp, Probe Sequence
tatagcatatccacatcctcaatga

SEQ ID NO: 84859 - DNA, 25 bp, Probe Sequence
tccaatgctaacatcaacaatagaa

SEQ ID NO: 84860 - DNA, 25 bp, Probe Sequence
ttccaatgctaacatcaacaataga

SEQ ID NO: 84861 - DNA, 25 bp, Probe Sequence
aggtacatatacacatactgaggct

SEQ ID NO: 84862 - DNA, 25 bp, Probe Sequence
aaggtacatatacacatactgaggc

SEQ ID NO: 84863 - DNA, 25 bp, Probe Sequence
cattccaactgtataattgacctgt

SEQ ID NO: 84864 - DNA, 25 bp, Probe Sequence
cattatagcatatccacatcctcaa

SEQ ID NO: 84865 - DNA, 25 bp, Probe Sequence
tagcatatccacatcctcaatgatc

SEQ ID NO: 84866 - DNA, 25 bp, Probe Sequence
atatccacatcctcaatgatctcct

SEQ ID NO: 84867 - DNA, 25 bp, Probe Sequence
catatccacatcctcaatgatctcc

SEQ ID NO: 84868 - DNA, 25 bp, Probe Sequence
ggtacatatacacatactgaggcta

SEQ ID NO: 84869 - DNA, 25 bp, Probe Sequence
tacacattatagcatatccacatcc

SEQ ID NO: 84870 - DNA, 25 bp, Probe Sequence
ttatagcatatccacatcctcaatg

SEQ ID NO: 84871 - DNA, 25 bp, Probe Sequence
tacacatactgaggctaacagacta

SEQ ID NO: 84872 - DNA, 25 bp, Probe Sequence
gcatatccacatcctcaatgatctc

SEQ ID NO: 84873 - DNA, 25 bp, Probe Sequence
tatacacatactgaggctaacagac

SEQ ID NO: 84874 - DNA, 25 bp, Probe Sequence
attccaactgtataattgacctgtt

SEQ ID NO: 84875 - DNA, 25 bp, Probe Sequence
atacacatactgaggctaacagact

SEQ ID NO: 84876 - DNA, 25 bp, Probe Sequence
tacttgtcctgtgaagagttgagtg

SEQ ID NO: 84877 - DNA, 25 bp, Probe Sequence
atgtacttgtcctgtgaagagttga

SEQ ID NO: 84878 - DNA, 25 bp, Probe Sequence
catgtacttgtcctgtgaagagttg

SEQ ID NO: 84879 - DNA, 25 bp, Probe Sequence
gtacttgtcctgtgaagagttgagt

SEQ ID NO: 84880 - DNA, 25 bp, Probe Sequence
tgtacttgtcctgtgaagagttgag

SEQ ID NO: 84881 - DNA, 25 bp, Probe Sequence
aatctcagagctaacatccacactt

SEQ ID NO: 84882 - DNA, 25 bp, Probe Sequence
atctcagagctaacatccacacttc

SEQ ID NO: 84883 - DNA, 25 bp, Probe Sequence
ccatgtacttgtcctgtgaagagtt

SEQ ID NO: 84884 - DNA, 25 bp, Probe Sequence
caatctcagagctaacatccacact

SEQ ID NO: 84885 - DNA, 25 bp, Probe Sequence
acacactcaccttcctcttctcatc

SEQ ID NO: 84886 - DNA, 25 bp, Probe Sequence
cacacactcaccttcctcttctcat

SEQ ID NO: 84887 - DNA, 25 bp, Probe Sequence
ccaatctcagagctaacatccacac

SEQ ID NO: 84888 - DNA, 25 bp, Probe Sequence
cactcaccttcctcttctcatccac

SEQ ID NO: 84889 - DNA, 25 bp, Probe Sequence
cacactcaccttcctcttctcatcc

SEQ ID NO: 84890 - DNA, 25 bp, Probe Sequence
gacacacactcaccttcctcttctc

SEQ ID NO: 84891 - DNA, 25 bp, Probe Sequence
tctcagagctaacatccacacttcc

SEQ ID NO: 84892 - DNA, 25 bp, Probe Sequence
acactcaccttcctcttctcatcca

SEQ ID NO: 84893 - DNA, 25 bp, Probe Sequence
cttgtcctgtgaagagttgagtgct

SEQ ID NO: 84894 - DNA, 25 bp, Probe Sequence
ttgtcctgtgaagagttgagtgctg

SEQ ID NO: 84895 - DNA, 25 bp, Probe Sequence
ctcaccttcctcttctcatccacct

SEQ ID NO: 84896 - DNA, 25 bp, Probe Sequence
gccatgtacttgtcctgtgaagagt

SEQ ID NO: 84897 - DNA, 25 bp, Probe Sequence
acacacactcaccttcctcttctca

SEQ ID NO: 84898 - DNA, 25 bp, Probe Sequence
acttgtcctgtgaagagttgagtgc

SEQ ID NO: 84899 - DNA, 25 bp, Probe Sequence
taacatccacacttccccacatttc

SEQ ID NO: 84900 - DNA, 25 bp, Probe Sequence
aatcaactatgacttcctctgagtg

SEQ ID NO: 84901 - DNA, 25 bp, Probe Sequence
gaatcaactatgacttcctctgagt

SEQ ID NO: 84902 - DNA, 25 bp, Probe Sequence
agaatcaactatgacttcctctgag

SEQ ID NO: 84903 - DNA, 25 bp, Probe Sequence
aagaatcaactatgacttcctctga

SEQ ID NO: 84904 - DNA, 25 bp, Probe Sequence
tacagagaaccttccagaagtagta

SEQ ID NO: 84905 - DNA, 25 bp, Probe Sequence
cagagaaccttccagaagtagtaac

SEQ ID NO: 84906 - DNA, 25 bp, Probe Sequence
acagagaaccttccagaagtagtaa

SEQ ID NO: 84907 - DNA, 25 bp, Probe Sequence
atcaactatgacttcctctgagtgg

SEQ ID NO: 84908 - DNA, 25 bp, Probe Sequence
agagaaccttccagaagtagtaacc

SEQ ID NO: 84909 - DNA, 25 bp, Probe Sequence
gtacagagaaccttccagaagtagt

SEQ ID NO: 84910 - DNA, 25 bp, Probe Sequence
taagaatcaactatgacttcctctg

SEQ ID NO: 84911 - DNA, 25 bp, Probe Sequence
gagaaccttccagaagtagtaaccg

SEQ ID NO: 84912 - DNA, 25 bp, Probe Sequence
aaaccaagggatgagtaacacatac

SEQ ID NO: 84913 - DNA, 25 bp, Probe Sequence
caaaccaagggatgagtaacacata

SEQ ID NO: 84914 - DNA, 25 bp, Probe Sequence
tggagttagaacaaagttggtgatt

SEQ ID NO: 84915 - DNA, 25 bp, Probe Sequence
ttggagttagaacaaagttggtgat

SEQ ID NO: 84916 - DNA, 25 bp, Probe Sequence
gacgggtggactaatgaagaattaa

SEQ ID NO: 84917 - DNA, 25 bp, Probe Sequence
ttaagaatcaactatgacttcctct

SEQ ID NO: 84918 - DNA, 25 bp, Probe Sequence
ggagttagaacaaagttggtgatta

SEQ ID NO: 84919 - DNA, 25 bp, Probe Sequence
aactatgacttcctctgagtggaga

SEQ ID NO: 84920 - DNA, 25 bp, Probe Sequence
caactatgacttcctctgagtggag

SEQ ID NO: 84921 - DNA, 25 bp, Probe Sequence
gactatgtgctaccgtagtgaatca

SEQ ID NO: 84922 - DNA, 25 bp, Probe Sequence
tgactatgtgctaccgtagtgaatc

SEQ ID NO: 84923 - DNA, 25 bp, Probe Sequence
ctgactatgtgctaccgtagtgaat

SEQ ID NO: 84924 - DNA, 25 bp, Probe Sequence
ccttaatcctcttgatcctctctgg

SEQ ID NO: 84925 - DNA, 25 bp, Probe Sequence
ctcagcttagacatcatctctcaac

SEQ ID NO: 84926 - DNA, 25 bp, Probe Sequence
tctcagcttagacatcatctctcaa

SEQ ID NO: 84927 - DNA, 25 bp, Probe Sequence
gccttaatcctcttgatcctctctg

SEQ ID NO: 84928 - DNA, 25 bp, Probe Sequence
cttaatcctcttgatcctctctgga

SEQ ID NO: 84929 - DNA, 25 bp, Probe Sequence
gcttagacatcatctctcaacctgg

SEQ ID NO: 84930 - DNA, 25 bp, Probe Sequence
tttctccatttctttaagtctcagc

SEQ ID NO: 84931 - DNA, 25 bp, Probe Sequence
gcaagtctctatttcaatcccttac

SEQ ID NO: 84932 - DNA, 25 bp, Probe Sequence
cgttcaataaacatatcagcatcca

SEQ ID NO: 84933 - DNA, 25 bp, Probe Sequence
cgcaagtctctatttcaatccctta

SEQ ID NO: 84934 - DNA, 25 bp, Probe Sequence
tcgttcaataaacatatcagcatcc

SEQ ID NO: 84935 - DNA, 25 bp, Probe Sequence
gagtcatcttgcataatatagtcgt

SEQ ID NO: 84936 - DNA, 25 bp, Probe Sequence
agcttagacatcatctctcaacctg

SEQ ID NO: 84937 - DNA, 25 bp, Probe Sequence
cagcttagacatcatctctcaacct

SEQ ID NO: 84938 - DNA, 25 bp, Probe Sequence
tcagcttagacatcatctctcaacc

SEQ ID NO: 84939 - DNA, 25 bp, Probe Sequence
agtcgttcaataaacatatcagcat

SEQ ID NO: 84940 - DNA, 25 bp, Probe Sequence
gtcgttcaataaacatatcagcatc

SEQ ID NO: 84941 - DNA, 25 bp, Probe Sequence
atgaaacctttacaacacaatgaaa

SEQ ID NO: 84942 - DNA, 25 bp, Probe Sequence
aatgaaacctttacaacacaatgaa

SEQ ID NO: 84943 - DNA, 25 bp, Probe Sequence
tagtcgttcaataaacatatcagca

SEQ ID NO: 84944 - DNA, 25 bp, Probe Sequence
tcatcttgcataatatagtcgttca

SEQ ID NO: 84945 - DNA, 25 bp, Probe Sequence
agtcatcttgcataatatagtcgtt

SEQ ID NO: 84946 - DNA, 25 bp, Probe Sequence
agagtcatcttgcataatatagtcg

SEQ ID NO: 84947 - DNA, 25 bp, Probe Sequence
gtcatcttgcataatatagtcgttc

SEQ ID NO: 84948 - DNA, 25 bp, Probe Sequence
agacatacagatattcatattcggc

SEQ ID NO: 84949 - DNA, 25 bp, Probe Sequence
gattcaatggagagcttaggatagg

SEQ ID NO: 84950 - DNA, 25 bp, Probe Sequence
attcaatggagagcttaggatagga

SEQ ID NO: 84951 - DNA, 25 bp, Probe Sequence
agattcaatggagagcttaggatag

SEQ ID NO: 84952 - DNA, 25 bp, Probe Sequence
ttcaatggagagcttaggataggaa

SEQ ID NO: 84953 - DNA, 25 bp, Probe Sequence
atagattcaatggagagcttaggat

SEQ ID NO: 84954 - DNA, 25 bp, Probe Sequence
tcaatggagagcttaggataggaac

SEQ ID NO: 84955 - DNA, 25 bp, Probe Sequence
gcaaacaagcaagtagtaatctcaa

SEQ ID NO: 84956 - DNA, 25 bp, Probe Sequence
tagattcaatggagagcttaggata

SEQ ID NO: 84957 - DNA, 25 bp, Probe Sequence
tatagattcaatggagagcttagga

SEQ ID NO: 84958 - DNA, 25 bp, Probe Sequence
aaccaggaagagggaaccaatataa

SEQ ID NO: 84959 - DNA, 25 bp, Probe Sequence
gaaccaggaagagggaaccaatata

SEQ ID NO: 84960 - DNA, 25 bp, Probe Sequence
gagacatacagatattcatattcgg

SEQ ID NO: 84961 - DNA, 25 bp, Probe Sequence
caatggagagcttaggataggaacc

SEQ ID NO: 84962 - DNA, 25 bp, Probe Sequence
accaggaagagggaaccaatataac

SEQ ID NO: 84963 - DNA, 25 bp, Probe Sequence
tcaggaaggagacacataagcagtt

SEQ ID NO: 84964 - DNA, 25 bp, Probe Sequence
gcacacatttacctagcacatatat

SEQ ID NO: 84965 - DNA, 25 bp, Probe Sequence
atatagattcaatggagagcttagg

SEQ ID NO: 84966 - DNA, 25 bp, Probe Sequence
caaacaagcaagtagtaatctcaat

SEQ ID NO: 84967 - DNA, 25 bp, Probe Sequence
tacagatattcatattcggccacag

SEQ ID NO: 84968 - DNA, 25 bp, Probe Sequence
atacagatattcatattcggccaca

SEQ ID NO: 84969 - DNA, 25 bp, Probe Sequence
acatacagatattcatattcggcca

SEQ ID NO: 84970 - DNA, 25 bp, Probe Sequence
catacagatattcatattcggccac

SEQ ID NO: 84971 - DNA, 25 bp, Probe Sequence
ccaggaagagggaaccaatataacc

SEQ ID NO: 84972 - DNA, 25 bp, Probe Sequence
tgccagttgttgaagttaatgttat

SEQ ID NO: 84973 - DNA, 25 bp, Probe Sequence
ctgccagttgttgaagttaatgtta

SEQ ID NO: 84974 - DNA, 25 bp, Probe Sequence
gccagttgttgaagttaatgttatg

SEQ ID NO: 84975 - DNA, 25 bp, Probe Sequence
atctgccagttgttgaagttaatgt

SEQ ID NO: 84976 - DNA, 25 bp, Probe Sequence
tctgccagttgttgaagttaatgtt

SEQ ID NO: 84977 - DNA, 25 bp, Probe Sequence
gatctgccagttgttgaagttaatg

SEQ ID NO: 84978 - DNA, 25 bp, Probe Sequence
tgtaatccagagagaatgctcagaa

SEQ ID NO: 84979 - DNA, 25 bp, Probe Sequence
cagttgttgaagttaatgttatggt

SEQ ID NO: 84980 - DNA, 25 bp, Probe Sequence
ggatctgccagttgttgaagttaat

SEQ ID NO: 84981 - DNA, 25 bp, Probe Sequence
ctgtaatccagagagaatgctcaga

SEQ ID NO: 84982 - DNA, 25 bp, Probe Sequence
atgttatggtaatcaaagggaggag

SEQ ID NO: 84983 - DNA, 25 bp, Probe Sequence
aatgttatggtaatcaaagggagga

SEQ ID NO: 84984 - DNA, 25 bp, Probe Sequence
gttatggtaatcaaagggaggagac

SEQ ID NO: 84985 - DNA, 25 bp, Probe Sequence
aatgtctttgtgaattgtttgcttg

SEQ ID NO: 84986 - DNA, 25 bp, Probe Sequence
tatggtaatcaaagggaggagacaa

SEQ ID NO: 84987 - DNA, 25 bp, Probe Sequence
ttatggtaatcaaagggaggagaca

SEQ ID NO: 84988 - DNA, 25 bp, Probe Sequence
tgttatggtaatcaaagggaggaga

SEQ ID NO: 84989 - DNA, 25 bp, Probe Sequence
tgtctttgtgaattgtttgcttgat

SEQ ID NO: 84990 - DNA, 25 bp, Probe Sequence
atgtctttgtgaattgtttgcttga

SEQ ID NO: 84991 - DNA, 25 bp, Probe Sequence
tcacaaggattcttctatttcacca

SEQ ID NO: 84992 - DNA, 25 bp, Probe Sequence
ctttgtgaattgtttgcttgattga

SEQ ID NO: 84993 - DNA, 25 bp, Probe Sequence
tctttgtgaattgtttgcttgattg

SEQ ID NO: 84994 - DNA, 25 bp, Probe Sequence
gtctttgtgaattgtttgcttgatt

SEQ ID NO: 84995 - DNA, 25 bp, Probe Sequence
ccagttgttgaagttaatgttatgg

SEQ ID NO: 84996 - DNA, 25 bp, Probe Sequence
aacagactcagaacaagaagacaag

SEQ ID NO: 84997 - DNA, 25 bp, Probe Sequence
gaacagactcagaacaagaagacaa

SEQ ID NO: 84998 - DNA, 25 bp, Probe Sequence
cacaagattcctaacctctccaatt

SEQ ID NO: 84999 - DNA, 25 bp, Probe Sequence
cagactcagaacaagaagacaagtt

SEQ ID NO: 85000 - DNA, 25 bp, Probe Sequence
aggaacagactcagaacaagaagac

SEQ ID NO: 85001 - DNA, 25 bp, Probe Sequence
caggaacagactcagaacaagaaga

SEQ ID NO: 85002 - DNA, 25 bp, Probe Sequence
ccacaagattcctaacctctccaat

SEQ ID NO: 85003 - DNA, 25 bp, Probe Sequence
acagactcagaacaagaagacaagt

SEQ ID NO: 85004 - DNA, 25 bp, Probe Sequence
acttggctgagactgcgattattaa

SEQ ID NO: 85005 - DNA, 25 bp, Probe Sequence
ggaacagactcagaacaagaagaca

SEQ ID NO: 85006 - DNA, 25 bp, Probe Sequence
attccaacttcatgtcaatacactg

SEQ ID NO: 85007 - DNA, 25 bp, Probe Sequence
aattccaacttcatgtcaatacact

SEQ ID NO: 85008 - DNA, 25 bp, Probe Sequence
cacttggctgagactgcgattatta

SEQ ID NO: 85009 - DNA, 25 bp, Probe Sequence
aataaactcctgtcctttcacttgg

SEQ ID NO: 85010 - DNA, 25 bp, Probe Sequence
ttctaggaagcaggcaagattaacc

SEQ ID NO: 85011 - DNA, 25 bp, Probe Sequence
ttggctgagactgcgattattaaat

SEQ ID NO: 85012 - DNA, 25 bp, Probe Sequence
ccaggaacagactcagaacaagaag

SEQ ID NO: 85013 - DNA, 25 bp, Probe Sequence
gattagaaattatggctcaggagtg

SEQ ID NO: 85014 - DNA, 25 bp, Probe Sequence
agattagaaattatggctcaggagt

SEQ ID NO: 85015 - DNA, 25 bp, Probe Sequence
tggctgagactgcgattattaaatt

SEQ ID NO: 85016 - DNA, 25 bp, Probe Sequence
ttccaacttcatgtcaatacactgc

SEQ ID NO: 85017 - DNA, 25 bp, Probe Sequence
taataaactcctgtcctttcacttg

SEQ ID NO: 85018 - DNA, 25 bp, Probe Sequence
cttggctgagactgcgattattaaa

SEQ ID NO: 85019 - DNA, 25 bp, Probe Sequence
agactcagaacaagaagacaagttt

SEQ ID NO: 85020 - DNA, 25 bp, Probe Sequence
tataatcccagcaatttgaaaggca

SEQ ID NO: 85021 - DNA, 25 bp, Probe Sequence
ttataatcccagcaatttgaaaggc

SEQ ID NO: 85022 - DNA, 25 bp, Probe Sequence
ataatcccagcaatttgaaaggcaa

SEQ ID NO: 85023 - DNA, 25 bp, Probe Sequence
aatttgaaaggcaaggtaggaggat

SEQ ID NO: 85024 - DNA, 25 bp, Probe Sequence
taatcccagcaatttgaaaggcaag

SEQ ID NO: 85025 - DNA, 25 bp, Probe Sequence
cttataatcccagcaatttgaaagg

SEQ ID NO: 85026 - DNA, 25 bp, Probe Sequence
atttgaaaggcaaggtaggaggatc

SEQ ID NO: 85027 - DNA, 25 bp, Probe Sequence
caatttgaaaggcaaggtaggagga

SEQ ID NO: 85028 - DNA, 25 bp, Probe Sequence
gactttcctactgggcagacatcta

SEQ ID NO: 85029 - DNA, 25 bp, Probe Sequence
aacatcaagggatcatatgccagta

SEQ ID NO: 85030 - DNA, 25 bp, Probe Sequence
gcttataatcccagcaatttgaaag

SEQ ID NO: 85031 - DNA, 25 bp, Probe Sequence
actttcctactgggcagacatctac

SEQ ID NO: 85032 - DNA, 25 bp, Probe Sequence
agcaatttgaaaggcaaggtaggag

SEQ ID NO: 85033 - DNA, 25 bp, Probe Sequence
gatgcagtggctcatgcttataatc

SEQ ID NO: 85034 - DNA, 25 bp, Probe Sequence
acatcaagggatcatatgccagtac

SEQ ID NO: 85035 - DNA, 25 bp, Probe Sequence
cagcaatttgaaaggcaaggtagga

SEQ ID NO: 85036 - DNA, 25 bp, Probe Sequence
tactgggcagacatctacgtattag

SEQ ID NO: 85037 - DNA, 25 bp, Probe Sequence
ctactgggcagacatctacgtatta

SEQ ID NO: 85038 - DNA, 25 bp, Probe Sequence
gaacatcaagggatcatatgccagt

SEQ ID NO: 85039 - DNA, 25 bp, Probe Sequence
cagtggctcatgcttataatcccag

SEQ ID NO: 85040 - DNA, 25 bp, Probe Sequence
atgcagtggctcatgcttataatcc

SEQ ID NO: 85041 - DNA, 25 bp, Probe Sequence
ggatgcagtggctcatgcttataat

SEQ ID NO: 85042 - DNA, 25 bp, Probe Sequence
ctttcctactgggcagacatctacg

SEQ ID NO: 85043 - DNA, 25 bp, Probe Sequence
catcaagggatcatatgccagtacg

SEQ ID NO: 85044 - DNA, 25 bp, Probe Sequence
ttcagtatggtaaggtacagtagaa

SEQ ID NO: 85045 - DNA, 25 bp, Probe Sequence
actatcagccacacaaatataaagc

SEQ ID NO: 85046 - DNA, 25 bp, Probe Sequence
cgactatcagccacacaaatataaa

SEQ ID NO: 85047 - DNA, 25 bp, Probe Sequence
ctctgctaaactgtcttgcttatca

SEQ ID NO: 85048 - DNA, 25 bp, Probe Sequence
actctgctaaactgtcttgcttatc

SEQ ID NO: 85049 - DNA, 25 bp, Probe Sequence
tctgctaaactgtcttgcttatcac

SEQ ID NO: 85050 - DNA, 25 bp, Probe Sequence
gcgactatcagccacacaaatataa

SEQ ID NO: 85051 - DNA, 25 bp, Probe Sequence
tgaatacgaaattgttctctgatgt

SEQ ID NO: 85052 - DNA, 25 bp, Probe Sequence
gtctttcagtatggtaaggtacagt

SEQ ID NO: 85053 - DNA, 25 bp, Probe Sequence
ctgtccagattctccacattgactc

SEQ ID NO: 85054 - DNA, 25 bp, Probe Sequence
tgctaaactgtcttgcttatcacaa

SEQ ID NO: 85055 - DNA, 25 bp, Probe Sequence
gtccagattctccacattgactcaa

SEQ ID NO: 85056 - DNA, 25 bp, Probe Sequence
gtactcatgtccagatgatggtaat

SEQ ID NO: 85057 - DNA, 25 bp, Probe Sequence
gactctgctaaactgtcttgcttat

SEQ ID NO: 85058 - DNA, 25 bp, Probe Sequence
gactatcagccacacaaatataaag

SEQ ID NO: 85059 - DNA, 25 bp, Probe Sequence
tactcatgtccagatgatggtaatt

SEQ ID NO: 85060 - DNA, 25 bp, Probe Sequence
ctgctaaactgtcttgcttatcaca

SEQ ID NO: 85061 - DNA, 25 bp, Probe Sequence
cagtatggtaaggtacagtagaaac

SEQ ID NO: 85062 - DNA, 25 bp, Probe Sequence
tcagtatggtaaggtacagtagaaa

SEQ ID NO: 85063 - DNA, 25 bp, Probe Sequence
tttcagtatggtaaggtacagtaga

SEQ ID NO: 85064 - DNA, 25 bp, Probe Sequence
attctccacattgactcaatcagtt

SEQ ID NO: 85065 - DNA, 25 bp, Probe Sequence
tgtctttcagtatggtaaggtacag

SEQ ID NO: 85066 - DNA, 25 bp, Probe Sequence
tttgtctttcagtatggtaaggtac

SEQ ID NO: 85067 - DNA, 25 bp, Probe Sequence
gaatacgaaattgttctctgatgtt

SEQ ID NO: 85068 - DNA, 25 bp, Probe Sequence
aaacttgtaatcctcactctttggg

SEQ ID NO: 85069 - DNA, 25 bp, Probe Sequence
ctcaaacttgtaatcctcactcttt

SEQ ID NO: 85070 - DNA, 25 bp, Probe Sequence
gctcaaacttgtaatcctcactctt

SEQ ID NO: 85071 - DNA, 25 bp, Probe Sequence
gtcccattaacacagtgagtagtac

SEQ ID NO: 85072 - DNA, 25 bp, Probe Sequence
tgtcccattaacacagtgagtagta

SEQ ID NO: 85073 - DNA, 25 bp, Probe Sequence
ggctcaaacttgtaatcctcactct

SEQ ID NO: 85074 - DNA, 25 bp, Probe Sequence
tggctcaaacttgtaatcctcactc

SEQ ID NO: 85075 - DNA, 25 bp, Probe Sequence
ttgagcttacagtgaaccaagattt

SEQ ID NO: 85076 - DNA, 25 bp, Probe Sequence
tttgagcttacagtgaaccaagatt

SEQ ID NO: 85077 - DNA, 25 bp, Probe Sequence
tgagcttacagtgaaccaagatttc

SEQ ID NO: 85078 - DNA, 25 bp, Probe Sequence
aacttgtaatcctcactctttggga

SEQ ID NO: 85079 - DNA, 25 bp, Probe Sequence
gtttgagcttacagtgaaccaagat

SEQ ID NO: 85080 - DNA, 25 bp, Probe Sequence
acttgtaatcctcactctttgggag

SEQ ID NO: 85081 - DNA, 25 bp, Probe Sequence
cttatcatggagtcaccctgagaag

SEQ ID NO: 85082 - DNA, 25 bp, Probe Sequence
gagcttacagtgaaccaagatttcc

SEQ ID NO: 85083 - DNA, 25 bp, Probe Sequence
gagtttgagcttacagtgaaccaag

SEQ ID NO: 85084 - DNA, 25 bp, Probe Sequence
caaacttgtaatcctcactctttgg

SEQ ID NO: 85085 - DNA, 25 bp, Probe Sequence
tcaaacttgtaatcctcactctttg

SEQ ID NO: 85086 - DNA, 25 bp, Probe Sequence
aattaggctggtatggtgacacaca

SEQ ID NO: 85087 - DNA, 25 bp, Probe Sequence
agtttgagcttacagtgaaccaaga

SEQ ID NO: 85088 - DNA, 25 bp, Probe Sequence
gtggctcaaacttgtaatcctcact

SEQ ID NO: 85089 - DNA, 25 bp, Probe Sequence
aaattaggctggtatggtgacacac

SEQ ID NO: 85090 - DNA, 25 bp, Probe Sequence
agcttacagtgaaccaagatttccc

SEQ ID NO: 85091 - DNA, 25 bp, Probe Sequence
tcccattaacacagtgagtagtact

SEQ ID NO: 85092 - DNA, 25 bp, Probe Sequence
atctcttatcaagtaggaatgccaa

SEQ ID NO: 85093 - DNA, 25 bp, Probe Sequence
ttgcctgatagttattccaacattg

SEQ ID NO: 85094 - DNA, 25 bp, Probe Sequence
tgcctgatagttattccaacattgt

SEQ ID NO: 85095 - DNA, 25 bp, Probe Sequence
tatctcttatcaagtaggaatgcca

SEQ ID NO: 85096 - DNA, 25 bp, Probe Sequence
gtatctcttatcaagtaggaatgcc

SEQ ID NO: 85097 - DNA, 25 bp, Probe Sequence
attgcctgatagttattccaacatt

SEQ ID NO: 85098 - DNA, 25 bp, Probe Sequence
gcctgatagttattccaacattgtt

SEQ ID NO: 85099 - DNA, 25 bp, Probe Sequence
tgtatctcttatcaagtaggaatgc

SEQ ID NO: 85100 - DNA, 25 bp, Probe Sequence
ttattgcctgatagttattccaaca

SEQ ID NO: 85101 - DNA, 25 bp, Probe Sequence
ggcgtatatgtatctcttatcaagt

SEQ ID NO: 85102 - DNA, 25 bp, Probe Sequence
tggcgtatatgtatctcttatcaag

SEQ ID NO: 85103 - DNA, 25 bp, Probe Sequence
tattgcctgatagttattccaacat

SEQ ID NO: 85104 - DNA, 25 bp, Probe Sequence
aataagtgtgtgaggcaatacatat

SEQ ID NO: 85105 - DNA, 25 bp, Probe Sequence
attggcgtatatgtatctcttatca

SEQ ID NO: 85106 - DNA, 25 bp, Probe Sequence
ttggcgtatatgtatctcttatcaa

SEQ ID NO: 85107 - DNA, 25 bp, Probe Sequence
aaatgctacgaatggatgtaaagtg

SEQ ID NO: 85108 - DNA, 25 bp, Probe Sequence
gaaggacagtaagaacccaatgaat

SEQ ID NO: 85109 - DNA, 25 bp, Probe Sequence
atgctacgaatggatgtaaagtgtt

SEQ ID NO: 85110 - DNA, 25 bp, Probe Sequence
aatgctacgaatggatgtaaagtgt

SEQ ID NO: 85111 - DNA, 25 bp, Probe Sequence
aaggacagtaagaacccaatgaatg

SEQ ID NO: 85112 - DNA, 25 bp, Probe Sequence
ctcttatcaagtaggaatgccaaac

SEQ ID NO: 85113 - DNA, 25 bp, Probe Sequence
tctcttatcaagtaggaatgccaaa

SEQ ID NO: 85114 - DNA, 25 bp, Probe Sequence
tgctacgaatggatgtaaagtgttt

SEQ ID NO: 85115 - DNA, 25 bp, Probe Sequence
aaacgacctagtatggataaacctg

SEQ ID NO: 85116 - DNA, 25 bp, Probe Sequence
gttcactctccacctatatgctatg

SEQ ID NO: 85117 - DNA, 25 bp, Probe Sequence
tgttcactctccacctatatgctat

SEQ ID NO: 85118 - DNA, 25 bp, Probe Sequence
ccattcaagttaaggtcaagtctaa

SEQ ID NO: 85119 - DNA, 25 bp, Probe Sequence
ccactcaagttaccattcaagttaa

SEQ ID NO: 85120 - DNA, 25 bp, Probe Sequence
actcaagttaccattcaagttaagg

SEQ ID NO: 85121 - DNA, 25 bp, Probe Sequence
tcaagttaaggtcaagtctaatgtt

SEQ ID NO: 85122 - DNA, 25 bp, Probe Sequence
ttcaagttaaggtcaagtctaatgt

SEQ ID NO: 85123 - DNA, 25 bp, Probe Sequence
cagcgacatcacatagtggaatata

SEQ ID NO: 85124 - DNA, 25 bp, Probe Sequence
aaggaaggaatatctgttggctctg

SEQ ID NO: 85125 - DNA, 25 bp, Probe Sequence
cactcaagttaccattcaagttaag

SEQ ID NO: 85126 - DNA, 25 bp, Probe Sequence
gaaggaatatctgttggctctggtt

SEQ ID NO: 85127 - DNA, 25 bp, Probe Sequence
agttaaggtcaagtctaatgttaca

SEQ ID NO: 85128 - DNA, 25 bp, Probe Sequence
gagaattgcttgaaccttgaactgg

SEQ ID NO: 85129 - DNA, 25 bp, Probe Sequence
accattcaagttaaggtcaagtcta

SEQ ID NO: 85130 - DNA, 25 bp, Probe Sequence
taccattcaagttaaggtcaagtct

SEQ ID NO: 85131 - DNA, 25 bp, Probe Sequence
gtgttcactctccacctatatgcta

SEQ ID NO: 85132 - DNA, 25 bp, Probe Sequence
agcgacatcacatagtggaatatat

SEQ ID NO: 85133 - DNA, 25 bp, Probe Sequence
aaggaatatctgttggctctggttg

SEQ ID NO: 85134 - DNA, 25 bp, Probe Sequence
gttaccattcaagttaaggtcaagt

SEQ ID NO: 85135 - DNA, 25 bp, Probe Sequence
caagttaccattcaagttaaggtca

SEQ ID NO: 85136 - DNA, 25 bp, Probe Sequence
ttaccattcaagttaaggtcaagtc

SEQ ID NO: 85137 - DNA, 25 bp, Probe Sequence
tcaagttaccattcaagttaaggtc

SEQ ID NO: 85138 - DNA, 25 bp, Probe Sequence
agttaccattcaagttaaggtcaag

SEQ ID NO: 85139 - DNA, 25 bp, Probe Sequence
ctcaagttaccattcaagttaaggt

SEQ ID NO: 85140 - DNA, 25 bp, Probe Sequence
gtagttccagctactcagtgagatg

SEQ ID NO: 85141 - DNA, 25 bp, Probe Sequence
tgtagttccagctactcagtgagat

SEQ ID NO: 85142 - DNA, 25 bp, Probe Sequence
tagttccagctactcagtgagatgg

SEQ ID NO: 85143 - DNA, 25 bp, Probe Sequence
ctgtagttccagctactcagtgaga

SEQ ID NO: 85144 - DNA, 25 bp, Probe Sequence
ctatgatcacgccgctatattccag

SEQ ID NO: 85145 - DNA, 25 bp, Probe Sequence
ctatattccagcttgggtgacagag

SEQ ID NO: 85146 - DNA, 25 bp, Probe Sequence
cctgtagttccagctactcagtgag

SEQ ID NO: 85147 - DNA, 25 bp, Probe Sequence
cagctactcagtgagatgggagatc

SEQ ID NO: 85148 - DNA, 25 bp, Probe Sequence
agatcacttgagcccagaagatcaa

SEQ ID NO: 85149 - DNA, 25 bp, Probe Sequence
agctactcagtgagatgggagatca

SEQ ID NO: 85150 - DNA, 25 bp, Probe Sequence
cacctgtagttccagctactcagtg

SEQ ID NO: 85151 - DNA, 25 bp, Probe Sequence
cacacctgtagttccagctactcag

SEQ ID NO: 85152 - DNA, 25 bp, Probe Sequence
acctgtagttccagctactcagtga

SEQ ID NO: 85153 - DNA, 25 bp, Probe Sequence
cacacacctgtagttccagctactc

SEQ ID NO: 85154 - DNA, 25 bp, Probe Sequence
gagctatgatcacgccgctatattc

SEQ ID NO: 85155 - DNA, 25 bp, Probe Sequence
gagatcacttgagcccagaagatca

SEQ ID NO: 85156 - DNA, 25 bp, Probe Sequence
acacctgtagttccagctactcagt

SEQ ID NO: 85157 - DNA, 25 bp, Probe Sequence
gctatgatcacgccgctatattcca

SEQ ID NO: 85158 - DNA, 25 bp, Probe Sequence
acacacctgtagttccagctactca

SEQ ID NO: 85159 - DNA, 25 bp, Probe Sequence
tgagctatgatcacgccgctatatt

SEQ ID NO: 85160 - DNA, 25 bp, Probe Sequence
tatattccagcttgggtgacagagc

SEQ ID NO: 85161 - DNA, 25 bp, Probe Sequence
gctatattccagcttgggtgacaga

SEQ ID NO: 85162 - DNA, 25 bp, Probe Sequence
ggagatcacttgagcccagaagatc

SEQ ID NO: 85163 - DNA, 25 bp, Probe Sequence
ccagctactcagtgagatgggagat

SEQ ID NO: 85164 - DNA, 25 bp, Probe Sequence
ttctctcctttcttctttcccattt

SEQ ID NO: 85165 - DNA, 25 bp, Probe Sequence
tttctctcctttcttctttcccatt

SEQ ID NO: 85166 - DNA, 25 bp, Probe Sequence
gttccttctttctctcctttcttct

SEQ ID NO: 85167 - DNA, 25 bp, Probe Sequence
tctctcctttcttctttcccatttc

SEQ ID NO: 85168 - DNA, 25 bp, Probe Sequence
ctttctctcctttcttctttcccat

SEQ ID NO: 85169 - DNA, 25 bp, Probe Sequence
ttctttctctcctttcttctttccc

SEQ ID NO: 85170 - DNA, 25 bp, Probe Sequence
tccttctttctctcctttcttcttt

SEQ ID NO: 85171 - DNA, 25 bp, Probe Sequence
ttccttctttctctcctttcttctt

SEQ ID NO: 85172 - DNA, 25 bp, Probe Sequence
ttatctcacactcttacagcacctg

SEQ ID NO: 85173 - DNA, 25 bp, Probe Sequence
cttctttctctcctttcttctttcc

SEQ ID NO: 85174 - DNA, 25 bp, Probe Sequence
ccttctttctctcctttcttctttc

SEQ ID NO: 85175 - DNA, 25 bp, Probe Sequence
ttcacttcacagataagaaagggaa

SEQ ID NO: 85176 - DNA, 25 bp, Probe Sequence
cttcacttcacagataagaaaggga

SEQ ID NO: 85177 - DNA, 25 bp, Probe Sequence
tctttctctcctttcttctttccca

SEQ ID NO: 85178 - DNA, 25 bp, Probe Sequence
ctctcctttcttctttcccatttcc

SEQ ID NO: 85179 - DNA, 25 bp, Probe Sequence
cgttccttctttctctcctttcttc

SEQ ID NO: 85180 - DNA, 25 bp, Probe Sequence
tttatctcacactcttacagcacct

SEQ ID NO: 85181 - DNA, 25 bp, Probe Sequence
aataatgattctccaaattgccttg

SEQ ID NO: 85182 - DNA, 25 bp, Probe Sequence
tctcctttcttctttcccatttccc

SEQ ID NO: 85183 - DNA, 25 bp, Probe Sequence
ctcttaggaacagatgccatcaaag

SEQ ID NO: 85184 - DNA, 25 bp, Probe Sequence
aaataatgattctccaaattgcctt

SEQ ID NO: 85185 - DNA, 25 bp, Probe Sequence
cttaggaacagatgccatcaaagac

SEQ ID NO: 85186 - DNA, 25 bp, Probe Sequence
ttcacagataagaaagggaagccag

SEQ ID NO: 85187 - DNA, 25 bp, Probe Sequence
tcttcacttcacagataagaaaggg

SEQ ID NO: 85188 - DNA, 25 bp, Probe Sequence
gttagaccgtcgtgagacaggttag

SEQ ID NO: 85189 - DNA, 25 bp, Probe Sequence
ttggcagacatcaagtgatcaaagg

SEQ ID NO: 85190 - DNA, 25 bp, Probe Sequence
gacatcaagtgatcaaaggccagac

SEQ ID NO: 85191 - DNA, 25 bp, Probe Sequence
cagacatcaagtgatcaaaggccag

SEQ ID NO: 85192 - DNA, 25 bp, Probe Sequence
agacatcaagtgatcaaaggccaga

SEQ ID NO: 85193 - DNA, 25 bp, Probe Sequence
cttggcagacatcaagtgatcaaag

SEQ ID NO: 85194 - DNA, 25 bp, Probe Sequence
ttgtcttggctcttcaaaggtaatg

SEQ ID NO: 85195 - DNA, 25 bp, Probe Sequence
ttggctagtgacagggctaattaat

SEQ ID NO: 85196 - DNA, 25 bp, Probe Sequence
tttggctagtgacagggctaattaa

SEQ ID NO: 85197 - DNA, 25 bp, Probe Sequence
ctttggctagtgacagggctaatta

SEQ ID NO: 85198 - DNA, 25 bp, Probe Sequence
tttcgttctttgtcttggctcttca

SEQ ID NO: 85199 - DNA, 25 bp, Probe Sequence
tgtcttggctcttcaaaggtaatgg

SEQ ID NO: 85200 - DNA, 25 bp, Probe Sequence
acggacaataaaagaatgaacacaa

SEQ ID NO: 85201 - DNA, 25 bp, Probe Sequence
aacggacaataaaagaatgaacaca

SEQ ID NO: 85202 - DNA, 25 bp, Probe Sequence
acaacggacaataaaagaatgaaca

SEQ ID NO: 85203 - DNA, 25 bp, Probe Sequence
caacggacaataaaagaatgaacac

SEQ ID NO: 85204 - DNA, 25 bp, Probe Sequence
ttcgttctttgtcttggctcttcaa

SEQ ID NO: 85205 - DNA, 25 bp, Probe Sequence
tttgtcttggctcttcaaaggtaat

SEQ ID NO: 85206 - DNA, 25 bp, Probe Sequence
cggacaataaaagaatgaacacaaa

SEQ ID NO: 85207 - DNA, 25 bp, Probe Sequence
ccatagtcttttcctgtgctgttag

SEQ ID NO: 85208 - DNA, 25 bp, Probe Sequence
tccatagtcttttcctgtgctgtta

SEQ ID NO: 85209 - DNA, 25 bp, Probe Sequence
tttcctgtgctgttagctctttatt

SEQ ID NO: 85210 - DNA, 25 bp, Probe Sequence
acatactccatagtcttttcctgtg

SEQ ID NO: 85211 - DNA, 25 bp, Probe Sequence
atactccatagtcttttcctgtgct

SEQ ID NO: 85212 - DNA, 25 bp, Probe Sequence
catactccatagtcttttcctgtgc

SEQ ID NO: 85213 - DNA, 25 bp, Probe Sequence
cctgtgctgttagctctttattctt

SEQ ID NO: 85214 - DNA, 25 bp, Probe Sequence
ctgtgctgttagctctttattctta

SEQ ID NO: 85215 - DNA, 25 bp, Probe Sequence
ttcctgtgctgttagctctttattc

SEQ ID NO: 85216 - DNA, 25 bp, Probe Sequence
ttttcgttctttgtcttggctcttc

SEQ ID NO: 85217 - DNA, 25 bp, Probe Sequence
tagtgacagggctaattaatttgct

SEQ ID NO: 85218 - DNA, 25 bp, Probe Sequence
ttactgcctgtaatcccagcacttt

SEQ ID NO: 85219 - DNA, 25 bp, Probe Sequence
cttactgcctgtaatcccagcactt

SEQ ID NO: 85220 - DNA, 25 bp, Probe Sequence
tactgcctgtaatcccagcactttg

SEQ ID NO: 85221 - DNA, 25 bp, Probe Sequence
acttgtagtcccagctactcgagag

SEQ ID NO: 85222 - DNA, 25 bp, Probe Sequence
cacttgtagtcccagctactcgaga

SEQ ID NO: 85223 - DNA, 25 bp, Probe Sequence
ctatctatgacctacctgtgtgttc

SEQ ID NO: 85224 - DNA, 25 bp, Probe Sequence
cagtcgtctaagtccaaccaataag

SEQ ID NO: 85225 - DNA, 25 bp, Probe Sequence
gtcgtctaagtccaaccaataagtg

SEQ ID NO: 85226 - DNA, 25 bp, Probe Sequence
agtcgtctaagtccaaccaataagt

SEQ ID NO: 85227 - DNA, 25 bp, Probe Sequence
tcagtcgtctaagtccaaccaataa

SEQ ID NO: 85228 - DNA, 25 bp, Probe Sequence
ttcagtcgtctaagtccaaccaata

SEQ ID NO: 85229 - DNA, 25 bp, Probe Sequence
cgtctaagtccaaccaataagtgtt

SEQ ID NO: 85230 - DNA, 25 bp, Probe Sequence
tatctatgacctacctgtgtgttca

SEQ ID NO: 85231 - DNA, 25 bp, Probe Sequence
gctatctatgacctacctgtgtgtt

SEQ ID NO: 85232 - DNA, 25 bp, Probe Sequence
tcgtctaagtccaaccaataagtgt

SEQ ID NO: 85233 - DNA, 25 bp, Probe Sequence
tgttctaagtgaagtaactcaggaa

SEQ ID NO: 85234 - DNA, 25 bp, Probe Sequence
ttgttctaagtgaagtaactcagga

SEQ ID NO: 85235 - DNA, 25 bp, Probe Sequence
tggagactattgttctaagtgaagt

SEQ ID NO: 85236 - DNA, 25 bp, Probe Sequence
tctaagtgaagtaactcaggaatga

SEQ ID NO: 85237 - DNA, 25 bp, Probe Sequence
attgttctaagtgaagtaactcagg

SEQ ID NO: 85238 - DNA, 25 bp, Probe Sequence
ctaagtgaagtaactcaggaatgaa

SEQ ID NO: 85239 - DNA, 25 bp, Probe Sequence
ttctaagtgaagtaactcaggaatg

SEQ ID NO: 85240 - DNA, 25 bp, Probe Sequence
gttctaagtgaagtaactcaggaat

SEQ ID NO: 85241 - DNA, 25 bp, Probe Sequence
ttggagactattgttctaagtgaag

SEQ ID NO: 85242 - DNA, 25 bp, Probe Sequence
ggagactattgttctaagtgaagta

SEQ ID NO: 85243 - DNA, 25 bp, Probe Sequence
attggagactattgttctaagtgaa

SEQ ID NO: 85244 - DNA, 25 bp, Probe Sequence
aattggagactattgttctaagtga

SEQ ID NO: 85245 - DNA, 25 bp, Probe Sequence
acctacctgtgtgttcatttatgta

SEQ ID NO: 85246 - DNA, 25 bp, Probe Sequence
gacctacctgtgtgttcatttatgt

SEQ ID NO: 85247 - DNA, 25 bp, Probe Sequence
ttcagaaggactctcaatcactcag

SEQ ID NO: 85248 - DNA, 25 bp, Probe Sequence
gttcagaaggactctcaatcactca

SEQ ID NO: 85249 - DNA, 25 bp, Probe Sequence
tgttcagaaggactctcaatcactc

SEQ ID NO: 85250 - DNA, 25 bp, Probe Sequence
ctgttcagaaggactctcaatcact

SEQ ID NO: 85251 - DNA, 25 bp, Probe Sequence
ggactctcaatcactcagctcttaa

SEQ ID NO: 85252 - DNA, 25 bp, Probe Sequence
tagaaacagagtgaaggcaagttaa

SEQ ID NO: 85253 - DNA, 25 bp, Probe Sequence
ctagaaacagagtgaaggcaagtta

SEQ ID NO: 85254 - DNA, 25 bp, Probe Sequence
aggactctcaatcactcagctctta

SEQ ID NO: 85255 - DNA, 25 bp, Probe Sequence
cctgttcagaaggactctcaatcac

SEQ ID NO: 85256 - DNA, 25 bp, Probe Sequence
taaattcccgaagtcctgttcagaa

SEQ ID NO: 85257 - DNA, 25 bp, Probe Sequence
agattaggagtaaattcccgaagtc

SEQ ID NO: 85258 - DNA, 25 bp, Probe Sequence
actctcaatcactcagctcttaaag

SEQ ID NO: 85259 - DNA, 25 bp, Probe Sequence
gactctcaatcactcagctcttaaa

SEQ ID NO: 85260 - DNA, 25 bp, Probe Sequence
aagattaggagtaaattcccgaagt

SEQ ID NO: 85261 - DNA, 25 bp, Probe Sequence
gattaggagtaaattcccgaagtcc

SEQ ID NO: 85262 - DNA, 25 bp, Probe Sequence
ctcaggtatttaaaggcagttcttg

SEQ ID NO: 85263 - DNA, 25 bp, Probe Sequence
caggtatttaaaggcagttcttgat

SEQ ID NO: 85264 - DNA, 25 bp, Probe Sequence
tcagaaggactctcaatcactcagc

SEQ ID NO: 85265 - DNA, 25 bp, Probe Sequence
aggtatttaaaggcagttcttgatc

SEQ ID NO: 85266 - DNA, 25 bp, Probe Sequence
gagtaaattcccgaagtcctgttca

SEQ ID NO: 85267 - DNA, 25 bp, Probe Sequence
tcaggtatttaaaggcagttcttga

SEQ ID NO: 85268 - DNA, 25 bp, Probe Sequence
actcaggtatttaaaggcagttctt

SEQ ID NO: 85269 - DNA, 25 bp, Probe Sequence
gtaaattcccgaagtcctgttcaga

SEQ ID NO: 85270 - DNA, 25 bp, Probe Sequence
agtaaattcccgaagtcctgttcag

SEQ ID NO: 85271 - DNA, 25 bp, Probe Sequence
taagagtatatgtatcggctgagtg

SEQ ID NO: 85272 - DNA, 25 bp, Probe Sequence
ttaagagtatatgtatcggctgagt

SEQ ID NO: 85273 - DNA, 25 bp, Probe Sequence
aagagtatatgtatcggctgagtgc

SEQ ID NO: 85274 - DNA, 25 bp, Probe Sequence
cgttcctgtaatcacatctactcag

SEQ ID NO: 85275 - DNA, 25 bp, Probe Sequence
tgtattgtgatttgtcctctgaaga

SEQ ID NO: 85276 - DNA, 25 bp, Probe Sequence
ctaaatctcagtctacaaccttgct

SEQ ID NO: 85277 - DNA, 25 bp, Probe Sequence
atgtattgtgatttgtcctctgaag

SEQ ID NO: 85278 - DNA, 25 bp, Probe Sequence
gtaatcacatctactcaggaggctg

SEQ ID NO: 85279 - DNA, 25 bp, Probe Sequence
ctgtaatcacatctactcaggaggc

SEQ ID NO: 85280 - DNA, 25 bp, Probe Sequence
gtattgtgatttgtcctctgaagaa

SEQ ID NO: 85281 - DNA, 25 bp, Probe Sequence
gcgttcctgtaatcacatctactca

SEQ ID NO: 85282 - DNA, 25 bp, Probe Sequence
tgcgttcctgtaatcacatctactc

SEQ ID NO: 85283 - DNA, 25 bp, Probe Sequence
ctcacacctgtaattccatcacttt

SEQ ID NO: 85284 - DNA, 25 bp, Probe Sequence
tgtaatcacatctactcaggaggct

SEQ ID NO: 85285 - DNA, 25 bp, Probe Sequence
gctcacacctgtaattccatcactt

SEQ ID NO: 85286 - DNA, 25 bp, Probe Sequence
tgtgtttaagagtatatgtatcggc

SEQ ID NO: 85287 - DNA, 25 bp, Probe Sequence
tattgtgatttgtcctctgaagaaa

SEQ ID NO: 85288 - DNA, 25 bp, Probe Sequence
tgtttaagagtatatgtatcggctg

SEQ ID NO: 85289 - DNA, 25 bp, Probe Sequence
gtgtttaagagtatatgtatcggct

SEQ ID NO: 85290 - DNA, 25 bp, Probe Sequence
gctaaatctcagtctacaaccttgc

SEQ ID NO: 85291 - DNA, 25 bp, Probe Sequence
tagctcacacctgtaattccatcac

SEQ ID NO: 85292 - DNA, 25 bp, Probe Sequence
gtagctcacacctgtaattccatca

SEQ ID NO: 85293 - DNA, 25 bp, Probe Sequence
tttagccatgtattgtgatttgtcc

SEQ ID NO: 85294 - DNA, 25 bp, Probe Sequence
ctttgctttagccatgtattgtgat

SEQ ID NO: 85295 - DNA, 25 bp, Probe Sequence
gcattatgaacacaactgaatacct

SEQ ID NO: 85296 - DNA, 25 bp, Probe Sequence
ttatgaacacaactgaatacctctt

SEQ ID NO: 85297 - DNA, 25 bp, Probe Sequence
cattatgaacacaactgaatacctc

SEQ ID NO: 85298 - DNA, 25 bp, Probe Sequence
gcacataatacagatactacgctga

SEQ ID NO: 85299 - DNA, 25 bp, Probe Sequence
attatgaacacaactgaatacctct

SEQ ID NO: 85300 - DNA, 25 bp, Probe Sequence
ggcacataatacagatactacgctg

SEQ ID NO: 85301 - DNA, 25 bp, Probe Sequence
cacataatacagatactacgctgat

SEQ ID NO: 85302 - DNA, 25 bp, Probe Sequence
tgcattatgaacacaactgaatacc

SEQ ID NO: 85303 - DNA, 25 bp, Probe Sequence
gctgcattatgaacacaactgaata

SEQ ID NO: 85304 - DNA, 25 bp, Probe Sequence
ttatgctgcattatgaacacaactg

SEQ ID NO: 85305 - DNA, 25 bp, Probe Sequence
atgggcacataatacagatactacg

SEQ ID NO: 85306 - DNA, 25 bp, Probe Sequence
acatatacacagtatccagattcac

SEQ ID NO: 85307 - DNA, 25 bp, Probe Sequence
ctgcattatgaacacaactgaatac

SEQ ID NO: 85308 - DNA, 25 bp, Probe Sequence
tatgctgcattatgaacacaactga

SEQ ID NO: 85309 - DNA, 25 bp, Probe Sequence
aacacaactgaatacctctttggat

SEQ ID NO: 85310 - DNA, 25 bp, Probe Sequence
acacaactgaatacctctttggata

SEQ ID NO: 85311 - DNA, 25 bp, Probe Sequence
atgaacacaactgaatacctctttg

SEQ ID NO: 85312 - DNA, 25 bp, Probe Sequence
actaatcataagtttcctggcacat

SEQ ID NO: 85313 - DNA, 25 bp, Probe Sequence
aacactaatcataagtttcctggca

SEQ ID NO: 85314 - DNA, 25 bp, Probe Sequence
catatacacagtatccagattcact

SEQ ID NO: 85315 - DNA, 25 bp, Probe Sequence
gccaagtcaatttactaagtcacaa

SEQ ID NO: 85316 - DNA, 25 bp, Probe Sequence
gaacacaactgaatacctctttgga

SEQ ID NO: 85317 - DNA, 25 bp, Probe Sequence
tgctgcattatgaacacaactgaat

SEQ ID NO: 85318 - DNA, 25 bp, Probe Sequence
agtatccagattcactgtgttcagc

SEQ ID NO: 85319 - DNA, 25 bp, Probe Sequence
agataattggtctcagagatcaagc

SEQ ID NO: 85320 - DNA, 25 bp, Probe Sequence
gataattggtctcagagatcaagcc

SEQ ID NO: 85321 - DNA, 25 bp, Probe Sequence
tgtcgtgttacagttatacaatgat

SEQ ID NO: 85322 - DNA, 25 bp, Probe Sequence
ctgtttgaatgtgtgttagtctgat

SEQ ID NO: 85323 - DNA, 25 bp, Probe Sequence
aagataattggtctcagagatcaag

SEQ ID NO: 85324 - DNA, 25 bp, Probe Sequence
aagaaatgttggcaaggagaataaa

SEQ ID NO: 85325 - DNA, 25 bp, Probe Sequence
aaagaaatgttggcaaggagaataa

SEQ ID NO: 85326 - DNA, 25 bp, Probe Sequence
aggagatttggagtttgtggtaaag

SEQ ID NO: 85327 - DNA, 25 bp, Probe Sequence
ctcagagatcaagccatatcctcag

SEQ ID NO: 85328 - DNA, 25 bp, Probe Sequence
caggagatttggagtttgtggtaaa

SEQ ID NO: 85329 - DNA, 25 bp, Probe Sequence
cctgtttgaatgtgtgttagtctga

SEQ ID NO: 85330 - DNA, 25 bp, Probe Sequence
caaagaaatgttggcaaggagaata

SEQ ID NO: 85331 - DNA, 25 bp, Probe Sequence
tcatctgaaagaaatggagaactct

SEQ ID NO: 85332 - DNA, 25 bp, Probe Sequence
gtctcagagatcaagccatatcctc

SEQ ID NO: 85333 - DNA, 25 bp, Probe Sequence
gtcgtgttacagttatacaatgatt

SEQ ID NO: 85334 - DNA, 25 bp, Probe Sequence
attggtctcagagatcaagccatat

SEQ ID NO: 85335 - DNA, 25 bp, Probe Sequence
tgtttgaatgtgtgttagtctgatc

SEQ ID NO: 85336 - DNA, 25 bp, Probe Sequence
tgaatgtgtgttagtctgatctttg

SEQ ID NO: 85337 - DNA, 25 bp, Probe Sequence
gtttgaatgtgtgttagtctgatct

SEQ ID NO: 85338 - DNA, 25 bp, Probe Sequence
aaatgtcaaagaaatgttggcaagg

SEQ ID NO: 85339 - DNA, 25 bp, Probe Sequence
tctcagagatcaagccatatcctca

SEQ ID NO: 85340 - DNA, 25 bp, Probe Sequence
ctcatctgaaagaaatggagaactc

SEQ ID NO: 85341 - DNA, 25 bp, Probe Sequence
gaatgtgtgttagtctgatctttga

SEQ ID NO: 85342 - DNA, 25 bp, Probe Sequence
aattggtctcagagatcaagccata

SEQ ID NO: 85343 - DNA, 25 bp, Probe Sequence
attgaggagatatgccagatgctta

SEQ ID NO: 85344 - DNA, 25 bp, Probe Sequence
ttgaggagatatgccagatgcttaa

SEQ ID NO: 85345 - DNA, 25 bp, Probe Sequence
aattgaggagatatgccagatgctt

SEQ ID NO: 85346 - DNA, 25 bp, Probe Sequence
ctatgagagctacaagaagaaggac

SEQ ID NO: 85347 - DNA, 25 bp, Probe Sequence
atgagagctacaagaagaaggacta

SEQ ID NO: 85348 - DNA, 25 bp, Probe Sequence
tatgagagctacaagaagaaggact

SEQ ID NO: 85349 - DNA, 25 bp, Probe Sequence
ttgctgtcagattaattccatgatc

SEQ ID NO: 85350 - DNA, 25 bp, Probe Sequence
gagagctacaagaagaaggactaca

SEQ ID NO: 85351 - DNA, 25 bp, Probe Sequence
tgagagctacaagaagaaggactac

SEQ ID NO: 85352 - DNA, 25 bp, Probe Sequence
attgctgtcagattaattccatgat

SEQ ID NO: 85353 - DNA, 25 bp, Probe Sequence
agagctacaagaagaaggactacac

SEQ ID NO: 85354 - DNA, 25 bp, Probe Sequence
aattgctgtcagattaattccatga

SEQ ID NO: 85355 - DNA, 25 bp, Probe Sequence
ggactacttaatcaacgggatgtat

SEQ ID NO: 85356 - DNA, 25 bp, Probe Sequence
gatatgccagatgcttaaacacatt

SEQ ID NO: 85357 - DNA, 25 bp, Probe Sequence
actacttaatcaacgggatgtatgc

SEQ ID NO: 85358 - DNA, 25 bp, Probe Sequence
atatgccagatgcttaaacacattt

SEQ ID NO: 85359 - DNA, 25 bp, Probe Sequence
agatatgccagatgcttaaacacat

SEQ ID NO: 85360 - DNA, 25 bp, Probe Sequence
gactacttaatcaacgggatgtatg

SEQ ID NO: 85361 - DNA, 25 bp, Probe Sequence
tggactacttaatcaacgggatgta

SEQ ID NO: 85362 - DNA, 25 bp, Probe Sequence
gagatatgccagatgcttaaacaca

SEQ ID NO: 85363 - DNA, 25 bp, Probe Sequence
gaggagatatgccagatgcttaaac

SEQ ID NO: 85364 - DNA, 25 bp, Probe Sequence
caaaccaagtgcttccaaattcttt

SEQ ID NO: 85365 - DNA, 25 bp, Probe Sequence
tatgccagatgcttaaacacattta

SEQ ID NO: 85366 - DNA, 25 bp, Probe Sequence
tgaggagatatgccagatgcttaaa

SEQ ID NO: 85367 - DNA, 25 bp, Probe Sequence
attgaggagatatgccagatgctta

SEQ ID NO: 85368 - DNA, 25 bp, Probe Sequence
ttgaggagatatgccagatgcttaa

SEQ ID NO: 85369 - DNA, 25 bp, Probe Sequence
aattgaggagatatgccagatgctt

SEQ ID NO: 85370 - DNA, 25 bp, Probe Sequence
ctatgagagctacaagaagaaggac

SEQ ID NO: 85371 - DNA, 25 bp, Probe Sequence
atgagagctacaagaagaaggacta

SEQ ID NO: 85372 - DNA, 25 bp, Probe Sequence
tatgagagctacaagaagaaggact

SEQ ID NO: 85373 - DNA, 25 bp, Probe Sequence
ttgctgtcagattaattccatgatc

SEQ ID NO: 85374 - DNA, 25 bp, Probe Sequence
gagagctacaagaagaaggactaca

SEQ ID NO: 85375 - DNA, 25 bp, Probe Sequence
tgagagctacaagaagaaggactac

SEQ ID NO: 85376 - DNA, 25 bp, Probe Sequence
attgctgtcagattaattccatgat

SEQ ID NO: 85377 - DNA, 25 bp, Probe Sequence
agagctacaagaagaaggactacac

SEQ ID NO: 85378 - DNA, 25 bp, Probe Sequence
aattgctgtcagattaattccatga

SEQ ID NO: 85379 - DNA, 25 bp, Probe Sequence
ggactacttaatcaacgggatgtat

SEQ ID NO: 85380 - DNA, 25 bp, Probe Sequence
gatatgccagatgcttaaacacatt

SEQ ID NO: 85381 - DNA, 25 bp, Probe Sequence
actacttaatcaacgggatgtatgc

SEQ ID NO: 85382 - DNA, 25 bp, Probe Sequence
atatgccagatgcttaaacacattt

SEQ ID NO: 85383 - DNA, 25 bp, Probe Sequence
agatatgccagatgcttaaacacat

SEQ ID NO: 85384 - DNA, 25 bp, Probe Sequence
gactacttaatcaacgggatgtatg

SEQ ID NO: 85385 - DNA, 25 bp, Probe Sequence
tggactacttaatcaacgggatgta

SEQ ID NO: 85386 - DNA, 25 bp, Probe Sequence
gagatatgccagatgcttaaacaca

SEQ ID NO: 85387 - DNA, 25 bp, Probe Sequence
gaggagatatgccagatgcttaaac

SEQ ID NO: 85388 - DNA, 25 bp, Probe Sequence
caaaccaagtgcttccaaattcttt

SEQ ID NO: 85389 - DNA, 25 bp, Probe Sequence
tatgccagatgcttaaacacattta

SEQ ID NO: 85390 - DNA, 25 bp, Probe Sequence
tgaggagatatgccagatgcttaaa

SEQ ID NO: 85391 - DNA, 25 bp, Probe Sequence
ctaagacagagcctaagacagttac

SEQ ID NO: 85392 - DNA, 25 bp, Probe Sequence
cctaagacagagcctaagacagtta

SEQ ID NO: 85393 - DNA, 25 bp, Probe Sequence
taagacagagcctaagacagttacc

SEQ ID NO: 85394 - DNA, 25 bp, Probe Sequence
cctaagacagagcctaagagttacc

SEQ ID NO: 85395 - DNA, 25 bp, Probe Sequence
gctcctggaagttatctattgagaa

SEQ ID NO: 85396 - DNA, 25 bp, Probe Sequence
ggctcctggaagttatctattgaga

SEQ ID NO: 85397 - DNA, 25 bp, Probe Sequence
agctgtgatgaagaattgagttacc

SEQ ID NO: 85398 - DNA, 25 bp, Probe Sequence
tcttgctgtctctttcacctaataa

SEQ ID NO: 85399 - DNA, 25 bp, Probe Sequence
ttcttgctgtctctttcacctaata

SEQ ID NO: 85400 - DNA, 25 bp, Probe Sequence
tttcttgctgtctctttcacctaat

SEQ ID NO: 85401 - DNA, 25 bp, Probe Sequence
ctaagacagttaccctaagacagag

SEQ ID NO: 85402 - DNA, 25 bp, Probe Sequence
cctaagagttaccctaagacagagt

SEQ ID NO: 85403 - DNA, 25 bp, Probe Sequence
gagtttaagagcctaagacagagtt

SEQ ID NO: 85404 - DNA, 25 bp, Probe Sequence
ccctaagagtttaagagcctaagac

SEQ ID NO: 85405 - DNA, 25 bp, Probe Sequence
agcctaagagttaccctaagagttt

SEQ ID NO: 85406 - DNA, 25 bp, Probe Sequence
tttaagagcctaagacagagttacc

SEQ ID NO: 85407 - DNA, 25 bp, Probe Sequence
aagagtttaagagcctaagacagag

SEQ ID NO: 85408 - DNA, 25 bp, Probe Sequence
accctaagagtttaagagcctaaga

SEQ ID NO: 85409 - DNA, 25 bp, Probe Sequence
agagttaccctaagacagagttacc

SEQ ID NO: 85410 - DNA, 25 bp, Probe Sequence
gagttaccctaagagtttaagagcc

SEQ ID NO: 85411 - DNA, 25 bp, Probe Sequence
cctaagacagttaccctaagacaga

SEQ ID NO: 85412 - DNA, 25 bp, Probe Sequence
cctaagagtttaagagcctaagaca

SEQ ID NO: 85413 - DNA, 25 bp, Probe Sequence
agagttaccctaagagtttaagagc

SEQ ID NO: 85414 - DNA, 25 bp, Probe Sequence
aagagttaccctaagacagagttac

SEQ ID NO: 85415 - DNA, 25 bp, Probe Sequence
cttattctccatgtggtcttcttct

SEQ ID NO: 85416 - DNA, 25 bp, Probe Sequence
tcttattctccatgtggtcttcttc

SEQ ID NO: 85417 - DNA, 25 bp, Probe Sequence
ctcttattctccatgtggtcttctt

SEQ ID NO: 85418 - DNA, 25 bp, Probe Sequence
ttattctccatgtggtcttcttctg

SEQ ID NO: 85419 - DNA, 25 bp, Probe Sequence
gatgagaggcatatatacttccgag

SEQ ID NO: 85420 - DNA, 25 bp, Probe Sequence
ctgatgagaggcatatatacttccg

SEQ ID NO: 85421 - DNA, 25 bp, Probe Sequence
tccactgatgagaggcatatatact

SEQ ID NO: 85422 - DNA, 25 bp, Probe Sequence
tgatgagaggcatatatacttccga

SEQ ID NO: 85423 - DNA, 25 bp, Probe Sequence
ccactgatgagaggcatatatactt

SEQ ID NO: 85424 - DNA, 25 bp, Probe Sequence
actgatgagaggcatatatacttcc

SEQ ID NO: 85425 - DNA, 25 bp, Probe Sequence
atgagaggcatatatacttccgagg

SEQ ID NO: 85426 - DNA, 25 bp, Probe Sequence
ctccactgatgagaggcatatatac

SEQ ID NO: 85427 - DNA, 25 bp, Probe Sequence
actccactgatgagaggcatatata

SEQ ID NO: 85428 - DNA, 25 bp, Probe Sequence
cctcttattctccatgtggtcttct

SEQ ID NO: 85429 - DNA, 25 bp, Probe Sequence
ttcctgacctggttaagagaatgac

SEQ ID NO: 85430 - DNA, 25 bp, Probe Sequence
gttcctgacctggttaagagaatga

SEQ ID NO: 85431 - DNA, 25 bp, Probe Sequence
cactgatgagaggcatatatacttc

SEQ ID NO: 85432 - DNA, 25 bp, Probe Sequence
gactccactgatgagaggcatatat

SEQ ID NO: 85433 - DNA, 25 bp, Probe Sequence
ttaagagaatgaccgagaacaaaca

SEQ ID NO: 85434 - DNA, 25 bp, Probe Sequence
tattctccatgtggtcttcttctgc

SEQ ID NO: 85435 - DNA, 25 bp, Probe Sequence
taagagaatgaccgagaacaaacac

SEQ ID NO: 85436 - DNA, 25 bp, Probe Sequence
gttaagagaatgaccgagaacaaac

SEQ ID NO: 85437 - DNA, 25 bp, Probe Sequence
tggttaagagaatgaccgagaacaa

SEQ ID NO: 85438 - DNA, 25 bp, Probe Sequence
gcctcttattctccatgtggtcttc

SEQ ID NO: 85439 - DNA, 25 bp, Probe Sequence
ggattctctcatcaaggctacaatt

SEQ ID NO: 85440 - DNA, 25 bp, Probe Sequence
aattggattctctcatcaaggctac

SEQ ID NO: 85441 - DNA, 25 bp, Probe Sequence
tggattctctcatcaaggctacaat

SEQ ID NO: 85442 - DNA, 25 bp, Probe Sequence
attggattctctcatcaaggctaca

SEQ ID NO: 85443 - DNA, 25 bp, Probe Sequence
ttggattctctcatcaaggctacaa

SEQ ID NO: 85444 - DNA, 25 bp, Probe Sequence
acttgctattcgtggagatgaagaa

SEQ ID NO: 85445 - DNA, 25 bp, Probe Sequence
aacttgctattcgtggagatgaaga

SEQ ID NO: 85446 - DNA, 25 bp, Probe Sequence
caacttgctattcgtggagatgaag

SEQ ID NO: 85447 - DNA, 25 bp, Probe Sequence
gatgcctggattccttgttatctca

SEQ ID NO: 85448 - DNA, 25 bp, Probe Sequence
tattcgtggagatgaagaattggat

SEQ ID NO: 85449 - DNA, 25 bp, Probe Sequence
gaattggattctctcatcaaggcta

SEQ ID NO: 85450 - DNA, 25 bp, Probe Sequence
ctattcgtggagatgaagaattgga

SEQ ID NO: 85451 - DNA, 25 bp, Probe Sequence
gaagctattgattctgaagtagtgg

SEQ ID NO: 85452 - DNA, 25 bp, Probe Sequence
attcgtggagatgaagaattggatt

SEQ ID NO: 85453 - DNA, 25 bp, Probe Sequence
ttgctattcgtggagatgaagaatt

SEQ ID NO: 85454 - DNA, 25 bp, Probe Sequence
tctgcattcgagtcttaaccatatt

SEQ ID NO: 85455 - DNA, 25 bp, Probe Sequence
ttctgcattcgagtcttaaccatat

SEQ ID NO: 85456 - DNA, 25 bp, Probe Sequence
cttgctattcgtggagatgaagaat

SEQ ID NO: 85457 - DNA, 25 bp, Probe Sequence
tggtggataagttcaataaaggtca

SEQ ID NO: 85458 - DNA, 25 bp, Probe Sequence
tctggtggataagttcaataaaggt

SEQ ID NO: 85459 - DNA, 25 bp, Probe Sequence
ttcgtggagatgaagaattggattc

SEQ ID NO: 85460 - DNA, 25 bp, Probe Sequence
ctggtggataagttcaataaaggtc

SEQ ID NO: 85461 - DNA, 25 bp, Probe Sequence
tcaggactctaaatactctaacagc

SEQ ID NO: 85462 - DNA, 25 bp, Probe Sequence
tgctattcgtggagatgaagaattg

SEQ ID NO: 85463 - DNA, 25 bp, Probe Sequence
ggattctctcatcaaggctacaatt

SEQ ID NO: 85464 - DNA, 25 bp, Probe Sequence
aattggattctctcatcaaggctac

SEQ ID NO: 85465 - DNA, 25 bp, Probe Sequence
tggattctctcatcaaggctacaat

SEQ ID NO: 85466 - DNA, 25 bp, Probe Sequence
attggattctctcatcaaggctaca

SEQ ID NO: 85467 - DNA, 25 bp, Probe Sequence
ttggattctctcatcaaggctacaa

SEQ ID NO: 85468 - DNA, 25 bp, Probe Sequence
acttgctattcgtggagatgaagaa

SEQ ID NO: 85469 - DNA, 25 bp, Probe Sequence
aacttgctattcgtggagatgaaga

SEQ ID NO: 85470 - DNA, 25 bp, Probe Sequence
caacttgctattcgtggagatgaag

SEQ ID NO: 85471 - DNA, 25 bp, Probe Sequence
gatgcctggattccttgttatctca

SEQ ID NO: 85472 - DNA, 25 bp, Probe Sequence
tattcgtggagatgaagaattggat

SEQ ID NO: 85473 - DNA, 25 bp, Probe Sequence
gaattggattctctcatcaaggcta

SEQ ID NO: 85474 - DNA, 25 bp, Probe Sequence
ctattcgtggagatgaagaattgga

SEQ ID NO: 85475 - DNA, 25 bp, Probe Sequence
gaagctattgattctgaagtagtgg

SEQ ID NO: 85476 - DNA, 25 bp, Probe Sequence
attcgtggagatgaagaattggatt

SEQ ID NO: 85477 - DNA, 25 bp, Probe Sequence
ttgctattcgtggagatgaagaatt

SEQ ID NO: 85478 - DNA, 25 bp, Probe Sequence
tctgcattcgagtcttaaccatatt

SEQ ID NO: 85479 - DNA, 25 bp, Probe Sequence
ttctgcattcgagtcttaaccatat

SEQ ID NO: 85480 - DNA, 25 bp, Probe Sequence
cttgctattcgtggagatgaagaat

SEQ ID NO: 85481 - DNA, 25 bp, Probe Sequence
tggtggataagttcaataaaggtca

SEQ ID NO: 85482 - DNA, 25 bp, Probe Sequence
tctggtggataagttcaataaaggt

SEQ ID NO: 85483 - DNA, 25 bp, Probe Sequence
ttcgtggagatgaagaattggattc

SEQ ID NO: 85484 - DNA, 25 bp, Probe Sequence
ctggtggataagttcaataaaggtc

SEQ ID NO: 85485 - DNA, 25 bp, Probe Sequence
tcaggactctaaatactctaacagc

SEQ ID NO: 85486 - DNA, 25 bp, Probe Sequence
tgctattcgtggagatgaagaattg

SEQ ID NO: 85487 - DNA, 25 bp, Probe Sequence
ctgtgattccgtttgtatctgtaaa

SEQ ID NO: 85488 - DNA, 25 bp, Probe Sequence
tgtgattccgtttgtatctgtaaat

SEQ ID NO: 85489 - DNA, 25 bp, Probe Sequence
gctgtgattccgtttgtatctgtaa

SEQ ID NO: 85490 - DNA, 25 bp, Probe Sequence
ctttgctgtgattccgtttgtatct

SEQ ID NO: 85491 - DNA, 25 bp, Probe Sequence
aactttgctgtgattccgtttgtat

SEQ ID NO: 85492 - DNA, 25 bp, Probe Sequence
tttgctgtgattccgtttgtatctg

SEQ ID NO: 85493 - DNA, 25 bp, Probe Sequence
actttgctgtgattccgtttgtatc

SEQ ID NO: 85494 - DNA, 25 bp, Probe Sequence
tgctgtgattccgtttgtatctgta

SEQ ID NO: 85495 - DNA, 25 bp, Probe Sequence
caactttgctgtgattccgtttgta

SEQ ID NO: 85496 - DNA, 25 bp, Probe Sequence
gtgattccgtttgtatctgtaaata

SEQ ID NO: 85497 - DNA, 25 bp, Probe Sequence
ttgctgtgattccgtttgtatctgt

SEQ ID NO: 85498 - DNA, 25 bp, Probe Sequence
gtctggatggttttatagcaacttt

SEQ ID NO: 85499 - DNA, 25 bp, Probe Sequence
tctggatggttttatagcaactttg

SEQ ID NO: 85500 - DNA, 25 bp, Probe Sequence
ggtctggatggttttatagcaactt

SEQ ID NO: 85501 - DNA, 25 bp, Probe Sequence
agaggtctggatggttttatagcaa

SEQ ID NO: 85502 - DNA, 25 bp, Probe Sequence
tgattccgtttgtatctgtaaatat

SEQ ID NO: 85503 - DNA, 25 bp, Probe Sequence
gaggtctggatggttttatagcaac

SEQ ID NO: 85504 - DNA, 25 bp, Probe Sequence
gagaggtctggatggttttatagca

SEQ ID NO: 85505 - DNA, 25 bp, Probe Sequence
aggtctggatggttttatagcaact

SEQ ID NO: 85506 - DNA, 25 bp, Probe Sequence
atcgagaggtctggatggttttata

SEQ ID NO: 85507 - DNA, 25 bp, Probe Sequence
cgagaggtctggatggttttatagc

SEQ ID NO: 85508 - DNA, 25 bp, Probe Sequence
tcgagaggtctggatggttttatag

SEQ ID NO: 85509 - DNA, 25 bp, Probe Sequence
cactttaagccaaaagaaaggagag

SEQ ID NO: 85510 - DNA, 25 bp, Probe Sequence
actttaagccaaaagaaaggagagg

SEQ ID NO: 85511 - DNA, 25 bp, Probe Sequence
acgactatgctgtaagagaggtaag

SEQ ID NO: 85512 - DNA, 25 bp, Probe Sequence
acttgttgagtgagtgaatgactaa

SEQ ID NO: 85513 - DNA, 25 bp, Probe Sequence
atacttgttgagtgagtgaatgact

SEQ ID NO: 85514 - DNA, 25 bp, Probe Sequence
tacttgttgagtgagtgaatgacta

SEQ ID NO: 85515 - DNA, 25 bp, Probe Sequence
cacgactatgctgtaagagaggtaa

SEQ ID NO: 85516 - DNA, 25 bp, Probe Sequence
aatacttgttgagtgagtgaatgac

SEQ ID NO: 85517 - DNA, 25 bp, Probe Sequence
ggcgtatcttccagttcaatgataa

SEQ ID NO: 85518 - DNA, 25 bp, Probe Sequence
gcagacattcattattagctccatg

SEQ ID NO: 85519 - DNA, 25 bp, Probe Sequence
gttgcagacattcattattagctcc

SEQ ID NO: 85520 - DNA, 25 bp, Probe Sequence
cagttgcagacattcattattagct

SEQ ID NO: 85521 - DNA, 25 bp, Probe Sequence
tcagttgcagacattcattattagc

SEQ ID NO: 85522 - DNA, 25 bp, Probe Sequence
gtctacttattgaatgattgaagca

SEQ ID NO: 85523 - DNA, 25 bp, Probe Sequence
tgtctacttattgaatgattgaagc

SEQ ID NO: 85524 - DNA, 25 bp, Probe Sequence
tgcagacattcattattagctccat

SEQ ID NO: 85525 - DNA, 25 bp, Probe Sequence
ttgcagacattcattattagctcca

SEQ ID NO: 85526 - DNA, 25 bp, Probe Sequence
agttgcagacattcattattagctc

SEQ ID NO: 85527 - DNA, 25 bp, Probe Sequence
cattcattattagctccatgtgagg

SEQ ID NO: 85528 - DNA, 25 bp, Probe Sequence
attatgatgagccttcttccctttg

SEQ ID NO: 85529 - DNA, 25 bp, Probe Sequence
aattatgatgagccttcttcccttt

SEQ ID NO: 85530 - DNA, 25 bp, Probe Sequence
attcattattagctccatgtgaggc

SEQ ID NO: 85531 - DNA, 25 bp, Probe Sequence
ctcaatcagttgcagacattcatta

SEQ ID NO: 85532 - DNA, 25 bp, Probe Sequence
caattatgatgagccttcttccctt

SEQ ID NO: 85533 - DNA, 25 bp, Probe Sequence
ccacgactatgctgtaagagaggta

SEQ ID NO: 85534 - DNA, 25 bp, Probe Sequence
tcaatcagttgcagacattcattat

SEQ ID NO: 85535 - DNA, 25 bp, Probe Sequence
gatcatagaatactgccatgcttat

SEQ ID NO: 85536 - DNA, 25 bp, Probe Sequence
tatgttgagattaattcactgacgc

SEQ ID NO: 85537 - DNA, 25 bp, Probe Sequence
atcatagaatactgccatgcttatt

SEQ ID NO: 85538 - DNA, 25 bp, Probe Sequence
gagattaattcactgacgcctcatt

SEQ ID NO: 85539 - DNA, 25 bp, Probe Sequence
acataagtgaaaggatttgggtctc

SEQ ID NO: 85540 - DNA, 25 bp, Probe Sequence
ggctcttcactaatttcactgtatg

SEQ ID NO: 85541 - DNA, 25 bp, Probe Sequence
tccttgtttcttgagtaagccttta

SEQ ID NO: 85542 - DNA, 25 bp, Probe Sequence
ctgacataagtgaaaggatttgggt

SEQ ID NO: 85543 - DNA, 25 bp, Probe Sequence
ccttgtttcttgagtaagcctttag

SEQ ID NO: 85544 - DNA, 25 bp, Probe Sequence
gggctcttcactaatttcactgtat

SEQ ID NO: 85545 - DNA, 25 bp, Probe Sequence
tagagaaggcagagaaacgaatata

SEQ ID NO: 85546 - DNA, 25 bp, Probe Sequence
gctcttcactaatttcactgtatgt

SEQ ID NO: 85547 - DNA, 25 bp, Probe Sequence
atgttgagattaattcactgacgcc

SEQ ID NO: 85548 - DNA, 25 bp, Probe Sequence
ctagagaaggcagagaaacgaatat

SEQ ID NO: 85549 - DNA, 25 bp, Probe Sequence
cttgtttcttgagtaagcctttaga

SEQ ID NO: 85550 - DNA, 25 bp, Probe Sequence
ataagtgaaaggatttgggtctcaa

SEQ ID NO: 85551 - DNA, 25 bp, Probe Sequence
catatcttggcaccactcctgatag

SEQ ID NO: 85552 - DNA, 25 bp, Probe Sequence
taagtgaaaggatttgggtctcaag

SEQ ID NO: 85553 - DNA, 25 bp, Probe Sequence
cataagtgaaaggatttgggtctca

SEQ ID NO: 85554 - DNA, 25 bp, Probe Sequence
ctatgttgagattaattcactgacg

SEQ ID NO: 85555 - DNA, 25 bp, Probe Sequence
taagcctttagaactttctgactcc

SEQ ID NO: 85556 - DNA, 25 bp, Probe Sequence
gttgagattaattcactgacgcctc

SEQ ID NO: 85557 - DNA, 25 bp, Probe Sequence
agagaaggcagagaaacgaatatat

SEQ ID NO: 85558 - DNA, 25 bp, Probe Sequence
tgaaacagcctgacataagtgaaag

SEQ ID NO: 85559 - DNA, 25 bp, Probe Sequence
aatggatcactgtagccttcaataa

SEQ ID NO: 85560 - DNA, 25 bp, Probe Sequence
gaatggatcactgtagccttcaata

SEQ ID NO: 85561 - DNA, 25 bp, Probe Sequence
ctcaagaccagcctgaccaatatag

SEQ ID NO: 85562 - DNA, 25 bp, Probe Sequence
gtctaattcctcccacttgttctta

SEQ ID NO: 85563 - DNA, 25 bp, Probe Sequence
gcattcaaggaaatctctgtcaaac

SEQ ID NO: 85564 - DNA, 25 bp, Probe Sequence
ccacttgttcttagtctttctctct

SEQ ID NO: 85565 - DNA, 25 bp, Probe Sequence
taattcctcccacttgttcttagtc

SEQ ID NO: 85566 - DNA, 25 bp, Probe Sequence
atggatcactgtagccttcaataaa

SEQ ID NO: 85567 - DNA, 25 bp, Probe Sequence
cccacttgttcttagtctttctctc

SEQ ID NO: 85568 - DNA, 25 bp, Probe Sequence
ctcccacttgttcttagtctttctc

SEQ ID NO: 85569 - DNA, 25 bp, Probe Sequence
taatgagtctaattcctcccacttg

SEQ ID NO: 85570 - DNA, 25 bp, Probe Sequence
tcccacttgttcttagtctttctct

SEQ ID NO: 85571 - DNA, 25 bp, Probe Sequence
cattcaaggaaatctctgtcaaaca

SEQ ID NO: 85572 - DNA, 25 bp, Probe Sequence
tcaaggaaatctctgtcaaacatca

SEQ ID NO: 85573 - DNA, 25 bp, Probe Sequence
ttcaaggaaatctctgtcaaacatc

SEQ ID NO: 85574 - DNA, 25 bp, Probe Sequence
cgaatggatcactgtagccttcaat

SEQ ID NO: 85575 - DNA, 25 bp, Probe Sequence
ggcattcaaggaaatctctgtcaaa

SEQ ID NO: 85576 - DNA, 25 bp, Probe Sequence
ttaatgagtctaattcctcccactt

SEQ ID NO: 85577 - DNA, 25 bp, Probe Sequence
attcctcccacttgttcttagtctt

SEQ ID NO: 85578 - DNA, 25 bp, Probe Sequence
aattcctcccacttgttcttagtct

SEQ ID NO: 85579 - DNA, 25 bp, Probe Sequence
agtctaattcctcccacttgttctt

SEQ ID NO: 85580 - DNA, 25 bp, Probe Sequence
caaggaaatctctgtcaaacatcag

SEQ ID NO: 85581 - DNA, 25 bp, Probe Sequence
ctaattcctcccacttgttcttagt

SEQ ID NO: 85582 - DNA, 25 bp, Probe Sequence
aggaaatctctgtcaaacatcagtt

SEQ ID NO: 85583 - DNA, 25 bp, Probe Sequence
gacactgaattgcttctaagaatgg

SEQ ID NO: 85584 - DNA, 25 bp, Probe Sequence
agacactgaattgcttctaagaatg

SEQ ID NO: 85585 - DNA, 25 bp, Probe Sequence
ccaatgagcagtgtattagaagaca

SEQ ID NO: 85586 - DNA, 25 bp, Probe Sequence
aagacactgaattgcttctaagaat

SEQ ID NO: 85587 - DNA, 25 bp, Probe Sequence
gagtctcaactatattgtccaggct

SEQ ID NO: 85588 - DNA, 25 bp, Probe Sequence
accgagtctcaactatattgtccag

SEQ ID NO: 85589 - DNA, 25 bp, Probe Sequence
ggacttgctgacttgctaattcatt

SEQ ID NO: 85590 - DNA, 25 bp, Probe Sequence
tgtattagaagacactgaattgctt

SEQ ID NO: 85591 - DNA, 25 bp, Probe Sequence
agtctcaactatattgtccaggctg

SEQ ID NO: 85592 - DNA, 25 bp, Probe Sequence
gaccgagtctcaactatattgtcca

SEQ ID NO: 85593 - DNA, 25 bp, Probe Sequence
ccgagtctcaactatattgtccagg

SEQ ID NO: 85594 - DNA, 25 bp, Probe Sequence
agaatagaaatgctaacctacctgc

SEQ ID NO: 85595 - DNA, 25 bp, Probe Sequence
aggacttgctgacttgctaattcat

SEQ ID NO: 85596 - DNA, 25 bp, Probe Sequence
tattcccaatgagcagtgtattaga

SEQ ID NO: 85597 - DNA, 25 bp, Probe Sequence
attcccaatgagcagtgtattagaa

SEQ ID NO: 85598 - DNA, 25 bp, Probe Sequence
ttcccaatgagcagtgtattagaag

SEQ ID NO: 85599 - DNA, 25 bp, Probe Sequence
aaggacttgctgacttgctaattca

SEQ ID NO: 85600 - DNA, 25 bp, Probe Sequence
cccaatgagcagtgtattagaagac

SEQ ID NO: 85601 - DNA, 25 bp, Probe Sequence
tcccaatgagcagtgtattagaaga

SEQ ID NO: 85602 - DNA, 25 bp, Probe Sequence
tttatgaccaagttatgaacgcttt

SEQ ID NO: 85603 - DNA, 25 bp, Probe Sequence
ggacctagaatagaaatgctaacct

SEQ ID NO: 85604 - DNA, 25 bp, Probe Sequence
gggacctagaatagaaatgctaacc

SEQ ID NO: 85605 - DNA, 25 bp, Probe Sequence
cgagtctcaactatattgtccaggc

SEQ ID NO: 85606 - DNA, 25 bp, Probe Sequence
atattcccaatgagcagtgtattag

SEQ ID NO: 85607 - DNA, 25 bp, Probe Sequence
ggtgttcataggtattgcgttctaa

SEQ ID NO: 85608 - DNA, 25 bp, Probe Sequence
aggtgttcataggtattgcgttcta

SEQ ID NO: 85609 - DNA, 25 bp, Probe Sequence
ctctatccttctcaacttgacttca

SEQ ID NO: 85610 - DNA, 25 bp, Probe Sequence
caacttgacttcataagagcactgg

SEQ ID NO: 85611 - DNA, 25 bp, Probe Sequence
tctctatccttctcaacttgacttc

SEQ ID NO: 85612 - DNA, 25 bp, Probe Sequence
tccttctcaacttgacttcataaga

SEQ ID NO: 85613 - DNA, 25 bp, Probe Sequence
ttctcaacttgacttcataagagca

SEQ ID NO: 85614 - DNA, 25 bp, Probe Sequence
cttctcaacttgacttcataagagc

SEQ ID NO: 85615 - DNA, 25 bp, Probe Sequence
tctatccttctcaacttgacttcat

SEQ ID NO: 85616 - DNA, 25 bp, Probe Sequence
tcaacttgacttcataagagcactg

SEQ ID NO: 85617 - DNA, 25 bp, Probe Sequence
ctcaacttgacttcataagagcact

SEQ ID NO: 85618 - DNA, 25 bp, Probe Sequence
tctcaacttgacttcataagagcac

SEQ ID NO: 85619 - DNA, 25 bp, Probe Sequence
aacttgacttcataagagcactggt

SEQ ID NO: 85620 - DNA, 25 bp, Probe Sequence
ccttctcaacttgacttcataagag

SEQ ID NO: 85621 - DNA, 25 bp, Probe Sequence
ttagccaagttgtaaccatcatgtg

SEQ ID NO: 85622 - DNA, 25 bp, Probe Sequence
cttagccaagttgtaaccatcatgt

SEQ ID NO: 85623 - DNA, 25 bp, Probe Sequence
gtctctatccttctcaacttgactt

SEQ ID NO: 85624 - DNA, 25 bp, Probe Sequence
atccttctcaacttgacttcataag

SEQ ID NO: 85625 - DNA, 25 bp, Probe Sequence
tagtctctatccttctcaacttgac

SEQ ID NO: 85626 - DNA, 25 bp, Probe Sequence
gaggtgttcataggtattgcgttct

SEQ ID NO: 85627 - DNA, 25 bp, Probe Sequence
agaggtgttcataggtattgcgttc

SEQ ID NO: 85628 - DNA, 25 bp, Probe Sequence
gagaggtgttcataggtattgcgtt

SEQ ID NO: 85629 - DNA, 25 bp, Probe Sequence
ttagtctctatccttctcaacttga

SEQ ID NO: 85630 - DNA, 25 bp, Probe Sequence
ttgacttcataagagcactggtgtt

SEQ ID NO: 85631 - DNA, 25 bp, Probe Sequence
aagtcctacatacaagtctaatggt

SEQ ID NO: 85632 - DNA, 25 bp, Probe Sequence
agtcctacatacaagtctaatggta

SEQ ID NO: 85633 - DNA, 25 bp, Probe Sequence
gtcctacatacaagtctaatggtaa

SEQ ID NO: 85634 - DNA, 25 bp, Probe Sequence
taagtcctacatacaagtctaatgg

SEQ ID NO: 85635 - DNA, 25 bp, Probe Sequence
tgtttcagaagtcttggcaatatca

SEQ ID NO: 85636 - DNA, 25 bp, Probe Sequence
gtttcagaagtcttggcaatatcaa

SEQ ID NO: 85637 - DNA, 25 bp, Probe Sequence
ttgtttcagaagtcttggcaatatc

SEQ ID NO: 85638 - DNA, 25 bp, Probe Sequence
cttgtttcagaagtcttggcaatat

SEQ ID NO: 85639 - DNA, 25 bp, Probe Sequence
tcttgtttcagaagtcttggcaata

SEQ ID NO: 85640 - DNA, 25 bp, Probe Sequence
cctacatacaagtctaatggtaatg

SEQ ID NO: 85641 - DNA, 25 bp, Probe Sequence
agtctaatggtaatgaaactctcct

SEQ ID NO: 85642 - DNA, 25 bp, Probe Sequence
tcctacatacaagtctaatggtaat

SEQ ID NO: 85643 - DNA, 25 bp, Probe Sequence
aagtctaatggtaatgaaactctcc

SEQ ID NO: 85644 - DNA, 25 bp, Probe Sequence
gtcttgtttcagaagtcttggcaat

SEQ ID NO: 85645 - DNA, 25 bp, Probe Sequence
gtctaatggtaatgaaactctccta

SEQ ID NO: 85646 - DNA, 25 bp, Probe Sequence
tttcaacatcacaagctaaagtctg

SEQ ID NO: 85647 - DNA, 25 bp, Probe Sequence
ggcaatatcaagaatatgtagtagt

SEQ ID NO: 85648 - DNA, 25 bp, Probe Sequence
tggcaatatcaagaatatgtagtag

SEQ ID NO: 85649 - DNA, 25 bp, Probe Sequence
acaagctaaagtctgattcccttaa

SEQ ID NO: 85650 - DNA, 25 bp, Probe Sequence
acaagtctaatggtaatgaaactct

SEQ ID NO: 85651 - DNA, 25 bp, Probe Sequence
cacaagctaaagtctgattccctta

SEQ ID NO: 85652 - DNA, 25 bp, Probe Sequence
atggtaatgaaactctcctatgtac

SEQ ID NO: 85653 - DNA, 25 bp, Probe Sequence
aatggtaatgaaactctcctatgta

SEQ ID NO: 85654 - DNA, 25 bp, Probe Sequence
taatggtaatgaaactctcctatgt

SEQ ID NO: 85655 - DNA, 25 bp, Probe Sequence
gataactggcattttgtagatgtgg

SEQ ID NO: 85656 - DNA, 25 bp, Probe Sequence
cctgataactggcattttgtagatg

SEQ ID NO: 85657 - DNA, 25 bp, Probe Sequence
tgataactggcattttgtagatgtg

SEQ ID NO: 85658 - DNA, 25 bp, Probe Sequence
ctgataactggcattttgtagatgt

SEQ ID NO: 85659 - DNA, 25 bp, Probe Sequence
ataactggcattttgtagatgtggt

SEQ ID NO: 85660 - DNA, 25 bp, Probe Sequence
taactggcattttgtagatgtggtt

SEQ ID NO: 85661 - DNA, 25 bp, Probe Sequence
tctccatctattgatgagggtctta

SEQ ID NO: 85662 - DNA, 25 bp, Probe Sequence
ctccatctattgatgagggtcttaa

SEQ ID NO: 85663 - DNA, 25 bp, Probe Sequence
aactggcattttgtagatgtggttt

SEQ ID NO: 85664 - DNA, 25 bp, Probe Sequence
tccatctattgatgagggtcttaaa

SEQ ID NO: 85665 - DNA, 25 bp, Probe Sequence
gtctccatctattgatgagggtctt

SEQ ID NO: 85666 - DNA, 25 bp, Probe Sequence
atgtctccatctattgatgagggtc

SEQ ID NO: 85667 - DNA, 25 bp, Probe Sequence
tgtctccatctattgatgagggtct

SEQ ID NO: 85668 - DNA, 25 bp, Probe Sequence
ccatctattgatgagggtcttaaaa

SEQ ID NO: 85669 - DNA, 25 bp, Probe Sequence
gcctgataactggcattttgtagat

SEQ ID NO: 85670 - DNA, 25 bp, Probe Sequence
cgcctgataactggcattttgtaga

SEQ ID NO: 85671 - DNA, 25 bp, Probe Sequence
ccgcctgataactggcattttgtag

SEQ ID NO: 85672 - DNA, 25 bp, Probe Sequence
atctgagcacctactgtatattagc

SEQ ID NO: 85673 - DNA, 25 bp, Probe Sequence
aatcctgtgacttgtgcttaatact

SEQ ID NO: 85674 - DNA, 25 bp, Probe Sequence
atcctgtgacttgtgcttaatacta

SEQ ID NO: 85675 - DNA, 25 bp, Probe Sequence
tctgagcacctactgtatattagcc

SEQ ID NO: 85676 - DNA, 25 bp, Probe Sequence
tcctgtgacttgtgcttaatactag

SEQ ID NO: 85677 - DNA, 25 bp, Probe Sequence
cttccaataatacacagagtccatt

SEQ ID NO: 85678 - DNA, 25 bp, Probe Sequence
ctgagcacctactgtatattagcca

SEQ ID NO: 85679 - DNA, 25 bp, Probe Sequence
aacttccaataatacacagagtcca

SEQ ID NO: 85680 - DNA, 25 bp, Probe Sequence
acttccaataatacacagagtccat

SEQ ID NO: 85681 - DNA, 25 bp, Probe Sequence
tgagcacctactgtatattagccac

SEQ ID NO: 85682 - DNA, 25 bp, Probe Sequence
cacctactgtatattagccacatct

SEQ ID NO: 85683 - DNA, 25 bp, Probe Sequence
gcacctactgtatattagccacatc

SEQ ID NO: 85684 - DNA, 25 bp, Probe Sequence
agcacctactgtatattagccacat

SEQ ID NO: 85685 - DNA, 25 bp, Probe Sequence
acctactgtatattagccacatctt

SEQ ID NO: 85686 - DNA, 25 bp, Probe Sequence
taacttccaataatacacagagtcc

SEQ ID NO: 85687 - DNA, 25 bp, Probe Sequence
actgtatattagccacatcttcttg

SEQ ID NO: 85688 - DNA, 25 bp, Probe Sequence
cctactgtatattagccacatcttc

SEQ ID NO: 85689 - DNA, 25 bp, Probe Sequence
gagcacctactgtatattagccaca

SEQ ID NO: 85690 - DNA, 25 bp, Probe Sequence
ctgtatattagccacatcttcttgg

SEQ ID NO: 85691 - DNA, 25 bp, Probe Sequence
gtgaaggagagaaatgagaagatga

SEQ ID NO: 85692 - DNA, 25 bp, Probe Sequence
tgtgaaggagagaaatgagaagatg

SEQ ID NO: 85693 - DNA, 25 bp, Probe Sequence
gtgtgaaggagagaaatgagaagat

SEQ ID NO: 85694 - DNA, 25 bp, Probe Sequence
ttgcttatatttgcttgtttggctt

SEQ ID NO: 85695 - DNA, 25 bp, Probe Sequence
tttgcttatatttgcttgtttggct

SEQ ID NO: 85696 - DNA, 25 bp, Probe Sequence
gggtaacatttcattctccaatctt

SEQ ID NO: 85697 - DNA, 25 bp, Probe Sequence
catttctcttcttcctgttattggt

SEQ ID NO: 85698 - DNA, 25 bp, Probe Sequence
cgtgcttgaagaatccactatgatg

SEQ ID NO: 85699 - DNA, 25 bp, Probe Sequence
gtgcttgaagaatccactatgatgg

SEQ ID NO: 85700 - DNA, 25 bp, Probe Sequence
acatttctcttcttcctgttattgg

SEQ ID NO: 85701 - DNA, 25 bp, Probe Sequence
ggtaacatttcattctccaatcttt

SEQ ID NO: 85702 - DNA, 25 bp, Probe Sequence
tacttggagaacgtgcttgaagaat

SEQ ID NO: 85703 - DNA, 25 bp, Probe Sequence
atacttggagaacgtgcttgaagaa

SEQ ID NO: 85704 - DNA, 25 bp, Probe Sequence
tgggtaacatttcattctccaatct

SEQ ID NO: 85705 - DNA, 25 bp, Probe Sequence
gaagaatccactatgatgggtaaca

SEQ ID NO: 85706 - DNA, 25 bp, Probe Sequence
tgaagaatccactatgatgggtaac

SEQ ID NO: 85707 - DNA, 25 bp, Probe Sequence
atccactatgatgggtaacatttca

SEQ ID NO: 85708 - DNA, 25 bp, Probe Sequence
cttgaagaatccactatgatgggta

SEQ ID NO: 85709 - DNA, 25 bp, Probe Sequence
tgatgggtaacatttcattctccaa

SEQ ID NO: 85710 - DNA, 25 bp, Probe Sequence
agaatccactatgatgggtaacatt

SEQ ID NO: 85711 - DNA, 25 bp, Probe Sequence
aagaatccactatgatgggtaacat

SEQ ID NO: 85712 - DNA, 25 bp, Probe Sequence
ttgaagaatccactatgatgggtaa

SEQ ID NO: 85713 - DNA, 25 bp, Probe Sequence
atgggtaacatttcattctccaatc

SEQ ID NO: 85714 - DNA, 25 bp, Probe Sequence
gatgggtaacatttcattctccaat

SEQ ID NO: 85715 - DNA, 25 bp, Probe Sequence
aatccactatgatgggtaacatttc

SEQ ID NO: 85716 - DNA, 25 bp, Probe Sequence
gaatccactatgatgggtaacattt

SEQ ID NO: 85717 - DNA, 25 bp, Probe Sequence
gaacgtgcttgaagaatccactatg

SEQ ID NO: 85718 - DNA, 25 bp, Probe Sequence
agaacgtgcttgaagaatccactat

SEQ ID NO: 85719 - DNA, 25 bp, Probe Sequence
acgtgcttgaagaatccactatgat

SEQ ID NO: 85720 - DNA, 25 bp, Probe Sequence
gggtaacatttcattctccaatctt

SEQ ID NO: 85721 - DNA, 25 bp, Probe Sequence
catttctcttcttcctgttattggt

SEQ ID NO: 85722 - DNA, 25 bp, Probe Sequence
cgtgcttgaagaatccactatgatg

SEQ ID NO: 85723 - DNA, 25 bp, Probe Sequence
gtgcttgaagaatccactatgatgg

SEQ ID NO: 85724 - DNA, 25 bp, Probe Sequence
acatttctcttcttcctgttattgg

SEQ ID NO: 85725 - DNA, 25 bp, Probe Sequence
ggtaacatttcattctccaatcttt

SEQ ID NO: 85726 - DNA, 25 bp, Probe Sequence
tacttggagaacgtgcttgaagaat

SEQ ID NO: 85727 - DNA, 25 bp, Probe Sequence
atacttggagaacgtgcttgaagaa

SEQ ID NO: 85728 - DNA, 25 bp, Probe Sequence
tgggtaacatttcattctccaatct

SEQ ID NO: 85729 - DNA, 25 bp, Probe Sequence
gaagaatccactatgatgggtaaca

SEQ ID NO: 85730 - DNA, 25 bp, Probe Sequence
tgaagaatccactatgatgggtaac

SEQ ID NO: 85731 - DNA, 25 bp, Probe Sequence
atccactatgatgggtaacatttca

SEQ ID NO: 85732 - DNA, 25 bp, Probe Sequence
cttgaagaatccactatgatgggta

SEQ ID NO: 85733 - DNA, 25 bp, Probe Sequence
tgatgggtaacatttcattctccaa

SEQ ID NO: 85734 - DNA, 25 bp, Probe Sequence
agaatccactatgatgggtaacatt

SEQ ID NO: 85735 - DNA, 25 bp, Probe Sequence
aagaatccactatgatgggtaacat

SEQ ID NO: 85736 - DNA, 25 bp, Probe Sequence
ttgaagaatccactatgatgggtaa

SEQ ID NO: 85737 - DNA, 25 bp, Probe Sequence
atgggtaacatttcattctccaatc

SEQ ID NO: 85738 - DNA, 25 bp, Probe Sequence
gatgggtaacatttcattctccaat

SEQ ID NO: 85739 - DNA, 25 bp, Probe Sequence
aatccactatgatgggtaacatttc

SEQ ID NO: 85740 - DNA, 25 bp, Probe Sequence
gaatccactatgatgggtaacattt

SEQ ID NO: 85741 - DNA, 25 bp, Probe Sequence
gaacgtgcttgaagaatccactatg

SEQ ID NO: 85742 - DNA, 25 bp, Probe Sequence
agaacgtgcttgaagaatccactat

SEQ ID NO: 85743 - DNA, 25 bp, Probe Sequence
acgtgcttgaagaatccactatgat

SEQ ID NO: 85744 - DNA, 25 bp, Probe Sequence
actaccaccctataatgagagagaa

SEQ ID NO: 85745 - DNA, 25 bp, Probe Sequence
accaccctataatgagagagaaatc

SEQ ID NO: 85746 - DNA, 25 bp, Probe Sequence
accaattaacagcccaatatctaca

SEQ ID NO: 85747 - DNA, 25 bp, Probe Sequence
tgaccaattaacagcccaatatcta

SEQ ID NO: 85748 - DNA, 25 bp, Probe Sequence
cggcggatataatacttatactacc

SEQ ID NO: 85749 - DNA, 25 bp, Probe Sequence
gaccaattaacagcccaatatctac

SEQ ID NO: 85750 - DNA, 25 bp, Probe Sequence
tactaccaccctataatgagagaga

SEQ ID NO: 85751 - DNA, 25 bp, Probe Sequence
cagcccaatatctacaatcaaccaa

SEQ ID NO: 85752 - DNA, 25 bp, Probe Sequence
aacagcccaatatctacaatcaacc

SEQ ID NO: 85753 - DNA, 25 bp, Probe Sequence
taacagcccaatatctacaatcaac

SEQ ID NO: 85754 - DNA, 25 bp, Probe Sequence
ctaccaccctataatgagagagaaa

SEQ ID NO: 85755 - DNA, 25 bp, Probe Sequence
ccaattaacagcccaatatctacaa

SEQ ID NO: 85756 - DNA, 25 bp, Probe Sequence
gaggaacaacaaattaagtagacca

SEQ ID NO: 85757 - DNA, 25 bp, Probe Sequence
tgaggaacaacaaattaagtagacc

SEQ ID NO: 85758 - DNA, 25 bp, Probe Sequence
ggaacaacaaattaagtagaccaac

SEQ ID NO: 85759 - DNA, 25 bp, Probe Sequence
ccaccctataatgagagagaaatca

SEQ ID NO: 85760 - DNA, 25 bp, Probe Sequence
aggaacaacaaattaagtagaccaa

SEQ ID NO: 85761 - DNA, 25 bp, Probe Sequence
taccaccctataatgagagagaaat

SEQ ID NO: 85762 - DNA, 25 bp, Probe Sequence
ttaacagcccaatatctacaatcaa

SEQ ID NO: 85763 - DNA, 25 bp, Probe Sequence
atactaccaccctataatgagagag

SEQ ID NO: 85764 - DNA, 25 bp, Probe Sequence
gtgaggaacaacaaattaagtagac

SEQ ID NO: 85765 - DNA, 25 bp, Probe Sequence
acagcccaatatctacaatcaacca

SEQ ID NO: 85766 - DNA, 25 bp, Probe Sequence
agtgaggaacaacaaattaagtaga

SEQ ID NO: 85767 - DNA, 25 bp, Probe Sequence
attaacagcccaatatctacaatca

SEQ ID NO: 85768 - DNA, 25 bp, Probe Sequence
cctgacttcaccacttattactaca

SEQ ID NO: 85769 - DNA, 25 bp, Probe Sequence
tcctgacttcaccacttattactac

SEQ ID NO: 85770 - DNA, 25 bp, Probe Sequence
aatcctgacttcaccacttattact

SEQ ID NO: 85771 - DNA, 25 bp, Probe Sequence
atcctgacttcaccacttattacta

SEQ ID NO: 85772 - DNA, 25 bp, Probe Sequence
caccacttattactacatgacactg

SEQ ID NO: 85773 - DNA, 25 bp, Probe Sequence
attcactgcttctagtaaggattct

SEQ ID NO: 85774 - DNA, 25 bp, Probe Sequence
ctgacttcaccacttattactacat

SEQ ID NO: 85775 - DNA, 25 bp, Probe Sequence
ttcactgcttctagtaaggattcta

SEQ ID NO: 85776 - DNA, 25 bp, Probe Sequence
aattcactgcttctagtaaggattc

SEQ ID NO: 85777 - DNA, 25 bp, Probe Sequence
tcaccacttattactacatgacact

SEQ ID NO: 85778 - DNA, 25 bp, Probe Sequence
tgacttcaccacttattactacatg

SEQ ID NO: 85779 - DNA, 25 bp, Probe Sequence
ttgctatcggtgtctctactcaatg

SEQ ID NO: 85780 - DNA, 25 bp, Probe Sequence
gttgctatcggtgtctctactcaat

SEQ ID NO: 85781 - DNA, 25 bp, Probe Sequence
gatgttgctatcggtgtctctactc

SEQ ID NO: 85782 - DNA, 25 bp, Probe Sequence
ttcaccacttattactacatgacac

SEQ ID NO: 85783 - DNA, 25 bp, Probe Sequence
cttcaccacttattactacatgaca

SEQ ID NO: 85784 - DNA, 25 bp, Probe Sequence
acttcaccacttattactacatgac

SEQ ID NO: 85785 - DNA, 25 bp, Probe Sequence
cactgcttctagtaaggattctagt

SEQ ID NO: 85786 - DNA, 25 bp, Probe Sequence
tcactgcttctagtaaggattctag

SEQ ID NO: 85787 - DNA, 25 bp, Probe Sequence
gacttcaccacttattactacatga

SEQ ID NO: 85788 - DNA, 25 bp, Probe Sequence
accacttattactacatgacactgg

SEQ ID NO: 85789 - DNA, 25 bp, Probe Sequence
atgttgctatcggtgtctctactca

SEQ ID NO: 85790 - DNA, 25 bp, Probe Sequence
gataggcttgctctgggaattaaat

SEQ ID NO: 85791 - DNA, 25 bp, Probe Sequence
ataggcttgctctgggaattaaatg

SEQ ID NO: 85792 - DNA, 25 bp, Probe Sequence
ttaatcctgacacttcacaatgctt

SEQ ID NO: 85793 - DNA, 25 bp, Probe Sequence
ctgacacttcacaatgcttcctatt

SEQ ID NO: 85794 - DNA, 25 bp, Probe Sequence
taatcctgacacttcacaatgcttc

SEQ ID NO: 85795 - DNA, 25 bp, Probe Sequence
ccaggatgtattccagattactgaa

SEQ ID NO: 85796 - DNA, 25 bp, Probe Sequence
aaccaggatgtattccagattactg

SEQ ID NO: 85797 - DNA, 25 bp, Probe Sequence
accaggatgtattccagattactga

SEQ ID NO: 85798 - DNA, 25 bp, Probe Sequence
gacctattaatcctgacacttcaca

SEQ ID NO: 85799 - DNA, 25 bp, Probe Sequence
agacctattaatcctgacacttcac

SEQ ID NO: 85800 - DNA, 25 bp, Probe Sequence
acctattaatcctgacacttcacaa

SEQ ID NO: 85801 - DNA, 25 bp, Probe Sequence
tattaatcctgacacttcacaatgc

SEQ ID NO: 85802 - DNA, 25 bp, Probe Sequence
caggatgtattccagattactgaac

SEQ ID NO: 85803 - DNA, 25 bp, Probe Sequence
attaatcctgacacttcacaatgct

SEQ ID NO: 85804 - DNA, 25 bp, Probe Sequence
ttattaggctaggaccagaggtatt

SEQ ID NO: 85805 - DNA, 25 bp, Probe Sequence
aggatgtattccagattactgaact

SEQ ID NO: 85806 - DNA, 25 bp, Probe Sequence
cttattaggctaggaccagaggtat

SEQ ID NO: 85807 - DNA, 25 bp, Probe Sequence
aagacctattaatcctgacacttca

SEQ ID NO: 85808 - DNA, 25 bp, Probe Sequence
tattaggctaggaccagaggtattg

SEQ ID NO: 85809 - DNA, 25 bp, Probe Sequence
attcaacttctctaccctactctgt

SEQ ID NO: 85810 - DNA, 25 bp, Probe Sequence
atgtggcaaatcccttaatatgtga

SEQ ID NO: 85811 - DNA, 25 bp, Probe Sequence
cctattaatcctgacacttcacaat

SEQ ID NO: 85812 - DNA, 25 bp, Probe Sequence
ccgtctttagaattatgtggcaaat

SEQ ID NO: 85813 - DNA, 25 bp, Probe Sequence
agtagcagaaatggtaaattagcct

SEQ ID NO: 85814 - DNA, 25 bp, Probe Sequence
cagtagcagaaatggtaaattagcc

SEQ ID NO: 85815 - DNA, 25 bp, Probe Sequence
aaagtgatacccagtagcagaaatg

SEQ ID NO: 85816 - DNA, 25 bp, Probe Sequence
aatgcagcatccacttcataattaa

SEQ ID NO: 85817 - DNA, 25 bp, Probe Sequence
aaacaaccttacaagcaaacttact

SEQ ID NO: 85818 - DNA, 25 bp, Probe Sequence
aaatcatttcaggtggttacagttt

SEQ ID NO: 85819 - DNA, 25 bp, Probe Sequence
aagcactccagacttgattaaatgt

SEQ ID NO: 85820 - DNA, 25 bp, Probe Sequence
aacaaccttacaagcaaacttacta

SEQ ID NO: 85821 - DNA, 25 bp, Probe Sequence
taaatcatttcaggtggttacagtt

SEQ ID NO: 85822 - DNA, 25 bp, Probe Sequence
acaaccttacaagcaaacttactat

SEQ ID NO: 85823 - DNA, 25 bp, Probe Sequence
ataaatcatttcaggtggttacagt

SEQ ID NO: 85824 - DNA, 25 bp, Probe Sequence
taaacaaccttacaagcaaacttac

SEQ ID NO: 85825 - DNA, 25 bp, Probe Sequence
tccagacttgattaaatgtccttga

SEQ ID NO: 85826 - DNA, 25 bp, Probe Sequence
actccagacttgattaaatgtcctt

SEQ ID NO: 85827 - DNA, 25 bp, Probe Sequence
gtataaacaaccttacaagcaaact

SEQ ID NO: 85828 - DNA, 25 bp, Probe Sequence
ctccagacttgattaaatgtccttg

SEQ ID NO: 85829 - DNA, 25 bp, Probe Sequence
cactccagacttgattaaatgtcct

SEQ ID NO: 85830 - DNA, 25 bp, Probe Sequence
ccagacttgattaaatgtccttgat

SEQ ID NO: 85831 - DNA, 25 bp, Probe Sequence
agcactccagacttgattaaatgtc

SEQ ID NO: 85832 - DNA, 25 bp, Probe Sequence
caaccttacaagcaaacttactatt

SEQ ID NO: 85833 - DNA, 25 bp, Probe Sequence
ataaacaaccttacaagcaaactta

SEQ ID NO: 85834 - DNA, 25 bp, Probe Sequence
tataaacaaccttacaagcaaactt

SEQ ID NO: 85835 - DNA, 25 bp, Probe Sequence
gcactccagacttgattaaatgtcc

SEQ ID NO: 85836 - DNA, 25 bp, Probe Sequence
tttaaatgcagcatccacttcataa

SEQ ID NO: 85837 - DNA, 25 bp, Probe Sequence
atgcagcatccacttcataattaaa

SEQ ID NO: 85838 - DNA, 25 bp, Probe Sequence
aaatgcagcatccacttcataatta

SEQ ID NO: 85839 - DNA, 25 bp, Probe Sequence
taaatgcagcatccacttcataatt

SEQ ID NO: 85840 - DNA, 25 bp, Probe Sequence
aggtgatctaggaatatgaatgctg

SEQ ID NO: 85841 - DNA, 25 bp, Probe Sequence
aaggtgatctaggaatatgaatgct

SEQ ID NO: 85842 - DNA, 25 bp, Probe Sequence
ggtgatctaggaatatgaatgctgg

SEQ ID NO: 85843 - DNA, 25 bp, Probe Sequence
ccatgaccaacttaatgtgaatgaa

SEQ ID NO: 85844 - DNA, 25 bp, Probe Sequence
ttccatgaccaacttaatgtgaatg

SEQ ID NO: 85845 - DNA, 25 bp, Probe Sequence
tccatgaccaacttaatgtgaatga

SEQ ID NO: 85846 - DNA, 25 bp, Probe Sequence
cttccatgaccaacttaatgtgaat

SEQ ID NO: 85847 - DNA, 25 bp, Probe Sequence
ccttccatgaccaacttaatgtgaa

SEQ ID NO: 85848 - DNA, 25 bp, Probe Sequence
taaggtgatctaggaatatgaatgc

SEQ ID NO: 85849 - DNA, 25 bp, Probe Sequence
atgaccaacttaatgtgaatgaatt

SEQ ID NO: 85850 - DNA, 25 bp, Probe Sequence
catgaccaacttaatgtgaatgaat

SEQ ID NO: 85851 - DNA, 25 bp, Probe Sequence
ccatcaagcatcgtagttaaatctc

SEQ ID NO: 85852 - DNA, 25 bp, Probe Sequence
accatcaagcatcgtagttaaatct

SEQ ID NO: 85853 - DNA, 25 bp, Probe Sequence
caccatcaagcatcgtagttaaatc

SEQ ID NO: 85854 - DNA, 25 bp, Probe Sequence
ggtagtcccattaggtgtatattga

SEQ ID NO: 85855 - DNA, 25 bp, Probe Sequence
tcaagcatcgtagttaaatctctcg

SEQ ID NO: 85856 - DNA, 25 bp, Probe Sequence
catcaagcatcgtagttaaatctct

SEQ ID NO: 85857 - DNA, 25 bp, Probe Sequence
ctcagatataacctacatggtgtct

SEQ ID NO: 85858 - DNA, 25 bp, Probe Sequence
tctcagatataacctacatggtgtc

SEQ ID NO: 85859 - DNA, 25 bp, Probe Sequence
atcaagcatcgtagttaaatctctc

SEQ ID NO: 85860 - DNA, 25 bp, Probe Sequence
ggatctcagatataacctacatggt

SEQ ID NO: 85861 - DNA, 25 bp, Probe Sequence
tcagatataacctacatggtgtctt

SEQ ID NO: 85862 - DNA, 25 bp, Probe Sequence
tcgggatctcagatataacctacat

SEQ ID NO: 85863 - DNA, 25 bp, Probe Sequence
ttcgggatctcagatataacctaca

SEQ ID NO: 85864 - DNA, 25 bp, Probe Sequence
atatcttcagactgctacattcact

SEQ ID NO: 85865 - DNA, 25 bp, Probe Sequence
tatcttcagactgctacattcactg

SEQ ID NO: 85866 - DNA, 25 bp, Probe Sequence
tatatcttcagactgctacattcac

SEQ ID NO: 85867 - DNA, 25 bp, Probe Sequence
ttcagactgctacattcactggtaa

SEQ ID NO: 85868 - DNA, 25 bp, Probe Sequence
tggataacttatatcttcagactgc

SEQ ID NO: 85869 - DNA, 25 bp, Probe Sequence
ttatatcttcagactgctacattca

SEQ ID NO: 85870 - DNA, 25 bp, Probe Sequence
acttatatcttcagactgctacatt

SEQ ID NO: 85871 - DNA, 25 bp, Probe Sequence
aacttatatcttcagactgctacat

SEQ ID NO: 85872 - DNA, 25 bp, Probe Sequence
cttcagactgctacattcactggta

SEQ ID NO: 85873 - DNA, 25 bp, Probe Sequence
gactgctacattcactggtaaattc

SEQ ID NO: 85874 - DNA, 25 bp, Probe Sequence
agactgctacattcactggtaaatt

SEQ ID NO: 85875 - DNA, 25 bp, Probe Sequence
tgctacattcactggtaaattcaag

SEQ ID NO: 85876 - DNA, 25 bp, Probe Sequence
ctgctacattcactggtaaattcaa

SEQ ID NO: 85877 - DNA, 25 bp, Probe Sequence
actgctacattcactggtaaattca

SEQ ID NO: 85878 - DNA, 25 bp, Probe Sequence
ggataacttatatcttcagactgct

SEQ ID NO: 85879 - DNA, 25 bp, Probe Sequence
atcttcagactgctacattcactgg

SEQ ID NO: 85880 - DNA, 25 bp, Probe Sequence
gctacattcactggtaaattcaagt

SEQ ID NO: 85881 - DNA, 25 bp, Probe Sequence
cttatatcttcagactgctacattc

SEQ ID NO: 85882 - DNA, 25 bp, Probe Sequence
cgaaggaacaaagatgactatgctt

SEQ ID NO: 85883 - DNA, 25 bp, Probe Sequence
taacttatatcttcagactgctaca

SEQ ID NO: 85884 - DNA, 25 bp, Probe Sequence
cagactgctacattcactggtaaat

SEQ ID NO: 85885 - DNA, 25 bp, Probe Sequence
ttgctttctctttaagtggataact

SEQ ID NO: 85886 - DNA, 25 bp, Probe Sequence
tttgctttctctttaagtggataac

SEQ ID NO: 85887 - DNA, 25 bp, Probe Sequence
tcagactgctacattcactggtaaa

SEQ ID NO: 85888 - DNA, 25 bp, Probe Sequence
tacagattggagttggaattaagca

SEQ ID NO: 85889 - DNA, 25 bp, Probe Sequence
tggagttggaattaagcatagttgt

SEQ ID NO: 85890 - DNA, 25 bp, Probe Sequence
ttggagttggaattaagcatagttg

SEQ ID NO: 85891 - DNA, 25 bp, Probe Sequence
acatattaacctctctgaatggcat

SEQ ID NO: 85892 - DNA, 25 bp, Probe Sequence
aacatattaacctctctgaatggca

SEQ ID NO: 85893 - DNA, 25 bp, Probe Sequence
acagattggagttggaattaagcat

SEQ ID NO: 85894 - DNA, 25 bp, Probe Sequence
gattggagttggaattaagcatagt

SEQ ID NO: 85895 - DNA, 25 bp, Probe Sequence
cagattggagttggaattaagcata

SEQ ID NO: 85896 - DNA, 25 bp, Probe Sequence
atacagattggagttggaattaagc

SEQ ID NO: 85897 - DNA, 25 bp, Probe Sequence
agattggagttggaattaagcatag

SEQ ID NO: 85898 - DNA, 25 bp, Probe Sequence
ggagttggaattaagcatagttgta

SEQ ID NO: 85899 - DNA, 25 bp, Probe Sequence
tgagttcacagtcttcttacttcaa

SEQ ID NO: 85900 - DNA, 25 bp, Probe Sequence
attggagttggaattaagcatagtt

SEQ ID NO: 85901 - DNA, 25 bp, Probe Sequence
aatggtatccttgagaatcttcagc

SEQ ID NO: 85902 - DNA, 25 bp, Probe Sequence
agaatggtatccttgagaatcttca

SEQ ID NO: 85903 - DNA, 25 bp, Probe Sequence
gaatggtatccttgagaatcttcag

SEQ ID NO: 85904 - DNA, 25 bp, Probe Sequence
catattaacctctctgaatggcatt

SEQ ID NO: 85905 - DNA, 25 bp, Probe Sequence
tctgagttcacagtcttcttacttc

SEQ ID NO: 85906 - DNA, 25 bp, Probe Sequence
ctctgagttcacagtcttcttactt

SEQ ID NO: 85907 - DNA, 25 bp, Probe Sequence
ctgagttcacagtcttcttacttca

SEQ ID NO: 85908 - DNA, 25 bp, Probe Sequence
ctctctgagttcacagtcttcttac

SEQ ID NO: 85909 - DNA, 25 bp, Probe Sequence
tctctctgagttcacagtcttctta

SEQ ID NO: 85910 - DNA, 25 bp, Probe Sequence
taatctctctgagttcacagtcttc

SEQ ID NO: 85911 - DNA, 25 bp, Probe Sequence
tctctgagttcacagtcttcttact

SEQ ID NO: 85912 - DNA, 25 bp, Probe Sequence
aagaagaagtcagcttgagcataca

SEQ ID NO: 85913 - DNA, 25 bp, Probe Sequence
taaagaagctgtcaagaagaagtca

SEQ ID NO: 85914 - DNA, 25 bp, Probe Sequence
agaagaagtcagcttgagcatacag

SEQ ID NO: 85915 - DNA, 25 bp, Probe Sequence
ttaaagaagctgtcaagaagaagtc

SEQ ID NO: 85916 - DNA, 25 bp, Probe Sequence
tttaaagaagctgtcaagaagaagt

SEQ ID NO: 85917 - DNA, 25 bp, Probe Sequence
cagaaacaagagaagaaacgactcg

SEQ ID NO: 85918 - DNA, 25 bp, Probe Sequence
aaacaagagaagaaacgactcgaaa

SEQ ID NO: 85919 - DNA, 25 bp, Probe Sequence
aaagaagctgtcaagaagaagtcag

SEQ ID NO: 85920 - DNA, 25 bp, Probe Sequence
gaaacaagagaagaaacgactcgaa

SEQ ID NO: 85921 - DNA, 25 bp, Probe Sequence
agaaacaagagaagaaacgactcga

SEQ ID NO: 85922 - DNA, 25 bp, Probe Sequence
caagaagaagtcagcttgagcatac

SEQ ID NO: 85923 - DNA, 25 bp, Probe Sequence
ccaggacaagtacataagactttaa

SEQ ID NO: 85924 - DNA, 25 bp, Probe Sequence
tagaaaatgctgcaaaagaagagag

SEQ ID NO: 85925 - DNA, 25 bp, Probe Sequence
ctagaaaatgctgcaaaagaagaga

SEQ ID NO: 85926 - DNA, 25 bp, Probe Sequence
gaaaatgctgcaaaagaagagagag

SEQ ID NO: 85927 - DNA, 25 bp, Probe Sequence
aagagaagaaacgactcgaaaattg

SEQ ID NO: 85928 - DNA, 25 bp, Probe Sequence
caagagaagaaacgactcgaaaatt

SEQ ID NO: 85929 - DNA, 25 bp, Probe Sequence
agaaaatgctgcaaaagaagagaga

SEQ ID NO: 85930 - DNA, 25 bp, Probe Sequence
gctagaaaatgctgcaaaagaagag

SEQ ID NO: 85931 - DNA, 25 bp, Probe Sequence
agagaagaaacgactcgaaaattgt

SEQ ID NO: 85932 - DNA, 25 bp, Probe Sequence
acaagagaagaaacgactcgaaaat

SEQ ID NO: 85933 - DNA, 25 bp, Probe Sequence
aacaagagaagaaacgactcgaaaa

SEQ ID NO: 85934 - DNA, 25 bp, Probe Sequence
gagaagaaacgactcgaaaattgtc

SEQ ID NO: 85935 - DNA, 25 bp, Probe Sequence
gaaaattgtccaagaagccaaagga

SEQ ID NO: 85936 - DNA, 25 bp, Probe Sequence
aagaagaagtcagcttgagcataca

SEQ ID NO: 85937 - DNA, 25 bp, Probe Sequence
taaagaagctgtcaagaagaagtca

SEQ ID NO: 85938 - DNA, 25 bp, Probe Sequence
agaagaagtcagcttgagcatacag

SEQ ID NO: 85939 - DNA, 25 bp, Probe Sequence
ttaaagaagctgtcaagaagaagtc

SEQ ID NO: 85940 - DNA, 25 bp, Probe Sequence
tttaaagaagctgtcaagaagaagt

SEQ ID NO: 85941 - DNA, 25 bp, Probe Sequence
cagaaacaagagaagaaacgactcg

SEQ ID NO: 85942 - DNA, 25 bp, Probe Sequence
aaacaagagaagaaacgactcgaaa

SEQ ID NO: 85943 - DNA, 25 bp, Probe Sequence
aaagaagctgtcaagaagaagtcag

SEQ ID NO: 85944 - DNA, 25 bp, Probe Sequence
gaaacaagagaagaaacgactcgaa

SEQ ID NO: 85945 - DNA, 25 bp, Probe Sequence
agaaacaagagaagaaacgactcga

SEQ ID NO: 85946 - DNA, 25 bp, Probe Sequence
caagaagaagtcagcttgagcatac

SEQ ID NO: 85947 - DNA, 25 bp, Probe Sequence
ccaggacaagtacataagactttaa

SEQ ID NO: 85948 - DNA, 25 bp, Probe Sequence
tagaaaatgctgcaaaagaagagag

SEQ ID NO: 85949 - DNA, 25 bp, Probe Sequence
ctagaaaatgctgcaaaagaagaga

SEQ ID NO: 85950 - DNA, 25 bp, Probe Sequence
gaaaatgctgcaaaagaagagagag

SEQ ID NO: 85951 - DNA, 25 bp, Probe Sequence
aagagaagaaacgactcgaaaattg

SEQ ID NO: 85952 - DNA, 25 bp, Probe Sequence
caagagaagaaacgactcgaaaatt

SEQ ID NO: 85953 - DNA, 25 bp, Probe Sequence
agaaaatgctgcaaaagaagagaga

SEQ ID NO: 85954 - DNA, 25 bp, Probe Sequence
gctagaaaatgctgcaaaagaagag

SEQ ID NO: 85955 - DNA, 25 bp, Probe Sequence
agagaagaaacgactcgaaaattgt

SEQ ID NO: 85956 - DNA, 25 bp, Probe Sequence
acaagagaagaaacgactcgaaaat

SEQ ID NO: 85957 - DNA, 25 bp, Probe Sequence
aacaagagaagaaacgactcgaaaa

SEQ ID NO: 85958 - DNA, 25 bp, Probe Sequence
gagaagaaacgactcgaaaattgtc

SEQ ID NO: 85959 - DNA, 25 bp, Probe Sequence
gaaaattgtccaagaagccaaagga

SEQ ID NO: 85960 - DNA, 25 bp, Probe Sequence
ggcattgtccaagaagtctaataac

SEQ ID NO: 85961 - DNA, 25 bp, Probe Sequence
taggtaatgtgactctagttctccg

SEQ ID NO: 85962 - DNA, 25 bp, Probe Sequence
gcattgtccaagaagtctaataaca

SEQ ID NO: 85963 - DNA, 25 bp, Probe Sequence
tggcattgtccaagaagtctaataa

SEQ ID NO: 85964 - DNA, 25 bp, Probe Sequence
gtaatgtgactctagttctccgcat

SEQ ID NO: 85965 - DNA, 25 bp, Probe Sequence
cattgtccaagaagtctaataacac

SEQ ID NO: 85966 - DNA, 25 bp, Probe Sequence
caccaactaggtaatgtgactctag

SEQ ID NO: 85967 - DNA, 25 bp, Probe Sequence
attgtccaagaagtctaataacact

SEQ ID NO: 85968 - DNA, 25 bp, Probe Sequence
aaatggtgaaactctgtctctactg

SEQ ID NO: 85969 - DNA, 25 bp, Probe Sequence
taataacacttacttggtctttcgc

SEQ ID NO: 85970 - DNA, 25 bp, Probe Sequence
ctaggtaatgtgactctagttctcc

SEQ ID NO: 85971 - DNA, 25 bp, Probe Sequence
ccaccaactaggtaatgtgactcta

SEQ ID NO: 85972 - DNA, 25 bp, Probe Sequence
aataacacttacttggtctttcgca

SEQ ID NO: 85973 - DNA, 25 bp, Probe Sequence
agtctaataacacttacttggtctt

SEQ ID NO: 85974 - DNA, 25 bp, Probe Sequence
cacttgtgacatatttcttgctcta

SEQ ID NO: 85975 - DNA, 25 bp, Probe Sequence
ataacacttacttggtctttcgcac

SEQ ID NO: 85976 - DNA, 25 bp, Probe Sequence
ccacttgtgacatatttcttgctct

SEQ ID NO: 85977 - DNA, 25 bp, Probe Sequence
tccacttgtgacatatttcttgctc

SEQ ID NO: 85978 - DNA, 25 bp, Probe Sequence
acttgtgacatatttcttgctctaa

SEQ ID NO: 85979 - DNA, 25 bp, Probe Sequence
taatgtgactctagttctccgcatt

SEQ ID NO: 85980 - DNA, 25 bp, Probe Sequence
ctaataacacttacttggtctttcg

SEQ ID NO: 85981 - DNA, 25 bp, Probe Sequence
taacacttacttggtctttcgcact

SEQ ID NO: 85982 - DNA, 25 bp, Probe Sequence
aatggtgaaactctgtctctactgc

SEQ ID NO: 85983 - DNA, 25 bp, Probe Sequence
cttgtgacatatttcttgctctaaa

SEQ ID NO: 85984 - DNA, 25 bp, Probe Sequence
ggagagcagatgtatcttgtcaata

SEQ ID NO: 85985 - DNA, 25 bp, Probe Sequence
taatggagagcagatgtatcttgtc

SEQ ID NO: 85986 - DNA, 25 bp, Probe Sequence
ttaatggagagcagatgtatcttgt

SEQ ID NO: 85987 - DNA, 25 bp, Probe Sequence
ggcagagtaattggcaactaagtaa

SEQ ID NO: 85988 - DNA, 25 bp, Probe Sequence
tggagagcagatgtatcttgtcaat

SEQ ID NO: 85989 - DNA, 25 bp, Probe Sequence
atggagagcagatgtatcttgtcaa

SEQ ID NO: 85990 - DNA, 25 bp, Probe Sequence
aatggagagcagatgtatcttgtca

SEQ ID NO: 85991 - DNA, 25 bp, Probe Sequence
agagcagatgtatcttgtcaatact

SEQ ID NO: 85992 - DNA, 25 bp, Probe Sequence
gcagatgtatcttgtcaatactacc

SEQ ID NO: 85993 - DNA, 25 bp, Probe Sequence
gagagcagatgtatcttgtcaatac

SEQ ID NO: 85994 - DNA, 25 bp, Probe Sequence
agtggtaaatctcaagtagcatcaa

SEQ ID NO: 85995 - DNA, 25 bp, Probe Sequence
tagtggtaaatctcaagtagcatca

SEQ ID NO: 85996 - DNA, 25 bp, Probe Sequence
gtggtaaatctcaagtagcatcaat

SEQ ID NO: 85997 - DNA, 25 bp, Probe Sequence
tcttgtcaatactacctttctcact

SEQ ID NO: 85998 - DNA, 25 bp, Probe Sequence
agcagatgtatcttgtcaatactac

SEQ ID NO: 85999 - DNA, 25 bp, Probe Sequence
tggtaaatctcaagtagcatcaatc

SEQ ID NO: 86000 - DNA, 25 bp, Probe Sequence
ggtaaatctcaagtagcatcaatct

SEQ ID NO: 86001 - DNA, 25 bp, Probe Sequence
gagcagatgtatcttgtcaatacta

SEQ ID NO: 86002 - DNA, 25 bp, Probe Sequence
tgtcaatactacctttctcactttc

SEQ ID NO: 86003 - DNA, 25 bp, Probe Sequence
ctcactttctaaagacatctgggaa

SEQ ID NO: 86004 - DNA, 25 bp, Probe Sequence
ttagtggtaaatctcaagtagcatc

SEQ ID NO: 86005 - DNA, 25 bp, Probe Sequence
ttgttggtttgaagtgatagccttt

SEQ ID NO: 86006 - DNA, 25 bp, Probe Sequence
cttgtcaatactacctttctcactt

SEQ ID NO: 86007 - DNA, 25 bp, Probe Sequence
gcagagtaattggcaactaagtaaa

SEQ ID NO: 86008 - DNA, 25 bp, Probe Sequence
atgacctatggaactgtcctacttg

SEQ ID NO: 86009 - DNA, 25 bp, Probe Sequence
tacatgacctatggaactgtcctac

SEQ ID NO: 86010 - DNA, 25 bp, Probe Sequence
gtacatgacctatggaactgtccta

SEQ ID NO: 86011 - DNA, 25 bp, Probe Sequence
catgacctatggaactgtcctactt

SEQ ID NO: 86012 - DNA, 25 bp, Probe Sequence
cattaagcccagtacatgacctatg

SEQ ID NO: 86013 - DNA, 25 bp, Probe Sequence
acatgacctatggaactgtcctact

SEQ ID NO: 86014 - DNA, 25 bp, Probe Sequence
agtacatgacctatggaactgtcct

SEQ ID NO: 86015 - DNA, 25 bp, Probe Sequence
ccattaagcccagtacatgacctat

SEQ ID NO: 86016 - DNA, 25 bp, Probe Sequence
tgacctatggaactgtcctacttgc

SEQ ID NO: 86017 - DNA, 25 bp, Probe Sequence
attaagcccagtacatgacctatgg

SEQ ID NO: 86018 - DNA, 25 bp, Probe Sequence
tgcagtacatctacgtatttagtca

SEQ ID NO: 86019 - DNA, 25 bp, Probe Sequence
taagcccagtacatgacctatggaa

SEQ ID NO: 86020 - DNA, 25 bp, Probe Sequence
ttaagcccagtacatgacctatgga

SEQ ID NO: 86021 - DNA, 25 bp, Probe Sequence
ttgcagtacatctacgtatttagtc

SEQ ID NO: 86022 - DNA, 25 bp, Probe Sequence
cttgcagtacatctacgtatttagt

SEQ ID NO: 86023 - DNA, 25 bp, Probe Sequence
aactgtcctacttgcagtacatcta

SEQ ID NO: 86024 - DNA, 25 bp, Probe Sequence
acctatggaactgtcctacttgcag

SEQ ID NO: 86025 - DNA, 25 bp, Probe Sequence
gacctatggaactgtcctacttgca

SEQ ID NO: 86026 - DNA, 25 bp, Probe Sequence
acttgcagtacatctacgtatttag

SEQ ID NO: 86027 - DNA, 25 bp, Probe Sequence
ctatggaactgtcctacttgcagta

SEQ ID NO: 86028 - DNA, 25 bp, Probe Sequence
cagtacatgacctatggaactgtcc

SEQ ID NO: 86029 - DNA, 25 bp, Probe Sequence
ccagtacatgacctatggaactgtc

SEQ ID NO: 86030 - DNA, 25 bp, Probe Sequence
tatggaactgtcctacttgcagtac

SEQ ID NO: 86031 - DNA, 25 bp, Probe Sequence
gccattaagcccagtacatgaccta

SEQ ID NO: 86032 - DNA, 25 bp, Probe Sequence
cattaagcagcatacagcatacatc

SEQ ID NO: 86033 - DNA, 25 bp, Probe Sequence
tactatcagagacttgtccttacca

SEQ ID NO: 86034 - DNA, 25 bp, Probe Sequence
acattaagcagcatacagcatacat

SEQ ID NO: 86035 - DNA, 25 bp, Probe Sequence
caacattaagcagcatacagcatac

SEQ ID NO: 86036 - DNA, 25 bp, Probe Sequence
ctactatcagagacttgtccttacc

SEQ ID NO: 86037 - DNA, 25 bp, Probe Sequence
cctactatcagagacttgtccttac

SEQ ID NO: 86038 - DNA, 25 bp, Probe Sequence
aacattaagcagcatacagcataca

SEQ ID NO: 86039 - DNA, 25 bp, Probe Sequence
taagcagcatacagcatacatccta

SEQ ID NO: 86040 - DNA, 25 bp, Probe Sequence
attaagcagcatacagcatacatcc

SEQ ID NO: 86041 - DNA, 25 bp, Probe Sequence
actatcagagacttgtccttaccac

SEQ ID NO: 86042 - DNA, 25 bp, Probe Sequence
ttctaggcaacattaagcagcatac

SEQ ID NO: 86043 - DNA, 25 bp, Probe Sequence
ctcctgagataacaagacagaagtt

SEQ ID NO: 86044 - DNA, 25 bp, Probe Sequence
gttctaggcaacattaagcagcata

SEQ ID NO: 86045 - DNA, 25 bp, Probe Sequence
ttaagcagcatacagcatacatcct

SEQ ID NO: 86046 - DNA, 25 bp, Probe Sequence
ctatcagagacttgtccttaccaca

SEQ ID NO: 86047 - DNA, 25 bp, Probe Sequence
gcaacattaagcagcatacagcata

SEQ ID NO: 86048 - DNA, 25 bp, Probe Sequence
ctaggcaacattaagcagcatacag

SEQ ID NO: 86049 - DNA, 25 bp, Probe Sequence
atacatcctagctcctgagataaca

SEQ ID NO: 86050 - DNA, 25 bp, Probe Sequence
tacatcctagctcctgagataacaa

SEQ ID NO: 86051 - DNA, 25 bp, Probe Sequence
catacatcctagctcctgagataac

SEQ ID NO: 86052 - DNA, 25 bp, Probe Sequence
tctaggcaacattaagcagcataca

SEQ ID NO: 86053 - DNA, 25 bp, Probe Sequence
atcctagctcctgagataacaagac

SEQ ID NO: 86054 - DNA, 25 bp, Probe Sequence
catcctagctcctgagataacaaga

SEQ ID NO: 86055 - DNA, 25 bp, Probe Sequence
gcatacatcctagctcctgagataa

SEQ ID NO: 86056 - DNA, 25 bp, Probe Sequence
tgttagttcttcacctgctatcatt

SEQ ID NO: 86057 - DNA, 25 bp, Probe Sequence
ctcttatgttagttcttcacctgct

SEQ ID NO: 86058 - DNA, 25 bp, Probe Sequence
tatgttagttcttcacctgctatca

SEQ ID NO: 86059 - DNA, 25 bp, Probe Sequence
tcttatgttagttcttcacctgcta

SEQ ID NO: 86060 - DNA, 25 bp, Probe Sequence
atgttagttcttcacctgctatcat

SEQ ID NO: 86061 - DNA, 25 bp, Probe Sequence
attcaggaatcaagattaggcaagt

SEQ ID NO: 86062 - DNA, 25 bp, Probe Sequence
ttcaggaatcaagattaggcaagtt

SEQ ID NO: 86063 - DNA, 25 bp, Probe Sequence
ttagtaacatattgccaccgtctag

SEQ ID NO: 86064 - DNA, 25 bp, Probe Sequence
gcatcaagcactcttatgttagttc

SEQ ID NO: 86065 - DNA, 25 bp, Probe Sequence
aggcaagttgttgtattgtaatgat

SEQ ID NO: 86066 - DNA, 25 bp, Probe Sequence
actcttatgttagttcttcacctgc

SEQ ID NO: 86067 - DNA, 25 bp, Probe Sequence
gcactcttatgttagttcttcacct

SEQ ID NO: 86068 - DNA, 25 bp, Probe Sequence
agcactcttatgttagttcttcacc

SEQ ID NO: 86069 - DNA, 25 bp, Probe Sequence
agcatcaagcactcttatgttagtt

SEQ ID NO: 86070 - DNA, 25 bp, Probe Sequence
aagcatcaagcactcttatgttagt

SEQ ID NO: 86071 - DNA, 25 bp, Probe Sequence
aagattaggcaagttgttgtattgt

SEQ ID NO: 86072 - DNA, 25 bp, Probe Sequence
ttatgttagttcttcacctgctatc

SEQ ID NO: 86073 - DNA, 25 bp, Probe Sequence
cttatgttagttcttcacctgctat

SEQ ID NO: 86074 - DNA, 25 bp, Probe Sequence
caagattaggcaagttgttgtattg

SEQ ID NO: 86075 - DNA, 25 bp, Probe Sequence
gaatcaagattaggcaagttgttgt

SEQ ID NO: 86076 - DNA, 25 bp, Probe Sequence
tcaagattaggcaagttgttgtatt

SEQ ID NO: 86077 - DNA, 25 bp, Probe Sequence
cactcttatgttagttcttcacctg

SEQ ID NO: 86078 - DNA, 25 bp, Probe Sequence
aagcactcttatgttagttcttcac

SEQ ID NO: 86079 - DNA, 25 bp, Probe Sequence
caagcactcttatgttagttcttca

SEQ ID NO: 86080 - DNA, 25 bp, Probe Sequence
gacagagttggcttacatatcctaa

SEQ ID NO: 86081 - DNA, 25 bp, Probe Sequence
tgacagagttggcttacatatccta

SEQ ID NO: 86082 - DNA, 25 bp, Probe Sequence
aatgacagagttggcttacatatcc

SEQ ID NO: 86083 - DNA, 25 bp, Probe Sequence
caatgacagagttggcttacatatc

SEQ ID NO: 86084 - DNA, 25 bp, Probe Sequence
acaatgacagagttggcttacatat

SEQ ID NO: 86085 - DNA, 25 bp, Probe Sequence
tacaatgacagagttggcttacata

SEQ ID NO: 86086 - DNA, 25 bp, Probe Sequence
ctacaatgacagagttggcttacat

SEQ ID NO: 86087 - DNA, 25 bp, Probe Sequence
ttcaagtctctgagttagaagaagc

SEQ ID NO: 86088 - DNA, 25 bp, Probe Sequence
atgacagagttggcttacatatcct

SEQ ID NO: 86089 - DNA, 25 bp, Probe Sequence
aagtctctgagttagaagaagcctt

SEQ ID NO: 86090 - DNA, 25 bp, Probe Sequence
tctgagttagaagaagccttggatt

SEQ ID NO: 86091 - DNA, 25 bp, Probe Sequence
agtctctgagttagaagaagccttg

SEQ ID NO: 86092 - DNA, 25 bp, Probe Sequence
caagtctctgagttagaagaagcct

SEQ ID NO: 86093 - DNA, 25 bp, Probe Sequence
ctctgagttagaagaagccttggat

SEQ ID NO: 86094 - DNA, 25 bp, Probe Sequence
tcaagtctctgagttagaagaagcc

SEQ ID NO: 86095 - DNA, 25 bp, Probe Sequence
atgctacaatgacagagttggctta

SEQ ID NO: 86096 - DNA, 25 bp, Probe Sequence
gtctctgagttagaagaagccttgg

SEQ ID NO: 86097 - DNA, 25 bp, Probe Sequence
acagagttggcttacatatcctaaa

SEQ ID NO: 86098 - DNA, 25 bp, Probe Sequence
tctctgagttagaagaagccttgga

SEQ ID NO: 86099 - DNA, 25 bp, Probe Sequence
accattctcatttgtctgtgtattt

SEQ ID NO: 86100 - DNA, 25 bp, Probe Sequence
aaccattctcatttgtctgtgtatt

SEQ ID NO: 86101 - DNA, 25 bp, Probe Sequence
aaactaccacccaagaaccaaatac

SEQ ID NO: 86102 - DNA, 25 bp, Probe Sequence
caaactaccacccaagaaccaaata

SEQ ID NO: 86103 - DNA, 25 bp, Probe Sequence
agaaagtttgccaacctctaatcta

SEQ ID NO: 86104 - DNA, 25 bp, Probe Sequence
tctgtggatattctatgacctctgt

SEQ ID NO: 86105 - DNA, 25 bp, Probe Sequence
atggcttctgtggatattctatgac

SEQ ID NO: 86106 - DNA, 25 bp, Probe Sequence
ctgttatggcttctgtggatattct

SEQ ID NO: 86107 - DNA, 25 bp, Probe Sequence
gcttctgtggatattctatgacctc

SEQ ID NO: 86108 - DNA, 25 bp, Probe Sequence
tactgttatggcttctgtggatatt

SEQ ID NO: 86109 - DNA, 25 bp, Probe Sequence
ttctgtggatattctatgacctctg

SEQ ID NO: 86110 - DNA, 25 bp, Probe Sequence
actgttatggcttctgtggatattc

SEQ ID NO: 86111 - DNA, 25 bp, Probe Sequence
tgttatggcttctgtggatattcta

SEQ ID NO: 86112 - DNA, 25 bp, Probe Sequence
cttctgtggatattctatgacctct

SEQ ID NO: 86113 - DNA, 25 bp, Probe Sequence
tatggcttctgtggatattctatga

SEQ ID NO: 86114 - DNA, 25 bp, Probe Sequence
gtactgttatggcttctgtggatat

SEQ ID NO: 86115 - DNA, 25 bp, Probe Sequence
ggcttctgtggatattctatgacct

SEQ ID NO: 86116 - DNA, 25 bp, Probe Sequence
ttatggcttctgtggatattctatg

SEQ ID NO: 86117 - DNA, 25 bp, Probe Sequence
gttatggcttctgtggatattctat

SEQ ID NO: 86118 - DNA, 25 bp, Probe Sequence
tggcttctgtggatattctatgacc

SEQ ID NO: 86119 - DNA, 25 bp, Probe Sequence
tgtactgttatggcttctgtggata

SEQ ID NO: 86120 - DNA, 25 bp, Probe Sequence
ctgtggatattctatgacctctgtc

SEQ ID NO: 86121 - DNA, 25 bp, Probe Sequence
ttgttgtactgttatggcttctgtg

SEQ ID NO: 86122 - DNA, 25 bp, Probe Sequence
ttgtactgttatggcttctgtggat

SEQ ID NO: 86123 - DNA, 25 bp, Probe Sequence
tgtggatattctatgacctctgtcg

SEQ ID NO: 86124 - DNA, 25 bp, Probe Sequence
tattctatgacctctgtcggtgtta

SEQ ID NO: 86125 - DNA, 25 bp, Probe Sequence
atattctatgacctctgtcggtgtt

SEQ ID NO: 86126 - DNA, 25 bp, Probe Sequence
attctatgacctctgtcggtgttaa

SEQ ID NO: 86127 - DNA, 25 bp, Probe Sequence
gtggatattctatgacctctgtcgg

SEQ ID NO: 86128 - DNA, 25 bp, Probe Sequence
ttcaagacactgtaaccacaagatg

SEQ ID NO: 86129 - DNA, 25 bp, Probe Sequence
atatggagagagctgacaatcaatt

SEQ ID NO: 86130 - DNA, 25 bp, Probe Sequence
gatatggagagagctgacaatcaat

SEQ ID NO: 86131 - DNA, 25 bp, Probe Sequence
tatggagagagctgacaatcaattc

SEQ ID NO: 86132 - DNA, 25 bp, Probe Sequence
agagagctgacaatcaattcacatt

SEQ ID NO: 86133 - DNA, 25 bp, Probe Sequence
agatatggagagagctgacaatcaa

SEQ ID NO: 86134 - DNA, 25 bp, Probe Sequence
gagagagctgacaatcaattcacat

SEQ ID NO: 86135 - DNA, 25 bp, Probe Sequence
ataaatgccgatgatttgtgtgaaa

SEQ ID NO: 86136 - DNA, 25 bp, Probe Sequence
aataaatgccgatgatttgtgtgaa

SEQ ID NO: 86137 - DNA, 25 bp, Probe Sequence
aaataaatgccgatgatttgtgtga

SEQ ID NO: 86138 - DNA, 25 bp, Probe Sequence
gaaataaatgccgatgatttgtgtg

SEQ ID NO: 86139 - DNA, 25 bp, Probe Sequence
aggaaataaatgccgatgatttgtg

SEQ ID NO: 86140 - DNA, 25 bp, Probe Sequence
caggaaataaatgccgatgatttgt

SEQ ID NO: 86141 - DNA, 25 bp, Probe Sequence
tttcaagacactgtaaccacaagat

SEQ ID NO: 86142 - DNA, 25 bp, Probe Sequence
atggagagagctgacaatcaattca

SEQ ID NO: 86143 - DNA, 25 bp, Probe Sequence
ggaaataaatgccgatgatttgtgt

SEQ ID NO: 86144 - DNA, 25 bp, Probe Sequence
cagatatggagagagctgacaatca

SEQ ID NO: 86145 - DNA, 25 bp, Probe Sequence
ccaggaaataaatgccgatgatttg

SEQ ID NO: 86146 - DNA, 25 bp, Probe Sequence
aactttcaagacactgtaaccacaa

SEQ ID NO: 86147 - DNA, 25 bp, Probe Sequence
ctttcaagacactgtaaccacaaga

SEQ ID NO: 86148 - DNA, 25 bp, Probe Sequence
actttcaagacactgtaaccacaag

SEQ ID NO: 86149 - DNA, 25 bp, Probe Sequence
tcaagacactgtaaccacaagatgg

SEQ ID NO: 86150 - DNA, 25 bp, Probe Sequence
aagatggttatttattgagctggct

SEQ ID NO: 86151 - DNA, 25 bp, Probe Sequence
caactttcaagacactgtaaccaca

SEQ ID NO: 86152 - DNA, 25 bp, Probe Sequence
taacattgaggaaggataagagcag

SEQ ID NO: 86153 - DNA, 25 bp, Probe Sequence
gtaacattgaggaaggataagagca

SEQ ID NO: 86154 - DNA, 25 bp, Probe Sequence
tgtaacattgaggaaggataagagc

SEQ ID NO: 86155 - DNA, 25 bp, Probe Sequence
caacaagtaatgaaccagccttatt

SEQ ID NO: 86156 - DNA, 25 bp, Probe Sequence
atgattacatatagaccacagcagg

SEQ ID NO: 86157 - DNA, 25 bp, Probe Sequence
aacaagtaatgaaccagccttattc

SEQ ID NO: 86158 - DNA, 25 bp, Probe Sequence
gttgtaacattgaggaaggataaga

SEQ ID NO: 86159 - DNA, 25 bp, Probe Sequence
agttgtaacattgaggaaggataag

SEQ ID NO: 86160 - DNA, 25 bp, Probe Sequence
ttgtagttgtaacattgaggaagga

SEQ ID NO: 86161 - DNA, 25 bp, Probe Sequence
ttgtaacattgaggaaggataagag

SEQ ID NO: 86162 - DNA, 25 bp, Probe Sequence
tgtagttgtaacattgaggaaggat

SEQ ID NO: 86163 - DNA, 25 bp, Probe Sequence
aaccagccttattcaagtacaagag

SEQ ID NO: 86164 - DNA, 25 bp, Probe Sequence
gaaccagccttattcaagtacaaga

SEQ ID NO: 86165 - DNA, 25 bp, Probe Sequence
gcaacaagtaatgaaccagccttat

SEQ ID NO: 86166 - DNA, 25 bp, Probe Sequence
gtagttgtaacattgaggaaggata

SEQ ID NO: 86167 - DNA, 25 bp, Probe Sequence
tgagatccataatcagagaattgcc

SEQ ID NO: 86168 - DNA, 25 bp, Probe Sequence
attgtagttgtaacattgaggaagg

SEQ ID NO: 86169 - DNA, 25 bp, Probe Sequence
catgattacatatagaccacagcag

SEQ ID NO: 86170 - DNA, 25 bp, Probe Sequence
ccagccttattcaagtacaagagtg

SEQ ID NO: 86171 - DNA, 25 bp, Probe Sequence
tagacatgaaccatctcacagttac

SEQ ID NO: 86172 - DNA, 25 bp, Probe Sequence
attagacatgaaccatctcacagtt

SEQ ID NO: 86173 - DNA, 25 bp, Probe Sequence
agccttattcaagtacaagagtgtt

SEQ ID NO: 86174 - DNA, 25 bp, Probe Sequence
ttgagatccataatcagagaattgc

SEQ ID NO: 86175 - DNA, 25 bp, Probe Sequence
ttagacatgaaccatctcacagtta

SEQ ID NO: 86176 - DNA, 25 bp, Probe Sequence
aacacaagtaagtatccagaattga

SEQ ID NO: 86177 - DNA, 25 bp, Probe Sequence
acacaagtaagtatccagaattgat

SEQ ID NO: 86178 - DNA, 25 bp, Probe Sequence
ttagccaatgtatctttgagtgttt

SEQ ID NO: 86179 - DNA, 25 bp, Probe Sequence
attagccaatgtatctttgagtgtt

SEQ ID NO: 86180 - DNA, 25 bp, Probe Sequence
aattagccaatgtatctttgagtgt

SEQ ID NO: 86181 - DNA, 25 bp, Probe Sequence
aaattagccaatgtatctttgagtg

SEQ ID NO: 86182 - DNA, 25 bp, Probe Sequence
aaacacaagtaagtatccagaattg

SEQ ID NO: 86183 - DNA, 25 bp, Probe Sequence
ctcatcatgcaaattagccaatgta

SEQ ID NO: 86184 - DNA, 25 bp, Probe Sequence
gagtctcactatgttgcctgcaata

SEQ ID NO: 86185 - DNA, 25 bp, Probe Sequence
cacaagtaagtatccagaattgata

SEQ ID NO: 86186 - DNA, 25 bp, Probe Sequence
tcatcatgcaaattagccaatgtat

SEQ ID NO: 86187 - DNA, 25 bp, Probe Sequence
tcatgcaaattagccaatgtatctt

SEQ ID NO: 86188 - DNA, 25 bp, Probe Sequence
actctcatcatgcaaattagccaat

SEQ ID NO: 86189 - DNA, 25 bp, Probe Sequence
catcatgcaaattagccaatgtatc

SEQ ID NO: 86190 - DNA, 25 bp, Probe Sequence
ctctcatcatgcaaattagccaatg

SEQ ID NO: 86191 - DNA, 25 bp, Probe Sequence
agatggagtctcactatgttgcctg

SEQ ID NO: 86192 - DNA, 25 bp, Probe Sequence
atcatgcaaattagccaatgtatct

SEQ ID NO: 86193 - DNA, 25 bp, Probe Sequence
gtagagatggagtctcactatgttg

SEQ ID NO: 86194 - DNA, 25 bp, Probe Sequence
tgtagagatggagtctcactatgtt

SEQ ID NO: 86195 - DNA, 25 bp, Probe Sequence
ttgtagagatggagtctcactatgt

SEQ ID NO: 86196 - DNA, 25 bp, Probe Sequence
agtctcactatgttgcctgcaatag

SEQ ID NO: 86197 - DNA, 25 bp, Probe Sequence
catgcaaattagccaatgtatcttt

SEQ ID NO: 86198 - DNA, 25 bp, Probe Sequence
tctcatcatgcaaattagccaatgt

SEQ ID NO: 86199 - DNA, 25 bp, Probe Sequence
gactctcatcatgcaaattagccaa

SEQ ID NO: 86200 - DNA, 25 bp, Probe Sequence
ttctccttagtcttctcatagcatt

SEQ ID NO: 86201 - DNA, 25 bp, Probe Sequence
aataactactgtgttcctggcaata

SEQ ID NO: 86202 - DNA, 25 bp, Probe Sequence
ataactactgtgttcctggcaatag

SEQ ID NO: 86203 - DNA, 25 bp, Probe Sequence
cattattggaattaacctggtgctg

SEQ ID NO: 86204 - DNA, 25 bp, Probe Sequence
tcattattggaattaacctggtgct

SEQ ID NO: 86205 - DNA, 25 bp, Probe Sequence
ctggcaatagtgtgttctgattaga

SEQ ID NO: 86206 - DNA, 25 bp, Probe Sequence
cctggcaatagtgtgttctgattag

SEQ ID NO: 86207 - DNA, 25 bp, Probe Sequence
ttcattattggaattaacctggtgc

SEQ ID NO: 86208 - DNA, 25 bp, Probe Sequence
tcctggcaatagtgtgttctgatta

SEQ ID NO: 86209 - DNA, 25 bp, Probe Sequence
tctccttagtcttctcatagcatta

SEQ ID NO: 86210 - DNA, 25 bp, Probe Sequence
caataactactgtgttcctggcaat

SEQ ID NO: 86211 - DNA, 25 bp, Probe Sequence
attattggaattaacctggtgctgg

SEQ ID NO: 86212 - DNA, 25 bp, Probe Sequence
tccttagtcttctcatagcattaac

SEQ ID NO: 86213 - DNA, 25 bp, Probe Sequence
gttcattattggaattaacctggtg

SEQ ID NO: 86214 - DNA, 25 bp, Probe Sequence
tggaattaacctggtgctggatatt

SEQ ID NO: 86215 - DNA, 25 bp, Probe Sequence
ttggaattaacctggtgctggatat

SEQ ID NO: 86216 - DNA, 25 bp, Probe Sequence
attggaattaacctggtgctggata

SEQ ID NO: 86217 - DNA, 25 bp, Probe Sequence
tattggaattaacctggtgctggat

SEQ ID NO: 86218 - DNA, 25 bp, Probe Sequence
attgttgaggtggtctgaatgttct

SEQ ID NO: 86219 - DNA, 25 bp, Probe Sequence
ctccttagtcttctcatagcattaa

SEQ ID NO: 86220 - DNA, 25 bp, Probe Sequence
ttcctggcaatagtgtgttctgatt

SEQ ID NO: 86221 - DNA, 25 bp, Probe Sequence
ttattggaattaacctggtgctgga

SEQ ID NO: 86222 - DNA, 25 bp, Probe Sequence
ccttagtcttctcatagcattaact

SEQ ID NO: 86223 - DNA, 25 bp, Probe Sequence
gcttattgttccaagacattgtcaa

SEQ ID NO: 86224 - DNA, 25 bp, Probe Sequence
aatattaggtaggtatggttgcagg

SEQ ID NO: 86225 - DNA, 25 bp, Probe Sequence
gaaacgcatctctactacaaatacg

SEQ ID NO: 86226 - DNA, 25 bp, Probe Sequence
ccaatatgatgaaaccctgtctcta

SEQ ID NO: 86227 - DNA, 25 bp, Probe Sequence
catctctactacaaatacgcacaaa

SEQ ID NO: 86228 - DNA, 25 bp, Probe Sequence
atgatgaaaccctgtctctactaaa

SEQ ID NO: 86229 - DNA, 25 bp, Probe Sequence
tgaaacgcatctctactacaaatac

SEQ ID NO: 86230 - DNA, 25 bp, Probe Sequence
gtgaaacgcatctctactacaaata

SEQ ID NO: 86231 - DNA, 25 bp, Probe Sequence
caatatgatgaaaccctgtctctac

SEQ ID NO: 86232 - DNA, 25 bp, Probe Sequence
ggtgaaacgcatctctactacaaat

SEQ ID NO: 86233 - DNA, 25 bp, Probe Sequence
aatatgatgaaaccctgtctctact

SEQ ID NO: 86234 - DNA, 25 bp, Probe Sequence
gcatctctactacaaatacgcacaa

SEQ ID NO: 86235 - DNA, 25 bp, Probe Sequence
caggagaatcacttcaacccataag

SEQ ID NO: 86236 - DNA, 25 bp, Probe Sequence
aaacgcatctctactacaaatacgc

SEQ ID NO: 86237 - DNA, 25 bp, Probe Sequence
tatgatgaaaccctgtctctactaa

SEQ ID NO: 86238 - DNA, 25 bp, Probe Sequence
atattaggtaggtatggttgcaggc

SEQ ID NO: 86239 - DNA, 25 bp, Probe Sequence
atatgatgaaaccctgtctctacta

SEQ ID NO: 86240 - DNA, 25 bp, Probe Sequence
tggtgaaacgcatctctactacaaa

SEQ ID NO: 86241 - DNA, 25 bp, Probe Sequence
aggagaatcacttcaacccataagg

SEQ ID NO: 86242 - DNA, 25 bp, Probe Sequence
aacgcatctctactacaaatacgca

SEQ ID NO: 86243 - DNA, 25 bp, Probe Sequence
ctggtgaaacgcatctctactacaa

SEQ ID NO: 86244 - DNA, 25 bp, Probe Sequence
gccaatatgatgaaaccctgtctct

SEQ ID NO: 86245 - DNA, 25 bp, Probe Sequence
gcaggagaatcacttcaacccataa

SEQ ID NO: 86246 - DNA, 25 bp, Probe Sequence
gagaatcacttcaacccataaggtg

SEQ ID NO: 86247 - DNA, 25 bp, Probe Sequence
tattaggtaggtatggttgcaggca

SEQ ID NO: 86248 - DNA, 25 bp, Probe Sequence
aatctgcttggttctattctgagag

SEQ ID NO: 86249 - DNA, 25 bp, Probe Sequence
ctgcttggttctattctgagagttc

SEQ ID NO: 86250 - DNA, 25 bp, Probe Sequence
atctgcttggttctattctgagagt

SEQ ID NO: 86251 - DNA, 25 bp, Probe Sequence
cgtgaacattgtaaggactatgagt

SEQ ID NO: 86252 - DNA, 25 bp, Probe Sequence
tgcttggttctattctgagagttct

SEQ ID NO: 86253 - DNA, 25 bp, Probe Sequence
tctgcttggttctattctgagagtt

SEQ ID NO: 86254 - DNA, 25 bp, Probe Sequence
ggttctattctgagagttctctgag

SEQ ID NO: 86255 - DNA, 25 bp, Probe Sequence
ttggttctattctgagagttctctg

SEQ ID NO: 86256 - DNA, 25 bp, Probe Sequence
tggttctattctgagagttctctga

SEQ ID NO: 86257 - DNA, 25 bp, Probe Sequence
cttggttctattctgagagttctct

SEQ ID NO: 86258 - DNA, 25 bp, Probe Sequence
gttctattctgagagttctctgaga

SEQ ID NO: 86259 - DNA, 25 bp, Probe Sequence
gcttggttctattctgagagttctc

SEQ ID NO: 86260 - DNA, 25 bp, Probe Sequence
ttcctctcctaaactcattctttcc

SEQ ID NO: 86261 - DNA, 25 bp, Probe Sequence
ctctcctaaactcattctttcctcc

SEQ ID NO: 86262 - DNA, 25 bp, Probe Sequence
cctctcctaaactcattctttcctc

SEQ ID NO: 86263 - DNA, 25 bp, Probe Sequence
ctgacgtgaacattgtaaggactat

SEQ ID NO: 86264 - DNA, 25 bp, Probe Sequence
tcctctcctaaactcattctttcct

SEQ ID NO: 86265 - DNA, 25 bp, Probe Sequence
ttgtttcagagagagttacttaccc

SEQ ID NO: 86266 - DNA, 25 bp, Probe Sequence
gtttcagagagagttacttacccat

SEQ ID NO: 86267 - DNA, 25 bp, Probe Sequence
ctcctaaactcattctttcctccac

SEQ ID NO: 86268 - DNA, 25 bp, Probe Sequence
tctcctaaactcattctttcctcca

SEQ ID NO: 86269 - DNA, 25 bp, Probe Sequence
acgtgaacattgtaaggactatgag

SEQ ID NO: 86270 - DNA, 25 bp, Probe Sequence
gacgtgaacattgtaaggactatga

SEQ ID NO: 86271 - DNA, 25 bp, Probe Sequence
cctaaactcattctttcctccacag

SEQ ID NO: 86272 - DNA, 25 bp, Probe Sequence
tatagcacagcaattccacttctaa

SEQ ID NO: 86273 - DNA, 25 bp, Probe Sequence
ttatagcacagcaattccacttcta

SEQ ID NO: 86274 - DNA, 25 bp, Probe Sequence
atagcacagcaattccacttctaat

SEQ ID NO: 86275 - DNA, 25 bp, Probe Sequence
atgtgtgtgtgtgtgtgtataatat

SEQ ID NO: 86276 - DNA, 25 bp, Probe Sequence
atatgtgtgtgtgtgtgtgtataat

SEQ ID NO: 86277 - DNA, 25 bp, Probe Sequence
atatatgtgtgtgtgtgtgtgtata

SEQ ID NO: 86278 - DNA, 25 bp, Probe Sequence
tatatatgtgtgtgtgtgtgtgtat

SEQ ID NO: 86279 - DNA, 25 bp, Probe Sequence
tagcacagcaattccacttctaatt

SEQ ID NO: 86280 - DNA, 25 bp, Probe Sequence
tatgtgtgtgtgtgtgtgtataata

SEQ ID NO: 86281 - DNA, 25 bp, Probe Sequence
tatatgtgtgtgtgtgtgtgtataa

SEQ ID NO: 86282 - DNA, 25 bp, Probe Sequence
tgtgtgtgtgtgtgtgtataatatt

SEQ ID NO: 86283 - DNA, 25 bp, Probe Sequence
ttgatgagacaactggttatctaat

SEQ ID NO: 86284 - DNA, 25 bp, Probe Sequence
atttatagcacagcaattccacttc

SEQ ID NO: 86285 - DNA, 25 bp, Probe Sequence
tttatagcacagcaattccacttct

SEQ ID NO: 86286 - DNA, 25 bp, Probe Sequence
atatatatgtgtgtgtgtgtgtgta

SEQ ID NO: 86287 - DNA, 25 bp, Probe Sequence
tatatatatgtgtgtgtgtgtgtgt

SEQ ID NO: 86288 - DNA, 25 bp, Probe Sequence
tgatgagacaactggttatctaata

SEQ ID NO: 86289 - DNA, 25 bp, Probe Sequence
ggaactgcttctataactttgtttg

SEQ ID NO: 86290 - DNA, 25 bp, Probe Sequence
aggaactgcttctataactttgttt

SEQ ID NO: 86291 - DNA, 25 bp, Probe Sequence
aaggaactgcttctataactttgtt

SEQ ID NO: 86292 - DNA, 25 bp, Probe Sequence
aatttatagcacagcaattccactt

SEQ ID NO: 86293 - DNA, 25 bp, Probe Sequence
tgagcaaaggatttcttaaatgaga

SEQ ID NO: 86294 - DNA, 25 bp, Probe Sequence
taaggaactgcttctataactttgt

SEQ ID NO: 86295 - DNA, 25 bp, Probe Sequence
atgctgactacagtagaaacatctc

SEQ ID NO: 86296 - DNA, 25 bp, Probe Sequence
ggtggaagttctaatgtctgttagc

SEQ ID NO: 86297 - DNA, 25 bp, Probe Sequence
gagagtgtgcagagagctatgatag

SEQ ID NO: 86298 - DNA, 25 bp, Probe Sequence
agagagtgtgcagagagctatgata

SEQ ID NO: 86299 - DNA, 25 bp, Probe Sequence
gacttggtggtgcataatggatatt

SEQ ID NO: 86300 - DNA, 25 bp, Probe Sequence
agggtggaagttctaatgtctgtta

SEQ ID NO: 86301 - DNA, 25 bp, Probe Sequence
gtggaagttctaatgtctgttagct

SEQ ID NO: 86302 - DNA, 25 bp, Probe Sequence
catgtagatgaatgtgttaagtgaa

SEQ ID NO: 86303 - DNA, 25 bp, Probe Sequence
agacttggtggtgcataatggatat

SEQ ID NO: 86304 - DNA, 25 bp, Probe Sequence
gaaaggtctagtatgagcgagaaag

SEQ ID NO: 86305 - DNA, 25 bp, Probe Sequence
aagggtggaagttctaatgtctgtt

SEQ ID NO: 86306 - DNA, 25 bp, Probe Sequence
atgatagcaataatgtacgaatgtt

SEQ ID NO: 86307 - DNA, 25 bp, Probe Sequence
ctagtatgagcgagaaaggagagag

SEQ ID NO: 86308 - DNA, 25 bp, Probe Sequence
atgaaaggtctagtatgagcgagaa

SEQ ID NO: 86309 - DNA, 25 bp, Probe Sequence
tgaaaggtctagtatgagcgagaaa

SEQ ID NO: 86310 - DNA, 25 bp, Probe Sequence
tacttgtgaaacattgtgtgggatt

SEQ ID NO: 86311 - DNA, 25 bp, Probe Sequence
gggtggaagttctaatgtctgttag

SEQ ID NO: 86312 - DNA, 25 bp, Probe Sequence
gagacttggtggtgcataatggata

SEQ ID NO: 86313 - DNA, 25 bp, Probe Sequence
ctgtctgtacttgtgaaacattgtg

SEQ ID NO: 86314 - DNA, 25 bp, Probe Sequence
gaagggtggaagttctaatgtctgt

SEQ ID NO: 86315 - DNA, 25 bp, Probe Sequence
tctagtatgagcgagaaaggagaga

SEQ ID NO: 86316 - DNA, 25 bp, Probe Sequence
gtctagtatgagcgagaaaggagag

SEQ ID NO: 86317 - DNA, 25 bp, Probe Sequence
aaaggtctagtatgagcgagaaagg

SEQ ID NO: 86318 - DNA, 25 bp, Probe Sequence
gtctgtacttgtgaaacattgtgtg

SEQ ID NO: 86319 - DNA, 25 bp, Probe Sequence
ttgtgaaacattgtgtgggattgat

SEQ ID NO: 86320 - DNA, 25 bp, Probe Sequence
agtagacttaccgttcaatctcctt

SEQ ID NO: 86321 - DNA, 25 bp, Probe Sequence
aacagtcaagtggttccaatagtag

SEQ ID NO: 86322 - DNA, 25 bp, Probe Sequence
aagtagacttaccgttcaatctcct

SEQ ID NO: 86323 - DNA, 25 bp, Probe Sequence
ttgctatgttgttcttgtgtgtgac

SEQ ID NO: 86324 - DNA, 25 bp, Probe Sequence
acagtcaagtggttccaatagtagg

SEQ ID NO: 86325 - DNA, 25 bp, Probe Sequence
ctaacctgaagtcctaacggataag

SEQ ID NO: 86326 - DNA, 25 bp, Probe Sequence
atctaacctgaagtcctaacggata

SEQ ID NO: 86327 - DNA, 25 bp, Probe Sequence
tatctaacctgaagtcctaacggat

SEQ ID NO: 86328 - DNA, 25 bp, Probe Sequence
atatctaacctgaagtcctaacgga

SEQ ID NO: 86329 - DNA, 25 bp, Probe Sequence
tctaacctgaagtcctaacggataa

SEQ ID NO: 86330 - DNA, 25 bp, Probe Sequence
taagtagacttaccgttcaatctcc

SEQ ID NO: 86331 - DNA, 25 bp, Probe Sequence
gtcctcttcatctgtatttcctacc

SEQ ID NO: 86332 - DNA, 25 bp, Probe Sequence
attctttgctatgttgttcttgtgt

SEQ ID NO: 86333 - DNA, 25 bp, Probe Sequence
ttctttgctatgttgttcttgtgtg

SEQ ID NO: 86334 - DNA, 25 bp, Probe Sequence
agtcctcttcatctgtatttcctac

SEQ ID NO: 86335 - DNA, 25 bp, Probe Sequence
gatatctaacctgaagtcctaacgg

SEQ ID NO: 86336 - DNA, 25 bp, Probe Sequence
actaagtagacttaccgttcaatct

SEQ ID NO: 86337 - DNA, 25 bp, Probe Sequence
ccttggaggtactaagtagacttac

SEQ ID NO: 86338 - DNA, 25 bp, Probe Sequence
tgatatctaacctgaagtcctaacg

SEQ ID NO: 86339 - DNA, 25 bp, Probe Sequence
gtagacttaccgttcaatctccttt

SEQ ID NO: 86340 - DNA, 25 bp, Probe Sequence
taacctgaagtcctaacggataagc

SEQ ID NO: 86341 - DNA, 25 bp, Probe Sequence
ctttgctatgttgttcttgtgtgtg

SEQ ID NO: 86342 - DNA, 25 bp, Probe Sequence
tctttgctatgttgttcttgtgtgt

SEQ ID NO: 86343 - DNA, 25 bp, Probe Sequence
ctaagtagacttaccgttcaatctc

SEQ ID NO: 86344 - DNA, 25 bp, Probe Sequence
ttatgctaacttaatcacagaggtg

SEQ ID NO: 86345 - DNA, 25 bp, Probe Sequence
gttatgctaacttaatcacagaggt

SEQ ID NO: 86346 - DNA, 25 bp, Probe Sequence
cgtttgccatatcccattggttaaa

SEQ ID NO: 86347 - DNA, 25 bp, Probe Sequence
tggttaaaagcaagtcatagttctg

SEQ ID NO: 86348 - DNA, 25 bp, Probe Sequence
aagtcatagttctgcccatacccaa

SEQ ID NO: 86349 - DNA, 25 bp, Probe Sequence
ccattggttaaaagcaagtcatagt

SEQ ID NO: 86350 - DNA, 25 bp, Probe Sequence
catatcccattggttaaaagcaagt

SEQ ID NO: 86351 - DNA, 25 bp, Probe Sequence
ttggttaaaagcaagtcatagttct

SEQ ID NO: 86352 - DNA, 25 bp, Probe Sequence
cccattggttaaaagcaagtcatag

SEQ ID NO: 86353 - DNA, 25 bp, Probe Sequence
atatcccattggttaaaagcaagtc

SEQ ID NO: 86354 - DNA, 25 bp, Probe Sequence
taacttaatcacagaggtgacatcc

SEQ ID NO: 86355 - DNA, 25 bp, Probe Sequence
tcccattggttaaaagcaagtcata

SEQ ID NO: 86356 - DNA, 25 bp, Probe Sequence
tatcccattggttaaaagcaagtca

SEQ ID NO: 86357 - DNA, 25 bp, Probe Sequence
gctaacttaatcacagaggtgacat

SEQ ID NO: 86358 - DNA, 25 bp, Probe Sequence
atgctaacttaatcacagaggtgac

SEQ ID NO: 86359 - DNA, 25 bp, Probe Sequence
tatgctaacttaatcacagaggtga

SEQ ID NO: 86360 - DNA, 25 bp, Probe Sequence
atcccattggttaaaagcaagtcat

SEQ ID NO: 86361 - DNA, 25 bp, Probe Sequence
ctaacttaatcacagaggtgacatc

SEQ ID NO: 86362 - DNA, 25 bp, Probe Sequence
cattggttaaaagcaagtcatagtt

SEQ ID NO: 86363 - DNA, 25 bp, Probe Sequence
caagtcatagttctgcccataccca

SEQ ID NO: 86364 - DNA, 25 bp, Probe Sequence
attggttaaaagcaagtcatagttc

SEQ ID NO: 86365 - DNA, 25 bp, Probe Sequence
tgctaacttaatcacagaggtgaca

SEQ ID NO: 86366 - DNA, 25 bp, Probe Sequence
aaagcaagtcatagttctgcccata

SEQ ID NO: 86367 - DNA, 25 bp, Probe Sequence
tttgccatatcccattggttaaaag

SEQ ID NO: 86368 - DNA, 25 bp, Probe Sequence
ctgcttatcggattagttacgctta

SEQ ID NO: 86369 - DNA, 25 bp, Probe Sequence
gacctctgcttatcggattagttac

SEQ ID NO: 86370 - DNA, 25 bp, Probe Sequence
tgcttatcggattagttacgcttac

SEQ ID NO: 86371 - DNA, 25 bp, Probe Sequence
ggattagttacgcttaccgatgtag

SEQ ID NO: 86372 - DNA, 25 bp, Probe Sequence
gcttatcggattagttacgcttacc

SEQ ID NO: 86373 - DNA, 25 bp, Probe Sequence
ggacctctgcttatcggattagtta

SEQ ID NO: 86374 - DNA, 25 bp, Probe Sequence
ggaatatggcactctgttcattgtt

SEQ ID NO: 86375 - DNA, 25 bp, Probe Sequence
tctgcttatcggattagttacgctt

SEQ ID NO: 86376 - DNA, 25 bp, Probe Sequence
acctctgcttatcggattagttacg

SEQ ID NO: 86377 - DNA, 25 bp, Probe Sequence
taattgcgagttgtctcttaatgaa

SEQ ID NO: 86378 - DNA, 25 bp, Probe Sequence
cataattgcgagttgtctcttaatg

SEQ ID NO: 86379 - DNA, 25 bp, Probe Sequence
acataattgcgagttgtctcttaat

SEQ ID NO: 86380 - DNA, 25 bp, Probe Sequence
ataattgcgagttgtctcttaatga

SEQ ID NO: 86381 - DNA, 25 bp, Probe Sequence
ctctgcttatcggattagttacgct

SEQ ID NO: 86382 - DNA, 25 bp, Probe Sequence
cattagtcctagagcgtcctgtaag

SEQ ID NO: 86383 - DNA, 25 bp, Probe Sequence
ttccaatgagcattagtcctagagc

SEQ ID NO: 86384 - DNA, 25 bp, Probe Sequence
gtctagctgtaggatggtgttataa

SEQ ID NO: 86385 - DNA, 25 bp, Probe Sequence
tacataattgcgagttgtctcttaa

SEQ ID NO: 86386 - DNA, 25 bp, Probe Sequence
ttacataattgcgagttgtctctta

SEQ ID NO: 86387 - DNA, 25 bp, Probe Sequence
ggtctagctgtaggatggtgttata

SEQ ID NO: 86388 - DNA, 25 bp, Probe Sequence
atttctttcttagtgtctgagggtc

SEQ ID NO: 86389 - DNA, 25 bp, Probe Sequence
cggtttctgagtatttctggtctat

SEQ ID NO: 86390 - DNA, 25 bp, Probe Sequence
atggacctctgcttatcggattagt

SEQ ID NO: 86391 - DNA, 25 bp, Probe Sequence
catttctttcttagtgtctgagggt

SEQ ID NO: 86392 - DNA, 25 bp, Probe Sequence
taggttgattccatgtcttgctatt

SEQ ID NO: 86393 - DNA, 25 bp, Probe Sequence
ctaggttgattccatgtcttgctat

SEQ ID NO: 86394 - DNA, 25 bp, Probe Sequence
ttgattccatgtcttgctattgtga

SEQ ID NO: 86395 - DNA, 25 bp, Probe Sequence
gttgattccatgtcttgctattgtg

SEQ ID NO: 86396 - DNA, 25 bp, Probe Sequence
tgattccatgtcttgctattgtgaa

SEQ ID NO: 86397 - DNA, 25 bp, Probe Sequence
aggttgattccatgtcttgctattg

SEQ ID NO: 86398 - DNA, 25 bp, Probe Sequence
actaggttgattccatgtcttgcta

SEQ ID NO: 86399 - DNA, 25 bp, Probe Sequence
ggttgattccatgtcttgctattgt

SEQ ID NO: 86400 - DNA, 25 bp, Probe Sequence
aacactaggttgattccatgtcttg

SEQ ID NO: 86401 - DNA, 25 bp, Probe Sequence
taaacaaacaacctacagaatggga

SEQ ID NO: 86402 - DNA, 25 bp, Probe Sequence
ataaacaaacaacctacagaatggg

SEQ ID NO: 86403 - DNA, 25 bp, Probe Sequence
gtgttggcaaatagtttacggttaa

SEQ ID NO: 86404 - DNA, 25 bp, Probe Sequence
gattccatgtcttgctattgtgaat

SEQ ID NO: 86405 - DNA, 25 bp, Probe Sequence
caaacaacctacagaatgggagaaa

SEQ ID NO: 86406 - DNA, 25 bp, Probe Sequence
gctacaattatctgatcttgacaag

SEQ ID NO: 86407 - DNA, 25 bp, Probe Sequence
tggcaaatagtttacggttaaatcc

SEQ ID NO: 86408 - DNA, 25 bp, Probe Sequence
tattggtgttggcaaatagtttacg

SEQ ID NO: 86409 - DNA, 25 bp, Probe Sequence
cttgatattggtgttggcaaatagt

SEQ ID NO: 86410 - DNA, 25 bp, Probe Sequence
tgttggcaaatagtttacggttaaa

SEQ ID NO: 86411 - DNA, 25 bp, Probe Sequence
cttcttgatattggtgttggcaaat

SEQ ID NO: 86412 - DNA, 25 bp, Probe Sequence
ggcaaatagtttacggttaaatcct

SEQ ID NO: 86413 - DNA, 25 bp, Probe Sequence
tcttgatattggtgttggcaaatag

SEQ ID NO: 86414 - DNA, 25 bp, Probe Sequence
aaacaaacaacctacagaatgggag

SEQ ID NO: 86415 - DNA, 25 bp, Probe Sequence
tgatattggtgttggcaaatagttt

SEQ ID NO: 86416 - DNA, 25 bp, Probe Sequence
acacaaccaaccatattaacaccta

SEQ ID NO: 86417 - DNA, 25 bp, Probe Sequence
aaccaaccatattaacacctagcaa

SEQ ID NO: 86418 - DNA, 25 bp, Probe Sequence
cacaaccaaccatattaacacctag

SEQ ID NO: 86419 - DNA, 25 bp, Probe Sequence
gacacaaccaaccatattaacacct

SEQ ID NO: 86420 - DNA, 25 bp, Probe Sequence
ccaaccatattaacacctagcaagt

SEQ ID NO: 86421 - DNA, 25 bp, Probe Sequence
accaaccatattaacacctagcaag

SEQ ID NO: 86422 - DNA, 25 bp, Probe Sequence
caaccaaccatattaacacctagca

SEQ ID NO: 86423 - DNA, 25 bp, Probe Sequence
acaaccaaccatattaacacctagc

SEQ ID NO: 86424 - DNA, 25 bp, Probe Sequence
ttattcactatcacaagaacagcat

SEQ ID NO: 86425 - DNA, 25 bp, Probe Sequence
ggacacaaccaaccatattaacacc

SEQ ID NO: 86426 - DNA, 25 bp, Probe Sequence
atgaatatactctgtgagccaggta

SEQ ID NO: 86427 - DNA, 25 bp, Probe Sequence
tattcactatcacaagaacagcatg

SEQ ID NO: 86428 - DNA, 25 bp, Probe Sequence
gaatatactctgtgagccaggtatg

SEQ ID NO: 86429 - DNA, 25 bp, Probe Sequence
tgaatatactctgtgagccaggtat

SEQ ID NO: 86430 - DNA, 25 bp, Probe Sequence
caaccatattaacacctagcaagtg

SEQ ID NO: 86431 - DNA, 25 bp, Probe Sequence
atacctgcctccatgattccattat

SEQ ID NO: 86432 - DNA, 25 bp, Probe Sequence
attcactatcacaagaacagcatgg

SEQ ID NO: 86433 - DNA, 25 bp, Probe Sequence
aatacctgcctccatgattccatta

SEQ ID NO: 86434 - DNA, 25 bp, Probe Sequence
taatacctgcctccatgattccatt

SEQ ID NO: 86435 - DNA, 25 bp, Probe Sequence
tacctgcctccatgattccattatc

SEQ ID NO: 86436 - DNA, 25 bp, Probe Sequence
acaacatagcaagacctgtctctaa

SEQ ID NO: 86437 - DNA, 25 bp, Probe Sequence
gtaatacctgcctccatgattccat

SEQ ID NO: 86438 - DNA, 25 bp, Probe Sequence
aatatactctgtgagccaggtatgg

SEQ ID NO: 86439 - DNA, 25 bp, Probe Sequence
catgaatatactctgtgagccaggt

SEQ ID NO: 86440 - DNA, 25 bp, Probe Sequence
cactggctggaatatacatagacat

SEQ ID NO: 86441 - DNA, 25 bp, Probe Sequence
tacactggctggaatatacatagac

SEQ ID NO: 86442 - DNA, 25 bp, Probe Sequence
ttgtgtaataatatgctgtgtgacc

SEQ ID NO: 86443 - DNA, 25 bp, Probe Sequence
gcatatacactggctggaatataca

SEQ ID NO: 86444 - DNA, 25 bp, Probe Sequence
acactggctggaatatacatagaca

SEQ ID NO: 86445 - DNA, 25 bp, Probe Sequence
atacactggctggaatatacataga

SEQ ID NO: 86446 - DNA, 25 bp, Probe Sequence
actcttaatcattacctgacactgc

SEQ ID NO: 86447 - DNA, 25 bp, Probe Sequence
actggctggaatatacatagacatg

SEQ ID NO: 86448 - DNA, 25 bp, Probe Sequence
gcagcatcttgaataagtggttctt

SEQ ID NO: 86449 - DNA, 25 bp, Probe Sequence
catatacactggctggaatatacat

SEQ ID NO: 86450 - DNA, 25 bp, Probe Sequence
ctggctggaatatacatagacatgc

SEQ ID NO: 86451 - DNA, 25 bp, Probe Sequence
cctgtactcttaatcattacctgac

SEQ ID NO: 86452 - DNA, 25 bp, Probe Sequence
tactcttaatcattacctgacactg

SEQ ID NO: 86453 - DNA, 25 bp, Probe Sequence
tcctgtactcttaatcattacctga

SEQ ID NO: 86454 - DNA, 25 bp, Probe Sequence
tatacactggctggaatatacatag

SEQ ID NO: 86455 - DNA, 25 bp, Probe Sequence
attgcatatacactggctggaatat

SEQ ID NO: 86456 - DNA, 25 bp, Probe Sequence
atattgcatatacactggctggaat

SEQ ID NO: 86457 - DNA, 25 bp, Probe Sequence
tgcatatacactggctggaatatac

SEQ ID NO: 86458 - DNA, 25 bp, Probe Sequence
ttgcatatacactggctggaatata

SEQ ID NO: 86459 - DNA, 25 bp, Probe Sequence
atcctgtactcttaatcattacctg

SEQ ID NO: 86460 - DNA, 25 bp, Probe Sequence
gcatcttgaataagtggttctttgt

SEQ ID NO: 86461 - DNA, 25 bp, Probe Sequence
tattgcatatacactggctggaata

SEQ ID NO: 86462 - DNA, 25 bp, Probe Sequence
tgtgtaataatatgctgtgtgaccc

SEQ ID NO: 86463 - DNA, 25 bp, Probe Sequence
agcatcttgaataagtggttctttg

SEQ ID NO: 86464 - DNA, 25 bp, Probe Sequence
ccatcaaatcaaggacaaatcagac

SEQ ID NO: 86465 - DNA, 25 bp, Probe Sequence
catcaaatcaaggacaaatcagact

SEQ ID NO: 86466 - DNA, 25 bp, Probe Sequence
tcaaggacaaatcagactactttca

SEQ ID NO: 86467 - DNA, 25 bp, Probe Sequence
caaatcaaggacaaatcagactact

SEQ ID NO: 86468 - DNA, 25 bp, Probe Sequence
tcaaatcaaggacaaatcagactac

SEQ ID NO: 86469 - DNA, 25 bp, Probe Sequence
agtttacaatggaaataacggacac

SEQ ID NO: 86470 - DNA, 25 bp, Probe Sequence
aactagaatgtgtaagaaactccca

SEQ ID NO: 86471 - DNA, 25 bp, Probe Sequence
caaggacaaatcagactactttcat

SEQ ID NO: 86472 - DNA, 25 bp, Probe Sequence
aagtttacaatggaaataacggaca

SEQ ID NO: 86473 - DNA, 25 bp, Probe Sequence
gtaagaaactcccacaaaccaatga

SEQ ID NO: 86474 - DNA, 25 bp, Probe Sequence
gtttacaatggaaataacggacacg

SEQ ID NO: 86475 - DNA, 25 bp, Probe Sequence
atcaaggacaaatcagactactttc

SEQ ID NO: 86476 - DNA, 25 bp, Probe Sequence
gaactagaatgtgtaagaaactccc

SEQ ID NO: 86477 - DNA, 25 bp, Probe Sequence
ttgagaaatgacagaatgagagaaa

SEQ ID NO: 86478 - DNA, 25 bp, Probe Sequence
aggacaaatcagactactttcattg

SEQ ID NO: 86479 - DNA, 25 bp, Probe Sequence
ggacaaatcagactactttcattga

SEQ ID NO: 86480 - DNA, 25 bp, Probe Sequence
tgagaaatgacagaatgagagaaat

SEQ ID NO: 86481 - DNA, 25 bp, Probe Sequence
attgagaaatgacagaatgagagaa

SEQ ID NO: 86482 - DNA, 25 bp, Probe Sequence
atcaaatcaaggacaaatcagacta

SEQ ID NO: 86483 - DNA, 25 bp, Probe Sequence
aaggacaaatcagactactttcatt

SEQ ID NO: 86484 - DNA, 25 bp, Probe Sequence
aatcaaggacaaatcagactacttt

SEQ ID NO: 86485 - DNA, 25 bp, Probe Sequence
aaatcaaggacaaatcagactactt

SEQ ID NO: 86486 - DNA, 25 bp, Probe Sequence
aagaccaatttgtaggacacatttg

SEQ ID NO: 86487 - DNA, 25 bp, Probe Sequence
tgaactagaatgtgtaagaaactcc

SEQ ID NO: 86488 - DNA, 25 bp, Probe Sequence
gagagacgactgatttccttagatg

SEQ ID NO: 86489 - DNA, 25 bp, Probe Sequence
agagagacgactgatttccttagat

SEQ ID NO: 86490 - DNA, 25 bp, Probe Sequence
aatcggtcttgatcttacaggacat

SEQ ID NO: 86491 - DNA, 25 bp, Probe Sequence
aaagagagacgactgatttccttag

SEQ ID NO: 86492 - DNA, 25 bp, Probe Sequence
atctttctgctctaagtagtggatg

SEQ ID NO: 86493 - DNA, 25 bp, Probe Sequence
agagacgactgatttccttagatgt

SEQ ID NO: 86494 - DNA, 25 bp, Probe Sequence
aagagagacgactgatttccttaga

SEQ ID NO: 86495 - DNA, 25 bp, Probe Sequence
atcggtcttgatcttacaggacatc

SEQ ID NO: 86496 - DNA, 25 bp, Probe Sequence
gatttccttagatgtctcaagtagc

SEQ ID NO: 86497 - DNA, 25 bp, Probe Sequence
tttctgggtcattaacaagtggaag

SEQ ID NO: 86498 - DNA, 25 bp, Probe Sequence
cggtcttgatcttacaggacatctt

SEQ ID NO: 86499 - DNA, 25 bp, Probe Sequence
actgatttccttagatgtctcaagt

SEQ ID NO: 86500 - DNA, 25 bp, Probe Sequence
catatctttctgctctaagtagtgg

SEQ ID NO: 86501 - DNA, 25 bp, Probe Sequence
gtattcacaccaatcggtcttgatc

SEQ ID NO: 86502 - DNA, 25 bp, Probe Sequence
agtattcacaccaatcggtcttgat

SEQ ID NO: 86503 - DNA, 25 bp, Probe Sequence
tctttctgctctaagtagtggatgg

SEQ ID NO: 86504 - DNA, 25 bp, Probe Sequence
tatctttctgctctaagtagtggat

SEQ ID NO: 86505 - DNA, 25 bp, Probe Sequence
atatctttctgctctaagtagtgga

SEQ ID NO: 86506 - DNA, 25 bp, Probe Sequence
gtttctgggtcattaacaagtggaa

SEQ ID NO: 86507 - DNA, 25 bp, Probe Sequence
caatcggtcttgatcttacaggaca

SEQ ID NO: 86508 - DNA, 25 bp, Probe Sequence
tattcacaccaatcggtcttgatct

SEQ ID NO: 86509 - DNA, 25 bp, Probe Sequence
ttcacaccaatcggtcttgatctta

SEQ ID NO: 86510 - DNA, 25 bp, Probe Sequence
ttcagtattcacaccaatcggtctt

SEQ ID NO: 86511 - DNA, 25 bp, Probe Sequence
cgactgatttccttagatgtctcaa

SEQ ID NO: 86512 - DNA, 25 bp, Probe Sequence
aagagcaggaacttctgtgtatatc

SEQ ID NO: 86513 - DNA, 25 bp, Probe Sequence
gcaggaacttctgtgtatatctgaa

SEQ ID NO: 86514 - DNA, 25 bp, Probe Sequence
gagcaggaacttctgtgtatatctg

SEQ ID NO: 86515 - DNA, 25 bp, Probe Sequence
agagcaggaacttctgtgtatatct

SEQ ID NO: 86516 - DNA, 25 bp, Probe Sequence
taggacttctactggcagacatcta

SEQ ID NO: 86517 - DNA, 25 bp, Probe Sequence
ataatgccagtacagacttaggact

SEQ ID NO: 86518 - DNA, 25 bp, Probe Sequence
cataatgccagtacagacttaggac

SEQ ID NO: 86519 - DNA, 25 bp, Probe Sequence
taatgccagtacagacttaggactt

SEQ ID NO: 86520 - DNA, 25 bp, Probe Sequence
agcaggaacttctgtgtatatctga

SEQ ID NO: 86521 - DNA, 25 bp, Probe Sequence
cttaggacttctactggcagacatc

SEQ ID NO: 86522 - DNA, 25 bp, Probe Sequence
ttaggacttctactggcagacatct

SEQ ID NO: 86523 - DNA, 25 bp, Probe Sequence
gccagtacagacttaggacttctac

SEQ ID NO: 86524 - DNA, 25 bp, Probe Sequence
agtacagacttaggacttctactgg

SEQ ID NO: 86525 - DNA, 25 bp, Probe Sequence
ccagtacagacttaggacttctact

SEQ ID NO: 86526 - DNA, 25 bp, Probe Sequence
aatgccagtacagacttaggacttc

SEQ ID NO: 86527 - DNA, 25 bp, Probe Sequence
tacagacttaggacttctactggca

SEQ ID NO: 86528 - DNA, 25 bp, Probe Sequence
tgccagtacagacttaggacttcta

SEQ ID NO: 86529 - DNA, 25 bp, Probe Sequence
acttaggacttctactggcagacat

SEQ ID NO: 86530 - DNA, 25 bp, Probe Sequence
gtacagacttaggacttctactggc

SEQ ID NO: 86531 - DNA, 25 bp, Probe Sequence
aggacttctactggcagacatctac

SEQ ID NO: 86532 - DNA, 25 bp, Probe Sequence
agacttaggacttctactggcagac

SEQ ID NO: 86533 - DNA, 25 bp, Probe Sequence
aatttctctgcctctagcctctatc

SEQ ID NO: 86534 - DNA, 25 bp, Probe Sequence
gaatttctctgcctctagcctctat

SEQ ID NO: 86535 - DNA, 25 bp, Probe Sequence
atgccagtacagacttaggacttct

SEQ ID NO: 86536 - DNA, 25 bp, Probe Sequence
ttactggaacctatgatctgaagag

SEQ ID NO: 86537 - DNA, 25 bp, Probe Sequence
attactggaacctatgatctgaaga

SEQ ID NO: 86538 - DNA, 25 bp, Probe Sequence
tactggaacctatgatctgaagagc

SEQ ID NO: 86539 - DNA, 25 bp, Probe Sequence
cattactggaacctatgatctgaag

SEQ ID NO: 86540 - DNA, 25 bp, Probe Sequence
ccattactggaacctatgatctgaa

SEQ ID NO: 86541 - DNA, 25 bp, Probe Sequence
tggatgacattaaagaagggttgag

SEQ ID NO: 86542 - DNA, 25 bp, Probe Sequence
ctggatgacattaaagaagggttga

SEQ ID NO: 86543 - DNA, 25 bp, Probe Sequence
aaccctttgtcttcttaatgattga

SEQ ID NO: 86544 - DNA, 25 bp, Probe Sequence
accctttgtcttcttaatgattgaa

SEQ ID NO: 86545 - DNA, 25 bp, Probe Sequence
ccctttgtcttcttaatgattgaac

SEQ ID NO: 86546 - DNA, 25 bp, Probe Sequence
gtttaacatccagcactgtaagaag

SEQ ID NO: 86547 - DNA, 25 bp, Probe Sequence
ggatgacattaaagaagggttgagc

SEQ ID NO: 86548 - DNA, 25 bp, Probe Sequence
aaaccctttgtcttcttaatgattg

SEQ ID NO: 86549 - DNA, 25 bp, Probe Sequence
aaggacaccgtagtaagaggacttc

SEQ ID NO: 86550 - DNA, 25 bp, Probe Sequence
tttaacatccagcactgtaagaagc

SEQ ID NO: 86551 - DNA, 25 bp, Probe Sequence
caaggacaccgtagtaagaggactt

SEQ ID NO: 86552 - DNA, 25 bp, Probe Sequence
tgtttaacatccagcactgtaagaa

SEQ ID NO: 86553 - DNA, 25 bp, Probe Sequence
gatgacattaaagaagggttgagct

SEQ ID NO: 86554 - DNA, 25 bp, Probe Sequence
atgacattaaagaagggttgagctg

SEQ ID NO: 86555 - DNA, 25 bp, Probe Sequence
cctggatgacattaaagaagggttg

SEQ ID NO: 86556 - DNA, 25 bp, Probe Sequence
gaacctatgatctgaagagcgtcct

SEQ ID NO: 86557 - DNA, 25 bp, Probe Sequence
ccctccctggatgacattaaagaag

SEQ ID NO: 86558 - DNA, 25 bp, Probe Sequence
gcatcactaaggtcttcagcaatgg

SEQ ID NO: 86559 - DNA, 25 bp, Probe Sequence
ggcatcactaaggtcttcagcaatg

SEQ ID NO: 86560 - DNA, 25 bp, Probe Sequence
ttactggaacctatgatctgaagag

SEQ ID NO: 86561 - DNA, 25 bp, Probe Sequence
attactggaacctatgatctgaaga

SEQ ID NO: 86562 - DNA, 25 bp, Probe Sequence
tactggaacctatgatctgaagagc

SEQ ID NO: 86563 - DNA, 25 bp, Probe Sequence
cattactggaacctatgatctgaag

SEQ ID NO: 86564 - DNA, 25 bp, Probe Sequence
ccattactggaacctatgatctgaa

SEQ ID NO: 86565 - DNA, 25 bp, Probe Sequence
tggatgacattaaagaagggttgag

SEQ ID NO: 86566 - DNA, 25 bp, Probe Sequence
ctggatgacattaaagaagggttga

SEQ ID NO: 86567 - DNA, 25 bp, Probe Sequence
aaccctttgtcttcttaatgattga

SEQ ID NO: 86568 - DNA, 25 bp, Probe Sequence
accctttgtcttcttaatgattgaa

SEQ ID NO: 86569 - DNA, 25 bp, Probe Sequence
ccctttgtcttcttaatgattgaac

SEQ ID NO: 86570 - DNA, 25 bp, Probe Sequence
gtttaacatccagcactgtaagaag

SEQ ID NO: 86571 - DNA, 25 bp, Probe Sequence
ggatgacattaaagaagggttgagc

SEQ ID NO: 86572 - DNA, 25 bp, Probe Sequence
aaaccctttgtcttcttaatgattg

SEQ ID NO: 86573 - DNA, 25 bp, Probe Sequence
aaggacaccgtagtaagaggacttc

SEQ ID NO: 86574 - DNA, 25 bp, Probe Sequence
tttaacatccagcactgtaagaagc

SEQ ID NO: 86575 - DNA, 25 bp, Probe Sequence
caaggacaccgtagtaagaggactt

SEQ ID NO: 86576 - DNA, 25 bp, Probe Sequence
tgtttaacatccagcactgtaagaa

SEQ ID NO: 86577 - DNA, 25 bp, Probe Sequence
gatgacattaaagaagggttgagct

SEQ ID NO: 86578 - DNA, 25 bp, Probe Sequence
atgacattaaagaagggttgagctg

SEQ ID NO: 86579 - DNA, 25 bp, Probe Sequence
cctggatgacattaaagaagggttg

SEQ ID NO: 86580 - DNA, 25 bp, Probe Sequence
gaacctatgatctgaagagcgtcct

SEQ ID NO: 86581 - DNA, 25 bp, Probe Sequence
ccctccctggatgacattaaagaag

SEQ ID NO: 86582 - DNA, 25 bp, Probe Sequence
gcatcactaaggtcttcagcaatgg

SEQ ID NO: 86583 - DNA, 25 bp, Probe Sequence
ggcatcactaaggtcttcagcaatg

SEQ ID NO: 86584 - DNA, 25 bp, Probe Sequence
ccacatacacctattaccaccatat

SEQ ID NO: 86585 - DNA, 25 bp, Probe Sequence
accacatacacctattaccaccata

SEQ ID NO: 86586 - DNA, 25 bp, Probe Sequence
aacgatggtgaatgatatgttatgt

SEQ ID NO: 86587 - DNA, 25 bp, Probe Sequence
caacgatggtgaatgatatgttatg

SEQ ID NO: 86588 - DNA, 25 bp, Probe Sequence
cacatacacctattaccaccatatt

SEQ ID NO: 86589 - DNA, 25 bp, Probe Sequence
caccacatacacctattaccaccat

SEQ ID NO: 86590 - DNA, 25 bp, Probe Sequence
acgatggtgaatgatatgttatgta

SEQ ID NO: 86591 - DNA, 25 bp, Probe Sequence
acaacgatggtgaatgatatgttat

SEQ ID NO: 86592 - DNA, 25 bp, Probe Sequence
tgacgcaatatataatctcagagga

SEQ ID NO: 86593 - DNA, 25 bp, Probe Sequence
gtgacgcaatatataatctcagagg

SEQ ID NO: 86594 - DNA, 25 bp, Probe Sequence
acgcaatatataatctcagaggagt

SEQ ID NO: 86595 - DNA, 25 bp, Probe Sequence
cgcaatatataatctcagaggagtg

SEQ ID NO: 86596 - DNA, 25 bp, Probe Sequence
gaccaccacatacacctattaccac

SEQ ID NO: 86597 - DNA, 25 bp, Probe Sequence
agtggtctagtgacgcaatatataa

SEQ ID NO: 86598 - DNA, 25 bp, Probe Sequence
atagtggtctagtgacgcaatatat

SEQ ID NO: 86599 - DNA, 25 bp, Probe Sequence
tatagtggtctagtgacgcaatata

SEQ ID NO: 86600 - DNA, 25 bp, Probe Sequence
gacgcaatatataatctcagaggag

SEQ ID NO: 86601 - DNA, 25 bp, Probe Sequence
cgatggtgaatgatatgttatgtac

SEQ ID NO: 86602 - DNA, 25 bp, Probe Sequence
gcaatatataatctcagaggagtgg

SEQ ID NO: 86603 - DNA, 25 bp, Probe Sequence
agtttctgcttgatttctttgtgag

SEQ ID NO: 86604 - DNA, 25 bp, Probe Sequence
gagtttctgcttgatttctttgtga

SEQ ID NO: 86605 - DNA, 25 bp, Probe Sequence
cgtgtctgttaagcaaatgttatct

SEQ ID NO: 86606 - DNA, 25 bp, Probe Sequence
agtgacgcaatatataatctcagag

SEQ ID NO: 86607 - DNA, 25 bp, Probe Sequence
aaataccgtgtctgttaagcaaatg

SEQ ID NO: 86608 - DNA, 25 bp, Probe Sequence
acgaatagcagataatgatgactag

SEQ ID NO: 86609 - DNA, 25 bp, Probe Sequence
aacgaatagcagataatgatgacta

SEQ ID NO: 86610 - DNA, 25 bp, Probe Sequence
aatgcctaagagtgaaagtagttct

SEQ ID NO: 86611 - DNA, 25 bp, Probe Sequence
acaaacgaatagcagataatgatga

SEQ ID NO: 86612 - DNA, 25 bp, Probe Sequence
tcagttaatgcctaagagtgaaagt

SEQ ID NO: 86613 - DNA, 25 bp, Probe Sequence
caaacgaatagcagataatgatgac

SEQ ID NO: 86614 - DNA, 25 bp, Probe Sequence
gttaatgcctaagagtgaaagtagt

SEQ ID NO: 86615 - DNA, 25 bp, Probe Sequence
cagttaatgcctaagagtgaaagta

SEQ ID NO: 86616 - DNA, 25 bp, Probe Sequence
tgcctaagagtgaaagtagttctat

SEQ ID NO: 86617 - DNA, 25 bp, Probe Sequence
atgcctaagagtgaaagtagttcta

SEQ ID NO: 86618 - DNA, 25 bp, Probe Sequence
aaacgaatagcagataatgatgact

SEQ ID NO: 86619 - DNA, 25 bp, Probe Sequence
agttaatgcctaagagtgaaagtag

SEQ ID NO: 86620 - DNA, 25 bp, Probe Sequence
atcagttaatgcctaagagtgaaag

SEQ ID NO: 86621 - DNA, 25 bp, Probe Sequence
taatgcctaagagtgaaagtagttc

SEQ ID NO: 86622 - DNA, 25 bp, Probe Sequence
ttaatgcctaagagtgaaagtagtt

SEQ ID NO: 86623 - DNA, 25 bp, Probe Sequence
gcctaagagtgaaagtagttctatt

SEQ ID NO: 86624 - DNA, 25 bp, Probe Sequence
gatcagttaatgcctaagagtgaaa

SEQ ID NO: 86625 - DNA, 25 bp, Probe Sequence
gtgaaagtagttctattgacattcc

SEQ ID NO: 86626 - DNA, 25 bp, Probe Sequence
tgaaagtagttctattgacattcct

SEQ ID NO: 86627 - DNA, 25 bp, Probe Sequence
tacaaacgaatagcagataatgatg

SEQ ID NO: 86628 - DNA, 25 bp, Probe Sequence
gcagataatgatgactagttcacac

SEQ ID NO: 86629 - DNA, 25 bp, Probe Sequence
aagagtgaaagtagttctattgaca

SEQ ID NO: 86630 - DNA, 25 bp, Probe Sequence
agcagataatgatgactagttcaca

SEQ ID NO: 86631 - DNA, 25 bp, Probe Sequence
agtgatcagttaatgcctaagagtg

SEQ ID NO: 86632 - DNA, 25 bp, Probe Sequence
ttcgcctgagatataagttgtactg

SEQ ID NO: 86633 - DNA, 25 bp, Probe Sequence
cctgagatataagttgtactgcgta

SEQ ID NO: 86634 - DNA, 25 bp, Probe Sequence
gagatataagttgtactgcgtatgc

SEQ ID NO: 86635 - DNA, 25 bp, Probe Sequence
atgagcaggaagattctgagacatt

SEQ ID NO: 86636 - DNA, 25 bp, Probe Sequence
aatgagcaggaagattctgagacat

SEQ ID NO: 86637 - DNA, 25 bp, Probe Sequence
tgagatataagttgtactgcgtatg

SEQ ID NO: 86638 - DNA, 25 bp, Probe Sequence
ctgagatataagttgtactgcgtat

SEQ ID NO: 86639 - DNA, 25 bp, Probe Sequence
gacatttcgcctgagatataagttg

SEQ ID NO: 86640 - DNA, 25 bp, Probe Sequence
agacatttcgcctgagatataagtt

SEQ ID NO: 86641 - DNA, 25 bp, Probe Sequence
gagacatttcgcctgagatataagt

SEQ ID NO: 86642 - DNA, 25 bp, Probe Sequence
tgagacatttcgcctgagatataag

SEQ ID NO: 86643 - DNA, 25 bp, Probe Sequence
ctgagacatttcgcctgagatataa

SEQ ID NO: 86644 - DNA, 25 bp, Probe Sequence
cttatggtagcgatgactgactgtg

SEQ ID NO: 86645 - DNA, 25 bp, Probe Sequence
tcgcctgagatataagttgtactgc

SEQ ID NO: 86646 - DNA, 25 bp, Probe Sequence
catttcgcctgagatataagttgta

SEQ ID NO: 86647 - DNA, 25 bp, Probe Sequence
tctgagacatttcgcctgagatata

SEQ ID NO: 86648 - DNA, 25 bp, Probe Sequence
gcctgagatataagttgtactgcgt

SEQ ID NO: 86649 - DNA, 25 bp, Probe Sequence
caatgagcaggaagattctgagaca

SEQ ID NO: 86650 - DNA, 25 bp, Probe Sequence
acatttcgcctgagatataagttgt

SEQ ID NO: 86651 - DNA, 25 bp, Probe Sequence
ttctgagacatttcgcctgagatat

SEQ ID NO: 86652 - DNA, 25 bp, Probe Sequence
attctgagacatttcgcctgagata

SEQ ID NO: 86653 - DNA, 25 bp, Probe Sequence
atttcgcctgagatataagttgtac

SEQ ID NO: 86654 - DNA, 25 bp, Probe Sequence
tttcgcctgagatataagttgtact

SEQ ID NO: 86655 - DNA, 25 bp, Probe Sequence
ttctgtccaatgagcaggaagattc

SEQ ID NO: 86656 - DNA, 25 bp, Probe Sequence
ttcgcctgagatataagttgtactg

SEQ ID NO: 86657 - DNA, 25 bp, Probe Sequence
cctgagatataagttgtactgcgta

SEQ ID NO: 86658 - DNA, 25 bp, Probe Sequence
gagatataagttgtactgcgtatgc

SEQ ID NO: 86659 - DNA, 25 bp, Probe Sequence
atgagcaggaagattctgagacatt

SEQ ID NO: 86660 - DNA, 25 bp, Probe Sequence
aatgagcaggaagattctgagacat

SEQ ID NO: 86661 - DNA, 25 bp, Probe Sequence
tgagatataagttgtactgcgtatg

SEQ ID NO: 86662 - DNA, 25 bp, Probe Sequence
ctgagatataagttgtactgcgtat

SEQ ID NO: 86663 - DNA, 25 bp, Probe Sequence
gacatttcgcctgagatataagttg

SEQ ID NO: 86664 - DNA, 25 bp, Probe Sequence
agacatttcgcctgagatataagtt

SEQ ID NO: 86665 - DNA, 25 bp, Probe Sequence
gagacatttcgcctgagatataagt

SEQ ID NO: 86666 - DNA, 25 bp, Probe Sequence
tgagacatttcgcctgagatataag

SEQ ID NO: 86667 - DNA, 25 bp, Probe Sequence
ctgagacatttcgcctgagatataa

SEQ ID NO: 86668 - DNA, 25 bp, Probe Sequence
cttatggtagcgatgactgactgtg

SEQ ID NO: 86669 - DNA, 25 bp, Probe Sequence
tcgcctgagatataagttgtactgc

SEQ ID NO: 86670 - DNA, 25 bp, Probe Sequence
catttcgcctgagatataagttgta

SEQ ID NO: 86671 - DNA, 25 bp, Probe Sequence
tctgagacatttcgcctgagatata

SEQ ID NO: 86672 - DNA, 25 bp, Probe Sequence
gcctgagatataagttgtactgcgt

SEQ ID NO: 86673 - DNA, 25 bp, Probe Sequence
caatgagcaggaagattctgagaca

SEQ ID NO: 86674 - DNA, 25 bp, Probe Sequence
acatttcgcctgagatataagttgt

SEQ ID NO: 86675 - DNA, 25 bp, Probe Sequence
ttctgagacatttcgcctgagatat

SEQ ID NO: 86676 - DNA, 25 bp, Probe Sequence
attctgagacatttcgcctgagata

SEQ ID NO: 86677 - DNA, 25 bp, Probe Sequence
atttcgcctgagatataagttgtac

SEQ ID NO: 86678 - DNA, 25 bp, Probe Sequence
tttcgcctgagatataagttgtact

SEQ ID NO: 86679 - DNA, 25 bp, Probe Sequence
ttctgtccaatgagcaggaagattc

SEQ ID NO: 86680 - DNA, 25 bp, Probe Sequence
gcactcattatattcctcctcacag

SEQ ID NO: 86681 - DNA, 25 bp, Probe Sequence
cactcattatattcctcctcacagt

SEQ ID NO: 86682 - DNA, 25 bp, Probe Sequence
ggcactcattatattcctcctcaca

SEQ ID NO: 86683 - DNA, 25 bp, Probe Sequence
tcattatattcctcctcacagtaga

SEQ ID NO: 86684 - DNA, 25 bp, Probe Sequence
ctcattatattcctcctcacagtag

SEQ ID NO: 86685 - DNA, 25 bp, Probe Sequence
actcattatattcctcctcacagta

SEQ ID NO: 86686 - DNA, 25 bp, Probe Sequence
aggcactcattatattcctcctcac

SEQ ID NO: 86687 - DNA, 25 bp, Probe Sequence
cattatattcctcctcacagtagag

SEQ ID NO: 86688 - DNA, 25 bp, Probe Sequence
atttatgtcaatgtcgcactcttca

SEQ ID NO: 86689 - DNA, 25 bp, Probe Sequence
cacacacactcatagccattaacga

SEQ ID NO: 86690 - DNA, 25 bp, Probe Sequence
acacacactcatagccattaacgag

SEQ ID NO: 86691 - DNA, 25 bp, Probe Sequence
ttatgtcaatgtcgcactcttcacc

SEQ ID NO: 86692 - DNA, 25 bp, Probe Sequence
tttatgtcaatgtcgcactcttcac

SEQ ID NO: 86693 - DNA, 25 bp, Probe Sequence
gagcggagaggcactcattatattc

SEQ ID NO: 86694 - DNA, 25 bp, Probe Sequence
cacactcatagccattaacgaggtc

SEQ ID NO: 86695 - DNA, 25 bp, Probe Sequence
cacacactcatagccattaacgagg

SEQ ID NO: 86696 - DNA, 25 bp, Probe Sequence
tcacaagcagatccgaagtatcctt

SEQ ID NO: 86697 - DNA, 25 bp, Probe Sequence
ttcacaagcagatccgaagtatcct

SEQ ID NO: 86698 - DNA, 25 bp, Probe Sequence
tatgtcaatgtcgcactcttcacct

SEQ ID NO: 86699 - DNA, 25 bp, Probe Sequence
acacactcatagccattaacgaggt

SEQ ID NO: 86700 - DNA, 25 bp, Probe Sequence
caattcacagtgtgttcctttgtat

SEQ ID NO: 86701 - DNA, 25 bp, Probe Sequence
tcaatgtcgcactcttcacctgtaa

SEQ ID NO: 86702 - DNA, 25 bp, Probe Sequence
attcatttatgtcaatgtcgcactc

SEQ ID NO: 86703 - DNA, 25 bp, Probe Sequence
attcacagtgtgttcctttgtattc

SEQ ID NO: 86704 - DNA, 25 bp, Probe Sequence
caactgtctgctaagattggtactg

SEQ ID NO: 86705 - DNA, 25 bp, Probe Sequence
agccctgtcaaataatcctttagaa

SEQ ID NO: 86706 - DNA, 25 bp, Probe Sequence
tgtcaaataatcctttagaaacccg

SEQ ID NO: 86707 - DNA, 25 bp, Probe Sequence
gccctgtcaaataatcctttagaaa

SEQ ID NO: 86708 - DNA, 25 bp, Probe Sequence
gtcaaataatcctttagaaacccga

SEQ ID NO: 86709 - DNA, 25 bp, Probe Sequence
aagccctgtcaaataatcctttaga

SEQ ID NO: 86710 - DNA, 25 bp, Probe Sequence
aaataatcctttagaaacccgatgg

SEQ ID NO: 86711 - DNA, 25 bp, Probe Sequence
taagccctgtcaaataatcctttag

SEQ ID NO: 86712 - DNA, 25 bp, Probe Sequence
ctaagccctgtcaaataatccttta

SEQ ID NO: 86713 - DNA, 25 bp, Probe Sequence
caaataatcctttagaaacccgatg

SEQ ID NO: 86714 - DNA, 25 bp, Probe Sequence
tcaaataatcctttagaaacccgat

SEQ ID NO: 86715 - DNA, 25 bp, Probe Sequence
aactgtctgctaagattggtactgc

SEQ ID NO: 86716 - DNA, 25 bp, Probe Sequence
gctaagccctgtcaaataatccttt

SEQ ID NO: 86717 - DNA, 25 bp, Probe Sequence
attgtgctaagccctgtcaaataat

SEQ ID NO: 86718 - DNA, 25 bp, Probe Sequence
ctgtcaaataatcctttagaaaccc

SEQ ID NO: 86719 - DNA, 25 bp, Probe Sequence
cctgtcaaataatcctttagaaacc

SEQ ID NO: 86720 - DNA, 25 bp, Probe Sequence
ccctgtcaaataatcctttagaaac

SEQ ID NO: 86721 - DNA, 25 bp, Probe Sequence
ttgtgctaagccctgtcaaataatc

SEQ ID NO: 86722 - DNA, 25 bp, Probe Sequence
gattgtgctaagccctgtcaaataa

SEQ ID NO: 86723 - DNA, 25 bp, Probe Sequence
aatcctttagaaacccgatggtaat

SEQ ID NO: 86724 - DNA, 25 bp, Probe Sequence
aataatcctttagaaacccgatggt

SEQ ID NO: 86725 - DNA, 25 bp, Probe Sequence
atcctttagaaacccgatggtaatc

SEQ ID NO: 86726 - DNA, 25 bp, Probe Sequence
tttagaaacccgatggtaatcaatg

SEQ ID NO: 86727 - DNA, 25 bp, Probe Sequence
taatcctttagaaacccgatggtaa

SEQ ID NO: 86728 - DNA, 25 bp, Probe Sequence
taatctcattcattcagcatcctca

SEQ ID NO: 86729 - DNA, 25 bp, Probe Sequence
actaatctcattcattcagcatcct

SEQ ID NO: 86730 - DNA, 25 bp, Probe Sequence
atctcattcattcagcatcctcatt

SEQ ID NO: 86731 - DNA, 25 bp, Probe Sequence
aatctcattcattcagcatcctcat

SEQ ID NO: 86732 - DNA, 25 bp, Probe Sequence
ctaatctcattcattcagcatcctc

SEQ ID NO: 86733 - DNA, 25 bp, Probe Sequence
tctcattcattcagcatcctcattg

SEQ ID NO: 86734 - DNA, 25 bp, Probe Sequence
tactaatctcattcattcagcatcc

SEQ ID NO: 86735 - DNA, 25 bp, Probe Sequence
cctctgccttccaatattactaatc

SEQ ID NO: 86736 - DNA, 25 bp, Probe Sequence
ctgccttccaatattactaatctca

SEQ ID NO: 86737 - DNA, 25 bp, Probe Sequence
gaggagtgatatgatctgaattaca

SEQ ID NO: 86738 - DNA, 25 bp, Probe Sequence
ggtggtcagggaaatcttctataag

SEQ ID NO: 86739 - DNA, 25 bp, Probe Sequence
taaatagggtggtcagggaaatctt

SEQ ID NO: 86740 - DNA, 25 bp, Probe Sequence
ttactaatctcattcattcagcatc

SEQ ID NO: 86741 - DNA, 25 bp, Probe Sequence
tctgccttccaatattactaatctc

SEQ ID NO: 86742 - DNA, 25 bp, Probe Sequence
ctctgccttccaatattactaatct

SEQ ID NO: 86743 - DNA, 25 bp, Probe Sequence
ttaaatagggtggtcagggaaatct

SEQ ID NO: 86744 - DNA, 25 bp, Probe Sequence
agaggagtgatatgatctgaattac

SEQ ID NO: 86745 - DNA, 25 bp, Probe Sequence
gggtggtcagggaaatcttctataa

SEQ ID NO: 86746 - DNA, 25 bp, Probe Sequence
tgccttccaatattactaatctcat

SEQ ID NO: 86747 - DNA, 25 bp, Probe Sequence
aggagtgatatgatctgaattacat

SEQ ID NO: 86748 - DNA, 25 bp, Probe Sequence
tttgagcagaggagtgatatgatct

SEQ ID NO: 86749 - DNA, 25 bp, Probe Sequence
ccctctgccttccaatattactaat

SEQ ID NO: 86750 - DNA, 25 bp, Probe Sequence
atccctctgccttccaatattacta

SEQ ID NO: 86751 - DNA, 25 bp, Probe Sequence
tccctctgccttccaatattactaa

SEQ ID NO: 86752 - DNA, 25 bp, Probe Sequence
gagatcacctcacatccattaagat

SEQ ID NO: 86753 - DNA, 25 bp, Probe Sequence
aagagatcacctcacatccattaag

SEQ ID NO: 86754 - DNA, 25 bp, Probe Sequence
attaagagatcacctcacatccatt

SEQ ID NO: 86755 - DNA, 25 bp, Probe Sequence
agagatcacctcacatccattaaga

SEQ ID NO: 86756 - DNA, 25 bp, Probe Sequence
taagagatcacctcacatccattaa

SEQ ID NO: 86757 - DNA, 25 bp, Probe Sequence
ttaagagatcacctcacatccatta

SEQ ID NO: 86758 - DNA, 25 bp, Probe Sequence
tattaagagatcacctcacatccat

SEQ ID NO: 86759 - DNA, 25 bp, Probe Sequence
atattaagagatcacctcacatcca

SEQ ID NO: 86760 - DNA, 25 bp, Probe Sequence
ttaagagagtgagtgtgtgtgtgtg

SEQ ID NO: 86761 - DNA, 25 bp, Probe Sequence
cagagtgaaatgacaacctacaaag

SEQ ID NO: 86762 - DNA, 25 bp, Probe Sequence
gagtgaaatgacaacctacaaagtg

SEQ ID NO: 86763 - DNA, 25 bp, Probe Sequence
agagtgaaatgacaacctacaaagt

SEQ ID NO: 86764 - DNA, 25 bp, Probe Sequence
acagagtgaaatgacaacctacaaa

SEQ ID NO: 86765 - DNA, 25 bp, Probe Sequence
taccaataccacccatataggcaaa

SEQ ID NO: 86766 - DNA, 25 bp, Probe Sequence
agtgaaatgacaacctacaaagtgg

SEQ ID NO: 86767 - DNA, 25 bp, Probe Sequence
gaaatgacaacctacaaagtgggag

SEQ ID NO: 86768 - DNA, 25 bp, Probe Sequence
cgaagagcataatccacagagtgaa

SEQ ID NO: 86769 - DNA, 25 bp, Probe Sequence
atgacaacctacaaagtgggagaaa

SEQ ID NO: 86770 - DNA, 25 bp, Probe Sequence
aatgacaacctacaaagtgggagaa

SEQ ID NO: 86771 - DNA, 25 bp, Probe Sequence
aaatgacaacctacaaagtgggaga

SEQ ID NO: 86772 - DNA, 25 bp, Probe Sequence
catcgaagagcataatccacagagt

SEQ ID NO: 86773 - DNA, 25 bp, Probe Sequence
tttaagagagtgagtgtgtgtgtgt

SEQ ID NO: 86774 - DNA, 25 bp, Probe Sequence
taagagagtgagtgtgtgtgtgtgt

SEQ ID NO: 86775 - DNA, 25 bp, Probe Sequence
tatattaagagatcacctcacatcc

SEQ ID NO: 86776 - DNA, 25 bp, Probe Sequence
ccactgccttattattctgatgact

SEQ ID NO: 86777 - DNA, 25 bp, Probe Sequence
cactgccttattattctgatgactc

SEQ ID NO: 86778 - DNA, 25 bp, Probe Sequence
ctgaatgtatagtgtgagaggaagc

SEQ ID NO: 86779 - DNA, 25 bp, Probe Sequence
actcagagaagacaatggctatatg

SEQ ID NO: 86780 - DNA, 25 bp, Probe Sequence
aactcagagaagacaatggctatat

SEQ ID NO: 86781 - DNA, 25 bp, Probe Sequence
tgccttattattctgatgactcaca

SEQ ID NO: 86782 - DNA, 25 bp, Probe Sequence
actgccttattattctgatgactca

SEQ ID NO: 86783 - DNA, 25 bp, Probe Sequence
ctgccttattattctgatgactcac

SEQ ID NO: 86784 - DNA, 25 bp, Probe Sequence
gccactgccttattattctgatgac

SEQ ID NO: 86785 - DNA, 25 bp, Probe Sequence
agccactgccttattattctgatga

SEQ ID NO: 86786 - DNA, 25 bp, Probe Sequence
aattcattgctcttcaagatgtctg

SEQ ID NO: 86787 - DNA, 25 bp, Probe Sequence
ctcagagaagacaatggctatatgt

SEQ ID NO: 86788 - DNA, 25 bp, Probe Sequence
tctgacaatctcaatcactcctctt

SEQ ID NO: 86789 - DNA, 25 bp, Probe Sequence
attcattgctcttcaagatgtctgt

SEQ ID NO: 86790 - DNA, 25 bp, Probe Sequence
ctctgacaatctcaatcactcctct

SEQ ID NO: 86791 - DNA, 25 bp, Probe Sequence
gccttattattctgatgactcacag

SEQ ID NO: 86792 - DNA, 25 bp, Probe Sequence
tcagagaagacaatggctatatgta

SEQ ID NO: 86793 - DNA, 25 bp, Probe Sequence
cctgaatgtatagtgtgagaggaag

SEQ ID NO: 86794 - DNA, 25 bp, Probe Sequence
aactgaagccacctgaatgtatagt

SEQ ID NO: 86795 - DNA, 25 bp, Probe Sequence
gaagacaatggctatatgtactcct

SEQ ID NO: 86796 - DNA, 25 bp, Probe Sequence
agaagacaatggctatatgtactcc

SEQ ID NO: 86797 - DNA, 25 bp, Probe Sequence
acctgaatgtatagtgtgagaggaa

SEQ ID NO: 86798 - DNA, 25 bp, Probe Sequence
ttcattgctcttcaagatgtctgtg

SEQ ID NO: 86799 - DNA, 25 bp, Probe Sequence
aagacaatggctatatgtactcctt

SEQ ID NO: 86800 - DNA, 25 bp, Probe Sequence
agattggaggaatgtcagaactgaa

SEQ ID NO: 86801 - DNA, 25 bp, Probe Sequence
aagattggaggaatgtcagaactga

SEQ ID NO: 86802 - DNA, 25 bp, Probe Sequence
atgtcagtatgttattcttcagggc

SEQ ID NO: 86803 - DNA, 25 bp, Probe Sequence
tcagtatgttattcttcagggcatc

SEQ ID NO: 86804 - DNA, 25 bp, Probe Sequence
gtcagtatgttattcttcagggcat

SEQ ID NO: 86805 - DNA, 25 bp, Probe Sequence
tggctaatagtctcaaatgtgtatg

SEQ ID NO: 86806 - DNA, 25 bp, Probe Sequence
aaagattggaggaatgtcagaactg

SEQ ID NO: 86807 - DNA, 25 bp, Probe Sequence
gctacatagagtttggttaggtatc

SEQ ID NO: 86808 - DNA, 25 bp, Probe Sequence
ttaaagggcaacttatcgttccaaa

SEQ ID NO: 86809 - DNA, 25 bp, Probe Sequence
caaagattggaggaatgtcagaact

SEQ ID NO: 86810 - DNA, 25 bp, Probe Sequence
tgtcagtatgttattcttcagggca

SEQ ID NO: 86811 - DNA, 25 bp, Probe Sequence
aatctggctactcttcaaagacttt

SEQ ID NO: 86812 - DNA, 25 bp, Probe Sequence
ttatctgtcctgtgttatagtagtt

SEQ ID NO: 86813 - DNA, 25 bp, Probe Sequence
gaatctggctactcttcaaagactt

SEQ ID NO: 86814 - DNA, 25 bp, Probe Sequence
ggttggattcatgtttaagtggtag

SEQ ID NO: 86815 - DNA, 25 bp, Probe Sequence
aggttggattcatgtttaagtggta

SEQ ID NO: 86816 - DNA, 25 bp, Probe Sequence
aaaggttggattcatgtttaagtgg

SEQ ID NO: 86817 - DNA, 25 bp, Probe Sequence
cagtatgttattcttcagggcatcg

SEQ ID NO: 86818 - DNA, 25 bp, Probe Sequence
taaagggcaacttatcgttccaaag

SEQ ID NO: 86819 - DNA, 25 bp, Probe Sequence
aaggttggattcatgtttaagtggt

SEQ ID NO: 86820 - DNA, 25 bp, Probe Sequence
gtatgttattcttcagggcatcgtg

SEQ ID NO: 86821 - DNA, 25 bp, Probe Sequence
agtatgttattcttcagggcatcgt

SEQ ID NO: 86822 - DNA, 25 bp, Probe Sequence
cctatggctaatagtctcaaatgtg

SEQ ID NO: 86823 - DNA, 25 bp, Probe Sequence
gttggattcatgtttaagtggtaga

SEQ ID NO: 86824 - DNA, 25 bp, Probe Sequence
ggcaggaaatctacgtattagtcat

SEQ ID NO: 86825 - DNA, 25 bp, Probe Sequence
ggaaatctacgtattagtcatcgct

SEQ ID NO: 86826 - DNA, 25 bp, Probe Sequence
aggaaatctacgtattagtcatcgc

SEQ ID NO: 86827 - DNA, 25 bp, Probe Sequence
tactggcaggaaatctacgtattag

SEQ ID NO: 86828 - DNA, 25 bp, Probe Sequence
ctactggcaggaaatctacgtatta

SEQ ID NO: 86829 - DNA, 25 bp, Probe Sequence
gcaggaaatctacgtattagtcatc

SEQ ID NO: 86830 - DNA, 25 bp, Probe Sequence
ctggcaggaaatctacgtattagtc

SEQ ID NO: 86831 - DNA, 25 bp, Probe Sequence
caggaaatctacgtattagtcatcg

SEQ ID NO: 86832 - DNA, 25 bp, Probe Sequence
tctactggcaggaaatctacgtatt

SEQ ID NO: 86833 - DNA, 25 bp, Probe Sequence
tggcaggaaatctacgtattagtca

SEQ ID NO: 86834 - DNA, 25 bp, Probe Sequence
ttctactggcaggaaatctacgtat

SEQ ID NO: 86835 - DNA, 25 bp, Probe Sequence
gaaatctacgtattagtcatcgcta

SEQ ID NO: 86836 - DNA, 25 bp, Probe Sequence
cttctactggcaggaaatctacgta

SEQ ID NO: 86837 - DNA, 25 bp, Probe Sequence
actggcaggaaatctacgtattagt

SEQ ID NO: 86838 - DNA, 25 bp, Probe Sequence
gataaaagaaattttgcctgccatt

SEQ ID NO: 86839 - DNA, 25 bp, Probe Sequence
ggataaaagaaattttgcctgccat

SEQ ID NO: 86840 - DNA, 25 bp, Probe Sequence
taaaagaaattttgcctgccatttt

SEQ ID NO: 86841 - DNA, 25 bp, Probe Sequence
ataaaagaaattttgcctgccattt

SEQ ID NO: 86842 - DNA, 25 bp, Probe Sequence
gggataaaagaaattttgcctgcca

SEQ ID NO: 86843 - DNA, 25 bp, Probe Sequence
cgggataaaagaaattttgcctgcc

SEQ ID NO: 86844 - DNA, 25 bp, Probe Sequence
aaaagagtatgagtcttctgtaaaa

SEQ ID NO: 86845 - DNA, 25 bp, Probe Sequence
ccgggataaaagaaattttgcctgc

SEQ ID NO: 86846 - DNA, 25 bp, Probe Sequence
atcatctaaggtcaggagttcaaga

SEQ ID NO: 86847 - DNA, 25 bp, Probe Sequence
gatcatctaaggtcaggagttcaag

SEQ ID NO: 86848 - DNA, 25 bp, Probe Sequence
atctaaggtcaggagttcaagacta

SEQ ID NO: 86849 - DNA, 25 bp, Probe Sequence
ggatcatctaaggtcaggagttcaa

SEQ ID NO: 86850 - DNA, 25 bp, Probe Sequence
tctaaggtcaggagttcaagactag

SEQ ID NO: 86851 - DNA, 25 bp, Probe Sequence
catctaaggtcaggagttcaagact

SEQ ID NO: 86852 - DNA, 25 bp, Probe Sequence
tcatctaaggtcaggagttcaagac

SEQ ID NO: 86853 - DNA, 25 bp, Probe Sequence
ctaaggtcaggagttcaagactagc

SEQ ID NO: 86854 - DNA, 25 bp, Probe Sequence
ggttgggtagacatctaaatgacta

SEQ ID NO: 86855 - DNA, 25 bp, Probe Sequence
gagggttgggtagacatctaaatga

SEQ ID NO: 86856 - DNA, 25 bp, Probe Sequence
gggttgggtagacatctaaatgact

SEQ ID NO: 86857 - DNA, 25 bp, Probe Sequence
agggttgggtagacatctaaatgac

SEQ ID NO: 86858 - DNA, 25 bp, Probe Sequence
gttgggtagacatctaaatgactaa

SEQ ID NO: 86859 - DNA, 25 bp, Probe Sequence
cggatcatctaaggtcaggagttca

SEQ ID NO: 86860 - DNA, 25 bp, Probe Sequence
ctacagagcaagactccatctcaaa

SEQ ID NO: 86861 - DNA, 25 bp, Probe Sequence
ggagggttgggtagacatctaaatg

SEQ ID NO: 86862 - DNA, 25 bp, Probe Sequence
taaggtcaggagttcaagactagcc

SEQ ID NO: 86863 - DNA, 25 bp, Probe Sequence
ttgggtagacatctaaatgactaaa

SEQ ID NO: 86864 - DNA, 25 bp, Probe Sequence
tgggtagacatctaaatgactaaat

SEQ ID NO: 86865 - DNA, 25 bp, Probe Sequence
tagacatctaaatgactaaattggc

SEQ ID NO: 86866 - DNA, 25 bp, Probe Sequence
atctaaatgactaaattggccggtt

SEQ ID NO: 86867 - DNA, 25 bp, Probe Sequence
cggagggttgggtagacatctaaat

SEQ ID NO: 86868 - DNA, 25 bp, Probe Sequence
gacatctaaatgactaaattggccg

SEQ ID NO: 86869 - DNA, 25 bp, Probe Sequence
gcggatcatctaaggtcaggagttc

SEQ ID NO: 86870 - DNA, 25 bp, Probe Sequence
cagaatgctttccttttcagatgtg

SEQ ID NO: 86871 - DNA, 25 bp, Probe Sequence
agaatgctttccttttcagatgtgg

SEQ ID NO: 86872 - DNA, 25 bp, Probe Sequence
gagaggctggagctagatagagagg

SEQ ID NO: 86873 - DNA, 25 bp, Probe Sequence
gaggctggagctagatagagaggac

SEQ ID NO: 86874 - DNA, 25 bp, Probe Sequence
agaggctggagctagatagagagga

SEQ ID NO: 86875 - DNA, 25 bp, Probe Sequence
cgagaggctggagctagatagagag

SEQ ID NO: 86876 - DNA, 25 bp, Probe Sequence
gaatgctttccttttcagatgtggc

SEQ ID NO: 86877 - DNA, 25 bp, Probe Sequence
ctccacgtccaagaagtagttcacc

SEQ ID NO: 86878 - DNA, 25 bp, Probe Sequence
aatgctttccttttcagatgtggct

SEQ ID NO: 86879 - DNA, 25 bp, Probe Sequence
cagctccacgtccaagaagtagttc

SEQ ID NO: 86880 - DNA, 25 bp, Probe Sequence
caggtggatttcgacaaggtcattg

SEQ ID NO: 86881 - DNA, 25 bp, Probe Sequence
gcagaatgctttccttttcagatgt

SEQ ID NO: 86882 - DNA, 25 bp, Probe Sequence
acaggtggatttcgacaaggtcatt

SEQ ID NO: 86883 - DNA, 25 bp, Probe Sequence
tttcagatgtggctggtcatggaag

SEQ ID NO: 86884 - DNA, 25 bp, Probe Sequence
ctttccttttcagatgtggctggtc

SEQ ID NO: 86885 - DNA, 25 bp, Probe Sequence
atgctttccttttcagatgtggctg

SEQ ID NO: 86886 - DNA, 25 bp, Probe Sequence
gacaggtggatttcgacaaggtcat

SEQ ID NO: 86887 - DNA, 25 bp, Probe Sequence
ttccttttcagatgtggctggtcat

SEQ ID NO: 86888 - DNA, 25 bp, Probe Sequence
tttccttttcagatgtggctggtca

SEQ ID NO: 86889 - DNA, 25 bp, Probe Sequence
ggtggatttcgacaaggtcattgtg

SEQ ID NO: 86890 - DNA, 25 bp, Probe Sequence
aggtggatttcgacaaggtcattgt

SEQ ID NO: 86891 - DNA, 25 bp, Probe Sequence
tccaagaagtagttcaccccagcta

SEQ ID NO: 86892 - DNA, 25 bp, Probe Sequence
ttttcagatgtggctggtcatggaa

SEQ ID NO: 86893 - DNA, 25 bp, Probe Sequence
cgtagatctggaaagagcagaatgc

SEQ ID NO: 86894 - DNA, 25 bp, Probe Sequence
gtacaataaatacatctgtggggcg

SEQ ID NO: 86895 - DNA, 25 bp, Probe Sequence
tacaataaatacatctgtggggcgg

SEQ ID NO: 86896 - DNA, 25 bp, Probe Sequence
tgtacaataaatacatctgtggggc

SEQ ID NO: 86897 - DNA, 25 bp, Probe Sequence
acaataaatacatctgtggggcggg

SEQ ID NO: 86898 - DNA, 25 bp, Probe Sequence
cttttgacggtcaatgcggtaaatg

SEQ ID NO: 86899 - DNA, 25 bp, Probe Sequence
ccttttgacggtcaatgcggtaaat

SEQ ID NO: 86900 - DNA, 25 bp, Probe Sequence
ttttgacggtcaatgcggtaaatgg

SEQ ID NO: 86901 - DNA, 25 bp, Probe Sequence
tacccaaataagaaggaaccagaaa

SEQ ID NO: 86902 - DNA, 25 bp, Probe Sequence
ctacccaaataagaaggaaccagaa

SEQ ID NO: 86903 - DNA, 25 bp, Probe Sequence
tgacagagcctacccaaataagaag

SEQ ID NO: 86904 - DNA, 25 bp, Probe Sequence
ttgacagagcctacccaaataagaa

SEQ ID NO: 86905 - DNA, 25 bp, Probe Sequence
cctacccaaataagaaggaaccaga

SEQ ID NO: 86906 - DNA, 25 bp, Probe Sequence
agagcctacccaaataagaaggaac

SEQ ID NO: 86907 - DNA, 25 bp, Probe Sequence
cagagcctacccaaataagaaggaa

SEQ ID NO: 86908 - DNA, 25 bp, Probe Sequence
ataagaaggaaccagaaaaccaact

SEQ ID NO: 86909 - DNA, 25 bp, Probe Sequence
ccaaataagaaggaaccagaaaacc

SEQ ID NO: 86910 - DNA, 25 bp, Probe Sequence
cccaaataagaaggaaccagaaaac

SEQ ID NO: 86911 - DNA, 25 bp, Probe Sequence
aataagaaggaaccagaaaaccaac

SEQ ID NO: 86912 - DNA, 25 bp, Probe Sequence
caaataagaaggaaccagaaaacca

SEQ ID NO: 86913 - DNA, 25 bp, Probe Sequence
acccaaataagaaggaaccagaaaa

SEQ ID NO: 86914 - DNA, 25 bp, Probe Sequence
taagaaggaaccagaaaaccaactc

SEQ ID NO: 86915 - DNA, 25 bp, Probe Sequence
gacagagcctacccaaataagaagg

SEQ ID NO: 86916 - DNA, 25 bp, Probe Sequence
aaataagaaggaaccagaaaaccaa

SEQ ID NO: 86917 - DNA, 25 bp, Probe Sequence
tctagtaatatgacaaaacagcccc

SEQ ID NO: 86918 - DNA, 25 bp, Probe Sequence
gagcctacccaaataagaaggaacc

SEQ ID NO: 86919 - DNA, 25 bp, Probe Sequence
ctttgacagagcctacccaaataag

SEQ ID NO: 86920 - DNA, 25 bp, Probe Sequence
ctctagtaatatgacaaaacagccc

SEQ ID NO: 86921 - DNA, 25 bp, Probe Sequence
acagagcctacccaaataagaagga

SEQ ID NO: 86922 - DNA, 25 bp, Probe Sequence
ggaaccagaaaaccaactctagtaa

SEQ ID NO: 86923 - DNA, 25 bp, Probe Sequence
tttgacagagcctacccaaataaga

SEQ ID NO: 86924 - DNA, 25 bp, Probe Sequence
gcctacccaaataagaaggaaccag

SEQ ID NO: 86925 - DNA, 25 bp, Probe Sequence
tgtgttcctgtaggcataatatgag

SEQ ID NO: 86926 - DNA, 25 bp, Probe Sequence
ctgtgttcctgtaggcataatatga

SEQ ID NO: 86927 - DNA, 25 bp, Probe Sequence
cctgtgttccgtctccaataattaa

SEQ ID NO: 86928 - DNA, 25 bp, Probe Sequence
attaatcattcctgctccatagacg

SEQ ID NO: 86929 - DNA, 25 bp, Probe Sequence
gtgttccgtctccaataattaatca

SEQ ID NO: 86930 - DNA, 25 bp, Probe Sequence
tgtgttccgtctccaataattaatc

SEQ ID NO: 86931 - DNA, 25 bp, Probe Sequence
ctgtgttccgtctccaataattaat

SEQ ID NO: 86932 - DNA, 25 bp, Probe Sequence
ccaataattaatcattcctgctcca

SEQ ID NO: 86933 - DNA, 25 bp, Probe Sequence
gtgttcctgtaggcataatatgagg

SEQ ID NO: 86934 - DNA, 25 bp, Probe Sequence
ctgtaggcataatatgaggaggtgg

SEQ ID NO: 86935 - DNA, 25 bp, Probe Sequence
tccaataattaatcattcctgctcc

SEQ ID NO: 86936 - DNA, 25 bp, Probe Sequence
cctgtgttcctgtaggcataatatg

SEQ ID NO: 86937 - DNA, 25 bp, Probe Sequence
aattaatcattcctgctccatagac

SEQ ID NO: 86938 - DNA, 25 bp, Probe Sequence
ccgtctccaataattaatcattcct

SEQ ID NO: 86939 - DNA, 25 bp, Probe Sequence
tccgtctccaataattaatcattcc

SEQ ID NO: 86940 - DNA, 25 bp, Probe Sequence
acctgtgttccgtctccaataatta

SEQ ID NO: 86941 - DNA, 25 bp, Probe Sequence
tgttccgtctccaataattaatcat

SEQ ID NO: 86942 - DNA, 25 bp, Probe Sequence
gtctccaataattaatcattcctgc

SEQ ID NO: 86943 - DNA, 25 bp, Probe Sequence
tctccaataattaatcattcctgct

SEQ ID NO: 86944 - DNA, 25 bp, Probe Sequence
cctgtaggcataatatgaggaggtg

SEQ ID NO: 86945 - DNA, 25 bp, Probe Sequence
cgtctccaataattaatcattcctg

SEQ ID NO: 86946 - DNA, 25 bp, Probe Sequence
cgcaggaagaagaactcagatagag

SEQ ID NO: 86947 - DNA, 25 bp, Probe Sequence
ccatctctatctcaactttatgtgc

SEQ ID NO: 86948 - DNA, 25 bp, Probe Sequence
ctccaataattaatcattcctgctc

SEQ ID NO: 86949 - DNA, 25 bp, Probe Sequence
aggaatatgtatctgtatggtcact

SEQ ID NO: 86950 - DNA, 25 bp, Probe Sequence
gatgagtacattaaggaccagagag

SEQ ID NO: 86951 - DNA, 25 bp, Probe Sequence
agatgagtacattaaggaccagaga

SEQ ID NO: 86952 - DNA, 25 bp, Probe Sequence
gcagagtaatccaactgactaatct

SEQ ID NO: 86953 - DNA, 25 bp, Probe Sequence
atgagtacattaaggaccagagagg

SEQ ID NO: 86954 - DNA, 25 bp, Probe Sequence
tagatgagtacattaaggaccagag

SEQ ID NO: 86955 - DNA, 25 bp, Probe Sequence
ctagatgagtacattaaggaccaga

SEQ ID NO: 86956 - DNA, 25 bp, Probe Sequence
cactagatgagtacattaaggacca

SEQ ID NO: 86957 - DNA, 25 bp, Probe Sequence
tggtcactagatgagtacattaagg

SEQ ID NO: 86958 - DNA, 25 bp, Probe Sequence
actagatgagtacattaaggaccag

SEQ ID NO: 86959 - DNA, 25 bp, Probe Sequence
tcactagatgagtacattaaggacc

SEQ ID NO: 86960 - DNA, 25 bp, Probe Sequence
ggtcactagatgagtacattaagga

SEQ ID NO: 86961 - DNA, 25 bp, Probe Sequence
ggcagagtaatccaactgactaatc

SEQ ID NO: 86962 - DNA, 25 bp, Probe Sequence
agagtaatccaactgactaatcttg

SEQ ID NO: 86963 - DNA, 25 bp, Probe Sequence
taaggaccagagaggttgagtaatt

SEQ ID NO: 86964 - DNA, 25 bp, Probe Sequence
ttaaggaccagagaggttgagtaat

SEQ ID NO: 86965 - DNA, 25 bp, Probe Sequence
attaaggaccagagaggttgagtaa

SEQ ID NO: 86966 - DNA, 25 bp, Probe Sequence
cagagtaatccaactgactaatctt

SEQ ID NO: 86967 - DNA, 25 bp, Probe Sequence
ggaatatgtatctgtatggtcacta

SEQ ID NO: 86968 - DNA, 25 bp, Probe Sequence
taggaatatgtatctgtatggtcac

SEQ ID NO: 86969 - DNA, 25 bp, Probe Sequence
gtaggaatatgtatctgtatggtca

SEQ ID NO: 86970 - DNA, 25 bp, Probe Sequence
atgaagttgggattgatattaggct

SEQ ID NO: 86971 - DNA, 25 bp, Probe Sequence
gatgaagttgggattgatattaggc

SEQ ID NO: 86972 - DNA, 25 bp, Probe Sequence
ttgatacctatatctgtgctcgcaa

SEQ ID NO: 86973 - DNA, 25 bp, Probe Sequence
catattggttgaactcagtgaagtg

SEQ ID NO: 86974 - DNA, 25 bp, Probe Sequence
tcatattggttgaactcagtgaagt

SEQ ID NO: 86975 - DNA, 25 bp, Probe Sequence
gtcatattggttgaactcagtgaag

SEQ ID NO: 86976 - DNA, 25 bp, Probe Sequence
atgtcatattggttgaactcagtga

SEQ ID NO: 86977 - DNA, 25 bp, Probe Sequence
atattggttgaactcagtgaagtgt

SEQ ID NO: 86978 - DNA, 25 bp, Probe Sequence
tgtcatattggttgaactcagtgaa

SEQ ID NO: 86979 - DNA, 25 bp, Probe Sequence
attggttgaactcagtgaagtgtta

SEQ ID NO: 86980 - DNA, 25 bp, Probe Sequence
tattggttgaactcagtgaagtgtt

SEQ ID NO: 86981 - DNA, 25 bp, Probe Sequence
ttggttgaactcagtgaagtgttag

SEQ ID NO: 86982 - DNA, 25 bp, Probe Sequence
gttgaactcagtgaagtgttagcaa

SEQ ID NO: 86983 - DNA, 25 bp, Probe Sequence
catgtcatattggttgaactcagtg

SEQ ID NO: 86984 - DNA, 25 bp, Probe Sequence
gccattacaacttcataatcacatg

SEQ ID NO: 86985 - DNA, 25 bp, Probe Sequence
agtctgagggtatggtaaatgattg

SEQ ID NO: 86986 - DNA, 25 bp, Probe Sequence
ctgagggtatggtaaatgattggag

SEQ ID NO: 86987 - DNA, 25 bp, Probe Sequence
gggatggtttaatgtgtatgcctat

SEQ ID NO: 86988 - DNA, 25 bp, Probe Sequence
tctgagggtatggtaaatgattgga

SEQ ID NO: 86989 - DNA, 25 bp, Probe Sequence
gtctgagggtatggtaaatgattgg

SEQ ID NO: 86990 - DNA, 25 bp, Probe Sequence
cagtctgagggtatggtaaatgatt

SEQ ID NO: 86991 - DNA, 25 bp, Probe Sequence
tatttatctggcagtctgagggtat

SEQ ID NO: 86992 - DNA, 25 bp, Probe Sequence
ggatggtttaatgtgtatgcctatt

SEQ ID NO: 86993 - DNA, 25 bp, Probe Sequence
ttatttatctggcagtctgagggta

SEQ ID NO: 86994 - DNA, 25 bp, Probe Sequence
ctttatttatctggcagtctgaggg

SEQ ID NO: 86995 - DNA, 25 bp, Probe Sequence
ccctttatttatctggcagtctgag

SEQ ID NO: 86996 - DNA, 25 bp, Probe Sequence
tttatttatctggcagtctgagggt

SEQ ID NO: 86997 - DNA, 25 bp, Probe Sequence
tacttagaagagactgaccaccata

SEQ ID NO: 86998 - DNA, 25 bp, Probe Sequence
tatacttagaagagactgaccacca

SEQ ID NO: 86999 - DNA, 25 bp, Probe Sequence
atacttagaagagactgaccaccat

SEQ ID NO: 87000 - DNA, 25 bp, Probe Sequence
acttagaagagactgaccaccatac

SEQ ID NO: 87001 - DNA, 25 bp, Probe Sequence
atatacttagaagagactgaccacc

SEQ ID NO: 87002 - DNA, 25 bp, Probe Sequence
taggatggcaattctgacactctta

SEQ ID NO: 87003 - DNA, 25 bp, Probe Sequence
cttagaagagactgaccaccatacc

SEQ ID NO: 87004 - DNA, 25 bp, Probe Sequence
aggatggcaattctgacactcttaa

SEQ ID NO: 87005 - DNA, 25 bp, Probe Sequence
ttaggatggcaattctgacactctt

SEQ ID NO: 87006 - DNA, 25 bp, Probe Sequence
tagaagagactgaccaccataccaa

SEQ ID NO: 87007 - DNA, 25 bp, Probe Sequence
ttagaagagactgaccaccatacca

SEQ ID NO: 87008 - DNA, 25 bp, Probe Sequence
ccaaggagagtgttacaattaacct

SEQ ID NO: 87009 - DNA, 25 bp, Probe Sequence
aagttaggatggcaattctgacact

SEQ ID NO: 87010 - DNA, 25 bp, Probe Sequence
gttaggatggcaattctgacactct

SEQ ID NO: 87011 - DNA, 25 bp, Probe Sequence
aggagagtgttacaattaacctaga

SEQ ID NO: 87012 - DNA, 25 bp, Probe Sequence
agttaggatggcaattctgacactc

SEQ ID NO: 87013 - DNA, 25 bp, Probe Sequence
caaggagagtgttacaattaaccta

SEQ ID NO: 87014 - DNA, 25 bp, Probe Sequence
ctatgggaaagttaggatggcaatt

SEQ ID NO: 87015 - DNA, 25 bp, Probe Sequence
caatgctatgggaaagttaggatgg

SEQ ID NO: 87016 - DNA, 25 bp, Probe Sequence
tatgggaaagttaggatggcaattc

SEQ ID NO: 87017 - DNA, 25 bp, Probe Sequence
ggatggcaattctgacactcttaaa

SEQ ID NO: 87018 - DNA, 25 bp, Probe Sequence
ggagagtgttacaattaacctagaa

SEQ ID NO: 87019 - DNA, 25 bp, Probe Sequence
aaggagagtgttacaattaacctag

SEQ ID NO: 87020 - DNA, 25 bp, Probe Sequence
aaagttaggatggcaattctgacac

SEQ ID NO: 87021 - DNA, 25 bp, Probe Sequence
gaaggtagcagtaagccaagatcat

SEQ ID NO: 87022 - DNA, 25 bp, Probe Sequence
aagtagaaagaatagttcaggcagg

SEQ ID NO: 87023 - DNA, 25 bp, Probe Sequence
gaagtagaaagaatagttcaggcag

SEQ ID NO: 87024 - DNA, 25 bp, Probe Sequence
agctcataagagtctcaatggagtt

SEQ ID NO: 87025 - DNA, 25 bp, Probe Sequence
aaggtagcagtaagccaagatcatg

SEQ ID NO: 87026 - DNA, 25 bp, Probe Sequence
gctcataagagtctcaatggagttt

SEQ ID NO: 87027 - DNA, 25 bp, Probe Sequence
aactgctagtaagaaacaagagagg

SEQ ID NO: 87028 - DNA, 25 bp, Probe Sequence
aggaaactgctagtaagaaacaaga

SEQ ID NO: 87029 - DNA, 25 bp, Probe Sequence
ctgtgttaggaaactgctagtaaga

SEQ ID NO: 87030 - DNA, 25 bp, Probe Sequence
cagctcataagagtctcaatggagt

SEQ ID NO: 87031 - DNA, 25 bp, Probe Sequence
ggaaactgctagtaagaaacaagag

SEQ ID NO: 87032 - DNA, 25 bp, Probe Sequence
tgtgttaggaaactgctagtaagaa

SEQ ID NO: 87033 - DNA, 25 bp, Probe Sequence
agtagaaagaatagttcaggcaggg

SEQ ID NO: 87034 - DNA, 25 bp, Probe Sequence
tggtgaaattgataataaagagggt

SEQ ID NO: 87035 - DNA, 25 bp, Probe Sequence
aaactgctagtaagaaacaagagag

SEQ ID NO: 87036 - DNA, 25 bp, Probe Sequence
gaaactgctagtaagaaacaagaga

SEQ ID NO: 87037 - DNA, 25 bp, Probe Sequence
gttaggaaactgctagtaagaaaca

SEQ ID NO: 87038 - DNA, 25 bp, Probe Sequence
tgttaggaaactgctagtaagaaac

SEQ ID NO: 87039 - DNA, 25 bp, Probe Sequence
gtgttaggaaactgctagtaagaaa

SEQ ID NO: 87040 - DNA, 25 bp, Probe Sequence
tagaaagaatagttcaggcagggtg

SEQ ID NO: 87041 - DNA, 25 bp, Probe Sequence
gtagaaagaatagttcaggcagggt

SEQ ID NO: 87042 - DNA, 25 bp, Probe Sequence
taggaaactgctagtaagaaacaag

SEQ ID NO: 87043 - DNA, 25 bp, Probe Sequence
cctgtgttaggaaactgctagtaag

SEQ ID NO: 87044 - DNA, 25 bp, Probe Sequence
ttaggaaactgctagtaagaaacaa

SEQ ID NO: 87045 - DNA, 25 bp, Probe Sequence
taggaaaggaagaaaccattgagaa

SEQ ID NO: 87046 - DNA, 25 bp, Probe Sequence
ttaggaaaggaagaaaccattgaga

SEQ ID NO: 87047 - DNA, 25 bp, Probe Sequence
gcagacagagaattggagtgaagaa

SEQ ID NO: 87048 - DNA, 25 bp, Probe Sequence
gaaaggaagaaaccattgagaagat

SEQ ID NO: 87049 - DNA, 25 bp, Probe Sequence
ggaaaggaagaaaccattgagaaga

SEQ ID NO: 87050 - DNA, 25 bp, Probe Sequence
aggaaaggaagaaaccattgagaag

SEQ ID NO: 87051 - DNA, 25 bp, Probe Sequence
aaaggaagaaaccattgagaagatg

SEQ ID NO: 87052 - DNA, 25 bp, Probe Sequence
cagacagagaattggagtgaagaaa

SEQ ID NO: 87053 - DNA, 25 bp, Probe Sequence
gttaggaaaggaagaaaccattgag

SEQ ID NO: 87054 - DNA, 25 bp, Probe Sequence
cgttaggaaaggaagaaaccattga

SEQ ID NO: 87055 - DNA, 25 bp, Probe Sequence
atcatctttggcagacagagaattg

SEQ ID NO: 87056 - DNA, 25 bp, Probe Sequence
catcatctttggcagacagagaatt

SEQ ID NO: 87057 - DNA, 25 bp, Probe Sequence
atctttggcagacagagaattggag

SEQ ID NO: 87058 - DNA, 25 bp, Probe Sequence
ttggcagacagagaattggagtgaa

SEQ ID NO: 87059 - DNA, 25 bp, Probe Sequence
acgttaggaaaggaagaaaccattg

SEQ ID NO: 87060 - DNA, 25 bp, Probe Sequence
ggcagacagagaattggagtgaaga

SEQ ID NO: 87061 - DNA, 25 bp, Probe Sequence
catctttggcagacagagaattgga

SEQ ID NO: 87062 - DNA, 25 bp, Probe Sequence
tcatctttggcagacagagaattgg

SEQ ID NO: 87063 - DNA, 25 bp, Probe Sequence
gacagagaattggagtgaagaaaac

SEQ ID NO: 87064 - DNA, 25 bp, Probe Sequence
agacagagaattggagtgaagaaaa

SEQ ID NO: 87065 - DNA, 25 bp, Probe Sequence
gcatcatctttggcagacagagaat

SEQ ID NO: 87066 - DNA, 25 bp, Probe Sequence
tggcagacagagaattggagtgaag

SEQ ID NO: 87067 - DNA, 25 bp, Probe Sequence
acagagaattggagtgaagaaaacg

SEQ ID NO: 87068 - DNA, 25 bp, Probe Sequence
tacatgaccttatgggactgtccta

SEQ ID NO: 87069 - DNA, 25 bp, Probe Sequence
gtcaatggaaggtgtagagtttact

SEQ ID NO: 87070 - DNA, 25 bp, Probe Sequence
gataagggactcttgtgctttcata

SEQ ID NO: 87071 - DNA, 25 bp, Probe Sequence
aggtcaatggaaggtgtagagttta

SEQ ID NO: 87072 - DNA, 25 bp, Probe Sequence
ataagggactcttgtgctttcatac

SEQ ID NO: 87073 - DNA, 25 bp, Probe Sequence
tcaatggaaggtgtagagtttactt

SEQ ID NO: 87074 - DNA, 25 bp, Probe Sequence
ggtcaatggaaggtgtagagtttac

SEQ ID NO: 87075 - DNA, 25 bp, Probe Sequence
tgaggtcaatggaaggtgtagagtt

SEQ ID NO: 87076 - DNA, 25 bp, Probe Sequence
cttgaggtcaatggaaggtgtagag

SEQ ID NO: 87077 - DNA, 25 bp, Probe Sequence
caatggaaggtgtagagtttacttt

SEQ ID NO: 87078 - DNA, 25 bp, Probe Sequence
gaggtcaatggaaggtgtagagttt

SEQ ID NO: 87079 - DNA, 25 bp, Probe Sequence
ttgaggtcaatggaaggtgtagagt

SEQ ID NO: 87080 - DNA, 25 bp, Probe Sequence
tgataagggactcttgtgctttcat

SEQ ID NO: 87081 - DNA, 25 bp, Probe Sequence
taagggactcttgtgctttcatacg

SEQ ID NO: 87082 - DNA, 25 bp, Probe Sequence
tgatgaaaccccaactctactaaaa

SEQ ID NO: 87083 - DNA, 25 bp, Probe Sequence
atgatgaaaccccaactctactaaa

SEQ ID NO: 87084 - DNA, 25 bp, Probe Sequence
gcttgaggtcaatggaaggtgtaga

SEQ ID NO: 87085 - DNA, 25 bp, Probe Sequence
catgatgaaaccccaactctactaa

SEQ ID NO: 87086 - DNA, 25 bp, Probe Sequence
aatggaaggtgtagagtttactttt

SEQ ID NO: 87087 - DNA, 25 bp, Probe Sequence
tgcttgaggtcaatggaaggtgtag

SEQ ID NO: 87088 - DNA, 25 bp, Probe Sequence
acatgatgaaaccccaactctacta

SEQ ID NO: 87089 - DNA, 25 bp, Probe Sequence
tggaaggtgtagagtttacttttaa

SEQ ID NO: 87090 - DNA, 25 bp, Probe Sequence
gtgcttgaggtcaatggaaggtgta

SEQ ID NO: 87091 - DNA, 25 bp, Probe Sequence
aagaggtgcttgaggtcaatggaag

SEQ ID NO: 87092 - DNA, 25 bp, Probe Sequence
aacatgatgaaaccccaactctact

SEQ ID NO: 87093 - DNA, 25 bp, Probe Sequence
aatataagcattcgcaaggagtgga

SEQ ID NO: 87094 - DNA, 25 bp, Probe Sequence
atataagcattcgcaaggagtggaa

SEQ ID NO: 87095 - DNA, 25 bp, Probe Sequence
ctcaacttacacattgcctagtgaa

SEQ ID NO: 87096 - DNA, 25 bp, Probe Sequence
tagggcttgtattaaaccactgaac

SEQ ID NO: 87097 - DNA, 25 bp, Probe Sequence
aagaaatataagcattcgcaaggag

SEQ ID NO: 87098 - DNA, 25 bp, Probe Sequence
gaaatataagcattcgcaaggagtg

SEQ ID NO: 87099 - DNA, 25 bp, Probe Sequence
agaaatataagcattcgcaaggagt

SEQ ID NO: 87100 - DNA, 25 bp, Probe Sequence
tttctagggcttgtattaaaccact

SEQ ID NO: 87101 - DNA, 25 bp, Probe Sequence
gaaatgttgagcccaaatatgtgat

SEQ ID NO: 87102 - DNA, 25 bp, Probe Sequence
aatgttgagcccaaatatgtgattg

SEQ ID NO: 87103 - DNA, 25 bp, Probe Sequence
aaatgttgagcccaaatatgtgatt

SEQ ID NO: 87104 - DNA, 25 bp, Probe Sequence
ctagggcttgtattaaaccactgaa

SEQ ID NO: 87105 - DNA, 25 bp, Probe Sequence
ttctagggcttgtattaaaccactg

SEQ ID NO: 87106 - DNA, 25 bp, Probe Sequence
ttgaaatgttgagcccaaatatgtg

SEQ ID NO: 87107 - DNA, 25 bp, Probe Sequence
aaaggatgtccagccaatgtaattt

SEQ ID NO: 87108 - DNA, 25 bp, Probe Sequence
taagaaatataagcattcgcaagga

SEQ ID NO: 87109 - DNA, 25 bp, Probe Sequence
gtaagaaatataagcattcgcaagg

SEQ ID NO: 87110 - DNA, 25 bp, Probe Sequence
tctagggcttgtattaaaccactga

SEQ ID NO: 87111 - DNA, 25 bp, Probe Sequence
aaatataagcattcgcaaggagtgg

SEQ ID NO: 87112 - DNA, 25 bp, Probe Sequence
tgaaatgttgagcccaaatatgtga

SEQ ID NO: 87113 - DNA, 25 bp, Probe Sequence
tcaaggtgataagcatttattggtt

SEQ ID NO: 87114 - DNA, 25 bp, Probe Sequence
ttcaaggtgataagcatttattggt

SEQ ID NO: 87115 - DNA, 25 bp, Probe Sequence
atgctgcatattcagtgttcactaa

SEQ ID NO: 87116 - DNA, 25 bp, Probe Sequence
cctcaacttacacattgcctagtga

SEQ ID NO: 87117 - DNA, 25 bp, Probe Sequence
tgtcaataaacagcattctgattaa

SEQ ID NO: 87118 - DNA, 25 bp, Probe Sequence
ttgtcaataaacagcattctgatta

SEQ ID NO: 87119 - DNA, 25 bp, Probe Sequence
gtcaataaacagcattctgattaaa

SEQ ID NO: 87120 - DNA, 25 bp, Probe Sequence
tcaataaacagcattctgattaaaa

SEQ ID NO: 87121 - DNA, 25 bp, Probe Sequence
tgtagaacagactgctaagaattgt

SEQ ID NO: 87122 - DNA, 25 bp, Probe Sequence
gatgaaggtgatactggacttgatc

SEQ ID NO: 87123 - DNA, 25 bp, Probe Sequence
atgctgacacagttatctatgttga

SEQ ID NO: 87124 - DNA, 25 bp, Probe Sequence
tgctgacacagttatctatgttgaa

SEQ ID NO: 87125 - DNA, 25 bp, Probe Sequence
cgatgaaggtgatactggacttgat

SEQ ID NO: 87126 - DNA, 25 bp, Probe Sequence
catgctgacacagttatctatgttg

SEQ ID NO: 87127 - DNA, 25 bp, Probe Sequence
tcatgctgacacagttatctatgtt

SEQ ID NO: 87128 - DNA, 25 bp, Probe Sequence
atcatgctgacacagttatctatgt

SEQ ID NO: 87129 - DNA, 25 bp, Probe Sequence
aggaatatcatgctgacacagttat

SEQ ID NO: 87130 - DNA, 25 bp, Probe Sequence
ttaggaatatcatgctgacacagtt

SEQ ID NO: 87131 - DNA, 25 bp, Probe Sequence
ggaatatcatgctgacacagttatc

SEQ ID NO: 87132 - DNA, 25 bp, Probe Sequence
taggaatatcatgctgacacagtta

SEQ ID NO: 87133 - DNA, 25 bp, Probe Sequence
gaatatcatgctgacacagttatct

SEQ ID NO: 87134 - DNA, 25 bp, Probe Sequence
ctgattaaagaggataaggtgtggt

SEQ ID NO: 87135 - DNA, 25 bp, Probe Sequence
ttgctgattaaagaggataaggtgt

SEQ ID NO: 87136 - DNA, 25 bp, Probe Sequence
tgattaaagaggataaggtgtggtt

SEQ ID NO: 87137 - DNA, 25 bp, Probe Sequence
ttaaagaggataaggtgtggtttgg

SEQ ID NO: 87138 - DNA, 25 bp, Probe Sequence
tgctgattaaagaggataaggtgtg

SEQ ID NO: 87139 - DNA, 25 bp, Probe Sequence
tttgctgattaaagaggataaggtg

SEQ ID NO: 87140 - DNA, 25 bp, Probe Sequence
attaaagaggataaggtgtggtttg

SEQ ID NO: 87141 - DNA, 25 bp, Probe Sequence
tatcatgctgacacagttatctatg

SEQ ID NO: 87142 - DNA, 25 bp, Probe Sequence
gctgattaaagaggataaggtgtgg

SEQ ID NO: 87143 - DNA, 25 bp, Probe Sequence
ggagagaacaagggatataccattg

SEQ ID NO: 87144 - DNA, 25 bp, Probe Sequence
gattaaagaggataaggtgtggttt

SEQ ID NO: 87145 - DNA, 25 bp, Probe Sequence
gcagaagctatgaaagggaataaag

SEQ ID NO: 87146 - DNA, 25 bp, Probe Sequence
ggcagaagctatgaaagggaataaa

SEQ ID NO: 87147 - DNA, 25 bp, Probe Sequence
cagaagctatgaaagggaataaaga

SEQ ID NO: 87148 - DNA, 25 bp, Probe Sequence
gaagctatgaaagggaataaagaga

SEQ ID NO: 87149 - DNA, 25 bp, Probe Sequence
agaagctatgaaagggaataaagag

SEQ ID NO: 87150 - DNA, 25 bp, Probe Sequence
ttattgatgaaaggaaccgtctttg

SEQ ID NO: 87151 - DNA, 25 bp, Probe Sequence
cttattgatgaaaggaaccgtcttt

SEQ ID NO: 87152 - DNA, 25 bp, Probe Sequence
caatgaataatccgccagaacgacc

SEQ ID NO: 87153 - DNA, 25 bp, Probe Sequence
ccaatgaataatccgccagaacgac

SEQ ID NO: 87154 - DNA, 25 bp, Probe Sequence
agctatgaaagggaataaagagaaa

SEQ ID NO: 87155 - DNA, 25 bp, Probe Sequence
aagctatgaaagggaataaagagaa

SEQ ID NO: 87156 - DNA, 25 bp, Probe Sequence
tattgatgaaaggaaccgtctttgc

SEQ ID NO: 87157 - DNA, 25 bp, Probe Sequence
aatgaataatccgccagaacgacca

SEQ ID NO: 87158 - DNA, 25 bp, Probe Sequence
cattagtgctctctctgcctggatc

SEQ ID NO: 87159 - DNA, 25 bp, Probe Sequence
cggcagaagctatgaaagggaataa

SEQ ID NO: 87160 - DNA, 25 bp, Probe Sequence
gaataatccgccagaacgaccagaa

SEQ ID NO: 87161 - DNA, 25 bp, Probe Sequence
atgaataatccgccagaacgaccag

SEQ ID NO: 87162 - DNA, 25 bp, Probe Sequence
gctatgaaagggaataaagagaaaa

SEQ ID NO: 87163 - DNA, 25 bp, Probe Sequence
gaaagggaataaagagaaaagaagt

SEQ ID NO: 87164 - DNA, 25 bp, Probe Sequence
tgaaagggaataaagagaaaagaag

SEQ ID NO: 87165 - DNA, 25 bp, Probe Sequence
aataatccgccagaacgaccagaaa

SEQ ID NO: 87166 - DNA, 25 bp, Probe Sequence
ccttattgatgaaaggaaccgtctt

SEQ ID NO: 87167 - DNA, 25 bp, Probe Sequence
ttcaaagggaagactgagaagcgag

SEQ ID NO: 87168 - DNA, 25 bp, Probe Sequence
gaccttcaaagggaagactgagaag

SEQ ID NO: 87169 - DNA, 25 bp, Probe Sequence
gcagaagctatgaaagggaataaag

SEQ ID NO: 87170 - DNA, 25 bp, Probe Sequence
ggcagaagctatgaaagggaataaa

SEQ ID NO: 87171 - DNA, 25 bp, Probe Sequence
cagaagctatgaaagggaataaaga

SEQ ID NO: 87172 - DNA, 25 bp, Probe Sequence
gaagctatgaaagggaataaagaga

SEQ ID NO: 87173 - DNA, 25 bp, Probe Sequence
agaagctatgaaagggaataaagag

SEQ ID NO: 87174 - DNA, 25 bp, Probe Sequence
ttattgatgaaaggaaccgtctttg

SEQ ID NO: 87175 - DNA, 25 bp, Probe Sequence
cttattgatgaaaggaaccgtcttt

SEQ ID NO: 87176 - DNA, 25 bp, Probe Sequence
caatgaataatccgccagaacgacc

SEQ ID NO: 87177 - DNA, 25 bp, Probe Sequence
ccaatgaataatccgccagaacgac

SEQ ID NO: 87178 - DNA, 25 bp, Probe Sequence
agctatgaaagggaataaagagaaa

SEQ ID NO: 87179 - DNA, 25 bp, Probe Sequence
aagctatgaaagggaataaagagaa

SEQ ID NO: 87180 - DNA, 25 bp, Probe Sequence
tattgatgaaaggaaccgtctttgc

SEQ ID NO: 87181 - DNA, 25 bp, Probe Sequence
aatgaataatccgccagaacgacca

SEQ ID NO: 87182 - DNA, 25 bp, Probe Sequence
cattagtgctctctctgcctggatc

SEQ ID NO: 87183 - DNA, 25 bp, Probe Sequence
cggcagaagctatgaaagggaataa

SEQ ID NO: 87184 - DNA, 25 bp, Probe Sequence
gaataatccgccagaacgaccagaa

SEQ ID NO: 87185 - DNA, 25 bp, Probe Sequence
atgaataatccgccagaacgaccag

SEQ ID NO: 87186 - DNA, 25 bp, Probe Sequence
gctatgaaagggaataaagagaaaa

SEQ ID NO: 87187 - DNA, 25 bp, Probe Sequence
gaaagggaataaagagaaaagaagt

SEQ ID NO: 87188 - DNA, 25 bp, Probe Sequence
tgaaagggaataaagagaaaagaag

SEQ ID NO: 87189 - DNA, 25 bp, Probe Sequence
aataatccgccagaacgaccagaaa

SEQ ID NO: 87190 - DNA, 25 bp, Probe Sequence
ccttattgatgaaaggaaccgtctt

SEQ ID NO: 87191 - DNA, 25 bp, Probe Sequence
ttcaaagggaagactgagaagcgag

SEQ ID NO: 87192 - DNA, 25 bp, Probe Sequence
gaccttcaaagggaagactgagaag

SEQ ID NO: 87193 - DNA, 25 bp, Probe Sequence
ccacagtatgagatgaatagaggta

SEQ ID NO: 87194 - DNA, 25 bp, Probe Sequence
ataatactctgcttctcttagacgc

SEQ ID NO: 87195 - DNA, 25 bp, Probe Sequence
taatactctgcttctcttagacgct

SEQ ID NO: 87196 - DNA, 25 bp, Probe Sequence
aatactctgcttctcttagacgctt

SEQ ID NO: 87197 - DNA, 25 bp, Probe Sequence
acagtatgagatgaatagaggtaga

SEQ ID NO: 87198 - DNA, 25 bp, Probe Sequence
cacagtatgagatgaatagaggtag

SEQ ID NO: 87199 - DNA, 25 bp, Probe Sequence
gtgtgtcagagtctcactatgtcac

SEQ ID NO: 87200 - DNA, 25 bp, Probe Sequence
gtgtgtgtcagagtctcactatgtc

SEQ ID NO: 87201 - DNA, 25 bp, Probe Sequence
gtatcatagtttgtcttcctgtcct

SEQ ID NO: 87202 - DNA, 25 bp, Probe Sequence
agtatcatagtttgtcttcctgtcc

SEQ ID NO: 87203 - DNA, 25 bp, Probe Sequence
gtccagtatcatagtttgtcttcct

SEQ ID NO: 87204 - DNA, 25 bp, Probe Sequence
agtccagtatcatagtttgtcttcc

SEQ ID NO: 87205 - DNA, 25 bp, Probe Sequence
ctatcctttcttccttctttcgtct

SEQ ID NO: 87206 - DNA, 25 bp, Probe Sequence
tctatcctttcttccttctttcgtc

SEQ ID NO: 87207 - DNA, 25 bp, Probe Sequence
tatcctttcttccttctttcgtctg

SEQ ID NO: 87208 - DNA, 25 bp, Probe Sequence
ttctatcctttcttccttctttcgt

SEQ ID NO: 87209 - DNA, 25 bp, Probe Sequence
tatcatagtttgtcttcctgtcctc

SEQ ID NO: 87210 - DNA, 25 bp, Probe Sequence
gtgtgtgtgtcagagtctcactatg

SEQ ID NO: 87211 - DNA, 25 bp, Probe Sequence
ctccttctatcctttcttccttctt

SEQ ID NO: 87212 - DNA, 25 bp, Probe Sequence
tcagtccagtatcatagtttgtctt

SEQ ID NO: 87213 - DNA, 25 bp, Probe Sequence
ttcagtccagtatcatagtttgtct

SEQ ID NO: 87214 - DNA, 25 bp, Probe Sequence
cttctatcctttcttccttctttcg

SEQ ID NO: 87215 - DNA, 25 bp, Probe Sequence
tataatactctgcttctcttagacg

SEQ ID NO: 87216 - DNA, 25 bp, Probe Sequence
cctccttctatcctttcttccttct

SEQ ID NO: 87217 - DNA, 25 bp, Probe Sequence
cactggttcattagagcaagacatc

SEQ ID NO: 87218 - DNA, 25 bp, Probe Sequence
ctggttcattagagcaagacatctg

SEQ ID NO: 87219 - DNA, 25 bp, Probe Sequence
tacaatgtcagtacctagccgaata

SEQ ID NO: 87220 - DNA, 25 bp, Probe Sequence
actggttcattagagcaagacatct

SEQ ID NO: 87221 - DNA, 25 bp, Probe Sequence
acaatgtcagtacctagccgaatat

SEQ ID NO: 87222 - DNA, 25 bp, Probe Sequence
cacttgtagtccattggtcattcaa

SEQ ID NO: 87223 - DNA, 25 bp, Probe Sequence
ttacaatgtcagtacctagccgaat

SEQ ID NO: 87224 - DNA, 25 bp, Probe Sequence
acactggttcattagagcaagacat

SEQ ID NO: 87225 - DNA, 25 bp, Probe Sequence
caatgtcagtacctagccgaatatt

SEQ ID NO: 87226 - DNA, 25 bp, Probe Sequence
aatgtcagtacctagccgaatatta

SEQ ID NO: 87227 - DNA, 25 bp, Probe Sequence
atgtcagtacctagccgaatattat

SEQ ID NO: 87228 - DNA, 25 bp, Probe Sequence
aacactggttcattagagcaagaca

SEQ ID NO: 87229 - DNA, 25 bp, Probe Sequence
caactctgacacttgtagtccattg

SEQ ID NO: 87230 - DNA, 25 bp, Probe Sequence
tcaactctgacacttgtagtccatt

SEQ ID NO: 87231 - DNA, 25 bp, Probe Sequence
ttcaactctgacacttgtagtccat

SEQ ID NO: 87232 - DNA, 25 bp, Probe Sequence
tgtcagtacctagccgaatattata

SEQ ID NO: 87233 - DNA, 25 bp, Probe Sequence
gacacttgtagtccattggtcattc

SEQ ID NO: 87234 - DNA, 25 bp, Probe Sequence
acacttgtagtccattggtcattca

SEQ ID NO: 87235 - DNA, 25 bp, Probe Sequence
cagttcaactctgacacttgtagtc

SEQ ID NO: 87236 - DNA, 25 bp, Probe Sequence
agagatttgttgatttggtagagca

SEQ ID NO: 87237 - DNA, 25 bp, Probe Sequence
aagagatttgttgatttggtagagc

SEQ ID NO: 87238 - DNA, 25 bp, Probe Sequence
gtcagtacctagccgaatattatag

SEQ ID NO: 87239 - DNA, 25 bp, Probe Sequence
cattcaaacttaggaaacacaccag

SEQ ID NO: 87240 - DNA, 25 bp, Probe Sequence
gtcattcaaacttaggaaacacacc

SEQ ID NO: 87241 - DNA, 25 bp, Probe Sequence
accatcatacaactgtctcacatta

SEQ ID NO: 87242 - DNA, 25 bp, Probe Sequence
taccatcatacaactgtctcacatt

SEQ ID NO: 87243 - DNA, 25 bp, Probe Sequence
ccatcatacaactgtctcacattaa

SEQ ID NO: 87244 - DNA, 25 bp, Probe Sequence
gtaccatcatacaactgtctcacat

SEQ ID NO: 87245 - DNA, 25 bp, Probe Sequence
ttactgtgttagagtccatccagac

SEQ ID NO: 87246 - DNA, 25 bp, Probe Sequence
acccaagtgaacaaagaagtatagt

SEQ ID NO: 87247 - DNA, 25 bp, Probe Sequence
tgacccaagtgaacaaagaagtata

SEQ ID NO: 87248 - DNA, 25 bp, Probe Sequence
tactggcactatctgtaccatcata

SEQ ID NO: 87249 - DNA, 25 bp, Probe Sequence
tatactggcactatctgtaccatca

SEQ ID NO: 87250 - DNA, 25 bp, Probe Sequence
gacccaagtgaacaaagaagtatag

SEQ ID NO: 87251 - DNA, 25 bp, Probe Sequence
catatactggcactatctgtaccat

SEQ ID NO: 87252 - DNA, 25 bp, Probe Sequence
atatactggcactatctgtaccatc

SEQ ID NO: 87253 - DNA, 25 bp, Probe Sequence
atactggcactatctgtaccatcat

SEQ ID NO: 87254 - DNA, 25 bp, Probe Sequence
gtgacccaagtgaacaaagaagtat

SEQ ID NO: 87255 - DNA, 25 bp, Probe Sequence
atctgtaccatcatacaactgtctc

SEQ ID NO: 87256 - DNA, 25 bp, Probe Sequence
gcactatctgtaccatcatacaact

SEQ ID NO: 87257 - DNA, 25 bp, Probe Sequence
cccaagtgaacaaagaagtatagtt

SEQ ID NO: 87258 - DNA, 25 bp, Probe Sequence
ctgtaccatcatacaactgtctcac

SEQ ID NO: 87259 - DNA, 25 bp, Probe Sequence
tctgtaccatcatacaactgtctca

SEQ ID NO: 87260 - DNA, 25 bp, Probe Sequence
actatctgtaccatcatacaactgt

SEQ ID NO: 87261 - DNA, 25 bp, Probe Sequence
ggcactatctgtaccatcatacaac

SEQ ID NO: 87262 - DNA, 25 bp, Probe Sequence
actggcactatctgtaccatcatac

SEQ ID NO: 87263 - DNA, 25 bp, Probe Sequence
gcatatactggcactatctgtacca

SEQ ID NO: 87264 - DNA, 25 bp, Probe Sequence
tatctgtaccatcatacaactgtct

SEQ ID NO: 87265 - DNA, 25 bp, Probe Sequence
tagtttgtgagcagagatgaagaaa

SEQ ID NO: 87266 - DNA, 25 bp, Probe Sequence
ctcccgtttcaatgtccaataaatg

SEQ ID NO: 87267 - DNA, 25 bp, Probe Sequence
ctagtttgtgagcagagatgaagaa

SEQ ID NO: 87268 - DNA, 25 bp, Probe Sequence
gctcccgtttcaatgtccaataaat

SEQ ID NO: 87269 - DNA, 25 bp, Probe Sequence
tcccgtttcaatgtccaataaatgc

SEQ ID NO: 87270 - DNA, 25 bp, Probe Sequence
cctagtttgtgagcagagatgaaga

SEQ ID NO: 87271 - DNA, 25 bp, Probe Sequence
aatggttctctgttgtgtgtgtgtg

SEQ ID NO: 87272 - DNA, 25 bp, Probe Sequence
cgtttcaatgtccaataaatgcaat

SEQ ID NO: 87273 - DNA, 25 bp, Probe Sequence
caatggttctctgttgtgtgtgtgt

SEQ ID NO: 87274 - DNA, 25 bp, Probe Sequence
ccgtttcaatgtccaataaatgcaa

SEQ ID NO: 87275 - DNA, 25 bp, Probe Sequence
ataaatgcaatggttctctgttgtg

SEQ ID NO: 87276 - DNA, 25 bp, Probe Sequence
aataaatgcaatggttctctgttgt

SEQ ID NO: 87277 - DNA, 25 bp, Probe Sequence
caataaatgcaatggttctctgttg

SEQ ID NO: 87278 - DNA, 25 bp, Probe Sequence
tgctcccgtttcaatgtccaataaa

SEQ ID NO: 87279 - DNA, 25 bp, Probe Sequence
gtttcaatgtccaataaatgcaatg

SEQ ID NO: 87280 - DNA, 25 bp, Probe Sequence
taaatgcaatggttctctgttgtgt

SEQ ID NO: 87281 - DNA, 25 bp, Probe Sequence
gtttgtgagcagagatgaagaaaag

SEQ ID NO: 87282 - DNA, 25 bp, Probe Sequence
tttccttcgggataggtacaatgtc

SEQ ID NO: 87283 - DNA, 25 bp, Probe Sequence
ttgtgagcagagatgaagaaaagtt

SEQ ID NO: 87284 - DNA, 25 bp, Probe Sequence
tttgtgagcagagatgaagaaaagt

SEQ ID NO: 87285 - DNA, 25 bp, Probe Sequence
agtttgtgagcagagatgaagaaaa

SEQ ID NO: 87286 - DNA, 25 bp, Probe Sequence
ctgctcccgtttcaatgtccaataa

SEQ ID NO: 87287 - DNA, 25 bp, Probe Sequence
gtttccttcgggataggtacaatgt

SEQ ID NO: 87288 - DNA, 25 bp, Probe Sequence
atgtccaataaatgcaatggttctc

SEQ ID NO: 87289 - DNA, 25 bp, Probe Sequence
ttctcaagtgtgtctaagtgaccat

SEQ ID NO: 87290 - DNA, 25 bp, Probe Sequence
catacaacgtacacataatggaagg

SEQ ID NO: 87291 - DNA, 25 bp, Probe Sequence
gaactcattcatacaacgtacacat

SEQ ID NO: 87292 - DNA, 25 bp, Probe Sequence
acatagtgcaagttcgagattatct

SEQ ID NO: 87293 - DNA, 25 bp, Probe Sequence
caacgtacacataatggaaggctaa

SEQ ID NO: 87294 - DNA, 25 bp, Probe Sequence
atacaacgtacacataatggaaggc

SEQ ID NO: 87295 - DNA, 25 bp, Probe Sequence
tatctcagtaaccctcagaatagca

SEQ ID NO: 87296 - DNA, 25 bp, Probe Sequence
ttaatatctgtggtagaacttgggc

SEQ ID NO: 87297 - DNA, 25 bp, Probe Sequence
tcatacaacgtacacataatggaag

SEQ ID NO: 87298 - DNA, 25 bp, Probe Sequence
ttatctcagtaaccctcagaatagc

SEQ ID NO: 87299 - DNA, 25 bp, Probe Sequence
atctcagtaaccctcagaatagcat

SEQ ID NO: 87300 - DNA, 25 bp, Probe Sequence
ttcatacaacgtacacataatggaa

SEQ ID NO: 87301 - DNA, 25 bp, Probe Sequence
taatatctgtggtagaacttgggca

SEQ ID NO: 87302 - DNA, 25 bp, Probe Sequence
actcattcatacaacgtacacataa

SEQ ID NO: 87303 - DNA, 25 bp, Probe Sequence
aactcattcatacaacgtacacata

SEQ ID NO: 87304 - DNA, 25 bp, Probe Sequence
attcatacaacgtacacataatgga

SEQ ID NO: 87305 - DNA, 25 bp, Probe Sequence
ggtcttgatctcctaaccttgtgat

SEQ ID NO: 87306 - DNA, 25 bp, Probe Sequence
gatggtcttgatctcctaaccttgt

SEQ ID NO: 87307 - DNA, 25 bp, Probe Sequence
accctcagaatagcatgtttacttt

SEQ ID NO: 87308 - DNA, 25 bp, Probe Sequence
attgttagtagagacagggtttcac

SEQ ID NO: 87309 - DNA, 25 bp, Probe Sequence
tctcaagtgtgtctaagtgaccatg

SEQ ID NO: 87310 - DNA, 25 bp, Probe Sequence
acaacgtacacataatggaaggcta

SEQ ID NO: 87311 - DNA, 25 bp, Probe Sequence
cacatagtgcaagttcgagattatc

SEQ ID NO: 87312 - DNA, 25 bp, Probe Sequence
tcacatagtgcaagttcgagattat

SEQ ID NO: 87313 - DNA, 25 bp, Probe Sequence
tgctaagacagtagatgttaagtgt

SEQ ID NO: 87314 - DNA, 25 bp, Probe Sequence
ttgctaagacagtagatgttaagtg

SEQ ID NO: 87315 - DNA, 25 bp, Probe Sequence
gcttgacttaataattccacaatgt

SEQ ID NO: 87316 - DNA, 25 bp, Probe Sequence
attgctaagacagtagatgttaagt

SEQ ID NO: 87317 - DNA, 25 bp, Probe Sequence
agcttgacttaataattccacaatg

SEQ ID NO: 87318 - DNA, 25 bp, Probe Sequence
aattgctaagacagtagatgttaag

SEQ ID NO: 87319 - DNA, 25 bp, Probe Sequence
ctcccatagtagctgagattacaag

SEQ ID NO: 87320 - DNA, 25 bp, Probe Sequence
tagatgttaagtgtctttatcaccc

SEQ ID NO: 87321 - DNA, 25 bp, Probe Sequence
cccaggaggaataagtttaagagct

SEQ ID NO: 87322 - DNA, 25 bp, Probe Sequence
cctcccatagtagctgagattacaa

SEQ ID NO: 87323 - DNA, 25 bp, Probe Sequence
gcccaggaggaataagtttaagagc

SEQ ID NO: 87324 - DNA, 25 bp, Probe Sequence
aatagcttgacttaataattccaca

SEQ ID NO: 87325 - DNA, 25 bp, Probe Sequence
attttcagtagagatggggtttcac

SEQ ID NO: 87326 - DNA, 25 bp, Probe Sequence
tagcttgacttaataattccacaat

SEQ ID NO: 87327 - DNA, 25 bp, Probe Sequence
atagcttgacttaataattccacaa

SEQ ID NO: 87328 - DNA, 25 bp, Probe Sequence
acaagtatatggggcaattaagtca

SEQ ID NO: 87329 - DNA, 25 bp, Probe Sequence
tgacaagtatatggggcaattaagt

SEQ ID NO: 87330 - DNA, 25 bp, Probe Sequence
atatggggcaattaagtcaaatagc

SEQ ID NO: 87331 - DNA, 25 bp, Probe Sequence
aaaatgacaagtatatggggcaatt

SEQ ID NO: 87332 - DNA, 25 bp, Probe Sequence
gtagatgttaagtgtctttatcacc

SEQ ID NO: 87333 - DNA, 25 bp, Probe Sequence
cattttcagtagagatggggtttca

SEQ ID NO: 87334 - DNA, 25 bp, Probe Sequence
caagtatatggggcaattaagtcaa

SEQ ID NO: 87335 - DNA, 25 bp, Probe Sequence
atgacaagtatatggggcaattaag

SEQ ID NO: 87336 - DNA, 25 bp, Probe Sequence
aatgacaagtatatggggcaattaa

SEQ ID NO: 87337 - DNA, 25 bp, Probe Sequence
acataggttagattctcattcacgg

SEQ ID NO: 87338 - DNA, 25 bp, Probe Sequence
cacataggttagattctcattcacg

SEQ ID NO: 87339 - DNA, 25 bp, Probe Sequence
gatgtggtgatactgagattgtctg

SEQ ID NO: 87340 - DNA, 25 bp, Probe Sequence
agatgtggtgatactgagattgtct

SEQ ID NO: 87341 - DNA, 25 bp, Probe Sequence
ggtaatctgacttctcacttcctaa

SEQ ID NO: 87342 - DNA, 25 bp, Probe Sequence
gtggtgatactgagattgtctgttc

SEQ ID NO: 87343 - DNA, 25 bp, Probe Sequence
atgtggtgatactgagattgtctgt

SEQ ID NO: 87344 - DNA, 25 bp, Probe Sequence
tgtggtgatactgagattgtctgtt

SEQ ID NO: 87345 - DNA, 25 bp, Probe Sequence
tcacataggttagattctcattcac

SEQ ID NO: 87346 - DNA, 25 bp, Probe Sequence
tggtgatactgagattgtctgttca

SEQ ID NO: 87347 - DNA, 25 bp, Probe Sequence
aacagatgtggtgatactgagattg

SEQ ID NO: 87348 - DNA, 25 bp, Probe Sequence
gtaatctgacttctcacttcctaag

SEQ ID NO: 87349 - DNA, 25 bp, Probe Sequence
cagatgtggtgatactgagattgtc

SEQ ID NO: 87350 - DNA, 25 bp, Probe Sequence
acagatgtggtgatactgagattgt

SEQ ID NO: 87351 - DNA, 25 bp, Probe Sequence
ttcacataggttagattctcattca

SEQ ID NO: 87352 - DNA, 25 bp, Probe Sequence
aatgtgatttgtcttcccttctttg

SEQ ID NO: 87353 - DNA, 25 bp, Probe Sequence
cttaggctaagagatgtgactacag

SEQ ID NO: 87354 - DNA, 25 bp, Probe Sequence
ataggttagattctcattcacggga

SEQ ID NO: 87355 - DNA, 25 bp, Probe Sequence
cataggttagattctcattcacggg

SEQ ID NO: 87356 - DNA, 25 bp, Probe Sequence
gagaaactgggaaacaaacgatata

SEQ ID NO: 87357 - DNA, 25 bp, Probe Sequence
tcctaagttcccttctatatcctca

SEQ ID NO: 87358 - DNA, 25 bp, Probe Sequence
gttagattctcattcacgggactag

SEQ ID NO: 87359 - DNA, 25 bp, Probe Sequence
ggagaaactgggaaacaaacgatat

SEQ ID NO: 87360 - DNA, 25 bp, Probe Sequence
cctaagttcccttctatatcctcaa

SEQ ID NO: 87361 - DNA, 25 bp, Probe Sequence
acataggttagattctcattcacgg

SEQ ID NO: 87362 - DNA, 25 bp, Probe Sequence
cacataggttagattctcattcacg

SEQ ID NO: 87363 - DNA, 25 bp, Probe Sequence
gatgtggtgatactgagattgtctg

SEQ ID NO: 87364 - DNA, 25 bp, Probe Sequence
agatgtggtgatactgagattgtct

SEQ ID NO: 87365 - DNA, 25 bp, Probe Sequence
ggtaatctgacttctcacttcctaa

SEQ ID NO: 87366 - DNA, 25 bp, Probe Sequence
gtggtgatactgagattgtctgttc

SEQ ID NO: 87367 - DNA, 25 bp, Probe Sequence
atgtggtgatactgagattgtctgt

SEQ ID NO: 87368 - DNA, 25 bp, Probe Sequence
tgtggtgatactgagattgtctgtt

SEQ ID NO: 87369 - DNA, 25 bp, Probe Sequence
tcacataggttagattctcattcac

SEQ ID NO: 87370 - DNA, 25 bp, Probe Sequence
tggtgatactgagattgtctgttca

SEQ ID NO: 87371 - DNA, 25 bp, Probe Sequence
aacagatgtggtgatactgagattg

SEQ ID NO: 87372 - DNA, 25 bp, Probe Sequence
gtaatctgacttctcacttcctaag

SEQ ID NO: 87373 - DNA, 25 bp, Probe Sequence
cagatgtggtgatactgagattgtc

SEQ ID NO: 87374 - DNA, 25 bp, Probe Sequence
acagatgtggtgatactgagattgt

SEQ ID NO: 87375 - DNA, 25 bp, Probe Sequence
ttcacataggttagattctcattca

SEQ ID NO: 87376 - DNA, 25 bp, Probe Sequence
aatgtgatttgtcttcccttctttg

SEQ ID NO: 87377 - DNA, 25 bp, Probe Sequence
cttaggctaagagatgtgactacag

SEQ ID NO: 87378 - DNA, 25 bp, Probe Sequence
ataggttagattctcattcacggga

SEQ ID NO: 87379 - DNA, 25 bp, Probe Sequence
cataggttagattctcattcacggg

SEQ ID NO: 87380 - DNA, 25 bp, Probe Sequence
gagaaactgggaaacaaacgatata

SEQ ID NO: 87381 - DNA, 25 bp, Probe Sequence
tcctaagttcccttctatatcctca

SEQ ID NO: 87382 - DNA, 25 bp, Probe Sequence
gttagattctcattcacgggactag

SEQ ID NO: 87383 - DNA, 25 bp, Probe Sequence
ggagaaactgggaaacaaacgatat

SEQ ID NO: 87384 - DNA, 25 bp, Probe Sequence
cctaagttcccttctatatcctcaa

SEQ ID NO: 87385 - DNA, 25 bp, Probe Sequence
tggacatgctgatctgttaatgata

SEQ ID NO: 87386 - DNA, 25 bp, Probe Sequence
aattcagacaagtcagtagcagtga

SEQ ID NO: 87387 - DNA, 25 bp, Probe Sequence
gacatgctgatctgttaatgatacc

SEQ ID NO: 87388 - DNA, 25 bp, Probe Sequence
ggacatgctgatctgttaatgatac

SEQ ID NO: 87389 - DNA, 25 bp, Probe Sequence
ctggacatgctgatctgttaatgat

SEQ ID NO: 87390 - DNA, 25 bp, Probe Sequence
aaccagaaccacagagcctattaat

SEQ ID NO: 87391 - DNA, 25 bp, Probe Sequence
gcttctttaacacaatttcctgaca

SEQ ID NO: 87392 - DNA, 25 bp, Probe Sequence
ggcatatttgtcacattcttctctg

SEQ ID NO: 87393 - DNA, 25 bp, Probe Sequence
attaaagtagccagcatcattagca

SEQ ID NO: 87394 - DNA, 25 bp, Probe Sequence
gccatttcatcaattaaagtagcca

SEQ ID NO: 87395 - DNA, 25 bp, Probe Sequence
ctttaacacaatttcctgacatcca

SEQ ID NO: 87396 - DNA, 25 bp, Probe Sequence
aattaaagtagccagcatcattagc

SEQ ID NO: 87397 - DNA, 25 bp, Probe Sequence
catcaattaaagtagccagcatcat

SEQ ID NO: 87398 - DNA, 25 bp, Probe Sequence
ttcatcaattaaagtagccagcatc

SEQ ID NO: 87399 - DNA, 25 bp, Probe Sequence
accagaaccacagagcctattaatc

SEQ ID NO: 87400 - DNA, 25 bp, Probe Sequence
taacacaatttcctgacatccattc

SEQ ID NO: 87401 - DNA, 25 bp, Probe Sequence
tctttaacacaatttcctgacatcc

SEQ ID NO: 87402 - DNA, 25 bp, Probe Sequence
tcatcaattaaagtagccagcatca

SEQ ID NO: 87403 - DNA, 25 bp, Probe Sequence
catatttgtcacattcttctctgct

SEQ ID NO: 87404 - DNA, 25 bp, Probe Sequence
tttcatcaattaaagtagccagcat

SEQ ID NO: 87405 - DNA, 25 bp, Probe Sequence
atttcatcaattaaagtagccagca

SEQ ID NO: 87406 - DNA, 25 bp, Probe Sequence
ttaacacaatttcctgacatccatt

SEQ ID NO: 87407 - DNA, 25 bp, Probe Sequence
tttaacacaatttcctgacatccat

SEQ ID NO: 87408 - DNA, 25 bp, Probe Sequence
atcaattaaagtagccagcatcatt

SEQ ID NO: 87409 - DNA, 25 bp, Probe Sequence
tcagggaaggaagcaacattaaatt

SEQ ID NO: 87410 - DNA, 25 bp, Probe Sequence
agggaaggaagcaacattaaattct

SEQ ID NO: 87411 - DNA, 25 bp, Probe Sequence
cagggaaggaagcaacattaaattc

SEQ ID NO: 87412 - DNA, 25 bp, Probe Sequence
gggaaggaagcaacattaaattcta

SEQ ID NO: 87413 - DNA, 25 bp, Probe Sequence
gtcagggaaggaagcaacattaaat

SEQ ID NO: 87414 - DNA, 25 bp, Probe Sequence
ggaaggaagcaacattaaattctag

SEQ ID NO: 87415 - DNA, 25 bp, Probe Sequence
gatcacaaggtcaagagattgagtc

SEQ ID NO: 87416 - DNA, 25 bp, Probe Sequence
atcacaaggtcaagagattgagtcc

SEQ ID NO: 87417 - DNA, 25 bp, Probe Sequence
catttgtctattttgttggcagttt

SEQ ID NO: 87418 - DNA, 25 bp, Probe Sequence
cgtcagggaaggaagcaacattaaa

SEQ ID NO: 87419 - DNA, 25 bp, Probe Sequence
atttgtctattttgttggcagtttt

SEQ ID NO: 87420 - DNA, 25 bp, Probe Sequence
cacaaggtcaagagattgagtccag

SEQ ID NO: 87421 - DNA, 25 bp, Probe Sequence
acatttgtctattttgttggcagtt

SEQ ID NO: 87422 - DNA, 25 bp, Probe Sequence
tttgtctattttgttggcagtttta

SEQ ID NO: 87423 - DNA, 25 bp, Probe Sequence
gaggttgcagtgagccataattgag

SEQ ID NO: 87424 - DNA, 25 bp, Probe Sequence
ttgtctattttgttggcagttttaa

SEQ ID NO: 87425 - DNA, 25 bp, Probe Sequence
aggaagcaacattaaattctagaca

SEQ ID NO: 87426 - DNA, 25 bp, Probe Sequence
gactctgtctcaaacaaacacaaaa

SEQ ID NO: 87427 - DNA, 25 bp, Probe Sequence
tcacaaggtcaagagattgagtcca

SEQ ID NO: 87428 - DNA, 25 bp, Probe Sequence
tgtctattttgttggcagttttaat

SEQ ID NO: 87429 - DNA, 25 bp, Probe Sequence
ttaaatatttgagtgagggaaaggg

SEQ ID NO: 87430 - DNA, 25 bp, Probe Sequence
ggaagcaacattaaattctagacat

SEQ ID NO: 87431 - DNA, 25 bp, Probe Sequence
aaggaagcaacattaaattctagac

SEQ ID NO: 87432 - DNA, 25 bp, Probe Sequence
ctgatcacaaggtcaagagattgag

SEQ ID NO: 87433 - DNA, 25 bp, Probe Sequence
cagcaccatcctggaaggttattac

SEQ ID NO: 87434 - DNA, 25 bp, Probe Sequence
tcagcaccatcctggaaggttatta

SEQ ID NO: 87435 - DNA, 25 bp, Probe Sequence
agcaccatcctggaaggttattacc

SEQ ID NO: 87436 - DNA, 25 bp, Probe Sequence
cctggaaggttattacctaatggag

SEQ ID NO: 87437 - DNA, 25 bp, Probe Sequence
attacctaatggagatccatctgtc

SEQ ID NO: 87438 - DNA, 25 bp, Probe Sequence
tcctggaaggttattacctaatgga

SEQ ID NO: 87439 - DNA, 25 bp, Probe Sequence
atcctggaaggttattacctaatgg

SEQ ID NO: 87440 - DNA, 25 bp, Probe Sequence
ccatcctggaaggttattacctaat

SEQ ID NO: 87441 - DNA, 25 bp, Probe Sequence
accatcctggaaggttattacctaa

SEQ ID NO: 87442 - DNA, 25 bp, Probe Sequence
ctggaaggttattacctaatggaga

SEQ ID NO: 87443 - DNA, 25 bp, Probe Sequence
ttacctaatggagatccatctgtcc

SEQ ID NO: 87444 - DNA, 25 bp, Probe Sequence
caccatcctggaaggttattaccta

SEQ ID NO: 87445 - DNA, 25 bp, Probe Sequence
aaggttattacctaatggagatcca

SEQ ID NO: 87446 - DNA, 25 bp, Probe Sequence
tggaaggttattacctaatggagat

SEQ ID NO: 87447 - DNA, 25 bp, Probe Sequence
catcctggaaggttattacctaatg

SEQ ID NO: 87448 - DNA, 25 bp, Probe Sequence
gtcagcaccatcctggaaggttatt

SEQ ID NO: 87449 - DNA, 25 bp, Probe Sequence
tacctaatggagatccatctgtcct

SEQ ID NO: 87450 - DNA, 25 bp, Probe Sequence
tattacctaatggagatccatctgt

SEQ ID NO: 87451 - DNA, 25 bp, Probe Sequence
ggttattacctaatggagatccatc

SEQ ID NO: 87452 - DNA, 25 bp, Probe Sequence
gaaggttattacctaatggagatcc

SEQ ID NO: 87453 - DNA, 25 bp, Probe Sequence
ggaaggttattacctaatggagatc

SEQ ID NO: 87454 - DNA, 25 bp, Probe Sequence
ctaatggagatccatctgtcctgtg

SEQ ID NO: 87455 - DNA, 25 bp, Probe Sequence
aggttattacctaatggagatccat

SEQ ID NO: 87456 - DNA, 25 bp, Probe Sequence
ttattacctaatggagatccatctg

SEQ ID NO: 87457 - DNA, 25 bp, Probe Sequence
cagcaccatcctggaaggttattac

SEQ ID NO: 87458 - DNA, 25 bp, Probe Sequence
tcagcaccatcctggaaggttatta

SEQ ID NO: 87459 - DNA, 25 bp, Probe Sequence
agcaccatcctggaaggttattacc

SEQ ID NO: 87460 - DNA, 25 bp, Probe Sequence
cctggaaggttattacctaatggag

SEQ ID NO: 87461 - DNA, 25 bp, Probe Sequence
attacctaatggagatccatctgtc

SEQ ID NO: 87462 - DNA, 25 bp, Probe Sequence
tcctggaaggttattacctaatgga

SEQ ID NO: 87463 - DNA, 25 bp, Probe Sequence
atcctggaaggttattacctaatgg

SEQ ID NO: 87464 - DNA, 25 bp, Probe Sequence
ccatcctggaaggttattacctaat

SEQ ID NO: 87465 - DNA, 25 bp, Probe Sequence
accatcctggaaggttattacctaa

SEQ ID NO: 87466 - DNA, 25 bp, Probe Sequence
ctggaaggttattacctaatggaga

SEQ ID NO: 87467 - DNA, 25 bp, Probe Sequence
ttacctaatggagatccatctgtcc

SEQ ID NO: 87468 - DNA, 25 bp, Probe Sequence
caccatcctggaaggttattaccta

SEQ ID NO: 87469 - DNA, 25 bp, Probe Sequence
aaggttattacctaatggagatcca

SEQ ID NO: 87470 - DNA, 25 bp, Probe Sequence
tggaaggttattacctaatggagat

SEQ ID NO: 87471 - DNA, 25 bp, Probe Sequence
catcctggaaggttattacctaatg

SEQ ID NO: 87472 - DNA, 25 bp, Probe Sequence
gtcagcaccatcctggaaggttatt

SEQ ID NO: 87473 - DNA, 25 bp, Probe Sequence
tacctaatggagatccatctgtcct

SEQ ID NO: 87474 - DNA, 25 bp, Probe Sequence
tattacctaatggagatccatctgt

SEQ ID NO: 87475 - DNA, 25 bp, Probe Sequence
ggttattacctaatggagatccatc

SEQ ID NO: 87476 - DNA, 25 bp, Probe Sequence
gaaggttattacctaatggagatcc

SEQ ID NO: 87477 - DNA, 25 bp, Probe Sequence
ggaaggttattacctaatggagatc

SEQ ID NO: 87478 - DNA, 25 bp, Probe Sequence
ctaatggagatccatctgtcctgtg

SEQ ID NO: 87479 - DNA, 25 bp, Probe Sequence
aggttattacctaatggagatccat

SEQ ID NO: 87480 - DNA, 25 bp, Probe Sequence
ttattacctaatggagatccatctg

SEQ ID NO: 87481 - DNA, 25 bp, Probe Sequence
aataactcaccttctctatccttgc

SEQ ID NO: 87482 - DNA, 25 bp, Probe Sequence
ttattgctcgttcctcagatgtatt

SEQ ID NO: 87483 - DNA, 25 bp, Probe Sequence
ataactcaccttctctatccttgct

SEQ ID NO: 87484 - DNA, 25 bp, Probe Sequence
gttattgctcgttcctcagatgtat

SEQ ID NO: 87485 - DNA, 25 bp, Probe Sequence
taactcaccttctctatccttgctc

SEQ ID NO: 87486 - DNA, 25 bp, Probe Sequence
cctctggaatgtagactgtatatgt

SEQ ID NO: 87487 - DNA, 25 bp, Probe Sequence
tgttattgctcgttcctcagatgta

SEQ ID NO: 87488 - DNA, 25 bp, Probe Sequence
gcagtaagtgatcttggtagtatcc

SEQ ID NO: 87489 - DNA, 25 bp, Probe Sequence
ggcagtaagtgatcttggtagtatc

SEQ ID NO: 87490 - DNA, 25 bp, Probe Sequence
cctcctctggaatgtagactgtata

SEQ ID NO: 87491 - DNA, 25 bp, Probe Sequence
ttgtctgtggtgttatagtggtaac

SEQ ID NO: 87492 - DNA, 25 bp, Probe Sequence
ctctggaatgtagactgtatatgtt

SEQ ID NO: 87493 - DNA, 25 bp, Probe Sequence
gtctgtggtgttatagtggtaactg

SEQ ID NO: 87494 - DNA, 25 bp, Probe Sequence
tcctctggaatgtagactgtatatg

SEQ ID NO: 87495 - DNA, 25 bp, Probe Sequence
tgtctgtggtgttatagtggtaact

SEQ ID NO: 87496 - DNA, 25 bp, Probe Sequence
taataactcaccttctctatccttg

SEQ ID NO: 87497 - DNA, 25 bp, Probe Sequence
ctcctctggaatgtagactgtatat

SEQ ID NO: 87498 - DNA, 25 bp, Probe Sequence
tttgtctgtggtgttatagtggtaa

SEQ ID NO: 87499 - DNA, 25 bp, Probe Sequence
tattgctcgttcctcagatgtattt

SEQ ID NO: 87500 - DNA, 25 bp, Probe Sequence
gtttgtctgtggtgttatagtggta

SEQ ID NO: 87501 - DNA, 25 bp, Probe Sequence
caagtttgtctgtggtgttatagtg

SEQ ID NO: 87502 - DNA, 25 bp, Probe Sequence
tcctttctacattcccattcactta

SEQ ID NO: 87503 - DNA, 25 bp, Probe Sequence
gtcctttctacattcccattcactt

SEQ ID NO: 87504 - DNA, 25 bp, Probe Sequence
aactcaccttctctatccttgctca

SEQ ID NO: 87505 - DNA, 25 bp, Probe Sequence
aataactcaccttctctatccttgc

SEQ ID NO: 87506 - DNA, 25 bp, Probe Sequence
ttattgctcgttcctcagatgtatt

SEQ ID NO: 87507 - DNA, 25 bp, Probe Sequence
ataactcaccttctctatccttgct

SEQ ID NO: 87508 - DNA, 25 bp, Probe Sequence
gttattgctcgttcctcagatgtat

SEQ ID NO: 87509 - DNA, 25 bp, Probe Sequence
taactcaccttctctatccttgctc

SEQ ID NO: 87510 - DNA, 25 bp, Probe Sequence
cctctggaatgtagactgtatatgt

SEQ ID NO: 87511 - DNA, 25 bp, Probe Sequence
tgttattgctcgttcctcagatgta

SEQ ID NO: 87512 - DNA, 25 bp, Probe Sequence
gcagtaagtgatcttggtagtatcc

SEQ ID NO: 87513 - DNA, 25 bp, Probe Sequence
ggcagtaagtgatcttggtagtatc

SEQ ID NO: 87514 - DNA, 25 bp, Probe Sequence
cctcctctggaatgtagactgtata

SEQ ID NO: 87515 - DNA, 25 bp, Probe Sequence
ttgtctgtggtgttatagtggtaac

SEQ ID NO: 87516 - DNA, 25 bp, Probe Sequence
ctctggaatgtagactgtatatgtt

SEQ ID NO: 87517 - DNA, 25 bp, Probe Sequence
gtctgtggtgttatagtggtaactg

SEQ ID NO: 87518 - DNA, 25 bp, Probe Sequence
tcctctggaatgtagactgtatatg

SEQ ID NO: 87519 - DNA, 25 bp, Probe Sequence
tgtctgtggtgttatagtggtaact

SEQ ID NO: 87520 - DNA, 25 bp, Probe Sequence
taataactcaccttctctatccttg

SEQ ID NO: 87521 - DNA, 25 bp, Probe Sequence
ctcctctggaatgtagactgtatat

SEQ ID NO: 87522 - DNA, 25 bp, Probe Sequence
tttgtctgtggtgttatagtggtaa

SEQ ID NO: 87523 - DNA, 25 bp, Probe Sequence
tattgctcgttcctcagatgtattt

SEQ ID NO: 87524 - DNA, 25 bp, Probe Sequence
gtttgtctgtggtgttatagtggta

SEQ ID NO: 87525 - DNA, 25 bp, Probe Sequence
caagtttgtctgtggtgttatagtg

SEQ ID NO: 87526 - DNA, 25 bp, Probe Sequence
tcctttctacattcccattcactta

SEQ ID NO: 87527 - DNA, 25 bp, Probe Sequence
gtcctttctacattcccattcactt

SEQ ID NO: 87528 - DNA, 25 bp, Probe Sequence
aactcaccttctctatccttgctca

SEQ ID NO: 87529 - DNA, 25 bp, Probe Sequence
ccacacagattgagaggtaagtatt

SEQ ID NO: 87530 - DNA, 25 bp, Probe Sequence
tccacacagattgagaggtaagtat

SEQ ID NO: 87531 - DNA, 25 bp, Probe Sequence
cacacagattgagaggtaagtattc

SEQ ID NO: 87532 - DNA, 25 bp, Probe Sequence
acacagattgagaggtaagtattct

SEQ ID NO: 87533 - DNA, 25 bp, Probe Sequence
tatcagccttgtgagtagtcagtaa

SEQ ID NO: 87534 - DNA, 25 bp, Probe Sequence
gtatcagccttgtgagtagtcagta

SEQ ID NO: 87535 - DNA, 25 bp, Probe Sequence
ctccacacagattgagaggtaagta

SEQ ID NO: 87536 - DNA, 25 bp, Probe Sequence
ttatcctgtatcagccttgtgagta

SEQ ID NO: 87537 - DNA, 25 bp, Probe Sequence
ttagatggtgccagaattgaggatt

SEQ ID NO: 87538 - DNA, 25 bp, Probe Sequence
tatcctgtatcagccttgtgagtag

SEQ ID NO: 87539 - DNA, 25 bp, Probe Sequence
atcagccttgtgagtagtcagtaac

SEQ ID NO: 87540 - DNA, 25 bp, Probe Sequence
agattgagaggtaagtattctaagc

SEQ ID NO: 87541 - DNA, 25 bp, Probe Sequence
cacagattgagaggtaagtattcta

SEQ ID NO: 87542 - DNA, 25 bp, Probe Sequence
aggtaagtattctaagctctctgca

SEQ ID NO: 87543 - DNA, 25 bp, Probe Sequence
gaggtaagtattctaagctctctgc

SEQ ID NO: 87544 - DNA, 25 bp, Probe Sequence
ctgtatcagccttgtgagtagtcag

SEQ ID NO: 87545 - DNA, 25 bp, Probe Sequence
tcagccttgtgagtagtcagtaact

SEQ ID NO: 87546 - DNA, 25 bp, Probe Sequence
tgtatcagccttgtgagtagtcagt

SEQ ID NO: 87547 - DNA, 25 bp, Probe Sequence
atcctgtatcagccttgtgagtagt

SEQ ID NO: 87548 - DNA, 25 bp, Probe Sequence
gattgagaggtaagtattctaagct

SEQ ID NO: 87549 - DNA, 25 bp, Probe Sequence
acagattgagaggtaagtattctaa

SEQ ID NO: 87550 - DNA, 25 bp, Probe Sequence
atctttatcctgtatcagccttgtg

SEQ ID NO: 87551 - DNA, 25 bp, Probe Sequence
ctttatcctgtatcagccttgtgag

SEQ ID NO: 87552 - DNA, 25 bp, Probe Sequence
tagatggtgccagaattgaggattt

SEQ ID NO: 87553 - DNA, 25 bp, Probe Sequence
aagtcagtccttacatagttaccat

SEQ ID NO: 87554 - DNA, 25 bp, Probe Sequence
agtcagtccttacatagttaccatg

SEQ ID NO: 87555 - DNA, 25 bp, Probe Sequence
aaagtcagtccttacatagttacca

SEQ ID NO: 87556 - DNA, 25 bp, Probe Sequence
cgggaagtctttgatttatggatat

SEQ ID NO: 87557 - DNA, 25 bp, Probe Sequence
agtctgagaatcactgttctgttaa

SEQ ID NO: 87558 - DNA, 25 bp, Probe Sequence
aagtctgagaatcactgttctgtta

SEQ ID NO: 87559 - DNA, 25 bp, Probe Sequence
tgctaaagtctgagaatcactgttc

SEQ ID NO: 87560 - DNA, 25 bp, Probe Sequence
ctgctaaagtctgagaatcactgtt

SEQ ID NO: 87561 - DNA, 25 bp, Probe Sequence
aaataactcatcatggcacctttag

SEQ ID NO: 87562 - DNA, 25 bp, Probe Sequence
aataacctttcattctttgctgagg

SEQ ID NO: 87563 - DNA, 25 bp, Probe Sequence
aaataacctttcattctttgctgag

SEQ ID NO: 87564 - DNA, 25 bp, Probe Sequence
aataactcatcatggcacctttagc

SEQ ID NO: 87565 - DNA, 25 bp, Probe Sequence
gtccttacatagttaccatgtgtct

SEQ ID NO: 87566 - DNA, 25 bp, Probe Sequence
agtccttacatagttaccatgtgtc

SEQ ID NO: 87567 - DNA, 25 bp, Probe Sequence
cagtccttacatagttaccatgtgt

SEQ ID NO: 87568 - DNA, 25 bp, Probe Sequence
tcagtccttacatagttaccatgtg

SEQ ID NO: 87569 - DNA, 25 bp, Probe Sequence
gtcagtccttacatagttaccatgt

SEQ ID NO: 87570 - DNA, 25 bp, Probe Sequence
ctcctgctaaagtctgagaatcact

SEQ ID NO: 87571 - DNA, 25 bp, Probe Sequence
ctttagcagtgccagaaaccatatc

SEQ ID NO: 87572 - DNA, 25 bp, Probe Sequence
tccttacatagttaccatgtgtctt

SEQ ID NO: 87573 - DNA, 25 bp, Probe Sequence
tcctgctaaagtctgagaatcactg

SEQ ID NO: 87574 - DNA, 25 bp, Probe Sequence
ataacctttcattctttgctgaggg

SEQ ID NO: 87575 - DNA, 25 bp, Probe Sequence
cctgctaaagtctgagaatcactgt

SEQ ID NO: 87576 - DNA, 25 bp, Probe Sequence
cctagacctactgaatcagaaactc

SEQ ID NO: 87577 - DNA, 25 bp, Probe Sequence
caccattcattctgtctgtctgttc

SEQ ID NO: 87578 - DNA, 25 bp, Probe Sequence
accattcattctgtctgtctgttcc

SEQ ID NO: 87579 - DNA, 25 bp, Probe Sequence
tttccttgctttcttgtttctgttt

SEQ ID NO: 87580 - DNA, 25 bp, Probe Sequence
ccaccattcattctgtctgtctgtt

SEQ ID NO: 87581 - DNA, 25 bp, Probe Sequence
agagggcagatgcttgatagattat

SEQ ID NO: 87582 - DNA, 25 bp, Probe Sequence
gagggcagatgcttgatagattatc

SEQ ID NO: 87583 - DNA, 25 bp, Probe Sequence
cagagggcagatgcttgatagatta

SEQ ID NO: 87584 - DNA, 25 bp, Probe Sequence
attcattctgtctgtctgttccctg

SEQ ID NO: 87585 - DNA, 25 bp, Probe Sequence
cattcattctgtctgtctgttccct

SEQ ID NO: 87586 - DNA, 25 bp, Probe Sequence
gtagattgacttgctcttgcctcac

SEQ ID NO: 87587 - DNA, 25 bp, Probe Sequence
cttggtagattgacttgctcttgcc

SEQ ID NO: 87588 - DNA, 25 bp, Probe Sequence
ccttggtagattgacttgctcttgc

SEQ ID NO: 87589 - DNA, 25 bp, Probe Sequence
gccttggtagattgacttgctcttg

SEQ ID NO: 87590 - DNA, 25 bp, Probe Sequence
tagattgacttgctcttgcctcact

SEQ ID NO: 87591 - DNA, 25 bp, Probe Sequence
gggcagatgcttgatagattatctt

SEQ ID NO: 87592 - DNA, 25 bp, Probe Sequence
ttggtagattgacttgctcttgcct

SEQ ID NO: 87593 - DNA, 25 bp, Probe Sequence
ggcagatgcttgatagattatcttt

SEQ ID NO: 87594 - DNA, 25 bp, Probe Sequence
agggcagatgcttgatagattatct

SEQ ID NO: 87595 - DNA, 25 bp, Probe Sequence
ccattcattctgtctgtctgttccc

SEQ ID NO: 87596 - DNA, 25 bp, Probe Sequence
ttccttgctttcttgtttctgtttt

SEQ ID NO: 87597 - DNA, 25 bp, Probe Sequence
ttttccttgctttcttgtttctgtt

SEQ ID NO: 87598 - DNA, 25 bp, Probe Sequence
tgttttgaaagtgaaatggggtttt

SEQ ID NO: 87599 - DNA, 25 bp, Probe Sequence
tcttttccttgctttcttgtttctg

SEQ ID NO: 87600 - DNA, 25 bp, Probe Sequence
atcttttccttgctttcttgtttct

SEQ ID NO: 87601 - DNA, 25 bp, Probe Sequence
caccattcattctgtctgtctgttc

SEQ ID NO: 87602 - DNA, 25 bp, Probe Sequence
accattcattctgtctgtctgttcc

SEQ ID NO: 87603 - DNA, 25 bp, Probe Sequence
tttccttgctttcttgtttctgttt

SEQ ID NO: 87604 - DNA, 25 bp, Probe Sequence
ccaccattcattctgtctgtctgtt

SEQ ID NO: 87605 - DNA, 25 bp, Probe Sequence
agagggcagatgcttgatagattat

SEQ ID NO: 87606 - DNA, 25 bp, Probe Sequence
gagggcagatgcttgatagattatc

SEQ ID NO: 87607 - DNA, 25 bp, Probe Sequence
cagagggcagatgcttgatagatta

SEQ ID NO: 87608 - DNA, 25 bp, Probe Sequence
attcattctgtctgtctgttccctg

SEQ ID NO: 87609 - DNA, 25 bp, Probe Sequence
cattcattctgtctgtctgttccct

SEQ ID NO: 87610 - DNA, 25 bp, Probe Sequence
gtagattgacttgctcttgcctcac

SEQ ID NO: 87611 - DNA, 25 bp, Probe Sequence
cttggtagattgacttgctcttgcc

SEQ ID NO: 87612 - DNA, 25 bp, Probe Sequence
ccttggtagattgacttgctcttgc

SEQ ID NO: 87613 - DNA, 25 bp, Probe Sequence
gccttggtagattgacttgctcttg

SEQ ID NO: 87614 - DNA, 25 bp, Probe Sequence
tagattgacttgctcttgcctcact

SEQ ID NO: 87615 - DNA, 25 bp, Probe Sequence
gggcagatgcttgatagattatctt

SEQ ID NO: 87616 - DNA, 25 bp, Probe Sequence
ttggtagattgacttgctcttgcct

SEQ ID NO: 87617 - DNA, 25 bp, Probe Sequence
ggcagatgcttgatagattatcttt

SEQ ID NO: 87618 - DNA, 25 bp, Probe Sequence
agggcagatgcttgatagattatct

SEQ ID NO: 87619 - DNA, 25 bp, Probe Sequence
ccattcattctgtctgtctgttccc

SEQ ID NO: 87620 - DNA, 25 bp, Probe Sequence
ttccttgctttcttgtttctgtttt

SEQ ID NO: 87621 - DNA, 25 bp, Probe Sequence
ttttccttgctttcttgtttctgtt

SEQ ID NO: 87622 - DNA, 25 bp, Probe Sequence
tgttttgaaagtgaaatggggtttt

SEQ ID NO: 87623 - DNA, 25 bp, Probe Sequence
tcttttccttgctttcttgtttctg

SEQ ID NO: 87624 - DNA, 25 bp, Probe Sequence
atcttttccttgctttcttgtttct

SEQ ID NO: 87625 - DNA, 25 bp, Probe Sequence
caataggaagagcaaccagttacta

SEQ ID NO: 87626 - DNA, 25 bp, Probe Sequence
taggaagagcaaccagttactatga

SEQ ID NO: 87627 - DNA, 25 bp, Probe Sequence
ataggaagagcaaccagttactatg

SEQ ID NO: 87628 - DNA, 25 bp, Probe Sequence
atctatgaccaataggaagagcaac

SEQ ID NO: 87629 - DNA, 25 bp, Probe Sequence
gaagagcaaccagttactatgagtg

SEQ ID NO: 87630 - DNA, 25 bp, Probe Sequence
aggaagagcaaccagttactatgag

SEQ ID NO: 87631 - DNA, 25 bp, Probe Sequence
tatgaccaataggaagagcaaccag

SEQ ID NO: 87632 - DNA, 25 bp, Probe Sequence
aataggaagagcaaccagttactat

SEQ ID NO: 87633 - DNA, 25 bp, Probe Sequence
agagcaaccagttactatgagtgaa

SEQ ID NO: 87634 - DNA, 25 bp, Probe Sequence
aagagcaaccagttactatgagtga

SEQ ID NO: 87635 - DNA, 25 bp, Probe Sequence
tatctatgaccaataggaagagcaa

SEQ ID NO: 87636 - DNA, 25 bp, Probe Sequence
ttatctatgaccaataggaagagca

SEQ ID NO: 87637 - DNA, 25 bp, Probe Sequence
gaccaataggaagagcaaccagtta

SEQ ID NO: 87638 - DNA, 25 bp, Probe Sequence
ccaataggaagagcaaccagttact

SEQ ID NO: 87639 - DNA, 25 bp, Probe Sequence
ggaagagcaaccagttactatgagt

SEQ ID NO: 87640 - DNA, 25 bp, Probe Sequence
accaataggaagagcaaccagttac

SEQ ID NO: 87641 - DNA, 25 bp, Probe Sequence
aagactgttaattcctcatgcgttg

SEQ ID NO: 87642 - DNA, 25 bp, Probe Sequence
tctatgaccaataggaagagcaacc

SEQ ID NO: 87643 - DNA, 25 bp, Probe Sequence
ctatgaccaataggaagagcaacca

SEQ ID NO: 87644 - DNA, 25 bp, Probe Sequence
gcccaataaagactgttaattcctc

SEQ ID NO: 87645 - DNA, 25 bp, Probe Sequence
agcccaataaagactgttaattcct

SEQ ID NO: 87646 - DNA, 25 bp, Probe Sequence
gagcccaataaagactgttaattcc

SEQ ID NO: 87647 - DNA, 25 bp, Probe Sequence
tgagcccaataaagactgttaattc

SEQ ID NO: 87648 - DNA, 25 bp, Probe Sequence
ctgagcccaataaagactgttaatt

SEQ ID NO: 87649 - DNA, 25 bp, Probe Sequence
caataggaagagcaaccagttacta

SEQ ID NO: 87650 - DNA, 25 bp, Probe Sequence
taggaagagcaaccagttactatga

SEQ ID NO: 87651 - DNA, 25 bp, Probe Sequence
ataggaagagcaaccagttactatg

SEQ ID NO: 87652 - DNA, 25 bp, Probe Sequence
atctatgaccaataggaagagcaac

SEQ ID NO: 87653 - DNA, 25 bp, Probe Sequence
gaagagcaaccagttactatgagtg

SEQ ID NO: 87654 - DNA, 25 bp, Probe Sequence
aggaagagcaaccagttactatgag

SEQ ID NO: 87655 - DNA, 25 bp, Probe Sequence
tatgaccaataggaagagcaaccag

SEQ ID NO: 87656 - DNA, 25 bp, Probe Sequence
aataggaagagcaaccagttactat

SEQ ID NO: 87657 - DNA, 25 bp, Probe Sequence
agagcaaccagttactatgagtgaa

SEQ ID NO: 87658 - DNA, 25 bp, Probe Sequence
aagagcaaccagttactatgagtga

SEQ ID NO: 87659 - DNA, 25 bp, Probe Sequence
tatctatgaccaataggaagagcaa

SEQ ID NO: 87660 - DNA, 25 bp, Probe Sequence
ttatctatgaccaataggaagagca

SEQ ID NO: 87661 - DNA, 25 bp, Probe Sequence
gaccaataggaagagcaaccagtta

SEQ ID NO: 87662 - DNA, 25 bp, Probe Sequence
ccaataggaagagcaaccagttact

SEQ ID NO: 87663 - DNA, 25 bp, Probe Sequence
ggaagagcaaccagttactatgagt

SEQ ID NO: 87664 - DNA, 25 bp, Probe Sequence
accaataggaagagcaaccagttac

SEQ ID NO: 87665 - DNA, 25 bp, Probe Sequence
aagactgttaattcctcatgcgttg

SEQ ID NO: 87666 - DNA, 25 bp, Probe Sequence
tctatgaccaataggaagagcaacc

SEQ ID NO: 87667 - DNA, 25 bp, Probe Sequence
ctatgaccaataggaagagcaacca

SEQ ID NO: 87668 - DNA, 25 bp, Probe Sequence
gcccaataaagactgttaattcctc

SEQ ID NO: 87669 - DNA, 25 bp, Probe Sequence
agcccaataaagactgttaattcct

SEQ ID NO: 87670 - DNA, 25 bp, Probe Sequence
gagcccaataaagactgttaattcc

SEQ ID NO: 87671 - DNA, 25 bp, Probe Sequence
tgagcccaataaagactgttaattc

SEQ ID NO: 87672 - DNA, 25 bp, Probe Sequence
ctgagcccaataaagactgttaatt

SEQ ID NO: 87673 - DNA, 25 bp, Probe Sequence
tcaggtagaggaacagagatagaat

SEQ ID NO: 87674 - DNA, 25 bp, Probe Sequence
atcaggtagaggaacagagatagaa

SEQ ID NO: 87675 - DNA, 25 bp, Probe Sequence
aatcaggtagaggaacagagataga

SEQ ID NO: 87676 - DNA, 25 bp, Probe Sequence
atataagaagtaggacctgagtgct

SEQ ID NO: 87677 - DNA, 25 bp, Probe Sequence
ggcaatataagaagtaggacctgag

SEQ ID NO: 87678 - DNA, 25 bp, Probe Sequence
aatataagaagtaggacctgagtgc

SEQ ID NO: 87679 - DNA, 25 bp, Probe Sequence
gcaatataagaagtaggacctgagt

SEQ ID NO: 87680 - DNA, 25 bp, Probe Sequence
caggtagaggaacagagatagaatt

SEQ ID NO: 87681 - DNA, 25 bp, Probe Sequence
tataagaagtaggacctgagtgctg

SEQ ID NO: 87682 - DNA, 25 bp, Probe Sequence
gtaatcaggtagaggaacagagata

SEQ ID NO: 87683 - DNA, 25 bp, Probe Sequence
taatcaggtagaggaacagagatag

SEQ ID NO: 87684 - DNA, 25 bp, Probe Sequence
tgtaatcaggtagaggaacagagat

SEQ ID NO: 87685 - DNA, 25 bp, Probe Sequence
caatataagaagtaggacctgagtg

SEQ ID NO: 87686 - DNA, 25 bp, Probe Sequence
agaagaaagagcaatcctaagaaca

SEQ ID NO: 87687 - DNA, 25 bp, Probe Sequence
cagagaagaaagagcaatcctaaga

SEQ ID NO: 87688 - DNA, 25 bp, Probe Sequence
aatccagaagaagaaaccaccatta

SEQ ID NO: 87689 - DNA, 25 bp, Probe Sequence
atttaagttagggatggagagaagc

SEQ ID NO: 87690 - DNA, 25 bp, Probe Sequence
gagaagaaagagcaatcctaagaac

SEQ ID NO: 87691 - DNA, 25 bp, Probe Sequence
agagaagaaagagcaatcctaagaa

SEQ ID NO: 87692 - DNA, 25 bp, Probe Sequence
atccagaagaagaaaccaccattaa

SEQ ID NO: 87693 - DNA, 25 bp, Probe Sequence
cattaacagtcctttcaatcagtgg

SEQ ID NO: 87694 - DNA, 25 bp, Probe Sequence
ttggatttaagttagggatggagag

SEQ ID NO: 87695 - DNA, 25 bp, Probe Sequence
attaacagtcctttcaatcagtggt

SEQ ID NO: 87696 - DNA, 25 bp, Probe Sequence
tggatttaagttagggatggagaga

SEQ ID NO: 87697 - DNA, 25 bp, Probe Sequence
ccaccataatgagttctgaatccaa

SEQ ID NO: 87698 - DNA, 25 bp, Probe Sequence
caccaccataatgagttctgaatcc

SEQ ID NO: 87699 - DNA, 25 bp, Probe Sequence
ccaccaccataatgagttctgaatc

SEQ ID NO: 87700 - DNA, 25 bp, Probe Sequence
accaccataatgagttctgaatcca

SEQ ID NO: 87701 - DNA, 25 bp, Probe Sequence
cggataacaattcacacaggaacag

SEQ ID NO: 87702 - DNA, 25 bp, Probe Sequence
gacggataacaattcacacaggaac

SEQ ID NO: 87703 - DNA, 25 bp, Probe Sequence
taacaattcacacaggaacagctat

SEQ ID NO: 87704 - DNA, 25 bp, Probe Sequence
ataacaattcacacaggaacagcta

SEQ ID NO: 87705 - DNA, 25 bp, Probe Sequence
ggataacaattcacacaggaacagc

SEQ ID NO: 87706 - DNA, 25 bp, Probe Sequence
acggataacaattcacacaggaaca

SEQ ID NO: 87707 - DNA, 25 bp, Probe Sequence
caccataatgagttctgaatccaaa

SEQ ID NO: 87708 - DNA, 25 bp, Probe Sequence
tcttcattctgttcttgcgttcctt

SEQ ID NO: 87709 - DNA, 25 bp, Probe Sequence
ttcttcattctgttcttgcgttcct

SEQ ID NO: 87710 - DNA, 25 bp, Probe Sequence
atgaccatttgtttcctctgaagta

SEQ ID NO: 87711 - DNA, 25 bp, Probe Sequence
gataacaattcacacaggaacagct

SEQ ID NO: 87712 - DNA, 25 bp, Probe Sequence
accatttgtttcctctgaagtagtc

SEQ ID NO: 87713 - DNA, 25 bp, Probe Sequence
gaccatttgtttcctctgaagtagt

SEQ ID NO: 87714 - DNA, 25 bp, Probe Sequence
tgaccatttgtttcctctgaagtag

SEQ ID NO: 87715 - DNA, 25 bp, Probe Sequence
gccaccaccataatgagttctgaat

SEQ ID NO: 87716 - DNA, 25 bp, Probe Sequence
ctttcttcattctgttcttgcgttc

SEQ ID NO: 87717 - DNA, 25 bp, Probe Sequence
aacaattcacacaggaacagctatg

SEQ ID NO: 87718 - DNA, 25 bp, Probe Sequence
gcataatccagggaatcataaatca

SEQ ID NO: 87719 - DNA, 25 bp, Probe Sequence
cctgactttcttcattctgttcttg

SEQ ID NO: 87720 - DNA, 25 bp, Probe Sequence
actttcttcattctgttcttgcgtt

SEQ ID NO: 87721 - DNA, 25 bp, Probe Sequence
taataaagacaaagccaccctgaaa

SEQ ID NO: 87722 - DNA, 25 bp, Probe Sequence
ctaataaagacaaagccaccctgaa

SEQ ID NO: 87723 - DNA, 25 bp, Probe Sequence
ttaatcctaaaggtggctgtaatca

SEQ ID NO: 87724 - DNA, 25 bp, Probe Sequence
taatcctaaaggtggctgtaatcat

SEQ ID NO: 87725 - DNA, 25 bp, Probe Sequence
tgtatttaatcctaaaggtggctgt

SEQ ID NO: 87726 - DNA, 25 bp, Probe Sequence
tgtgtatttaatcctaaaggtggct

SEQ ID NO: 87727 - DNA, 25 bp, Probe Sequence
gtgtatttaatcctaaaggtggctg

SEQ ID NO: 87728 - DNA, 25 bp, Probe Sequence
gactaataaagacaaagccaccctg

SEQ ID NO: 87729 - DNA, 25 bp, Probe Sequence
ctgactaataaagacaaagccaccc

SEQ ID NO: 87730 - DNA, 25 bp, Probe Sequence
cctgagtgtattgcatctcttgatt

SEQ ID NO: 87731 - DNA, 25 bp, Probe Sequence
cataatgtcacagttgcctcaaatg

SEQ ID NO: 87732 - DNA, 25 bp, Probe Sequence
ttgtgtatttaatcctaaaggtggc

SEQ ID NO: 87733 - DNA, 25 bp, Probe Sequence
actaataaagacaaagccaccctga

SEQ ID NO: 87734 - DNA, 25 bp, Probe Sequence
tgactaataaagacaaagccaccct

SEQ ID NO: 87735 - DNA, 25 bp, Probe Sequence
ataatgtcacagttgcctcaaatga

SEQ ID NO: 87736 - DNA, 25 bp, Probe Sequence
tttaatcctaaaggtggctgtaatc

SEQ ID NO: 87737 - DNA, 25 bp, Probe Sequence
aatcctaaaggtggctgtaatcatg

SEQ ID NO: 87738 - DNA, 25 bp, Probe Sequence
gcaaatgctgactaataaagacaaa

SEQ ID NO: 87739 - DNA, 25 bp, Probe Sequence
gtatttaatcctaaaggtggctgta

SEQ ID NO: 87740 - DNA, 25 bp, Probe Sequence
atttaatcctaaaggtggctgtaat

SEQ ID NO: 87741 - DNA, 25 bp, Probe Sequence
ttctcattgcataatgtcacagttg

SEQ ID NO: 87742 - DNA, 25 bp, Probe Sequence
ggcaattgtaactccatctaatcaa

SEQ ID NO: 87743 - DNA, 25 bp, Probe Sequence
tcctagatgcaaatgctgactaata

SEQ ID NO: 87744 - DNA, 25 bp, Probe Sequence
ttcctagatgcaaatgctgactaat

SEQ ID NO: 87745 - DNA, 25 bp, Probe Sequence
tagaagagatcgccagacatactta

SEQ ID NO: 87746 - DNA, 25 bp, Probe Sequence
agagtcaaggagtggtagaagagat

SEQ ID NO: 87747 - DNA, 25 bp, Probe Sequence
ggcagaggatgacttcatgtatatt

SEQ ID NO: 87748 - DNA, 25 bp, Probe Sequence
aagagtcaaggagtggtagaagaga

SEQ ID NO: 87749 - DNA, 25 bp, Probe Sequence
aagtctctctcttcatgtatcatcc

SEQ ID NO: 87750 - DNA, 25 bp, Probe Sequence
aggcagaggatgacttcatgtatat

SEQ ID NO: 87751 - DNA, 25 bp, Probe Sequence
aaggcagaggatgacttcatgtata

SEQ ID NO: 87752 - DNA, 25 bp, Probe Sequence
gagtcaaggagtggtagaagagatc

SEQ ID NO: 87753 - DNA, 25 bp, Probe Sequence
agaagagatcgccagacatacttag

SEQ ID NO: 87754 - DNA, 25 bp, Probe Sequence
attagcactccacactcagattgta

SEQ ID NO: 87755 - DNA, 25 bp, Probe Sequence
gtagaagagatcgccagacatactt

SEQ ID NO: 87756 - DNA, 25 bp, Probe Sequence
atctgctactggaagtctctctctt

SEQ ID NO: 87757 - DNA, 25 bp, Probe Sequence
ttagcactccacactcagattgtag

SEQ ID NO: 87758 - DNA, 25 bp, Probe Sequence
attgtttattctctgctttccttgg

SEQ ID NO: 87759 - DNA, 25 bp, Probe Sequence
aattagcactccacactcagattgt

SEQ ID NO: 87760 - DNA, 25 bp, Probe Sequence
taatttcagagtcatccaagagtcc

SEQ ID NO: 87761 - DNA, 25 bp, Probe Sequence
gaagagatcgccagacatacttagg

SEQ ID NO: 87762 - DNA, 25 bp, Probe Sequence
gtttctcagtaaagtcaatttggca

SEQ ID NO: 87763 - DNA, 25 bp, Probe Sequence
tgtttctcagtaaagtcaatttggc

SEQ ID NO: 87764 - DNA, 25 bp, Probe Sequence
tttctcagtaaagtcaatttggcaa

SEQ ID NO: 87765 - DNA, 25 bp, Probe Sequence
atcatagcctcaaggaaagaagaaa

SEQ ID NO: 87766 - DNA, 25 bp, Probe Sequence
ttctcagtaaagtcaatttggcaat

SEQ ID NO: 87767 - DNA, 25 bp, Probe Sequence
tcatagcctcaaggaaagaagaaag

SEQ ID NO: 87768 - DNA, 25 bp, Probe Sequence
tgtttattctctgctttccttggat

SEQ ID NO: 87769 - DNA, 25 bp, Probe Sequence
ttcaagtaggaccatagcgatacta

SEQ ID NO: 87770 - DNA, 25 bp, Probe Sequence
tcaagtaggaccatagcgatactag

SEQ ID NO: 87771 - DNA, 25 bp, Probe Sequence
atagcgatactagccctttactcat

SEQ ID NO: 87772 - DNA, 25 bp, Probe Sequence
acaacaccaaatcattcaatgcttt

SEQ ID NO: 87773 - DNA, 25 bp, Probe Sequence
aacaacaccaaatcattcaatgctt

SEQ ID NO: 87774 - DNA, 25 bp, Probe Sequence
aaacaacaccaaatcattcaatgct

SEQ ID NO: 87775 - DNA, 25 bp, Probe Sequence
taaacaacaccaaatcattcaatgc

SEQ ID NO: 87776 - DNA, 25 bp, Probe Sequence
caagtaggaccatagcgatactagc

SEQ ID NO: 87777 - DNA, 25 bp, Probe Sequence
catagcgatactagccctttactca

SEQ ID NO: 87778 - DNA, 25 bp, Probe Sequence
tttactcatgccaaattcacagttt

SEQ ID NO: 87779 - DNA, 25 bp, Probe Sequence
ctttactcatgccaaattcacagtt

SEQ ID NO: 87780 - DNA, 25 bp, Probe Sequence
tagcgatactagccctttactcatg

SEQ ID NO: 87781 - DNA, 25 bp, Probe Sequence
aacgaatcattctaatcactgtatt

SEQ ID NO: 87782 - DNA, 25 bp, Probe Sequence
tctaaacaacaccaaatcattcaat

SEQ ID NO: 87783 - DNA, 25 bp, Probe Sequence
atctaaacaacaccaaatcattcaa

SEQ ID NO: 87784 - DNA, 25 bp, Probe Sequence
ccatagcgatactagccctttactc

SEQ ID NO: 87785 - DNA, 25 bp, Probe Sequence
aatttggagcatttccgattacttt

SEQ ID NO: 87786 - DNA, 25 bp, Probe Sequence
atttggagcatttccgattactttg

SEQ ID NO: 87787 - DNA, 25 bp, Probe Sequence
tactagccctttactcatgccaaat

SEQ ID NO: 87788 - DNA, 25 bp, Probe Sequence
atactagccctttactcatgccaaa

SEQ ID NO: 87789 - DNA, 25 bp, Probe Sequence
gaccatagcgatactagccctttac

SEQ ID NO: 87790 - DNA, 25 bp, Probe Sequence
ctagccctttactcatgccaaattc

SEQ ID NO: 87791 - DNA, 25 bp, Probe Sequence
ctaaacaacaccaaatcattcaatg

SEQ ID NO: 87792 - DNA, 25 bp, Probe Sequence
gatactagccctttactcatgccaa

SEQ ID NO: 87793 - DNA, 25 bp, Probe Sequence
catcttcccagaatcctttgcacac

SEQ ID NO: 87794 - DNA, 25 bp, Probe Sequence
ttggcatatgtggtcctcgttcatc

SEQ ID NO: 87795 - DNA, 25 bp, Probe Sequence
cttggcatatgtggtcctcgttcat

SEQ ID NO: 87796 - DNA, 25 bp, Probe Sequence
ccacccatcttcccagaatcctttg

SEQ ID NO: 87797 - DNA, 25 bp, Probe Sequence
ccatcttcccagaatcctttgcaca

SEQ ID NO: 87798 - DNA, 25 bp, Probe Sequence
atcgccaataggactatgtattcac

SEQ ID NO: 87799 - DNA, 25 bp, Probe Sequence
cgccaataggactatgtattcactg

SEQ ID NO: 87800 - DNA, 25 bp, Probe Sequence
tcgccaataggactatgtattcact

SEQ ID NO: 87801 - DNA, 25 bp, Probe Sequence
gccaataggactatgtattcactgc

SEQ ID NO: 87802 - DNA, 25 bp, Probe Sequence
gatcgccaataggactatgtattca

SEQ ID NO: 87803 - DNA, 25 bp, Probe Sequence
tgatcgccaataggactatgtattc

SEQ ID NO: 87804 - DNA, 25 bp, Probe Sequence
gtgatcgccaataggactatgtatt

SEQ ID NO: 87805 - DNA, 25 bp, Probe Sequence
agtgatcgccaataggactatgtat

SEQ ID NO: 87806 - DNA, 25 bp, Probe Sequence
cagtgatcgccaataggactatgta

SEQ ID NO: 87807 - DNA, 25 bp, Probe Sequence
cccacttatcctttcttcctattct

SEQ ID NO: 87808 - DNA, 25 bp, Probe Sequence
gatttctgtattccttctccactcc

SEQ ID NO: 87809 - DNA, 25 bp, Probe Sequence
gcccacttatcctttcttcctattc

SEQ ID NO: 87810 - DNA, 25 bp, Probe Sequence
ccaataggactatgtattcactgca

SEQ ID NO: 87811 - DNA, 25 bp, Probe Sequence
ttcttcctattctgtgaaaccttcc

SEQ ID NO: 87812 - DNA, 25 bp, Probe Sequence
ccacttatcctttcttcctattctg

SEQ ID NO: 87813 - DNA, 25 bp, Probe Sequence
ttactcatatcctcagcttcttgcc

SEQ ID NO: 87814 - DNA, 25 bp, Probe Sequence
atttctgtattccttctccactccc

SEQ ID NO: 87815 - DNA, 25 bp, Probe Sequence
ccgacagtatttactcatatcctca

SEQ ID NO: 87816 - DNA, 25 bp, Probe Sequence
gccgacagtatttactcatatcctc

SEQ ID NO: 87817 - DNA, 25 bp, Probe Sequence
acttatcctttcttcctattctgtg

SEQ ID NO: 87818 - DNA, 25 bp, Probe Sequence
cacttatcctttcttcctattctgt

SEQ ID NO: 87819 - DNA, 25 bp, Probe Sequence
cgaggatgtgggcttatttgtaaac

SEQ ID NO: 87820 - DNA, 25 bp, Probe Sequence
cttatcctttcttcctattctgtga

SEQ ID NO: 87821 - DNA, 25 bp, Probe Sequence
gacagtatttactcatatcctcagc

SEQ ID NO: 87822 - DNA, 25 bp, Probe Sequence
gtgagttgacataagaaccatagtt

SEQ ID NO: 87823 - DNA, 25 bp, Probe Sequence
aacagacactacataagacattgaa

SEQ ID NO: 87824 - DNA, 25 bp, Probe Sequence
tgtgagttgacataagaaccatagt

SEQ ID NO: 87825 - DNA, 25 bp, Probe Sequence
agttgtgagttgacataagaaccat

SEQ ID NO: 87826 - DNA, 25 bp, Probe Sequence
atgagttgtgagttgacataagaac

SEQ ID NO: 87827 - DNA, 25 bp, Probe Sequence
gagttgtgagttgacataagaacca

SEQ ID NO: 87828 - DNA, 25 bp, Probe Sequence
tgagttgtgagttgacataagaacc

SEQ ID NO: 87829 - DNA, 25 bp, Probe Sequence
gttgtgagttgacataagaaccata

SEQ ID NO: 87830 - DNA, 25 bp, Probe Sequence
ttgtgagttgacataagaaccatag

SEQ ID NO: 87831 - DNA, 25 bp, Probe Sequence
aatgagttgtgagttgacataagaa

SEQ ID NO: 87832 - DNA, 25 bp, Probe Sequence
taacagacactacataagacattga

SEQ ID NO: 87833 - DNA, 25 bp, Probe Sequence
ttaacagacactacataagacattg

SEQ ID NO: 87834 - DNA, 25 bp, Probe Sequence
cagtggtttcagtatgacaatcttt

SEQ ID NO: 87835 - DNA, 25 bp, Probe Sequence
ttaatttccttgaatcagagccatt

SEQ ID NO: 87836 - DNA, 25 bp, Probe Sequence
tttaatttccttgaatcagagccat

SEQ ID NO: 87837 - DNA, 25 bp, Probe Sequence
aatcagagccattctaaagtgactc

SEQ ID NO: 87838 - DNA, 25 bp, Probe Sequence
acagacactacataagacattgaaa

SEQ ID NO: 87839 - DNA, 25 bp, Probe Sequence
tttatggcagtggtttcagtatgac

SEQ ID NO: 87840 - DNA, 25 bp, Probe Sequence
gcagtggtttcagtatgacaatctt

SEQ ID NO: 87841 - DNA, 25 bp, Probe Sequence
aaatgagttgtgagttgacataaga

SEQ ID NO: 87842 - DNA, 25 bp, Probe Sequence
atctaaatgagttgtgagttgacat

SEQ ID NO: 87843 - DNA, 25 bp, Probe Sequence
cttgaatcagagccattctaaagtg

SEQ ID NO: 87844 - DNA, 25 bp, Probe Sequence
atttccttgaatcagagccattcta

SEQ ID NO: 87845 - DNA, 25 bp, Probe Sequence
ttgaatcagagccattctaaagtga

SEQ ID NO: 87846 - DNA, 25 bp, Probe Sequence
ggtagatgagtaggaagattaggac

SEQ ID NO: 87847 - DNA, 25 bp, Probe Sequence
aggtagatgagtaggaagattagga

SEQ ID NO: 87848 - DNA, 25 bp, Probe Sequence
atattaggaatgtgaagccagaatg

SEQ ID NO: 87849 - DNA, 25 bp, Probe Sequence
aaggtagatgagtaggaagattagg

SEQ ID NO: 87850 - DNA, 25 bp, Probe Sequence
catattaggaatgtgaagccagaat

SEQ ID NO: 87851 - DNA, 25 bp, Probe Sequence
gcatattaggaatgtgaagccagaa

SEQ ID NO: 87852 - DNA, 25 bp, Probe Sequence
ggtatatggatctgataactgaggt

SEQ ID NO: 87853 - DNA, 25 bp, Probe Sequence
tggtatatggatctgataactgagg

SEQ ID NO: 87854 - DNA, 25 bp, Probe Sequence
ttgcctcttgacataattggtatat

SEQ ID NO: 87855 - DNA, 25 bp, Probe Sequence
gtagatgagtaggaagattaggact

SEQ ID NO: 87856 - DNA, 25 bp, Probe Sequence
gcctcttgacataattggtatatgg

SEQ ID NO: 87857 - DNA, 25 bp, Probe Sequence
ctgccaactgagttatctagtgata

SEQ ID NO: 87858 - DNA, 25 bp, Probe Sequence
tgccaactgagttatctagtgatat

SEQ ID NO: 87859 - DNA, 25 bp, Probe Sequence
gccaactgagttatctagtgatatg

SEQ ID NO: 87860 - DNA, 25 bp, Probe Sequence
tgcctcttgacataattggtatatg

SEQ ID NO: 87861 - DNA, 25 bp, Probe Sequence
cattatgtaattcttggtcagctca

SEQ ID NO: 87862 - DNA, 25 bp, Probe Sequence
gtatatggatctgataactgaggtc

SEQ ID NO: 87863 - DNA, 25 bp, Probe Sequence
tattaggaatgtgaagccagaatgg

SEQ ID NO: 87864 - DNA, 25 bp, Probe Sequence
tatatcctattcccttcctcccatt

SEQ ID NO: 87865 - DNA, 25 bp, Probe Sequence
atatcctattcccttcctcccattt

SEQ ID NO: 87866 - DNA, 25 bp, Probe Sequence
actgagttatctagtgatatgacct

SEQ ID NO: 87867 - DNA, 25 bp, Probe Sequence
ctatgggaatgatgctttggaaatt

SEQ ID NO: 87868 - DNA, 25 bp, Probe Sequence
tgggaatgatgctttggaaattatt

SEQ ID NO: 87869 - DNA, 25 bp, Probe Sequence
tatatggatctgataactgaggtcc

SEQ ID NO: 87870 - DNA, 25 bp, Probe Sequence
gagagacttgggtcagacttagagg

SEQ ID NO: 87871 - DNA, 25 bp, Probe Sequence
ggagagacttgggtcagacttagag

SEQ ID NO: 87872 - DNA, 25 bp, Probe Sequence
agagacttgggtcagacttagaggg

SEQ ID NO: 87873 - DNA, 25 bp, Probe Sequence
gggagagacttgggtcagacttaga

SEQ ID NO: 87874 - DNA, 25 bp, Probe Sequence
tgggagagacttgggtcagacttag

SEQ ID NO: 87875 - DNA, 25 bp, Probe Sequence
ctgggagagacttgggtcagactta

SEQ ID NO: 87876 - DNA, 25 bp, Probe Sequence
ttgggtcagacttagaggggacttc

SEQ ID NO: 87877 - DNA, 25 bp, Probe Sequence
cttgggtcagacttagaggggactt

SEQ ID NO: 87878 - DNA, 25 bp, Probe Sequence
aactcttcctcatcatctcattcaa

SEQ ID NO: 87879 - DNA, 25 bp, Probe Sequence
actcttcctcatcatctcattcaat

SEQ ID NO: 87880 - DNA, 25 bp, Probe Sequence
atccaataagaatctactgagagcc

SEQ ID NO: 87881 - DNA, 25 bp, Probe Sequence
caataagaatctactgagagccgtc

SEQ ID NO: 87882 - DNA, 25 bp, Probe Sequence
ctcttcctcatcatctcattcaatt

SEQ ID NO: 87883 - DNA, 25 bp, Probe Sequence
aataagaatctactgagagccgtca

SEQ ID NO: 87884 - DNA, 25 bp, Probe Sequence
tccaataagaatctactgagagccg

SEQ ID NO: 87885 - DNA, 25 bp, Probe Sequence
ccaataagaatctactgagagccgt

SEQ ID NO: 87886 - DNA, 25 bp, Probe Sequence
tatccaataagaatctactgagagc

SEQ ID NO: 87887 - DNA, 25 bp, Probe Sequence
aaactcttcctcatcatctcattca

SEQ ID NO: 87888 - DNA, 25 bp, Probe Sequence
caaactcttcctcatcatctcattc

SEQ ID NO: 87889 - DNA, 25 bp, Probe Sequence
gcaaactcttcctcatcatctcatt

SEQ ID NO: 87890 - DNA, 25 bp, Probe Sequence
tagcaaactcttcctcatcatctca

SEQ ID NO: 87891 - DNA, 25 bp, Probe Sequence
tttctagcaaactcttcctcatcat

SEQ ID NO: 87892 - DNA, 25 bp, Probe Sequence
acctttctctttctagcaaactctt

SEQ ID NO: 87893 - DNA, 25 bp, Probe Sequence
ttctagcaaactcttcctcatcatc

SEQ ID NO: 87894 - DNA, 25 bp, Probe Sequence
tctttctagcaaactcttcctcatc

SEQ ID NO: 87895 - DNA, 25 bp, Probe Sequence
ctctttctagcaaactcttcctcat

SEQ ID NO: 87896 - DNA, 25 bp, Probe Sequence
ttctctttctagcaaactcttcctc

SEQ ID NO: 87897 - DNA, 25 bp, Probe Sequence
tttctctttctagcaaactcttcct

SEQ ID NO: 87898 - DNA, 25 bp, Probe Sequence
ctttctctttctagcaaactcttcc

SEQ ID NO: 87899 - DNA, 25 bp, Probe Sequence
cctttctctttctagcaaactcttc

SEQ ID NO: 87900 - DNA, 25 bp, Probe Sequence
ctttctagcaaactcttcctcatca

SEQ ID NO: 87901 - DNA, 25 bp, Probe Sequence
ctagcaaactcttcctcatcatctc

SEQ ID NO: 87902 - DNA, 25 bp, Probe Sequence
ccttgaagaactcctggtatgatta

SEQ ID NO: 87903 - DNA, 25 bp, Probe Sequence
tccttgaagaactcctggtatgatt

SEQ ID NO: 87904 - DNA, 25 bp, Probe Sequence
ttccttgaagaactcctggtatgat

SEQ ID NO: 87905 - DNA, 25 bp, Probe Sequence
tgaagaactcctggtatgattatct

SEQ ID NO: 87906 - DNA, 25 bp, Probe Sequence
ttgaagaactcctggtatgattatc

SEQ ID NO: 87907 - DNA, 25 bp, Probe Sequence
cttgaagaactcctggtatgattat

SEQ ID NO: 87908 - DNA, 25 bp, Probe Sequence
ttaatgtggtgttctgttctcagtt

SEQ ID NO: 87909 - DNA, 25 bp, Probe Sequence
taatgtggtgttctgttctcagttc

SEQ ID NO: 87910 - DNA, 25 bp, Probe Sequence
tccttatacatggtgtggtcagatt

SEQ ID NO: 87911 - DNA, 25 bp, Probe Sequence
atttccttgaagaactcctggtatg

SEQ ID NO: 87912 - DNA, 25 bp, Probe Sequence
ttatttccttgaagaactcctggta

SEQ ID NO: 87913 - DNA, 25 bp, Probe Sequence
gtccttatacatggtgtggtcagat

SEQ ID NO: 87914 - DNA, 25 bp, Probe Sequence
tatttccttgaagaactcctggtat

SEQ ID NO: 87915 - DNA, 25 bp, Probe Sequence
atgtggtgttctgttctcagttcat

SEQ ID NO: 87916 - DNA, 25 bp, Probe Sequence
gttatttccttgaagaactcctggt

SEQ ID NO: 87917 - DNA, 25 bp, Probe Sequence
ttggtgtcgtctctcatgttagaag

SEQ ID NO: 87918 - DNA, 25 bp, Probe Sequence
tttccttgaagaactcctggtatga

SEQ ID NO: 87919 - DNA, 25 bp, Probe Sequence
aatgtggtgttctgttctcagttca

SEQ ID NO: 87920 - DNA, 25 bp, Probe Sequence
ggttatttccttgaagaactcctgg

SEQ ID NO: 87921 - DNA, 25 bp, Probe Sequence
catttagtttgtcctccaagttact

SEQ ID NO: 87922 - DNA, 25 bp, Probe Sequence
gaacatttagtttgtcctccaagtt

SEQ ID NO: 87923 - DNA, 25 bp, Probe Sequence
ttgaacatttagtttgtcctccaag

SEQ ID NO: 87924 - DNA, 25 bp, Probe Sequence
tgaacatttagtttgtcctccaagt

SEQ ID NO: 87925 - DNA, 25 bp, Probe Sequence
tttgaacatttagtttgtcctccaa

SEQ ID NO: 87926 - DNA, 25 bp, Probe Sequence
ggtcttcctacttaggtggttaatt

SEQ ID NO: 87927 - DNA, 25 bp, Probe Sequence
aggtcttcctacttaggtggttaat

SEQ ID NO: 87928 - DNA, 25 bp, Probe Sequence
aaaggaaataccaaatgagttagcc

SEQ ID NO: 87929 - DNA, 25 bp, Probe Sequence
gccagattgttgtcctgacatataa

SEQ ID NO: 87930 - DNA, 25 bp, Probe Sequence
aaggaaataccaaatgagttagccc

SEQ ID NO: 87931 - DNA, 25 bp, Probe Sequence
ggaaataccaaatgagttagcccat

SEQ ID NO: 87932 - DNA, 25 bp, Probe Sequence
agccagattgttgtcctgacatata

SEQ ID NO: 87933 - DNA, 25 bp, Probe Sequence
ggtggttaatttcctggtcttcaaa

SEQ ID NO: 87934 - DNA, 25 bp, Probe Sequence
gtggttaatttcctggtcttcaaat

SEQ ID NO: 87935 - DNA, 25 bp, Probe Sequence
aggaaataccaaatgagttagccca

SEQ ID NO: 87936 - DNA, 25 bp, Probe Sequence
tggttaatttcctggtcttcaaatc

SEQ ID NO: 87937 - DNA, 25 bp, Probe Sequence
ggttaatttcctggtcttcaaatct

SEQ ID NO: 87938 - DNA, 25 bp, Probe Sequence
gaaataccaaatgagttagcccatg

SEQ ID NO: 87939 - DNA, 25 bp, Probe Sequence
taggtcttcctacttaggtggttaa

SEQ ID NO: 87940 - DNA, 25 bp, Probe Sequence
ttaggtcttcctacttaggtggtta

SEQ ID NO: 87941 - DNA, 25 bp, Probe Sequence
attaggtcttcctacttaggtggtt

SEQ ID NO: 87942 - DNA, 25 bp, Probe Sequence
aatttcctggtcttcaaatctcttt

SEQ ID NO: 87943 - DNA, 25 bp, Probe Sequence
tacttaggtggttaatttcctggtc

SEQ ID NO: 87944 - DNA, 25 bp, Probe Sequence
ctacttaggtggttaatttcctggt

SEQ ID NO: 87945 - DNA, 25 bp, Probe Sequence
ttaggtggttaatttcctggtcttc

SEQ ID NO: 87946 - DNA, 25 bp, Probe Sequence
cttaggtggttaatttcctggtctt

SEQ ID NO: 87947 - DNA, 25 bp, Probe Sequence
cattaggtcttcctacttaggtggt

SEQ ID NO: 87948 - DNA, 25 bp, Probe Sequence
gagcattaggtcttcctacttaggt

SEQ ID NO: 87949 - DNA, 25 bp, Probe Sequence
agcattaggtcttcctacttaggtg

SEQ ID NO: 87950 - DNA, 25 bp, Probe Sequence
tattgttggtaaggaatatctggcg

SEQ ID NO: 87951 - DNA, 25 bp, Probe Sequence
ctattgttggtaaggaatatctggc

SEQ ID NO: 87952 - DNA, 25 bp, Probe Sequence
tgcctattgttggtaaggaatatct

SEQ ID NO: 87953 - DNA, 25 bp, Probe Sequence
gcctattgttggtaaggaatatctg

SEQ ID NO: 87954 - DNA, 25 bp, Probe Sequence
tctgtcaagtggatattgtcctaag

SEQ ID NO: 87955 - DNA, 25 bp, Probe Sequence
atctgtcaagtggatattgtcctaa

SEQ ID NO: 87956 - DNA, 25 bp, Probe Sequence
cctattgttggtaaggaatatctgg

SEQ ID NO: 87957 - DNA, 25 bp, Probe Sequence
atgcctattgttggtaaggaatatc

SEQ ID NO: 87958 - DNA, 25 bp, Probe Sequence
ctgtcaagtggatattgtcctaagc

SEQ ID NO: 87959 - DNA, 25 bp, Probe Sequence
gatctgtcaagtggatattgtccta

SEQ ID NO: 87960 - DNA, 25 bp, Probe Sequence
tcatgcctattgttggtaaggaata

SEQ ID NO: 87961 - DNA, 25 bp, Probe Sequence
ttcatgcctattgttggtaaggaat

SEQ ID NO: 87962 - DNA, 25 bp, Probe Sequence
catgcctattgttggtaaggaatat

SEQ ID NO: 87963 - DNA, 25 bp, Probe Sequence
tataactggacagaagcattctcag

SEQ ID NO: 87964 - DNA, 25 bp, Probe Sequence
tggtaagcggtaatacatatggaag

SEQ ID NO: 87965 - DNA, 25 bp, Probe Sequence
ctggtaagcggtaatacatatggaa

SEQ ID NO: 87966 - DNA, 25 bp, Probe Sequence
atataactggacagaagcattctca

SEQ ID NO: 87967 - DNA, 25 bp, Probe Sequence
catatataactggacagaagcattc

SEQ ID NO: 87968 - DNA, 25 bp, Probe Sequence
cggtaatacatatggaagctacaca

SEQ ID NO: 87969 - DNA, 25 bp, Probe Sequence
ggatctgtcaagtggatattgtcct

SEQ ID NO: 87970 - DNA, 25 bp, Probe Sequence
ccatatataactggacagaagcatt

SEQ ID NO: 87971 - DNA, 25 bp, Probe Sequence
tatgctgtatctactcaactaacaa

SEQ ID NO: 87972 - DNA, 25 bp, Probe Sequence
ttatgctgtatctactcaactaaca

SEQ ID NO: 87973 - DNA, 25 bp, Probe Sequence
aacttgtttatgctgtatctactca

SEQ ID NO: 87974 - DNA, 25 bp, Probe Sequence
tggaaccatgccttcataattctag

SEQ ID NO: 87975 - DNA, 25 bp, Probe Sequence
atggaaccatgccttcataattcta

SEQ ID NO: 87976 - DNA, 25 bp, Probe Sequence
aatggaaccatgccttcataattct

SEQ ID NO: 87977 - DNA, 25 bp, Probe Sequence
caatggaaccatgccttcataattc

SEQ ID NO: 87978 - DNA, 25 bp, Probe Sequence
aggaagctgagatggaagaattaat

SEQ ID NO: 87979 - DNA, 25 bp, Probe Sequence
acaatggaaccatgccttcataatt

SEQ ID NO: 87980 - DNA, 25 bp, Probe Sequence
aacaatggaaccatgccttcataat

SEQ ID NO: 87981 - DNA, 25 bp, Probe Sequence
gggcatttggaaataagttcattga

SEQ ID NO: 87982 - DNA, 25 bp, Probe Sequence
caggaagctgagatggaagaattaa

SEQ ID NO: 87983 - DNA, 25 bp, Probe Sequence
caacacaggcaatattccagctatg

SEQ ID NO: 87984 - DNA, 25 bp, Probe Sequence
ccaaataatcaagggtgaaggtaaa

SEQ ID NO: 87985 - DNA, 25 bp, Probe Sequence
gagtacacaaaccagagaatgacat

SEQ ID NO: 87986 - DNA, 25 bp, Probe Sequence
aaatgaaggagtacacaaaccagag

SEQ ID NO: 87987 - DNA, 25 bp, Probe Sequence
gaatgacatgaatccagcaaatagg

SEQ ID NO: 87988 - DNA, 25 bp, Probe Sequence
cacaaaccagagaatgacatgaatc

SEQ ID NO: 87989 - DNA, 25 bp, Probe Sequence
tacacaaaccagagaatgacatgaa

SEQ ID NO: 87990 - DNA, 25 bp, Probe Sequence
agaatgacatgaatccagcaaatag

SEQ ID NO: 87991 - DNA, 25 bp, Probe Sequence
gagaatgacatgaatccagcaaata

SEQ ID NO: 87992 - DNA, 25 bp, Probe Sequence
agagaatgacatgaatccagcaaat

SEQ ID NO: 87993 - DNA, 25 bp, Probe Sequence
acacaaaccagagaatgacatgaat

SEQ ID NO: 87994 - DNA, 25 bp, Probe Sequence
gaaggagtacacaaaccagagaatg

SEQ ID NO: 87995 - DNA, 25 bp, Probe Sequence
aaaccagagaatgacatgaatccag

SEQ ID NO: 87996 - DNA, 25 bp, Probe Sequence
gtacacaaaccagagaatgacatga

SEQ ID NO: 87997 - DNA, 25 bp, Probe Sequence
agtacacaaaccagagaatgacatg

SEQ ID NO: 87998 - DNA, 25 bp, Probe Sequence
cagaccaacagataactcatcctaa

SEQ ID NO: 87999 - DNA, 25 bp, Probe Sequence
acagaccaacagataactcatccta

SEQ ID NO: 88000 - DNA, 25 bp, Probe Sequence
aacagaccaacagataactcatcct

SEQ ID NO: 88001 - DNA, 25 bp, Probe Sequence
caacagaccaacagataactcatcc

SEQ ID NO: 88002 - DNA, 25 bp, Probe Sequence
gcaacagaccaacagataactcatc

SEQ ID NO: 88003 - DNA, 25 bp, Probe Sequence
tgggcagcaatatagggtaaataaa

SEQ ID NO: 88004 - DNA, 25 bp, Probe Sequence
aaggaggatagaccaggaaataaag

SEQ ID NO: 88005 - DNA, 25 bp, Probe Sequence
gaaggaggatagaccaggaaataaa

SEQ ID NO: 88006 - DNA, 25 bp, Probe Sequence
gtgggcagcaatatagggtaaataa

SEQ ID NO: 88007 - DNA, 25 bp, Probe Sequence
accaacagataactcatcctaaaca

SEQ ID NO: 88008 - DNA, 25 bp, Probe Sequence
ccaacagataactcatcctaaacag

SEQ ID NO: 88009 - DNA, 25 bp, Probe Sequence
gaccaacagataactcatcctaaac

SEQ ID NO: 88010 - DNA, 25 bp, Probe Sequence
aggaggatagaccaggaaataaagg

SEQ ID NO: 88011 - DNA, 25 bp, Probe Sequence
ggaaggaggatagaccaggaaataa

SEQ ID NO: 88012 - DNA, 25 bp, Probe Sequence
agaccaacagataactcatcctaaa

SEQ ID NO: 88013 - DNA, 25 bp, Probe Sequence
cctaaacagagaaatgagaaagagt

SEQ ID NO: 88014 - DNA, 25 bp, Probe Sequence
tgtgggcagcaatatagggtaaata

SEQ ID NO: 88015 - DNA, 25 bp, Probe Sequence
caacagataactcatcctaaacaga

SEQ ID NO: 88016 - DNA, 25 bp, Probe Sequence
tcctaaacagagaaatgagaaagag

SEQ ID NO: 88017 - DNA, 25 bp, Probe Sequence
ggaggatagaccaggaaataaaggg

SEQ ID NO: 88018 - DNA, 25 bp, Probe Sequence
acagataactcatcctaaacagaga

SEQ ID NO: 88019 - DNA, 25 bp, Probe Sequence
agagaaatgagaaagagtctgtggg

SEQ ID NO: 88020 - DNA, 25 bp, Probe Sequence
tgcaacagaccaacagataactcat

SEQ ID NO: 88021 - DNA, 25 bp, Probe Sequence
atcctaaacagagaaatgagaaaga

SEQ ID NO: 88022 - DNA, 25 bp, Probe Sequence
tacttgtatattggaggcttcaggt

SEQ ID NO: 88023 - DNA, 25 bp, Probe Sequence
tgtacttgtatattggaggcttcag

SEQ ID NO: 88024 - DNA, 25 bp, Probe Sequence
atgtacttgtatattggaggcttca

SEQ ID NO: 88025 - DNA, 25 bp, Probe Sequence
gtacttgtatattggaggcttcagg

SEQ ID NO: 88026 - DNA, 25 bp, Probe Sequence
aatgtacttgtatattggaggcttc

SEQ ID NO: 88027 - DNA, 25 bp, Probe Sequence
acttgtatattggaggcttcaggtg

SEQ ID NO: 88028 - DNA, 25 bp, Probe Sequence
tgtgtagagatgtttagatagggtc

SEQ ID NO: 88029 - DNA, 25 bp, Probe Sequence
ctaatgggcaagcaatacaaagaac

SEQ ID NO: 88030 - DNA, 25 bp, Probe Sequence
actaatgggcaagcaatacaaagaa

SEQ ID NO: 88031 - DNA, 25 bp, Probe Sequence
atgtgtagagatgtttagatagggt

SEQ ID NO: 88032 - DNA, 25 bp, Probe Sequence
gtgtagagatgtttagatagggtct

SEQ ID NO: 88033 - DNA, 25 bp, Probe Sequence
cactaatgggcaagcaatacaaaga

SEQ ID NO: 88034 - DNA, 25 bp, Probe Sequence
tgaaatgtacttgtatattggaggc

SEQ ID NO: 88035 - DNA, 25 bp, Probe Sequence
cttgtatattggaggcttcaggtgc

SEQ ID NO: 88036 - DNA, 25 bp, Probe Sequence
taatgggcaagcaatacaaagaacc

SEQ ID NO: 88037 - DNA, 25 bp, Probe Sequence
gaaatgtacttgtatattggaggct

SEQ ID NO: 88038 - DNA, 25 bp, Probe Sequence
ctttctggaaatcaagccttgttta

SEQ ID NO: 88039 - DNA, 25 bp, Probe Sequence
ttctggaaatcaagccttgtttatt

SEQ ID NO: 88040 - DNA, 25 bp, Probe Sequence
tttctggaaatcaagccttgtttat

SEQ ID NO: 88041 - DNA, 25 bp, Probe Sequence
ctgatagtccacctcggcttatgaa

SEQ ID NO: 88042 - DNA, 25 bp, Probe Sequence
aatgtgtagagatgtttagataggg

SEQ ID NO: 88043 - DNA, 25 bp, Probe Sequence
aaatgtacttgtatattggaggctt

SEQ ID NO: 88044 - DNA, 25 bp, Probe Sequence
aagcaatacaaagaacctgtctgtg

SEQ ID NO: 88045 - DNA, 25 bp, Probe Sequence
caagcaatacaaagaacctgtctgt

SEQ ID NO: 88046 - DNA, 25 bp, Probe Sequence
aacattcttacaactatctggctca

SEQ ID NO: 88047 - DNA, 25 bp, Probe Sequence
attcttacaactatctggctcacat

SEQ ID NO: 88048 - DNA, 25 bp, Probe Sequence
cattcttacaactatctggctcaca

SEQ ID NO: 88049 - DNA, 25 bp, Probe Sequence
acattcttacaactatctggctcac

SEQ ID NO: 88050 - DNA, 25 bp, Probe Sequence
aatctgtgttcctgtgttctgtaag

SEQ ID NO: 88051 - DNA, 25 bp, Probe Sequence
cctacatcacaagtatgccaagtaa

SEQ ID NO: 88052 - DNA, 25 bp, Probe Sequence
caatctgtgttcctgtgttctgtaa

SEQ ID NO: 88053 - DNA, 25 bp, Probe Sequence
tacatcacaagtatgccaagtaatg

SEQ ID NO: 88054 - DNA, 25 bp, Probe Sequence
ctacatcacaagtatgccaagtaat

SEQ ID NO: 88055 - DNA, 25 bp, Probe Sequence
catcacaagtatgccaagtaatgaa

SEQ ID NO: 88056 - DNA, 25 bp, Probe Sequence
acatcacaagtatgccaagtaatga

SEQ ID NO: 88057 - DNA, 25 bp, Probe Sequence
acctacatcacaagtatgccaagta

SEQ ID NO: 88058 - DNA, 25 bp, Probe Sequence
tacctacatcacaagtatgccaagt

SEQ ID NO: 88059 - DNA, 25 bp, Probe Sequence
atctgtgttcctgtgttctgtaagt

SEQ ID NO: 88060 - DNA, 25 bp, Probe Sequence
ttcttacaactatctggctcacatg

SEQ ID NO: 88061 - DNA, 25 bp, Probe Sequence
aatacctacatcacaagtatgccaa

SEQ ID NO: 88062 - DNA, 25 bp, Probe Sequence
atacctacatcacaagtatgccaag

SEQ ID NO: 88063 - DNA, 25 bp, Probe Sequence
aacttccaaccatcctagtatcctg

SEQ ID NO: 88064 - DNA, 25 bp, Probe Sequence
tctgtgttcctgtgttctgtaagtc

SEQ ID NO: 88065 - DNA, 25 bp, Probe Sequence
agtctgttgtctattatagctgagc

SEQ ID NO: 88066 - DNA, 25 bp, Probe Sequence
gtctgttgtctattatagctgagca

SEQ ID NO: 88067 - DNA, 25 bp, Probe Sequence
tctattatagctgagcaatctgtgt

SEQ ID NO: 88068 - DNA, 25 bp, Probe Sequence
tgtctattatagctgagcaatctgt

SEQ ID NO: 88069 - DNA, 25 bp, Probe Sequence
gtctattatagctgagcaatctgtg

SEQ ID NO: 88070 - DNA, 25 bp, Probe Sequence
ttctctaagcctcaattacctcatc

SEQ ID NO: 88071 - DNA, 25 bp, Probe Sequence
ctaagcctcaattacctcatctgta

SEQ ID NO: 88072 - DNA, 25 bp, Probe Sequence
ctctaagcctcaattacctcatctg

SEQ ID NO: 88073 - DNA, 25 bp, Probe Sequence
tctctaagcctcaattacctcatct

SEQ ID NO: 88074 - DNA, 25 bp, Probe Sequence
aacttctctaagcctcaattacctc

SEQ ID NO: 88075 - DNA, 25 bp, Probe Sequence
cttctctaagcctcaattacctcat

SEQ ID NO: 88076 - DNA, 25 bp, Probe Sequence
tctaagcctcaattacctcatctgt

SEQ ID NO: 88077 - DNA, 25 bp, Probe Sequence
acttctctaagcctcaattacctca

SEQ ID NO: 88078 - DNA, 25 bp, Probe Sequence
taacttctctaagcctcaattacct

SEQ ID NO: 88079 - DNA, 25 bp, Probe Sequence
gttgagaatagccagtgttgatgtc

SEQ ID NO: 88080 - DNA, 25 bp, Probe Sequence
cagttgagaatagccagtgttgatg

SEQ ID NO: 88081 - DNA, 25 bp, Probe Sequence
ttaacttctctaagcctcaattacc

SEQ ID NO: 88082 - DNA, 25 bp, Probe Sequence
agttgagaatagccagtgttgatgt

SEQ ID NO: 88083 - DNA, 25 bp, Probe Sequence
tcagttgagaatagccagtgttgat

SEQ ID NO: 88084 - DNA, 25 bp, Probe Sequence
taagcctcaattacctcatctgtaa

SEQ ID NO: 88085 - DNA, 25 bp, Probe Sequence
ttgagaatagccagtgttgatgtca

SEQ ID NO: 88086 - DNA, 25 bp, Probe Sequence
atgatgtagtaaccaacacctggat

SEQ ID NO: 88087 - DNA, 25 bp, Probe Sequence
caacacctggatttaataagaacct

SEQ ID NO: 88088 - DNA, 25 bp, Probe Sequence
tatatactggtcattaagagcatgg

SEQ ID NO: 88089 - DNA, 25 bp, Probe Sequence
tgatgtagtaaccaacacctggatt

SEQ ID NO: 88090 - DNA, 25 bp, Probe Sequence
atcattgaaccaggcaacttctcat

SEQ ID NO: 88091 - DNA, 25 bp, Probe Sequence
gtcagttgagaatagccagtgttga

SEQ ID NO: 88092 - DNA, 25 bp, Probe Sequence
ctccatgatgtagtaaccaacacct

SEQ ID NO: 88093 - DNA, 25 bp, Probe Sequence
cacagacttactctcaggtcagttg

SEQ ID NO: 88094 - DNA, 25 bp, Probe Sequence
tgattcttgaggatagatgtatgct

SEQ ID NO: 88095 - DNA, 25 bp, Probe Sequence
attcttgaggatagatgtatgctcg

SEQ ID NO: 88096 - DNA, 25 bp, Probe Sequence
ttgattcttgaggatagatgtatgc

SEQ ID NO: 88097 - DNA, 25 bp, Probe Sequence
gattcttgaggatagatgtatgctc

SEQ ID NO: 88098 - DNA, 25 bp, Probe Sequence
aaggattctattgttcagttgtgat

SEQ ID NO: 88099 - DNA, 25 bp, Probe Sequence
ttcttgaggatagatgtatgctcgg

SEQ ID NO: 88100 - DNA, 25 bp, Probe Sequence
aggattctattgttcagttgtgatc

SEQ ID NO: 88101 - DNA, 25 bp, Probe Sequence
tgccatctataaggattctattgtt

SEQ ID NO: 88102 - DNA, 25 bp, Probe Sequence
ttgccatctataaggattctattgt

SEQ ID NO: 88103 - DNA, 25 bp, Probe Sequence
taaggattctattgttcagttgtga

SEQ ID NO: 88104 - DNA, 25 bp, Probe Sequence
ataaggattctattgttcagttgtg

SEQ ID NO: 88105 - DNA, 25 bp, Probe Sequence
gccatctataaggattctattgttc

SEQ ID NO: 88106 - DNA, 25 bp, Probe Sequence
ttgtgagaaaccttgccatctataa

SEQ ID NO: 88107 - DNA, 25 bp, Probe Sequence
aagttgattcttgaggatagatgta

SEQ ID NO: 88108 - DNA, 25 bp, Probe Sequence
cttgccatctataaggattctattg

SEQ ID NO: 88109 - DNA, 25 bp, Probe Sequence
tgtgagaaaccttgccatctataag

SEQ ID NO: 88110 - DNA, 25 bp, Probe Sequence
cttgtgagaaaccttgccatctata

SEQ ID NO: 88111 - DNA, 25 bp, Probe Sequence
cttgaggatagatgtatgctcggtg

SEQ ID NO: 88112 - DNA, 25 bp, Probe Sequence
tcttgaggatagatgtatgctcggt

SEQ ID NO: 88113 - DNA, 25 bp, Probe Sequence
gttgattcttgaggatagatgtatg

SEQ ID NO: 88114 - DNA, 25 bp, Probe Sequence
agttgattcttgaggatagatgtat

SEQ ID NO: 88115 - DNA, 25 bp, Probe Sequence
aatagcgtgaagttgcagtagattg

SEQ ID NO: 88116 - DNA, 25 bp, Probe Sequence
atatcaacttgcttgtgagaaacct

SEQ ID NO: 88117 - DNA, 25 bp, Probe Sequence
tatatcaacttgcttgtgagaaacc

SEQ ID NO: 88118 - DNA, 25 bp, Probe Sequence
tggttgaatcataacataaggaagt

SEQ ID NO: 88119 - DNA, 25 bp, Probe Sequence
tgaaagaggaaataacacagcattg

SEQ ID NO: 88120 - DNA, 25 bp, Probe Sequence
atatcacttaggtcacttgggtttc

SEQ ID NO: 88121 - DNA, 25 bp, Probe Sequence
aaagcacactgaaagaaagaaactc

SEQ ID NO: 88122 - DNA, 25 bp, Probe Sequence
gaaataacacagcattgggaagaag

SEQ ID NO: 88123 - DNA, 25 bp, Probe Sequence
gaaagaggaaataacacagcattgg

SEQ ID NO: 88124 - DNA, 25 bp, Probe Sequence
ttgaaagaggaaataacacagcatt

SEQ ID NO: 88125 - DNA, 25 bp, Probe Sequence
tttgaaagaggaaataacacagcat

SEQ ID NO: 88126 - DNA, 25 bp, Probe Sequence
tgggtaactacattgagaaatctga

SEQ ID NO: 88127 - DNA, 25 bp, Probe Sequence
ataacacagcattgggaagaagaaa

SEQ ID NO: 88128 - DNA, 25 bp, Probe Sequence
aataacacagcattgggaagaagaa

SEQ ID NO: 88129 - DNA, 25 bp, Probe Sequence
aaataacacagcattgggaagaaga

SEQ ID NO: 88130 - DNA, 25 bp, Probe Sequence
ttgggtaactacattgagaaatctg

SEQ ID NO: 88131 - DNA, 25 bp, Probe Sequence
tatcacttaggtcacttgggtttca

SEQ ID NO: 88132 - DNA, 25 bp, Probe Sequence
gggtttcaaattgggtaactacatt

SEQ ID NO: 88133 - DNA, 25 bp, Probe Sequence
tgggtttcaaattgggtaactacat

SEQ ID NO: 88134 - DNA, 25 bp, Probe Sequence
atggttgaatcataacataaggaag

SEQ ID NO: 88135 - DNA, 25 bp, Probe Sequence
gatggttgaatcataacataaggaa

SEQ ID NO: 88136 - DNA, 25 bp, Probe Sequence
cttgggtttcaaattgggtaactac

SEQ ID NO: 88137 - DNA, 25 bp, Probe Sequence
aagatcagcatcagcgtcatattga

SEQ ID NO: 88138 - DNA, 25 bp, Probe Sequence
acttgggtttcaaattgggtaacta

SEQ ID NO: 88139 - DNA, 25 bp, Probe Sequence
cttaggtcacttgggtttcaaattg

SEQ ID NO: 88140 - DNA, 25 bp, Probe Sequence
ctttgaaagaggaaataacacagca

SEQ ID NO: 88141 - DNA, 25 bp, Probe Sequence
actttgaaagaggaaataacacagc

SEQ ID NO: 88142 - DNA, 25 bp, Probe Sequence
attacgcagcacatacttactaact

SEQ ID NO: 88143 - DNA, 25 bp, Probe Sequence
gattacgcagcacatacttactaac

SEQ ID NO: 88144 - DNA, 25 bp, Probe Sequence
tgattacgcagcacatacttactaa

SEQ ID NO: 88145 - DNA, 25 bp, Probe Sequence
atgaatagtgatggagacctaagtt

SEQ ID NO: 88146 - DNA, 25 bp, Probe Sequence
aatgaatagtgatggagacctaagt

SEQ ID NO: 88147 - DNA, 25 bp, Probe Sequence
tgaatagtgatggagacctaagtta

SEQ ID NO: 88148 - DNA, 25 bp, Probe Sequence
tcatcagaacaatctcctagaagtg

SEQ ID NO: 88149 - DNA, 25 bp, Probe Sequence
acgaattatcatcagaacaatctcc

SEQ ID NO: 88150 - DNA, 25 bp, Probe Sequence
cgaattatcatcagaacaatctcct

SEQ ID NO: 88151 - DNA, 25 bp, Probe Sequence
catacttactaactgccagagtgtc

SEQ ID NO: 88152 - DNA, 25 bp, Probe Sequence
tacttactaactgccagagtgtcat

SEQ ID NO: 88153 - DNA, 25 bp, Probe Sequence
atacttactaactgccagagtgtca

SEQ ID NO: 88154 - DNA, 25 bp, Probe Sequence
atcatcagaacaatctcctagaagt

SEQ ID NO: 88155 - DNA, 25 bp, Probe Sequence
catcagaacaatctcctagaagtgc

SEQ ID NO: 88156 - DNA, 25 bp, Probe Sequence
ctgattacgcagcacatacttacta

SEQ ID NO: 88157 - DNA, 25 bp, Probe Sequence
gagacgaattatcatcagaacaatc

SEQ ID NO: 88158 - DNA, 25 bp, Probe Sequence
gaatagtgatggagacctaagttag

SEQ ID NO: 88159 - DNA, 25 bp, Probe Sequence
ttacgcagcacatacttactaactg

SEQ ID NO: 88160 - DNA, 25 bp, Probe Sequence
tgagacgaattatcatcagaacaat

SEQ ID NO: 88161 - DNA, 25 bp, Probe Sequence
acatacttactaactgccagagtgt

SEQ ID NO: 88162 - DNA, 25 bp, Probe Sequence
agacgaattatcatcagaacaatct

SEQ ID NO: 88163 - DNA, 25 bp, Probe Sequence
gacgaattatcatcagaacaatctc

SEQ ID NO: 88164 - DNA, 25 bp, Probe Sequence
cacatacttactaactgccagagtg

SEQ ID NO: 88165 - DNA, 25 bp, Probe Sequence
acttactaactgccagagtgtcatc

SEQ ID NO: 88166 - DNA, 25 bp, Probe Sequence
ttaagagcatagacactcacttcat

SEQ ID NO: 88167 - DNA, 25 bp, Probe Sequence
agagcatagacactcacttcatatt

SEQ ID NO: 88168 - DNA, 25 bp, Probe Sequence
aagagcatagacactcacttcatat

SEQ ID NO: 88169 - DNA, 25 bp, Probe Sequence
taagagcatagacactcacttcata

SEQ ID NO: 88170 - DNA, 25 bp, Probe Sequence
ctaatggtgatggtggtctcagtag

SEQ ID NO: 88171 - DNA, 25 bp, Probe Sequence
agtaatagtagcctctgtgacacca

SEQ ID NO: 88172 - DNA, 25 bp, Probe Sequence
ccaccataagtcctgatacaaccac

SEQ ID NO: 88173 - DNA, 25 bp, Probe Sequence
taaatgtatattcgttcccgttcca

SEQ ID NO: 88174 - DNA, 25 bp, Probe Sequence
gcatagacactcacttcatatttgg

SEQ ID NO: 88175 - DNA, 25 bp, Probe Sequence
ataaatgtatattcgttcccgttcc

SEQ ID NO: 88176 - DNA, 25 bp, Probe Sequence
agcatagacactcacttcatatttg

SEQ ID NO: 88177 - DNA, 25 bp, Probe Sequence
gtaatagtagcctctgtgacaccag

SEQ ID NO: 88178 - DNA, 25 bp, Probe Sequence
cagtaatagtagcctctgtgacacc

SEQ ID NO: 88179 - DNA, 25 bp, Probe Sequence
ccagtaatagtagcctctgtgacac

SEQ ID NO: 88180 - DNA, 25 bp, Probe Sequence
aaatgtatattcgttcccgttccag

SEQ ID NO: 88181 - DNA, 25 bp, Probe Sequence
caccataagtcctgatacaaccacg

SEQ ID NO: 88182 - DNA, 25 bp, Probe Sequence
catagacactcacttcatatttggt

SEQ ID NO: 88183 - DNA, 25 bp, Probe Sequence
ataagtcctgatacaaccacggatg

SEQ ID NO: 88184 - DNA, 25 bp, Probe Sequence
cataagtcctgatacaaccacggat

SEQ ID NO: 88185 - DNA, 25 bp, Probe Sequence
caaggttgatttctttcattggtcc

SEQ ID NO: 88186 - DNA, 25 bp, Probe Sequence
cttgatggttctctggattggagtc

SEQ ID NO: 88187 - DNA, 25 bp, Probe Sequence
cataaatgtatattcgttcccgttc

SEQ ID NO: 88188 - DNA, 25 bp, Probe Sequence
gagcaaggttgatttctttcattgg

SEQ ID NO: 88189 - DNA, 25 bp, Probe Sequence
ggagcaaggttgatttctttcattg

SEQ ID NO: 88190 - DNA, 25 bp, Probe Sequence
aacacacctgtctaattcacttact

SEQ ID NO: 88191 - DNA, 25 bp, Probe Sequence
aactgctctgtaattctggacatta

SEQ ID NO: 88192 - DNA, 25 bp, Probe Sequence
taactgctctgtaattctggacatt

SEQ ID NO: 88193 - DNA, 25 bp, Probe Sequence
ataactgctctgtaattctggacat

SEQ ID NO: 88194 - DNA, 25 bp, Probe Sequence
aataactgctctgtaattctggaca

SEQ ID NO: 88195 - DNA, 25 bp, Probe Sequence
acacctgtctaattcacttactaac

SEQ ID NO: 88196 - DNA, 25 bp, Probe Sequence
cacacctgtctaattcacttactaa

SEQ ID NO: 88197 - DNA, 25 bp, Probe Sequence
ctgctctgtaattctggacattagt

SEQ ID NO: 88198 - DNA, 25 bp, Probe Sequence
actgctctgtaattctggacattag

SEQ ID NO: 88199 - DNA, 25 bp, Probe Sequence
gctctgtaattctggacattagtgt

SEQ ID NO: 88200 - DNA, 25 bp, Probe Sequence
tgctctgtaattctggacattagtg

SEQ ID NO: 88201 - DNA, 25 bp, Probe Sequence
acacacctgtctaattcacttacta

SEQ ID NO: 88202 - DNA, 25 bp, Probe Sequence
cacctgtctaattcacttactaact

SEQ ID NO: 88203 - DNA, 25 bp, Probe Sequence
ggaataactgctctgtaattctgga

SEQ ID NO: 88204 - DNA, 25 bp, Probe Sequence
gaataactgctctgtaattctggac

SEQ ID NO: 88205 - DNA, 25 bp, Probe Sequence
acctgtctaattcacttactaactt

SEQ ID NO: 88206 - DNA, 25 bp, Probe Sequence
gatgaaaggaaagtctatgatggga

SEQ ID NO: 88207 - DNA, 25 bp, Probe Sequence
tgggatgaaaggaaagtctatgatg

SEQ ID NO: 88208 - DNA, 25 bp, Probe Sequence
caatgggatgaaaggaaagtctatg

SEQ ID NO: 88209 - DNA, 25 bp, Probe Sequence
ctctgtaattctggacattagtgta

SEQ ID NO: 88210 - DNA, 25 bp, Probe Sequence
tgaaaggaaagtctatgatgggaat

SEQ ID NO: 88211 - DNA, 25 bp, Probe Sequence
atgaaaggaaagtctatgatgggaa

SEQ ID NO: 88212 - DNA, 25 bp, Probe Sequence
aatgggatgaaaggaaagtctatga

SEQ ID NO: 88213 - DNA, 25 bp, Probe Sequence
gaaaggaaagtctatgatgggaatg

SEQ ID NO: 88214 - DNA, 25 bp, Probe Sequence
ttctgtatgttgctgtgtggtaata

SEQ ID NO: 88215 - DNA, 25 bp, Probe Sequence
tatgttgctgtgtggtaatactctg

SEQ ID NO: 88216 - DNA, 25 bp, Probe Sequence
aagacataagaagtgactggtgaat

SEQ ID NO: 88217 - DNA, 25 bp, Probe Sequence
actgctatgaattgatgtggtaaga

SEQ ID NO: 88218 - DNA, 25 bp, Probe Sequence
caagacataagaagtgactggtgaa

SEQ ID NO: 88219 - DNA, 25 bp, Probe Sequence
atatcttctgtatgttgctgtgtgg

SEQ ID NO: 88220 - DNA, 25 bp, Probe Sequence
agacataagaagtgactggtgaata

SEQ ID NO: 88221 - DNA, 25 bp, Probe Sequence
cttctgtatgttgctgtgtggtaat

SEQ ID NO: 88222 - DNA, 25 bp, Probe Sequence
ctgctatgaattgatgtggtaagat

SEQ ID NO: 88223 - DNA, 25 bp, Probe Sequence
tactgctatgaattgatgtggtaag

SEQ ID NO: 88224 - DNA, 25 bp, Probe Sequence
ttcaagacataagaagtgactggtg

SEQ ID NO: 88225 - DNA, 25 bp, Probe Sequence
gttcaagacataagaagtgactggt

SEQ ID NO: 88226 - DNA, 25 bp, Probe Sequence
gacataagaagtgactggtgaatat

SEQ ID NO: 88227 - DNA, 25 bp, Probe Sequence
atgttgctgtgtggtaatactctga

SEQ ID NO: 88228 - DNA, 25 bp, Probe Sequence
atcttctgtatgttgctgtgtggta

SEQ ID NO: 88229 - DNA, 25 bp, Probe Sequence
tatcttctgtatgttgctgtgtggt

SEQ ID NO: 88230 - DNA, 25 bp, Probe Sequence
tgctatgaattgatgtggtaagatc

SEQ ID NO: 88231 - DNA, 25 bp, Probe Sequence
gtactgctatgaattgatgtggtaa

SEQ ID NO: 88232 - DNA, 25 bp, Probe Sequence
tcaagacataagaagtgactggtga

SEQ ID NO: 88233 - DNA, 25 bp, Probe Sequence
tgttcaagacataagaagtgactgg

SEQ ID NO: 88234 - DNA, 25 bp, Probe Sequence
ggcagtcttatctgagtgaacatat

SEQ ID NO: 88235 - DNA, 25 bp, Probe Sequence
tcttctgtatgttgctgtgtggtaa

SEQ ID NO: 88236 - DNA, 25 bp, Probe Sequence
catatcttctgtatgttgctgtgtg

SEQ ID NO: 88237 - DNA, 25 bp, Probe Sequence
gcagtcttatctgagtgaacatatc

SEQ ID NO: 88238 - DNA, 25 bp, Probe Sequence
gaataacctcaccttcctctacttg

SEQ ID NO: 88239 - DNA, 25 bp, Probe Sequence
ttcatcttcagttcaacaacatagc

SEQ ID NO: 88240 - DNA, 25 bp, Probe Sequence
aataacctcaccttcctctacttgg

SEQ ID NO: 88241 - DNA, 25 bp, Probe Sequence
tgaataacctcaccttcctctactt

SEQ ID NO: 88242 - DNA, 25 bp, Probe Sequence
aactgaataacctcaccttcctcta

SEQ ID NO: 88243 - DNA, 25 bp, Probe Sequence
gcttcaattacagatgacacattct

SEQ ID NO: 88244 - DNA, 25 bp, Probe Sequence
ctgaataacctcaccttcctctact

SEQ ID NO: 88245 - DNA, 25 bp, Probe Sequence
cgtgtaattcatcttcagttcaaca

SEQ ID NO: 88246 - DNA, 25 bp, Probe Sequence
actgaataacctcaccttcctctac

SEQ ID NO: 88247 - DNA, 25 bp, Probe Sequence
caaggctaatgacaccagttacatc

SEQ ID NO: 88248 - DNA, 25 bp, Probe Sequence
acacctacactaatagtctgtctca

SEQ ID NO: 88249 - DNA, 25 bp, Probe Sequence
cctacactaatagtctgtctcaaca

SEQ ID NO: 88250 - DNA, 25 bp, Probe Sequence
acctacactaatagtctgtctcaac

SEQ ID NO: 88251 - DNA, 25 bp, Probe Sequence
cacctacactaatagtctgtctcaa

SEQ ID NO: 88252 - DNA, 25 bp, Probe Sequence
gtaattcatcttcagttcaacaaca

SEQ ID NO: 88253 - DNA, 25 bp, Probe Sequence
acactaatagtctgtctcaacaatg

SEQ ID NO: 88254 - DNA, 25 bp, Probe Sequence
tacacctacactaatagtctgtctc

SEQ ID NO: 88255 - DNA, 25 bp, Probe Sequence
cttcctctacttggaccataatgtc

SEQ ID NO: 88256 - DNA, 25 bp, Probe Sequence
cactaatagtctgtctcaacaatga

SEQ ID NO: 88257 - DNA, 25 bp, Probe Sequence
gtacacctacactaatagtctgtct

SEQ ID NO: 88258 - DNA, 25 bp, Probe Sequence
agtacacctacactaatagtctgtc

SEQ ID NO: 88259 - DNA, 25 bp, Probe Sequence
cttcagttcaacaacatagcttcaa

SEQ ID NO: 88260 - DNA, 25 bp, Probe Sequence
catcttcagttcaacaacatagctt

SEQ ID NO: 88261 - DNA, 25 bp, Probe Sequence
atcttcagttcaacaacatagcttc

SEQ ID NO: 88262 - DNA, 25 bp, Probe Sequence
ataggaggagaaagaatacatcggt

SEQ ID NO: 88263 - DNA, 25 bp, Probe Sequence
taggaggagaaagaatacatcggtt

SEQ ID NO: 88264 - DNA, 25 bp, Probe Sequence
tataggaggagaaagaatacatcgg

SEQ ID NO: 88265 - DNA, 25 bp, Probe Sequence
aatcgctttgaataaatactccctt

SEQ ID NO: 88266 - DNA, 25 bp, Probe Sequence
tcgctttgaataaatactcccttaa

SEQ ID NO: 88267 - DNA, 25 bp, Probe Sequence
aagaatacatcggttgttaaagcag

SEQ ID NO: 88268 - DNA, 25 bp, Probe Sequence
aggagaaagaatacatcggttgtta

SEQ ID NO: 88269 - DNA, 25 bp, Probe Sequence
atcgctttgaataaatactccctta

SEQ ID NO: 88270 - DNA, 25 bp, Probe Sequence
taatcgctttgaataaatactccct

SEQ ID NO: 88271 - DNA, 25 bp, Probe Sequence
aaagaatacatcggttgttaaagca

SEQ ID NO: 88272 - DNA, 25 bp, Probe Sequence
ttgttaaagcaggagaggaagagag

SEQ ID NO: 88273 - DNA, 25 bp, Probe Sequence
gaggagaaagaatacatcggttgtt

SEQ ID NO: 88274 - DNA, 25 bp, Probe Sequence
gaaagaatacatcggttgttaaagc

SEQ ID NO: 88275 - DNA, 25 bp, Probe Sequence
ggagaaagaatacatcggttgttaa

SEQ ID NO: 88276 - DNA, 25 bp, Probe Sequence
aggaggagaaagaatacatcggttg

SEQ ID NO: 88277 - DNA, 25 bp, Probe Sequence
gttgttaaagcaggagaggaagaga

SEQ ID NO: 88278 - DNA, 25 bp, Probe Sequence
aatacatcggttgttaaagcaggag

SEQ ID NO: 88279 - DNA, 25 bp, Probe Sequence
agaatacatcggttgttaaagcagg

SEQ ID NO: 88280 - DNA, 25 bp, Probe Sequence
gaatacatcggttgttaaagcagga

SEQ ID NO: 88281 - DNA, 25 bp, Probe Sequence
gttaaagcaggagaggaagagagac

SEQ ID NO: 88282 - DNA, 25 bp, Probe Sequence
aatatcaacgggactttccaaattg

SEQ ID NO: 88283 - DNA, 25 bp, Probe Sequence
caatatcaacgggactttccaaatt

SEQ ID NO: 88284 - DNA, 25 bp, Probe Sequence
ttaatcgctttgaataaatactccc

SEQ ID NO: 88285 - DNA, 25 bp, Probe Sequence
atatcaacgggactttccaaattgt

SEQ ID NO: 88286 - DNA, 25 bp, Probe Sequence
ttattaagactcacaggctggtaac

SEQ ID NO: 88287 - DNA, 25 bp, Probe Sequence
attattaagactcacaggctggtaa

SEQ ID NO: 88288 - DNA, 25 bp, Probe Sequence
aattattaagactcacaggctggta

SEQ ID NO: 88289 - DNA, 25 bp, Probe Sequence
ggacctaataccttgagacttcatt

SEQ ID NO: 88290 - DNA, 25 bp, Probe Sequence
tattaagactcacaggctggtaaca

SEQ ID NO: 88291 - DNA, 25 bp, Probe Sequence
acctaataccttgagacttcattgt

SEQ ID NO: 88292 - DNA, 25 bp, Probe Sequence
gacctaataccttgagacttcattg

SEQ ID NO: 88293 - DNA, 25 bp, Probe Sequence
aggtaagttctaagttctctatgga

SEQ ID NO: 88294 - DNA, 25 bp, Probe Sequence
taataccttgagacttcattgttcc

SEQ ID NO: 88295 - DNA, 25 bp, Probe Sequence
cctaataccttgagacttcattgtt

SEQ ID NO: 88296 - DNA, 25 bp, Probe Sequence
cggacctaataccttgagacttcat

SEQ ID NO: 88297 - DNA, 25 bp, Probe Sequence
cacggacctaataccttgagacttc

SEQ ID NO: 88298 - DNA, 25 bp, Probe Sequence
ggtaagttctaagttctctatggaa

SEQ ID NO: 88299 - DNA, 25 bp, Probe Sequence
gaggtaagttctaagttctctatgg

SEQ ID NO: 88300 - DNA, 25 bp, Probe Sequence
ggaggtaagttctaagttctctatg

SEQ ID NO: 88301 - DNA, 25 bp, Probe Sequence
aggaggtaagttctaagttctctat

SEQ ID NO: 88302 - DNA, 25 bp, Probe Sequence
ttaggaggtaagttctaagttctct

SEQ ID NO: 88303 - DNA, 25 bp, Probe Sequence
tgatgtgagtttaggaaagtggatt

SEQ ID NO: 88304 - DNA, 25 bp, Probe Sequence
tgagaaatgtgatgtgagtttagga

SEQ ID NO: 88305 - DNA, 25 bp, Probe Sequence
tttcagataaacagcaaagaggatg

SEQ ID NO: 88306 - DNA, 25 bp, Probe Sequence
aatgtgatgtgagtttaggaaagtg

SEQ ID NO: 88307 - DNA, 25 bp, Probe Sequence
gtgatgtgagtttaggaaagtggat

SEQ ID NO: 88308 - DNA, 25 bp, Probe Sequence
ttgagaaatgtgatgtgagtttagg

SEQ ID NO: 88309 - DNA, 25 bp, Probe Sequence
agtttgagaaatgtgatgtgagttt

SEQ ID NO: 88310 - DNA, 25 bp, Probe Sequence
ccgtattagtatcgcctattaccat

SEQ ID NO: 88311 - DNA, 25 bp, Probe Sequence
ttagtatcgcctattaccattgtga

SEQ ID NO: 88312 - DNA, 25 bp, Probe Sequence
accgtattagtatcgcctattacca

SEQ ID NO: 88313 - DNA, 25 bp, Probe Sequence
taccgtattagtatcgcctattacc

SEQ ID NO: 88314 - DNA, 25 bp, Probe Sequence
tagtatcgcctattaccattgtgat

SEQ ID NO: 88315 - DNA, 25 bp, Probe Sequence
agtatcgcctattaccattgtgatg

SEQ ID NO: 88316 - DNA, 25 bp, Probe Sequence
ctattaccattgtgatgcgttcttg

SEQ ID NO: 88317 - DNA, 25 bp, Probe Sequence
attagtatcgcctattaccattgtg

SEQ ID NO: 88318 - DNA, 25 bp, Probe Sequence
cctattaccattgtgatgcgttctt

SEQ ID NO: 88319 - DNA, 25 bp, Probe Sequence
cgtattagtatcgcctattaccatt

SEQ ID NO: 88320 - DNA, 25 bp, Probe Sequence
gtatcgcctattaccattgtgatgc

SEQ ID NO: 88321 - DNA, 25 bp, Probe Sequence
ttaccgtattagtatcgcctattac

SEQ ID NO: 88322 - DNA, 25 bp, Probe Sequence
tattaccattgtgatgcgttcttgc

SEQ ID NO: 88323 - DNA, 25 bp, Probe Sequence
aattaccgtattagtatcgcctatt

SEQ ID NO: 88324 - DNA, 25 bp, Probe Sequence
tattagtatcgcctattaccattgt

SEQ ID NO: 88325 - DNA, 25 bp, Probe Sequence
gtattagtatcgcctattaccattg

SEQ ID NO: 88326 - DNA, 25 bp, Probe Sequence
attaccgtattagtatcgcctatta

SEQ ID NO: 88327 - DNA, 25 bp, Probe Sequence
gcctattaccattgtgatgcgttct

SEQ ID NO: 88328 - DNA, 25 bp, Probe Sequence
taattaccgtattagtatcgcctat

SEQ ID NO: 88329 - DNA, 25 bp, Probe Sequence
attaccattgtgatgcgttcttgcc

SEQ ID NO: 88330 - DNA, 25 bp, Probe Sequence
atgcgttcttgccagtacatcaatg

SEQ ID NO: 88331 - DNA, 25 bp, Probe Sequence
atagatcctgaagttacagatgaaa

SEQ ID NO: 88332 - DNA, 25 bp, Probe Sequence
acttgccagtaattaccgtattagt

SEQ ID NO: 88333 - DNA, 25 bp, Probe Sequence
agtaattaccgtattagtatcgcct

SEQ ID NO: 88334 - DNA, 25 bp, Probe Sequence
ccgtattagtatcgcctattaccat

SEQ ID NO: 88335 - DNA, 25 bp, Probe Sequence
ttagtatcgcctattaccattgtga

SEQ ID NO: 88336 - DNA, 25 bp, Probe Sequence
accgtattagtatcgcctattacca

SEQ ID NO: 88337 - DNA, 25 bp, Probe Sequence
taccgtattagtatcgcctattacc

SEQ ID NO: 88338 - DNA, 25 bp, Probe Sequence
tagtatcgcctattaccattgtgat

SEQ ID NO: 88339 - DNA, 25 bp, Probe Sequence
agtatcgcctattaccattgtgatg

SEQ ID NO: 88340 - DNA, 25 bp, Probe Sequence
ctattaccattgtgatgcgttcttg

SEQ ID NO: 88341 - DNA, 25 bp, Probe Sequence
attagtatcgcctattaccattgtg

SEQ ID NO: 88342 - DNA, 25 bp, Probe Sequence
cctattaccattgtgatgcgttctt

SEQ ID NO: 88343 - DNA, 25 bp, Probe Sequence
cgtattagtatcgcctattaccatt

SEQ ID NO: 88344 - DNA, 25 bp, Probe Sequence
gtatcgcctattaccattgtgatgc

SEQ ID NO: 88345 - DNA, 25 bp, Probe Sequence
ttaccgtattagtatcgcctattac

SEQ ID NO: 88346 - DNA, 25 bp, Probe Sequence
tattaccattgtgatgcgttcttgc

SEQ ID NO: 88347 - DNA, 25 bp, Probe Sequence
aattaccgtattagtatcgcctatt

SEQ ID NO: 88348 - DNA, 25 bp, Probe Sequence
tattagtatcgcctattaccattgt

SEQ ID NO: 88349 - DNA, 25 bp, Probe Sequence
gtattagtatcgcctattaccattg

SEQ ID NO: 88350 - DNA, 25 bp, Probe Sequence
attaccgtattagtatcgcctatta

SEQ ID NO: 88351 - DNA, 25 bp, Probe Sequence
gcctattaccattgtgatgcgttct

SEQ ID NO: 88352 - DNA, 25 bp, Probe Sequence
taattaccgtattagtatcgcctat

SEQ ID NO: 88353 - DNA, 25 bp, Probe Sequence
attaccattgtgatgcgttcttgcc

SEQ ID NO: 88354 - DNA, 25 bp, Probe Sequence
atgcgttcttgccagtacatcaatg

SEQ ID NO: 88355 - DNA, 25 bp, Probe Sequence
atagatcctgaagttacagatgaaa

SEQ ID NO: 88356 - DNA, 25 bp, Probe Sequence
acttgccagtaattaccgtattagt

SEQ ID NO: 88357 - DNA, 25 bp, Probe Sequence
agtaattaccgtattagtatcgcct

SEQ ID NO: 88358 - DNA, 25 bp, Probe Sequence
tgaggtatctctaaggcacatagta

SEQ ID NO: 88359 - DNA, 25 bp, Probe Sequence
gaggtatctctaaggcacatagtag

SEQ ID NO: 88360 - DNA, 25 bp, Probe Sequence
atagtctgtaacaatcaacctcagt

SEQ ID NO: 88361 - DNA, 25 bp, Probe Sequence
tagtgaggtatctctaaggcacata

SEQ ID NO: 88362 - DNA, 25 bp, Probe Sequence
ttagtgaggtatctctaaggcacat

SEQ ID NO: 88363 - DNA, 25 bp, Probe Sequence
tagtctgtaacaatcaacctcagta

SEQ ID NO: 88364 - DNA, 25 bp, Probe Sequence
agtgaggtatctctaaggcacatag

SEQ ID NO: 88365 - DNA, 25 bp, Probe Sequence
agtctgtaacaatcaacctcagtac

SEQ ID NO: 88366 - DNA, 25 bp, Probe Sequence
aggtatctctaaggcacatagtaga

SEQ ID NO: 88367 - DNA, 25 bp, Probe Sequence
aatagtctgtaacaatcaacctcag

SEQ ID NO: 88368 - DNA, 25 bp, Probe Sequence
gtgaggtatctctaaggcacatagt

SEQ ID NO: 88369 - DNA, 25 bp, Probe Sequence
ggtatctctaaggcacatagtagaa

SEQ ID NO: 88370 - DNA, 25 bp, Probe Sequence
taatagtctgtaacaatcaacctca

SEQ ID NO: 88371 - DNA, 25 bp, Probe Sequence
gacatagtaggctctgaaacatctt

SEQ ID NO: 88372 - DNA, 25 bp, Probe Sequence
acatagtaggctctgaaacatcttg

SEQ ID NO: 88373 - DNA, 25 bp, Probe Sequence
aaggacgaaggtaaatgagatgtaa

SEQ ID NO: 88374 - DNA, 25 bp, Probe Sequence
aaatgacatagtaggctctgaaaca

SEQ ID NO: 88375 - DNA, 25 bp, Probe Sequence
ggacgaaggtaaatgagatgtaact

SEQ ID NO: 88376 - DNA, 25 bp, Probe Sequence
aggacgaaggtaaatgagatgtaac

SEQ ID NO: 88377 - DNA, 25 bp, Probe Sequence
caaatgacatagtaggctctgaaac

SEQ ID NO: 88378 - DNA, 25 bp, Probe Sequence
ttaaggacgaaggtaaatgagatgt

SEQ ID NO: 88379 - DNA, 25 bp, Probe Sequence
ccaaatgacatagtaggctctgaaa

SEQ ID NO: 88380 - DNA, 25 bp, Probe Sequence
atgacatagtaggctctgaaacatc

SEQ ID NO: 88381 - DNA, 25 bp, Probe Sequence
aatgacatagtaggctctgaaacat

SEQ ID NO: 88382 - DNA, 25 bp, Probe Sequence
cttcaattcacacttcctcactaag

SEQ ID NO: 88383 - DNA, 25 bp, Probe Sequence
gcttcaattcacacttcctcactaa

SEQ ID NO: 88384 - DNA, 25 bp, Probe Sequence
cactaattgctgttgatgagttctt

SEQ ID NO: 88385 - DNA, 25 bp, Probe Sequence
taccgttcaatcaaccaattagcaa

SEQ ID NO: 88386 - DNA, 25 bp, Probe Sequence
gcagttactaaggttacacaagata

SEQ ID NO: 88387 - DNA, 25 bp, Probe Sequence
tcattcatgcttcaattcacacttc

SEQ ID NO: 88388 - DNA, 25 bp, Probe Sequence
atcattcatgcttcaattcacactt

SEQ ID NO: 88389 - DNA, 25 bp, Probe Sequence
gacactaattgctgttgatgagttc

SEQ ID NO: 88390 - DNA, 25 bp, Probe Sequence
gtgtaccgttcaatcaaccaattag

SEQ ID NO: 88391 - DNA, 25 bp, Probe Sequence
acactaattgctgttgatgagttct

SEQ ID NO: 88392 - DNA, 25 bp, Probe Sequence
tgacactaattgctgttgatgagtt

SEQ ID NO: 88393 - DNA, 25 bp, Probe Sequence
ttgacactaattgctgttgatgagt

SEQ ID NO: 88394 - DNA, 25 bp, Probe Sequence
tgtgtaccgttcaatcaaccaatta

SEQ ID NO: 88395 - DNA, 25 bp, Probe Sequence
tatcattcatgcttcaattcacact

SEQ ID NO: 88396 - DNA, 25 bp, Probe Sequence
attcatgcttcaattcacacttcct

SEQ ID NO: 88397 - DNA, 25 bp, Probe Sequence
cattcatgcttcaattcacacttcc

SEQ ID NO: 88398 - DNA, 25 bp, Probe Sequence
ccttcctggtgtaatcagtagatat

SEQ ID NO: 88399 - DNA, 25 bp, Probe Sequence
tgcttcaattcacacttcctcacta

SEQ ID NO: 88400 - DNA, 25 bp, Probe Sequence
tggtgtaatcagtagatatgttgac

SEQ ID NO: 88401 - DNA, 25 bp, Probe Sequence
ttcaattcacacttcctcactaagg

SEQ ID NO: 88402 - DNA, 25 bp, Probe Sequence
cctggtgtaatcagtagatatgttg

SEQ ID NO: 88403 - DNA, 25 bp, Probe Sequence
ttatcattcatgcttcaattcacac

SEQ ID NO: 88404 - DNA, 25 bp, Probe Sequence
tcctggtgtaatcagtagatatgtt

SEQ ID NO: 88405 - DNA, 25 bp, Probe Sequence
ttcctggtgtaatcagtagatatgt

SEQ ID NO: 88406 - DNA, 25 bp, Probe Sequence
gatattgccagccattaccagatat

SEQ ID NO: 88407 - DNA, 25 bp, Probe Sequence
atattgccagccattaccagatatg

SEQ ID NO: 88408 - DNA, 25 bp, Probe Sequence
tgatattgccagccattaccagata

SEQ ID NO: 88409 - DNA, 25 bp, Probe Sequence
gacaagtcagtcatagtctatcagc

SEQ ID NO: 88410 - DNA, 25 bp, Probe Sequence
ttgatattgccagccattaccagat

SEQ ID NO: 88411 - DNA, 25 bp, Probe Sequence
acaagtcagtcatagtctatcagct

SEQ ID NO: 88412 - DNA, 25 bp, Probe Sequence
accctaagttgttctggcatattta

SEQ ID NO: 88413 - DNA, 25 bp, Probe Sequence
taccctaagttgttctggcatattt

SEQ ID NO: 88414 - DNA, 25 bp, Probe Sequence
ttaccctaagttgttctggcatatt

SEQ ID NO: 88415 - DNA, 25 bp, Probe Sequence
aatctctgaaatgccataaactgtg

SEQ ID NO: 88416 - DNA, 25 bp, Probe Sequence
tgttctggcatatttatctgtaggt

SEQ ID NO: 88417 - DNA, 25 bp, Probe Sequence
atctctgaaatgccataaactgtga

SEQ ID NO: 88418 - DNA, 25 bp, Probe Sequence
aaatctctgaaatgccataaactgt

SEQ ID NO: 88419 - DNA, 25 bp, Probe Sequence
ctgaaatgccataaactgtgacaag

SEQ ID NO: 88420 - DNA, 25 bp, Probe Sequence
ccctaagttgttctggcatatttat

SEQ ID NO: 88421 - DNA, 25 bp, Probe Sequence
gaaatctctgaaatgccataaactg

SEQ ID NO: 88422 - DNA, 25 bp, Probe Sequence
agccaattctcccaagatttatagt

SEQ ID NO: 88423 - DNA, 25 bp, Probe Sequence
aagttgttctggcatatttatctgt

SEQ ID NO: 88424 - DNA, 25 bp, Probe Sequence
tctgaaatgccataaactgtgacaa

SEQ ID NO: 88425 - DNA, 25 bp, Probe Sequence
tctctgaaatgccataaactgtgac

SEQ ID NO: 88426 - DNA, 25 bp, Probe Sequence
ttgttctggcatatttatctgtagg

SEQ ID NO: 88427 - DNA, 25 bp, Probe Sequence
gccaattctcccaagatttatagtt

SEQ ID NO: 88428 - DNA, 25 bp, Probe Sequence
ctctgaaatgccataaactgtgaca

SEQ ID NO: 88429 - DNA, 25 bp, Probe Sequence
agaaatctctgaaatgccataaact

SEQ ID NO: 88430 - DNA, 25 bp, Probe Sequence
ttaattccttgctaggtgttctcag

SEQ ID NO: 88431 - DNA, 25 bp, Probe Sequence
cttaattccttgctaggtgttctca

SEQ ID NO: 88432 - DNA, 25 bp, Probe Sequence
taattccttgctaggtgttctcaga

SEQ ID NO: 88433 - DNA, 25 bp, Probe Sequence
ccttaattccttgctaggtgttctc

SEQ ID NO: 88434 - DNA, 25 bp, Probe Sequence
attccttgctaggtgttctcagatt

SEQ ID NO: 88435 - DNA, 25 bp, Probe Sequence
aattccttgctaggtgttctcagat

SEQ ID NO: 88436 - DNA, 25 bp, Probe Sequence
aacaaagcaagaccctatctctaaa

SEQ ID NO: 88437 - DNA, 25 bp, Probe Sequence
caacaaagcaagaccctatctctaa

SEQ ID NO: 88438 - DNA, 25 bp, Probe Sequence
cttgctaggtgttctcagatttatg

SEQ ID NO: 88439 - DNA, 25 bp, Probe Sequence
tcttagtcaaatatgagggaggttg

SEQ ID NO: 88440 - DNA, 25 bp, Probe Sequence
cttcttagtcaaatatgagggaggt

SEQ ID NO: 88441 - DNA, 25 bp, Probe Sequence
acttcttagtcaaatatgagggagg

SEQ ID NO: 88442 - DNA, 25 bp, Probe Sequence
cttagtcaaatatgagggaggttgg

SEQ ID NO: 88443 - DNA, 25 bp, Probe Sequence
tagtcaaatatgagggaggttggat

SEQ ID NO: 88444 - DNA, 25 bp, Probe Sequence
ttagtcaaatatgagggaggttgga

SEQ ID NO: 88445 - DNA, 25 bp, Probe Sequence
ttcttagtcaaatatgagggaggtt

SEQ ID NO: 88446 - DNA, 25 bp, Probe Sequence
ttgctaggtgttctcagatttatga

SEQ ID NO: 88447 - DNA, 25 bp, Probe Sequence
gttgagagtgtgtctttcagtcttc

SEQ ID NO: 88448 - DNA, 25 bp, Probe Sequence
gccttaattccttgctaggtgttct

SEQ ID NO: 88449 - DNA, 25 bp, Probe Sequence
cttgttgagagtgtgtctttcagtc

SEQ ID NO: 88450 - DNA, 25 bp, Probe Sequence
ccttgctaggtgttctcagatttat

SEQ ID NO: 88451 - DNA, 25 bp, Probe Sequence
cttctttctcccgctgaatcatttc

SEQ ID NO: 88452 - DNA, 25 bp, Probe Sequence
agtcaaatatgagggaggttggatg

SEQ ID NO: 88453 - DNA, 25 bp, Probe Sequence
tgttgagagtgtgtctttcagtctt

SEQ ID NO: 88454 - DNA, 25 bp, Probe Sequence
ctgaatagaccaataacaagtgctg

SEQ ID NO: 88455 - DNA, 25 bp, Probe Sequence
tgaatagaccaataacaagtgctga

SEQ ID NO: 88456 - DNA, 25 bp, Probe Sequence
aagaagagagagaagaatcagatgc

SEQ ID NO: 88457 - DNA, 25 bp, Probe Sequence
gaatagaccaataacaagtgctgaa

SEQ ID NO: 88458 - DNA, 25 bp, Probe Sequence
actgaatagaccaataacaagtgct

SEQ ID NO: 88459 - DNA, 25 bp, Probe Sequence
aataactaagagccgaactgaagga

SEQ ID NO: 88460 - DNA, 25 bp, Probe Sequence
ataactaagagccgaactgaaggag

SEQ ID NO: 88461 - DNA, 25 bp, Probe Sequence
tactgaatagaccaataacaagtgc

SEQ ID NO: 88462 - DNA, 25 bp, Probe Sequence
ctaagagccgaactgaaggagatag

SEQ ID NO: 88463 - DNA, 25 bp, Probe Sequence
gaggcagtaattaataggctaccaa

SEQ ID NO: 88464 - DNA, 25 bp, Probe Sequence
ttgaggcagtaattaataggctacc

SEQ ID NO: 88465 - DNA, 25 bp, Probe Sequence
aggcagtaattaataggctaccaac

SEQ ID NO: 88466 - DNA, 25 bp, Probe Sequence
gcagtaattaataggctaccaacca

SEQ ID NO: 88467 - DNA, 25 bp, Probe Sequence
taagagccgaactgaaggagataga

SEQ ID NO: 88468 - DNA, 25 bp, Probe Sequence
tgaggcagtaattaataggctacca

SEQ ID NO: 88469 - DNA, 25 bp, Probe Sequence
attctcagagacaccattaatcagt

SEQ ID NO: 88470 - DNA, 25 bp, Probe Sequence
ggcagtaattaataggctaccaacc

SEQ ID NO: 88471 - DNA, 25 bp, Probe Sequence
actaagagccgaactgaaggagata

SEQ ID NO: 88472 - DNA, 25 bp, Probe Sequence
cagtaattaataggctaccaaccaa

SEQ ID NO: 88473 - DNA, 25 bp, Probe Sequence
attgaggcagtaattaataggctac

SEQ ID NO: 88474 - DNA, 25 bp, Probe Sequence
taactaagagccgaactgaaggaga

SEQ ID NO: 88475 - DNA, 25 bp, Probe Sequence
gagagagaagaatcagatgcagtaa

SEQ ID NO: 88476 - DNA, 25 bp, Probe Sequence
aattctcagagacaccattaatcag

SEQ ID NO: 88477 - DNA, 25 bp, Probe Sequence
agagagagaagaatcagatgcagta

SEQ ID NO: 88478 - DNA, 25 bp, Probe Sequence
gtgaatagtgaagtggctatcctaa

SEQ ID NO: 88479 - DNA, 25 bp, Probe Sequence
aatgtgaatagtgaagtggctatcc

SEQ ID NO: 88480 - DNA, 25 bp, Probe Sequence
tgtgaatagtgaagtggctatccta

SEQ ID NO: 88481 - DNA, 25 bp, Probe Sequence
atgtgaatagtgaagtggctatcct

SEQ ID NO: 88482 - DNA, 25 bp, Probe Sequence
tgttgtaagtacagttggctagatc

SEQ ID NO: 88483 - DNA, 25 bp, Probe Sequence
ttcatcatttggtgcttagtctttg

SEQ ID NO: 88484 - DNA, 25 bp, Probe Sequence
gttcatcatttggtgcttagtcttt

SEQ ID NO: 88485 - DNA, 25 bp, Probe Sequence
ctacagttcatcatttggtgcttag

SEQ ID NO: 88486 - DNA, 25 bp, Probe Sequence
gtttatctccacccacactatcata

SEQ ID NO: 88487 - DNA, 25 bp, Probe Sequence
catcatttggtgcttagtctttgta

SEQ ID NO: 88488 - DNA, 25 bp, Probe Sequence
tacagttcatcatttggtgcttagt

SEQ ID NO: 88489 - DNA, 25 bp, Probe Sequence
agttcatcatttggtgcttagtctt

SEQ ID NO: 88490 - DNA, 25 bp, Probe Sequence
actacagttcatcatttggtgctta

SEQ ID NO: 88491 - DNA, 25 bp, Probe Sequence
taaagccactacagttcatcatttg

SEQ ID NO: 88492 - DNA, 25 bp, Probe Sequence
tcatcatttggtgcttagtctttgt

SEQ ID NO: 88493 - DNA, 25 bp, Probe Sequence
ccacccacactatcatagatttctt

SEQ ID NO: 88494 - DNA, 25 bp, Probe Sequence
ctaaagccactacagttcatcattt

SEQ ID NO: 88495 - DNA, 25 bp, Probe Sequence
tttatctccacccacactatcatag

SEQ ID NO: 88496 - DNA, 25 bp, Probe Sequence
ctccacccacactatcatagatttc

SEQ ID NO: 88497 - DNA, 25 bp, Probe Sequence
atcatttggtgcttagtctttgtaa

SEQ ID NO: 88498 - DNA, 25 bp, Probe Sequence
tccacccacactatcatagatttct

SEQ ID NO: 88499 - DNA, 25 bp, Probe Sequence
cagttcatcatttggtgcttagtct

SEQ ID NO: 88500 - DNA, 25 bp, Probe Sequence
ttatctccacccacactatcataga

SEQ ID NO: 88501 - DNA, 25 bp, Probe Sequence
tttgccatcttagcctaaagtattg

SEQ ID NO: 88502 - DNA, 25 bp, Probe Sequence
gtgaatagtgaagtggctatcctaa

SEQ ID NO: 88503 - DNA, 25 bp, Probe Sequence
aatgtgaatagtgaagtggctatcc

SEQ ID NO: 88504 - DNA, 25 bp, Probe Sequence
tgtgaatagtgaagtggctatccta

SEQ ID NO: 88505 - DNA, 25 bp, Probe Sequence
atgtgaatagtgaagtggctatcct

SEQ ID NO: 88506 - DNA, 25 bp, Probe Sequence
tgttgtaagtacagttggctagatc

SEQ ID NO: 88507 - DNA, 25 bp, Probe Sequence
ttcatcatttggtgcttagtctttg

SEQ ID NO: 88508 - DNA, 25 bp, Probe Sequence
gttcatcatttggtgcttagtcttt

SEQ ID NO: 88509 - DNA, 25 bp, Probe Sequence
ctacagttcatcatttggtgcttag

SEQ ID NO: 88510 - DNA, 25 bp, Probe Sequence
gtttatctccacccacactatcata

SEQ ID NO: 88511 - DNA, 25 bp, Probe Sequence
catcatttggtgcttagtctttgta

SEQ ID NO: 88512 - DNA, 25 bp, Probe Sequence
tacagttcatcatttggtgcttagt

SEQ ID NO: 88513 - DNA, 25 bp, Probe Sequence
agttcatcatttggtgcttagtctt

SEQ ID NO: 88514 - DNA, 25 bp, Probe Sequence
actacagttcatcatttggtgctta

SEQ ID NO: 88515 - DNA, 25 bp, Probe Sequence
taaagccactacagttcatcatttg

SEQ ID NO: 88516 - DNA, 25 bp, Probe Sequence
tcatcatttggtgcttagtctttgt

SEQ ID NO: 88517 - DNA, 25 bp, Probe Sequence
ccacccacactatcatagatttctt

SEQ ID NO: 88518 - DNA, 25 bp, Probe Sequence
ctaaagccactacagttcatcattt

SEQ ID NO: 88519 - DNA, 25 bp, Probe Sequence
tttatctccacccacactatcatag

SEQ ID NO: 88520 - DNA, 25 bp, Probe Sequence
ctccacccacactatcatagatttc

SEQ ID NO: 88521 - DNA, 25 bp, Probe Sequence
atcatttggtgcttagtctttgtaa

SEQ ID NO: 88522 - DNA, 25 bp, Probe Sequence
tccacccacactatcatagatttct

SEQ ID NO: 88523 - DNA, 25 bp, Probe Sequence
cagttcatcatttggtgcttagtct

SEQ ID NO: 88524 - DNA, 25 bp, Probe Sequence
ttatctccacccacactatcataga

SEQ ID NO: 88525 - DNA, 25 bp, Probe Sequence
tttgccatcttagcctaaagtattg

SEQ ID NO: 88526 - DNA, 25 bp, Probe Sequence
ccagatacaggtgaatacataggaa

SEQ ID NO: 88527 - DNA, 25 bp, Probe Sequence
cctaatgatatgtgaattggttggt

SEQ ID NO: 88528 - DNA, 25 bp, Probe Sequence
agatacaggtgaatacataggaact

SEQ ID NO: 88529 - DNA, 25 bp, Probe Sequence
cagatacaggtgaatacataggaac

SEQ ID NO: 88530 - DNA, 25 bp, Probe Sequence
aggtgaatacataggaactatctgc

SEQ ID NO: 88531 - DNA, 25 bp, Probe Sequence
ggtgaatacataggaactatctgcc

SEQ ID NO: 88532 - DNA, 25 bp, Probe Sequence
atccatgtctctagcaatctatgtc

SEQ ID NO: 88533 - DNA, 25 bp, Probe Sequence
catgtctctagcaatctatgtctgg

SEQ ID NO: 88534 - DNA, 25 bp, Probe Sequence
ccatgtctctagcaatctatgtctg

SEQ ID NO: 88535 - DNA, 25 bp, Probe Sequence
tccatgtctctagcaatctatgtct

SEQ ID NO: 88536 - DNA, 25 bp, Probe Sequence
aatacataggaactatctgcctgtg

SEQ ID NO: 88537 - DNA, 25 bp, Probe Sequence
gaatacataggaactatctgcctgt

SEQ ID NO: 88538 - DNA, 25 bp, Probe Sequence
tgaatacataggaactatctgcctg

SEQ ID NO: 88539 - DNA, 25 bp, Probe Sequence
gtgaatacataggaactatctgcct

SEQ ID NO: 88540 - DNA, 25 bp, Probe Sequence
atacataggaactatctgcctgtgt

SEQ ID NO: 88541 - DNA, 25 bp, Probe Sequence
acaggtgaatacataggaactatct

SEQ ID NO: 88542 - DNA, 25 bp, Probe Sequence
tatccatgtctctagcaatctatgt

SEQ ID NO: 88543 - DNA, 25 bp, Probe Sequence
ctaatgatatgtgaattggttggtt

SEQ ID NO: 88544 - DNA, 25 bp, Probe Sequence
actgtctggtgatacctatatccat

SEQ ID NO: 88545 - DNA, 25 bp, Probe Sequence
accagatacaggtgaatacatagga

SEQ ID NO: 88546 - DNA, 25 bp, Probe Sequence
tacataggaactatctgcctgtgtc

SEQ ID NO: 88547 - DNA, 25 bp, Probe Sequence
caggtgaatacataggaactatctg

SEQ ID NO: 88548 - DNA, 25 bp, Probe Sequence
cactgtctggtgatacctatatcca

SEQ ID NO: 88549 - DNA, 25 bp, Probe Sequence
gatacaggtgaatacataggaacta

SEQ ID NO: 88550 - DNA, 25 bp, Probe Sequence
ctacacatctgagaaggacaagttg

SEQ ID NO: 88551 - DNA, 25 bp, Probe Sequence
tacacatctgagaaggacaagttga

SEQ ID NO: 88552 - DNA, 25 bp, Probe Sequence
actacacatctgagaaggacaagtt

SEQ ID NO: 88553 - DNA, 25 bp, Probe Sequence
acacatctgagaaggacaagttgat

SEQ ID NO: 88554 - DNA, 25 bp, Probe Sequence
cactacacatctgagaaggacaagt

SEQ ID NO: 88555 - DNA, 25 bp, Probe Sequence
ccactacacatctgagaaggacaag

SEQ ID NO: 88556 - DNA, 25 bp, Probe Sequence
tatttcatctgggtggagttcattt

SEQ ID NO: 88557 - DNA, 25 bp, Probe Sequence
ctatttcatctgggtggagttcatt

SEQ ID NO: 88558 - DNA, 25 bp, Probe Sequence
atttcatctgggtggagttcatttc

SEQ ID NO: 88559 - DNA, 25 bp, Probe Sequence
atctgagaaggacaagttgatgtgg

SEQ ID NO: 88560 - DNA, 25 bp, Probe Sequence
aactgagcaaacaatgattcaagaa

SEQ ID NO: 88561 - DNA, 25 bp, Probe Sequence
gagcacataatcagactctccagag

SEQ ID NO: 88562 - DNA, 25 bp, Probe Sequence
taactgagcaaacaatgattcaaga

SEQ ID NO: 88563 - DNA, 25 bp, Probe Sequence
actgagcaaacaatgattcaagaat

SEQ ID NO: 88564 - DNA, 25 bp, Probe Sequence
gtctgtctgttccagtgatgaagtt

SEQ ID NO: 88565 - DNA, 25 bp, Probe Sequence
tgggatacagatacttacgaaatgt

SEQ ID NO: 88566 - DNA, 25 bp, Probe Sequence
ttaactgagcaaacaatgattcaag

SEQ ID NO: 88567 - DNA, 25 bp, Probe Sequence
cctgggatacagatacttacgaaat

SEQ ID NO: 88568 - DNA, 25 bp, Probe Sequence
cttaggcaaagtttacttgacatgg

SEQ ID NO: 88569 - DNA, 25 bp, Probe Sequence
tcctgggatacagatacttacgaaa

SEQ ID NO: 88570 - DNA, 25 bp, Probe Sequence
ctcctgggatacagatacttacgaa

SEQ ID NO: 88571 - DNA, 25 bp, Probe Sequence
tttaactgagcaaacaatgattcaa

SEQ ID NO: 88572 - DNA, 25 bp, Probe Sequence
ctgggatacagatacttacgaaatg

SEQ ID NO: 88573 - DNA, 25 bp, Probe Sequence
ctgtctgtctgttccagtgatgaag

SEQ ID NO: 88574 - DNA, 25 bp, Probe Sequence
ttgaggtattgttggattcagttga

SEQ ID NO: 88575 - DNA, 25 bp, Probe Sequence
tgaggtattgttggattcagttgag

SEQ ID NO: 88576 - DNA, 25 bp, Probe Sequence
gaggtattgttggattcagttgagc

SEQ ID NO: 88577 - DNA, 25 bp, Probe Sequence
tctctgacattggtgcctaagaatt

SEQ ID NO: 88578 - DNA, 25 bp, Probe Sequence
atgttgtgttcagcctatcatccat

SEQ ID NO: 88579 - DNA, 25 bp, Probe Sequence
gattctctgacattggtgcctaaga

SEQ ID NO: 88580 - DNA, 25 bp, Probe Sequence
agattctctgacattggtgcctaag

SEQ ID NO: 88581 - DNA, 25 bp, Probe Sequence
ttgtgttcagcctatcatccatcaa

SEQ ID NO: 88582 - DNA, 25 bp, Probe Sequence
aatgttgtgttcagcctatcatcca

SEQ ID NO: 88583 - DNA, 25 bp, Probe Sequence
cagcctatcatccatcaaatcacta

SEQ ID NO: 88584 - DNA, 25 bp, Probe Sequence
gttgtgttcagcctatcatccatca

SEQ ID NO: 88585 - DNA, 25 bp, Probe Sequence
tgttgtgttcagcctatcatccatc

SEQ ID NO: 88586 - DNA, 25 bp, Probe Sequence
ttcagcctatcatccatcaaatcac

SEQ ID NO: 88587 - DNA, 25 bp, Probe Sequence
gttcagcctatcatccatcaaatca

SEQ ID NO: 88588 - DNA, 25 bp, Probe Sequence
tgttcagcctatcatccatcaaatc

SEQ ID NO: 88589 - DNA, 25 bp, Probe Sequence
gtgttcagcctatcatccatcaaat

SEQ ID NO: 88590 - DNA, 25 bp, Probe Sequence
agcctatcatccatcaaatcactag

SEQ ID NO: 88591 - DNA, 25 bp, Probe Sequence
aggtattgttggattcagttgagcc

SEQ ID NO: 88592 - DNA, 25 bp, Probe Sequence
tcagcctatcatccatcaaatcact

SEQ ID NO: 88593 - DNA, 25 bp, Probe Sequence
caaatgttgtgttcagcctatcatc

SEQ ID NO: 88594 - DNA, 25 bp, Probe Sequence
tttgaggtattgttggattcagttg

SEQ ID NO: 88595 - DNA, 25 bp, Probe Sequence
tcaaatgttgtgttcagcctatcat

SEQ ID NO: 88596 - DNA, 25 bp, Probe Sequence
ggaagcctatagaactataactgtc

SEQ ID NO: 88597 - DNA, 25 bp, Probe Sequence
ctctgacattggtgcctaagaattt

SEQ ID NO: 88598 - DNA, 25 bp, Probe Sequence
ggtagtgttctcagtataactccat

SEQ ID NO: 88599 - DNA, 25 bp, Probe Sequence
agtgttctcagtataactccatctg

SEQ ID NO: 88600 - DNA, 25 bp, Probe Sequence
gtagtgttctcagtataactccatc

SEQ ID NO: 88601 - DNA, 25 bp, Probe Sequence
gtgttctcagtataactccatctgc

SEQ ID NO: 88602 - DNA, 25 bp, Probe Sequence
attgctcaacatataacatggtgct

SEQ ID NO: 88603 - DNA, 25 bp, Probe Sequence
cattgctcaacatataacatggtgc

SEQ ID NO: 88604 - DNA, 25 bp, Probe Sequence
tagtgttctcagtataactccatct

SEQ ID NO: 88605 - DNA, 25 bp, Probe Sequence
ttcggtgaactattgaagagtaatt

SEQ ID NO: 88606 - DNA, 25 bp, Probe Sequence
tccatctgcaatatagtacaacctc

SEQ ID NO: 88607 - DNA, 25 bp, Probe Sequence
ctccatctgcaatatagtacaacct

SEQ ID NO: 88608 - DNA, 25 bp, Probe Sequence
ccatctgcaatatagtacaacctca

SEQ ID NO: 88609 - DNA, 25 bp, Probe Sequence
ttgctcaacatataacatggtgctg

SEQ ID NO: 88610 - DNA, 25 bp, Probe Sequence
ttaaagtataaagaaatccgccagg

SEQ ID NO: 88611 - DNA, 25 bp, Probe Sequence
actccatctgcaatatagtacaacc

SEQ ID NO: 88612 - DNA, 25 bp, Probe Sequence
atctgcaatatagtacaacctcagg

SEQ ID NO: 88613 - DNA, 25 bp, Probe Sequence
aactccatctgcaatatagtacaac

SEQ ID NO: 88614 - DNA, 25 bp, Probe Sequence
gggtagtgttctcagtataactcca

SEQ ID NO: 88615 - DNA, 25 bp, Probe Sequence
gttctcagtataactccatctgcaa

SEQ ID NO: 88616 - DNA, 25 bp, Probe Sequence
ttctcagtataactccatctgcaat

SEQ ID NO: 88617 - DNA, 25 bp, Probe Sequence
tgctttatctgtttagacatctgct

SEQ ID NO: 88618 - DNA, 25 bp, Probe Sequence
gtgctttatctgtttagacatctgc

SEQ ID NO: 88619 - DNA, 25 bp, Probe Sequence
catctgcaatatagtacaacctcag

SEQ ID NO: 88620 - DNA, 25 bp, Probe Sequence
tctcagtataactccatctgcaata

SEQ ID NO: 88621 - DNA, 25 bp, Probe Sequence
tgttctcagtataactccatctgca

SEQ ID NO: 88622 - DNA, 25 bp, Probe Sequence
aatgtccagttgtatgttcagtctc

SEQ ID NO: 88623 - DNA, 25 bp, Probe Sequence
agttgtatgttcagtctcttggaag

SEQ ID NO: 88624 - DNA, 25 bp, Probe Sequence
cagttgtatgttcagtctcttggaa

SEQ ID NO: 88625 - DNA, 25 bp, Probe Sequence
gtatgttcagtctcttggaaggaag

SEQ ID NO: 88626 - DNA, 25 bp, Probe Sequence
gtccagttgtatgttcagtctcttg

SEQ ID NO: 88627 - DNA, 25 bp, Probe Sequence
atgtccagttgtatgttcagtctct

SEQ ID NO: 88628 - DNA, 25 bp, Probe Sequence
tgtatgttcagtctcttggaaggaa

SEQ ID NO: 88629 - DNA, 25 bp, Probe Sequence
ttgtatgttcagtctcttggaagga

SEQ ID NO: 88630 - DNA, 25 bp, Probe Sequence
gttgtatgttcagtctcttggaagg

SEQ ID NO: 88631 - DNA, 25 bp, Probe Sequence
tgtccagttgtatgttcagtctctt

SEQ ID NO: 88632 - DNA, 25 bp, Probe Sequence
caatgtccagttgtatgttcagtct

SEQ ID NO: 88633 - DNA, 25 bp, Probe Sequence
tatgttcagtctcttggaaggaagg

SEQ ID NO: 88634 - DNA, 25 bp, Probe Sequence
ccaatgtccagttgtatgttcagtc

SEQ ID NO: 88635 - DNA, 25 bp, Probe Sequence
ctacagtaagctatgatctcaccac

SEQ ID NO: 88636 - DNA, 25 bp, Probe Sequence
taagctatgatctcaccactgtact

SEQ ID NO: 88637 - DNA, 25 bp, Probe Sequence
gtaagctatgatctcaccactgtac

SEQ ID NO: 88638 - DNA, 25 bp, Probe Sequence
ctctgctccaagtcattgcttacta

SEQ ID NO: 88639 - DNA, 25 bp, Probe Sequence
agtaagctatgatctcaccactgta

SEQ ID NO: 88640 - DNA, 25 bp, Probe Sequence
tacagtaagctatgatctcaccact

SEQ ID NO: 88641 - DNA, 25 bp, Probe Sequence
cttactacacccacaaacattcttc

SEQ ID NO: 88642 - DNA, 25 bp, Probe Sequence
aagctatgatctcaccactgtactc

SEQ ID NO: 88643 - DNA, 25 bp, Probe Sequence
tctgctccaagtcattgcttactac

SEQ ID NO: 88644 - DNA, 25 bp, Probe Sequence
ctatgatctcaccactgtactccag

SEQ ID NO: 88645 - DNA, 25 bp, Probe Sequence
cccacaaacattcttcgttctttaa

SEQ ID NO: 88646 - DNA, 25 bp, Probe Sequence
attcaagcaatcctatacaaccgta

SEQ ID NO: 88647 - DNA, 25 bp, Probe Sequence
ttatatccttcttgctcatcagttg

SEQ ID NO: 88648 - DNA, 25 bp, Probe Sequence
cattcaagcaatcctatacaaccgt

SEQ ID NO: 88649 - DNA, 25 bp, Probe Sequence
agccattcaagcaatcctatacaac

SEQ ID NO: 88650 - DNA, 25 bp, Probe Sequence
cagccattcaagcaatcctatacaa

SEQ ID NO: 88651 - DNA, 25 bp, Probe Sequence
tgtgcctagaccaagaagttattat

SEQ ID NO: 88652 - DNA, 25 bp, Probe Sequence
atgtgcctagaccaagaagttatta

SEQ ID NO: 88653 - DNA, 25 bp, Probe Sequence
gtgcctagaccaagaagttattatc

SEQ ID NO: 88654 - DNA, 25 bp, Probe Sequence
tatatccttcttgctcatcagttga

SEQ ID NO: 88655 - DNA, 25 bp, Probe Sequence
tgcctagaccaagaagttattatct

SEQ ID NO: 88656 - DNA, 25 bp, Probe Sequence
ttaccgctaacaacctattccaact

SEQ ID NO: 88657 - DNA, 25 bp, Probe Sequence
ccattcaagcaatcctatacaaccg

SEQ ID NO: 88658 - DNA, 25 bp, Probe Sequence
catgtgcctagaccaagaagttatt

SEQ ID NO: 88659 - DNA, 25 bp, Probe Sequence
atatccttcttgctcatcagttgat

SEQ ID NO: 88660 - DNA, 25 bp, Probe Sequence
atattcatgtgcctagaccaagaag

SEQ ID NO: 88661 - DNA, 25 bp, Probe Sequence
tcgttacatggtccatcatagaatt

SEQ ID NO: 88662 - DNA, 25 bp, Probe Sequence
ttcgttacatggtccatcatagaat

SEQ ID NO: 88663 - DNA, 25 bp, Probe Sequence
gcctagaccaagaagttattatctc

SEQ ID NO: 88664 - DNA, 25 bp, Probe Sequence
gccattcaagcaatcctatacaacc

SEQ ID NO: 88665 - DNA, 25 bp, Probe Sequence
attatatccttcttgctcatcagtt

SEQ ID NO: 88666 - DNA, 25 bp, Probe Sequence
ttcaagcaatcctatacaaccgtat

SEQ ID NO: 88667 - DNA, 25 bp, Probe Sequence
caatattcatgtgcctagaccaaga

SEQ ID NO: 88668 - DNA, 25 bp, Probe Sequence
gttcgttacatggtccatcatagaa

SEQ ID NO: 88669 - DNA, 25 bp, Probe Sequence
tcaagcaatcctatacaaccgtatc

SEQ ID NO: 88670 - DNA, 25 bp, Probe Sequence
ataatcaactatcagcaggaggaag

SEQ ID NO: 88671 - DNA, 25 bp, Probe Sequence
aataatcaactatcagcaggaggaa

SEQ ID NO: 88672 - DNA, 25 bp, Probe Sequence
taatcaactatcagcaggaggaaga

SEQ ID NO: 88673 - DNA, 25 bp, Probe Sequence
gagtcacttccatacatctacacag

SEQ ID NO: 88674 - DNA, 25 bp, Probe Sequence
taagcctcaggttcctcatctataa

SEQ ID NO: 88675 - DNA, 25 bp, Probe Sequence
atgagtcacttccatacatctacac

SEQ ID NO: 88676 - DNA, 25 bp, Probe Sequence
gacgaggctaataatcaactatcag

SEQ ID NO: 88677 - DNA, 25 bp, Probe Sequence
tgagtcacttccatacatctacaca

SEQ ID NO: 88678 - DNA, 25 bp, Probe Sequence
ctaagcctcaggttcctcatctata

SEQ ID NO: 88679 - DNA, 25 bp, Probe Sequence
taataatcaactatcagcaggagga

SEQ ID NO: 88680 - DNA, 25 bp, Probe Sequence
aatgagtcacttccatacatctaca

SEQ ID NO: 88681 - DNA, 25 bp, Probe Sequence
tagaacttccttccactctgagaat

SEQ ID NO: 88682 - DNA, 25 bp, Probe Sequence
aatcaactatcagcaggaggaagaa

SEQ ID NO: 88683 - DNA, 25 bp, Probe Sequence
ctaataatcaactatcagcaggagg

SEQ ID NO: 88684 - DNA, 25 bp, Probe Sequence
tgacgaggctaataatcaactatca

SEQ ID NO: 88685 - DNA, 25 bp, Probe Sequence
agtcacttccatacatctacacagg

SEQ ID NO: 88686 - DNA, 25 bp, Probe Sequence
atcaactatcagcaggaggaagaag

SEQ ID NO: 88687 - DNA, 25 bp, Probe Sequence
ctagaacttccttccactctgagaa

SEQ ID NO: 88688 - DNA, 25 bp, Probe Sequence
aactatcagcaggaggaagaagaac

SEQ ID NO: 88689 - DNA, 25 bp, Probe Sequence
caactatcagcaggaggaagaagaa

SEQ ID NO: 88690 - DNA, 25 bp, Probe Sequence
tgcctagaacatgcttagaacatat

SEQ ID NO: 88691 - DNA, 25 bp, Probe Sequence
gtgcctagaacatgcttagaacata

SEQ ID NO: 88692 - DNA, 25 bp, Probe Sequence
agaacttccttccactctgagaatc

SEQ ID NO: 88693 - DNA, 25 bp, Probe Sequence
gttacttaacctctctaagcctcag

SEQ ID NO: 88694 - DNA, 25 bp, Probe Sequence
gcagttaccatctcatcacatctaa

SEQ ID NO: 88695 - DNA, 25 bp, Probe Sequence
atgtggtgtataagtgaagtcaagg

SEQ ID NO: 88696 - DNA, 25 bp, Probe Sequence
tggtgtataagtgaagtcaaggttg

SEQ ID NO: 88697 - DNA, 25 bp, Probe Sequence
gtggtgtataagtgaagtcaaggtt

SEQ ID NO: 88698 - DNA, 25 bp, Probe Sequence
tgtataagtgaagtcaaggttgctt

SEQ ID NO: 88699 - DNA, 25 bp, Probe Sequence
gtgtataagtgaagtcaaggttgct

SEQ ID NO: 88700 - DNA, 25 bp, Probe Sequence
aatgtggtgtataagtgaagtcaag

SEQ ID NO: 88701 - DNA, 25 bp, Probe Sequence
tagttccttgatcttcctctgctat

SEQ ID NO: 88702 - DNA, 25 bp, Probe Sequence
ttcacaggagataagagaagcactt

SEQ ID NO: 88703 - DNA, 25 bp, Probe Sequence
tgtggtgtataagtgaagtcaaggt

SEQ ID NO: 88704 - DNA, 25 bp, Probe Sequence
ggtgtataagtgaagtcaaggttgc

SEQ ID NO: 88705 - DNA, 25 bp, Probe Sequence
agttccttgatcttcctctgctatt

SEQ ID NO: 88706 - DNA, 25 bp, Probe Sequence
gtagttccttgatcttcctctgcta

SEQ ID NO: 88707 - DNA, 25 bp, Probe Sequence
tcctgccatcactgaagattaactt

SEQ ID NO: 88708 - DNA, 25 bp, Probe Sequence
taatgtggtgtataagtgaagtcaa

SEQ ID NO: 88709 - DNA, 25 bp, Probe Sequence
ataatgtggtgtataagtgaagtca

SEQ ID NO: 88710 - DNA, 25 bp, Probe Sequence
ctcctgccatcactgaagattaact

SEQ ID NO: 88711 - DNA, 25 bp, Probe Sequence
tcacaggagataagagaagcacttc

SEQ ID NO: 88712 - DNA, 25 bp, Probe Sequence
actcctgccatcactgaagattaac

SEQ ID NO: 88713 - DNA, 25 bp, Probe Sequence
cactcctgccatcactgaagattaa

SEQ ID NO: 88714 - DNA, 25 bp, Probe Sequence
tagtaccaacagtatcacataccaa

SEQ ID NO: 88715 - DNA, 25 bp, Probe Sequence
ttagtaccaacagtatcacatacca

SEQ ID NO: 88716 - DNA, 25 bp, Probe Sequence
gttagtaccaacagtatcacatacc

SEQ ID NO: 88717 - DNA, 25 bp, Probe Sequence
cctgttccttagttcactttcttca

SEQ ID NO: 88718 - DNA, 25 bp, Probe Sequence
cattccatctcaaactgcttcttta

SEQ ID NO: 88719 - DNA, 25 bp, Probe Sequence
tacattccatctcaaactgcttctt

SEQ ID NO: 88720 - DNA, 25 bp, Probe Sequence
ttaattcatccataagaagccattc

SEQ ID NO: 88721 - DNA, 25 bp, Probe Sequence
aaacattatgaccctctgaagactg

SEQ ID NO: 88722 - DNA, 25 bp, Probe Sequence
aattggagtcaatcctctgatacag

SEQ ID NO: 88723 - DNA, 25 bp, Probe Sequence
acattccatctcaaactgcttcttt

SEQ ID NO: 88724 - DNA, 25 bp, Probe Sequence
tcaaactgcttctttaattcatcca

SEQ ID NO: 88725 - DNA, 25 bp, Probe Sequence
aacattatgaccctctgaagactga

SEQ ID NO: 88726 - DNA, 25 bp, Probe Sequence
ttccatctcaaactgcttctttaat

SEQ ID NO: 88727 - DNA, 25 bp, Probe Sequence
attccatctcaaactgcttctttaa

SEQ ID NO: 88728 - DNA, 25 bp, Probe Sequence
aatcctttgttgtcatttcagcaat

SEQ ID NO: 88729 - DNA, 25 bp, Probe Sequence
tccatctcaaactgcttctttaatt

SEQ ID NO: 88730 - DNA, 25 bp, Probe Sequence
attatgaccctctgaagactgactc

SEQ ID NO: 88731 - DNA, 25 bp, Probe Sequence
ctcaaactgcttctttaattcatcc

SEQ ID NO: 88732 - DNA, 25 bp, Probe Sequence
ccatctcaaactgcttctttaattc

SEQ ID NO: 88733 - DNA, 25 bp, Probe Sequence
cattatgaccctctgaagactgact

SEQ ID NO: 88734 - DNA, 25 bp, Probe Sequence
aattcatccataagaagccattctg

SEQ ID NO: 88735 - DNA, 25 bp, Probe Sequence
attcatccataagaagccattctgg

SEQ ID NO: 88736 - DNA, 25 bp, Probe Sequence
gtacattccatctcaaactgcttct

SEQ ID NO: 88737 - DNA, 25 bp, Probe Sequence
aaatcctttgttgtcatttcagcaa

SEQ ID NO: 88738 - DNA, 25 bp, Probe Sequence
acattatgaccctctgaagactgac

SEQ ID NO: 88739 - DNA, 25 bp, Probe Sequence
caaactgcttctttaattcatccat

SEQ ID NO: 88740 - DNA, 25 bp, Probe Sequence
taaatcctttgttgtcatttcagca

SEQ ID NO: 88741 - DNA, 25 bp, Probe Sequence
atgctaatgattcatctgaggtttc

SEQ ID NO: 88742 - DNA, 25 bp, Probe Sequence
taatcatctagtatgtgccaagagc

SEQ ID NO: 88743 - DNA, 25 bp, Probe Sequence
ataatcatctagtatgtgccaagag

SEQ ID NO: 88744 - DNA, 25 bp, Probe Sequence
acccactatgacgctatattatgag

SEQ ID NO: 88745 - DNA, 25 bp, Probe Sequence
aatcatctagtatgtgccaagagcc

SEQ ID NO: 88746 - DNA, 25 bp, Probe Sequence
aataatcatctagtatgtgccaaga

SEQ ID NO: 88747 - DNA, 25 bp, Probe Sequence
tcctattatcttggttaagtgagtt

SEQ ID NO: 88748 - DNA, 25 bp, Probe Sequence
ttcctattatcttggttaagtgagt

SEQ ID NO: 88749 - DNA, 25 bp, Probe Sequence
cccactatgacgctatattatgagt

SEQ ID NO: 88750 - DNA, 25 bp, Probe Sequence
tacccactatgacgctatattatga

SEQ ID NO: 88751 - DNA, 25 bp, Probe Sequence
gtatgtacccactatgacgctatat

SEQ ID NO: 88752 - DNA, 25 bp, Probe Sequence
tgtacccactatgacgctatattat

SEQ ID NO: 88753 - DNA, 25 bp, Probe Sequence
atgtacccactatgacgctatatta

SEQ ID NO: 88754 - DNA, 25 bp, Probe Sequence
tatgtacccactatgacgctatatt

SEQ ID NO: 88755 - DNA, 25 bp, Probe Sequence
agtatgtacccactatgacgctata

SEQ ID NO: 88756 - DNA, 25 bp, Probe Sequence
actatgacgctatattatgagtgta

SEQ ID NO: 88757 - DNA, 25 bp, Probe Sequence
gtacccactatgacgctatattatg

SEQ ID NO: 88758 - DNA, 25 bp, Probe Sequence
cattatgcccagtacaggacttatg

SEQ ID NO: 88759 - DNA, 25 bp, Probe Sequence
gagtatgtacccactatgacgctat

SEQ ID NO: 88760 - DNA, 25 bp, Probe Sequence
ctatgacgctatattatgagtgtac

SEQ ID NO: 88761 - DNA, 25 bp, Probe Sequence
acttctgggactttattctatgaaa

SEQ ID NO: 88762 - DNA, 25 bp, Probe Sequence
tgctacgtattagtcatcgctatta

SEQ ID NO: 88763 - DNA, 25 bp, Probe Sequence
gctacgtattagtcatcgctattac

SEQ ID NO: 88764 - DNA, 25 bp, Probe Sequence
atgctacgtattagtcatcgctatt

SEQ ID NO: 88765 - DNA, 25 bp, Probe Sequence
agtacatgctacgtattagtcatcg

SEQ ID NO: 88766 - DNA, 25 bp, Probe Sequence
ggactataacctgaacgacatactt

SEQ ID NO: 88767 - DNA, 25 bp, Probe Sequence
tataacctgaacgacatacttctcc

SEQ ID NO: 88768 - DNA, 25 bp, Probe Sequence
actataacctgaacgacatacttct

SEQ ID NO: 88769 - DNA, 25 bp, Probe Sequence
ataacctgaacgacatacttctcca

SEQ ID NO: 88770 - DNA, 25 bp, Probe Sequence
gactataacctgaacgacatacttc

SEQ ID NO: 88771 - DNA, 25 bp, Probe Sequence
ctataacctgaacgacatacttctc

SEQ ID NO: 88772 - DNA, 25 bp, Probe Sequence
tccataaggctgtgcttgatgtatt

SEQ ID NO: 88773 - DNA, 25 bp, Probe Sequence
ctggagttcagagagataggttgag

SEQ ID NO: 88774 - DNA, 25 bp, Probe Sequence
atcaagacagatgaggaagtggaac

SEQ ID NO: 88775 - DNA, 25 bp, Probe Sequence
taacctgaacgacatacttctccag

SEQ ID NO: 88776 - DNA, 25 bp, Probe Sequence
gatcaagacagatgaggaagtggaa

SEQ ID NO: 88777 - DNA, 25 bp, Probe Sequence
gcctcctgacagcaataaataattt

SEQ ID NO: 88778 - DNA, 25 bp, Probe Sequence
ataaggctgtgcttgatgtatttga

SEQ ID NO: 88779 - DNA, 25 bp, Probe Sequence
cataaggctgtgcttgatgtatttg

SEQ ID NO: 88780 - DNA, 25 bp, Probe Sequence
gtccataaggctgtgcttgatgtat

SEQ ID NO: 88781 - DNA, 25 bp, Probe Sequence
tcctgacagcaataaataatttcgt

SEQ ID NO: 88782 - DNA, 25 bp, Probe Sequence
gggactataacctgaacgacatact

SEQ ID NO: 88783 - DNA, 25 bp, Probe Sequence
taaggctgtgcttgatgtatttgag

SEQ ID NO: 88784 - DNA, 25 bp, Probe Sequence
ctcctgacagcaataaataatttcg

SEQ ID NO: 88785 - DNA, 25 bp, Probe Sequence
cctgacagcaataaataatttcgtt

SEQ ID NO: 88786 - DNA, 25 bp, Probe Sequence
ccataaggctgtgcttgatgtattt

SEQ ID NO: 88787 - DNA, 25 bp, Probe Sequence
tgacagcaataaataatttcgttgg

SEQ ID NO: 88788 - DNA, 25 bp, Probe Sequence
cctcctgacagcaataaataatttc

SEQ ID NO: 88789 - DNA, 25 bp, Probe Sequence
ggctctcagtaaggaacttggaatg

SEQ ID NO: 88790 - DNA, 25 bp, Probe Sequence
tgacatcttctggttattactctga

SEQ ID NO: 88791 - DNA, 25 bp, Probe Sequence
ttgacatcttctggttattactctg

SEQ ID NO: 88792 - DNA, 25 bp, Probe Sequence
catcttctggttattactctgaaca

SEQ ID NO: 88793 - DNA, 25 bp, Probe Sequence
acatcttctggttattactctgaac

SEQ ID NO: 88794 - DNA, 25 bp, Probe Sequence
gacatcttctggttattactctgaa

SEQ ID NO: 88795 - DNA, 25 bp, Probe Sequence
ttctggttattactctgaacattgt

SEQ ID NO: 88796 - DNA, 25 bp, Probe Sequence
cttctggttattactctgaacattg

SEQ ID NO: 88797 - DNA, 25 bp, Probe Sequence
tcttctggttattactctgaacatt

SEQ ID NO: 88798 - DNA, 25 bp, Probe Sequence
atcttctggttattactctgaacat

SEQ ID NO: 88799 - DNA, 25 bp, Probe Sequence
tctggttattactctgaacattgtt

SEQ ID NO: 88800 - DNA, 25 bp, Probe Sequence
ttgagagtgagcatactatgaagta

SEQ ID NO: 88801 - DNA, 25 bp, Probe Sequence
ggttgatttcgtaggatttgacatc

SEQ ID NO: 88802 - DNA, 25 bp, Probe Sequence
cgtaggatttgacatcttctggtta

SEQ ID NO: 88803 - DNA, 25 bp, Probe Sequence
tggttgatttcgtaggatttgacat

SEQ ID NO: 88804 - DNA, 25 bp, Probe Sequence
atggttgatttcgtaggatttgaca

SEQ ID NO: 88805 - DNA, 25 bp, Probe Sequence
gttgatttcgtaggatttgacatct

SEQ ID NO: 88806 - DNA, 25 bp, Probe Sequence
tatggttgatttcgtaggatttgac

SEQ ID NO: 88807 - DNA, 25 bp, Probe Sequence
tttcgtaggatttgacatcttctgg

SEQ ID NO: 88808 - DNA, 25 bp, Probe Sequence
atttcgtaggatttgacatcttctg

SEQ ID NO: 88809 - DNA, 25 bp, Probe Sequence
tgatttcgtaggatttgacatcttc

SEQ ID NO: 88810 - DNA, 25 bp, Probe Sequence
gatttcgtaggatttgacatcttct

SEQ ID NO: 88811 - DNA, 25 bp, Probe Sequence
tggttattgatatggttgatttcgt

SEQ ID NO: 88812 - DNA, 25 bp, Probe Sequence
ttgatttcgtaggatttgacatctt

SEQ ID NO: 88813 - DNA, 25 bp, Probe Sequence
ctggttattgatatggttgatttcg

SEQ ID NO: 88814 - DNA, 25 bp, Probe Sequence
aggtggattcagataagcataagac

SEQ ID NO: 88815 - DNA, 25 bp, Probe Sequence
tcaataaggtggattcagataagca

SEQ ID NO: 88816 - DNA, 25 bp, Probe Sequence
tgctcaataaggtggattcagataa

SEQ ID NO: 88817 - DNA, 25 bp, Probe Sequence
ggtggattcagataagcataagaca

SEQ ID NO: 88818 - DNA, 25 bp, Probe Sequence
gtgctcaataaggtggattcagata

SEQ ID NO: 88819 - DNA, 25 bp, Probe Sequence
aaggtggattcagataagcataaga

SEQ ID NO: 88820 - DNA, 25 bp, Probe Sequence
ctcaataaggtggattcagataagc

SEQ ID NO: 88821 - DNA, 25 bp, Probe Sequence
gctcaataaggtggattcagataag

SEQ ID NO: 88822 - DNA, 25 bp, Probe Sequence
gtagaggaacaggtgactaagtatc

SEQ ID NO: 88823 - DNA, 25 bp, Probe Sequence
ggtagaggaacaggtgactaagtat

SEQ ID NO: 88824 - DNA, 25 bp, Probe Sequence
caataaggtggattcagataagcat

SEQ ID NO: 88825 - DNA, 25 bp, Probe Sequence
tagaggaacaggtgactaagtatct

SEQ ID NO: 88826 - DNA, 25 bp, Probe Sequence
gtggattcagataagcataagacat

SEQ ID NO: 88827 - DNA, 25 bp, Probe Sequence
aggtgactaagtatctggatagaga

SEQ ID NO: 88828 - DNA, 25 bp, Probe Sequence
atcttgtgctcaataaggtggattc

SEQ ID NO: 88829 - DNA, 25 bp, Probe Sequence
ttgagaaggaagtggcttatcattc

SEQ ID NO: 88830 - DNA, 25 bp, Probe Sequence
tggtagaaggcactgacattgataa

SEQ ID NO: 88831 - DNA, 25 bp, Probe Sequence
aggtagaggaacaggtgactaagta

SEQ ID NO: 88832 - DNA, 25 bp, Probe Sequence
taaggtggattcagataagcataag

SEQ ID NO: 88833 - DNA, 25 bp, Probe Sequence
ggtgactaagtatctggatagagaa

SEQ ID NO: 88834 - DNA, 25 bp, Probe Sequence
tgtgctcaataaggtggattcagat

SEQ ID NO: 88835 - DNA, 25 bp, Probe Sequence
acaggtgactaagtatctggataga

SEQ ID NO: 88836 - DNA, 25 bp, Probe Sequence
aagaggtagaggaacaggtgactaa

SEQ ID NO: 88837 - DNA, 25 bp, Probe Sequence
ctggtagaaggcactgacattgata

SEQ ID NO: 88838 - DNA, 25 bp, Probe Sequence
catcctgttgtgaagttctatctcc

SEQ ID NO: 88839 - DNA, 25 bp, Probe Sequence
ccatcctgttgtgaagttctatctc

SEQ ID NO: 88840 - DNA, 25 bp, Probe Sequence
atcctgttgtgaagttctatctcca

SEQ ID NO: 88841 - DNA, 25 bp, Probe Sequence
ttagccatattagagtccaaccagg

SEQ ID NO: 88842 - DNA, 25 bp, Probe Sequence
tattagagtccaaccaggagacata

SEQ ID NO: 88843 - DNA, 25 bp, Probe Sequence
atattagagtccaaccaggagacat

SEQ ID NO: 88844 - DNA, 25 bp, Probe Sequence
agagaactccagagaatataggact

SEQ ID NO: 88845 - DNA, 25 bp, Probe Sequence
attagagtccaaccaggagacataa

SEQ ID NO: 88846 - DNA, 25 bp, Probe Sequence
gccatcctgttgtgaagttctatct

SEQ ID NO: 88847 - DNA, 25 bp, Probe Sequence
gaactccagagaatataggactagc

SEQ ID NO: 88848 - DNA, 25 bp, Probe Sequence
aactccagagaatataggactagcc

SEQ ID NO: 88849 - DNA, 25 bp, Probe Sequence
tcctgttgtgaagttctatctccag

SEQ ID NO: 88850 - DNA, 25 bp, Probe Sequence
aagagaactccagagaatataggac

SEQ ID NO: 88851 - DNA, 25 bp, Probe Sequence
catattagagtccaaccaggagaca

SEQ ID NO: 88852 - DNA, 25 bp, Probe Sequence
tttagccatattagagtccaaccag

SEQ ID NO: 88853 - DNA, 25 bp, Probe Sequence
ctttagccatattagagtccaacca

SEQ ID NO: 88854 - DNA, 25 bp, Probe Sequence
tctttagccatattagagtccaacc

SEQ ID NO: 88855 - DNA, 25 bp, Probe Sequence
gagaactccagagaatataggacta

SEQ ID NO: 88856 - DNA, 25 bp, Probe Sequence
ccatattagagtccaaccaggagac

SEQ ID NO: 88857 - DNA, 25 bp, Probe Sequence
agaactccagagaatataggactag

SEQ ID NO: 88858 - DNA, 25 bp, Probe Sequence
cacaaagtaaagagaactccagaga

SEQ ID NO: 88859 - DNA, 25 bp, Probe Sequence
acaaagtaaagagaactccagagaa

SEQ ID NO: 88860 - DNA, 25 bp, Probe Sequence
tagcacaaagtaaagagaactccag

SEQ ID NO: 88861 - DNA, 25 bp, Probe Sequence
tagccatattagagtccaaccagga

SEQ ID NO: 88862 - DNA, 25 bp, Probe Sequence
gaatgagtgttaatgagtccaggag

SEQ ID NO: 88863 - DNA, 25 bp, Probe Sequence
aatgccaggaatgagtgttaatgag

SEQ ID NO: 88864 - DNA, 25 bp, Probe Sequence
gaatgccaggaatgagtgttaatga

SEQ ID NO: 88865 - DNA, 25 bp, Probe Sequence
atgagtgttaatgagtccaggagaa

SEQ ID NO: 88866 - DNA, 25 bp, Probe Sequence
aatgagtgttaatgagtccaggaga

SEQ ID NO: 88867 - DNA, 25 bp, Probe Sequence
atgctcaatcaacatctactgaatg

SEQ ID NO: 88868 - DNA, 25 bp, Probe Sequence
tgaatgccaggaatgagtgttaatg

SEQ ID NO: 88869 - DNA, 25 bp, Probe Sequence
ctgatattgtctctcatagcaccac

SEQ ID NO: 88870 - DNA, 25 bp, Probe Sequence
ctcaatcaacatctactgaatgcca

SEQ ID NO: 88871 - DNA, 25 bp, Probe Sequence
atattgtctctcatagcaccacatc

SEQ ID NO: 88872 - DNA, 25 bp, Probe Sequence
gatattgtctctcatagcaccacat

SEQ ID NO: 88873 - DNA, 25 bp, Probe Sequence
aatgctcaatcaacatctactgaat

SEQ ID NO: 88874 - DNA, 25 bp, Probe Sequence
tgagtgttaatgagtccaggagaag

SEQ ID NO: 88875 - DNA, 25 bp, Probe Sequence
acctggaacagtaactaacacatag

SEQ ID NO: 88876 - DNA, 25 bp, Probe Sequence
cacctggaacagtaactaacacata

SEQ ID NO: 88877 - DNA, 25 bp, Probe Sequence
tattgtctctcatagcaccacatct

SEQ ID NO: 88878 - DNA, 25 bp, Probe Sequence
cactgatgaatgttgattaatgcca

SEQ ID NO: 88879 - DNA, 25 bp, Probe Sequence
accactgatgaatgttgattaatgc

SEQ ID NO: 88880 - DNA, 25 bp, Probe Sequence
tgctcaatcaacatctactgaatgc

SEQ ID NO: 88881 - DNA, 25 bp, Probe Sequence
cctgatattgtctctcatagcacca

SEQ ID NO: 88882 - DNA, 25 bp, Probe Sequence
gtattaacctctgtagaaggctgtt

SEQ ID NO: 88883 - DNA, 25 bp, Probe Sequence
atgtattaacctctgtagaaggctg

SEQ ID NO: 88884 - DNA, 25 bp, Probe Sequence
tgatattgtctctcatagcaccaca

SEQ ID NO: 88885 - DNA, 25 bp, Probe Sequence
ccactgatgaatgttgattaatgcc

SEQ ID NO: 88886 - DNA, 25 bp, Probe Sequence
tatggcatttctatctattgtggct

SEQ ID NO: 88887 - DNA, 25 bp, Probe Sequence
cacctttgtatgttcctttgtatgt

SEQ ID NO: 88888 - DNA, 25 bp, Probe Sequence
tggcatttctatctattgtggcttt

SEQ ID NO: 88889 - DNA, 25 bp, Probe Sequence
atggcatttctatctattgtggctt

SEQ ID NO: 88890 - DNA, 25 bp, Probe Sequence
ggcatttctatctattgtggcttta

SEQ ID NO: 88891 - DNA, 25 bp, Probe Sequence
ttatggcatttctatctattgtggc

SEQ ID NO: 88892 - DNA, 25 bp, Probe Sequence
tttggagaaatgaatgtttgtctgg

SEQ ID NO: 88893 - DNA, 25 bp, Probe Sequence
acctttgtatgttcctttgtatgtt

SEQ ID NO: 88894 - DNA, 25 bp, Probe Sequence
ttggagaaatgaatgtttgtctgga

SEQ ID NO: 88895 - DNA, 25 bp, Probe Sequence
atgttcctttgtatgttcctatcag

SEQ ID NO: 88896 - DNA, 25 bp, Probe Sequence
tttgtatgttcctttgtatgttcct

SEQ ID NO: 88897 - DNA, 25 bp, Probe Sequence
accaaagttctgataccttgtttac

SEQ ID NO: 88898 - DNA, 25 bp, Probe Sequence
gcatttctatctattgtggctttac

SEQ ID NO: 88899 - DNA, 25 bp, Probe Sequence
ctttgtatgttcctttgtatgttcc

SEQ ID NO: 88900 - DNA, 25 bp, Probe Sequence
cctttgtatgttcctttgtatgttc

SEQ ID NO: 88901 - DNA, 25 bp, Probe Sequence
ccaaagttctgataccttgtttaca

SEQ ID NO: 88902 - DNA, 25 bp, Probe Sequence
tggagaaatgaatgtttgtctggag

SEQ ID NO: 88903 - DNA, 25 bp, Probe Sequence
agacacctttgtatgttcctttgta

SEQ ID NO: 88904 - DNA, 25 bp, Probe Sequence
aaatgtccctaccagaagccttaaa

SEQ ID NO: 88905 - DNA, 25 bp, Probe Sequence
acacctttgtatgttcctttgtatg

SEQ ID NO: 88906 - DNA, 25 bp, Probe Sequence
aaccaaagttctgataccttgttta

SEQ ID NO: 88907 - DNA, 25 bp, Probe Sequence
gagaaatgaatgtttgtctggagca

SEQ ID NO: 88908 - DNA, 25 bp, Probe Sequence
gacacctttgtatgttcctttgtat

SEQ ID NO: 88909 - DNA, 25 bp, Probe Sequence
gagaccttgtggatcaacagaagtt

SEQ ID NO: 88910 - DNA, 25 bp, Probe Sequence
tagtgtagatggtgtaagactctca

SEQ ID NO: 88911 - DNA, 25 bp, Probe Sequence
aaggatggatcagaatgttcaagac

SEQ ID NO: 88912 - DNA, 25 bp, Probe Sequence
agtgtagatggtgtaagactctcag

SEQ ID NO: 88913 - DNA, 25 bp, Probe Sequence
atagtgtagatggtgtaagactctc

SEQ ID NO: 88914 - DNA, 25 bp, Probe Sequence
gaaggatggatcagaatgttcaaga

SEQ ID NO: 88915 - DNA, 25 bp, Probe Sequence
aagtagaagcagttgtcagatcatg

SEQ ID NO: 88916 - DNA, 25 bp, Probe Sequence
gatgagacacagagtacatggtaag

SEQ ID NO: 88917 - DNA, 25 bp, Probe Sequence
aggatggatcagaatgttcaagact

SEQ ID NO: 88918 - DNA, 25 bp, Probe Sequence
atgagacacagagtacatggtaaga

SEQ ID NO: 88919 - DNA, 25 bp, Probe Sequence
atgatgagacacagagtacatggta

SEQ ID NO: 88920 - DNA, 25 bp, Probe Sequence
aatagtgtagatggtgtaagactct

SEQ ID NO: 88921 - DNA, 25 bp, Probe Sequence
agacacagagtacatggtaagacat

SEQ ID NO: 88922 - DNA, 25 bp, Probe Sequence
tgatgagacacagagtacatggtaa

SEQ ID NO: 88923 - DNA, 25 bp, Probe Sequence
gcaacattatgaaggatggatcaga

SEQ ID NO: 88924 - DNA, 25 bp, Probe Sequence
agcaacattatgaaggatggatcag

SEQ ID NO: 88925 - DNA, 25 bp, Probe Sequence
tcagcaacattatgaaggatggatc

SEQ ID NO: 88926 - DNA, 25 bp, Probe Sequence
caacattatgaaggatggatcagaa

SEQ ID NO: 88927 - DNA, 25 bp, Probe Sequence
cagcaacattatgaaggatggatca

SEQ ID NO: 88928 - DNA, 25 bp, Probe Sequence
gccttaatagtgtagatggtgtaag

SEQ ID NO: 88929 - DNA, 25 bp, Probe Sequence
gagacacagagtacatggtaagaca

SEQ ID NO: 88930 - DNA, 25 bp, Probe Sequence
tgagacacagagtacatggtaagac

SEQ ID NO: 88931 - DNA, 25 bp, Probe Sequence
cagaatgttcaagactgagattagt

SEQ ID NO: 88932 - DNA, 25 bp, Probe Sequence
ttatgaaggatggatcagaatgttc

SEQ ID NO: 88933 - DNA, 25 bp, Probe Sequence
gtgtagatggtgtaagactctcagc

SEQ ID NO: 88934 - DNA, 25 bp, Probe Sequence
gggtctttggatatttggttcattt

SEQ ID NO: 88935 - DNA, 25 bp, Probe Sequence
tgggtctttggatatttggttcatt

SEQ ID NO: 88936 - DNA, 25 bp, Probe Sequence
ctgggtctttggatatttggttcat

SEQ ID NO: 88937 - DNA, 25 bp, Probe Sequence
atttggttcatttagaagttcctgt

SEQ ID NO: 88938 - DNA, 25 bp, Probe Sequence
aataggatctgtttgattgtgatgg

SEQ ID NO: 88939 - DNA, 25 bp, Probe Sequence
tttggttcatttagaagttcctgta

SEQ ID NO: 88940 - DNA, 25 bp, Probe Sequence
ataggatctgtttgattgtgatggc

SEQ ID NO: 88941 - DNA, 25 bp, Probe Sequence
tggttcatttagaagttcctgtatt

SEQ ID NO: 88942 - DNA, 25 bp, Probe Sequence
ttggttcatttagaagttcctgtat

SEQ ID NO: 88943 - DNA, 25 bp, Probe Sequence
cagtccttgtcctcctctaagatgg

SEQ ID NO: 88944 - DNA, 25 bp, Probe Sequence
ccagtccttgtcctcctctaagatg

SEQ ID NO: 88945 - DNA, 25 bp, Probe Sequence
tccagtccttgtcctcctctaagat

SEQ ID NO: 88946 - DNA, 25 bp, Probe Sequence
gttcatttagaagttcctgtattcc

SEQ ID NO: 88947 - DNA, 25 bp, Probe Sequence
ggttcatttagaagttcctgtattc

SEQ ID NO: 88948 - DNA, 25 bp, Probe Sequence
ggtctttggatatttggttcattta

SEQ ID NO: 88949 - DNA, 25 bp, Probe Sequence
ttcatttagaagttcctgtattcct

SEQ ID NO: 88950 - DNA, 25 bp, Probe Sequence
taggatctgtttgattgtgatggct

SEQ ID NO: 88951 - DNA, 25 bp, Probe Sequence
ctttgagctgggtctttggatattt

SEQ ID NO: 88952 - DNA, 25 bp, Probe Sequence
tttggtggcgaagatggataatcat

SEQ ID NO: 88953 - DNA, 25 bp, Probe Sequence
tttgagctgggtctttggatatttg

SEQ ID NO: 88954 - DNA, 25 bp, Probe Sequence
tatttggttcatttagaagttcctg

SEQ ID NO: 88955 - DNA, 25 bp, Probe Sequence
tagaagttcctgtattcctaatagg

SEQ ID NO: 88956 - DNA, 25 bp, Probe Sequence
cctaataggatctgtttgattgtga

SEQ ID NO: 88957 - DNA, 25 bp, Probe Sequence
gctgggtctttggatatttggttca

SEQ ID NO: 88958 - DNA, 25 bp, Probe Sequence
ttaattggaacttggtaggaactgc

SEQ ID NO: 88959 - DNA, 25 bp, Probe Sequence
aggaattaaccaacttgttgcttaa

SEQ ID NO: 88960 - DNA, 25 bp, Probe Sequence
aaggaattaaccaacttgttgctta

SEQ ID NO: 88961 - DNA, 25 bp, Probe Sequence
taattggaacttggtaggaactgcc

SEQ ID NO: 88962 - DNA, 25 bp, Probe Sequence
gatgaatcccaaatgtgttatgcta

SEQ ID NO: 88963 - DNA, 25 bp, Probe Sequence
tgaatcccaaatgtgttatgctaaa

SEQ ID NO: 88964 - DNA, 25 bp, Probe Sequence
gctttaattggaacttggtaggaac

SEQ ID NO: 88965 - DNA, 25 bp, Probe Sequence
atgaatcccaaatgtgttatgctaa

SEQ ID NO: 88966 - DNA, 25 bp, Probe Sequence
caggacctataagccaaagtttaac

SEQ ID NO: 88967 - DNA, 25 bp, Probe Sequence
aggacctataagccaaagtttaacc

SEQ ID NO: 88968 - DNA, 25 bp, Probe Sequence
ccaggacctataagccaaagtttaa

SEQ ID NO: 88969 - DNA, 25 bp, Probe Sequence
tttaattggaacttggtaggaactg

SEQ ID NO: 88970 - DNA, 25 bp, Probe Sequence
ctttaattggaacttggtaggaact

SEQ ID NO: 88971 - DNA, 25 bp, Probe Sequence
gtttaaccgctttaattggaacttg

SEQ ID NO: 88972 - DNA, 25 bp, Probe Sequence
tttaaccgctttaattggaacttgg

SEQ ID NO: 88973 - DNA, 25 bp, Probe Sequence
accaggacctataagccaaagttta

SEQ ID NO: 88974 - DNA, 25 bp, Probe Sequence
ggacctataagccaaagtttaaccg

SEQ ID NO: 88975 - DNA, 25 bp, Probe Sequence
cgctttaattggaacttggtaggaa

SEQ ID NO: 88976 - DNA, 25 bp, Probe Sequence
gaatcccaaatgtgttatgctaaat

SEQ ID NO: 88977 - DNA, 25 bp, Probe Sequence
aattaaccaacttgttgcttaatgc

SEQ ID NO: 88978 - DNA, 25 bp, Probe Sequence
attaaccaacttgttgcttaatgcc

SEQ ID NO: 88979 - DNA, 25 bp, Probe Sequence
gacctataagccaaagtttaaccgc

SEQ ID NO: 88980 - DNA, 25 bp, Probe Sequence
ttatgctaaattaaagaagtgaggc

SEQ ID NO: 88981 - DNA, 25 bp, Probe Sequence
aatcccaaatgtgttatgctaaatt

SEQ ID NO: 88982 - DNA, 25 bp, Probe Sequence
gagagagagagagagagagagagaa

SEQ ID NO: 88983 - DNA, 25 bp, Probe Sequence
ggagagagagagagagagagagaga

SEQ ID NO: 88984 - DNA, 25 bp, Probe Sequence
agagagagagagagagagagagaaa

SEQ ID NO: 88985 - DNA, 25 bp, Probe Sequence
ataaatcgtaacaaggttccgtagg

SEQ ID NO: 88986 - DNA, 25 bp, Probe Sequence
aataaatcgtaacaaggttccgtag

SEQ ID NO: 88987 - DNA, 25 bp, Probe Sequence
gaataaatcgtaacaaggttccgta

SEQ ID NO: 88988 - DNA, 25 bp, Probe Sequence
ataacaggtctgtgatgccttagat

SEQ ID NO: 88989 - DNA, 25 bp, Probe Sequence
agaggaataaatcgtaacaaggttc

SEQ ID NO: 88990 - DNA, 25 bp, Probe Sequence
aataacaggtctgtgatgccttaga

SEQ ID NO: 88991 - DNA, 25 bp, Probe Sequence
caataacaggtctgtgatgccttag

SEQ ID NO: 88992 - DNA, 25 bp, Probe Sequence
ctagaggaataaatcgtaacaaggt

SEQ ID NO: 88993 - DNA, 25 bp, Probe Sequence
taacaggtctgtgatgccttagatg

SEQ ID NO: 88994 - DNA, 25 bp, Probe Sequence
taaatcgtaacaaggttccgtaggg

SEQ ID NO: 88995 - DNA, 25 bp, Probe Sequence
tagaggaataaatcgtaacaaggtt

SEQ ID NO: 88996 - DNA, 25 bp, Probe Sequence
gagagagagagagagagagagaaaa

SEQ ID NO: 88997 - DNA, 25 bp, Probe Sequence
gggagagagagagagagagagagag

SEQ ID NO: 88998 - DNA, 25 bp, Probe Sequence
catgaacgaggaaattcccagtaag

SEQ ID NO: 88999 - DNA, 25 bp, Probe Sequence
atgaacgaggaaattcccagtaagt

SEQ ID NO: 89000 - DNA, 25 bp, Probe Sequence
actgacatctagaggaataaatcgt

SEQ ID NO: 89001 - DNA, 25 bp, Probe Sequence
tcgaaactgacatctagaggaataa

SEQ ID NO: 89002 - DNA, 25 bp, Probe Sequence
cgaaactgacatctagaggaataaa

SEQ ID NO: 89003 - DNA, 25 bp, Probe Sequence
aacaggtctgtgatgccttagatgt

SEQ ID NO: 89004 - DNA, 25 bp, Probe Sequence
aactgacatctagaggaataaatcg

SEQ ID NO: 89005 - DNA, 25 bp, Probe Sequence
gtcgaaactgacatctagaggaata

SEQ ID NO: 89006 - DNA, 25 bp, Probe Sequence
tgagaatagagagctccctccagag

SEQ ID NO: 89007 - DNA, 25 bp, Probe Sequence
ctgagaatagagagctccctccaga

SEQ ID NO: 89008 - DNA, 25 bp, Probe Sequence
gagaatagagagctccctccagagg

SEQ ID NO: 89009 - DNA, 25 bp, Probe Sequence
cctgagaatagagagctccctccag

SEQ ID NO: 89010 - DNA, 25 bp, Probe Sequence
gaatagagagctccctccagaggac

SEQ ID NO: 89011 - DNA, 25 bp, Probe Sequence
agaatagagagctccctccagagga

SEQ ID NO: 89012 - DNA, 25 bp, Probe Sequence
tgagaatagagagctccctccagag

SEQ ID NO: 89013 - DNA, 25 bp, Probe Sequence
ctgagaatagagagctccctccaga

SEQ ID NO: 89014 - DNA, 25 bp, Probe Sequence
gagaatagagagctccctccagagg

SEQ ID NO: 89015 - DNA, 25 bp, Probe Sequence
cctgagaatagagagctccctccag

SEQ ID NO: 89016 - DNA, 25 bp, Probe Sequence
gaatagagagctccctccagaggac

SEQ ID NO: 89017 - DNA, 25 bp, Probe Sequence
agaatagagagctccctccagagga

SEQ ID NO: 89018 - DNA, 25 bp, Probe Sequence
aaggtgttggttgatatagacagca

SEQ ID NO: 89019 - DNA, 25 bp, Probe Sequence
tgttggttgatatagacagcaggac

SEQ ID NO: 89020 - DNA, 25 bp, Probe Sequence
gtgttggttgatatagacagcagga

SEQ ID NO: 89021 - DNA, 25 bp, Probe Sequence
aggtgttggttgatatagacagcag

SEQ ID NO: 89022 - DNA, 25 bp, Probe Sequence
gttggttgatatagacagcaggacg

SEQ ID NO: 89023 - DNA, 25 bp, Probe Sequence
aaaggtgttggttgatatagacagc

SEQ ID NO: 89024 - DNA, 25 bp, Probe Sequence
ggtgttggttgatatagacagcagg

SEQ ID NO: 89025 - DNA, 25 bp, Probe Sequence
gaatccgctaaggagtgtgtaacaa

SEQ ID NO: 89026 - DNA, 25 bp, Probe Sequence
aatccgctaaggagtgtgtaacaac

SEQ ID NO: 89027 - DNA, 25 bp, Probe Sequence
ttggttgatatagacagcaggacgg

SEQ ID NO: 89028 - DNA, 25 bp, Probe Sequence
gtaacaactcacctgccgaatcaac

SEQ ID NO: 89029 - DNA, 25 bp, Probe Sequence
aacaactcacctgccgaatcaacta

SEQ ID NO: 89030 - DNA, 25 bp, Probe Sequence
taacaactcacctgccgaatcaact

SEQ ID NO: 89031 - DNA, 25 bp, Probe Sequence
atccgctaaggagtgtgtaacaact

SEQ ID NO: 89032 - DNA, 25 bp, Probe Sequence
agaaaaggtgttggttgatatagac

SEQ ID NO: 89033 - DNA, 25 bp, Probe Sequence
cagaaaaggtgttggttgatataga

SEQ ID NO: 89034 - DNA, 25 bp, Probe Sequence
tgtaacaactcacctgccgaatcaa

SEQ ID NO: 89035 - DNA, 25 bp, Probe Sequence
ctaaggagtgtgtaacaactcacct

SEQ ID NO: 89036 - DNA, 25 bp, Probe Sequence
gttgatatagacagcaggacggtgg

SEQ ID NO: 89037 - DNA, 25 bp, Probe Sequence
ggttgatatagacagcaggacggtg

SEQ ID NO: 89038 - DNA, 25 bp, Probe Sequence
taaggagtgtgtaacaactcacctg

SEQ ID NO: 89039 - DNA, 25 bp, Probe Sequence
aaaaggtgttggttgatatagacag

SEQ ID NO: 89040 - DNA, 25 bp, Probe Sequence
gaaaaggtgttggttgatatagaca

SEQ ID NO: 89041 - DNA, 25 bp, Probe Sequence
gaatcaactagccctgaaaatggat

SEQ ID NO: 89042 - DNA, 25 bp, Probe Sequence
attcagctagacctagatattgtgc

SEQ ID NO: 89043 - DNA, 25 bp, Probe Sequence
tgattcagctagacctagatattgt

SEQ ID NO: 89044 - DNA, 25 bp, Probe Sequence
tgtgattcagctagacctagatatt

SEQ ID NO: 89045 - DNA, 25 bp, Probe Sequence
gattcagctagacctagatattgtg

SEQ ID NO: 89046 - DNA, 25 bp, Probe Sequence
gtgattcagctagacctagatattg

SEQ ID NO: 89047 - DNA, 25 bp, Probe Sequence
atggcaatttagattcactgatgtc

SEQ ID NO: 89048 - DNA, 25 bp, Probe Sequence
gcaatttagattcactgatgtcctt

SEQ ID NO: 89049 - DNA, 25 bp, Probe Sequence
ttcagctagacctagatattgtgcc

SEQ ID NO: 89050 - DNA, 25 bp, Probe Sequence
aatggcaatttagattcactgatgt

SEQ ID NO: 89051 - DNA, 25 bp, Probe Sequence
tctgtgattcagctagacctagata

SEQ ID NO: 89052 - DNA, 25 bp, Probe Sequence
ctagacctagatattgtgcccattc

SEQ ID NO: 89053 - DNA, 25 bp, Probe Sequence
ggcaatttagattcactgatgtcct

SEQ ID NO: 89054 - DNA, 25 bp, Probe Sequence
ctctgtgattcagctagacctagat

SEQ ID NO: 89055 - DNA, 25 bp, Probe Sequence
ctgtgattcagctagacctagatat

SEQ ID NO: 89056 - DNA, 25 bp, Probe Sequence
tggcaatttagattcactgatgtcc

SEQ ID NO: 89057 - DNA, 25 bp, Probe Sequence
cgagttctctcttaaatggcaattt

SEQ ID NO: 89058 - DNA, 25 bp, Probe Sequence
tagacctagatattgtgcccattcc

SEQ ID NO: 89059 - DNA, 25 bp, Probe Sequence
caactttgaagtcactttgggttta

SEQ ID NO: 89060 - DNA, 25 bp, Probe Sequence
aactttgaagtcactttgggtttaa

SEQ ID NO: 89061 - DNA, 25 bp, Probe Sequence
ccgagttctctcttaaatggcaatt

SEQ ID NO: 89062 - DNA, 25 bp, Probe Sequence
caatttagattcactgatgtccttc

SEQ ID NO: 89063 - DNA, 25 bp, Probe Sequence
gctagacctagatattgtgcccatt

SEQ ID NO: 89064 - DNA, 25 bp, Probe Sequence
aatttagattcactgatgtccttca

SEQ ID NO: 89065 - DNA, 25 bp, Probe Sequence
acctagatattgtgcccattccttc

SEQ ID NO: 89066 - DNA, 25 bp, Probe Sequence
gaaccatacatcaggataaggtgtc

SEQ ID NO: 89067 - DNA, 25 bp, Probe Sequence
accatacatcaggataaggtgtcaa

SEQ ID NO: 89068 - DNA, 25 bp, Probe Sequence
aaccatacatcaggataaggtgtca

SEQ ID NO: 89069 - DNA, 25 bp, Probe Sequence
ctggaaccatacatcaggataaggt

SEQ ID NO: 89070 - DNA, 25 bp, Probe Sequence
ggaaccatacatcaggataaggtgt

SEQ ID NO: 89071 - DNA, 25 bp, Probe Sequence
tggaaccatacatcaggataaggtg

SEQ ID NO: 89072 - DNA, 25 bp, Probe Sequence
ccatacatcaggataaggtgtcaaa

SEQ ID NO: 89073 - DNA, 25 bp, Probe Sequence
catccttctgttcacttgaaagttt

SEQ ID NO: 89074 - DNA, 25 bp, Probe Sequence
gacaccatccttctgttcacttgaa

SEQ ID NO: 89075 - DNA, 25 bp, Probe Sequence
ccatccttctgttcacttgaaagtt

SEQ ID NO: 89076 - DNA, 25 bp, Probe Sequence
caccatccttctgttcacttgaaag

SEQ ID NO: 89077 - DNA, 25 bp, Probe Sequence
accatccttctgttcacttgaaagt

SEQ ID NO: 89078 - DNA, 25 bp, Probe Sequence
cttgttcatccctcatccacagtag

SEQ ID NO: 89079 - DNA, 25 bp, Probe Sequence
acaccatccttctgttcacttgaaa

SEQ ID NO: 89080 - DNA, 25 bp, Probe Sequence
ttctgttcacttgaaagttttccac

SEQ ID NO: 89081 - DNA, 25 bp, Probe Sequence
cttctgttcacttgaaagttttcca

SEQ ID NO: 89082 - DNA, 25 bp, Probe Sequence
tccttctgttcacttgaaagttttc

SEQ ID NO: 89083 - DNA, 25 bp, Probe Sequence
ccttctgttcacttgaaagttttcc

SEQ ID NO: 89084 - DNA, 25 bp, Probe Sequence
atccttctgttcacttgaaagtttt

SEQ ID NO: 89085 - DNA, 25 bp, Probe Sequence
catacatcaggataaggtgtcaaaa

SEQ ID NO: 89086 - DNA, 25 bp, Probe Sequence
tgttcacttgaaagttttccacaat

SEQ ID NO: 89087 - DNA, 25 bp, Probe Sequence
ctgttcacttgaaagttttccacaa

SEQ ID NO: 89088 - DNA, 25 bp, Probe Sequence
ccttgttcatccctcatccacagta

SEQ ID NO: 89089 - DNA, 25 bp, Probe Sequence
ggacaccatccttctgttcacttga

SEQ ID NO: 89090 - DNA, 25 bp, Probe Sequence
gatcaacgggactttccaaaatgtc

SEQ ID NO: 89091 - DNA, 25 bp, Probe Sequence
cagatcaacgggactttccaaaatg

SEQ ID NO: 89092 - DNA, 25 bp, Probe Sequence
agatcaacgggactttccaaaatgt

SEQ ID NO: 89093 - DNA, 25 bp, Probe Sequence
ccagatcaacgggactttccaaaat

SEQ ID NO: 89094 - DNA, 25 bp, Probe Sequence
accagatcaacgggactttccaaaa

SEQ ID NO: 89095 - DNA, 25 bp, Probe Sequence
aatgggagttgttttggcaccagat

SEQ ID NO: 89096 - DNA, 25 bp, Probe Sequence
ggagttgttttggcaccagatcaac

SEQ ID NO: 89097 - DNA, 25 bp, Probe Sequence
gagttgttttggcaccagatcaacg

SEQ ID NO: 89098 - DNA, 25 bp, Probe Sequence
taaccattgtcttgttctgtgatga

SEQ ID NO: 89099 - DNA, 25 bp, Probe Sequence
ttaaccattgtcttgttctgtgatg

SEQ ID NO: 89100 - DNA, 25 bp, Probe Sequence
tgtcatcatcaagaactacctgaag

SEQ ID NO: 89101 - DNA, 25 bp, Probe Sequence
atgtcatcatcaagaactacctgaa

SEQ ID NO: 89102 - DNA, 25 bp, Probe Sequence
aaccattgtcttgttctgtgatgag

SEQ ID NO: 89103 - DNA, 25 bp, Probe Sequence
catcatcaagaactacctgaaggac

SEQ ID NO: 89104 - DNA, 25 bp, Probe Sequence
tcatcatcaagaactacctgaagga

SEQ ID NO: 89105 - DNA, 25 bp, Probe Sequence
gtcatcatcaagaactacctgaagg

SEQ ID NO: 89106 - DNA, 25 bp, Probe Sequence
tcatcaagaactacctgaaggactg

SEQ ID NO: 89107 - DNA, 25 bp, Probe Sequence
tttctcctctttcctctctttgttc

SEQ ID NO: 89108 - DNA, 25 bp, Probe Sequence
ttctcctctttcctctctttgttct

SEQ ID NO: 89109 - DNA, 25 bp, Probe Sequence
accattgtcttgttctgtgatgagg

SEQ ID NO: 89110 - DNA, 25 bp, Probe Sequence
agaattagtttgaggacctggaata

SEQ ID NO: 89111 - DNA, 25 bp, Probe Sequence
tctcctctttcctctctttgttctc

SEQ ID NO: 89112 - DNA, 25 bp, Probe Sequence
tttaaccattgtcttgttctgtgat

SEQ ID NO: 89113 - DNA, 25 bp, Probe Sequence
gaattagtttgaggacctggaatag

SEQ ID NO: 89114 - DNA, 25 bp, Probe Sequence
tcctctttcctctctttgttctcag

SEQ ID NO: 89115 - DNA, 25 bp, Probe Sequence
ctcctctttcctctctttgttctca

SEQ ID NO: 89116 - DNA, 25 bp, Probe Sequence
catcaagaactacctgaaggactgc

SEQ ID NO: 89117 - DNA, 25 bp, Probe Sequence
cagaattagtttgaggacctggaat

SEQ ID NO: 89118 - DNA, 25 bp, Probe Sequence
aattagtttgaggacctggaatagg

SEQ ID NO: 89119 - DNA, 25 bp, Probe Sequence
tacatccagaattagtttgaggacc

SEQ ID NO: 89120 - DNA, 25 bp, Probe Sequence
gctacatccagaattagtttgagga

SEQ ID NO: 89121 - DNA, 25 bp, Probe Sequence
agctacatccagaattagtttgagg

SEQ ID NO: 89122 - DNA, 25 bp, Probe Sequence
taaccattgtcttgttctgtgatga

SEQ ID NO: 89123 - DNA, 25 bp, Probe Sequence
ttaaccattgtcttgttctgtgatg

SEQ ID NO: 89124 - DNA, 25 bp, Probe Sequence
tgtcatcatcaagaactacctgaag

SEQ ID NO: 89125 - DNA, 25 bp, Probe Sequence
atgtcatcatcaagaactacctgaa

SEQ ID NO: 89126 - DNA, 25 bp, Probe Sequence
aaccattgtcttgttctgtgatgag

SEQ ID NO: 89127 - DNA, 25 bp, Probe Sequence
catcatcaagaactacctgaaggac

SEQ ID NO: 89128 - DNA, 25 bp, Probe Sequence
tcatcatcaagaactacctgaagga

SEQ ID NO: 89129 - DNA, 25 bp, Probe Sequence
gtcatcatcaagaactacctgaagg

SEQ ID NO: 89130 - DNA, 25 bp, Probe Sequence
tcatcaagaactacctgaaggactg

SEQ ID NO: 89131 - DNA, 25 bp, Probe Sequence
tttctcctctttcctctctttgttc

SEQ ID NO: 89132 - DNA, 25 bp, Probe Sequence
ttctcctctttcctctctttgttct

SEQ ID NO: 89133 - DNA, 25 bp, Probe Sequence
accattgtcttgttctgtgatgagg

SEQ ID NO: 89134 - DNA, 25 bp, Probe Sequence
agaattagtttgaggacctggaata

SEQ ID NO: 89135 - DNA, 25 bp, Probe Sequence
tctcctctttcctctctttgttctc

SEQ ID NO: 89136 - DNA, 25 bp, Probe Sequence
tttaaccattgtcttgttctgtgat

SEQ ID NO: 89137 - DNA, 25 bp, Probe Sequence
gaattagtttgaggacctggaatag

SEQ ID NO: 89138 - DNA, 25 bp, Probe Sequence
tcctctttcctctctttgttctcag

SEQ ID NO: 89139 - DNA, 25 bp, Probe Sequence
ctcctctttcctctctttgttctca

SEQ ID NO: 89140 - DNA, 25 bp, Probe Sequence
catcaagaactacctgaaggactgc

SEQ ID NO: 89141 - DNA, 25 bp, Probe Sequence
cagaattagtttgaggacctggaat

SEQ ID NO: 89142 - DNA, 25 bp, Probe Sequence
aattagtttgaggacctggaatagg

SEQ ID NO: 89143 - DNA, 25 bp, Probe Sequence
tacatccagaattagtttgaggacc

SEQ ID NO: 89144 - DNA, 25 bp, Probe Sequence
gctacatccagaattagtttgagga

SEQ ID NO: 89145 - DNA, 25 bp, Probe Sequence
agctacatccagaattagtttgagg

SEQ ID NO: 89146 - DNA, 25 bp, Probe Sequence
gacatttcttcaatttcccatcgtg

SEQ ID NO: 89147 - DNA, 25 bp, Probe Sequence
gagacatttcttcaatttcccatcg

SEQ ID NO: 89148 - DNA, 25 bp, Probe Sequence
agagacatttcttcaatttcccatc

SEQ ID NO: 89149 - DNA, 25 bp, Probe Sequence
agacatttcttcaatttcccatcgt

SEQ ID NO: 89150 - DNA, 25 bp, Probe Sequence
ttagagacatttcttcaatttccca

SEQ ID NO: 89151 - DNA, 25 bp, Probe Sequence
tagagacatttcttcaatttcccat

SEQ ID NO: 89152 - DNA, 25 bp, Probe Sequence
acatttcttcaatttcccatcgtgc

SEQ ID NO: 89153 - DNA, 25 bp, Probe Sequence
tttagagacatttcttcaatttccc

SEQ ID NO: 89154 - DNA, 25 bp, Probe Sequence
catttcttcaatttcccatcgtgcc

SEQ ID NO: 89155 - DNA, 25 bp, Probe Sequence
atttcttcaatttcccatcgtgcct

SEQ ID NO: 89156 - DNA, 25 bp, Probe Sequence
ggggaggggttaagttaaataaaga

SEQ ID NO: 89157 - DNA, 25 bp, Probe Sequence
aggggaggggttaagttaaataaag

SEQ ID NO: 89158 - DNA, 25 bp, Probe Sequence
gaaggggaggggttaagttaaataa

SEQ ID NO: 89159 - DNA, 25 bp, Probe Sequence
aaggggaggggttaagttaaataaa

SEQ ID NO: 89160 - DNA, 25 bp, Probe Sequence
agaaggggaggggttaagttaaata

SEQ ID NO: 89161 - DNA, 25 bp, Probe Sequence
ttcttcaatttcccatcgtgccttt

SEQ ID NO: 89162 - DNA, 25 bp, Probe Sequence
tttcttcaatttcccatcgtgcctt

SEQ ID NO: 89163 - DNA, 25 bp, Probe Sequence
gtttagagacatttcttcaatttcc

SEQ ID NO: 89164 - DNA, 25 bp, Probe Sequence
gggaggggttaagttaaataaagaa

SEQ ID NO: 89165 - DNA, 25 bp, Probe Sequence
gagaaggggaggggttaagttaaat

SEQ ID NO: 89166 - DNA, 25 bp, Probe Sequence
tcttcaatttcccatcgtgcctttc

SEQ ID NO: 89167 - DNA, 25 bp, Probe Sequence
ggaggggttaagttaaataaagaag

SEQ ID NO: 89168 - DNA, 25 bp, Probe Sequence
cttcaatttcccatcgtgcctttcc

SEQ ID NO: 89169 - DNA, 25 bp, Probe Sequence
ggagaaggggaggggttaagttaaa

SEQ ID NO: 89170 - DNA, 25 bp, Probe Sequence
ctgctgctgaagtagatgttatacc

SEQ ID NO: 89171 - DNA, 25 bp, Probe Sequence
cctgctgctgaagtagatgttatac

SEQ ID NO: 89172 - DNA, 25 bp, Probe Sequence
gctgctgaagtagatgttataccac

SEQ ID NO: 89173 - DNA, 25 bp, Probe Sequence
tgctgaagtagatgttataccactg

SEQ ID NO: 89174 - DNA, 25 bp, Probe Sequence
ctgctgaagtagatgttataccact

SEQ ID NO: 89175 - DNA, 25 bp, Probe Sequence
tgctgctgaagtagatgttatacca

SEQ ID NO: 89176 - DNA, 25 bp, Probe Sequence
gctgaagtagatgttataccactgg

SEQ ID NO: 89177 - DNA, 25 bp, Probe Sequence
taatgtggttgtcagattacagact

SEQ ID NO: 89178 - DNA, 25 bp, Probe Sequence
aatgtggttgtcagattacagactt

SEQ ID NO: 89179 - DNA, 25 bp, Probe Sequence
gcctgctgctgaagtagatgttata

SEQ ID NO: 89180 - DNA, 25 bp, Probe Sequence
cttattctcctgctgaaggtgttac

SEQ ID NO: 89181 - DNA, 25 bp, Probe Sequence
aactgagttatggaatatgagctgc

SEQ ID NO: 89182 - DNA, 25 bp, Probe Sequence
atcccatctctgtatccaaatccta

SEQ ID NO: 89183 - DNA, 25 bp, Probe Sequence
aaatcccatctctgtatccaaatcc

SEQ ID NO: 89184 - DNA, 25 bp, Probe Sequence
tgaaatcccatctctgtatccaaat

SEQ ID NO: 89185 - DNA, 25 bp, Probe Sequence
ctgaaatcccatctctgtatccaaa

SEQ ID NO: 89186 - DNA, 25 bp, Probe Sequence
tactgaaatcccatctctgtatcca

SEQ ID NO: 89187 - DNA, 25 bp, Probe Sequence
gaaatcccatctctgtatccaaatc

SEQ ID NO: 89188 - DNA, 25 bp, Probe Sequence
aatcccatctctgtatccaaatcct

SEQ ID NO: 89189 - DNA, 25 bp, Probe Sequence
tgagttatggaatatgagctgcctt

SEQ ID NO: 89190 - DNA, 25 bp, Probe Sequence
ccatctctgtatccaaatcctacta

SEQ ID NO: 89191 - DNA, 25 bp, Probe Sequence
cccatctctgtatccaaatcctact

SEQ ID NO: 89192 - DNA, 25 bp, Probe Sequence
tcccatctctgtatccaaatcctac

SEQ ID NO: 89193 - DNA, 25 bp, Probe Sequence
actgaaatcccatctctgtatccaa

SEQ ID NO: 89194 - DNA, 25 bp, Probe Sequence
ctaagtaaggaagatgctggagaat

SEQ ID NO: 89195 - DNA, 25 bp, Probe Sequence
gtaaggaagatgctggagaatatga

SEQ ID NO: 89196 - DNA, 25 bp, Probe Sequence
agtaaggaagatgctggagaatatg

SEQ ID NO: 89197 - DNA, 25 bp, Probe Sequence
taaggaagatgctggagaatatgag

SEQ ID NO: 89198 - DNA, 25 bp, Probe Sequence
aagtaaggaagatgctggagaatat

SEQ ID NO: 89199 - DNA, 25 bp, Probe Sequence
aaggaagatgctggagaatatgagt

SEQ ID NO: 89200 - DNA, 25 bp, Probe Sequence
taagtaaggaagatgctggagaata

SEQ ID NO: 89201 - DNA, 25 bp, Probe Sequence
tctaagtaaggaagatgctggagaa

SEQ ID NO: 89202 - DNA, 25 bp, Probe Sequence
aattacagtggttgatgccttacat

SEQ ID NO: 89203 - DNA, 25 bp, Probe Sequence
cattacctgttcttgcctaataagt

SEQ ID NO: 89204 - DNA, 25 bp, Probe Sequence
ggtgctggtatctcctctaagtaag

SEQ ID NO: 89205 - DNA, 25 bp, Probe Sequence
aactacattacctgttcttgcctaa

SEQ ID NO: 89206 - DNA, 25 bp, Probe Sequence
caagaataagccatgaagtcaactg

SEQ ID NO: 89207 - DNA, 25 bp, Probe Sequence
actacattacctgttcttgcctaat

SEQ ID NO: 89208 - DNA, 25 bp, Probe Sequence
ataactacattacctgttcttgcct

SEQ ID NO: 89209 - DNA, 25 bp, Probe Sequence
gataactacattacctgttcttgcc

SEQ ID NO: 89210 - DNA, 25 bp, Probe Sequence
ggataactacattacctgttcttgc

SEQ ID NO: 89211 - DNA, 25 bp, Probe Sequence
aggaagatgctggagaatatgagtg

SEQ ID NO: 89212 - DNA, 25 bp, Probe Sequence
ctctaagtaaggaagatgctggaga

SEQ ID NO: 89213 - DNA, 25 bp, Probe Sequence
taactacattacctgttcttgccta

SEQ ID NO: 89214 - DNA, 25 bp, Probe Sequence
attacctgttcttgcctaataagtt

SEQ ID NO: 89215 - DNA, 25 bp, Probe Sequence
acattacctgttcttgcctaataag

SEQ ID NO: 89216 - DNA, 25 bp, Probe Sequence
ccaagaataagccatgaagtcaact

SEQ ID NO: 89217 - DNA, 25 bp, Probe Sequence
accaagaataagccatgaagtcaac

SEQ ID NO: 89218 - DNA, 25 bp, Probe Sequence
ctaagtaaggaagatgctggagaat

SEQ ID NO: 89219 - DNA, 25 bp, Probe Sequence
gtaaggaagatgctggagaatatga

SEQ ID NO: 89220 - DNA, 25 bp, Probe Sequence
agtaaggaagatgctggagaatatg

SEQ ID NO: 89221 - DNA, 25 bp, Probe Sequence
taaggaagatgctggagaatatgag

SEQ ID NO: 89222 - DNA, 25 bp, Probe Sequence
aagtaaggaagatgctggagaatat

SEQ ID NO: 89223 - DNA, 25 bp, Probe Sequence
aaggaagatgctggagaatatgagt

SEQ ID NO: 89224 - DNA, 25 bp, Probe Sequence
taagtaaggaagatgctggagaata

SEQ ID NO: 89225 - DNA, 25 bp, Probe Sequence
tctaagtaaggaagatgctggagaa

SEQ ID NO: 89226 - DNA, 25 bp, Probe Sequence
aattacagtggttgatgccttacat

SEQ ID NO: 89227 - DNA, 25 bp, Probe Sequence
cattacctgttcttgcctaataagt

SEQ ID NO: 89228 - DNA, 25 bp, Probe Sequence
ggtgctggtatctcctctaagtaag

SEQ ID NO: 89229 - DNA, 25 bp, Probe Sequence
aactacattacctgttcttgcctaa

SEQ ID NO: 89230 - DNA, 25 bp, Probe Sequence
caagaataagccatgaagtcaactg

SEQ ID NO: 89231 - DNA, 25 bp, Probe Sequence
actacattacctgttcttgcctaat

SEQ ID NO: 89232 - DNA, 25 bp, Probe Sequence
ataactacattacctgttcttgcct

SEQ ID NO: 89233 - DNA, 25 bp, Probe Sequence
gataactacattacctgttcttgcc

SEQ ID NO: 89234 - DNA, 25 bp, Probe Sequence
ggataactacattacctgttcttgc

SEQ ID NO: 89235 - DNA, 25 bp, Probe Sequence
aggaagatgctggagaatatgagtg

SEQ ID NO: 89236 - DNA, 25 bp, Probe Sequence
ctctaagtaaggaagatgctggaga

SEQ ID NO: 89237 - DNA, 25 bp, Probe Sequence
taactacattacctgttcttgccta

SEQ ID NO: 89238 - DNA, 25 bp, Probe Sequence
attacctgttcttgcctaataagtt

SEQ ID NO: 89239 - DNA, 25 bp, Probe Sequence
acattacctgttcttgcctaataag

SEQ ID NO: 89240 - DNA, 25 bp, Probe Sequence
ccaagaataagccatgaagtcaact

SEQ ID NO: 89241 - DNA, 25 bp, Probe Sequence
accaagaataagccatgaagtcaac

SEQ ID NO: 89242 - DNA, 25 bp, Probe Sequence
aatgaagtcagtgctacagtaatcc

SEQ ID NO: 89243 - DNA, 25 bp, Probe Sequence
atgaagtcagtgctacagtaatcca

SEQ ID NO: 89244 - DNA, 25 bp, Probe Sequence
taatgaagtcagtgctacagtaatc

SEQ ID NO: 89245 - DNA, 25 bp, Probe Sequence
tgaagtcagtgctacagtaatccag

SEQ ID NO: 89246 - DNA, 25 bp, Probe Sequence
ttaatgaagtcagtgctacagtaat

SEQ ID NO: 89247 - DNA, 25 bp, Probe Sequence
ccatacaacaggttattgaggatat

SEQ ID NO: 89248 - DNA, 25 bp, Probe Sequence
acaagaccatacaacaggttattga

SEQ ID NO: 89249 - DNA, 25 bp, Probe Sequence
gacaagaccatacaacaggttattg

SEQ ID NO: 89250 - DNA, 25 bp, Probe Sequence
tgacaagaccatacaacaggttatt

SEQ ID NO: 89251 - DNA, 25 bp, Probe Sequence
gaagtcagtgctacagtaatccagg

SEQ ID NO: 89252 - DNA, 25 bp, Probe Sequence
gaccatacaacaggttattgaggat

SEQ ID NO: 89253 - DNA, 25 bp, Probe Sequence
caagaccatacaacaggttattgag

SEQ ID NO: 89254 - DNA, 25 bp, Probe Sequence
aagaccatacaacaggttattgagg

SEQ ID NO: 89255 - DNA, 25 bp, Probe Sequence
ctgacaagaccatacaacaggttat

SEQ ID NO: 89256 - DNA, 25 bp, Probe Sequence
accatacaacaggttattgaggata

SEQ ID NO: 89257 - DNA, 25 bp, Probe Sequence
atgaaatagcccgtaaagagtatcc

SEQ ID NO: 89258 - DNA, 25 bp, Probe Sequence
atagcaaaccaagaggaagaagaaa

SEQ ID NO: 89259 - DNA, 25 bp, Probe Sequence
tatcatagcaaaccaagaggaagaa

SEQ ID NO: 89260 - DNA, 25 bp, Probe Sequence
agaccatacaacaggttattgagga

SEQ ID NO: 89261 - DNA, 25 bp, Probe Sequence
aagttgatagaaaggcgtggaatat

SEQ ID NO: 89262 - DNA, 25 bp, Probe Sequence
aaagttgatagaaaggcgtggaata

SEQ ID NO: 89263 - DNA, 25 bp, Probe Sequence
taaagttgatagaaaggcgtggaat

SEQ ID NO: 89264 - DNA, 25 bp, Probe Sequence
atatcatagcaaaccaagaggaaga

SEQ ID NO: 89265 - DNA, 25 bp, Probe Sequence
gaatccacctcctctctttaatgaa

SEQ ID NO: 89266 - DNA, 25 bp, Probe Sequence
ctatgacaccactaaggttcagaat

SEQ ID NO: 89267 - DNA, 25 bp, Probe Sequence
atgacaccactaaggttcagaataa

SEQ ID NO: 89268 - DNA, 25 bp, Probe Sequence
tggagattattattggagcctaatt

SEQ ID NO: 89269 - DNA, 25 bp, Probe Sequence
tatgacaccactaaggttcagaata

SEQ ID NO: 89270 - DNA, 25 bp, Probe Sequence
actatgacaccactaaggttcagaa

SEQ ID NO: 89271 - DNA, 25 bp, Probe Sequence
agagactatgacaccactaaggttc

SEQ ID NO: 89272 - DNA, 25 bp, Probe Sequence
atggagattattattggagcctaat

SEQ ID NO: 89273 - DNA, 25 bp, Probe Sequence
ggagattattattggagcctaattg

SEQ ID NO: 89274 - DNA, 25 bp, Probe Sequence
gactatgacaccactaaggttcaga

SEQ ID NO: 89275 - DNA, 25 bp, Probe Sequence
agactatgacaccactaaggttcag

SEQ ID NO: 89276 - DNA, 25 bp, Probe Sequence
gagactatgacaccactaaggttca

SEQ ID NO: 89277 - DNA, 25 bp, Probe Sequence
cagagactatgacaccactaaggtt

SEQ ID NO: 89278 - DNA, 25 bp, Probe Sequence
tatggagattattattggagcctaa

SEQ ID NO: 89279 - DNA, 25 bp, Probe Sequence
ttatggagattattattggagccta

SEQ ID NO: 89280 - DNA, 25 bp, Probe Sequence
tcagagactatgacaccactaaggt

SEQ ID NO: 89281 - DNA, 25 bp, Probe Sequence
tacagattcatttaaggcttgtgtg

SEQ ID NO: 89282 - DNA, 25 bp, Probe Sequence
agtatattgaatgtttgcctttagc

SEQ ID NO: 89283 - DNA, 25 bp, Probe Sequence
gagattattattggagcctaattgt

SEQ ID NO: 89284 - DNA, 25 bp, Probe Sequence
atacagattcatttaaggcttgtgt

SEQ ID NO: 89285 - DNA, 25 bp, Probe Sequence
tgatacagattcatttaaggcttgt

SEQ ID NO: 89286 - DNA, 25 bp, Probe Sequence
cttactacactcaacggtttggatc

SEQ ID NO: 89287 - DNA, 25 bp, Probe Sequence
tgttagccttaactttgaggttcta

SEQ ID NO: 89288 - DNA, 25 bp, Probe Sequence
aattgctgtttaatgtagtcgatgg

SEQ ID NO: 89289 - DNA, 25 bp, Probe Sequence
tttatggagattattattggagcct

SEQ ID NO: 89290 - DNA, 25 bp, Probe Sequence
aaggagaataatggcacataacact

SEQ ID NO: 89291 - DNA, 25 bp, Probe Sequence
gccgcactgatggatatgtaataat

SEQ ID NO: 89292 - DNA, 25 bp, Probe Sequence
ccgcactgatggatatgtaataata

SEQ ID NO: 89293 - DNA, 25 bp, Probe Sequence
aggagaataatggcacataacactc

SEQ ID NO: 89294 - DNA, 25 bp, Probe Sequence
ggcacataacactccaatgatagtt

SEQ ID NO: 89295 - DNA, 25 bp, Probe Sequence
agccgcactgatggatatgtaataa

SEQ ID NO: 89296 - DNA, 25 bp, Probe Sequence
aagccgcactgatggatatgtaata

SEQ ID NO: 89297 - DNA, 25 bp, Probe Sequence
ccagtaaccaagagttgattcatat

SEQ ID NO: 89298 - DNA, 25 bp, Probe Sequence
tgagataatgattgtactgccatga

SEQ ID NO: 89299 - DNA, 25 bp, Probe Sequence
gagataatgattgtactgccatgag

SEQ ID NO: 89300 - DNA, 25 bp, Probe Sequence
ttgagataatgattgtactgccatg

SEQ ID NO: 89301 - DNA, 25 bp, Probe Sequence
gtgtatcagataagaagcactggaa

SEQ ID NO: 89302 - DNA, 25 bp, Probe Sequence
atgtgtatcagataagaagcactgg

SEQ ID NO: 89303 - DNA, 25 bp, Probe Sequence
agataatgattgtactgccatgagt

SEQ ID NO: 89304 - DNA, 25 bp, Probe Sequence
acattaaggtgacgaacaatataga

SEQ ID NO: 89305 - DNA, 25 bp, Probe Sequence
gacattaaggtgacgaacaatatag

SEQ ID NO: 89306 - DNA, 25 bp, Probe Sequence
aatgtgtatcagataagaagcactg

SEQ ID NO: 89307 - DNA, 25 bp, Probe Sequence
tgtgtatcagataagaagcactgga

SEQ ID NO: 89308 - DNA, 25 bp, Probe Sequence
agtaatgtgtatcagataagaagca

SEQ ID NO: 89309 - DNA, 25 bp, Probe Sequence
aataatggcacataacactccaatg

SEQ ID NO: 89310 - DNA, 25 bp, Probe Sequence
gaataatggcacataacactccaat

SEQ ID NO: 89311 - DNA, 25 bp, Probe Sequence
aatggcacataacactccaatgata

SEQ ID NO: 89312 - DNA, 25 bp, Probe Sequence
taatggcacataacactccaatgat

SEQ ID NO: 89313 - DNA, 25 bp, Probe Sequence
ataatggcacataacactccaatga

SEQ ID NO: 89314 - DNA, 25 bp, Probe Sequence
agcgagatacaagttcaagcatata

SEQ ID NO: 89315 - DNA, 25 bp, Probe Sequence
gcgagatacaagttcaagcatatag

SEQ ID NO: 89316 - DNA, 25 bp, Probe Sequence
ttaactctgtaattgtggtgtgtca

SEQ ID NO: 89317 - DNA, 25 bp, Probe Sequence
cagcgagatacaagttcaagcatat

SEQ ID NO: 89318 - DNA, 25 bp, Probe Sequence
attgtggtgtgtcaacttcatatct

SEQ ID NO: 89319 - DNA, 25 bp, Probe Sequence
cgagatacaagttcaagcatatagt

SEQ ID NO: 89320 - DNA, 25 bp, Probe Sequence
ttgtggtgtgtcaacttcatatctt

SEQ ID NO: 89321 - DNA, 25 bp, Probe Sequence
aattgtggtgtgtcaacttcatatc

SEQ ID NO: 89322 - DNA, 25 bp, Probe Sequence
taactctgtaattgtggtgtgtcaa

SEQ ID NO: 89323 - DNA, 25 bp, Probe Sequence
tatcagtcctgctcttatacaatca

SEQ ID NO: 89324 - DNA, 25 bp, Probe Sequence
gtaattgtggtgtgtcaacttcata

SEQ ID NO: 89325 - DNA, 25 bp, Probe Sequence
tgtggtgtgtcaacttcatatcttg

SEQ ID NO: 89326 - DNA, 25 bp, Probe Sequence
tgtaattgtggtgtgtcaacttcat

SEQ ID NO: 89327 - DNA, 25 bp, Probe Sequence
taattgtggtgtgtcaacttcatat

SEQ ID NO: 89328 - DNA, 25 bp, Probe Sequence
tctgtaattgtggtgtgtcaacttc

SEQ ID NO: 89329 - DNA, 25 bp, Probe Sequence
ctctgtaattgtggtgtgtcaactt

SEQ ID NO: 89330 - DNA, 25 bp, Probe Sequence
tatatagtccgaagtattccagcaa

SEQ ID NO: 89331 - DNA, 25 bp, Probe Sequence
atcagtcctgctcttatacaatcag

SEQ ID NO: 89332 - DNA, 25 bp, Probe Sequence
gtcctgctcttatacaatcagtgtt

SEQ ID NO: 89333 - DNA, 25 bp, Probe Sequence
ctgtaattgtggtgtgtcaacttca

SEQ ID NO: 89334 - DNA, 25 bp, Probe Sequence
aactctgtaattgtggtgtgtcaac

SEQ ID NO: 89335 - DNA, 25 bp, Probe Sequence
tcctgctcttatacaatcagtgtta

SEQ ID NO: 89336 - DNA, 25 bp, Probe Sequence
ttatcagtcctgctcttatacaatc

SEQ ID NO: 89337 - DNA, 25 bp, Probe Sequence
atatatagtccgaagtattccagca

SEQ ID NO: 89338 - DNA, 25 bp, Probe Sequence
tatttccgttctcctcctgtcttta

SEQ ID NO: 89339 - DNA, 25 bp, Probe Sequence
atttccgttctcctcctgtctttaa

SEQ ID NO: 89340 - DNA, 25 bp, Probe Sequence
ctatttccgttctcctcctgtcttt

SEQ ID NO: 89341 - DNA, 25 bp, Probe Sequence
tttccgttctcctcctgtctttaaa

SEQ ID NO: 89342 - DNA, 25 bp, Probe Sequence
cctatttccgttctcctcctgtctt

SEQ ID NO: 89343 - DNA, 25 bp, Probe Sequence
tttccctatttccgttctcctcctg

SEQ ID NO: 89344 - DNA, 25 bp, Probe Sequence
aactccttttccctatttccgttct

SEQ ID NO: 89345 - DNA, 25 bp, Probe Sequence
caactccttttccctatttccgttc

SEQ ID NO: 89346 - DNA, 25 bp, Probe Sequence
actccttttccctatttccgttctc

SEQ ID NO: 89347 - DNA, 25 bp, Probe Sequence
agtcccaactccttttccctatttc

SEQ ID NO: 89348 - DNA, 25 bp, Probe Sequence
cttttccctatttccgttctcctcc

SEQ ID NO: 89349 - DNA, 25 bp, Probe Sequence
ccttttccctatttccgttctcctc

SEQ ID NO: 89350 - DNA, 25 bp, Probe Sequence
ctccttttccctatttccgttctcc

SEQ ID NO: 89351 - DNA, 25 bp, Probe Sequence
cagtcccaactccttttccctattt

SEQ ID NO: 89352 - DNA, 25 bp, Probe Sequence
gtcccaactccttttccctatttcc

SEQ ID NO: 89353 - DNA, 25 bp, Probe Sequence
ttttccctatttccgttctcctcct

SEQ ID NO: 89354 - DNA, 25 bp, Probe Sequence
tccttttccctatttccgttctcct

SEQ ID NO: 89355 - DNA, 25 bp, Probe Sequence
ccaactccttttccctatttccgtt

SEQ ID NO: 89356 - DNA, 25 bp, Probe Sequence
ttccctatttccgttctcctcctgt

SEQ ID NO: 89357 - DNA, 25 bp, Probe Sequence
cccatttgcttactttgcatttgtg

SEQ ID NO: 89358 - DNA, 25 bp, Probe Sequence
tcagtcccaactccttttccctatt

SEQ ID NO: 89359 - DNA, 25 bp, Probe Sequence
catttgcttactttgcatttgtgcc

SEQ ID NO: 89360 - DNA, 25 bp, Probe Sequence
ccatttgcttactttgcatttgtgc

SEQ ID NO: 89361 - DNA, 25 bp, Probe Sequence
ctcagtcccaactccttttccctat

SEQ ID NO: 89362 - DNA, 25 bp, Probe Sequence
ctaggataggagaagaacagagcag

SEQ ID NO: 89363 - DNA, 25 bp, Probe Sequence
catagtggatacatgagtatggaca

SEQ ID NO: 89364 - DNA, 25 bp, Probe Sequence
acatagtggatacatgagtatggac

SEQ ID NO: 89365 - DNA, 25 bp, Probe Sequence
cacatagtggatacatgagtatgga

SEQ ID NO: 89366 - DNA, 25 bp, Probe Sequence
atagtggatacatgagtatggacag

SEQ ID NO: 89367 - DNA, 25 bp, Probe Sequence
tagtggatacatgagtatggacagg

SEQ ID NO: 89368 - DNA, 25 bp, Probe Sequence
gagcaaggagagtatgtttagtcag

SEQ ID NO: 89369 - DNA, 25 bp, Probe Sequence
cagagcaaggagagtatgtttagtc

SEQ ID NO: 89370 - DNA, 25 bp, Probe Sequence
agagcaaggagagtatgtttagtca

SEQ ID NO: 89371 - DNA, 25 bp, Probe Sequence
tgactcccagaactttaagactttc

SEQ ID NO: 89372 - DNA, 25 bp, Probe Sequence
tcaatacagcagagcaaggagagta

SEQ ID NO: 89373 - DNA, 25 bp, Probe Sequence
aatacagcagagcaaggagagtatg

SEQ ID NO: 89374 - DNA, 25 bp, Probe Sequence
caatacagcagagcaaggagagtat

SEQ ID NO: 89375 - DNA, 25 bp, Probe Sequence
taggataggagaagaacagagcagc

SEQ ID NO: 89376 - DNA, 25 bp, Probe Sequence
aaggagagtatgtttagtcaggcag

SEQ ID NO: 89377 - DNA, 25 bp, Probe Sequence
agcaaggagagtatgtttagtcagg

SEQ ID NO: 89378 - DNA, 25 bp, Probe Sequence
ggacacaggacttatctcacacatg

SEQ ID NO: 89379 - DNA, 25 bp, Probe Sequence
caaggagagtatgtttagtcaggca

SEQ ID NO: 89380 - DNA, 25 bp, Probe Sequence
aatcatatcagtattgagtctgccc

SEQ ID NO: 89381 - DNA, 25 bp, Probe Sequence
ctgactcccagaactttaagacttt

SEQ ID NO: 89382 - DNA, 25 bp, Probe Sequence
ggagagtatgtttagtcaggcagag

SEQ ID NO: 89383 - DNA, 25 bp, Probe Sequence
agcagagcaaggagagtatgtttag

SEQ ID NO: 89384 - DNA, 25 bp, Probe Sequence
gcagagcaaggagagtatgtttagt

SEQ ID NO: 89385 - DNA, 25 bp, Probe Sequence
cagcagagcaaggagagtatgttta

SEQ ID NO: 89386 - DNA, 25 bp, Probe Sequence
ttgcatacttacctagtgaaacttt

SEQ ID NO: 89387 - DNA, 25 bp, Probe Sequence
tttgcatacttacctagtgaaactt

SEQ ID NO: 89388 - DNA, 25 bp, Probe Sequence
atttgcatacttacctagtgaaact

SEQ ID NO: 89389 - DNA, 25 bp, Probe Sequence
agaatttgcatacttacctagtgaa

SEQ ID NO: 89390 - DNA, 25 bp, Probe Sequence
aagaatttgcatacttacctagtga

SEQ ID NO: 89391 - DNA, 25 bp, Probe Sequence
aatttgcatacttacctagtgaaac

SEQ ID NO: 89392 - DNA, 25 bp, Probe Sequence
gaatttgcatacttacctagtgaaa

SEQ ID NO: 89393 - DNA, 25 bp, Probe Sequence
gcatacttacctagtgaaacttttc

SEQ ID NO: 89394 - DNA, 25 bp, Probe Sequence
agcttcatgcacttaaagaagtatt

SEQ ID NO: 89395 - DNA, 25 bp, Probe Sequence
gcttcatgcacttaaagaagtattt

SEQ ID NO: 89396 - DNA, 25 bp, Probe Sequence
taagaatttgcatacttacctagtg

SEQ ID NO: 89397 - DNA, 25 bp, Probe Sequence
tgcatacttacctagtgaaactttt

SEQ ID NO: 89398 - DNA, 25 bp, Probe Sequence
agaataagaatttgcatacttacct

SEQ ID NO: 89399 - DNA, 25 bp, Probe Sequence
catacttacctagtgaaacttttct

SEQ ID NO: 89400 - DNA, 25 bp, Probe Sequence
ataagaatttgcatacttacctagt

SEQ ID NO: 89401 - DNA, 25 bp, Probe Sequence
aagcttcatgcacttaaagaagtat

SEQ ID NO: 89402 - DNA, 25 bp, Probe Sequence
gaataagaatttgcatacttaccta

SEQ ID NO: 89403 - DNA, 25 bp, Probe Sequence
tagaataagaatttgcatacttacc

SEQ ID NO: 89404 - DNA, 25 bp, Probe Sequence
tacttacctagtgaaacttttctag

SEQ ID NO: 89405 - DNA, 25 bp, Probe Sequence
acttacctagtgaaacttttctaga

SEQ ID NO: 89406 - DNA, 25 bp, Probe Sequence
atacttacctagtgaaacttttcta

SEQ ID NO: 89407 - DNA, 25 bp, Probe Sequence
cttcatgcacttaaagaagtatttt

SEQ ID NO: 89408 - DNA, 25 bp, Probe Sequence
taggtcagcaagtgaatgtgatatt

SEQ ID NO: 89409 - DNA, 25 bp, Probe Sequence
ctaggtcagcaagtgaatgtgatat

SEQ ID NO: 89410 - DNA, 25 bp, Probe Sequence
agtcagacacttacaggtaatccaa

SEQ ID NO: 89411 - DNA, 25 bp, Probe Sequence
tctaggtcagcaagtgaatgtgata

SEQ ID NO: 89412 - DNA, 25 bp, Probe Sequence
gctgtcctatatcacaatgaacatt

SEQ ID NO: 89413 - DNA, 25 bp, Probe Sequence
gagtcagacacttacaggtaatcca

SEQ ID NO: 89414 - DNA, 25 bp, Probe Sequence
tgagtcagacacttacaggtaatcc

SEQ ID NO: 89415 - DNA, 25 bp, Probe Sequence
ctgagtcagacacttacaggtaatc

SEQ ID NO: 89416 - DNA, 25 bp, Probe Sequence
ttactgattcaggatagttagccag

SEQ ID NO: 89417 - DNA, 25 bp, Probe Sequence
tgattcaggatagttagccagctag

SEQ ID NO: 89418 - DNA, 25 bp, Probe Sequence
gaaaggaagaaagaaatcaaaccca

SEQ ID NO: 89419 - DNA, 25 bp, Probe Sequence
ggaatgaaaggagaaaggaagaaag

SEQ ID NO: 89420 - DNA, 25 bp, Probe Sequence
agaaaggaagaaagaaatcaaaccc

SEQ ID NO: 89421 - DNA, 25 bp, Probe Sequence
aaaggaagaaagaaatcaaacccat

SEQ ID NO: 89422 - DNA, 25 bp, Probe Sequence
gggaatgaaaggagaaaggaagaaa

SEQ ID NO: 89423 - DNA, 25 bp, Probe Sequence
ctctaggtcagcaagtgaatgtgat

SEQ ID NO: 89424 - DNA, 25 bp, Probe Sequence
agctgtcctatatcacaatgaacat

SEQ ID NO: 89425 - DNA, 25 bp, Probe Sequence
agagctgtcctatatcacaatgaac

SEQ ID NO: 89426 - DNA, 25 bp, Probe Sequence
gagctgtcctatatcacaatgaaca

SEQ ID NO: 89427 - DNA, 25 bp, Probe Sequence
gaatgaaaggagaaaggaagaaaga

SEQ ID NO: 89428 - DNA, 25 bp, Probe Sequence
attgctgttatacattaccgttatg

SEQ ID NO: 89429 - DNA, 25 bp, Probe Sequence
gtcagacacttacaggtaatccaaa

SEQ ID NO: 89430 - DNA, 25 bp, Probe Sequence
actccgaagaaattcacatctgtaa

SEQ ID NO: 89431 - DNA, 25 bp, Probe Sequence
ttactccgaagaaattcacatctgt

SEQ ID NO: 89432 - DNA, 25 bp, Probe Sequence
taacctgccaacacttagtcttatc

SEQ ID NO: 89433 - DNA, 25 bp, Probe Sequence
cataacctgccaacacttagtctta

SEQ ID NO: 89434 - DNA, 25 bp, Probe Sequence
ccaacacttagtcttatcacacatt

SEQ ID NO: 89435 - DNA, 25 bp, Probe Sequence
ataacctgccaacacttagtcttat

SEQ ID NO: 89436 - DNA, 25 bp, Probe Sequence
gccaacacttagtcttatcacacat

SEQ ID NO: 89437 - DNA, 25 bp, Probe Sequence
ctacataacctgccaacacttagtc

SEQ ID NO: 89438 - DNA, 25 bp, Probe Sequence
cgtatgtaatgatgtctgtggctac

SEQ ID NO: 89439 - DNA, 25 bp, Probe Sequence
tacataacctgccaacacttagtct

SEQ ID NO: 89440 - DNA, 25 bp, Probe Sequence
ctgccaacacttagtcttatcacac

SEQ ID NO: 89441 - DNA, 25 bp, Probe Sequence
aacctgccaacacttagtcttatca

SEQ ID NO: 89442 - DNA, 25 bp, Probe Sequence
tgccaacacttagtcttatcacaca

SEQ ID NO: 89443 - DNA, 25 bp, Probe Sequence
acataacctgccaacacttagtctt

SEQ ID NO: 89444 - DNA, 25 bp, Probe Sequence
ccgtatgtaatgatgtctgtggcta

SEQ ID NO: 89445 - DNA, 25 bp, Probe Sequence
ttctagttcattcatgttctctgtt

SEQ ID NO: 89446 - DNA, 25 bp, Probe Sequence
cctgccaacacttagtcttatcaca

SEQ ID NO: 89447 - DNA, 25 bp, Probe Sequence
acctgccaacacttagtcttatcac

SEQ ID NO: 89448 - DNA, 25 bp, Probe Sequence
tcttctaattactaacaatgctggt

SEQ ID NO: 89449 - DNA, 25 bp, Probe Sequence
gctacataacctgccaacacttagt

SEQ ID NO: 89450 - DNA, 25 bp, Probe Sequence
aatgctggtatgaaattgttgtgta

SEQ ID NO: 89451 - DNA, 25 bp, Probe Sequence
atgctggtatgaaattgttgtgtat

SEQ ID NO: 89452 - DNA, 25 bp, Probe Sequence
gtatgtaatgatgtctgtggctaca

SEQ ID NO: 89453 - DNA, 25 bp, Probe Sequence
aattgttgtgtatatctctggtaga

SEQ ID NO: 89454 - DNA, 25 bp, Probe Sequence
tgctggtatgaaattgttgtgtata

SEQ ID NO: 89455 - DNA, 25 bp, Probe Sequence
tgttgagtacatatactgacagctc

SEQ ID NO: 89456 - DNA, 25 bp, Probe Sequence
attagacaagagtgtgtgttaccaa

SEQ ID NO: 89457 - DNA, 25 bp, Probe Sequence
aattagacaagagtgtgtgttacca

SEQ ID NO: 89458 - DNA, 25 bp, Probe Sequence
gaattagacaagagtgtgtgttacc

SEQ ID NO: 89459 - DNA, 25 bp, Probe Sequence
ggaattagacaagagtgtgtgttac

SEQ ID NO: 89460 - DNA, 25 bp, Probe Sequence
gcatttggttaggcttagagagaaa

SEQ ID NO: 89461 - DNA, 25 bp, Probe Sequence
gctggaagaaagttcataaatggat

SEQ ID NO: 89462 - DNA, 25 bp, Probe Sequence
ggctggaagaaagttcataaatgga

SEQ ID NO: 89463 - DNA, 25 bp, Probe Sequence
ctgggctggaagaaagttcataaat

SEQ ID NO: 89464 - DNA, 25 bp, Probe Sequence
tgggctggaagaaagttcataaatg

SEQ ID NO: 89465 - DNA, 25 bp, Probe Sequence
ttagacaagagtgtgtgttaccaaa

SEQ ID NO: 89466 - DNA, 25 bp, Probe Sequence
gggaattagacaagagtgtgtgtta

SEQ ID NO: 89467 - DNA, 25 bp, Probe Sequence
ctggaagaaagttcataaatggatg

SEQ ID NO: 89468 - DNA, 25 bp, Probe Sequence
gggctggaagaaagttcataaatgg

SEQ ID NO: 89469 - DNA, 25 bp, Probe Sequence
tgggaattagacaagagtgtgtgtt

SEQ ID NO: 89470 - DNA, 25 bp, Probe Sequence
ccaagcatcattcaccaaagcattt

SEQ ID NO: 89471 - DNA, 25 bp, Probe Sequence
ctgggaattagacaagagtgtgtgt

SEQ ID NO: 89472 - DNA, 25 bp, Probe Sequence
cctgggctggaagaaagttcataaa

SEQ ID NO: 89473 - DNA, 25 bp, Probe Sequence
atatgggcactttacagaatccagt

SEQ ID NO: 89474 - DNA, 25 bp, Probe Sequence
tatgggcactttacagaatccagtt

SEQ ID NO: 89475 - DNA, 25 bp, Probe Sequence
tagcatatgggcactttacagaatc

SEQ ID NO: 89476 - DNA, 25 bp, Probe Sequence
ctagcatatgggcactttacagaat

SEQ ID NO: 89477 - DNA, 25 bp, Probe Sequence
gagaaaggagggcagatttgtaacc

SEQ ID NO: 89478 - DNA, 25 bp, Probe Sequence
ggagaaaggagggcagatttgtaac

SEQ ID NO: 89479 - DNA, 25 bp, Probe Sequence
catttggttaggcttagagagaaaa

SEQ ID NO: 89480 - DNA, 25 bp, Probe Sequence
aatatgtaaccttagactcagccag

SEQ ID NO: 89481 - DNA, 25 bp, Probe Sequence
ttaccatagttaccaccaaggatac

SEQ ID NO: 89482 - DNA, 25 bp, Probe Sequence
gttaccatagttaccaccaaggata

SEQ ID NO: 89483 - DNA, 25 bp, Probe Sequence
taccatagttaccaccaaggatacc

SEQ ID NO: 89484 - DNA, 25 bp, Probe Sequence
atatgtaaccttagactcagccagt

SEQ ID NO: 89485 - DNA, 25 bp, Probe Sequence
atgtcgtaactattgttcaagtgag

SEQ ID NO: 89486 - DNA, 25 bp, Probe Sequence
tatgtaaccttagactcagccagtt

SEQ ID NO: 89487 - DNA, 25 bp, Probe Sequence
tgtcgtaactattgttcaagtgagc

SEQ ID NO: 89488 - DNA, 25 bp, Probe Sequence
tagttaccaccaaggataccaggat

SEQ ID NO: 89489 - DNA, 25 bp, Probe Sequence
atagttaccaccaaggataccagga

SEQ ID NO: 89490 - DNA, 25 bp, Probe Sequence
catagttaccaccaaggataccagg

SEQ ID NO: 89491 - DNA, 25 bp, Probe Sequence
ccatagttaccaccaaggataccag

SEQ ID NO: 89492 - DNA, 25 bp, Probe Sequence
catgtcgtaactattgttcaagtga

SEQ ID NO: 89493 - DNA, 25 bp, Probe Sequence
gtcgtaactattgttcaagtgagcc

SEQ ID NO: 89494 - DNA, 25 bp, Probe Sequence
accatagttaccaccaaggatacca

SEQ ID NO: 89495 - DNA, 25 bp, Probe Sequence
attcttccacactgcgtactacatt

SEQ ID NO: 89496 - DNA, 25 bp, Probe Sequence
aaatatgtaaccttagactcagcca

SEQ ID NO: 89497 - DNA, 25 bp, Probe Sequence
aaatgtcaaatcctggtatccttcc

SEQ ID NO: 89498 - DNA, 25 bp, Probe Sequence
gaaatgtcaaatcctggtatccttc

SEQ ID NO: 89499 - DNA, 25 bp, Probe Sequence
ggatacccttactgagcagaaatat

SEQ ID NO: 89500 - DNA, 25 bp, Probe Sequence
gaaatatgtaaccttagactcagcc

SEQ ID NO: 89501 - DNA, 25 bp, Probe Sequence
atacccttactgagcagaaatatgt

SEQ ID NO: 89502 - DNA, 25 bp, Probe Sequence
tggatacccttactgagcagaaata

SEQ ID NO: 89503 - DNA, 25 bp, Probe Sequence
aagatgagtatgcaggctatggtta

SEQ ID NO: 89504 - DNA, 25 bp, Probe Sequence
cctattagcaactggaagacaagta

SEQ ID NO: 89505 - DNA, 25 bp, Probe Sequence
tcttcagtaccatcctattagcaac

SEQ ID NO: 89506 - DNA, 25 bp, Probe Sequence
tattagcaactggaagacaagtagc

SEQ ID NO: 89507 - DNA, 25 bp, Probe Sequence
cttcttcagtaccatcctattagca

SEQ ID NO: 89508 - DNA, 25 bp, Probe Sequence
ttcttcagtaccatcctattagcaa

SEQ ID NO: 89509 - DNA, 25 bp, Probe Sequence
ctattagcaactggaagacaagtag

SEQ ID NO: 89510 - DNA, 25 bp, Probe Sequence
gaactacaagacttcttcagtacca

SEQ ID NO: 89511 - DNA, 25 bp, Probe Sequence
cttcagtaccatcctattagcaact

SEQ ID NO: 89512 - DNA, 25 bp, Probe Sequence
actacaagacttcttcagtaccatc

SEQ ID NO: 89513 - DNA, 25 bp, Probe Sequence
acttcttcagtaccatcctattagc

SEQ ID NO: 89514 - DNA, 25 bp, Probe Sequence
ctacaagacttcttcagtaccatcc

SEQ ID NO: 89515 - DNA, 25 bp, Probe Sequence
caagacttcttcagtaccatcctat

SEQ ID NO: 89516 - DNA, 25 bp, Probe Sequence
acaagacttcttcagtaccatccta

SEQ ID NO: 89517 - DNA, 25 bp, Probe Sequence
tacaagacttcttcagtaccatcct

SEQ ID NO: 89518 - DNA, 25 bp, Probe Sequence
aactacaagacttcttcagtaccat

SEQ ID NO: 89519 - DNA, 25 bp, Probe Sequence
aagacttcttcagtaccatcctatt

SEQ ID NO: 89520 - DNA, 25 bp, Probe Sequence
atcctattagcaactggaagacaag

SEQ ID NO: 89521 - DNA, 25 bp, Probe Sequence
tataagatgttatggagcagatagc

SEQ ID NO: 89522 - DNA, 25 bp, Probe Sequence
catcctattagcaactggaagacaa

SEQ ID NO: 89523 - DNA, 25 bp, Probe Sequence
taccatcctattagcaactggaaga

SEQ ID NO: 89524 - DNA, 25 bp, Probe Sequence
ttctgcaactctaattctcttcctt

SEQ ID NO: 89525 - DNA, 25 bp, Probe Sequence
agacttcttcagtaccatcctatta

SEQ ID NO: 89526 - DNA, 25 bp, Probe Sequence
attctgcaactctaattctcttcct

SEQ ID NO: 89527 - DNA, 25 bp, Probe Sequence
tcctattagcaactggaagacaagt

SEQ ID NO: 89528 - DNA, 25 bp, Probe Sequence
tgtgaagtgttactacagccttaat

SEQ ID NO: 89529 - DNA, 25 bp, Probe Sequence
gtgaagtgttactacagccttaata

SEQ ID NO: 89530 - DNA, 25 bp, Probe Sequence
tatatgaagaagtaagtgctgggag

SEQ ID NO: 89531 - DNA, 25 bp, Probe Sequence
atctcattacttatactgggacacc

SEQ ID NO: 89532 - DNA, 25 bp, Probe Sequence
ttatatgaagaagtaagtgctggga

SEQ ID NO: 89533 - DNA, 25 bp, Probe Sequence
cttagcctttacctgtgaagtgtta

SEQ ID NO: 89534 - DNA, 25 bp, Probe Sequence
ttagcctttacctgtgaagtgttac

SEQ ID NO: 89535 - DNA, 25 bp, Probe Sequence
atatgaagaagtaagtgctgggagt

SEQ ID NO: 89536 - DNA, 25 bp, Probe Sequence
tgaagtgttactacagccttaatat

SEQ ID NO: 89537 - DNA, 25 bp, Probe Sequence
tatgaagaagtaagtgctgggagtt

SEQ ID NO: 89538 - DNA, 25 bp, Probe Sequence
tttatatgaagaagtaagtgctggg

SEQ ID NO: 89539 - DNA, 25 bp, Probe Sequence
cgcaaggaaactgtttatatgaaga

SEQ ID NO: 89540 - DNA, 25 bp, Probe Sequence
tcgcaaggaaactgtttatatgaag

SEQ ID NO: 89541 - DNA, 25 bp, Probe Sequence
ctcgcaaggaaactgtttatatgaa

SEQ ID NO: 89542 - DNA, 25 bp, Probe Sequence
tgaagaagtaagtgctgggagttta

SEQ ID NO: 89543 - DNA, 25 bp, Probe Sequence
gtagcctttactgtttgatatacca

SEQ ID NO: 89544 - DNA, 25 bp, Probe Sequence
tgtagcctttactgtttgatatacc

SEQ ID NO: 89545 - DNA, 25 bp, Probe Sequence
gagagagaatgtatttgctgacaac

SEQ ID NO: 89546 - DNA, 25 bp, Probe Sequence
cctttacctgtgaagtgttactaca

SEQ ID NO: 89547 - DNA, 25 bp, Probe Sequence
atgaaataactgaatttggaggctg

SEQ ID NO: 89548 - DNA, 25 bp, Probe Sequence
cggatgaaataactgaatttggagg

SEQ ID NO: 89549 - DNA, 25 bp, Probe Sequence
gatgaaataactgaatttggaggct

SEQ ID NO: 89550 - DNA, 25 bp, Probe Sequence
ggatgaaataactgaatttggaggc

SEQ ID NO: 89551 - DNA, 25 bp, Probe Sequence
acggatgaaataactgaatttggag

SEQ ID NO: 89552 - DNA, 25 bp, Probe Sequence
gcttctaccacctgttcttaatgta

SEQ ID NO: 89553 - DNA, 25 bp, Probe Sequence
ttgcttctaccacctgttcttaatg

SEQ ID NO: 89554 - DNA, 25 bp, Probe Sequence
gttgcttctaccacctgttcttaat

SEQ ID NO: 89555 - DNA, 25 bp, Probe Sequence
ttctaccacctgttcttaatgtaac

SEQ ID NO: 89556 - DNA, 25 bp, Probe Sequence
gtagaggaagatgagttgaggacag

SEQ ID NO: 89557 - DNA, 25 bp, Probe Sequence
ctgtagaggaagatgagttgaggac

SEQ ID NO: 89558 - DNA, 25 bp, Probe Sequence
cttctaccacctgttcttaatgtaa

SEQ ID NO: 89559 - DNA, 25 bp, Probe Sequence
aacactgtagaggaagatgagttga

SEQ ID NO: 89560 - DNA, 25 bp, Probe Sequence
taactgttctattctgatactacgc

SEQ ID NO: 89561 - DNA, 25 bp, Probe Sequence
tgcttctaccacctgttcttaatgt

SEQ ID NO: 89562 - DNA, 25 bp, Probe Sequence
acactgtagaggaagatgagttgag

SEQ ID NO: 89563 - DNA, 25 bp, Probe Sequence
actgtagaggaagatgagttgagga

SEQ ID NO: 89564 - DNA, 25 bp, Probe Sequence
cactgtagaggaagatgagttgagg

SEQ ID NO: 89565 - DNA, 25 bp, Probe Sequence
cttatttctctttctctgcgttgtt

SEQ ID NO: 89566 - DNA, 25 bp, Probe Sequence
ttcttatttctctttctctgcgttg

SEQ ID NO: 89567 - DNA, 25 bp, Probe Sequence
tgctttcttatttctctttctctgc

SEQ ID NO: 89568 - DNA, 25 bp, Probe Sequence
tcttatttctctttctctgcgttgt

SEQ ID NO: 89569 - DNA, 25 bp, Probe Sequence
gctttcttatttctctttctctgcg

SEQ ID NO: 89570 - DNA, 25 bp, Probe Sequence
ctttcttatttctctttctctgcgt

SEQ ID NO: 89571 - DNA, 25 bp, Probe Sequence
tgtgatggtctttgctttcttattt

SEQ ID NO: 89572 - DNA, 25 bp, Probe Sequence
atgtgatggtctttgctttcttatt

SEQ ID NO: 89573 - DNA, 25 bp, Probe Sequence
aatgtgatggtctttgctttcttat

SEQ ID NO: 89574 - DNA, 25 bp, Probe Sequence
atttctctttctctgcgttgttaat

SEQ ID NO: 89575 - DNA, 25 bp, Probe Sequence
ttctctttctctgcgttgttaattt

SEQ ID NO: 89576 - DNA, 25 bp, Probe Sequence
ttacatatctgtctcattctgcctt

SEQ ID NO: 89577 - DNA, 25 bp, Probe Sequence
cattacatatctgtctcattctgcc

SEQ ID NO: 89578 - DNA, 25 bp, Probe Sequence
attacatatctgtctcattctgcct

SEQ ID NO: 89579 - DNA, 25 bp, Probe Sequence
tcattacatatctgtctcattctgc

SEQ ID NO: 89580 - DNA, 25 bp, Probe Sequence
aagttacaagctaagattccagaag

SEQ ID NO: 89581 - DNA, 25 bp, Probe Sequence
tggtccataagaataatgaagaagt

SEQ ID NO: 89582 - DNA, 25 bp, Probe Sequence
gcttatgtcttggctaaatagtcaa

SEQ ID NO: 89583 - DNA, 25 bp, Probe Sequence
cctgttgtttagtgtctccttccta

SEQ ID NO: 89584 - DNA, 25 bp, Probe Sequence
tgatggtccataagaataatgaaga

SEQ ID NO: 89585 - DNA, 25 bp, Probe Sequence
aaagtttagggctcaagatcaatct

SEQ ID NO: 89586 - DNA, 25 bp, Probe Sequence
tacatatctgtctcattctgccttt

SEQ ID NO: 89587 - DNA, 25 bp, Probe Sequence
ggatgatggtccataagaataatga

SEQ ID NO: 89588 - DNA, 25 bp, Probe Sequence
ctgttgtttagtgtctccttcctaa

SEQ ID NO: 89589 - DNA, 25 bp, Probe Sequence
tatttcttcaaacagatgtcctgga

SEQ ID NO: 89590 - DNA, 25 bp, Probe Sequence
atttcttcaaacagatgtcctggat

SEQ ID NO: 89591 - DNA, 25 bp, Probe Sequence
atatttcttcaaacagatgtcctgg

SEQ ID NO: 89592 - DNA, 25 bp, Probe Sequence
tttcttcaaacagatgtcctggatg

SEQ ID NO: 89593 - DNA, 25 bp, Probe Sequence
ggtccaaaggatagaagcatctaaa

SEQ ID NO: 89594 - DNA, 25 bp, Probe Sequence
tacaagctaagattccagaagcatt

SEQ ID NO: 89595 - DNA, 25 bp, Probe Sequence
ttacaagctaagattccagaagcat

SEQ ID NO: 89596 - DNA, 25 bp, Probe Sequence
tggatatttcttcaaacagatgtcc

SEQ ID NO: 89597 - DNA, 25 bp, Probe Sequence
agttacaagctaagattccagaagc

SEQ ID NO: 89598 - DNA, 25 bp, Probe Sequence
actggatatttcttcaaacagatgt

SEQ ID NO: 89599 - DNA, 25 bp, Probe Sequence
cttcaaacagatgtcctggatgatg

SEQ ID NO: 89600 - DNA, 25 bp, Probe Sequence
ttccagagataatcctagccatcct

SEQ ID NO: 89601 - DNA, 25 bp, Probe Sequence
agtgatgtttgaaccttctgtgtaa

SEQ ID NO: 89602 - DNA, 25 bp, Probe Sequence
cgggtttacttggaatgaaagatac

SEQ ID NO: 89603 - DNA, 25 bp, Probe Sequence
tcgggtttacttggaatgaaagata

SEQ ID NO: 89604 - DNA, 25 bp, Probe Sequence
ctggatggtttctcttaggactttg

SEQ ID NO: 89605 - DNA, 25 bp, Probe Sequence
ataatcctagccatcctctccactc

SEQ ID NO: 89606 - DNA, 25 bp, Probe Sequence
gataatcctagccatcctctccact

SEQ ID NO: 89607 - DNA, 25 bp, Probe Sequence
gatgtttgaaccttctgtgtaactt

SEQ ID NO: 89608 - DNA, 25 bp, Probe Sequence
tgatgtttgaaccttctgtgtaact

SEQ ID NO: 89609 - DNA, 25 bp, Probe Sequence
gtgatgtttgaaccttctgtgtaac

SEQ ID NO: 89610 - DNA, 25 bp, Probe Sequence
atgtttgaaccttctgtgtaacttt

SEQ ID NO: 89611 - DNA, 25 bp, Probe Sequence
tccagagataatcctagccatcctc

SEQ ID NO: 89612 - DNA, 25 bp, Probe Sequence
agataatcctagccatcctctccac

SEQ ID NO: 89613 - DNA, 25 bp, Probe Sequence
gggtttacttggaatgaaagatact

SEQ ID NO: 89614 - DNA, 25 bp, Probe Sequence
gtcgggtttacttggaatgaaagat

SEQ ID NO: 89615 - DNA, 25 bp, Probe Sequence
atgtcgggtttacttggaatgaaag

SEQ ID NO: 89616 - DNA, 25 bp, Probe Sequence
tttccagagataatcctagccatcc

SEQ ID NO: 89617 - DNA, 25 bp, Probe Sequence
tgaaagatacttgaattattgtgcg

SEQ ID NO: 89618 - DNA, 25 bp, Probe Sequence
ttgaaattccatgtcgggtttactt

SEQ ID NO: 89619 - DNA, 25 bp, Probe Sequence
tttgaaattccatgtcgggtttact

SEQ ID NO: 89620 - DNA, 25 bp, Probe Sequence
gtttgaaattccatgtcgggtttac

SEQ ID NO: 89621 - DNA, 25 bp, Probe Sequence
cattgtgtgctctcagatttcttcc

SEQ ID NO: 89622 - DNA, 25 bp, Probe Sequence
ccattgtgtgctctcagatttcttc

SEQ ID NO: 89623 - DNA, 25 bp, Probe Sequence
ctctcagatttcttccactgtttga

SEQ ID NO: 89624 - DNA, 25 bp, Probe Sequence
ataagcactactggtaatgttgagc

SEQ ID NO: 89625 - DNA, 25 bp, Probe Sequence
aataagcactactggtaatgttgag

SEQ ID NO: 89626 - DNA, 25 bp, Probe Sequence
gactaataagcactactggtaatgt

SEQ ID NO: 89627 - DNA, 25 bp, Probe Sequence
tgactaataagcactactggtaatg

SEQ ID NO: 89628 - DNA, 25 bp, Probe Sequence
taagcactactggtaatgttgagca

SEQ ID NO: 89629 - DNA, 25 bp, Probe Sequence
gtgtgactaataagcactactggta

SEQ ID NO: 89630 - DNA, 25 bp, Probe Sequence
taataagcactactggtaatgttga

SEQ ID NO: 89631 - DNA, 25 bp, Probe Sequence
actaataagcactactggtaatgtt

SEQ ID NO: 89632 - DNA, 25 bp, Probe Sequence
tgtgactaataagcactactggtaa

SEQ ID NO: 89633 - DNA, 25 bp, Probe Sequence
ctaataagcactactggtaatgttg

SEQ ID NO: 89634 - DNA, 25 bp, Probe Sequence
gtaatgttgagcacagtggtaactc

SEQ ID NO: 89635 - DNA, 25 bp, Probe Sequence
gcagttgttgtgtagagaatgtaaa

SEQ ID NO: 89636 - DNA, 25 bp, Probe Sequence
atgcagttgttgtgtagagaatgta

SEQ ID NO: 89637 - DNA, 25 bp, Probe Sequence
gaccagtgagaatagtgcattagtt

SEQ ID NO: 89638 - DNA, 25 bp, Probe Sequence
tgcagttgttgtgtagagaatgtaa

SEQ ID NO: 89639 - DNA, 25 bp, Probe Sequence
aaagttctgttcgtttatccattgc

SEQ ID NO: 89640 - DNA, 25 bp, Probe Sequence
gtgactaataagcactactggtaat

SEQ ID NO: 89641 - DNA, 25 bp, Probe Sequence
aatgtaaattgtctggaacctttgg

SEQ ID NO: 89642 - DNA, 25 bp, Probe Sequence
gagatgcagttgttgtgtagagaat

SEQ ID NO: 89643 - DNA, 25 bp, Probe Sequence
agatgcagttgttgtgtagagaatg

SEQ ID NO: 89644 - DNA, 25 bp, Probe Sequence
tgaaagttctgttcgtttatccatt

SEQ ID NO: 89645 - DNA, 25 bp, Probe Sequence
aatgaaagttctgttcgtttatcca

SEQ ID NO: 89646 - DNA, 25 bp, Probe Sequence
agagaatgtaaattgtctggaacct

SEQ ID NO: 89647 - DNA, 25 bp, Probe Sequence
gaaagttctgttcgtttatccattg

SEQ ID NO: 89648 - DNA, 25 bp, Probe Sequence
attaggaatgtcttcttgtcagcca

SEQ ID NO: 89649 - DNA, 25 bp, Probe Sequence
ttaggaatgtcttcttgtcagccag

SEQ ID NO: 89650 - DNA, 25 bp, Probe Sequence
tggaaattgttgtttgtgtaggttt

SEQ ID NO: 89651 - DNA, 25 bp, Probe Sequence
gggtatggaaattgttgtttgtgta

SEQ ID NO: 89652 - DNA, 25 bp, Probe Sequence
atggaaattgttgtttgtgtaggtt

SEQ ID NO: 89653 - DNA, 25 bp, Probe Sequence
attgggtatggaaattgttgtttgt

SEQ ID NO: 89654 - DNA, 25 bp, Probe Sequence
ttgggtatggaaattgttgtttgtg

SEQ ID NO: 89655 - DNA, 25 bp, Probe Sequence
tatggaaattgttgtttgtgtaggt

SEQ ID NO: 89656 - DNA, 25 bp, Probe Sequence
cattgggtatggaaattgttgtttg

SEQ ID NO: 89657 - DNA, 25 bp, Probe Sequence
tcattaggaatgtcttcttgtcagc

SEQ ID NO: 89658 - DNA, 25 bp, Probe Sequence
gtatggaaattgttgtttgtgtagg

SEQ ID NO: 89659 - DNA, 25 bp, Probe Sequence
ggtatggaaattgttgtttgtgtag

SEQ ID NO: 89660 - DNA, 25 bp, Probe Sequence
ttcattaggaatgtcttcttgtcag

SEQ ID NO: 89661 - DNA, 25 bp, Probe Sequence
tgggtatggaaattgttgtttgtgt

SEQ ID NO: 89662 - DNA, 25 bp, Probe Sequence
agtctacattgggtatggaaattgt

SEQ ID NO: 89663 - DNA, 25 bp, Probe Sequence
ccctgatatgtgtgctctacaataa

SEQ ID NO: 89664 - DNA, 25 bp, Probe Sequence
acattgggtatggaaattgttgttt

SEQ ID NO: 89665 - DNA, 25 bp, Probe Sequence
cattaggaatgtcttcttgtcagcc

SEQ ID NO: 89666 - DNA, 25 bp, Probe Sequence
ctacattgggtatggaaattgttgt

SEQ ID NO: 89667 - DNA, 25 bp, Probe Sequence
tctacattgggtatggaaattgttg

SEQ ID NO: 89668 - DNA, 25 bp, Probe Sequence
gtctacattgggtatggaaattgtt

SEQ ID NO: 89669 - DNA, 25 bp, Probe Sequence
attcattaggaatgtcttcttgtca

SEQ ID NO: 89670 - DNA, 25 bp, Probe Sequence
gtagcttctatccactcagatcctg

SEQ ID NO: 89671 - DNA, 25 bp, Probe Sequence
tacattgggtatggaaattgttgtt

SEQ ID NO: 89672 - DNA, 25 bp, Probe Sequence
agactgtaatgctattcctctatgg

SEQ ID NO: 89673 - DNA, 25 bp, Probe Sequence
tgttagactgtaatgctattcctct

SEQ ID NO: 89674 - DNA, 25 bp, Probe Sequence
ttgttagactgtaatgctattcctc

SEQ ID NO: 89675 - DNA, 25 bp, Probe Sequence
attctgattgttagactgtaatgct

SEQ ID NO: 89676 - DNA, 25 bp, Probe Sequence
aacttgctctgacctataatgtctt

SEQ ID NO: 89677 - DNA, 25 bp, Probe Sequence
caacttgctctgacctataatgtct

SEQ ID NO: 89678 - DNA, 25 bp, Probe Sequence
attgttagactgtaatgctattcct

SEQ ID NO: 89679 - DNA, 25 bp, Probe Sequence
acttgctctgacctataatgtctta

SEQ ID NO: 89680 - DNA, 25 bp, Probe Sequence
gattgttagactgtaatgctattcc

SEQ ID NO: 89681 - DNA, 25 bp, Probe Sequence
agtaagtctgagtggttccttcaag

SEQ ID NO: 89682 - DNA, 25 bp, Probe Sequence
ttctgattgttagactgtaatgcta

SEQ ID NO: 89683 - DNA, 25 bp, Probe Sequence
cttgctctgacctataatgtcttag

SEQ ID NO: 89684 - DNA, 25 bp, Probe Sequence
agtaataatgtcaggtcttaccagc

SEQ ID NO: 89685 - DNA, 25 bp, Probe Sequence
aattctgattgttagactgtaatgc

SEQ ID NO: 89686 - DNA, 25 bp, Probe Sequence
tctgattgttagactgtaatgctat

SEQ ID NO: 89687 - DNA, 25 bp, Probe Sequence
gtaataatgtcaggtcttaccagcc

SEQ ID NO: 89688 - DNA, 25 bp, Probe Sequence
gactgtaatgctattcctctatggg

SEQ ID NO: 89689 - DNA, 25 bp, Probe Sequence
tgagtaataatgtcaggtcttacca

SEQ ID NO: 89690 - DNA, 25 bp, Probe Sequence
taataatgtcaggtcttaccagcca

SEQ ID NO: 89691 - DNA, 25 bp, Probe Sequence
gtgagtaataatgtcaggtcttacc

SEQ ID NO: 89692 - DNA, 25 bp, Probe Sequence
cagtaagtctgagtggttccttcaa

SEQ ID NO: 89693 - DNA, 25 bp, Probe Sequence
tgattgttagactgtaatgctattc

SEQ ID NO: 89694 - DNA, 25 bp, Probe Sequence
ctgattgttagactgtaatgctatt

SEQ ID NO: 89695 - DNA, 25 bp, Probe Sequence
ttgtgagtaataatgtcaggtctta

SEQ ID NO: 89696 - DNA, 25 bp, Probe Sequence
aatagggtgtgtttgttgtagtgta

SEQ ID NO: 89697 - DNA, 25 bp, Probe Sequence
gctgctactttgaatgtctttactc

SEQ ID NO: 89698 - DNA, 25 bp, Probe Sequence
ttgatagcataggaaatggacgaat

SEQ ID NO: 89699 - DNA, 25 bp, Probe Sequence
cttgatagcataggaaatggacgaa

SEQ ID NO: 89700 - DNA, 25 bp, Probe Sequence
ctgctactttgaatgtctttactct

SEQ ID NO: 89701 - DNA, 25 bp, Probe Sequence
tgatagcataggaaatggacgaatg

SEQ ID NO: 89702 - DNA, 25 bp, Probe Sequence
taaagacttcagagtggcttgatag

SEQ ID NO: 89703 - DNA, 25 bp, Probe Sequence
ttaaagacttcagagtggcttgata

SEQ ID NO: 89704 - DNA, 25 bp, Probe Sequence
tgctactttgaatgtctttactctt

SEQ ID NO: 89705 - DNA, 25 bp, Probe Sequence
attgttaaagacttcagagtggctt

SEQ ID NO: 89706 - DNA, 25 bp, Probe Sequence
aattgttaaagacttcagagtggct

SEQ ID NO: 89707 - DNA, 25 bp, Probe Sequence
taattgttaaagacttcagagtggc

SEQ ID NO: 89708 - DNA, 25 bp, Probe Sequence
atagggtgtgtttgttgtagtgtac

SEQ ID NO: 89709 - DNA, 25 bp, Probe Sequence
gttaaagacttcagagtggcttgat

SEQ ID NO: 89710 - DNA, 25 bp, Probe Sequence
tgactggatttgagatgaaatggta

SEQ ID NO: 89711 - DNA, 25 bp, Probe Sequence
atggtgaaactttgtctctactaaa

SEQ ID NO: 89712 - DNA, 25 bp, Probe Sequence
atgactggatttgagatgaaatggt

SEQ ID NO: 89713 - DNA, 25 bp, Probe Sequence
caatagggtgtgtttgttgtagtgt

SEQ ID NO: 89714 - DNA, 25 bp, Probe Sequence
tagcatgactggatttgagatgaaa

SEQ ID NO: 89715 - DNA, 25 bp, Probe Sequence
ttgttaaagacttcagagtggcttg

SEQ ID NO: 89716 - DNA, 25 bp, Probe Sequence
gactggatttgagatgaaatggtaa

SEQ ID NO: 89717 - DNA, 25 bp, Probe Sequence
gatgtagcatgactggatttgagat

SEQ ID NO: 89718 - DNA, 25 bp, Probe Sequence
gtagcatgactggatttgagatgaa

SEQ ID NO: 89719 - DNA, 25 bp, Probe Sequence
atgtagcatgactggatttgagatg

SEQ ID NO: 89720 - DNA, 25 bp, Probe Sequence
aagtattggaagagcagaattgagg

SEQ ID NO: 89721 - DNA, 25 bp, Probe Sequence
caagtattggaagagcagaattgag

SEQ ID NO: 89722 - DNA, 25 bp, Probe Sequence
ctcaagtattggaagagcagaattg

SEQ ID NO: 89723 - DNA, 25 bp, Probe Sequence
cctcaagtattggaagagcagaatt

SEQ ID NO: 89724 - DNA, 25 bp, Probe Sequence
ctatcctcaagtattggaagagcag

SEQ ID NO: 89725 - DNA, 25 bp, Probe Sequence
tatcctcaagtattggaagagcaga

SEQ ID NO: 89726 - DNA, 25 bp, Probe Sequence
tcctcaagtattggaagagcagaat

SEQ ID NO: 89727 - DNA, 25 bp, Probe Sequence
atcctcaagtattggaagagcagaa

SEQ ID NO: 89728 - DNA, 25 bp, Probe Sequence
cctatcctcaagtattggaagagca

SEQ ID NO: 89729 - DNA, 25 bp, Probe Sequence
tgcctatcctcaagtattggaagag

SEQ ID NO: 89730 - DNA, 25 bp, Probe Sequence
ttctggaggatatctaatgtgatgc

SEQ ID NO: 89731 - DNA, 25 bp, Probe Sequence
gtgcctatcctcaagtattggaaga

SEQ ID NO: 89732 - DNA, 25 bp, Probe Sequence
tctggaggatatctaatgtgatgcc

SEQ ID NO: 89733 - DNA, 25 bp, Probe Sequence
tattggaagagcagaattgagggag

SEQ ID NO: 89734 - DNA, 25 bp, Probe Sequence
tcaagtattggaagagcagaattga

SEQ ID NO: 89735 - DNA, 25 bp, Probe Sequence
ggtgcctatcctcaagtattggaag

SEQ ID NO: 89736 - DNA, 25 bp, Probe Sequence
gatctctgtcttgagtttctccttc

SEQ ID NO: 89737 - DNA, 25 bp, Probe Sequence
gcctatcctcaagtattggaagagc

SEQ ID NO: 89738 - DNA, 25 bp, Probe Sequence
atgttcatctacagtacatggaagg

SEQ ID NO: 89739 - DNA, 25 bp, Probe Sequence
cgtatgttcatctacagtacatgga

SEQ ID NO: 89740 - DNA, 25 bp, Probe Sequence
atctctgtcttgagtttctccttcc

SEQ ID NO: 89741 - DNA, 25 bp, Probe Sequence
taggaggatctctgtcttgagtttc

SEQ ID NO: 89742 - DNA, 25 bp, Probe Sequence
ctaggaggatctctgtcttgagttt

SEQ ID NO: 89743 - DNA, 25 bp, Probe Sequence
gtattggaagagcagaattgaggga

SEQ ID NO: 89744 - DNA, 25 bp, Probe Sequence
aagtattggaagagcagaattgagg

SEQ ID NO: 89745 - DNA, 25 bp, Probe Sequence
caagtattggaagagcagaattgag

SEQ ID NO: 89746 - DNA, 25 bp, Probe Sequence
ctcaagtattggaagagcagaattg

SEQ ID NO: 89747 - DNA, 25 bp, Probe Sequence
cctcaagtattggaagagcagaatt

SEQ ID NO: 89748 - DNA, 25 bp, Probe Sequence
ctatcctcaagtattggaagagcag

SEQ ID NO: 89749 - DNA, 25 bp, Probe Sequence
tatcctcaagtattggaagagcaga

SEQ ID NO: 89750 - DNA, 25 bp, Probe Sequence
tcctcaagtattggaagagcagaat

SEQ ID NO: 89751 - DNA, 25 bp, Probe Sequence
atcctcaagtattggaagagcagaa

SEQ ID NO: 89752 - DNA, 25 bp, Probe Sequence
cctatcctcaagtattggaagagca

SEQ ID NO: 89753 - DNA, 25 bp, Probe Sequence
tgcctatcctcaagtattggaagag

SEQ ID NO: 89754 - DNA, 25 bp, Probe Sequence
ttctggaggatatctaatgtgatgc

SEQ ID NO: 89755 - DNA, 25 bp, Probe Sequence
gtgcctatcctcaagtattggaaga

SEQ ID NO: 89756 - DNA, 25 bp, Probe Sequence
tctggaggatatctaatgtgatgcc

SEQ ID NO: 89757 - DNA, 25 bp, Probe Sequence
tattggaagagcagaattgagggag

SEQ ID NO: 89758 - DNA, 25 bp, Probe Sequence
tcaagtattggaagagcagaattga

SEQ ID NO: 89759 - DNA, 25 bp, Probe Sequence
ggtgcctatcctcaagtattggaag

SEQ ID NO: 89760 - DNA, 25 bp, Probe Sequence
gatctctgtcttgagtttctccttc

SEQ ID NO: 89761 - DNA, 25 bp, Probe Sequence
gcctatcctcaagtattggaagagc

SEQ ID NO: 89762 - DNA, 25 bp, Probe Sequence
atgttcatctacagtacatggaagg

SEQ ID NO: 89763 - DNA, 25 bp, Probe Sequence
cgtatgttcatctacagtacatgga

SEQ ID NO: 89764 - DNA, 25 bp, Probe Sequence
atctctgtcttgagtttctccttcc

SEQ ID NO: 89765 - DNA, 25 bp, Probe Sequence
taggaggatctctgtcttgagtttc

SEQ ID NO: 89766 - DNA, 25 bp, Probe Sequence
ctaggaggatctctgtcttgagttt

SEQ ID NO: 89767 - DNA, 25 bp, Probe Sequence
gtattggaagagcagaattgaggga

SEQ ID NO: 89768 - DNA, 25 bp, Probe Sequence
gttaatacccactcgcaatttgaag

SEQ ID NO: 89769 - DNA, 25 bp, Probe Sequence
gaaagtgtgtgataccttcctgaaa

SEQ ID NO: 89770 - DNA, 25 bp, Probe Sequence
ttaatacccactcgcaatttgaagt

SEQ ID NO: 89771 - DNA, 25 bp, Probe Sequence
gaccttgacatttctgtgtttacaa

SEQ ID NO: 89772 - DNA, 25 bp, Probe Sequence
agaaagtgtgtgataccttcctgaa

SEQ ID NO: 89773 - DNA, 25 bp, Probe Sequence
accttgacatttctgtgtttacaaa

SEQ ID NO: 89774 - DNA, 25 bp, Probe Sequence
cagtcagaaagtgtgtgataccttc

SEQ ID NO: 89775 - DNA, 25 bp, Probe Sequence
ccttgacatttctgtgtttacaaag

SEQ ID NO: 89776 - DNA, 25 bp, Probe Sequence
taatacccactcgcaatttgaagtc

SEQ ID NO: 89777 - DNA, 25 bp, Probe Sequence
ggaccttgacatttctgtgtttaca

SEQ ID NO: 89778 - DNA, 25 bp, Probe Sequence
cttgacatttctgtgtttacaaagt

SEQ ID NO: 89779 - DNA, 25 bp, Probe Sequence
gacatttctgtgtttacaaagtacg

SEQ ID NO: 89780 - DNA, 25 bp, Probe Sequence
gtcagaaagtgtgtgataccttcct

SEQ ID NO: 89781 - DNA, 25 bp, Probe Sequence
agtcagaaagtgtgtgataccttcc

SEQ ID NO: 89782 - DNA, 25 bp, Probe Sequence
gggaccttgacatttctgtgtttac

SEQ ID NO: 89783 - DNA, 25 bp, Probe Sequence
agggaccttgacatttctgtgttta

SEQ ID NO: 89784 - DNA, 25 bp, Probe Sequence
gatatcatattgtggcttctgagct

SEQ ID NO: 89785 - DNA, 25 bp, Probe Sequence
agatatcatattgtggcttctgagc

SEQ ID NO: 89786 - DNA, 25 bp, Probe Sequence
cagaaagtgtgtgataccttcctga

SEQ ID NO: 89787 - DNA, 25 bp, Probe Sequence
tcagaaagtgtgtgataccttcctg

SEQ ID NO: 89788 - DNA, 25 bp, Probe Sequence
tgtttacaaagtacgtcttcaggtc

SEQ ID NO: 89789 - DNA, 25 bp, Probe Sequence
tgacatttctgtgtttacaaagtac

SEQ ID NO: 89790 - DNA, 25 bp, Probe Sequence
tttcctttcacgttgattattcctc

SEQ ID NO: 89791 - DNA, 25 bp, Probe Sequence
ctttcctttcacgttgattattcct

SEQ ID NO: 89792 - DNA, 25 bp, Probe Sequence
cagagaaggaggcagtcaataagag

SEQ ID NO: 89793 - DNA, 25 bp, Probe Sequence
actgttgtatcttgaataaacgctg

SEQ ID NO: 89794 - DNA, 25 bp, Probe Sequence
cactgttgtatcttgaataaacgct

SEQ ID NO: 89795 - DNA, 25 bp, Probe Sequence
tctactggatcacttgtcaagaagc

SEQ ID NO: 89796 - DNA, 25 bp, Probe Sequence
tcactgttgtatcttgaataaacgc

SEQ ID NO: 89797 - DNA, 25 bp, Probe Sequence
gttgtatcttgaataaacgctgctg

SEQ ID NO: 89798 - DNA, 25 bp, Probe Sequence
ctgttgtatcttgaataaacgctgc

SEQ ID NO: 89799 - DNA, 25 bp, Probe Sequence
gattccctcactgttgtatcttgaa

SEQ ID NO: 89800 - DNA, 25 bp, Probe Sequence
tccctcactgttgtatcttgaataa

SEQ ID NO: 89801 - DNA, 25 bp, Probe Sequence
ttccctcactgttgtatcttgaata

SEQ ID NO: 89802 - DNA, 25 bp, Probe Sequence
tgttgtatcttgaataaacgctgct

SEQ ID NO: 89803 - DNA, 25 bp, Probe Sequence
agatttctactggatcacttgtcaa

SEQ ID NO: 89804 - DNA, 25 bp, Probe Sequence
agagaaggaggcagtcaataagagg

SEQ ID NO: 89805 - DNA, 25 bp, Probe Sequence
aagatttctactggatcacttgtca

SEQ ID NO: 89806 - DNA, 25 bp, Probe Sequence
ttctactggatcacttgtcaagaag

SEQ ID NO: 89807 - DNA, 25 bp, Probe Sequence
ccctcactgttgtatcttgaataaa

SEQ ID NO: 89808 - DNA, 25 bp, Probe Sequence
gatttctactggatcacttgtcaag

SEQ ID NO: 89809 - DNA, 25 bp, Probe Sequence
agaaggaggcagtcaataagaggtc

SEQ ID NO: 89810 - DNA, 25 bp, Probe Sequence
gagaaggaggcagtcaataagaggt

SEQ ID NO: 89811 - DNA, 25 bp, Probe Sequence
atttctactggatcacttgtcaaga

SEQ ID NO: 89812 - DNA, 25 bp, Probe Sequence
aaagatttctactggatcacttgtc

SEQ ID NO: 89813 - DNA, 25 bp, Probe Sequence
gtatcttgaataaacgctgctgctt

SEQ ID NO: 89814 - DNA, 25 bp, Probe Sequence
tatcttgaataaacgctgctgcttc

SEQ ID NO: 89815 - DNA, 25 bp, Probe Sequence
ctcactgttgtatcttgaataaacg

SEQ ID NO: 89816 - DNA, 25 bp, Probe Sequence
ccacttcctaatactataccttcgg

SEQ ID NO: 89817 - DNA, 25 bp, Probe Sequence
tccacttcctaatactataccttcg

SEQ ID NO: 89818 - DNA, 25 bp, Probe Sequence
ccatagcaactcctgtactctacta

SEQ ID NO: 89819 - DNA, 25 bp, Probe Sequence
catagcaactcctgtactctactaa

SEQ ID NO: 89820 - DNA, 25 bp, Probe Sequence
tattcagaccatagcaactcctgta

SEQ ID NO: 89821 - DNA, 25 bp, Probe Sequence
ctcacatcttgtaattccagcactt

SEQ ID NO: 89822 - DNA, 25 bp, Probe Sequence
atattcagaccatagcaactcctgt

SEQ ID NO: 89823 - DNA, 25 bp, Probe Sequence
gaccatagcaactcctgtactctac

SEQ ID NO: 89824 - DNA, 25 bp, Probe Sequence
gttccacttcctaatactatacctt

SEQ ID NO: 89825 - DNA, 25 bp, Probe Sequence
accatagcaactcctgtactctact

SEQ ID NO: 89826 - DNA, 25 bp, Probe Sequence
agaccatagcaactcctgtactcta

SEQ ID NO: 89827 - DNA, 25 bp, Probe Sequence
cacttcctaatactataccttcggg

SEQ ID NO: 89828 - DNA, 25 bp, Probe Sequence
aatattcagaccatagcaactcctg

SEQ ID NO: 89829 - DNA, 25 bp, Probe Sequence
ggttccacttcctaatactatacct

SEQ ID NO: 89830 - DNA, 25 bp, Probe Sequence
aggttccacttcctaatactatacc

SEQ ID NO: 89831 - DNA, 25 bp, Probe Sequence
ttccacttcctaatactataccttc

SEQ ID NO: 89832 - DNA, 25 bp, Probe Sequence
ttcataagatggttgcattctagct

SEQ ID NO: 89833 - DNA, 25 bp, Probe Sequence
ataagattcacttgaactaacaacg

SEQ ID NO: 89834 - DNA, 25 bp, Probe Sequence
aactcactggtttcataagatggtt

SEQ ID NO: 89835 - DNA, 25 bp, Probe Sequence
tcataagatggttgcattctagctg

SEQ ID NO: 89836 - DNA, 25 bp, Probe Sequence
actcactggtttcataagatggttg

SEQ ID NO: 89837 - DNA, 25 bp, Probe Sequence
caactcactggtttcataagatggt

SEQ ID NO: 89838 - DNA, 25 bp, Probe Sequence
ttcacttgaactaacaacgtaagaa

SEQ ID NO: 89839 - DNA, 25 bp, Probe Sequence
attcagaccatagcaactcctgtac

SEQ ID NO: 89840 - DNA, 25 bp, Probe Sequence
atccttacttctcttccttctctcc

SEQ ID NO: 89841 - DNA, 25 bp, Probe Sequence
tctcttccttctctccttaatgaca

SEQ ID NO: 89842 - DNA, 25 bp, Probe Sequence
ctcttccttctctccttaatgacat

SEQ ID NO: 89843 - DNA, 25 bp, Probe Sequence
ttctcttccttctctccttaatgac

SEQ ID NO: 89844 - DNA, 25 bp, Probe Sequence
acttctcttccttctctccttaatg

SEQ ID NO: 89845 - DNA, 25 bp, Probe Sequence
aatccttacttctcttccttctctc

SEQ ID NO: 89846 - DNA, 25 bp, Probe Sequence
ccttacttctcttccttctctcctt

SEQ ID NO: 89847 - DNA, 25 bp, Probe Sequence
cttctcttccttctctccttaatga

SEQ ID NO: 89848 - DNA, 25 bp, Probe Sequence
cattaacactattctcaccagacct

SEQ ID NO: 89849 - DNA, 25 bp, Probe Sequence
attaacactattctcaccagacctc

SEQ ID NO: 89850 - DNA, 25 bp, Probe Sequence
acattaacactattctcaccagacc

SEQ ID NO: 89851 - DNA, 25 bp, Probe Sequence
actatccatcctcatcctagcaata

SEQ ID NO: 89852 - DNA, 25 bp, Probe Sequence
tactatccatcctcatcctagcaat

SEQ ID NO: 89853 - DNA, 25 bp, Probe Sequence
attactatccatcctcatcctagca

SEQ ID NO: 89854 - DNA, 25 bp, Probe Sequence
atccatcctcatcctagcaataatc

SEQ ID NO: 89855 - DNA, 25 bp, Probe Sequence
ttactatccatcctcatcctagcaa

SEQ ID NO: 89856 - DNA, 25 bp, Probe Sequence
cttacttctcttccttctctcctta

SEQ ID NO: 89857 - DNA, 25 bp, Probe Sequence
gacattaacactattctcaccagac

SEQ ID NO: 89858 - DNA, 25 bp, Probe Sequence
ctatccatcctcatcctagcaataa

SEQ ID NO: 89859 - DNA, 25 bp, Probe Sequence
tagcatccgtactatacttcacaac

SEQ ID NO: 89860 - DNA, 25 bp, Probe Sequence
gtagcatccgtactatacttcacaa

SEQ ID NO: 89861 - DNA, 25 bp, Probe Sequence
tgacattaacactattctcaccaga

SEQ ID NO: 89862 - DNA, 25 bp, Probe Sequence
tcttccttctctccttaatgacatt

SEQ ID NO: 89863 - DNA, 25 bp, Probe Sequence
tccttacttctcttccttctctcct

SEQ ID NO: 89864 - DNA, 25 bp, Probe Sequence
aagaagaagaaggaaagaagaggag

SEQ ID NO: 89865 - DNA, 25 bp, Probe Sequence
caagaagaagaaggaaagaagagga

SEQ ID NO: 89866 - DNA, 25 bp, Probe Sequence
agaagaagaaggaaagaagaggagg

SEQ ID NO: 89867 - DNA, 25 bp, Probe Sequence
gcaagaagaagaaggaaagaagagg

SEQ ID NO: 89868 - DNA, 25 bp, Probe Sequence
ggcaagaagaagaaggaaagaagag

SEQ ID NO: 89869 - DNA, 25 bp, Probe Sequence
gaagaagaaggaaagaagaggaggg

SEQ ID NO: 89870 - DNA, 25 bp, Probe Sequence
gggcaagaagaagaaggaaagaaga

SEQ ID NO: 89871 - DNA, 25 bp, Probe Sequence
tgggcaagaagaagaaggaaagaag

SEQ ID NO: 89872 - DNA, 25 bp, Probe Sequence
ctgggcaagaagaagaaggaaagaa

SEQ ID NO: 89873 - DNA, 25 bp, Probe Sequence
aagaagaaggaaagaagaggagggg

SEQ ID NO: 89874 - DNA, 25 bp, Probe Sequence
cctgggcaagaagaagaaggaaaga

SEQ ID NO: 89875 - DNA, 25 bp, Probe Sequence
tcctgggcaagaagaagaaggaaag

SEQ ID NO: 89876 - DNA, 25 bp, Probe Sequence
ctcctgggcaagaagaagaaggaaa

SEQ ID NO: 89877 - DNA, 25 bp, Probe Sequence
tctcctgggcaagaagaagaaggaa

SEQ ID NO: 89878 - DNA, 25 bp, Probe Sequence
aagaagaagaaggaaagaagaggag

SEQ ID NO: 89879 - DNA, 25 bp, Probe Sequence
caagaagaagaaggaaagaagagga

SEQ ID NO: 89880 - DNA, 25 bp, Probe Sequence
agaagaagaaggaaagaagaggagg

SEQ ID NO: 89881 - DNA, 25 bp, Probe Sequence
gcaagaagaagaaggaaagaagagg

SEQ ID NO: 89882 - DNA, 25 bp, Probe Sequence
ggcaagaagaagaaggaaagaagag

SEQ ID NO: 89883 - DNA, 25 bp, Probe Sequence
gaagaagaaggaaagaagaggaggg

SEQ ID NO: 89884 - DNA, 25 bp, Probe Sequence
gggcaagaagaagaaggaaagaaga

SEQ ID NO: 89885 - DNA, 25 bp, Probe Sequence
tgggcaagaagaagaaggaaagaag

SEQ ID NO: 89886 - DNA, 25 bp, Probe Sequence
ctgggcaagaagaagaaggaaagaa

SEQ ID NO: 89887 - DNA, 25 bp, Probe Sequence
aagaagaaggaaagaagaggagggg

SEQ ID NO: 89888 - DNA, 25 bp, Probe Sequence
cctgggcaagaagaagaaggaaaga

SEQ ID NO: 89889 - DNA, 25 bp, Probe Sequence
tcctgggcaagaagaagaaggaaag

SEQ ID NO: 89890 - DNA, 25 bp, Probe Sequence
ctcctgggcaagaagaagaaggaaa

SEQ ID NO: 89891 - DNA, 25 bp, Probe Sequence
tctcctgggcaagaagaagaaggaa

SEQ ID NO: 89892 - DNA, 25 bp, Probe Sequence
cattgactgctatatggttcggtag

SEQ ID NO: 89893 - DNA, 25 bp, Probe Sequence
attgactgctatatggttcggtagg

SEQ ID NO: 89894 - DNA, 25 bp, Probe Sequence
ctatatggttcggtaggctgtgtac

SEQ ID NO: 89895 - DNA, 25 bp, Probe Sequence
gctatatggttcggtaggctgtgta

SEQ ID NO: 89896 - DNA, 25 bp, Probe Sequence
tgtgtacggtgggaggtctatataa

SEQ ID NO: 89897 - DNA, 25 bp, Probe Sequence
ctgtgtacggtgggaggtctatata

SEQ ID NO: 89898 - DNA, 25 bp, Probe Sequence
tatatggttcggtaggctgtgtacg

SEQ ID NO: 89899 - DNA, 25 bp, Probe Sequence
ttgactgctatatggttcggtaggc

SEQ ID NO: 89900 - DNA, 25 bp, Probe Sequence
acaggaaacagctatgatccattag

SEQ ID NO: 89901 - DNA, 25 bp, Probe Sequence
cacaggaaacagctatgatccatta

SEQ ID NO: 89902 - DNA, 25 bp, Probe Sequence
caggaaacagctatgatccattagg

SEQ ID NO: 89903 - DNA, 25 bp, Probe Sequence
gttttgacctccatagaagacactc

SEQ ID NO: 89904 - DNA, 25 bp, Probe Sequence
gactgctatatggttcggtaggctg

SEQ ID NO: 89905 - DNA, 25 bp, Probe Sequence
atttcacacaggaaacagctatgat

SEQ ID NO: 89906 - DNA, 25 bp, Probe Sequence
tttgacctccatagaagacactcgg

SEQ ID NO: 89907 - DNA, 25 bp, Probe Sequence
ctgctatatggttcggtaggctgtg

SEQ ID NO: 89908 - DNA, 25 bp, Probe Sequence
aaatttctcttctggaaacaccaaa

SEQ ID NO: 89909 - DNA, 25 bp, Probe Sequence
tttcacacaggaaacagctatgatc

SEQ ID NO: 89910 - DNA, 25 bp, Probe Sequence
tttccaaaatgtctgtaacaactgc

SEQ ID NO: 89911 - DNA, 25 bp, Probe Sequence
actttccaaaatgtctgtaacaact

SEQ ID NO: 89912 - DNA, 25 bp, Probe Sequence
gttatcgatgtacctagaagtatgt

SEQ ID NO: 89913 - DNA, 25 bp, Probe Sequence
ctttccaaaatgtctgtaacaactg

SEQ ID NO: 89914 - DNA, 25 bp, Probe Sequence
acacaggaaacagctatgatccatt

SEQ ID NO: 89915 - DNA, 25 bp, Probe Sequence
tgactgctatatggttcggtaggct

SEQ ID NO: 89916 - DNA, 25 bp, Probe Sequence
gacacaactcttaccagtagtgctg

SEQ ID NO: 89917 - DNA, 25 bp, Probe Sequence
ctttcttaggttgattcagggaggg

SEQ ID NO: 89918 - DNA, 25 bp, Probe Sequence
aactcttaccagtagtgctgctctt

SEQ ID NO: 89919 - DNA, 25 bp, Probe Sequence
tttcttaggttgattcagggaggga

SEQ ID NO: 89920 - DNA, 25 bp, Probe Sequence
ttcttaggttgattcagggagggaa

SEQ ID NO: 89921 - DNA, 25 bp, Probe Sequence
actcttaccagtagtgctgctcttc

SEQ ID NO: 89922 - DNA, 25 bp, Probe Sequence
cctttcttaggttgattcagggagg

SEQ ID NO: 89923 - DNA, 25 bp, Probe Sequence
tcttaggttgattcagggagggaag

SEQ ID NO: 89924 - DNA, 25 bp, Probe Sequence
caacacggtgaaactccatctctac

SEQ ID NO: 89925 - DNA, 25 bp, Probe Sequence
caactcttaccagtagtgctgctct

SEQ ID NO: 89926 - DNA, 25 bp, Probe Sequence
ggacacaactcttaccagtagtgct

SEQ ID NO: 89927 - DNA, 25 bp, Probe Sequence
ctttctcttcccctgttccaaatac

SEQ ID NO: 89928 - DNA, 25 bp, Probe Sequence
actttctcttcccctgttccaaata

SEQ ID NO: 89929 - DNA, 25 bp, Probe Sequence
ctgagtgactccaaggagattgttt

SEQ ID NO: 89930 - DNA, 25 bp, Probe Sequence
ggtgaaactccatctctactaaaat

SEQ ID NO: 89931 - DNA, 25 bp, Probe Sequence
acaactcttaccagtagtgctgctc

SEQ ID NO: 89932 - DNA, 25 bp, Probe Sequence
tttaatgtgatctcctggcattgga

SEQ ID NO: 89933 - DNA, 25 bp, Probe Sequence
cttaccagtagtgctgctcttcctc

SEQ ID NO: 89934 - DNA, 25 bp, Probe Sequence
ctcttaccagtagtgctgctcttcc

SEQ ID NO: 89935 - DNA, 25 bp, Probe Sequence
actctggaaccgtgtacatctaaga

SEQ ID NO: 89936 - DNA, 25 bp, Probe Sequence
cacaactcttaccagtagtgctgct

SEQ ID NO: 89937 - DNA, 25 bp, Probe Sequence
tttctcttcccctgttccaaatacc

SEQ ID NO: 89938 - DNA, 25 bp, Probe Sequence
caaaggttttaatgtgatctcctgg

SEQ ID NO: 89939 - DNA, 25 bp, Probe Sequence
ccaaaggttttaatgtgatctcctg

SEQ ID NO: 89940 - DNA, 25 bp, Probe Sequence
agttgcgattaggatagccatacat

SEQ ID NO: 89941 - DNA, 25 bp, Probe Sequence
taccaacagtgtcaatgtcaatgtc

SEQ ID NO: 89942 - DNA, 25 bp, Probe Sequence
gttgcgattaggatagccatacatg

SEQ ID NO: 89943 - DNA, 25 bp, Probe Sequence
cagttgcgattaggatagccataca

SEQ ID NO: 89944 - DNA, 25 bp, Probe Sequence
gtaccaacagtgtcaatgtcaatgt

SEQ ID NO: 89945 - DNA, 25 bp, Probe Sequence
tgtaccaacagtgtcaatgtcaatg

SEQ ID NO: 89946 - DNA, 25 bp, Probe Sequence
aagctgagagttattacaccagatc

SEQ ID NO: 89947 - DNA, 25 bp, Probe Sequence
gaagctgagagttattacaccagat

SEQ ID NO: 89948 - DNA, 25 bp, Probe Sequence
ccagttgcgattaggatagccatac

SEQ ID NO: 89949 - DNA, 25 bp, Probe Sequence
ccaacagtgtcaatgtcaatgtcag

SEQ ID NO: 89950 - DNA, 25 bp, Probe Sequence
actggaagctgagagttattacacc

SEQ ID NO: 89951 - DNA, 25 bp, Probe Sequence
caacagtgtcaatgtcaatgtcagc

SEQ ID NO: 89952 - DNA, 25 bp, Probe Sequence
accaacagtgtcaatgtcaatgtca

SEQ ID NO: 89953 - DNA, 25 bp, Probe Sequence
ggaagctgagagttattacaccaga

SEQ ID NO: 89954 - DNA, 25 bp, Probe Sequence
cgattaggatagccatacatggagg

SEQ ID NO: 89955 - DNA, 25 bp, Probe Sequence
aacagtgtcaatgtcaatgtcagca

SEQ ID NO: 89956 - DNA, 25 bp, Probe Sequence
tggaagctgagagttattacaccag

SEQ ID NO: 89957 - DNA, 25 bp, Probe Sequence
ctggaagctgagagttattacacca

SEQ ID NO: 89958 - DNA, 25 bp, Probe Sequence
tccagttgcgattaggatagccata

SEQ ID NO: 89959 - DNA, 25 bp, Probe Sequence
ttgcgattaggatagccatacatgg

SEQ ID NO: 89960 - DNA, 25 bp, Probe Sequence
tcaactggaagctgagagttattac

SEQ ID NO: 89961 - DNA, 25 bp, Probe Sequence
aactggaagctgagagttattacac

SEQ ID NO: 89962 - DNA, 25 bp, Probe Sequence
caactggaagctgagagttattaca

SEQ ID NO: 89963 - DNA, 25 bp, Probe Sequence
atcaactggaagctgagagttatta

SEQ ID NO: 89964 - DNA, 25 bp, Probe Sequence
tgtacttggcaatatcctcatactt

SEQ ID NO: 89965 - DNA, 25 bp, Probe Sequence
atgtacttggcaatatcctcatact

SEQ ID NO: 89966 - DNA, 25 bp, Probe Sequence
catgtacttggcaatatcctcatac

SEQ ID NO: 89967 - DNA, 25 bp, Probe Sequence
gcatgtacttggcaatatcctcata

SEQ ID NO: 89968 - DNA, 25 bp, Probe Sequence
gagtcatagaaacatacagcacaac

SEQ ID NO: 89969 - DNA, 25 bp, Probe Sequence
tgagtcatagaaacatacagcacaa

SEQ ID NO: 89970 - DNA, 25 bp, Probe Sequence
acttggcaatatcctcatactttcc

SEQ ID NO: 89971 - DNA, 25 bp, Probe Sequence
tgcttctctagtatctgtttaggga

SEQ ID NO: 89972 - DNA, 25 bp, Probe Sequence
atgcttctctagtatctgtttaggg

SEQ ID NO: 89973 - DNA, 25 bp, Probe Sequence
gtcaaatggtagtgctcaagagaaa

SEQ ID NO: 89974 - DNA, 25 bp, Probe Sequence
agtcatagaaacatacagcacaact

SEQ ID NO: 89975 - DNA, 25 bp, Probe Sequence
ggcaatatcctcatactttccaaag

SEQ ID NO: 89976 - DNA, 25 bp, Probe Sequence
gcttctctagtatctgtttagggaa

SEQ ID NO: 89977 - DNA, 25 bp, Probe Sequence
tacttggcaatatcctcatactttc

SEQ ID NO: 89978 - DNA, 25 bp, Probe Sequence
atgagtcatagaaacatacagcaca

SEQ ID NO: 89979 - DNA, 25 bp, Probe Sequence
atgctgtttcattcctttgggtaag

SEQ ID NO: 89980 - DNA, 25 bp, Probe Sequence
gatgctgtttcattcctttgggtaa

SEQ ID NO: 89981 - DNA, 25 bp, Probe Sequence
acatgagtcatagaaacatacagca

SEQ ID NO: 89982 - DNA, 25 bp, Probe Sequence
atatcatggtcatttgtaggcatca

SEQ ID NO: 89983 - DNA, 25 bp, Probe Sequence
catgagtcatagaaacatacagcac

SEQ ID NO: 89984 - DNA, 25 bp, Probe Sequence
gtcatagaaacatacagcacaactg

SEQ ID NO: 89985 - DNA, 25 bp, Probe Sequence
gacgtgaataacatgagtcatagaa

SEQ ID NO: 89986 - DNA, 25 bp, Probe Sequence
gtacttggcaatatcctcatacttt

SEQ ID NO: 89987 - DNA, 25 bp, Probe Sequence
aacatgagtcatagaaacatacagc

SEQ ID NO: 89988 - DNA, 25 bp, Probe Sequence
aataaaccatgatcttgaaagtgcc

SEQ ID NO: 89989 - DNA, 25 bp, Probe Sequence
ataaaccatgatcttgaaagtgcca

SEQ ID NO: 89990 - DNA, 25 bp, Probe Sequence
aaataaaccatgatcttgaaagtgc

SEQ ID NO: 89991 - DNA, 25 bp, Probe Sequence
taaaccatgatcttgaaagtgccaa

SEQ ID NO: 89992 - DNA, 25 bp, Probe Sequence
aaaccatgatcttgaaagtgccaaa

SEQ ID NO: 89993 - DNA, 25 bp, Probe Sequence
aaccatgatcttgaaagtgccaaaa

SEQ ID NO: 89994 - DNA, 25 bp, Probe Sequence
taaataaaccatgatcttgaaagtg

SEQ ID NO: 89995 - DNA, 25 bp, Probe Sequence
tagagcttgaattttaagggattcc

SEQ ID NO: 89996 - DNA, 25 bp, Probe Sequence
ctagagcttgaattttaagggattc

SEQ ID NO: 89997 - DNA, 25 bp, Probe Sequence
tctagagcttgaattttaagggatt

SEQ ID NO: 89998 - DNA, 25 bp, Probe Sequence
agagcttgaattttaagggattccc

SEQ ID NO: 89999 - DNA, 25 bp, Probe Sequence
gggattccctaatatgtatactatc

SEQ ID NO: 90000 - DNA, 25 bp, Probe Sequence
attaagtttctcttgtcttggcatc

SEQ ID NO: 90001 - DNA, 25 bp, Probe Sequence
ttaagtttctcttgtcttggcatca

SEQ ID NO: 90002 - DNA, 25 bp, Probe Sequence
agatcataattctcacctacttctg

SEQ ID NO: 90003 - DNA, 25 bp, Probe Sequence
gatcataattctcacctacttctga

SEQ ID NO: 90004 - DNA, 25 bp, Probe Sequence
taagtttctcttgtcttggcatcaa

SEQ ID NO: 90005 - DNA, 25 bp, Probe Sequence
aattaagtttctcttgtcttggcat

SEQ ID NO: 90006 - DNA, 25 bp, Probe Sequence
ctgactcacattagtgccagttagt

SEQ ID NO: 90007 - DNA, 25 bp, Probe Sequence
atgtaaacatctgattctggaatgc

SEQ ID NO: 90008 - DNA, 25 bp, Probe Sequence
tgactcacattagtgccagttagtg

SEQ ID NO: 90009 - DNA, 25 bp, Probe Sequence
ttctttctgtcttggaatgtaaaca

SEQ ID NO: 90010 - DNA, 25 bp, Probe Sequence
cagttagtgccttcggtgtaagatc

SEQ ID NO: 90011 - DNA, 25 bp, Probe Sequence
caacagttgctgactcacattagtg

SEQ ID NO: 90012 - DNA, 25 bp, Probe Sequence
tctgtcttggaatgtaaacatctga

SEQ ID NO: 90013 - DNA, 25 bp, Probe Sequence
atcttctcatcagccctcaatttgt

SEQ ID NO: 90014 - DNA, 25 bp, Probe Sequence
gatcttctcatcagccctcaatttg

SEQ ID NO: 90015 - DNA, 25 bp, Probe Sequence
ttctgtcttggaatgtaaacatctg

SEQ ID NO: 90016 - DNA, 25 bp, Probe Sequence
ttccaacagttgctgactcacatta

SEQ ID NO: 90017 - DNA, 25 bp, Probe Sequence
ctgtcttggaatgtaaacatctgat

SEQ ID NO: 90018 - DNA, 25 bp, Probe Sequence
taattaagtttctcttgtcttggca

SEQ ID NO: 90019 - DNA, 25 bp, Probe Sequence
tgtcttggaatgtaaacatctgatt

SEQ ID NO: 90020 - DNA, 25 bp, Probe Sequence
cttattgggtgccatttgatattca

SEQ ID NO: 90021 - DNA, 25 bp, Probe Sequence
tttctgtcttggaatgtaaacatct

SEQ ID NO: 90022 - DNA, 25 bp, Probe Sequence
tctttctgtcttggaatgtaaacat

SEQ ID NO: 90023 - DNA, 25 bp, Probe Sequence
gcttattgggtgccatttgatattc

SEQ ID NO: 90024 - DNA, 25 bp, Probe Sequence
cgtattattcatcgctattacctgg

SEQ ID NO: 90025 - DNA, 25 bp, Probe Sequence
gaacacattacgatggatgatggaa

SEQ ID NO: 90026 - DNA, 25 bp, Probe Sequence
ttattcatcgctattacctggtgat

SEQ ID NO: 90027 - DNA, 25 bp, Probe Sequence
attattcatcgctattacctggtga

SEQ ID NO: 90028 - DNA, 25 bp, Probe Sequence
ctgaacacattacgatggatgatgg

SEQ ID NO: 90029 - DNA, 25 bp, Probe Sequence
tattcatcgctattacctggtgatc

SEQ ID NO: 90030 - DNA, 25 bp, Probe Sequence
tattattcatcgctattacctggtg

SEQ ID NO: 90031 - DNA, 25 bp, Probe Sequence
gtattattcatcgctattacctggt

SEQ ID NO: 90032 - DNA, 25 bp, Probe Sequence
tgaacacattacgatggatgatgga

SEQ ID NO: 90033 - DNA, 25 bp, Probe Sequence
ccgaataatatcctggaagttatca

SEQ ID NO: 90034 - DNA, 25 bp, Probe Sequence
gctgaacacattacgatggatgatg

SEQ ID NO: 90035 - DNA, 25 bp, Probe Sequence
acataagactatccagaaatcccag

SEQ ID NO: 90036 - DNA, 25 bp, Probe Sequence
aacataagactatccagaaatccca

SEQ ID NO: 90037 - DNA, 25 bp, Probe Sequence
tacgatggatgatggaaacataaga

SEQ ID NO: 90038 - DNA, 25 bp, Probe Sequence
acattacgatggatgatggaaacat

SEQ ID NO: 90039 - DNA, 25 bp, Probe Sequence
cgatggatgatggaaacataagact

SEQ ID NO: 90040 - DNA, 25 bp, Probe Sequence
attcatcgctattacctggtgatcc

SEQ ID NO: 90041 - DNA, 25 bp, Probe Sequence
aacacattacgatggatgatggaaa

SEQ ID NO: 90042 - DNA, 25 bp, Probe Sequence
acgtattattcatcgctattacctg

SEQ ID NO: 90043 - DNA, 25 bp, Probe Sequence
acgatggatgatggaaacataagac

SEQ ID NO: 90044 - DNA, 25 bp, Probe Sequence
ttacgatggatgatggaaacataag

SEQ ID NO: 90045 - DNA, 25 bp, Probe Sequence
cattacgatggatgatggaaacata

SEQ ID NO: 90046 - DNA, 25 bp, Probe Sequence
ataagactatccagaaatcccagtg

SEQ ID NO: 90047 - DNA, 25 bp, Probe Sequence
cataagactatccagaaatcccagt

SEQ ID NO: 90048 - DNA, 25 bp, Probe Sequence
atcccagcctcttagtaaatgaatc

SEQ ID NO: 90049 - DNA, 25 bp, Probe Sequence
ggaaccaacagaattatataggtgc

SEQ ID NO: 90050 - DNA, 25 bp, Probe Sequence
ttacaaaccataaatcccacacaga

SEQ ID NO: 90051 - DNA, 25 bp, Probe Sequence
tacaaaccataaatcccacacagat

SEQ ID NO: 90052 - DNA, 25 bp, Probe Sequence
ttatcccagcctcttagtaaatgaa

SEQ ID NO: 90053 - DNA, 25 bp, Probe Sequence
gcagaagaattgggtatttggtatc

SEQ ID NO: 90054 - DNA, 25 bp, Probe Sequence
ccagcctcttagtaaatgaatcgtt

SEQ ID NO: 90055 - DNA, 25 bp, Probe Sequence
tatcccagcctcttagtaaatgaat

SEQ ID NO: 90056 - DNA, 25 bp, Probe Sequence
attatcccagcctcttagtaaatga

SEQ ID NO: 90057 - DNA, 25 bp, Probe Sequence
gttacaaaccataaatcccacacag

SEQ ID NO: 90058 - DNA, 25 bp, Probe Sequence
gattatcccagcctcttagtaaatg

SEQ ID NO: 90059 - DNA, 25 bp, Probe Sequence
cagcctcttagtaaatgaatcgtta

SEQ ID NO: 90060 - DNA, 25 bp, Probe Sequence
gaaccaacagaattatataggtgct

SEQ ID NO: 90061 - DNA, 25 bp, Probe Sequence
cagaagaattgggtatttggtatca

SEQ ID NO: 90062 - DNA, 25 bp, Probe Sequence
aaccaacagaattatataggtgctt

SEQ ID NO: 90063 - DNA, 25 bp, Probe Sequence
cagggaaccaacagaattatatagg

SEQ ID NO: 90064 - DNA, 25 bp, Probe Sequence
tgttacaaaccataaatcccacaca

SEQ ID NO: 90065 - DNA, 25 bp, Probe Sequence
aattcttgattatgtaggtagtggg

SEQ ID NO: 90066 - DNA, 25 bp, Probe Sequence
tcccagcctcttagtaaatgaatcg

SEQ ID NO: 90067 - DNA, 25 bp, Probe Sequence
agaagaattgggtatttggtatcat

SEQ ID NO: 90068 - DNA, 25 bp, Probe Sequence
cccagcctcttagtaaatgaatcgt

SEQ ID NO: 90069 - DNA, 25 bp, Probe Sequence
ttgttacaaaccataaatcccacac

SEQ ID NO: 90070 - DNA, 25 bp, Probe Sequence
gcctcttagtaaatgaatcgttacc

SEQ ID NO: 90071 - DNA, 25 bp, Probe Sequence
tgtgatcctggtacatttcataagc

SEQ ID NO: 90072 - DNA, 25 bp, Probe Sequence
taggcttgtaggatgtcttagaatc

SEQ ID NO: 90073 - DNA, 25 bp, Probe Sequence
tattcacacagaacacattcagagt

SEQ ID NO: 90074 - DNA, 25 bp, Probe Sequence
actattcacacagaacacattcaga

SEQ ID NO: 90075 - DNA, 25 bp, Probe Sequence
cactattcacacagaacacattcag

SEQ ID NO: 90076 - DNA, 25 bp, Probe Sequence
ctattcacacagaacacattcagag

SEQ ID NO: 90077 - DNA, 25 bp, Probe Sequence
ggcttgtaggatgtcttagaatcat

SEQ ID NO: 90078 - DNA, 25 bp, Probe Sequence
aggcttgtaggatgtcttagaatca

SEQ ID NO: 90079 - DNA, 25 bp, Probe Sequence
actaggcttgtaggatgtcttagaa

SEQ ID NO: 90080 - DNA, 25 bp, Probe Sequence
tactaggcttgtaggatgtcttaga

SEQ ID NO: 90081 - DNA, 25 bp, Probe Sequence
atgatactaggcttgtaggatgtct

SEQ ID NO: 90082 - DNA, 25 bp, Probe Sequence
aatgatactaggcttgtaggatgtc

SEQ ID NO: 90083 - DNA, 25 bp, Probe Sequence
attcacacagaacacattcagagtt

SEQ ID NO: 90084 - DNA, 25 bp, Probe Sequence
ctaggcttgtaggatgtcttagaat

SEQ ID NO: 90085 - DNA, 25 bp, Probe Sequence
tgatactaggcttgtaggatgtctt

SEQ ID NO: 90086 - DNA, 25 bp, Probe Sequence
atactaggcttgtaggatgtcttag

SEQ ID NO: 90087 - DNA, 25 bp, Probe Sequence
gatactaggcttgtaggatgtctta

SEQ ID NO: 90088 - DNA, 25 bp, Probe Sequence
agcactattcacacagaacacattc

SEQ ID NO: 90089 - DNA, 25 bp, Probe Sequence
gagcactattcacacagaacacatt

SEQ ID NO: 90090 - DNA, 25 bp, Probe Sequence
taatgatactaggcttgtaggatgt

SEQ ID NO: 90091 - DNA, 25 bp, Probe Sequence
gcactattcacacagaacacattca

SEQ ID NO: 90092 - DNA, 25 bp, Probe Sequence
gcttgtaggatgtcttagaatcatg

SEQ ID NO: 90093 - DNA, 25 bp, Probe Sequence
ttaatgatactaggcttgtaggatg

SEQ ID NO: 90094 - DNA, 25 bp, Probe Sequence
cttgtaggatgtcttagaatcatgt

SEQ ID NO: 90095 - DNA, 25 bp, Probe Sequence
gtgtgtgcaagatattaatgtggtc

SEQ ID NO: 90096 - DNA, 25 bp, Probe Sequence
tatccaacacagtagtagtaggctc

SEQ ID NO: 90097 - DNA, 25 bp, Probe Sequence
ctatccaacacagtagtagtaggct

SEQ ID NO: 90098 - DNA, 25 bp, Probe Sequence
aactatccaacacagtagtagtagg

SEQ ID NO: 90099 - DNA, 25 bp, Probe Sequence
actatccaacacagtagtagtaggc

SEQ ID NO: 90100 - DNA, 25 bp, Probe Sequence
aaccgaatttaactatccaacacag

SEQ ID NO: 90101 - DNA, 25 bp, Probe Sequence
atccaacacagtagtagtaggctcc

SEQ ID NO: 90102 - DNA, 25 bp, Probe Sequence
gctccgaatataatgctccatatat

SEQ ID NO: 90103 - DNA, 25 bp, Probe Sequence
tcctcctacctcagcctcataagta

SEQ ID NO: 90104 - DNA, 25 bp, Probe Sequence
accgaatttaactatccaacacagt

SEQ ID NO: 90105 - DNA, 25 bp, Probe Sequence
taaccgaatttaactatccaacaca

SEQ ID NO: 90106 - DNA, 25 bp, Probe Sequence
tcggaacatcacatctaagggattt

SEQ ID NO: 90107 - DNA, 25 bp, Probe Sequence
gtaaccgaatttaactatccaacac

SEQ ID NO: 90108 - DNA, 25 bp, Probe Sequence
ccgaatttaactatccaacacagta

SEQ ID NO: 90109 - DNA, 25 bp, Probe Sequence
tgtttgctatgtaaccgaatttaac

SEQ ID NO: 90110 - DNA, 25 bp, Probe Sequence
ctcggaacatcacatctaagggatt

SEQ ID NO: 90111 - DNA, 25 bp, Probe Sequence
gatcctcctacctcagcctcataag

SEQ ID NO: 90112 - DNA, 25 bp, Probe Sequence
gtttgctatgtaaccgaatttaact

SEQ ID NO: 90113 - DNA, 25 bp, Probe Sequence
tgtaaccgaatttaactatccaaca

SEQ ID NO: 90114 - DNA, 25 bp, Probe Sequence
atcctcctacctcagcctcataagt

SEQ ID NO: 90115 - DNA, 25 bp, Probe Sequence
gctatgtaaccgaatttaactatcc

SEQ ID NO: 90116 - DNA, 25 bp, Probe Sequence
taagctactgcatctggcctataat

SEQ ID NO: 90117 - DNA, 25 bp, Probe Sequence
catagctccgaatataatgctccat

SEQ ID NO: 90118 - DNA, 25 bp, Probe Sequence
cgtgatttaaacatagctccgaata

SEQ ID NO: 90119 - DNA, 25 bp, Probe Sequence
aacatagctccgaatataatgctcc

SEQ ID NO: 90120 - DNA, 25 bp, Probe Sequence
aatgaagaaggtgttatgtctggct

SEQ ID NO: 90121 - DNA, 25 bp, Probe Sequence
aagaaggtgttatgtctggctgtag

SEQ ID NO: 90122 - DNA, 25 bp, Probe Sequence
gaagaaggtgttatgtctggctgta

SEQ ID NO: 90123 - DNA, 25 bp, Probe Sequence
tataacattcacctggctgtcaact

SEQ ID NO: 90124 - DNA, 25 bp, Probe Sequence
gtataacattcacctggctgtcaac

SEQ ID NO: 90125 - DNA, 25 bp, Probe Sequence
tgtataacattcacctggctgtcaa

SEQ ID NO: 90126 - DNA, 25 bp, Probe Sequence
cttgtgtataacattcacctggctg

SEQ ID NO: 90127 - DNA, 25 bp, Probe Sequence
gttccaaatgaagaaggtgttatgt

SEQ ID NO: 90128 - DNA, 25 bp, Probe Sequence
caagttccaaatgaagaaggtgtta

SEQ ID NO: 90129 - DNA, 25 bp, Probe Sequence
ttccaaatgaagaaggtgttatgtc

SEQ ID NO: 90130 - DNA, 25 bp, Probe Sequence
agttccaaatgaagaaggtgttatg

SEQ ID NO: 90131 - DNA, 25 bp, Probe Sequence
atgaagaaggtgttatgtctggctg

SEQ ID NO: 90132 - DNA, 25 bp, Probe Sequence
caaatgaagaaggtgttatgtctgg

SEQ ID NO: 90133 - DNA, 25 bp, Probe Sequence
ccaaatgaagaaggtgttatgtctg

SEQ ID NO: 90134 - DNA, 25 bp, Probe Sequence
tccaaatgaagaaggtgttatgtct

SEQ ID NO: 90135 - DNA, 25 bp, Probe Sequence
gaagtccacaatcaagttccaaatg

SEQ ID NO: 90136 - DNA, 25 bp, Probe Sequence
atgagcttgtgtataacattcacct

SEQ ID NO: 90137 - DNA, 25 bp, Probe Sequence
gatgagcttgtgtataacattcacc

SEQ ID NO: 90138 - DNA, 25 bp, Probe Sequence
cgatgagcttgtgtataacattcac

SEQ ID NO: 90139 - DNA, 25 bp, Probe Sequence
aatcaagttccaaatgaagaaggtg

SEQ ID NO: 90140 - DNA, 25 bp, Probe Sequence
caatcaagttccaaatgaagaaggt

SEQ ID NO: 90141 - DNA, 25 bp, Probe Sequence
acaatcaagttccaaatgaagaagg

SEQ ID NO: 90142 - DNA, 25 bp, Probe Sequence
aagttccaaatgaagaaggtgttat

SEQ ID NO: 90143 - DNA, 25 bp, Probe Sequence
ccacaatcaagttccaaatgaagaa

SEQ ID NO: 90144 - DNA, 25 bp, Probe Sequence
aatgaagaaggtgttatgtctggct

SEQ ID NO: 90145 - DNA, 25 bp, Probe Sequence
aagaaggtgttatgtctggctgtag

SEQ ID NO: 90146 - DNA, 25 bp, Probe Sequence
gaagaaggtgttatgtctggctgta

SEQ ID NO: 90147 - DNA, 25 bp, Probe Sequence
tataacattcacctggctgtcaact

SEQ ID NO: 90148 - DNA, 25 bp, Probe Sequence
gtataacattcacctggctgtcaac

SEQ ID NO: 90149 - DNA, 25 bp, Probe Sequence
tgtataacattcacctggctgtcaa

SEQ ID NO: 90150 - DNA, 25 bp, Probe Sequence
cttgtgtataacattcacctggctg

SEQ ID NO: 90151 - DNA, 25 bp, Probe Sequence
gttccaaatgaagaaggtgttatgt

SEQ ID NO: 90152 - DNA, 25 bp, Probe Sequence
caagttccaaatgaagaaggtgtta

SEQ ID NO: 90153 - DNA, 25 bp, Probe Sequence
ttccaaatgaagaaggtgttatgtc

SEQ ID NO: 90154 - DNA, 25 bp, Probe Sequence
agttccaaatgaagaaggtgttatg

SEQ ID NO: 90155 - DNA, 25 bp, Probe Sequence
atgaagaaggtgttatgtctggctg

SEQ ID NO: 90156 - DNA, 25 bp, Probe Sequence
caaatgaagaaggtgttatgtctgg

SEQ ID NO: 90157 - DNA, 25 bp, Probe Sequence
ccaaatgaagaaggtgttatgtctg

SEQ ID NO: 90158 - DNA, 25 bp, Probe Sequence
tccaaatgaagaaggtgttatgtct

SEQ ID NO: 90159 - DNA, 25 bp, Probe Sequence
gaagtccacaatcaagttccaaatg

SEQ ID NO: 90160 - DNA, 25 bp, Probe Sequence
atgagcttgtgtataacattcacct

SEQ ID NO: 90161 - DNA, 25 bp, Probe Sequence
gatgagcttgtgtataacattcacc

SEQ ID NO: 90162 - DNA, 25 bp, Probe Sequence
cgatgagcttgtgtataacattcac

SEQ ID NO: 90163 - DNA, 25 bp, Probe Sequence
aatcaagttccaaatgaagaaggtg

SEQ ID NO: 90164 - DNA, 25 bp, Probe Sequence
caatcaagttccaaatgaagaaggt

SEQ ID NO: 90165 - DNA, 25 bp, Probe Sequence
acaatcaagttccaaatgaagaagg

SEQ ID NO: 90166 - DNA, 25 bp, Probe Sequence
aagttccaaatgaagaaggtgttat

SEQ ID NO: 90167 - DNA, 25 bp, Probe Sequence
ccacaatcaagttccaaatgaagaa

SEQ ID NO: 90168 - DNA, 25 bp, Probe Sequence
caaccttagaccttcactcagatta

SEQ ID NO: 90169 - DNA, 25 bp, Probe Sequence
aaccttagaccttcactcagattag

SEQ ID NO: 90170 - DNA, 25 bp, Probe Sequence
accttagaccttcactcagattagt

SEQ ID NO: 90171 - DNA, 25 bp, Probe Sequence
agattccaaccttagaccttcactc

SEQ ID NO: 90172 - DNA, 25 bp, Probe Sequence
gagattccaaccttagaccttcact

SEQ ID NO: 90173 - DNA, 25 bp, Probe Sequence
aagttgtaagttcttaggatatgcc

SEQ ID NO: 90174 - DNA, 25 bp, Probe Sequence
ccaaccttagaccttcactcagatt

SEQ ID NO: 90175 - DNA, 25 bp, Probe Sequence
attccaaccttagaccttcactcag

SEQ ID NO: 90176 - DNA, 25 bp, Probe Sequence
gattccaaccttagaccttcactca

SEQ ID NO: 90177 - DNA, 25 bp, Probe Sequence
tccaaccttagaccttcactcagat

SEQ ID NO: 90178 - DNA, 25 bp, Probe Sequence
atcagaagctatctacttgaagtgc

SEQ ID NO: 90179 - DNA, 25 bp, Probe Sequence
ttccaaccttagaccttcactcaga

SEQ ID NO: 90180 - DNA, 25 bp, Probe Sequence
ctcacacaggataatacaggaaagt

SEQ ID NO: 90181 - DNA, 25 bp, Probe Sequence
cacacaggataatacaggaaagttg

SEQ ID NO: 90182 - DNA, 25 bp, Probe Sequence
tcacacaggataatacaggaaagtt

SEQ ID NO: 90183 - DNA, 25 bp, Probe Sequence
ctgctcacacaggataatacaggaa

SEQ ID NO: 90184 - DNA, 25 bp, Probe Sequence
aggaatcagaagctatctacttgaa

SEQ ID NO: 90185 - DNA, 25 bp, Probe Sequence
ttgtaagttcttaggatatgcccag

SEQ ID NO: 90186 - DNA, 25 bp, Probe Sequence
agttgtaagttcttaggatatgccc

SEQ ID NO: 90187 - DNA, 25 bp, Probe Sequence
cattctttactcaaggataacacgg

SEQ ID NO: 90188 - DNA, 25 bp, Probe Sequence
gttgtaagttcttaggatatgccca

SEQ ID NO: 90189 - DNA, 25 bp, Probe Sequence
gatattgtgtcagccaattccatag

SEQ ID NO: 90190 - DNA, 25 bp, Probe Sequence
agatattgtgtcagccaattccata

SEQ ID NO: 90191 - DNA, 25 bp, Probe Sequence
ggaatcagaagctatctacttgaag

SEQ ID NO: 90192 - DNA, 25 bp, Probe Sequence
gatgctcacagtaactcagagatta

SEQ ID NO: 90193 - DNA, 25 bp, Probe Sequence
tcacagtaactcagagattaccaac

SEQ ID NO: 90194 - DNA, 25 bp, Probe Sequence
ctcacagtaactcagagattaccaa

SEQ ID NO: 90195 - DNA, 25 bp, Probe Sequence
atgctcacagtaactcagagattac

SEQ ID NO: 90196 - DNA, 25 bp, Probe Sequence
cacagtaactcagagattaccaacc

SEQ ID NO: 90197 - DNA, 25 bp, Probe Sequence
ggatgctcacagtaactcagagatt

SEQ ID NO: 90198 - DNA, 25 bp, Probe Sequence
cacgcttatagaaatctcccactta

SEQ ID NO: 90199 - DNA, 25 bp, Probe Sequence
aaacaatgccacgcttatagaaatc

SEQ ID NO: 90200 - DNA, 25 bp, Probe Sequence
caaacaatgccacgcttatagaaat

SEQ ID NO: 90201 - DNA, 25 bp, Probe Sequence
acgcttatagaaatctcccacttat

SEQ ID NO: 90202 - DNA, 25 bp, Probe Sequence
tacaaacaatgccacgcttatagaa

SEQ ID NO: 90203 - DNA, 25 bp, Probe Sequence
gctcacagtaactcagagattacca

SEQ ID NO: 90204 - DNA, 25 bp, Probe Sequence
tgctcacagtaactcagagattacc

SEQ ID NO: 90205 - DNA, 25 bp, Probe Sequence
cttggaataaagaagaattgcctgt

SEQ ID NO: 90206 - DNA, 25 bp, Probe Sequence
ataaagaagaattgcctgtaatccc

SEQ ID NO: 90207 - DNA, 25 bp, Probe Sequence
aacaatgccacgcttatagaaatct

SEQ ID NO: 90208 - DNA, 25 bp, Probe Sequence
aactgtagcctggaaccacttacta

SEQ ID NO: 90209 - DNA, 25 bp, Probe Sequence
ccttggaataaagaagaattgcctg

SEQ ID NO: 90210 - DNA, 25 bp, Probe Sequence
ctacaaacaatgccacgcttataga

SEQ ID NO: 90211 - DNA, 25 bp, Probe Sequence
cgcttatagaaatctcccacttatt

SEQ ID NO: 90212 - DNA, 25 bp, Probe Sequence
acaatgccacgcttatagaaatctc

SEQ ID NO: 90213 - DNA, 25 bp, Probe Sequence
tggaataaagaagaattgcctgtaa

SEQ ID NO: 90214 - DNA, 25 bp, Probe Sequence
ttggaataaagaagaattgcctgta

SEQ ID NO: 90215 - DNA, 25 bp, Probe Sequence
acaaacaatgccacgcttatagaaa

SEQ ID NO: 90216 - DNA, 25 bp, Probe Sequence
ctacctcatatcaagccctcactat

SEQ ID NO: 90217 - DNA, 25 bp, Probe Sequence
aatgtgaagattacacggaatcatg

SEQ ID NO: 90218 - DNA, 25 bp, Probe Sequence
aaattgtttgctatctctcttccag

SEQ ID NO: 90219 - DNA, 25 bp, Probe Sequence
ttactcttcacacaagctcaatgag

SEQ ID NO: 90220 - DNA, 25 bp, Probe Sequence
atgtgaagattacacggaatcatgt

SEQ ID NO: 90221 - DNA, 25 bp, Probe Sequence
taaatataagaaggtgtgtctgcca

SEQ ID NO: 90222 - DNA, 25 bp, Probe Sequence
gttactcttcacacaagctcaatga

SEQ ID NO: 90223 - DNA, 25 bp, Probe Sequence
ttaagaatgaggagaatgcagcttc

SEQ ID NO: 90224 - DNA, 25 bp, Probe Sequence
aattgtttgctatctctcttccaga

SEQ ID NO: 90225 - DNA, 25 bp, Probe Sequence
gaaattgtttgctatctctcttcca

SEQ ID NO: 90226 - DNA, 25 bp, Probe Sequence
ctaaatataagaaggtgtgtctgcc

SEQ ID NO: 90227 - DNA, 25 bp, Probe Sequence
ctgttactcttcacacaagctcaat

SEQ ID NO: 90228 - DNA, 25 bp, Probe Sequence
tgtgaagattacacggaatcatgtc

SEQ ID NO: 90229 - DNA, 25 bp, Probe Sequence
ctgatgtcactttcttgtctttcaa

SEQ ID NO: 90230 - DNA, 25 bp, Probe Sequence
agaaattgtttgctatctctcttcc

SEQ ID NO: 90231 - DNA, 25 bp, Probe Sequence
tgttactcttcacacaagctcaatg

SEQ ID NO: 90232 - DNA, 25 bp, Probe Sequence
tgatgtcactttcttgtctttcaat

SEQ ID NO: 90233 - DNA, 25 bp, Probe Sequence
gaagattacacggaatcatgtcctg

SEQ ID NO: 90234 - DNA, 25 bp, Probe Sequence
acacacagaaattgtttgctatctc

SEQ ID NO: 90235 - DNA, 25 bp, Probe Sequence
gacacacagaaattgtttgctatct

SEQ ID NO: 90236 - DNA, 25 bp, Probe Sequence
agacacacagaaattgtttgctatc

SEQ ID NO: 90237 - DNA, 25 bp, Probe Sequence
cacacagaaattgtttgctatctct

SEQ ID NO: 90238 - DNA, 25 bp, Probe Sequence
acacagaaattgtttgctatctctc

SEQ ID NO: 90239 - DNA, 25 bp, Probe Sequence
aagacacacagaaattgtttgctat

SEQ ID NO: 90240 - DNA, 25 bp, Probe Sequence
tatatcaccagcaattccactccta

SEQ ID NO: 90241 - DNA, 25 bp, Probe Sequence
atcatactcagagaccataacacat

SEQ ID NO: 90242 - DNA, 25 bp, Probe Sequence
cgatgagataccacttcacatagat

SEQ ID NO: 90243 - DNA, 25 bp, Probe Sequence
aagttatatcaccagcaattccact

SEQ ID NO: 90244 - DNA, 25 bp, Probe Sequence
aggatcatactcagagaccataaca

SEQ ID NO: 90245 - DNA, 25 bp, Probe Sequence
caggatcatactcagagaccataac

SEQ ID NO: 90246 - DNA, 25 bp, Probe Sequence
ggatcatactcagagaccataacac

SEQ ID NO: 90247 - DNA, 25 bp, Probe Sequence
gatcatactcagagaccataacaca

SEQ ID NO: 90248 - DNA, 25 bp, Probe Sequence
agttatatcaccagcaattccactc

SEQ ID NO: 90249 - DNA, 25 bp, Probe Sequence
ttatatcaccagcaattccactcct

SEQ ID NO: 90250 - DNA, 25 bp, Probe Sequence
gttatatcaccagcaattccactcc

SEQ ID NO: 90251 - DNA, 25 bp, Probe Sequence
ccaggatcatactcagagaccataa

SEQ ID NO: 90252 - DNA, 25 bp, Probe Sequence
tcatactcagagaccataacacatg

SEQ ID NO: 90253 - DNA, 25 bp, Probe Sequence
ccgatgagataccacttcacataga

SEQ ID NO: 90254 - DNA, 25 bp, Probe Sequence
tccaggatcatactcagagaccata

SEQ ID NO: 90255 - DNA, 25 bp, Probe Sequence
catactcagagaccataacacatga

SEQ ID NO: 90256 - DNA, 25 bp, Probe Sequence
atatcaccagcaattccactcctag

SEQ ID NO: 90257 - DNA, 25 bp, Probe Sequence
atactcagagaccataacacatgaa

SEQ ID NO: 90258 - DNA, 25 bp, Probe Sequence
gatgagataccacttcacatagatt

SEQ ID NO: 90259 - DNA, 25 bp, Probe Sequence
agataccacttcacatagattaagg

SEQ ID NO: 90260 - DNA, 25 bp, Probe Sequence
ttccaggatcatactcagagaccat

SEQ ID NO: 90261 - DNA, 25 bp, Probe Sequence
aattagaacttccatacactgctgg

SEQ ID NO: 90262 - DNA, 25 bp, Probe Sequence
ggagaggatgtagggaaattagaac

SEQ ID NO: 90263 - DNA, 25 bp, Probe Sequence
ataatcaagtgtgggagaggatgta

SEQ ID NO: 90264 - DNA, 25 bp, Probe Sequence
ttcgttggagtctatataacagagc

SEQ ID NO: 90265 - DNA, 25 bp, Probe Sequence
tcgttggagtctatataacagagct

SEQ ID NO: 90266 - DNA, 25 bp, Probe Sequence
gctttcgttggagtctatataacag

SEQ ID NO: 90267 - DNA, 25 bp, Probe Sequence
cgtagctttcgttggagtctatata

SEQ ID NO: 90268 - DNA, 25 bp, Probe Sequence
agctttcgttggagtctatataaca

SEQ ID NO: 90269 - DNA, 25 bp, Probe Sequence
tttcgttggagtctatataacagag

SEQ ID NO: 90270 - DNA, 25 bp, Probe Sequence
ctttcgttggagtctatataacaga

SEQ ID NO: 90271 - DNA, 25 bp, Probe Sequence
gtagctttcgttggagtctatataa

SEQ ID NO: 90272 - DNA, 25 bp, Probe Sequence
ccgtagctttcgttggagtctatat

SEQ ID NO: 90273 - DNA, 25 bp, Probe Sequence
tagctttcgttggagtctatataac

SEQ ID NO: 90274 - DNA, 25 bp, Probe Sequence
gttggagtctatataacagagctcg

SEQ ID NO: 90275 - DNA, 25 bp, Probe Sequence
cgttggagtctatataacagagctc

SEQ ID NO: 90276 - DNA, 25 bp, Probe Sequence
ccaataaataaatgtggatttgtga

SEQ ID NO: 90277 - DNA, 25 bp, Probe Sequence
tggagtctatataacagagctcgtt

SEQ ID NO: 90278 - DNA, 25 bp, Probe Sequence
ttggagtctatataacagagctcgt

SEQ ID NO: 90279 - DNA, 25 bp, Probe Sequence
gccgtagctttcgttggagtctata

SEQ ID NO: 90280 - DNA, 25 bp, Probe Sequence
tataacagagctcgtttagtgaacc

SEQ ID NO: 90281 - DNA, 25 bp, Probe Sequence
ggagtctatataacagagctcgttt

SEQ ID NO: 90282 - DNA, 25 bp, Probe Sequence
atataacagagctcgtttagtgaac

SEQ ID NO: 90283 - DNA, 25 bp, Probe Sequence
tttagtgaaccgtcagatcgccttg

SEQ ID NO: 90284 - DNA, 25 bp, Probe Sequence
gtttagtgaaccgtcagatcgcctt

SEQ ID NO: 90285 - DNA, 25 bp, Probe Sequence
ctatataacagagctcgtttagtga

SEQ ID NO: 90286 - DNA, 25 bp, Probe Sequence
tctatataacagagctcgtttagtg

SEQ ID NO: 90287 - DNA, 25 bp, Probe Sequence
gtctatataacagagctcgtttagt

SEQ ID NO: 90288 - DNA, 25 bp, Probe Sequence
ttcgttggagtctatataacagagc

SEQ ID NO: 90289 - DNA, 25 bp, Probe Sequence
tcgttggagtctatataacagagct

SEQ ID NO: 90290 - DNA, 25 bp, Probe Sequence
gctttcgttggagtctatataacag

SEQ ID NO: 90291 - DNA, 25 bp, Probe Sequence
cgtagctttcgttggagtctatata

SEQ ID NO: 90292 - DNA, 25 bp, Probe Sequence
agctttcgttggagtctatataaca

SEQ ID NO: 90293 - DNA, 25 bp, Probe Sequence
tttcgttggagtctatataacagag

SEQ ID NO: 90294 - DNA, 25 bp, Probe Sequence
ctttcgttggagtctatataacaga

SEQ ID NO: 90295 - DNA, 25 bp, Probe Sequence
gtagctttcgttggagtctatataa

SEQ ID NO: 90296 - DNA, 25 bp, Probe Sequence
ccgtagctttcgttggagtctatat

SEQ ID NO: 90297 - DNA, 25 bp, Probe Sequence
tagctttcgttggagtctatataac

SEQ ID NO: 90298 - DNA, 25 bp, Probe Sequence
gttggagtctatataacagagctcg

SEQ ID NO: 90299 - DNA, 25 bp, Probe Sequence
cgttggagtctatataacagagctc

SEQ ID NO: 90300 - DNA, 25 bp, Probe Sequence
ccaataaataaatgtggatttgtga

SEQ ID NO: 90301 - DNA, 25 bp, Probe Sequence
tggagtctatataacagagctcgtt

SEQ ID NO: 90302 - DNA, 25 bp, Probe Sequence
ttggagtctatataacagagctcgt

SEQ ID NO: 90303 - DNA, 25 bp, Probe Sequence
gccgtagctttcgttggagtctata

SEQ ID NO: 90304 - DNA, 25 bp, Probe Sequence
tataacagagctcgtttagtgaacc

SEQ ID NO: 90305 - DNA, 25 bp, Probe Sequence
ggagtctatataacagagctcgttt

SEQ ID NO: 90306 - DNA, 25 bp, Probe Sequence
atataacagagctcgtttagtgaac

SEQ ID NO: 90307 - DNA, 25 bp, Probe Sequence
tttagtgaaccgtcagatcgccttg

SEQ ID NO: 90308 - DNA, 25 bp, Probe Sequence
gtttagtgaaccgtcagatcgcctt

SEQ ID NO: 90309 - DNA, 25 bp, Probe Sequence
ctatataacagagctcgtttagtga

SEQ ID NO: 90310 - DNA, 25 bp, Probe Sequence
tctatataacagagctcgtttagtg

SEQ ID NO: 90311 - DNA, 25 bp, Probe Sequence
gtctatataacagagctcgtttagt

SEQ ID NO: 90312 - DNA, 25 bp, Probe Sequence
agatgtgcttcaacaagttaattct

SEQ ID NO: 90313 - DNA, 25 bp, Probe Sequence
gatgtgcttcaacaagttaattctt

SEQ ID NO: 90314 - DNA, 25 bp, Probe Sequence
aagatgtgcttcaacaagttaattc

SEQ ID NO: 90315 - DNA, 25 bp, Probe Sequence
tgcttcctgagttcagttgtaatag

SEQ ID NO: 90316 - DNA, 25 bp, Probe Sequence
ctgcttcctgagttcagttgtaata

SEQ ID NO: 90317 - DNA, 25 bp, Probe Sequence
gattatctgcttcctgagttcagtt

SEQ ID NO: 90318 - DNA, 25 bp, Probe Sequence
attatctgcttcctgagttcagttg

SEQ ID NO: 90319 - DNA, 25 bp, Probe Sequence
gatgtgtgctgatttatgaaggaat

SEQ ID NO: 90320 - DNA, 25 bp, Probe Sequence
tgatgtgtgctgatttatgaaggaa

SEQ ID NO: 90321 - DNA, 25 bp, Probe Sequence
tatctgcttcctgagttcagttgta

SEQ ID NO: 90322 - DNA, 25 bp, Probe Sequence
gtgtgctgatttatgaaggaattgt

SEQ ID NO: 90323 - DNA, 25 bp, Probe Sequence
tgtgtgctgatttatgaaggaattg

SEQ ID NO: 90324 - DNA, 25 bp, Probe Sequence
tgtgctgatttatgaaggaattgtt

SEQ ID NO: 90325 - DNA, 25 bp, Probe Sequence
gctgattatctgcttcctgagttca

SEQ ID NO: 90326 - DNA, 25 bp, Probe Sequence
atgtgtgctgatttatgaaggaatt

SEQ ID NO: 90327 - DNA, 25 bp, Probe Sequence
ctgatgtgtgctgatttatgaagga

SEQ ID NO: 90328 - DNA, 25 bp, Probe Sequence
ttcctgagttcagttgtaatagctt

SEQ ID NO: 90329 - DNA, 25 bp, Probe Sequence
cttcctgagttcagttgtaatagct

SEQ ID NO: 90330 - DNA, 25 bp, Probe Sequence
tgattatctgcttcctgagttcagt

SEQ ID NO: 90331 - DNA, 25 bp, Probe Sequence
tcctgagttcagttgtaatagcttg

SEQ ID NO: 90332 - DNA, 25 bp, Probe Sequence
gagttcagttgtaatagcttgcgag

SEQ ID NO: 90333 - DNA, 25 bp, Probe Sequence
aatgtcagttcaagatgtttggaga

SEQ ID NO: 90334 - DNA, 25 bp, Probe Sequence
taatgtcagttcaagatgtttggag

SEQ ID NO: 90335 - DNA, 25 bp, Probe Sequence
gtgctgatttatgaaggaattgttt

SEQ ID NO: 90336 - DNA, 25 bp, Probe Sequence
cagtacatgacctaatgggactttc

SEQ ID NO: 90337 - DNA, 25 bp, Probe Sequence
atgacctaatgggactttcctactg

SEQ ID NO: 90338 - DNA, 25 bp, Probe Sequence
tacatgacctaatgggactttccta

SEQ ID NO: 90339 - DNA, 25 bp, Probe Sequence
catgacctaatgggactttcctact

SEQ ID NO: 90340 - DNA, 25 bp, Probe Sequence
acatgacctaatgggactttcctac

SEQ ID NO: 90341 - DNA, 25 bp, Probe Sequence
gtacatgacctaatgggactttcct

SEQ ID NO: 90342 - DNA, 25 bp, Probe Sequence
aagtgggaaaagaagattcaagttt

SEQ ID NO: 90343 - DNA, 25 bp, Probe Sequence
ccagtacatgacctaatgggacttt

SEQ ID NO: 90344 - DNA, 25 bp, Probe Sequence
ctaagtgggaaaagaagattcaagt

SEQ ID NO: 90345 - DNA, 25 bp, Probe Sequence
tctaagtgggaaaagaagattcaag

SEQ ID NO: 90346 - DNA, 25 bp, Probe Sequence
taagtgggaaaagaagattcaagtt

SEQ ID NO: 90347 - DNA, 25 bp, Probe Sequence
tgacctaatgggactttcctactgg

SEQ ID NO: 90348 - DNA, 25 bp, Probe Sequence
agtgggaaaagaagattcaagtttt

SEQ ID NO: 90349 - DNA, 25 bp, Probe Sequence
aaaatcaaacgggactttccaaaat

SEQ ID NO: 90350 - DNA, 25 bp, Probe Sequence
aaatcaaacgggactttccaaaatg

SEQ ID NO: 90351 - DNA, 25 bp, Probe Sequence
aaccaatctaagtgggaaaagaaga

SEQ ID NO: 90352 - DNA, 25 bp, Probe Sequence
tgaaaccaatctaagtgggaaaaga

SEQ ID NO: 90353 - DNA, 25 bp, Probe Sequence
ttgaaaccaatctaagtgggaaaag

SEQ ID NO: 90354 - DNA, 25 bp, Probe Sequence
caaaatcaaacgggactttccaaaa

SEQ ID NO: 90355 - DNA, 25 bp, Probe Sequence
aaaccaatctaagtgggaaaagaag

SEQ ID NO: 90356 - DNA, 25 bp, Probe Sequence
gaaaccaatctaagtgggaaaagaa

SEQ ID NO: 90357 - DNA, 25 bp, Probe Sequence
tttgaaaccaatctaagtgggaaaa

SEQ ID NO: 90358 - DNA, 25 bp, Probe Sequence
ttttgaaaccaatctaagtgggaaa

SEQ ID NO: 90359 - DNA, 25 bp, Probe Sequence
gttttgaaaccaatctaagtgggaa

SEQ ID NO: 90360 - DNA, 25 bp, Probe Sequence
gaagaactgcttaatggtgatgatg

SEQ ID NO: 90361 - DNA, 25 bp, Probe Sequence
aatggatgaggaagaactgcttaat

SEQ ID NO: 90362 - DNA, 25 bp, Probe Sequence
atggatgaggaagaactgcttaatg

SEQ ID NO: 90363 - DNA, 25 bp, Probe Sequence
ggaagaactgcttaatggtgatgat

SEQ ID NO: 90364 - DNA, 25 bp, Probe Sequence
gaggaagaactgcttaatggtgatg

SEQ ID NO: 90365 - DNA, 25 bp, Probe Sequence
gatgaggaagaactgcttaatggtg

SEQ ID NO: 90366 - DNA, 25 bp, Probe Sequence
agttactcaagaagtccagttccat

SEQ ID NO: 90367 - DNA, 25 bp, Probe Sequence
aagaactgcttaatggtgatgatgc

SEQ ID NO: 90368 - DNA, 25 bp, Probe Sequence
aggaagaactgcttaatggtgatga

SEQ ID NO: 90369 - DNA, 25 bp, Probe Sequence
tgaggaagaactgcttaatggtgat

SEQ ID NO: 90370 - DNA, 25 bp, Probe Sequence
atgaggaagaactgcttaatggtga

SEQ ID NO: 90371 - DNA, 25 bp, Probe Sequence
tactcaagaagtccagttccatgat

SEQ ID NO: 90372 - DNA, 25 bp, Probe Sequence
cagttactcaagaagtccagttcca

SEQ ID NO: 90373 - DNA, 25 bp, Probe Sequence
ttactcaagaagtccagttccatga

SEQ ID NO: 90374 - DNA, 25 bp, Probe Sequence
gttactcaagaagtccagttccatg

SEQ ID NO: 90375 - DNA, 25 bp, Probe Sequence
ggatgaggaagaactgcttaatggt

SEQ ID NO: 90376 - DNA, 25 bp, Probe Sequence
tggatgaggaagaactgcttaatgg

SEQ ID NO: 90377 - DNA, 25 bp, Probe Sequence
ggaatgaataaagccctgaatgaat

SEQ ID NO: 90378 - DNA, 25 bp, Probe Sequence
gaaaggaaatggatgaggaagaact

SEQ ID NO: 90379 - DNA, 25 bp, Probe Sequence
actcaagaagtccagttccatgatt

SEQ ID NO: 90380 - DNA, 25 bp, Probe Sequence
aaaggaaatggatgaggaagaactg

SEQ ID NO: 90381 - DNA, 25 bp, Probe Sequence
aaatggatgaggaagaactgcttaa

SEQ ID NO: 90382 - DNA, 25 bp, Probe Sequence
ggctctcagtaaagatgtgtttcta

SEQ ID NO: 90383 - DNA, 25 bp, Probe Sequence
gaaatggatgaggaagaactgctta

SEQ ID NO: 90384 - DNA, 25 bp, Probe Sequence
caacttacgacttagaacctgatgt

SEQ ID NO: 90385 - DNA, 25 bp, Probe Sequence
cctgatgttatccgtagattccaag

SEQ ID NO: 90386 - DNA, 25 bp, Probe Sequence
atgttatccgtagattccaagcatt

SEQ ID NO: 90387 - DNA, 25 bp, Probe Sequence
agaacctgatgttatccgtagattc

SEQ ID NO: 90388 - DNA, 25 bp, Probe Sequence
aacttacgacttagaacctgatgtt

SEQ ID NO: 90389 - DNA, 25 bp, Probe Sequence
acttagaacctgatgttatccgtag

SEQ ID NO: 90390 - DNA, 25 bp, Probe Sequence
gacttagaacctgatgttatccgta

SEQ ID NO: 90391 - DNA, 25 bp, Probe Sequence
tacgacttagaacctgatgttatcc

SEQ ID NO: 90392 - DNA, 25 bp, Probe Sequence
gatgttatccgtagattccaagcat

SEQ ID NO: 90393 - DNA, 25 bp, Probe Sequence
cttagaacctgatgttatccgtaga

SEQ ID NO: 90394 - DNA, 25 bp, Probe Sequence
tccgtagattccaagcattgtataa

SEQ ID NO: 90395 - DNA, 25 bp, Probe Sequence
ttatccgtagattccaagcattgta

SEQ ID NO: 90396 - DNA, 25 bp, Probe Sequence
atccgtagattccaagcattgtata

SEQ ID NO: 90397 - DNA, 25 bp, Probe Sequence
tatccgtagattccaagcattgtat

SEQ ID NO: 90398 - DNA, 25 bp, Probe Sequence
gaacctgatgttatccgtagattcc

SEQ ID NO: 90399 - DNA, 25 bp, Probe Sequence
acttacgacttagaacctgatgtta

SEQ ID NO: 90400 - DNA, 25 bp, Probe Sequence
ctgatgttatccgtagattccaagc

SEQ ID NO: 90401 - DNA, 25 bp, Probe Sequence
acctgatgttatccgtagattccaa

SEQ ID NO: 90402 - DNA, 25 bp, Probe Sequence
tcaacttacgacttagaacctgatg

SEQ ID NO: 90403 - DNA, 25 bp, Probe Sequence
aatcaacttacgacttagaacctga

SEQ ID NO: 90404 - DNA, 25 bp, Probe Sequence
tagaacctgatgttatccgtagatt

SEQ ID NO: 90405 - DNA, 25 bp, Probe Sequence
ttagaacctgatgttatccgtagat

SEQ ID NO: 90406 - DNA, 25 bp, Probe Sequence
aacctgatgttatccgtagattcca

SEQ ID NO: 90407 - DNA, 25 bp, Probe Sequence
gttatccgtagattccaagcattgt

SEQ ID NO: 90408 - DNA, 25 bp, Probe Sequence
gatataatggcatcacctggctttc

SEQ ID NO: 90409 - DNA, 25 bp, Probe Sequence
atataatggcatcacctggctttca

SEQ ID NO: 90410 - DNA, 25 bp, Probe Sequence
ctcaaccaaccgtcactagtattac

SEQ ID NO: 90411 - DNA, 25 bp, Probe Sequence
tcaaccaaccgtcactagtattact

SEQ ID NO: 90412 - DNA, 25 bp, Probe Sequence
cctcaaccaaccgtcactagtatta

SEQ ID NO: 90413 - DNA, 25 bp, Probe Sequence
ggatataatggcatcacctggcttt

SEQ ID NO: 90414 - DNA, 25 bp, Probe Sequence
caaccaaccgtcactagtattacta

SEQ ID NO: 90415 - DNA, 25 bp, Probe Sequence
ttttatccacccctttctcattttc

SEQ ID NO: 90416 - DNA, 25 bp, Probe Sequence
accaaccgtcactagtattactatt

SEQ ID NO: 90417 - DNA, 25 bp, Probe Sequence
aaccaaccgtcactagtattactat

SEQ ID NO: 90418 - DNA, 25 bp, Probe Sequence
tgctgaaaccccatctttactaaaa

SEQ ID NO: 90419 - DNA, 25 bp, Probe Sequence
tttatccacccctttctcattttcc

SEQ ID NO: 90420 - DNA, 25 bp, Probe Sequence
atgctgaaaccccatctttactaaa

SEQ ID NO: 90421 - DNA, 25 bp, Probe Sequence
accgtcactagtattactattcagt

SEQ ID NO: 90422 - DNA, 25 bp, Probe Sequence
ccaaccgtcactagtattactattc

SEQ ID NO: 90423 - DNA, 25 bp, Probe Sequence
tataatggcatcacctggctttcag

SEQ ID NO: 90424 - DNA, 25 bp, Probe Sequence
tgtgaaatggggatataatggcatc

SEQ ID NO: 90425 - DNA, 25 bp, Probe Sequence
ctgtgaaatggggatataatggcat

SEQ ID NO: 90426 - DNA, 25 bp, Probe Sequence
cttatgcctataatcccagcacttt

SEQ ID NO: 90427 - DNA, 25 bp, Probe Sequence
ttatgcctataatcccagcactttg

SEQ ID NO: 90428 - DNA, 25 bp, Probe Sequence
ctgcctgtgaaatggggatataatg

SEQ ID NO: 90429 - DNA, 25 bp, Probe Sequence
tgaaatggggatataatggcatcac

SEQ ID NO: 90430 - DNA, 25 bp, Probe Sequence
gtgaaatggggatataatggcatca

SEQ ID NO: 90431 - DNA, 25 bp, Probe Sequence
gaaatggggatataatggcatcacc

SEQ ID NO: 90432 - DNA, 25 bp, Probe Sequence
aatatgaagatggcaggtgataagg

SEQ ID NO: 90433 - DNA, 25 bp, Probe Sequence
ggtgataaggttgttgtagtatgtg

SEQ ID NO: 90434 - DNA, 25 bp, Probe Sequence
aggtgataaggttgttgtagtatgt

SEQ ID NO: 90435 - DNA, 25 bp, Probe Sequence
gcaggtgataaggttgttgtagtat

SEQ ID NO: 90436 - DNA, 25 bp, Probe Sequence
caggtgataaggttgttgtagtatg

SEQ ID NO: 90437 - DNA, 25 bp, Probe Sequence
gtgataaggttgttgtagtatgtgt

SEQ ID NO: 90438 - DNA, 25 bp, Probe Sequence
atatgaagatggcaggtgataaggt

SEQ ID NO: 90439 - DNA, 25 bp, Probe Sequence
tatgaagatggcaggtgataaggtt

SEQ ID NO: 90440 - DNA, 25 bp, Probe Sequence
tgataaggttgttgtagtatgtgtt

SEQ ID NO: 90441 - DNA, 25 bp, Probe Sequence
ggcaggtgataaggttgttgtagta

SEQ ID NO: 90442 - DNA, 25 bp, Probe Sequence
aggttgttgtagtatgtgttagtaa

SEQ ID NO: 90443 - DNA, 25 bp, Probe Sequence
aaggttgttgtagtatgtgttagta

SEQ ID NO: 90444 - DNA, 25 bp, Probe Sequence
taaggttgttgtagtatgtgttagt

SEQ ID NO: 90445 - DNA, 25 bp, Probe Sequence
ggactgagatgtattccatagactt

SEQ ID NO: 90446 - DNA, 25 bp, Probe Sequence
atggcaggtgataaggttgttgtag

SEQ ID NO: 90447 - DNA, 25 bp, Probe Sequence
gatggcaggtgataaggttgttgta

SEQ ID NO: 90448 - DNA, 25 bp, Probe Sequence
atgaagatggcaggtgataaggttg

SEQ ID NO: 90449 - DNA, 25 bp, Probe Sequence
agaaatatgaagatggcaggtgata

SEQ ID NO: 90450 - DNA, 25 bp, Probe Sequence
attctgcttagtcttcactgtgctt

SEQ ID NO: 90451 - DNA, 25 bp, Probe Sequence
gactgagatgtattccatagactta

SEQ ID NO: 90452 - DNA, 25 bp, Probe Sequence
cagaaatatgaagatggcaggtgat

SEQ ID NO: 90453 - DNA, 25 bp, Probe Sequence
gaagatggcaggtgataaggttgtt

SEQ ID NO: 90454 - DNA, 25 bp, Probe Sequence
aaatatgaagatggcaggtgataag

SEQ ID NO: 90455 - DNA, 25 bp, Probe Sequence
gaaatatgaagatggcaggtgataa

SEQ ID NO: 90456 - DNA, 25 bp, Probe Sequence
cgtattagtcatcgctattacctgt

SEQ ID NO: 90457 - DNA, 25 bp, Probe Sequence
gtattagtcatcgctattacctgtg

SEQ ID NO: 90458 - DNA, 25 bp, Probe Sequence
attagtcatcgctattacctgtgat

SEQ ID NO: 90459 - DNA, 25 bp, Probe Sequence
tattagtcatcgctattacctgtga

SEQ ID NO: 90460 - DNA, 25 bp, Probe Sequence
ttagtcatcgctattacctgtgatc

SEQ ID NO: 90461 - DNA, 25 bp, Probe Sequence
tagtcatcgctattacctgtgatcg

SEQ ID NO: 90462 - DNA, 25 bp, Probe Sequence
acgtattagtcatcgctattacctg

SEQ ID NO: 90463 - DNA, 25 bp, Probe Sequence
gttgtacggtgggaggtctattata

SEQ ID NO: 90464 - DNA, 25 bp, Probe Sequence
ttgtacggtgggaggtctattataa

SEQ ID NO: 90465 - DNA, 25 bp, Probe Sequence
tgtacggtgggaggtctattataag

SEQ ID NO: 90466 - DNA, 25 bp, Probe Sequence
ggtgggaggtctattataagcagag

SEQ ID NO: 90467 - DNA, 25 bp, Probe Sequence
gtacggtgggaggtctattataagc

SEQ ID NO: 90468 - DNA, 25 bp, Probe Sequence
tacgtattagtcatcgctattacct

SEQ ID NO: 90469 - DNA, 25 bp, Probe Sequence
tacggtgggaggtctattataagca

SEQ ID NO: 90470 - DNA, 25 bp, Probe Sequence
gatcggtttgtcagtacatcaatgg

SEQ ID NO: 90471 - DNA, 25 bp, Probe Sequence
ctattacctgtgatcggtttgtcag

SEQ ID NO: 90472 - DNA, 25 bp, Probe Sequence
tgctagtacatctacgtattagtca

SEQ ID NO: 90473 - DNA, 25 bp, Probe Sequence
gtgggaggtctattataagcagagc

SEQ ID NO: 90474 - DNA, 25 bp, Probe Sequence
gacactatagaaccagtttgtacca

SEQ ID NO: 90475 - DNA, 25 bp, Probe Sequence
tgacactatagaaccagtttgtacc

SEQ ID NO: 90476 - DNA, 25 bp, Probe Sequence
acactatagaaccagtttgtaccaa

SEQ ID NO: 90477 - DNA, 25 bp, Probe Sequence
attacctgtgatcggtttgtcagta

SEQ ID NO: 90478 - DNA, 25 bp, Probe Sequence
tattacctgtgatcggtttgtcagt

SEQ ID NO: 90479 - DNA, 25 bp, Probe Sequence
ctgctagtacatctacgtattagtc

SEQ ID NO: 90480 - DNA, 25 bp, Probe Sequence
aatgaactgataactctagccacaa

SEQ ID NO: 90481 - DNA, 25 bp, Probe Sequence
agactgacctgatgtaaatgtttgt

SEQ ID NO: 90482 - DNA, 25 bp, Probe Sequence
atgaactgataactctagccacaaa

SEQ ID NO: 90483 - DNA, 25 bp, Probe Sequence
aaatgaactgataactctagccaca

SEQ ID NO: 90484 - DNA, 25 bp, Probe Sequence
tgaactgataactctagccacaaag

SEQ ID NO: 90485 - DNA, 25 bp, Probe Sequence
cctaaatgaactgataactctagcc

SEQ ID NO: 90486 - DNA, 25 bp, Probe Sequence
taaatgaactgataactctagccac

SEQ ID NO: 90487 - DNA, 25 bp, Probe Sequence
gactgacctgatgtaaatgtttgtc

SEQ ID NO: 90488 - DNA, 25 bp, Probe Sequence
cagactgacctgatgtaaatgtttg

SEQ ID NO: 90489 - DNA, 25 bp, Probe Sequence
gaactgataactctagccacaaagc

SEQ ID NO: 90490 - DNA, 25 bp, Probe Sequence
caaattgactaattcctgttagggc

SEQ ID NO: 90491 - DNA, 25 bp, Probe Sequence
ccagactgacctgatgtaaatgttt

SEQ ID NO: 90492 - DNA, 25 bp, Probe Sequence
ctaaatgaactgataactctagcca

SEQ ID NO: 90493 - DNA, 25 bp, Probe Sequence
ccaaattgactaattcctgttaggg

SEQ ID NO: 90494 - DNA, 25 bp, Probe Sequence
cctgctcccaattatgttaatctgc

SEQ ID NO: 90495 - DNA, 25 bp, Probe Sequence
gcctgctcccaattatgttaatctg

SEQ ID NO: 90496 - DNA, 25 bp, Probe Sequence
tcctaaatgaactgataactctagc

SEQ ID NO: 90497 - DNA, 25 bp, Probe Sequence
accaaattgactaattcctgttagg

SEQ ID NO: 90498 - DNA, 25 bp, Probe Sequence
ttgagaaactaggatcaggagacac

SEQ ID NO: 90499 - DNA, 25 bp, Probe Sequence
gttgagaaactaggatcaggagaca

SEQ ID NO: 90500 - DNA, 25 bp, Probe Sequence
ggaccaaattgactaattcctgtta

SEQ ID NO: 90501 - DNA, 25 bp, Probe Sequence
gacctgatgtaaatgtttgtcatac

SEQ ID NO: 90502 - DNA, 25 bp, Probe Sequence
agcctgctcccaattatgttaatct

SEQ ID NO: 90503 - DNA, 25 bp, Probe Sequence
cagcctgctcccaattatgttaatc

SEQ ID NO: 90504 - DNA, 25 bp, Probe Sequence
aattcaagccgattacattatcagc

SEQ ID NO: 90505 - DNA, 25 bp, Probe Sequence
attcaagccgattacattatcagcc

SEQ ID NO: 90506 - DNA, 25 bp, Probe Sequence
aatagtcagtgctacttgaggtcat

SEQ ID NO: 90507 - DNA, 25 bp, Probe Sequence
atagtcagtgctacttgaggtcatc

SEQ ID NO: 90508 - DNA, 25 bp, Probe Sequence
aattcagagacacagttgacattgc

SEQ ID NO: 90509 - DNA, 25 bp, Probe Sequence
cattaaggatgagctatagtgacca

SEQ ID NO: 90510 - DNA, 25 bp, Probe Sequence
acattaaggatgagctatagtgacc

SEQ ID NO: 90511 - DNA, 25 bp, Probe Sequence
gtccaaattcaagccgattacatta

SEQ ID NO: 90512 - DNA, 25 bp, Probe Sequence
ctcataaattggactctctgctttg

SEQ ID NO: 90513 - DNA, 25 bp, Probe Sequence
ctaagtccaaattcaagccgattac

SEQ ID NO: 90514 - DNA, 25 bp, Probe Sequence
tcataaattggactctctgctttgt

SEQ ID NO: 90515 - DNA, 25 bp, Probe Sequence
actaagtccaaattcaagccgatta

SEQ ID NO: 90516 - DNA, 25 bp, Probe Sequence
tactaagtccaaattcaagccgatt

SEQ ID NO: 90517 - DNA, 25 bp, Probe Sequence
ttactaagtccaaattcaagccgat

SEQ ID NO: 90518 - DNA, 25 bp, Probe Sequence
aagttactaagtccaaattcaagcc

SEQ ID NO: 90519 - DNA, 25 bp, Probe Sequence
taagtccaaattcaagccgattaca

SEQ ID NO: 90520 - DNA, 25 bp, Probe Sequence
cctcataaattggactctctgcttt

SEQ ID NO: 90521 - DNA, 25 bp, Probe Sequence
attaaggatgagctatagtgaccat

SEQ ID NO: 90522 - DNA, 25 bp, Probe Sequence
tccaaattcaagccgattacattat

SEQ ID NO: 90523 - DNA, 25 bp, Probe Sequence
gccatacattaaggatgagctatag

SEQ ID NO: 90524 - DNA, 25 bp, Probe Sequence
tagtcagtgctacttgaggtcatca

SEQ ID NO: 90525 - DNA, 25 bp, Probe Sequence
aatgagccatacattaaggatgagc

SEQ ID NO: 90526 - DNA, 25 bp, Probe Sequence
ccaaattcaagccgattacattatc

SEQ ID NO: 90527 - DNA, 25 bp, Probe Sequence
agtccaaattcaagccgattacatt

SEQ ID NO: 90528 - DNA, 25 bp, Probe Sequence
tctgaattataccatcggagaagtg

SEQ ID NO: 90529 - DNA, 25 bp, Probe Sequence
ccatctgaattataccatcggagaa

SEQ ID NO: 90530 - DNA, 25 bp, Probe Sequence
atctgaattataccatcggagaagt

SEQ ID NO: 90531 - DNA, 25 bp, Probe Sequence
catctgaattataccatcggagaag

SEQ ID NO: 90532 - DNA, 25 bp, Probe Sequence
cggatattggctatattgataggct

SEQ ID NO: 90533 - DNA, 25 bp, Probe Sequence
tcggatattggctatattgataggc

SEQ ID NO: 90534 - DNA, 25 bp, Probe Sequence
gtagataactgcgaggacactaagg

SEQ ID NO: 90535 - DNA, 25 bp, Probe Sequence
ttgtagataactgcgaggacactaa

SEQ ID NO: 90536 - DNA, 25 bp, Probe Sequence
ggatattggctatattgataggctg

SEQ ID NO: 90537 - DNA, 25 bp, Probe Sequence
aatcactgtggttgtgttgagtatt

SEQ ID NO: 90538 - DNA, 25 bp, Probe Sequence
tgtagataactgcgaggacactaag

SEQ ID NO: 90539 - DNA, 25 bp, Probe Sequence
tatattgataggctgagctgactga

SEQ ID NO: 90540 - DNA, 25 bp, Probe Sequence
tccatctgaattataccatcggaga

SEQ ID NO: 90541 - DNA, 25 bp, Probe Sequence
gtccatctgaattataccatcggag

SEQ ID NO: 90542 - DNA, 25 bp, Probe Sequence
atcactgtggttgtgttgagtattg

SEQ ID NO: 90543 - DNA, 25 bp, Probe Sequence
ctgaattataccatcggagaagtgg

SEQ ID NO: 90544 - DNA, 25 bp, Probe Sequence
tctcctttctaatggtgcttacttt

SEQ ID NO: 90545 - DNA, 25 bp, Probe Sequence
gatattggctatattgataggctga

SEQ ID NO: 90546 - DNA, 25 bp, Probe Sequence
gtctcctttctaatggtgcttactt

SEQ ID NO: 90547 - DNA, 25 bp, Probe Sequence
atattggctatattgataggctgag

SEQ ID NO: 90548 - DNA, 25 bp, Probe Sequence
cactgtggttgtgttgagtattgtt

SEQ ID NO: 90549 - DNA, 25 bp, Probe Sequence
atattgataggctgagctgactgag

SEQ ID NO: 90550 - DNA, 25 bp, Probe Sequence
ctatattgataggctgagctgactg

SEQ ID NO: 90551 - DNA, 25 bp, Probe Sequence
atcggatattggctatattgatagg

SEQ ID NO: 90552 - DNA, 25 bp, Probe Sequence
cttatgcttcccatcctctctttaa

SEQ ID NO: 90553 - DNA, 25 bp, Probe Sequence
cactttgaatgctttcttacttgtt

SEQ ID NO: 90554 - DNA, 25 bp, Probe Sequence
gggttaaagtgttaaatatgttgcc

SEQ ID NO: 90555 - DNA, 25 bp, Probe Sequence
tttgtgacctaatttatgtggaaga

SEQ ID NO: 90556 - DNA, 25 bp, Probe Sequence
ccttatgcttcccatcctctcttta

SEQ ID NO: 90557 - DNA, 25 bp, Probe Sequence
cttcttcccacttcctacttcctag

SEQ ID NO: 90558 - DNA, 25 bp, Probe Sequence
tgacctaatttatgtggaagattgt

SEQ ID NO: 90559 - DNA, 25 bp, Probe Sequence
tgtgacctaatttatgtggaagatt

SEQ ID NO: 90560 - DNA, 25 bp, Probe Sequence
ttgtgacctaatttatgtggaagat

SEQ ID NO: 90561 - DNA, 25 bp, Probe Sequence
actttgaatgctttcttacttgttt

SEQ ID NO: 90562 - DNA, 25 bp, Probe Sequence
gtgacctaatttatgtggaagattg

SEQ ID NO: 90563 - DNA, 25 bp, Probe Sequence
taaatatgttgcctagacaagggtt

SEQ ID NO: 90564 - DNA, 25 bp, Probe Sequence
ttaaatatgttgcctagacaagggt

SEQ ID NO: 90565 - DNA, 25 bp, Probe Sequence
gttaaatatgttgcctagacaaggg

SEQ ID NO: 90566 - DNA, 25 bp, Probe Sequence
ggttaaagtgttaaatatgttgcct

SEQ ID NO: 90567 - DNA, 25 bp, Probe Sequence
tgttaaatatgttgcctagacaagg

SEQ ID NO: 90568 - DNA, 25 bp, Probe Sequence
aaatatgttgcctagacaagggttc

SEQ ID NO: 90569 - DNA, 25 bp, Probe Sequence
tagagtgaagactgtgctgtcgtta

SEQ ID NO: 90570 - DNA, 25 bp, Probe Sequence
cttcccatcctctctttaaatgtga

SEQ ID NO: 90571 - DNA, 25 bp, Probe Sequence
ttatgcttcccatcctctctttaaa

SEQ ID NO: 90572 - DNA, 25 bp, Probe Sequence
ttcccatcctctctttaaatgtgat

SEQ ID NO: 90573 - DNA, 25 bp, Probe Sequence
ccttcttcccacttcctacttccta

SEQ ID NO: 90574 - DNA, 25 bp, Probe Sequence
tatgcttcccatcctctctttaaat

SEQ ID NO: 90575 - DNA, 25 bp, Probe Sequence
agtgttaaatatgttgcctagacaa

SEQ ID NO: 90576 - DNA, 25 bp, Probe Sequence
gatgatcgttcttctctccgtattg

SEQ ID NO: 90577 - DNA, 25 bp, Probe Sequence
tgatgatcgttcttctctccgtatt

SEQ ID NO: 90578 - DNA, 25 bp, Probe Sequence
ttgatgatcgttcttctctccgtat

SEQ ID NO: 90579 - DNA, 25 bp, Probe Sequence
attgatgatcgttcttctctccgta

SEQ ID NO: 90580 - DNA, 25 bp, Probe Sequence
atgatcgttcttctctccgtattgg

SEQ ID NO: 90581 - DNA, 25 bp, Probe Sequence
cattgatgatcgttcttctctccgt

SEQ ID NO: 90582 - DNA, 25 bp, Probe Sequence
agccattgatgatcgttcttctctc

SEQ ID NO: 90583 - DNA, 25 bp, Probe Sequence
cagccattgatgatcgttcttctct

SEQ ID NO: 90584 - DNA, 25 bp, Probe Sequence
tcagccattgatgatcgttcttctc

SEQ ID NO: 90585 - DNA, 25 bp, Probe Sequence
ccattgatgatcgttcttctctccg

SEQ ID NO: 90586 - DNA, 25 bp, Probe Sequence
gtcagccattgatgatcgttcttct

SEQ ID NO: 90587 - DNA, 25 bp, Probe Sequence
gccattgatgatcgttcttctctcc

SEQ ID NO: 90588 - DNA, 25 bp, Probe Sequence
cgggatcatttctatagtgtgttac

SEQ ID NO: 90589 - DNA, 25 bp, Probe Sequence
ccgggatcatttctatagtgtgtta

SEQ ID NO: 90590 - DNA, 25 bp, Probe Sequence
gggatcatttctatagtgtgttact

SEQ ID NO: 90591 - DNA, 25 bp, Probe Sequence
cgtcagccattgatgatcgttcttc

SEQ ID NO: 90592 - DNA, 25 bp, Probe Sequence
atagtgtgttactagagaagtttct

SEQ ID NO: 90593 - DNA, 25 bp, Probe Sequence
tgatcgttcttctctccgtattggg

SEQ ID NO: 90594 - DNA, 25 bp, Probe Sequence
gactgtcctacttgcagtacatcta

SEQ ID NO: 90595 - DNA, 25 bp, Probe Sequence
tctatagtgtgttactagagaagtt

SEQ ID NO: 90596 - DNA, 25 bp, Probe Sequence
gagaagtttctctgaacgtgtagag

SEQ ID NO: 90597 - DNA, 25 bp, Probe Sequence
ttctatagtgtgttactagagaagt

SEQ ID NO: 90598 - DNA, 25 bp, Probe Sequence
agaagtttctctgaacgtgtagagc

SEQ ID NO: 90599 - DNA, 25 bp, Probe Sequence
tatagtgtgttactagagaagtttc

SEQ ID NO: 90600 - DNA, 25 bp, Probe Sequence
caactccattataccatgtagccat

SEQ ID NO: 90601 - DNA, 25 bp, Probe Sequence
ttccaactccattataccatgtagc

SEQ ID NO: 90602 - DNA, 25 bp, Probe Sequence
ctccattataccatgtagccatagt

SEQ ID NO: 90603 - DNA, 25 bp, Probe Sequence
actccattataccatgtagccatag

SEQ ID NO: 90604 - DNA, 25 bp, Probe Sequence
aactccattataccatgtagccata

SEQ ID NO: 90605 - DNA, 25 bp, Probe Sequence
tccattataccatgtagccatagta

SEQ ID NO: 90606 - DNA, 25 bp, Probe Sequence
tccaactccattataccatgtagcc

SEQ ID NO: 90607 - DNA, 25 bp, Probe Sequence
atttctggctttctacacatttagg

SEQ ID NO: 90608 - DNA, 25 bp, Probe Sequence
ccaactccattataccatgtagcca

SEQ ID NO: 90609 - DNA, 25 bp, Probe Sequence
atcatttctggctttctacacattt

SEQ ID NO: 90610 - DNA, 25 bp, Probe Sequence
aactttgtatcatttctggctttct

SEQ ID NO: 90611 - DNA, 25 bp, Probe Sequence
gtatcatttctggctttctacacat

SEQ ID NO: 90612 - DNA, 25 bp, Probe Sequence
ccattataccatgtagccatagtaa

SEQ ID NO: 90613 - DNA, 25 bp, Probe Sequence
tcatttctggctttctacacattta

SEQ ID NO: 90614 - DNA, 25 bp, Probe Sequence
gaactttgtatcatttctggctttc

SEQ ID NO: 90615 - DNA, 25 bp, Probe Sequence
tagaaggtatttcactttggcactg

SEQ ID NO: 90616 - DNA, 25 bp, Probe Sequence
tttctggctttctacacatttaggc

SEQ ID NO: 90617 - DNA, 25 bp, Probe Sequence
catttctggctttctacacatttag

SEQ ID NO: 90618 - DNA, 25 bp, Probe Sequence
tatcatttctggctttctacacatt

SEQ ID NO: 90619 - DNA, 25 bp, Probe Sequence
gcactgactgaactttgtatcattt

SEQ ID NO: 90620 - DNA, 25 bp, Probe Sequence
ctgaactttgtatcatttctggctt

SEQ ID NO: 90621 - DNA, 25 bp, Probe Sequence
gactgaactttgtatcatttctggc

SEQ ID NO: 90622 - DNA, 25 bp, Probe Sequence
actttgtatcatttctggctttcta

SEQ ID NO: 90623 - DNA, 25 bp, Probe Sequence
tgaactttgtatcatttctggcttt

SEQ ID NO: 90624 - DNA, 25 bp, Probe Sequence
ggcagcatcctcattaataattctt

SEQ ID NO: 90625 - DNA, 25 bp, Probe Sequence
gttctctcttcttcattattagtgc

SEQ ID NO: 90626 - DNA, 25 bp, Probe Sequence
gcagcatcctcattaataattcttg

SEQ ID NO: 90627 - DNA, 25 bp, Probe Sequence
ttcttggtgacacgaataatacacg

SEQ ID NO: 90628 - DNA, 25 bp, Probe Sequence
attcttggtgacacgaataatacac

SEQ ID NO: 90629 - DNA, 25 bp, Probe Sequence
gcatcctcattaataattcttggtg

SEQ ID NO: 90630 - DNA, 25 bp, Probe Sequence
agcatcctcattaataattcttggt

SEQ ID NO: 90631 - DNA, 25 bp, Probe Sequence
aattcttggtgacacgaataataca

SEQ ID NO: 90632 - DNA, 25 bp, Probe Sequence
cagcatcctcattaataattcttgg

SEQ ID NO: 90633 - DNA, 25 bp, Probe Sequence
tcattaataattcttggtgacacga

SEQ ID NO: 90634 - DNA, 25 bp, Probe Sequence
ctcattaataattcttggtgacacg

SEQ ID NO: 90635 - DNA, 25 bp, Probe Sequence
cattaataattcttggtgacacgaa

SEQ ID NO: 90636 - DNA, 25 bp, Probe Sequence
cctcattaataattcttggtgacac

SEQ ID NO: 90637 - DNA, 25 bp, Probe Sequence
tcctcattaataattcttggtgaca

SEQ ID NO: 90638 - DNA, 25 bp, Probe Sequence
ttctctcttcttcattattagtgca

SEQ ID NO: 90639 - DNA, 25 bp, Probe Sequence
tgttctctcttcttcattattagtg

SEQ ID NO: 90640 - DNA, 25 bp, Probe Sequence
gggcagcatcctcattaataattct

SEQ ID NO: 90641 - DNA, 25 bp, Probe Sequence
tctctcttcttcattattagtgcat

SEQ ID NO: 90642 - DNA, 25 bp, Probe Sequence
tgggcagcatcctcattaataattc

SEQ ID NO: 90643 - DNA, 25 bp, Probe Sequence
ctgggcagcatcctcattaataatt

SEQ ID NO: 90644 - DNA, 25 bp, Probe Sequence
taattcttggtgacacgaataatac

SEQ ID NO: 90645 - DNA, 25 bp, Probe Sequence
aataattcttggtgacacgaataat

SEQ ID NO: 90646 - DNA, 25 bp, Probe Sequence
aattggattggtaactctacctcag

SEQ ID NO: 90647 - DNA, 25 bp, Probe Sequence
tcattattagtgcatttggtgtgtg

SEQ ID NO: 90648 - DNA, 25 bp, Probe Sequence
tccgtcatcagtattatcatcaaca

SEQ ID NO: 90649 - DNA, 25 bp, Probe Sequence
ccgtcatcagtattatcatcaacaa

SEQ ID NO: 90650 - DNA, 25 bp, Probe Sequence
tcatatcttaaccacatcaaggacc

SEQ ID NO: 90651 - DNA, 25 bp, Probe Sequence
ttccgtcatcagtattatcatcaac

SEQ ID NO: 90652 - DNA, 25 bp, Probe Sequence
atatcttaaccacatcaaggacctg

SEQ ID NO: 90653 - DNA, 25 bp, Probe Sequence
catatcttaaccacatcaaggacct

SEQ ID NO: 90654 - DNA, 25 bp, Probe Sequence
ctcatatcttaaccacatcaaggac

SEQ ID NO: 90655 - DNA, 25 bp, Probe Sequence
tctcatatcttaaccacatcaagga

SEQ ID NO: 90656 - DNA, 25 bp, Probe Sequence
ttctcatatcttaaccacatcaagg

SEQ ID NO: 90657 - DNA, 25 bp, Probe Sequence
tctcatcagtccaaaccatcataaa

SEQ ID NO: 90658 - DNA, 25 bp, Probe Sequence
ttctcatcagtccaaaccatcataa

SEQ ID NO: 90659 - DNA, 25 bp, Probe Sequence
tacataaccacacccttcatctaac

SEQ ID NO: 90660 - DNA, 25 bp, Probe Sequence
catacataaccacacccttcatcta

SEQ ID NO: 90661 - DNA, 25 bp, Probe Sequence
tttcatacataaccacacccttcat

SEQ ID NO: 90662 - DNA, 25 bp, Probe Sequence
atttcatacataaccacacccttca

SEQ ID NO: 90663 - DNA, 25 bp, Probe Sequence
cttctcatcagtccaaaccatcata

SEQ ID NO: 90664 - DNA, 25 bp, Probe Sequence
accatatttgtttccctgagtttct

SEQ ID NO: 90665 - DNA, 25 bp, Probe Sequence
ttcatacataaccacacccttcatc

SEQ ID NO: 90666 - DNA, 25 bp, Probe Sequence
gctctatttcatacataaccacacc

SEQ ID NO: 90667 - DNA, 25 bp, Probe Sequence
atacataaccacacccttcatctaa

SEQ ID NO: 90668 - DNA, 25 bp, Probe Sequence
tctatttcatacataaccacaccct

SEQ ID NO: 90669 - DNA, 25 bp, Probe Sequence
ctctatttcatacataaccacaccc

SEQ ID NO: 90670 - DNA, 25 bp, Probe Sequence
gccaaggattattctctctgacttt

SEQ ID NO: 90671 - DNA, 25 bp, Probe Sequence
aaccatatttgtttccctgagtttc

SEQ ID NO: 90672 - DNA, 25 bp, Probe Sequence
gtaagtcctccatacaccataggtt

SEQ ID NO: 90673 - DNA, 25 bp, Probe Sequence
ttctgtaagtcctccatacaccata

SEQ ID NO: 90674 - DNA, 25 bp, Probe Sequence
tctgtaagtcctccatacaccatag

SEQ ID NO: 90675 - DNA, 25 bp, Probe Sequence
cttctgtaagtcctccatacaccat

SEQ ID NO: 90676 - DNA, 25 bp, Probe Sequence
ctgtaagtcctccatacaccatagg

SEQ ID NO: 90677 - DNA, 25 bp, Probe Sequence
cgtagaggatagtacacacaggagg

SEQ ID NO: 90678 - DNA, 25 bp, Probe Sequence
aagaaggaactcagtgtttgtggta

SEQ ID NO: 90679 - DNA, 25 bp, Probe Sequence
tgtaagtcctccatacaccataggt

SEQ ID NO: 90680 - DNA, 25 bp, Probe Sequence
gtagaggatagtacacacaggaggc

SEQ ID NO: 90681 - DNA, 25 bp, Probe Sequence
acgtagaggatagtacacacaggag

SEQ ID NO: 90682 - DNA, 25 bp, Probe Sequence
tagaggatagtacacacaggaggct

SEQ ID NO: 90683 - DNA, 25 bp, Probe Sequence
taagtcctccatacaccataggttt

SEQ ID NO: 90684 - DNA, 25 bp, Probe Sequence
cacgtagaggatagtacacacagga

SEQ ID NO: 90685 - DNA, 25 bp, Probe Sequence
cttaaggatcaatggtcttgttgcc

SEQ ID NO: 90686 - DNA, 25 bp, Probe Sequence
ttaaggatcaatggtcttgttgccg

SEQ ID NO: 90687 - DNA, 25 bp, Probe Sequence
aaagaaggaactcagtgtttgtggt

SEQ ID NO: 90688 - DNA, 25 bp, Probe Sequence
tttactcacaagagggctttggaaa

SEQ ID NO: 90689 - DNA, 25 bp, Probe Sequence
aaggaactcagtgtttgtggtactt

SEQ ID NO: 90690 - DNA, 25 bp, Probe Sequence
gaggatagtacacacaggaggcttc

SEQ ID NO: 90691 - DNA, 25 bp, Probe Sequence
agaaggaactcagtgtttgtggtac

SEQ ID NO: 90692 - DNA, 25 bp, Probe Sequence
gaaggaactcagtgtttgtggtact

SEQ ID NO: 90693 - DNA, 25 bp, Probe Sequence
ctgtggcttctgtaagtcctccata

SEQ ID NO: 90694 - DNA, 25 bp, Probe Sequence
gaactcagtgtttgtggtacttgga

SEQ ID NO: 90695 - DNA, 25 bp, Probe Sequence
aggaactcagtgtttgtggtacttg

SEQ ID NO: 90696 - DNA, 25 bp, Probe Sequence
acagtcaatagcctatctacaatca

SEQ ID NO: 90697 - DNA, 25 bp, Probe Sequence
gagacagtcaatagcctatctacaa

SEQ ID NO: 90698 - DNA, 25 bp, Probe Sequence
tgagacagtcaatagcctatctaca

SEQ ID NO: 90699 - DNA, 25 bp, Probe Sequence
gacagtcaatagcctatctacaatc

SEQ ID NO: 90700 - DNA, 25 bp, Probe Sequence
agacagtcaatagcctatctacaat

SEQ ID NO: 90701 - DNA, 25 bp, Probe Sequence
cagtcaatagcctatctacaatcaa

SEQ ID NO: 90702 - DNA, 25 bp, Probe Sequence
atctactgcctgaactgagagaatg

SEQ ID NO: 90703 - DNA, 25 bp, Probe Sequence
catctactgcctgaactgagagaat

SEQ ID NO: 90704 - DNA, 25 bp, Probe Sequence
ttctatctctctgtgacctcttcag

SEQ ID NO: 90705 - DNA, 25 bp, Probe Sequence
agtcaatagcctatctacaatcaag

SEQ ID NO: 90706 - DNA, 25 bp, Probe Sequence
gtcaatagcctatctacaatcaagg

SEQ ID NO: 90707 - DNA, 25 bp, Probe Sequence
ctactgcctgaactgagagaatgac

SEQ ID NO: 90708 - DNA, 25 bp, Probe Sequence
ctttctatctctctgtgacctcttc

SEQ ID NO: 90709 - DNA, 25 bp, Probe Sequence
tctttctatctctctgtgacctctt

SEQ ID NO: 90710 - DNA, 25 bp, Probe Sequence
attcttgggctctctaatgtgattt

SEQ ID NO: 90711 - DNA, 25 bp, Probe Sequence
aagaataatcctgaagaatcccaca

SEQ ID NO: 90712 - DNA, 25 bp, Probe Sequence
tattcttgggctctctaatgtgatt

SEQ ID NO: 90713 - DNA, 25 bp, Probe Sequence
agaataatcctgaagaatcccacat

SEQ ID NO: 90714 - DNA, 25 bp, Probe Sequence
caagaataatcctgaagaatcccac

SEQ ID NO: 90715 - DNA, 25 bp, Probe Sequence
atattcttgggctctctaatgtgat

SEQ ID NO: 90716 - DNA, 25 bp, Probe Sequence
gcaagaataatcctgaagaatccca

SEQ ID NO: 90717 - DNA, 25 bp, Probe Sequence
tctactgcctgaactgagagaatga

SEQ ID NO: 90718 - DNA, 25 bp, Probe Sequence
catattcttgggctctctaatgtga

SEQ ID NO: 90719 - DNA, 25 bp, Probe Sequence
ttcttgggctctctaatgtgatttg

SEQ ID NO: 90720 - DNA, 25 bp, Probe Sequence
tcataatagttacagtcggcatcaa

SEQ ID NO: 90721 - DNA, 25 bp, Probe Sequence
ctcataatagttacagtcggcatca

SEQ ID NO: 90722 - DNA, 25 bp, Probe Sequence
tgtagcaggaatcttcttactcatc

SEQ ID NO: 90723 - DNA, 25 bp, Probe Sequence
gttgtagcaggaatcttcttactca

SEQ ID NO: 90724 - DNA, 25 bp, Probe Sequence
tgttgtagcaggaatcttcttactc

SEQ ID NO: 90725 - DNA, 25 bp, Probe Sequence
atgttgtagcaggaatcttcttact

SEQ ID NO: 90726 - DNA, 25 bp, Probe Sequence
ttgtagcaggaatcttcttactcat

SEQ ID NO: 90727 - DNA, 25 bp, Probe Sequence
ggatgttgtagcaggaatcttctta

SEQ ID NO: 90728 - DNA, 25 bp, Probe Sequence
gatgttgtagcaggaatcttcttac

SEQ ID NO: 90729 - DNA, 25 bp, Probe Sequence
cataatagttacagtcggcatcaac

SEQ ID NO: 90730 - DNA, 25 bp, Probe Sequence
ataatagttacagtcggcatcaacc

SEQ ID NO: 90731 - DNA, 25 bp, Probe Sequence
actcataatagttacagtcggcatc

SEQ ID NO: 90732 - DNA, 25 bp, Probe Sequence
tccacaccttaacatgaacagatat

SEQ ID NO: 90733 - DNA, 25 bp, Probe Sequence
atccacaccttaacatgaacagata

SEQ ID NO: 90734 - DNA, 25 bp, Probe Sequence
ccacaccttaacatgaacagatatt

SEQ ID NO: 90735 - DNA, 25 bp, Probe Sequence
taatagttacagtcggcatcaacca

SEQ ID NO: 90736 - DNA, 25 bp, Probe Sequence
acaccttaacatgaacagatattcg

SEQ ID NO: 90737 - DNA, 25 bp, Probe Sequence
catccacaccttaacatgaacagat

SEQ ID NO: 90738 - DNA, 25 bp, Probe Sequence
gtagcaggaatcttcttactcatcc

SEQ ID NO: 90739 - DNA, 25 bp, Probe Sequence
gaatcttcttactcatccgcttcca

SEQ ID NO: 90740 - DNA, 25 bp, Probe Sequence
aatcttcttactcatccgcttccac

SEQ ID NO: 90741 - DNA, 25 bp, Probe Sequence
aatagttacagtcggcatcaaccaa

SEQ ID NO: 90742 - DNA, 25 bp, Probe Sequence
atagcccactaatccaaactctaac

SEQ ID NO: 90743 - DNA, 25 bp, Probe Sequence
caccttaacatgaacagatattcga

SEQ ID NO: 90744 - DNA, 25 bp, Probe Sequence
ggctttcctacttgcgtacatctac

SEQ ID NO: 90745 - DNA, 25 bp, Probe Sequence
tatgggctttcctacttgcgtacat

SEQ ID NO: 90746 - DNA, 25 bp, Probe Sequence
gggctttcctacttgcgtacatcta

SEQ ID NO: 90747 - DNA, 25 bp, Probe Sequence
gtatgggctttcctacttgcgtaca

SEQ ID NO: 90748 - DNA, 25 bp, Probe Sequence
cctacttgcgtacatctacgtatta

SEQ ID NO: 90749 - DNA, 25 bp, Probe Sequence
tgcgtacatctacgtattagtcatc

SEQ ID NO: 90750 - DNA, 25 bp, Probe Sequence
ttgcgtacatctacgtattagtcat

SEQ ID NO: 90751 - DNA, 25 bp, Probe Sequence
cttgcgtacatctacgtattagtca

SEQ ID NO: 90752 - DNA, 25 bp, Probe Sequence
acttgcgtacatctacgtattagtc

SEQ ID NO: 90753 - DNA, 25 bp, Probe Sequence
tacttgcgtacatctacgtattagt

SEQ ID NO: 90754 - DNA, 25 bp, Probe Sequence
gcgtacatctacgtattagtcatcg

SEQ ID NO: 90755 - DNA, 25 bp, Probe Sequence
atgttcgaaagcatcttgagaggaa

SEQ ID NO: 90756 - DNA, 25 bp, Probe Sequence
ctacttgcgtacatctacgtattag

SEQ ID NO: 90757 - DNA, 25 bp, Probe Sequence
tcctacttgcgtacatctacgtatt

SEQ ID NO: 90758 - DNA, 25 bp, Probe Sequence
ttcctacttgcgtacatctacgtat

SEQ ID NO: 90759 - DNA, 25 bp, Probe Sequence
atgggctttcctacttgcgtacatc

SEQ ID NO: 90760 - DNA, 25 bp, Probe Sequence
actgacgtatgggctttcctacttg

SEQ ID NO: 90761 - DNA, 25 bp, Probe Sequence
ctttcctacttgcgtacatctacgt

SEQ ID NO: 90762 - DNA, 25 bp, Probe Sequence
tgatcggttttgcagtacatccatg

SEQ ID NO: 90763 - DNA, 25 bp, Probe Sequence
gtgatcggttttgcagtacatccat

SEQ ID NO: 90764 - DNA, 25 bp, Probe Sequence
gctttcctacttgcgtacatctacg

SEQ ID NO: 90765 - DNA, 25 bp, Probe Sequence
tttcctacttgcgtacatctacgta

SEQ ID NO: 90766 - DNA, 25 bp, Probe Sequence
gatgttcgaaagcatcttgagagga

SEQ ID NO: 90767 - DNA, 25 bp, Probe Sequence
ggatgttcgaaagcatcttgagagg

SEQ ID NO: 90768 - DNA, 25 bp, Probe Sequence
ggctttcctacttgcgtacatctac

SEQ ID NO: 90769 - DNA, 25 bp, Probe Sequence
tatgggctttcctacttgcgtacat

SEQ ID NO: 90770 - DNA, 25 bp, Probe Sequence
gggctttcctacttgcgtacatcta

SEQ ID NO: 90771 - DNA, 25 bp, Probe Sequence
gtatgggctttcctacttgcgtaca

SEQ ID NO: 90772 - DNA, 25 bp, Probe Sequence
cctacttgcgtacatctacgtatta

SEQ ID NO: 90773 - DNA, 25 bp, Probe Sequence
tgcgtacatctacgtattagtcatc

SEQ ID NO: 90774 - DNA, 25 bp, Probe Sequence
ttgcgtacatctacgtattagtcat

SEQ ID NO: 90775 - DNA, 25 bp, Probe Sequence
cttgcgtacatctacgtattagtca

SEQ ID NO: 90776 - DNA, 25 bp, Probe Sequence
acttgcgtacatctacgtattagtc

SEQ ID NO: 90777 - DNA, 25 bp, Probe Sequence
tacttgcgtacatctacgtattagt

SEQ ID NO: 90778 - DNA, 25 bp, Probe Sequence
gcgtacatctacgtattagtcatcg

SEQ ID NO: 90779 - DNA, 25 bp, Probe Sequence
atgttcgaaagcatcttgagaggaa

SEQ ID NO: 90780 - DNA, 25 bp, Probe Sequence
ctacttgcgtacatctacgtattag

SEQ ID NO: 90781 - DNA, 25 bp, Probe Sequence
tcctacttgcgtacatctacgtatt

SEQ ID NO: 90782 - DNA, 25 bp, Probe Sequence
ttcctacttgcgtacatctacgtat

SEQ ID NO: 90783 - DNA, 25 bp, Probe Sequence
atgggctttcctacttgcgtacatc

SEQ ID NO: 90784 - DNA, 25 bp, Probe Sequence
actgacgtatgggctttcctacttg

SEQ ID NO: 90785 - DNA, 25 bp, Probe Sequence
ctttcctacttgcgtacatctacgt

SEQ ID NO: 90786 - DNA, 25 bp, Probe Sequence
tgatcggttttgcagtacatccatg

SEQ ID NO: 90787 - DNA, 25 bp, Probe Sequence
gtgatcggttttgcagtacatccat

SEQ ID NO: 90788 - DNA, 25 bp, Probe Sequence
gctttcctacttgcgtacatctacg

SEQ ID NO: 90789 - DNA, 25 bp, Probe Sequence
tttcctacttgcgtacatctacgta

SEQ ID NO: 90790 - DNA, 25 bp, Probe Sequence
gatgttcgaaagcatcttgagagga

SEQ ID NO: 90791 - DNA, 25 bp, Probe Sequence
ggatgttcgaaagcatcttgagagg

SEQ ID NO: 90792 - DNA, 25 bp, Probe Sequence
gaagtatgtagccagaagagttagg

SEQ ID NO: 90793 - DNA, 25 bp, Probe Sequence
ggaagtatgtagccagaagagttag

SEQ ID NO: 90794 - DNA, 25 bp, Probe Sequence
tggaagtatgtagccagaagagtta

SEQ ID NO: 90795 - DNA, 25 bp, Probe Sequence
cataccgtttgattgtttgacttct

SEQ ID NO: 90796 - DNA, 25 bp, Probe Sequence
ccataccgtttgattgtttgacttc

SEQ ID NO: 90797 - DNA, 25 bp, Probe Sequence
ataccgtttgattgtttgacttcta

SEQ ID NO: 90798 - DNA, 25 bp, Probe Sequence
taccgtttgattgtttgacttctag

SEQ ID NO: 90799 - DNA, 25 bp, Probe Sequence
ttgtagccataccgtttgattgttt

SEQ ID NO: 90800 - DNA, 25 bp, Probe Sequence
tttgtagccataccgtttgattgtt

SEQ ID NO: 90801 - DNA, 25 bp, Probe Sequence
gtctattaccaatgaagagggcatc

SEQ ID NO: 90802 - DNA, 25 bp, Probe Sequence
tagccataccgtttgattgtttgac

SEQ ID NO: 90803 - DNA, 25 bp, Probe Sequence
cgtttgattgtttgacttctagtgt

SEQ ID NO: 90804 - DNA, 25 bp, Probe Sequence
gtagccataccgtttgattgtttga

SEQ ID NO: 90805 - DNA, 25 bp, Probe Sequence
ctttgtagccataccgtttgattgt

SEQ ID NO: 90806 - DNA, 25 bp, Probe Sequence
tgtctattaccaatgaagagggcat

SEQ ID NO: 90807 - DNA, 25 bp, Probe Sequence
ccgtttgattgtttgacttctagtg

SEQ ID NO: 90808 - DNA, 25 bp, Probe Sequence
accgtttgattgtttgacttctagt

SEQ ID NO: 90809 - DNA, 25 bp, Probe Sequence
tctgtctattaccaatgaagagggc

SEQ ID NO: 90810 - DNA, 25 bp, Probe Sequence
gatattccgtctgtcccataataaa

SEQ ID NO: 90811 - DNA, 25 bp, Probe Sequence
tgtagccataccgtttgattgtttg

SEQ ID NO: 90812 - DNA, 25 bp, Probe Sequence
tctattaccaatgaagagggcatcc

SEQ ID NO: 90813 - DNA, 25 bp, Probe Sequence
gaagagggcatcctataaatatggg

SEQ ID NO: 90814 - DNA, 25 bp, Probe Sequence
tgaagagggcatcctataaatatgg

SEQ ID NO: 90815 - DNA, 25 bp, Probe Sequence
ccaatgaagagggcatcctataaat

SEQ ID NO: 90816 - DNA, 25 bp, Probe Sequence
acatctacagtattagtctatcgct

SEQ ID NO: 90817 - DNA, 25 bp, Probe Sequence
tattagtctatcgcttacttcgcct

SEQ ID NO: 90818 - DNA, 25 bp, Probe Sequence
gtattagtctatcgcttacttcgcc

SEQ ID NO: 90819 - DNA, 25 bp, Probe Sequence
tgccaagtacatctacagtattagt

SEQ ID NO: 90820 - DNA, 25 bp, Probe Sequence
gccaagtacatctacagtattagtc

SEQ ID NO: 90821 - DNA, 25 bp, Probe Sequence
attagtctatcgcttacttcgcctt

SEQ ID NO: 90822 - DNA, 25 bp, Probe Sequence
catctacagtattagtctatcgctt

SEQ ID NO: 90823 - DNA, 25 bp, Probe Sequence
ttgccaagtacatctacagtattag

SEQ ID NO: 90824 - DNA, 25 bp, Probe Sequence
agtattagtctatcgcttacttcgc

SEQ ID NO: 90825 - DNA, 25 bp, Probe Sequence
cttgccaagtacatctacagtatta

SEQ ID NO: 90826 - DNA, 25 bp, Probe Sequence
tctatatcagcccagtagtcttctt

SEQ ID NO: 90827 - DNA, 25 bp, Probe Sequence
ttctatatcagcccagtagtcttct

SEQ ID NO: 90828 - DNA, 25 bp, Probe Sequence
gttctatatcagcccagtagtcttc

SEQ ID NO: 90829 - DNA, 25 bp, Probe Sequence
tagtgttctatatcagcccagtagt

SEQ ID NO: 90830 - DNA, 25 bp, Probe Sequence
tatcggtgggtagtgttctatatca

SEQ ID NO: 90831 - DNA, 25 bp, Probe Sequence
gtatcggtgggtagtgttctatatc

SEQ ID NO: 90832 - DNA, 25 bp, Probe Sequence
gtagtgttctatatcagcccagtag

SEQ ID NO: 90833 - DNA, 25 bp, Probe Sequence
tacatctacagtattagtctatcgc

SEQ ID NO: 90834 - DNA, 25 bp, Probe Sequence
tgttctatatcagcccagtagtctt

SEQ ID NO: 90835 - DNA, 25 bp, Probe Sequence
cagtattagtctatcgcttacttcg

SEQ ID NO: 90836 - DNA, 25 bp, Probe Sequence
ctatatcagcccagtagtcttcttt

SEQ ID NO: 90837 - DNA, 25 bp, Probe Sequence
ttagtctatcgcttacttcgccttg

SEQ ID NO: 90838 - DNA, 25 bp, Probe Sequence
tctacagtattagtctatcgcttac

SEQ ID NO: 90839 - DNA, 25 bp, Probe Sequence
ggtagtgttctatatcagcccagta

SEQ ID NO: 90840 - DNA, 25 bp, Probe Sequence
atattcagtcaaggcacttatggtt

SEQ ID NO: 90841 - DNA, 25 bp, Probe Sequence
gatattcagtcaaggcacttatggt

SEQ ID NO: 90842 - DNA, 25 bp, Probe Sequence
tgatattcagtcaaggcacttatgg

SEQ ID NO: 90843 - DNA, 25 bp, Probe Sequence
gagcatataccttcacagttcttaa

SEQ ID NO: 90844 - DNA, 25 bp, Probe Sequence
tgagcatataccttcacagttctta

SEQ ID NO: 90845 - DNA, 25 bp, Probe Sequence
atgatattcagtcaaggcacttatg

SEQ ID NO: 90846 - DNA, 25 bp, Probe Sequence
agcatataccttcacagttcttaat

SEQ ID NO: 90847 - DNA, 25 bp, Probe Sequence
catgatattcagtcaaggcacttat

SEQ ID NO: 90848 - DNA, 25 bp, Probe Sequence
tggaataaagtgagaatgggagaag

SEQ ID NO: 90849 - DNA, 25 bp, Probe Sequence
ttggaataaagtgagaatgggagaa

SEQ ID NO: 90850 - DNA, 25 bp, Probe Sequence
tttggaataaagtgagaatgggaga

SEQ ID NO: 90851 - DNA, 25 bp, Probe Sequence
taaagtgagaatgggagaagggata

SEQ ID NO: 90852 - DNA, 25 bp, Probe Sequence
ataccttcacagttcttaatacctg

SEQ ID NO: 90853 - DNA, 25 bp, Probe Sequence
gaataaagtgagaatgggagaaggg

SEQ ID NO: 90854 - DNA, 25 bp, Probe Sequence
ggaataaagtgagaatgggagaagg

SEQ ID NO: 90855 - DNA, 25 bp, Probe Sequence
ataaagtgagaatgggagaagggat

SEQ ID NO: 90856 - DNA, 25 bp, Probe Sequence
cttgaaacttagagaaccctttgaa

SEQ ID NO: 90857 - DNA, 25 bp, Probe Sequence
ggtgtaccagtatgagtggaatata

SEQ ID NO: 90858 - DNA, 25 bp, Probe Sequence
aaagtgagaatgggagaagggatat

SEQ ID NO: 90859 - DNA, 25 bp, Probe Sequence
aataaagtgagaatgggagaaggga

SEQ ID NO: 90860 - DNA, 25 bp, Probe Sequence
tcttgaaacttagagaaccctttga

SEQ ID NO: 90861 - DNA, 25 bp, Probe Sequence
ttgaaacttagagaaccctttgaat

SEQ ID NO: 90862 - DNA, 25 bp, Probe Sequence
tattcagtcaaggcacttatggttt

SEQ ID NO: 90863 - DNA, 25 bp, Probe Sequence
aagtgagaatgggagaagggatatg

SEQ ID NO: 90864 - DNA, 25 bp, Probe Sequence
atattcagtcaaggcacttatggtt

SEQ ID NO: 90865 - DNA, 25 bp, Probe Sequence
gatattcagtcaaggcacttatggt

SEQ ID NO: 90866 - DNA, 25 bp, Probe Sequence
tgatattcagtcaaggcacttatgg

SEQ ID NO: 90867 - DNA, 25 bp, Probe Sequence
gagcatataccttcacagttcttaa

SEQ ID NO: 90868 - DNA, 25 bp, Probe Sequence
tgagcatataccttcacagttctta

SEQ ID NO: 90869 - DNA, 25 bp, Probe Sequence
atgatattcagtcaaggcacttatg

SEQ ID NO: 90870 - DNA, 25 bp, Probe Sequence
agcatataccttcacagttcttaat

SEQ ID NO: 90871 - DNA, 25 bp, Probe Sequence
catgatattcagtcaaggcacttat

SEQ ID NO: 90872 - DNA, 25 bp, Probe Sequence
tggaataaagtgagaatgggagaag

SEQ ID NO: 90873 - DNA, 25 bp, Probe Sequence
ttggaataaagtgagaatgggagaa

SEQ ID NO: 90874 - DNA, 25 bp, Probe Sequence
tttggaataaagtgagaatgggaga

SEQ ID NO: 90875 - DNA, 25 bp, Probe Sequence
taaagtgagaatgggagaagggata

SEQ ID NO: 90876 - DNA, 25 bp, Probe Sequence
ataccttcacagttcttaatacctg

SEQ ID NO: 90877 - DNA, 25 bp, Probe Sequence
gaataaagtgagaatgggagaaggg

SEQ ID NO: 90878 - DNA, 25 bp, Probe Sequence
ggaataaagtgagaatgggagaagg

SEQ ID NO: 90879 - DNA, 25 bp, Probe Sequence
ataaagtgagaatgggagaagggat

SEQ ID NO: 90880 - DNA, 25 bp, Probe Sequence
cttgaaacttagagaaccctttgaa

SEQ ID NO: 90881 - DNA, 25 bp, Probe Sequence
ggtgtaccagtatgagtggaatata

SEQ ID NO: 90882 - DNA, 25 bp, Probe Sequence
aaagtgagaatgggagaagggatat

SEQ ID NO: 90883 - DNA, 25 bp, Probe Sequence
aataaagtgagaatgggagaaggga

SEQ ID NO: 90884 - DNA, 25 bp, Probe Sequence
tcttgaaacttagagaaccctttga

SEQ ID NO: 90885 - DNA, 25 bp, Probe Sequence
ttgaaacttagagaaccctttgaat

SEQ ID NO: 90886 - DNA, 25 bp, Probe Sequence
tattcagtcaaggcacttatggttt

SEQ ID NO: 90887 - DNA, 25 bp, Probe Sequence
aagtgagaatgggagaagggatatg

SEQ ID NO: 90888 - DNA, 25 bp, Probe Sequence
cagtaaggaatgattgccaatgtat

SEQ ID NO: 90889 - DNA, 25 bp, Probe Sequence
agtaaggaatgattgccaatgtatt

SEQ ID NO: 90890 - DNA, 25 bp, Probe Sequence
ttcacagtaaggaatgattgccaat

SEQ ID NO: 90891 - DNA, 25 bp, Probe Sequence
acagtaaggaatgattgccaatgta

SEQ ID NO: 90892 - DNA, 25 bp, Probe Sequence
tcacagtaaggaatgattgccaatg

SEQ ID NO: 90893 - DNA, 25 bp, Probe Sequence
ggaatgattgccaatgtattatcct

SEQ ID NO: 90894 - DNA, 25 bp, Probe Sequence
aggaatgattgccaatgtattatcc

SEQ ID NO: 90895 - DNA, 25 bp, Probe Sequence
gaatgattgccaatgtattatcctt

SEQ ID NO: 90896 - DNA, 25 bp, Probe Sequence
aaggaatgattgccaatgtattatc

SEQ ID NO: 90897 - DNA, 25 bp, Probe Sequence
attcacagtaaggaatgattgccaa

SEQ ID NO: 90898 - DNA, 25 bp, Probe Sequence
cacagtaaggaatgattgccaatgt

SEQ ID NO: 90899 - DNA, 25 bp, Probe Sequence
aagttaccaaatgaggaagaggaaa

SEQ ID NO: 90900 - DNA, 25 bp, Probe Sequence
ttgtgggttgttggtttattacttg

SEQ ID NO: 90901 - DNA, 25 bp, Probe Sequence
gtaactattgcttctgccatttctt

SEQ ID NO: 90902 - DNA, 25 bp, Probe Sequence
tagaagttaccaaatgaggaagagg

SEQ ID NO: 90903 - DNA, 25 bp, Probe Sequence
taactgtaacttagacctttcctgg

SEQ ID NO: 90904 - DNA, 25 bp, Probe Sequence
agttaccaaatgaggaagaggaaag

SEQ ID NO: 90905 - DNA, 25 bp, Probe Sequence
gaagttaccaaatgaggaagaggaa

SEQ ID NO: 90906 - DNA, 25 bp, Probe Sequence
agtgttagaagttaccaaatgagga

SEQ ID NO: 90907 - DNA, 25 bp, Probe Sequence
taactattgcttctgccatttcttc

SEQ ID NO: 90908 - DNA, 25 bp, Probe Sequence
gttgttggtttattacttgggtgtc

SEQ ID NO: 90909 - DNA, 25 bp, Probe Sequence
attgtgggttgttggtttattactt

SEQ ID NO: 90910 - DNA, 25 bp, Probe Sequence
ttgttggtttattacttgggtgtca

SEQ ID NO: 90911 - DNA, 25 bp, Probe Sequence
agtaactattgcttctgccatttct

SEQ ID NO: 90912 - DNA, 25 bp, Probe Sequence
ctcagaacaagtcatacctaatgct

SEQ ID NO: 90913 - DNA, 25 bp, Probe Sequence
atgaagatacatattggtggcagag

SEQ ID NO: 90914 - DNA, 25 bp, Probe Sequence
ctaattcaacagaagcaactccatc

SEQ ID NO: 90915 - DNA, 25 bp, Probe Sequence
aattcaacagaagcaactccatcta

SEQ ID NO: 90916 - DNA, 25 bp, Probe Sequence
taattcaacagaagcaactccatct

SEQ ID NO: 90917 - DNA, 25 bp, Probe Sequence
attcaacagaagcaactccatctac

SEQ ID NO: 90918 - DNA, 25 bp, Probe Sequence
gttgattcgcatagattctccagag

SEQ ID NO: 90919 - DNA, 25 bp, Probe Sequence
actcagaacaagtcatacctaatgc

SEQ ID NO: 90920 - DNA, 25 bp, Probe Sequence
ttgattcgcatagattctccagagt

SEQ ID NO: 90921 - DNA, 25 bp, Probe Sequence
aaggttgattcgcatagattctcca

SEQ ID NO: 90922 - DNA, 25 bp, Probe Sequence
tcagaacaagtcatacctaatgctg

SEQ ID NO: 90923 - DNA, 25 bp, Probe Sequence
tgattcgcatagattctccagagtc

SEQ ID NO: 90924 - DNA, 25 bp, Probe Sequence
gtatgaagatacatattggtggcag

SEQ ID NO: 90925 - DNA, 25 bp, Probe Sequence
tatgaagatacatattggtggcaga

SEQ ID NO: 90926 - DNA, 25 bp, Probe Sequence
atacatattggtggcagagctaatt

SEQ ID NO: 90927 - DNA, 25 bp, Probe Sequence
ggttgattcgcatagattctccaga

SEQ ID NO: 90928 - DNA, 25 bp, Probe Sequence
aggttgattcgcatagattctccag

SEQ ID NO: 90929 - DNA, 25 bp, Probe Sequence
gatacatattggtggcagagctaat

SEQ ID NO: 90930 - DNA, 25 bp, Probe Sequence
tacatattggtggcagagctaattc

SEQ ID NO: 90931 - DNA, 25 bp, Probe Sequence
tactcagaacaagtcatacctaatg

SEQ ID NO: 90932 - DNA, 25 bp, Probe Sequence
tgaagatacatattggtggcagagc

SEQ ID NO: 90933 - DNA, 25 bp, Probe Sequence
gattcgcatagattctccagagtcc

SEQ ID NO: 90934 - DNA, 25 bp, Probe Sequence
agatacatattggtggcagagctaa

SEQ ID NO: 90935 - DNA, 25 bp, Probe Sequence
aagatacatattggtggcagagcta

SEQ ID NO: 90936 - DNA, 25 bp, Probe Sequence
cttctctttgtagttgatgctttgt

SEQ ID NO: 90937 - DNA, 25 bp, Probe Sequence
tttctgcttctctttgtagttgatg

SEQ ID NO: 90938 - DNA, 25 bp, Probe Sequence
tctctttgtagttgatgctttgttt

SEQ ID NO: 90939 - DNA, 25 bp, Probe Sequence
ttctctttgtagttgatgctttgtt

SEQ ID NO: 90940 - DNA, 25 bp, Probe Sequence
gcttctctttgtagttgatgctttg

SEQ ID NO: 90941 - DNA, 25 bp, Probe Sequence
tgcttctctttgtagttgatgcttt

SEQ ID NO: 90942 - DNA, 25 bp, Probe Sequence
atttctgcttctctttgtagttgat

SEQ ID NO: 90943 - DNA, 25 bp, Probe Sequence
aatttctgcttctctttgtagttga

SEQ ID NO: 90944 - DNA, 25 bp, Probe Sequence
aacccataagtcaatttgctattca

SEQ ID NO: 90945 - DNA, 25 bp, Probe Sequence
caaagaactcatacttgggattacc

SEQ ID NO: 90946 - DNA, 25 bp, Probe Sequence
ctgcttctctttgtagttgatgctt

SEQ ID NO: 90947 - DNA, 25 bp, Probe Sequence
ttctgcttctctttgtagttgatgc

SEQ ID NO: 90948 - DNA, 25 bp, Probe Sequence
acccataagtcaatttgctattcat

SEQ ID NO: 90949 - DNA, 25 bp, Probe Sequence
gctctgtagttgctaatttaaccca

SEQ ID NO: 90950 - DNA, 25 bp, Probe Sequence
gaatttctgcttctctttgtagttg

SEQ ID NO: 90951 - DNA, 25 bp, Probe Sequence
ctctgtagttgctaatttaacccat

SEQ ID NO: 90952 - DNA, 25 bp, Probe Sequence
gcagtcagaaattccttgtatttgt

SEQ ID NO: 90953 - DNA, 25 bp, Probe Sequence
agttgctaatttaacccataagtca

SEQ ID NO: 90954 - DNA, 25 bp, Probe Sequence
tctgcttctctttgtagttgatgct

SEQ ID NO: 90955 - DNA, 25 bp, Probe Sequence
agagttcatagtctatttagtgtgc

SEQ ID NO: 90956 - DNA, 25 bp, Probe Sequence
actaaattatgttcctgccaagtaa

SEQ ID NO: 90957 - DNA, 25 bp, Probe Sequence
gtactaaattatgttcctgccaagt

SEQ ID NO: 90958 - DNA, 25 bp, Probe Sequence
agtcagaaattccttgtatttgtca

SEQ ID NO: 90959 - DNA, 25 bp, Probe Sequence
cagtcagaaattccttgtatttgtc

SEQ ID NO: 90960 - DNA, 25 bp, Probe Sequence
gtgtcttcagtgtctcattgtcatc

SEQ ID NO: 90961 - DNA, 25 bp, Probe Sequence
tgtgtcttcagtgtctcattgtcat

SEQ ID NO: 90962 - DNA, 25 bp, Probe Sequence
tgtcttcagtgtctcattgtcatcc

SEQ ID NO: 90963 - DNA, 25 bp, Probe Sequence
gtgtgtcttcagtgtctcattgtca

SEQ ID NO: 90964 - DNA, 25 bp, Probe Sequence
gttcatttgtatattgttgttcggg

SEQ ID NO: 90965 - DNA, 25 bp, Probe Sequence
cttcgtgtgtcttcagtgtctcatt

SEQ ID NO: 90966 - DNA, 25 bp, Probe Sequence
ttcgtgtgtcttcagtgtctcattg

SEQ ID NO: 90967 - DNA, 25 bp, Probe Sequence
atttaactcttgaagtcacaccctc

SEQ ID NO: 90968 - DNA, 25 bp, Probe Sequence
gatttaactcttgaagtcacaccct

SEQ ID NO: 90969 - DNA, 25 bp, Probe Sequence
gcctaagtgtgatttaactcttgaa

SEQ ID NO: 90970 - DNA, 25 bp, Probe Sequence
tgttcatttgtatattgttgttcgg

SEQ ID NO: 90971 - DNA, 25 bp, Probe Sequence
cgttctttaaccaactgaaatgaaa

SEQ ID NO: 90972 - DNA, 25 bp, Probe Sequence
tgatttaactcttgaagtcacaccc

SEQ ID NO: 90973 - DNA, 25 bp, Probe Sequence
gtgtctggcatgaaattactgtaaa

SEQ ID NO: 90974 - DNA, 25 bp, Probe Sequence
tgtctggcatgaaattactgtaaag

SEQ ID NO: 90975 - DNA, 25 bp, Probe Sequence
accctccctatatatgttcatttgt

SEQ ID NO: 90976 - DNA, 25 bp, Probe Sequence
aagtgtgatttaactcttgaagtca

SEQ ID NO: 90977 - DNA, 25 bp, Probe Sequence
tggcatgaaattactgtaaagaact

SEQ ID NO: 90978 - DNA, 25 bp, Probe Sequence
gtctggcatgaaattactgtaaaga

SEQ ID NO: 90979 - DNA, 25 bp, Probe Sequence
ctggcatgaaattactgtaaagaac

SEQ ID NO: 90980 - DNA, 25 bp, Probe Sequence
ggtgtctggcatgaaattactgtaa

SEQ ID NO: 90981 - DNA, 25 bp, Probe Sequence
ctaatcattgtagtggcctaagtgt

SEQ ID NO: 90982 - DNA, 25 bp, Probe Sequence
taatcattgtagtggcctaagtgtg

SEQ ID NO: 90983 - DNA, 25 bp, Probe Sequence
ccacagagtaccctccctatatatg

SEQ ID NO: 90984 - DNA, 25 bp, Probe Sequence
gtctgatttattcactgagcaaacc

SEQ ID NO: 90985 - DNA, 25 bp, Probe Sequence
ggtctgatttattcactgagcaaac

SEQ ID NO: 90986 - DNA, 25 bp, Probe Sequence
tctgatttattcactgagcaaacca

SEQ ID NO: 90987 - DNA, 25 bp, Probe Sequence
tggtctgatttattcactgagcaaa

SEQ ID NO: 90988 - DNA, 25 bp, Probe Sequence
ttggtctgatttattcactgagcaa

SEQ ID NO: 90989 - DNA, 25 bp, Probe Sequence
tgatctggtgactggaattaaactg

SEQ ID NO: 90990 - DNA, 25 bp, Probe Sequence
gtgatctggtgactggaattaaact

SEQ ID NO: 90991 - DNA, 25 bp, Probe Sequence
cttggtctgatttattcactgagca

SEQ ID NO: 90992 - DNA, 25 bp, Probe Sequence
acttggtctgatttattcactgagc

SEQ ID NO: 90993 - DNA, 25 bp, Probe Sequence
ggtgactggaattaaactgctgaaa

SEQ ID NO: 90994 - DNA, 25 bp, Probe Sequence
tgacttggtctgatttattcactga

SEQ ID NO: 90995 - DNA, 25 bp, Probe Sequence
ctgatttattcactgagcaaaccag

SEQ ID NO: 90996 - DNA, 25 bp, Probe Sequence
gacttggtctgatttattcactgag

SEQ ID NO: 90997 - DNA, 25 bp, Probe Sequence
agtgatctggtgactggaattaaac

SEQ ID NO: 90998 - DNA, 25 bp, Probe Sequence
atgacttggtctgatttattcactg

SEQ ID NO: 90999 - DNA, 25 bp, Probe Sequence
atctggtgactggaattaaactgct

SEQ ID NO: 91000 - DNA, 25 bp, Probe Sequence
gaacatttatttctgctgtgcttta

SEQ ID NO: 91001 - DNA, 25 bp, Probe Sequence
gatctggtgactggaattaaactgc

SEQ ID NO: 91002 - DNA, 25 bp, Probe Sequence
aatgacttggtctgatttattcact

SEQ ID NO: 91003 - DNA, 25 bp, Probe Sequence
tttatttctgctgtgctttattagt

SEQ ID NO: 91004 - DNA, 25 bp, Probe Sequence
tggtgactggaattaaactgctgaa

SEQ ID NO: 91005 - DNA, 25 bp, Probe Sequence
acatttatttctgctgtgctttatt

SEQ ID NO: 91006 - DNA, 25 bp, Probe Sequence
aacatttatttctgctgtgctttat

SEQ ID NO: 91007 - DNA, 25 bp, Probe Sequence
tgatttattcactgagcaaaccagc

SEQ ID NO: 91008 - DNA, 25 bp, Probe Sequence
ctgttacttgctttgagttggaatc

SEQ ID NO: 91009 - DNA, 25 bp, Probe Sequence
cgattctttgaagagatgacaacaa

SEQ ID NO: 91010 - DNA, 25 bp, Probe Sequence
tgttacttgctttgagttggaatcg

SEQ ID NO: 91011 - DNA, 25 bp, Probe Sequence
gctgttacttgctttgagttggaat

SEQ ID NO: 91012 - DNA, 25 bp, Probe Sequence
tcgattctttgaagagatgacaaca

SEQ ID NO: 91013 - DNA, 25 bp, Probe Sequence
ctacgcaattctcgattctttgaag

SEQ ID NO: 91014 - DNA, 25 bp, Probe Sequence
tacgcaattctcgattctttgaaga

SEQ ID NO: 91015 - DNA, 25 bp, Probe Sequence
ctcgattctttgaagagatgacaac

SEQ ID NO: 91016 - DNA, 25 bp, Probe Sequence
gttacttgctttgagttggaatcgg

SEQ ID NO: 91017 - DNA, 25 bp, Probe Sequence
ttgagttggaatcggtttgcattta

SEQ ID NO: 91018 - DNA, 25 bp, Probe Sequence
tacttgctttgagttggaatcggtt

SEQ ID NO: 91019 - DNA, 25 bp, Probe Sequence
ttacttgctttgagttggaatcggt

SEQ ID NO: 91020 - DNA, 25 bp, Probe Sequence
acgcctgtaaatgtattcattctta

SEQ ID NO: 91021 - DNA, 25 bp, Probe Sequence
tacgcctgtaaatgtattcattctt

SEQ ID NO: 91022 - DNA, 25 bp, Probe Sequence
ttacgcctgtaaatgtattcattct

SEQ ID NO: 91023 - DNA, 25 bp, Probe Sequence
cttgctttgagttggaatcggtttg

SEQ ID NO: 91024 - DNA, 25 bp, Probe Sequence
acgcaattctcgattctttgaagag

SEQ ID NO: 91025 - DNA, 25 bp, Probe Sequence
gctacgcaattctcgattctttgaa

SEQ ID NO: 91026 - DNA, 25 bp, Probe Sequence
tgagttggaatcggtttgcatttac

SEQ ID NO: 91027 - DNA, 25 bp, Probe Sequence
tttgagttggaatcggtttgcattt

SEQ ID NO: 91028 - DNA, 25 bp, Probe Sequence
cgcctgtaaatgtattcattcttaa

SEQ ID NO: 91029 - DNA, 25 bp, Probe Sequence
ctttgagttggaatcggtttgcatt

SEQ ID NO: 91030 - DNA, 25 bp, Probe Sequence
acttgctttgagttggaatcggttt

SEQ ID NO: 91031 - DNA, 25 bp, Probe Sequence
gattctttgaagagatgacaacaaa

SEQ ID NO: 91032 - DNA, 25 bp, Probe Sequence
ctatcttctcctgttccacctcttc

SEQ ID NO: 91033 - DNA, 25 bp, Probe Sequence
tatcttctcctgttccacctcttca

SEQ ID NO: 91034 - DNA, 25 bp, Probe Sequence
cggtattctgctgctcatttgtaaa

SEQ ID NO: 91035 - DNA, 25 bp, Probe Sequence
gctatcttctcctgttccacctctt

SEQ ID NO: 91036 - DNA, 25 bp, Probe Sequence
acgcttgtgagattgagaatgaacc

SEQ ID NO: 91037 - DNA, 25 bp, Probe Sequence
cacgcttgtgagattgagaatgaac

SEQ ID NO: 91038 - DNA, 25 bp, Probe Sequence
atcttctcctgttccacctcttcac

SEQ ID NO: 91039 - DNA, 25 bp, Probe Sequence
gttgaatgtgtcccttctctcattt

SEQ ID NO: 91040 - DNA, 25 bp, Probe Sequence
ggtattctgctgctcatttgtaaaa

SEQ ID NO: 91041 - DNA, 25 bp, Probe Sequence
cgcttgtgagattgagaatgaaccg

SEQ ID NO: 91042 - DNA, 25 bp, Probe Sequence
cttgttggtttgcacctttatgtat

SEQ ID NO: 91043 - DNA, 25 bp, Probe Sequence
ttgttggtttgcacctttatgtatg

SEQ ID NO: 91044 - DNA, 25 bp, Probe Sequence
tcttgttggtttgcacctttatgta

SEQ ID NO: 91045 - DNA, 25 bp, Probe Sequence
ctctcttcttgagggtggacttctt

SEQ ID NO: 91046 - DNA, 25 bp, Probe Sequence
tctgctgctcatttgtaaaattgtt

SEQ ID NO: 91047 - DNA, 25 bp, Probe Sequence
ttctgctgctcatttgtaaaattgt

SEQ ID NO: 91048 - DNA, 25 bp, Probe Sequence
gctgctcatttgtaaaattgtttca

SEQ ID NO: 91049 - DNA, 25 bp, Probe Sequence
tgctgctcatttgtaaaattgtttc

SEQ ID NO: 91050 - DNA, 25 bp, Probe Sequence
ctgctgctcatttgtaaaattgttt

SEQ ID NO: 91051 - DNA, 25 bp, Probe Sequence
catcttgttggtttgcacctttatg

SEQ ID NO: 91052 - DNA, 25 bp, Probe Sequence
attctgctgctcatttgtaaaattg

SEQ ID NO: 91053 - DNA, 25 bp, Probe Sequence
atcttgttggtttgcacctttatgt

SEQ ID NO: 91054 - DNA, 25 bp, Probe Sequence
catgttactgagggagattttagcc

SEQ ID NO: 91055 - DNA, 25 bp, Probe Sequence
agctatcttctcctgttccacctct

SEQ ID NO: 91056 - DNA, 25 bp, Probe Sequence
taagttgatgtcagcgtatgtgtat

SEQ ID NO: 91057 - DNA, 25 bp, Probe Sequence
ctaagttgatgtcagcgtatgtgta

SEQ ID NO: 91058 - DNA, 25 bp, Probe Sequence
aagttgatgtcagcgtatgtgtatt

SEQ ID NO: 91059 - DNA, 25 bp, Probe Sequence
tctgtggtaggtaataggagaagaa

SEQ ID NO: 91060 - DNA, 25 bp, Probe Sequence
ttaagcacctccatattatgacttg

SEQ ID NO: 91061 - DNA, 25 bp, Probe Sequence
ggagctataagatggatgtgaagtc

SEQ ID NO: 91062 - DNA, 25 bp, Probe Sequence
taagcacctccatattatgacttgg

SEQ ID NO: 91063 - DNA, 25 bp, Probe Sequence
gagctataagatggatgtgaagtct

SEQ ID NO: 91064 - DNA, 25 bp, Probe Sequence
gtggtaggtaataggagaagaaagg

SEQ ID NO: 91065 - DNA, 25 bp, Probe Sequence
ggatttctgtggtaggtaataggag

SEQ ID NO: 91066 - DNA, 25 bp, Probe Sequence
tggtaggtaataggagaagaaaggg

SEQ ID NO: 91067 - DNA, 25 bp, Probe Sequence
tgtggtaggtaataggagaagaaag

SEQ ID NO: 91068 - DNA, 25 bp, Probe Sequence
ctgtggtaggtaataggagaagaaa

SEQ ID NO: 91069 - DNA, 25 bp, Probe Sequence
gggatttctgtggtaggtaatagga

SEQ ID NO: 91070 - DNA, 25 bp, Probe Sequence
gttgatgtcagcgtatgtgtatttg

SEQ ID NO: 91071 - DNA, 25 bp, Probe Sequence
agttgatgtcagcgtatgtgtattt

SEQ ID NO: 91072 - DNA, 25 bp, Probe Sequence
gtcttagcacctttcttctgttcaa

SEQ ID NO: 91073 - DNA, 25 bp, Probe Sequence
tagcacctttcttctgttcaagttt

SEQ ID NO: 91074 - DNA, 25 bp, Probe Sequence
ttagcacctttcttctgttcaagtt

SEQ ID NO: 91075 - DNA, 25 bp, Probe Sequence
aatgaatcctttccctctgaatgtc

SEQ ID NO: 91076 - DNA, 25 bp, Probe Sequence
tcttagcacctttcttctgttcaag

SEQ ID NO: 91077 - DNA, 25 bp, Probe Sequence
taggtaataggagaagaaagggcac

SEQ ID NO: 91078 - DNA, 25 bp, Probe Sequence
gtaggtaataggagaagaaagggca

SEQ ID NO: 91079 - DNA, 25 bp, Probe Sequence
aagcacctccatattatgacttggt

SEQ ID NO: 91080 - DNA, 25 bp, Probe Sequence
ttgatttccctaagttccttgttct

SEQ ID NO: 91081 - DNA, 25 bp, Probe Sequence
ctaagttccttgttctccctctaaa

SEQ ID NO: 91082 - DNA, 25 bp, Probe Sequence
tgatttccctaagttccttgttctc

SEQ ID NO: 91083 - DNA, 25 bp, Probe Sequence
tttgatttccctaagttccttgttc

SEQ ID NO: 91084 - DNA, 25 bp, Probe Sequence
gatttccctaagttccttgttctcc

SEQ ID NO: 91085 - DNA, 25 bp, Probe Sequence
cctaagttccttgttctccctctaa

SEQ ID NO: 91086 - DNA, 25 bp, Probe Sequence
atttccctaagttccttgttctccc

SEQ ID NO: 91087 - DNA, 25 bp, Probe Sequence
ccctaagttccttgttctccctcta

SEQ ID NO: 91088 - DNA, 25 bp, Probe Sequence
tttccctaagttccttgttctccct

SEQ ID NO: 91089 - DNA, 25 bp, Probe Sequence
atccccattttgatttccctaagtt

SEQ ID NO: 91090 - DNA, 25 bp, Probe Sequence
tatccccattttgatttccctaagt

SEQ ID NO: 91091 - DNA, 25 bp, Probe Sequence
ctgttcgtatccccattttgatttc

SEQ ID NO: 91092 - DNA, 25 bp, Probe Sequence
gtatccccattttgatttccctaag

SEQ ID NO: 91093 - DNA, 25 bp, Probe Sequence
cccattttgatttccctaagttcct

SEQ ID NO: 91094 - DNA, 25 bp, Probe Sequence
tccccattttgatttccctaagttc

SEQ ID NO: 91095 - DNA, 25 bp, Probe Sequence
cgtatccccattttgatttccctaa

SEQ ID NO: 91096 - DNA, 25 bp, Probe Sequence
ccattttgatttccctaagttcctt

SEQ ID NO: 91097 - DNA, 25 bp, Probe Sequence
taagttccttgttctccctctaaaa

SEQ ID NO: 91098 - DNA, 25 bp, Probe Sequence
ttccctaagttccttgttctccctc

SEQ ID NO: 91099 - DNA, 25 bp, Probe Sequence
ttttgatttccctaagttccttgtt

SEQ ID NO: 91100 - DNA, 25 bp, Probe Sequence
attttgatttccctaagttccttgt

SEQ ID NO: 91101 - DNA, 25 bp, Probe Sequence
tcgtatccccattttgatttcccta

SEQ ID NO: 91102 - DNA, 25 bp, Probe Sequence
tgttcgtatccccattttgatttcc

SEQ ID NO: 91103 - DNA, 25 bp, Probe Sequence
cctgttcgtatccccattttgattt

SEQ ID NO: 91104 - DNA, 25 bp, Probe Sequence
cttggaactgaacatggagagatag

SEQ ID NO: 91105 - DNA, 25 bp, Probe Sequence
ccttggaactgaacatggagagata

SEQ ID NO: 91106 - DNA, 25 bp, Probe Sequence
ttggaactgaacatggagagatagt

SEQ ID NO: 91107 - DNA, 25 bp, Probe Sequence
tggaactgaacatggagagatagtg

SEQ ID NO: 91108 - DNA, 25 bp, Probe Sequence
ggaactgaacatggagagatagtgc

SEQ ID NO: 91109 - DNA, 25 bp, Probe Sequence
gaactgaacatggagagatagtgca

SEQ ID NO: 91110 - DNA, 25 bp, Probe Sequence
aactgaacatggagagatagtgcag

SEQ ID NO: 91111 - DNA, 25 bp, Probe Sequence
tccttggaactgaacatggagagat

SEQ ID NO: 91112 - DNA, 25 bp, Probe Sequence
tgaacatggagagatagtgcaggaa

SEQ ID NO: 91113 - DNA, 25 bp, Probe Sequence
aacatggagagatagtgcaggaaag

SEQ ID NO: 91114 - DNA, 25 bp, Probe Sequence
gaacatggagagatagtgcaggaaa

SEQ ID NO: 91115 - DNA, 25 bp, Probe Sequence
gatgttggtgtcagggtcaaagaag

SEQ ID NO: 91116 - DNA, 25 bp, Probe Sequence
gaagtgatctcaaagtaccggattg

SEQ ID NO: 91117 - DNA, 25 bp, Probe Sequence
ctgaacatggagagatagtgcagga

SEQ ID NO: 91118 - DNA, 25 bp, Probe Sequence
cagaggtagacgatgttggtgtcag

SEQ ID NO: 91119 - DNA, 25 bp, Probe Sequence
gatctcacacttgttcacctccagg

SEQ ID NO: 91120 - DNA, 25 bp, Probe Sequence
actgaacatggagagatagtgcagg

SEQ ID NO: 91121 - DNA, 25 bp, Probe Sequence
ggaagtgatctcaaagtaccggatt

SEQ ID NO: 91122 - DNA, 25 bp, Probe Sequence
cgatctcacacttgttcacctccag

SEQ ID NO: 91123 - DNA, 25 bp, Probe Sequence
cacagaggtagacgatgttggtgtc

SEQ ID NO: 91124 - DNA, 25 bp, Probe Sequence
acatggagagatagtgcaggaaagg

SEQ ID NO: 91125 - DNA, 25 bp, Probe Sequence
atgttggtgtcagggtcaaagaagg

SEQ ID NO: 91126 - DNA, 25 bp, Probe Sequence
aagtgatctcaaagtaccggattga

SEQ ID NO: 91127 - DNA, 25 bp, Probe Sequence
gcctcggaagtgatctcaaagtacc

SEQ ID NO: 91128 - DNA, 25 bp, Probe Sequence
acctgaatcctgaatcttagactct

SEQ ID NO: 91129 - DNA, 25 bp, Probe Sequence
cctgaatcctgaatcttagactctt

SEQ ID NO: 91130 - DNA, 25 bp, Probe Sequence
tacctgaatcctgaatcttagactc

SEQ ID NO: 91131 - DNA, 25 bp, Probe Sequence
gtacctgaatcctgaatcttagact

SEQ ID NO: 91132 - DNA, 25 bp, Probe Sequence
agtacctgaatcctgaatcttagac

SEQ ID NO: 91133 - DNA, 25 bp, Probe Sequence
ccagtacctgaatcctgaatcttag

SEQ ID NO: 91134 - DNA, 25 bp, Probe Sequence
cagtacctgaatcctgaatcttaga

SEQ ID NO: 91135 - DNA, 25 bp, Probe Sequence
ctgaatcctgaatcttagactctta

SEQ ID NO: 91136 - DNA, 25 bp, Probe Sequence
ccaacatctcactgcaattctatca

SEQ ID NO: 91137 - DNA, 25 bp, Probe Sequence
gctggctaatacatatatacctaca

SEQ ID NO: 91138 - DNA, 25 bp, Probe Sequence
atgtaactgagcttggaagaggatc

SEQ ID NO: 91139 - DNA, 25 bp, Probe Sequence
ttcctaatgctcagaacatggatga

SEQ ID NO: 91140 - DNA, 25 bp, Probe Sequence
caacatctcactgcaattctatcag

SEQ ID NO: 91141 - DNA, 25 bp, Probe Sequence
catgtaactgagcttggaagaggat

SEQ ID NO: 91142 - DNA, 25 bp, Probe Sequence
tgaatcctgaatcttagactcttat

SEQ ID NO: 91143 - DNA, 25 bp, Probe Sequence
ggatgagatgataaatgtttgttgt

SEQ ID NO: 91144 - DNA, 25 bp, Probe Sequence
tggatgagatgataaatgtttgttg

SEQ ID NO: 91145 - DNA, 25 bp, Probe Sequence
gccaacatctcactgcaattctatc

SEQ ID NO: 91146 - DNA, 25 bp, Probe Sequence
agtagtagcgtggtatcacaggatt

SEQ ID NO: 91147 - DNA, 25 bp, Probe Sequence
taaggaactcagccatagccatgta

SEQ ID NO: 91148 - DNA, 25 bp, Probe Sequence
tgagatgataaatgtttgttgtgtt

SEQ ID NO: 91149 - DNA, 25 bp, Probe Sequence
ggtatcacaggatttcatcatgttg

SEQ ID NO: 91150 - DNA, 25 bp, Probe Sequence
tggtatcacaggatttcatcatgtt

SEQ ID NO: 91151 - DNA, 25 bp, Probe Sequence
atgagatgataaatgtttgttgtgt

SEQ ID NO: 91152 - DNA, 25 bp, Probe Sequence
acctgaatcctgaatcttagactct

SEQ ID NO: 91153 - DNA, 25 bp, Probe Sequence
cctgaatcctgaatcttagactctt

SEQ ID NO: 91154 - DNA, 25 bp, Probe Sequence
tacctgaatcctgaatcttagactc

SEQ ID NO: 91155 - DNA, 25 bp, Probe Sequence
gtacctgaatcctgaatcttagact

SEQ ID NO: 91156 - DNA, 25 bp, Probe Sequence
agtacctgaatcctgaatcttagac

SEQ ID NO: 91157 - DNA, 25 bp, Probe Sequence
ccagtacctgaatcctgaatcttag

SEQ ID NO: 91158 - DNA, 25 bp, Probe Sequence
cagtacctgaatcctgaatcttaga

SEQ ID NO: 91159 - DNA, 25 bp, Probe Sequence
ctgaatcctgaatcttagactctta

SEQ ID NO: 91160 - DNA, 25 bp, Probe Sequence
ccaacatctcactgcaattctatca

SEQ ID NO: 91161 - DNA, 25 bp, Probe Sequence
gctggctaatacatatatacctaca

SEQ ID NO: 91162 - DNA, 25 bp, Probe Sequence
atgtaactgagcttggaagaggatc

SEQ ID NO: 91163 - DNA, 25 bp, Probe Sequence
ttcctaatgctcagaacatggatga

SEQ ID NO: 91164 - DNA, 25 bp, Probe Sequence
caacatctcactgcaattctatcag

SEQ ID NO: 91165 - DNA, 25 bp, Probe Sequence
catgtaactgagcttggaagaggat

SEQ ID NO: 91166 - DNA, 25 bp, Probe Sequence
tgaatcctgaatcttagactcttat

SEQ ID NO: 91167 - DNA, 25 bp, Probe Sequence
ggatgagatgataaatgtttgttgt

SEQ ID NO: 91168 - DNA, 25 bp, Probe Sequence
tggatgagatgataaatgtttgttg

SEQ ID NO: 91169 - DNA, 25 bp, Probe Sequence
gccaacatctcactgcaattctatc

SEQ ID NO: 91170 - DNA, 25 bp, Probe Sequence
agtagtagcgtggtatcacaggatt

SEQ ID NO: 91171 - DNA, 25 bp, Probe Sequence
taaggaactcagccatagccatgta

SEQ ID NO: 91172 - DNA, 25 bp, Probe Sequence
tgagatgataaatgtttgttgtgtt

SEQ ID NO: 91173 - DNA, 25 bp, Probe Sequence
ggtatcacaggatttcatcatgttg

SEQ ID NO: 91174 - DNA, 25 bp, Probe Sequence
tggtatcacaggatttcatcatgtt

SEQ ID NO: 91175 - DNA, 25 bp, Probe Sequence
atgagatgataaatgtttgttgtgt

SEQ ID NO: 91176 - DNA, 25 bp, Probe Sequence
tatgattgtcacagagatggtagaa

SEQ ID NO: 91177 - DNA, 25 bp, Probe Sequence
ttatgattgtcacagagatggtaga

SEQ ID NO: 91178 - DNA, 25 bp, Probe Sequence
gaataccaattcaaccaccaaggaa

SEQ ID NO: 91179 - DNA, 25 bp, Probe Sequence
gattgtcacagagatggtagaaatt

SEQ ID NO: 91180 - DNA, 25 bp, Probe Sequence
aataccaattcaaccaccaaggaaa

SEQ ID NO: 91181 - DNA, 25 bp, Probe Sequence
tgattgtcacagagatggtagaaat

SEQ ID NO: 91182 - DNA, 25 bp, Probe Sequence
atgattgtcacagagatggtagaaa

SEQ ID NO: 91183 - DNA, 25 bp, Probe Sequence
tgtcacagagatggtagaaattatg

SEQ ID NO: 91184 - DNA, 25 bp, Probe Sequence
cgacatttcatatataggtgccaaa

SEQ ID NO: 91185 - DNA, 25 bp, Probe Sequence
gatgcgacatttcatatataggtgc

SEQ ID NO: 91186 - DNA, 25 bp, Probe Sequence
gggatgcgacatttcatatataggt

SEQ ID NO: 91187 - DNA, 25 bp, Probe Sequence
ggatgcgacatttcatatataggtg

SEQ ID NO: 91188 - DNA, 25 bp, Probe Sequence
ataccaattcaaccaccaaggaaac

SEQ ID NO: 91189 - DNA, 25 bp, Probe Sequence
ccctctcggacatttatacctatgg

SEQ ID NO: 91190 - DNA, 25 bp, Probe Sequence
tggtagaaattatgatctgactgga

SEQ ID NO: 91191 - DNA, 25 bp, Probe Sequence
gcgacatttcatatataggtgccaa

SEQ ID NO: 91192 - DNA, 25 bp, Probe Sequence
aatttatgattgtcacagagatggt

SEQ ID NO: 91193 - DNA, 25 bp, Probe Sequence
atgcgacatttcatatataggtgcc

SEQ ID NO: 91194 - DNA, 25 bp, Probe Sequence
tttatgattgtcacagagatggtag

SEQ ID NO: 91195 - DNA, 25 bp, Probe Sequence
cgggatgcgacatttcatatatagg

SEQ ID NO: 91196 - DNA, 25 bp, Probe Sequence
ttgtcacagagatggtagaaattat

SEQ ID NO: 91197 - DNA, 25 bp, Probe Sequence
attgtcacagagatggtagaaatta

SEQ ID NO: 91198 - DNA, 25 bp, Probe Sequence
gtcacagagatggtagaaattatga

SEQ ID NO: 91199 - DNA, 25 bp, Probe Sequence
gaatttatgattgtcacagagatgg

SEQ ID NO: 91200 - DNA, 25 bp, Probe Sequence
ggcaacataataagacctcatctca

SEQ ID NO: 91201 - DNA, 25 bp, Probe Sequence
tggcaacataataagacctcatctc

SEQ ID NO: 91202 - DNA, 25 bp, Probe Sequence
ctggcaacataataagacctcatct

SEQ ID NO: 91203 - DNA, 25 bp, Probe Sequence
cctggcaacataataagacctcatc

SEQ ID NO: 91204 - DNA, 25 bp, Probe Sequence
atgtagagtgatggaagagcagaat

SEQ ID NO: 91205 - DNA, 25 bp, Probe Sequence
gcaacataataagacctcatctcag

SEQ ID NO: 91206 - DNA, 25 bp, Probe Sequence
gtagagtgatggaagagcagaattg

SEQ ID NO: 91207 - DNA, 25 bp, Probe Sequence
tagagtgatggaagagcagaattgt

SEQ ID NO: 91208 - DNA, 25 bp, Probe Sequence
tgtagagtgatggaagagcagaatt

SEQ ID NO: 91209 - DNA, 25 bp, Probe Sequence
aaccagtgtgagcgagtctaataat

SEQ ID NO: 91210 - DNA, 25 bp, Probe Sequence
agtgtgagcgagtctaataatccag

SEQ ID NO: 91211 - DNA, 25 bp, Probe Sequence
cagtgtgagcgagtctaataatcca

SEQ ID NO: 91212 - DNA, 25 bp, Probe Sequence
accagtgtgagcgagtctaataatc

SEQ ID NO: 91213 - DNA, 25 bp, Probe Sequence
gaaccagtgtgagcgagtctaataa

SEQ ID NO: 91214 - DNA, 25 bp, Probe Sequence
atctgtgtgtgatgtctgttgagtt

SEQ ID NO: 91215 - DNA, 25 bp, Probe Sequence
aatctgtgtgtgatgtctgttgagt

SEQ ID NO: 91216 - DNA, 25 bp, Probe Sequence
caacataataagacctcatctcaga

SEQ ID NO: 91217 - DNA, 25 bp, Probe Sequence
taggaagagaagtcatggtcgatat

SEQ ID NO: 91218 - DNA, 25 bp, Probe Sequence
ataggaagagaagtcatggtcgata

SEQ ID NO: 91219 - DNA, 25 bp, Probe Sequence
tataggaagagaagtcatggtcgat

SEQ ID NO: 91220 - DNA, 25 bp, Probe Sequence
ttataggaagagaagtcatggtcga

SEQ ID NO: 91221 - DNA, 25 bp, Probe Sequence
ccagtgtgagcgagtctaataatcc

SEQ ID NO: 91222 - DNA, 25 bp, Probe Sequence
aaatcttggtttatgcttcctctct

SEQ ID NO: 91223 - DNA, 25 bp, Probe Sequence
cctttggaaatcttggtttatgctt

SEQ ID NO: 91224 - DNA, 25 bp, Probe Sequence
attgtatttgaagactgtttgccat

SEQ ID NO: 91225 - DNA, 25 bp, Probe Sequence
tgtatttgaagactgtttgccataa

SEQ ID NO: 91226 - DNA, 25 bp, Probe Sequence
ttgtatttgaagactgtttgccata

SEQ ID NO: 91227 - DNA, 25 bp, Probe Sequence
tattgtatttgaagactgtttgcca

SEQ ID NO: 91228 - DNA, 25 bp, Probe Sequence
gtattgtatttgaagactgtttgcc

SEQ ID NO: 91229 - DNA, 25 bp, Probe Sequence
gaagactgtttgccataaatctgaa

SEQ ID NO: 91230 - DNA, 25 bp, Probe Sequence
ttgaagactgtttgccataaatctg

SEQ ID NO: 91231 - DNA, 25 bp, Probe Sequence
aagactgtttgccataaatctgaaa

SEQ ID NO: 91232 - DNA, 25 bp, Probe Sequence
tttgaagactgtttgccataaatct

SEQ ID NO: 91233 - DNA, 25 bp, Probe Sequence
tgaagactgtttgccataaatctga

SEQ ID NO: 91234 - DNA, 25 bp, Probe Sequence
agactgtttgccataaatctgaaat

SEQ ID NO: 91235 - DNA, 25 bp, Probe Sequence
tgtattgtatttgaagactgtttgc

SEQ ID NO: 91236 - DNA, 25 bp, Probe Sequence
gactgtttgccataaatctgaaatt

SEQ ID NO: 91237 - DNA, 25 bp, Probe Sequence
aattctacgtgtgctaacataggag

SEQ ID NO: 91238 - DNA, 25 bp, Probe Sequence
gtatttgaagactgtttgccataaa

SEQ ID NO: 91239 - DNA, 25 bp, Probe Sequence
taattctacgtgtgctaacatagga

SEQ ID NO: 91240 - DNA, 25 bp, Probe Sequence
attctacgtgtgctaacataggaga

SEQ ID NO: 91241 - DNA, 25 bp, Probe Sequence
tgaacttcatggcatatcaactttg

SEQ ID NO: 91242 - DNA, 25 bp, Probe Sequence
gaactgtttcctaccttctttacat

SEQ ID NO: 91243 - DNA, 25 bp, Probe Sequence
atttgaagactgtttgccataaatc

SEQ ID NO: 91244 - DNA, 25 bp, Probe Sequence
ccagtaggtgcttaatattgtttga

SEQ ID NO: 91245 - DNA, 25 bp, Probe Sequence
cttgaacttcatggcatatcaactt

SEQ ID NO: 91246 - DNA, 25 bp, Probe Sequence
aaatctcttaaaccagtaggtgctt

SEQ ID NO: 91247 - DNA, 25 bp, Probe Sequence
tctcttaaaccagtaggtgcttaat

SEQ ID NO: 91248 - DNA, 25 bp, Probe Sequence
atagcagtggactgtcttttggatt

SEQ ID NO: 91249 - DNA, 25 bp, Probe Sequence
gatagcagtggactgtcttttggat

SEQ ID NO: 91250 - DNA, 25 bp, Probe Sequence
tagcagtggactgtcttttggattc

SEQ ID NO: 91251 - DNA, 25 bp, Probe Sequence
ggatagcagtggactgtcttttgga

SEQ ID NO: 91252 - DNA, 25 bp, Probe Sequence
gggatagcagtggactgtcttttgg

SEQ ID NO: 91253 - DNA, 25 bp, Probe Sequence
ctaaggcatatcaaagaagcagact

SEQ ID NO: 91254 - DNA, 25 bp, Probe Sequence
taaccctaaggcatatcaaagaagc

SEQ ID NO: 91255 - DNA, 25 bp, Probe Sequence
ggtaaccctaaggcatatcaaagaa

SEQ ID NO: 91256 - DNA, 25 bp, Probe Sequence
accattgcattacaacctctaactt

SEQ ID NO: 91257 - DNA, 25 bp, Probe Sequence
taaggcatatcaaagaagcagactg

SEQ ID NO: 91258 - DNA, 25 bp, Probe Sequence
gtaaccctaaggcatatcaaagaag

SEQ ID NO: 91259 - DNA, 25 bp, Probe Sequence
ccattgcattacaacctctaactta

SEQ ID NO: 91260 - DNA, 25 bp, Probe Sequence
caccattgcattacaacctctaact

SEQ ID NO: 91261 - DNA, 25 bp, Probe Sequence
cctaaggcatatcaaagaagcagac

SEQ ID NO: 91262 - DNA, 25 bp, Probe Sequence
gcaatttgaaatgaaatgacaaggt

SEQ ID NO: 91263 - DNA, 25 bp, Probe Sequence
cgcaatttgaaatgaaatgacaagg

SEQ ID NO: 91264 - DNA, 25 bp, Probe Sequence
ccgcaatttgaaatgaaatgacaag

SEQ ID NO: 91265 - DNA, 25 bp, Probe Sequence
ccaccattgcattacaacctctaac

SEQ ID NO: 91266 - DNA, 25 bp, Probe Sequence
gacttacatttcctggtttaacatt

SEQ ID NO: 91267 - DNA, 25 bp, Probe Sequence
gtggacttacatttcctggtttaac

SEQ ID NO: 91268 - DNA, 25 bp, Probe Sequence
agtggacttacatttcctggtttaa

SEQ ID NO: 91269 - DNA, 25 bp, Probe Sequence
aaccctaaggcatatcaaagaagca

SEQ ID NO: 91270 - DNA, 25 bp, Probe Sequence
tggacttacatttcctggtttaaca

SEQ ID NO: 91271 - DNA, 25 bp, Probe Sequence
gagtggacttacatttcctggttta

SEQ ID NO: 91272 - DNA, 25 bp, Probe Sequence
attgagagtggacttacatttcctg

SEQ ID NO: 91273 - DNA, 25 bp, Probe Sequence
ccctaaggcatatcaaagaagcaga

SEQ ID NO: 91274 - DNA, 25 bp, Probe Sequence
aatttgaaatgaaatgacaaggtgt

SEQ ID NO: 91275 - DNA, 25 bp, Probe Sequence
ggacttacatttcctggtttaacat

SEQ ID NO: 91276 - DNA, 25 bp, Probe Sequence
caatttgaaatgaaatgacaaggtg

SEQ ID NO: 91277 - DNA, 25 bp, Probe Sequence
ctaaggcatatcaaagaagcagact

SEQ ID NO: 91278 - DNA, 25 bp, Probe Sequence
taaccctaaggcatatcaaagaagc

SEQ ID NO: 91279 - DNA, 25 bp, Probe Sequence
ggtaaccctaaggcatatcaaagaa

SEQ ID NO: 91280 - DNA, 25 bp, Probe Sequence
accattgcattacaacctctaactt

SEQ ID NO: 91281 - DNA, 25 bp, Probe Sequence
taaggcatatcaaagaagcagactg

SEQ ID NO: 91282 - DNA, 25 bp, Probe Sequence
gtaaccctaaggcatatcaaagaag

SEQ ID NO: 91283 - DNA, 25 bp, Probe Sequence
ccattgcattacaacctctaactta

SEQ ID NO: 91284 - DNA, 25 bp, Probe Sequence
caccattgcattacaacctctaact

SEQ ID NO: 91285 - DNA, 25 bp, Probe Sequence
cctaaggcatatcaaagaagcagac

SEQ ID NO: 91286 - DNA, 25 bp, Probe Sequence
gcaatttgaaatgaaatgacaaggt

SEQ ID NO: 91287 - DNA, 25 bp, Probe Sequence
cgcaatttgaaatgaaatgacaagg

SEQ ID NO: 91288 - DNA, 25 bp, Probe Sequence
ccgcaatttgaaatgaaatgacaag

SEQ ID NO: 91289 - DNA, 25 bp, Probe Sequence
ccaccattgcattacaacctctaac

SEQ ID NO: 91290 - DNA, 25 bp, Probe Sequence
gacttacatttcctggtttaacatt

SEQ ID NO: 91291 - DNA, 25 bp, Probe Sequence
gtggacttacatttcctggtttaac

SEQ ID NO: 91292 - DNA, 25 bp, Probe Sequence
agtggacttacatttcctggtttaa

SEQ ID NO: 91293 - DNA, 25 bp, Probe Sequence
aaccctaaggcatatcaaagaagca

SEQ ID NO: 91294 - DNA, 25 bp, Probe Sequence
tggacttacatttcctggtttaaca

SEQ ID NO: 91295 - DNA, 25 bp, Probe Sequence
gagtggacttacatttcctggttta

SEQ ID NO: 91296 - DNA, 25 bp, Probe Sequence
attgagagtggacttacatttcctg

SEQ ID NO: 91297 - DNA, 25 bp, Probe Sequence
ccctaaggcatatcaaagaagcaga

SEQ ID NO: 91298 - DNA, 25 bp, Probe Sequence
aatttgaaatgaaatgacaaggtgt

SEQ ID NO: 91299 - DNA, 25 bp, Probe Sequence
ggacttacatttcctggtttaacat

SEQ ID NO: 91300 - DNA, 25 bp, Probe Sequence
caatttgaaatgaaatgacaaggtg

SEQ ID NO: 91301 - DNA, 25 bp, Probe Sequence
aacattaagaagaagaccaagaagc

SEQ ID NO: 91302 - DNA, 25 bp, Probe Sequence
attagaggtaacagatgatggtgaa

SEQ ID NO: 91303 - DNA, 25 bp, Probe Sequence
aattagaggtaacagatgatggtga

SEQ ID NO: 91304 - DNA, 25 bp, Probe Sequence
gaattagaggtaacagatgatggtg

SEQ ID NO: 91305 - DNA, 25 bp, Probe Sequence
agaattagaggtaacagatgatggt

SEQ ID NO: 91306 - DNA, 25 bp, Probe Sequence
cattaagaagaagaccaagaagcgt

SEQ ID NO: 91307 - DNA, 25 bp, Probe Sequence
acattaagaagaagaccaagaagcg

SEQ ID NO: 91308 - DNA, 25 bp, Probe Sequence
tacaacgaataagcacctatggact

SEQ ID NO: 91309 - DNA, 25 bp, Probe Sequence
caacgaataagcacctatggacttc

SEQ ID NO: 91310 - DNA, 25 bp, Probe Sequence
aagaattagaggtaacagatgatgg

SEQ ID NO: 91311 - DNA, 25 bp, Probe Sequence
gtacaacgaataagcacctatggac

SEQ ID NO: 91312 - DNA, 25 bp, Probe Sequence
attaagaagaagaccaagaagcgtc

SEQ ID NO: 91313 - DNA, 25 bp, Probe Sequence
acaacgaataagcacctatggactt

SEQ ID NO: 91314 - DNA, 25 bp, Probe Sequence
ttgcctatgaaggtactaatgaaga

SEQ ID NO: 91315 - DNA, 25 bp, Probe Sequence
catccagtagtgaaacagaagagaa

SEQ ID NO: 91316 - DNA, 25 bp, Probe Sequence
aagaacatccagtagtgaaacagaa

SEQ ID NO: 91317 - DNA, 25 bp, Probe Sequence
tagaggtaacagatgatggtgaaac

SEQ ID NO: 91318 - DNA, 25 bp, Probe Sequence
atccagtagtgaaacagaagagaaa

SEQ ID NO: 91319 - DNA, 25 bp, Probe Sequence
aacatccagtagtgaaacagaagag

SEQ ID NO: 91320 - DNA, 25 bp, Probe Sequence
gaacatccagtagtgaaacagaaga

SEQ ID NO: 91321 - DNA, 25 bp, Probe Sequence
agaacatccagtagtgaaacagaag

SEQ ID NO: 91322 - DNA, 25 bp, Probe Sequence
ttagaggtaacagatgatggtgaaa

SEQ ID NO: 91323 - DNA, 25 bp, Probe Sequence
caagaacatccagtagtgaaacaga

SEQ ID NO: 91324 - DNA, 25 bp, Probe Sequence
acaagaacatccagtagtgaaacag

SEQ ID NO: 91325 - DNA, 25 bp, Probe Sequence
gaacacttgctactggataatcgta

SEQ ID NO: 91326 - DNA, 25 bp, Probe Sequence
ctggaacacttgctactggataatc

SEQ ID NO: 91327 - DNA, 25 bp, Probe Sequence
gtgacaacattggctacattacctt

SEQ ID NO: 91328 - DNA, 25 bp, Probe Sequence
aaggaacagagtcacagtagtcttc

SEQ ID NO: 91329 - DNA, 25 bp, Probe Sequence
ataggatgatgagaccatgtatgtg

SEQ ID NO: 91330 - DNA, 25 bp, Probe Sequence
taggatgatgagaccatgtatgtga

SEQ ID NO: 91331 - DNA, 25 bp, Probe Sequence
ccatataggatgatgagaccatgta

SEQ ID NO: 91332 - DNA, 25 bp, Probe Sequence
ggaacagagtcacagtagtcttcag

SEQ ID NO: 91333 - DNA, 25 bp, Probe Sequence
aggatgatgagaccatgtatgtgag

SEQ ID NO: 91334 - DNA, 25 bp, Probe Sequence
ggaacacttgctactggataatcgt

SEQ ID NO: 91335 - DNA, 25 bp, Probe Sequence
tggaacacttgctactggataatcg

SEQ ID NO: 91336 - DNA, 25 bp, Probe Sequence
tataggatgatgagaccatgtatgt

SEQ ID NO: 91337 - DNA, 25 bp, Probe Sequence
gatgatgagaccatgtatgtgagtc

SEQ ID NO: 91338 - DNA, 25 bp, Probe Sequence
ggatgatgagaccatgtatgtgagt

SEQ ID NO: 91339 - DNA, 25 bp, Probe Sequence
gctggaacacttgctactggataat

SEQ ID NO: 91340 - DNA, 25 bp, Probe Sequence
aggaacagagtcacagtagtcttca

SEQ ID NO: 91341 - DNA, 25 bp, Probe Sequence
tccatataggatgatgagaccatgt

SEQ ID NO: 91342 - DNA, 25 bp, Probe Sequence
tgacaacattggctacattaccttt

SEQ ID NO: 91343 - DNA, 25 bp, Probe Sequence
gaacagagtcacagtagtcttcagc

SEQ ID NO: 91344 - DNA, 25 bp, Probe Sequence
gacaacattggctacattacctttg

SEQ ID NO: 91345 - DNA, 25 bp, Probe Sequence
aacacttgctactggataatcgtag

SEQ ID NO: 91346 - DNA, 25 bp, Probe Sequence
atgtgttcattggaaaggtgttcat

SEQ ID NO: 91347 - DNA, 25 bp, Probe Sequence
aaaggaacagagtcacagtagtctt

SEQ ID NO: 91348 - DNA, 25 bp, Probe Sequence
caaagacttcatagttcccaagaat

SEQ ID NO: 91349 - DNA, 25 bp, Probe Sequence
accgtatttctgtgcctgtatttat

SEQ ID NO: 91350 - DNA, 25 bp, Probe Sequence
atttctgtgcctgtatttattgtcc

SEQ ID NO: 91351 - DNA, 25 bp, Probe Sequence
ccgtatttctgtgcctgtatttatt

SEQ ID NO: 91352 - DNA, 25 bp, Probe Sequence
gtgcctgtatttattgtcccatttg

SEQ ID NO: 91353 - DNA, 25 bp, Probe Sequence
tgtgcctgtatttattgtcccattt

SEQ ID NO: 91354 - DNA, 25 bp, Probe Sequence
ctgtgcctgtatttattgtcccatt

SEQ ID NO: 91355 - DNA, 25 bp, Probe Sequence
tttctgtgcctgtatttattgtccc

SEQ ID NO: 91356 - DNA, 25 bp, Probe Sequence
cgtatttctgtgcctgtatttattg

SEQ ID NO: 91357 - DNA, 25 bp, Probe Sequence
acatgcaataccagacattataact

SEQ ID NO: 91358 - DNA, 25 bp, Probe Sequence
gcccacaaattctgatactgtttaa

SEQ ID NO: 91359 - DNA, 25 bp, Probe Sequence
tctgtgcctgtatttattgtcccat

SEQ ID NO: 91360 - DNA, 25 bp, Probe Sequence
tgcctgtatttattgtcccatttgc

SEQ ID NO: 91361 - DNA, 25 bp, Probe Sequence
ttctgtgcctgtatttattgtccca

SEQ ID NO: 91362 - DNA, 25 bp, Probe Sequence
tgtaacatgcaataccagacattat

SEQ ID NO: 91363 - DNA, 25 bp, Probe Sequence
gtatttctgtgcctgtatttattgt

SEQ ID NO: 91364 - DNA, 25 bp, Probe Sequence
atatttcagtgctgtcaccgtattt

SEQ ID NO: 91365 - DNA, 25 bp, Probe Sequence
aacatgcaataccagacattataac

SEQ ID NO: 91366 - DNA, 25 bp, Probe Sequence
caccgtatttctgtgcctgtattta

SEQ ID NO: 91367 - DNA, 25 bp, Probe Sequence
tatttctgtgcctgtatttattgtc

SEQ ID NO: 91368 - DNA, 25 bp, Probe Sequence
tatttcagtgctgtcaccgtatttc

SEQ ID NO: 91369 - DNA, 25 bp, Probe Sequence
catatttcagtgctgtcaccgtatt

SEQ ID NO: 91370 - DNA, 25 bp, Probe Sequence
tatatgtaacatgcaataccagaca

SEQ ID NO: 91371 - DNA, 25 bp, Probe Sequence
gtaacatgcaataccagacattata

SEQ ID NO: 91372 - DNA, 25 bp, Probe Sequence
catgcaataccagacattataacta

SEQ ID NO: 91373 - DNA, 25 bp, Probe Sequence
gagtgtaagttcatgtaggagagtg

SEQ ID NO: 91374 - DNA, 25 bp, Probe Sequence
gtgtaagttcatgtaggagagtgta

SEQ ID NO: 91375 - DNA, 25 bp, Probe Sequence
taagttcatgtaggagagtgtatgc

SEQ ID NO: 91376 - DNA, 25 bp, Probe Sequence
agtgtaagttcatgtaggagagtgt

SEQ ID NO: 91377 - DNA, 25 bp, Probe Sequence
tgtaagttcatgtaggagagtgtat

SEQ ID NO: 91378 - DNA, 25 bp, Probe Sequence
gtgagtgtaagttcatgtaggagag

SEQ ID NO: 91379 - DNA, 25 bp, Probe Sequence
tgagtgtaagttcatgtaggagagt

SEQ ID NO: 91380 - DNA, 25 bp, Probe Sequence
tgtgagtgtaagttcatgtaggaga

SEQ ID NO: 91381 - DNA, 25 bp, Probe Sequence
gtgtgagtgtaagttcatgtaggag

SEQ ID NO: 91382 - DNA, 25 bp, Probe Sequence
gtaagttcatgtaggagagtgtatg

SEQ ID NO: 91383 - DNA, 25 bp, Probe Sequence
caggtgtgagtgtaagttcatgtag

SEQ ID NO: 91384 - DNA, 25 bp, Probe Sequence
aggtgtgagtgtaagttcatgtagg

SEQ ID NO: 91385 - DNA, 25 bp, Probe Sequence
ggtgtgagtgtaagttcatgtagga

SEQ ID NO: 91386 - DNA, 25 bp, Probe Sequence
aagttcatgtaggagagtgtatgcg

SEQ ID NO: 91387 - DNA, 25 bp, Probe Sequence
gcaggtgtgagtgtaagttcatgta

SEQ ID NO: 91388 - DNA, 25 bp, Probe Sequence
atgacattccaagctccaataaaga

SEQ ID NO: 91389 - DNA, 25 bp, Probe Sequence
gttcatgtaggagagtgtatgcgtg

SEQ ID NO: 91390 - DNA, 25 bp, Probe Sequence
tatgacattccaagctccaataaag

SEQ ID NO: 91391 - DNA, 25 bp, Probe Sequence
ctatgacattccaagctccaataaa

SEQ ID NO: 91392 - DNA, 25 bp, Probe Sequence
attccaagctccaataaagactgtc

SEQ ID NO: 91393 - DNA, 25 bp, Probe Sequence
gacattccaagctccaataaagact

SEQ ID NO: 91394 - DNA, 25 bp, Probe Sequence
agttcatgtaggagagtgtatgcgt

SEQ ID NO: 91395 - DNA, 25 bp, Probe Sequence
gctatgacattccaagctccaataa

SEQ ID NO: 91396 - DNA, 25 bp, Probe Sequence
cattccaagctccaataaagactgt

SEQ ID NO: 91397 - DNA, 25 bp, Probe Sequence
agacaaggatatgactgagcaataa

SEQ ID NO: 91398 - DNA, 25 bp, Probe Sequence
aagacaaggatatgactgagcaata

SEQ ID NO: 91399 - DNA, 25 bp, Probe Sequence
atgaggagatgaagttaaggcataa

SEQ ID NO: 91400 - DNA, 25 bp, Probe Sequence
aatgaggagatgaagttaaggcata

SEQ ID NO: 91401 - DNA, 25 bp, Probe Sequence
aacagactcatcctataagaagtgc

SEQ ID NO: 91402 - DNA, 25 bp, Probe Sequence
tccaagacatagtacgataagacct

SEQ ID NO: 91403 - DNA, 25 bp, Probe Sequence
ttccaagacatagtacgataagacc

SEQ ID NO: 91404 - DNA, 25 bp, Probe Sequence
acagactcatcctataagaagtgct

SEQ ID NO: 91405 - DNA, 25 bp, Probe Sequence
cagactcatcctataagaagtgcta

SEQ ID NO: 91406 - DNA, 25 bp, Probe Sequence
ccaagacatagtacgataagaccta

SEQ ID NO: 91407 - DNA, 25 bp, Probe Sequence
agactcatcctataagaagtgctaa

SEQ ID NO: 91408 - DNA, 25 bp, Probe Sequence
aagagagagtggcatggcatattaa

SEQ ID NO: 91409 - DNA, 25 bp, Probe Sequence
agaatataacactgtaactgtggtg

SEQ ID NO: 91410 - DNA, 25 bp, Probe Sequence
cagaatataacactgtaactgtggt

SEQ ID NO: 91411 - DNA, 25 bp, Probe Sequence
ttcatcaataacagactcatcctat

SEQ ID NO: 91412 - DNA, 25 bp, Probe Sequence
cagtgaaacaaataacagacgatga

SEQ ID NO: 91413 - DNA, 25 bp, Probe Sequence
tgtggtgtgtaaactactcttatcc

SEQ ID NO: 91414 - DNA, 25 bp, Probe Sequence
gtaactgtggtgtgtaaactactct

SEQ ID NO: 91415 - DNA, 25 bp, Probe Sequence
aaagacaaggatatgactgagcaat

SEQ ID NO: 91416 - DNA, 25 bp, Probe Sequence
gtggtgtgtaaactactcttatcct

SEQ ID NO: 91417 - DNA, 25 bp, Probe Sequence
aactgtggtgtgtaaactactctta

SEQ ID NO: 91418 - DNA, 25 bp, Probe Sequence
taactgtggtgtgtaaactactctt

SEQ ID NO: 91419 - DNA, 25 bp, Probe Sequence
tgtaactgtggtgtgtaaactactc

SEQ ID NO: 91420 - DNA, 25 bp, Probe Sequence
ctgtaactgtggtgtgtaaactact

SEQ ID NO: 91421 - DNA, 25 bp, Probe Sequence
attaccttaaagcatcaccactcat

SEQ ID NO: 91422 - DNA, 25 bp, Probe Sequence
atcattaccttaaagcatcaccact

SEQ ID NO: 91423 - DNA, 25 bp, Probe Sequence
gacgcataatcattaccttaaagca

SEQ ID NO: 91424 - DNA, 25 bp, Probe Sequence
gggacgcataatcattaccttaaag

SEQ ID NO: 91425 - DNA, 25 bp, Probe Sequence
tgggacgcataatcattaccttaaa

SEQ ID NO: 91426 - DNA, 25 bp, Probe Sequence
ttaccttaaagcatcaccactcatt

SEQ ID NO: 91427 - DNA, 25 bp, Probe Sequence
aatcattaccttaaagcatcaccac

SEQ ID NO: 91428 - DNA, 25 bp, Probe Sequence
ggacgcataatcattaccttaaagc

SEQ ID NO: 91429 - DNA, 25 bp, Probe Sequence
taccttaaagcatcaccactcattt

SEQ ID NO: 91430 - DNA, 25 bp, Probe Sequence
tcattaccttaaagcatcaccactc

SEQ ID NO: 91431 - DNA, 25 bp, Probe Sequence
acgcataatcattaccttaaagcat

SEQ ID NO: 91432 - DNA, 25 bp, Probe Sequence
atgggacgcataatcattaccttaa

SEQ ID NO: 91433 - DNA, 25 bp, Probe Sequence
ccttagatgggacgcataatcatta

SEQ ID NO: 91434 - DNA, 25 bp, Probe Sequence
gatgggacgcataatcattacctta

SEQ ID NO: 91435 - DNA, 25 bp, Probe Sequence
ttagatgggacgcataatcattacc

SEQ ID NO: 91436 - DNA, 25 bp, Probe Sequence
cattaccttaaagcatcaccactca

SEQ ID NO: 91437 - DNA, 25 bp, Probe Sequence
cttagatgggacgcataatcattac

SEQ ID NO: 91438 - DNA, 25 bp, Probe Sequence
cgcataatcattaccttaaagcatc

SEQ ID NO: 91439 - DNA, 25 bp, Probe Sequence
tagatgggacgcataatcattacct

SEQ ID NO: 91440 - DNA, 25 bp, Probe Sequence
taatcattaccttaaagcatcacca

SEQ ID NO: 91441 - DNA, 25 bp, Probe Sequence
agatgggacgcataatcattacctt

SEQ ID NO: 91442 - DNA, 25 bp, Probe Sequence
gcataatcattaccttaaagcatca

SEQ ID NO: 91443 - DNA, 25 bp, Probe Sequence
atccttagatgggacgcataatcat

SEQ ID NO: 91444 - DNA, 25 bp, Probe Sequence
tatcctttcaaacagctattggcaa

SEQ ID NO: 91445 - DNA, 25 bp, Probe Sequence
tttaatgttctccagcaaacttcac

SEQ ID NO: 91446 - DNA, 25 bp, Probe Sequence
ttaatgttctccagcaaacttcact

SEQ ID NO: 91447 - DNA, 25 bp, Probe Sequence
aaataaacgaggatgggaacaactg

SEQ ID NO: 91448 - DNA, 25 bp, Probe Sequence
caaataaacgaggatgggaacaact

SEQ ID NO: 91449 - DNA, 25 bp, Probe Sequence
tcaaataaacgaggatgggaacaac

SEQ ID NO: 91450 - DNA, 25 bp, Probe Sequence
gtcaaataaacgaggatgggaacaa

SEQ ID NO: 91451 - DNA, 25 bp, Probe Sequence
ttgtcaaataaacgaggatgggaac

SEQ ID NO: 91452 - DNA, 25 bp, Probe Sequence
taatgttctccagcaaacttcactc

SEQ ID NO: 91453 - DNA, 25 bp, Probe Sequence
tactttgtcaaataaacgaggatgg

SEQ ID NO: 91454 - DNA, 25 bp, Probe Sequence
tttgtcaaataaacgaggatgggaa

SEQ ID NO: 91455 - DNA, 25 bp, Probe Sequence
ctgtttcatgttcactggtatttgg

SEQ ID NO: 91456 - DNA, 25 bp, Probe Sequence
cctgtttcatgttcactggtatttg

SEQ ID NO: 91457 - DNA, 25 bp, Probe Sequence
tcctgtttcatgttcactggtattt

SEQ ID NO: 91458 - DNA, 25 bp, Probe Sequence
ctttgtcaaataaacgaggatggga

SEQ ID NO: 91459 - DNA, 25 bp, Probe Sequence
aagtaacagtttctagttgccgaag

SEQ ID NO: 91460 - DNA, 25 bp, Probe Sequence
gaagtaacagtttctagttgccgaa

SEQ ID NO: 91461 - DNA, 25 bp, Probe Sequence
ctcctgtttcatgttcactggtatt

SEQ ID NO: 91462 - DNA, 25 bp, Probe Sequence
tgtttcatgttcactggtatttggt

SEQ ID NO: 91463 - DNA, 25 bp, Probe Sequence
actttgtcaaataaacgaggatggg

SEQ ID NO: 91464 - DNA, 25 bp, Probe Sequence
tagatagatcgttcttaacacgcat

SEQ ID NO: 91465 - DNA, 25 bp, Probe Sequence
ctagatagatcgttcttaacacgca

SEQ ID NO: 91466 - DNA, 25 bp, Probe Sequence
aataaacgaggatgggaacaactga

SEQ ID NO: 91467 - DNA, 25 bp, Probe Sequence
gtactttgtcaaataaacgaggatg

SEQ ID NO: 91468 - DNA, 25 bp, Probe Sequence
ataaacgaggatgggaacaactgag

SEQ ID NO: 91469 - DNA, 25 bp, Probe Sequence
tcaatctatcaattacagtccgtcc

SEQ ID NO: 91470 - DNA, 25 bp, Probe Sequence
aatctatcaattacagtccgtccac

SEQ ID NO: 91471 - DNA, 25 bp, Probe Sequence
caatctatcaattacagtccgtcca

SEQ ID NO: 91472 - DNA, 25 bp, Probe Sequence
atcaatctatcaattacagtccgtc

SEQ ID NO: 91473 - DNA, 25 bp, Probe Sequence
atctatcaattacagtccgtccacc

SEQ ID NO: 91474 - DNA, 25 bp, Probe Sequence
aatcaatctatcaattacagtccgt

SEQ ID NO: 91475 - DNA, 25 bp, Probe Sequence
ctatcaattacagtccgtccaccac

SEQ ID NO: 91476 - DNA, 25 bp, Probe Sequence
tctatcaattacagtccgtccacca

SEQ ID NO: 91477 - DNA, 25 bp, Probe Sequence
taatcaatctatcaattacagtccg

SEQ ID NO: 91478 - DNA, 25 bp, Probe Sequence
gaagctgtacccaatttaattccat

SEQ ID NO: 91479 - DNA, 25 bp, Probe Sequence
tgaagctgtacccaatttaattcca

SEQ ID NO: 91480 - DNA, 25 bp, Probe Sequence
ttgaagctgtacccaatttaattcc

SEQ ID NO: 91481 - DNA, 25 bp, Probe Sequence
gctgtacccaatttaattccataat

SEQ ID NO: 91482 - DNA, 25 bp, Probe Sequence
agctgtacccaatttaattccataa

SEQ ID NO: 91483 - DNA, 25 bp, Probe Sequence
aagctgtacccaatttaattccata

SEQ ID NO: 91484 - DNA, 25 bp, Probe Sequence
tatcaattacagtccgtccaccacc

SEQ ID NO: 91485 - DNA, 25 bp, Probe Sequence
tttcccacattcatagcctgtagtg

SEQ ID NO: 91486 - DNA, 25 bp, Probe Sequence
ggattgaagctgtacccaatttaat

SEQ ID NO: 91487 - DNA, 25 bp, Probe Sequence
tgtacccaatttaattccataatca

SEQ ID NO: 91488 - DNA, 25 bp, Probe Sequence
cttttcccacattcatagcctgtag

SEQ ID NO: 91489 - DNA, 25 bp, Probe Sequence
attgaagctgtacccaatttaattc

SEQ ID NO: 91490 - DNA, 25 bp, Probe Sequence
gattgaagctgtacccaatttaatt

SEQ ID NO: 91491 - DNA, 25 bp, Probe Sequence
gggattgaagctgtacccaatttaa

SEQ ID NO: 91492 - DNA, 25 bp, Probe Sequence
acccaatttaattccataatcaatc

SEQ ID NO: 91493 - DNA, 25 bp, Probe Sequence
acttgagaagattggcttgaattag

SEQ ID NO: 91494 - DNA, 25 bp, Probe Sequence
gacttgagaagattggcttgaatta

SEQ ID NO: 91495 - DNA, 25 bp, Probe Sequence
cttgagaagattggcttgaattaga

SEQ ID NO: 91496 - DNA, 25 bp, Probe Sequence
ttgagaagattggcttgaattagat

SEQ ID NO: 91497 - DNA, 25 bp, Probe Sequence
ggacttgagaagattggcttgaatt

SEQ ID NO: 91498 - DNA, 25 bp, Probe Sequence
tgagaagattggcttgaattagatc

SEQ ID NO: 91499 - DNA, 25 bp, Probe Sequence
gagaagattggcttgaattagatca

SEQ ID NO: 91500 - DNA, 25 bp, Probe Sequence
tggacttgagaagattggcttgaat

SEQ ID NO: 91501 - DNA, 25 bp, Probe Sequence
atggacttgagaagattggcttgaa

SEQ ID NO: 91502 - DNA, 25 bp, Probe Sequence
aatggacttgagaagattggcttga

SEQ ID NO: 91503 - DNA, 25 bp, Probe Sequence
agaagattggcttgaattagatcat

SEQ ID NO: 91504 - DNA, 25 bp, Probe Sequence
ttctggttatcatttctcttccctg

SEQ ID NO: 91505 - DNA, 25 bp, Probe Sequence
cccaactacctaaccctttcttatt

SEQ ID NO: 91506 - DNA, 25 bp, Probe Sequence
tttctggttatcatttctcttccct

SEQ ID NO: 91507 - DNA, 25 bp, Probe Sequence
ctggttatcatttctcttccctgtg

SEQ ID NO: 91508 - DNA, 25 bp, Probe Sequence
tctggttatcatttctcttccctgt

SEQ ID NO: 91509 - DNA, 25 bp, Probe Sequence
tggctaatgtagaaatgttaagtgg

SEQ ID NO: 91510 - DNA, 25 bp, Probe Sequence
atttctggttatcatttctcttccc

SEQ ID NO: 91511 - DNA, 25 bp, Probe Sequence
ggcaatctttcctgttgtaaatctt

SEQ ID NO: 91512 - DNA, 25 bp, Probe Sequence
gtaaatgaagcccaactacctaacc

SEQ ID NO: 91513 - DNA, 25 bp, Probe Sequence
ggctaatgtagaaatgttaagtgga

SEQ ID NO: 91514 - DNA, 25 bp, Probe Sequence
tctttcctgttgtaaatcttccttt

SEQ ID NO: 91515 - DNA, 25 bp, Probe Sequence
aagtaaatgaagcccaactacctaa

SEQ ID NO: 91516 - DNA, 25 bp, Probe Sequence
aaagtaaatgaagcccaactaccta

SEQ ID NO: 91517 - DNA, 25 bp, Probe Sequence
attagcctgtgactctgtgatgtat

SEQ ID NO: 91518 - DNA, 25 bp, Probe Sequence
ttagcctgtgactctgtgatgtatc

SEQ ID NO: 91519 - DNA, 25 bp, Probe Sequence
cattagcctgtgactctgtgatgta

SEQ ID NO: 91520 - DNA, 25 bp, Probe Sequence
taaacccttagacgcttgagaataa

SEQ ID NO: 91521 - DNA, 25 bp, Probe Sequence
aaacccttagacgcttgagaataaa

SEQ ID NO: 91522 - DNA, 25 bp, Probe Sequence
gtaaacccttagacgcttgagaata

SEQ ID NO: 91523 - DNA, 25 bp, Probe Sequence
aacccttagacgcttgagaataaac

SEQ ID NO: 91524 - DNA, 25 bp, Probe Sequence
ctcattagcctgtgactctgtgatg

SEQ ID NO: 91525 - DNA, 25 bp, Probe Sequence
tctcattagcctgtgactctgtgat

SEQ ID NO: 91526 - DNA, 25 bp, Probe Sequence
tagcctgtgactctgtgatgtatca

SEQ ID NO: 91527 - DNA, 25 bp, Probe Sequence
tgtaaacccttagacgcttgagaat

SEQ ID NO: 91528 - DNA, 25 bp, Probe Sequence
ttgtaaacccttagacgcttgagaa

SEQ ID NO: 91529 - DNA, 25 bp, Probe Sequence
tttgtaaacccttagacgcttgaga

SEQ ID NO: 91530 - DNA, 25 bp, Probe Sequence
tcattagcctgtgactctgtgatgt

SEQ ID NO: 91531 - DNA, 25 bp, Probe Sequence
acccttagacgcttgagaataaacc

SEQ ID NO: 91532 - DNA, 25 bp, Probe Sequence
agcctgtgactctgtgatgtatcat

SEQ ID NO: 91533 - DNA, 25 bp, Probe Sequence
gtcatagatgtcatcttctctctgc

SEQ ID NO: 91534 - DNA, 25 bp, Probe Sequence
gtttgtaaacccttagacgcttgag

SEQ ID NO: 91535 - DNA, 25 bp, Probe Sequence
agtcatagatgtcatcttctctctg

SEQ ID NO: 91536 - DNA, 25 bp, Probe Sequence
gcctgtgactctgtgatgtatcatg

SEQ ID NO: 91537 - DNA, 25 bp, Probe Sequence
tcatagatgtcatcttctctctgcc

SEQ ID NO: 91538 - DNA, 25 bp, Probe Sequence
aagtcatagatgtcatcttctctct

SEQ ID NO: 91539 - DNA, 25 bp, Probe Sequence
cccttagacgcttgagaataaaccc

SEQ ID NO: 91540 - DNA, 25 bp, Probe Sequence
gtctcattagcctgtgactctgtga

SEQ ID NO: 91541 - DNA, 25 bp, Probe Sequence
atattctgtatgttgcaccttgaac

SEQ ID NO: 91542 - DNA, 25 bp, Probe Sequence
caatattctgtatgttgcaccttga

SEQ ID NO: 91543 - DNA, 25 bp, Probe Sequence
tcaatattctgtatgttgcaccttg

SEQ ID NO: 91544 - DNA, 25 bp, Probe Sequence
aatattctgtatgttgcaccttgaa

SEQ ID NO: 91545 - DNA, 25 bp, Probe Sequence
ttcaatattctgtatgttgcacctt

SEQ ID NO: 91546 - DNA, 25 bp, Probe Sequence
tattctgtatgttgcaccttgaacc

SEQ ID NO: 91547 - DNA, 25 bp, Probe Sequence
attcaatattctgtatgttgcacct

SEQ ID NO: 91548 - DNA, 25 bp, Probe Sequence
tcaggaatgtgtttaataccaagaa

SEQ ID NO: 91549 - DNA, 25 bp, Probe Sequence
gtgccaaatatcttgaaatgccaaa

SEQ ID NO: 91550 - DNA, 25 bp, Probe Sequence
tgagcagcctgtttatttctctaat

SEQ ID NO: 91551 - DNA, 25 bp, Probe Sequence
caggaatgtgtttaataccaagaag

SEQ ID NO: 91552 - DNA, 25 bp, Probe Sequence
atcaggaatgtgtttaataccaaga

SEQ ID NO: 91553 - DNA, 25 bp, Probe Sequence
aggaatgtgtttaataccaagaaga

SEQ ID NO: 91554 - DNA, 25 bp, Probe Sequence
tttatgtcagagaaacacacacaca

SEQ ID NO: 91555 - DNA, 25 bp, Probe Sequence
gtgagcagcctgtttatttctctaa

SEQ ID NO: 91556 - DNA, 25 bp, Probe Sequence
aattcaatattctgtatgttgcacc

SEQ ID NO: 91557 - DNA, 25 bp, Probe Sequence
agtgccaaatatcttgaaatgccaa

SEQ ID NO: 91558 - DNA, 25 bp, Probe Sequence
ggaatgtgtttaataccaagaagag

SEQ ID NO: 91559 - DNA, 25 bp, Probe Sequence
gagcagcctgtttatttctctaata

SEQ ID NO: 91560 - DNA, 25 bp, Probe Sequence
agagtgccaaatatcttgaaatgcc

SEQ ID NO: 91561 - DNA, 25 bp, Probe Sequence
aaatgtaatcacaagagtgccaaat

SEQ ID NO: 91562 - DNA, 25 bp, Probe Sequence
tgtaatcacaagagtgccaaatatc

SEQ ID NO: 91563 - DNA, 25 bp, Probe Sequence
agcagcctgtttatttctctaatat

SEQ ID NO: 91564 - DNA, 25 bp, Probe Sequence
ttatgtcagagaaacacacacacac

SEQ ID NO: 91565 - DNA, 25 bp, Probe Sequence
cagttagcctccatgaagattctat

SEQ ID NO: 91566 - DNA, 25 bp, Probe Sequence
ctacagttagcctccatgaagattc

SEQ ID NO: 91567 - DNA, 25 bp, Probe Sequence
agttagcctccatgaagattctatt

SEQ ID NO: 91568 - DNA, 25 bp, Probe Sequence
acagttagcctccatgaagattcta

SEQ ID NO: 91569 - DNA, 25 bp, Probe Sequence
tacagttagcctccatgaagattct

SEQ ID NO: 91570 - DNA, 25 bp, Probe Sequence
aaagactatgttgtgattcggtttg

SEQ ID NO: 91571 - DNA, 25 bp, Probe Sequence
aagactatgttgtgattcggtttga

SEQ ID NO: 91572 - DNA, 25 bp, Probe Sequence
tatttgggtttgattcctttggtga

SEQ ID NO: 91573 - DNA, 25 bp, Probe Sequence
gtatttgggtttgattcctttggtg

SEQ ID NO: 91574 - DNA, 25 bp, Probe Sequence
agtatttgggtttgattcctttggt

SEQ ID NO: 91575 - DNA, 25 bp, Probe Sequence
tagtatttgggtttgattcctttgg

SEQ ID NO: 91576 - DNA, 25 bp, Probe Sequence
ggtttgattcctttggtgaagatta

SEQ ID NO: 91577 - DNA, 25 bp, Probe Sequence
agactatgttgtgattcggtttgaa

SEQ ID NO: 91578 - DNA, 25 bp, Probe Sequence
aattgggaaatactgtgaatggaaa

SEQ ID NO: 91579 - DNA, 25 bp, Probe Sequence
caaagactatgttgtgattcggttt

SEQ ID NO: 91580 - DNA, 25 bp, Probe Sequence
tttaagcaccctacaacactttacc

SEQ ID NO: 91581 - DNA, 25 bp, Probe Sequence
tttcaaagactatgttgtgattcgg

SEQ ID NO: 91582 - DNA, 25 bp, Probe Sequence
aaattgccaaatcccttcttagtat

SEQ ID NO: 91583 - DNA, 25 bp, Probe Sequence
ttccaccatagaacttctactgtat

SEQ ID NO: 91584 - DNA, 25 bp, Probe Sequence
tcaaagactatgttgtgattcggtt

SEQ ID NO: 91585 - DNA, 25 bp, Probe Sequence
ttcaaagactatgttgtgattcggt

SEQ ID NO: 91586 - DNA, 25 bp, Probe Sequence
agttagtatttgggtttgattcctt

SEQ ID NO: 91587 - DNA, 25 bp, Probe Sequence
aagttagtatttgggtttgattcct

SEQ ID NO: 91588 - DNA, 25 bp, Probe Sequence
atttgggtttgattcctttggtgaa

SEQ ID NO: 91589 - DNA, 25 bp, Probe Sequence
ccaccacagaatatctcattactgg

SEQ ID NO: 91590 - DNA, 25 bp, Probe Sequence
ttcttgagatgaggaaaggaagtta

SEQ ID NO: 91591 - DNA, 25 bp, Probe Sequence
gttcttgagatgaggaaaggaagtt

SEQ ID NO: 91592 - DNA, 25 bp, Probe Sequence
ttgttcttgagatgaggaaaggaag

SEQ ID NO: 91593 - DNA, 25 bp, Probe Sequence
cttgttcttgagatgaggaaaggaa

SEQ ID NO: 91594 - DNA, 25 bp, Probe Sequence
tcttgagatgaggaaaggaagttaa

SEQ ID NO: 91595 - DNA, 25 bp, Probe Sequence
ttcttgttcttgagatgaggaaagg

SEQ ID NO: 91596 - DNA, 25 bp, Probe Sequence
ccattatccaagatgttgtttcacc

SEQ ID NO: 91597 - DNA, 25 bp, Probe Sequence
cccattatccaagatgttgtttcac

SEQ ID NO: 91598 - DNA, 25 bp, Probe Sequence
tttatgcccattatccaagatgttg

SEQ ID NO: 91599 - DNA, 25 bp, Probe Sequence
cattatccaagatgttgtttcacct

SEQ ID NO: 91600 - DNA, 25 bp, Probe Sequence
tatgcccattatccaagatgttgtt

SEQ ID NO: 91601 - DNA, 25 bp, Probe Sequence
ttatgcccattatccaagatgttgt

SEQ ID NO: 91602 - DNA, 25 bp, Probe Sequence
atccaagatgttgtttcaccttatc

SEQ ID NO: 91603 - DNA, 25 bp, Probe Sequence
gatgttgtttcaccttatctgagtt

SEQ ID NO: 91604 - DNA, 25 bp, Probe Sequence
cttgagatgaggaaaggaagttaaa

SEQ ID NO: 91605 - DNA, 25 bp, Probe Sequence
attatccaagatgttgtttcacctt

SEQ ID NO: 91606 - DNA, 25 bp, Probe Sequence
tcttgttcttgagatgaggaaagga

SEQ ID NO: 91607 - DNA, 25 bp, Probe Sequence
atgcccattatccaagatgttgttt

SEQ ID NO: 91608 - DNA, 25 bp, Probe Sequence
tgttcttgagatgaggaaaggaagt

SEQ ID NO: 91609 - DNA, 25 bp, Probe Sequence
ctgtcttacccacttgagtcaatta

SEQ ID NO: 91610 - DNA, 25 bp, Probe Sequence
tgttgtttcaccttatctgagttag

SEQ ID NO: 91611 - DNA, 25 bp, Probe Sequence
tgtcttacccacttgagtcaattat

SEQ ID NO: 91612 - DNA, 25 bp, Probe Sequence
atttctattataaggctaggcaccc

SEQ ID NO: 91613 - DNA, 25 bp, Probe Sequence
ttatgggagttgaggctaagatatg

SEQ ID NO: 91614 - DNA, 25 bp, Probe Sequence
atgatctgccattctctgtaccttg

SEQ ID NO: 91615 - DNA, 25 bp, Probe Sequence
tatgggagttgaggctaagatatgg

SEQ ID NO: 91616 - DNA, 25 bp, Probe Sequence
aactcaccataagcaataacattaa

SEQ ID NO: 91617 - DNA, 25 bp, Probe Sequence
catgatctgccattctctgtacctt

SEQ ID NO: 91618 - DNA, 25 bp, Probe Sequence
gagttgaggctaagatatgggtttg

SEQ ID NO: 91619 - DNA, 25 bp, Probe Sequence
attatgggagttgaggctaagatat

SEQ ID NO: 91620 - DNA, 25 bp, Probe Sequence
aattatgggagttgaggctaagata

SEQ ID NO: 91621 - DNA, 25 bp, Probe Sequence
caattatgggagttgaggctaagat

SEQ ID NO: 91622 - DNA, 25 bp, Probe Sequence
tcattgtcaggtttgaagagaagat

SEQ ID NO: 91623 - DNA, 25 bp, Probe Sequence
atcattgtcaggtttgaagagaaga

SEQ ID NO: 91624 - DNA, 25 bp, Probe Sequence
aatcattgtcaggtttgaagagaag

SEQ ID NO: 91625 - DNA, 25 bp, Probe Sequence
aaatgagaattaggttaatgggagc

SEQ ID NO: 91626 - DNA, 25 bp, Probe Sequence
aaatcattgtcaggtttgaagagaa

SEQ ID NO: 91627 - DNA, 25 bp, Probe Sequence
ggagttgaggctaagatatgggttt

SEQ ID NO: 91628 - DNA, 25 bp, Probe Sequence
ttgtcaggtttgaagagaagatcat

SEQ ID NO: 91629 - DNA, 25 bp, Probe Sequence
attgtcaggtttgaagagaagatca

SEQ ID NO: 91630 - DNA, 25 bp, Probe Sequence
cattgtcaggtttgaagagaagatc

SEQ ID NO: 91631 - DNA, 25 bp, Probe Sequence
tgtcaggtttgaagagaagatcata

SEQ ID NO: 91632 - DNA, 25 bp, Probe Sequence
cacatgataaactcaccataagcaa

SEQ ID NO: 91633 - DNA, 25 bp, Probe Sequence
agttgaggctaagatatgggtttgg

SEQ ID NO: 91634 - DNA, 25 bp, Probe Sequence
ccacatgataaactcaccataagca

SEQ ID NO: 91635 - DNA, 25 bp, Probe Sequence
accacatgataaactcaccataagc

SEQ ID NO: 91636 - DNA, 25 bp, Probe Sequence
gttgaggctaagatatgggtttggt

SEQ ID NO: 91637 - DNA, 25 bp, Probe Sequence
agaataaccagtgtagagaagacct

SEQ ID NO: 91638 - DNA, 25 bp, Probe Sequence
tagaataaccagtgtagagaagacc

SEQ ID NO: 91639 - DNA, 25 bp, Probe Sequence
gaataaccagtgtagagaagacctc

SEQ ID NO: 91640 - DNA, 25 bp, Probe Sequence
ataaccagtgtagagaagacctcaa

SEQ ID NO: 91641 - DNA, 25 bp, Probe Sequence
aataaccagtgtagagaagacctca

SEQ ID NO: 91642 - DNA, 25 bp, Probe Sequence
ggctaactagaataaccagtgtaga

SEQ ID NO: 91643 - DNA, 25 bp, Probe Sequence
agatgaatggctaactagaataacc

SEQ ID NO: 91644 - DNA, 25 bp, Probe Sequence
ctagaataaccagtgtagagaagac

SEQ ID NO: 91645 - DNA, 25 bp, Probe Sequence
gctaactagaataaccagtgtagag

SEQ ID NO: 91646 - DNA, 25 bp, Probe Sequence
actagaataaccagtgtagagaaga

SEQ ID NO: 91647 - DNA, 25 bp, Probe Sequence
aatggctaactagaataaccagtgt

SEQ ID NO: 91648 - DNA, 25 bp, Probe Sequence
tggctaactagaataaccagtgtag

SEQ ID NO: 91649 - DNA, 25 bp, Probe Sequence
tgaatggctaactagaataaccagt

SEQ ID NO: 91650 - DNA, 25 bp, Probe Sequence
gaatggctaactagaataaccagtg

SEQ ID NO: 91651 - DNA, 25 bp, Probe Sequence
atggctaactagaataaccagtgta

SEQ ID NO: 91652 - DNA, 25 bp, Probe Sequence
atgaatggctaactagaataaccag

SEQ ID NO: 91653 - DNA, 25 bp, Probe Sequence
gatgaatggctaactagaataacca

SEQ ID NO: 91654 - DNA, 25 bp, Probe Sequence
aactagaataaccagtgtagagaag

SEQ ID NO: 91655 - DNA, 25 bp, Probe Sequence
tagagaagacctcaaatgacctgat

SEQ ID NO: 91656 - DNA, 25 bp, Probe Sequence
taaccagtgtagagaagacctcaaa

SEQ ID NO: 91657 - DNA, 25 bp, Probe Sequence
cttcaatagccgattcgatcaagtg

SEQ ID NO: 91658 - DNA, 25 bp, Probe Sequence
cagtgtagagaagacctcaaatgac

SEQ ID NO: 91659 - DNA, 25 bp, Probe Sequence
gaagacctcaaatgacctgatgaag

SEQ ID NO: 91660 - DNA, 25 bp, Probe Sequence
aaccagtgtagagaagacctcaaat

SEQ ID NO: 91661 - DNA, 25 bp, Probe Sequence
aattaacttggctaggtatggtgtc

SEQ ID NO: 91662 - DNA, 25 bp, Probe Sequence
taagcctacagtatcagatcaatgg

SEQ ID NO: 91663 - DNA, 25 bp, Probe Sequence
attaacttggctaggtatggtgtct

SEQ ID NO: 91664 - DNA, 25 bp, Probe Sequence
ttaacttggctaggtatggtgtctc

SEQ ID NO: 91665 - DNA, 25 bp, Probe Sequence
ttaagcctacagtatcagatcaatg

SEQ ID NO: 91666 - DNA, 25 bp, Probe Sequence
ataagtctaattgcccattgccata

SEQ ID NO: 91667 - DNA, 25 bp, Probe Sequence
tataagtctaattgcccattgccat

SEQ ID NO: 91668 - DNA, 25 bp, Probe Sequence
gtcttgtactcagagaagcaacatg

SEQ ID NO: 91669 - DNA, 25 bp, Probe Sequence
taagtctaattgcccattgccataa

SEQ ID NO: 91670 - DNA, 25 bp, Probe Sequence
taacttggctaggtatggtgtctca

SEQ ID NO: 91671 - DNA, 25 bp, Probe Sequence
aagtataagtctaattgcccattgc

SEQ ID NO: 91672 - DNA, 25 bp, Probe Sequence
tgtcttgtactcagagaagcaacat

SEQ ID NO: 91673 - DNA, 25 bp, Probe Sequence
agtataagtctaattgcccattgcc

SEQ ID NO: 91674 - DNA, 25 bp, Probe Sequence
aaattaacttggctaggtatggtgt

SEQ ID NO: 91675 - DNA, 25 bp, Probe Sequence
agtctaattgcccattgccataaat

SEQ ID NO: 91676 - DNA, 25 bp, Probe Sequence
ttgtcttgtactcagagaagcaaca

SEQ ID NO: 91677 - DNA, 25 bp, Probe Sequence
gtataagtctaattgcccattgcca

SEQ ID NO: 91678 - DNA, 25 bp, Probe Sequence
aagtctaattgcccattgccataaa

SEQ ID NO: 91679 - DNA, 25 bp, Probe Sequence
cctacagtatcagatcaatgggaaa

SEQ ID NO: 91680 - DNA, 25 bp, Probe Sequence
gtctaattgcccattgccataaatt

SEQ ID NO: 91681 - DNA, 25 bp, Probe Sequence
gtcttaagcctacagtatcagatca

SEQ ID NO: 91682 - DNA, 25 bp, Probe Sequence
tcttaagcctacagtatcagatcaa

SEQ ID NO: 91683 - DNA, 25 bp, Probe Sequence
cacttgtcttaagcctacagtatca

SEQ ID NO: 91684 - DNA, 25 bp, Probe Sequence
acttgtcttaagcctacagtatcag

SEQ ID NO: 91685 - DNA, 25 bp, Probe Sequence
gatggatggatggatggatgattat

SEQ ID NO: 91686 - DNA, 25 bp, Probe Sequence
gactcacatctataatccaagcact

SEQ ID NO: 91687 - DNA, 25 bp, Probe Sequence
actcacatctataatccaagcactt

SEQ ID NO: 91688 - DNA, 25 bp, Probe Sequence
atggatggatggatggatgattata

SEQ ID NO: 91689 - DNA, 25 bp, Probe Sequence
agactcacatctataatccaagcac

SEQ ID NO: 91690 - DNA, 25 bp, Probe Sequence
tggatggatggatggatgattatat

SEQ ID NO: 91691 - DNA, 25 bp, Probe Sequence
ggatggatggatggatggatgatta

SEQ ID NO: 91692 - DNA, 25 bp, Probe Sequence
ctctgcttagtctcaaggtatggaa

SEQ ID NO: 91693 - DNA, 25 bp, Probe Sequence
tactctgcttagtctcaaggtatgg

SEQ ID NO: 91694 - DNA, 25 bp, Probe Sequence
atactctgcttagtctcaaggtatg

SEQ ID NO: 91695 - DNA, 25 bp, Probe Sequence
ttatactctgcttagtctcaaggta

SEQ ID NO: 91696 - DNA, 25 bp, Probe Sequence
tagactcacatctataatccaagca

SEQ ID NO: 91697 - DNA, 25 bp, Probe Sequence
actctgcttagtctcaaggtatgga

SEQ ID NO: 91698 - DNA, 25 bp, Probe Sequence
ataaaggtggtaatgagttgggaag

SEQ ID NO: 91699 - DNA, 25 bp, Probe Sequence
caacagaaagatggagaaagaaagc

SEQ ID NO: 91700 - DNA, 25 bp, Probe Sequence
tataaaggtggtaatgagttgggaa

SEQ ID NO: 91701 - DNA, 25 bp, Probe Sequence
ctgcttagtctcaaggtatggaaat

SEQ ID NO: 91702 - DNA, 25 bp, Probe Sequence
tatactctgcttagtctcaaggtat

SEQ ID NO: 91703 - DNA, 25 bp, Probe Sequence
tcgataggatagatagactcacatc

SEQ ID NO: 91704 - DNA, 25 bp, Probe Sequence
gcttagtctcaaggtatggaaatgt

SEQ ID NO: 91705 - DNA, 25 bp, Probe Sequence
tgcttagtctcaaggtatggaaatg

SEQ ID NO: 91706 - DNA, 25 bp, Probe Sequence
ctcacatctataatccaagcacttt

SEQ ID NO: 91707 - DNA, 25 bp, Probe Sequence
gtaatgagttgggaagggaatgttt

SEQ ID NO: 91708 - DNA, 25 bp, Probe Sequence
ggatggatggatggatgattatata

SEQ ID NO: 91709 - DNA, 25 bp, Probe Sequence
cctgagtgaccatagagagatgata

SEQ ID NO: 91710 - DNA, 25 bp, Probe Sequence
tacataagtcttcacaggaacaagt

SEQ ID NO: 91711 - DNA, 25 bp, Probe Sequence
ctacataagtcttcacaggaacaag

SEQ ID NO: 91712 - DNA, 25 bp, Probe Sequence
ctgagtgaccatagagagatgataa

SEQ ID NO: 91713 - DNA, 25 bp, Probe Sequence
actacataagtcttcacaggaacaa

SEQ ID NO: 91714 - DNA, 25 bp, Probe Sequence
aactacataagtcttcacaggaaca

SEQ ID NO: 91715 - DNA, 25 bp, Probe Sequence
acataagtcttcacaggaacaagtg

SEQ ID NO: 91716 - DNA, 25 bp, Probe Sequence
ccaatcatcccatcataaatactgc

SEQ ID NO: 91717 - DNA, 25 bp, Probe Sequence
caaagactaatgaataacctggctg

SEQ ID NO: 91718 - DNA, 25 bp, Probe Sequence
caatgggagatgattagaaacgaag

SEQ ID NO: 91719 - DNA, 25 bp, Probe Sequence
atcagaatcaaagagagaatgtgct

SEQ ID NO: 91720 - DNA, 25 bp, Probe Sequence
aaagactaatgaataacctggctgg

SEQ ID NO: 91721 - DNA, 25 bp, Probe Sequence
attagtctgtggtgggaaattcaat

SEQ ID NO: 91722 - DNA, 25 bp, Probe Sequence
catcagaatcaaagagagaatgtgc

SEQ ID NO: 91723 - DNA, 25 bp, Probe Sequence
caatcatcccatcataaatactgct

SEQ ID NO: 91724 - DNA, 25 bp, Probe Sequence
tcagaatcaaagagagaatgtgctt

SEQ ID NO: 91725 - DNA, 25 bp, Probe Sequence
aatgggagatgattagaaacgaagc

SEQ ID NO: 91726 - DNA, 25 bp, Probe Sequence
ataagtcttcacaggaacaagtgct

SEQ ID NO: 91727 - DNA, 25 bp, Probe Sequence
cataagtcttcacaggaacaagtgc

SEQ ID NO: 91728 - DNA, 25 bp, Probe Sequence
cagaatcaaagagagaatgtgctta

SEQ ID NO: 91729 - DNA, 25 bp, Probe Sequence
ttagtctgtggtgggaaattcaatg

SEQ ID NO: 91730 - DNA, 25 bp, Probe Sequence
tcaaagactaatgaataacctggct

SEQ ID NO: 91731 - DNA, 25 bp, Probe Sequence
tcaatgggagatgattagaaacgaa

SEQ ID NO: 91732 - DNA, 25 bp, Probe Sequence
ttcaatgggagatgattagaaacga

SEQ ID NO: 91733 - DNA, 25 bp, Probe Sequence
cttagccaaggatgaacactctatg

SEQ ID NO: 91734 - DNA, 25 bp, Probe Sequence
acttagccaaggatgaacactctat

SEQ ID NO: 91735 - DNA, 25 bp, Probe Sequence
aacttagccaaggatgaacactcta

SEQ ID NO: 91736 - DNA, 25 bp, Probe Sequence
taacttagccaaggatgaacactct

SEQ ID NO: 91737 - DNA, 25 bp, Probe Sequence
gtaacttagccaaggatgaacactc

SEQ ID NO: 91738 - DNA, 25 bp, Probe Sequence
ttacagatcaaggaattggactcaa

SEQ ID NO: 91739 - DNA, 25 bp, Probe Sequence
aagtaacttagccaaggatgaacac

SEQ ID NO: 91740 - DNA, 25 bp, Probe Sequence
cagcagtacagaactcagtagtatg

SEQ ID NO: 91741 - DNA, 25 bp, Probe Sequence
caagagcaacaacctagttagtacc

SEQ ID NO: 91742 - DNA, 25 bp, Probe Sequence
ccaagagcaacaacctagttagtac

SEQ ID NO: 91743 - DNA, 25 bp, Probe Sequence
agtaacttagccaaggatgaacact

SEQ ID NO: 91744 - DNA, 25 bp, Probe Sequence
agtacagaactcagtagtatggctt

SEQ ID NO: 91745 - DNA, 25 bp, Probe Sequence
cagtacagaactcagtagtatggct

SEQ ID NO: 91746 - DNA, 25 bp, Probe Sequence
agcagtacagaactcagtagtatgg

SEQ ID NO: 91747 - DNA, 25 bp, Probe Sequence
ccagcagtacagaactcagtagtat

SEQ ID NO: 91748 - DNA, 25 bp, Probe Sequence
ttagccaaggatgaacactctatgc

SEQ ID NO: 91749 - DNA, 25 bp, Probe Sequence
taagtaacttagccaaggatgaaca

SEQ ID NO: 91750 - DNA, 25 bp, Probe Sequence
ggagagaaatgcttgataccactta

SEQ ID NO: 91751 - DNA, 25 bp, Probe Sequence
gagagaaatgcttgataccacttag

SEQ ID NO: 91752 - DNA, 25 bp, Probe Sequence
agagaaatgcttgataccacttagt

SEQ ID NO: 91753 - DNA, 25 bp, Probe Sequence
gccaagagcaacaacctagttagta

SEQ ID NO: 91754 - DNA, 25 bp, Probe Sequence
gatagcaatttagtgaaagttccca

SEQ ID NO: 91755 - DNA, 25 bp, Probe Sequence
tgatagcaatttagtgaaagttccc

SEQ ID NO: 91756 - DNA, 25 bp, Probe Sequence
ttaagtaacttagccaaggatgaac

SEQ ID NO: 91757 - DNA, 25 bp, Probe Sequence
atcatcttcacctattcctctgact

SEQ ID NO: 91758 - DNA, 25 bp, Probe Sequence
tcatcttcacctattcctctgactc

SEQ ID NO: 91759 - DNA, 25 bp, Probe Sequence
tagcagatcatcttcacctattcct

SEQ ID NO: 91760 - DNA, 25 bp, Probe Sequence
tcttcacctattcctctgactccta

SEQ ID NO: 91761 - DNA, 25 bp, Probe Sequence
gatcatcttcacctattcctctgac

SEQ ID NO: 91762 - DNA, 25 bp, Probe Sequence
agatcatcttcacctattcctctga

SEQ ID NO: 91763 - DNA, 25 bp, Probe Sequence
cttcacctattcctctgactcctag

SEQ ID NO: 91764 - DNA, 25 bp, Probe Sequence
atagcagatcatcttcacctattcc

SEQ ID NO: 91765 - DNA, 25 bp, Probe Sequence
gcatagcagatcatcttcacctatt

SEQ ID NO: 91766 - DNA, 25 bp, Probe Sequence
atcttcacctattcctctgactcct

SEQ ID NO: 91767 - DNA, 25 bp, Probe Sequence
catcttcacctattcctctgactcc

SEQ ID NO: 91768 - DNA, 25 bp, Probe Sequence
gcagatcatcttcacctattcctct

SEQ ID NO: 91769 - DNA, 25 bp, Probe Sequence
agcagatcatcttcacctattcctc

SEQ ID NO: 91770 - DNA, 25 bp, Probe Sequence
catagcagatcatcttcacctattc

SEQ ID NO: 91771 - DNA, 25 bp, Probe Sequence
tttgtgaaacttccagaaatccttg

SEQ ID NO: 91772 - DNA, 25 bp, Probe Sequence
agaactaatgaaataaacgaggtcc

SEQ ID NO: 91773 - DNA, 25 bp, Probe Sequence
gctttgaagggagaagaactaatga

SEQ ID NO: 91774 - DNA, 25 bp, Probe Sequence
tctgagaagaatctgaaggctttat

SEQ ID NO: 91775 - DNA, 25 bp, Probe Sequence
acctattcctctgactcctagcaag

SEQ ID NO: 91776 - DNA, 25 bp, Probe Sequence
tttagcagaataccacgatgacttc

SEQ ID NO: 91777 - DNA, 25 bp, Probe Sequence
tgagaagaatctgaaggctttattg

SEQ ID NO: 91778 - DNA, 25 bp, Probe Sequence
gaactaatgaaataaacgaggtcct

SEQ ID NO: 91779 - DNA, 25 bp, Probe Sequence
ctttgaagggagaagaactaatgaa

SEQ ID NO: 91780 - DNA, 25 bp, Probe Sequence
gagaagaatctgaaggctttattga

SEQ ID NO: 91781 - DNA, 25 bp, Probe Sequence
gaagacaggagtcaatggagattct

SEQ ID NO: 91782 - DNA, 25 bp, Probe Sequence
agtcaatggagattctcgatacttc

SEQ ID NO: 91783 - DNA, 25 bp, Probe Sequence
gagtcaatggagattctcgatactt

SEQ ID NO: 91784 - DNA, 25 bp, Probe Sequence
aagacaggagtcaatggagattctc

SEQ ID NO: 91785 - DNA, 25 bp, Probe Sequence
ggagtcaatggagattctcgatact

SEQ ID NO: 91786 - DNA, 25 bp, Probe Sequence
aggagtcaatggagattctcgatac

SEQ ID NO: 91787 - DNA, 25 bp, Probe Sequence
caggagtcaatggagattctcgata

SEQ ID NO: 91788 - DNA, 25 bp, Probe Sequence
atcactggtactctttctaatcctg

SEQ ID NO: 91789 - DNA, 25 bp, Probe Sequence
caatggagattctcgatacttcctg

SEQ ID NO: 91790 - DNA, 25 bp, Probe Sequence
tcaatggagattctcgatacttcct

SEQ ID NO: 91791 - DNA, 25 bp, Probe Sequence
gtcaatggagattctcgatacttcc

SEQ ID NO: 91792 - DNA, 25 bp, Probe Sequence
aatggagattctcgatacttcctgt

SEQ ID NO: 91793 - DNA, 25 bp, Probe Sequence
tcactggtactctttctaatcctga

SEQ ID NO: 91794 - DNA, 25 bp, Probe Sequence
cactggtactctttctaatcctgag

SEQ ID NO: 91795 - DNA, 25 bp, Probe Sequence
cgaagacaggagtcaatggagattc

SEQ ID NO: 91796 - DNA, 25 bp, Probe Sequence
ggtactctttctaatcctgaggttt

SEQ ID NO: 91797 - DNA, 25 bp, Probe Sequence
tggtactctttctaatcctgaggtt

SEQ ID NO: 91798 - DNA, 25 bp, Probe Sequence
ctggtactctttctaatcctgaggt

SEQ ID NO: 91799 - DNA, 25 bp, Probe Sequence
actggtactctttctaatcctgagg

SEQ ID NO: 91800 - DNA, 25 bp, Probe Sequence
tatcactggtactctttctaatcct

SEQ ID NO: 91801 - DNA, 25 bp, Probe Sequence
tagtgatatttcagttcccgctgta

SEQ ID NO: 91802 - DNA, 25 bp, Probe Sequence
atggagattctcgatacttcctgtg

SEQ ID NO: 91803 - DNA, 25 bp, Probe Sequence
tttgacatcccaggattctacgatt

SEQ ID NO: 91804 - DNA, 25 bp, Probe Sequence
tgacctagtgatatttcagttcccg

SEQ ID NO: 91805 - DNA, 25 bp, Probe Sequence
aatgatgatgagacaataatggcag

SEQ ID NO: 91806 - DNA, 25 bp, Probe Sequence
atatggtgttggtagtaataagtgc

SEQ ID NO: 91807 - DNA, 25 bp, Probe Sequence
atgatgatgagacaataatggcagc

SEQ ID NO: 91808 - DNA, 25 bp, Probe Sequence
ttgaacaccaagatgagattgagtc

SEQ ID NO: 91809 - DNA, 25 bp, Probe Sequence
acaacacactaggaagttactaaca

SEQ ID NO: 91810 - DNA, 25 bp, Probe Sequence
gaacaccaagatgagattgagtctg

SEQ ID NO: 91811 - DNA, 25 bp, Probe Sequence
cacaacacactaggaagttactaac

SEQ ID NO: 91812 - DNA, 25 bp, Probe Sequence
gcacaacacactaggaagttactaa

SEQ ID NO: 91813 - DNA, 25 bp, Probe Sequence
atgccagtgaatctcattatgactt

SEQ ID NO: 91814 - DNA, 25 bp, Probe Sequence
tgaacaccaagatgagattgagtct

SEQ ID NO: 91815 - DNA, 25 bp, Probe Sequence
tgccagtgaatctcattatgacttc

SEQ ID NO: 91816 - DNA, 25 bp, Probe Sequence
agtaacaagcaagttgaactcagaa

SEQ ID NO: 91817 - DNA, 25 bp, Probe Sequence
aagtaacaagcaagttgaactcaga

SEQ ID NO: 91818 - DNA, 25 bp, Probe Sequence
caacacactaggaagttactaacaa

SEQ ID NO: 91819 - DNA, 25 bp, Probe Sequence
agcacaacacactaggaagttacta

SEQ ID NO: 91820 - DNA, 25 bp, Probe Sequence
aatcatgccagtgaatctcattatg

SEQ ID NO: 91821 - DNA, 25 bp, Probe Sequence
caatcatgccagtgaatctcattat

SEQ ID NO: 91822 - DNA, 25 bp, Probe Sequence
acaatcatgccagtgaatctcatta

SEQ ID NO: 91823 - DNA, 25 bp, Probe Sequence
taaggatgacacaatatcacctagc

SEQ ID NO: 91824 - DNA, 25 bp, Probe Sequence
catgccagtgaatctcattatgact

SEQ ID NO: 91825 - DNA, 25 bp, Probe Sequence
cacactaggaagttactaacaatca

SEQ ID NO: 91826 - DNA, 25 bp, Probe Sequence
acacactaggaagttactaacaatc

SEQ ID NO: 91827 - DNA, 25 bp, Probe Sequence
gaatctcattatgacttcaccatct

SEQ ID NO: 91828 - DNA, 25 bp, Probe Sequence
aacaatcatgccagtgaatctcatt

SEQ ID NO: 91829 - DNA, 25 bp, Probe Sequence
aacttaaagagagattgttgaaggc

SEQ ID NO: 91830 - DNA, 25 bp, Probe Sequence
aaacttaaagagagattgttgaagg

SEQ ID NO: 91831 - DNA, 25 bp, Probe Sequence
tgcagtaatctacgtattagtcatc

SEQ ID NO: 91832 - DNA, 25 bp, Probe Sequence
ttaaagagagattgttgaaggccat

SEQ ID NO: 91833 - DNA, 25 bp, Probe Sequence
taaagagagattgttgaaggccatc

SEQ ID NO: 91834 - DNA, 25 bp, Probe Sequence
cttaaagagagattgttgaaggcca

SEQ ID NO: 91835 - DNA, 25 bp, Probe Sequence
acttaaagagagattgttgaaggcc

SEQ ID NO: 91836 - DNA, 25 bp, Probe Sequence
tagccagtacgactagggacttcta

SEQ ID NO: 91837 - DNA, 25 bp, Probe Sequence
aagagagattgttgaaggccatcac

SEQ ID NO: 91838 - DNA, 25 bp, Probe Sequence
gagattgttgaaggccatcacgtat

SEQ ID NO: 91839 - DNA, 25 bp, Probe Sequence
aatctacgtattagtcatcgctata

SEQ ID NO: 91840 - DNA, 25 bp, Probe Sequence
agattgttgaaggccatcacgtatg

SEQ ID NO: 91841 - DNA, 25 bp, Probe Sequence
tgctgtaaaacaaaacaaaacaaaa

SEQ ID NO: 91842 - DNA, 25 bp, Probe Sequence
atgctgtaaaacaaaacaaaacaaa

SEQ ID NO: 91843 - DNA, 25 bp, Probe Sequence
catgctgtaaaacaaaacaaaacaa

SEQ ID NO: 91844 - DNA, 25 bp, Probe Sequence
aaagagagattgttgaaggccatca

SEQ ID NO: 91845 - DNA, 25 bp, Probe Sequence
agagattgttgaaggccatcacgta

SEQ ID NO: 91846 - DNA, 25 bp, Probe Sequence
gctgtaaaacaaaacaaaacaaaat

SEQ ID NO: 91847 - DNA, 25 bp, Probe Sequence
agccagtacgactagggacttctac

SEQ ID NO: 91848 - DNA, 25 bp, Probe Sequence
tattagtcatcgctataaccatggg

SEQ ID NO: 91849 - DNA, 25 bp, Probe Sequence
ctagccagtacgactagggacttct

SEQ ID NO: 91850 - DNA, 25 bp, Probe Sequence
gccagtacgactagggacttctact

SEQ ID NO: 91851 - DNA, 25 bp, Probe Sequence
aaaacttaaagagagattgttgaag

SEQ ID NO: 91852 - DNA, 25 bp, Probe Sequence
gattgttgaaggccatcacgtatgc

SEQ ID NO: 91853 - DNA, 25 bp, Probe Sequence
cgtaactggaatcttcataggtcat

SEQ ID NO: 91854 - DNA, 25 bp, Probe Sequence
ccgtaactggaatcttcataggtca

SEQ ID NO: 91855 - DNA, 25 bp, Probe Sequence
actggaatcttcataggtcatattg

SEQ ID NO: 91856 - DNA, 25 bp, Probe Sequence
tctgccgtaactggaatcttcatag

SEQ ID NO: 91857 - DNA, 25 bp, Probe Sequence
ctctgccgtaactggaatcttcata

SEQ ID NO: 91858 - DNA, 25 bp, Probe Sequence
gtaactggaatcttcataggtcata

SEQ ID NO: 91859 - DNA, 25 bp, Probe Sequence
aactggaatcttcataggtcatatt

SEQ ID NO: 91860 - DNA, 25 bp, Probe Sequence
ctggaatcttcataggtcatattga

SEQ ID NO: 91861 - DNA, 25 bp, Probe Sequence
gccgtaactggaatcttcataggtc

SEQ ID NO: 91862 - DNA, 25 bp, Probe Sequence
ctgccgtaactggaatcttcatagg

SEQ ID NO: 91863 - DNA, 25 bp, Probe Sequence
taactggaatcttcataggtcatat

SEQ ID NO: 91864 - DNA, 25 bp, Probe Sequence
tgccgtaactggaatcttcataggt

SEQ ID NO: 91865 - DNA, 25 bp, Probe Sequence
actctgccgtaactggaatcttcat

SEQ ID NO: 91866 - DNA, 25 bp, Probe Sequence
ctcttctgtccctttcagtcatttg

SEQ ID NO: 91867 - DNA, 25 bp, Probe Sequence
gaaggttcattcgcataggtgtgag

SEQ ID NO: 91868 - DNA, 25 bp, Probe Sequence
cctcttctgtccctttcagtcattt

SEQ ID NO: 91869 - DNA, 25 bp, Probe Sequence
ctttcagtcatttgctgtacttccc

SEQ ID NO: 91870 - DNA, 25 bp, Probe Sequence
cctttcagtcatttgctgtacttcc

SEQ ID NO: 91871 - DNA, 25 bp, Probe Sequence
ccctttcagtcatttgctgtacttc

SEQ ID NO: 91872 - DNA, 25 bp, Probe Sequence
gactctgccgtaactggaatcttca

SEQ ID NO: 91873 - DNA, 25 bp, Probe Sequence
tggaatcttcataggtcatattgaa

SEQ ID NO: 91874 - DNA, 25 bp, Probe Sequence
tttcagtcatttgctgtacttccct

SEQ ID NO: 91875 - DNA, 25 bp, Probe Sequence
tccctttcagtcatttgctgtactt

SEQ ID NO: 91876 - DNA, 25 bp, Probe Sequence
ctgtccctttcagtcatttgctgta

SEQ ID NO: 91877 - DNA, 25 bp, Probe Sequence
cccaagaccatcctttattgtagta

SEQ ID NO: 91878 - DNA, 25 bp, Probe Sequence
ttaaagaacttgcccaccaacataa

SEQ ID NO: 91879 - DNA, 25 bp, Probe Sequence
cacccaagaccatcctttattgtag

SEQ ID NO: 91880 - DNA, 25 bp, Probe Sequence
acccaagaccatcctttattgtagt

SEQ ID NO: 91881 - DNA, 25 bp, Probe Sequence
cttaaagaacttgcccaccaacata

SEQ ID NO: 91882 - DNA, 25 bp, Probe Sequence
ttgcccaccaacataaccaatttat

SEQ ID NO: 91883 - DNA, 25 bp, Probe Sequence
taaagaacttgcccaccaacataac

SEQ ID NO: 91884 - DNA, 25 bp, Probe Sequence
ccaagaccatcctttattgtagtat

SEQ ID NO: 91885 - DNA, 25 bp, Probe Sequence
attgacacccaagaccatcctttat

SEQ ID NO: 91886 - DNA, 25 bp, Probe Sequence
cttgcccaccaacataaccaattta

SEQ ID NO: 91887 - DNA, 25 bp, Probe Sequence
acacccaagaccatcctttattgta

SEQ ID NO: 91888 - DNA, 25 bp, Probe Sequence
ttgacacccaagaccatcctttatt

SEQ ID NO: 91889 - DNA, 25 bp, Probe Sequence
aattgacacccaagaccatccttta

SEQ ID NO: 91890 - DNA, 25 bp, Probe Sequence
tatagaacctcttgttgggcatgat

SEQ ID NO: 91891 - DNA, 25 bp, Probe Sequence
acaatttccagcttaaagaacttgc

SEQ ID NO: 91892 - DNA, 25 bp, Probe Sequence
tgtagtattagttcatggtaactgc

SEQ ID NO: 91893 - DNA, 25 bp, Probe Sequence
aaacatttcaggaggaatttacaat

SEQ ID NO: 91894 - DNA, 25 bp, Probe Sequence
caatttccagcttaaagaacttgcc

SEQ ID NO: 91895 - DNA, 25 bp, Probe Sequence
tgacacccaagaccatcctttattg

SEQ ID NO: 91896 - DNA, 25 bp, Probe Sequence
gtatagaacctcttgttgggcatga

SEQ ID NO: 91897 - DNA, 25 bp, Probe Sequence
acatttcaggaggaatttacaattt

SEQ ID NO: 91898 - DNA, 25 bp, Probe Sequence
aacatttcaggaggaatttacaatt

SEQ ID NO: 91899 - DNA, 25 bp, Probe Sequence
gacacccaagaccatcctttattgt

SEQ ID NO: 91900 - DNA, 25 bp, Probe Sequence
tacaatttccagcttaaagaacttg

SEQ ID NO: 91901 - DNA, 25 bp, Probe Sequence
cttattgatagtcagcattagtggc

SEQ ID NO: 91902 - DNA, 25 bp, Probe Sequence
tcttattgatagtcagcattagtgg

SEQ ID NO: 91903 - DNA, 25 bp, Probe Sequence
tatgattccagtaggctctagctta

SEQ ID NO: 91904 - DNA, 25 bp, Probe Sequence
tatgaggatatgattccagtaggct

SEQ ID NO: 91905 - DNA, 25 bp, Probe Sequence
gaggatatgattccagtaggctcta

SEQ ID NO: 91906 - DNA, 25 bp, Probe Sequence
atgattccagtaggctctagcttat

SEQ ID NO: 91907 - DNA, 25 bp, Probe Sequence
atatgattccagtaggctctagctt

SEQ ID NO: 91908 - DNA, 25 bp, Probe Sequence
atatgaggatatgattccagtaggc

SEQ ID NO: 91909 - DNA, 25 bp, Probe Sequence
tgattccagtaggctctagcttatt

SEQ ID NO: 91910 - DNA, 25 bp, Probe Sequence
aggatatgattccagtaggctctag

SEQ ID NO: 91911 - DNA, 25 bp, Probe Sequence
gatatgattccagtaggctctagct

SEQ ID NO: 91912 - DNA, 25 bp, Probe Sequence
atgaggatatgattccagtaggctc

SEQ ID NO: 91913 - DNA, 25 bp, Probe Sequence
gtgactgtctttaacttggctttag

SEQ ID NO: 91914 - DNA, 25 bp, Probe Sequence
cagtcccaatgtaaacctaaccata

SEQ ID NO: 91915 - DNA, 25 bp, Probe Sequence
acctaagtcacctgaaataaagtct

SEQ ID NO: 91916 - DNA, 25 bp, Probe Sequence
agtcccaatgtaaacctaaccataa

SEQ ID NO: 91917 - DNA, 25 bp, Probe Sequence
tgtgactgtctttaacttggcttta

SEQ ID NO: 91918 - DNA, 25 bp, Probe Sequence
ggcaactaccattaatatgaggata

SEQ ID NO: 91919 - DNA, 25 bp, Probe Sequence
cttcagtcccaatgtaaacctaacc

SEQ ID NO: 91920 - DNA, 25 bp, Probe Sequence
cctaagtcacctgaaataaagtctc

SEQ ID NO: 91921 - DNA, 25 bp, Probe Sequence
tgactgtctttaacttggctttaga

SEQ ID NO: 91922 - DNA, 25 bp, Probe Sequence
gcataacctaagtcacctgaaataa

SEQ ID NO: 91923 - DNA, 25 bp, Probe Sequence
atgtgactgtctttaacttggcttt

SEQ ID NO: 91924 - DNA, 25 bp, Probe Sequence
aatgtgactgtctttaacttggctt

SEQ ID NO: 91925 - DNA, 25 bp, Probe Sequence
cttcttgattctggacaacttcttg

SEQ ID NO: 91926 - DNA, 25 bp, Probe Sequence
tcttcttgattctggacaacttctt

SEQ ID NO: 91927 - DNA, 25 bp, Probe Sequence
ttcttcttgattctggacaacttct

SEQ ID NO: 91928 - DNA, 25 bp, Probe Sequence
aatgtgttcctaaggtgtgaatctt

SEQ ID NO: 91929 - DNA, 25 bp, Probe Sequence
ttcttgattctggacaacttcttga

SEQ ID NO: 91930 - DNA, 25 bp, Probe Sequence
ttcctaaggtgtgaatcttgagaac

SEQ ID NO: 91931 - DNA, 25 bp, Probe Sequence
gttcctaaggtgtgaatcttgagaa

SEQ ID NO: 91932 - DNA, 25 bp, Probe Sequence
tcttgattctggacaacttcttgag

SEQ ID NO: 91933 - DNA, 25 bp, Probe Sequence
atgtgttcctaaggtgtgaatcttg

SEQ ID NO: 91934 - DNA, 25 bp, Probe Sequence
cttgattctggacaacttcttgagt

SEQ ID NO: 91935 - DNA, 25 bp, Probe Sequence
tgttcctaaggtgtgaatcttgaga

SEQ ID NO: 91936 - DNA, 25 bp, Probe Sequence
gtgttcctaaggtgtgaatcttgag

SEQ ID NO: 91937 - DNA, 25 bp, Probe Sequence
gattctggacaacttcttgagtcta

SEQ ID NO: 91938 - DNA, 25 bp, Probe Sequence
cctaaggtgtgaatcttgagaacaa

SEQ ID NO: 91939 - DNA, 25 bp, Probe Sequence
ttctggacaacttcttgagtctatt

SEQ ID NO: 91940 - DNA, 25 bp, Probe Sequence
attctggacaacttcttgagtctat

SEQ ID NO: 91941 - DNA, 25 bp, Probe Sequence
tgtgttcctaaggtgtgaatcttga

SEQ ID NO: 91942 - DNA, 25 bp, Probe Sequence
ttgattctggacaacttcttgagtc

SEQ ID NO: 91943 - DNA, 25 bp, Probe Sequence
tctggacaacttcttgagtctatta

SEQ ID NO: 91944 - DNA, 25 bp, Probe Sequence
tcctaaggtgtgaatcttgagaaca

SEQ ID NO: 91945 - DNA, 25 bp, Probe Sequence
tgattctggacaacttcttgagtct

SEQ ID NO: 91946 - DNA, 25 bp, Probe Sequence
ctggacaacttcttgagtctattaa

SEQ ID NO: 91947 - DNA, 25 bp, Probe Sequence
gtgaccacctggaagtaacaagtag

SEQ ID NO: 91948 - DNA, 25 bp, Probe Sequence
aaatgtgttcctaaggtgtgaatct

SEQ ID NO: 91949 - DNA, 25 bp, Probe Sequence
aatagaagaagttcaagccttggat

SEQ ID NO: 91950 - DNA, 25 bp, Probe Sequence
atagaagaagttcaagccttggatg

SEQ ID NO: 91951 - DNA, 25 bp, Probe Sequence
tagaagaagttcaagccttggatga

SEQ ID NO: 91952 - DNA, 25 bp, Probe Sequence
ttgtatgtaaatctgctttgtggtg

SEQ ID NO: 91953 - DNA, 25 bp, Probe Sequence
gttgtatgtaaatctgctttgtggt

SEQ ID NO: 91954 - DNA, 25 bp, Probe Sequence
aggttgtatgtaaatctgctttgtg

SEQ ID NO: 91955 - DNA, 25 bp, Probe Sequence
gtatgtaaatctgctttgtggtgac

SEQ ID NO: 91956 - DNA, 25 bp, Probe Sequence
atagaggagaatgttggtgtttgta

SEQ ID NO: 91957 - DNA, 25 bp, Probe Sequence
tatagaggagaatgttggtgtttgt

SEQ ID NO: 91958 - DNA, 25 bp, Probe Sequence
ggttgtatgtaaatctgctttgtgg

SEQ ID NO: 91959 - DNA, 25 bp, Probe Sequence
tgtatgtaaatctgctttgtggtga

SEQ ID NO: 91960 - DNA, 25 bp, Probe Sequence
cagaaatagaagaagttcaagcctt

SEQ ID NO: 91961 - DNA, 25 bp, Probe Sequence
ccagaaatagaagaagttcaagcct

SEQ ID NO: 91962 - DNA, 25 bp, Probe Sequence
tccagaaatagaagaagttcaagcc

SEQ ID NO: 91963 - DNA, 25 bp, Probe Sequence
ttatagaggagaatgttggtgtttg

SEQ ID NO: 91964 - DNA, 25 bp, Probe Sequence
aaggttgtatgtaaatctgctttgt

SEQ ID NO: 91965 - DNA, 25 bp, Probe Sequence
attgaaggttgtatgtaaatctgct

SEQ ID NO: 91966 - DNA, 25 bp, Probe Sequence
atccagaaatagaagaagttcaagc

SEQ ID NO: 91967 - DNA, 25 bp, Probe Sequence
tgaaggttgtatgtaaatctgcttt

SEQ ID NO: 91968 - DNA, 25 bp, Probe Sequence
ttgaaggttgtatgtaaatctgctt

SEQ ID NO: 91969 - DNA, 25 bp, Probe Sequence
gaaggttgtatgtaaatctgctttg

SEQ ID NO: 91970 - DNA, 25 bp, Probe Sequence
gagaatgttggtgtttgtactgttt

SEQ ID NO: 91971 - DNA, 25 bp, Probe Sequence
tagaggagaatgttggtgtttgtac

SEQ ID NO: 91972 - DNA, 25 bp, Probe Sequence
gatttatagaggagaatgttggtgt

SEQ ID NO: 91973 - DNA, 25 bp, Probe Sequence
aatagaagaagttcaagccttggat

SEQ ID NO: 91974 - DNA, 25 bp, Probe Sequence
atagaagaagttcaagccttggatg

SEQ ID NO: 91975 - DNA, 25 bp, Probe Sequence
tagaagaagttcaagccttggatga

SEQ ID NO: 91976 - DNA, 25 bp, Probe Sequence
ttgtatgtaaatctgctttgtggtg

SEQ ID NO: 91977 - DNA, 25 bp, Probe Sequence
gttgtatgtaaatctgctttgtggt

SEQ ID NO: 91978 - DNA, 25 bp, Probe Sequence
aggttgtatgtaaatctgctttgtg

SEQ ID NO: 91979 - DNA, 25 bp, Probe Sequence
gtatgtaaatctgctttgtggtgac

SEQ ID NO: 91980 - DNA, 25 bp, Probe Sequence
atagaggagaatgttggtgtttgta

SEQ ID NO: 91981 - DNA, 25 bp, Probe Sequence
tatagaggagaatgttggtgtttgt

SEQ ID NO: 91982 - DNA, 25 bp, Probe Sequence
ggttgtatgtaaatctgctttgtgg

SEQ ID NO: 91983 - DNA, 25 bp, Probe Sequence
tgtatgtaaatctgctttgtggtga

SEQ ID NO: 91984 - DNA, 25 bp, Probe Sequence
cagaaatagaagaagttcaagcctt

SEQ ID NO: 91985 - DNA, 25 bp, Probe Sequence
ccagaaatagaagaagttcaagcct

SEQ ID NO: 91986 - DNA, 25 bp, Probe Sequence
tccagaaatagaagaagttcaagcc

SEQ ID NO: 91987 - DNA, 25 bp, Probe Sequence
ttatagaggagaatgttggtgtttg

SEQ ID NO: 91988 - DNA, 25 bp, Probe Sequence
aaggttgtatgtaaatctgctttgt

SEQ ID NO: 91989 - DNA, 25 bp, Probe Sequence
attgaaggttgtatgtaaatctgct

SEQ ID NO: 91990 - DNA, 25 bp, Probe Sequence
atccagaaatagaagaagttcaagc

SEQ ID NO: 91991 - DNA, 25 bp, Probe Sequence
tgaaggttgtatgtaaatctgcttt

SEQ ID NO: 91992 - DNA, 25 bp, Probe Sequence
ttgaaggttgtatgtaaatctgctt

SEQ ID NO: 91993 - DNA, 25 bp, Probe Sequence
gaaggttgtatgtaaatctgctttg

SEQ ID NO: 91994 - DNA, 25 bp, Probe Sequence
gagaatgttggtgtttgtactgttt

SEQ ID NO: 91995 - DNA, 25 bp, Probe Sequence
tagaggagaatgttggtgtttgtac

SEQ ID NO: 91996 - DNA, 25 bp, Probe Sequence
gatttatagaggagaatgttggtgt

SEQ ID NO: 91997 - DNA, 25 bp, Probe Sequence
gcaatggtatatctgtaagtggacg

SEQ ID NO: 91998 - DNA, 25 bp, Probe Sequence
caatggtatatctgtaagtggacgt

SEQ ID NO: 91999 - DNA, 25 bp, Probe Sequence
ctgcaatggtatatctgtaagtgga

SEQ ID NO: 92000 - DNA, 25 bp, Probe Sequence
tgcaatggtatatctgtaagtggac

SEQ ID NO: 92001 - DNA, 25 bp, Probe Sequence
aatggtatatctgtaagtggacgtt

SEQ ID NO: 92002 - DNA, 25 bp, Probe Sequence
aacttgctttccagaataccctaaa

SEQ ID NO: 92003 - DNA, 25 bp, Probe Sequence
cctggaattactgcaatggtatatc

SEQ ID NO: 92004 - DNA, 25 bp, Probe Sequence
tggtatatctgtaagtggacgttaa

SEQ ID NO: 92005 - DNA, 25 bp, Probe Sequence
gcatctatgactattccctcttgaa

SEQ ID NO: 92006 - DNA, 25 bp, Probe Sequence
aataccctaaaggacctggaattac

SEQ ID NO: 92007 - DNA, 25 bp, Probe Sequence
atggtatatctgtaagtggacgtta

SEQ ID NO: 92008 - DNA, 25 bp, Probe Sequence
ataccctaaaggacctggaattact

SEQ ID NO: 92009 - DNA, 25 bp, Probe Sequence
gaataccctaaaggacctggaatta

SEQ ID NO: 92010 - DNA, 25 bp, Probe Sequence
caacttgctttccagaataccctaa

SEQ ID NO: 92011 - DNA, 25 bp, Probe Sequence
ggaattactgcaatggtatatctgt

SEQ ID NO: 92012 - DNA, 25 bp, Probe Sequence
tggaattactgcaatggtatatctg

SEQ ID NO: 92013 - DNA, 25 bp, Probe Sequence
actgcaatggtatatctgtaagtgg

SEQ ID NO: 92014 - DNA, 25 bp, Probe Sequence
agaataccctaaaggacctggaatt

SEQ ID NO: 92015 - DNA, 25 bp, Probe Sequence
gtatatctgtaagtggacgttaagg

SEQ ID NO: 92016 - DNA, 25 bp, Probe Sequence
ggtatatctgtaagtggacgttaag

SEQ ID NO: 92017 - DNA, 25 bp, Probe Sequence
atgactattccctcttgaaacaaca

SEQ ID NO: 92018 - DNA, 25 bp, Probe Sequence
actattccctcttgaaacaacacta

SEQ ID NO: 92019 - DNA, 25 bp, Probe Sequence
tctatgactattccctcttgaaaca

SEQ ID NO: 92020 - DNA, 25 bp, Probe Sequence
ctggaattactgcaatggtatatct

SEQ ID NO: 92021 - DNA, 25 bp, Probe Sequence
gacacagtaagaaccaggcataatt

SEQ ID NO: 92022 - DNA, 25 bp, Probe Sequence
caccaagtagttattcatacatcca

SEQ ID NO: 92023 - DNA, 25 bp, Probe Sequence
tgacacagtaagaaccaggcataat

SEQ ID NO: 92024 - DNA, 25 bp, Probe Sequence
tcaccaagtagttattcatacatcc

SEQ ID NO: 92025 - DNA, 25 bp, Probe Sequence
atgacacagtaagaaccaggcataa

SEQ ID NO: 92026 - DNA, 25 bp, Probe Sequence
accaagtagttattcatacatccaa

SEQ ID NO: 92027 - DNA, 25 bp, Probe Sequence
cattcttacctcgctagatggttaa

SEQ ID NO: 92028 - DNA, 25 bp, Probe Sequence
gcccattgaatatagactttgtgtt

SEQ ID NO: 92029 - DNA, 25 bp, Probe Sequence
ttgcccattgaatatagactttgtg

SEQ ID NO: 92030 - DNA, 25 bp, Probe Sequence
tgcccattgaatatagactttgtgt

SEQ ID NO: 92031 - DNA, 25 bp, Probe Sequence
acacagtaagaaccaggcataattt

SEQ ID NO: 92032 - DNA, 25 bp, Probe Sequence
tttgcccattgaatatagactttgt

SEQ ID NO: 92033 - DNA, 25 bp, Probe Sequence
tatagactttgtgttcccaatcagg

SEQ ID NO: 92034 - DNA, 25 bp, Probe Sequence
catgacacagtaagaaccaggcata

SEQ ID NO: 92035 - DNA, 25 bp, Probe Sequence
ctccagatagagcttatccagataa

SEQ ID NO: 92036 - DNA, 25 bp, Probe Sequence
ctaagaatctcacaaatgtttgcca

SEQ ID NO: 92037 - DNA, 25 bp, Probe Sequence
actaagaatctcacaaatgtttgcc

SEQ ID NO: 92038 - DNA, 25 bp, Probe Sequence
atatagactttgtgttcccaatcag

SEQ ID NO: 92039 - DNA, 25 bp, Probe Sequence
taagaatctcacaaatgtttgccat

SEQ ID NO: 92040 - DNA, 25 bp, Probe Sequence
gcattcttacctcgctagatggtta

SEQ ID NO: 92041 - DNA, 25 bp, Probe Sequence
attgaatatagactttgtgttccca

SEQ ID NO: 92042 - DNA, 25 bp, Probe Sequence
cccatagcatccttacctttaagaa

SEQ ID NO: 92043 - DNA, 25 bp, Probe Sequence
ttgaatatagactttgtgttcccaa

SEQ ID NO: 92044 - DNA, 25 bp, Probe Sequence
ttgatgggttataaatgacttgacg

SEQ ID NO: 92045 - DNA, 25 bp, Probe Sequence
ccttaataaagacttagatgttgcc

SEQ ID NO: 92046 - DNA, 25 bp, Probe Sequence
cttaataaagacttagatgttgcca

SEQ ID NO: 92047 - DNA, 25 bp, Probe Sequence
accttaataaagacttagatgttgc

SEQ ID NO: 92048 - DNA, 25 bp, Probe Sequence
taataaagacttagatgttgccaaa

SEQ ID NO: 92049 - DNA, 25 bp, Probe Sequence
ttaataaagacttagatgttgccaa

SEQ ID NO: 92050 - DNA, 25 bp, Probe Sequence
aataaagacttagatgttgccaaaa

SEQ ID NO: 92051 - DNA, 25 bp, Probe Sequence
gaagaaggtccgcgttaaatgtaca

SEQ ID NO: 92052 - DNA, 25 bp, Probe Sequence
aagaaggtccgcgttaaatgtacac

SEQ ID NO: 92053 - DNA, 25 bp, Probe Sequence
ggaagaaggtccgcgttaaatgtac

SEQ ID NO: 92054 - DNA, 25 bp, Probe Sequence
ggtccgcgttaaatgtacacgattt

SEQ ID NO: 92055 - DNA, 25 bp, Probe Sequence
gggaagaaggtccgcgttaaatgta

SEQ ID NO: 92056 - DNA, 25 bp, Probe Sequence
gtccgcgttaaatgtacacgatttt

SEQ ID NO: 92057 - DNA, 25 bp, Probe Sequence
aggtccgcgttaaatgtacacgatt

SEQ ID NO: 92058 - DNA, 25 bp, Probe Sequence
aaggtccgcgttaaatgtacacgat

SEQ ID NO: 92059 - DNA, 25 bp, Probe Sequence
ccttaataaagacttagatgttgcc

SEQ ID NO: 92060 - DNA, 25 bp, Probe Sequence
cttaataaagacttagatgttgcca

SEQ ID NO: 92061 - DNA, 25 bp, Probe Sequence
accttaataaagacttagatgttgc

SEQ ID NO: 92062 - DNA, 25 bp, Probe Sequence
taataaagacttagatgttgccaaa

SEQ ID NO: 92063 - DNA, 25 bp, Probe Sequence
ttaataaagacttagatgttgccaa

SEQ ID NO: 92064 - DNA, 25 bp, Probe Sequence
aataaagacttagatgttgccaaaa

SEQ ID NO: 92065 - DNA, 25 bp, Probe Sequence
gaagaaggtccgcgttaaatgtaca

SEQ ID NO: 92066 - DNA, 25 bp, Probe Sequence
aagaaggtccgcgttaaatgtacac

SEQ ID NO: 92067 - DNA, 25 bp, Probe Sequence
ggaagaaggtccgcgttaaatgtac

SEQ ID NO: 92068 - DNA, 25 bp, Probe Sequence
ggtccgcgttaaatgtacacgattt

SEQ ID NO: 92069 - DNA, 25 bp, Probe Sequence
gggaagaaggtccgcgttaaatgta

SEQ ID NO: 92070 - DNA, 25 bp, Probe Sequence
gtccgcgttaaatgtacacgatttt

SEQ ID NO: 92071 - DNA, 25 bp, Probe Sequence
aggtccgcgttaaatgtacacgatt

SEQ ID NO: 92072 - DNA, 25 bp, Probe Sequence
aaggtccgcgttaaatgtacacgat

SEQ ID NO: 92073 - DNA, 25 bp, Probe Sequence
ccaatgcctgattatctcttctact

SEQ ID NO: 92074 - DNA, 25 bp, Probe Sequence
tccaatgcctgattatctcttctac

SEQ ID NO: 92075 - DNA, 25 bp, Probe Sequence
ctccaatgcctgattatctcttcta

SEQ ID NO: 92076 - DNA, 25 bp, Probe Sequence
atctccaatgcctgattatctcttc

SEQ ID NO: 92077 - DNA, 25 bp, Probe Sequence
tctccaatgcctgattatctcttct

SEQ ID NO: 92078 - DNA, 25 bp, Probe Sequence
caatgcctgattatctcttctacta

SEQ ID NO: 92079 - DNA, 25 bp, Probe Sequence
tcaaggaagtcatataatcagagtc

SEQ ID NO: 92080 - DNA, 25 bp, Probe Sequence
aatctccaatgcctgattatctctt

SEQ ID NO: 92081 - DNA, 25 bp, Probe Sequence
gaatctccaatgcctgattatctct

SEQ ID NO: 92082 - DNA, 25 bp, Probe Sequence
agaatctccaatgcctgattatctc

SEQ ID NO: 92083 - DNA, 25 bp, Probe Sequence
aagaatctccaatgcctgattatct

SEQ ID NO: 92084 - DNA, 25 bp, Probe Sequence
gcctcaatgttcagaaataatgctt

SEQ ID NO: 92085 - DNA, 25 bp, Probe Sequence
caaggaagtcatataatcagagtcc

SEQ ID NO: 92086 - DNA, 25 bp, Probe Sequence
aattaactcactgtgacaagctcaa

SEQ ID NO: 92087 - DNA, 25 bp, Probe Sequence
ttcaaggaagtcatataatcagagt

SEQ ID NO: 92088 - DNA, 25 bp, Probe Sequence
tcaatcaggtttcaaggaagtcata

SEQ ID NO: 92089 - DNA, 25 bp, Probe Sequence
tgcctcaatgttcagaaataatgct

SEQ ID NO: 92090 - DNA, 25 bp, Probe Sequence
aagtcatataatcagagtcccaaga

SEQ ID NO: 92091 - DNA, 25 bp, Probe Sequence
caatcaggtttcaaggaagtcatat

SEQ ID NO: 92092 - DNA, 25 bp, Probe Sequence
ctcaatcaggtttcaaggaagtcat

SEQ ID NO: 92093 - DNA, 25 bp, Probe Sequence
ttgcctcaatgttcagaaataatgc

SEQ ID NO: 92094 - DNA, 25 bp, Probe Sequence
gaagtcatataatcagagtcccaag

SEQ ID NO: 92095 - DNA, 25 bp, Probe Sequence
aatgcctgattatctcttctactat

SEQ ID NO: 92096 - DNA, 25 bp, Probe Sequence
agtcatataatcagagtcccaagat

SEQ ID NO: 92097 - DNA, 25 bp, Probe Sequence
gtcagccacttactgtctaatgatt

SEQ ID NO: 92098 - DNA, 25 bp, Probe Sequence
agtcagccacttactgtctaatgat

SEQ ID NO: 92099 - DNA, 25 bp, Probe Sequence
atgagtcagccacttactgtctaat

SEQ ID NO: 92100 - DNA, 25 bp, Probe Sequence
gagtcagccacttactgtctaatga

SEQ ID NO: 92101 - DNA, 25 bp, Probe Sequence
gatgagtcagccacttactgtctaa

SEQ ID NO: 92102 - DNA, 25 bp, Probe Sequence
tgagtcagccacttactgtctaatg

SEQ ID NO: 92103 - DNA, 25 bp, Probe Sequence
agttcttctctgacaatccctttaa

SEQ ID NO: 92104 - DNA, 25 bp, Probe Sequence
agtaagttcttctctgacaatccct

SEQ ID NO: 92105 - DNA, 25 bp, Probe Sequence
gtaagttcttctctgacaatccctt

SEQ ID NO: 92106 - DNA, 25 bp, Probe Sequence
gcactcccattcctttatcctaatt

SEQ ID NO: 92107 - DNA, 25 bp, Probe Sequence
aagttcttctctgacaatcccttta

SEQ ID NO: 92108 - DNA, 25 bp, Probe Sequence
taagttcttctctgacaatcccttt

SEQ ID NO: 92109 - DNA, 25 bp, Probe Sequence
agcactcccattcctttatcctaat

SEQ ID NO: 92110 - DNA, 25 bp, Probe Sequence
aaacaaggtagagagttagggattt

SEQ ID NO: 92111 - DNA, 25 bp, Probe Sequence
gttaaacaaggtagagagttaggga

SEQ ID NO: 92112 - DNA, 25 bp, Probe Sequence
tagaatgtaagctccttgaaggtag

SEQ ID NO: 92113 - DNA, 25 bp, Probe Sequence
ctagaatgtaagctccttgaaggta

SEQ ID NO: 92114 - DNA, 25 bp, Probe Sequence
ggctattgagtttcactgtttaagt

SEQ ID NO: 92115 - DNA, 25 bp, Probe Sequence
agaaggctattgagtttcactgttt

SEQ ID NO: 92116 - DNA, 25 bp, Probe Sequence
aggctattgagtttcactgtttaag

SEQ ID NO: 92117 - DNA, 25 bp, Probe Sequence
gaaggctattgagtttcactgttta

SEQ ID NO: 92118 - DNA, 25 bp, Probe Sequence
actgatatatttgctctctacaccc

SEQ ID NO: 92119 - DNA, 25 bp, Probe Sequence
cactcccattcctttatcctaattt

SEQ ID NO: 92120 - DNA, 25 bp, Probe Sequence
taaacaaggtagagagttagggatt

SEQ ID NO: 92121 - DNA, 25 bp, Probe Sequence
gatgtgaaactccgtctctactaaa

SEQ ID NO: 92122 - DNA, 25 bp, Probe Sequence
gactttcctacttgcggtacatcta

SEQ ID NO: 92123 - DNA, 25 bp, Probe Sequence
tacttgcggtacatctacgtattag

SEQ ID NO: 92124 - DNA, 25 bp, Probe Sequence
ctacttgcggtacatctacgtatta

SEQ ID NO: 92125 - DNA, 25 bp, Probe Sequence
actttcctacttgcggtacatctac

SEQ ID NO: 92126 - DNA, 25 bp, Probe Sequence
cggtacatctacgtattagtcatcg

SEQ ID NO: 92127 - DNA, 25 bp, Probe Sequence
ggtacatctacgtattagtcatcgc

SEQ ID NO: 92128 - DNA, 25 bp, Probe Sequence
gcggtacatctacgtattagtcatc

SEQ ID NO: 92129 - DNA, 25 bp, Probe Sequence
cttgcggtacatctacgtattagtc

SEQ ID NO: 92130 - DNA, 25 bp, Probe Sequence
ggatgtgaaactccgtctctactaa

SEQ ID NO: 92131 - DNA, 25 bp, Probe Sequence
tgcggtacatctacgtattagtcat

SEQ ID NO: 92132 - DNA, 25 bp, Probe Sequence
ttgcggtacatctacgtattagtca

SEQ ID NO: 92133 - DNA, 25 bp, Probe Sequence
cttatggactttcctacttgcggta

SEQ ID NO: 92134 - DNA, 25 bp, Probe Sequence
acttgcggtacatctacgtattagt

SEQ ID NO: 92135 - DNA, 25 bp, Probe Sequence
atgtgaaactccgtctctactaaaa

SEQ ID NO: 92136 - DNA, 25 bp, Probe Sequence
cctacttgcggtacatctacgtatt

SEQ ID NO: 92137 - DNA, 25 bp, Probe Sequence
ctttcctacttgcggtacatctacg

SEQ ID NO: 92138 - DNA, 25 bp, Probe Sequence
ttatggactttcctacttgcggtac

SEQ ID NO: 92139 - DNA, 25 bp, Probe Sequence
ccagtacaggacttatggactttcc

SEQ ID NO: 92140 - DNA, 25 bp, Probe Sequence
cccagtacaggacttatggactttc

SEQ ID NO: 92141 - DNA, 25 bp, Probe Sequence
catgatgcccagtacaggacttatg

SEQ ID NO: 92142 - DNA, 25 bp, Probe Sequence
tcctacttgcggtacatctacgtat

SEQ ID NO: 92143 - DNA, 25 bp, Probe Sequence
gggatgtgaaactccgtctctacta

SEQ ID NO: 92144 - DNA, 25 bp, Probe Sequence
ttcctacttgcggtacatctacgta

SEQ ID NO: 92145 - DNA, 25 bp, Probe Sequence
agtgactgtgttgtgattcatagta

SEQ ID NO: 92146 - DNA, 25 bp, Probe Sequence
aatgatctgtgtgaccttgaacttc

SEQ ID NO: 92147 - DNA, 25 bp, Probe Sequence
gaatgatctgtgtgaccttgaactt

SEQ ID NO: 92148 - DNA, 25 bp, Probe Sequence
gtgactgtgttgtgattcatagtac

SEQ ID NO: 92149 - DNA, 25 bp, Probe Sequence
tgactgtgttgtgattcatagtaca

SEQ ID NO: 92150 - DNA, 25 bp, Probe Sequence
gactgtgttgtgattcatagtacat

SEQ ID NO: 92151 - DNA, 25 bp, Probe Sequence
agaatgatctgtgtgaccttgaact

SEQ ID NO: 92152 - DNA, 25 bp, Probe Sequence
actgtgttgtgattcatagtacatt

SEQ ID NO: 92153 - DNA, 25 bp, Probe Sequence
aagagagagagagagaaagaatccc

SEQ ID NO: 92154 - DNA, 25 bp, Probe Sequence
aaagagagagagagagaaagaatcc

SEQ ID NO: 92155 - DNA, 25 bp, Probe Sequence
tcagtgactgtgttgtgattcatag

SEQ ID NO: 92156 - DNA, 25 bp, Probe Sequence
ctcagtgactgtgttgtgattcata

SEQ ID NO: 92157 - DNA, 25 bp, Probe Sequence
atgatctgtgtgaccttgaacttca

SEQ ID NO: 92158 - DNA, 25 bp, Probe Sequence
cagtgactgtgttgtgattcatagt

SEQ ID NO: 92159 - DNA, 25 bp, Probe Sequence
tatacttctctccttccctgatctc

SEQ ID NO: 92160 - DNA, 25 bp, Probe Sequence
gagagagagagagaaagaatcccac

SEQ ID NO: 92161 - DNA, 25 bp, Probe Sequence
agagagagagagagaaagaatccca

SEQ ID NO: 92162 - DNA, 25 bp, Probe Sequence
atatacttctctccttccctgatct

SEQ ID NO: 92163 - DNA, 25 bp, Probe Sequence
gagagagagagaaagaatcccacag

SEQ ID NO: 92164 - DNA, 25 bp, Probe Sequence
tatagctcagtgactgtgttgtgat

SEQ ID NO: 92165 - DNA, 25 bp, Probe Sequence
aatatacttctctccttccctgatc

SEQ ID NO: 92166 - DNA, 25 bp, Probe Sequence
agagagagagagaaagaatcccaca

SEQ ID NO: 92167 - DNA, 25 bp, Probe Sequence
ttaatatacttctctccttccctga

SEQ ID NO: 92168 - DNA, 25 bp, Probe Sequence
cttgaacttcacatttcccacattg

SEQ ID NO: 92169 - DNA, 25 bp, Probe Sequence
atgttcagtcattcagtctctcctt

SEQ ID NO: 92170 - DNA, 25 bp, Probe Sequence
ttacagatgaacctcttggagactt

SEQ ID NO: 92171 - DNA, 25 bp, Probe Sequence
tgttcagtcattcagtctctccttc

SEQ ID NO: 92172 - DNA, 25 bp, Probe Sequence
gtagatgcctgaagaggagattaag

SEQ ID NO: 92173 - DNA, 25 bp, Probe Sequence
gttcagtcattcagtctctccttcc

SEQ ID NO: 92174 - DNA, 25 bp, Probe Sequence
tagatgcctgaagaggagattaagg

SEQ ID NO: 92175 - DNA, 25 bp, Probe Sequence
ggtagatgcctgaagaggagattaa

SEQ ID NO: 92176 - DNA, 25 bp, Probe Sequence
ttcagtcattcagtctctccttcct

SEQ ID NO: 92177 - DNA, 25 bp, Probe Sequence
catgttcagtcattcagtctctcct

SEQ ID NO: 92178 - DNA, 25 bp, Probe Sequence
gaatactcagttctaagtacctggc

SEQ ID NO: 92179 - DNA, 25 bp, Probe Sequence
ggtggtttgatttccttcatatagc

SEQ ID NO: 92180 - DNA, 25 bp, Probe Sequence
tgggtggtttgatttccttcatata

SEQ ID NO: 92181 - DNA, 25 bp, Probe Sequence
cctttcagatttgagtcttcattgt

SEQ ID NO: 92182 - DNA, 25 bp, Probe Sequence
agtctttacagatgaacctcttgga

SEQ ID NO: 92183 - DNA, 25 bp, Probe Sequence
cagtctttacagatgaacctcttgg

SEQ ID NO: 92184 - DNA, 25 bp, Probe Sequence
ccagtctttacagatgaacctcttg

SEQ ID NO: 92185 - DNA, 25 bp, Probe Sequence
ggtttgatttccttcatatagcaca

SEQ ID NO: 92186 - DNA, 25 bp, Probe Sequence
tggtttgatttccttcatatagcac

SEQ ID NO: 92187 - DNA, 25 bp, Probe Sequence
gtggtttgatttccttcatatagca

SEQ ID NO: 92188 - DNA, 25 bp, Probe Sequence
gggtggtttgatttccttcatatag

SEQ ID NO: 92189 - DNA, 25 bp, Probe Sequence
ttgggtggtttgatttccttcatat

SEQ ID NO: 92190 - DNA, 25 bp, Probe Sequence
agatacatagtaggaaaccagaagt

SEQ ID NO: 92191 - DNA, 25 bp, Probe Sequence
tcctttcagatttgagtcttcattg

SEQ ID NO: 92192 - DNA, 25 bp, Probe Sequence
tcccaggtttgatcttagaatactc

SEQ ID NO: 92193 - DNA, 25 bp, Probe Sequence
gttaagcatggaagagaggtagtag

SEQ ID NO: 92194 - DNA, 25 bp, Probe Sequence
agttaagcatggaagagaggtagta

SEQ ID NO: 92195 - DNA, 25 bp, Probe Sequence
atggaagagaggtagtaggtaggtg

SEQ ID NO: 92196 - DNA, 25 bp, Probe Sequence
ttaagcatggaagagaggtagtagg

SEQ ID NO: 92197 - DNA, 25 bp, Probe Sequence
ctaagcggtaatggaggaagactag

SEQ ID NO: 92198 - DNA, 25 bp, Probe Sequence
atcagtcattcatagcactatatcg

SEQ ID NO: 92199 - DNA, 25 bp, Probe Sequence
aattgtgtatagaagaagctggtga

SEQ ID NO: 92200 - DNA, 25 bp, Probe Sequence
attgtgtatagaagaagctggtgag

SEQ ID NO: 92201 - DNA, 25 bp, Probe Sequence
tctaagcggtaatggaggaagacta

SEQ ID NO: 92202 - DNA, 25 bp, Probe Sequence
cagttaagcatggaagagaggtagt

SEQ ID NO: 92203 - DNA, 25 bp, Probe Sequence
aagcatggaagagaggtagtaggta

SEQ ID NO: 92204 - DNA, 25 bp, Probe Sequence
taagcatggaagagaggtagtaggt

SEQ ID NO: 92205 - DNA, 25 bp, Probe Sequence
ttgtgtatagaagaagctggtgaga

SEQ ID NO: 92206 - DNA, 25 bp, Probe Sequence
catggaagagaggtagtaggtaggt

SEQ ID NO: 92207 - DNA, 25 bp, Probe Sequence
cagttgggtttctcataagtatcct

SEQ ID NO: 92208 - DNA, 25 bp, Probe Sequence
tgtataatcagtcattcatagcact

SEQ ID NO: 92209 - DNA, 25 bp, Probe Sequence
gtgtatagaagaagctggtgagagt

SEQ ID NO: 92210 - DNA, 25 bp, Probe Sequence
gtgctgttcgtagtttgtataatca

SEQ ID NO: 92211 - DNA, 25 bp, Probe Sequence
tgtgctgttcgtagtttgtataatc

SEQ ID NO: 92212 - DNA, 25 bp, Probe Sequence
gcttcagactgttatctataggctt

SEQ ID NO: 92213 - DNA, 25 bp, Probe Sequence
agcactatatcgagtacatacaggt

SEQ ID NO: 92214 - DNA, 25 bp, Probe Sequence
tgtatagaagaagctggtgagagtg

SEQ ID NO: 92215 - DNA, 25 bp, Probe Sequence
tgtgtatagaagaagctggtgagag

SEQ ID NO: 92216 - DNA, 25 bp, Probe Sequence
ttgtgctgttcgtagtttgtataat

SEQ ID NO: 92217 - DNA, 25 bp, Probe Sequence
gtaattgttgctcaccacttagatt

SEQ ID NO: 92218 - DNA, 25 bp, Probe Sequence
attatagatgtgctctgctcattcg

SEQ ID NO: 92219 - DNA, 25 bp, Probe Sequence
aattatagatgtgctctgctcattc

SEQ ID NO: 92220 - DNA, 25 bp, Probe Sequence
atgctcagtacagacttcacattaa

SEQ ID NO: 92221 - DNA, 25 bp, Probe Sequence
ttatgctcagtacagacttcacatt

SEQ ID NO: 92222 - DNA, 25 bp, Probe Sequence
aattatgctcagtacagacttcaca

SEQ ID NO: 92223 - DNA, 25 bp, Probe Sequence
attatgctcagtacagacttcacat

SEQ ID NO: 92224 - DNA, 25 bp, Probe Sequence
aatcatccaaggctgaattatgctc

SEQ ID NO: 92225 - DNA, 25 bp, Probe Sequence
gaattatgctcagtacagacttcac

SEQ ID NO: 92226 - DNA, 25 bp, Probe Sequence
tgctcagtacagacttcacattaag

SEQ ID NO: 92227 - DNA, 25 bp, Probe Sequence
tcgtacttgccatgatgagattaat

SEQ ID NO: 92228 - DNA, 25 bp, Probe Sequence
tatgctcagtacagacttcacatta

SEQ ID NO: 92229 - DNA, 25 bp, Probe Sequence
atgctaattatagatgtgctctgct

SEQ ID NO: 92230 - DNA, 25 bp, Probe Sequence
gctaattatagatgtgctctgctca

SEQ ID NO: 92231 - DNA, 25 bp, Probe Sequence
tgctaattatagatgtgctctgctc

SEQ ID NO: 92232 - DNA, 25 bp, Probe Sequence
cgtacttgccatgatgagattaatg

SEQ ID NO: 92233 - DNA, 25 bp, Probe Sequence
aatgctaattatagatgtgctctgc

SEQ ID NO: 92234 - DNA, 25 bp, Probe Sequence
ctcgtacttgccatgatgagattaa

SEQ ID NO: 92235 - DNA, 25 bp, Probe Sequence
ttatagatgtgctctgctcattcgg

SEQ ID NO: 92236 - DNA, 25 bp, Probe Sequence
atcatccaaggctgaattatgctca

SEQ ID NO: 92237 - DNA, 25 bp, Probe Sequence
ggtaattgttgctcaccacttagat

SEQ ID NO: 92238 - DNA, 25 bp, Probe Sequence
catgatgagattaatggcaggtctg

SEQ ID NO: 92239 - DNA, 25 bp, Probe Sequence
ctaattatagatgtgctctgctcat

SEQ ID NO: 92240 - DNA, 25 bp, Probe Sequence
atgagattaatggcaggtctggtag

SEQ ID NO: 92241 - DNA, 25 bp, Probe Sequence
gtctgcgattcttggttcttcctaa

SEQ ID NO: 92242 - DNA, 25 bp, Probe Sequence
atggatttcttcgtagcagtatgtt

SEQ ID NO: 92243 - DNA, 25 bp, Probe Sequence
atttcttcgtagcagtatgttggag

SEQ ID NO: 92244 - DNA, 25 bp, Probe Sequence
gatttcttcgtagcagtatgttgga

SEQ ID NO: 92245 - DNA, 25 bp, Probe Sequence
aagtattggtctccatgtgtatcag

SEQ ID NO: 92246 - DNA, 25 bp, Probe Sequence
tggatttcttcgtagcagtatgttg

SEQ ID NO: 92247 - DNA, 25 bp, Probe Sequence
cgattcttggttcttcctaaacttg

SEQ ID NO: 92248 - DNA, 25 bp, Probe Sequence
cttggttcttcctaaacttgtatcc

SEQ ID NO: 92249 - DNA, 25 bp, Probe Sequence
gattcttggttcttcctaaacttgt

SEQ ID NO: 92250 - DNA, 25 bp, Probe Sequence
ttaacaacggtgaagggaaatcttt

SEQ ID NO: 92251 - DNA, 25 bp, Probe Sequence
atgtcataacccaggatcaaatcaa

SEQ ID NO: 92252 - DNA, 25 bp, Probe Sequence
ggatttcttcgtagcagtatgttgg

SEQ ID NO: 92253 - DNA, 25 bp, Probe Sequence
tgtcataacccaggatcaaatcaaa

SEQ ID NO: 92254 - DNA, 25 bp, Probe Sequence
cttaacaacggtgaagggaaatctt

SEQ ID NO: 92255 - DNA, 25 bp, Probe Sequence
gtcataacccaggatcaaatcaaat

SEQ ID NO: 92256 - DNA, 25 bp, Probe Sequence
tcttcctaaacttgtatccaatggc

SEQ ID NO: 92257 - DNA, 25 bp, Probe Sequence
ggttcttcctaaacttgtatccaat

SEQ ID NO: 92258 - DNA, 25 bp, Probe Sequence
agtattggtctccatgtgtatcagg

SEQ ID NO: 92259 - DNA, 25 bp, Probe Sequence
tcttggttcttcctaaacttgtatc

SEQ ID NO: 92260 - DNA, 25 bp, Probe Sequence
gcgattcttggttcttcctaaactt

SEQ ID NO: 92261 - DNA, 25 bp, Probe Sequence
aaactgaattaagaagcagacactg

SEQ ID NO: 92262 - DNA, 25 bp, Probe Sequence
catgtcataacccaggatcaaatca

SEQ ID NO: 92263 - DNA, 25 bp, Probe Sequence
ttcttcctaaacttgtatccaatgg

SEQ ID NO: 92264 - DNA, 25 bp, Probe Sequence
tcataacccaggatcaaatcaaatt

SEQ ID NO: 92265 - DNA, 25 bp, Probe Sequence
ggttactcttcctcatagtcatcat

SEQ ID NO: 92266 - DNA, 25 bp, Probe Sequence
tactcttcctcatagtcatcattga

SEQ ID NO: 92267 - DNA, 25 bp, Probe Sequence
aggttactcttcctcatagtcatca

SEQ ID NO: 92268 - DNA, 25 bp, Probe Sequence
ccacttaggttactcttcctcatag

SEQ ID NO: 92269 - DNA, 25 bp, Probe Sequence
cacttaggttactcttcctcatagt

SEQ ID NO: 92270 - DNA, 25 bp, Probe Sequence
atgaactcatggtaacatattctgg

SEQ ID NO: 92271 - DNA, 25 bp, Probe Sequence
cttaggttactcttcctcatagtca

SEQ ID NO: 92272 - DNA, 25 bp, Probe Sequence
acttaggttactcttcctcatagtc

SEQ ID NO: 92273 - DNA, 25 bp, Probe Sequence
ttactcttcctcatagtcatcattg

SEQ ID NO: 92274 - DNA, 25 bp, Probe Sequence
gttactcttcctcatagtcatcatt

SEQ ID NO: 92275 - DNA, 25 bp, Probe Sequence
taggttactcttcctcatagtcatc

SEQ ID NO: 92276 - DNA, 25 bp, Probe Sequence
ttaggttactcttcctcatagtcat

SEQ ID NO: 92277 - DNA, 25 bp, Probe Sequence
tcataattacctaacagcagttctt

SEQ ID NO: 92278 - DNA, 25 bp, Probe Sequence
atcataattacctaacagcagttct

SEQ ID NO: 92279 - DNA, 25 bp, Probe Sequence
cacagtgagatgagtttagaacagg

SEQ ID NO: 92280 - DNA, 25 bp, Probe Sequence
ccacagtgagatgagtttagaacag

SEQ ID NO: 92281 - DNA, 25 bp, Probe Sequence
gatacatcaaccaccagcacatcaa

SEQ ID NO: 92282 - DNA, 25 bp, Probe Sequence
tgaactcatggtaacatattctggg

SEQ ID NO: 92283 - DNA, 25 bp, Probe Sequence
gtgttccaatatacgaaattatccg

SEQ ID NO: 92284 - DNA, 25 bp, Probe Sequence
atacatcaaccaccagcacatcaac

SEQ ID NO: 92285 - DNA, 25 bp, Probe Sequence
acagtgagatgagtttagaacaggg

SEQ ID NO: 92286 - DNA, 25 bp, Probe Sequence
cccacttaggttactcttcctcata

SEQ ID NO: 92287 - DNA, 25 bp, Probe Sequence
cacatcaacaactccatctgctcag

SEQ ID NO: 92288 - DNA, 25 bp, Probe Sequence
gccacagtgagatgagtttagaaca

SEQ ID NO: 92289 - DNA, 25 bp, Probe Sequence
cttagttcacggtctcagtagtcta

SEQ ID NO: 92290 - DNA, 25 bp, Probe Sequence
ttagttcacggtctcagtagtctag

SEQ ID NO: 92291 - DNA, 25 bp, Probe Sequence
acttagttcacggtctcagtagtct

SEQ ID NO: 92292 - DNA, 25 bp, Probe Sequence
cacttagttcacggtctcagtagtc

SEQ ID NO: 92293 - DNA, 25 bp, Probe Sequence
gtcacttagttcacggtctcagtag

SEQ ID NO: 92294 - DNA, 25 bp, Probe Sequence
gaggatggatttgtcacttagttca

SEQ ID NO: 92295 - DNA, 25 bp, Probe Sequence
aggatggatttgtcacttagttcac

SEQ ID NO: 92296 - DNA, 25 bp, Probe Sequence
gatttgtttgtggcgttgagtattt

SEQ ID NO: 92297 - DNA, 25 bp, Probe Sequence
tcacttagttcacggtctcagtagt

SEQ ID NO: 92298 - DNA, 25 bp, Probe Sequence
atttgtttgtggcgttgagtatttg

SEQ ID NO: 92299 - DNA, 25 bp, Probe Sequence
ggaggatggatttgtcacttagttc

SEQ ID NO: 92300 - DNA, 25 bp, Probe Sequence
tgtcacttagttcacggtctcagta

SEQ ID NO: 92301 - DNA, 25 bp, Probe Sequence
gatttgtcacttagttcacggtctc

SEQ ID NO: 92302 - DNA, 25 bp, Probe Sequence
gttctttagggtattgcttgggttc

SEQ ID NO: 92303 - DNA, 25 bp, Probe Sequence
gatggatttgtcacttagttcacgg

SEQ ID NO: 92304 - DNA, 25 bp, Probe Sequence
ggatggatttgtcacttagttcacg

SEQ ID NO: 92305 - DNA, 25 bp, Probe Sequence
atttgtcacttagttcacggtctca

SEQ ID NO: 92306 - DNA, 25 bp, Probe Sequence
tttgtttgtggcgttgagtatttgt

SEQ ID NO: 92307 - DNA, 25 bp, Probe Sequence
gggaggatggatttgtcacttagtt

SEQ ID NO: 92308 - DNA, 25 bp, Probe Sequence
atggatttgtcacttagttcacggt

SEQ ID NO: 92309 - DNA, 25 bp, Probe Sequence
tttaacccagtagtttggagtatcc

SEQ ID NO: 92310 - DNA, 25 bp, Probe Sequence
tagttcacggtctcagtagtctaga

SEQ ID NO: 92311 - DNA, 25 bp, Probe Sequence
ttgtcacttagttcacggtctcagt

SEQ ID NO: 92312 - DNA, 25 bp, Probe Sequence
atccttcctctgaacgaagtaagaa

SEQ ID NO: 92313 - DNA, 25 bp, Probe Sequence
tataggcactcatcaagttctcaag

SEQ ID NO: 92314 - DNA, 25 bp, Probe Sequence
ttataggcactcatcaagttctcaa

SEQ ID NO: 92315 - DNA, 25 bp, Probe Sequence
tctaattgattcaggattctgtgct

SEQ ID NO: 92316 - DNA, 25 bp, Probe Sequence
tgattcaggattctgtgctaataca

SEQ ID NO: 92317 - DNA, 25 bp, Probe Sequence
ataggcactcatcaagttctcaaga

SEQ ID NO: 92318 - DNA, 25 bp, Probe Sequence
ttctaattgattcaggattctgtgc

SEQ ID NO: 92319 - DNA, 25 bp, Probe Sequence
agatacctgctaccagtgataagag

SEQ ID NO: 92320 - DNA, 25 bp, Probe Sequence
atacctgctaccagtgataagagtc

SEQ ID NO: 92321 - DNA, 25 bp, Probe Sequence
gatacctgctaccagtgataagagt

SEQ ID NO: 92322 - DNA, 25 bp, Probe Sequence
cagatacctgctaccagtgataaga

SEQ ID NO: 92323 - DNA, 25 bp, Probe Sequence
gattcaggattctgtgctaatacaa

SEQ ID NO: 92324 - DNA, 25 bp, Probe Sequence
ttgattcaggattctgtgctaatac

SEQ ID NO: 92325 - DNA, 25 bp, Probe Sequence
aattgattcaggattctgtgctaat

SEQ ID NO: 92326 - DNA, 25 bp, Probe Sequence
ctaattgattcaggattctgtgcta

SEQ ID NO: 92327 - DNA, 25 bp, Probe Sequence
taggcactcatcaagttctcaagag

SEQ ID NO: 92328 - DNA, 25 bp, Probe Sequence
taattgattcaggattctgtgctaa

SEQ ID NO: 92329 - DNA, 25 bp, Probe Sequence
attgattcaggattctgtgctaata

SEQ ID NO: 92330 - DNA, 25 bp, Probe Sequence
caaacatccctttagaataactgcc

SEQ ID NO: 92331 - DNA, 25 bp, Probe Sequence
aaacatccctttagaataactgcca

SEQ ID NO: 92332 - DNA, 25 bp, Probe Sequence
tcaaacatccctttagaataactgc

SEQ ID NO: 92333 - DNA, 25 bp, Probe Sequence
aacatccctttagaataactgccac

SEQ ID NO: 92334 - DNA, 25 bp, Probe Sequence
agggtcttatgaacaaggtaaatga

SEQ ID NO: 92335 - DNA, 25 bp, Probe Sequence
tacctgctaccagtgataagagtca

SEQ ID NO: 92336 - DNA, 25 bp, Probe Sequence
gagggtcttatgaacaaggtaaatg

SEQ ID NO: 92337 - DNA, 25 bp, Probe Sequence
tacgattgaatgaacttctgtgagc

SEQ ID NO: 92338 - DNA, 25 bp, Probe Sequence
gtacgattgaatgaacttctgtgag

SEQ ID NO: 92339 - DNA, 25 bp, Probe Sequence
aaggtacgattgaatgaacttctgt

SEQ ID NO: 92340 - DNA, 25 bp, Probe Sequence
acacacacacaatctgtatgatgat

SEQ ID NO: 92341 - DNA, 25 bp, Probe Sequence
ggtacgattgaatgaacttctgtga

SEQ ID NO: 92342 - DNA, 25 bp, Probe Sequence
aggtacgattgaatgaacttctgtg

SEQ ID NO: 92343 - DNA, 25 bp, Probe Sequence
aataatgacacacacacacacacac

SEQ ID NO: 92344 - DNA, 25 bp, Probe Sequence
cacacacacacaatctgtatgatga

SEQ ID NO: 92345 - DNA, 25 bp, Probe Sequence
acacacacacacaatctgtatgatg

SEQ ID NO: 92346 - DNA, 25 bp, Probe Sequence
cacacacacacacaatctgtatgat

SEQ ID NO: 92347 - DNA, 25 bp, Probe Sequence
tagcgtgacacttaatataacagtt

SEQ ID NO: 92348 - DNA, 25 bp, Probe Sequence
ttagcgtgacacttaatataacagt

SEQ ID NO: 92349 - DNA, 25 bp, Probe Sequence
cacacacacaatctgtatgatgatt

SEQ ID NO: 92350 - DNA, 25 bp, Probe Sequence
attctaattccacctcagtcattaa

SEQ ID NO: 92351 - DNA, 25 bp, Probe Sequence
tggagttgtagacatcacagatcaa

SEQ ID NO: 92352 - DNA, 25 bp, Probe Sequence
tagagagagatttccaagcatttcc

SEQ ID NO: 92353 - DNA, 25 bp, Probe Sequence
ctggagttgtagacatcacagatca

SEQ ID NO: 92354 - DNA, 25 bp, Probe Sequence
cctagagagagatttccaagcattt

SEQ ID NO: 92355 - DNA, 25 bp, Probe Sequence
tcctagagtaacctagagagagatt

SEQ ID NO: 92356 - DNA, 25 bp, Probe Sequence
ttcctagagtaacctagagagagat

SEQ ID NO: 92357 - DNA, 25 bp, Probe Sequence
caaataatgacacacacacacacac

SEQ ID NO: 92358 - DNA, 25 bp, Probe Sequence
gtaacctagagagagatttccaagc

SEQ ID NO: 92359 - DNA, 25 bp, Probe Sequence
agagtaacctagagagagatttcca

SEQ ID NO: 92360 - DNA, 25 bp, Probe Sequence
ataatgacacacacacacacacaca

SEQ ID NO: 92361 - DNA, 25 bp, Probe Sequence
aaggatagaagacagcagtataggt

SEQ ID NO: 92362 - DNA, 25 bp, Probe Sequence
gaaggatagaagacagcagtatagg

SEQ ID NO: 92363 - DNA, 25 bp, Probe Sequence
tagaagacagcagtataggtgaatg

SEQ ID NO: 92364 - DNA, 25 bp, Probe Sequence
gaagaaggatagaagacagcagtat

SEQ ID NO: 92365 - DNA, 25 bp, Probe Sequence
gatagaagacagcagtataggtgaa

SEQ ID NO: 92366 - DNA, 25 bp, Probe Sequence
ttaaggaagaaggatagaagacagc

SEQ ID NO: 92367 - DNA, 25 bp, Probe Sequence
taaggaagaaggatagaagacagca

SEQ ID NO: 92368 - DNA, 25 bp, Probe Sequence
ggatagaagacagcagtataggtga

SEQ ID NO: 92369 - DNA, 25 bp, Probe Sequence
aggatagaagacagcagtataggtg

SEQ ID NO: 92370 - DNA, 25 bp, Probe Sequence
agaaggatagaagacagcagtatag

SEQ ID NO: 92371 - DNA, 25 bp, Probe Sequence
atagaagacagcagtataggtgaat

SEQ ID NO: 92372 - DNA, 25 bp, Probe Sequence
ggaagaaggatagaagacagcagta

SEQ ID NO: 92373 - DNA, 25 bp, Probe Sequence
aagaaggatagaagacagcagtata

SEQ ID NO: 92374 - DNA, 25 bp, Probe Sequence
agttaaggaagaaggatagaagaca

SEQ ID NO: 92375 - DNA, 25 bp, Probe Sequence
gttaaggaagaaggatagaagacag

SEQ ID NO: 92376 - DNA, 25 bp, Probe Sequence
aaggaagaaggatagaagacagcag

SEQ ID NO: 92377 - DNA, 25 bp, Probe Sequence
gagttaaggaagaaggatagaagac

SEQ ID NO: 92378 - DNA, 25 bp, Probe Sequence
agagttaaggaagaaggatagaaga

SEQ ID NO: 92379 - DNA, 25 bp, Probe Sequence
gaagacagcagtataggtgaatgtg

SEQ ID NO: 92380 - DNA, 25 bp, Probe Sequence
agaagacagcagtataggtgaatgt

SEQ ID NO: 92381 - DNA, 25 bp, Probe Sequence
ttaagtatgatccagtggcacagtt

SEQ ID NO: 92382 - DNA, 25 bp, Probe Sequence
aagacagcagtataggtgaatgtgt

SEQ ID NO: 92383 - DNA, 25 bp, Probe Sequence
aagagttaaggaagaaggatagaag

SEQ ID NO: 92384 - DNA, 25 bp, Probe Sequence
aggaagaaggatagaagacagcagt

SEQ ID NO: 92385 - DNA, 25 bp, Probe Sequence
attgtctagcatagttcttaggtgg

SEQ ID NO: 92386 - DNA, 25 bp, Probe Sequence
acattcagagtcatattatggtcaa

SEQ ID NO: 92387 - DNA, 25 bp, Probe Sequence
tattgtctagcatagttcttaggtg

SEQ ID NO: 92388 - DNA, 25 bp, Probe Sequence
cattcagagtcatattatggtcaac

SEQ ID NO: 92389 - DNA, 25 bp, Probe Sequence
gacattcagagtcatattatggtca

SEQ ID NO: 92390 - DNA, 25 bp, Probe Sequence
ttcagagtcatattatggtcaactt

SEQ ID NO: 92391 - DNA, 25 bp, Probe Sequence
gttaagtgatggtataggaaagggt

SEQ ID NO: 92392 - DNA, 25 bp, Probe Sequence
tggtcatgtctgaataattctcatt

SEQ ID NO: 92393 - DNA, 25 bp, Probe Sequence
agttaagtgatggtataggaaaggg

SEQ ID NO: 92394 - DNA, 25 bp, Probe Sequence
taagtgatggtataggaaagggttt

SEQ ID NO: 92395 - DNA, 25 bp, Probe Sequence
aggaacctatgttattgcattaagc

SEQ ID NO: 92396 - DNA, 25 bp, Probe Sequence
attcagagtcatattatggtcaact

SEQ ID NO: 92397 - DNA, 25 bp, Probe Sequence
ttaagtgatggtataggaaagggtt

SEQ ID NO: 92398 - DNA, 25 bp, Probe Sequence
atggtcatgtctgaataattctcat

SEQ ID NO: 92399 - DNA, 25 bp, Probe Sequence
gcattaagcaagagtatgtctgttt

SEQ ID NO: 92400 - DNA, 25 bp, Probe Sequence
gagtatgtctgtttatcccaagttt

SEQ ID NO: 92401 - DNA, 25 bp, Probe Sequence
gggtttcttgaactttgtggtatta

SEQ ID NO: 92402 - DNA, 25 bp, Probe Sequence
agagtatgtctgtttatcccaagtt

SEQ ID NO: 92403 - DNA, 25 bp, Probe Sequence
aagagtatgtctgtttatcccaagt

SEQ ID NO: 92404 - DNA, 25 bp, Probe Sequence
aagcaagagtatgtctgtttatccc

SEQ ID NO: 92405 - DNA, 25 bp, Probe Sequence
attacgtcatgtcattggtgtgata

SEQ ID NO: 92406 - DNA, 25 bp, Probe Sequence
tattacgtcatgtcattggtgtgat

SEQ ID NO: 92407 - DNA, 25 bp, Probe Sequence
ttgtggtattacgtcatgtcattgg

SEQ ID NO: 92408 - DNA, 25 bp, Probe Sequence
agggtttcttgaactttgtggtatt

SEQ ID NO: 92409 - DNA, 25 bp, Probe Sequence
cttaccaatctcacttaccatagca

SEQ ID NO: 92410 - DNA, 25 bp, Probe Sequence
acttaccaatctcacttaccatagc

SEQ ID NO: 92411 - DNA, 25 bp, Probe Sequence
gcacttaccaatctcacttaccata

SEQ ID NO: 92412 - DNA, 25 bp, Probe Sequence
ttaccaatctcacttaccatagcat

SEQ ID NO: 92413 - DNA, 25 bp, Probe Sequence
aacttagattcttgagccacacttc

SEQ ID NO: 92414 - DNA, 25 bp, Probe Sequence
cttcttccttcttgtaagttcctcc

SEQ ID NO: 92415 - DNA, 25 bp, Probe Sequence
ccttcttccttcttgtaagttcctc

SEQ ID NO: 92416 - DNA, 25 bp, Probe Sequence
cacttaccaatctcacttaccatag

SEQ ID NO: 92417 - DNA, 25 bp, Probe Sequence
ttgccttcttccttcttgtaagttc

SEQ ID NO: 92418 - DNA, 25 bp, Probe Sequence
tgtcttccattgatctctgattgtc

SEQ ID NO: 92419 - DNA, 25 bp, Probe Sequence
agtgtcttccattgatctctgattg

SEQ ID NO: 92420 - DNA, 25 bp, Probe Sequence
aagtgtcttccattgatctctgatt

SEQ ID NO: 92421 - DNA, 25 bp, Probe Sequence
gtgtcttccattgatctctgattgt

SEQ ID NO: 92422 - DNA, 25 bp, Probe Sequence
agcctacctctataccttcatgtaa

SEQ ID NO: 92423 - DNA, 25 bp, Probe Sequence
taccaatctcacttaccatagcatg

SEQ ID NO: 92424 - DNA, 25 bp, Probe Sequence
tacctctataccttcatgtaagcca

SEQ ID NO: 92425 - DNA, 25 bp, Probe Sequence
ctacctctataccttcatgtaagcc

SEQ ID NO: 92426 - DNA, 25 bp, Probe Sequence
cctacctctataccttcatgtaagc

SEQ ID NO: 92427 - DNA, 25 bp, Probe Sequence
gcctacctctataccttcatgtaag

SEQ ID NO: 92428 - DNA, 25 bp, Probe Sequence
ctctataccttcatgtaagccatca

SEQ ID NO: 92429 - DNA, 25 bp, Probe Sequence
cctctataccttcatgtaagccatc

SEQ ID NO: 92430 - DNA, 25 bp, Probe Sequence
gtcttccattgatctctgattgtcc

SEQ ID NO: 92431 - DNA, 25 bp, Probe Sequence
cttagattcttgagccacacttcag

SEQ ID NO: 92432 - DNA, 25 bp, Probe Sequence
acctctataccttcatgtaagccat

SEQ ID NO: 92433 - DNA, 25 bp, Probe Sequence
gtggttagaatagttcctggcatat

SEQ ID NO: 92434 - DNA, 25 bp, Probe Sequence
agtggttagaatagttcctggcata

SEQ ID NO: 92435 - DNA, 25 bp, Probe Sequence
cctggcatataataagcactagaga

SEQ ID NO: 92436 - DNA, 25 bp, Probe Sequence
tcctggcatataataagcactagag

SEQ ID NO: 92437 - DNA, 25 bp, Probe Sequence
actcaatctcaactcatctcaatgc

SEQ ID NO: 92438 - DNA, 25 bp, Probe Sequence
tggttagaatagttcctggcatata

SEQ ID NO: 92439 - DNA, 25 bp, Probe Sequence
ttcctggcatataataagcactaga

SEQ ID NO: 92440 - DNA, 25 bp, Probe Sequence
gttcctggcatataataagcactag

SEQ ID NO: 92441 - DNA, 25 bp, Probe Sequence
atagttcctggcatataataagcac

SEQ ID NO: 92442 - DNA, 25 bp, Probe Sequence
ggtactcaatctcaactcatctcaa

SEQ ID NO: 92443 - DNA, 25 bp, Probe Sequence
ttcttgaggctactatcatacttcc

SEQ ID NO: 92444 - DNA, 25 bp, Probe Sequence
ctggtactcaatctcaactcatctc

SEQ ID NO: 92445 - DNA, 25 bp, Probe Sequence
agttcctggcatataataagcacta

SEQ ID NO: 92446 - DNA, 25 bp, Probe Sequence
tagttcctggcatataataagcact

SEQ ID NO: 92447 - DNA, 25 bp, Probe Sequence
tggtactcaatctcaactcatctca

SEQ ID NO: 92448 - DNA, 25 bp, Probe Sequence
tactcaatctcaactcatctcaatg

SEQ ID NO: 92449 - DNA, 25 bp, Probe Sequence
ctcaatctcaactcatctcaatgcc

SEQ ID NO: 92450 - DNA, 25 bp, Probe Sequence
aagtggttagaatagttcctggcat

SEQ ID NO: 92451 - DNA, 25 bp, Probe Sequence
caatctcaactcatctcaatgcctg

SEQ ID NO: 92452 - DNA, 25 bp, Probe Sequence
aatagttcctggcatataataagca

SEQ ID NO: 92453 - DNA, 25 bp, Probe Sequence
ataattaatacatgccaggcttcca

SEQ ID NO: 92454 - DNA, 25 bp, Probe Sequence
tcaatctcaactcatctcaatgcct

SEQ ID NO: 92455 - DNA, 25 bp, Probe Sequence
cttgaggctactatcatacttcctg

SEQ ID NO: 92456 - DNA, 25 bp, Probe Sequence
tcttgaggctactatcatacttcct

SEQ ID NO: 92457 - DNA, 25 bp, Probe Sequence
gccacatcatagttcaccttatcaa

SEQ ID NO: 92458 - DNA, 25 bp, Probe Sequence
agttcaccttatcaagttacaccat

SEQ ID NO: 92459 - DNA, 25 bp, Probe Sequence
tagttcaccttatcaagttacacca

SEQ ID NO: 92460 - DNA, 25 bp, Probe Sequence
ccacatcatagttcaccttatcaag

SEQ ID NO: 92461 - DNA, 25 bp, Probe Sequence
ttatatcacacacacacacaccaag

SEQ ID NO: 92462 - DNA, 25 bp, Probe Sequence
cttatatcacacacacacacaccaa

SEQ ID NO: 92463 - DNA, 25 bp, Probe Sequence
cacatcatagttcaccttatcaagt

SEQ ID NO: 92464 - DNA, 25 bp, Probe Sequence
gttcaccttatcaagttacaccata

SEQ ID NO: 92465 - DNA, 25 bp, Probe Sequence
cacttatatcacacacacacacacc

SEQ ID NO: 92466 - DNA, 25 bp, Probe Sequence
tatatcacacacacacacaccaaga

SEQ ID NO: 92467 - DNA, 25 bp, Probe Sequence
atagttcaccttatcaagttacacc

SEQ ID NO: 92468 - DNA, 25 bp, Probe Sequence
acttatatcacacacacacacacca

SEQ ID NO: 92469 - DNA, 25 bp, Probe Sequence
acatcatagttcaccttatcaagtt

SEQ ID NO: 92470 - DNA, 25 bp, Probe Sequence
gcacttatatcacacacacacacac

SEQ ID NO: 92471 - DNA, 25 bp, Probe Sequence
atatcacacacacacacaccaagat

SEQ ID NO: 92472 - DNA, 25 bp, Probe Sequence
ttcaccttatcaagttacaccatat

SEQ ID NO: 92473 - DNA, 25 bp, Probe Sequence
aatactggcatcaagcatcttctca

SEQ ID NO: 92474 - DNA, 25 bp, Probe Sequence
catagttcaccttatcaagttacac

SEQ ID NO: 92475 - DNA, 25 bp, Probe Sequence
tcatagttcaccttatcaagttaca

SEQ ID NO: 92476 - DNA, 25 bp, Probe Sequence
gattacagatgtgatccaccatgtt

SEQ ID NO: 92477 - DNA, 25 bp, Probe Sequence
attacagatgtgatccaccatgttg

SEQ ID NO: 92478 - DNA, 25 bp, Probe Sequence
atactggcatcaagcatcttctcac

SEQ ID NO: 92479 - DNA, 25 bp, Probe Sequence
tgtgattacagatgtgatccaccat

SEQ ID NO: 92480 - DNA, 25 bp, Probe Sequence
gtgattacagatgtgatccaccatg

SEQ ID NO: 92481 - DNA, 25 bp, Probe Sequence
gtccttcttccttgatactcacgaa

SEQ ID NO: 92482 - DNA, 25 bp, Probe Sequence
agtttctcttcttctctacaacctg

SEQ ID NO: 92483 - DNA, 25 bp, Probe Sequence
cagtttctcttcttctctacaacct

SEQ ID NO: 92484 - DNA, 25 bp, Probe Sequence
ttctcttcttctctacaacctgcga

SEQ ID NO: 92485 - DNA, 25 bp, Probe Sequence
gtttctcttcttctctacaacctgc

SEQ ID NO: 92486 - DNA, 25 bp, Probe Sequence
gcagtttctcttcttctctacaacc

SEQ ID NO: 92487 - DNA, 25 bp, Probe Sequence
cgcagtttctcttcttctctacaac

SEQ ID NO: 92488 - DNA, 25 bp, Probe Sequence
tctcttcttctctacaacctgcgac

SEQ ID NO: 92489 - DNA, 25 bp, Probe Sequence
tttctcttcttctctacaacctgcg

SEQ ID NO: 92490 - DNA, 25 bp, Probe Sequence
ccgcagtttctcttcttctctacaa

SEQ ID NO: 92491 - DNA, 25 bp, Probe Sequence
ggtccttcttccttgatactcacga

SEQ ID NO: 92492 - DNA, 25 bp, Probe Sequence
ctccgcagtttctcttcttctctac

SEQ ID NO: 92493 - DNA, 25 bp, Probe Sequence
ctcccactccatgaggtatttctac

SEQ ID NO: 92494 - DNA, 25 bp, Probe Sequence
tccttcttccttgatactcacgaag

SEQ ID NO: 92495 - DNA, 25 bp, Probe Sequence
tccgcagtttctcttcttctctaca

SEQ ID NO: 92496 - DNA, 25 bp, Probe Sequence
atgaggtatttctacaccaccatgt

SEQ ID NO: 92497 - DNA, 25 bp, Probe Sequence
cccactccatgaggtatttctacac

SEQ ID NO: 92498 - DNA, 25 bp, Probe Sequence
tcccactccatgaggtatttctaca

SEQ ID NO: 92499 - DNA, 25 bp, Probe Sequence
actccatgaggtatttctacaccac

SEQ ID NO: 92500 - DNA, 25 bp, Probe Sequence
cactccatgaggtatttctacacca

SEQ ID NO: 92501 - DNA, 25 bp, Probe Sequence
cctccgcagtttctcttcttctcta

SEQ ID NO: 92502 - DNA, 25 bp, Probe Sequence
tgaggtatttctacaccaccatgtc

SEQ ID NO: 92503 - DNA, 25 bp, Probe Sequence
ccatgaggtatttctacaccaccat

SEQ ID NO: 92504 - DNA, 25 bp, Probe Sequence
gtttccttcctggtttctcagacag

SEQ ID NO: 92505 - DNA, 25 bp, Probe Sequence
tctgactcacatacagtagatcact

SEQ ID NO: 92506 - DNA, 25 bp, Probe Sequence
ggcataggattacttgtctcagaag

SEQ ID NO: 92507 - DNA, 25 bp, Probe Sequence
gcataggattacttgtctcagaagc

SEQ ID NO: 92508 - DNA, 25 bp, Probe Sequence
aagattccatgttcagataaggcaa

SEQ ID NO: 92509 - DNA, 25 bp, Probe Sequence
gattccatgttcagataaggcaact

SEQ ID NO: 92510 - DNA, 25 bp, Probe Sequence
agattccatgttcagataaggcaac

SEQ ID NO: 92511 - DNA, 25 bp, Probe Sequence
ctgactcacatacagtagatcactt

SEQ ID NO: 92512 - DNA, 25 bp, Probe Sequence
ttctgactcacatacagtagatcac

SEQ ID NO: 92513 - DNA, 25 bp, Probe Sequence
cataggattacttgtctcagaagct

SEQ ID NO: 92514 - DNA, 25 bp, Probe Sequence
atagggcataggattacttgtctca

SEQ ID NO: 92515 - DNA, 25 bp, Probe Sequence
ggtggatatagggcataggattact

SEQ ID NO: 92516 - DNA, 25 bp, Probe Sequence
attccatgttcagataaggcaactg

SEQ ID NO: 92517 - DNA, 25 bp, Probe Sequence
ggatatagggcataggattacttgt

SEQ ID NO: 92518 - DNA, 25 bp, Probe Sequence
tggatatagggcataggattacttg

SEQ ID NO: 92519 - DNA, 25 bp, Probe Sequence
gtggatatagggcataggattactt

SEQ ID NO: 92520 - DNA, 25 bp, Probe Sequence
tagggcataggattacttgtctcag

SEQ ID NO: 92521 - DNA, 25 bp, Probe Sequence
tatagggcataggattacttgtctc

SEQ ID NO: 92522 - DNA, 25 bp, Probe Sequence
ttgtctcagaagctgtcatagaatt

SEQ ID NO: 92523 - DNA, 25 bp, Probe Sequence
ttacttgtctcagaagctgtcatag

SEQ ID NO: 92524 - DNA, 25 bp, Probe Sequence
ataggattacttgtctcagaagctg

SEQ ID NO: 92525 - DNA, 25 bp, Probe Sequence
cttgtctcagaagctgtcatagaat

SEQ ID NO: 92526 - DNA, 25 bp, Probe Sequence
attacttgtctcagaagctgtcata

SEQ ID NO: 92527 - DNA, 25 bp, Probe Sequence
gattacttgtctcagaagctgtcat

SEQ ID NO: 92528 - DNA, 25 bp, Probe Sequence
tacttgtctcagaagctgtcataga

SEQ ID NO: 92529 - DNA, 25 bp, Probe Sequence
ttcaagagaggaggattggatgagt

SEQ ID NO: 92530 - DNA, 25 bp, Probe Sequence
tttgttgttggttagatttggcact

SEQ ID NO: 92531 - DNA, 25 bp, Probe Sequence
gttagatttggcactgtgtagtcat

SEQ ID NO: 92532 - DNA, 25 bp, Probe Sequence
atgtgactgatgaggtttcaagaga

SEQ ID NO: 92533 - DNA, 25 bp, Probe Sequence
tttcaagagaggaggattggatgag

SEQ ID NO: 92534 - DNA, 25 bp, Probe Sequence
gatgaggtttcaagagaggaggatt

SEQ ID NO: 92535 - DNA, 25 bp, Probe Sequence
tcaagagaggaggattggatgagtg

SEQ ID NO: 92536 - DNA, 25 bp, Probe Sequence
gttggttagatttggcactgtgtag

SEQ ID NO: 92537 - DNA, 25 bp, Probe Sequence
atgatcgtcaactctcacctcttct

SEQ ID NO: 92538 - DNA, 25 bp, Probe Sequence
ttgttgttggttagatttggcactg

SEQ ID NO: 92539 - DNA, 25 bp, Probe Sequence
gtttcaagagaggaggattggatga

SEQ ID NO: 92540 - DNA, 25 bp, Probe Sequence
atgaggtttcaagagaggaggattg

SEQ ID NO: 92541 - DNA, 25 bp, Probe Sequence
ttagatttggcactgtgtagtcatg

SEQ ID NO: 92542 - DNA, 25 bp, Probe Sequence
tgatcgtcaactctcacctcttctt

SEQ ID NO: 92543 - DNA, 25 bp, Probe Sequence
tgtgactgatgaggtttcaagagag

SEQ ID NO: 92544 - DNA, 25 bp, Probe Sequence
gactgatgaggtttcaagagaggag

SEQ ID NO: 92545 - DNA, 25 bp, Probe Sequence
catgtgactgatgaggtttcaagag

SEQ ID NO: 92546 - DNA, 25 bp, Probe Sequence
tgttggttagatttggcactgtgta

SEQ ID NO: 92547 - DNA, 25 bp, Probe Sequence
gatcgtcaactctcacctcttcttt

SEQ ID NO: 92548 - DNA, 25 bp, Probe Sequence
atcgtcaactctcacctcttctttg

SEQ ID NO: 92549 - DNA, 25 bp, Probe Sequence
ttggttagatttggcactgtgtagt

SEQ ID NO: 92550 - DNA, 25 bp, Probe Sequence
caactctcacctcttctttggtaac

SEQ ID NO: 92551 - DNA, 25 bp, Probe Sequence
tcaactctcacctcttctttggtaa

SEQ ID NO: 92552 - DNA, 25 bp, Probe Sequence
tgatgaggtttcaagagaggaggat

SEQ ID NO: 92553 - DNA, 25 bp, Probe Sequence
ttgagagtggacttacatttccttt

SEQ ID NO: 92554 - DNA, 25 bp, Probe Sequence
attgagagtggacttacatttcctt

SEQ ID NO: 92555 - DNA, 25 bp, Probe Sequence
tgctcaataataaagcctgattctg

SEQ ID NO: 92556 - DNA, 25 bp, Probe Sequence
gctcaataataaagcctgattctga

SEQ ID NO: 92557 - DNA, 25 bp, Probe Sequence
ctcaataataaagcctgattctgat

SEQ ID NO: 92558 - DNA, 25 bp, Probe Sequence
ttgctcaataataaagcctgattct

SEQ ID NO: 92559 - DNA, 25 bp, Probe Sequence
tcattgctcaataataaagcctgat

SEQ ID NO: 92560 - DNA, 25 bp, Probe Sequence
tcaataataaagcctgattctgatc

SEQ ID NO: 92561 - DNA, 25 bp, Probe Sequence
cattgctcaataataaagcctgatt

SEQ ID NO: 92562 - DNA, 25 bp, Probe Sequence
attgctcaataataaagcctgattc

SEQ ID NO: 92563 - DNA, 25 bp, Probe Sequence
tgagagtggacttacatttcctttt

SEQ ID NO: 92564 - DNA, 25 bp, Probe Sequence
ctgttggacctccatagaagacacc

SEQ ID NO: 92565 - DNA, 25 bp, Probe Sequence
cctgttggacctccatagaagacac

SEQ ID NO: 92566 - DNA, 25 bp, Probe Sequence
cacctgttggacctccatagaagac

SEQ ID NO: 92567 - DNA, 25 bp, Probe Sequence
ccgctcgccatttattttgctttag

SEQ ID NO: 92568 - DNA, 25 bp, Probe Sequence
acctgttggacctccatagaagaca

SEQ ID NO: 92569 - DNA, 25 bp, Probe Sequence
gccatttattttgctttagcatcct

SEQ ID NO: 92570 - DNA, 25 bp, Probe Sequence
tcgccatttattttgctttagcatc

SEQ ID NO: 92571 - DNA, 25 bp, Probe Sequence
ctcgccatttattttgctttagcat

SEQ ID NO: 92572 - DNA, 25 bp, Probe Sequence
ccatttattttgctttagcatcctt

SEQ ID NO: 92573 - DNA, 25 bp, Probe Sequence
cgccatttattttgctttagcatcc

SEQ ID NO: 92574 - DNA, 25 bp, Probe Sequence
caataataaagcctgattctgatca

SEQ ID NO: 92575 - DNA, 25 bp, Probe Sequence
ataaagcctgattctgatcaataaa

SEQ ID NO: 92576 - DNA, 25 bp, Probe Sequence
aataaagcctgattctgatcaataa

SEQ ID NO: 92577 - DNA, 25 bp, Probe Sequence
aatatacatagcagcacatccttga

SEQ ID NO: 92578 - DNA, 25 bp, Probe Sequence
atatacatagcagcacatccttgag

SEQ ID NO: 92579 - DNA, 25 bp, Probe Sequence
ccttaactgatgatattccaccaca

SEQ ID NO: 92580 - DNA, 25 bp, Probe Sequence
accttaactgatgatattccaccac

SEQ ID NO: 92581 - DNA, 25 bp, Probe Sequence
ctgccttaactgatgacattacctt

SEQ ID NO: 92582 - DNA, 25 bp, Probe Sequence
tgccttaactgatgacattaccttg

SEQ ID NO: 92583 - DNA, 25 bp, Probe Sequence
gctacgcattcaaggatggataata

SEQ ID NO: 92584 - DNA, 25 bp, Probe Sequence
taccttaactgatgatattccacca

SEQ ID NO: 92585 - DNA, 25 bp, Probe Sequence
cttaactgatgatattccaccacaa

SEQ ID NO: 92586 - DNA, 25 bp, Probe Sequence
ggatggataatatacatagcagcac

SEQ ID NO: 92587 - DNA, 25 bp, Probe Sequence
taatatacatagcagcacatccttg

SEQ ID NO: 92588 - DNA, 25 bp, Probe Sequence
aggatggataatatacatagcagca

SEQ ID NO: 92589 - DNA, 25 bp, Probe Sequence
cgcattcaaggatggataatataca

SEQ ID NO: 92590 - DNA, 25 bp, Probe Sequence
acgcattcaaggatggataatatac

SEQ ID NO: 92591 - DNA, 25 bp, Probe Sequence
ctaccttaactgatgatattccacc

SEQ ID NO: 92592 - DNA, 25 bp, Probe Sequence
cctaccttaactgatgatattccac

SEQ ID NO: 92593 - DNA, 25 bp, Probe Sequence
ctacgcattcaaggatggataatat

SEQ ID NO: 92594 - DNA, 25 bp, Probe Sequence
tcctaccttaactgatgatattcca

SEQ ID NO: 92595 - DNA, 25 bp, Probe Sequence
tggataatatacatagcagcacatc

SEQ ID NO: 92596 - DNA, 25 bp, Probe Sequence
gatggataatatacatagcagcaca

SEQ ID NO: 92597 - DNA, 25 bp, Probe Sequence
ccttaactgatgacattaccttgtg

SEQ ID NO: 92598 - DNA, 25 bp, Probe Sequence
catcttcttgagaatgaggactgtc

SEQ ID NO: 92599 - DNA, 25 bp, Probe Sequence
tacaccatcttcttgagaatgagga

SEQ ID NO: 92600 - DNA, 25 bp, Probe Sequence
gataatatacatagcagcacatcct

SEQ ID NO: 92601 - DNA, 25 bp, Probe Sequence
gttaggaagagagacttgggaacag

SEQ ID NO: 92602 - DNA, 25 bp, Probe Sequence
ttagagagaaataaacgcagtaatg

SEQ ID NO: 92603 - DNA, 25 bp, Probe Sequence
tagagagaaataaacgcagtaatgc

SEQ ID NO: 92604 - DNA, 25 bp, Probe Sequence
tttagagagaaataaacgcagtaat

SEQ ID NO: 92605 - DNA, 25 bp, Probe Sequence
ttaggaagagagacttgggaacagc

SEQ ID NO: 92606 - DNA, 25 bp, Probe Sequence
agctagttcttacttcataaggttt

SEQ ID NO: 92607 - DNA, 25 bp, Probe Sequence
cgttaggaagagagacttgggaaca

SEQ ID NO: 92608 - DNA, 25 bp, Probe Sequence
tagctagttcttacttcataaggtt

SEQ ID NO: 92609 - DNA, 25 bp, Probe Sequence
agagagaaataaacgcagtaatgca

SEQ ID NO: 92610 - DNA, 25 bp, Probe Sequence
gaagagagacttgggaacagctaca

SEQ ID NO: 92611 - DNA, 25 bp, Probe Sequence
ggttttagagagaaataaacgcagt

SEQ ID NO: 92612 - DNA, 25 bp, Probe Sequence
aggttttagagagaaataaacgcag

SEQ ID NO: 92613 - DNA, 25 bp, Probe Sequence
aagagagacttgggaacagctacac

SEQ ID NO: 92614 - DNA, 25 bp, Probe Sequence
cacgttaggaagagagacttgggaa

SEQ ID NO: 92615 - DNA, 25 bp, Probe Sequence
aaggttttagagagaaataaacgca

SEQ ID NO: 92616 - DNA, 25 bp, Probe Sequence
acgttaggaagagagacttgggaac

SEQ ID NO: 92617 - DNA, 25 bp, Probe Sequence
ttttagagagaaataaacgcagtaa

SEQ ID NO: 92618 - DNA, 25 bp, Probe Sequence
cagccacgttaggaagagagacttg

SEQ ID NO: 92619 - DNA, 25 bp, Probe Sequence
gctagttcttacttcataaggtttt

SEQ ID NO: 92620 - DNA, 25 bp, Probe Sequence
ggaagagagacttgggaacagctac

SEQ ID NO: 92621 - DNA, 25 bp, Probe Sequence
aggaagagagacttgggaacagcta

SEQ ID NO: 92622 - DNA, 25 bp, Probe Sequence
taggaagagagacttgggaacagct

SEQ ID NO: 92623 - DNA, 25 bp, Probe Sequence
gagagacttgggaacagctacacag

SEQ ID NO: 92624 - DNA, 25 bp, Probe Sequence
gttttagagagaaataaacgcagta

SEQ ID NO: 92625 - DNA, 25 bp, Probe Sequence
ccacaggaatggtgatagtaatagg

SEQ ID NO: 92626 - DNA, 25 bp, Probe Sequence
acaggaatggtgatagtaataggga

SEQ ID NO: 92627 - DNA, 25 bp, Probe Sequence
caggaatggtgatagtaatagggag

SEQ ID NO: 92628 - DNA, 25 bp, Probe Sequence
aatggtgatagtaatagggagggag

SEQ ID NO: 92629 - DNA, 25 bp, Probe Sequence
gaatggtgatagtaatagggaggga

SEQ ID NO: 92630 - DNA, 25 bp, Probe Sequence
aggaatggtgatagtaatagggagg

SEQ ID NO: 92631 - DNA, 25 bp, Probe Sequence
ggaatggtgatagtaatagggaggg

SEQ ID NO: 92632 - DNA, 25 bp, Probe Sequence
tctaagcaaagtgtgaataggattt

SEQ ID NO: 92633 - DNA, 25 bp, Probe Sequence
ttctaagcaaagtgtgaataggatt

SEQ ID NO: 92634 - DNA, 25 bp, Probe Sequence
tttctaagcaaagtgtgaataggat

SEQ ID NO: 92635 - DNA, 25 bp, Probe Sequence
gtgtatcatagggaactttcacctt

SEQ ID NO: 92636 - DNA, 25 bp, Probe Sequence
cacaggaatggtgatagtaataggg

SEQ ID NO: 92637 - DNA, 25 bp, Probe Sequence
ctgtgtatcatagggaactttcacc

SEQ ID NO: 92638 - DNA, 25 bp, Probe Sequence
cctgtgtatcatagggaactttcac

SEQ ID NO: 92639 - DNA, 25 bp, Probe Sequence
gtacagtattctgagaaacgcaaat

SEQ ID NO: 92640 - DNA, 25 bp, Probe Sequence
tgtatcatagggaactttcacctta

SEQ ID NO: 92641 - DNA, 25 bp, Probe Sequence
tgtgtatcatagggaactttcacct

SEQ ID NO: 92642 - DNA, 25 bp, Probe Sequence
acagtattctgagaaacgcaaataa

SEQ ID NO: 92643 - DNA, 25 bp, Probe Sequence
atggtgatagtaatagggagggagc

SEQ ID NO: 92644 - DNA, 25 bp, Probe Sequence
cccacaggaatggtgatagtaatag

SEQ ID NO: 92645 - DNA, 25 bp, Probe Sequence
tcattgtaagcacaggtccaacttg

SEQ ID NO: 92646 - DNA, 25 bp, Probe Sequence
gtcattgtaagcacaggtccaactt

SEQ ID NO: 92647 - DNA, 25 bp, Probe Sequence
tacagtattctgagaaacgcaaata

SEQ ID NO: 92648 - DNA, 25 bp, Probe Sequence
cagtattctgagaaacgcaaataaa

SEQ ID NO: 92649 - DNA, 25 bp, Probe Sequence
ttgtgacttgactgtggaagatgat

SEQ ID NO: 92650 - DNA, 25 bp, Probe Sequence
attgtgacttgactgtggaagatga

SEQ ID NO: 92651 - DNA, 25 bp, Probe Sequence
cattgtgacttgactgtggaagatg

SEQ ID NO: 92652 - DNA, 25 bp, Probe Sequence
catctaggttaagcaagagcacaag

SEQ ID NO: 92653 - DNA, 25 bp, Probe Sequence
atctaggttaagcaagagcacaagt

SEQ ID NO: 92654 - DNA, 25 bp, Probe Sequence
ttgaagaccatctaggttaagcaag

SEQ ID NO: 92655 - DNA, 25 bp, Probe Sequence
gaagaccatctaggttaagcaagag

SEQ ID NO: 92656 - DNA, 25 bp, Probe Sequence
gggtgagtaagtagttgggtataag

SEQ ID NO: 92657 - DNA, 25 bp, Probe Sequence
tgcctttgacataaatcctatacca

SEQ ID NO: 92658 - DNA, 25 bp, Probe Sequence
gacttgactgtggaagatgatggtt

SEQ ID NO: 92659 - DNA, 25 bp, Probe Sequence
tgtgacttgactgtggaagatgatg

SEQ ID NO: 92660 - DNA, 25 bp, Probe Sequence
tgaagaccatctaggttaagcaaga

SEQ ID NO: 92661 - DNA, 25 bp, Probe Sequence
cctttgacataaatcctataccagc

SEQ ID NO: 92662 - DNA, 25 bp, Probe Sequence
gcctttgacataaatcctataccag

SEQ ID NO: 92663 - DNA, 25 bp, Probe Sequence
ctgcctttgacataaatcctatacc

SEQ ID NO: 92664 - DNA, 25 bp, Probe Sequence
acattgtgacttgactgtggaagat

SEQ ID NO: 92665 - DNA, 25 bp, Probe Sequence
ggtgagtaagtagttgggtataaga

SEQ ID NO: 92666 - DNA, 25 bp, Probe Sequence
aaattctgcctttgacataaatcct

SEQ ID NO: 92667 - DNA, 25 bp, Probe Sequence
acttgactgtggaagatgatggttg

SEQ ID NO: 92668 - DNA, 25 bp, Probe Sequence
cttacttacctgcctgaagaaattc

SEQ ID NO: 92669 - DNA, 25 bp, Probe Sequence
gaaattctgcctttgacataaatcc

SEQ ID NO: 92670 - DNA, 25 bp, Probe Sequence
ccttacttacctgcctgaagaaatt

SEQ ID NO: 92671 - DNA, 25 bp, Probe Sequence
tctaggttaagcaagagcacaagtg

SEQ ID NO: 92672 - DNA, 25 bp, Probe Sequence
ccatctaggttaagcaagagcacaa

SEQ ID NO: 92673 - DNA, 25 bp, Probe Sequence
cgatattcaccgttccataagtata

SEQ ID NO: 92674 - DNA, 25 bp, Probe Sequence
taacaagagactggatgctgctatc

SEQ ID NO: 92675 - DNA, 25 bp, Probe Sequence
atgaccttcaagagaattaggactt

SEQ ID NO: 92676 - DNA, 25 bp, Probe Sequence
aatgaccttcaagagaattaggact

SEQ ID NO: 92677 - DNA, 25 bp, Probe Sequence
gtaacaagagactggatgctgctat

SEQ ID NO: 92678 - DNA, 25 bp, Probe Sequence
tagagaacaacgagaataaaccagt

SEQ ID NO: 92679 - DNA, 25 bp, Probe Sequence
gagaacaacgagaataaaccagtga

SEQ ID NO: 92680 - DNA, 25 bp, Probe Sequence
agagaacaacgagaataaaccagtg

SEQ ID NO: 92681 - DNA, 25 bp, Probe Sequence
ccaagaggaagaagaaagtgttaaa

SEQ ID NO: 92682 - DNA, 25 bp, Probe Sequence
agaacaacgagaataaaccagtgac

SEQ ID NO: 92683 - DNA, 25 bp, Probe Sequence
cctagagaacaacgagaataaacca

SEQ ID NO: 92684 - DNA, 25 bp, Probe Sequence
gccaagaggaagaagaaagtgttaa

SEQ ID NO: 92685 - DNA, 25 bp, Probe Sequence
ctagagaacaacgagaataaaccag

SEQ ID NO: 92686 - DNA, 25 bp, Probe Sequence
agaaatgaaatctgctgtggactac

SEQ ID NO: 92687 - DNA, 25 bp, Probe Sequence
gagaataaaccagtgaccaactcta

SEQ ID NO: 92688 - DNA, 25 bp, Probe Sequence
agaataaaccagtgaccaactctag

SEQ ID NO: 92689 - DNA, 25 bp, Probe Sequence
gcctagagaacaacgagaataaacc

SEQ ID NO: 92690 - DNA, 25 bp, Probe Sequence
gcagtttaagtattggaatttcaca

SEQ ID NO: 92691 - DNA, 25 bp, Probe Sequence
gaataaaccagtgaccaactctagg

SEQ ID NO: 92692 - DNA, 25 bp, Probe Sequence
aaatgaaatctgctgtggactacaa

SEQ ID NO: 92693 - DNA, 25 bp, Probe Sequence
gaacaacgagaataaaccagtgacc

SEQ ID NO: 92694 - DNA, 25 bp, Probe Sequence
gagctactctgaggacgatattcac

SEQ ID NO: 92695 - DNA, 25 bp, Probe Sequence
cgcctagagaacaacgagaataaac

SEQ ID NO: 92696 - DNA, 25 bp, Probe Sequence
attcgcctagagaacaacgagaata

SEQ ID NO: 92697 - DNA, 25 bp, Probe Sequence
cttccatgtcaagattcagctagtg

SEQ ID NO: 92698 - DNA, 25 bp, Probe Sequence
aaccttccatgtcaagattcagcta

SEQ ID NO: 92699 - DNA, 25 bp, Probe Sequence
aattccatttgtaggtagtgagaca

SEQ ID NO: 92700 - DNA, 25 bp, Probe Sequence
caaatggaacacggaggataaagtc

SEQ ID NO: 92701 - DNA, 25 bp, Probe Sequence
gcatacattcttcaagatcccattt

SEQ ID NO: 92702 - DNA, 25 bp, Probe Sequence
ccttccatgtcaagattcagctagt

SEQ ID NO: 92703 - DNA, 25 bp, Probe Sequence
accttccatgtcaagattcagctag

SEQ ID NO: 92704 - DNA, 25 bp, Probe Sequence
aaatggaacacggaggataaagtca

SEQ ID NO: 92705 - DNA, 25 bp, Probe Sequence
aaattccatttgtaggtagtgagac

SEQ ID NO: 92706 - DNA, 25 bp, Probe Sequence
tgaaattccatttgtaggtagtgag

SEQ ID NO: 92707 - DNA, 25 bp, Probe Sequence
tcagcatggaaacaagatgaaattc

SEQ ID NO: 92708 - DNA, 25 bp, Probe Sequence
ctcagcatggaaacaagatgaaatt

SEQ ID NO: 92709 - DNA, 25 bp, Probe Sequence
tactcagcatggaaacaagatgaaa

SEQ ID NO: 92710 - DNA, 25 bp, Probe Sequence
gaaattccatttgtaggtagtgaga

SEQ ID NO: 92711 - DNA, 25 bp, Probe Sequence
ttagctttgtcactgtttcactact

SEQ ID NO: 92712 - DNA, 25 bp, Probe Sequence
attagctttgtcactgtttcactac

SEQ ID NO: 92713 - DNA, 25 bp, Probe Sequence
ctactcagcatggaaacaagatgaa

SEQ ID NO: 92714 - DNA, 25 bp, Probe Sequence
aatggaacacggaggataaagtcag

SEQ ID NO: 92715 - DNA, 25 bp, Probe Sequence
tagctttgtcactgtttcactactc

SEQ ID NO: 92716 - DNA, 25 bp, Probe Sequence
gattagctttgtcactgtttcacta

SEQ ID NO: 92717 - DNA, 25 bp, Probe Sequence
actcagcatggaaacaagatgaaat

SEQ ID NO: 92718 - DNA, 25 bp, Probe Sequence
atgaaattccatttgtaggtagtga

SEQ ID NO: 92719 - DNA, 25 bp, Probe Sequence
catacattcttcaagatcccatttg

SEQ ID NO: 92720 - DNA, 25 bp, Probe Sequence
tcactactcagcatggaaacaagat

SEQ ID NO: 92721 - DNA, 25 bp, Probe Sequence
gactcttgacagttgtgcttctcta

SEQ ID NO: 92722 - DNA, 25 bp, Probe Sequence
actcttgacagttgtgcttctctag

SEQ ID NO: 92723 - DNA, 25 bp, Probe Sequence
gtaacattgaaggaaagaccagact

SEQ ID NO: 92724 - DNA, 25 bp, Probe Sequence
agaattatctgtgaaccatacgtga

SEQ ID NO: 92725 - DNA, 25 bp, Probe Sequence
tttgctgtaacattgaaggaaagac

SEQ ID NO: 92726 - DNA, 25 bp, Probe Sequence
taacattgaaggaaagaccagactt

SEQ ID NO: 92727 - DNA, 25 bp, Probe Sequence
gaattatctgtgaaccatacgtgat

SEQ ID NO: 92728 - DNA, 25 bp, Probe Sequence
aagaattatctgtgaaccatacgtg

SEQ ID NO: 92729 - DNA, 25 bp, Probe Sequence
tgtaacattgaaggaaagaccagac

SEQ ID NO: 92730 - DNA, 25 bp, Probe Sequence
ctcttgacagttgtgcttctctagg

SEQ ID NO: 92731 - DNA, 25 bp, Probe Sequence
aattatctgtgaaccatacgtgatt

SEQ ID NO: 92732 - DNA, 25 bp, Probe Sequence
tctgtgaaccatacgtgattaataa

SEQ ID NO: 92733 - DNA, 25 bp, Probe Sequence
tcttgacagttgtgcttctctagga

SEQ ID NO: 92734 - DNA, 25 bp, Probe Sequence
ttatctgtgaaccatacgtgattaa

SEQ ID NO: 92735 - DNA, 25 bp, Probe Sequence
ttgctgtaacattgaaggaaagacc

SEQ ID NO: 92736 - DNA, 25 bp, Probe Sequence
cttgacagttgtgcttctctaggag

SEQ ID NO: 92737 - DNA, 25 bp, Probe Sequence
atctgtgaaccatacgtgattaata

SEQ ID NO: 92738 - DNA, 25 bp, Probe Sequence
tatctgtgaaccatacgtgattaat

SEQ ID NO: 92739 - DNA, 25 bp, Probe Sequence
attatctgtgaaccatacgtgatta

SEQ ID NO: 92740 - DNA, 25 bp, Probe Sequence
aagactcttgacagttgtgcttctc

SEQ ID NO: 92741 - DNA, 25 bp, Probe Sequence
ctgtaacattgaaggaaagaccaga

SEQ ID NO: 92742 - DNA, 25 bp, Probe Sequence
agtgtaaacaaacaaagtgtaccac

SEQ ID NO: 92743 - DNA, 25 bp, Probe Sequence
tagtgtaaacaaacaaagtgtacca

SEQ ID NO: 92744 - DNA, 25 bp, Probe Sequence
tgctgtaacattgaaggaaagacca

SEQ ID NO: 92745 - DNA, 25 bp, Probe Sequence
ggtgagtagccttgaataatgtgta

SEQ ID NO: 92746 - DNA, 25 bp, Probe Sequence
cttctcacctaactgccaatctata

SEQ ID NO: 92747 - DNA, 25 bp, Probe Sequence
ttggtgagtagccttgaataatgtg

SEQ ID NO: 92748 - DNA, 25 bp, Probe Sequence
gtgagtagccttgaataatgtgtat

SEQ ID NO: 92749 - DNA, 25 bp, Probe Sequence
tgagtagccttgaataatgtgtatc

SEQ ID NO: 92750 - DNA, 25 bp, Probe Sequence
agtagccttgaataatgtgtatctc

SEQ ID NO: 92751 - DNA, 25 bp, Probe Sequence
gagtagccttgaataatgtgtatct

SEQ ID NO: 92752 - DNA, 25 bp, Probe Sequence
ccttctcacctaactgccaatctat

SEQ ID NO: 92753 - DNA, 25 bp, Probe Sequence
tggtgagtagccttgaataatgtgt

SEQ ID NO: 92754 - DNA, 25 bp, Probe Sequence
ttctctgttgtagacatcttgtgac

SEQ ID NO: 92755 - DNA, 25 bp, Probe Sequence
tgttgtagacatcttgtgacactaa

SEQ ID NO: 92756 - DNA, 25 bp, Probe Sequence
ctgttgtagacatcttgtgacacta

SEQ ID NO: 92757 - DNA, 25 bp, Probe Sequence
gtagccttgaataatgtgtatctca

SEQ ID NO: 92758 - DNA, 25 bp, Probe Sequence
tctctgttgtagacatcttgtgaca

SEQ ID NO: 92759 - DNA, 25 bp, Probe Sequence
ctctgttgtagacatcttgtgacac

SEQ ID NO: 92760 - DNA, 25 bp, Probe Sequence
tctgttgtagacatcttgtgacact

SEQ ID NO: 92761 - DNA, 25 bp, Probe Sequence
ttctcacctaactgccaatctatag

SEQ ID NO: 92762 - DNA, 25 bp, Probe Sequence
attggtcctatttctcttcctatgc

SEQ ID NO: 92763 - DNA, 25 bp, Probe Sequence
ctttggtgagtagccttgaataatg

SEQ ID NO: 92764 - DNA, 25 bp, Probe Sequence
atttctcttcctatgctctaatccc

SEQ ID NO: 92765 - DNA, 25 bp, Probe Sequence
tttggtgagtagccttgaataatgt

SEQ ID NO: 92766 - DNA, 25 bp, Probe Sequence
taaatcacacactatcctaatcgcc

SEQ ID NO: 92767 - DNA, 25 bp, Probe Sequence
ctcttcctatgctctaatcccacta

SEQ ID NO: 92768 - DNA, 25 bp, Probe Sequence
ctaaatcacacactatcctaatcgc

SEQ ID NO: 92769 - DNA, 25 bp, Probe Sequence
aagaagaaatgaaagaagggacaga

SEQ ID NO: 92770 - DNA, 25 bp, Probe Sequence
caagaagaaatgaaagaagggacag

SEQ ID NO: 92771 - DNA, 25 bp, Probe Sequence
agaagaaatgaaagaagggacagac

SEQ ID NO: 92772 - DNA, 25 bp, Probe Sequence
ccaactactgaggaggaatacttgc

SEQ ID NO: 92773 - DNA, 25 bp, Probe Sequence
gccaactactgaggaggaatacttg

SEQ ID NO: 92774 - DNA, 25 bp, Probe Sequence
tgccaactactgaggaggaatactt

SEQ ID NO: 92775 - DNA, 25 bp, Probe Sequence
gaagaaatgaaagaagggacagaca

SEQ ID NO: 92776 - DNA, 25 bp, Probe Sequence
aagaaatgaaagaagggacagacat

SEQ ID NO: 92777 - DNA, 25 bp, Probe Sequence
tcaagaagaaatgaaagaagggaca

SEQ ID NO: 92778 - DNA, 25 bp, Probe Sequence
gatgaaatcaggaagaggacaagtg

SEQ ID NO: 92779 - DNA, 25 bp, Probe Sequence
ctactgaggaggaatacttgcactt

SEQ ID NO: 92780 - DNA, 25 bp, Probe Sequence
tagtattcagccattgggagatcat

SEQ ID NO: 92781 - DNA, 25 bp, Probe Sequence
aactactgaggaggaatacttgcac

SEQ ID NO: 92782 - DNA, 25 bp, Probe Sequence
tgccacattatctctgtttattcac

SEQ ID NO: 92783 - DNA, 25 bp, Probe Sequence
gccacattatctctgtttattcact

SEQ ID NO: 92784 - DNA, 25 bp, Probe Sequence
gtgccaactactgaggaggaatact

SEQ ID NO: 92785 - DNA, 25 bp, Probe Sequence
gtattcagccattgggagatcattc

SEQ ID NO: 92786 - DNA, 25 bp, Probe Sequence
caactactgaggaggaatacttgca

SEQ ID NO: 92787 - DNA, 25 bp, Probe Sequence
ctagtattcagccattgggagatca

SEQ ID NO: 92788 - DNA, 25 bp, Probe Sequence
agaaatgaaagaagggacagacatg

SEQ ID NO: 92789 - DNA, 25 bp, Probe Sequence
ttgccacattatctctgtttattca

SEQ ID NO: 92790 - DNA, 25 bp, Probe Sequence
agtattcagccattgggagatcatt

SEQ ID NO: 92791 - DNA, 25 bp, Probe Sequence
atgaaatcaggaagaggacaagtgg

SEQ ID NO: 92792 - DNA, 25 bp, Probe Sequence
actactgaggaggaatacttgcact

SEQ ID NO: 92793 - DNA, 25 bp, Probe Sequence
aattagtcatcgctattaccatgtg

SEQ ID NO: 92794 - DNA, 25 bp, Probe Sequence
tcatcgctattaccatgtgatcgtt

SEQ ID NO: 92795 - DNA, 25 bp, Probe Sequence
taattagtcatcgctattaccatgt

SEQ ID NO: 92796 - DNA, 25 bp, Probe Sequence
gataaacggtgaaatctctagcctc

SEQ ID NO: 92797 - DNA, 25 bp, Probe Sequence
ataaacggtgaaatctctagcctct

SEQ ID NO: 92798 - DNA, 25 bp, Probe Sequence
acaatctaacgtaattagtcatcgc

SEQ ID NO: 92799 - DNA, 25 bp, Probe Sequence
taaacggtgaaatctctagcctctt

SEQ ID NO: 92800 - DNA, 25 bp, Probe Sequence
caatctaacgtaattagtcatcgct

SEQ ID NO: 92801 - DNA, 25 bp, Probe Sequence
ttgccagtacaatctaacgtaatta

SEQ ID NO: 92802 - DNA, 25 bp, Probe Sequence
gccagtacaatctaacgtaattagt

SEQ ID NO: 92803 - DNA, 25 bp, Probe Sequence
tgccagtacaatctaacgtaattag

SEQ ID NO: 92804 - DNA, 25 bp, Probe Sequence
gtcatcgctattaccatgtgatcgt

SEQ ID NO: 92805 - DNA, 25 bp, Probe Sequence
ggataaacggtgaaatctctagcct

SEQ ID NO: 92806 - DNA, 25 bp, Probe Sequence
catcgctattaccatgtgatcgttt

SEQ ID NO: 92807 - DNA, 25 bp, Probe Sequence
tctaacgtaattagtcatcgctatt

SEQ ID NO: 92808 - DNA, 25 bp, Probe Sequence
aatctaacgtaattagtcatcgcta

SEQ ID NO: 92809 - DNA, 25 bp, Probe Sequence
tcctactttgccagtacaatctaac

SEQ ID NO: 92810 - DNA, 25 bp, Probe Sequence
ttcctactttgccagtacaatctaa

SEQ ID NO: 92811 - DNA, 25 bp, Probe Sequence
tttcctactttgccagtacaatcta

SEQ ID NO: 92812 - DNA, 25 bp, Probe Sequence
ctttcctactttgccagtacaatct

SEQ ID NO: 92813 - DNA, 25 bp, Probe Sequence
atctaacgtaattagtcatcgctat

SEQ ID NO: 92814 - DNA, 25 bp, Probe Sequence
actttcctactttgccagtacaatc

SEQ ID NO: 92815 - DNA, 25 bp, Probe Sequence
gactttcctactttgccagtacaat

SEQ ID NO: 92816 - DNA, 25 bp, Probe Sequence
ctttgccagtacaatctaacgtaat

SEQ ID NO: 92817 - DNA, 25 bp, Probe Sequence
gttatttattgaaaccaagtgtggg

SEQ ID NO: 92818 - DNA, 25 bp, Probe Sequence
gactttcccaaatgtcgtaacactc

SEQ ID NO: 92819 - DNA, 25 bp, Probe Sequence
actttcccaaatgtcgtaacactcc

SEQ ID NO: 92820 - DNA, 25 bp, Probe Sequence
ggagtttgttttggcacctatctac

SEQ ID NO: 92821 - DNA, 25 bp, Probe Sequence
gagtttgttttggcacctatctacg

SEQ ID NO: 92822 - DNA, 25 bp, Probe Sequence
ggactttcccaaatgtcgtaacact

SEQ ID NO: 92823 - DNA, 25 bp, Probe Sequence
tttggcacctatctacgggactttc

SEQ ID NO: 92824 - DNA, 25 bp, Probe Sequence
tatttattgaaaccaagtgtgggga

SEQ ID NO: 92825 - DNA, 25 bp, Probe Sequence
ttatttattgaaaccaagtgtgggg

SEQ ID NO: 92826 - DNA, 25 bp, Probe Sequence
gggagtttgttttggcacctatcta

SEQ ID NO: 92827 - DNA, 25 bp, Probe Sequence
ctttcccaaatgtcgtaacactccg

SEQ ID NO: 92828 - DNA, 25 bp, Probe Sequence
atttattgaaaccaagtgtggggag

SEQ ID NO: 92829 - DNA, 25 bp, Probe Sequence
agtttgttttggcacctatctacgg

SEQ ID NO: 92830 - DNA, 25 bp, Probe Sequence
atgggagtttgttttggcacctatc

SEQ ID NO: 92831 - DNA, 25 bp, Probe Sequence
ggttatttattgaaaccaagtgtgg

SEQ ID NO: 92832 - DNA, 25 bp, Probe Sequence
gggttatttattgaaaccaagtgtg

SEQ ID NO: 92833 - DNA, 25 bp, Probe Sequence
ttttggcacctatctacgggacttt

SEQ ID NO: 92834 - DNA, 25 bp, Probe Sequence
gtttgttttggcacctatctacggg

SEQ ID NO: 92835 - DNA, 25 bp, Probe Sequence
tttgttttggcacctatctacggga

SEQ ID NO: 92836 - DNA, 25 bp, Probe Sequence
catgggagtttgttttggcacctat

SEQ ID NO: 92837 - DNA, 25 bp, Probe Sequence
tgggagtttgttttggcacctatct

SEQ ID NO: 92838 - DNA, 25 bp, Probe Sequence
tttattgaaaccaagtgtggggagc

SEQ ID NO: 92839 - DNA, 25 bp, Probe Sequence
gttttggcacctatctacgggactt

SEQ ID NO: 92840 - DNA, 25 bp, Probe Sequence
ggggttatttattgaaaccaagtgt

SEQ ID NO: 92841 - DNA, 25 bp, Probe Sequence
cagcatgatcttgttactgtgatat

SEQ ID NO: 92842 - DNA, 25 bp, Probe Sequence
gactttccagatgtcgtaacaactc

SEQ ID NO: 92843 - DNA, 25 bp, Probe Sequence
gatggaacacagcatgatcttgtta

SEQ ID NO: 92844 - DNA, 25 bp, Probe Sequence
acactatagaacacagtttgtacca

SEQ ID NO: 92845 - DNA, 25 bp, Probe Sequence
atggaacacagcatgatcttgttac

SEQ ID NO: 92846 - DNA, 25 bp, Probe Sequence
gacactatagaacacagtttgtacc

SEQ ID NO: 92847 - DNA, 25 bp, Probe Sequence
actttccagatgtcgtaacaactcc

SEQ ID NO: 92848 - DNA, 25 bp, Probe Sequence
cactatagaacacagtttgtaccaa

SEQ ID NO: 92849 - DNA, 25 bp, Probe Sequence
gtattccgtttgccgtacatcaatg

SEQ ID NO: 92850 - DNA, 25 bp, Probe Sequence
ggaacacagcatgatcttgttactg

SEQ ID NO: 92851 - DNA, 25 bp, Probe Sequence
ggactttccagatgtcgtaacaact

SEQ ID NO: 92852 - DNA, 25 bp, Probe Sequence
tggaacacagcatgatcttgttact

SEQ ID NO: 92853 - DNA, 25 bp, Probe Sequence
ctttctcttacctgttatttatcca

SEQ ID NO: 92854 - DNA, 25 bp, Probe Sequence
acagcatgatcttgttactgtgata

SEQ ID NO: 92855 - DNA, 25 bp, Probe Sequence
tctttctcttacctgttatttatcc

SEQ ID NO: 92856 - DNA, 25 bp, Probe Sequence
gaacacagcatgatcttgttactgt

SEQ ID NO: 92857 - DNA, 25 bp, Probe Sequence
aaatcaacgggactttccagatgtc

SEQ ID NO: 92858 - DNA, 25 bp, Probe Sequence
ctttccagatgtcgtaacaactccg

SEQ ID NO: 92859 - DNA, 25 bp, Probe Sequence
tattccgtttgccgtacatcaatgg

SEQ ID NO: 92860 - DNA, 25 bp, Probe Sequence
ggtattccgtttgccgtacatcaat

SEQ ID NO: 92861 - DNA, 25 bp, Probe Sequence
gggactttccagatgtcgtaacaac

SEQ ID NO: 92862 - DNA, 25 bp, Probe Sequence
caaatcaacgggactttccagatgt

SEQ ID NO: 92863 - DNA, 25 bp, Probe Sequence
tctcttacctgttatttatccattt

SEQ ID NO: 92864 - DNA, 25 bp, Probe Sequence
ttctcttacctgttatttatccatt

SEQ ID NO: 92865 - DNA, 25 bp, Probe Sequence
ccaatccaagtgaataaaccaagag

SEQ ID NO: 92866 - DNA, 25 bp, Probe Sequence
caatccaagtgaataaaccaagagc

SEQ ID NO: 92867 - DNA, 25 bp, Probe Sequence
atcccaatccaagtgaataaaccaa

SEQ ID NO: 92868 - DNA, 25 bp, Probe Sequence
cccaatccaagtgaataaaccaaga

SEQ ID NO: 92869 - DNA, 25 bp, Probe Sequence
tcccaatccaagtgaataaaccaag

SEQ ID NO: 92870 - DNA, 25 bp, Probe Sequence
ggaggatgcagcttaagatattact

SEQ ID NO: 92871 - DNA, 25 bp, Probe Sequence
aatggaggatgcagcttaagatatt

SEQ ID NO: 92872 - DNA, 25 bp, Probe Sequence
tggaggatgcagcttaagatattac

SEQ ID NO: 92873 - DNA, 25 bp, Probe Sequence
gaatggaggatgcagcttaagatat

SEQ ID NO: 92874 - DNA, 25 bp, Probe Sequence
atggaggatgcagcttaagatatta

SEQ ID NO: 92875 - DNA, 25 bp, Probe Sequence
atgatcccaatccaagtgaataaac

SEQ ID NO: 92876 - DNA, 25 bp, Probe Sequence
gatcccaatccaagtgaataaacca

SEQ ID NO: 92877 - DNA, 25 bp, Probe Sequence
tgatcccaatccaagtgaataaacc

SEQ ID NO: 92878 - DNA, 25 bp, Probe Sequence
catgatcccaatccaagtgaataaa

SEQ ID NO: 92879 - DNA, 25 bp, Probe Sequence
ccatgatcccaatccaagtgaataa

SEQ ID NO: 92880 - DNA, 25 bp, Probe Sequence
tgaatggaggatgcagcttaagata

SEQ ID NO: 92881 - DNA, 25 bp, Probe Sequence
tccaagtgaataaaccaagagctat

SEQ ID NO: 92882 - DNA, 25 bp, Probe Sequence
atccaagtgaataaaccaagagcta

SEQ ID NO: 92883 - DNA, 25 bp, Probe Sequence
aatccaagtgaataaaccaagagct

SEQ ID NO: 92884 - DNA, 25 bp, Probe Sequence
aaatgaaccatgatcccaatccaag

SEQ ID NO: 92885 - DNA, 25 bp, Probe Sequence
gaaatgaaccatgatcccaatccaa

SEQ ID NO: 92886 - DNA, 25 bp, Probe Sequence
accatgatcccaatccaagtgaata

SEQ ID NO: 92887 - DNA, 25 bp, Probe Sequence
gaggatgcagcttaagatattacta

SEQ ID NO: 92888 - DNA, 25 bp, Probe Sequence
ccaagtgaataaaccaagagctatt

SEQ ID NO: 92889 - DNA, 25 bp, Probe Sequence
aaagaaagacagggttggtgtttaa

SEQ ID NO: 92890 - DNA, 25 bp, Probe Sequence
aagaaagacagggttggtgtttaac

SEQ ID NO: 92891 - DNA, 25 bp, Probe Sequence
gcctacattcatcttcgactttcta

SEQ ID NO: 92892 - DNA, 25 bp, Probe Sequence
cctacattcatcttcgactttctaa

SEQ ID NO: 92893 - DNA, 25 bp, Probe Sequence
taaacagtataaaatgcgtgaaccc

SEQ ID NO: 92894 - DNA, 25 bp, Probe Sequence
agaaagacagggttggtgtttaaca

SEQ ID NO: 92895 - DNA, 25 bp, Probe Sequence
ttaaacagtataaaatgcgtgaacc

SEQ ID NO: 92896 - DNA, 25 bp, Probe Sequence
aaaagaaagacagggttggtgttta

SEQ ID NO: 92897 - DNA, 25 bp, Probe Sequence
ctacattcatcttcgactttctaaa

SEQ ID NO: 92898 - DNA, 25 bp, Probe Sequence
aaacagtataaaatgcgtgaacccg

SEQ ID NO: 92899 - DNA, 25 bp, Probe Sequence
cttaaacagtataaaatgcgtgaac

SEQ ID NO: 92900 - DNA, 25 bp, Probe Sequence
aacacttaaacagtataaaatgcgt

SEQ ID NO: 92901 - DNA, 25 bp, Probe Sequence
acacttaaacagtataaaatgcgtg

SEQ ID NO: 92902 - DNA, 25 bp, Probe Sequence
acttaaacagtataaaatgcgtgaa

SEQ ID NO: 92903 - DNA, 25 bp, Probe Sequence
cacttaaacagtataaaatgcgtga

SEQ ID NO: 92904 - DNA, 25 bp, Probe Sequence
caaaagaaagacagggttggtgttt

SEQ ID NO: 92905 - DNA, 25 bp, Probe Sequence
aaaagctcaacccaaaagaaagaca

SEQ ID NO: 92906 - DNA, 25 bp, Probe Sequence
ggcctacattcatcttcgactttct

SEQ ID NO: 92907 - DNA, 25 bp, Probe Sequence
tggcctacattcatcttcgactttc

SEQ ID NO: 92908 - DNA, 25 bp, Probe Sequence
ctggcctacattcatcttcgacttt

SEQ ID NO: 92909 - DNA, 25 bp, Probe Sequence
aaagctcaacccaaaagaaagacag

SEQ ID NO: 92910 - DNA, 25 bp, Probe Sequence
cctggcctacattcatcttcgactt

SEQ ID NO: 92911 - DNA, 25 bp, Probe Sequence
ttcctggcctacattcatcttcgac

SEQ ID NO: 92912 - DNA, 25 bp, Probe Sequence
attttcctggcctacattcatcttc

SEQ ID NO: 92913 - DNA, 25 bp, Probe Sequence
caggaggccacactgatgttctaaa

SEQ ID NO: 92914 - DNA, 25 bp, Probe Sequence
aggaggccacactgatgttctaaaa

SEQ ID NO: 92915 - DNA, 25 bp, Probe Sequence
gctgctttatcatctttacccaaat

SEQ ID NO: 92916 - DNA, 25 bp, Probe Sequence
ttacccaaataaattaaagttgccc

SEQ ID NO: 92917 - DNA, 25 bp, Probe Sequence
tagctgctttatcatctttacccaa

SEQ ID NO: 92918 - DNA, 25 bp, Probe Sequence
ttagctgctttatcatctttaccca

SEQ ID NO: 92919 - DNA, 25 bp, Probe Sequence
agctgctttatcatctttacccaaa

SEQ ID NO: 92920 - DNA, 25 bp, Probe Sequence
tttagctgctttatcatctttaccc

SEQ ID NO: 92921 - DNA, 25 bp, Probe Sequence
ctgctttatcatctttacccaaata

SEQ ID NO: 92922 - DNA, 25 bp, Probe Sequence
tgctttatcatctttacccaaataa

SEQ ID NO: 92923 - DNA, 25 bp, Probe Sequence
tttacccaaataaattaaagttgcc

SEQ ID NO: 92924 - DNA, 25 bp, Probe Sequence
ccaaataaattaaagttgcccctgt

SEQ ID NO: 92925 - DNA, 25 bp, Probe Sequence
tacccaaataaattaaagttgcccc

SEQ ID NO: 92926 - DNA, 25 bp, Probe Sequence
cccaaataaattaaagttgcccctg

SEQ ID NO: 92927 - DNA, 25 bp, Probe Sequence
accatatgagtaggtagatacagat

SEQ ID NO: 92928 - DNA, 25 bp, Probe Sequence
acccaaataaattaaagttgcccct

SEQ ID NO: 92929 - DNA, 25 bp, Probe Sequence
agttgcccctgtaatacataagttt

SEQ ID NO: 92930 - DNA, 25 bp, Probe Sequence
aagttgcccctgtaatacataagtt

SEQ ID NO: 92931 - DNA, 25 bp, Probe Sequence
aaagttgcccctgtaatacataagt

SEQ ID NO: 92932 - DNA, 25 bp, Probe Sequence
aaattaaagttgcccctgtaataca

SEQ ID NO: 92933 - DNA, 25 bp, Probe Sequence
gttgcccctgtaatacataagttta

SEQ ID NO: 92934 - DNA, 25 bp, Probe Sequence
caaataaattaaagttgcccctgta

SEQ ID NO: 92935 - DNA, 25 bp, Probe Sequence
aattaaagttgcccctgtaatacat

SEQ ID NO: 92936 - DNA, 25 bp, Probe Sequence
taaagttgcccctgtaatacataag

SEQ ID NO: 92937 - DNA, 25 bp, Probe Sequence
ccatatgagtaggtagatacagata

SEQ ID NO: 92938 - DNA, 25 bp, Probe Sequence
ttaaagttgcccctgtaatacataa

SEQ ID NO: 92939 - DNA, 25 bp, Probe Sequence
gctgtaatgttgtgtatggtagttc

SEQ ID NO: 92940 - DNA, 25 bp, Probe Sequence
gtaatgttgtgtatggtagttctca

SEQ ID NO: 92941 - DNA, 25 bp, Probe Sequence
tgtaatgttgtgtatggtagttctc

SEQ ID NO: 92942 - DNA, 25 bp, Probe Sequence
ctgtaatgttgtgtatggtagttct

SEQ ID NO: 92943 - DNA, 25 bp, Probe Sequence
gtatggtagttctcactggatgcta

SEQ ID NO: 92944 - DNA, 25 bp, Probe Sequence
tatggtagttctcactggatgctag

SEQ ID NO: 92945 - DNA, 25 bp, Probe Sequence
aatgttgtgtatggtagttctcact

SEQ ID NO: 92946 - DNA, 25 bp, Probe Sequence
atgttgtgtatggtagttctcactg

SEQ ID NO: 92947 - DNA, 25 bp, Probe Sequence
agctgtaatgttgtgtatggtagtt

SEQ ID NO: 92948 - DNA, 25 bp, Probe Sequence
gtagttctcactggatgctagagtt

SEQ ID NO: 92949 - DNA, 25 bp, Probe Sequence
ttgtgtatggtagttctcactggat

SEQ ID NO: 92950 - DNA, 25 bp, Probe Sequence
taatgttgtgtatggtagttctcac

SEQ ID NO: 92951 - DNA, 25 bp, Probe Sequence
tgtgtatggtagttctcactggatg

SEQ ID NO: 92952 - DNA, 25 bp, Probe Sequence
gttgtgtatggtagttctcactgga

SEQ ID NO: 92953 - DNA, 25 bp, Probe Sequence
atggtagttctcactggatgctaga

SEQ ID NO: 92954 - DNA, 25 bp, Probe Sequence
tgttgtgtatggtagttctcactgg

SEQ ID NO: 92955 - DNA, 25 bp, Probe Sequence
tgtatggtagttctcactggatgct

SEQ ID NO: 92956 - DNA, 25 bp, Probe Sequence
tgtaagatttaatggttccacttgt

SEQ ID NO: 92957 - DNA, 25 bp, Probe Sequence
gcatgtgtaagatttaatggttcca

SEQ ID NO: 92958 - DNA, 25 bp, Probe Sequence
tccacttgtattatttgaccatgac

SEQ ID NO: 92959 - DNA, 25 bp, Probe Sequence
tagttctcactggatgctagagttt

SEQ ID NO: 92960 - DNA, 25 bp, Probe Sequence
ggtagttctcactggatgctagagt

SEQ ID NO: 92961 - DNA, 25 bp, Probe Sequence
tggtagttctcactggatgctagag

SEQ ID NO: 92962 - DNA, 25 bp, Probe Sequence
gtgtatggtagttctcactggatgc

SEQ ID NO: 92963 - DNA, 25 bp, Probe Sequence
tcagaggcagatactaaattaagca

SEQ ID NO: 92964 - DNA, 25 bp, Probe Sequence
cagaggcagatactaaattaagcat

SEQ ID NO: 92965 - DNA, 25 bp, Probe Sequence
ttcagaggcagatactaaattaagc

SEQ ID NO: 92966 - DNA, 25 bp, Probe Sequence
ggcttctctatattcccaaattcat

SEQ ID NO: 92967 - DNA, 25 bp, Probe Sequence
aagcataggtggtaaataaaggaaa

SEQ ID NO: 92968 - DNA, 25 bp, Probe Sequence
ggcagatactaaattaagcataggt

SEQ ID NO: 92969 - DNA, 25 bp, Probe Sequence
cccaaattcatatttcagaaccctc

SEQ ID NO: 92970 - DNA, 25 bp, Probe Sequence
tcccaaattcatatttcagaaccct

SEQ ID NO: 92971 - DNA, 25 bp, Probe Sequence
ttcccaaattcatatttcagaaccc

SEQ ID NO: 92972 - DNA, 25 bp, Probe Sequence
aggcagatactaaattaagcatagg

SEQ ID NO: 92973 - DNA, 25 bp, Probe Sequence
ccatattcagaggcagatactaaat

SEQ ID NO: 92974 - DNA, 25 bp, Probe Sequence
aaagaaagataggcaggtttactgt

SEQ ID NO: 92975 - DNA, 25 bp, Probe Sequence
ccaaattcatatttcagaaccctct

SEQ ID NO: 92976 - DNA, 25 bp, Probe Sequence
aagaaagataggcaggtttactgta

SEQ ID NO: 92977 - DNA, 25 bp, Probe Sequence
gtaaatgaagtaggctgccatattc

SEQ ID NO: 92978 - DNA, 25 bp, Probe Sequence
tgtaaatgaagtaggctgccatatt

SEQ ID NO: 92979 - DNA, 25 bp, Probe Sequence
agaaagataggcaggtttactgtaa

SEQ ID NO: 92980 - DNA, 25 bp, Probe Sequence
ctgtaaatgaagtaggctgccatat

SEQ ID NO: 92981 - DNA, 25 bp, Probe Sequence
taagcataggtggtaaataaaggaa

SEQ ID NO: 92982 - DNA, 25 bp, Probe Sequence
ttaagcataggtggtaaataaagga

SEQ ID NO: 92983 - DNA, 25 bp, Probe Sequence
gcagatactaaattaagcataggtg

SEQ ID NO: 92984 - DNA, 25 bp, Probe Sequence
tggcttctctatattcccaaattca

SEQ ID NO: 92985 - DNA, 25 bp, Probe Sequence
actggcttctctatattcccaaatt

SEQ ID NO: 92986 - DNA, 25 bp, Probe Sequence
cactggcttctctatattcccaaat

SEQ ID NO: 92987 - DNA, 25 bp, Probe Sequence
cttctgtccgctcctatctatattc

SEQ ID NO: 92988 - DNA, 25 bp, Probe Sequence
ttctgtccgctcctatctatattct

SEQ ID NO: 92989 - DNA, 25 bp, Probe Sequence
tcttctgtccgctcctatctatatt

SEQ ID NO: 92990 - DNA, 25 bp, Probe Sequence
ctcttctgtccgctcctatctatat

SEQ ID NO: 92991 - DNA, 25 bp, Probe Sequence
tctgtccgctcctatctatattctg

SEQ ID NO: 92992 - DNA, 25 bp, Probe Sequence
tctcttctgtccgctcctatctata

SEQ ID NO: 92993 - DNA, 25 bp, Probe Sequence
ttatgtaaggcgatggagatgtact

SEQ ID NO: 92994 - DNA, 25 bp, Probe Sequence
gttatgtaaggcgatggagatgtac

SEQ ID NO: 92995 - DNA, 25 bp, Probe Sequence
ggttatgtaaggcgatggagatgta

SEQ ID NO: 92996 - DNA, 25 bp, Probe Sequence
ttctcttctgtccgctcctatctat

SEQ ID NO: 92997 - DNA, 25 bp, Probe Sequence
ctgtccgctcctatctatattctgc

SEQ ID NO: 92998 - DNA, 25 bp, Probe Sequence
tatgtaaggcgatggagatgtactg

SEQ ID NO: 92999 - DNA, 25 bp, Probe Sequence
atggttatgtaaggcgatggagatg

SEQ ID NO: 93000 - DNA, 25 bp, Probe Sequence
tttgttagatttggctccattgttt

SEQ ID NO: 93001 - DNA, 25 bp, Probe Sequence
atttgttagatttggctccattgtt

SEQ ID NO: 93002 - DNA, 25 bp, Probe Sequence
aatttgttagatttggctccattgt

SEQ ID NO: 93003 - DNA, 25 bp, Probe Sequence
caacctgagtacctgaaggattctt

SEQ ID NO: 93004 - DNA, 25 bp, Probe Sequence
catggttatgtaaggcgatggagat

SEQ ID NO: 93005 - DNA, 25 bp, Probe Sequence
taccattgccagagaaatcagagat

SEQ ID NO: 93006 - DNA, 25 bp, Probe Sequence
gttaccattgccagagaaatcagag

SEQ ID NO: 93007 - DNA, 25 bp, Probe Sequence
ttaccattgccagagaaatcagaga

SEQ ID NO: 93008 - DNA, 25 bp, Probe Sequence
agttaccattgccagagaaatcaga

SEQ ID NO: 93009 - DNA, 25 bp, Probe Sequence
cagttaccattgccagagaaatcag

SEQ ID NO: 93010 - DNA, 25 bp, Probe Sequence
tgttgtgtttgttgatctttgattc

SEQ ID NO: 93011 - DNA, 25 bp, Probe Sequence
ttcctcactgtcactgtaaccataa

SEQ ID NO: 93012 - DNA, 25 bp, Probe Sequence
cttcctcactgtcactgtaaccata

SEQ ID NO: 93013 - DNA, 25 bp, Probe Sequence
ctctgatctaactcttctgttcgtt

SEQ ID NO: 93014 - DNA, 25 bp, Probe Sequence
tgatctaactcttctgttcgttgtt

SEQ ID NO: 93015 - DNA, 25 bp, Probe Sequence
tctgatctaactcttctgttcgttg

SEQ ID NO: 93016 - DNA, 25 bp, Probe Sequence
ctgatctaactcttctgttcgttgt

SEQ ID NO: 93017 - DNA, 25 bp, Probe Sequence
cactctgatctaactcttctgttcg

SEQ ID NO: 93018 - DNA, 25 bp, Probe Sequence
gcactctgatctaactcttctgttc

SEQ ID NO: 93019 - DNA, 25 bp, Probe Sequence
actctgatctaactcttctgttcgt

SEQ ID NO: 93020 - DNA, 25 bp, Probe Sequence
tctgttcgttgttagaattgtggtg

SEQ ID NO: 93021 - DNA, 25 bp, Probe Sequence
ggcactctgatctaactcttctgtt

SEQ ID NO: 93022 - DNA, 25 bp, Probe Sequence
gatctaactcttctgttcgttgtta

SEQ ID NO: 93023 - DNA, 25 bp, Probe Sequence
gtggcactctgatctaactcttctg

SEQ ID NO: 93024 - DNA, 25 bp, Probe Sequence
tcctcactgtcactgtaaccataaa

SEQ ID NO: 93025 - DNA, 25 bp, Probe Sequence
tcttcctcactgtcactgtaaccat

SEQ ID NO: 93026 - DNA, 25 bp, Probe Sequence
tcttctgttcgttgttagaattgtg

SEQ ID NO: 93027 - DNA, 25 bp, Probe Sequence
ctcttctgttcgttgttagaattgt

SEQ ID NO: 93028 - DNA, 25 bp, Probe Sequence
actcttctgttcgttgttagaattg

SEQ ID NO: 93029 - DNA, 25 bp, Probe Sequence
cttctgttcgttgttagaattgtgg

SEQ ID NO: 93030 - DNA, 25 bp, Probe Sequence
ttcttcctcactgtcactgtaacca

SEQ ID NO: 93031 - DNA, 25 bp, Probe Sequence
tggcactctgatctaactcttctgt

SEQ ID NO: 93032 - DNA, 25 bp, Probe Sequence
ctgttcgttgttagaattgtggtgc

SEQ ID NO: 93033 - DNA, 25 bp, Probe Sequence
ttctgttcgttgttagaattgtggt

SEQ ID NO: 93034 - DNA, 25 bp, Probe Sequence
aactcttctgttcgttgttagaatt

SEQ ID NO: 93035 - DNA, 25 bp, Probe Sequence
aaatagcctatacacagcatcttgt

SEQ ID NO: 93036 - DNA, 25 bp, Probe Sequence
gtacagtttagttggagtgtagcac

SEQ ID NO: 93037 - DNA, 25 bp, Probe Sequence
tgaaaatagcctatacacagcatct

SEQ ID NO: 93038 - DNA, 25 bp, Probe Sequence
aaaatagcctatacacagcatcttg

SEQ ID NO: 93039 - DNA, 25 bp, Probe Sequence
cagcgttgactgaggagatagtgaa

SEQ ID NO: 93040 - DNA, 25 bp, Probe Sequence
gaaaatagcctatacacagcatctt

SEQ ID NO: 93041 - DNA, 25 bp, Probe Sequence
tgactgaggagatagtgaaaatagc

SEQ ID NO: 93042 - DNA, 25 bp, Probe Sequence
gactgaggagatagtgaaaatagcc

SEQ ID NO: 93043 - DNA, 25 bp, Probe Sequence
cgttgactgaggagatagtgaaaat

SEQ ID NO: 93044 - DNA, 25 bp, Probe Sequence
agcgttgactgaggagatagtgaaa

SEQ ID NO: 93045 - DNA, 25 bp, Probe Sequence
agtgaaaatagcctatacacagcat

SEQ ID NO: 93046 - DNA, 25 bp, Probe Sequence
gtgaaaatagcctatacacagcatc

SEQ ID NO: 93047 - DNA, 25 bp, Probe Sequence
tagtgaaaatagcctatacacagca

SEQ ID NO: 93048 - DNA, 25 bp, Probe Sequence
actgaggagatagtgaaaatagcct

SEQ ID NO: 93049 - DNA, 25 bp, Probe Sequence
ttagttggagtgtagcactgaagaa

SEQ ID NO: 93050 - DNA, 25 bp, Probe Sequence
ctgaggagatagtgaaaatagccta

SEQ ID NO: 93051 - DNA, 25 bp, Probe Sequence
gttgactgaggagatagtgaaaata

SEQ ID NO: 93052 - DNA, 25 bp, Probe Sequence
aatagcctatacacagcatcttgtg

SEQ ID NO: 93053 - DNA, 25 bp, Probe Sequence
ttgactgaggagatagtgaaaatag

SEQ ID NO: 93054 - DNA, 25 bp, Probe Sequence
atagtgaaaatagcctatacacagc

SEQ ID NO: 93055 - DNA, 25 bp, Probe Sequence
tgaggagatagtgaaaatagcctat

SEQ ID NO: 93056 - DNA, 25 bp, Probe Sequence
tagttggagtgtagcactgaagaac

SEQ ID NO: 93057 - DNA, 25 bp, Probe Sequence
atagcctatacacagcatcttgtga

SEQ ID NO: 93058 - DNA, 25 bp, Probe Sequence
tagcctatacacagcatcttgtgaa

SEQ ID NO: 93059 - DNA, 25 bp, Probe Sequence
atgttgtagttagagacactgtagc

SEQ ID NO: 93060 - DNA, 25 bp, Probe Sequence
tagagacactgtagctgtatctgta

SEQ ID NO: 93061 - DNA, 25 bp, Probe Sequence
agagacactgtagctgtatctgtat

SEQ ID NO: 93062 - DNA, 25 bp, Probe Sequence
gagacactgtagctgtatctgtata

SEQ ID NO: 93063 - DNA, 25 bp, Probe Sequence
gcatgttgtagttagagacactgta

SEQ ID NO: 93064 - DNA, 25 bp, Probe Sequence
gattgataatagccttgcatgttgt

SEQ ID NO: 93065 - DNA, 25 bp, Probe Sequence
aatagccttgcatgttgtagttaga

SEQ ID NO: 93066 - DNA, 25 bp, Probe Sequence
tgataatagccttgcatgttgtagt

SEQ ID NO: 93067 - DNA, 25 bp, Probe Sequence
agattgataatagccttgcatgttg

SEQ ID NO: 93068 - DNA, 25 bp, Probe Sequence
catgttgtagttagagacactgtag

SEQ ID NO: 93069 - DNA, 25 bp, Probe Sequence
atagccttgcatgttgtagttagag

SEQ ID NO: 93070 - DNA, 25 bp, Probe Sequence
gataatagccttgcatgttgtagtt

SEQ ID NO: 93071 - DNA, 25 bp, Probe Sequence
ttgataatagccttgcatgttgtag

SEQ ID NO: 93072 - DNA, 25 bp, Probe Sequence
taatatagcctgggaagttctgttg

SEQ ID NO: 93073 - DNA, 25 bp, Probe Sequence
gtaatatagcctgggaagttctgtt

SEQ ID NO: 93074 - DNA, 25 bp, Probe Sequence
atacctgtaatatagcctgggaagt

SEQ ID NO: 93075 - DNA, 25 bp, Probe Sequence
tacctgtaatatagcctgggaagtt

SEQ ID NO: 93076 - DNA, 25 bp, Probe Sequence
ctgtaatatagcctgggaagttctg

SEQ ID NO: 93077 - DNA, 25 bp, Probe Sequence
agacactgtagctgtatctgtatac

SEQ ID NO: 93078 - DNA, 25 bp, Probe Sequence
gttagagacactgtagctgtatctg

SEQ ID NO: 93079 - DNA, 25 bp, Probe Sequence
agttagagacactgtagctgtatct

SEQ ID NO: 93080 - DNA, 25 bp, Probe Sequence
tgtagttagagacactgtagctgta

SEQ ID NO: 93081 - DNA, 25 bp, Probe Sequence
taatagccttgcatgttgtagttag

SEQ ID NO: 93082 - DNA, 25 bp, Probe Sequence
tgtaatatagcctgggaagttctgt

SEQ ID NO: 93083 - DNA, 25 bp, Probe Sequence
gtaagtagatgagaagtcttcacgg

SEQ ID NO: 93084 - DNA, 25 bp, Probe Sequence
ggtaagtagatgagaagtcttcacg

SEQ ID NO: 93085 - DNA, 25 bp, Probe Sequence
cggtaagtagatgagaagtcttcac

SEQ ID NO: 93086 - DNA, 25 bp, Probe Sequence
taagtagatgagaagtcttcacggg

SEQ ID NO: 93087 - DNA, 25 bp, Probe Sequence
tccggtaagtagatgagaagtcttc

SEQ ID NO: 93088 - DNA, 25 bp, Probe Sequence
ccggtaagtagatgagaagtcttca

SEQ ID NO: 93089 - DNA, 25 bp, Probe Sequence
ctccggtaagtagatgagaagtctt

SEQ ID NO: 93090 - DNA, 25 bp, Probe Sequence
ttctggtactttgtatctccggtaa

SEQ ID NO: 93091 - DNA, 25 bp, Probe Sequence
cttctggtactttgtatctccggta

SEQ ID NO: 93092 - DNA, 25 bp, Probe Sequence
tctggtactttgtatctccggtaag

SEQ ID NO: 93093 - DNA, 25 bp, Probe Sequence
tatctccggtaagtagatgagaagt

SEQ ID NO: 93094 - DNA, 25 bp, Probe Sequence
tgtatctccggtaagtagatgagaa

SEQ ID NO: 93095 - DNA, 25 bp, Probe Sequence
ttgtatctccggtaagtagatgaga

SEQ ID NO: 93096 - DNA, 25 bp, Probe Sequence
gtatctccggtaagtagatgagaag

SEQ ID NO: 93097 - DNA, 25 bp, Probe Sequence
atctccggtaagtagatgagaagtc

SEQ ID NO: 93098 - DNA, 25 bp, Probe Sequence
tttgtatctccggtaagtagatgag

SEQ ID NO: 93099 - DNA, 25 bp, Probe Sequence
ctttgtatctccggtaagtagatga

SEQ ID NO: 93100 - DNA, 25 bp, Probe Sequence
tctccggtaagtagatgagaagtct

SEQ ID NO: 93101 - DNA, 25 bp, Probe Sequence
actttgtatctccggtaagtagatg

SEQ ID NO: 93102 - DNA, 25 bp, Probe Sequence
cccgcttctggtactttgtatctcc

SEQ ID NO: 93103 - DNA, 25 bp, Probe Sequence
cagtcccgcttctggtactttgtat

SEQ ID NO: 93104 - DNA, 25 bp, Probe Sequence
ctggtactttgtatctccggtaagt

SEQ ID NO: 93105 - DNA, 25 bp, Probe Sequence
agatcactgaaggtgtgaggagatc

SEQ ID NO: 93106 - DNA, 25 bp, Probe Sequence
aagtcttcacggggagattgtctac

SEQ ID NO: 93107 - DNA, 25 bp, Probe Sequence
ttcaggttcttcaagtctccatctt

SEQ ID NO: 93108 - DNA, 25 bp, Probe Sequence
ttcttcaggttcttcaagtctccat

SEQ ID NO: 93109 - DNA, 25 bp, Probe Sequence
aaggttcttcaggttcttcaagtct

SEQ ID NO: 93110 - DNA, 25 bp, Probe Sequence
tattgttgacatgaatctatgcgtg

SEQ ID NO: 93111 - DNA, 25 bp, Probe Sequence
cttcaggttcttcaagtctccatct

SEQ ID NO: 93112 - DNA, 25 bp, Probe Sequence
tcttcaggttcttcaagtctccatc

SEQ ID NO: 93113 - DNA, 25 bp, Probe Sequence
ttattgttgacatgaatctatgcgt

SEQ ID NO: 93114 - DNA, 25 bp, Probe Sequence
gttattgttgacatgaatctatgcg

SEQ ID NO: 93115 - DNA, 25 bp, Probe Sequence
aggttcttcaggttcttcaagtctc

SEQ ID NO: 93116 - DNA, 25 bp, Probe Sequence
attgttgacatgaatctatgcgtga

SEQ ID NO: 93117 - DNA, 25 bp, Probe Sequence
ttgttgacatgaatctatgcgtgaa

SEQ ID NO: 93118 - DNA, 25 bp, Probe Sequence
catgaatctatgcgtgaaggttctt

SEQ ID NO: 93119 - DNA, 25 bp, Probe Sequence
gttcttcaggttcttcaagtctcca

SEQ ID NO: 93120 - DNA, 25 bp, Probe Sequence
tgttgacatgaatctatgcgtgaag

SEQ ID NO: 93121 - DNA, 25 bp, Probe Sequence
gacatgaatctatgcgtgaaggttc

SEQ ID NO: 93122 - DNA, 25 bp, Probe Sequence
ggttcttcaggttcttcaagtctcc

SEQ ID NO: 93123 - DNA, 25 bp, Probe Sequence
acatgaatctatgcgtgaaggttct

SEQ ID NO: 93124 - DNA, 25 bp, Probe Sequence
gttgacatgaatctatgcgtgaagg

SEQ ID NO: 93125 - DNA, 25 bp, Probe Sequence
tgttattgttgacatgaatctatgc

SEQ ID NO: 93126 - DNA, 25 bp, Probe Sequence
tgacatgaatctatgcgtgaaggtt

SEQ ID NO: 93127 - DNA, 25 bp, Probe Sequence
ttgacatgaatctatgcgtgaaggt

SEQ ID NO: 93128 - DNA, 25 bp, Probe Sequence
gactcactttgctcatgttattgtt

SEQ ID NO: 93129 - DNA, 25 bp, Probe Sequence
tcaggttcttcaagtctccatcttt

SEQ ID NO: 93130 - DNA, 25 bp, Probe Sequence
actcactttgctcatgttattgttg

SEQ ID NO: 93131 - DNA, 25 bp, Probe Sequence
aaagtaaattccatacctccatcac

SEQ ID NO: 93132 - DNA, 25 bp, Probe Sequence
agtaaattccatacctccatcactg

SEQ ID NO: 93133 - DNA, 25 bp, Probe Sequence
aagtaaattccatacctccatcact

SEQ ID NO: 93134 - DNA, 25 bp, Probe Sequence
cctattcatgctcatatgtattgcc

SEQ ID NO: 93135 - DNA, 25 bp, Probe Sequence
gtaaattccatacctccatcactgc

SEQ ID NO: 93136 - DNA, 25 bp, Probe Sequence
attcatgctcatatgtattgcctgt

SEQ ID NO: 93137 - DNA, 25 bp, Probe Sequence
ttcatgctcatatgtattgcctgtt

SEQ ID NO: 93138 - DNA, 25 bp, Probe Sequence
tattcatgctcatatgtattgcctg

SEQ ID NO: 93139 - DNA, 25 bp, Probe Sequence
ctattcatgctcatatgtattgcct

SEQ ID NO: 93140 - DNA, 25 bp, Probe Sequence
tcatgctcatatgtattgcctgttg

SEQ ID NO: 93141 - DNA, 25 bp, Probe Sequence
aattccatacctccatcactgcatg

SEQ ID NO: 93142 - DNA, 25 bp, Probe Sequence
taaattccatacctccatcactgca

SEQ ID NO: 93143 - DNA, 25 bp, Probe Sequence
atgctcatatgtattgcctgttgct

SEQ ID NO: 93144 - DNA, 25 bp, Probe Sequence
catgctcatatgtattgcctgttgc

SEQ ID NO: 93145 - DNA, 25 bp, Probe Sequence
ccctattcatgctcatatgtattgc

SEQ ID NO: 93146 - DNA, 25 bp, Probe Sequence
gccctattcatgctcatatgtattg

SEQ ID NO: 93147 - DNA, 25 bp, Probe Sequence
tgctcatatgtattgcctgttgctt

SEQ ID NO: 93148 - DNA, 25 bp, Probe Sequence
tttcacaggcaaaagtaaattccat

SEQ ID NO: 93149 - DNA, 25 bp, Probe Sequence
tcacaggcaaaagtaaattccatac

SEQ ID NO: 93150 - DNA, 25 bp, Probe Sequence
gcaaaagtaaattccatacctccat

SEQ ID NO: 93151 - DNA, 25 bp, Probe Sequence
cacaggcaaaagtaaattccatacc

SEQ ID NO: 93152 - DNA, 25 bp, Probe Sequence
gtttcacaggcaaaagtaaattcca

SEQ ID NO: 93153 - DNA, 25 bp, Probe Sequence
aaattccatacctccatcactgcat

SEQ ID NO: 93154 - DNA, 25 bp, Probe Sequence
ttcacaggcaaaagtaaattccata

SEQ ID NO: 93155 - DNA, 25 bp, Probe Sequence
gtcatcgtataccatgtgatcgttt

SEQ ID NO: 93156 - DNA, 25 bp, Probe Sequence
tataccatgtgatcgttttgcagta

SEQ ID NO: 93157 - DNA, 25 bp, Probe Sequence
catcgtataccatgtgatcgttttg

SEQ ID NO: 93158 - DNA, 25 bp, Probe Sequence
tcatcgtataccatgtgatcgtttt

SEQ ID NO: 93159 - DNA, 25 bp, Probe Sequence
ataccatgtgatcgttttgcagtac

SEQ ID NO: 93160 - DNA, 25 bp, Probe Sequence
gtataccatgtgatcgttttgcagt

SEQ ID NO: 93161 - DNA, 25 bp, Probe Sequence
atcgtataccatgtgatcgttttgc

SEQ ID NO: 93162 - DNA, 25 bp, Probe Sequence
aaataaaagctgtgtttgagcatca

SEQ ID NO: 93163 - DNA, 25 bp, Probe Sequence
aaaataaaagctgtgtttgagcatc

SEQ ID NO: 93164 - DNA, 25 bp, Probe Sequence
gtaaaataaaagctgtgtttgagca

SEQ ID NO: 93165 - DNA, 25 bp, Probe Sequence
agtaaaataaaagctgtgtttgagc

SEQ ID NO: 93166 - DNA, 25 bp, Probe Sequence
cgtataccatgtgatcgttttgcag

SEQ ID NO: 93167 - DNA, 25 bp, Probe Sequence
aataaaagctgtgtttgagcatcaa

SEQ ID NO: 93168 - DNA, 25 bp, Probe Sequence
tcgtataccatgtgatcgttttgca

SEQ ID NO: 93169 - DNA, 25 bp, Probe Sequence
taaaataaaagctgtgtttgagcat

SEQ ID NO: 93170 - DNA, 25 bp, Probe Sequence
tttgcagtacatcatggcgtggata

SEQ ID NO: 93171 - DNA, 25 bp, Probe Sequence
taaaagctgtgtttgagcatcaaaa

SEQ ID NO: 93172 - DNA, 25 bp, Probe Sequence
ataaaagctgtgtttgagcatcaaa

SEQ ID NO: 93173 - DNA, 25 bp, Probe Sequence
gatcgttttgcagtacatcatggcg

SEQ ID NO: 93174 - DNA, 25 bp, Probe Sequence
tgatcgttttgcagtacatcatggc

SEQ ID NO: 93175 - DNA, 25 bp, Probe Sequence
gtaactgtcctgtcctgctcattat

SEQ ID NO: 93176 - DNA, 25 bp, Probe Sequence
taactgtcctgtcctgctcattatg

SEQ ID NO: 93177 - DNA, 25 bp, Probe Sequence
ctggatcttggagaatgtgagaagc

SEQ ID NO: 93178 - DNA, 25 bp, Probe Sequence
gctggatcttggagaatgtgagaag

SEQ ID NO: 93179 - DNA, 25 bp, Probe Sequence
ggtaactgtcctgtcctgctcatta

SEQ ID NO: 93180 - DNA, 25 bp, Probe Sequence
ctagaggctggatcttggagaatgt

SEQ ID NO: 93181 - DNA, 25 bp, Probe Sequence
tagaggctggatcttggagaatgtg

SEQ ID NO: 93182 - DNA, 25 bp, Probe Sequence
gatcttggagaatgtgagaagccag

SEQ ID NO: 93183 - DNA, 25 bp, Probe Sequence
cctagaggctggatcttggagaatg

SEQ ID NO: 93184 - DNA, 25 bp, Probe Sequence
tcattatgccacttccttttaactg

SEQ ID NO: 93185 - DNA, 25 bp, Probe Sequence
ctcattatgccacttccttttaact

SEQ ID NO: 93186 - DNA, 25 bp, Probe Sequence
gctcattatgccacttccttttaac

SEQ ID NO: 93187 - DNA, 25 bp, Probe Sequence
cacttccttttaactgccaagaaat

SEQ ID NO: 93188 - DNA, 25 bp, Probe Sequence
cattatgccacttccttttaactgc

SEQ ID NO: 93189 - DNA, 25 bp, Probe Sequence
tgctcattatgccacttccttttaa

SEQ ID NO: 93190 - DNA, 25 bp, Probe Sequence
acttccttttaactgccaagaaatt

SEQ ID NO: 93191 - DNA, 25 bp, Probe Sequence
ctgctcattatgccacttcctttta

SEQ ID NO: 93192 - DNA, 25 bp, Probe Sequence
tggatcttggagaatgtgagaagcc

SEQ ID NO: 93193 - DNA, 25 bp, Probe Sequence
ggctggatcttggagaatgtgagaa

SEQ ID NO: 93194 - DNA, 25 bp, Probe Sequence
attatgccacttccttttaactgcc

SEQ ID NO: 93195 - DNA, 25 bp, Probe Sequence
ccacttccttttaactgccaagaaa

SEQ ID NO: 93196 - DNA, 25 bp, Probe Sequence
gtcctgctcattatgccacttcctt

SEQ ID NO: 93197 - DNA, 25 bp, Probe Sequence
aactgtcctgtcctgctcattatgc

SEQ ID NO: 93198 - DNA, 25 bp, Probe Sequence
gaggctggatcttggagaatgtgag

SEQ ID NO: 93199 - DNA, 25 bp, Probe Sequence
acccttgtagtatgtcatcattctg

SEQ ID NO: 93200 - DNA, 25 bp, Probe Sequence
cacccttgtagtatgtcatcattct

SEQ ID NO: 93201 - DNA, 25 bp, Probe Sequence
ttattctgtaatggaaagtgttgcc

SEQ ID NO: 93202 - DNA, 25 bp, Probe Sequence
tattctgtaatggaaagtgttgcct

SEQ ID NO: 93203 - DNA, 25 bp, Probe Sequence
tagcacccttgtagtatgtcatcat

SEQ ID NO: 93204 - DNA, 25 bp, Probe Sequence
gttattctgtaatggaaagtgttgc

SEQ ID NO: 93205 - DNA, 25 bp, Probe Sequence
cccttgtagtatgtcatcattctgc

SEQ ID NO: 93206 - DNA, 25 bp, Probe Sequence
gaggttattctgtaatggaaagtgt

SEQ ID NO: 93207 - DNA, 25 bp, Probe Sequence
gcacccttgtagtatgtcatcattc

SEQ ID NO: 93208 - DNA, 25 bp, Probe Sequence
ggttattctgtaatggaaagtgttg

SEQ ID NO: 93209 - DNA, 25 bp, Probe Sequence
agaggttattctgtaatggaaagtg

SEQ ID NO: 93210 - DNA, 25 bp, Probe Sequence
agcacccttgtagtatgtcatcatt

SEQ ID NO: 93211 - DNA, 25 bp, Probe Sequence
attctgtaatggaaagtgttgcctg

SEQ ID NO: 93212 - DNA, 25 bp, Probe Sequence
aggttattctgtaatggaaagtgtt

SEQ ID NO: 93213 - DNA, 25 bp, Probe Sequence
ctagcacccttgtagtatgtcatca

SEQ ID NO: 93214 - DNA, 25 bp, Probe Sequence
tagaggttattctgtaatggaaagt

SEQ ID NO: 93215 - DNA, 25 bp, Probe Sequence
aaatgttgaaatccaatcctagaaa

SEQ ID NO: 93216 - DNA, 25 bp, Probe Sequence
aatgttgaaatccaatcctagaaat

SEQ ID NO: 93217 - DNA, 25 bp, Probe Sequence
tgttgaaatccaatcctagaaataa

SEQ ID NO: 93218 - DNA, 25 bp, Probe Sequence
ttctgtaatggaaagtgttgcctgc

SEQ ID NO: 93219 - DNA, 25 bp, Probe Sequence
atagaggttattctgtaatggaaag

SEQ ID NO: 93220 - DNA, 25 bp, Probe Sequence
atgttgaaatccaatcctagaaata

SEQ ID NO: 93221 - DNA, 25 bp, Probe Sequence
cttgtagagctgagcattttctttt

SEQ ID NO: 93222 - DNA, 25 bp, Probe Sequence
tcttgtagagctgagcattttcttt

SEQ ID NO: 93223 - DNA, 25 bp, Probe Sequence
actcttctctgtatgtcaactcatc

SEQ ID NO: 93224 - DNA, 25 bp, Probe Sequence
ctcttctctgtatgtcaactcatcc

SEQ ID NO: 93225 - DNA, 25 bp, Probe Sequence
catattctctgccttgttcttatca

SEQ ID NO: 93226 - DNA, 25 bp, Probe Sequence
ctgatgctctgactcttctctgtat

SEQ ID NO: 93227 - DNA, 25 bp, Probe Sequence
gatgctctgactcttctctgtatgt

SEQ ID NO: 93228 - DNA, 25 bp, Probe Sequence
tgatgctctgactcttctctgtatg

SEQ ID NO: 93229 - DNA, 25 bp, Probe Sequence
tatatattgccatcacaccgtacat

SEQ ID NO: 93230 - DNA, 25 bp, Probe Sequence
atatattgccatcacaccgtacatc

SEQ ID NO: 93231 - DNA, 25 bp, Probe Sequence
gactcttctctgtatgtcaactcat

SEQ ID NO: 93232 - DNA, 25 bp, Probe Sequence
tattctctgccttgttcttatcagc

SEQ ID NO: 93233 - DNA, 25 bp, Probe Sequence
tctgatgctctgactcttctctgta

SEQ ID NO: 93234 - DNA, 25 bp, Probe Sequence
agtattcatgtccacattgagaagt

SEQ ID NO: 93235 - DNA, 25 bp, Probe Sequence
tcagtattcatgtccacattgagaa

SEQ ID NO: 93236 - DNA, 25 bp, Probe Sequence
ttcagtattcatgtccacattgaga

SEQ ID NO: 93237 - DNA, 25 bp, Probe Sequence
atatggtatcataagtcctccgtca

SEQ ID NO: 93238 - DNA, 25 bp, Probe Sequence
cagtattcatgtccacattgagaag

SEQ ID NO: 93239 - DNA, 25 bp, Probe Sequence
tgaagtgttctataacctgatctct

SEQ ID NO: 93240 - DNA, 25 bp, Probe Sequence
acctaactgtatctgtagtgtatca

SEQ ID NO: 93241 - DNA, 25 bp, Probe Sequence
ttggctacaactaattcagtattca

SEQ ID NO: 93242 - DNA, 25 bp, Probe Sequence
cttctgatgctctgactcttctctg

SEQ ID NO: 93243 - DNA, 25 bp, Probe Sequence
attcagtattcatgtccacattgag

SEQ ID NO: 93244 - DNA, 25 bp, Probe Sequence
tatggtatcataagtcctccgtcag

SEQ ID NO: 93245 - DNA, 25 bp, Probe Sequence
tatattgccatcacaccgtacatca

SEQ ID NO: 93246 - DNA, 25 bp, Probe Sequence
atggtatcataagtcctccgtcaga

SEQ ID NO: 93247 - DNA, 25 bp, Probe Sequence
ccaacctctctgtaaccgtattctt

SEQ ID NO: 93248 - DNA, 25 bp, Probe Sequence
aacctctctgtaaccgtattctttg

SEQ ID NO: 93249 - DNA, 25 bp, Probe Sequence
caacctctctgtaaccgtattcttt

SEQ ID NO: 93250 - DNA, 25 bp, Probe Sequence
cctctctgtaaccgtattctttgaa

SEQ ID NO: 93251 - DNA, 25 bp, Probe Sequence
gcagaggttatagtgagccaagatg

SEQ ID NO: 93252 - DNA, 25 bp, Probe Sequence
acctctctgtaaccgtattctttga

SEQ ID NO: 93253 - DNA, 25 bp, Probe Sequence
ctctctgtaaccgtattctttgaaa

SEQ ID NO: 93254 - DNA, 25 bp, Probe Sequence
ctctgtaaccgtattctttgaaagc

SEQ ID NO: 93255 - DNA, 25 bp, Probe Sequence
tctctgtaaccgtattctttgaaag

SEQ ID NO: 93256 - DNA, 25 bp, Probe Sequence
atcctggctaacactgtgaaactaa

SEQ ID NO: 93257 - DNA, 25 bp, Probe Sequence
cagaggttatagtgagccaagatgg

SEQ ID NO: 93258 - DNA, 25 bp, Probe Sequence
tcctggctaacactgtgaaactaaa

SEQ ID NO: 93259 - DNA, 25 bp, Probe Sequence
ctgtaaccgtattctttgaaagctg

SEQ ID NO: 93260 - DNA, 25 bp, Probe Sequence
tctgtaaccgtattctttgaaagct

SEQ ID NO: 93261 - DNA, 25 bp, Probe Sequence
ctaatcacgaggtcaggagatctag

SEQ ID NO: 93262 - DNA, 25 bp, Probe Sequence
gtaaccgtattctttgaaagctgtg

SEQ ID NO: 93263 - DNA, 25 bp, Probe Sequence
catcctggctaacactgtgaaacta

SEQ ID NO: 93264 - DNA, 25 bp, Probe Sequence
tgtaaccgtattctttgaaagctgt

SEQ ID NO: 93265 - DNA, 25 bp, Probe Sequence
taatcacgaggtcaggagatctaga

SEQ ID NO: 93266 - DNA, 25 bp, Probe Sequence
taaccgtattctttgaaagctgtgg

SEQ ID NO: 93267 - DNA, 25 bp, Probe Sequence
ttctttgaaagctgtggaataaggc

SEQ ID NO: 93268 - DNA, 25 bp, Probe Sequence
caataaaagtgctatgagacccaac

SEQ ID NO: 93269 - DNA, 25 bp, Probe Sequence
attctttgaaagctgtggaataagg

SEQ ID NO: 93270 - DNA, 25 bp, Probe Sequence
accccatctctactaaaataccaaa

SEQ ID NO: 93271 - DNA, 25 bp, Probe Sequence
caagcatagaagaatcgtaggagaa

SEQ ID NO: 93272 - DNA, 25 bp, Probe Sequence
aactcaagcatagaagaatcgtagg

SEQ ID NO: 93273 - DNA, 25 bp, Probe Sequence
aagcatagaagaatcgtaggagaat

SEQ ID NO: 93274 - DNA, 25 bp, Probe Sequence
gaactcaagcatagaagaatcgtag

SEQ ID NO: 93275 - DNA, 25 bp, Probe Sequence
tcaagcatagaagaatcgtaggaga

SEQ ID NO: 93276 - DNA, 25 bp, Probe Sequence
gcatagaagaatcgtaggagaatga

SEQ ID NO: 93277 - DNA, 25 bp, Probe Sequence
agcatagaagaatcgtaggagaatg

SEQ ID NO: 93278 - DNA, 25 bp, Probe Sequence
atcgtaggagaatgattaggcagat

SEQ ID NO: 93279 - DNA, 25 bp, Probe Sequence
tcgtaggagaatgattaggcagatt

SEQ ID NO: 93280 - DNA, 25 bp, Probe Sequence
actcaagcatagaagaatcgtagga

SEQ ID NO: 93281 - DNA, 25 bp, Probe Sequence
ctcaagcatagaagaatcgtaggag

SEQ ID NO: 93282 - DNA, 25 bp, Probe Sequence
aagccttcatattcatcaactcatg

SEQ ID NO: 93283 - DNA, 25 bp, Probe Sequence
catagaagaatcgtaggagaatgat

SEQ ID NO: 93284 - DNA, 25 bp, Probe Sequence
aagaatcgtaggagaatgattaggc

SEQ ID NO: 93285 - DNA, 25 bp, Probe Sequence
aacgtgcatgtaataagactcctat

SEQ ID NO: 93286 - DNA, 25 bp, Probe Sequence
gaatcgtaggagaatgattaggcag

SEQ ID NO: 93287 - DNA, 25 bp, Probe Sequence
aaacgaactcaagcatagaagaatc

SEQ ID NO: 93288 - DNA, 25 bp, Probe Sequence
aatcgtaggagaatgattaggcaga

SEQ ID NO: 93289 - DNA, 25 bp, Probe Sequence
agaatcgtaggagaatgattaggca

SEQ ID NO: 93290 - DNA, 25 bp, Probe Sequence
cgtaggagaatgattaggcagattt

SEQ ID NO: 93291 - DNA, 25 bp, Probe Sequence
tgtatatcgggaaggaatgtaaacg

SEQ ID NO: 93292 - DNA, 25 bp, Probe Sequence
acgtgcatgtaataagactcctata

SEQ ID NO: 93293 - DNA, 25 bp, Probe Sequence
catgaacattacacacatattccaa

SEQ ID NO: 93294 - DNA, 25 bp, Probe Sequence
tacttggctatttctctgtctcctt

SEQ ID NO: 93295 - DNA, 25 bp, Probe Sequence
gtatttcaataaacacctggcaaga

SEQ ID NO: 93296 - DNA, 25 bp, Probe Sequence
atttcaataaacacctggcaagaat

SEQ ID NO: 93297 - DNA, 25 bp, Probe Sequence
tttcaataaacacctggcaagaata

SEQ ID NO: 93298 - DNA, 25 bp, Probe Sequence
tatttcaataaacacctggcaagaa

SEQ ID NO: 93299 - DNA, 25 bp, Probe Sequence
ttcaataaacacctggcaagaatat

SEQ ID NO: 93300 - DNA, 25 bp, Probe Sequence
actcccatttgaattgatttacagt

SEQ ID NO: 93301 - DNA, 25 bp, Probe Sequence
tttatcagcccatagtcaccaagag

SEQ ID NO: 93302 - DNA, 25 bp, Probe Sequence
ctcccatttgaattgatttacagtt

SEQ ID NO: 93303 - DNA, 25 bp, Probe Sequence
aactcccatttgaattgatttacag

SEQ ID NO: 93304 - DNA, 25 bp, Probe Sequence
ctttatcagcccatagtcaccaaga

SEQ ID NO: 93305 - DNA, 25 bp, Probe Sequence
ccctggacttctatttattactgat

SEQ ID NO: 93306 - DNA, 25 bp, Probe Sequence
cagaaagatacttcctcatgttcat

SEQ ID NO: 93307 - DNA, 25 bp, Probe Sequence
acagaaagatacttcctcatgttca

SEQ ID NO: 93308 - DNA, 25 bp, Probe Sequence
tcccatttgaattgatttacagttt

SEQ ID NO: 93309 - DNA, 25 bp, Probe Sequence
tcaataaacacctggcaagaatatt

SEQ ID NO: 93310 - DNA, 25 bp, Probe Sequence
ggtatttcaataaacacctggcaag

SEQ ID NO: 93311 - DNA, 25 bp, Probe Sequence
ttatcagcccatagtcaccaagaga

SEQ ID NO: 93312 - DNA, 25 bp, Probe Sequence
taataaacagacatgcaagcacttt

SEQ ID NO: 93313 - DNA, 25 bp, Probe Sequence
ataataaacagacatgcaagcactt

SEQ ID NO: 93314 - DNA, 25 bp, Probe Sequence
cataataaacagacatgcaagcact

SEQ ID NO: 93315 - DNA, 25 bp, Probe Sequence
tcataataaacagacatgcaagcac

SEQ ID NO: 93316 - DNA, 25 bp, Probe Sequence
agatacttcctcatgttcatttgaa

SEQ ID NO: 93317 - DNA, 25 bp, Probe Sequence
aagatacttcctcatgttcatttga

SEQ ID NO: 93318 - DNA, 25 bp, Probe Sequence
agaaagatacttcctcatgttcatt

SEQ ID NO: 93319 - DNA, 25 bp, Probe Sequence
tacagagaagaaggcagaatggata

SEQ ID NO: 93320 - DNA, 25 bp, Probe Sequence
tcctcctcatatctacttacacacc

SEQ ID NO: 93321 - DNA, 25 bp, Probe Sequence
ttcctcctcatatctacttacacac

SEQ ID NO: 93322 - DNA, 25 bp, Probe Sequence
gttcctcctcatatctacttacaca

SEQ ID NO: 93323 - DNA, 25 bp, Probe Sequence
atacacaagtgatataggcttctgc

SEQ ID NO: 93324 - DNA, 25 bp, Probe Sequence
gagaagaaggcagaatggataggaa

SEQ ID NO: 93325 - DNA, 25 bp, Probe Sequence
acagagaagaaggcagaatggatag

SEQ ID NO: 93326 - DNA, 25 bp, Probe Sequence
gaagtacagagaagaaggcagaatg

SEQ ID NO: 93327 - DNA, 25 bp, Probe Sequence
agaagtacagagaagaaggcagaat

SEQ ID NO: 93328 - DNA, 25 bp, Probe Sequence
agaagaaggcagaatggataggaac

SEQ ID NO: 93329 - DNA, 25 bp, Probe Sequence
tgttcctcctcatatctacttacac

SEQ ID NO: 93330 - DNA, 25 bp, Probe Sequence
aatacacaagtgatataggcttctg

SEQ ID NO: 93331 - DNA, 25 bp, Probe Sequence
gagaagtacagagaagaaggcagaa

SEQ ID NO: 93332 - DNA, 25 bp, Probe Sequence
cagagaagaaggcagaatggatagg

SEQ ID NO: 93333 - DNA, 25 bp, Probe Sequence
agaagactgagaagtacagagaaga

SEQ ID NO: 93334 - DNA, 25 bp, Probe Sequence
cagaagactgagaagtacagagaag

SEQ ID NO: 93335 - DNA, 25 bp, Probe Sequence
aagactgagaagtacagagaagaag

SEQ ID NO: 93336 - DNA, 25 bp, Probe Sequence
gaagactgagaagtacagagaagaa

SEQ ID NO: 93337 - DNA, 25 bp, Probe Sequence
agagaagaaggcagaatggatagga

SEQ ID NO: 93338 - DNA, 25 bp, Probe Sequence
atgttcctcctcatatctacttaca

SEQ ID NO: 93339 - DNA, 25 bp, Probe Sequence
gtacagagaagaaggcagaatggat

SEQ ID NO: 93340 - DNA, 25 bp, Probe Sequence
agactgagaagtacagagaagaagg

SEQ ID NO: 93341 - DNA, 25 bp, Probe Sequence
aagtacagagaagaaggcagaatgg

SEQ ID NO: 93342 - DNA, 25 bp, Probe Sequence
aatgttcctcctcatatctacttac

SEQ ID NO: 93343 - DNA, 25 bp, Probe Sequence
tgataactgagtaaggtgaggagat

SEQ ID NO: 93344 - DNA, 25 bp, Probe Sequence
ggaggtatgtgataactgagtaagg

SEQ ID NO: 93345 - DNA, 25 bp, Probe Sequence
ggtatgtgataactgagtaaggtga

SEQ ID NO: 93346 - DNA, 25 bp, Probe Sequence
aggtatgtgataactgagtaaggtg

SEQ ID NO: 93347 - DNA, 25 bp, Probe Sequence
gataactgagtaaggtgaggagatt

SEQ ID NO: 93348 - DNA, 25 bp, Probe Sequence
atgtgataactgagtaaggtgagga

SEQ ID NO: 93349 - DNA, 25 bp, Probe Sequence
tatgtgataactgagtaaggtgagg

SEQ ID NO: 93350 - DNA, 25 bp, Probe Sequence
gaggtatgtgataactgagtaaggt

SEQ ID NO: 93351 - DNA, 25 bp, Probe Sequence
tggaggtatgtgataactgagtaag

SEQ ID NO: 93352 - DNA, 25 bp, Probe Sequence
gtgataactgagtaaggtgaggaga

SEQ ID NO: 93353 - DNA, 25 bp, Probe Sequence
ttggaggtatgtgataactgagtaa

SEQ ID NO: 93354 - DNA, 25 bp, Probe Sequence
tgtgataactgagtaaggtgaggag

SEQ ID NO: 93355 - DNA, 25 bp, Probe Sequence
gtatgtgataactgagtaaggtgag

SEQ ID NO: 93356 - DNA, 25 bp, Probe Sequence
tgattgtgatgttgcctggtctata

SEQ ID NO: 93357 - DNA, 25 bp, Probe Sequence
taactgagtaaggtgaggagattaa

SEQ ID NO: 93358 - DNA, 25 bp, Probe Sequence
tgccttatgactattagaatatgcc

SEQ ID NO: 93359 - DNA, 25 bp, Probe Sequence
ataactgagtaaggtgaggagatta

SEQ ID NO: 93360 - DNA, 25 bp, Probe Sequence
gccttatgactattagaatatgcct

SEQ ID NO: 93361 - DNA, 25 bp, Probe Sequence
acacattgccttatgactattagaa

SEQ ID NO: 93362 - DNA, 25 bp, Probe Sequence
aacacattgccttatgactattaga

SEQ ID NO: 93363 - DNA, 25 bp, Probe Sequence
ggaagcacatagatacatcttacaa

SEQ ID NO: 93364 - DNA, 25 bp, Probe Sequence
gcacatagatacatcttacaagttg

SEQ ID NO: 93365 - DNA, 25 bp, Probe Sequence
agcacatagatacatcttacaagtt

SEQ ID NO: 93366 - DNA, 25 bp, Probe Sequence
aagcacatagatacatcttacaagt

SEQ ID NO: 93367 - DNA, 25 bp, Probe Sequence
cccagtataaatcaggaatgtttgt

SEQ ID NO: 93368 - DNA, 25 bp, Probe Sequence
ttctataacttgtgaacaggtactt

SEQ ID NO: 93369 - DNA, 25 bp, Probe Sequence
aaaccacttgggaactatactcttt

SEQ ID NO: 93370 - DNA, 25 bp, Probe Sequence
gaaaccacttgggaactatactctt

SEQ ID NO: 93371 - DNA, 25 bp, Probe Sequence
aggtttctataacttgtgaacaggt

SEQ ID NO: 93372 - DNA, 25 bp, Probe Sequence
caggtttctataacttgtgaacagg

SEQ ID NO: 93373 - DNA, 25 bp, Probe Sequence
ccaggtttctataacttgtgaacag

SEQ ID NO: 93374 - DNA, 25 bp, Probe Sequence
tgagaaaccacttgggaactatact

SEQ ID NO: 93375 - DNA, 25 bp, Probe Sequence
agaaaccacttgggaactatactct

SEQ ID NO: 93376 - DNA, 25 bp, Probe Sequence
gccaggtttctataacttgtgaaca

SEQ ID NO: 93377 - DNA, 25 bp, Probe Sequence
ccagtataaatcaggaatgtttgtg

SEQ ID NO: 93378 - DNA, 25 bp, Probe Sequence
ataacttgtgaacaggtactttggg

SEQ ID NO: 93379 - DNA, 25 bp, Probe Sequence
ttctattgtggtaagctcattggca

SEQ ID NO: 93380 - DNA, 25 bp, Probe Sequence
gagaaaccacttgggaactatactc

SEQ ID NO: 93381 - DNA, 25 bp, Probe Sequence
ggtttctataacttgtgaacaggta

SEQ ID NO: 93382 - DNA, 25 bp, Probe Sequence
tataacttgtgaacaggtactttgg

SEQ ID NO: 93383 - DNA, 25 bp, Probe Sequence
cttgtgaacaggtactttgggaaat

SEQ ID NO: 93384 - DNA, 25 bp, Probe Sequence
ttaaattgtaaaccaggactactgc

SEQ ID NO: 93385 - DNA, 25 bp, Probe Sequence
gaacaggtactttgggaaatgactc

SEQ ID NO: 93386 - DNA, 25 bp, Probe Sequence
ttgtgaacaggtactttgggaaatg

SEQ ID NO: 93387 - DNA, 25 bp, Probe Sequence
taacttgtgaacaggtactttggga

SEQ ID NO: 93388 - DNA, 25 bp, Probe Sequence
tctattgtggtaagctcattggcag

SEQ ID NO: 93389 - DNA, 25 bp, Probe Sequence
atttctattgtggtaagctcattgg

SEQ ID NO: 93390 - DNA, 25 bp, Probe Sequence
tgaacaggtactttgggaaatgact

SEQ ID NO: 93391 - DNA, 25 bp, Probe Sequence
gcattattcttctgttggattctga

SEQ ID NO: 93392 - DNA, 25 bp, Probe Sequence
cacttgaacagagaattggtagaga

SEQ ID NO: 93393 - DNA, 25 bp, Probe Sequence
acttgaacagagaattggtagagaa

SEQ ID NO: 93394 - DNA, 25 bp, Probe Sequence
gagtcttccacttgaacagagaatt

SEQ ID NO: 93395 - DNA, 25 bp, Probe Sequence
agtcttccacttgaacagagaattg

SEQ ID NO: 93396 - DNA, 25 bp, Probe Sequence
tgagtcttccacttgaacagagaat

SEQ ID NO: 93397 - DNA, 25 bp, Probe Sequence
ttgagtcttccacttgaacagagaa

SEQ ID NO: 93398 - DNA, 25 bp, Probe Sequence
ttccacttgaacagagaattggtag

SEQ ID NO: 93399 - DNA, 25 bp, Probe Sequence
cttccacttgaacagagaattggta

SEQ ID NO: 93400 - DNA, 25 bp, Probe Sequence
tgcattattcttctgttggattctg

SEQ ID NO: 93401 - DNA, 25 bp, Probe Sequence
ccacttgaacagagaattggtagag

SEQ ID NO: 93402 - DNA, 25 bp, Probe Sequence
cattattcttctgttggattctgat

SEQ ID NO: 93403 - DNA, 25 bp, Probe Sequence
ttgcattattcttctgttggattct

SEQ ID NO: 93404 - DNA, 25 bp, Probe Sequence
tccacttgaacagagaattggtaga

SEQ ID NO: 93405 - DNA, 25 bp, Probe Sequence
acccattagaattgataccagtgaa

SEQ ID NO: 93406 - DNA, 25 bp, Probe Sequence
aacccattagaattgataccagtga

SEQ ID NO: 93407 - DNA, 25 bp, Probe Sequence
tgaacccattagaattgataccagt

SEQ ID NO: 93408 - DNA, 25 bp, Probe Sequence
actgaacccattagaattgatacca

SEQ ID NO: 93409 - DNA, 25 bp, Probe Sequence
tgaacagagaattggtagagaaagt

SEQ ID NO: 93410 - DNA, 25 bp, Probe Sequence
gaacccattagaattgataccagtg

SEQ ID NO: 93411 - DNA, 25 bp, Probe Sequence
gactgaacccattagaattgatacc

SEQ ID NO: 93412 - DNA, 25 bp, Probe Sequence
ggactgaacccattagaattgatac

SEQ ID NO: 93413 - DNA, 25 bp, Probe Sequence
ggcaggcttaaataaaggactaaat

SEQ ID NO: 93414 - DNA, 25 bp, Probe Sequence
gggcaggcttaaataaaggactaaa

SEQ ID NO: 93415 - DNA, 25 bp, Probe Sequence
attagagcaggattgaaggtattgt

SEQ ID NO: 93416 - DNA, 25 bp, Probe Sequence
tgattagagcaggattgaaggtatt

SEQ ID NO: 93417 - DNA, 25 bp, Probe Sequence
ttagagcaggattgaaggtattgtg

SEQ ID NO: 93418 - DNA, 25 bp, Probe Sequence
gattagagcaggattgaaggtattg

SEQ ID NO: 93419 - DNA, 25 bp, Probe Sequence
tagagcaggattgaaggtattgtga

SEQ ID NO: 93420 - DNA, 25 bp, Probe Sequence
ttcaagcagaagatgtgattaggac

SEQ ID NO: 93421 - DNA, 25 bp, Probe Sequence
ctgattagagcaggattgaaggtat

SEQ ID NO: 93422 - DNA, 25 bp, Probe Sequence
tctgattagagcaggattgaaggta

SEQ ID NO: 93423 - DNA, 25 bp, Probe Sequence
agagcaggattgaaggtattgtgac

SEQ ID NO: 93424 - DNA, 25 bp, Probe Sequence
ggtattgtgacctgctactgaatag

SEQ ID NO: 93425 - DNA, 25 bp, Probe Sequence
tcaagcagaagatgtgattaggacc

SEQ ID NO: 93426 - DNA, 25 bp, Probe Sequence
catctgagtgtagtcctgtctttag

SEQ ID NO: 93427 - DNA, 25 bp, Probe Sequence
ttctttctattgactatgggtggag

SEQ ID NO: 93428 - DNA, 25 bp, Probe Sequence
tagcctgtaaatccctatgaaactt

SEQ ID NO: 93429 - DNA, 25 bp, Probe Sequence
tttctttctattgactatgggtgga

SEQ ID NO: 93430 - DNA, 25 bp, Probe Sequence
agcctgtaaatccctatgaaacttg

SEQ ID NO: 93431 - DNA, 25 bp, Probe Sequence
ctttctttctattgactatgggtgg

SEQ ID NO: 93432 - DNA, 25 bp, Probe Sequence
cctttctttctattgactatgggtg

SEQ ID NO: 93433 - DNA, 25 bp, Probe Sequence
ctcaattcctcctgaagttatggca

SEQ ID NO: 93434 - DNA, 25 bp, Probe Sequence
tctttagggagtataagccaggaat

SEQ ID NO: 93435 - DNA, 25 bp, Probe Sequence
ctttagggagtataagccaggaatt

SEQ ID NO: 93436 - DNA, 25 bp, Probe Sequence
ctagcctgtaaatccctatgaaact

SEQ ID NO: 93437 - DNA, 25 bp, Probe Sequence
tctagcctgtaaatccctatgaaac

SEQ ID NO: 93438 - DNA, 25 bp, Probe Sequence
aattcctcctgaagttatggcagag

SEQ ID NO: 93439 - DNA, 25 bp, Probe Sequence
ggacctcttaattactagacctcag

SEQ ID NO: 93440 - DNA, 25 bp, Probe Sequence
gacctcttaattactagacctcagt

SEQ ID NO: 93441 - DNA, 25 bp, Probe Sequence
aataaataaataggctgggtgtggt

SEQ ID NO: 93442 - DNA, 25 bp, Probe Sequence
aaataaataaataggctgggtgtgg

SEQ ID NO: 93443 - DNA, 25 bp, Probe Sequence
ataaataaataggctgggtgtggtg

SEQ ID NO: 93444 - DNA, 25 bp, Probe Sequence
cactcagaaagactaaaggaaatgt

SEQ ID NO: 93445 - DNA, 25 bp, Probe Sequence
cccaaagccagaaactaaacaaatt

SEQ ID NO: 93446 - DNA, 25 bp, Probe Sequence
tcactcagaaagactaaaggaaatg

SEQ ID NO: 93447 - DNA, 25 bp, Probe Sequence
tcccaaagccagaaactaaacaaat

SEQ ID NO: 93448 - DNA, 25 bp, Probe Sequence
ctcactcagaaagactaaaggaaat

SEQ ID NO: 93449 - DNA, 25 bp, Probe Sequence
aggacctcactcagaaagactaaag

SEQ ID NO: 93450 - DNA, 25 bp, Probe Sequence
ttcccaaagccagaaactaaacaaa

SEQ ID NO: 93451 - DNA, 25 bp, Probe Sequence
caggacctcactcagaaagactaaa

SEQ ID NO: 93452 - DNA, 25 bp, Probe Sequence
cttcccaaagccagaaactaaacaa

SEQ ID NO: 93453 - DNA, 25 bp, Probe Sequence
cctcactcagaaagactaaaggaaa

SEQ ID NO: 93454 - DNA, 25 bp, Probe Sequence
gggacctcttaattactagacctca

SEQ ID NO: 93455 - DNA, 25 bp, Probe Sequence
atcaggacctcactcagaaagacta

SEQ ID NO: 93456 - DNA, 25 bp, Probe Sequence
actcagaaagactaaaggaaatgta

SEQ ID NO: 93457 - DNA, 25 bp, Probe Sequence
acctcactcagaaagactaaaggaa

SEQ ID NO: 93458 - DNA, 25 bp, Probe Sequence
taaataaataggctgggtgtggtgg

SEQ ID NO: 93459 - DNA, 25 bp, Probe Sequence
tcaggacctcactcagaaagactaa

SEQ ID NO: 93460 - DNA, 25 bp, Probe Sequence
gacctcactcagaaagactaaagga

SEQ ID NO: 93461 - DNA, 25 bp, Probe Sequence
cgggacctcttaattactagacctc

SEQ ID NO: 93462 - DNA, 25 bp, Probe Sequence
gaatcaggacctcactcagaaagac

SEQ ID NO: 93463 - DNA, 25 bp, Probe Sequence
ggacctcttaattactagacctcag

SEQ ID NO: 93464 - DNA, 25 bp, Probe Sequence
gacctcttaattactagacctcagt

SEQ ID NO: 93465 - DNA, 25 bp, Probe Sequence
aataaataaataggctgggtgtggt

SEQ ID NO: 93466 - DNA, 25 bp, Probe Sequence
aaataaataaataggctgggtgtgg

SEQ ID NO: 93467 - DNA, 25 bp, Probe Sequence
ataaataaataggctgggtgtggtg

SEQ ID NO: 93468 - DNA, 25 bp, Probe Sequence
cactcagaaagactaaaggaaatgt

SEQ ID NO: 93469 - DNA, 25 bp, Probe Sequence
cccaaagccagaaactaaacaaatt

SEQ ID NO: 93470 - DNA, 25 bp, Probe Sequence
tcactcagaaagactaaaggaaatg

SEQ ID NO: 93471 - DNA, 25 bp, Probe Sequence
tcccaaagccagaaactaaacaaat

SEQ ID NO: 93472 - DNA, 25 bp, Probe Sequence
ctcactcagaaagactaaaggaaat

SEQ ID NO: 93473 - DNA, 25 bp, Probe Sequence
aggacctcactcagaaagactaaag

SEQ ID NO: 93474 - DNA, 25 bp, Probe Sequence
ttcccaaagccagaaactaaacaaa

SEQ ID NO: 93475 - DNA, 25 bp, Probe Sequence
caggacctcactcagaaagactaaa

SEQ ID NO: 93476 - DNA, 25 bp, Probe Sequence
cttcccaaagccagaaactaaacaa

SEQ ID NO: 93477 - DNA, 25 bp, Probe Sequence
cctcactcagaaagactaaaggaaa

SEQ ID NO: 93478 - DNA, 25 bp, Probe Sequence
gggacctcttaattactagacctca

SEQ ID NO: 93479 - DNA, 25 bp, Probe Sequence
atcaggacctcactcagaaagacta

SEQ ID NO: 93480 - DNA, 25 bp, Probe Sequence
actcagaaagactaaaggaaatgta

SEQ ID NO: 93481 - DNA, 25 bp, Probe Sequence
acctcactcagaaagactaaaggaa

SEQ ID NO: 93482 - DNA, 25 bp, Probe Sequence
taaataaataggctgggtgtggtgg

SEQ ID NO: 93483 - DNA, 25 bp, Probe Sequence
tcaggacctcactcagaaagactaa

SEQ ID NO: 93484 - DNA, 25 bp, Probe Sequence
gacctcactcagaaagactaaagga

SEQ ID NO: 93485 - DNA, 25 bp, Probe Sequence
cgggacctcttaattactagacctc

SEQ ID NO: 93486 - DNA, 25 bp, Probe Sequence
gaatcaggacctcactcagaaagac

SEQ ID NO: 93487 - DNA, 25 bp, Probe Sequence
ctaatagacaagtgtaatctcacca

SEQ ID NO: 93488 - DNA, 25 bp, Probe Sequence
tcagttaatgcttatgctttattgc

SEQ ID NO: 93489 - DNA, 25 bp, Probe Sequence
tctaatagacaagtgtaatctcacc

SEQ ID NO: 93490 - DNA, 25 bp, Probe Sequence
tgtaatctcaccataatacatcgtg

SEQ ID NO: 93491 - DNA, 25 bp, Probe Sequence
gtgtaatctcaccataatacatcgt

SEQ ID NO: 93492 - DNA, 25 bp, Probe Sequence
agtgtaatctcaccataatacatcg

SEQ ID NO: 93493 - DNA, 25 bp, Probe Sequence
gacaagtgtaatctcaccataatac

SEQ ID NO: 93494 - DNA, 25 bp, Probe Sequence
agacaagtgtaatctcaccataata

SEQ ID NO: 93495 - DNA, 25 bp, Probe Sequence
tagacaagtgtaatctcaccataat

SEQ ID NO: 93496 - DNA, 25 bp, Probe Sequence
atagacaagtgtaatctcaccataa

SEQ ID NO: 93497 - DNA, 25 bp, Probe Sequence
aatagacaagtgtaatctcaccata

SEQ ID NO: 93498 - DNA, 25 bp, Probe Sequence
taatagacaagtgtaatctcaccat

SEQ ID NO: 93499 - DNA, 25 bp, Probe Sequence
aaatgttagtaaatcagccaggcat

SEQ ID NO: 93500 - DNA, 25 bp, Probe Sequence
acaagtgtaatctcaccataataca

SEQ ID NO: 93501 - DNA, 25 bp, Probe Sequence
agccgaggaagatagatcacttgag

SEQ ID NO: 93502 - DNA, 25 bp, Probe Sequence
gagccgaggaagatagatcacttga

SEQ ID NO: 93503 - DNA, 25 bp, Probe Sequence
aatgttagtaaatcagccaggcatg

SEQ ID NO: 93504 - DNA, 25 bp, Probe Sequence
ctagatctcagttaatgcttatgct

SEQ ID NO: 93505 - DNA, 25 bp, Probe Sequence
tctagatctcagttaatgcttatgc

SEQ ID NO: 93506 - DNA, 25 bp, Probe Sequence
agtagtctagatctcagttaatgct

SEQ ID NO: 93507 - DNA, 25 bp, Probe Sequence
tagatctcagttaatgcttatgctt

SEQ ID NO: 93508 - DNA, 25 bp, Probe Sequence
gatctcagttaatgcttatgcttta

SEQ ID NO: 93509 - DNA, 25 bp, Probe Sequence
ctcagttaatgcttatgctttattg

SEQ ID NO: 93510 - DNA, 25 bp, Probe Sequence
gtagtctagatctcagttaatgctt

SEQ ID NO: 93511 - DNA, 25 bp, Probe Sequence
gttatactagactccattgtgcctt

SEQ ID NO: 93512 - DNA, 25 bp, Probe Sequence
tactagactccattgtgccttacta

SEQ ID NO: 93513 - DNA, 25 bp, Probe Sequence
tatactagactccattgtgccttac

SEQ ID NO: 93514 - DNA, 25 bp, Probe Sequence
actagactccattgtgccttactat

SEQ ID NO: 93515 - DNA, 25 bp, Probe Sequence
atactagactccattgtgccttact

SEQ ID NO: 93516 - DNA, 25 bp, Probe Sequence
atgttatactagactccattgtgcc

SEQ ID NO: 93517 - DNA, 25 bp, Probe Sequence
tagactccattgtgccttactatat

SEQ ID NO: 93518 - DNA, 25 bp, Probe Sequence
ctagactccattgtgccttactata

SEQ ID NO: 93519 - DNA, 25 bp, Probe Sequence
tgttatactagactccattgtgcct

SEQ ID NO: 93520 - DNA, 25 bp, Probe Sequence
ttatactagactccattgtgcctta

SEQ ID NO: 93521 - DNA, 25 bp, Probe Sequence
atctggatcgttatctactgactag

SEQ ID NO: 93522 - DNA, 25 bp, Probe Sequence
gatctggatcgttatctactgacta

SEQ ID NO: 93523 - DNA, 25 bp, Probe Sequence
agactccattgtgccttactatata

SEQ ID NO: 93524 - DNA, 25 bp, Probe Sequence
tatgttatactagactccattgtgc

SEQ ID NO: 93525 - DNA, 25 bp, Probe Sequence
actccattgtgccttactatatatg

SEQ ID NO: 93526 - DNA, 25 bp, Probe Sequence
gactccattgtgccttactatatat

SEQ ID NO: 93527 - DNA, 25 bp, Probe Sequence
cctatggttaatccactgtcagatc

SEQ ID NO: 93528 - DNA, 25 bp, Probe Sequence
atcctataaagagaacggtatgact

SEQ ID NO: 93529 - DNA, 25 bp, Probe Sequence
tcctataaagagaacggtatgactt

SEQ ID NO: 93530 - DNA, 25 bp, Probe Sequence
atgctctgagaaattgaatgtacct

SEQ ID NO: 93531 - DNA, 25 bp, Probe Sequence
gatgctctgagaaattgaatgtacc

SEQ ID NO: 93532 - DNA, 25 bp, Probe Sequence
tgctctgagaaattgaatgtacctt

SEQ ID NO: 93533 - DNA, 25 bp, Probe Sequence
catcctataaagagaacggtatgac

SEQ ID NO: 93534 - DNA, 25 bp, Probe Sequence
tgtgccttactatatatgggaatgt

SEQ ID NO: 93535 - DNA, 25 bp, Probe Sequence
acacaacattagcaaatcaaatcca

SEQ ID NO: 93536 - DNA, 25 bp, Probe Sequence
atcctcaacacaacattagcaaatc

SEQ ID NO: 93537 - DNA, 25 bp, Probe Sequence
aaatcctcaacacaacattagcaaa

SEQ ID NO: 93538 - DNA, 25 bp, Probe Sequence
acaacattagcaaatcaaatccagt

SEQ ID NO: 93539 - DNA, 25 bp, Probe Sequence
aatcctcaacacaacattagcaaat

SEQ ID NO: 93540 - DNA, 25 bp, Probe Sequence
cacaacattagcaaatcaaatccag

SEQ ID NO: 93541 - DNA, 25 bp, Probe Sequence
cctcaacacaacattagcaaatcaa

SEQ ID NO: 93542 - DNA, 25 bp, Probe Sequence
aacacaacattagcaaatcaaatcc

SEQ ID NO: 93543 - DNA, 25 bp, Probe Sequence
ctcaacacaacattagcaaatcaaa

SEQ ID NO: 93544 - DNA, 25 bp, Probe Sequence
tcctcaacacaacattagcaaatca

SEQ ID NO: 93545 - DNA, 25 bp, Probe Sequence
tcaacacaacattagcaaatcaaat

SEQ ID NO: 93546 - DNA, 25 bp, Probe Sequence
caacacaacattagcaaatcaaatc

SEQ ID NO: 93547 - DNA, 25 bp, Probe Sequence
caacattagcaaatcaaatccagta

SEQ ID NO: 93548 - DNA, 25 bp, Probe Sequence
aacattagcaaatcaaatccagtaa

SEQ ID NO: 93549 - DNA, 25 bp, Probe Sequence
acattagcaaatcaaatccagtaat

SEQ ID NO: 93550 - DNA, 25 bp, Probe Sequence
agtactgaccaacatatctcatgaa

SEQ ID NO: 93551 - DNA, 25 bp, Probe Sequence
aagtactgaccaacatatctcatga

SEQ ID NO: 93552 - DNA, 25 bp, Probe Sequence
aaaatcctcaacacaacattagcaa

SEQ ID NO: 93553 - DNA, 25 bp, Probe Sequence
attagcaaatcaaatccagtaatgg

SEQ ID NO: 93554 - DNA, 25 bp, Probe Sequence
gtactgaccaacatatctcatgaat

SEQ ID NO: 93555 - DNA, 25 bp, Probe Sequence
actgaccaacatatctcatgaatat

SEQ ID NO: 93556 - DNA, 25 bp, Probe Sequence
aaagtactgaccaacatatctcatg

SEQ ID NO: 93557 - DNA, 25 bp, Probe Sequence
acatatctcatgaatattcgtgcaa

SEQ ID NO: 93558 - DNA, 25 bp, Probe Sequence
aacatatctcatgaatattcgtgca

SEQ ID NO: 93559 - DNA, 25 bp, Probe Sequence
gattgacgagagatgtgttggtaat

SEQ ID NO: 93560 - DNA, 25 bp, Probe Sequence
ctaagatggctgttcagtgactaat

SEQ ID NO: 93561 - DNA, 25 bp, Probe Sequence
taagatggctgttcagtgactaatg

SEQ ID NO: 93562 - DNA, 25 bp, Probe Sequence
attgacgagagatgtgttggtaatg

SEQ ID NO: 93563 - DNA, 25 bp, Probe Sequence
aatccgataactaagatggctgttc

SEQ ID NO: 93564 - DNA, 25 bp, Probe Sequence
tcagtcataagagattaaccgagat

SEQ ID NO: 93565 - DNA, 25 bp, Probe Sequence
gtcaatccgataactaagatggctg

SEQ ID NO: 93566 - DNA, 25 bp, Probe Sequence
atcagtcataagagattaaccgaga

SEQ ID NO: 93567 - DNA, 25 bp, Probe Sequence
caatccgataactaagatggctgtt

SEQ ID NO: 93568 - DNA, 25 bp, Probe Sequence
tataacagtatgccaacatcactcc

SEQ ID NO: 93569 - DNA, 25 bp, Probe Sequence
gataactaagatggctgttcagtga

SEQ ID NO: 93570 - DNA, 25 bp, Probe Sequence
tcaatccgataactaagatggctgt

SEQ ID NO: 93571 - DNA, 25 bp, Probe Sequence
agattgacgagagatgtgttggtaa

SEQ ID NO: 93572 - DNA, 25 bp, Probe Sequence
ataactaagatggctgttcagtgac

SEQ ID NO: 93573 - DNA, 25 bp, Probe Sequence
atccgataactaagatggctgttca

SEQ ID NO: 93574 - DNA, 25 bp, Probe Sequence
agtcaatccgataactaagatggct

SEQ ID NO: 93575 - DNA, 25 bp, Probe Sequence
cagtcaatccgataactaagatggc

SEQ ID NO: 93576 - DNA, 25 bp, Probe Sequence
gcagtcaatccgataactaagatgg

SEQ ID NO: 93577 - DNA, 25 bp, Probe Sequence
gagattgacgagagatgtgttggta

SEQ ID NO: 93578 - DNA, 25 bp, Probe Sequence
actaagatggctgttcagtgactaa

SEQ ID NO: 93579 - DNA, 25 bp, Probe Sequence
aactaagatggctgttcagtgacta

SEQ ID NO: 93580 - DNA, 25 bp, Probe Sequence
taactaagatggctgttcagtgact

SEQ ID NO: 93581 - DNA, 25 bp, Probe Sequence
caagagattgacgagagatgtgttg

SEQ ID NO: 93582 - DNA, 25 bp, Probe Sequence
cgataactaagatggctgttcagtg

SEQ ID NO: 93583 - DNA, 25 bp, Probe Sequence
ttatgagaggtagaggttgaaggac

SEQ ID NO: 93584 - DNA, 25 bp, Probe Sequence
gacttcttccagtgagattagtgtt

SEQ ID NO: 93585 - DNA, 25 bp, Probe Sequence
ccattcaccgagagcctatatctag

SEQ ID NO: 93586 - DNA, 25 bp, Probe Sequence
ggcatcaccatgaacagagatatat

SEQ ID NO: 93587 - DNA, 25 bp, Probe Sequence
accattcaccgagagcctatatcta

SEQ ID NO: 93588 - DNA, 25 bp, Probe Sequence
aatgttgaatgtcttggctcagttc

SEQ ID NO: 93589 - DNA, 25 bp, Probe Sequence
gaatgttgaatgtcttggctcagtt

SEQ ID NO: 93590 - DNA, 25 bp, Probe Sequence
aggcatcaccatgaacagagatata

SEQ ID NO: 93591 - DNA, 25 bp, Probe Sequence
taggcatcaccatgaacagagatat

SEQ ID NO: 93592 - DNA, 25 bp, Probe Sequence
gcatcaccatgaacagagatatatt

SEQ ID NO: 93593 - DNA, 25 bp, Probe Sequence
gaggacttcttccagtgagattagt

SEQ ID NO: 93594 - DNA, 25 bp, Probe Sequence
gtgtttatgagaggtagaggttgaa

SEQ ID NO: 93595 - DNA, 25 bp, Probe Sequence
cgggagttagatgtatagagtgttt

SEQ ID NO: 93596 - DNA, 25 bp, Probe Sequence
tcgggagttagatgtatagagtgtt

SEQ ID NO: 93597 - DNA, 25 bp, Probe Sequence
ttcgggagttagatgtatagagtgt

SEQ ID NO: 93598 - DNA, 25 bp, Probe Sequence
ttgtcctccttgttatttctgtttg

SEQ ID NO: 93599 - DNA, 25 bp, Probe Sequence
tttatgagaggtagaggttgaagga

SEQ ID NO: 93600 - DNA, 25 bp, Probe Sequence
gtttatgagaggtagaggttgaagg

SEQ ID NO: 93601 - DNA, 25 bp, Probe Sequence
tgtttatgagaggtagaggttgaag

SEQ ID NO: 93602 - DNA, 25 bp, Probe Sequence
tgtcctccttgttatttctgtttgt

SEQ ID NO: 93603 - DNA, 25 bp, Probe Sequence
tttcgggagttagatgtatagagtg

SEQ ID NO: 93604 - DNA, 25 bp, Probe Sequence
agtgtttatgagaggtagaggttga

SEQ ID NO: 93605 - DNA, 25 bp, Probe Sequence
aggacttcttccagtgagattagtg

SEQ ID NO: 93606 - DNA, 25 bp, Probe Sequence
tagtgtttatgagaggtagaggttg

SEQ ID NO: 93607 - DNA, 25 bp, Probe Sequence
ttatgagaggtagaggttgaaggac

SEQ ID NO: 93608 - DNA, 25 bp, Probe Sequence
gacttcttccagtgagattagtgtt

SEQ ID NO: 93609 - DNA, 25 bp, Probe Sequence
ccattcaccgagagcctatatctag

SEQ ID NO: 93610 - DNA, 25 bp, Probe Sequence
ggcatcaccatgaacagagatatat

SEQ ID NO: 93611 - DNA, 25 bp, Probe Sequence
accattcaccgagagcctatatcta

SEQ ID NO: 93612 - DNA, 25 bp, Probe Sequence
aatgttgaatgtcttggctcagttc

SEQ ID NO: 93613 - DNA, 25 bp, Probe Sequence
gaatgttgaatgtcttggctcagtt

SEQ ID NO: 93614 - DNA, 25 bp, Probe Sequence
aggcatcaccatgaacagagatata

SEQ ID NO: 93615 - DNA, 25 bp, Probe Sequence
taggcatcaccatgaacagagatat

SEQ ID NO: 93616 - DNA, 25 bp, Probe Sequence
gcatcaccatgaacagagatatatt

SEQ ID NO: 93617 - DNA, 25 bp, Probe Sequence
gaggacttcttccagtgagattagt

SEQ ID NO: 93618 - DNA, 25 bp, Probe Sequence
gtgtttatgagaggtagaggttgaa

SEQ ID NO: 93619 - DNA, 25 bp, Probe Sequence
cgggagttagatgtatagagtgttt

SEQ ID NO: 93620 - DNA, 25 bp, Probe Sequence
tcgggagttagatgtatagagtgtt

SEQ ID NO: 93621 - DNA, 25 bp, Probe Sequence
ttcgggagttagatgtatagagtgt

SEQ ID NO: 93622 - DNA, 25 bp, Probe Sequence
ttgtcctccttgttatttctgtttg

SEQ ID NO: 93623 - DNA, 25 bp, Probe Sequence
tttatgagaggtagaggttgaagga

SEQ ID NO: 93624 - DNA, 25 bp, Probe Sequence
gtttatgagaggtagaggttgaagg

SEQ ID NO: 93625 - DNA, 25 bp, Probe Sequence
tgtttatgagaggtagaggttgaag

SEQ ID NO: 93626 - DNA, 25 bp, Probe Sequence
tgtcctccttgttatttctgtttgt

SEQ ID NO: 93627 - DNA, 25 bp, Probe Sequence
tttcgggagttagatgtatagagtg

SEQ ID NO: 93628 - DNA, 25 bp, Probe Sequence
agtgtttatgagaggtagaggttga

SEQ ID NO: 93629 - DNA, 25 bp, Probe Sequence
aggacttcttccagtgagattagtg

SEQ ID NO: 93630 - DNA, 25 bp, Probe Sequence
tagtgtttatgagaggtagaggttg

SEQ ID NO: 93631 - DNA, 25 bp, Probe Sequence
acatctacttgcttaaattgtgggc

SEQ ID NO: 93632 - DNA, 25 bp, Probe Sequence
ttccatttcttctgcacatctactt

SEQ ID NO: 93633 - DNA, 25 bp, Probe Sequence
cttccatttcttctgcacatctact

SEQ ID NO: 93634 - DNA, 25 bp, Probe Sequence
tccatttcttctgcacatctacttg

SEQ ID NO: 93635 - DNA, 25 bp, Probe Sequence
aagaaggattgatcagagcattgtg

SEQ ID NO: 93636 - DNA, 25 bp, Probe Sequence
aatccttccatttcttctgcacatc

SEQ ID NO: 93637 - DNA, 25 bp, Probe Sequence
ttcttctgcacatctacttgcttaa

SEQ ID NO: 93638 - DNA, 25 bp, Probe Sequence
ccttccatttcttctgcacatctac

SEQ ID NO: 93639 - DNA, 25 bp, Probe Sequence
tccttccatttcttctgcacatcta

SEQ ID NO: 93640 - DNA, 25 bp, Probe Sequence
gaatccttccatttcttctgcacat

SEQ ID NO: 93641 - DNA, 25 bp, Probe Sequence
atccttccatttcttctgcacatct

SEQ ID NO: 93642 - DNA, 25 bp, Probe Sequence
ctgaatccttccatttcttctgcac

SEQ ID NO: 93643 - DNA, 25 bp, Probe Sequence
tgaatccttccatttcttctgcaca

SEQ ID NO: 93644 - DNA, 25 bp, Probe Sequence
aaagaaggattgatcagagcattgt

SEQ ID NO: 93645 - DNA, 25 bp, Probe Sequence
ctgcacatctacttgcttaaattgt

SEQ ID NO: 93646 - DNA, 25 bp, Probe Sequence
tctgcacatctacttgcttaaattg

SEQ ID NO: 93647 - DNA, 25 bp, Probe Sequence
cttctgcacatctacttgcttaaat

SEQ ID NO: 93648 - DNA, 25 bp, Probe Sequence
tcttctgcacatctacttgcttaaa

SEQ ID NO: 93649 - DNA, 25 bp, Probe Sequence
tttcttctgcacatctacttgctta

SEQ ID NO: 93650 - DNA, 25 bp, Probe Sequence
ttctgcacatctacttgcttaaatt

SEQ ID NO: 93651 - DNA, 25 bp, Probe Sequence
catctacttgcttaaattgtgggcc

SEQ ID NO: 93652 - DNA, 25 bp, Probe Sequence
atttcttctgcacatctacttgctt

SEQ ID NO: 93653 - DNA, 25 bp, Probe Sequence
tacttgcttaaattgtgggccaaag

SEQ ID NO: 93654 - DNA, 25 bp, Probe Sequence
ctacttgcttaaattgtgggccaaa

SEQ ID NO: 93655 - DNA, 25 bp, Probe Sequence
aatggaagatatttcaagtggcaac

SEQ ID NO: 93656 - DNA, 25 bp, Probe Sequence
atggaagatatttcaagtggcaacc

SEQ ID NO: 93657 - DNA, 25 bp, Probe Sequence
caaatggaagatatttcaagtggca

SEQ ID NO: 93658 - DNA, 25 bp, Probe Sequence
aaatggaagatatttcaagtggcaa

SEQ ID NO: 93659 - DNA, 25 bp, Probe Sequence
ctgtcgctacttgtcttgcttatgg

SEQ ID NO: 93660 - DNA, 25 bp, Probe Sequence
cctgtcgctacttgtcttgcttatg

SEQ ID NO: 93661 - DNA, 25 bp, Probe Sequence
tcctgtcgctacttgtcttgcttat

SEQ ID NO: 93662 - DNA, 25 bp, Probe Sequence
ccaaatggaagatatttcaagtggc

SEQ ID NO: 93663 - DNA, 25 bp, Probe Sequence
ctacttgtcttgcttatggcatgag

SEQ ID NO: 93664 - DNA, 25 bp, Probe Sequence
tccaaatggaagatatttcaagtgg

SEQ ID NO: 93665 - DNA, 25 bp, Probe Sequence
tggaagatatttcaagtggcaaccc

SEQ ID NO: 93666 - DNA, 25 bp, Probe Sequence
aagatatttcaagtggcaacccgtc

SEQ ID NO: 93667 - DNA, 25 bp, Probe Sequence
gtcctgtcgctacttgtcttgctta

SEQ ID NO: 93668 - DNA, 25 bp, Probe Sequence
gaagatatttcaagtggcaacccgt

SEQ ID NO: 93669 - DNA, 25 bp, Probe Sequence
tacttgtcttgcttatggcatgagg

SEQ ID NO: 93670 - DNA, 25 bp, Probe Sequence
acatcccagcaagtctccttttata

SEQ ID NO: 93671 - DNA, 25 bp, Probe Sequence
cttgtgtcctgtcgctacttgtctt

SEQ ID NO: 93672 - DNA, 25 bp, Probe Sequence
atccaaatggaagatatttcaagtg

SEQ ID NO: 93673 - DNA, 25 bp, Probe Sequence
cagcaagtctccttttataacatgg

SEQ ID NO: 93674 - DNA, 25 bp, Probe Sequence
ccagcaagtctccttttataacatg

SEQ ID NO: 93675 - DNA, 25 bp, Probe Sequence
atcccagcaagtctccttttataac

SEQ ID NO: 93676 - DNA, 25 bp, Probe Sequence
catcccagcaagtctccttttataa

SEQ ID NO: 93677 - DNA, 25 bp, Probe Sequence
cccagcaagtctccttttataacat

SEQ ID NO: 93678 - DNA, 25 bp, Probe Sequence
ttgtgtcctgtcgctacttgtcttg

SEQ ID NO: 93679 - DNA, 25 bp, Probe Sequence
ttatcttcattctcacactgacgtt

SEQ ID NO: 93680 - DNA, 25 bp, Probe Sequence
tatcttcattctcacactgacgttc

SEQ ID NO: 93681 - DNA, 25 bp, Probe Sequence
gtttatcttcattctcacactgacg

SEQ ID NO: 93682 - DNA, 25 bp, Probe Sequence
ggtttatcttcattctcacactgac

SEQ ID NO: 93683 - DNA, 25 bp, Probe Sequence
cggtttatcttcattctcacactga

SEQ ID NO: 93684 - DNA, 25 bp, Probe Sequence
atcttcattctcacactgacgttct

SEQ ID NO: 93685 - DNA, 25 bp, Probe Sequence
tcttcattctcacactgacgttctg

SEQ ID NO: 93686 - DNA, 25 bp, Probe Sequence
tttatcttcattctcacactgacgt

SEQ ID NO: 93687 - DNA, 25 bp, Probe Sequence
gtgtgtctctgtgtatgtcgctctc

SEQ ID NO: 93688 - DNA, 25 bp, Probe Sequence
ccggtttatcttcattctcacactg

SEQ ID NO: 93689 - DNA, 25 bp, Probe Sequence
cttcattctcacactgacgttctgc

SEQ ID NO: 93690 - DNA, 25 bp, Probe Sequence
atcatgccttcattcctgtcgtctg

SEQ ID NO: 93691 - DNA, 25 bp, Probe Sequence
catcatgccttcattcctgtcgtct

SEQ ID NO: 93692 - DNA, 25 bp, Probe Sequence
tcctcctctgtgttctctccatgtc

SEQ ID NO: 93693 - DNA, 25 bp, Probe Sequence
ctcctcctctgtgttctctccatgt

SEQ ID NO: 93694 - DNA, 25 bp, Probe Sequence
tctgccggtttatcttcattctcac

SEQ ID NO: 93695 - DNA, 25 bp, Probe Sequence
gtctgccggtttatcttcattctca

SEQ ID NO: 93696 - DNA, 25 bp, Probe Sequence
tcattctcacactgacgttctgctt

SEQ ID NO: 93697 - DNA, 25 bp, Probe Sequence
ttcattctcacactgacgttctgct

SEQ ID NO: 93698 - DNA, 25 bp, Probe Sequence
gccaacgttactgcctttatttaaa

SEQ ID NO: 93699 - DNA, 25 bp, Probe Sequence
attctcacactgacgttctgctttc

SEQ ID NO: 93700 - DNA, 25 bp, Probe Sequence
gccggtttatcttcattctcacact

SEQ ID NO: 93701 - DNA, 25 bp, Probe Sequence
ctgccggtttatcttcattctcaca

SEQ ID NO: 93702 - DNA, 25 bp, Probe Sequence
tgccaacgttactgcctttatttaa

SEQ ID NO: 93703 - DNA, 25 bp, Probe Sequence
gcaagtcaatcattaaccaaccata

SEQ ID NO: 93704 - DNA, 25 bp, Probe Sequence
tgataccagatacagcaatgagata

SEQ ID NO: 93705 - DNA, 25 bp, Probe Sequence
ttgataccagatacagcaatgagat

SEQ ID NO: 93706 - DNA, 25 bp, Probe Sequence
aataatgtgtctaattgtgcctagc

SEQ ID NO: 93707 - DNA, 25 bp, Probe Sequence
ataatgtgtctaattgtgcctagcc

SEQ ID NO: 93708 - DNA, 25 bp, Probe Sequence
gtctaattgtgcctagccagtattg

SEQ ID NO: 93709 - DNA, 25 bp, Probe Sequence
gataccagatacagcaatgagataa

SEQ ID NO: 93710 - DNA, 25 bp, Probe Sequence
ttctgcttcaattctaatgtcacat

SEQ ID NO: 93711 - DNA, 25 bp, Probe Sequence
tgtctaattgtgcctagccagtatt

SEQ ID NO: 93712 - DNA, 25 bp, Probe Sequence
ttgcttaactgatgtacttgatgat

SEQ ID NO: 93713 - DNA, 25 bp, Probe Sequence
caagtcaatcattaaccaaccataa

SEQ ID NO: 93714 - DNA, 25 bp, Probe Sequence
taatgtgtctaattgtgcctagcca

SEQ ID NO: 93715 - DNA, 25 bp, Probe Sequence
accagatacagcaatgagataataa

SEQ ID NO: 93716 - DNA, 25 bp, Probe Sequence
acagcaatgagataataatgtgtct

SEQ ID NO: 93717 - DNA, 25 bp, Probe Sequence
ataccagatacagcaatgagataat

SEQ ID NO: 93718 - DNA, 25 bp, Probe Sequence
gtgtctaattgtgcctagccagtat

SEQ ID NO: 93719 - DNA, 25 bp, Probe Sequence
tgcttaactgatgtacttgatgata

SEQ ID NO: 93720 - DNA, 25 bp, Probe Sequence
tctatggtaatctttcaggctttgt

SEQ ID NO: 93721 - DNA, 25 bp, Probe Sequence
tgatgtacttgatgatactatgacc

SEQ ID NO: 93722 - DNA, 25 bp, Probe Sequence
ggctttgttgtttgataccagatac

SEQ ID NO: 93723 - DNA, 25 bp, Probe Sequence
aggctttgttgtttgataccagata

SEQ ID NO: 93724 - DNA, 25 bp, Probe Sequence
gtaatctttcaggctttgttgtttg

SEQ ID NO: 93725 - DNA, 25 bp, Probe Sequence
ggtaatctttcaggctttgttgttt

SEQ ID NO: 93726 - DNA, 25 bp, Probe Sequence
tatggtaatctttcaggctttgttg

SEQ ID NO: 93727 - DNA, 25 bp, Probe Sequence
ccttactcttggatgcttcttaacc

SEQ ID NO: 93728 - DNA, 25 bp, Probe Sequence
ttggagtttctgtttagggcattaa

SEQ ID NO: 93729 - DNA, 25 bp, Probe Sequence
gttggagtttctgtttagggcatta

SEQ ID NO: 93730 - DNA, 25 bp, Probe Sequence
cttactcttggatgcttcttaaccc

SEQ ID NO: 93731 - DNA, 25 bp, Probe Sequence
cccttactcttggatgcttcttaac

SEQ ID NO: 93732 - DNA, 25 bp, Probe Sequence
aattcccgcaaactataaagagcat

SEQ ID NO: 93733 - DNA, 25 bp, Probe Sequence
tggagtttctgtttagggcattaaa

SEQ ID NO: 93734 - DNA, 25 bp, Probe Sequence
ttactcttggatgcttcttaaccct

SEQ ID NO: 93735 - DNA, 25 bp, Probe Sequence
aaattcccgcaaactataaagagca

SEQ ID NO: 93736 - DNA, 25 bp, Probe Sequence
tactcttggatgcttcttaaccctc

SEQ ID NO: 93737 - DNA, 25 bp, Probe Sequence
atgaggctgttggagtttctgttta

SEQ ID NO: 93738 - DNA, 25 bp, Probe Sequence
attcccgcaaactataaagagcatg

SEQ ID NO: 93739 - DNA, 25 bp, Probe Sequence
cttacccagtcttcccttactcttg

SEQ ID NO: 93740 - DNA, 25 bp, Probe Sequence
tcccttactcttggatgcttcttaa

SEQ ID NO: 93741 - DNA, 25 bp, Probe Sequence
ttcccttactcttggatgcttctta

SEQ ID NO: 93742 - DNA, 25 bp, Probe Sequence
tgttggagtttctgtttagggcatt

SEQ ID NO: 93743 - DNA, 25 bp, Probe Sequence
ctcttggatgcttcttaaccctcag

SEQ ID NO: 93744 - DNA, 25 bp, Probe Sequence
tgaggctgttggagtttctgtttag

SEQ ID NO: 93745 - DNA, 25 bp, Probe Sequence
ctttgcttacccagtcttcccttac

SEQ ID NO: 93746 - DNA, 25 bp, Probe Sequence
ctgttggagtttctgtttagggcat

SEQ ID NO: 93747 - DNA, 25 bp, Probe Sequence
cttcccttactcttggatgcttctt

SEQ ID NO: 93748 - DNA, 25 bp, Probe Sequence
ttgttttgtttgcccctttattttg

SEQ ID NO: 93749 - DNA, 25 bp, Probe Sequence
gtttgttttgtttgcccctttattt

SEQ ID NO: 93750 - DNA, 25 bp, Probe Sequence
ttcccgcaaactataaagagcatgt

SEQ ID NO: 93751 - DNA, 25 bp, Probe Sequence
ccttactcttggatgcttcttaacc

SEQ ID NO: 93752 - DNA, 25 bp, Probe Sequence
ttggagtttctgtttagggcattaa

SEQ ID NO: 93753 - DNA, 25 bp, Probe Sequence
gttggagtttctgtttagggcatta

SEQ ID NO: 93754 - DNA, 25 bp, Probe Sequence
cttactcttggatgcttcttaaccc

SEQ ID NO: 93755 - DNA, 25 bp, Probe Sequence
cccttactcttggatgcttcttaac

SEQ ID NO: 93756 - DNA, 25 bp, Probe Sequence
aattcccgcaaactataaagagcat

SEQ ID NO: 93757 - DNA, 25 bp, Probe Sequence
tggagtttctgtttagggcattaaa

SEQ ID NO: 93758 - DNA, 25 bp, Probe Sequence
ttactcttggatgcttcttaaccct

SEQ ID NO: 93759 - DNA, 25 bp, Probe Sequence
aaattcccgcaaactataaagagca

SEQ ID NO: 93760 - DNA, 25 bp, Probe Sequence
tactcttggatgcttcttaaccctc

SEQ ID NO: 93761 - DNA, 25 bp, Probe Sequence
atgaggctgttggagtttctgttta

SEQ ID NO: 93762 - DNA, 25 bp, Probe Sequence
attcccgcaaactataaagagcatg

SEQ ID NO: 93763 - DNA, 25 bp, Probe Sequence
cttacccagtcttcccttactcttg

SEQ ID NO: 93764 - DNA, 25 bp, Probe Sequence
tcccttactcttggatgcttcttaa

SEQ ID NO: 93765 - DNA, 25 bp, Probe Sequence
ttcccttactcttggatgcttctta

SEQ ID NO: 93766 - DNA, 25 bp, Probe Sequence
tgttggagtttctgtttagggcatt

SEQ ID NO: 93767 - DNA, 25 bp, Probe Sequence
ctcttggatgcttcttaaccctcag

SEQ ID NO: 93768 - DNA, 25 bp, Probe Sequence
tgaggctgttggagtttctgtttag

SEQ ID NO: 93769 - DNA, 25 bp, Probe Sequence
ctttgcttacccagtcttcccttac

SEQ ID NO: 93770 - DNA, 25 bp, Probe Sequence
ctgttggagtttctgtttagggcat

SEQ ID NO: 93771 - DNA, 25 bp, Probe Sequence
cttcccttactcttggatgcttctt

SEQ ID NO: 93772 - DNA, 25 bp, Probe Sequence
ttgttttgtttgcccctttattttg

SEQ ID NO: 93773 - DNA, 25 bp, Probe Sequence
gtttgttttgtttgcccctttattt

SEQ ID NO: 93774 - DNA, 25 bp, Probe Sequence
ttcccgcaaactataaagagcatgt

SEQ ID NO: 93775 - DNA, 25 bp, Probe Sequence
gagtacatctacgtattagtcatcg

SEQ ID NO: 93776 - DNA, 25 bp, Probe Sequence
ggagtacatctacgtattagtcatc

SEQ ID NO: 93777 - DNA, 25 bp, Probe Sequence
gaaattctggatataacttgggcac

SEQ ID NO: 93778 - DNA, 25 bp, Probe Sequence
atgtctttaggtggaaattctggat

SEQ ID NO: 93779 - DNA, 25 bp, Probe Sequence
gtggaaattctggatataacttggg

SEQ ID NO: 93780 - DNA, 25 bp, Probe Sequence
ggtggaaattctggatataacttgg

SEQ ID NO: 93781 - DNA, 25 bp, Probe Sequence
tgtctttaggtggaaattctggata

SEQ ID NO: 93782 - DNA, 25 bp, Probe Sequence
ggaaattctggatataacttgggca

SEQ ID NO: 93783 - DNA, 25 bp, Probe Sequence
tggaaattctggatataacttgggc

SEQ ID NO: 93784 - DNA, 25 bp, Probe Sequence
aaattctggatataacttgggcacc

SEQ ID NO: 93785 - DNA, 25 bp, Probe Sequence
aggtggaaattctggatataacttg

SEQ ID NO: 93786 - DNA, 25 bp, Probe Sequence
aattctggatataacttgggcacct

SEQ ID NO: 93787 - DNA, 25 bp, Probe Sequence
gtctttaggtggaaattctggatat

SEQ ID NO: 93788 - DNA, 25 bp, Probe Sequence
catgtctttaggtggaaattctgga

SEQ ID NO: 93789 - DNA, 25 bp, Probe Sequence
attctggatataacttgggcacctc

SEQ ID NO: 93790 - DNA, 25 bp, Probe Sequence
gatataacttgggcacctcctgaag

SEQ ID NO: 93791 - DNA, 25 bp, Probe Sequence
taggtggaaattctggatataactt

SEQ ID NO: 93792 - DNA, 25 bp, Probe Sequence
ttaggtggaaattctggatataact

SEQ ID NO: 93793 - DNA, 25 bp, Probe Sequence
tataacttgggcacctcctgaagat

SEQ ID NO: 93794 - DNA, 25 bp, Probe Sequence
atataacttgggcacctcctgaaga

SEQ ID NO: 93795 - DNA, 25 bp, Probe Sequence
tctttaggtggaaattctggatata

SEQ ID NO: 93796 - DNA, 25 bp, Probe Sequence
tttaggtggaaattctggatataac

SEQ ID NO: 93797 - DNA, 25 bp, Probe Sequence
caagacccttctctagaatttccag

SEQ ID NO: 93798 - DNA, 25 bp, Probe Sequence
ctttaggtggaaattctggatataa

SEQ ID NO: 93799 - DNA, 25 bp, Probe Sequence
aagacccttctctagaatttccagc

SEQ ID NO: 93800 - DNA, 25 bp, Probe Sequence
ctggtgcgtacattctgtagagttt

SEQ ID NO: 93801 - DNA, 25 bp, Probe Sequence
aatcacttctatggacttatctgcg

SEQ ID NO: 93802 - DNA, 25 bp, Probe Sequence
tatggacttatctgcgaacttatga

SEQ ID NO: 93803 - DNA, 25 bp, Probe Sequence
atggacttatctgcgaacttatgac

SEQ ID NO: 93804 - DNA, 25 bp, Probe Sequence
ctatggacttatctgcgaacttatg

SEQ ID NO: 93805 - DNA, 25 bp, Probe Sequence
tctatggacttatctgcgaacttat

SEQ ID NO: 93806 - DNA, 25 bp, Probe Sequence
cttctatggacttatctgcgaactt

SEQ ID NO: 93807 - DNA, 25 bp, Probe Sequence
atcacttctatggacttatctgcga

SEQ ID NO: 93808 - DNA, 25 bp, Probe Sequence
ttctatggacttatctgcgaactta

SEQ ID NO: 93809 - DNA, 25 bp, Probe Sequence
aattcctcggtgatgaagtattctg

SEQ ID NO: 93810 - DNA, 25 bp, Probe Sequence
tgtgtgtgtgtgtgtgtgtataatt

SEQ ID NO: 93811 - DNA, 25 bp, Probe Sequence
ttcctcggtgatgaagtattctgta

SEQ ID NO: 93812 - DNA, 25 bp, Probe Sequence
taattcctcggtgatgaagtattct

SEQ ID NO: 93813 - DNA, 25 bp, Probe Sequence
gcttaattcctcggtgatgaagtat

SEQ ID NO: 93814 - DNA, 25 bp, Probe Sequence
gacttatctgcgaacttatgacacc

SEQ ID NO: 93815 - DNA, 25 bp, Probe Sequence
ggacttatctgcgaacttatgacac

SEQ ID NO: 93816 - DNA, 25 bp, Probe Sequence
acttctatggacttatctgcgaact

SEQ ID NO: 93817 - DNA, 25 bp, Probe Sequence
cacttctatggacttatctgcgaac

SEQ ID NO: 93818 - DNA, 25 bp, Probe Sequence
tcacttctatggacttatctgcgaa

SEQ ID NO: 93819 - DNA, 25 bp, Probe Sequence
gtgtgtgtgtgtgtgtgtgtataat

SEQ ID NO: 93820 - DNA, 25 bp, Probe Sequence
ttaattcctcggtgatgaagtattc

SEQ ID NO: 93821 - DNA, 25 bp, Probe Sequence
cttaattcctcggtgatgaagtatt

SEQ ID NO: 93822 - DNA, 25 bp, Probe Sequence
attcctcggtgatgaagtattctgt

SEQ ID NO: 93823 - DNA, 25 bp, Probe Sequence
gaacttatgacaccagaaggaacac

SEQ ID NO: 93824 - DNA, 25 bp, Probe Sequence
tggacttatctgcgaacttatgaca

SEQ ID NO: 93825 - DNA, 25 bp, Probe Sequence
tgaagtggctgaatctcattgtatt

SEQ ID NO: 93826 - DNA, 25 bp, Probe Sequence
ttgaagtggctgaatctcattgtat

SEQ ID NO: 93827 - DNA, 25 bp, Probe Sequence
cttgaagtggctgaatctcattgta

SEQ ID NO: 93828 - DNA, 25 bp, Probe Sequence
ctgggctgtctttgctatatgtata

SEQ ID NO: 93829 - DNA, 25 bp, Probe Sequence
tgggctgtctttgctatatgtataa

SEQ ID NO: 93830 - DNA, 25 bp, Probe Sequence
gtaggcttattctttggagatgtct

SEQ ID NO: 93831 - DNA, 25 bp, Probe Sequence
cagatgtaggcttattctttggaga

SEQ ID NO: 93832 - DNA, 25 bp, Probe Sequence
tgtaggcttattctttggagatgtc

SEQ ID NO: 93833 - DNA, 25 bp, Probe Sequence
atgtaggcttattctttggagatgt

SEQ ID NO: 93834 - DNA, 25 bp, Probe Sequence
gatgtaggcttattctttggagatg

SEQ ID NO: 93835 - DNA, 25 bp, Probe Sequence
agatgtaggcttattctttggagat

SEQ ID NO: 93836 - DNA, 25 bp, Probe Sequence
gggctgtctttgctatatgtataat

SEQ ID NO: 93837 - DNA, 25 bp, Probe Sequence
gaagtggctgaatctcattgtattt

SEQ ID NO: 93838 - DNA, 25 bp, Probe Sequence
gcttattctttggagatgtctagga

SEQ ID NO: 93839 - DNA, 25 bp, Probe Sequence
aggcttattctttggagatgtctag

SEQ ID NO: 93840 - DNA, 25 bp, Probe Sequence
atgtataatagagccattggatctt

SEQ ID NO: 93841 - DNA, 25 bp, Probe Sequence
taggcttattctttggagatgtcta

SEQ ID NO: 93842 - DNA, 25 bp, Probe Sequence
ggcttattctttggagatgtctagg

SEQ ID NO: 93843 - DNA, 25 bp, Probe Sequence
atcctatgccaaataaagatgttgt

SEQ ID NO: 93844 - DNA, 25 bp, Probe Sequence
tccttgaagtggctgaatctcattg

SEQ ID NO: 93845 - DNA, 25 bp, Probe Sequence
gtccttgaagtggctgaatctcatt

SEQ ID NO: 93846 - DNA, 25 bp, Probe Sequence
attctttggagatgtctaggagagg

SEQ ID NO: 93847 - DNA, 25 bp, Probe Sequence
ctttggagatgtctaggagaggaaa

SEQ ID NO: 93848 - DNA, 25 bp, Probe Sequence
tattctttggagatgtctaggagag

SEQ ID NO: 93849 - DNA, 25 bp, Probe Sequence
cagttgatggacatttgagttgttt

SEQ ID NO: 93850 - DNA, 25 bp, Probe Sequence
catgtattagtaggtagttcctgtt

SEQ ID NO: 93851 - DNA, 25 bp, Probe Sequence
tgtccagcttctttcacttaatgta

SEQ ID NO: 93852 - DNA, 25 bp, Probe Sequence
gtccagcttctttcacttaatgtaa

SEQ ID NO: 93853 - DNA, 25 bp, Probe Sequence
ccacagtttgttaattcatttacca

SEQ ID NO: 93854 - DNA, 25 bp, Probe Sequence
accacagtttgttaattcatttacc

SEQ ID NO: 93855 - DNA, 25 bp, Probe Sequence
catttaccagttgatggacatttga

SEQ ID NO: 93856 - DNA, 25 bp, Probe Sequence
tcatttaccagttgatggacatttg

SEQ ID NO: 93857 - DNA, 25 bp, Probe Sequence
atttaccagttgatggacatttgag

SEQ ID NO: 93858 - DNA, 25 bp, Probe Sequence
ttaccagttgatggacatttgagtt

SEQ ID NO: 93859 - DNA, 25 bp, Probe Sequence
tttaccagttgatggacatttgagt

SEQ ID NO: 93860 - DNA, 25 bp, Probe Sequence
ttcatttaccagttgatggacattt

SEQ ID NO: 93861 - DNA, 25 bp, Probe Sequence
tgcattgtatagttataccacagtt

SEQ ID NO: 93862 - DNA, 25 bp, Probe Sequence
ttgcattgtatagttataccacagt

SEQ ID NO: 93863 - DNA, 25 bp, Probe Sequence
attcatttaccagttgatggacatt

SEQ ID NO: 93864 - DNA, 25 bp, Probe Sequence
aattcatttaccagttgatggacat

SEQ ID NO: 93865 - DNA, 25 bp, Probe Sequence
taccagttgatggacatttgagttg

SEQ ID NO: 93866 - DNA, 25 bp, Probe Sequence
tccagcttctttcacttaatgtaat

SEQ ID NO: 93867 - DNA, 25 bp, Probe Sequence
taattcatttaccagttgatggaca

SEQ ID NO: 93868 - DNA, 25 bp, Probe Sequence
ccagttgatggacatttgagttgtt

SEQ ID NO: 93869 - DNA, 25 bp, Probe Sequence
ttgtgtccagcttctttcacttaat

SEQ ID NO: 93870 - DNA, 25 bp, Probe Sequence
acagtttgttaattcatttaccagt

SEQ ID NO: 93871 - DNA, 25 bp, Probe Sequence
tttgtgtccagcttctttcacttaa

SEQ ID NO: 93872 - DNA, 25 bp, Probe Sequence
cacagtttgttaattcatttaccag

SEQ ID NO: 93873 - DNA, 25 bp, Probe Sequence
gagacgacactaccaataaaccaaa

SEQ ID NO: 93874 - DNA, 25 bp, Probe Sequence
gacgacactaccaataaaccaaact

SEQ ID NO: 93875 - DNA, 25 bp, Probe Sequence
agacgacactaccaataaaccaaac

SEQ ID NO: 93876 - DNA, 25 bp, Probe Sequence
tgagacgacactaccaataaaccaa

SEQ ID NO: 93877 - DNA, 25 bp, Probe Sequence
ctgagacgacactaccaataaacca

SEQ ID NO: 93878 - DNA, 25 bp, Probe Sequence
ctgctgagacgacactaccaataaa

SEQ ID NO: 93879 - DNA, 25 bp, Probe Sequence
tgctgagacgacactaccaataaac

SEQ ID NO: 93880 - DNA, 25 bp, Probe Sequence
cttcttgaccctctctccatcattc

SEQ ID NO: 93881 - DNA, 25 bp, Probe Sequence
ttcttgaccctctctccatcattca

SEQ ID NO: 93882 - DNA, 25 bp, Probe Sequence
gctgagacgacactaccaataaacc

SEQ ID NO: 93883 - DNA, 25 bp, Probe Sequence
gctgctgagacgacactaccaataa

SEQ ID NO: 93884 - DNA, 25 bp, Probe Sequence
tcttgaccctctctccatcattcag

SEQ ID NO: 93885 - DNA, 25 bp, Probe Sequence
atttggcttaccagcatttgagaag

SEQ ID NO: 93886 - DNA, 25 bp, Probe Sequence
ccttcttgaccctctctccatcatt

SEQ ID NO: 93887 - DNA, 25 bp, Probe Sequence
catttggcttaccagcatttgagaa

SEQ ID NO: 93888 - DNA, 25 bp, Probe Sequence
ctcactccttggacttgtcaccttg

SEQ ID NO: 93889 - DNA, 25 bp, Probe Sequence
tctcactccttggacttgtcacctt

SEQ ID NO: 93890 - DNA, 25 bp, Probe Sequence
gacatttggcttaccagcatttgag

SEQ ID NO: 93891 - DNA, 25 bp, Probe Sequence
acatttggcttaccagcatttgaga

SEQ ID NO: 93892 - DNA, 25 bp, Probe Sequence
ctcagtgaccttctcaggcattctg

SEQ ID NO: 93893 - DNA, 25 bp, Probe Sequence
gtgacatttggcttaccagcatttg

SEQ ID NO: 93894 - DNA, 25 bp, Probe Sequence
accttcttgaccctctctccatcat

SEQ ID NO: 93895 - DNA, 25 bp, Probe Sequence
tctctcaccttcttgaccctctctc

SEQ ID NO: 93896 - DNA, 25 bp, Probe Sequence
tgacatttggcttaccagcatttga

SEQ ID NO: 93897 - DNA, 25 bp, Probe Sequence
aatccaatacctcttacctcctctg

SEQ ID NO: 93898 - DNA, 25 bp, Probe Sequence
attctcaaggattgtcagacttcaa

SEQ ID NO: 93899 - DNA, 25 bp, Probe Sequence
aagattctcaaggattgtcagactt

SEQ ID NO: 93900 - DNA, 25 bp, Probe Sequence
agattctcaaggattgtcagacttc

SEQ ID NO: 93901 - DNA, 25 bp, Probe Sequence
cattctctctgaagtctaggttacc

SEQ ID NO: 93902 - DNA, 25 bp, Probe Sequence
gattctcaaggattgtcagacttca

SEQ ID NO: 93903 - DNA, 25 bp, Probe Sequence
tcagcgtacctcattagtaattgtt

SEQ ID NO: 93904 - DNA, 25 bp, Probe Sequence
ctcagcgtacctcattagtaattgt

SEQ ID NO: 93905 - DNA, 25 bp, Probe Sequence
ctctgctcattctctctgaagtcta

SEQ ID NO: 93906 - DNA, 25 bp, Probe Sequence
cctcagcgtacctcattagtaattg

SEQ ID NO: 93907 - DNA, 25 bp, Probe Sequence
tcattctctctgaagtctaggttac

SEQ ID NO: 93908 - DNA, 25 bp, Probe Sequence
tctgctcattctctctgaagtctag

SEQ ID NO: 93909 - DNA, 25 bp, Probe Sequence
ctcattctctctgaagtctaggtta

SEQ ID NO: 93910 - DNA, 25 bp, Probe Sequence
gctcattctctctgaagtctaggtt

SEQ ID NO: 93911 - DNA, 25 bp, Probe Sequence
ctgctcattctctctgaagtctagg

SEQ ID NO: 93912 - DNA, 25 bp, Probe Sequence
ctctctgctcattctctctgaagtc

SEQ ID NO: 93913 - DNA, 25 bp, Probe Sequence
aaatccaatacctcttacctcctct

SEQ ID NO: 93914 - DNA, 25 bp, Probe Sequence
tctctgctcattctctctgaagtct

SEQ ID NO: 93915 - DNA, 25 bp, Probe Sequence
gcctcagcgtacctcattagtaatt

SEQ ID NO: 93916 - DNA, 25 bp, Probe Sequence
acggattaaatagtggattcagaga

SEQ ID NO: 93917 - DNA, 25 bp, Probe Sequence
cggattaaatagtggattcagagac

SEQ ID NO: 93918 - DNA, 25 bp, Probe Sequence
aataaacacagttcccaaagcattt

SEQ ID NO: 93919 - DNA, 25 bp, Probe Sequence
tataggcaataaacacagttcccaa

SEQ ID NO: 93920 - DNA, 25 bp, Probe Sequence
ttataggcaataaacacagttccca

SEQ ID NO: 93921 - DNA, 25 bp, Probe Sequence
ctaagataattgcgtgaactctgtt

SEQ ID NO: 93922 - DNA, 25 bp, Probe Sequence
aagataattgcgtgaactctgttaa

SEQ ID NO: 93923 - DNA, 25 bp, Probe Sequence
gctaagataattgcgtgaactctgt

SEQ ID NO: 93924 - DNA, 25 bp, Probe Sequence
taagataattgcgtgaactctgtta

SEQ ID NO: 93925 - DNA, 25 bp, Probe Sequence
agctaagataattgcgtgaactctg

SEQ ID NO: 93926 - DNA, 25 bp, Probe Sequence
cagctaagataattgcgtgaactct

SEQ ID NO: 93927 - DNA, 25 bp, Probe Sequence
ttccagctaagataattgcgtgaac

SEQ ID NO: 93928 - DNA, 25 bp, Probe Sequence
ccagctaagataattgcgtgaactc

SEQ ID NO: 93929 - DNA, 25 bp, Probe Sequence
agataattgcgtgaactctgttaaa

SEQ ID NO: 93930 - DNA, 25 bp, Probe Sequence
tccagctaagataattgcgtgaact

SEQ ID NO: 93931 - DNA, 25 bp, Probe Sequence
actgattatcactcatcaatggctt

SEQ ID NO: 93932 - DNA, 25 bp, Probe Sequence
aactgattatcactcatcaatggct

SEQ ID NO: 93933 - DNA, 25 bp, Probe Sequence
taatatgtaatcatgtgtcaggaca

SEQ ID NO: 93934 - DNA, 25 bp, Probe Sequence
aatttcctgggtgtgtccttgttaa

SEQ ID NO: 93935 - DNA, 25 bp, Probe Sequence
ttaatatgtaatcatgtgtcaggac

SEQ ID NO: 93936 - DNA, 25 bp, Probe Sequence
tttccagctaagataattgcgtgaa

SEQ ID NO: 93937 - DNA, 25 bp, Probe Sequence
gattatcactcatcaatggctttat

SEQ ID NO: 93938 - DNA, 25 bp, Probe Sequence
ctttccagctaagataattgcgtga

SEQ ID NO: 93939 - DNA, 25 bp, Probe Sequence
ttatcactcatcaatggctttattt

SEQ ID NO: 93940 - DNA, 25 bp, Probe Sequence
atttcctgggtgtgtccttgttaag

SEQ ID NO: 93941 - DNA, 25 bp, Probe Sequence
aatatgtaatcatgtgtcaggacat

SEQ ID NO: 93942 - DNA, 25 bp, Probe Sequence
attatcactcatcaatggctttatt

SEQ ID NO: 93943 - DNA, 25 bp, Probe Sequence
aaactgattatcactcatcaatggc

SEQ ID NO: 93944 - DNA, 25 bp, Probe Sequence
ctgattatcactcatcaatggcttt

SEQ ID NO: 93945 - DNA, 25 bp, Probe Sequence
tgattaggtcgtcattgtcttacat

SEQ ID NO: 93946 - DNA, 25 bp, Probe Sequence
aggtcgtcattgtcttacatatact

SEQ ID NO: 93947 - DNA, 25 bp, Probe Sequence
ggtcgtcattgtcttacatatactt

SEQ ID NO: 93948 - DNA, 25 bp, Probe Sequence
gattaggtcgtcattgtcttacata

SEQ ID NO: 93949 - DNA, 25 bp, Probe Sequence
taggtcgtcattgtcttacatatac

SEQ ID NO: 93950 - DNA, 25 bp, Probe Sequence
attaggtcgtcattgtcttacatat

SEQ ID NO: 93951 - DNA, 25 bp, Probe Sequence
actgaagtagcaccactaaacatag

SEQ ID NO: 93952 - DNA, 25 bp, Probe Sequence
cactgaagtagcaccactaaacata

SEQ ID NO: 93953 - DNA, 25 bp, Probe Sequence
ggttaatgaattatgattaggtcgt

SEQ ID NO: 93954 - DNA, 25 bp, Probe Sequence
gtcagaaagcataactactctaggc

SEQ ID NO: 93955 - DNA, 25 bp, Probe Sequence
atgattaggtcgtcattgtcttaca

SEQ ID NO: 93956 - DNA, 25 bp, Probe Sequence
agtcagaaagcataactactctagg

SEQ ID NO: 93957 - DNA, 25 bp, Probe Sequence
ttaggtcgtcattgtcttacatata

SEQ ID NO: 93958 - DNA, 25 bp, Probe Sequence
aggttaatgaattatgattaggtcg

SEQ ID NO: 93959 - DNA, 25 bp, Probe Sequence
ctgaagtagcaccactaaacatagc

SEQ ID NO: 93960 - DNA, 25 bp, Probe Sequence
gtagcaccactaaacatagcacaac

SEQ ID NO: 93961 - DNA, 25 bp, Probe Sequence
gaagtagcaccactaaacatagcac

SEQ ID NO: 93962 - DNA, 25 bp, Probe Sequence
tgaagtagcaccactaaacatagca

SEQ ID NO: 93963 - DNA, 25 bp, Probe Sequence
tgaattatgattaggtcgtcattgt

SEQ ID NO: 93964 - DNA, 25 bp, Probe Sequence
tatgattaggtcgtcattgtcttac

SEQ ID NO: 93965 - DNA, 25 bp, Probe Sequence
attatgattaggtcgtcattgtctt

SEQ ID NO: 93966 - DNA, 25 bp, Probe Sequence
aattatgattaggtcgtcattgtct

SEQ ID NO: 93967 - DNA, 25 bp, Probe Sequence
agtagcaccactaaacatagcacaa

SEQ ID NO: 93968 - DNA, 25 bp, Probe Sequence
aagtagcaccactaaacatagcaca

SEQ ID NO: 93969 - DNA, 25 bp, Probe Sequence
gatacacactacgagagatgttgag

SEQ ID NO: 93970 - DNA, 25 bp, Probe Sequence
accttgtgaatgtactcagttgaat

SEQ ID NO: 93971 - DNA, 25 bp, Probe Sequence
atacacactacgagagatgttgagt

SEQ ID NO: 93972 - DNA, 25 bp, Probe Sequence
ccttgtgaatgtactcagttgaatt

SEQ ID NO: 93973 - DNA, 25 bp, Probe Sequence
aaccttgtgaatgtactcagttgaa

SEQ ID NO: 93974 - DNA, 25 bp, Probe Sequence
ggatacacactacgagagatgttga

SEQ ID NO: 93975 - DNA, 25 bp, Probe Sequence
tgaatgtactcagttgaattaacca

SEQ ID NO: 93976 - DNA, 25 bp, Probe Sequence
gtgaatgtactcagttgaattaacc

SEQ ID NO: 93977 - DNA, 25 bp, Probe Sequence
aaatggcaactgtgtggataaatac

SEQ ID NO: 93978 - DNA, 25 bp, Probe Sequence
gaaatggcaactgtgtggataaata

SEQ ID NO: 93979 - DNA, 25 bp, Probe Sequence
ctgtttaatgggtgtagtttctgtg

SEQ ID NO: 93980 - DNA, 25 bp, Probe Sequence
tagaaatggcaactgtgtggataaa

SEQ ID NO: 93981 - DNA, 25 bp, Probe Sequence
tagttgctgtttaatgggtgtagtt

SEQ ID NO: 93982 - DNA, 25 bp, Probe Sequence
tgtttaatgggtgtagtttctgtgt

SEQ ID NO: 93983 - DNA, 25 bp, Probe Sequence
ttgctgtttaatgggtgtagtttct

SEQ ID NO: 93984 - DNA, 25 bp, Probe Sequence
gttgctgtttaatgggtgtagtttc

SEQ ID NO: 93985 - DNA, 25 bp, Probe Sequence
tgtaagatgatggaaatgctctgaa

SEQ ID NO: 93986 - DNA, 25 bp, Probe Sequence
aatgggtgtagtttctgtgtaagat

SEQ ID NO: 93987 - DNA, 25 bp, Probe Sequence
gggtgtagtttctgtgtaagatgat

SEQ ID NO: 93988 - DNA, 25 bp, Probe Sequence
gtttaatgggtgtagtttctgtgta

SEQ ID NO: 93989 - DNA, 25 bp, Probe Sequence
gtagttgctgtttaatgggtgtagt

SEQ ID NO: 93990 - DNA, 25 bp, Probe Sequence
agaaatggcaactgtgtggataaat

SEQ ID NO: 93991 - DNA, 25 bp, Probe Sequence
ttctgtgtaagatgatggaaatgct

SEQ ID NO: 93992 - DNA, 25 bp, Probe Sequence
atgggtgtagtttctgtgtaagatg

SEQ ID NO: 93993 - DNA, 25 bp, Probe Sequence
atgtgttctgccgtcattctatgta

SEQ ID NO: 93994 - DNA, 25 bp, Probe Sequence
tagttgttggcataaatgtgttctg

SEQ ID NO: 93995 - DNA, 25 bp, Probe Sequence
atagttgttggcataaatgtgttct

SEQ ID NO: 93996 - DNA, 25 bp, Probe Sequence
atccagtaaactaccaacaatttcg

SEQ ID NO: 93997 - DNA, 25 bp, Probe Sequence
tccagtaaactaccaacaatttcgt

SEQ ID NO: 93998 - DNA, 25 bp, Probe Sequence
catagttaaattgccatcttgaagc

SEQ ID NO: 93999 - DNA, 25 bp, Probe Sequence
ggcaaagaagaacattccttactaa

SEQ ID NO: 94000 - DNA, 25 bp, Probe Sequence
gaagaaaggcaaagaagaacattcc

SEQ ID NO: 94001 - DNA, 25 bp, Probe Sequence
ggaagaaaggcaaagaagaacattc

SEQ ID NO: 94002 - DNA, 25 bp, Probe Sequence
tggaagaaaggcaaagaagaacatt

SEQ ID NO: 94003 - DNA, 25 bp, Probe Sequence
ccagtaaactaccaacaatttcgtt

SEQ ID NO: 94004 - DNA, 25 bp, Probe Sequence
tactactctcagggacacagttatt

SEQ ID NO: 94005 - DNA, 25 bp, Probe Sequence
ttactactctcagggacacagttat

SEQ ID NO: 94006 - DNA, 25 bp, Probe Sequence
tttactactctcagggacacagtta

SEQ ID NO: 94007 - DNA, 25 bp, Probe Sequence
ctggaagaaaggcaaagaagaacat

SEQ ID NO: 94008 - DNA, 25 bp, Probe Sequence
tgtgttctgccgtcattctatgtac

SEQ ID NO: 94009 - DNA, 25 bp, Probe Sequence
ccgtcattctatgtaccctttacta

SEQ ID NO: 94010 - DNA, 25 bp, Probe Sequence
ctactctcagggacacagttattga

SEQ ID NO: 94011 - DNA, 25 bp, Probe Sequence
cagccatgaaatgtactttgagaag

SEQ ID NO: 94012 - DNA, 25 bp, Probe Sequence
ctttactactctcagggacacagtt

SEQ ID NO: 94013 - DNA, 25 bp, Probe Sequence
tactctcagggacacagttattgac

SEQ ID NO: 94014 - DNA, 25 bp, Probe Sequence
actactctcagggacacagttattg

SEQ ID NO: 94015 - DNA, 25 bp, Probe Sequence
tatagttgttggcataaatgtgttc

SEQ ID NO: 94016 - DNA, 25 bp, Probe Sequence
catgaaatgtactttgagaagccaa

SEQ ID NO: 94017 - DNA, 25 bp, Probe Sequence
gtgtaaggaagactgatgtagatgt

SEQ ID NO: 94018 - DNA, 25 bp, Probe Sequence
tgtgtaaggaagactgatgtagatg

SEQ ID NO: 94019 - DNA, 25 bp, Probe Sequence
tgtaaggaagactgatgtagatgtt

SEQ ID NO: 94020 - DNA, 25 bp, Probe Sequence
ttgtgtaaggaagactgatgtagat

SEQ ID NO: 94021 - DNA, 25 bp, Probe Sequence
attgtgtaaggaagactgatgtaga

SEQ ID NO: 94022 - DNA, 25 bp, Probe Sequence
aaggaagactgatgtagatgttctg

SEQ ID NO: 94023 - DNA, 25 bp, Probe Sequence
gtctaattctgtgagcctacctata

SEQ ID NO: 94024 - DNA, 25 bp, Probe Sequence
ggaagactgatgtagatgttctgtg

SEQ ID NO: 94025 - DNA, 25 bp, Probe Sequence
aggaagactgatgtagatgttctgt

SEQ ID NO: 94026 - DNA, 25 bp, Probe Sequence
gtaaggaagactgatgtagatgttc

SEQ ID NO: 94027 - DNA, 25 bp, Probe Sequence
taaggaagactgatgtagatgttct

SEQ ID NO: 94028 - DNA, 25 bp, Probe Sequence
gaagactgatgtagatgttctgtgc

SEQ ID NO: 94029 - DNA, 25 bp, Probe Sequence
aagactgatgtagatgttctgtgct

SEQ ID NO: 94030 - DNA, 25 bp, Probe Sequence
tattgtgtaaggaagactgatgtag

SEQ ID NO: 94031 - DNA, 25 bp, Probe Sequence
attattgtgtaaggaagactgatgt

SEQ ID NO: 94032 - DNA, 25 bp, Probe Sequence
gcatgttgtatctagtctgatgtac

SEQ ID NO: 94033 - DNA, 25 bp, Probe Sequence
ggataagttcaggaatacattctgc

SEQ ID NO: 94034 - DNA, 25 bp, Probe Sequence
cggataagttcaggaatacattctg

SEQ ID NO: 94035 - DNA, 25 bp, Probe Sequence
tgattattgtgtaaggaagactgat

SEQ ID NO: 94036 - DNA, 25 bp, Probe Sequence
atgattattgtgtaaggaagactga

SEQ ID NO: 94037 - DNA, 25 bp, Probe Sequence
agttctgagtattgatagcttgctt

SEQ ID NO: 94038 - DNA, 25 bp, Probe Sequence
ctctgtaatccttgaatacggaagt

SEQ ID NO: 94039 - DNA, 25 bp, Probe Sequence
tgttgtatctagtctgatgtactgt

SEQ ID NO: 94040 - DNA, 25 bp, Probe Sequence
tgtagctctgtaatccttgaatacg

SEQ ID NO: 94041 - DNA, 25 bp, Probe Sequence
caggaggaagatgtaatgaatatgc

SEQ ID NO: 94042 - DNA, 25 bp, Probe Sequence
cgccttaataatgactggttatctg

SEQ ID NO: 94043 - DNA, 25 bp, Probe Sequence
aacgagagatggaattaacattgaa

SEQ ID NO: 94044 - DNA, 25 bp, Probe Sequence
gccttaataatgactggttatctgt

SEQ ID NO: 94045 - DNA, 25 bp, Probe Sequence
gcaacaggaggaagatgtaatgaat

SEQ ID NO: 94046 - DNA, 25 bp, Probe Sequence
caacaggaggaagatgtaatgaata

SEQ ID NO: 94047 - DNA, 25 bp, Probe Sequence
ttatgtcctgttcaacactcagtac

SEQ ID NO: 94048 - DNA, 25 bp, Probe Sequence
acaggaggaagatgtaatgaatatg

SEQ ID NO: 94049 - DNA, 25 bp, Probe Sequence
cagagttgttgttatatgatgcacc

SEQ ID NO: 94050 - DNA, 25 bp, Probe Sequence
agagttgttgttatatgatgcacca

SEQ ID NO: 94051 - DNA, 25 bp, Probe Sequence
aggaggaagatgtaatgaatatgca

SEQ ID NO: 94052 - DNA, 25 bp, Probe Sequence
tttatgaacagtgctttgatatgcc

SEQ ID NO: 94053 - DNA, 25 bp, Probe Sequence
ggaggaagatgtaatgaatatgcag

SEQ ID NO: 94054 - DNA, 25 bp, Probe Sequence
caatgaagggaatatgacactacag

SEQ ID NO: 94055 - DNA, 25 bp, Probe Sequence
aatgaagggaatatgacactacagt

SEQ ID NO: 94056 - DNA, 25 bp, Probe Sequence
gcaatgaagggaatatgacactaca

SEQ ID NO: 94057 - DNA, 25 bp, Probe Sequence
cttaatctggtttacggatgtgact

SEQ ID NO: 94058 - DNA, 25 bp, Probe Sequence
gagttgttgttatatgatgcaccaa

SEQ ID NO: 94059 - DNA, 25 bp, Probe Sequence
ttaatctggtttacggatgtgactg

SEQ ID NO: 94060 - DNA, 25 bp, Probe Sequence
gaggaagatgtaatgaatatgcagt

SEQ ID NO: 94061 - DNA, 25 bp, Probe Sequence
agttgatttatgaacagtgctttga

SEQ ID NO: 94062 - DNA, 25 bp, Probe Sequence
aacaggaggaagatgtaatgaatat

SEQ ID NO: 94063 - DNA, 25 bp, Probe Sequence
tgaagggaatatgacactacagtat

SEQ ID NO: 94064 - DNA, 25 bp, Probe Sequence
atgaagggaatatgacactacagta

SEQ ID NO: 94065 - DNA, 25 bp, Probe Sequence
ctccttaaccaatagtcatcacctt

SEQ ID NO: 94066 - DNA, 25 bp, Probe Sequence
tccttaaccaatagtcatcaccttg

SEQ ID NO: 94067 - DNA, 25 bp, Probe Sequence
aatagtcatcaccttgttcctctgt

SEQ ID NO: 94068 - DNA, 25 bp, Probe Sequence
taaccaatagtcatcaccttgttcc

SEQ ID NO: 94069 - DNA, 25 bp, Probe Sequence
ccttaaccaatagtcatcaccttgt

SEQ ID NO: 94070 - DNA, 25 bp, Probe Sequence
ttaaccaatagtcatcaccttgttc

SEQ ID NO: 94071 - DNA, 25 bp, Probe Sequence
cttaaccaatagtcatcaccttgtt

SEQ ID NO: 94072 - DNA, 25 bp, Probe Sequence
caatagtcatcaccttgttcctctg

SEQ ID NO: 94073 - DNA, 25 bp, Probe Sequence
atagtcatcaccttgttcctctgtc

SEQ ID NO: 94074 - DNA, 25 bp, Probe Sequence
aaccaatagtcatcaccttgttcct

SEQ ID NO: 94075 - DNA, 25 bp, Probe Sequence
ccaatagtcatcaccttgttcctct

SEQ ID NO: 94076 - DNA, 25 bp, Probe Sequence
agaggcacattggatgagtatcttg

SEQ ID NO: 94077 - DNA, 25 bp, Probe Sequence
cagaggcacattggatgagtatctt

SEQ ID NO: 94078 - DNA, 25 bp, Probe Sequence
accaatagtcatcaccttgttcctc

SEQ ID NO: 94079 - DNA, 25 bp, Probe Sequence
tatctgctattcgggtaatcttcac

SEQ ID NO: 94080 - DNA, 25 bp, Probe Sequence
gcaatacacagttatcctttcacag

SEQ ID NO: 94081 - DNA, 25 bp, Probe Sequence
tttggattatctgctattcgggtaa

SEQ ID NO: 94082 - DNA, 25 bp, Probe Sequence
cagtattagaggaaatgagaagggt

SEQ ID NO: 94083 - DNA, 25 bp, Probe Sequence
ggaaaggagagtcagtattagagga

SEQ ID NO: 94084 - DNA, 25 bp, Probe Sequence
ttatctgctattcgggtaatcttca

SEQ ID NO: 94085 - DNA, 25 bp, Probe Sequence
gtttggattatctgctattcgggta

SEQ ID NO: 94086 - DNA, 25 bp, Probe Sequence
caagccagtaaggtttaaggttatg

SEQ ID NO: 94087 - DNA, 25 bp, Probe Sequence
tggaaaggagagtcagtattagagg

SEQ ID NO: 94088 - DNA, 25 bp, Probe Sequence
ttggaaaggagagtcagtattagag

SEQ ID NO: 94089 - DNA, 25 bp, Probe Sequence
ctccttaaccaatagtcatcacctt

SEQ ID NO: 94090 - DNA, 25 bp, Probe Sequence
tccttaaccaatagtcatcaccttg

SEQ ID NO: 94091 - DNA, 25 bp, Probe Sequence
aatagtcatcaccttgttcctctgt

SEQ ID NO: 94092 - DNA, 25 bp, Probe Sequence
taaccaatagtcatcaccttgttcc

SEQ ID NO: 94093 - DNA, 25 bp, Probe Sequence
ccttaaccaatagtcatcaccttgt

SEQ ID NO: 94094 - DNA, 25 bp, Probe Sequence
ttaaccaatagtcatcaccttgttc

SEQ ID NO: 94095 - DNA, 25 bp, Probe Sequence
cttaaccaatagtcatcaccttgtt

SEQ ID NO: 94096 - DNA, 25 bp, Probe Sequence
caatagtcatcaccttgttcctctg

SEQ ID NO: 94097 - DNA, 25 bp, Probe Sequence
atagtcatcaccttgttcctctgtc

SEQ ID NO: 94098 - DNA, 25 bp, Probe Sequence
aaccaatagtcatcaccttgttcct

SEQ ID NO: 94099 - DNA, 25 bp, Probe Sequence
ccaatagtcatcaccttgttcctct

SEQ ID NO: 94100 - DNA, 25 bp, Probe Sequence
agaggcacattggatgagtatcttg

SEQ ID NO: 94101 - DNA, 25 bp, Probe Sequence
cagaggcacattggatgagtatctt

SEQ ID NO: 94102 - DNA, 25 bp, Probe Sequence
accaatagtcatcaccttgttcctc

SEQ ID NO: 94103 - DNA, 25 bp, Probe Sequence
tatctgctattcgggtaatcttcac

SEQ ID NO: 94104 - DNA, 25 bp, Probe Sequence
gcaatacacagttatcctttcacag

SEQ ID NO: 94105 - DNA, 25 bp, Probe Sequence
tttggattatctgctattcgggtaa

SEQ ID NO: 94106 - DNA, 25 bp, Probe Sequence
cagtattagaggaaatgagaagggt

SEQ ID NO: 94107 - DNA, 25 bp, Probe Sequence
ggaaaggagagtcagtattagagga

SEQ ID NO: 94108 - DNA, 25 bp, Probe Sequence
ttatctgctattcgggtaatcttca

SEQ ID NO: 94109 - DNA, 25 bp, Probe Sequence
gtttggattatctgctattcgggta

SEQ ID NO: 94110 - DNA, 25 bp, Probe Sequence
caagccagtaaggtttaaggttatg

SEQ ID NO: 94111 - DNA, 25 bp, Probe Sequence
tggaaaggagagtcagtattagagg

SEQ ID NO: 94112 - DNA, 25 bp, Probe Sequence
ttggaaaggagagtcagtattagag

SEQ ID NO: 94113 - DNA, 25 bp, Probe Sequence
tagtcagagaattgtaagtgctcag

SEQ ID NO: 94114 - DNA, 25 bp, Probe Sequence
ttagtcagagaattgtaagtgctca

SEQ ID NO: 94115 - DNA, 25 bp, Probe Sequence
gtcagagaattgtaagtgctcagag

SEQ ID NO: 94116 - DNA, 25 bp, Probe Sequence
agtcagagaattgtaagtgctcaga

SEQ ID NO: 94117 - DNA, 25 bp, Probe Sequence
attagtcagagaattgtaagtgctc

SEQ ID NO: 94118 - DNA, 25 bp, Probe Sequence
tatgcttgttatgaactacactgaa

SEQ ID NO: 94119 - DNA, 25 bp, Probe Sequence
aattagtcagagaattgtaagtgct

SEQ ID NO: 94120 - DNA, 25 bp, Probe Sequence
atatgcttgttatgaactacactga

SEQ ID NO: 94121 - DNA, 25 bp, Probe Sequence
ttgtgaagaattactagctcaaggt

SEQ ID NO: 94122 - DNA, 25 bp, Probe Sequence
tgaagaattactagctcaaggtgaa

SEQ ID NO: 94123 - DNA, 25 bp, Probe Sequence
gtgaagaattactagctcaaggtga

SEQ ID NO: 94124 - DNA, 25 bp, Probe Sequence
tgaactacactgaaatctacccaag

SEQ ID NO: 94125 - DNA, 25 bp, Probe Sequence
ctgaagatgatgtggaatgagaaac

SEQ ID NO: 94126 - DNA, 25 bp, Probe Sequence
ggctgaagatgatgtggaatgagaa

SEQ ID NO: 94127 - DNA, 25 bp, Probe Sequence
tgtgaagaattactagctcaaggtg

SEQ ID NO: 94128 - DNA, 25 bp, Probe Sequence
tgatagacttgactgtgtttgtgaa

SEQ ID NO: 94129 - DNA, 25 bp, Probe Sequence
ttgatagacttgactgtgtttgtga

SEQ ID NO: 94130 - DNA, 25 bp, Probe Sequence
tttgatagacttgactgtgtttgtg

SEQ ID NO: 94131 - DNA, 25 bp, Probe Sequence
atgaactacactgaaatctacccaa

SEQ ID NO: 94132 - DNA, 25 bp, Probe Sequence
gatagacttgactgtgtttgtgaaa

SEQ ID NO: 94133 - DNA, 25 bp, Probe Sequence
tgaagatgatgtggaatgagaaacc

SEQ ID NO: 94134 - DNA, 25 bp, Probe Sequence
atttgatagacttgactgtgtttgt

SEQ ID NO: 94135 - DNA, 25 bp, Probe Sequence
tatgaactacactgaaatctaccca

SEQ ID NO: 94136 - DNA, 25 bp, Probe Sequence
ttggctgaagatgatgtggaatgag

SEQ ID NO: 94137 - DNA, 25 bp, Probe Sequence
gatattgacagagttggcttcagaa

SEQ ID NO: 94138 - DNA, 25 bp, Probe Sequence
gtgaagcatacacaagtatcatagc

SEQ ID NO: 94139 - DNA, 25 bp, Probe Sequence
tcgtgaagcatacacaagtatcata

SEQ ID NO: 94140 - DNA, 25 bp, Probe Sequence
aagcatacacaagtatcatagccaa

SEQ ID NO: 94141 - DNA, 25 bp, Probe Sequence
cgtgaagcatacacaagtatcatag

SEQ ID NO: 94142 - DNA, 25 bp, Probe Sequence
atattgacagagttggcttcagaag

SEQ ID NO: 94143 - DNA, 25 bp, Probe Sequence
ttcgtgaagcatacacaagtatcat

SEQ ID NO: 94144 - DNA, 25 bp, Probe Sequence
gaagcatacacaagtatcatagcca

SEQ ID NO: 94145 - DNA, 25 bp, Probe Sequence
tgaagcatacacaagtatcatagcc

SEQ ID NO: 94146 - DNA, 25 bp, Probe Sequence
ttgacgatattgacagagttggctt

SEQ ID NO: 94147 - DNA, 25 bp, Probe Sequence
ccaattcaaggaagctaagaacatt

SEQ ID NO: 94148 - DNA, 25 bp, Probe Sequence
gttggcttcagaaggtgtgtaatac

SEQ ID NO: 94149 - DNA, 25 bp, Probe Sequence
agttggcttcagaaggtgtgtaata

SEQ ID NO: 94150 - DNA, 25 bp, Probe Sequence
gaacagaactggacagagaatgagt

SEQ ID NO: 94151 - DNA, 25 bp, Probe Sequence
tgacgatattgacagagttggcttc

SEQ ID NO: 94152 - DNA, 25 bp, Probe Sequence
gagtttgacgatattgacagagttg

SEQ ID NO: 94153 - DNA, 25 bp, Probe Sequence
atgagtttgacgatattgacagagt

SEQ ID NO: 94154 - DNA, 25 bp, Probe Sequence
tgagtttgacgatattgacagagtt

SEQ ID NO: 94155 - DNA, 25 bp, Probe Sequence
ggacagagaatgagtttgacgatat

SEQ ID NO: 94156 - DNA, 25 bp, Probe Sequence
ggtagataaatccacgaagataggg

SEQ ID NO: 94157 - DNA, 25 bp, Probe Sequence
cttcgtgaagcatacacaagtatca

SEQ ID NO: 94158 - DNA, 25 bp, Probe Sequence
ctaaaggagtgtgttctaacccaat

SEQ ID NO: 94159 - DNA, 25 bp, Probe Sequence
taaaggagtgtgttctaacccaatt

SEQ ID NO: 94160 - DNA, 25 bp, Probe Sequence
aatgagtttgacgatattgacagag

SEQ ID NO: 94161 - DNA, 25 bp, Probe Sequence
ccagcacatacattcaacatcatct

SEQ ID NO: 94162 - DNA, 25 bp, Probe Sequence
acatacattcaacatcatctgcgaa

SEQ ID NO: 94163 - DNA, 25 bp, Probe Sequence
ctatatacgctgccattactcatca

SEQ ID NO: 94164 - DNA, 25 bp, Probe Sequence
cctatatacgctgccattactcatc

SEQ ID NO: 94165 - DNA, 25 bp, Probe Sequence
cacatacattcaacatcatctgcga

SEQ ID NO: 94166 - DNA, 25 bp, Probe Sequence
ctggctctccttcatcttacatctt

SEQ ID NO: 94167 - DNA, 25 bp, Probe Sequence
tcctatatacgctgccattactcat

SEQ ID NO: 94168 - DNA, 25 bp, Probe Sequence
tctcctatatacgctgccattactc

SEQ ID NO: 94169 - DNA, 25 bp, Probe Sequence
ctctcctatatacgctgccattact

SEQ ID NO: 94170 - DNA, 25 bp, Probe Sequence
gactctcctatatacgctgccatta

SEQ ID NO: 94171 - DNA, 25 bp, Probe Sequence
aataattactggacatggacacaca

SEQ ID NO: 94172 - DNA, 25 bp, Probe Sequence
tggctctccttcatcttacatcttg

SEQ ID NO: 94173 - DNA, 25 bp, Probe Sequence
cagcacatacattcaacatcatctg

SEQ ID NO: 94174 - DNA, 25 bp, Probe Sequence
ataattactggacatggacacacac

SEQ ID NO: 94175 - DNA, 25 bp, Probe Sequence
ctcctatatacgctgccattactca

SEQ ID NO: 94176 - DNA, 25 bp, Probe Sequence
actctcctatatacgctgccattac

SEQ ID NO: 94177 - DNA, 25 bp, Probe Sequence
ctctggctctccttcatcttacatc

SEQ ID NO: 94178 - DNA, 25 bp, Probe Sequence
ataatacttcctcttggctggcttc

SEQ ID NO: 94179 - DNA, 25 bp, Probe Sequence
ggctctccttcatcttacatcttga

SEQ ID NO: 94180 - DNA, 25 bp, Probe Sequence
tatatacgctgccattactcatcag

SEQ ID NO: 94181 - DNA, 25 bp, Probe Sequence
tctggctctccttcatcttacatct

SEQ ID NO: 94182 - DNA, 25 bp, Probe Sequence
atatacgctgccattactcatcaga

SEQ ID NO: 94183 - DNA, 25 bp, Probe Sequence
cataatacttcctcttggctggctt

SEQ ID NO: 94184 - DNA, 25 bp, Probe Sequence
tatacgctgccattactcatcagaa

SEQ ID NO: 94185 - DNA, 25 bp, Probe Sequence
tatataagcagagcctcgtttagtg

SEQ ID NO: 94186 - DNA, 25 bp, Probe Sequence
ctatataagcagagcctcgtttagt

SEQ ID NO: 94187 - DNA, 25 bp, Probe Sequence
atataagcagagcctcgtttagtga

SEQ ID NO: 94188 - DNA, 25 bp, Probe Sequence
tataagcagagcctcgtttagtgaa

SEQ ID NO: 94189 - DNA, 25 bp, Probe Sequence
gtctatataagcagagcctcgttta

SEQ ID NO: 94190 - DNA, 25 bp, Probe Sequence
tctatataagcagagcctcgtttag

SEQ ID NO: 94191 - DNA, 25 bp, Probe Sequence
aggtctatataagcagagcctcgtt

SEQ ID NO: 94192 - DNA, 25 bp, Probe Sequence
ggtctatataagcagagcctcgttt

SEQ ID NO: 94193 - DNA, 25 bp, Probe Sequence
ataagcagagcctcgtttagtgaac

SEQ ID NO: 94194 - DNA, 25 bp, Probe Sequence
gactttccaaatgtcgtacaactcc

SEQ ID NO: 94195 - DNA, 25 bp, Probe Sequence
ggactttccaaatgtcgtacaactc

SEQ ID NO: 94196 - DNA, 25 bp, Probe Sequence
gtgggaggtctatataagcagagcc

SEQ ID NO: 94197 - DNA, 25 bp, Probe Sequence
gggactttccaaatgtcgtacaact

SEQ ID NO: 94198 - DNA, 25 bp, Probe Sequence
actttccaaatgtcgtacaactccg

SEQ ID NO: 94199 - DNA, 25 bp, Probe Sequence
ttgcagacatcaatggcgtgaatac

SEQ ID NO: 94200 - DNA, 25 bp, Probe Sequence
tgggaggtctatataagcagagcct

SEQ ID NO: 94201 - DNA, 25 bp, Probe Sequence
tttgcagacatcaatggcgtgaata

SEQ ID NO: 94202 - DNA, 25 bp, Probe Sequence
taagcagagcctcgtttagtgaacc

SEQ ID NO: 94203 - DNA, 25 bp, Probe Sequence
gaatacgtttgactcacgggatttc

SEQ ID NO: 94204 - DNA, 25 bp, Probe Sequence
tgaatacgtttgactcacgggattt

SEQ ID NO: 94205 - DNA, 25 bp, Probe Sequence
cagacatcaatggcgtgaatacgtt

SEQ ID NO: 94206 - DNA, 25 bp, Probe Sequence
cgggactttccaaatgtcgtacaac

SEQ ID NO: 94207 - DNA, 25 bp, Probe Sequence
ctttccaaatgtcgtacaactccgc

SEQ ID NO: 94208 - DNA, 25 bp, Probe Sequence
catcaatggcgtgaatacgtttgac

SEQ ID NO: 94209 - DNA, 25 bp, Probe Sequence
tatataagcagagcctcgtttagtg

SEQ ID NO: 94210 - DNA, 25 bp, Probe Sequence
ctatataagcagagcctcgtttagt

SEQ ID NO: 94211 - DNA, 25 bp, Probe Sequence
atataagcagagcctcgtttagtga

SEQ ID NO: 94212 - DNA, 25 bp, Probe Sequence
tataagcagagcctcgtttagtgaa

SEQ ID NO: 94213 - DNA, 25 bp, Probe Sequence
gtctatataagcagagcctcgttta

SEQ ID NO: 94214 - DNA, 25 bp, Probe Sequence
tctatataagcagagcctcgtttag

SEQ ID NO: 94215 - DNA, 25 bp, Probe Sequence
aggtctatataagcagagcctcgtt

SEQ ID NO: 94216 - DNA, 25 bp, Probe Sequence
ggtctatataagcagagcctcgttt

SEQ ID NO: 94217 - DNA, 25 bp, Probe Sequence
ataagcagagcctcgtttagtgaac

SEQ ID NO: 94218 - DNA, 25 bp, Probe Sequence
gactttccaaatgtcgtacaactcc

SEQ ID NO: 94219 - DNA, 25 bp, Probe Sequence
ggactttccaaatgtcgtacaactc

SEQ ID NO: 94220 - DNA, 25 bp, Probe Sequence
gtgggaggtctatataagcagagcc

SEQ ID NO: 94221 - DNA, 25 bp, Probe Sequence
gggactttccaaatgtcgtacaact

SEQ ID NO: 94222 - DNA, 25 bp, Probe Sequence
actttccaaatgtcgtacaactccg

SEQ ID NO: 94223 - DNA, 25 bp, Probe Sequence
ttgcagacatcaatggcgtgaatac

SEQ ID NO: 94224 - DNA, 25 bp, Probe Sequence
tgggaggtctatataagcagagcct

SEQ ID NO: 94225 - DNA, 25 bp, Probe Sequence
tttgcagacatcaatggcgtgaata

SEQ ID NO: 94226 - DNA, 25 bp, Probe Sequence
taagcagagcctcgtttagtgaacc

SEQ ID NO: 94227 - DNA, 25 bp, Probe Sequence
gaatacgtttgactcacgggatttc

SEQ ID NO: 94228 - DNA, 25 bp, Probe Sequence
tgaatacgtttgactcacgggattt

SEQ ID NO: 94229 - DNA, 25 bp, Probe Sequence
cagacatcaatggcgtgaatacgtt

SEQ ID NO: 94230 - DNA, 25 bp, Probe Sequence
cgggactttccaaatgtcgtacaac

SEQ ID NO: 94231 - DNA, 25 bp, Probe Sequence
ctttccaaatgtcgtacaactccgc

SEQ ID NO: 94232 - DNA, 25 bp, Probe Sequence
catcaatggcgtgaatacgtttgac

SEQ ID NO: 94233 - DNA, 25 bp, Probe Sequence
ataacacatagtctacagcctggaa

SEQ ID NO: 94234 - DNA, 25 bp, Probe Sequence
aataacacatagtctacagcctgga

SEQ ID NO: 94235 - DNA, 25 bp, Probe Sequence
gaatgaatggaatgaatgaatagcc

SEQ ID NO: 94236 - DNA, 25 bp, Probe Sequence
taacacatagtctacagcctggaag

SEQ ID NO: 94237 - DNA, 25 bp, Probe Sequence
agaatgaatggaatgaatgaatagc

SEQ ID NO: 94238 - DNA, 25 bp, Probe Sequence
acatagtaggcattcgtgatgactt

SEQ ID NO: 94239 - DNA, 25 bp, Probe Sequence
tgaatggaatgaatgaatagccaga

SEQ ID NO: 94240 - DNA, 25 bp, Probe Sequence
atgaatggaatgaatgaatagccag

SEQ ID NO: 94241 - DNA, 25 bp, Probe Sequence
gaatggaatgaatgaatagccagat

SEQ ID NO: 94242 - DNA, 25 bp, Probe Sequence
aatgaatggaatgaatgaatagcca

SEQ ID NO: 94243 - DNA, 25 bp, Probe Sequence
aaataacacatagtctacagcctgg

SEQ ID NO: 94244 - DNA, 25 bp, Probe Sequence
cccaaatcagtgctgtaagaaataa

SEQ ID NO: 94245 - DNA, 25 bp, Probe Sequence
gaaataacacatagtctacagcctg

SEQ ID NO: 94246 - DNA, 25 bp, Probe Sequence
agaaataacacatagtctacagcct

SEQ ID NO: 94247 - DNA, 25 bp, Probe Sequence
ccaaatcagtgctgtaagaaataac

SEQ ID NO: 94248 - DNA, 25 bp, Probe Sequence
atggaatgaatgaatagccagataa

SEQ ID NO: 94249 - DNA, 25 bp, Probe Sequence
aatggaatgaatgaatagccagata

SEQ ID NO: 94250 - DNA, 25 bp, Probe Sequence
aacacatagtctacagcctggaagt

SEQ ID NO: 94251 - DNA, 25 bp, Probe Sequence
cacatagtaggcattcgtgatgact

SEQ ID NO: 94252 - DNA, 25 bp, Probe Sequence
catagtaggcattcgtgatgacttt

SEQ ID NO: 94253 - DNA, 25 bp, Probe Sequence
aagaaataacacatagtctacagcc

SEQ ID NO: 94254 - DNA, 25 bp, Probe Sequence
gcccaaatcagtgctgtaagaaata

SEQ ID NO: 94255 - DNA, 25 bp, Probe Sequence
gagcatagtgactggcacatagtag

SEQ ID NO: 94256 - DNA, 25 bp, Probe Sequence
tataagaccacctgttctgttgcat

SEQ ID NO: 94257 - DNA, 25 bp, Probe Sequence
aatggaattgtgttgtgccttactt

SEQ ID NO: 94258 - DNA, 25 bp, Probe Sequence
aattgtgttgtgccttacttcagag

SEQ ID NO: 94259 - DNA, 25 bp, Probe Sequence
gaattgtgttgtgccttacttcaga

SEQ ID NO: 94260 - DNA, 25 bp, Probe Sequence
aattcttgatgttcatcttcagcac

SEQ ID NO: 94261 - DNA, 25 bp, Probe Sequence
atggaattgtgttgtgccttacttc

SEQ ID NO: 94262 - DNA, 25 bp, Probe Sequence
taattcttgatgttcatcttcagca

SEQ ID NO: 94263 - DNA, 25 bp, Probe Sequence
gtaattcttgatgttcatcttcagc

SEQ ID NO: 94264 - DNA, 25 bp, Probe Sequence
attcttgatgttcatcttcagcacc

SEQ ID NO: 94265 - DNA, 25 bp, Probe Sequence
ggaattgtgttgtgccttacttcag

SEQ ID NO: 94266 - DNA, 25 bp, Probe Sequence
aggtggtctcttctttcttgtaata

SEQ ID NO: 94267 - DNA, 25 bp, Probe Sequence
ggaggaaagacacttaaagacactt

SEQ ID NO: 94268 - DNA, 25 bp, Probe Sequence
ctcaggaggaaagacacttaaagac

SEQ ID NO: 94269 - DNA, 25 bp, Probe Sequence
gactcaggaggaaagacacttaaag

SEQ ID NO: 94270 - DNA, 25 bp, Probe Sequence
ggtggtctcttctttcttgtaataa

SEQ ID NO: 94271 - DNA, 25 bp, Probe Sequence
actcaggaggaaagacacttaaaga

SEQ ID NO: 94272 - DNA, 25 bp, Probe Sequence
caggaggaaagacacttaaagacac

SEQ ID NO: 94273 - DNA, 25 bp, Probe Sequence
tggaattgtgttgtgccttacttca

SEQ ID NO: 94274 - DNA, 25 bp, Probe Sequence
aggaggaaagacacttaaagacact

SEQ ID NO: 94275 - DNA, 25 bp, Probe Sequence
tcaggaggaaagacacttaaagaca

SEQ ID NO: 94276 - DNA, 25 bp, Probe Sequence
gaggtggtctcttctttcttgtaat

SEQ ID NO: 94277 - DNA, 25 bp, Probe Sequence
ttcttgatgttcatcttcagcacca

SEQ ID NO: 94278 - DNA, 25 bp, Probe Sequence
ggactcaggaggaaagacacttaaa

SEQ ID NO: 94279 - DNA, 25 bp, Probe Sequence
agtaattcttgatgttcatcttcag

SEQ ID NO: 94280 - DNA, 25 bp, Probe Sequence
tcttgatgttcatcttcagcaccag

SEQ ID NO: 94281 - DNA, 25 bp, Probe Sequence
gtattagtcgtcgctatgtacctgg

SEQ ID NO: 94282 - DNA, 25 bp, Probe Sequence
tattagtcgtcgctatgtacctggt

SEQ ID NO: 94283 - DNA, 25 bp, Probe Sequence
cgtattagtcgtcgctatgtacctg

SEQ ID NO: 94284 - DNA, 25 bp, Probe Sequence
tggctttagtaggtatagaagacat

SEQ ID NO: 94285 - DNA, 25 bp, Probe Sequence
agtaggtatagaagacatggattac

SEQ ID NO: 94286 - DNA, 25 bp, Probe Sequence
gctttagtaggtatagaagacatgg

SEQ ID NO: 94287 - DNA, 25 bp, Probe Sequence
ggctttagtaggtatagaagacatg

SEQ ID NO: 94288 - DNA, 25 bp, Probe Sequence
ttgcagtacatcctacgtattagtc

SEQ ID NO: 94289 - DNA, 25 bp, Probe Sequence
acttgcagtacatcctacgtattag

SEQ ID NO: 94290 - DNA, 25 bp, Probe Sequence
attagtcgtcgctatgtacctggtg

SEQ ID NO: 94291 - DNA, 25 bp, Probe Sequence
ttagtaggtatagaagacatggatt

SEQ ID NO: 94292 - DNA, 25 bp, Probe Sequence
tgcagtacatcctacgtattagtcg

SEQ ID NO: 94293 - DNA, 25 bp, Probe Sequence
acaataaactactgatgtctgcaaa

SEQ ID NO: 94294 - DNA, 25 bp, Probe Sequence
aacaataaactactgatgtctgcaa

SEQ ID NO: 94295 - DNA, 25 bp, Probe Sequence
taggtatagaagacatggattacca

SEQ ID NO: 94296 - DNA, 25 bp, Probe Sequence
ctacttgcagtacatcctacgtatt

SEQ ID NO: 94297 - DNA, 25 bp, Probe Sequence
gtaggtatagaagacatggattacc

SEQ ID NO: 94298 - DNA, 25 bp, Probe Sequence
tacttgcagtacatcctacgtatta

SEQ ID NO: 94299 - DNA, 25 bp, Probe Sequence
cagtacatcaatggcgtggatatcg

SEQ ID NO: 94300 - DNA, 25 bp, Probe Sequence
ctttagtaggtatagaagacatgga

SEQ ID NO: 94301 - DNA, 25 bp, Probe Sequence
cctacttgcagtacatcctacgtat

SEQ ID NO: 94302 - DNA, 25 bp, Probe Sequence
aggtatagaagacatggattaccat

SEQ ID NO: 94303 - DNA, 25 bp, Probe Sequence
ggtatagaagacatggattaccatc

SEQ ID NO: 94304 - DNA, 25 bp, Probe Sequence
tagtaggtatagaagacatggatta

SEQ ID NO: 94305 - DNA, 25 bp, Probe Sequence
aagataagctagtggacaatcagtg

SEQ ID NO: 94306 - DNA, 25 bp, Probe Sequence
taagataagctagtggacaatcagt

SEQ ID NO: 94307 - DNA, 25 bp, Probe Sequence
ataagctagtggacaatcagtgtag

SEQ ID NO: 94308 - DNA, 25 bp, Probe Sequence
gataagctagtggacaatcagtgta

SEQ ID NO: 94309 - DNA, 25 bp, Probe Sequence
taagctagtggacaatcagtgtagt

SEQ ID NO: 94310 - DNA, 25 bp, Probe Sequence
ttaagataagctagtggacaatcag

SEQ ID NO: 94311 - DNA, 25 bp, Probe Sequence
agataagctagtggacaatcagtgt

SEQ ID NO: 94312 - DNA, 25 bp, Probe Sequence
gctagtggacaatcagtgtagtgtt

SEQ ID NO: 94313 - DNA, 25 bp, Probe Sequence
gtttatacactgttctccaaaggta

SEQ ID NO: 94314 - DNA, 25 bp, Probe Sequence
tgtttatacactgttctccaaaggt

SEQ ID NO: 94315 - DNA, 25 bp, Probe Sequence
tagtggacaatcagtgtagtgttta

SEQ ID NO: 94316 - DNA, 25 bp, Probe Sequence
agtggacaatcagtgtagtgtttac

SEQ ID NO: 94317 - DNA, 25 bp, Probe Sequence
ttgtttatacactgttctccaaagg

SEQ ID NO: 94318 - DNA, 25 bp, Probe Sequence
ctagtggacaatcagtgtagtgttt

SEQ ID NO: 94319 - DNA, 25 bp, Probe Sequence
tagagatcatgcgaactacagtttg

SEQ ID NO: 94320 - DNA, 25 bp, Probe Sequence
tttatacactgttctccaaaggtac

SEQ ID NO: 94321 - DNA, 25 bp, Probe Sequence
aagctagtggacaatcagtgtagtg

SEQ ID NO: 94322 - DNA, 25 bp, Probe Sequence
cctctgtagagatcatgcgaactac

SEQ ID NO: 94323 - DNA, 25 bp, Probe Sequence
tggacaatcagtgtagtgtttacaa

SEQ ID NO: 94324 - DNA, 25 bp, Probe Sequence
ggacaatcagtgtagtgtttacaat

SEQ ID NO: 94325 - DNA, 25 bp, Probe Sequence
attgtttatacactgttctccaaag

SEQ ID NO: 94326 - DNA, 25 bp, Probe Sequence
gtggacaatcagtgtagtgtttaca

SEQ ID NO: 94327 - DNA, 25 bp, Probe Sequence
gatcatgcgaactacagtttggaac

SEQ ID NO: 94328 - DNA, 25 bp, Probe Sequence
agctagtggacaatcagtgtagtgt

SEQ ID NO: 94329 - DNA, 25 bp, Probe Sequence
cgggtctaatcgtgtaggaataaag

SEQ ID NO: 94330 - DNA, 25 bp, Probe Sequence
gggtctaatcgtgtaggaataaagc

SEQ ID NO: 94331 - DNA, 25 bp, Probe Sequence
ggtctaatcgtgtaggaataaagct

SEQ ID NO: 94332 - DNA, 25 bp, Probe Sequence
tctaatcgtgtaggaataaagctgt

SEQ ID NO: 94333 - DNA, 25 bp, Probe Sequence
gtctaatcgtgtaggaataaagctg

SEQ ID NO: 94334 - DNA, 25 bp, Probe Sequence
ctaatcgtgtaggaataaagctgta

SEQ ID NO: 94335 - DNA, 25 bp, Probe Sequence
aatcgtgtaggaataaagctgtatt

SEQ ID NO: 94336 - DNA, 25 bp, Probe Sequence
taatcgtgtaggaataaagctgtat

SEQ ID NO: 94337 - DNA, 25 bp, Probe Sequence
taacgggtctaatcgtgtaggaata

SEQ ID NO: 94338 - DNA, 25 bp, Probe Sequence
acgggtctaatcgtgtaggaataaa

SEQ ID NO: 94339 - DNA, 25 bp, Probe Sequence
aacgggtctaatcgtgtaggaataa

SEQ ID NO: 94340 - DNA, 25 bp, Probe Sequence
gtaacgggtctaatcgtgtaggaat

SEQ ID NO: 94341 - DNA, 25 bp, Probe Sequence
atcgtgtaggaataaagctgtattc

SEQ ID NO: 94342 - DNA, 25 bp, Probe Sequence
ggtaacgggtctaatcgtgtaggaa

SEQ ID NO: 94343 - DNA, 25 bp, Probe Sequence
gaataaagctgtattccagtgcttc

SEQ ID NO: 94344 - DNA, 25 bp, Probe Sequence
aataaagctgtattccagtgcttcc

SEQ ID NO: 94345 - DNA, 25 bp, Probe Sequence
ataaagctgtattccagtgcttcca

SEQ ID NO: 94346 - DNA, 25 bp, Probe Sequence
taaagctgtattccagtgcttccaa

SEQ ID NO: 94347 - DNA, 25 bp, Probe Sequence
aaagctgtattccagtgcttccaaa

SEQ ID NO: 94348 - DNA, 25 bp, Probe Sequence
aagctgtattccagtgcttccaaaa

SEQ ID NO: 94349 - DNA, 25 bp, Probe Sequence
actctctcactaggcaagaacttat

SEQ ID NO: 94350 - DNA, 25 bp, Probe Sequence
tctctcactaggcaagaacttatag

SEQ ID NO: 94351 - DNA, 25 bp, Probe Sequence
ctctctcactaggcaagaacttata

SEQ ID NO: 94352 - DNA, 25 bp, Probe Sequence
cactctctcactaggcaagaactta

SEQ ID NO: 94353 - DNA, 25 bp, Probe Sequence
ctctcactaggcaagaacttatagt

SEQ ID NO: 94354 - DNA, 25 bp, Probe Sequence
tgtgagaaataaatgtgtgaggaga

SEQ ID NO: 94355 - DNA, 25 bp, Probe Sequence
ctgtgagaaataaatgtgtgaggag

SEQ ID NO: 94356 - DNA, 25 bp, Probe Sequence
gtgagaaataaatgtgtgaggagag

SEQ ID NO: 94357 - DNA, 25 bp, Probe Sequence
tgagaaataaatgtgtgaggagagc

SEQ ID NO: 94358 - DNA, 25 bp, Probe Sequence
taaacgaactttgaaatgccagaac

SEQ ID NO: 94359 - DNA, 25 bp, Probe Sequence
gtaaacgaactttgaaatgccagaa

SEQ ID NO: 94360 - DNA, 25 bp, Probe Sequence
cactgaattgggaaacctacatttg

SEQ ID NO: 94361 - DNA, 25 bp, Probe Sequence
tcactgaattgggaaacctacattt

SEQ ID NO: 94362 - DNA, 25 bp, Probe Sequence
tctgtgagaaataaatgtgtgagga

SEQ ID NO: 94363 - DNA, 25 bp, Probe Sequence
actgaattgggaaacctacatttgt

SEQ ID NO: 94364 - DNA, 25 bp, Probe Sequence
gagaaataaatgtgtgaggagagcc

SEQ ID NO: 94365 - DNA, 25 bp, Probe Sequence
aacgaactttgaaatgccagaacta

SEQ ID NO: 94366 - DNA, 25 bp, Probe Sequence
atctgtgagaaataaatgtgtgagg

SEQ ID NO: 94367 - DNA, 25 bp, Probe Sequence
gtcactgaattgggaaacctacatt

SEQ ID NO: 94368 - DNA, 25 bp, Probe Sequence
catcagagagggtgaagaataagtc

SEQ ID NO: 94369 - DNA, 25 bp, Probe Sequence
ctgaattgggaaacctacatttgta

SEQ ID NO: 94370 - DNA, 25 bp, Probe Sequence
tcactctctcactaggcaagaactt

SEQ ID NO: 94371 - DNA, 25 bp, Probe Sequence
tacccacagtaaacgaactttgaaa

SEQ ID NO: 94372 - DNA, 25 bp, Probe Sequence
cccacagtaaacgaactttgaaatg

SEQ ID NO: 94373 - DNA, 25 bp, Probe Sequence
taagttgtcatttgtaggtttcagc

SEQ ID NO: 94374 - DNA, 25 bp, Probe Sequence
ttaagttgtcatttgtaggtttcag

SEQ ID NO: 94375 - DNA, 25 bp, Probe Sequence
gcatcttaaagctgagtgtatttct

SEQ ID NO: 94376 - DNA, 25 bp, Probe Sequence
aagttgtcatttgtaggtttcagct

SEQ ID NO: 94377 - DNA, 25 bp, Probe Sequence
ttgtagcttgctatctgtatttgaa

SEQ ID NO: 94378 - DNA, 25 bp, Probe Sequence
tttgtagcttgctatctgtatttga

SEQ ID NO: 94379 - DNA, 25 bp, Probe Sequence
tgtagcttgctatctgtatttgaat

SEQ ID NO: 94380 - DNA, 25 bp, Probe Sequence
tttctaatgtcttccattcctaccc

SEQ ID NO: 94381 - DNA, 25 bp, Probe Sequence
cttctttcattctgatctttgttca

SEQ ID NO: 94382 - DNA, 25 bp, Probe Sequence
ctgaggacctgcattagaaacattt

SEQ ID NO: 94383 - DNA, 25 bp, Probe Sequence
gataacttgctgtttctcacgtttc

SEQ ID NO: 94384 - DNA, 25 bp, Probe Sequence
tcttctttcattctgatctttgttc

SEQ ID NO: 94385 - DNA, 25 bp, Probe Sequence
cccgtttcttaagttgtcatttgta

SEQ ID NO: 94386 - DNA, 25 bp, Probe Sequence
ttcccgtttcttaagttgtcatttg

SEQ ID NO: 94387 - DNA, 25 bp, Probe Sequence
gttgtacaggaagagatgtgtctaa

SEQ ID NO: 94388 - DNA, 25 bp, Probe Sequence
aattgttgtacaggaagagatgtgt

SEQ ID NO: 94389 - DNA, 25 bp, Probe Sequence
ataacttgctgtttctcacgtttca

SEQ ID NO: 94390 - DNA, 25 bp, Probe Sequence
cttcccgtttcttaagttgtcattt

SEQ ID NO: 94391 - DNA, 25 bp, Probe Sequence
attgttgtacaggaagagatgtgtc

SEQ ID NO: 94392 - DNA, 25 bp, Probe Sequence
atttgtagcttgctatctgtatttg

SEQ ID NO: 94393 - DNA, 25 bp, Probe Sequence
tgttgtacaggaagagatgtgtcta

SEQ ID NO: 94394 - DNA, 25 bp, Probe Sequence
tcttcccgtttcttaagttgtcatt

SEQ ID NO: 94395 - DNA, 25 bp, Probe Sequence
tcccgtttcttaagttgtcatttgt

SEQ ID NO: 94396 - DNA, 25 bp, Probe Sequence
cgtttcttaagttgtcatttgtagg

SEQ ID NO: 94397 - DNA, 25 bp, Probe Sequence
ggaactagcaggacatcacttacaa

SEQ ID NO: 94398 - DNA, 25 bp, Probe Sequence
tagcaggacatcacttacaaattca

SEQ ID NO: 94399 - DNA, 25 bp, Probe Sequence
ctctggatacatctcctgacagtac

SEQ ID NO: 94400 - DNA, 25 bp, Probe Sequence
actagcaggacatcacttacaaatt

SEQ ID NO: 94401 - DNA, 25 bp, Probe Sequence
aactagcaggacatcacttacaaat

SEQ ID NO: 94402 - DNA, 25 bp, Probe Sequence
ctagcaggacatcacttacaaattc

SEQ ID NO: 94403 - DNA, 25 bp, Probe Sequence
gaactagcaggacatcacttacaaa

SEQ ID NO: 94404 - DNA, 25 bp, Probe Sequence
agcaggacatcacttacaaattcac

SEQ ID NO: 94405 - DNA, 25 bp, Probe Sequence
tggaactagcaggacatcacttaca

SEQ ID NO: 94406 - DNA, 25 bp, Probe Sequence
ctggaactagcaggacatcacttac

SEQ ID NO: 94407 - DNA, 25 bp, Probe Sequence
caggacatcacttacaaattcaccc

SEQ ID NO: 94408 - DNA, 25 bp, Probe Sequence
tctggaactagcaggacatcactta

SEQ ID NO: 94409 - DNA, 25 bp, Probe Sequence
ggacatcacttacaaattcacccac

SEQ ID NO: 94410 - DNA, 25 bp, Probe Sequence
catcacttacaaattcacccacgag

SEQ ID NO: 94411 - DNA, 25 bp, Probe Sequence
aggacatcacttacaaattcaccca

SEQ ID NO: 94412 - DNA, 25 bp, Probe Sequence
atccaataatctttgtctgagggca

SEQ ID NO: 94413 - DNA, 25 bp, Probe Sequence
atcacttacaaattcacccacgaga

SEQ ID NO: 94414 - DNA, 25 bp, Probe Sequence
atgccgtagctatataaggtcattc

SEQ ID NO: 94415 - DNA, 25 bp, Probe Sequence
catgccgtagctatataaggtcatt

SEQ ID NO: 94416 - DNA, 25 bp, Probe Sequence
gcaggacatcacttacaaattcacc

SEQ ID NO: 94417 - DNA, 25 bp, Probe Sequence
tgatctgtagctctggatacatctc

SEQ ID NO: 94418 - DNA, 25 bp, Probe Sequence
ttgtgatctgtagctctggatacat

SEQ ID NO: 94419 - DNA, 25 bp, Probe Sequence
atttgtgatctgtagctctggatac

SEQ ID NO: 94420 - DNA, 25 bp, Probe Sequence
catttgtgatctgtagctctggata

SEQ ID NO: 94421 - DNA, 25 bp, Probe Sequence
gactgctcactgttcatattatagg

SEQ ID NO: 94422 - DNA, 25 bp, Probe Sequence
ttctgactgctcactgttcatatta

SEQ ID NO: 94423 - DNA, 25 bp, Probe Sequence
tctgactgctcactgttcatattat

SEQ ID NO: 94424 - DNA, 25 bp, Probe Sequence
ggtggcttcatattaagtagtaaca

SEQ ID NO: 94425 - DNA, 25 bp, Probe Sequence
tggtggcttcatattaagtagtaac

SEQ ID NO: 94426 - DNA, 25 bp, Probe Sequence
gcatggtggcttcatattaagtagt

SEQ ID NO: 94427 - DNA, 25 bp, Probe Sequence
tgactgctcactgttcatattatag

SEQ ID NO: 94428 - DNA, 25 bp, Probe Sequence
ctgactgctcactgttcatattata

SEQ ID NO: 94429 - DNA, 25 bp, Probe Sequence
atggtggcttcatattaagtagtaa

SEQ ID NO: 94430 - DNA, 25 bp, Probe Sequence
catggtggcttcatattaagtagta

SEQ ID NO: 94431 - DNA, 25 bp, Probe Sequence
agatactctatggtagaactaaggc

SEQ ID NO: 94432 - DNA, 25 bp, Probe Sequence
actgctcactgttcatattataggg

SEQ ID NO: 94433 - DNA, 25 bp, Probe Sequence
aaccctttgtatatttctgactgct

SEQ ID NO: 94434 - DNA, 25 bp, Probe Sequence
gtggcttcatattaagtagtaacag

SEQ ID NO: 94435 - DNA, 25 bp, Probe Sequence
accctttgtatatttctgactgctc

SEQ ID NO: 94436 - DNA, 25 bp, Probe Sequence
tggcttcatattaagtagtaacaga

SEQ ID NO: 94437 - DNA, 25 bp, Probe Sequence
atcttagagaaatgagtgctggttt

SEQ ID NO: 94438 - DNA, 25 bp, Probe Sequence
ctatcttagagaaatgagtgctggt

SEQ ID NO: 94439 - DNA, 25 bp, Probe Sequence
acctatcttagagaaatgagtgctg

SEQ ID NO: 94440 - DNA, 25 bp, Probe Sequence
tatcttagagaaatgagtgctggtt

SEQ ID NO: 94441 - DNA, 25 bp, Probe Sequence
cctatcttagagaaatgagtgctgg

SEQ ID NO: 94442 - DNA, 25 bp, Probe Sequence
taaccctttgtatatttctgactgc

SEQ ID NO: 94443 - DNA, 25 bp, Probe Sequence
gccaaagtctttaccctatttaacc

SEQ ID NO: 94444 - DNA, 25 bp, Probe Sequence
aacctatcttagagaaatgagtgct

SEQ ID NO: 94445 - DNA, 25 bp, Probe Sequence
aggtctgctttgtcttatatttgga

SEQ ID NO: 94446 - DNA, 25 bp, Probe Sequence
ggtctgctttgtcttatatttggaa

SEQ ID NO: 94447 - DNA, 25 bp, Probe Sequence
caggtctgctttgtcttatatttgg

SEQ ID NO: 94448 - DNA, 25 bp, Probe Sequence
cgagataacatacgcccaaataata

SEQ ID NO: 94449 - DNA, 25 bp, Probe Sequence
ccgagataacatacgcccaaataat

SEQ ID NO: 94450 - DNA, 25 bp, Probe Sequence
agcctgtagggaattaaagtgaatc

SEQ ID NO: 94451 - DNA, 25 bp, Probe Sequence
gagcctgtagggaattaaagtgaat

SEQ ID NO: 94452 - DNA, 25 bp, Probe Sequence
gcctgtagggaattaaagtgaatca

SEQ ID NO: 94453 - DNA, 25 bp, Probe Sequence
gataacatacgcccaaataatagga

SEQ ID NO: 94454 - DNA, 25 bp, Probe Sequence
agataacatacgcccaaataatagg

SEQ ID NO: 94455 - DNA, 25 bp, Probe Sequence
tggcttctttgtatttctgatcgta

SEQ ID NO: 94456 - DNA, 25 bp, Probe Sequence
cttggcttctttgtatttctgatcg

SEQ ID NO: 94457 - DNA, 25 bp, Probe Sequence
taacatacgcccaaataataggaaa

SEQ ID NO: 94458 - DNA, 25 bp, Probe Sequence
ggcttctttgtatttctgatcgtaa

SEQ ID NO: 94459 - DNA, 25 bp, Probe Sequence
gcttggcttctttgtatttctgatc

SEQ ID NO: 94460 - DNA, 25 bp, Probe Sequence
ggtagaagttcccatgagtgattat

SEQ ID NO: 94461 - DNA, 25 bp, Probe Sequence
tgctttgtcttatatttggaagtct

SEQ ID NO: 94462 - DNA, 25 bp, Probe Sequence
tctgctttgtcttatatttggaagt

SEQ ID NO: 94463 - DNA, 25 bp, Probe Sequence
ttggcttctttgtatttctgatcgt

SEQ ID NO: 94464 - DNA, 25 bp, Probe Sequence
ataacatacgcccaaataataggaa

SEQ ID NO: 94465 - DNA, 25 bp, Probe Sequence
tttgtatttctgatcgtaagggctg

SEQ ID NO: 94466 - DNA, 25 bp, Probe Sequence
ctttgtatttctgatcgtaagggct

SEQ ID NO: 94467 - DNA, 25 bp, Probe Sequence
tctttgtatttctgatcgtaagggc

SEQ ID NO: 94468 - DNA, 25 bp, Probe Sequence
ctttgtcttatatttggaagtctgc

SEQ ID NO: 94469 - DNA, 25 bp, Probe Sequence
gtgtatgtatcttcaactggtgtcc

SEQ ID NO: 94470 - DNA, 25 bp, Probe Sequence
agtgtatgtatcttcaactggtgtc

SEQ ID NO: 94471 - DNA, 25 bp, Probe Sequence
tagtgtatgtatcttcaactggtgt

SEQ ID NO: 94472 - DNA, 25 bp, Probe Sequence
tgtagtgtatgtatcttcaactggt

SEQ ID NO: 94473 - DNA, 25 bp, Probe Sequence
gtagtgtatgtatcttcaactggtg

SEQ ID NO: 94474 - DNA, 25 bp, Probe Sequence
atgtagtgtatgtatcttcaactgg

SEQ ID NO: 94475 - DNA, 25 bp, Probe Sequence
ataacaatggtaggcttccagttaa

SEQ ID NO: 94476 - DNA, 25 bp, Probe Sequence
aataacaatggtaggcttccagtta

SEQ ID NO: 94477 - DNA, 25 bp, Probe Sequence
gtatgtatcttcaactggtgtccaa

SEQ ID NO: 94478 - DNA, 25 bp, Probe Sequence
taaagacggtagattggtagattgg

SEQ ID NO: 94479 - DNA, 25 bp, Probe Sequence
gaataacaatggtaggcttccagtt

SEQ ID NO: 94480 - DNA, 25 bp, Probe Sequence
ttgaataacaatggtaggcttccag

SEQ ID NO: 94481 - DNA, 25 bp, Probe Sequence
tgagaaagcccaatcctatatgttt

SEQ ID NO: 94482 - DNA, 25 bp, Probe Sequence
ctgagaaagcccaatcctatatgtt

SEQ ID NO: 94483 - DNA, 25 bp, Probe Sequence
ataaacaacaaacactgagaaagcc

SEQ ID NO: 94484 - DNA, 25 bp, Probe Sequence
cagttaaagacggtagattggtaga

SEQ ID NO: 94485 - DNA, 25 bp, Probe Sequence
tgtatgtatcttcaactggtgtcca

SEQ ID NO: 94486 - DNA, 25 bp, Probe Sequence
cactgagaaagcccaatcctatatg

SEQ ID NO: 94487 - DNA, 25 bp, Probe Sequence
agttaaagacggtagattggtagat

SEQ ID NO: 94488 - DNA, 25 bp, Probe Sequence
actgagaaagcccaatcctatatgt

SEQ ID NO: 94489 - DNA, 25 bp, Probe Sequence
acactgagaaagcccaatcctatat

SEQ ID NO: 94490 - DNA, 25 bp, Probe Sequence
caagtttgaataacaatggtaggct

SEQ ID NO: 94491 - DNA, 25 bp, Probe Sequence
gtttgaataacaatggtaggcttcc

SEQ ID NO: 94492 - DNA, 25 bp, Probe Sequence
agtttgaataacaatggtaggcttc

SEQ ID NO: 94493 - DNA, 25 bp, Probe Sequence
ctaccacaagaagcggaagtatgag

SEQ ID NO: 94494 - DNA, 25 bp, Probe Sequence
agagttggagttctatcttaggaaa

SEQ ID NO: 94495 - DNA, 25 bp, Probe Sequence
taccacaagaagcggaagtatgagt

SEQ ID NO: 94496 - DNA, 25 bp, Probe Sequence
aagagttggagttctatcttaggaa

SEQ ID NO: 94497 - DNA, 25 bp, Probe Sequence
tttgtcttcacccatgtaataaagg

SEQ ID NO: 94498 - DNA, 25 bp, Probe Sequence
cacaagaagcggaagtatgagttgg

SEQ ID NO: 94499 - DNA, 25 bp, Probe Sequence
ccacaagaagcggaagtatgagttg

SEQ ID NO: 94500 - DNA, 25 bp, Probe Sequence
cctaccacaagaagcggaagtatga

SEQ ID NO: 94501 - DNA, 25 bp, Probe Sequence
ttgtcttcacccatgtaataaaggt

SEQ ID NO: 94502 - DNA, 25 bp, Probe Sequence
accacaagaagcggaagtatgagtt

SEQ ID NO: 94503 - DNA, 25 bp, Probe Sequence
gagggcaaagagttggagttctatc

SEQ ID NO: 94504 - DNA, 25 bp, Probe Sequence
ggcaaagagttggagttctatctta

SEQ ID NO: 94505 - DNA, 25 bp, Probe Sequence
caagagaaagccctaccacaagaag

SEQ ID NO: 94506 - DNA, 25 bp, Probe Sequence
gcaaagagttggagttctatcttag

SEQ ID NO: 94507 - DNA, 25 bp, Probe Sequence
aaaggtgtttattgttttgttccca

SEQ ID NO: 94508 - DNA, 25 bp, Probe Sequence
ctacaatgcatctaataacgagctg

SEQ ID NO: 94509 - DNA, 25 bp, Probe Sequence
tctacaatgcatctaataacgagct

SEQ ID NO: 94510 - DNA, 25 bp, Probe Sequence
gtctacaatgcatctaataacgagc

SEQ ID NO: 94511 - DNA, 25 bp, Probe Sequence
ataaatccttgttttgtcttcaccc

SEQ ID NO: 94512 - DNA, 25 bp, Probe Sequence
agggcaaagagttggagttctatct

SEQ ID NO: 94513 - DNA, 25 bp, Probe Sequence
agagggcaaagagttggagttctat

SEQ ID NO: 94514 - DNA, 25 bp, Probe Sequence
ctgactcctgaggaagaagagattt

SEQ ID NO: 94515 - DNA, 25 bp, Probe Sequence
taaatccttgttttgtcttcaccca

SEQ ID NO: 94516 - DNA, 25 bp, Probe Sequence
aaagagttggagttctatcttagga

SEQ ID NO: 94517 - DNA, 25 bp, Probe Sequence
ctaccacaagaagcggaagtatgag

SEQ ID NO: 94518 - DNA, 25 bp, Probe Sequence
agagttggagttctatcttaggaaa

SEQ ID NO: 94519 - DNA, 25 bp, Probe Sequence
taccacaagaagcggaagtatgagt

SEQ ID NO: 94520 - DNA, 25 bp, Probe Sequence
aagagttggagttctatcttaggaa

SEQ ID NO: 94521 - DNA, 25 bp, Probe Sequence
tttgtcttcacccatgtaataaagg

SEQ ID NO: 94522 - DNA, 25 bp, Probe Sequence
cacaagaagcggaagtatgagttgg

SEQ ID NO: 94523 - DNA, 25 bp, Probe Sequence
ccacaagaagcggaagtatgagttg

SEQ ID NO: 94524 - DNA, 25 bp, Probe Sequence
cctaccacaagaagcggaagtatga

SEQ ID NO: 94525 - DNA, 25 bp, Probe Sequence
ttgtcttcacccatgtaataaaggt

SEQ ID NO: 94526 - DNA, 25 bp, Probe Sequence
accacaagaagcggaagtatgagtt

SEQ ID NO: 94527 - DNA, 25 bp, Probe Sequence
gagggcaaagagttggagttctatc

SEQ ID NO: 94528 - DNA, 25 bp, Probe Sequence
ggcaaagagttggagttctatctta

SEQ ID NO: 94529 - DNA, 25 bp, Probe Sequence
caagagaaagccctaccacaagaag

SEQ ID NO: 94530 - DNA, 25 bp, Probe Sequence
gcaaagagttggagttctatcttag

SEQ ID NO: 94531 - DNA, 25 bp, Probe Sequence
aaaggtgtttattgttttgttccca

SEQ ID NO: 94532 - DNA, 25 bp, Probe Sequence
ctacaatgcatctaataacgagctg

SEQ ID NO: 94533 - DNA, 25 bp, Probe Sequence
tctacaatgcatctaataacgagct

SEQ ID NO: 94534 - DNA, 25 bp, Probe Sequence
gtctacaatgcatctaataacgagc

SEQ ID NO: 94535 - DNA, 25 bp, Probe Sequence
ataaatccttgttttgtcttcaccc

SEQ ID NO: 94536 - DNA, 25 bp, Probe Sequence
agggcaaagagttggagttctatct

SEQ ID NO: 94537 - DNA, 25 bp, Probe Sequence
agagggcaaagagttggagttctat

SEQ ID NO: 94538 - DNA, 25 bp, Probe Sequence
ctgactcctgaggaagaagagattt

SEQ ID NO: 94539 - DNA, 25 bp, Probe Sequence
taaatccttgttttgtcttcaccca

SEQ ID NO: 94540 - DNA, 25 bp, Probe Sequence
aaagagttggagttctatcttagga

SEQ ID NO: 94541 - DNA, 25 bp, Probe Sequence
aatgtcttagtgtctagtggatcag

SEQ ID NO: 94542 - DNA, 25 bp, Probe Sequence
atgtcttagtgtctagtggatcagg

SEQ ID NO: 94543 - DNA, 25 bp, Probe Sequence
tgggtaaatgtcttagtgtctagtg

SEQ ID NO: 94544 - DNA, 25 bp, Probe Sequence
gggtaaatgtcttagtgtctagtgg

SEQ ID NO: 94545 - DNA, 25 bp, Probe Sequence
ggtaaatgtcttagtgtctagtgga

SEQ ID NO: 94546 - DNA, 25 bp, Probe Sequence
atgggtaaatgtcttagtgtctagt

SEQ ID NO: 94547 - DNA, 25 bp, Probe Sequence
aaatgtcttagtgtctagtggatca

SEQ ID NO: 94548 - DNA, 25 bp, Probe Sequence
catcatgggtaaatgtcttagtgtc

SEQ ID NO: 94549 - DNA, 25 bp, Probe Sequence
atcatgggtaaatgtcttagtgtct

SEQ ID NO: 94550 - DNA, 25 bp, Probe Sequence
tcatgggtaaatgtcttagtgtcta

SEQ ID NO: 94551 - DNA, 25 bp, Probe Sequence
tgtcttagtgtctagtggatcaggc

SEQ ID NO: 94552 - DNA, 25 bp, Probe Sequence
catgggtaaatgtcttagtgtctag

SEQ ID NO: 94553 - DNA, 25 bp, Probe Sequence
gtaaatgtcttagtgtctagtggat

SEQ ID NO: 94554 - DNA, 25 bp, Probe Sequence
taaatgtcttagtgtctagtggatc

SEQ ID NO: 94555 - DNA, 25 bp, Probe Sequence
gtcttagtgtctagtggatcaggcc

SEQ ID NO: 94556 - DNA, 25 bp, Probe Sequence
agtaaaataaaagctgtgtttgaga

SEQ ID NO: 94557 - DNA, 25 bp, Probe Sequence
aaaataaaagctgtgtttgagaaaa

SEQ ID NO: 94558 - DNA, 25 bp, Probe Sequence
gtaaaataaaagctgtgtttgagaa

SEQ ID NO: 94559 - DNA, 25 bp, Probe Sequence
tcttagtgtctagtggatcaggcca

SEQ ID NO: 94560 - DNA, 25 bp, Probe Sequence
taaaataaaagctgtgtttgagaaa

SEQ ID NO: 94561 - DNA, 25 bp, Probe Sequence
ctcagcaagcatgtagtaactcttc

SEQ ID NO: 94562 - DNA, 25 bp, Probe Sequence
aatacgcacattcacaccttgtaag

SEQ ID NO: 94563 - DNA, 25 bp, Probe Sequence
acattcacaccttgtaagaatctga

SEQ ID NO: 94564 - DNA, 25 bp, Probe Sequence
cacattcacaccttgtaagaatctg

SEQ ID NO: 94565 - DNA, 25 bp, Probe Sequence
cattcacaccttgtaagaatctgag

SEQ ID NO: 94566 - DNA, 25 bp, Probe Sequence
tctcagcaagcatgtagtaactctt

SEQ ID NO: 94567 - DNA, 25 bp, Probe Sequence
attcacaccttgtaagaatctgagg

SEQ ID NO: 94568 - DNA, 25 bp, Probe Sequence
ctctcagcaagcatgtagtaactct

SEQ ID NO: 94569 - DNA, 25 bp, Probe Sequence
cttgaatttagacagaatacgcaca

SEQ ID NO: 94570 - DNA, 25 bp, Probe Sequence
ccttgaatttagacagaatacgcac

SEQ ID NO: 94571 - DNA, 25 bp, Probe Sequence
tccttgaatttagacagaatacgca

SEQ ID NO: 94572 - DNA, 25 bp, Probe Sequence
atacgaaataaattagccaggtgtg

SEQ ID NO: 94573 - DNA, 25 bp, Probe Sequence
ttagacagaatacgcacattcacac

SEQ ID NO: 94574 - DNA, 25 bp, Probe Sequence
gcacattcacaccttgtaagaatct

SEQ ID NO: 94575 - DNA, 25 bp, Probe Sequence
atccttgaatttagacagaatacgc

SEQ ID NO: 94576 - DNA, 25 bp, Probe Sequence
tgaatttagacagaatacgcacatt

SEQ ID NO: 94577 - DNA, 25 bp, Probe Sequence
ttgaatttagacagaatacgcacat

SEQ ID NO: 94578 - DNA, 25 bp, Probe Sequence
atacgcacattcacaccttgtaaga

SEQ ID NO: 94579 - DNA, 25 bp, Probe Sequence
gattccagtctatcttctccatgcc

SEQ ID NO: 94580 - DNA, 25 bp, Probe Sequence
aatacgaaataaattagccaggtgt

SEQ ID NO: 94581 - DNA, 25 bp, Probe Sequence
gaatacgcacattcacaccttgtaa

SEQ ID NO: 94582 - DNA, 25 bp, Probe Sequence
cagcaatccttgaatttagacagaa

SEQ ID NO: 94583 - DNA, 25 bp, Probe Sequence
tcagcaagcatgtagtaactcttcc

SEQ ID NO: 94584 - DNA, 25 bp, Probe Sequence
tacgcacattcacaccttgtaagaa

SEQ ID NO: 94585 - DNA, 25 bp, Probe Sequence
ttcctatcctcaatcctgaacaaga

SEQ ID NO: 94586 - DNA, 25 bp, Probe Sequence
ggaagacaggacagtgtatgttata

SEQ ID NO: 94587 - DNA, 25 bp, Probe Sequence
tcctatcctcaatcctgaacaagag

SEQ ID NO: 94588 - DNA, 25 bp, Probe Sequence
gtttcctttcctatcctcaatcctg

SEQ ID NO: 94589 - DNA, 25 bp, Probe Sequence
agtttcctttcctatcctcaatcct

SEQ ID NO: 94590 - DNA, 25 bp, Probe Sequence
gaagaagtttcctttcctatcctca

SEQ ID NO: 94591 - DNA, 25 bp, Probe Sequence
aagtttcctttcctatcctcaatcc

SEQ ID NO: 94592 - DNA, 25 bp, Probe Sequence
gattcccattaggctcatcatactg

SEQ ID NO: 94593 - DNA, 25 bp, Probe Sequence
aagaagtttcctttcctatcctcaa

SEQ ID NO: 94594 - DNA, 25 bp, Probe Sequence
gaacaagaggtatttctggacttct

SEQ ID NO: 94595 - DNA, 25 bp, Probe Sequence
agaagtttcctttcctatcctcaat

SEQ ID NO: 94596 - DNA, 25 bp, Probe Sequence
tgaacaagaggtatttctggacttc

SEQ ID NO: 94597 - DNA, 25 bp, Probe Sequence
ctgaacaagaggtatttctggactt

SEQ ID NO: 94598 - DNA, 25 bp, Probe Sequence
gaagtttcctttcctatcctcaatc

SEQ ID NO: 94599 - DNA, 25 bp, Probe Sequence
cgaagaagtttcctttcctatcctc

SEQ ID NO: 94600 - DNA, 25 bp, Probe Sequence
attcccattaggctcatcatactgt

SEQ ID NO: 94601 - DNA, 25 bp, Probe Sequence
tttcctatcctcaatcctgaacaag

SEQ ID NO: 94602 - DNA, 25 bp, Probe Sequence
ctttcctatcctcaatcctgaacaa

SEQ ID NO: 94603 - DNA, 25 bp, Probe Sequence
gaagacaggacagtgtatgttataa

SEQ ID NO: 94604 - DNA, 25 bp, Probe Sequence
ttcctttcctatcctcaatcctgaa

SEQ ID NO: 94605 - DNA, 25 bp, Probe Sequence
tttcctttcctatcctcaatcctga

SEQ ID NO: 94606 - DNA, 25 bp, Probe Sequence
ctcacactgactgttgtatttcatc

SEQ ID NO: 94607 - DNA, 25 bp, Probe Sequence
ttaggctcatcatactgtgattgaa

SEQ ID NO: 94608 - DNA, 25 bp, Probe Sequence
cacactgactgttgtatttcatctg

SEQ ID NO: 94609 - DNA, 25 bp, Probe Sequence
tttcattcatcaacctctcaatccc

SEQ ID NO: 94610 - DNA, 25 bp, Probe Sequence
attcatcaacctctcaatcccagat

SEQ ID NO: 94611 - DNA, 25 bp, Probe Sequence
ttcattcatcaacctctcaatccca

SEQ ID NO: 94612 - DNA, 25 bp, Probe Sequence
caaacctatacacaaccaagtgaaa

SEQ ID NO: 94613 - DNA, 25 bp, Probe Sequence
tcattcatcaacctctcaatcccag

SEQ ID NO: 94614 - DNA, 25 bp, Probe Sequence
cctatacacaaccaagtgaaaggat

SEQ ID NO: 94615 - DNA, 25 bp, Probe Sequence
aaacctatacacaaccaagtgaaag

SEQ ID NO: 94616 - DNA, 25 bp, Probe Sequence
aacctatacacaaccaagtgaaagg

SEQ ID NO: 94617 - DNA, 25 bp, Probe Sequence
ctatacacaaccaagtgaaaggatt

SEQ ID NO: 94618 - DNA, 25 bp, Probe Sequence
cattcatcaacctctcaatcccaga

SEQ ID NO: 94619 - DNA, 25 bp, Probe Sequence
atacacaaccaagtgaaaggattaa

SEQ ID NO: 94620 - DNA, 25 bp, Probe Sequence
acctatacacaaccaagtgaaagga

SEQ ID NO: 94621 - DNA, 25 bp, Probe Sequence
gcaaacctatacacaaccaagtgaa

SEQ ID NO: 94622 - DNA, 25 bp, Probe Sequence
acacaaccaagtgaaaggattaatt

SEQ ID NO: 94623 - DNA, 25 bp, Probe Sequence
tcatcaacctctcaatcccagattt

SEQ ID NO: 94624 - DNA, 25 bp, Probe Sequence
ttcatcaacctctcaatcccagatt

SEQ ID NO: 94625 - DNA, 25 bp, Probe Sequence
tatacacaaccaagtgaaaggatta

SEQ ID NO: 94626 - DNA, 25 bp, Probe Sequence
tacacaaccaagtgaaaggattaat

SEQ ID NO: 94627 - DNA, 25 bp, Probe Sequence
ttttcattcatcaacctctcaatcc

SEQ ID NO: 94628 - DNA, 25 bp, Probe Sequence
cacaaccaagtgaaaggattaattt

SEQ ID NO: 94629 - DNA, 25 bp, Probe Sequence
attttcattcatcaacctctcaatc

SEQ ID NO: 94630 - DNA, 25 bp, Probe Sequence
acctctcaatcccagattttcaaaa

SEQ ID NO: 94631 - DNA, 25 bp, Probe Sequence
aacctctcaatcccagattttcaaa

SEQ ID NO: 94632 - DNA, 25 bp, Probe Sequence
atcaacctctcaatcccagattttc

SEQ ID NO: 94633 - DNA, 25 bp, Probe Sequence
cagttcgtatcctagaggttgttaa

SEQ ID NO: 94634 - DNA, 25 bp, Probe Sequence
acttcaacaagccagatatagatgc

SEQ ID NO: 94635 - DNA, 25 bp, Probe Sequence
agttcgtatcctagaggttgttaag

SEQ ID NO: 94636 - DNA, 25 bp, Probe Sequence
ggtaacatacttcaacaagccagat

SEQ ID NO: 94637 - DNA, 25 bp, Probe Sequence
gtaacatacttcaacaagccagata

SEQ ID NO: 94638 - DNA, 25 bp, Probe Sequence
attgctacttgagtgtgaacagtta

SEQ ID NO: 94639 - DNA, 25 bp, Probe Sequence
tagtacagttcgtatcctagaggtt

SEQ ID NO: 94640 - DNA, 25 bp, Probe Sequence
cttcaacaagccagatatagatgcc

SEQ ID NO: 94641 - DNA, 25 bp, Probe Sequence
ttcaacaagccagatatagatgcct

SEQ ID NO: 94642 - DNA, 25 bp, Probe Sequence
acatacttcaacaagccagatatag

SEQ ID NO: 94643 - DNA, 25 bp, Probe Sequence
tattgacattgctacttgagtgtga

SEQ ID NO: 94644 - DNA, 25 bp, Probe Sequence
ttattgacattgctacttgagtgtg

SEQ ID NO: 94645 - DNA, 25 bp, Probe Sequence
agtacagttcgtatcctagaggttg

SEQ ID NO: 94646 - DNA, 25 bp, Probe Sequence
ttgctacttgagtgtgaacagttac

SEQ ID NO: 94647 - DNA, 25 bp, Probe Sequence
tacttcaacaagccagatatagatg

SEQ ID NO: 94648 - DNA, 25 bp, Probe Sequence
catacttcaacaagccagatataga

SEQ ID NO: 94649 - DNA, 25 bp, Probe Sequence
attgacattgctacttgagtgtgaa

SEQ ID NO: 94650 - DNA, 25 bp, Probe Sequence
acagttcgtatcctagaggttgtta

SEQ ID NO: 94651 - DNA, 25 bp, Probe Sequence
tacagttcgtatcctagaggttgtt

SEQ ID NO: 94652 - DNA, 25 bp, Probe Sequence
aacatacttcaacaagccagatata

SEQ ID NO: 94653 - DNA, 25 bp, Probe Sequence
taacatacttcaacaagccagatat

SEQ ID NO: 94654 - DNA, 25 bp, Probe Sequence
ctacttgagtgtgaacagttacctg

SEQ ID NO: 94655 - DNA, 25 bp, Probe Sequence
cattgctacttgagtgtgaacagtt

SEQ ID NO: 94656 - DNA, 25 bp, Probe Sequence
tatgtcatccaggaacttagaccaa

SEQ ID NO: 94657 - DNA, 25 bp, Probe Sequence
cagttcgtatcctagaggttgttaa

SEQ ID NO: 94658 - DNA, 25 bp, Probe Sequence
acttcaacaagccagatatagatgc

SEQ ID NO: 94659 - DNA, 25 bp, Probe Sequence
agttcgtatcctagaggttgttaag

SEQ ID NO: 94660 - DNA, 25 bp, Probe Sequence
ggtaacatacttcaacaagccagat

SEQ ID NO: 94661 - DNA, 25 bp, Probe Sequence
gtaacatacttcaacaagccagata

SEQ ID NO: 94662 - DNA, 25 bp, Probe Sequence
attgctacttgagtgtgaacagtta

SEQ ID NO: 94663 - DNA, 25 bp, Probe Sequence
tagtacagttcgtatcctagaggtt

SEQ ID NO: 94664 - DNA, 25 bp, Probe Sequence
cttcaacaagccagatatagatgcc

SEQ ID NO: 94665 - DNA, 25 bp, Probe Sequence
ttcaacaagccagatatagatgcct

SEQ ID NO: 94666 - DNA, 25 bp, Probe Sequence
acatacttcaacaagccagatatag

SEQ ID NO: 94667 - DNA, 25 bp, Probe Sequence
tattgacattgctacttgagtgtga

SEQ ID NO: 94668 - DNA, 25 bp, Probe Sequence
ttattgacattgctacttgagtgtg

SEQ ID NO: 94669 - DNA, 25 bp, Probe Sequence
agtacagttcgtatcctagaggttg

SEQ ID NO: 94670 - DNA, 25 bp, Probe Sequence
ttgctacttgagtgtgaacagttac

SEQ ID NO: 94671 - DNA, 25 bp, Probe Sequence
tacttcaacaagccagatatagatg

SEQ ID NO: 94672 - DNA, 25 bp, Probe Sequence
catacttcaacaagccagatataga

SEQ ID NO: 94673 - DNA, 25 bp, Probe Sequence
attgacattgctacttgagtgtgaa

SEQ ID NO: 94674 - DNA, 25 bp, Probe Sequence
acagttcgtatcctagaggttgtta

SEQ ID NO: 94675 - DNA, 25 bp, Probe Sequence
tacagttcgtatcctagaggttgtt

SEQ ID NO: 94676 - DNA, 25 bp, Probe Sequence
aacatacttcaacaagccagatata

SEQ ID NO: 94677 - DNA, 25 bp, Probe Sequence
taacatacttcaacaagccagatat

SEQ ID NO: 94678 - DNA, 25 bp, Probe Sequence
ctacttgagtgtgaacagttacctg

SEQ ID NO: 94679 - DNA, 25 bp, Probe Sequence
cattgctacttgagtgtgaacagtt

SEQ ID NO: 94680 - DNA, 25 bp, Probe Sequence
tatgtcatccaggaacttagaccaa

SEQ ID NO: 94681 - DNA, 25 bp, Probe Sequence
agttaatgtcaagttaggcactact

SEQ ID NO: 94682 - DNA, 25 bp, Probe Sequence
agtgagtacaggactgacacaatat

SEQ ID NO: 94683 - DNA, 25 bp, Probe Sequence
tgagtacaggactgacacaatatta

SEQ ID NO: 94684 - DNA, 25 bp, Probe Sequence
aagtgagtacaggactgacacaata

SEQ ID NO: 94685 - DNA, 25 bp, Probe Sequence
taagtgagtacaggactgacacaat

SEQ ID NO: 94686 - DNA, 25 bp, Probe Sequence
gtgagtacaggactgacacaatatt

SEQ ID NO: 94687 - DNA, 25 bp, Probe Sequence
ctaagtgagtacaggactgacacaa

SEQ ID NO: 94688 - DNA, 25 bp, Probe Sequence
actgacacaatattattcaacatgc

SEQ ID NO: 94689 - DNA, 25 bp, Probe Sequence
aggactgacacaatattattcaaca

SEQ ID NO: 94690 - DNA, 25 bp, Probe Sequence
acaggactgacacaatattattcaa

SEQ ID NO: 94691 - DNA, 25 bp, Probe Sequence
tagttaatgtcaagttaggcactac

SEQ ID NO: 94692 - DNA, 25 bp, Probe Sequence
caggactgacacaatattattcaac

SEQ ID NO: 94693 - DNA, 25 bp, Probe Sequence
tttactaattcaggctgggtttgat

SEQ ID NO: 94694 - DNA, 25 bp, Probe Sequence
gtttagttaatgtcaagttaggcac

SEQ ID NO: 94695 - DNA, 25 bp, Probe Sequence
agtttagttaatgtcaagttaggca

SEQ ID NO: 94696 - DNA, 25 bp, Probe Sequence
ctgggcaacaaagtgagattctatc

SEQ ID NO: 94697 - DNA, 25 bp, Probe Sequence
gagtacaggactgacacaatattat

SEQ ID NO: 94698 - DNA, 25 bp, Probe Sequence
acagtaatttgctacagaatcatca

SEQ ID NO: 94699 - DNA, 25 bp, Probe Sequence
ataagccattatactctttccagga

SEQ ID NO: 94700 - DNA, 25 bp, Probe Sequence
tttctttggaggtgctaagtgagta

SEQ ID NO: 94701 - DNA, 25 bp, Probe Sequence
ttactaattcaggctgggtttgatg

SEQ ID NO: 94702 - DNA, 25 bp, Probe Sequence
cagtttagttaatgtcaagttaggc

SEQ ID NO: 94703 - DNA, 25 bp, Probe Sequence
gacacaatattattcaacatgcaga

SEQ ID NO: 94704 - DNA, 25 bp, Probe Sequence
aataagccattatactctttccagg

SEQ ID NO: 94705 - DNA, 25 bp, Probe Sequence
caccttgtattctctgttaccttct

SEQ ID NO: 94706 - DNA, 25 bp, Probe Sequence
tcaccttgtattctctgttaccttc

SEQ ID NO: 94707 - DNA, 25 bp, Probe Sequence
atcaccttgtattctctgttacctt

SEQ ID NO: 94708 - DNA, 25 bp, Probe Sequence
accttgtattctctgttaccttcta

SEQ ID NO: 94709 - DNA, 25 bp, Probe Sequence
gatcaccttgtattctctgttacct

SEQ ID NO: 94710 - DNA, 25 bp, Probe Sequence
gagtcatcttgctgagtggataatc

SEQ ID NO: 94711 - DNA, 25 bp, Probe Sequence
agatcaccttgtattctctgttacc

SEQ ID NO: 94712 - DNA, 25 bp, Probe Sequence
cattccaattctatatccgacttga

SEQ ID NO: 94713 - DNA, 25 bp, Probe Sequence
tcattccaattctatatccgacttg

SEQ ID NO: 94714 - DNA, 25 bp, Probe Sequence
tctgtgactggatcttctatcattc

SEQ ID NO: 94715 - DNA, 25 bp, Probe Sequence
agtcatcttgctgagtggataatca

SEQ ID NO: 94716 - DNA, 25 bp, Probe Sequence
tgagtcatcttgctgagtggataat

SEQ ID NO: 94717 - DNA, 25 bp, Probe Sequence
ccttgtattctctgttaccttctaa

SEQ ID NO: 94718 - DNA, 25 bp, Probe Sequence
gtctgtgactggatcttctatcatt

SEQ ID NO: 94719 - DNA, 25 bp, Probe Sequence
agtaagcactacaatcatgtcaagt

SEQ ID NO: 94720 - DNA, 25 bp, Probe Sequence
cagtaagcactacaatcatgtcaag

SEQ ID NO: 94721 - DNA, 25 bp, Probe Sequence
gtaagcactacaatcatgtcaagtt

SEQ ID NO: 94722 - DNA, 25 bp, Probe Sequence
aagatcaccttgtattctctgttac

SEQ ID NO: 94723 - DNA, 25 bp, Probe Sequence
atcattccaattctatatccgactt

SEQ ID NO: 94724 - DNA, 25 bp, Probe Sequence
taagcactacaatcatgtcaagttc

SEQ ID NO: 94725 - DNA, 25 bp, Probe Sequence
ctgagtcatcttgctgagtggataa

SEQ ID NO: 94726 - DNA, 25 bp, Probe Sequence
attccaattctatatccgacttgaa

SEQ ID NO: 94727 - DNA, 25 bp, Probe Sequence
gaatatgaggtatccgtaagaccaa

SEQ ID NO: 94728 - DNA, 25 bp, Probe Sequence
gtcatcttgctgagtggataatcac

SEQ ID NO: 94729 - DNA, 25 bp, Probe Sequence
atatagtcaagtaggagcagtggaa

SEQ ID NO: 94730 - DNA, 25 bp, Probe Sequence
aatgttgtgtgaattgaagttctgt

SEQ ID NO: 94731 - DNA, 25 bp, Probe Sequence
tgttgtgtgaattgaagttctgtat

SEQ ID NO: 94732 - DNA, 25 bp, Probe Sequence
atgttgtgtgaattgaagttctgta

SEQ ID NO: 94733 - DNA, 25 bp, Probe Sequence
tatatagtcaagtaggagcagtgga

SEQ ID NO: 94734 - DNA, 25 bp, Probe Sequence
gtatatagtcaagtaggagcagtgg

SEQ ID NO: 94735 - DNA, 25 bp, Probe Sequence
tgtatatagtcaagtaggagcagtg

SEQ ID NO: 94736 - DNA, 25 bp, Probe Sequence
agcaggaagaattatagcaatctgt

SEQ ID NO: 94737 - DNA, 25 bp, Probe Sequence
gcaggaagaattatagcaatctgtc

SEQ ID NO: 94738 - DNA, 25 bp, Probe Sequence
gttgtgtgaattgaagttctgtatt

SEQ ID NO: 94739 - DNA, 25 bp, Probe Sequence
atgtatatagtcaagtaggagcagt

SEQ ID NO: 94740 - DNA, 25 bp, Probe Sequence
caggaagaattatagcaatctgtca

SEQ ID NO: 94741 - DNA, 25 bp, Probe Sequence
agatgtatatagtcaagtaggagca

SEQ ID NO: 94742 - DNA, 25 bp, Probe Sequence
tagcaggaagaattatagcaatctg

SEQ ID NO: 94743 - DNA, 25 bp, Probe Sequence
aggaagaattatagcaatctgtcat

SEQ ID NO: 94744 - DNA, 25 bp, Probe Sequence
gatgtatatagtcaagtaggagcag

SEQ ID NO: 94745 - DNA, 25 bp, Probe Sequence
tgtagtccagtatcagttacttcct

SEQ ID NO: 94746 - DNA, 25 bp, Probe Sequence
ttgtagtccagtatcagttacttcc

SEQ ID NO: 94747 - DNA, 25 bp, Probe Sequence
aacagacaagcctatgtattatgaa

SEQ ID NO: 94748 - DNA, 25 bp, Probe Sequence
atagcaggaagaattatagcaatct

SEQ ID NO: 94749 - DNA, 25 bp, Probe Sequence
tgggatgtgaatggaatgttagaaa

SEQ ID NO: 94750 - DNA, 25 bp, Probe Sequence
acttgtagtccagtatcagttactt

SEQ ID NO: 94751 - DNA, 25 bp, Probe Sequence
acagacaagcctatgtattatgaat

SEQ ID NO: 94752 - DNA, 25 bp, Probe Sequence
tggaatgttagaaatgttgtgtgaa

SEQ ID NO: 94753 - DNA, 25 bp, Probe Sequence
acctgtagtcctagttactcagaag

SEQ ID NO: 94754 - DNA, 25 bp, Probe Sequence
gttacagtgacctatgatgaagcca

SEQ ID NO: 94755 - DNA, 25 bp, Probe Sequence
attcaatgttcatggataggaagac

SEQ ID NO: 94756 - DNA, 25 bp, Probe Sequence
cacctgtagtcctagttactcagaa

SEQ ID NO: 94757 - DNA, 25 bp, Probe Sequence
gtagtcctagttactcagaaggttg

SEQ ID NO: 94758 - DNA, 25 bp, Probe Sequence
tgtagtcctagttactcagaaggtt

SEQ ID NO: 94759 - DNA, 25 bp, Probe Sequence
tagtcctagttactcagaaggttga

SEQ ID NO: 94760 - DNA, 25 bp, Probe Sequence
ctgtagtcctagttactcagaaggt

SEQ ID NO: 94761 - DNA, 25 bp, Probe Sequence
tcaatgttcatggataggaagacaa

SEQ ID NO: 94762 - DNA, 25 bp, Probe Sequence
ttcaatgttcatggataggaagaca

SEQ ID NO: 94763 - DNA, 25 bp, Probe Sequence
ggatattcaatgttcatggatagga

SEQ ID NO: 94764 - DNA, 25 bp, Probe Sequence
aggatattcaatgttcatggatagg

SEQ ID NO: 94765 - DNA, 25 bp, Probe Sequence
cctgtagtcctagttactcagaagg

SEQ ID NO: 94766 - DNA, 25 bp, Probe Sequence
caatgttcatggataggaagacaat

SEQ ID NO: 94767 - DNA, 25 bp, Probe Sequence
acacctgtagtcctagttactcaga

SEQ ID NO: 94768 - DNA, 25 bp, Probe Sequence
cacacctgtagtcctagttactcag

SEQ ID NO: 94769 - DNA, 25 bp, Probe Sequence
cacacacctgtagtcctagttactc

SEQ ID NO: 94770 - DNA, 25 bp, Probe Sequence
gccttcctatatatcagcaataaga

SEQ ID NO: 94771 - DNA, 25 bp, Probe Sequence
acacacctgtagtcctagttactca

SEQ ID NO: 94772 - DNA, 25 bp, Probe Sequence
acaatttacattagcatcccacaaa

SEQ ID NO: 94773 - DNA, 25 bp, Probe Sequence
tagttaagatgtcagttcttgccaa

SEQ ID NO: 94774 - DNA, 25 bp, Probe Sequence
atagttaagatgtcagttcttgcca

SEQ ID NO: 94775 - DNA, 25 bp, Probe Sequence
tacaatttacattagcatcccacaa

SEQ ID NO: 94776 - DNA, 25 bp, Probe Sequence
ttacagtgacctatgatgaagccac

SEQ ID NO: 94777 - DNA, 25 bp, Probe Sequence
gaggtcgtatgtgaaattgctagat

SEQ ID NO: 94778 - DNA, 25 bp, Probe Sequence
aggtcgtatgtgaaattgctagatc

SEQ ID NO: 94779 - DNA, 25 bp, Probe Sequence
gtatgtgaaattgctagatcgtctc

SEQ ID NO: 94780 - DNA, 25 bp, Probe Sequence
tcgtatgtgaaattgctagatcgtc

SEQ ID NO: 94781 - DNA, 25 bp, Probe Sequence
gtcgtatgtgaaattgctagatcgt

SEQ ID NO: 94782 - DNA, 25 bp, Probe Sequence
tatgtgaaattgctagatcgtctca

SEQ ID NO: 94783 - DNA, 25 bp, Probe Sequence
cgtatgtgaaattgctagatcgtct

SEQ ID NO: 94784 - DNA, 25 bp, Probe Sequence
gaagtagacgtaagtgtcagaggat

SEQ ID NO: 94785 - DNA, 25 bp, Probe Sequence
aagtagacgtaagtgtcagaggatg

SEQ ID NO: 94786 - DNA, 25 bp, Probe Sequence
ggtcgtatgtgaaattgctagatcg

SEQ ID NO: 94787 - DNA, 25 bp, Probe Sequence
ggaggtcgtatgtgaaattgctaga

SEQ ID NO: 94788 - DNA, 25 bp, Probe Sequence
tggaggtcgtatgtgaaattgctag

SEQ ID NO: 94789 - DNA, 25 bp, Probe Sequence
gtaagtgtcagaggatgcaaggatc

SEQ ID NO: 94790 - DNA, 25 bp, Probe Sequence
gtggaggtcgtatgtgaaattgcta

SEQ ID NO: 94791 - DNA, 25 bp, Probe Sequence
atctctgcttcgtaggttcgtcttc

SEQ ID NO: 94792 - DNA, 25 bp, Probe Sequence
aagtgtcagaggatgcaaggatcta

SEQ ID NO: 94793 - DNA, 25 bp, Probe Sequence
taagtgtcagaggatgcaaggatct

SEQ ID NO: 94794 - DNA, 25 bp, Probe Sequence
cagaggatgcaaggatctacgattg

SEQ ID NO: 94795 - DNA, 25 bp, Probe Sequence
tcagaggatgcaaggatctacgatt

SEQ ID NO: 94796 - DNA, 25 bp, Probe Sequence
gaaattgctagatcgtctcacacca

SEQ ID NO: 94797 - DNA, 25 bp, Probe Sequence
gatctctgcttcgtaggttcgtctt

SEQ ID NO: 94798 - DNA, 25 bp, Probe Sequence
ggaagtagacgtaagtgtcagagga

SEQ ID NO: 94799 - DNA, 25 bp, Probe Sequence
tgaaattgctagatcgtctcacacc

SEQ ID NO: 94800 - DNA, 25 bp, Probe Sequence
ctacgccagtcatgttgtgattgag

SEQ ID NO: 94801 - DNA, 25 bp, Probe Sequence
gtcactcctagtccaatgtccttag

SEQ ID NO: 94802 - DNA, 25 bp, Probe Sequence
aatcaaagaggcaggtagacacata

SEQ ID NO: 94803 - DNA, 25 bp, Probe Sequence
aaatcaaagaggcaggtagacacat

SEQ ID NO: 94804 - DNA, 25 bp, Probe Sequence
atcaaagaggcaggtagacacatac

SEQ ID NO: 94805 - DNA, 25 bp, Probe Sequence
ggtcactcctagtccaatgtcctta

SEQ ID NO: 94806 - DNA, 25 bp, Probe Sequence
ttcacccaatccaacttcagagaac

SEQ ID NO: 94807 - DNA, 25 bp, Probe Sequence
gttcacccaatccaacttcagagaa

SEQ ID NO: 94808 - DNA, 25 bp, Probe Sequence
gaattgtagagttcacccaatccaa

SEQ ID NO: 94809 - DNA, 25 bp, Probe Sequence
gagaattgtagagttcacccaatcc

SEQ ID NO: 94810 - DNA, 25 bp, Probe Sequence
ggagaattgtagagttcacccaatc

SEQ ID NO: 94811 - DNA, 25 bp, Probe Sequence
tttggagaattgtagagttcaccca

SEQ ID NO: 94812 - DNA, 25 bp, Probe Sequence
aattgtagagttcacccaatccaac

SEQ ID NO: 94813 - DNA, 25 bp, Probe Sequence
agaattgtagagttcacccaatcca

SEQ ID NO: 94814 - DNA, 25 bp, Probe Sequence
tggagaattgtagagttcacccaat

SEQ ID NO: 94815 - DNA, 25 bp, Probe Sequence
tcactcctagtccaatgtccttagg

SEQ ID NO: 94816 - DNA, 25 bp, Probe Sequence
cttttggagaattgtagagttcacc

SEQ ID NO: 94817 - DNA, 25 bp, Probe Sequence
ccttttggagaattgtagagttcac

SEQ ID NO: 94818 - DNA, 25 bp, Probe Sequence
gagccttttggagaattgtagagtt

SEQ ID NO: 94819 - DNA, 25 bp, Probe Sequence
ttttggagaattgtagagttcaccc

SEQ ID NO: 94820 - DNA, 25 bp, Probe Sequence
agccttttggagaattgtagagttc

SEQ ID NO: 94821 - DNA, 25 bp, Probe Sequence
gccttttggagaattgtagagttca

SEQ ID NO: 94822 - DNA, 25 bp, Probe Sequence
aaaagccagactagcatgtaaaatc

SEQ ID NO: 94823 - DNA, 25 bp, Probe Sequence
aaagccagactagcatgtaaaatca

SEQ ID NO: 94824 - DNA, 25 bp, Probe Sequence
aagccagactagcatgtaaaatcat

SEQ ID NO: 94825 - DNA, 25 bp, Probe Sequence
tagtatcgctattaccatgtgatgc

SEQ ID NO: 94826 - DNA, 25 bp, Probe Sequence
cgtatagtatcgctattaccatgtg

SEQ ID NO: 94827 - DNA, 25 bp, Probe Sequence
tcgtatagtatcgctattaccatgt

SEQ ID NO: 94828 - DNA, 25 bp, Probe Sequence
atagtatcgctattaccatgtgatg

SEQ ID NO: 94829 - DNA, 25 bp, Probe Sequence
gtatagtatcgctattaccatgtga

SEQ ID NO: 94830 - DNA, 25 bp, Probe Sequence
tatagtatcgctattaccatgtgat

SEQ ID NO: 94831 - DNA, 25 bp, Probe Sequence
ctattaccatgtgatgcgttttgac

SEQ ID NO: 94832 - DNA, 25 bp, Probe Sequence
tattaccatgtgatgcgttttgacc

SEQ ID NO: 94833 - DNA, 25 bp, Probe Sequence
gctattaccatgtgatgcgttttga

SEQ ID NO: 94834 - DNA, 25 bp, Probe Sequence
attaccatgtgatgcgttttgacca

SEQ ID NO: 94835 - DNA, 25 bp, Probe Sequence
agtatcgctattaccatgtgatgcg

SEQ ID NO: 94836 - DNA, 25 bp, Probe Sequence
atgcgttttgaccagtacatcaatg

SEQ ID NO: 94837 - DNA, 25 bp, Probe Sequence
gtatcgctattaccatgtgatgcgt

SEQ ID NO: 94838 - DNA, 25 bp, Probe Sequence
gatgcgttttgaccagtacatcaat

SEQ ID NO: 94839 - DNA, 25 bp, Probe Sequence
ggattgttggttttcggaactgagg

SEQ ID NO: 94840 - DNA, 25 bp, Probe Sequence
gggattgttggttttcggaactgag

SEQ ID NO: 94841 - DNA, 25 bp, Probe Sequence
ttaccatgtgatgcgttttgaccag

SEQ ID NO: 94842 - DNA, 25 bp, Probe Sequence
catgtgatgcgttttgaccagtaca

SEQ ID NO: 94843 - DNA, 25 bp, Probe Sequence
atgtgatgcgttttgaccagtacat

SEQ ID NO: 94844 - DNA, 25 bp, Probe Sequence
gattgttggttttcggaactgaggc

SEQ ID NO: 94845 - DNA, 25 bp, Probe Sequence
ccatgtgatgcgttttgaccagtac

SEQ ID NO: 94846 - DNA, 25 bp, Probe Sequence
accatgtgatgcgttttgaccagta

SEQ ID NO: 94847 - DNA, 25 bp, Probe Sequence
taccatgtgatgcgttttgaccagt

SEQ ID NO: 94848 - DNA, 25 bp, Probe Sequence
tgtgatgcgttttgaccagtacatc

SEQ ID NO: 94849 - DNA, 25 bp, Probe Sequence
ggaagaaggaagaagaagaagaaga

SEQ ID NO: 94850 - DNA, 25 bp, Probe Sequence
aggaagaaggaagaagaagaagaag

SEQ ID NO: 94851 - DNA, 25 bp, Probe Sequence
gaaggaagaaggaagaagaagaaga

SEQ ID NO: 94852 - DNA, 25 bp, Probe Sequence
agaaggaagaaggaagaagaagaag

SEQ ID NO: 94853 - DNA, 25 bp, Probe Sequence
gaagaaggaagaaggaagaagaaga

SEQ ID NO: 94854 - DNA, 25 bp, Probe Sequence
agaagaaggaagaaggaagaagaag

SEQ ID NO: 94855 - DNA, 25 bp, Probe Sequence
gaagaagaaggaagaaggaagaaga

SEQ ID NO: 94856 - DNA, 25 bp, Probe Sequence
tgaagaagaaggaagaaggaagaag

SEQ ID NO: 94857 - DNA, 25 bp, Probe Sequence
gtgaagaagaaggaagaaggaagaa

SEQ ID NO: 94858 - DNA, 25 bp, Probe Sequence
aaggaagaaggaagaagaagaagaa

SEQ ID NO: 94859 - DNA, 25 bp, Probe Sequence
aagaaggaagaaggaagaagaagaa

SEQ ID NO: 94860 - DNA, 25 bp, Probe Sequence
aagaagaaggaagaaggaagaagaa

SEQ ID NO: 94861 - DNA, 25 bp, Probe Sequence
ctgtgaagaagaaggaagaaggaag

SEQ ID NO: 94862 - DNA, 25 bp, Probe Sequence
tgtgaagaagaaggaagaaggaaga

SEQ ID NO: 94863 - DNA, 25 bp, Probe Sequence
gaagaaggaagaagaagaagaagaa

SEQ ID NO: 94864 - DNA, 25 bp, Probe Sequence
aagaaggaagaagaagaagaagaat

SEQ ID NO: 94865 - DNA, 25 bp, Probe Sequence
agaaggaagaagaagaagaagaatt

SEQ ID NO: 94866 - DNA, 25 bp, Probe Sequence
gcaataagaccatgtgagtcagtac

SEQ ID NO: 94867 - DNA, 25 bp, Probe Sequence
ccctaccttatagaagcagacaatg

SEQ ID NO: 94868 - DNA, 25 bp, Probe Sequence
tccctaccttatagaagcagacaat

SEQ ID NO: 94869 - DNA, 25 bp, Probe Sequence
attccctaccttatagaagcagaca

SEQ ID NO: 94870 - DNA, 25 bp, Probe Sequence
ttccctaccttatagaagcagacaa

SEQ ID NO: 94871 - DNA, 25 bp, Probe Sequence
cctgtgaagaagaaggaagaaggaa

SEQ ID NO: 94872 - DNA, 25 bp, Probe Sequence
aaatcattcatccaagaaccagaaa

SEQ ID NO: 94873 - DNA, 25 bp, Probe Sequence
ctcatagactcattcatacttggct

SEQ ID NO: 94874 - DNA, 25 bp, Probe Sequence
gaagttatagaggattgaggtggac

SEQ ID NO: 94875 - DNA, 25 bp, Probe Sequence
tcatagactcattcatacttggctg

SEQ ID NO: 94876 - DNA, 25 bp, Probe Sequence
tgaagttatagaggattgaggtgga

SEQ ID NO: 94877 - DNA, 25 bp, Probe Sequence
atgaagttatagaggattgaggtgg

SEQ ID NO: 94878 - DNA, 25 bp, Probe Sequence
tcctcatagactcattcatacttgg

SEQ ID NO: 94879 - DNA, 25 bp, Probe Sequence
cctcatagactcattcatacttggc

SEQ ID NO: 94880 - DNA, 25 bp, Probe Sequence
catagactcattcatacttggctgc

SEQ ID NO: 94881 - DNA, 25 bp, Probe Sequence
aagttatagaggattgaggtggacc

SEQ ID NO: 94882 - DNA, 25 bp, Probe Sequence
tctccgatattcattggttatcagg

SEQ ID NO: 94883 - DNA, 25 bp, Probe Sequence
ttatagaggattgaggtggaccaag

SEQ ID NO: 94884 - DNA, 25 bp, Probe Sequence
gttatagaggattgaggtggaccaa

SEQ ID NO: 94885 - DNA, 25 bp, Probe Sequence
ctccgatattcattggttatcagga

SEQ ID NO: 94886 - DNA, 25 bp, Probe Sequence
ggactatctccgatattcattggtt

SEQ ID NO: 94887 - DNA, 25 bp, Probe Sequence
acaggactatctccgatattcattg

SEQ ID NO: 94888 - DNA, 25 bp, Probe Sequence
agacaggactatctccgatattcat

SEQ ID NO: 94889 - DNA, 25 bp, Probe Sequence
tgtcctcatagactcattcatactt

SEQ ID NO: 94890 - DNA, 25 bp, Probe Sequence
ttgtcctcatagactcattcatact

SEQ ID NO: 94891 - DNA, 25 bp, Probe Sequence
caggactatctccgatattcattgg

SEQ ID NO: 94892 - DNA, 25 bp, Probe Sequence
gacaggactatctccgatattcatt

SEQ ID NO: 94893 - DNA, 25 bp, Probe Sequence
gtcctcatagactcattcatacttg

SEQ ID NO: 94894 - DNA, 25 bp, Probe Sequence
tccgatattcattggttatcaggat

SEQ ID NO: 94895 - DNA, 25 bp, Probe Sequence
aggactatctccgatattcattggt

SEQ ID NO: 94896 - DNA, 25 bp, Probe Sequence
agttatagaggattgaggtggacca

SEQ ID NO: 94897 - DNA, 25 bp, Probe Sequence
aatatagtaacaccacttccatcct

SEQ ID NO: 94898 - DNA, 25 bp, Probe Sequence
gtcacatcttacatggatagcagta

SEQ ID NO: 94899 - DNA, 25 bp, Probe Sequence
tcacatcttacatggatagcagtag

SEQ ID NO: 94900 - DNA, 25 bp, Probe Sequence
cacatcttacatggatagcagtagg

SEQ ID NO: 94901 - DNA, 25 bp, Probe Sequence
tatagtaacaccacttccatcctag

SEQ ID NO: 94902 - DNA, 25 bp, Probe Sequence
ctcctgctacactacaagacatacc

SEQ ID NO: 94903 - DNA, 25 bp, Probe Sequence
atcttacatggatagcagtaggcaa

SEQ ID NO: 94904 - DNA, 25 bp, Probe Sequence
atatagtaacaccacttccatccta

SEQ ID NO: 94905 - DNA, 25 bp, Probe Sequence
gctcctgctacactacaagacatac

SEQ ID NO: 94906 - DNA, 25 bp, Probe Sequence
catcttacatggatagcagtaggca

SEQ ID NO: 94907 - DNA, 25 bp, Probe Sequence
acatcttacatggatagcagtaggc

SEQ ID NO: 94908 - DNA, 25 bp, Probe Sequence
ctctctctcaaacttctacactcag

SEQ ID NO: 94909 - DNA, 25 bp, Probe Sequence
ttagagacaaggagaatgacaaagt

SEQ ID NO: 94910 - DNA, 25 bp, Probe Sequence
agagacaaggagaatgacaaagtat

SEQ ID NO: 94911 - DNA, 25 bp, Probe Sequence
tgtcacatcttacatggatagcagt

SEQ ID NO: 94912 - DNA, 25 bp, Probe Sequence
ctcggttccatttgtaatcagtaat

SEQ ID NO: 94913 - DNA, 25 bp, Probe Sequence
gagacaaggagaatgacaaagtatc

SEQ ID NO: 94914 - DNA, 25 bp, Probe Sequence
agattgctcactgactttcctatta

SEQ ID NO: 94915 - DNA, 25 bp, Probe Sequence
tagagacaaggagaatgacaaagta

SEQ ID NO: 94916 - DNA, 25 bp, Probe Sequence
ggtgatagaggtttctttctggtat

SEQ ID NO: 94917 - DNA, 25 bp, Probe Sequence
aacgaggtttaatggacttacagag

SEQ ID NO: 94918 - DNA, 25 bp, Probe Sequence
aggtgatagaggtttctttctggta

SEQ ID NO: 94919 - DNA, 25 bp, Probe Sequence
cactacaagacatacccgaagacta

SEQ ID NO: 94920 - DNA, 25 bp, Probe Sequence
ctacactacaagacatacccgaaga

SEQ ID NO: 94921 - DNA, 25 bp, Probe Sequence
agaggataactgattaccaacaagg

SEQ ID NO: 94922 - DNA, 25 bp, Probe Sequence
taacctaatagaatcctcctggctt

SEQ ID NO: 94923 - DNA, 25 bp, Probe Sequence
gactaacctaatagaatcctcctgg

SEQ ID NO: 94924 - DNA, 25 bp, Probe Sequence
ctaacctaatagaatcctcctggct

SEQ ID NO: 94925 - DNA, 25 bp, Probe Sequence
tgaaggtcttgttgattgattatcg

SEQ ID NO: 94926 - DNA, 25 bp, Probe Sequence
actaacctaatagaatcctcctggc

SEQ ID NO: 94927 - DNA, 25 bp, Probe Sequence
gaggataactgattaccaacaaggc

SEQ ID NO: 94928 - DNA, 25 bp, Probe Sequence
ggataactgattaccaacaaggctg

SEQ ID NO: 94929 - DNA, 25 bp, Probe Sequence
aggataactgattaccaacaaggct

SEQ ID NO: 94930 - DNA, 25 bp, Probe Sequence
aacctaatagaatcctcctggcttc

SEQ ID NO: 94931 - DNA, 25 bp, Probe Sequence
ggtatgaagagataaggactggagc

SEQ ID NO: 94932 - DNA, 25 bp, Probe Sequence
ccagaggataactgattaccaacaa

SEQ ID NO: 94933 - DNA, 25 bp, Probe Sequence
cagaggataactgattaccaacaag

SEQ ID NO: 94934 - DNA, 25 bp, Probe Sequence
gaagagataaggactggagctaatg

SEQ ID NO: 94935 - DNA, 25 bp, Probe Sequence
tatgaagagataaggactggagcta

SEQ ID NO: 94936 - DNA, 25 bp, Probe Sequence
tggactaacctaatagaatcctcct

SEQ ID NO: 94937 - DNA, 25 bp, Probe Sequence
taacactccatatctcaatgtcttg

SEQ ID NO: 94938 - DNA, 25 bp, Probe Sequence
tgaagagataaggactggagctaat

SEQ ID NO: 94939 - DNA, 25 bp, Probe Sequence
atgaagagataaggactggagctaa

SEQ ID NO: 94940 - DNA, 25 bp, Probe Sequence
ggactaacctaatagaatcctcctg

SEQ ID NO: 94941 - DNA, 25 bp, Probe Sequence
gtatgaagagataaggactggagct

SEQ ID NO: 94942 - DNA, 25 bp, Probe Sequence
atggatggactaacctaatagaatc

SEQ ID NO: 94943 - DNA, 25 bp, Probe Sequence
ttgccagaggataactgattaccaa

SEQ ID NO: 94944 - DNA, 25 bp, Probe Sequence
gaaggtcttgttgattgattatcga

SEQ ID NO: 94945 - DNA, 25 bp, Probe Sequence
tatcactgtcagtcattctcatagg

SEQ ID NO: 94946 - DNA, 25 bp, Probe Sequence
atacatgcaatcaatagtcctggaa

SEQ ID NO: 94947 - DNA, 25 bp, Probe Sequence
aatacatgcaatcaatagtcctgga

SEQ ID NO: 94948 - DNA, 25 bp, Probe Sequence
cctggaatcctgtaatgtagaaact

SEQ ID NO: 94949 - DNA, 25 bp, Probe Sequence
tggaatcctgtaatgtagaaactgc

SEQ ID NO: 94950 - DNA, 25 bp, Probe Sequence
ctggaatcctgtaatgtagaaactg

SEQ ID NO: 94951 - DNA, 25 bp, Probe Sequence
tttaatctcagttaagcacaacagg

SEQ ID NO: 94952 - DNA, 25 bp, Probe Sequence
ccctggaatcctgtaatgtagaaac

SEQ ID NO: 94953 - DNA, 25 bp, Probe Sequence
cctgtggactatgatgtaagcaaag

SEQ ID NO: 94954 - DNA, 25 bp, Probe Sequence
gcatttaatctcagttaagcacaac

SEQ ID NO: 94955 - DNA, 25 bp, Probe Sequence
ttaatctcagttaagcacaacaggg

SEQ ID NO: 94956 - DNA, 25 bp, Probe Sequence
ttatcactgtcagtcattctcatag

SEQ ID NO: 94957 - DNA, 25 bp, Probe Sequence
ctgtggactatgatgtaagcaaagc

SEQ ID NO: 94958 - DNA, 25 bp, Probe Sequence
tatgatgtaagcaaagccctggaat

SEQ ID NO: 94959 - DNA, 25 bp, Probe Sequence
taatctcagttaagcacaacagggt

SEQ ID NO: 94960 - DNA, 25 bp, Probe Sequence
ttctagcacgccaaataaattccag

SEQ ID NO: 94961 - DNA, 25 bp, Probe Sequence
cttctagcacgccaaataaattcca

SEQ ID NO: 94962 - DNA, 25 bp, Probe Sequence
catttaatctcagttaagcacaaca

SEQ ID NO: 94963 - DNA, 25 bp, Probe Sequence
agcctgtggactatgatgtaagcaa

SEQ ID NO: 94964 - DNA, 25 bp, Probe Sequence
ctactcagtgagcacaaacaaatac

SEQ ID NO: 94965 - DNA, 25 bp, Probe Sequence
atttaatctcagttaagcacaacag

SEQ ID NO: 94966 - DNA, 25 bp, Probe Sequence
cctttatcactgtcagtcattctca

SEQ ID NO: 94967 - DNA, 25 bp, Probe Sequence
tactcagtgagcacaaacaaataca

SEQ ID NO: 94968 - DNA, 25 bp, Probe Sequence
gccctggaatcctgtaatgtagaaa

SEQ ID NO: 94969 - DNA, 25 bp, Probe Sequence
ctctcagataaccacaataagtcca

SEQ ID NO: 94970 - DNA, 25 bp, Probe Sequence
acctctcagataaccacaataagtc

SEQ ID NO: 94971 - DNA, 25 bp, Probe Sequence
cctctcagataaccacaataagtcc

SEQ ID NO: 94972 - DNA, 25 bp, Probe Sequence
aacctctcagataaccacaataagt

SEQ ID NO: 94973 - DNA, 25 bp, Probe Sequence
tctcagataaccacaataagtccat

SEQ ID NO: 94974 - DNA, 25 bp, Probe Sequence
gaacctctcagataaccacaataag

SEQ ID NO: 94975 - DNA, 25 bp, Probe Sequence
agaacctctcagataaccacaataa

SEQ ID NO: 94976 - DNA, 25 bp, Probe Sequence
ttagaacctctcagataaccacaat

SEQ ID NO: 94977 - DNA, 25 bp, Probe Sequence
atgtgaatgttagaacctctcagat

SEQ ID NO: 94978 - DNA, 25 bp, Probe Sequence
tgtgaatgttagaacctctcagata

SEQ ID NO: 94979 - DNA, 25 bp, Probe Sequence
tagaacctctcagataaccacaata

SEQ ID NO: 94980 - DNA, 25 bp, Probe Sequence
ataactaccaacagtgtctgagaag

SEQ ID NO: 94981 - DNA, 25 bp, Probe Sequence
aataactaccaacagtgtctgagaa

SEQ ID NO: 94982 - DNA, 25 bp, Probe Sequence
ctcagataaccacaataagtccata

SEQ ID NO: 94983 - DNA, 25 bp, Probe Sequence
agattacaatgatgttctggctagg

SEQ ID NO: 94984 - DNA, 25 bp, Probe Sequence
taactaccaacagtgtctgagaaga

SEQ ID NO: 94985 - DNA, 25 bp, Probe Sequence
catgtgaatgttagaacctctcaga

SEQ ID NO: 94986 - DNA, 25 bp, Probe Sequence
aagattacaatgatgttctggctag

SEQ ID NO: 94987 - DNA, 25 bp, Probe Sequence
ttaagattacaatgatgttctggct

SEQ ID NO: 94988 - DNA, 25 bp, Probe Sequence
gtgaatgttagaacctctcagataa

SEQ ID NO: 94989 - DNA, 25 bp, Probe Sequence
gttagaacctctcagataaccacaa

SEQ ID NO: 94990 - DNA, 25 bp, Probe Sequence
atgttagaacctctcagataaccac

SEQ ID NO: 94991 - DNA, 25 bp, Probe Sequence
ttacaatgatgttctggctaggcta

SEQ ID NO: 94992 - DNA, 25 bp, Probe Sequence
tgttagaacctctcagataaccaca

SEQ ID NO: 94993 - DNA, 25 bp, Probe Sequence
tagcactcacctctatactctcttc

SEQ ID NO: 94994 - DNA, 25 bp, Probe Sequence
cactcacctctatactctcttcttc

SEQ ID NO: 94995 - DNA, 25 bp, Probe Sequence
actcacctctatactctcttcttct

SEQ ID NO: 94996 - DNA, 25 bp, Probe Sequence
gcactcacctctatactctcttctt

SEQ ID NO: 94997 - DNA, 25 bp, Probe Sequence
ctagcactcacctctatactctctt

SEQ ID NO: 94998 - DNA, 25 bp, Probe Sequence
tccatagaggtgagatcatacagta

SEQ ID NO: 94999 - DNA, 25 bp, Probe Sequence
agcactcacctctatactctcttct

SEQ ID NO: 95000 - DNA, 25 bp, Probe Sequence
ccatagaggtgagatcatacagtat

SEQ ID NO: 95001 - DNA, 25 bp, Probe Sequence
agcaatattcagcataccttacagt

SEQ ID NO: 95002 - DNA, 25 bp, Probe Sequence
cagcaatattcagcataccttacag

SEQ ID NO: 95003 - DNA, 25 bp, Probe Sequence
tcagcaatattcagcataccttaca

SEQ ID NO: 95004 - DNA, 25 bp, Probe Sequence
ctcacctctatactctcttcttcta

SEQ ID NO: 95005 - DNA, 25 bp, Probe Sequence
ctcagcaatattcagcataccttac

SEQ ID NO: 95006 - DNA, 25 bp, Probe Sequence
tctcagcaatattcagcatacctta

SEQ ID NO: 95007 - DNA, 25 bp, Probe Sequence
atctctcagcaatattcagcatacc

SEQ ID NO: 95008 - DNA, 25 bp, Probe Sequence
gatctctcagcaatattcagcatac

SEQ ID NO: 95009 - DNA, 25 bp, Probe Sequence
ctccatagaggtgagatcatacagt

SEQ ID NO: 95010 - DNA, 25 bp, Probe Sequence
cctagcactcacctctatactctct

SEQ ID NO: 95011 - DNA, 25 bp, Probe Sequence
ctctcagcaatattcagcatacctt

SEQ ID NO: 95012 - DNA, 25 bp, Probe Sequence
tcttcttctaggagtccaaccttat

SEQ ID NO: 95013 - DNA, 25 bp, Probe Sequence
cttcttctaggagtccaaccttatt

SEQ ID NO: 95014 - DNA, 25 bp, Probe Sequence
ctcttcttctaggagtccaacctta

SEQ ID NO: 95015 - DNA, 25 bp, Probe Sequence
ttcactcggcataacatcatctagg

SEQ ID NO: 95016 - DNA, 25 bp, Probe Sequence
tcacctctatactctcttcttctag

SEQ ID NO: 95017 - DNA, 25 bp, Probe Sequence
ttaaggtgtaactgactgactgttg

SEQ ID NO: 95018 - DNA, 25 bp, Probe Sequence
tgtagactagccaagattcattctg

SEQ ID NO: 95019 - DNA, 25 bp, Probe Sequence
ttgtagactagccaagattcattct

SEQ ID NO: 95020 - DNA, 25 bp, Probe Sequence
gtagactagccaagattcattctga

SEQ ID NO: 95021 - DNA, 25 bp, Probe Sequence
agactagccaagattcattctgatt

SEQ ID NO: 95022 - DNA, 25 bp, Probe Sequence
taaggtgtaactgactgactgttgt

SEQ ID NO: 95023 - DNA, 25 bp, Probe Sequence
tagactagccaagattcattctgat

SEQ ID NO: 95024 - DNA, 25 bp, Probe Sequence
actagccaagattcattctgattag

SEQ ID NO: 95025 - DNA, 25 bp, Probe Sequence
gactagccaagattcattctgatta

SEQ ID NO: 95026 - DNA, 25 bp, Probe Sequence
ctagccaagattcattctgattaga

SEQ ID NO: 95027 - DNA, 25 bp, Probe Sequence
aatctgattgcatgtatgaaggact

SEQ ID NO: 95028 - DNA, 25 bp, Probe Sequence
gtcaggtaagcaggtcaaatataga

SEQ ID NO: 95029 - DNA, 25 bp, Probe Sequence
cagtcaggtaagcaggtcaaatata

SEQ ID NO: 95030 - DNA, 25 bp, Probe Sequence
agtcaggtaagcaggtcaaatatag

SEQ ID NO: 95031 - DNA, 25 bp, Probe Sequence
atctgattgcatgtatgaaggactc

SEQ ID NO: 95032 - DNA, 25 bp, Probe Sequence
ctttaaggtgtaactgactgactgt

SEQ ID NO: 95033 - DNA, 25 bp, Probe Sequence
taatctgattgcatgtatgaaggac

SEQ ID NO: 95034 - DNA, 25 bp, Probe Sequence
aaggtgtaactgactgactgttgtg

SEQ ID NO: 95035 - DNA, 25 bp, Probe Sequence
tttaaggtgtaactgactgactgtt

SEQ ID NO: 95036 - DNA, 25 bp, Probe Sequence
gcaactctggctttcataagtagta

SEQ ID NO: 95037 - DNA, 25 bp, Probe Sequence
tgtatcgtgtaccaatgatatgtaa

SEQ ID NO: 95038 - DNA, 25 bp, Probe Sequence
tttcaaagacttgtagactagccaa

SEQ ID NO: 95039 - DNA, 25 bp, Probe Sequence
atttcaaagacttgtagactagcca

SEQ ID NO: 95040 - DNA, 25 bp, Probe Sequence
ggtgtaactgactgactgttgtgtt

SEQ ID NO: 95041 - DNA, 25 bp, Probe Sequence
gagcagccttcaagcattccattac

SEQ ID NO: 95042 - DNA, 25 bp, Probe Sequence
ttaggttggatgtatgaagaatagc

SEQ ID NO: 95043 - DNA, 25 bp, Probe Sequence
taggttggatgtatgaagaatagct

SEQ ID NO: 95044 - DNA, 25 bp, Probe Sequence
taacaactcaacaagcaaacaacta

SEQ ID NO: 95045 - DNA, 25 bp, Probe Sequence
ttaacaactcaacaagcaaacaact

SEQ ID NO: 95046 - DNA, 25 bp, Probe Sequence
tttaacaactcaacaagcaaacaac

SEQ ID NO: 95047 - DNA, 25 bp, Probe Sequence
ctgtctcgttcactgctatctcaag

SEQ ID NO: 95048 - DNA, 25 bp, Probe Sequence
aacaactcaacaagcaaacaactac

SEQ ID NO: 95049 - DNA, 25 bp, Probe Sequence
actttaacaactcaacaagcaaaca

SEQ ID NO: 95050 - DNA, 25 bp, Probe Sequence
ctttaacaactcaacaagcaaacaa

SEQ ID NO: 95051 - DNA, 25 bp, Probe Sequence
aactttaacaactcaacaagcaaac

SEQ ID NO: 95052 - DNA, 25 bp, Probe Sequence
caaattatgcttccaacaaaggtct

SEQ ID NO: 95053 - DNA, 25 bp, Probe Sequence
gcttccaacaaaggtctaatatcca

SEQ ID NO: 95054 - DNA, 25 bp, Probe Sequence
tgcttccaacaaaggtctaatatcc

SEQ ID NO: 95055 - DNA, 25 bp, Probe Sequence
tccaacaaaggtctaatatccagaa

SEQ ID NO: 95056 - DNA, 25 bp, Probe Sequence
ttccaacaaaggtctaatatccaga

SEQ ID NO: 95057 - DNA, 25 bp, Probe Sequence
cttccaacaaaggtctaatatccag

SEQ ID NO: 95058 - DNA, 25 bp, Probe Sequence
atgcttccaacaaaggtctaatatc

SEQ ID NO: 95059 - DNA, 25 bp, Probe Sequence
acaaattatgcttccaacaaaggtc

SEQ ID NO: 95060 - DNA, 25 bp, Probe Sequence
tcacaaattatgcttccaacaaagg

SEQ ID NO: 95061 - DNA, 25 bp, Probe Sequence
tggcaaagaaactatcaacagaata

SEQ ID NO: 95062 - DNA, 25 bp, Probe Sequence
cacaaattatgcttccaacaaaggt

SEQ ID NO: 95063 - DNA, 25 bp, Probe Sequence
ttggcaaagaaactatcaacagaat

SEQ ID NO: 95064 - DNA, 25 bp, Probe Sequence
attggcaaagaaactatcaacagaa

SEQ ID NO: 95065 - DNA, 25 bp, Probe Sequence
accttggcaaagaatttatgacaaa

SEQ ID NO: 95066 - DNA, 25 bp, Probe Sequence
agaagattagtgccatcattgagaa

SEQ ID NO: 95067 - DNA, 25 bp, Probe Sequence
aagaagattagtgccatcattgaga

SEQ ID NO: 95068 - DNA, 25 bp, Probe Sequence
gaagaagattagtgccatcattgag

SEQ ID NO: 95069 - DNA, 25 bp, Probe Sequence
ggatagtgatgaggaggtggattat

SEQ ID NO: 95070 - DNA, 25 bp, Probe Sequence
tagtgatgaggaggtggattatagc

SEQ ID NO: 95071 - DNA, 25 bp, Probe Sequence
ggaagaagattagtgccatcattga

SEQ ID NO: 95072 - DNA, 25 bp, Probe Sequence
atagtgatgaggaggtggattatag

SEQ ID NO: 95073 - DNA, 25 bp, Probe Sequence
gatagtgatgaggaggtggattata

SEQ ID NO: 95074 - DNA, 25 bp, Probe Sequence
gtgatgaggaggtggattatagcaa

SEQ ID NO: 95075 - DNA, 25 bp, Probe Sequence
tggatagtgatgaggaggtggatta

SEQ ID NO: 95076 - DNA, 25 bp, Probe Sequence
caggaagaatacagcgagtatatga

SEQ ID NO: 95077 - DNA, 25 bp, Probe Sequence
ccaggaagaatacagcgagtatatg

SEQ ID NO: 95078 - DNA, 25 bp, Probe Sequence
ggaagaatacagcgagtatatgaac

SEQ ID NO: 95079 - DNA, 25 bp, Probe Sequence
gaatacagcgagtatatgaacaaca

SEQ ID NO: 95080 - DNA, 25 bp, Probe Sequence
aggaagaatacagcgagtatatgaa

SEQ ID NO: 95081 - DNA, 25 bp, Probe Sequence
agtgatgaggaggtggattatagca

SEQ ID NO: 95082 - DNA, 25 bp, Probe Sequence
agaatacagcgagtatatgaacaac

SEQ ID NO: 95083 - DNA, 25 bp, Probe Sequence
aatacagcgagtatatgaacaacaa

SEQ ID NO: 95084 - DNA, 25 bp, Probe Sequence
gaagaatacagcgagtatatgaaca

SEQ ID NO: 95085 - DNA, 25 bp, Probe Sequence
gagaaagaggaagaagatggaaact

SEQ ID NO: 95086 - DNA, 25 bp, Probe Sequence
ttgagaaagaggaagaagatggaaa

SEQ ID NO: 95087 - DNA, 25 bp, Probe Sequence
tgagaaagaggaagaagatggaaac

SEQ ID NO: 95088 - DNA, 25 bp, Probe Sequence
attgagaaagaggaagaagatggaa

SEQ ID NO: 95089 - DNA, 25 bp, Probe Sequence
tggaagaagattagtgccatcattg

SEQ ID NO: 95090 - DNA, 25 bp, Probe Sequence
atatatgcccagtacaggaccttat

SEQ ID NO: 95091 - DNA, 25 bp, Probe Sequence
tatatgcccagtacaggaccttatg

SEQ ID NO: 95092 - DNA, 25 bp, Probe Sequence
catatatgcccagtacaggacctta

SEQ ID NO: 95093 - DNA, 25 bp, Probe Sequence
ataaaagacctattgatttggaaaa

SEQ ID NO: 95094 - DNA, 25 bp, Probe Sequence
aataaaagacctattgatttggaaa

SEQ ID NO: 95095 - DNA, 25 bp, Probe Sequence
caataaaagacctattgatttggaa

SEQ ID NO: 95096 - DNA, 25 bp, Probe Sequence
ttatcttattgagaggtgaggagtg

SEQ ID NO: 95097 - DNA, 25 bp, Probe Sequence
tatcttattgagaggtgaggagtgc

SEQ ID NO: 95098 - DNA, 25 bp, Probe Sequence
tttatcttattgagaggtgaggagt

SEQ ID NO: 95099 - DNA, 25 bp, Probe Sequence
gcatccattccttcatgtctttatt

SEQ ID NO: 95100 - DNA, 25 bp, Probe Sequence
atcttattgagaggtgaggagtgcc

SEQ ID NO: 95101 - DNA, 25 bp, Probe Sequence
atttatcttattgagaggtgaggag

SEQ ID NO: 95102 - DNA, 25 bp, Probe Sequence
ctctgcatccattccttcatgtctt

SEQ ID NO: 95103 - DNA, 25 bp, Probe Sequence
tgcatccattccttcatgtctttat

SEQ ID NO: 95104 - DNA, 25 bp, Probe Sequence
ctgcatccattccttcatgtcttta

SEQ ID NO: 95105 - DNA, 25 bp, Probe Sequence
catccattccttcatgtctttattt

SEQ ID NO: 95106 - DNA, 25 bp, Probe Sequence
gtctctgcatccattccttcatgtc

SEQ ID NO: 95107 - DNA, 25 bp, Probe Sequence
ccattccttcatgtctttatttagt

SEQ ID NO: 95108 - DNA, 25 bp, Probe Sequence
tctctgcatccattccttcatgtct

SEQ ID NO: 95109 - DNA, 25 bp, Probe Sequence
tatttatcttattgagaggtgagga

SEQ ID NO: 95110 - DNA, 25 bp, Probe Sequence
tctgcatccattccttcatgtcttt

SEQ ID NO: 95111 - DNA, 25 bp, Probe Sequence
tccattccttcatgtctttatttag

SEQ ID NO: 95112 - DNA, 25 bp, Probe Sequence
tcttattgagaggtgaggagtgcca

SEQ ID NO: 95113 - DNA, 25 bp, Probe Sequence
tccttcatgtctttatttagttgtt

SEQ ID NO: 95114 - DNA, 25 bp, Probe Sequence
ttccttcatgtctttatttagttgt

SEQ ID NO: 95115 - DNA, 25 bp, Probe Sequence
cttattgagaggtgaggagtgccac

SEQ ID NO: 95116 - DNA, 25 bp, Probe Sequence
ttatttatcttattgagaggtgagg

SEQ ID NO: 95117 - DNA, 25 bp, Probe Sequence
atccattccttcatgtctttattta

SEQ ID NO: 95118 - DNA, 25 bp, Probe Sequence
ccttcatgtctttatttagttgttt

SEQ ID NO: 95119 - DNA, 25 bp, Probe Sequence
attccttcatgtctttatttagttg

SEQ ID NO: 95120 - DNA, 25 bp, Probe Sequence
caagcacagaataattccacaacag

SEQ ID NO: 95121 - DNA, 25 bp, Probe Sequence
ttccaagcacagaataattccacaa

SEQ ID NO: 95122 - DNA, 25 bp, Probe Sequence
tcttccaagcacagaataattccac

SEQ ID NO: 95123 - DNA, 25 bp, Probe Sequence
cttccaagcacagaataattccaca

SEQ ID NO: 95124 - DNA, 25 bp, Probe Sequence
aagcacagaataattccacaacagg

SEQ ID NO: 95125 - DNA, 25 bp, Probe Sequence
tccaagcacagaataattccacaac

SEQ ID NO: 95126 - DNA, 25 bp, Probe Sequence
ccaagcacagaataattccacaaca

SEQ ID NO: 95127 - DNA, 25 bp, Probe Sequence
tatggtgactctgtggttaggctta

SEQ ID NO: 95128 - DNA, 25 bp, Probe Sequence
tatttatggtgactctgtggttagg

SEQ ID NO: 95129 - DNA, 25 bp, Probe Sequence
aacttgctatttatggtgactctgt

SEQ ID NO: 95130 - DNA, 25 bp, Probe Sequence
tgactctgtggttaggcttatttac

SEQ ID NO: 95131 - DNA, 25 bp, Probe Sequence
gtgactctgtggttaggcttattta

SEQ ID NO: 95132 - DNA, 25 bp, Probe Sequence
gctatttatggtgactctgtggtta

SEQ ID NO: 95133 - DNA, 25 bp, Probe Sequence
cctttctttaacacacactgacttt

SEQ ID NO: 95134 - DNA, 25 bp, Probe Sequence
acttgctatttatggtgactctgtg

SEQ ID NO: 95135 - DNA, 25 bp, Probe Sequence
ggctttgtttgtaattcgggtatat

SEQ ID NO: 95136 - DNA, 25 bp, Probe Sequence
tgttatggctttgtttgtaattcgg

SEQ ID NO: 95137 - DNA, 25 bp, Probe Sequence
tggctttgtttgtaattcgggtata

SEQ ID NO: 95138 - DNA, 25 bp, Probe Sequence
tatggctttgtttgtaattcgggta

SEQ ID NO: 95139 - DNA, 25 bp, Probe Sequence
ctatttatggtgactctgtggttag

SEQ ID NO: 95140 - DNA, 25 bp, Probe Sequence
atgttatggctttgtttgtaattcg

SEQ ID NO: 95141 - DNA, 25 bp, Probe Sequence
cttgctatttatggtgactctgtgg

SEQ ID NO: 95142 - DNA, 25 bp, Probe Sequence
taacttgctatttatggtgactctg

SEQ ID NO: 95143 - DNA, 25 bp, Probe Sequence
atggctttgtttgtaattcgggtat

SEQ ID NO: 95144 - DNA, 25 bp, Probe Sequence
aggaacaaggataagtgaatagaca

SEQ ID NO: 95145 - DNA, 25 bp, Probe Sequence
acaggaacaaggataagtgaataga

SEQ ID NO: 95146 - DNA, 25 bp, Probe Sequence
ggaacaaggataagtgaatagacag

SEQ ID NO: 95147 - DNA, 25 bp, Probe Sequence
caggaacaaggataagtgaatagac

SEQ ID NO: 95148 - DNA, 25 bp, Probe Sequence
cagtacaggaacaaggataagtgaa

SEQ ID NO: 95149 - DNA, 25 bp, Probe Sequence
aactaattgaattgtatggtcaggc

SEQ ID NO: 95150 - DNA, 25 bp, Probe Sequence
gaacaaggataagtgaatagacagt

SEQ ID NO: 95151 - DNA, 25 bp, Probe Sequence
agtacaggaacaaggataagtgaat

SEQ ID NO: 95152 - DNA, 25 bp, Probe Sequence
acaaggataagtgaatagacagtca

SEQ ID NO: 95153 - DNA, 25 bp, Probe Sequence
aacaaggataagtgaatagacagtc

SEQ ID NO: 95154 - DNA, 25 bp, Probe Sequence
aaggataagtgaatagacagtcagt

SEQ ID NO: 95155 - DNA, 25 bp, Probe Sequence
caaggataagtgaatagacagtcag

SEQ ID NO: 95156 - DNA, 25 bp, Probe Sequence
gataagtgaatagacagtcagtccg

SEQ ID NO: 95157 - DNA, 25 bp, Probe Sequence
aggataagtgaatagacagtcagtc

SEQ ID NO: 95158 - DNA, 25 bp, Probe Sequence
ggatcacttgaggagttagaacatc

SEQ ID NO: 95159 - DNA, 25 bp, Probe Sequence
tacaggaacaaggataagtgaatag

SEQ ID NO: 95160 - DNA, 25 bp, Probe Sequence
aggatcacttgaggagttagaacat

SEQ ID NO: 95161 - DNA, 25 bp, Probe Sequence
acagaattgaatgtatccaacgcaa

SEQ ID NO: 95162 - DNA, 25 bp, Probe Sequence
ggataagtgaatagacagtcagtcc

SEQ ID NO: 95163 - DNA, 25 bp, Probe Sequence
gtacaggaacaaggataagtgaata

SEQ ID NO: 95164 - DNA, 25 bp, Probe Sequence
atagacagtcagtccgcaagatatt

SEQ ID NO: 95165 - DNA, 25 bp, Probe Sequence
aatagacagtcagtccgcaagatat

SEQ ID NO: 95166 - DNA, 25 bp, Probe Sequence
gaggatcacttgaggagttagaaca

SEQ ID NO: 95167 - DNA, 25 bp, Probe Sequence
gacagaattgaatgtatccaacgca

SEQ ID NO: 95168 - DNA, 25 bp, Probe Sequence
gactctgaggtgctaagataaggta

SEQ ID NO: 95169 - DNA, 25 bp, Probe Sequence
ttcttcctcattattctcatctgtg

SEQ ID NO: 95170 - DNA, 25 bp, Probe Sequence
tcttcctcattattctcatctgtga

SEQ ID NO: 95171 - DNA, 25 bp, Probe Sequence
tcacttaactgttccagaatacact

SEQ ID NO: 95172 - DNA, 25 bp, Probe Sequence
gtcacttaactgttccagaatacac

SEQ ID NO: 95173 - DNA, 25 bp, Probe Sequence
agtcacttaactgttccagaataca

SEQ ID NO: 95174 - DNA, 25 bp, Probe Sequence
actctgaggtgctaagataaggtac

SEQ ID NO: 95175 - DNA, 25 bp, Probe Sequence
cacttaactgttccagaatacactt

SEQ ID NO: 95176 - DNA, 25 bp, Probe Sequence
cttcctcattattctcatctgtgat

SEQ ID NO: 95177 - DNA, 25 bp, Probe Sequence
tctcatctgtgatctaagcattaca

SEQ ID NO: 95178 - DNA, 25 bp, Probe Sequence
tcctcattattctcatctgtgatct

SEQ ID NO: 95179 - DNA, 25 bp, Probe Sequence
ttagtccactcatacaggataacac

SEQ ID NO: 95180 - DNA, 25 bp, Probe Sequence
aagtagttacagtcgtagtgacagg

SEQ ID NO: 95181 - DNA, 25 bp, Probe Sequence
ttctcatctgtgatctaagcattac

SEQ ID NO: 95182 - DNA, 25 bp, Probe Sequence
ctcatctgtgatctaagcattacaa

SEQ ID NO: 95183 - DNA, 25 bp, Probe Sequence
tcatacaggataacaccttggacaa

SEQ ID NO: 95184 - DNA, 25 bp, Probe Sequence
tagtccactcatacaggataacacc

SEQ ID NO: 95185 - DNA, 25 bp, Probe Sequence
ttcctcattattctcatctgtgatc

SEQ ID NO: 95186 - DNA, 25 bp, Probe Sequence
aagtcacttaactgttccagaatac

SEQ ID NO: 95187 - DNA, 25 bp, Probe Sequence
acttgtaaacttattgagggtagca

SEQ ID NO: 95188 - DNA, 25 bp, Probe Sequence
ccctgtttcttcctcattattctca

SEQ ID NO: 95189 - DNA, 25 bp, Probe Sequence
accctgtttcttcctcattattctc

SEQ ID NO: 95190 - DNA, 25 bp, Probe Sequence
gttacttaccctgtttcttcctcat

SEQ ID NO: 95191 - DNA, 25 bp, Probe Sequence
caggactctgaggtgctaagataag

SEQ ID NO: 95192 - DNA, 25 bp, Probe Sequence
ttcatcacaaggacacacacatata

SEQ ID NO: 95193 - DNA, 25 bp, Probe Sequence
acacacacatatacacgaatagaca

SEQ ID NO: 95194 - DNA, 25 bp, Probe Sequence
ggacacacacatatacacgaataga

SEQ ID NO: 95195 - DNA, 25 bp, Probe Sequence
aggacacacacatatacacgaatag

SEQ ID NO: 95196 - DNA, 25 bp, Probe Sequence
aaggacacacacatatacacgaata

SEQ ID NO: 95197 - DNA, 25 bp, Probe Sequence
aatatctggtatcctggcacaataa

SEQ ID NO: 95198 - DNA, 25 bp, Probe Sequence
aataatatctggtatcctggcacaa

SEQ ID NO: 95199 - DNA, 25 bp, Probe Sequence
gacacacacatatacacgaatagac

SEQ ID NO: 95200 - DNA, 25 bp, Probe Sequence
tcatcacaaggacacacacatatac

SEQ ID NO: 95201 - DNA, 25 bp, Probe Sequence
atatctggtatcctggcacaataat

SEQ ID NO: 95202 - DNA, 25 bp, Probe Sequence
ataatatctggtatcctggcacaat

SEQ ID NO: 95203 - DNA, 25 bp, Probe Sequence
atcacaaggacacacacatatacac

SEQ ID NO: 95204 - DNA, 25 bp, Probe Sequence
catcacaaggacacacacatataca

SEQ ID NO: 95205 - DNA, 25 bp, Probe Sequence
tatctggtatcctggcacaataatt

SEQ ID NO: 95206 - DNA, 25 bp, Probe Sequence
caaggacacacacatatacacgaat

SEQ ID NO: 95207 - DNA, 25 bp, Probe Sequence
cacacacatatacacgaatagacat

SEQ ID NO: 95208 - DNA, 25 bp, Probe Sequence
taatatctggtatcctggcacaata

SEQ ID NO: 95209 - DNA, 25 bp, Probe Sequence
taataatatctggtatcctggcaca

SEQ ID NO: 95210 - DNA, 25 bp, Probe Sequence
cacacatatacacgaatagacatca

SEQ ID NO: 95211 - DNA, 25 bp, Probe Sequence
acacacatatacacgaatagacatc

SEQ ID NO: 95212 - DNA, 25 bp, Probe Sequence
ttaataatatctggtatcctggcac

SEQ ID NO: 95213 - DNA, 25 bp, Probe Sequence
acacatatacacgaatagacatcaa

SEQ ID NO: 95214 - DNA, 25 bp, Probe Sequence
acaaggacacacacatatacacgaa

SEQ ID NO: 95215 - DNA, 25 bp, Probe Sequence
cttaataatatctggtatcctggca

SEQ ID NO: 95216 - DNA, 25 bp, Probe Sequence
ttcatcacaaggacacacacatata

SEQ ID NO: 95217 - DNA, 25 bp, Probe Sequence
acacacacatatacacgaatagaca

SEQ ID NO: 95218 - DNA, 25 bp, Probe Sequence
ggacacacacatatacacgaataga

SEQ ID NO: 95219 - DNA, 25 bp, Probe Sequence
aggacacacacatatacacgaatag

SEQ ID NO: 95220 - DNA, 25 bp, Probe Sequence
aaggacacacacatatacacgaata

SEQ ID NO: 95221 - DNA, 25 bp, Probe Sequence
aatatctggtatcctggcacaataa

SEQ ID NO: 95222 - DNA, 25 bp, Probe Sequence
aataatatctggtatcctggcacaa

SEQ ID NO: 95223 - DNA, 25 bp, Probe Sequence
gacacacacatatacacgaatagac

SEQ ID NO: 95224 - DNA, 25 bp, Probe Sequence
tcatcacaaggacacacacatatac

SEQ ID NO: 95225 - DNA, 25 bp, Probe Sequence
atatctggtatcctggcacaataat

SEQ ID NO: 95226 - DNA, 25 bp, Probe Sequence
ataatatctggtatcctggcacaat

SEQ ID NO: 95227 - DNA, 25 bp, Probe Sequence
atcacaaggacacacacatatacac

SEQ ID NO: 95228 - DNA, 25 bp, Probe Sequence
catcacaaggacacacacatataca

SEQ ID NO: 95229 - DNA, 25 bp, Probe Sequence
tatctggtatcctggcacaataatt

SEQ ID NO: 95230 - DNA, 25 bp, Probe Sequence
caaggacacacacatatacacgaat

SEQ ID NO: 95231 - DNA, 25 bp, Probe Sequence
cacacacatatacacgaatagacat

SEQ ID NO: 95232 - DNA, 25 bp, Probe Sequence
taatatctggtatcctggcacaata

SEQ ID NO: 95233 - DNA, 25 bp, Probe Sequence
taataatatctggtatcctggcaca

SEQ ID NO: 95234 - DNA, 25 bp, Probe Sequence
cacacatatacacgaatagacatca

SEQ ID NO: 95235 - DNA, 25 bp, Probe Sequence
acacacatatacacgaatagacatc

SEQ ID NO: 95236 - DNA, 25 bp, Probe Sequence
ttaataatatctggtatcctggcac

SEQ ID NO: 95237 - DNA, 25 bp, Probe Sequence
acacatatacacgaatagacatcaa

SEQ ID NO: 95238 - DNA, 25 bp, Probe Sequence
acaaggacacacacatatacacgaa

SEQ ID NO: 95239 - DNA, 25 bp, Probe Sequence
cttaataatatctggtatcctggca

SEQ ID NO: 95240 - DNA, 25 bp, Probe Sequence
tgaagatggtgagagttagaattgt

SEQ ID NO: 95241 - DNA, 25 bp, Probe Sequence
gctgaagatggtgagagttagaatt

SEQ ID NO: 95242 - DNA, 25 bp, Probe Sequence
ctgaagatggtgagagttagaattg

SEQ ID NO: 95243 - DNA, 25 bp, Probe Sequence
attctagtgatgtgtgtaggaagga

SEQ ID NO: 95244 - DNA, 25 bp, Probe Sequence
tattctagtgatgtgtgtaggaagg

SEQ ID NO: 95245 - DNA, 25 bp, Probe Sequence
cgttgataccgactagatagataga

SEQ ID NO: 95246 - DNA, 25 bp, Probe Sequence
ttctagtgatgtgtgtaggaaggag

SEQ ID NO: 95247 - DNA, 25 bp, Probe Sequence
tattgaatgcctagaatgttccaag

SEQ ID NO: 95248 - DNA, 25 bp, Probe Sequence
gaagatggtgagagttagaattgta

SEQ ID NO: 95249 - DNA, 25 bp, Probe Sequence
ggctgaagatggtgagagttagaat

SEQ ID NO: 95250 - DNA, 25 bp, Probe Sequence
aatgttccaagcactgttctaggta

SEQ ID NO: 95251 - DNA, 25 bp, Probe Sequence
atattgaatgcctagaatgttccaa

SEQ ID NO: 95252 - DNA, 25 bp, Probe Sequence
attgaatgcctagaatgttccaagc

SEQ ID NO: 95253 - DNA, 25 bp, Probe Sequence
aagatggtgagagttagaattgtaa

SEQ ID NO: 95254 - DNA, 25 bp, Probe Sequence
tatattgaatgcctagaatgttcca

SEQ ID NO: 95255 - DNA, 25 bp, Probe Sequence
atattctagtgatgtgtgtaggaag

SEQ ID NO: 95256 - DNA, 25 bp, Probe Sequence
cagagaaggtgaaaggaagtatttg

SEQ ID NO: 95257 - DNA, 25 bp, Probe Sequence
cacgttgataccgactagatagata

SEQ ID NO: 95258 - DNA, 25 bp, Probe Sequence
aggctgaagatggtgagagttagaa

SEQ ID NO: 95259 - DNA, 25 bp, Probe Sequence
tcgcccttcttcaagtttatattct

SEQ ID NO: 95260 - DNA, 25 bp, Probe Sequence
atgttccaagcactgttctaggtac

SEQ ID NO: 95261 - DNA, 25 bp, Probe Sequence
ttgtcattcaagccgttattcacac

SEQ ID NO: 95262 - DNA, 25 bp, Probe Sequence
acgttgataccgactagatagatag

SEQ ID NO: 95263 - DNA, 25 bp, Probe Sequence
gagaaggtgaaaggaagtatttgct

SEQ ID NO: 95264 - DNA, 25 bp, Probe Sequence
acattcacattgagttgatagtcct

SEQ ID NO: 95265 - DNA, 25 bp, Probe Sequence
ttcacattgagttgatagtccttct

SEQ ID NO: 95266 - DNA, 25 bp, Probe Sequence
attgagttgatagtccttctccatc

SEQ ID NO: 95267 - DNA, 25 bp, Probe Sequence
cattgagttgatagtccttctccat

SEQ ID NO: 95268 - DNA, 25 bp, Probe Sequence
tcacattgagttgatagtccttctc

SEQ ID NO: 95269 - DNA, 25 bp, Probe Sequence
cattcacattgagttgatagtcctt

SEQ ID NO: 95270 - DNA, 25 bp, Probe Sequence
tgagttgatagtccttctccatctt

SEQ ID NO: 95271 - DNA, 25 bp, Probe Sequence
ttgagttgatagtccttctccatct

SEQ ID NO: 95272 - DNA, 25 bp, Probe Sequence
cacattgagttgatagtccttctcc

SEQ ID NO: 95273 - DNA, 25 bp, Probe Sequence
attcacattgagttgatagtccttc

SEQ ID NO: 95274 - DNA, 25 bp, Probe Sequence
acattgagttgatagtccttctcca

SEQ ID NO: 95275 - DNA, 25 bp, Probe Sequence
tacattcacattgagttgatagtcc

SEQ ID NO: 95276 - DNA, 25 bp, Probe Sequence
caatgagtagggtgggagtaataag

SEQ ID NO: 95277 - DNA, 25 bp, Probe Sequence
atggagcttctctgttagtctattg

SEQ ID NO: 95278 - DNA, 25 bp, Probe Sequence
ttgatagtccttctccatctttgtc

SEQ ID NO: 95279 - DNA, 25 bp, Probe Sequence
agttgatagtccttctccatctttg

SEQ ID NO: 95280 - DNA, 25 bp, Probe Sequence
ctcacttatggagcttctctgttag

SEQ ID NO: 95281 - DNA, 25 bp, Probe Sequence
gttgatagtccttctccatctttgt

SEQ ID NO: 95282 - DNA, 25 bp, Probe Sequence
gatagtccttctccatctttgtctg

SEQ ID NO: 95283 - DNA, 25 bp, Probe Sequence
acttatggagcttctctgttagtct

SEQ ID NO: 95284 - DNA, 25 bp, Probe Sequence
cacttatggagcttctctgttagtc

SEQ ID NO: 95285 - DNA, 25 bp, Probe Sequence
tgatagtccttctccatctttgtct

SEQ ID NO: 95286 - DNA, 25 bp, Probe Sequence
ttctctgttagtctattgggaaagc

SEQ ID NO: 95287 - DNA, 25 bp, Probe Sequence
gcttctctgttagtctattgggaaa

SEQ ID NO: 95288 - DNA, 25 bp, Probe Sequence
tctggtatgtatattcctgagttcc

SEQ ID NO: 95289 - DNA, 25 bp, Probe Sequence
agaagcaattcagatgatagtccag

SEQ ID NO: 95290 - DNA, 25 bp, Probe Sequence
cagaagcaattcagatgatagtcca

SEQ ID NO: 95291 - DNA, 25 bp, Probe Sequence
tcagaagcaattcagatgatagtcc

SEQ ID NO: 95292 - DNA, 25 bp, Probe Sequence
gtcagaagcaattcagatgatagtc

SEQ ID NO: 95293 - DNA, 25 bp, Probe Sequence
gaagcaattcagatgatagtccagg

SEQ ID NO: 95294 - DNA, 25 bp, Probe Sequence
aagcaattcagatgatagtccagga

SEQ ID NO: 95295 - DNA, 25 bp, Probe Sequence
cgtcagaagcaattcagatgatagt

SEQ ID NO: 95296 - DNA, 25 bp, Probe Sequence
ttcagatgatagtccaggaattgct

SEQ ID NO: 95297 - DNA, 25 bp, Probe Sequence
agcaattcagatgatagtccaggaa

SEQ ID NO: 95298 - DNA, 25 bp, Probe Sequence
catctggtatgtatattcctgagtt

SEQ ID NO: 95299 - DNA, 25 bp, Probe Sequence
atgttactgagctgatctgtatagg

SEQ ID NO: 95300 - DNA, 25 bp, Probe Sequence
atctggtatgtatattcctgagttc

SEQ ID NO: 95301 - DNA, 25 bp, Probe Sequence
attcagatgatagtccaggaattgc

SEQ ID NO: 95302 - DNA, 25 bp, Probe Sequence
gcaattcagatgatagtccaggaat

SEQ ID NO: 95303 - DNA, 25 bp, Probe Sequence
aatgtgaagctatgtcataccagtt

SEQ ID NO: 95304 - DNA, 25 bp, Probe Sequence
taatgtgaagctatgtcataccagt

SEQ ID NO: 95305 - DNA, 25 bp, Probe Sequence
ctcttcctctggacgattcatctta

SEQ ID NO: 95306 - DNA, 25 bp, Probe Sequence
ctggtatgtatattcctgagttccc

SEQ ID NO: 95307 - DNA, 25 bp, Probe Sequence
ggtatgtatattcctgagttcccac

SEQ ID NO: 95308 - DNA, 25 bp, Probe Sequence
gaagctatgtcataccagttgtgaa

SEQ ID NO: 95309 - DNA, 25 bp, Probe Sequence
atgtgaagctatgtcataccagttg

SEQ ID NO: 95310 - DNA, 25 bp, Probe Sequence
tcttcctctggacgattcatcttac

SEQ ID NO: 95311 - DNA, 25 bp, Probe Sequence
gatgttactgagctgatctgtatag

SEQ ID NO: 95312 - DNA, 25 bp, Probe Sequence
aacacgaataacacagaagttgtca

SEQ ID NO: 95313 - DNA, 25 bp, Probe Sequence
gaataacacagaagttgtcaccact

SEQ ID NO: 95314 - DNA, 25 bp, Probe Sequence
ttaattcagaggttcctaactcagg

SEQ ID NO: 95315 - DNA, 25 bp, Probe Sequence
acacgaataacacagaagttgtcac

SEQ ID NO: 95316 - DNA, 25 bp, Probe Sequence
cgaataacacagaagttgtcaccac

SEQ ID NO: 95317 - DNA, 25 bp, Probe Sequence
cacgaataacacagaagttgtcacc

SEQ ID NO: 95318 - DNA, 25 bp, Probe Sequence
acgaataacacagaagttgtcacca

SEQ ID NO: 95319 - DNA, 25 bp, Probe Sequence
aaacacgaataacacagaagttgtc

SEQ ID NO: 95320 - DNA, 25 bp, Probe Sequence
atccgcaaatctccataggtagaaa

SEQ ID NO: 95321 - DNA, 25 bp, Probe Sequence
aaataatgtggacatccgcaaatct

SEQ ID NO: 95322 - DNA, 25 bp, Probe Sequence
caaataatgtggacatccgcaaatc

SEQ ID NO: 95323 - DNA, 25 bp, Probe Sequence
cagtcctttaattcagaggttccta

SEQ ID NO: 95324 - DNA, 25 bp, Probe Sequence
aataacacagaagttgtcaccactt

SEQ ID NO: 95325 - DNA, 25 bp, Probe Sequence
gtcctttaattcagaggttcctaac

SEQ ID NO: 95326 - DNA, 25 bp, Probe Sequence
tcctttaattcagaggttcctaact

SEQ ID NO: 95327 - DNA, 25 bp, Probe Sequence
agtcctttaattcagaggttcctaa

SEQ ID NO: 95328 - DNA, 25 bp, Probe Sequence
catccgcaaatctccataggtagaa

SEQ ID NO: 95329 - DNA, 25 bp, Probe Sequence
aataatgtggacatccgcaaatctc

SEQ ID NO: 95330 - DNA, 25 bp, Probe Sequence
cctttaattcagaggttcctaactc

SEQ ID NO: 95331 - DNA, 25 bp, Probe Sequence
taattcagaggttcctaactcaggg

SEQ ID NO: 95332 - DNA, 25 bp, Probe Sequence
tttaattcagaggttcctaactcag

SEQ ID NO: 95333 - DNA, 25 bp, Probe Sequence
ctttaattcagaggttcctaactca

SEQ ID NO: 95334 - DNA, 25 bp, Probe Sequence
gacatccgcaaatctccataggtag

SEQ ID NO: 95335 - DNA, 25 bp, Probe Sequence
tgtgaataatgtgcaaataatgtgg

SEQ ID NO: 95336 - DNA, 25 bp, Probe Sequence
taatgcccagattgtgtttctaaga

SEQ ID NO: 95337 - DNA, 25 bp, Probe Sequence
tctttagagaaatgaccgattccag

SEQ ID NO: 95338 - DNA, 25 bp, Probe Sequence
cataatgcccagattgtgtttctaa

SEQ ID NO: 95339 - DNA, 25 bp, Probe Sequence
ataatgcccagattgtgtttctaag

SEQ ID NO: 95340 - DNA, 25 bp, Probe Sequence
aggatatagaaaccaactggaagaa

SEQ ID NO: 95341 - DNA, 25 bp, Probe Sequence
aaggatatagaaaccaactggaaga

SEQ ID NO: 95342 - DNA, 25 bp, Probe Sequence
taagtgacacaagccatgaagacaa

SEQ ID NO: 95343 - DNA, 25 bp, Probe Sequence
ggatatagaaaccaactggaagaag

SEQ ID NO: 95344 - DNA, 25 bp, Probe Sequence
ttctcacttgccaatatagtaaagc

SEQ ID NO: 95345 - DNA, 25 bp, Probe Sequence
tctatcttatgccagaagacaagaa

SEQ ID NO: 95346 - DNA, 25 bp, Probe Sequence
gccagggaattatgataatagggta

SEQ ID NO: 95347 - DNA, 25 bp, Probe Sequence
agccagggaattatgataatagggt

SEQ ID NO: 95348 - DNA, 25 bp, Probe Sequence
tagccagggaattatgataataggg

SEQ ID NO: 95349 - DNA, 25 bp, Probe Sequence
aacctgtctatcttatgccagaaga

SEQ ID NO: 95350 - DNA, 25 bp, Probe Sequence
cgataaacctgtctatcttatgcca

SEQ ID NO: 95351 - DNA, 25 bp, Probe Sequence
accgataaacctgtctatcttatgc

SEQ ID NO: 95352 - DNA, 25 bp, Probe Sequence
aaaggatatagaaaccaactggaag

SEQ ID NO: 95353 - DNA, 25 bp, Probe Sequence
ctttagagaaatgaccgattccagc

SEQ ID NO: 95354 - DNA, 25 bp, Probe Sequence
aatgcccagattgtgtttctaagaa

SEQ ID NO: 95355 - DNA, 25 bp, Probe Sequence
ccgataaacctgtctatcttatgcc

SEQ ID NO: 95356 - DNA, 25 bp, Probe Sequence
aaacctgtctatcttatgccagaag

SEQ ID NO: 95357 - DNA, 25 bp, Probe Sequence
acaccgataaacctgtctatcttat

SEQ ID NO: 95358 - DNA, 25 bp, Probe Sequence
atacaccgataaacctgtctatctt

SEQ ID NO: 95359 - DNA, 25 bp, Probe Sequence
aatacaccgataaacctgtctatct

SEQ ID NO: 95360 - DNA, 25 bp, Probe Sequence
ttgtgtgtggtgtgtaagtatatcc

SEQ ID NO: 95361 - DNA, 25 bp, Probe Sequence
cagaggttgtagtgagccaatatca

SEQ ID NO: 95362 - DNA, 25 bp, Probe Sequence
tttgtgtgtggtgtgtaagtatatc

SEQ ID NO: 95363 - DNA, 25 bp, Probe Sequence
ccagaggttgtagtgagccaatatc

SEQ ID NO: 95364 - DNA, 25 bp, Probe Sequence
ttgcgtgggctagacttatactaaa

SEQ ID NO: 95365 - DNA, 25 bp, Probe Sequence
tgtgtgtggtgtgtaagtatatccc

SEQ ID NO: 95366 - DNA, 25 bp, Probe Sequence
tatctgggatagcaaaggtcttctt

SEQ ID NO: 95367 - DNA, 25 bp, Probe Sequence
atctgggatagcaaaggtcttcttc

SEQ ID NO: 95368 - DNA, 25 bp, Probe Sequence
gttgcgtgggctagacttatactaa

SEQ ID NO: 95369 - DNA, 25 bp, Probe Sequence
gtatctgggatagcaaaggtcttct

SEQ ID NO: 95370 - DNA, 25 bp, Probe Sequence
ggtatctgggatagcaaaggtcttc

SEQ ID NO: 95371 - DNA, 25 bp, Probe Sequence
aatgttgcgtgggctagacttatac

SEQ ID NO: 95372 - DNA, 25 bp, Probe Sequence
caatgttgcgtgggctagacttata

SEQ ID NO: 95373 - DNA, 25 bp, Probe Sequence
tgttgcgtgggctagacttatacta

SEQ ID NO: 95374 - DNA, 25 bp, Probe Sequence
ggtgtgtaagtatatccccaatgtt

SEQ ID NO: 95375 - DNA, 25 bp, Probe Sequence
gtgtgtaagtatatccccaatgttg

SEQ ID NO: 95376 - DNA, 25 bp, Probe Sequence
tggtatctgggatagcaaaggtctt

SEQ ID NO: 95377 - DNA, 25 bp, Probe Sequence
tgtgtaagtatatccccaatgttgc

SEQ ID NO: 95378 - DNA, 25 bp, Probe Sequence
ggtggaaaattagagtgaacaagaa

SEQ ID NO: 95379 - DNA, 25 bp, Probe Sequence
tcttttgtgtgtggtgtgtaagtat

SEQ ID NO: 95380 - DNA, 25 bp, Probe Sequence
atcttttgtgtgtggtgtgtaagta

SEQ ID NO: 95381 - DNA, 25 bp, Probe Sequence
cttttgtgtgtggtgtgtaagtata

SEQ ID NO: 95382 - DNA, 25 bp, Probe Sequence
gccagaggttgtagtgagccaatat

SEQ ID NO: 95383 - DNA, 25 bp, Probe Sequence
tggaaaattagagtgaacaagaaca

SEQ ID NO: 95384 - DNA, 25 bp, Probe Sequence
aatttgacttctcaccctcaccaac

SEQ ID NO: 95385 - DNA, 25 bp, Probe Sequence
aaatttgacttctcaccctcaccaa

SEQ ID NO: 95386 - DNA, 25 bp, Probe Sequence
ctgagattacgccactacactccag

SEQ ID NO: 95387 - DNA, 25 bp, Probe Sequence
atttgacttctcaccctcaccaaca

SEQ ID NO: 95388 - DNA, 25 bp, Probe Sequence
cgggatgccacagtttattttaaat

SEQ ID NO: 95389 - DNA, 25 bp, Probe Sequence
tccaataaaatttgacttctcaccc

SEQ ID NO: 95390 - DNA, 25 bp, Probe Sequence
ccaataaaatttgacttctcaccct

SEQ ID NO: 95391 - DNA, 25 bp, Probe Sequence
ataaaatttgacttctcaccctcac

SEQ ID NO: 95392 - DNA, 25 bp, Probe Sequence
taaaatttgacttctcaccctcacc

SEQ ID NO: 95393 - DNA, 25 bp, Probe Sequence
aataaaatttgacttctcaccctca

SEQ ID NO: 95394 - DNA, 25 bp, Probe Sequence
gagctgagattacgccactacactc

SEQ ID NO: 95395 - DNA, 25 bp, Probe Sequence
caataaaatttgacttctcaccctc

SEQ ID NO: 95396 - DNA, 25 bp, Probe Sequence
ctccaataaaatttgacttctcacc

SEQ ID NO: 95397 - DNA, 25 bp, Probe Sequence
tttgacttctcaccctcaccaacag

SEQ ID NO: 95398 - DNA, 25 bp, Probe Sequence
gggatgccacagtttattttaaata

SEQ ID NO: 95399 - DNA, 25 bp, Probe Sequence
aaaatttgacttctcaccctcacca

SEQ ID NO: 95400 - DNA, 25 bp, Probe Sequence
tctccaataaaatttgacttctcac

SEQ ID NO: 95401 - DNA, 25 bp, Probe Sequence
actctccaataaaatttgacttctc

SEQ ID NO: 95402 - DNA, 25 bp, Probe Sequence
gactctccaataaaatttgacttct

SEQ ID NO: 95403 - DNA, 25 bp, Probe Sequence
agactctccaataaaatttgacttc

SEQ ID NO: 95404 - DNA, 25 bp, Probe Sequence
ctctccaataaaatttgacttctca

SEQ ID NO: 95405 - DNA, 25 bp, Probe Sequence
ggatgccacagtttattttaaatag

SEQ ID NO: 95406 - DNA, 25 bp, Probe Sequence
catgtgcctgtaatcccacctactc

SEQ ID NO: 95407 - DNA, 25 bp, Probe Sequence
ccgggatgccacagtttattttaaa

SEQ ID NO: 95408 - DNA, 25 bp, Probe Sequence
ggaattgacatcttctatgacaacg

SEQ ID NO: 95409 - DNA, 25 bp, Probe Sequence
ttcaattacaagaagaaggacaccg

SEQ ID NO: 95410 - DNA, 25 bp, Probe Sequence
tggaattgacatcttctatgacaac

SEQ ID NO: 95411 - DNA, 25 bp, Probe Sequence
ctatcagccagtataacttgaagcc

SEQ ID NO: 95412 - DNA, 25 bp, Probe Sequence
gtagcgtagacagatcacaatcaat

SEQ ID NO: 95413 - DNA, 25 bp, Probe Sequence
tagcgtagacagatcacaatcaatg

SEQ ID NO: 95414 - DNA, 25 bp, Probe Sequence
cgtagacagatcacaatcaatgaac

SEQ ID NO: 95415 - DNA, 25 bp, Probe Sequence
agacagatcacaatcaatgaacaag

SEQ ID NO: 95416 - DNA, 25 bp, Probe Sequence
gtagacagatcacaatcaatgaaca

SEQ ID NO: 95417 - DNA, 25 bp, Probe Sequence
gacagatcacaatcaatgaacaagc

SEQ ID NO: 95418 - DNA, 25 bp, Probe Sequence
atggaattgacatcttctatgacaa

SEQ ID NO: 95419 - DNA, 25 bp, Probe Sequence
agtatgctgaagagttccagaagaa

SEQ ID NO: 95420 - DNA, 25 bp, Probe Sequence
aagtatgctgaagagttccagaaga

SEQ ID NO: 95421 - DNA, 25 bp, Probe Sequence
caagtatgctgaagagttccagaag

SEQ ID NO: 95422 - DNA, 25 bp, Probe Sequence
gcgtagacagatcacaatcaatgaa

SEQ ID NO: 95423 - DNA, 25 bp, Probe Sequence
tagacagatcacaatcaatgaacaa

SEQ ID NO: 95424 - DNA, 25 bp, Probe Sequence
caatcaatgaacaagcgagacacaa

SEQ ID NO: 95425 - DNA, 25 bp, Probe Sequence
atcacaatcaatgaacaagcgagac

SEQ ID NO: 95426 - DNA, 25 bp, Probe Sequence
gtgaactatcttggtaacacagcag

SEQ ID NO: 95427 - DNA, 25 bp, Probe Sequence
gatcacaatcaatgaacaagcgaga

SEQ ID NO: 95428 - DNA, 25 bp, Probe Sequence
agatcacaatcaatgaacaagcgag

SEQ ID NO: 95429 - DNA, 25 bp, Probe Sequence
tgtagcgtagacagatcacaatcaa

SEQ ID NO: 95430 - DNA, 25 bp, Probe Sequence
tagtttatctcttccagcgtcaatt

SEQ ID NO: 95431 - DNA, 25 bp, Probe Sequence
cagatcacaatcaatgaacaagcga

SEQ ID NO: 95432 - DNA, 25 bp, Probe Sequence
tgaatcagcagttaagaaggttcta

SEQ ID NO: 95433 - DNA, 25 bp, Probe Sequence
atgaatcagcagttaagaaggttct

SEQ ID NO: 95434 - DNA, 25 bp, Probe Sequence
agaaggaactgttagtgagtcaaga

SEQ ID NO: 95435 - DNA, 25 bp, Probe Sequence
gaaggaactgttagtgagtcaagac

SEQ ID NO: 95436 - DNA, 25 bp, Probe Sequence
gaatcagcagttaagaaggttctag

SEQ ID NO: 95437 - DNA, 25 bp, Probe Sequence
acatgaatcagcagttaagaaggtt

SEQ ID NO: 95438 - DNA, 25 bp, Probe Sequence
catgaatcagcagttaagaaggttc

SEQ ID NO: 95439 - DNA, 25 bp, Probe Sequence
tccacatgaatcagcagttaagaag

SEQ ID NO: 95440 - DNA, 25 bp, Probe Sequence
ctccacatgaatcagcagttaagaa

SEQ ID NO: 95441 - DNA, 25 bp, Probe Sequence
cacatgaatcagcagttaagaaggt

SEQ ID NO: 95442 - DNA, 25 bp, Probe Sequence
cagaaggaactgttagtgagtcaag

SEQ ID NO: 95443 - DNA, 25 bp, Probe Sequence
aggaactgttagtgagtcaagacaa

SEQ ID NO: 95444 - DNA, 25 bp, Probe Sequence
aaggaactgttagtgagtcaagaca

SEQ ID NO: 95445 - DNA, 25 bp, Probe Sequence
ccacatgaatcagcagttaagaagg

SEQ ID NO: 95446 - DNA, 25 bp, Probe Sequence
caaatggcggtcttatagtttcaat

SEQ ID NO: 95447 - DNA, 25 bp, Probe Sequence
ggagggtaacattatttggacagat

SEQ ID NO: 95448 - DNA, 25 bp, Probe Sequence
ctttggagggagggtaacattattt

SEQ ID NO: 95449 - DNA, 25 bp, Probe Sequence
agcaaacttaataaacagccacttt

SEQ ID NO: 95450 - DNA, 25 bp, Probe Sequence
tttggagggagggtaacattatttg

SEQ ID NO: 95451 - DNA, 25 bp, Probe Sequence
tcaaatggcggtcttatagtttcaa

SEQ ID NO: 95452 - DNA, 25 bp, Probe Sequence
atggcggtcttatagtttcaattct

SEQ ID NO: 95453 - DNA, 25 bp, Probe Sequence
aatggcggtcttatagtttcaattc

SEQ ID NO: 95454 - DNA, 25 bp, Probe Sequence
aatttaggattcacgcaagtttcag

SEQ ID NO: 95455 - DNA, 25 bp, Probe Sequence
tagcaaacttaataaacagccactt

SEQ ID NO: 95456 - DNA, 25 bp, Probe Sequence
aatgttattctgagcaagtcctatg

SEQ ID NO: 95457 - DNA, 25 bp, Probe Sequence
caatgttattctgagcaagtcctat

SEQ ID NO: 95458 - DNA, 25 bp, Probe Sequence
gcaatgttattctgagcaagtccta

SEQ ID NO: 95459 - DNA, 25 bp, Probe Sequence
ctagagttccaagcacctacattaa

SEQ ID NO: 95460 - DNA, 25 bp, Probe Sequence
actagagttccaagcacctacatta

SEQ ID NO: 95461 - DNA, 25 bp, Probe Sequence
gacatgaatctattctctcctctcg

SEQ ID NO: 95462 - DNA, 25 bp, Probe Sequence
ccagacatgaatctattctctcctc

SEQ ID NO: 95463 - DNA, 25 bp, Probe Sequence
agagttccaagcacctacattaatt

SEQ ID NO: 95464 - DNA, 25 bp, Probe Sequence
tagagttccaagcacctacattaat

SEQ ID NO: 95465 - DNA, 25 bp, Probe Sequence
cagacatgaatctattctctcctct

SEQ ID NO: 95466 - DNA, 25 bp, Probe Sequence
agacatgaatctattctctcctctc

SEQ ID NO: 95467 - DNA, 25 bp, Probe Sequence
aactagagttccaagcacctacatt

SEQ ID NO: 95468 - DNA, 25 bp, Probe Sequence
gagttccaagcacctacattaatta

SEQ ID NO: 95469 - DNA, 25 bp, Probe Sequence
atcgccagacatgaatctattctct

SEQ ID NO: 95470 - DNA, 25 bp, Probe Sequence
catcgccagacatgaatctattctc

SEQ ID NO: 95471 - DNA, 25 bp, Probe Sequence
attctctcctctcgattgtagcata

SEQ ID NO: 95472 - DNA, 25 bp, Probe Sequence
tattctctcctctcgattgtagcat

SEQ ID NO: 95473 - DNA, 25 bp, Probe Sequence
gccagacatgaatctattctctcct

SEQ ID NO: 95474 - DNA, 25 bp, Probe Sequence
acatgaatctattctctcctctcga

SEQ ID NO: 95475 - DNA, 25 bp, Probe Sequence
tgtcagatatgatacactgcacata

SEQ ID NO: 95476 - DNA, 25 bp, Probe Sequence
tctattctctcctctcgattgtagc

SEQ ID NO: 95477 - DNA, 25 bp, Probe Sequence
catgaatctattctctcctctcgat

SEQ ID NO: 95478 - DNA, 25 bp, Probe Sequence
ttctctcctctcgattgtagcatag

SEQ ID NO: 95479 - DNA, 25 bp, Probe Sequence
ctattctctcctctcgattgtagca

SEQ ID NO: 95480 - DNA, 25 bp, Probe Sequence
aatatactcaatgcgtctgatgtgt

SEQ ID NO: 95481 - DNA, 25 bp, Probe Sequence
atatactcaatgcgtctgatgtgtc

SEQ ID NO: 95482 - DNA, 25 bp, Probe Sequence
aaccagtacagtaccataagtagaa

SEQ ID NO: 95483 - DNA, 25 bp, Probe Sequence
accagtacagtaccataagtagaat

SEQ ID NO: 95484 - DNA, 25 bp, Probe Sequence
tatactcaatgcgtctgatgtgtca

SEQ ID NO: 95485 - DNA, 25 bp, Probe Sequence
accttcaagctgtgtaatattccaa

SEQ ID NO: 95486 - DNA, 25 bp, Probe Sequence
aaccttcaagctgtgtaatattcca

SEQ ID NO: 95487 - DNA, 25 bp, Probe Sequence
ccttcaagctgtgtaatattccaat

SEQ ID NO: 95488 - DNA, 25 bp, Probe Sequence
cagtatgaccttgtctagtctccaa

SEQ ID NO: 95489 - DNA, 25 bp, Probe Sequence
aaccagtatgaccttgtctagtctc

SEQ ID NO: 95490 - DNA, 25 bp, Probe Sequence
agctgtgtaatattccaatgttgtt

SEQ ID NO: 95491 - DNA, 25 bp, Probe Sequence
aagctgtgtaatattccaatgttgt

SEQ ID NO: 95492 - DNA, 25 bp, Probe Sequence
atgtaaggatcacctagtcttcact

SEQ ID NO: 95493 - DNA, 25 bp, Probe Sequence
tcaagctgtgtaatattccaatgtt

SEQ ID NO: 95494 - DNA, 25 bp, Probe Sequence
ttcaagctgtgtaatattccaatgt

SEQ ID NO: 95495 - DNA, 25 bp, Probe Sequence
catgtaaggatcacctagtcttcac

SEQ ID NO: 95496 - DNA, 25 bp, Probe Sequence
atactcaatgcgtctgatgtgtcat

SEQ ID NO: 95497 - DNA, 25 bp, Probe Sequence
tgtaaggatcacctagtcttcacta

SEQ ID NO: 95498 - DNA, 25 bp, Probe Sequence
cttcaagctgtgtaatattccaatg

SEQ ID NO: 95499 - DNA, 25 bp, Probe Sequence
caagctgtgtaatattccaatgttg

SEQ ID NO: 95500 - DNA, 25 bp, Probe Sequence
gtaaggatcacctagtcttcactat

SEQ ID NO: 95501 - DNA, 25 bp, Probe Sequence
gaaggtatttatcatagttgcccat

SEQ ID NO: 95502 - DNA, 25 bp, Probe Sequence
tgactttctctttctgaatgacttc

SEQ ID NO: 95503 - DNA, 25 bp, Probe Sequence
ggattgactttctctttctgaatga

SEQ ID NO: 95504 - DNA, 25 bp, Probe Sequence
caaggatggatacggttaatctctt

SEQ ID NO: 95505 - DNA, 25 bp, Probe Sequence
aaggatggatacggttaatctctta

SEQ ID NO: 95506 - DNA, 25 bp, Probe Sequence
attatagccactgacacaatagagt

SEQ ID NO: 95507 - DNA, 25 bp, Probe Sequence
aggatggatacggttaatctcttaa

SEQ ID NO: 95508 - DNA, 25 bp, Probe Sequence
tgttgagcacacctatattcacata

SEQ ID NO: 95509 - DNA, 25 bp, Probe Sequence
gcacacctatattcacatagagagt

SEQ ID NO: 95510 - DNA, 25 bp, Probe Sequence
tgagcacacctatattcacatagag

SEQ ID NO: 95511 - DNA, 25 bp, Probe Sequence
agcacacctatattcacatagagag

SEQ ID NO: 95512 - DNA, 25 bp, Probe Sequence
gagcacacctatattcacatagaga

SEQ ID NO: 95513 - DNA, 25 bp, Probe Sequence
ttgagcacacctatattcacataga

SEQ ID NO: 95514 - DNA, 25 bp, Probe Sequence
gttgagcacacctatattcacatag

SEQ ID NO: 95515 - DNA, 25 bp, Probe Sequence
ttatagccactgacacaatagagtc

SEQ ID NO: 95516 - DNA, 25 bp, Probe Sequence
ggaatattatagccactgacacaat

SEQ ID NO: 95517 - DNA, 25 bp, Probe Sequence
tattatagccactgacacaatagag

SEQ ID NO: 95518 - DNA, 25 bp, Probe Sequence
acaatatagctcgaagaacattcca

SEQ ID NO: 95519 - DNA, 25 bp, Probe Sequence
aacaatatagctcgaagaacattcc

SEQ ID NO: 95520 - DNA, 25 bp, Probe Sequence
aatatagctcgaagaacattccatg

SEQ ID NO: 95521 - DNA, 25 bp, Probe Sequence
caatatagctcgaagaacattccat

SEQ ID NO: 95522 - DNA, 25 bp, Probe Sequence
cacacctatattcacatagagagtg

SEQ ID NO: 95523 - DNA, 25 bp, Probe Sequence
ccaaggatggatacggttaatctct

SEQ ID NO: 95524 - DNA, 25 bp, Probe Sequence
atattatagccactgacacaataga

SEQ ID NO: 95525 - DNA, 25 bp, Probe Sequence
gaggtaaagtctgtttatttggtgt

SEQ ID NO: 95526 - DNA, 25 bp, Probe Sequence
acttggttggtgacttgctattctg

SEQ ID NO: 95527 - DNA, 25 bp, Probe Sequence
agaggtaaagtctgtttatttggtg

SEQ ID NO: 95528 - DNA, 25 bp, Probe Sequence
agatgtagagagagcagcctgatta

SEQ ID NO: 95529 - DNA, 25 bp, Probe Sequence
gatgtagagagagcagcctgattac

SEQ ID NO: 95530 - DNA, 25 bp, Probe Sequence
atgtagagagagcagcctgattacc

SEQ ID NO: 95531 - DNA, 25 bp, Probe Sequence
cagatgtagagagagcagcctgatt

SEQ ID NO: 95532 - DNA, 25 bp, Probe Sequence
agaaaataggggtaatagtacaggc

SEQ ID NO: 95533 - DNA, 25 bp, Probe Sequence
gaaaataggggtaatagtacaggcg

SEQ ID NO: 95534 - DNA, 25 bp, Probe Sequence
aaaataggggtaatagtacaggcgt

SEQ ID NO: 95535 - DNA, 25 bp, Probe Sequence
aaataggggtaatagtacaggcgtg

SEQ ID NO: 95536 - DNA, 25 bp, Probe Sequence
ttcctcactagaaaataggggtaat

SEQ ID NO: 95537 - DNA, 25 bp, Probe Sequence
gattcaagaccagcctgacgaacat

SEQ ID NO: 95538 - DNA, 25 bp, Probe Sequence
tcagtttcctcactagaaaataggg

SEQ ID NO: 95539 - DNA, 25 bp, Probe Sequence
gcctcagtttcctcactagaaaata

SEQ ID NO: 95540 - DNA, 25 bp, Probe Sequence
gtttcctcactagaaaataggggta

SEQ ID NO: 95541 - DNA, 25 bp, Probe Sequence
cagtttcctcactagaaaatagggg

SEQ ID NO: 95542 - DNA, 25 bp, Probe Sequence
tactttgggtcccagatgtagagag

SEQ ID NO: 95543 - DNA, 25 bp, Probe Sequence
agtttcctcactagaaaataggggt

SEQ ID NO: 95544 - DNA, 25 bp, Probe Sequence
tttgtggctcctggactctactttg

SEQ ID NO: 95545 - DNA, 25 bp, Probe Sequence
tcctcactagaaaataggggtaata

SEQ ID NO: 95546 - DNA, 25 bp, Probe Sequence
tttcctcactagaaaataggggtaa

SEQ ID NO: 95547 - DNA, 25 bp, Probe Sequence
cctcactagaaaataggggtaatag

SEQ ID NO: 95548 - DNA, 25 bp, Probe Sequence
ctcagtttcctcactagaaaatagg

SEQ ID NO: 95549 - DNA, 25 bp, Probe Sequence
cctcagtttcctcactagaaaatag

SEQ ID NO: 95550 - DNA, 25 bp, Probe Sequence
gactctactttgggtcccagatgta

SEQ ID NO: 95551 - DNA, 25 bp, Probe Sequence
ctactttgggtcccagatgtagaga

SEQ ID NO: 95552 - DNA, 25 bp, Probe Sequence
gatagaagcctttgtctgtgcctac

SEQ ID NO: 95553 - DNA, 25 bp, Probe Sequence
atagaagcctttgtctgtgcctaca

SEQ ID NO: 95554 - DNA, 25 bp, Probe Sequence
ctcacatgaccagatgggagaaaga

SEQ ID NO: 95555 - DNA, 25 bp, Probe Sequence
cgatagaagcctttgtctgtgccta

SEQ ID NO: 95556 - DNA, 25 bp, Probe Sequence
acatgaccagatgggagaaagacag

SEQ ID NO: 95557 - DNA, 25 bp, Probe Sequence
tcacatgaccagatgggagaaagac

SEQ ID NO: 95558 - DNA, 25 bp, Probe Sequence
cacatgaccagatgggagaaagaca

SEQ ID NO: 95559 - DNA, 25 bp, Probe Sequence
gactcctcatccagtgctctctttg

SEQ ID NO: 95560 - DNA, 25 bp, Probe Sequence
gaccagtggagcctttctgacaatt

SEQ ID NO: 95561 - DNA, 25 bp, Probe Sequence
tagaagcctttgtctgtgcctacaa

SEQ ID NO: 95562 - DNA, 25 bp, Probe Sequence
atggcaggggagttgaatctttgag

SEQ ID NO: 95563 - DNA, 25 bp, Probe Sequence
gatggcaggggagttgaatctttga

SEQ ID NO: 95564 - DNA, 25 bp, Probe Sequence
gagatggcaggggagttgaatcttt

SEQ ID NO: 95565 - DNA, 25 bp, Probe Sequence
agatggcaggggagttgaatctttg

SEQ ID NO: 95566 - DNA, 25 bp, Probe Sequence
ttctacttcccattccaaataccat

SEQ ID NO: 95567 - DNA, 25 bp, Probe Sequence
attctacttcccattccaaatacca

SEQ ID NO: 95568 - DNA, 25 bp, Probe Sequence
cccattacaacattaagaaactcca

SEQ ID NO: 95569 - DNA, 25 bp, Probe Sequence
tctacttcccattccaaataccata

SEQ ID NO: 95570 - DNA, 25 bp, Probe Sequence
agtgattctgtaaagagttcccatt

SEQ ID NO: 95571 - DNA, 25 bp, Probe Sequence
tcccattacaacattaagaaactcc

SEQ ID NO: 95572 - DNA, 25 bp, Probe Sequence
tcccattccaaataccatattgtca

SEQ ID NO: 95573 - DNA, 25 bp, Probe Sequence
cccattccaaataccatattgtcaa

SEQ ID NO: 95574 - DNA, 25 bp, Probe Sequence
ttcccattccaaataccatattgtc

SEQ ID NO: 95575 - DNA, 25 bp, Probe Sequence
cttcccattccaaataccatattgt

SEQ ID NO: 95576 - DNA, 25 bp, Probe Sequence
acttcccattccaaataccatattg

SEQ ID NO: 95577 - DNA, 25 bp, Probe Sequence
aataacttcggacttatactgatcc

SEQ ID NO: 95578 - DNA, 25 bp, Probe Sequence
gtgattctgtaaagagttcccatta

SEQ ID NO: 95579 - DNA, 25 bp, Probe Sequence
ctacttcccattccaaataccatat

SEQ ID NO: 95580 - DNA, 25 bp, Probe Sequence
atagtccaccagtgattctgtaaag

SEQ ID NO: 95581 - DNA, 25 bp, Probe Sequence
cagtgattctgtaaagagttcccat

SEQ ID NO: 95582 - DNA, 25 bp, Probe Sequence
aatagtccaccagtgattctgtaaa

SEQ ID NO: 95583 - DNA, 25 bp, Probe Sequence
aaatagtccaccagtgattctgtaa

SEQ ID NO: 95584 - DNA, 25 bp, Probe Sequence
agagttcccattacaacattaagaa

SEQ ID NO: 95585 - DNA, 25 bp, Probe Sequence
aagagttcccattacaacattaaga

SEQ ID NO: 95586 - DNA, 25 bp, Probe Sequence
tagtccaccagtgattctgtaaaga

SEQ ID NO: 95587 - DNA, 25 bp, Probe Sequence
tattctacttcccattccaaatacc

SEQ ID NO: 95588 - DNA, 25 bp, Probe Sequence
ccattacaacattaagaaactccaa

SEQ ID NO: 95589 - DNA, 25 bp, Probe Sequence
caccagtgattctgtaaagagttcc

SEQ ID NO: 95590 - DNA, 25 bp, Probe Sequence
aataccgcaccttctcactgtataa

SEQ ID NO: 95591 - DNA, 25 bp, Probe Sequence
ataccgcaccttctcactgtataag

SEQ ID NO: 95592 - DNA, 25 bp, Probe Sequence
taatacctgggtgctgaaataatct

SEQ ID NO: 95593 - DNA, 25 bp, Probe Sequence
aatacctgggtgctgaaataatctg

SEQ ID NO: 95594 - DNA, 25 bp, Probe Sequence
ttaatacctgggtgctgaaataatc

SEQ ID NO: 95595 - DNA, 25 bp, Probe Sequence
gcttaatacctgggtgctgaaataa

SEQ ID NO: 95596 - DNA, 25 bp, Probe Sequence
cttaatacctgggtgctgaaataat

SEQ ID NO: 95597 - DNA, 25 bp, Probe Sequence
tacctgggtgctgaaataatctgta

SEQ ID NO: 95598 - DNA, 25 bp, Probe Sequence
taccgcaccttctcactgtataagt

SEQ ID NO: 95599 - DNA, 25 bp, Probe Sequence
atacctgggtgctgaaataatctgt

SEQ ID NO: 95600 - DNA, 25 bp, Probe Sequence
cacatagcagggaacaacagatact

SEQ ID NO: 95601 - DNA, 25 bp, Probe Sequence
gacacatagcagggaacaacagata

SEQ ID NO: 95602 - DNA, 25 bp, Probe Sequence
acacatagcagggaacaacagatac

SEQ ID NO: 95603 - DNA, 25 bp, Probe Sequence
aaataccgcaccttctcactgtata

SEQ ID NO: 95604 - DNA, 25 bp, Probe Sequence
ggcttaatacctgggtgctgaaata

SEQ ID NO: 95605 - DNA, 25 bp, Probe Sequence
aactaatgggtactaggcttaatac

SEQ ID NO: 95606 - DNA, 25 bp, Probe Sequence
acctgggtgctgaaataatctgtac

SEQ ID NO: 95607 - DNA, 25 bp, Probe Sequence
acatagcagggaacaacagatactg

SEQ ID NO: 95608 - DNA, 25 bp, Probe Sequence
ctgcccttgtacccatgaacttaaa

SEQ ID NO: 95609 - DNA, 25 bp, Probe Sequence
caagtttacctgtgcaacaaatctg

SEQ ID NO: 95610 - DNA, 25 bp, Probe Sequence
aataactaatgggtactaggcttaa

SEQ ID NO: 95611 - DNA, 25 bp, Probe Sequence
aaataactaatgggtactaggctta

SEQ ID NO: 95612 - DNA, 25 bp, Probe Sequence
actgtataagtggaagctaaatgat

SEQ ID NO: 95613 - DNA, 25 bp, Probe Sequence
acaagtttacctgtgcaacaaatct

SEQ ID NO: 95614 - DNA, 25 bp, Probe Sequence
ctcggtaatgatgaagaactggtag

SEQ ID NO: 95615 - DNA, 25 bp, Probe Sequence
aatggaatgagtctcggtaatgatg

SEQ ID NO: 95616 - DNA, 25 bp, Probe Sequence
ggaatgagtctcggtaatgatgaag

SEQ ID NO: 95617 - DNA, 25 bp, Probe Sequence
aatgagtctcggtaatgatgaagaa

SEQ ID NO: 95618 - DNA, 25 bp, Probe Sequence
gaatgagtctcggtaatgatgaaga

SEQ ID NO: 95619 - DNA, 25 bp, Probe Sequence
atgagtctcggtaatgatgaagaac

SEQ ID NO: 95620 - DNA, 25 bp, Probe Sequence
aataccaacagtgattatgctcagt

SEQ ID NO: 95621 - DNA, 25 bp, Probe Sequence
cggtaatgatgaagaactggtagta

SEQ ID NO: 95622 - DNA, 25 bp, Probe Sequence
tctcggtaatgatgaagaactggta

SEQ ID NO: 95623 - DNA, 25 bp, Probe Sequence
atggaatgagtctcggtaatgatga

SEQ ID NO: 95624 - DNA, 25 bp, Probe Sequence
ataccaacagtgattatgctcagta

SEQ ID NO: 95625 - DNA, 25 bp, Probe Sequence
tggaatgagtctcggtaatgatgaa

SEQ ID NO: 95626 - DNA, 25 bp, Probe Sequence
ataagatccagatcacattaggctc

SEQ ID NO: 95627 - DNA, 25 bp, Probe Sequence
aataagatccagatcacattaggct

SEQ ID NO: 95628 - DNA, 25 bp, Probe Sequence
gagtctcggtaatgatgaagaactg

SEQ ID NO: 95629 - DNA, 25 bp, Probe Sequence
tcggtaatgatgaagaactggtagt

SEQ ID NO: 95630 - DNA, 25 bp, Probe Sequence
tgagtctcggtaatgatgaagaact

SEQ ID NO: 95631 - DNA, 25 bp, Probe Sequence
atataccatgaacagatgaggcaat

SEQ ID NO: 95632 - DNA, 25 bp, Probe Sequence
aatataccatgaacagatgaggcaa

SEQ ID NO: 95633 - DNA, 25 bp, Probe Sequence
taccaacagtgattatgctcagtac

SEQ ID NO: 95634 - DNA, 25 bp, Probe Sequence
tataccatgaacagatgaggcaatg

SEQ ID NO: 95635 - DNA, 25 bp, Probe Sequence
taagatccagatcacattaggctcc

SEQ ID NO: 95636 - DNA, 25 bp, Probe Sequence
tgattcagtaagtaatgagaggttg

SEQ ID NO: 95637 - DNA, 25 bp, Probe Sequence
ggtaatgatgaagaactggtagtaa

SEQ ID NO: 95638 - DNA, 25 bp, Probe Sequence
ctgatccataagcactgatgtcata

SEQ ID NO: 95639 - DNA, 25 bp, Probe Sequence
tgatccataagcactgatgtcatat

SEQ ID NO: 95640 - DNA, 25 bp, Probe Sequence
ctcaactagcaacataggcacaatg

SEQ ID NO: 95641 - DNA, 25 bp, Probe Sequence
cagacagctcaatctcgatgtaatt

SEQ ID NO: 95642 - DNA, 25 bp, Probe Sequence
cctgatccataagcactgatgtcat

SEQ ID NO: 95643 - DNA, 25 bp, Probe Sequence
gactttgagatggctttcagtagta

SEQ ID NO: 95644 - DNA, 25 bp, Probe Sequence
aagactttgagatggctttcagtag

SEQ ID NO: 95645 - DNA, 25 bp, Probe Sequence
tgctaactacctatttatctgcttc

SEQ ID NO: 95646 - DNA, 25 bp, Probe Sequence
tgaaagacacatgctaactacctat

SEQ ID NO: 95647 - DNA, 25 bp, Probe Sequence
gctaactacctatttatctgcttct

SEQ ID NO: 95648 - DNA, 25 bp, Probe Sequence
tttgagatggctttcagtagtacat

SEQ ID NO: 95649 - DNA, 25 bp, Probe Sequence
ctttgagatggctttcagtagtaca

SEQ ID NO: 95650 - DNA, 25 bp, Probe Sequence
actttgagatggctttcagtagtac

SEQ ID NO: 95651 - DNA, 25 bp, Probe Sequence
agactttgagatggctttcagtagt

SEQ ID NO: 95652 - DNA, 25 bp, Probe Sequence
ttgagatggctttcagtagtacata

SEQ ID NO: 95653 - DNA, 25 bp, Probe Sequence
tagcaacataggcacaatgtctata

SEQ ID NO: 95654 - DNA, 25 bp, Probe Sequence
tgagatggctttcagtagtacatat

SEQ ID NO: 95655 - DNA, 25 bp, Probe Sequence
ctagcaacataggcacaatgtctat

SEQ ID NO: 95656 - DNA, 25 bp, Probe Sequence
gaaagacacatgctaactacctatt

SEQ ID NO: 95657 - DNA, 25 bp, Probe Sequence
acatgctaactacctatttatctgc

SEQ ID NO: 95658 - DNA, 25 bp, Probe Sequence
cctcaagacaacaagaaagcaagtt

SEQ ID NO: 95659 - DNA, 25 bp, Probe Sequence
atgctaactacctatttatctgctt

SEQ ID NO: 95660 - DNA, 25 bp, Probe Sequence
cgtcaaaccttgttaaacatccaat

SEQ ID NO: 95661 - DNA, 25 bp, Probe Sequence
catgctaactacctatttatctgct

SEQ ID NO: 95662 - DNA, 25 bp, Probe Sequence
aatatgccaagtacagatagtgagg

SEQ ID NO: 95663 - DNA, 25 bp, Probe Sequence
ggaatatgccaagtacagatagtga

SEQ ID NO: 95664 - DNA, 25 bp, Probe Sequence
aggaatatgccaagtacagatagtg

SEQ ID NO: 95665 - DNA, 25 bp, Probe Sequence
atatgccaagtacagatagtgagga

SEQ ID NO: 95666 - DNA, 25 bp, Probe Sequence
tatgccaagtacagatagtgaggaa

SEQ ID NO: 95667 - DNA, 25 bp, Probe Sequence
agaatatactctggtagactgaggc

SEQ ID NO: 95668 - DNA, 25 bp, Probe Sequence
gaatatgccaagtacagatagtgag

SEQ ID NO: 95669 - DNA, 25 bp, Probe Sequence
taggaatatgccaagtacagatagt

SEQ ID NO: 95670 - DNA, 25 bp, Probe Sequence
aagaatatactctggtagactgagg

SEQ ID NO: 95671 - DNA, 25 bp, Probe Sequence
gtaggaatatgccaagtacagatag

SEQ ID NO: 95672 - DNA, 25 bp, Probe Sequence
gaatatactctggtagactgaggcg

SEQ ID NO: 95673 - DNA, 25 bp, Probe Sequence
tcaagaatatactctggtagactga

SEQ ID NO: 95674 - DNA, 25 bp, Probe Sequence
caagaatatactctggtagactgag

SEQ ID NO: 95675 - DNA, 25 bp, Probe Sequence
acagatagtgaggaaagaaaggaag

SEQ ID NO: 95676 - DNA, 25 bp, Probe Sequence
cagatagtgaggaaagaaaggaaga

SEQ ID NO: 95677 - DNA, 25 bp, Probe Sequence
ttcaagaatatactctggtagactg

SEQ ID NO: 95678 - DNA, 25 bp, Probe Sequence
agatagtgaggaaagaaaggaagaa

SEQ ID NO: 95679 - DNA, 25 bp, Probe Sequence
cctgagtgataaagtgagaccctat

SEQ ID NO: 95680 - DNA, 25 bp, Probe Sequence
tacagatagtgaggaaagaaaggaa

SEQ ID NO: 95681 - DNA, 25 bp, Probe Sequence
caaacctgagtgataaagtgagacc

SEQ ID NO: 95682 - DNA, 25 bp, Probe Sequence
ccaaacctgagtgataaagtgagac

SEQ ID NO: 95683 - DNA, 25 bp, Probe Sequence
gatagtgaggaaagaaaggaagaaa

SEQ ID NO: 95684 - DNA, 25 bp, Probe Sequence
ccaagtacagatagtgaggaaagaa

SEQ ID NO: 95685 - DNA, 25 bp, Probe Sequence
gtacagatagtgaggaaagaaagga

SEQ ID NO: 95686 - DNA, 25 bp, Probe Sequence
aacatactcataggcaccaacattc

SEQ ID NO: 95687 - DNA, 25 bp, Probe Sequence
ctaagaatgttcacacaatgccaag

SEQ ID NO: 95688 - DNA, 25 bp, Probe Sequence
taagaatgttcacacaatgccaaga

SEQ ID NO: 95689 - DNA, 25 bp, Probe Sequence
tctaagaatgttcacacaatgccaa

SEQ ID NO: 95690 - DNA, 25 bp, Probe Sequence
ttctaagaatgttcacacaatgcca

SEQ ID NO: 95691 - DNA, 25 bp, Probe Sequence
acatactcataggcaccaacattcc

SEQ ID NO: 95692 - DNA, 25 bp, Probe Sequence
ccacaaggaaagaaactaagacaag

SEQ ID NO: 95693 - DNA, 25 bp, Probe Sequence
atagcatagaccacaaggaaagaaa

SEQ ID NO: 95694 - DNA, 25 bp, Probe Sequence
aatagcatagaccacaaggaaagaa

SEQ ID NO: 95695 - DNA, 25 bp, Probe Sequence
aaatagcatagaccacaaggaaaga

SEQ ID NO: 95696 - DNA, 25 bp, Probe Sequence
accacaaggaaagaaactaagacaa

SEQ ID NO: 95697 - DNA, 25 bp, Probe Sequence
agaccacaaggaaagaaactaagac

SEQ ID NO: 95698 - DNA, 25 bp, Probe Sequence
gagaatatccaacaaatcgcaagta

SEQ ID NO: 95699 - DNA, 25 bp, Probe Sequence
aaacatactcataggcaccaacatt

SEQ ID NO: 95700 - DNA, 25 bp, Probe Sequence
tagaccacaaggaaagaaactaaga

SEQ ID NO: 95701 - DNA, 25 bp, Probe Sequence
gcatagaccacaaggaaagaaacta

SEQ ID NO: 95702 - DNA, 25 bp, Probe Sequence
tagcatagaccacaaggaaagaaac

SEQ ID NO: 95703 - DNA, 25 bp, Probe Sequence
gcaaagggacaatgtaacaaatcta

SEQ ID NO: 95704 - DNA, 25 bp, Probe Sequence
ttatttaactggcaaggtgaggaaa

SEQ ID NO: 95705 - DNA, 25 bp, Probe Sequence
gaccacaaggaaagaaactaagaca

SEQ ID NO: 95706 - DNA, 25 bp, Probe Sequence
agaatatccaacaaatcgcaagtaa

SEQ ID NO: 95707 - DNA, 25 bp, Probe Sequence
atagagagcaaagggacaatgtaac

SEQ ID NO: 95708 - DNA, 25 bp, Probe Sequence
tggaacaaagtcatagagagcaaag

SEQ ID NO: 95709 - DNA, 25 bp, Probe Sequence
ctggaacaaagtcatagagagcaaa

SEQ ID NO: 95710 - DNA, 25 bp, Probe Sequence
tattgctgtgacttctactgaggaa

SEQ ID NO: 95711 - DNA, 25 bp, Probe Sequence
ctattgctgtgacttctactgagga

SEQ ID NO: 95712 - DNA, 25 bp, Probe Sequence
gctgtgacttctactgaggaaataa

SEQ ID NO: 95713 - DNA, 25 bp, Probe Sequence
tgctgtgacttctactgaggaaata

SEQ ID NO: 95714 - DNA, 25 bp, Probe Sequence
cctattgctgtgacttctactgagg

SEQ ID NO: 95715 - DNA, 25 bp, Probe Sequence
tgactagcagccttaattccatttg

SEQ ID NO: 95716 - DNA, 25 bp, Probe Sequence
taaagtgtccttgtgattacattgg

SEQ ID NO: 95717 - DNA, 25 bp, Probe Sequence
ctgtgacttctactgaggaaataat

SEQ ID NO: 95718 - DNA, 25 bp, Probe Sequence
ttgctgtgacttctactgaggaaat

SEQ ID NO: 95719 - DNA, 25 bp, Probe Sequence
attgctgtgacttctactgaggaaa

SEQ ID NO: 95720 - DNA, 25 bp, Probe Sequence
ccctattgctgtgacttctactgag

SEQ ID NO: 95721 - DNA, 25 bp, Probe Sequence
ctgactagcagccttaattccattt

SEQ ID NO: 95722 - DNA, 25 bp, Probe Sequence
agaacactctccctgtcttaaagtc

SEQ ID NO: 95723 - DNA, 25 bp, Probe Sequence
gaacactctccctgtcttaaagtca

SEQ ID NO: 95724 - DNA, 25 bp, Probe Sequence
tcagaacactctccctgtcttaaag

SEQ ID NO: 95725 - DNA, 25 bp, Probe Sequence
ctcagaacactctccctgtcttaaa

SEQ ID NO: 95726 - DNA, 25 bp, Probe Sequence
tgtgacttctactgaggaaataatt

SEQ ID NO: 95727 - DNA, 25 bp, Probe Sequence
aaagtgtccttgtgattacattggc

SEQ ID NO: 95728 - DNA, 25 bp, Probe Sequence
aacactctccctgtcttaaagtcag

SEQ ID NO: 95729 - DNA, 25 bp, Probe Sequence
cagaacactctccctgtcttaaagt

SEQ ID NO: 95730 - DNA, 25 bp, Probe Sequence
ttaaagtgtccttgtgattacattg

SEQ ID NO: 95731 - DNA, 25 bp, Probe Sequence
ctgaggaaataattaaacccaaaca

SEQ ID NO: 95732 - DNA, 25 bp, Probe Sequence
actgaggaaataattaaacccaaac

SEQ ID NO: 95733 - DNA, 25 bp, Probe Sequence
tttggagcctctggaaagattgttt

SEQ ID NO: 95734 - DNA, 25 bp, Probe Sequence
gaatgatacttgactccacataaga

SEQ ID NO: 95735 - DNA, 25 bp, Probe Sequence
caggaatgatacttgactccacata

SEQ ID NO: 95736 - DNA, 25 bp, Probe Sequence
ctatctccagcaggaatgatacttg

SEQ ID NO: 95737 - DNA, 25 bp, Probe Sequence
acaagattgtcctagccagtaataa

SEQ ID NO: 95738 - DNA, 25 bp, Probe Sequence
aacaagattgtcctagccagtaata

SEQ ID NO: 95739 - DNA, 25 bp, Probe Sequence
aatgatacttgactccacataagag

SEQ ID NO: 95740 - DNA, 25 bp, Probe Sequence
aggaatgatacttgactccacataa

SEQ ID NO: 95741 - DNA, 25 bp, Probe Sequence
tatctccagcaggaatgatacttga

SEQ ID NO: 95742 - DNA, 25 bp, Probe Sequence
actatctccagcaggaatgatactt

SEQ ID NO: 95743 - DNA, 25 bp, Probe Sequence
ggaatgatacttgactccacataag

SEQ ID NO: 95744 - DNA, 25 bp, Probe Sequence
agacacactgaatcatagcttctac

SEQ ID NO: 95745 - DNA, 25 bp, Probe Sequence
gagacacactgaatcatagcttcta

SEQ ID NO: 95746 - DNA, 25 bp, Probe Sequence
cacactgaatcatagcttctacctc

SEQ ID NO: 95747 - DNA, 25 bp, Probe Sequence
gactatctccagcaggaatgatact

SEQ ID NO: 95748 - DNA, 25 bp, Probe Sequence
agactatctccagcaggaatgatac

SEQ ID NO: 95749 - DNA, 25 bp, Probe Sequence
gacacactgaatcatagcttctacc

SEQ ID NO: 95750 - DNA, 25 bp, Probe Sequence
tcactgagacacactgaatcatagc

SEQ ID NO: 95751 - DNA, 25 bp, Probe Sequence
ctccacataagagttctaattctga

SEQ ID NO: 95752 - DNA, 25 bp, Probe Sequence
acacactgaatcatagcttctacct

SEQ ID NO: 95753 - DNA, 25 bp, Probe Sequence
tccacataagagttctaattctgaa

SEQ ID NO: 95754 - DNA, 25 bp, Probe Sequence
acactgaatcatagcttctacctca

SEQ ID NO: 95755 - DNA, 25 bp, Probe Sequence
aagagaaaggtgtattgagtttagc

SEQ ID NO: 95756 - DNA, 25 bp, Probe Sequence
ctgagacacactgaatcatagcttc

SEQ ID NO: 95757 - DNA, 25 bp, Probe Sequence
atattagatggctgatagggattgt

SEQ ID NO: 95758 - DNA, 25 bp, Probe Sequence
ggtggtagtagcaaatattcaaacg

SEQ ID NO: 95759 - DNA, 25 bp, Probe Sequence
gtggtagtagcaaatattcaaacga

SEQ ID NO: 95760 - DNA, 25 bp, Probe Sequence
tggtggtagtagcaaatattcaaac

SEQ ID NO: 95761 - DNA, 25 bp, Probe Sequence
tggtagtagcaaatattcaaacgag

SEQ ID NO: 95762 - DNA, 25 bp, Probe Sequence
ggtagtagcaaatattcaaacgaga

SEQ ID NO: 95763 - DNA, 25 bp, Probe Sequence
tcttggtggtagtagcaaatattca

SEQ ID NO: 95764 - DNA, 25 bp, Probe Sequence
cttggtggtagtagcaaatattcaa

SEQ ID NO: 95765 - DNA, 25 bp, Probe Sequence
ttggtggtagtagcaaatattcaaa

SEQ ID NO: 95766 - DNA, 25 bp, Probe Sequence
agtagcaaatattcaaacgagaact

SEQ ID NO: 95767 - DNA, 25 bp, Probe Sequence
atcttggtggtagtagcaaatattc

SEQ ID NO: 95768 - DNA, 25 bp, Probe Sequence
gatcttggtggtagtagcaaatatt

SEQ ID NO: 95769 - DNA, 25 bp, Probe Sequence
gtagcaaatattcaaacgagaactt

SEQ ID NO: 95770 - DNA, 25 bp, Probe Sequence
tagcaaatattcaaacgagaacttt

SEQ ID NO: 95771 - DNA, 25 bp, Probe Sequence
tagtagcaaatattcaaacgagaac

SEQ ID NO: 95772 - DNA, 25 bp, Probe Sequence
gtagtagcaaatattcaaacgagaa

SEQ ID NO: 95773 - DNA, 25 bp, Probe Sequence
cagatcttggtggtagtagcaaata

SEQ ID NO: 95774 - DNA, 25 bp, Probe Sequence
agatcttggtggtagtagcaaatat

SEQ ID NO: 95775 - DNA, 25 bp, Probe Sequence
agcaaatattcaaacgagaactttg

SEQ ID NO: 95776 - DNA, 25 bp, Probe Sequence
gcagatcttggtggtagtagcaaat

SEQ ID NO: 95777 - DNA, 25 bp, Probe Sequence
caggtgcagatcttggtggtagtag

SEQ ID NO: 95778 - DNA, 25 bp, Probe Sequence
gcaaatattcaaacgagaactttga

SEQ ID NO: 95779 - DNA, 25 bp, Probe Sequence
gtgcagatcttggtggtagtagcaa

SEQ ID NO: 95780 - DNA, 25 bp, Probe Sequence
tgcagatcttggtggtagtagcaaa

SEQ ID NO: 95781 - DNA, 25 bp, Probe Sequence
caaacgagaactttgaaggccgaag

SEQ ID NO: 95782 - DNA, 25 bp, Probe Sequence
ctcataaccagcaagcctctcaatg

SEQ ID NO: 95783 - DNA, 25 bp, Probe Sequence
cctcataaccagcaagcctctcaat

SEQ ID NO: 95784 - DNA, 25 bp, Probe Sequence
ctctcaatgccatcctcctctccta

SEQ ID NO: 95785 - DNA, 25 bp, Probe Sequence
tctcaatgccatcctcctctcctag

SEQ ID NO: 95786 - DNA, 25 bp, Probe Sequence
ctcaatgccatcctcctctcctaga

SEQ ID NO: 95787 - DNA, 25 bp, Probe Sequence
tcaatgccatcctcctctcctagac

SEQ ID NO: 95788 - DNA, 25 bp, Probe Sequence
ctagaccccaaggtttgctcctaac

SEQ ID NO: 95789 - DNA, 25 bp, Probe Sequence
gggagatagcaaccaagtcatgcat

SEQ ID NO: 95790 - DNA, 25 bp, Probe Sequence
tggctaaggctactatacttggata

SEQ ID NO: 95791 - DNA, 25 bp, Probe Sequence
tatggctaaggctactatacttgga

SEQ ID NO: 95792 - DNA, 25 bp, Probe Sequence
atggctaaggctactatacttggat

SEQ ID NO: 95793 - DNA, 25 bp, Probe Sequence
atatggctaaggctactatacttgg

SEQ ID NO: 95794 - DNA, 25 bp, Probe Sequence
ggctaaggctactatacttggatag

SEQ ID NO: 95795 - DNA, 25 bp, Probe Sequence
atattctgtctgcactgtccaataa

SEQ ID NO: 95796 - DNA, 25 bp, Probe Sequence
aatattctgtctgcactgtccaata

SEQ ID NO: 95797 - DNA, 25 bp, Probe Sequence
gtagtctcagttccttccctcttaa

SEQ ID NO: 95798 - DNA, 25 bp, Probe Sequence
tatttcatccctaatagcacttcgc

SEQ ID NO: 95799 - DNA, 25 bp, Probe Sequence
agtagtctcagttccttccctctta

SEQ ID NO: 95800 - DNA, 25 bp, Probe Sequence
ggaccttctgacatgatggaaatat

SEQ ID NO: 95801 - DNA, 25 bp, Probe Sequence
acatatggctaaggctactatactt

SEQ ID NO: 95802 - DNA, 25 bp, Probe Sequence
catatggctaaggctactatacttg

SEQ ID NO: 95803 - DNA, 25 bp, Probe Sequence
aggaccttctgacatgatggaaata

SEQ ID NO: 95804 - DNA, 25 bp, Probe Sequence
cccagctttctatttcatccctaat

SEQ ID NO: 95805 - DNA, 25 bp, Probe Sequence
ctactatacttggatagcacagctc

SEQ ID NO: 95806 - DNA, 25 bp, Probe Sequence
tactatacttggatagcacagctct

SEQ ID NO: 95807 - DNA, 25 bp, Probe Sequence
ctatacttggatagcacagctctta

SEQ ID NO: 95808 - DNA, 25 bp, Probe Sequence
actatccaacaggaccttctgacat

SEQ ID NO: 95809 - DNA, 25 bp, Probe Sequence
tacatatggctaaggctactatact

SEQ ID NO: 95810 - DNA, 25 bp, Probe Sequence
accttctgacatgatggaaatattc

SEQ ID NO: 95811 - DNA, 25 bp, Probe Sequence
gaccttctgacatgatggaaatatt

SEQ ID NO: 95812 - DNA, 25 bp, Probe Sequence
tatacttggatagcacagctcttaa

SEQ ID NO: 95813 - DNA, 25 bp, Probe Sequence
actatacttggatagcacagctctt

SEQ ID NO: 95814 - DNA, 25 bp, Probe Sequence
agtaggaaggtggagtatagaagaa

SEQ ID NO: 95815 - DNA, 25 bp, Probe Sequence
aagtaggaaggtggagtatagaaga

SEQ ID NO: 95816 - DNA, 25 bp, Probe Sequence
attatagaagcaagaaggcgatagc

SEQ ID NO: 95817 - DNA, 25 bp, Probe Sequence
gtaggaaggtggagtatagaagaat

SEQ ID NO: 95818 - DNA, 25 bp, Probe Sequence
aattatagaagcaagaaggcgatag

SEQ ID NO: 95819 - DNA, 25 bp, Probe Sequence
agaagaatatccttggaagtacaca

SEQ ID NO: 95820 - DNA, 25 bp, Probe Sequence
agtaattatagaagcaagaaggcga

SEQ ID NO: 95821 - DNA, 25 bp, Probe Sequence
gaagaatatccttggaagtacacag

SEQ ID NO: 95822 - DNA, 25 bp, Probe Sequence
aggaaggtggagtatagaagaatat

SEQ ID NO: 95823 - DNA, 25 bp, Probe Sequence
aagtaattatagaagcaagaaggcg

SEQ ID NO: 95824 - DNA, 25 bp, Probe Sequence
gtaattatagaagcaagaaggcgat

SEQ ID NO: 95825 - DNA, 25 bp, Probe Sequence
ggaaggtggagtatagaagaatatc

SEQ ID NO: 95826 - DNA, 25 bp, Probe Sequence
aagaatatccttggaagtacacagg

SEQ ID NO: 95827 - DNA, 25 bp, Probe Sequence
taggaaggtggagtatagaagaata

SEQ ID NO: 95828 - DNA, 25 bp, Probe Sequence
ggctcatgtagataaggtaggcatt

SEQ ID NO: 95829 - DNA, 25 bp, Probe Sequence
aatggctcatgtagataaggtaggc

SEQ ID NO: 95830 - DNA, 25 bp, Probe Sequence
aagagataaagtaggaaggtggagt

SEQ ID NO: 95831 - DNA, 25 bp, Probe Sequence
agagataaagtaggaaggtggagta

SEQ ID NO: 95832 - DNA, 25 bp, Probe Sequence
aaagagataaagtaggaaggtggag

SEQ ID NO: 95833 - DNA, 25 bp, Probe Sequence
aaagtaggaaggtggagtatagaag

SEQ ID NO: 95834 - DNA, 25 bp, Probe Sequence
tagaagaatatccttggaagtacac

SEQ ID NO: 95835 - DNA, 25 bp, Probe Sequence
gagataaagtaggaaggtggagtat

SEQ ID NO: 95836 - DNA, 25 bp, Probe Sequence
taattatagaagcaagaaggcgata

SEQ ID NO: 95837 - DNA, 25 bp, Probe Sequence
tggagtatagaagaatatccttgga

SEQ ID NO: 95838 - DNA, 25 bp, Probe Sequence
agtggatgacttctatgatggaatc

SEQ ID NO: 95839 - DNA, 25 bp, Probe Sequence
acggctctataatgaagataatgtc

SEQ ID NO: 95840 - DNA, 25 bp, Probe Sequence
cggctctataatgaagataatgtct

SEQ ID NO: 95841 - DNA, 25 bp, Probe Sequence
aacggctctataatgaagataatgt

SEQ ID NO: 95842 - DNA, 25 bp, Probe Sequence
aaagtagaggaaatggaagtggatg

SEQ ID NO: 95843 - DNA, 25 bp, Probe Sequence
caaagtagaggaaatggaagtggat

SEQ ID NO: 95844 - DNA, 25 bp, Probe Sequence
gatggaatcaaacggctctataatg

SEQ ID NO: 95845 - DNA, 25 bp, Probe Sequence
taaacgcaaagtagaggaaatggaa

SEQ ID NO: 95846 - DNA, 25 bp, Probe Sequence
cattcctgattggctttctcttaca

SEQ ID NO: 95847 - DNA, 25 bp, Probe Sequence
aagtagaggaaatggaagtggatga

SEQ ID NO: 95848 - DNA, 25 bp, Probe Sequence
ctaaacgcaaagtagaggaaatgga

SEQ ID NO: 95849 - DNA, 25 bp, Probe Sequence
aaactctcattatttgtgtggctaa

SEQ ID NO: 95850 - DNA, 25 bp, Probe Sequence
gaaaggctgtagaaggaaatatacc

SEQ ID NO: 95851 - DNA, 25 bp, Probe Sequence
ggaaaggctgtagaaggaaatatac

SEQ ID NO: 95852 - DNA, 25 bp, Probe Sequence
atggttatctggaaatggagaaact

SEQ ID NO: 95853 - DNA, 25 bp, Probe Sequence
aggaaaggctgtagaaggaaatata

SEQ ID NO: 95854 - DNA, 25 bp, Probe Sequence
tagactactttgggaatgagaacat

SEQ ID NO: 95855 - DNA, 25 bp, Probe Sequence
gcgttatttaagcacataaagacca

SEQ ID NO: 95856 - DNA, 25 bp, Probe Sequence
agcgttatttaagcacataaagacc

SEQ ID NO: 95857 - DNA, 25 bp, Probe Sequence
attcctgattggctttctcttacaa

SEQ ID NO: 95858 - DNA, 25 bp, Probe Sequence
gtagactactttgggaatgagaaca

SEQ ID NO: 95859 - DNA, 25 bp, Probe Sequence
atggaatcaaacggctctataatga

SEQ ID NO: 95860 - DNA, 25 bp, Probe Sequence
agtgctacctttgagtgtaaactaa

SEQ ID NO: 95861 - DNA, 25 bp, Probe Sequence
aagtgctacctttgagtgtaaacta

SEQ ID NO: 95862 - DNA, 25 bp, Probe Sequence
ccagtgccaggaatagtaacattat

SEQ ID NO: 95863 - DNA, 25 bp, Probe Sequence
agtgccaggaatagtaacattatga

SEQ ID NO: 95864 - DNA, 25 bp, Probe Sequence
cagtgccaggaatagtaacattatg

SEQ ID NO: 95865 - DNA, 25 bp, Probe Sequence
gtgccaggaatagtaacattatgaa

SEQ ID NO: 95866 - DNA, 25 bp, Probe Sequence
tgataattgaatctctcagttgtgg

SEQ ID NO: 95867 - DNA, 25 bp, Probe Sequence
tgccaggaatagtaacattatgaat

SEQ ID NO: 95868 - DNA, 25 bp, Probe Sequence
atcttgtagaatttgatgagaccct

SEQ ID NO: 95869 - DNA, 25 bp, Probe Sequence
gaaatggcaattatcagtgttggat

SEQ ID NO: 95870 - DNA, 25 bp, Probe Sequence
gaatctctcagttgtgggaataatt

SEQ ID NO: 95871 - DNA, 25 bp, Probe Sequence
aatggcaattatcagtgttggattt

SEQ ID NO: 95872 - DNA, 25 bp, Probe Sequence
aaatggcaattatcagtgttggatt

SEQ ID NO: 95873 - DNA, 25 bp, Probe Sequence
ttgaatctctcagttgtgggaataa

SEQ ID NO: 95874 - DNA, 25 bp, Probe Sequence
ggcaattatcagtgttggatttagt

SEQ ID NO: 95875 - DNA, 25 bp, Probe Sequence
tggcaattatcagtgttggatttag

SEQ ID NO: 95876 - DNA, 25 bp, Probe Sequence
tgaatctctcagttgtgggaataat

SEQ ID NO: 95877 - DNA, 25 bp, Probe Sequence
attgaatctctcagttgtgggaata

SEQ ID NO: 95878 - DNA, 25 bp, Probe Sequence
taattgaatctctcagttgtgggaa

SEQ ID NO: 95879 - DNA, 25 bp, Probe Sequence
tgtttgaaatggcaattatcagtgt

SEQ ID NO: 95880 - DNA, 25 bp, Probe Sequence
ataattgaatctctcagttgtggga

SEQ ID NO: 95881 - DNA, 25 bp, Probe Sequence
atgataattgaatctctcagttgtg

SEQ ID NO: 95882 - DNA, 25 bp, Probe Sequence
gtgtttgaaatggcaattatcagtg

SEQ ID NO: 95883 - DNA, 25 bp, Probe Sequence
agtgtttgaaatggcaattatcagt

SEQ ID NO: 95884 - DNA, 25 bp, Probe Sequence
tcagtgtttgaaatggcaattatca

SEQ ID NO: 95885 - DNA, 25 bp, Probe Sequence
aattgaatctctcagttgtgggaat

SEQ ID NO: 95886 - DNA, 25 bp, Probe Sequence
attctacgctgtaataggtcgctta

SEQ ID NO: 95887 - DNA, 25 bp, Probe Sequence
ttctacgctgtaataggtcgcttaa

SEQ ID NO: 95888 - DNA, 25 bp, Probe Sequence
aacctagaagcatacatccagtgaa

SEQ ID NO: 95889 - DNA, 25 bp, Probe Sequence
aattctacgctgtaataggtcgctt

SEQ ID NO: 95890 - DNA, 25 bp, Probe Sequence
caacctagaagcatacatccagtga

SEQ ID NO: 95891 - DNA, 25 bp, Probe Sequence
tcaacctagaagcatacatccagtg

SEQ ID NO: 95892 - DNA, 25 bp, Probe Sequence
gtcaacctagaagcatacatccagt

SEQ ID NO: 95893 - DNA, 25 bp, Probe Sequence
atcctgtcaacctagaagcatacat

SEQ ID NO: 95894 - DNA, 25 bp, Probe Sequence
aatcctgtcaacctagaagcataca

SEQ ID NO: 95895 - DNA, 25 bp, Probe Sequence
tcctgtcaacctagaagcatacatc

SEQ ID NO: 95896 - DNA, 25 bp, Probe Sequence
cataatagcttctctctcatcggag

SEQ ID NO: 95897 - DNA, 25 bp, Probe Sequence
tgtcaacctagaagcatacatccag

SEQ ID NO: 95898 - DNA, 25 bp, Probe Sequence
ctgtcaacctagaagcatacatcca

SEQ ID NO: 95899 - DNA, 25 bp, Probe Sequence
gtgtaattccaaagccaaataaacc

SEQ ID NO: 95900 - DNA, 25 bp, Probe Sequence
tgtaattccaaagccaaataaacct

SEQ ID NO: 95901 - DNA, 25 bp, Probe Sequence
ccaaagtgtaattccaaagccaaat

SEQ ID NO: 95902 - DNA, 25 bp, Probe Sequence
gcataatagcttctctctcatcgga

SEQ ID NO: 95903 - DNA, 25 bp, Probe Sequence
cagagacaatggaataacaccttta

SEQ ID NO: 95904 - DNA, 25 bp, Probe Sequence
aattccaaagccaaataaacctctt

SEQ ID NO: 95905 - DNA, 25 bp, Probe Sequence
aaatcctgtcaacctagaagcatac

SEQ ID NO: 95906 - DNA, 25 bp, Probe Sequence
gtaattccaaagccaaataaacctc

SEQ ID NO: 95907 - DNA, 25 bp, Probe Sequence
taattccaaagccaaataaacctct

SEQ ID NO: 95908 - DNA, 25 bp, Probe Sequence
attccaaagtgtaattccaaagcca

SEQ ID NO: 95909 - DNA, 25 bp, Probe Sequence
ctacgctgtaataggtcgcttaaag

SEQ ID NO: 95910 - DNA, 25 bp, Probe Sequence
ctcacagacatcaggcaaattatag

SEQ ID NO: 95911 - DNA, 25 bp, Probe Sequence
tctcacagacatcaggcaaattata

SEQ ID NO: 95912 - DNA, 25 bp, Probe Sequence
atctcacagacatcaggcaaattat

SEQ ID NO: 95913 - DNA, 25 bp, Probe Sequence
aatctcacagacatcaggcaaatta

SEQ ID NO: 95914 - DNA, 25 bp, Probe Sequence
ttatcaaatctcacagacatcaggc

SEQ ID NO: 95915 - DNA, 25 bp, Probe Sequence
tcacagacatcaggcaaattatagc

SEQ ID NO: 95916 - DNA, 25 bp, Probe Sequence
tttatcaaatctcacagacatcagg

SEQ ID NO: 95917 - DNA, 25 bp, Probe Sequence
aaatctcacagacatcaggcaaatt

SEQ ID NO: 95918 - DNA, 25 bp, Probe Sequence
gataacaatgtcacacaggaaacag

SEQ ID NO: 95919 - DNA, 25 bp, Probe Sequence
caaatctcacagacatcaggcaaat

SEQ ID NO: 95920 - DNA, 25 bp, Probe Sequence
tatcaaatctcacagacatcaggca

SEQ ID NO: 95921 - DNA, 25 bp, Probe Sequence
ggataacaatgtcacacaggaaaca

SEQ ID NO: 95922 - DNA, 25 bp, Probe Sequence
gacggataacaatgtcacacaggaa

SEQ ID NO: 95923 - DNA, 25 bp, Probe Sequence
ttacgtggaggtctatataagcgga

SEQ ID NO: 95924 - DNA, 25 bp, Probe Sequence
atcaaatctcacagacatcaggcaa

SEQ ID NO: 95925 - DNA, 25 bp, Probe Sequence
ataacaatgtcacacaggaaacagc

SEQ ID NO: 95926 - DNA, 25 bp, Probe Sequence
tacgtggaggtctatataagcggag

SEQ ID NO: 95927 - DNA, 25 bp, Probe Sequence
tagcgtttacgtggaggtctatata

SEQ ID NO: 95928 - DNA, 25 bp, Probe Sequence
tcaaatctcacagacatcaggcaaa

SEQ ID NO: 95929 - DNA, 25 bp, Probe Sequence
gtttacgtggaggtctatataagcg

SEQ ID NO: 95930 - DNA, 25 bp, Probe Sequence
cgtttacgtggaggtctatataagc

SEQ ID NO: 95931 - DNA, 25 bp, Probe Sequence
gcgtttacgtggaggtctatataag

SEQ ID NO: 95932 - DNA, 25 bp, Probe Sequence
agcgtttacgtggaggtctatataa

SEQ ID NO: 95933 - DNA, 25 bp, Probe Sequence
cggataacaatgtcacacaggaaac

SEQ ID NO: 95934 - DNA, 25 bp, Probe Sequence
ttgactactctgctattatggactc

SEQ ID NO: 95935 - DNA, 25 bp, Probe Sequence
cagaaggaagtaagaagcacagtag

SEQ ID NO: 95936 - DNA, 25 bp, Probe Sequence
agaaggaagtaagaagcacagtagt

SEQ ID NO: 95937 - DNA, 25 bp, Probe Sequence
tcagaaggaagtaagaagcacagta

SEQ ID NO: 95938 - DNA, 25 bp, Probe Sequence
attgactactctgctattatggact

SEQ ID NO: 95939 - DNA, 25 bp, Probe Sequence
cctgaatctctaatatgtgtgatgg

SEQ ID NO: 95940 - DNA, 25 bp, Probe Sequence
tgactactctgctattatggactca

SEQ ID NO: 95941 - DNA, 25 bp, Probe Sequence
gctattatggactcagaaggaagta

SEQ ID NO: 95942 - DNA, 25 bp, Probe Sequence
tatggactcagaaggaagtaagaag

SEQ ID NO: 95943 - DNA, 25 bp, Probe Sequence
tgctattatggactcagaaggaagt

SEQ ID NO: 95944 - DNA, 25 bp, Probe Sequence
tgaatctctaatatgtgtgatggtc

SEQ ID NO: 95945 - DNA, 25 bp, Probe Sequence
ctgaatctctaatatgtgtgatggt

SEQ ID NO: 95946 - DNA, 25 bp, Probe Sequence
ttatggactcagaaggaagtaagaa

SEQ ID NO: 95947 - DNA, 25 bp, Probe Sequence
attatggactcagaaggaagtaaga

SEQ ID NO: 95948 - DNA, 25 bp, Probe Sequence
gactactctgctattatggactcag

SEQ ID NO: 95949 - DNA, 25 bp, Probe Sequence
ctgctattatggactcagaaggaag

SEQ ID NO: 95950 - DNA, 25 bp, Probe Sequence
ctcagaaggaagtaagaagcacagt

SEQ ID NO: 95951 - DNA, 25 bp, Probe Sequence
gaatctctaatatgtgtgatggtca

SEQ ID NO: 95952 - DNA, 25 bp, Probe Sequence
gaaggaagtaagaagcacagtagtg

SEQ ID NO: 95953 - DNA, 25 bp, Probe Sequence
atggactcagaaggaagtaagaagc

SEQ ID NO: 95954 - DNA, 25 bp, Probe Sequence
tattgactactctgctattatggac

SEQ ID NO: 95955 - DNA, 25 bp, Probe Sequence
aggaagtaagaagcacagtagtgaa

SEQ ID NO: 95956 - DNA, 25 bp, Probe Sequence
aaggaagtaagaagcacagtagtga

SEQ ID NO: 95957 - DNA, 25 bp, Probe Sequence
actcagaaggaagtaagaagcacag

SEQ ID NO: 95958 - DNA, 25 bp, Probe Sequence
gatattagctcatcactggtcaaca

SEQ ID NO: 95959 - DNA, 25 bp, Probe Sequence
tgacctggaaatgggattagataag

SEQ ID NO: 95960 - DNA, 25 bp, Probe Sequence
gacctggaaatgggattagataaga

SEQ ID NO: 95961 - DNA, 25 bp, Probe Sequence
agagagatagggtaatgagtgtagt

SEQ ID NO: 95962 - DNA, 25 bp, Probe Sequence
ctttgacctggaaatgggattagat

SEQ ID NO: 95963 - DNA, 25 bp, Probe Sequence
ttgccacgaacagttgataaataag

SEQ ID NO: 95964 - DNA, 25 bp, Probe Sequence
cttgccacgaacagttgataaataa

SEQ ID NO: 95965 - DNA, 25 bp, Probe Sequence
attggcaattccataatcctagttc

SEQ ID NO: 95966 - DNA, 25 bp, Probe Sequence
ttgacctggaaatgggattagataa

SEQ ID NO: 95967 - DNA, 25 bp, Probe Sequence
tttgacctggaaatgggattagata

SEQ ID NO: 95968 - DNA, 25 bp, Probe Sequence
gagagatagggtaatgagtgtagtc

SEQ ID NO: 95969 - DNA, 25 bp, Probe Sequence
cagagagatagggtaatgagtgtag

SEQ ID NO: 95970 - DNA, 25 bp, Probe Sequence
ctgactgtgacccaactgatattag

SEQ ID NO: 95971 - DNA, 25 bp, Probe Sequence
ttggcaattccataatcctagttcg

SEQ ID NO: 95972 - DNA, 25 bp, Probe Sequence
gcagagagatagggtaatgagtgta

SEQ ID NO: 95973 - DNA, 25 bp, Probe Sequence
acctggaaatgggattagataagaa

SEQ ID NO: 95974 - DNA, 25 bp, Probe Sequence
tggaaattaaatagatgatggcacc

SEQ ID NO: 95975 - DNA, 25 bp, Probe Sequence
ttctttgacctggaaatgggattag

SEQ ID NO: 95976 - DNA, 25 bp, Probe Sequence
atattagctcatcactggtcaacag

SEQ ID NO: 95977 - DNA, 25 bp, Probe Sequence
cctggaaatgggattagataagaag

SEQ ID NO: 95978 - DNA, 25 bp, Probe Sequence
gttctttgacctggaaatgggatta

SEQ ID NO: 95979 - DNA, 25 bp, Probe Sequence
taaatagatgatggcaccagaaagg

SEQ ID NO: 95980 - DNA, 25 bp, Probe Sequence
ggaaattaaatagatgatggcacca

SEQ ID NO: 95981 - DNA, 25 bp, Probe Sequence
gggtaatgagtgtagtcagaaatca

SEQ ID NO: 95982 - DNA, 25 bp, Probe Sequence
gtggtctcttctgttctactgtaag

SEQ ID NO: 95983 - DNA, 25 bp, Probe Sequence
agtggtctcttctgttctactgtaa

SEQ ID NO: 95984 - DNA, 25 bp, Probe Sequence
tggtctcttctgttctactgtaagc

SEQ ID NO: 95985 - DNA, 25 bp, Probe Sequence
aattccagtggtctcttctgttcta

SEQ ID NO: 95986 - DNA, 25 bp, Probe Sequence
ggtctcttctgttctactgtaagcc

SEQ ID NO: 95987 - DNA, 25 bp, Probe Sequence
ataggaatactcgaacggtactctt

SEQ ID NO: 95988 - DNA, 25 bp, Probe Sequence
aataggaatactcgaacggtactct

SEQ ID NO: 95989 - DNA, 25 bp, Probe Sequence
tcagtaagattgtgtggtaatcctg

SEQ ID NO: 95990 - DNA, 25 bp, Probe Sequence
agtaagattgtgtggtaatcctgtg

SEQ ID NO: 95991 - DNA, 25 bp, Probe Sequence
cagtaagattgtgtggtaatcctgt

SEQ ID NO: 95992 - DNA, 25 bp, Probe Sequence
atcagtaagattgtgtggtaatcct

SEQ ID NO: 95993 - DNA, 25 bp, Probe Sequence
attccagtggtctcttctgttctac

SEQ ID NO: 95994 - DNA, 25 bp, Probe Sequence
gagtaaatgaaatgggcagatgttt

SEQ ID NO: 95995 - DNA, 25 bp, Probe Sequence
agtaaatgaaatgggcagatgtttg

SEQ ID NO: 95996 - DNA, 25 bp, Probe Sequence
aatcagtaagattgtgtggtaatcc

SEQ ID NO: 95997 - DNA, 25 bp, Probe Sequence
gtaagattgtgtggtaatcctgtgg

SEQ ID NO: 95998 - DNA, 25 bp, Probe Sequence
taagattgtgtggtaatcctgtgga

SEQ ID NO: 95999 - DNA, 25 bp, Probe Sequence
gtaaatgaaatgggcagatgtttgg

SEQ ID NO: 96000 - DNA, 25 bp, Probe Sequence
atttaagagcatttgactacaaccg

SEQ ID NO: 96001 - DNA, 25 bp, Probe Sequence
ttaagagcatttgactacaaccgaa

SEQ ID NO: 96002 - DNA, 25 bp, Probe Sequence
tttaagagcatttgactacaaccga

SEQ ID NO: 96003 - DNA, 25 bp, Probe Sequence
ctgtcacttccgagtaaatgaaatg

SEQ ID NO: 96004 - DNA, 25 bp, Probe Sequence
gatgtgcatgagactggaattgatt

SEQ ID NO: 96005 - DNA, 25 bp, Probe Sequence
caattccagtggtctcttctgttct

SEQ ID NO: 96006 - DNA, 25 bp, Probe Sequence
atgatttgtatcttagacgacctgt

SEQ ID NO: 96007 - DNA, 25 bp, Probe Sequence
gatgatttgtatcttagacgacctg

SEQ ID NO: 96008 - DNA, 25 bp, Probe Sequence
cttatcctttgccaatctctgactc

SEQ ID NO: 96009 - DNA, 25 bp, Probe Sequence
ttgtatcttagacgacctgtccaga

SEQ ID NO: 96010 - DNA, 25 bp, Probe Sequence
ttatcctttgccaatctctgactca

SEQ ID NO: 96011 - DNA, 25 bp, Probe Sequence
tgatttgtatcttagacgacctgtc

SEQ ID NO: 96012 - DNA, 25 bp, Probe Sequence
tatcctttgccaatctctgactcaa

SEQ ID NO: 96013 - DNA, 25 bp, Probe Sequence
gatttgtatcttagacgacctgtcc

SEQ ID NO: 96014 - DNA, 25 bp, Probe Sequence
gtatcttagacgacctgtccagatg

SEQ ID NO: 96015 - DNA, 25 bp, Probe Sequence
ccttatcctttgccaatctctgact

SEQ ID NO: 96016 - DNA, 25 bp, Probe Sequence
atttgtatcttagacgacctgtcca

SEQ ID NO: 96017 - DNA, 25 bp, Probe Sequence
tgtatcttagacgacctgtccagat

SEQ ID NO: 96018 - DNA, 25 bp, Probe Sequence
atcctttgccaatctctgactcaat

SEQ ID NO: 96019 - DNA, 25 bp, Probe Sequence
tttgtatcttagacgacctgtccag

SEQ ID NO: 96020 - DNA, 25 bp, Probe Sequence
tatcttagacgacctgtccagatgg

SEQ ID NO: 96021 - DNA, 25 bp, Probe Sequence
agatgatttgtatcttagacgacct

SEQ ID NO: 96022 - DNA, 25 bp, Probe Sequence
cttagacgacctgtccagatggtta

SEQ ID NO: 96023 - DNA, 25 bp, Probe Sequence
tcctttgccaatctctgactcaatg

SEQ ID NO: 96024 - DNA, 25 bp, Probe Sequence
gaccttttatgttttctatgggcaa

SEQ ID NO: 96025 - DNA, 25 bp, Probe Sequence
ctgaccttttatgttttctatgggc

SEQ ID NO: 96026 - DNA, 25 bp, Probe Sequence
gctgaccttttatgttttctatggg

SEQ ID NO: 96027 - DNA, 25 bp, Probe Sequence
tgactttgctgaccttttatgtttt

SEQ ID NO: 96028 - DNA, 25 bp, Probe Sequence
tatgttttctatgggcaataaaggc

SEQ ID NO: 96029 - DNA, 25 bp, Probe Sequence
actttgctgaccttttatgttttct

SEQ ID NO: 96030 - DNA, 25 bp, Probe Sequence
actgtatatatccatcggtaactcc

SEQ ID NO: 96031 - DNA, 25 bp, Probe Sequence
ttaaggacagagtcttgctatgttg

SEQ ID NO: 96032 - DNA, 25 bp, Probe Sequence
aatcataacatactgcaacctccat

SEQ ID NO: 96033 - DNA, 25 bp, Probe Sequence
cgggtaatggctgttctactattta

SEQ ID NO: 96034 - DNA, 25 bp, Probe Sequence
atcataacatactgcaacctccatc

SEQ ID NO: 96035 - DNA, 25 bp, Probe Sequence
tgtatttctgaacttcgggtaatgg

SEQ ID NO: 96036 - DNA, 25 bp, Probe Sequence
atgtatttctgaacttcgggtaatg

SEQ ID NO: 96037 - DNA, 25 bp, Probe Sequence
cataacatactgcaacctccatctc

SEQ ID NO: 96038 - DNA, 25 bp, Probe Sequence
aagttgattcgtccattggtatttg

SEQ ID NO: 96039 - DNA, 25 bp, Probe Sequence
aaagttgattcgtccattggtattt

SEQ ID NO: 96040 - DNA, 25 bp, Probe Sequence
gggtaatggctgttctactatttag

SEQ ID NO: 96041 - DNA, 25 bp, Probe Sequence
tcataacatactgcaacctccatct

SEQ ID NO: 96042 - DNA, 25 bp, Probe Sequence
ttaccaactcttaactgctaccctt

SEQ ID NO: 96043 - DNA, 25 bp, Probe Sequence
tttaccaactcttaactgctaccct

SEQ ID NO: 96044 - DNA, 25 bp, Probe Sequence
gtaatgtatttctgaacttcgggta

SEQ ID NO: 96045 - DNA, 25 bp, Probe Sequence
agtaatgtatttctgaacttcgggt

SEQ ID NO: 96046 - DNA, 25 bp, Probe Sequence
gttgattcgtccattggtatttgtg

SEQ ID NO: 96047 - DNA, 25 bp, Probe Sequence
agttgattcgtccattggtatttgt

SEQ ID NO: 96048 - DNA, 25 bp, Probe Sequence
tcgggtaatggctgttctactattt

SEQ ID NO: 96049 - DNA, 25 bp, Probe Sequence
ttcgggtaatggctgttctactatt

SEQ ID NO: 96050 - DNA, 25 bp, Probe Sequence
aatgtatttctgaacttcgggtaat

SEQ ID NO: 96051 - DNA, 25 bp, Probe Sequence
taaggacagagtcttgctatgttgc

SEQ ID NO: 96052 - DNA, 25 bp, Probe Sequence
ttgattcgtccattggtatttgtgt

SEQ ID NO: 96053 - DNA, 25 bp, Probe Sequence
tatatatccatcggtaactccctgt

SEQ ID NO: 96054 - DNA, 25 bp, Probe Sequence
gattacagacggtgacataacacag

SEQ ID NO: 96055 - DNA, 25 bp, Probe Sequence
ctgattacagacggtgacataacac

SEQ ID NO: 96056 - DNA, 25 bp, Probe Sequence
cgctgttatgtgaattatgattctg

SEQ ID NO: 96057 - DNA, 25 bp, Probe Sequence
tcgctgttatgtgaattatgattct

SEQ ID NO: 96058 - DNA, 25 bp, Probe Sequence
aaatgagtttcgctgttatgtgaat

SEQ ID NO: 96059 - DNA, 25 bp, Probe Sequence
tgattacagacggtgacataacaca

SEQ ID NO: 96060 - DNA, 25 bp, Probe Sequence
caaatgagtttcgctgttatgtgaa

SEQ ID NO: 96061 - DNA, 25 bp, Probe Sequence
aatgagtttcgctgttatgtgaatt

SEQ ID NO: 96062 - DNA, 25 bp, Probe Sequence
gctgttatgtgaattatgattctgg

SEQ ID NO: 96063 - DNA, 25 bp, Probe Sequence
agtttcgctgttatgtgaattatga

SEQ ID NO: 96064 - DNA, 25 bp, Probe Sequence
tgagtttcgctgttatgtgaattat

SEQ ID NO: 96065 - DNA, 25 bp, Probe Sequence
atgagtttcgctgttatgtgaatta

SEQ ID NO: 96066 - DNA, 25 bp, Probe Sequence
ttcgctgttatgtgaattatgattc

SEQ ID NO: 96067 - DNA, 25 bp, Probe Sequence
gagtttcgctgttatgtgaattatg

SEQ ID NO: 96068 - DNA, 25 bp, Probe Sequence
attacagacggtgacataacacagg

SEQ ID NO: 96069 - DNA, 25 bp, Probe Sequence
gtttcgctgttatgtgaattatgat

SEQ ID NO: 96070 - DNA, 25 bp, Probe Sequence
tttcgctgttatgtgaattatgatt

SEQ ID NO: 96071 - DNA, 25 bp, Probe Sequence
gcaaatgagtttcgctgttatgtga

SEQ ID NO: 96072 - DNA, 25 bp, Probe Sequence
tgttatgtgaattatgattctgggc

SEQ ID NO: 96073 - DNA, 25 bp, Probe Sequence
cttggcaaatgagtttcgctgttat

SEQ ID NO: 96074 - DNA, 25 bp, Probe Sequence
tatgtgaattatgattctgggctgg

SEQ ID NO: 96075 - DNA, 25 bp, Probe Sequence
ttatgtgaattatgattctgggctg

SEQ ID NO: 96076 - DNA, 25 bp, Probe Sequence
gttatgtgaattatgattctgggct

SEQ ID NO: 96077 - DNA, 25 bp, Probe Sequence
ttggcaaatgagtttcgctgttatg

SEQ ID NO: 96078 - DNA, 25 bp, Probe Sequence
gatgttaggtgtgaggaatagtgtt

SEQ ID NO: 96079 - DNA, 25 bp, Probe Sequence
gagatgttaggtgtgaggaatagtg

SEQ ID NO: 96080 - DNA, 25 bp, Probe Sequence
ttagcaagaggcgtagtaatcaatc

SEQ ID NO: 96081 - DNA, 25 bp, Probe Sequence
agatgttaggtgtgaggaatagtgt

SEQ ID NO: 96082 - DNA, 25 bp, Probe Sequence
atgttaggtgtgaggaatagtgttc

SEQ ID NO: 96083 - DNA, 25 bp, Probe Sequence
caagaggcgtagtaatcaatcacat

SEQ ID NO: 96084 - DNA, 25 bp, Probe Sequence
ggagatgttaggtgtgaggaatagt

SEQ ID NO: 96085 - DNA, 25 bp, Probe Sequence
tagcaagaggcgtagtaatcaatca

SEQ ID NO: 96086 - DNA, 25 bp, Probe Sequence
aagaggcgtagtaatcaatcacatg

SEQ ID NO: 96087 - DNA, 25 bp, Probe Sequence
gcgtagtaatcaatcacatgagtac

SEQ ID NO: 96088 - DNA, 25 bp, Probe Sequence
ggcgtagtaatcaatcacatgagta

SEQ ID NO: 96089 - DNA, 25 bp, Probe Sequence
cgtagtaatcaatcacatgagtacc

SEQ ID NO: 96090 - DNA, 25 bp, Probe Sequence
gaggcgtagtaatcaatcacatgag

SEQ ID NO: 96091 - DNA, 25 bp, Probe Sequence
agaggcgtagtaatcaatcacatga

SEQ ID NO: 96092 - DNA, 25 bp, Probe Sequence
tttagcaagaggcgtagtaatcaat

SEQ ID NO: 96093 - DNA, 25 bp, Probe Sequence
aggcgtagtaatcaatcacatgagt

SEQ ID NO: 96094 - DNA, 25 bp, Probe Sequence
agcaagaggcgtagtaatcaatcac

SEQ ID NO: 96095 - DNA, 25 bp, Probe Sequence
caatcacatgagtaccttactgaga

SEQ ID NO: 96096 - DNA, 25 bp, Probe Sequence
tcaatcacatgagtaccttactgag

SEQ ID NO: 96097 - DNA, 25 bp, Probe Sequence
tggaatgcttatttgaaacacatct

SEQ ID NO: 96098 - DNA, 25 bp, Probe Sequence
ttgtatatgggttccttgtgaaact

SEQ ID NO: 96099 - DNA, 25 bp, Probe Sequence
tgtatatgggttccttgtgaaacta

SEQ ID NO: 96100 - DNA, 25 bp, Probe Sequence
aatcacatgagtaccttactgagaa

SEQ ID NO: 96101 - DNA, 25 bp, Probe Sequence
atcaatcacatgagtaccttactga

SEQ ID NO: 96102 - DNA, 25 bp, Probe Sequence
tcttgagaacagaagcattcctaat

SEQ ID NO: 96103 - DNA, 25 bp, Probe Sequence
atcttgagaacagaagcattcctaa

SEQ ID NO: 96104 - DNA, 25 bp, Probe Sequence
atatcttgagaacagaagcattcct

SEQ ID NO: 96105 - DNA, 25 bp, Probe Sequence
cttgagaacagaagcattcctaatt

SEQ ID NO: 96106 - DNA, 25 bp, Probe Sequence
tatcttgagaacagaagcattccta

SEQ ID NO: 96107 - DNA, 25 bp, Probe Sequence
aatatcttgagaacagaagcattcc

SEQ ID NO: 96108 - DNA, 25 bp, Probe Sequence
ccaatatcttgagaacagaagcatt

SEQ ID NO: 96109 - DNA, 25 bp, Probe Sequence
gtatcggtaggatgatatgtcagag

SEQ ID NO: 96110 - DNA, 25 bp, Probe Sequence
tatcggtaggatgatatgtcagagg

SEQ ID NO: 96111 - DNA, 25 bp, Probe Sequence
ggtatcggtaggatgatatgtcaga

SEQ ID NO: 96112 - DNA, 25 bp, Probe Sequence
caatatcttgagaacagaagcattc

SEQ ID NO: 96113 - DNA, 25 bp, Probe Sequence
tgtcaagagatccatagttatgagg

SEQ ID NO: 96114 - DNA, 25 bp, Probe Sequence
ggaatgctctactctgtctatggag

SEQ ID NO: 96115 - DNA, 25 bp, Probe Sequence
gcatttactatacagacccagactt

SEQ ID NO: 96116 - DNA, 25 bp, Probe Sequence
taagggcacagattgatagcattta

SEQ ID NO: 96117 - DNA, 25 bp, Probe Sequence
tagcatttactatacagacccagac

SEQ ID NO: 96118 - DNA, 25 bp, Probe Sequence
agcatttactatacagacccagact

SEQ ID NO: 96119 - DNA, 25 bp, Probe Sequence
gggcacagattgatagcatttacta

SEQ ID NO: 96120 - DNA, 25 bp, Probe Sequence
ttgtaaagggtatcggtaggatgat

SEQ ID NO: 96121 - DNA, 25 bp, Probe Sequence
ctaagggcacagattgatagcattt

SEQ ID NO: 96122 - DNA, 25 bp, Probe Sequence
catttactatacagacccagacttg

SEQ ID NO: 96123 - DNA, 25 bp, Probe Sequence
atgtcaagagatccatagttatgag

SEQ ID NO: 96124 - DNA, 25 bp, Probe Sequence
gatgtcaagagatccatagttatga

SEQ ID NO: 96125 - DNA, 25 bp, Probe Sequence
aagggcacagattgatagcatttac

SEQ ID NO: 96126 - DNA, 25 bp, Probe Sequence
aatgaggtagacgaagaagaggaag

SEQ ID NO: 96127 - DNA, 25 bp, Probe Sequence
atatgctgagaatgaggaataatgg

SEQ ID NO: 96128 - DNA, 25 bp, Probe Sequence
ggatatgctgagaatgaggaataat

SEQ ID NO: 96129 - DNA, 25 bp, Probe Sequence
caatgaggtagacgaagaagaggaa

SEQ ID NO: 96130 - DNA, 25 bp, Probe Sequence
tgacaatgaggtagacgaagaagag

SEQ ID NO: 96131 - DNA, 25 bp, Probe Sequence
ctgacaatgaggtagacgaagaaga

SEQ ID NO: 96132 - DNA, 25 bp, Probe Sequence
gaggatggagatgaagatgaggaag

SEQ ID NO: 96133 - DNA, 25 bp, Probe Sequence
gaagaggatggagatgaagatgagg

SEQ ID NO: 96134 - DNA, 25 bp, Probe Sequence
ggaagaggatggagatgaagatgag

SEQ ID NO: 96135 - DNA, 25 bp, Probe Sequence
gaggaagaggatggagatgaagatg

SEQ ID NO: 96136 - DNA, 25 bp, Probe Sequence
gaggtagacgaagaagaggaagaag

SEQ ID NO: 96137 - DNA, 25 bp, Probe Sequence
tctgacaatgaggtagacgaagaag

SEQ ID NO: 96138 - DNA, 25 bp, Probe Sequence
ctgaagatgatgaggatgacgatgt

SEQ ID NO: 96139 - DNA, 25 bp, Probe Sequence
agaggatggagatgaagatgaggaa

SEQ ID NO: 96140 - DNA, 25 bp, Probe Sequence
aagaggatggagatgaagatgagga

SEQ ID NO: 96141 - DNA, 25 bp, Probe Sequence
aggaagaggatggagatgaagatga

SEQ ID NO: 96142 - DNA, 25 bp, Probe Sequence
tgaggaagaggatggagatgaagat

SEQ ID NO: 96143 - DNA, 25 bp, Probe Sequence
atgaggtagacgaagaagaggaaga

SEQ ID NO: 96144 - DNA, 25 bp, Probe Sequence
gtagacgaagaagaggaagaaggtg

SEQ ID NO: 96145 - DNA, 25 bp, Probe Sequence
tgaggtagacgaagaagaggaagaa

SEQ ID NO: 96146 - DNA, 25 bp, Probe Sequence
gacaatgaggtagacgaagaagagg

SEQ ID NO: 96147 - DNA, 25 bp, Probe Sequence
gatatgctgagaatgaggaataatg

SEQ ID NO: 96148 - DNA, 25 bp, Probe Sequence
acaatgaggtagacgaagaagagga

SEQ ID NO: 96149 - DNA, 25 bp, Probe Sequence
gaagaagaaggtgatggtgaggaag

SEQ ID NO: 96150 - DNA, 25 bp, Probe Sequence
tgagcacagatatgacaagcagtag

SEQ ID NO: 96151 - DNA, 25 bp, Probe Sequence
cacagatatgacaagcagtagccat

SEQ ID NO: 96152 - DNA, 25 bp, Probe Sequence
gtgctaaacctgacaaataagagat

SEQ ID NO: 96153 - DNA, 25 bp, Probe Sequence
ttgatgatgaaaggtggaagttcta

SEQ ID NO: 96154 - DNA, 25 bp, Probe Sequence
tgatgatgaaaggtggaagttctac

SEQ ID NO: 96155 - DNA, 25 bp, Probe Sequence
tttgatgatgaaaggtggaagttct

SEQ ID NO: 96156 - DNA, 25 bp, Probe Sequence
ctgagcacagatatgacaagcagta

SEQ ID NO: 96157 - DNA, 25 bp, Probe Sequence
ttgagtttcagttgattcagtttgt

SEQ ID NO: 96158 - DNA, 25 bp, Probe Sequence
gatttcttaataatgggcagacaga

SEQ ID NO: 96159 - DNA, 25 bp, Probe Sequence
agatttcttaataatgggcagacag

SEQ ID NO: 96160 - DNA, 25 bp, Probe Sequence
acttgagtttcagttgattcagttt

SEQ ID NO: 96161 - DNA, 25 bp, Probe Sequence
cttgagtttcagttgattcagtttg

SEQ ID NO: 96162 - DNA, 25 bp, Probe Sequence
gcaagatttcttaataatgggcaga

SEQ ID NO: 96163 - DNA, 25 bp, Probe Sequence
acagatatgacaagcagtagccatg

SEQ ID NO: 96164 - DNA, 25 bp, Probe Sequence
tgagtttcagttgattcagtttgta

SEQ ID NO: 96165 - DNA, 25 bp, Probe Sequence
tgctaaacctgacaaataagagatc

SEQ ID NO: 96166 - DNA, 25 bp, Probe Sequence
acatgctagtttcaattaccacagt

SEQ ID NO: 96167 - DNA, 25 bp, Probe Sequence
gtacatgctagtttcaattaccaca

SEQ ID NO: 96168 - DNA, 25 bp, Probe Sequence
aattaccacagtattctagagacgg

SEQ ID NO: 96169 - DNA, 25 bp, Probe Sequence
tgctagtttcaattaccacagtatt

SEQ ID NO: 96170 - DNA, 25 bp, Probe Sequence
tacatgctagtttcaattaccacag

SEQ ID NO: 96171 - DNA, 25 bp, Probe Sequence
ttcacattgctaacttgagtttcag

SEQ ID NO: 96172 - DNA, 25 bp, Probe Sequence
catgctagtttcaattaccacagta

SEQ ID NO: 96173 - DNA, 25 bp, Probe Sequence
gagtttcagttgattcagtttgtaa

SEQ ID NO: 96174 - DNA, 25 bp, Probe Sequence
cagagtctatcatcttgttaccagt

SEQ ID NO: 96175 - DNA, 25 bp, Probe Sequence
gtaacttgttcttgattctgctcat

SEQ ID NO: 96176 - DNA, 25 bp, Probe Sequence
agtaacttgttcttgattctgctca

SEQ ID NO: 96177 - DNA, 25 bp, Probe Sequence
cacagagtctatcatcttgttacca

SEQ ID NO: 96178 - DNA, 25 bp, Probe Sequence
acacagagtctatcatcttgttacc

SEQ ID NO: 96179 - DNA, 25 bp, Probe Sequence
acagagtctatcatcttgttaccag

SEQ ID NO: 96180 - DNA, 25 bp, Probe Sequence
cagtaacttgttcttgattctgctc

SEQ ID NO: 96181 - DNA, 25 bp, Probe Sequence
tcagtaacttgttcttgattctgct

SEQ ID NO: 96182 - DNA, 25 bp, Probe Sequence
agagtctatcatcttgttaccagta

SEQ ID NO: 96183 - DNA, 25 bp, Probe Sequence
ccactaggaagaagactctaagtac

SEQ ID NO: 96184 - DNA, 25 bp, Probe Sequence
taacttgttcttgattctgctcatg

SEQ ID NO: 96185 - DNA, 25 bp, Probe Sequence
cactaggaagaagactctaagtaca

SEQ ID NO: 96186 - DNA, 25 bp, Probe Sequence
tggtagaacacagagtctatcatct

SEQ ID NO: 96187 - DNA, 25 bp, Probe Sequence
atggtagaacacagagtctatcatc

SEQ ID NO: 96188 - DNA, 25 bp, Probe Sequence
agaagactctaagtacattcaagga

SEQ ID NO: 96189 - DNA, 25 bp, Probe Sequence
aggaagaagactctaagtacattca

SEQ ID NO: 96190 - DNA, 25 bp, Probe Sequence
ggtagaacacagagtctatcatctt

SEQ ID NO: 96191 - DNA, 25 bp, Probe Sequence
gagtctatcatcttgttaccagtat

SEQ ID NO: 96192 - DNA, 25 bp, Probe Sequence
tcttgttaccagtataatatccagg

SEQ ID NO: 96193 - DNA, 25 bp, Probe Sequence
tagaacacagagtctatcatcttgt

SEQ ID NO: 96194 - DNA, 25 bp, Probe Sequence
aacatggtagaacacagagtctatc

SEQ ID NO: 96195 - DNA, 25 bp, Probe Sequence
gaacatggtagaacacagagtctat

SEQ ID NO: 96196 - DNA, 25 bp, Probe Sequence
gtagaacacagagtctatcatcttg

SEQ ID NO: 96197 - DNA, 25 bp, Probe Sequence
catggtagaacacagagtctatcat

SEQ ID NO: 96198 - DNA, 25 bp, Probe Sequence
agatgcttgtatatgaatgtgttgt

SEQ ID NO: 96199 - DNA, 25 bp, Probe Sequence
gatgcttgtatatgaatgtgttgta

SEQ ID NO: 96200 - DNA, 25 bp, Probe Sequence
tagatgcttgtatatgaatgtgttg

SEQ ID NO: 96201 - DNA, 25 bp, Probe Sequence
caactcttcctgctaaactgtattc

SEQ ID NO: 96202 - DNA, 25 bp, Probe Sequence
aactcttcctgctaaactgtattcc

SEQ ID NO: 96203 - DNA, 25 bp, Probe Sequence
ccaactcttcctgctaaactgtatt

SEQ ID NO: 96204 - DNA, 25 bp, Probe Sequence
tgcttgtatatgaatgtgttgtaat

SEQ ID NO: 96205 - DNA, 25 bp, Probe Sequence
atgcttgtatatgaatgtgttgtaa

SEQ ID NO: 96206 - DNA, 25 bp, Probe Sequence
aatgccaaacggaggaaataagtaa

SEQ ID NO: 96207 - DNA, 25 bp, Probe Sequence
aaatgccaaacggaggaaataagta

SEQ ID NO: 96208 - DNA, 25 bp, Probe Sequence
atgccaaacggaggaaataagtaag

SEQ ID NO: 96209 - DNA, 25 bp, Probe Sequence
gaatacttcacagaaaccaaatgcc

SEQ ID NO: 96210 - DNA, 25 bp, Probe Sequence
aatataggtctcattcatacagtgt

SEQ ID NO: 96211 - DNA, 25 bp, Probe Sequence
actcttcctgctaaactgtattcca

SEQ ID NO: 96212 - DNA, 25 bp, Probe Sequence
atacttcacagaaaccaaatgccaa

SEQ ID NO: 96213 - DNA, 25 bp, Probe Sequence
aatacttcacagaaaccaaatgcca

SEQ ID NO: 96214 - DNA, 25 bp, Probe Sequence
aaataagtaagccctcccagtttct

SEQ ID NO: 96215 - DNA, 25 bp, Probe Sequence
tacttcacagaaaccaaatgccaaa

SEQ ID NO: 96216 - DNA, 25 bp, Probe Sequence
aataagtaagccctcccagtttctc

SEQ ID NO: 96217 - DNA, 25 bp, Probe Sequence
ctgtttgattaagaagcactatgtt

SEQ ID NO: 96218 - DNA, 25 bp, Probe Sequence
ctcttcctgctaaactgtattccag

SEQ ID NO: 96219 - DNA, 25 bp, Probe Sequence
atagatgcttgtatatgaatgtgtt

SEQ ID NO: 96220 - DNA, 25 bp, Probe Sequence
aatagatgcttgtatatgaatgtgt

SEQ ID NO: 96221 - DNA, 25 bp, Probe Sequence
caaatgccaaacggaggaaataagt

SEQ ID NO: 96222 - DNA, 25 bp, Probe Sequence
tctactaccaccaaggagaatagtt

SEQ ID NO: 96223 - DNA, 25 bp, Probe Sequence
caatgtcacaacctctctgatcttg

SEQ ID NO: 96224 - DNA, 25 bp, Probe Sequence
ctctactaccaccaaggagaatagt

SEQ ID NO: 96225 - DNA, 25 bp, Probe Sequence
ctaccaccaaggagaatagtttagg

SEQ ID NO: 96226 - DNA, 25 bp, Probe Sequence
caccaaggagaatagtttaggagaa

SEQ ID NO: 96227 - DNA, 25 bp, Probe Sequence
taccaccaaggagaatagtttagga

SEQ ID NO: 96228 - DNA, 25 bp, Probe Sequence
accaaggagaatagtttaggagaaa

SEQ ID NO: 96229 - DNA, 25 bp, Probe Sequence
ccaccaaggagaatagtttaggaga

SEQ ID NO: 96230 - DNA, 25 bp, Probe Sequence
accaccaaggagaatagtttaggag

SEQ ID NO: 96231 - DNA, 25 bp, Probe Sequence
cactgatctctactaccaccaagga

SEQ ID NO: 96232 - DNA, 25 bp, Probe Sequence
actgatctctactaccaccaaggag

SEQ ID NO: 96233 - DNA, 25 bp, Probe Sequence
tttctgacccactgatctctactac

SEQ ID NO: 96234 - DNA, 25 bp, Probe Sequence
gtttctgacccactgatctctacta

SEQ ID NO: 96235 - DNA, 25 bp, Probe Sequence
gcaatgtcacaacctctctgatctt

SEQ ID NO: 96236 - DNA, 25 bp, Probe Sequence
aaatccagaaggaggaagaatgttt

SEQ ID NO: 96237 - DNA, 25 bp, Probe Sequence
ttgtttctgacccactgatctctac

SEQ ID NO: 96238 - DNA, 25 bp, Probe Sequence
gttgtttctgacccactgatctcta

SEQ ID NO: 96239 - DNA, 25 bp, Probe Sequence
gaaatccagaaggaggaagaatgtt

SEQ ID NO: 96240 - DNA, 25 bp, Probe Sequence
actaccaccaaggagaatagtttag

SEQ ID NO: 96241 - DNA, 25 bp, Probe Sequence
ctactaccaccaaggagaatagttt

SEQ ID NO: 96242 - DNA, 25 bp, Probe Sequence
cagaaatccagaaggaggaagaatg

SEQ ID NO: 96243 - DNA, 25 bp, Probe Sequence
agaaatccagaaggaggaagaatgt

SEQ ID NO: 96244 - DNA, 25 bp, Probe Sequence
ccactgatctctactaccaccaagg

SEQ ID NO: 96245 - DNA, 25 bp, Probe Sequence
ttctgacccactgatctctactacc

SEQ ID NO: 96246 - DNA, 25 bp, Probe Sequence
gctactaaactgaaggtaagggtaa

SEQ ID NO: 96247 - DNA, 25 bp, Probe Sequence
tactaaactgaaggtaagggtaagg

SEQ ID NO: 96248 - DNA, 25 bp, Probe Sequence
ctaaactgaaggtaagggtaagggt

SEQ ID NO: 96249 - DNA, 25 bp, Probe Sequence
actaaactgaaggtaagggtaaggg

SEQ ID NO: 96250 - DNA, 25 bp, Probe Sequence
taagttaagaaatgacagtctcggg

SEQ ID NO: 96251 - DNA, 25 bp, Probe Sequence
taaactgaaggtaagggtaagggtt

SEQ ID NO: 96252 - DNA, 25 bp, Probe Sequence
ttaagttaagaaatgacagtctcgg

SEQ ID NO: 96253 - DNA, 25 bp, Probe Sequence
tcttgacctcaggtgagttacttaa

SEQ ID NO: 96254 - DNA, 25 bp, Probe Sequence
ctactaaactgaaggtaagggtaag

SEQ ID NO: 96255 - DNA, 25 bp, Probe Sequence
ctcttgacctcaggtgagttactta

SEQ ID NO: 96256 - DNA, 25 bp, Probe Sequence
caggtgagttacttaaggctaggag

SEQ ID NO: 96257 - DNA, 25 bp, Probe Sequence
atgacaaagctactaaactgaaggt

SEQ ID NO: 96258 - DNA, 25 bp, Probe Sequence
tggatgacaaagctactaaactgaa

SEQ ID NO: 96259 - DNA, 25 bp, Probe Sequence
gttaagttaagaaatgacagtctcg

SEQ ID NO: 96260 - DNA, 25 bp, Probe Sequence
aaagctactaaactgaaggtaaggg

SEQ ID NO: 96261 - DNA, 25 bp, Probe Sequence
gatgacaaagctactaaactgaagg

SEQ ID NO: 96262 - DNA, 25 bp, Probe Sequence
ggatgacaaagctactaaactgaag

SEQ ID NO: 96263 - DNA, 25 bp, Probe Sequence
agctactaaactgaaggtaagggta

SEQ ID NO: 96264 - DNA, 25 bp, Probe Sequence
tgacaaagctactaaactgaaggta

SEQ ID NO: 96265 - DNA, 25 bp, Probe Sequence
ggtgagttacttaaggctaggagtt

SEQ ID NO: 96266 - DNA, 25 bp, Probe Sequence
caaagctactaaactgaaggtaagg

SEQ ID NO: 96267 - DNA, 25 bp, Probe Sequence
aaactgaaggtaagggtaagggttg

SEQ ID NO: 96268 - DNA, 25 bp, Probe Sequence
tttatgtcactcaaagctatatggc

SEQ ID NO: 96269 - DNA, 25 bp, Probe Sequence
tcaggtgagttacttaaggctagga

SEQ ID NO: 96270 - DNA, 25 bp, Probe Sequence
attaagtgactgtatcatgttcggt

SEQ ID NO: 96271 - DNA, 25 bp, Probe Sequence
ttaagtgactgtatcatgttcggtt

SEQ ID NO: 96272 - DNA, 25 bp, Probe Sequence
cattaagtgactgtatcatgttcgg

SEQ ID NO: 96273 - DNA, 25 bp, Probe Sequence
tcagacattaagtgactgtatcatg

SEQ ID NO: 96274 - DNA, 25 bp, Probe Sequence
ttcagacattaagtgactgtatcat

SEQ ID NO: 96275 - DNA, 25 bp, Probe Sequence
ttccgtgtctgtgtagaaagaagta

SEQ ID NO: 96276 - DNA, 25 bp, Probe Sequence
gtagaaagaagtagacatgggagac

SEQ ID NO: 96277 - DNA, 25 bp, Probe Sequence
ccgtgtctgtgtagaaagaagtaga

SEQ ID NO: 96278 - DNA, 25 bp, Probe Sequence
tccgtgtctgtgtagaaagaagtag

SEQ ID NO: 96279 - DNA, 25 bp, Probe Sequence
agtgactgtatcatgttcggtttaa

SEQ ID NO: 96280 - DNA, 25 bp, Probe Sequence
aagtgactgtatcatgttcggttta

SEQ ID NO: 96281 - DNA, 25 bp, Probe Sequence
taagtgactgtatcatgttcggttt

SEQ ID NO: 96282 - DNA, 25 bp, Probe Sequence
tagaaagaagtagacatgggagact

SEQ ID NO: 96283 - DNA, 25 bp, Probe Sequence
gtgactgtatcatgttcggtttaat

SEQ ID NO: 96284 - DNA, 25 bp, Probe Sequence
tctgtgtagaaagaagtagacatgg

SEQ ID NO: 96285 - DNA, 25 bp, Probe Sequence
acattaagtgactgtatcatgttcg

SEQ ID NO: 96286 - DNA, 25 bp, Probe Sequence
tgtagaaagaagtagacatgggaga

SEQ ID NO: 96287 - DNA, 25 bp, Probe Sequence
gtgtagaaagaagtagacatgggag

SEQ ID NO: 96288 - DNA, 25 bp, Probe Sequence
ctgtgtagaaagaagtagacatggg

SEQ ID NO: 96289 - DNA, 25 bp, Probe Sequence
tgtgtagaaagaagtagacatggga

SEQ ID NO: 96290 - DNA, 25 bp, Probe Sequence
cagacattaagtgactgtatcatgt

SEQ ID NO: 96291 - DNA, 25 bp, Probe Sequence
tttcagacattaagtgactgtatca

SEQ ID NO: 96292 - DNA, 25 bp, Probe Sequence
tgactgtatcatgttcggtttaata

SEQ ID NO: 96293 - DNA, 25 bp, Probe Sequence
aaagattgagaaatcggatggtttc

SEQ ID NO: 96294 - DNA, 25 bp, Probe Sequence
agttgtctcggaggaagtgataatt

SEQ ID NO: 96295 - DNA, 25 bp, Probe Sequence
tgtgttgaagacagtaaggatgtta

SEQ ID NO: 96296 - DNA, 25 bp, Probe Sequence
ttgtgttgaagacagtaaggatgtt

SEQ ID NO: 96297 - DNA, 25 bp, Probe Sequence
gtgttgaagacagtaaggatgttaa

SEQ ID NO: 96298 - DNA, 25 bp, Probe Sequence
cagttgtctcggaggaagtgataat

SEQ ID NO: 96299 - DNA, 25 bp, Probe Sequence
ttgaagacagtaaggatgttaatgt

SEQ ID NO: 96300 - DNA, 25 bp, Probe Sequence
tgttgaagacagtaaggatgttaat

SEQ ID NO: 96301 - DNA, 25 bp, Probe Sequence
gttgaagacagtaaggatgttaatg

SEQ ID NO: 96302 - DNA, 25 bp, Probe Sequence
ttacattcagttgtctcggaggaag

SEQ ID NO: 96303 - DNA, 25 bp, Probe Sequence
cttacattcagttgtctcggaggaa

SEQ ID NO: 96304 - DNA, 25 bp, Probe Sequence
gttgtctcggaggaagtgataattt

SEQ ID NO: 96305 - DNA, 25 bp, Probe Sequence
cacggaatctatttacccttgcttt

SEQ ID NO: 96306 - DNA, 25 bp, Probe Sequence
tgaagacagtaaggatgttaatgta

SEQ ID NO: 96307 - DNA, 25 bp, Probe Sequence
tcagttgtctcggaggaagtgataa

SEQ ID NO: 96308 - DNA, 25 bp, Probe Sequence
ttcagttgtctcggaggaagtgata

SEQ ID NO: 96309 - DNA, 25 bp, Probe Sequence
tttgtgttgaagacagtaaggatgt

SEQ ID NO: 96310 - DNA, 25 bp, Probe Sequence
tgatccaaatgattccaagcataaa

SEQ ID NO: 96311 - DNA, 25 bp, Probe Sequence
gtattgatccaaatgattccaagca

SEQ ID NO: 96312 - DNA, 25 bp, Probe Sequence
tgtattgatccaaatgattccaagc

SEQ ID NO: 96313 - DNA, 25 bp, Probe Sequence
cactgtattgatccaaatgattcca

SEQ ID NO: 96314 - DNA, 25 bp, Probe Sequence
ttgatccaaatgattccaagcataa

SEQ ID NO: 96315 - DNA, 25 bp, Probe Sequence
attgatccaaatgattccaagcata

SEQ ID NO: 96316 - DNA, 25 bp, Probe Sequence
tattgatccaaatgattccaagcat

SEQ ID NO: 96317 - DNA, 25 bp, Probe Sequence
tcactgtattgatccaaatgattcc

SEQ ID NO: 96318 - DNA, 25 bp, Probe Sequence
cctatttatgtttctactcgggaac

SEQ ID NO: 96319 - DNA, 25 bp, Probe Sequence
ttgtacggtgggaggtctatataag

SEQ ID NO: 96320 - DNA, 25 bp, Probe Sequence
gttgtacggtgggaggtctatataa

SEQ ID NO: 96321 - DNA, 25 bp, Probe Sequence
cctttggaagagagaagaacagagt

SEQ ID NO: 96322 - DNA, 25 bp, Probe Sequence
tcctttggaagagagaagaacagag

SEQ ID NO: 96323 - DNA, 25 bp, Probe Sequence
ctcaaaccctgcctttcctttactt

SEQ ID NO: 96324 - DNA, 25 bp, Probe Sequence
ccctatttatgtttctactcgggaa

SEQ ID NO: 96325 - DNA, 25 bp, Probe Sequence
ttcagtaaagtctcgttacgccaaa

SEQ ID NO: 96326 - DNA, 25 bp, Probe Sequence
tttcagtaaagtctcgttacgccaa

SEQ ID NO: 96327 - DNA, 25 bp, Probe Sequence
tttatgtttctactcgggaacaaac

SEQ ID NO: 96328 - DNA, 25 bp, Probe Sequence
gccctatttatgtttctactcggga

SEQ ID NO: 96329 - DNA, 25 bp, Probe Sequence
ttatgtttctactcgggaacaaacg

SEQ ID NO: 96330 - DNA, 25 bp, Probe Sequence
atttatgtttctactcgggaacaaa

SEQ ID NO: 96331 - DNA, 25 bp, Probe Sequence
ctatttatgtttctactcgggaaca

SEQ ID NO: 96332 - DNA, 25 bp, Probe Sequence
tatttatgtttctactcgggaacaa

SEQ ID NO: 96333 - DNA, 25 bp, Probe Sequence
tttcctttggaagagagaagaacag

SEQ ID NO: 96334 - DNA, 25 bp, Probe Sequence
aaatcaacgggactttcgagatgtc

SEQ ID NO: 96335 - DNA, 25 bp, Probe Sequence
cgttgtacggtgggaggtctatata

SEQ ID NO: 96336 - DNA, 25 bp, Probe Sequence
cctcaaaccctgcctttcctttact

SEQ ID NO: 96337 - DNA, 25 bp, Probe Sequence
ttcctttggaagagagaagaacaga

SEQ ID NO: 96338 - DNA, 25 bp, Probe Sequence
tatgtttctactcgggaacaaacgt

SEQ ID NO: 96339 - DNA, 25 bp, Probe Sequence
caaaatcaacgggactttcgagatg

SEQ ID NO: 96340 - DNA, 25 bp, Probe Sequence
tcagtaaagtctcgttacgccaaaa

SEQ ID NO: 96341 - DNA, 25 bp, Probe Sequence
aaaatcaacgggactttcgagatgt

SEQ ID NO: 96342 - DNA, 25 bp, Probe Sequence
cctatttatgtttctactcgggaac

SEQ ID NO: 96343 - DNA, 25 bp, Probe Sequence
ttgtacggtgggaggtctatataag

SEQ ID NO: 96344 - DNA, 25 bp, Probe Sequence
gttgtacggtgggaggtctatataa

SEQ ID NO: 96345 - DNA, 25 bp, Probe Sequence
cctttggaagagagaagaacagagt

SEQ ID NO: 96346 - DNA, 25 bp, Probe Sequence
tcctttggaagagagaagaacagag

SEQ ID NO: 96347 - DNA, 25 bp, Probe Sequence
ctcaaaccctgcctttcctttactt

SEQ ID NO: 96348 - DNA, 25 bp, Probe Sequence
ccctatttatgtttctactcgggaa

SEQ ID NO: 96349 - DNA, 25 bp, Probe Sequence
ttcagtaaagtctcgttacgccaaa

SEQ ID NO: 96350 - DNA, 25 bp, Probe Sequence
tttcagtaaagtctcgttacgccaa

SEQ ID NO: 96351 - DNA, 25 bp, Probe Sequence
tttatgtttctactcgggaacaaac

SEQ ID NO: 96352 - DNA, 25 bp, Probe Sequence
gccctatttatgtttctactcggga

SEQ ID NO: 96353 - DNA, 25 bp, Probe Sequence
ttatgtttctactcgggaacaaacg

SEQ ID NO: 96354 - DNA, 25 bp, Probe Sequence
atttatgtttctactcgggaacaaa

SEQ ID NO: 96355 - DNA, 25 bp, Probe Sequence
ctatttatgtttctactcgggaaca

SEQ ID NO: 96356 - DNA, 25 bp, Probe Sequence
tatttatgtttctactcgggaacaa

SEQ ID NO: 96357 - DNA, 25 bp, Probe Sequence
tttcctttggaagagagaagaacag

SEQ ID NO: 96358 - DNA, 25 bp, Probe Sequence
aaatcaacgggactttcgagatgtc

SEQ ID NO: 96359 - DNA, 25 bp, Probe Sequence
cgttgtacggtgggaggtctatata

SEQ ID NO: 96360 - DNA, 25 bp, Probe Sequence
cctcaaaccctgcctttcctttact

SEQ ID NO: 96361 - DNA, 25 bp, Probe Sequence
ttcctttggaagagagaagaacaga

SEQ ID NO: 96362 - DNA, 25 bp, Probe Sequence
tatgtttctactcgggaacaaacgt

SEQ ID NO: 96363 - DNA, 25 bp, Probe Sequence
caaaatcaacgggactttcgagatg

SEQ ID NO: 96364 - DNA, 25 bp, Probe Sequence
tcagtaaagtctcgttacgccaaaa

SEQ ID NO: 96365 - DNA, 25 bp, Probe Sequence
aaaatcaacgggactttcgagatgt

SEQ ID NO: 96366 - DNA, 25 bp, Probe Sequence
gttaatccttcctagatccagacaa

SEQ ID NO: 96367 - DNA, 25 bp, Probe Sequence
taatccttcctagatccagacaaga

SEQ ID NO: 96368 - DNA, 25 bp, Probe Sequence
actctgttaatccttcctagatcca

SEQ ID NO: 96369 - DNA, 25 bp, Probe Sequence
gactctgttaatccttcctagatcc

SEQ ID NO: 96370 - DNA, 25 bp, Probe Sequence
ttaatccttcctagatccagacaag

SEQ ID NO: 96371 - DNA, 25 bp, Probe Sequence
aatccttcctagatccagacaagag

SEQ ID NO: 96372 - DNA, 25 bp, Probe Sequence
agactctgttaatccttcctagatc

SEQ ID NO: 96373 - DNA, 25 bp, Probe Sequence
tcacagaggcagattaataggagaa

SEQ ID NO: 96374 - DNA, 25 bp, Probe Sequence
tgttaatccttcctagatccagaca

SEQ ID NO: 96375 - DNA, 25 bp, Probe Sequence
ctgttaatccttcctagatccagac

SEQ ID NO: 96376 - DNA, 25 bp, Probe Sequence
ctctgttaatccttcctagatccag

SEQ ID NO: 96377 - DNA, 25 bp, Probe Sequence
atccttcctagatccagacaagaga

SEQ ID NO: 96378 - DNA, 25 bp, Probe Sequence
tccttcctagatccagacaagagaa

SEQ ID NO: 96379 - DNA, 25 bp, Probe Sequence
tcagactctgttaatccttcctaga

SEQ ID NO: 96380 - DNA, 25 bp, Probe Sequence
gttcagactctgttaatccttccta

SEQ ID NO: 96381 - DNA, 25 bp, Probe Sequence
ttcagactctgttaatccttcctag

SEQ ID NO: 96382 - DNA, 25 bp, Probe Sequence
aggaggttatataccatcttgaggt

SEQ ID NO: 96383 - DNA, 25 bp, Probe Sequence
caggaggttatataccatcttgagg

SEQ ID NO: 96384 - DNA, 25 bp, Probe Sequence
gcaggaggttatataccatcttgag

SEQ ID NO: 96385 - DNA, 25 bp, Probe Sequence
cagactctgttaatccttcctagat

SEQ ID NO: 96386 - DNA, 25 bp, Probe Sequence
ctcacagaggcagattaataggaga

SEQ ID NO: 96387 - DNA, 25 bp, Probe Sequence
ggaggttatataccatcttgaggtt

SEQ ID NO: 96388 - DNA, 25 bp, Probe Sequence
actcacagaggcagattaataggag

SEQ ID NO: 96389 - DNA, 25 bp, Probe Sequence
gactcacagaggcagattaatagga

SEQ ID NO: 96390 - DNA, 25 bp, Probe Sequence
atacacaccaagtaatccacgttaa

SEQ ID NO: 96391 - DNA, 25 bp, Probe Sequence
gatacacaccaagtaatccacgtta

SEQ ID NO: 96392 - DNA, 25 bp, Probe Sequence
tacacaccaagtaatccacgttaag

SEQ ID NO: 96393 - DNA, 25 bp, Probe Sequence
gttaagcagaacaaatcaatccacg

SEQ ID NO: 96394 - DNA, 25 bp, Probe Sequence
ctttcttgtcctttcctggttcaaa

SEQ ID NO: 96395 - DNA, 25 bp, Probe Sequence
aaagtgttgggattataggcatgag

SEQ ID NO: 96396 - DNA, 25 bp, Probe Sequence
ttaagcagaacaaatcaatccacgg

SEQ ID NO: 96397 - DNA, 25 bp, Probe Sequence
agctgatacacaccaagtaatccac

SEQ ID NO: 96398 - DNA, 25 bp, Probe Sequence
tgatacacaccaagtaatccacgtt

SEQ ID NO: 96399 - DNA, 25 bp, Probe Sequence
ttcccatcctctttcttgtcctttc

SEQ ID NO: 96400 - DNA, 25 bp, Probe Sequence
cttcccatcctctttcttgtccttt

SEQ ID NO: 96401 - DNA, 25 bp, Probe Sequence
caaagtgttgggattataggcatga

SEQ ID NO: 96402 - DNA, 25 bp, Probe Sequence
ctgatacacaccaagtaatccacgt

SEQ ID NO: 96403 - DNA, 25 bp, Probe Sequence
gctgatacacaccaagtaatccacg

SEQ ID NO: 96404 - DNA, 25 bp, Probe Sequence
tctttcttgtcctttcctggttcaa

SEQ ID NO: 96405 - DNA, 25 bp, Probe Sequence
ctctttcttgtcctttcctggttca

SEQ ID NO: 96406 - DNA, 25 bp, Probe Sequence
acacaccaagtaatccacgttaagg

SEQ ID NO: 96407 - DNA, 25 bp, Probe Sequence
taagcagaacaaatcaatccacgga

SEQ ID NO: 96408 - DNA, 25 bp, Probe Sequence
atcagtccttcccatcctctttctt

SEQ ID NO: 96409 - DNA, 25 bp, Probe Sequence
aagtgttgggattataggcatgagg

SEQ ID NO: 96410 - DNA, 25 bp, Probe Sequence
catcctctttcttgtcctttcctgg

SEQ ID NO: 96411 - DNA, 25 bp, Probe Sequence
ccatcctctttcttgtcctttcctg

SEQ ID NO: 96412 - DNA, 25 bp, Probe Sequence
cctctttcttgtcctttcctggttc

SEQ ID NO: 96413 - DNA, 25 bp, Probe Sequence
atcctctttcttgtcctttcctggt

SEQ ID NO: 96414 - DNA, 25 bp, Probe Sequence
atgaataaaggctacaggctccaaa

SEQ ID NO: 96415 - DNA, 25 bp, Probe Sequence
catgaataaaggctacaggctccaa

SEQ ID NO: 96416 - DNA, 25 bp, Probe Sequence
ggaataagaaggacctgaggcagac

SEQ ID NO: 96417 - DNA, 25 bp, Probe Sequence
tgaataaaggctacaggctccaaaa

SEQ ID NO: 96418 - DNA, 25 bp, Probe Sequence
gaataagaaggacctgaggcagacg

SEQ ID NO: 96419 - DNA, 25 bp, Probe Sequence
aataagaaggacctgaggcagacga

SEQ ID NO: 96420 - DNA, 25 bp, Probe Sequence
gcatgaataaaggctacaggctcca

SEQ ID NO: 96421 - DNA, 25 bp, Probe Sequence
atgaataaaggctacaggctccaaa

SEQ ID NO: 96422 - DNA, 25 bp, Probe Sequence
catgaataaaggctacaggctccaa

SEQ ID NO: 96423 - DNA, 25 bp, Probe Sequence
ggaataagaaggacctgaggcagac

SEQ ID NO: 96424 - DNA, 25 bp, Probe Sequence
tgaataaaggctacaggctccaaaa

SEQ ID NO: 96425 - DNA, 25 bp, Probe Sequence
gaataagaaggacctgaggcagacg

SEQ ID NO: 96426 - DNA, 25 bp, Probe Sequence
aataagaaggacctgaggcagacga

SEQ ID NO: 96427 - DNA, 25 bp, Probe Sequence
gcatgaataaaggctacaggctcca

SEQ ID NO: 96428 - DNA, 25 bp, Probe Sequence
gattgacatcaagaagtgtgtgaag

SEQ ID NO: 96429 - DNA, 25 bp, Probe Sequence
attgacatcaagaagtgtgtgaagc

SEQ ID NO: 96430 - DNA, 25 bp, Probe Sequence
atacctgccaaatatgattgacatc

SEQ ID NO: 96431 - DNA, 25 bp, Probe Sequence
catcaataaagtacctgtgctcaac

SEQ ID NO: 96432 - DNA, 25 bp, Probe Sequence
taccatcaataaagtacctgtgctc

SEQ ID NO: 96433 - DNA, 25 bp, Probe Sequence
aataaagtacctgtgctcaaccaaa

SEQ ID NO: 96434 - DNA, 25 bp, Probe Sequence
atcaataaagtacctgtgctcaacc

SEQ ID NO: 96435 - DNA, 25 bp, Probe Sequence
ccatcaataaagtacctgtgctcaa

SEQ ID NO: 96436 - DNA, 25 bp, Probe Sequence
tatgattgacatcaagaagtgtgtg

SEQ ID NO: 96437 - DNA, 25 bp, Probe Sequence
atgattgacatcaagaagtgtgtga

SEQ ID NO: 96438 - DNA, 25 bp, Probe Sequence
caataaagtacctgtgctcaaccaa

SEQ ID NO: 96439 - DNA, 25 bp, Probe Sequence
tgattgacatcaagaagtgtgtgaa

SEQ ID NO: 96440 - DNA, 25 bp, Probe Sequence
ccgtctagtcatacctgccaaatat

SEQ ID NO: 96441 - DNA, 25 bp, Probe Sequence
catacctgccaaatatgattgacat

SEQ ID NO: 96442 - DNA, 25 bp, Probe Sequence
atatgattgacatcaagaagtgtgt

SEQ ID NO: 96443 - DNA, 25 bp, Probe Sequence
accatcaataaagtacctgtgctca

SEQ ID NO: 96444 - DNA, 25 bp, Probe Sequence
cgtctagtcatacctgccaaatatg

SEQ ID NO: 96445 - DNA, 25 bp, Probe Sequence
tcaataaagtacctgtgctcaacca

SEQ ID NO: 96446 - DNA, 25 bp, Probe Sequence
ttgacatcaagaagtgtgtgaagca

SEQ ID NO: 96447 - DNA, 25 bp, Probe Sequence
tgacatcaagaagtgtgtgaagcag

SEQ ID NO: 96448 - DNA, 25 bp, Probe Sequence
aatatgattgacatcaagaagtgtg

SEQ ID NO: 96449 - DNA, 25 bp, Probe Sequence
tacctgccaaatatgattgacatca

SEQ ID NO: 96450 - DNA, 25 bp, Probe Sequence
ctgccaaatatgattgacatcaaga

SEQ ID NO: 96451 - DNA, 25 bp, Probe Sequence
gacatcaagaagtgtgtgaagcagg

SEQ ID NO: 96452 - DNA, 25 bp, Probe Sequence
tatacacaatacacaccacagtcaa

SEQ ID NO: 96453 - DNA, 25 bp, Probe Sequence
tcaactatacacaatacacaccaca

SEQ ID NO: 96454 - DNA, 25 bp, Probe Sequence
ctatacacaatacacaccacagtca

SEQ ID NO: 96455 - DNA, 25 bp, Probe Sequence
caactatacacaatacacaccacag

SEQ ID NO: 96456 - DNA, 25 bp, Probe Sequence
gccaatcaactatacacaatacaca

SEQ ID NO: 96457 - DNA, 25 bp, Probe Sequence
agccaatcaactatacacaatacac

SEQ ID NO: 96458 - DNA, 25 bp, Probe Sequence
atcaactatacacaatacacaccac

SEQ ID NO: 96459 - DNA, 25 bp, Probe Sequence
aactatacacaatacacaccacagt

SEQ ID NO: 96460 - DNA, 25 bp, Probe Sequence
aagccaatcaactatacacaataca

SEQ ID NO: 96461 - DNA, 25 bp, Probe Sequence
gacatactccataactcactctgac

SEQ ID NO: 96462 - DNA, 25 bp, Probe Sequence
agacatactccataactcactctga

SEQ ID NO: 96463 - DNA, 25 bp, Probe Sequence
actatacacaatacacaccacagtc

SEQ ID NO: 96464 - DNA, 25 bp, Probe Sequence
acatactccataactcactctgact

SEQ ID NO: 96465 - DNA, 25 bp, Probe Sequence
aatgaagccaatcaactatacacaa

SEQ ID NO: 96466 - DNA, 25 bp, Probe Sequence
aatcaactatacacaatacacacca

SEQ ID NO: 96467 - DNA, 25 bp, Probe Sequence
catactccataactcactctgacta

SEQ ID NO: 96468 - DNA, 25 bp, Probe Sequence
gaagccaatcaactatacacaatac

SEQ ID NO: 96469 - DNA, 25 bp, Probe Sequence
atgaagccaatcaactatacacaat

SEQ ID NO: 96470 - DNA, 25 bp, Probe Sequence
cagcctgaattataccaccaatcaa

SEQ ID NO: 96471 - DNA, 25 bp, Probe Sequence
gcagacatactccataactcactct

SEQ ID NO: 96472 - DNA, 25 bp, Probe Sequence
caatcaactatacacaatacacacc

SEQ ID NO: 96473 - DNA, 25 bp, Probe Sequence
ccaatcaactatacacaatacacac

SEQ ID NO: 96474 - DNA, 25 bp, Probe Sequence
ggaatctagtcacaactcaataacc

SEQ ID NO: 96475 - DNA, 25 bp, Probe Sequence
acaggaatctagtcacaactcaata

SEQ ID NO: 96476 - DNA, 25 bp, Probe Sequence
ataatgttcaagttggacctaagtg

SEQ ID NO: 96477 - DNA, 25 bp, Probe Sequence
acttccttattcctgtatggtatca

SEQ ID NO: 96478 - DNA, 25 bp, Probe Sequence
taatgttcaagttggacctaagtgc

SEQ ID NO: 96479 - DNA, 25 bp, Probe Sequence
cacttccttattcctgtatggtatc

SEQ ID NO: 96480 - DNA, 25 bp, Probe Sequence
aataatgttcaagttggacctaagt

SEQ ID NO: 96481 - DNA, 25 bp, Probe Sequence
ttaaccaacctgtccaatacaatct

SEQ ID NO: 96482 - DNA, 25 bp, Probe Sequence
taaccaacctgtccaatacaatctc

SEQ ID NO: 96483 - DNA, 25 bp, Probe Sequence
caacctgtccaatacaatctctctg

SEQ ID NO: 96484 - DNA, 25 bp, Probe Sequence
cttccttattcctgtatggtatcaa

SEQ ID NO: 96485 - DNA, 25 bp, Probe Sequence
aaccaacctgtccaatacaatctct

SEQ ID NO: 96486 - DNA, 25 bp, Probe Sequence
ccacttccttattcctgtatggtat

SEQ ID NO: 96487 - DNA, 25 bp, Probe Sequence
aatgttcaagttggacctaagtgct

SEQ ID NO: 96488 - DNA, 25 bp, Probe Sequence
ccaacctgtccaatacaatctctct

SEQ ID NO: 96489 - DNA, 25 bp, Probe Sequence
cccaagtatttcctctatttcccaa

SEQ ID NO: 96490 - DNA, 25 bp, Probe Sequence
accaacctgtccaatacaatctctc

SEQ ID NO: 96491 - DNA, 25 bp, Probe Sequence
ccaagtatttcctctatttcccaag

SEQ ID NO: 96492 - DNA, 25 bp, Probe Sequence
atgttcaagttggacctaagtgctc

SEQ ID NO: 96493 - DNA, 25 bp, Probe Sequence
tagtatttggtgttacagggaggaa

SEQ ID NO: 96494 - DNA, 25 bp, Probe Sequence
aacctgtccaatacaatctctctgc

SEQ ID NO: 96495 - DNA, 25 bp, Probe Sequence
atggtatcaaattcaaactcttggc

SEQ ID NO: 96496 - DNA, 25 bp, Probe Sequence
gccacttccttattcctgtatggta

SEQ ID NO: 96497 - DNA, 25 bp, Probe Sequence
actcctccaaataatgttcaagttg

SEQ ID NO: 96498 - DNA, 25 bp, Probe Sequence
cactcctccaaataatgttcaagtt

SEQ ID NO: 96499 - DNA, 25 bp, Probe Sequence
ctagtatttggtgttacagggagga

SEQ ID NO: 96500 - DNA, 25 bp, Probe Sequence
atatcttgagcactgatcttaggtt

SEQ ID NO: 96501 - DNA, 25 bp, Probe Sequence
aatatcttgagcactgatcttaggt

SEQ ID NO: 96502 - DNA, 25 bp, Probe Sequence
ttattatcactcagatcagtcctcc

SEQ ID NO: 96503 - DNA, 25 bp, Probe Sequence
tattatcactcagatcagtcctccg

SEQ ID NO: 96504 - DNA, 25 bp, Probe Sequence
agagaaagagttaatccacacagag

SEQ ID NO: 96505 - DNA, 25 bp, Probe Sequence
ttcagggattggagtatttaaggat

SEQ ID NO: 96506 - DNA, 25 bp, Probe Sequence
attcagggattggagtatttaagga

SEQ ID NO: 96507 - DNA, 25 bp, Probe Sequence
tagagaaagagttaatccacacaga

SEQ ID NO: 96508 - DNA, 25 bp, Probe Sequence
gcaatagagaaagagttaatccaca

SEQ ID NO: 96509 - DNA, 25 bp, Probe Sequence
gagaaagagttaatccacacagagc

SEQ ID NO: 96510 - DNA, 25 bp, Probe Sequence
aagatcagatgagccaatttatcca

SEQ ID NO: 96511 - DNA, 25 bp, Probe Sequence
caagatcagatgagccaatttatcc

SEQ ID NO: 96512 - DNA, 25 bp, Probe Sequence
cacaagatcagatgagccaatttat

SEQ ID NO: 96513 - DNA, 25 bp, Probe Sequence
tcagggattggagtatttaaggata

SEQ ID NO: 96514 - DNA, 25 bp, Probe Sequence
aattcagggattggagtatttaagg

SEQ ID NO: 96515 - DNA, 25 bp, Probe Sequence
tatcttgagcactgatcttaggttt

SEQ ID NO: 96516 - DNA, 25 bp, Probe Sequence
agatcagatgagccaatttatccat

SEQ ID NO: 96517 - DNA, 25 bp, Probe Sequence
caaagatgaaatcacagggagacag

SEQ ID NO: 96518 - DNA, 25 bp, Probe Sequence
acaagatcagatgagccaatttatc

SEQ ID NO: 96519 - DNA, 25 bp, Probe Sequence
ccacaagatcagatgagccaattta

SEQ ID NO: 96520 - DNA, 25 bp, Probe Sequence
aaccataatatctaatcttgtggct

SEQ ID NO: 96521 - DNA, 25 bp, Probe Sequence
aaagatgaaatcacagggagacagt

SEQ ID NO: 96522 - DNA, 25 bp, Probe Sequence
atagagaaagagttaatccacacag

SEQ ID NO: 96523 - DNA, 25 bp, Probe Sequence
gaaaccctgtctctactaaacacac

SEQ ID NO: 96524 - DNA, 25 bp, Probe Sequence
tccttagaatatgagacagactggc

SEQ ID NO: 96525 - DNA, 25 bp, Probe Sequence
ctccttagaatatgagacagactgg

SEQ ID NO: 96526 - DNA, 25 bp, Probe Sequence
cctccttagaatatgagacagactg

SEQ ID NO: 96527 - DNA, 25 bp, Probe Sequence
ctatgactagagaagctacagaact

SEQ ID NO: 96528 - DNA, 25 bp, Probe Sequence
tggaagaaccatctctatgactaga

SEQ ID NO: 96529 - DNA, 25 bp, Probe Sequence
aaggtaatgttactagagaaggaac

SEQ ID NO: 96530 - DNA, 25 bp, Probe Sequence
ggtaatgttactagagaaggaacct

SEQ ID NO: 96531 - DNA, 25 bp, Probe Sequence
aggtaatgttactagagaaggaacc

SEQ ID NO: 96532 - DNA, 25 bp, Probe Sequence
agagaaatagtagggtcagttaggt

SEQ ID NO: 96533 - DNA, 25 bp, Probe Sequence
gagaaatagtagggtcagttaggtt

SEQ ID NO: 96534 - DNA, 25 bp, Probe Sequence
tatgcctacacttctcttgggttat

SEQ ID NO: 96535 - DNA, 25 bp, Probe Sequence
atatgcctacacttctcttgggtta

SEQ ID NO: 96536 - DNA, 25 bp, Probe Sequence
aagagaaatagtagggtcagttagg

SEQ ID NO: 96537 - DNA, 25 bp, Probe Sequence
aaaccaagacctttagggatttcat

SEQ ID NO: 96538 - DNA, 25 bp, Probe Sequence
atgactagagaagctacagaactcc

SEQ ID NO: 96539 - DNA, 25 bp, Probe Sequence
tatgactagagaagctacagaactc

SEQ ID NO: 96540 - DNA, 25 bp, Probe Sequence
gtaatgttactagagaaggaacctt

SEQ ID NO: 96541 - DNA, 25 bp, Probe Sequence
aactcccaattctgtttcctttctc

SEQ ID NO: 96542 - DNA, 25 bp, Probe Sequence
gaactcccaattctgtttcctttct

SEQ ID NO: 96543 - DNA, 25 bp, Probe Sequence
gtagagatggcgtttcactatgttg

SEQ ID NO: 96544 - DNA, 25 bp, Probe Sequence
ccctccttagaatatgagacagact

SEQ ID NO: 96545 - DNA, 25 bp, Probe Sequence
acttctcttgggttatgttcctctg

SEQ ID NO: 96546 - DNA, 25 bp, Probe Sequence
cacttctcttgggttatgttcctct

SEQ ID NO: 96547 - DNA, 25 bp, Probe Sequence
agaaatagtagggtcagttaggtta

SEQ ID NO: 96548 - DNA, 25 bp, Probe Sequence
atggattgttgtcagaattgttgaa

SEQ ID NO: 96549 - DNA, 25 bp, Probe Sequence
tatggattgttgtcagaattgttga

SEQ ID NO: 96550 - DNA, 25 bp, Probe Sequence
atatggattgttgtcagaattgttg

SEQ ID NO: 96551 - DNA, 25 bp, Probe Sequence
aatatgtcaagattcgttggtgctc

SEQ ID NO: 96552 - DNA, 25 bp, Probe Sequence
ttatctaggtggtccataggctctt

SEQ ID NO: 96553 - DNA, 25 bp, Probe Sequence
cttatctaggtggtccataggctct

SEQ ID NO: 96554 - DNA, 25 bp, Probe Sequence
tatgtcaagattcgttggtgctcat

SEQ ID NO: 96555 - DNA, 25 bp, Probe Sequence
atatgtcaagattcgttggtgctca

SEQ ID NO: 96556 - DNA, 25 bp, Probe Sequence
tatctaggtggtccataggctcttg

SEQ ID NO: 96557 - DNA, 25 bp, Probe Sequence
taaatatgtcaagattcgttggtgc

SEQ ID NO: 96558 - DNA, 25 bp, Probe Sequence
taagatgggtctacctctcaatttg

SEQ ID NO: 96559 - DNA, 25 bp, Probe Sequence
tggattgttgtcagaattgttgaaa

SEQ ID NO: 96560 - DNA, 25 bp, Probe Sequence
ttaagatgggtctacctctcaattt

SEQ ID NO: 96561 - DNA, 25 bp, Probe Sequence
aaatatgtcaagattcgttggtgct

SEQ ID NO: 96562 - DNA, 25 bp, Probe Sequence
attaagatgggtctacctctcaatt

SEQ ID NO: 96563 - DNA, 25 bp, Probe Sequence
aattaagatgggtctacctctcaat

SEQ ID NO: 96564 - DNA, 25 bp, Probe Sequence
tatatggattgttgtcagaattgtt

SEQ ID NO: 96565 - DNA, 25 bp, Probe Sequence
ataatttgccttatctaggtggtcc

SEQ ID NO: 96566 - DNA, 25 bp, Probe Sequence
tgccattctagattacaattccatt

SEQ ID NO: 96567 - DNA, 25 bp, Probe Sequence
ttaaatatgtcaagattcgttggtg

SEQ ID NO: 96568 - DNA, 25 bp, Probe Sequence
atttgccttatctaggtggtccata

SEQ ID NO: 96569 - DNA, 25 bp, Probe Sequence
taatttgccttatctaggtggtcca

SEQ ID NO: 96570 - DNA, 25 bp, Probe Sequence
atatatggattgttgtcagaattgt

SEQ ID NO: 96571 - DNA, 25 bp, Probe Sequence
ttgccttatctaggtggtccatagg

SEQ ID NO: 96572 - DNA, 25 bp, Probe Sequence
gatgctgtctcagaaggagttaaag

SEQ ID NO: 96573 - DNA, 25 bp, Probe Sequence
atggatgctgtctcagaaggagtta

SEQ ID NO: 96574 - DNA, 25 bp, Probe Sequence
tggatgctgtctcagaaggagttaa

SEQ ID NO: 96575 - DNA, 25 bp, Probe Sequence
gttattcagcctaactatcctgcgg

SEQ ID NO: 96576 - DNA, 25 bp, Probe Sequence
cgttattcagcctaactatcctgcg

SEQ ID NO: 96577 - DNA, 25 bp, Probe Sequence
ggatgctgtctcagaaggagttaaa

SEQ ID NO: 96578 - DNA, 25 bp, Probe Sequence
ctgtctcagaaggagttaaagctat

SEQ ID NO: 96579 - DNA, 25 bp, Probe Sequence
tgtctcagaaggagttaaagctata

SEQ ID NO: 96580 - DNA, 25 bp, Probe Sequence
aatggatgctgtctcagaaggagtt

SEQ ID NO: 96581 - DNA, 25 bp, Probe Sequence
acgttattcagcctaactatcctgc

SEQ ID NO: 96582 - DNA, 25 bp, Probe Sequence
agaaggagttaaagctataacctgt

SEQ ID NO: 96583 - DNA, 25 bp, Probe Sequence
ggagttaaagctataacctgtaacc

SEQ ID NO: 96584 - DNA, 25 bp, Probe Sequence
cagaaggagttaaagctataacctg

SEQ ID NO: 96585 - DNA, 25 bp, Probe Sequence
tcagaaggagttaaagctataacct

SEQ ID NO: 96586 - DNA, 25 bp, Probe Sequence
ctcagaaggagttaaagctataacc

SEQ ID NO: 96587 - DNA, 25 bp, Probe Sequence
gtctcagaaggagttaaagctataa

SEQ ID NO: 96588 - DNA, 25 bp, Probe Sequence
gaaatggatgctgtctcagaaggag

SEQ ID NO: 96589 - DNA, 25 bp, Probe Sequence
gagttaaagctataacctgtaacct

SEQ ID NO: 96590 - DNA, 25 bp, Probe Sequence
aggagttaaagctataacctgtaac

SEQ ID NO: 96591 - DNA, 25 bp, Probe Sequence
gaaggagttaaagctataacctgta

SEQ ID NO: 96592 - DNA, 25 bp, Probe Sequence
tctcagaaggagttaaagctataac

SEQ ID NO: 96593 - DNA, 25 bp, Probe Sequence
agaaatggatgctgtctcagaagga

SEQ ID NO: 96594 - DNA, 25 bp, Probe Sequence
agttaaagctataacctgtaacctt

SEQ ID NO: 96595 - DNA, 25 bp, Probe Sequence
aaggagttaaagctataacctgtaa

SEQ ID NO: 96596 - DNA, 25 bp, Probe Sequence
gatgctgtctcagaaggagttaaag

SEQ ID NO: 96597 - DNA, 25 bp, Probe Sequence
atggatgctgtctcagaaggagtta

SEQ ID NO: 96598 - DNA, 25 bp, Probe Sequence
tggatgctgtctcagaaggagttaa

SEQ ID NO: 96599 - DNA, 25 bp, Probe Sequence
gttattcagcctaactatcctgcgg

SEQ ID NO: 96600 - DNA, 25 bp, Probe Sequence
cgttattcagcctaactatcctgcg

SEQ ID NO: 96601 - DNA, 25 bp, Probe Sequence
ggatgctgtctcagaaggagttaaa

SEQ ID NO: 96602 - DNA, 25 bp, Probe Sequence
ctgtctcagaaggagttaaagctat

SEQ ID NO: 96603 - DNA, 25 bp, Probe Sequence
tgtctcagaaggagttaaagctata

SEQ ID NO: 96604 - DNA, 25 bp, Probe Sequence
aatggatgctgtctcagaaggagtt

SEQ ID NO: 96605 - DNA, 25 bp, Probe Sequence
acgttattcagcctaactatcctgc

SEQ ID NO: 96606 - DNA, 25 bp, Probe Sequence
agaaggagttaaagctataacctgt

SEQ ID NO: 96607 - DNA, 25 bp, Probe Sequence
ggagttaaagctataacctgtaacc

SEQ ID NO: 96608 - DNA, 25 bp, Probe Sequence
cagaaggagttaaagctataacctg

SEQ ID NO: 96609 - DNA, 25 bp, Probe Sequence
tcagaaggagttaaagctataacct

SEQ ID NO: 96610 - DNA, 25 bp, Probe Sequence
ctcagaaggagttaaagctataacc

SEQ ID NO: 96611 - DNA, 25 bp, Probe Sequence
gtctcagaaggagttaaagctataa

SEQ ID NO: 96612 - DNA, 25 bp, Probe Sequence
gaaatggatgctgtctcagaaggag

SEQ ID NO: 96613 - DNA, 25 bp, Probe Sequence
gagttaaagctataacctgtaacct

SEQ ID NO: 96614 - DNA, 25 bp, Probe Sequence
aggagttaaagctataacctgtaac

SEQ ID NO: 96615 - DNA, 25 bp, Probe Sequence
gaaggagttaaagctataacctgta

SEQ ID NO: 96616 - DNA, 25 bp, Probe Sequence
tctcagaaggagttaaagctataac

SEQ ID NO: 96617 - DNA, 25 bp, Probe Sequence
agaaatggatgctgtctcagaagga

SEQ ID NO: 96618 - DNA, 25 bp, Probe Sequence
agttaaagctataacctgtaacctt

SEQ ID NO: 96619 - DNA, 25 bp, Probe Sequence
aaggagttaaagctataacctgtaa

SEQ ID NO: 96620 - DNA, 25 bp, Probe Sequence
ggcccgaagcgtttactttgtaaaa

SEQ ID NO: 96621 - DNA, 25 bp, Probe Sequence
gagatagcagactcagatatgatga

SEQ ID NO: 96622 - DNA, 25 bp, Probe Sequence
cagtaataggtagaagtggcatcat

SEQ ID NO: 96623 - DNA, 25 bp, Probe Sequence
agtaataggtagaagtggcatcatt

SEQ ID NO: 96624 - DNA, 25 bp, Probe Sequence
tcagtaataggtagaagtggcatca

SEQ ID NO: 96625 - DNA, 25 bp, Probe Sequence
ttcagtaataggtagaagtggcatc

SEQ ID NO: 96626 - DNA, 25 bp, Probe Sequence
aacatcaggtaagccattagttagg

SEQ ID NO: 96627 - DNA, 25 bp, Probe Sequence
ccattagttaggcaagtcaattctt

SEQ ID NO: 96628 - DNA, 25 bp, Probe Sequence
ggagatagcagactcagatatgatg

SEQ ID NO: 96629 - DNA, 25 bp, Probe Sequence
aggagatagcagactcagatatgat

SEQ ID NO: 96630 - DNA, 25 bp, Probe Sequence
ttcctcaatggtaagactcttcaac

SEQ ID NO: 96631 - DNA, 25 bp, Probe Sequence
attcctcaatggtaagactcttcaa

SEQ ID NO: 96632 - DNA, 25 bp, Probe Sequence
aacaggagatagcagactcagatat

SEQ ID NO: 96633 - DNA, 25 bp, Probe Sequence
cctcaatggtaagactcttcaacat

SEQ ID NO: 96634 - DNA, 25 bp, Probe Sequence
caggagatagcagactcagatatga

SEQ ID NO: 96635 - DNA, 25 bp, Probe Sequence
gaacaggagatagcagactcagata

SEQ ID NO: 96636 - DNA, 25 bp, Probe Sequence
acaggagatagcagactcagatatg

SEQ ID NO: 96637 - DNA, 25 bp, Probe Sequence
atggtaagactcttcaacattgact

SEQ ID NO: 96638 - DNA, 25 bp, Probe Sequence
tcctcaatggtaagactcttcaaca

SEQ ID NO: 96639 - DNA, 25 bp, Probe Sequence
agactcttcaacattgactacagaa

SEQ ID NO: 96640 - DNA, 25 bp, Probe Sequence
aagactcttcaacattgactacaga

SEQ ID NO: 96641 - DNA, 25 bp, Probe Sequence
tggtaagactcttcaacattgacta

SEQ ID NO: 96642 - DNA, 25 bp, Probe Sequence
ggtaagactcttcaacattgactac

SEQ ID NO: 96643 - DNA, 25 bp, Probe Sequence
gtaagactcttcaacattgactaca

SEQ ID NO: 96644 - DNA, 25 bp, Probe Sequence
taagactcttcaacattgactacag

SEQ ID NO: 96645 - DNA, 25 bp, Probe Sequence
tgaaagaaagaagaggaagaggaag

SEQ ID NO: 96646 - DNA, 25 bp, Probe Sequence
gatgaaagaaagaagaggaagagga

SEQ ID NO: 96647 - DNA, 25 bp, Probe Sequence
atgaaagaaagaagaggaagaggaa

SEQ ID NO: 96648 - DNA, 25 bp, Probe Sequence
ggatgaaagaaagaagaggaagagg

SEQ ID NO: 96649 - DNA, 25 bp, Probe Sequence
gggatgaaagaaagaagaggaagag

SEQ ID NO: 96650 - DNA, 25 bp, Probe Sequence
gaaagaaagaagaggaagaggaagc

SEQ ID NO: 96651 - DNA, 25 bp, Probe Sequence
cgggatgaaagaaagaagaggaaga

SEQ ID NO: 96652 - DNA, 25 bp, Probe Sequence
cattatgcccagtacatgaccttag

SEQ ID NO: 96653 - DNA, 25 bp, Probe Sequence
cagtacatgaccttagggaactttc

SEQ ID NO: 96654 - DNA, 25 bp, Probe Sequence
aagaggaagcgagaagaaggagaag

SEQ ID NO: 96655 - DNA, 25 bp, Probe Sequence
gaagaggaagcgagaagaaggagaa

SEQ ID NO: 96656 - DNA, 25 bp, Probe Sequence
aagaggaagaggaagcgagaagaag

SEQ ID NO: 96657 - DNA, 25 bp, Probe Sequence
gaagaggaagaggaagcgagaagaa

SEQ ID NO: 96658 - DNA, 25 bp, Probe Sequence
aagaagaggaagaggaagcgagaag

SEQ ID NO: 96659 - DNA, 25 bp, Probe Sequence
gaagcgagaagaaggagaaggatga

SEQ ID NO: 96660 - DNA, 25 bp, Probe Sequence
aaagaaagaagaggaagaggaagcg

SEQ ID NO: 96661 - DNA, 25 bp, Probe Sequence
attatgcccagtacatgaccttagg

SEQ ID NO: 96662 - DNA, 25 bp, Probe Sequence
aagcgagaagaaggagaaggatgac

SEQ ID NO: 96663 - DNA, 25 bp, Probe Sequence
ccagtacatgaccttagggaacttt

SEQ ID NO: 96664 - DNA, 25 bp, Probe Sequence
gtcaagggtggagtattacggaaac

SEQ ID NO: 96665 - DNA, 25 bp, Probe Sequence
gaactttcctacttggcagtacatc

SEQ ID NO: 96666 - DNA, 25 bp, Probe Sequence
gagaagaaggagaaggatgacagct

SEQ ID NO: 96667 - DNA, 25 bp, Probe Sequence
aactttcctacttggcagtacatct

SEQ ID NO: 96668 - DNA, 25 bp, Probe Sequence
agaagaggaagaggaagcgagaaga

SEQ ID NO: 96669 - DNA, 25 bp, Probe Sequence
gacagtggaacttacattgaacata

SEQ ID NO: 96670 - DNA, 25 bp, Probe Sequence
ggacagtggaacttacattgaacat

SEQ ID NO: 96671 - DNA, 25 bp, Probe Sequence
aaggacagtggaacttacattgaac

SEQ ID NO: 96672 - DNA, 25 bp, Probe Sequence
caaggacagtggaacttacattgaa

SEQ ID NO: 96673 - DNA, 25 bp, Probe Sequence
aatggagacttgtgttatcttgaat

SEQ ID NO: 96674 - DNA, 25 bp, Probe Sequence
aacaaggacagtggaacttacattg

SEQ ID NO: 96675 - DNA, 25 bp, Probe Sequence
atggagacttgtgttatcttgaatt

SEQ ID NO: 96676 - DNA, 25 bp, Probe Sequence
acagtggaacttacattgaacatat

SEQ ID NO: 96677 - DNA, 25 bp, Probe Sequence
aggacagtggaacttacattgaaca

SEQ ID NO: 96678 - DNA, 25 bp, Probe Sequence
acaaggacagtggaacttacattga

SEQ ID NO: 96679 - DNA, 25 bp, Probe Sequence
ttctatcacatcatcattgagacat

SEQ ID NO: 96680 - DNA, 25 bp, Probe Sequence
tcttctctcactaccatcaaacaaa

SEQ ID NO: 96681 - DNA, 25 bp, Probe Sequence
ttcttctctcactaccatcaaacaa

SEQ ID NO: 96682 - DNA, 25 bp, Probe Sequence
tcactaccatcaaacaaaggagaaa

SEQ ID NO: 96683 - DNA, 25 bp, Probe Sequence
ttctctcactaccatcaaacaaagg

SEQ ID NO: 96684 - DNA, 25 bp, Probe Sequence
aaatgaacaaagaaggtcccaaatt

SEQ ID NO: 96685 - DNA, 25 bp, Probe Sequence
cttctctcactaccatcaaacaaag

SEQ ID NO: 96686 - DNA, 25 bp, Probe Sequence
aatgaacaaagaaggtcccaaattc

SEQ ID NO: 96687 - DNA, 25 bp, Probe Sequence
gttcttctctcactaccatcaaaca

SEQ ID NO: 96688 - DNA, 25 bp, Probe Sequence
tgttcttctctcactaccatcaaac

SEQ ID NO: 96689 - DNA, 25 bp, Probe Sequence
tctctcactaccatcaaacaaagga

SEQ ID NO: 96690 - DNA, 25 bp, Probe Sequence
ccataagatcacaggtggagtctaa

SEQ ID NO: 96691 - DNA, 25 bp, Probe Sequence
tctatcacatcatcattgagacata

SEQ ID NO: 96692 - DNA, 25 bp, Probe Sequence
aaacaaggacagtggaacttacatt

SEQ ID NO: 96693 - DNA, 25 bp, Probe Sequence
caggtgatacatctgtggaacataa

SEQ ID NO: 96694 - DNA, 25 bp, Probe Sequence
ccaggtgatacatctgtggaacata

SEQ ID NO: 96695 - DNA, 25 bp, Probe Sequence
aggtgatacatctgtggaacataaa

SEQ ID NO: 96696 - DNA, 25 bp, Probe Sequence
tttcaaaccaggtgatacatctgtg

SEQ ID NO: 96697 - DNA, 25 bp, Probe Sequence
accaggtgatacatctgtggaacat

SEQ ID NO: 96698 - DNA, 25 bp, Probe Sequence
aaccaggtgatacatctgtggaaca

SEQ ID NO: 96699 - DNA, 25 bp, Probe Sequence
aaaccaggtgatacatctgtggaac

SEQ ID NO: 96700 - DNA, 25 bp, Probe Sequence
caaaccaggtgatacatctgtggaa

SEQ ID NO: 96701 - DNA, 25 bp, Probe Sequence
ttcaaaccaggtgatacatctgtgg

SEQ ID NO: 96702 - DNA, 25 bp, Probe Sequence
agagtgctgggattacaggtatgag

SEQ ID NO: 96703 - DNA, 25 bp, Probe Sequence
ggtgatacatctgtggaacataaaa

SEQ ID NO: 96704 - DNA, 25 bp, Probe Sequence
ttttcaaaccaggtgatacatctgt

SEQ ID NO: 96705 - DNA, 25 bp, Probe Sequence
gttttcaaaccaggtgatacatctg

SEQ ID NO: 96706 - DNA, 25 bp, Probe Sequence
cagagtgctgggattacaggtatga

SEQ ID NO: 96707 - DNA, 25 bp, Probe Sequence
tcaaaccaggtgatacatctgtgga

SEQ ID NO: 96708 - DNA, 25 bp, Probe Sequence
ttagggactttcctacttggcagta

SEQ ID NO: 96709 - DNA, 25 bp, Probe Sequence
tagggactttcctacttggcagtac

SEQ ID NO: 96710 - DNA, 25 bp, Probe Sequence
caggacttagggactttcctacttg

SEQ ID NO: 96711 - DNA, 25 bp, Probe Sequence
ctattaccatgtgatgcggttttgg

SEQ ID NO: 96712 - DNA, 25 bp, Probe Sequence
cttagggactttcctacttggcagt

SEQ ID NO: 96713 - DNA, 25 bp, Probe Sequence
acttagggactttcctacttggcag

SEQ ID NO: 96714 - DNA, 25 bp, Probe Sequence
gacttagggactttcctacttggca

SEQ ID NO: 96715 - DNA, 25 bp, Probe Sequence
acaggacttagggactttcctactt

SEQ ID NO: 96716 - DNA, 25 bp, Probe Sequence
gctattaccatgtgatgcggttttg

SEQ ID NO: 96717 - DNA, 25 bp, Probe Sequence
ttacaggaagattacttgagagagc

SEQ ID NO: 96718 - DNA, 25 bp, Probe Sequence
caccattacaggaagattacttgag

SEQ ID NO: 96719 - DNA, 25 bp, Probe Sequence
gcaccattacaggaagattacttga

SEQ ID NO: 96720 - DNA, 25 bp, Probe Sequence
accattacaggaagattacttgaga

SEQ ID NO: 96721 - DNA, 25 bp, Probe Sequence
ccattacaggaagattacttgagag

SEQ ID NO: 96722 - DNA, 25 bp, Probe Sequence
ggcaccattacaggaagattacttg

SEQ ID NO: 96723 - DNA, 25 bp, Probe Sequence
gagtatctaggatgccatgatgaat

SEQ ID NO: 96724 - DNA, 25 bp, Probe Sequence
aactgatgagtatctaggatgccat

SEQ ID NO: 96725 - DNA, 25 bp, Probe Sequence
tatctaggatgccatgatgaatgag

SEQ ID NO: 96726 - DNA, 25 bp, Probe Sequence
gtatctaggatgccatgatgaatga

SEQ ID NO: 96727 - DNA, 25 bp, Probe Sequence
agtatctaggatgccatgatgaatg

SEQ ID NO: 96728 - DNA, 25 bp, Probe Sequence
agaatccaactgatgagtatctagg

SEQ ID NO: 96729 - DNA, 25 bp, Probe Sequence
gatgagtatctaggatgccatgatg

SEQ ID NO: 96730 - DNA, 25 bp, Probe Sequence
tgagtatctaggatgccatgatgaa

SEQ ID NO: 96731 - DNA, 25 bp, Probe Sequence
atgagtatctaggatgccatgatga

SEQ ID NO: 96732 - DNA, 25 bp, Probe Sequence
tgatgagtatctaggatgccatgat

SEQ ID NO: 96733 - DNA, 25 bp, Probe Sequence
ctgatgagtatctaggatgccatga

SEQ ID NO: 96734 - DNA, 25 bp, Probe Sequence
cattacaggaagattacttgagaga

SEQ ID NO: 96735 - DNA, 25 bp, Probe Sequence
caactgatgagtatctaggatgcca

SEQ ID NO: 96736 - DNA, 25 bp, Probe Sequence
ggaagaatccaactgatgagtatct

SEQ ID NO: 96737 - DNA, 25 bp, Probe Sequence
tacaggaagattacttgagagagct

SEQ ID NO: 96738 - DNA, 25 bp, Probe Sequence
attacaggaagattacttgagagag

SEQ ID NO: 96739 - DNA, 25 bp, Probe Sequence
gaatccaactgatgagtatctagga

SEQ ID NO: 96740 - DNA, 25 bp, Probe Sequence
actgatgagtatctaggatgccatg

SEQ ID NO: 96741 - DNA, 25 bp, Probe Sequence
ttacaggaagattacttgagagagc

SEQ ID NO: 96742 - DNA, 25 bp, Probe Sequence
caccattacaggaagattacttgag

SEQ ID NO: 96743 - DNA, 25 bp, Probe Sequence
gcaccattacaggaagattacttga

SEQ ID NO: 96744 - DNA, 25 bp, Probe Sequence
accattacaggaagattacttgaga

SEQ ID NO: 96745 - DNA, 25 bp, Probe Sequence
ccattacaggaagattacttgagag

SEQ ID NO: 96746 - DNA, 25 bp, Probe Sequence
ggcaccattacaggaagattacttg

SEQ ID NO: 96747 - DNA, 25 bp, Probe Sequence
gagtatctaggatgccatgatgaat

SEQ ID NO: 96748 - DNA, 25 bp, Probe Sequence
aactgatgagtatctaggatgccat

SEQ ID NO: 96749 - DNA, 25 bp, Probe Sequence
tatctaggatgccatgatgaatgag

SEQ ID NO: 96750 - DNA, 25 bp, Probe Sequence
gtatctaggatgccatgatgaatga

SEQ ID NO: 96751 - DNA, 25 bp, Probe Sequence
agtatctaggatgccatgatgaatg

SEQ ID NO: 96752 - DNA, 25 bp, Probe Sequence
agaatccaactgatgagtatctagg

SEQ ID NO: 96753 - DNA, 25 bp, Probe Sequence
gatgagtatctaggatgccatgatg

SEQ ID NO: 96754 - DNA, 25 bp, Probe Sequence
tgagtatctaggatgccatgatgaa

SEQ ID NO: 96755 - DNA, 25 bp, Probe Sequence
atgagtatctaggatgccatgatga

SEQ ID NO: 96756 - DNA, 25 bp, Probe Sequence
tgatgagtatctaggatgccatgat

SEQ ID NO: 96757 - DNA, 25 bp, Probe Sequence
ctgatgagtatctaggatgccatga

SEQ ID NO: 96758 - DNA, 25 bp, Probe Sequence
cattacaggaagattacttgagaga

SEQ ID NO: 96759 - DNA, 25 bp, Probe Sequence
caactgatgagtatctaggatgcca

SEQ ID NO: 96760 - DNA, 25 bp, Probe Sequence
ggaagaatccaactgatgagtatct

SEQ ID NO: 96761 - DNA, 25 bp, Probe Sequence
tacaggaagattacttgagagagct

SEQ ID NO: 96762 - DNA, 25 bp, Probe Sequence
attacaggaagattacttgagagag

SEQ ID NO: 96763 - DNA, 25 bp, Probe Sequence
gaatccaactgatgagtatctagga

SEQ ID NO: 96764 - DNA, 25 bp, Probe Sequence
actgatgagtatctaggatgccatg

SEQ ID NO: 96765 - DNA, 25 bp, Probe Sequence
aattcctgttgcttaatgacattgc

SEQ ID NO: 96766 - DNA, 25 bp, Probe Sequence
tataaacaaacttactgaactgcca

SEQ ID NO: 96767 - DNA, 25 bp, Probe Sequence
tgctggtataaacaaacttactgaa

SEQ ID NO: 96768 - DNA, 25 bp, Probe Sequence
gacagtctgcataacattgtaacaa

SEQ ID NO: 96769 - DNA, 25 bp, Probe Sequence
gtataaacaaacttactgaactgcc

SEQ ID NO: 96770 - DNA, 25 bp, Probe Sequence
ggtataaacaaacttactgaactgc

SEQ ID NO: 96771 - DNA, 25 bp, Probe Sequence
gctggtataaacaaacttactgaac

SEQ ID NO: 96772 - DNA, 25 bp, Probe Sequence
atgctggtataaacaaacttactga

SEQ ID NO: 96773 - DNA, 25 bp, Probe Sequence
attcctgttgcttaatgacattgcg

SEQ ID NO: 96774 - DNA, 25 bp, Probe Sequence
ggtcatgctggtataaacaaactta

SEQ ID NO: 96775 - DNA, 25 bp, Probe Sequence
tggtcatgctggtataaacaaactt

SEQ ID NO: 96776 - DNA, 25 bp, Probe Sequence
ataaacaaacttactgaactgccag

SEQ ID NO: 96777 - DNA, 25 bp, Probe Sequence
cgacagtctgcataacattgtaaca

SEQ ID NO: 96778 - DNA, 25 bp, Probe Sequence
gtggtcatgctggtataaacaaact

SEQ ID NO: 96779 - DNA, 25 bp, Probe Sequence
ctgtttgtggtcatgctggtataaa

SEQ ID NO: 96780 - DNA, 25 bp, Probe Sequence
catgctggtataaacaaacttactg

SEQ ID NO: 96781 - DNA, 25 bp, Probe Sequence
gtcatgctggtataaacaaacttac

SEQ ID NO: 96782 - DNA, 25 bp, Probe Sequence
aaattcctgttgcttaatgacattg

SEQ ID NO: 96783 - DNA, 25 bp, Probe Sequence
tcatgctggtataaacaaacttact

SEQ ID NO: 96784 - DNA, 25 bp, Probe Sequence
tggtataaacaaacttactgaactg

SEQ ID NO: 96785 - DNA, 25 bp, Probe Sequence
acagtctgcataacattgtaacaat

SEQ ID NO: 96786 - DNA, 25 bp, Probe Sequence
ttgcttaatgacattgcgacagtct

SEQ ID NO: 96787 - DNA, 25 bp, Probe Sequence
gttgcttaatgacattgcgacagtc

SEQ ID NO: 96788 - DNA, 25 bp, Probe Sequence
gccagttatataagagtatagcaca

SEQ ID NO: 96789 - DNA, 25 bp, Probe Sequence
acctgtttcccatctgtagttattc

SEQ ID NO: 96790 - DNA, 25 bp, Probe Sequence
cattacctgtttcccatctgtagtt

SEQ ID NO: 96791 - DNA, 25 bp, Probe Sequence
ctgtagttattcgatgaagtcatgt

SEQ ID NO: 96792 - DNA, 25 bp, Probe Sequence
tacctgtttcccatctgtagttatt

SEQ ID NO: 96793 - DNA, 25 bp, Probe Sequence
ttacctgtttcccatctgtagttat

SEQ ID NO: 96794 - DNA, 25 bp, Probe Sequence
attacctgtttcccatctgtagtta

SEQ ID NO: 96795 - DNA, 25 bp, Probe Sequence
tctgtagttattcgatgaagtcatg

SEQ ID NO: 96796 - DNA, 25 bp, Probe Sequence
cctgtttcccatctgtagttattcg

SEQ ID NO: 96797 - DNA, 25 bp, Probe Sequence
tctgaattgtagaagtgtccaaaca

SEQ ID NO: 96798 - DNA, 25 bp, Probe Sequence
ccattacctgtttcccatctgtagt

SEQ ID NO: 96799 - DNA, 25 bp, Probe Sequence
aattgtagaagtgtccaaacaggtt

SEQ ID NO: 96800 - DNA, 25 bp, Probe Sequence
ctgaattgtagaagtgtccaaacag

SEQ ID NO: 96801 - DNA, 25 bp, Probe Sequence
atctgtagttattcgatgaagtcat

SEQ ID NO: 96802 - DNA, 25 bp, Probe Sequence
tgtagttattcgatgaagtcatgta

SEQ ID NO: 96803 - DNA, 25 bp, Probe Sequence
gaattgtagaagtgtccaaacaggt

SEQ ID NO: 96804 - DNA, 25 bp, Probe Sequence
tgaattgtagaagtgtccaaacagg

SEQ ID NO: 96805 - DNA, 25 bp, Probe Sequence
gtagttattcgatgaagtcatgtac

SEQ ID NO: 96806 - DNA, 25 bp, Probe Sequence
attgtagaagtgtccaaacaggttg

SEQ ID NO: 96807 - DNA, 25 bp, Probe Sequence
ctgtttcccatctgtagttattcga

SEQ ID NO: 96808 - DNA, 25 bp, Probe Sequence
tgtttcccatctgtagttattcgat

SEQ ID NO: 96809 - DNA, 25 bp, Probe Sequence
gccattacctgtttcccatctgtag

SEQ ID NO: 96810 - DNA, 25 bp, Probe Sequence
ttgtagaagtgtccaaacaggttgt

SEQ ID NO: 96811 - DNA, 25 bp, Probe Sequence
atttaggtgacactataggacaagt

SEQ ID NO: 96812 - DNA, 25 bp, Probe Sequence
ttctgaattgtagaagtgtccaaac

SEQ ID NO: 96813 - DNA, 25 bp, Probe Sequence
tggtgtgaatggaaatgtgatagaa

SEQ ID NO: 96814 - DNA, 25 bp, Probe Sequence
ggtgtgaatggaaatgtgatagaat

SEQ ID NO: 96815 - DNA, 25 bp, Probe Sequence
tagatagaacgcaactttcagagag

SEQ ID NO: 96816 - DNA, 25 bp, Probe Sequence
tatcagaatagatagaacgcaactt

SEQ ID NO: 96817 - DNA, 25 bp, Probe Sequence
ttatcagaatagatagaacgcaact

SEQ ID NO: 96818 - DNA, 25 bp, Probe Sequence
atagatagaacgcaactttcagaga

SEQ ID NO: 96819 - DNA, 25 bp, Probe Sequence
gtggtgtgaatggaaatgtgataga

SEQ ID NO: 96820 - DNA, 25 bp, Probe Sequence
aactttcagagagatgtcttggaat

SEQ ID NO: 96821 - DNA, 25 bp, Probe Sequence
gatagaacgcaactttcagagagat

SEQ ID NO: 96822 - DNA, 25 bp, Probe Sequence
cagaatagatagaacgcaactttca

SEQ ID NO: 96823 - DNA, 25 bp, Probe Sequence
atagaacgcaactttcagagagatg

SEQ ID NO: 96824 - DNA, 25 bp, Probe Sequence
agagagatgtcttggaatttggaaa

SEQ ID NO: 96825 - DNA, 25 bp, Probe Sequence
actttcagagagatgtcttggaatt

SEQ ID NO: 96826 - DNA, 25 bp, Probe Sequence
agttggatgtcaaggataaaggaaa

SEQ ID NO: 96827 - DNA, 25 bp, Probe Sequence
taaatctaggataatgcccaggttc

SEQ ID NO: 96828 - DNA, 25 bp, Probe Sequence
aatagatagaacgcaactttcagag

SEQ ID NO: 96829 - DNA, 25 bp, Probe Sequence
gaatagatagaacgcaactttcaga

SEQ ID NO: 96830 - DNA, 25 bp, Probe Sequence
agaatagatagaacgcaactttcag

SEQ ID NO: 96831 - DNA, 25 bp, Probe Sequence
tcagaatagatagaacgcaactttc

SEQ ID NO: 96832 - DNA, 25 bp, Probe Sequence
gataaatctaggataatgcccaggt

SEQ ID NO: 96833 - DNA, 25 bp, Probe Sequence
cagagagatgtcttggaatttggaa

SEQ ID NO: 96834 - DNA, 25 bp, Probe Sequence
ttcagagagatgtcttggaatttgg

SEQ ID NO: 96835 - DNA, 25 bp, Probe Sequence
tttcagagagatgtcttggaatttg

SEQ ID NO: 96836 - DNA, 25 bp, Probe Sequence
caactttcagagagatgtcttggaa

SEQ ID NO: 96837 - DNA, 25 bp, Probe Sequence
gtgaacagagttaccttacagagtt

SEQ ID NO: 96838 - DNA, 25 bp, Probe Sequence
aagtgaacagagttaccttacagag

SEQ ID NO: 96839 - DNA, 25 bp, Probe Sequence
agtgaacagagttaccttacagagt

SEQ ID NO: 96840 - DNA, 25 bp, Probe Sequence
atgtgaatgttaggtcagttctact

SEQ ID NO: 96841 - DNA, 25 bp, Probe Sequence
gatgtgaatgttaggtcagttctac

SEQ ID NO: 96842 - DNA, 25 bp, Probe Sequence
agatgtgaatgttaggtcagttcta

SEQ ID NO: 96843 - DNA, 25 bp, Probe Sequence
tagatgtgaatgttaggtcagttct

SEQ ID NO: 96844 - DNA, 25 bp, Probe Sequence
ctccaagacacttactgatctactg

SEQ ID NO: 96845 - DNA, 25 bp, Probe Sequence
ttagatgtgaatgttaggtcagttc

SEQ ID NO: 96846 - DNA, 25 bp, Probe Sequence
ttgaagtgtccttgtagatagactg

SEQ ID NO: 96847 - DNA, 25 bp, Probe Sequence
aggttgagaataataggatctgtgt

SEQ ID NO: 96848 - DNA, 25 bp, Probe Sequence
tccaagacacttactgatctactgt

SEQ ID NO: 96849 - DNA, 25 bp, Probe Sequence
gaggttgagaataataggatctgtg

SEQ ID NO: 96850 - DNA, 25 bp, Probe Sequence
agaggttgagaataataggatctgt

SEQ ID NO: 96851 - DNA, 25 bp, Probe Sequence
gctccaagacacttactgatctact

SEQ ID NO: 96852 - DNA, 25 bp, Probe Sequence
ggttgagaataataggatctgtgtt

SEQ ID NO: 96853 - DNA, 25 bp, Probe Sequence
caagacacttactgatctactgtga

SEQ ID NO: 96854 - DNA, 25 bp, Probe Sequence
ccaagacacttactgatctactgtg

SEQ ID NO: 96855 - DNA, 25 bp, Probe Sequence
ctccgattatgtatagaaccttagt

SEQ ID NO: 96856 - DNA, 25 bp, Probe Sequence
actccgattatgtatagaaccttag

SEQ ID NO: 96857 - DNA, 25 bp, Probe Sequence
aagacacttactgatctactgtgaa

SEQ ID NO: 96858 - DNA, 25 bp, Probe Sequence
tgaagtgtccttgtagatagactgc

SEQ ID NO: 96859 - DNA, 25 bp, Probe Sequence
agacacttactgatctactgtgaat

SEQ ID NO: 96860 - DNA, 25 bp, Probe Sequence
ttccctatcctaactcagtaacaga

SEQ ID NO: 96861 - DNA, 25 bp, Probe Sequence
tctgtctaattgccgagttactgtc

SEQ ID NO: 96862 - DNA, 25 bp, Probe Sequence
ctgtctaattgccgagttactgtca

SEQ ID NO: 96863 - DNA, 25 bp, Probe Sequence
tgtctaattgccgagttactgtcag

SEQ ID NO: 96864 - DNA, 25 bp, Probe Sequence
ctctgtctaattgccgagttactgt

SEQ ID NO: 96865 - DNA, 25 bp, Probe Sequence
taattgatttagaggttcctgagcc

SEQ ID NO: 96866 - DNA, 25 bp, Probe Sequence
tcggtttaattgatttagaggttcc

SEQ ID NO: 96867 - DNA, 25 bp, Probe Sequence
acataatttgccttcagaatcttca

SEQ ID NO: 96868 - DNA, 25 bp, Probe Sequence
cggtttaattgatttagaggttcct

SEQ ID NO: 96869 - DNA, 25 bp, Probe Sequence
ttaattgatttagaggttcctgagc

SEQ ID NO: 96870 - DNA, 25 bp, Probe Sequence
agtcggtttaattgatttagaggtt

SEQ ID NO: 96871 - DNA, 25 bp, Probe Sequence
cctctgtctaattgccgagttactg

SEQ ID NO: 96872 - DNA, 25 bp, Probe Sequence
gtcggtttaattgatttagaggttc

SEQ ID NO: 96873 - DNA, 25 bp, Probe Sequence
tgagccttcaaattcagtaatacat

SEQ ID NO: 96874 - DNA, 25 bp, Probe Sequence
cgtagtcggtttaattgatttagag

SEQ ID NO: 96875 - DNA, 25 bp, Probe Sequence
ggtttaattgatttagaggttcctg

SEQ ID NO: 96876 - DNA, 25 bp, Probe Sequence
cataatttgccttcagaatcttcaa

SEQ ID NO: 96877 - DNA, 25 bp, Probe Sequence
tagtcggtttaattgatttagaggt

SEQ ID NO: 96878 - DNA, 25 bp, Probe Sequence
gtagtcggtttaattgatttagagg

SEQ ID NO: 96879 - DNA, 25 bp, Probe Sequence
gtctaattgccgagttactgtcagc

SEQ ID NO: 96880 - DNA, 25 bp, Probe Sequence
tacataatttgccttcagaatcttc

SEQ ID NO: 96881 - DNA, 25 bp, Probe Sequence
attgatttagaggttcctgagcctt

SEQ ID NO: 96882 - DNA, 25 bp, Probe Sequence
aattgatttagaggttcctgagcct

SEQ ID NO: 96883 - DNA, 25 bp, Probe Sequence
ttagaggttcctgagccttcaaatt

SEQ ID NO: 96884 - DNA, 25 bp, Probe Sequence
tttagaggttcctgagccttcaaat

SEQ ID NO: 96885 - DNA, 25 bp, Probe Sequence
ttacaaggtctacaggtgattctaa

SEQ ID NO: 96886 - DNA, 25 bp, Probe Sequence
aaggtctacaggtgattctaataca

SEQ ID NO: 96887 - DNA, 25 bp, Probe Sequence
acaaggtctacaggtgattctaata

SEQ ID NO: 96888 - DNA, 25 bp, Probe Sequence
tacaaggtctacaggtgattctaat

SEQ ID NO: 96889 - DNA, 25 bp, Probe Sequence
cagaaccacgatatgaagattccaa

SEQ ID NO: 96890 - DNA, 25 bp, Probe Sequence
caaggtctacaggtgattctaatac

SEQ ID NO: 96891 - DNA, 25 bp, Probe Sequence
cagcagaaccacgatatgaagattc

SEQ ID NO: 96892 - DNA, 25 bp, Probe Sequence
acaggtgattctaatacacagacaa

SEQ ID NO: 96893 - DNA, 25 bp, Probe Sequence
ggtctacaggtgattctaatacaca

SEQ ID NO: 96894 - DNA, 25 bp, Probe Sequence
aggtctacaggtgattctaatacac

SEQ ID NO: 96895 - DNA, 25 bp, Probe Sequence
tacaggtgattctaatacacagaca

SEQ ID NO: 96896 - DNA, 25 bp, Probe Sequence
ctacaggtgattctaatacacagac

SEQ ID NO: 96897 - DNA, 25 bp, Probe Sequence
tctacaggtgattctaatacacaga

SEQ ID NO: 96898 - DNA, 25 bp, Probe Sequence
gtctacaggtgattctaatacacag

SEQ ID NO: 96899 - DNA, 25 bp, Probe Sequence
agcagaaccacgatatgaagattcc

SEQ ID NO: 96900 - DNA, 25 bp, Probe Sequence
ttcaacacaggtagaactttaggag

SEQ ID NO: 96901 - DNA, 25 bp, Probe Sequence
tttcaacacaggtagaactttagga

SEQ ID NO: 96902 - DNA, 25 bp, Probe Sequence
agaaccacgatatgaagattccaaa

SEQ ID NO: 96903 - DNA, 25 bp, Probe Sequence
tttacaaggtctacaggtgattcta

SEQ ID NO: 96904 - DNA, 25 bp, Probe Sequence
gaaccacgatatgaagattccaaat

SEQ ID NO: 96905 - DNA, 25 bp, Probe Sequence
attaaggaagagaaatctggacaca

SEQ ID NO: 96906 - DNA, 25 bp, Probe Sequence
gcagaaccacgatatgaagattcca

SEQ ID NO: 96907 - DNA, 25 bp, Probe Sequence
cattaaggaagagaaatctggacac

SEQ ID NO: 96908 - DNA, 25 bp, Probe Sequence
aaccacgatatgaagattccaaatt

SEQ ID NO: 96909 - DNA, 25 bp, Probe Sequence
ggaggctgagttctaataagtcttc

SEQ ID NO: 96910 - DNA, 25 bp, Probe Sequence
gaggctgagttctaataagtcttca

SEQ ID NO: 96911 - DNA, 25 bp, Probe Sequence
aggctgagttctaataagtcttcat

SEQ ID NO: 96912 - DNA, 25 bp, Probe Sequence
ggctgagttctaataagtcttcatt

SEQ ID NO: 96913 - DNA, 25 bp, Probe Sequence
aacaagtaacctggaatgtgaacac

SEQ ID NO: 96914 - DNA, 25 bp, Probe Sequence
tgtatggtctctccctactattcag

SEQ ID NO: 96915 - DNA, 25 bp, Probe Sequence
gtgtatggtctctccctactattca

SEQ ID NO: 96916 - DNA, 25 bp, Probe Sequence
ggtgtatggtctctccctactattc

SEQ ID NO: 96917 - DNA, 25 bp, Probe Sequence
cctgtgagaatgagcatttgtattt

SEQ ID NO: 96918 - DNA, 25 bp, Probe Sequence
gtatggtctctccctactattcagc

SEQ ID NO: 96919 - DNA, 25 bp, Probe Sequence
gggaggctgagttctaataagtctt

SEQ ID NO: 96920 - DNA, 25 bp, Probe Sequence
ccctgtgagaatgagcatttgtatt

SEQ ID NO: 96921 - DNA, 25 bp, Probe Sequence
taaacaagtaacctggaatgtgaac

SEQ ID NO: 96922 - DNA, 25 bp, Probe Sequence
aaacaagtaacctggaatgtgaaca

SEQ ID NO: 96923 - DNA, 25 bp, Probe Sequence
taccctgtgagaatgagcatttgta

SEQ ID NO: 96924 - DNA, 25 bp, Probe Sequence
ttaaacaagtaacctggaatgtgaa

SEQ ID NO: 96925 - DNA, 25 bp, Probe Sequence
aagtaacctggaatgtgaacaccaa

SEQ ID NO: 96926 - DNA, 25 bp, Probe Sequence
cttaccctgtgagaatgagcatttg

SEQ ID NO: 96927 - DNA, 25 bp, Probe Sequence
acaagtaacctggaatgtgaacacc

SEQ ID NO: 96928 - DNA, 25 bp, Probe Sequence
tcttaccctgtgagaatgagcattt

SEQ ID NO: 96929 - DNA, 25 bp, Probe Sequence
accctgtgagaatgagcatttgtat

SEQ ID NO: 96930 - DNA, 25 bp, Probe Sequence
aggtgtatggtctctccctactatt

SEQ ID NO: 96931 - DNA, 25 bp, Probe Sequence
tatggtctctccctactattcagcg

SEQ ID NO: 96932 - DNA, 25 bp, Probe Sequence
ttaccctgtgagaatgagcatttgt

SEQ ID NO: 96933 - DNA, 25 bp, Probe Sequence
gcgtttgtgaaattatagatgggag

SEQ ID NO: 96934 - DNA, 25 bp, Probe Sequence
ttgcgtttgtgaaattatagatggg

SEQ ID NO: 96935 - DNA, 25 bp, Probe Sequence
accttgcgtttgtgaaattatagat

SEQ ID NO: 96936 - DNA, 25 bp, Probe Sequence
tgcgtttgtgaaattatagatggga

SEQ ID NO: 96937 - DNA, 25 bp, Probe Sequence
ttgtgaaattatagatgggagacgc

SEQ ID NO: 96938 - DNA, 25 bp, Probe Sequence
cttgcgtttgtgaaattatagatgg

SEQ ID NO: 96939 - DNA, 25 bp, Probe Sequence
ccttgcgtttgtgaaattatagatg

SEQ ID NO: 96940 - DNA, 25 bp, Probe Sequence
tttgtgaaattatagatgggagacg

SEQ ID NO: 96941 - DNA, 25 bp, Probe Sequence
cgtttgtgaaattatagatgggaga

SEQ ID NO: 96942 - DNA, 25 bp, Probe Sequence
ttctattaagttggtgcagtaatga

SEQ ID NO: 96943 - DNA, 25 bp, Probe Sequence
tctattaagttggtgcagtaatgat

SEQ ID NO: 96944 - DNA, 25 bp, Probe Sequence
tataagatattcccgctttctgttt

SEQ ID NO: 96945 - DNA, 25 bp, Probe Sequence
caccttgcgtttgtgaaattataga

SEQ ID NO: 96946 - DNA, 25 bp, Probe Sequence
ttatgattacccgtaacacatttgt

SEQ ID NO: 96947 - DNA, 25 bp, Probe Sequence
tattaagttggtgcagtaatgattg

SEQ ID NO: 96948 - DNA, 25 bp, Probe Sequence
gtttgtgaaattatagatgggagac

SEQ ID NO: 96949 - DNA, 25 bp, Probe Sequence
attatgattacccgtaacacatttg

SEQ ID NO: 96950 - DNA, 25 bp, Probe Sequence
ctattaagttggtgcagtaatgatt

SEQ ID NO: 96951 - DNA, 25 bp, Probe Sequence
ttataagatattcccgctttctgtt

SEQ ID NO: 96952 - DNA, 25 bp, Probe Sequence
tttataagatattcccgctttctgt

SEQ ID NO: 96953 - DNA, 25 bp, Probe Sequence
tttgccattgaaagtaatgcttagg

SEQ ID NO: 96954 - DNA, 25 bp, Probe Sequence
gattacccgtaacacatttgtgatt

SEQ ID NO: 96955 - DNA, 25 bp, Probe Sequence
tatgattacccgtaacacatttgtg

SEQ ID NO: 96956 - DNA, 25 bp, Probe Sequence
tgattacccgtaacacatttgtgat

SEQ ID NO: 96957 - DNA, 25 bp, Probe Sequence
cagttaataagctcgtagttggatc

SEQ ID NO: 96958 - DNA, 25 bp, Probe Sequence
agttaataagctcgtagttggatct

SEQ ID NO: 96959 - DNA, 25 bp, Probe Sequence
taataagctcgtagttggatcttgg

SEQ ID NO: 96960 - DNA, 25 bp, Probe Sequence
gcagttaataagctcgtagttggat

SEQ ID NO: 96961 - DNA, 25 bp, Probe Sequence
ttaataagctcgtagttggatcttg

SEQ ID NO: 96962 - DNA, 25 bp, Probe Sequence
gttaataagctcgtagttggatctt

SEQ ID NO: 96963 - DNA, 25 bp, Probe Sequence
taacaatttcacacaggtaatcagc

SEQ ID NO: 96964 - DNA, 25 bp, Probe Sequence
tacggataacaatttcacacaggta

SEQ ID NO: 96965 - DNA, 25 bp, Probe Sequence
cggataacaatttcacacaggtaat

SEQ ID NO: 96966 - DNA, 25 bp, Probe Sequence
acggataacaatttcacacaggtaa

SEQ ID NO: 96967 - DNA, 25 bp, Probe Sequence
ttacggataacaatttcacacaggt

SEQ ID NO: 96968 - DNA, 25 bp, Probe Sequence
acaggtaatcagctatgaccattag

SEQ ID NO: 96969 - DNA, 25 bp, Probe Sequence
cacaggtaatcagctatgaccatta

SEQ ID NO: 96970 - DNA, 25 bp, Probe Sequence
caggtaatcagctatgaccattagg

SEQ ID NO: 96971 - DNA, 25 bp, Probe Sequence
tgcagttaataagctcgtagttgga

SEQ ID NO: 96972 - DNA, 25 bp, Probe Sequence
ggataacaatttcacacaggtaatc

SEQ ID NO: 96973 - DNA, 25 bp, Probe Sequence
acaatttcacacaggtaatcagcta

SEQ ID NO: 96974 - DNA, 25 bp, Probe Sequence
gttacggataacaatttcacacagg

SEQ ID NO: 96975 - DNA, 25 bp, Probe Sequence
ggttacggataacaatttcacacag

SEQ ID NO: 96976 - DNA, 25 bp, Probe Sequence
aatttcacacaggtaatcagctatg

SEQ ID NO: 96977 - DNA, 25 bp, Probe Sequence
caatttcacacaggtaatcagctat

SEQ ID NO: 96978 - DNA, 25 bp, Probe Sequence
acacaggtaatcagctatgaccatt

SEQ ID NO: 96979 - DNA, 25 bp, Probe Sequence
ataacaatttcacacaggtaatcag

SEQ ID NO: 96980 - DNA, 25 bp, Probe Sequence
gataacaatttcacacaggtaatca

SEQ ID NO: 96981 - DNA, 25 bp, Probe Sequence
tgtaggaattgtagtcaacggtcag

SEQ ID NO: 96982 - DNA, 25 bp, Probe Sequence
ctgtaggaattgtagtcaacggtca

SEQ ID NO: 96983 - DNA, 25 bp, Probe Sequence
atggttgaatgtaaatcttgaagca

SEQ ID NO: 96984 - DNA, 25 bp, Probe Sequence
aataaatggcacagaagagaacatc

SEQ ID NO: 96985 - DNA, 25 bp, Probe Sequence
taaatggcacagaagagaacatcat

SEQ ID NO: 96986 - DNA, 25 bp, Probe Sequence
ataaatggcacagaagagaacatca

SEQ ID NO: 96987 - DNA, 25 bp, Probe Sequence
aaataaatggcacagaagagaacat

SEQ ID NO: 96988 - DNA, 25 bp, Probe Sequence
tggttgaatgtaaatcttgaagcaa

SEQ ID NO: 96989 - DNA, 25 bp, Probe Sequence
aatggttgaatgtaaatcttgaagc

SEQ ID NO: 96990 - DNA, 25 bp, Probe Sequence
cctgtaggaattgtagtcaacggtc

SEQ ID NO: 96991 - DNA, 25 bp, Probe Sequence
atggttctagcacattctccttgtc

SEQ ID NO: 96992 - DNA, 25 bp, Probe Sequence
ggttgaatgtaaatcttgaagcaaa

SEQ ID NO: 96993 - DNA, 25 bp, Probe Sequence
tttgaattatagtacccacacatgc

SEQ ID NO: 96994 - DNA, 25 bp, Probe Sequence
aaatagaaatcagcactgagaccat

SEQ ID NO: 96995 - DNA, 25 bp, Probe Sequence
aatagaaatcagcactgagaccatc

SEQ ID NO: 96996 - DNA, 25 bp, Probe Sequence
gtaggaattgtagtcaacggtcagc

SEQ ID NO: 96997 - DNA, 25 bp, Probe Sequence
gttctagcacattctccttgtcctg

SEQ ID NO: 96998 - DNA, 25 bp, Probe Sequence
catggttctagcacattctccttgt

SEQ ID NO: 96999 - DNA, 25 bp, Probe Sequence
tgaattatagtacccacacatgcaa

SEQ ID NO: 97000 - DNA, 25 bp, Probe Sequence
ttgaattatagtacccacacatgca

SEQ ID NO: 97001 - DNA, 25 bp, Probe Sequence
atagaaatcagcactgagaccatca

SEQ ID NO: 97002 - DNA, 25 bp, Probe Sequence
gaattatagtacccacacatgcaaa

SEQ ID NO: 97003 - DNA, 25 bp, Probe Sequence
aattgtagtcaacggtcagcttgtt

SEQ ID NO: 97004 - DNA, 25 bp, Probe Sequence
aatggcacagaagagaacatcattt

SEQ ID NO: 97005 - DNA, 25 bp, Probe Sequence
tgtaggaattgtagtcaacggtcag

SEQ ID NO: 97006 - DNA, 25 bp, Probe Sequence
ctgtaggaattgtagtcaacggtca

SEQ ID NO: 97007 - DNA, 25 bp, Probe Sequence
atggttgaatgtaaatcttgaagca

SEQ ID NO: 97008 - DNA, 25 bp, Probe Sequence
aataaatggcacagaagagaacatc

SEQ ID NO: 97009 - DNA, 25 bp, Probe Sequence
taaatggcacagaagagaacatcat

SEQ ID NO: 97010 - DNA, 25 bp, Probe Sequence
ataaatggcacagaagagaacatca

SEQ ID NO: 97011 - DNA, 25 bp, Probe Sequence
aaataaatggcacagaagagaacat

SEQ ID NO: 97012 - DNA, 25 bp, Probe Sequence
tggttgaatgtaaatcttgaagcaa

SEQ ID NO: 97013 - DNA, 25 bp, Probe Sequence
aatggttgaatgtaaatcttgaagc

SEQ ID NO: 97014 - DNA, 25 bp, Probe Sequence
cctgtaggaattgtagtcaacggtc

SEQ ID NO: 97015 - DNA, 25 bp, Probe Sequence
atggttctagcacattctccttgtc

SEQ ID NO: 97016 - DNA, 25 bp, Probe Sequence
ggttgaatgtaaatcttgaagcaaa

SEQ ID NO: 97017 - DNA, 25 bp, Probe Sequence
tttgaattatagtacccacacatgc

SEQ ID NO: 97018 - DNA, 25 bp, Probe Sequence
aaatagaaatcagcactgagaccat

SEQ ID NO: 97019 - DNA, 25 bp, Probe Sequence
aatagaaatcagcactgagaccatc

SEQ ID NO: 97020 - DNA, 25 bp, Probe Sequence
gtaggaattgtagtcaacggtcagc

SEQ ID NO: 97021 - DNA, 25 bp, Probe Sequence
gttctagcacattctccttgtcctg

SEQ ID NO: 97022 - DNA, 25 bp, Probe Sequence
catggttctagcacattctccttgt

SEQ ID NO: 97023 - DNA, 25 bp, Probe Sequence
tgaattatagtacccacacatgcaa

SEQ ID NO: 97024 - DNA, 25 bp, Probe Sequence
ttgaattatagtacccacacatgca

SEQ ID NO: 97025 - DNA, 25 bp, Probe Sequence
atagaaatcagcactgagaccatca

SEQ ID NO: 97026 - DNA, 25 bp, Probe Sequence
gaattatagtacccacacatgcaaa

SEQ ID NO: 97027 - DNA, 25 bp, Probe Sequence
aattgtagtcaacggtcagcttgtt

SEQ ID NO: 97028 - DNA, 25 bp, Probe Sequence
aatggcacagaagagaacatcattt

SEQ ID NO: 97029 - DNA, 25 bp, Probe Sequence
acagttctctgaatgccaatatgat

SEQ ID NO: 97030 - DNA, 25 bp, Probe Sequence
agttctctgaatgccaatatgatta

SEQ ID NO: 97031 - DNA, 25 bp, Probe Sequence
cagttctctgaatgccaatatgatt

SEQ ID NO: 97032 - DNA, 25 bp, Probe Sequence
cacagttctctgaatgccaatatga

SEQ ID NO: 97033 - DNA, 25 bp, Probe Sequence
ggacattattccacagttctctgaa

SEQ ID NO: 97034 - DNA, 25 bp, Probe Sequence
ccacagttctctgaatgccaatatg

SEQ ID NO: 97035 - DNA, 25 bp, Probe Sequence
attattccacagttctctgaatgcc

SEQ ID NO: 97036 - DNA, 25 bp, Probe Sequence
gttctctgaatgccaatatgattat

SEQ ID NO: 97037 - DNA, 25 bp, Probe Sequence
tccacagttctctgaatgccaatat

SEQ ID NO: 97038 - DNA, 25 bp, Probe Sequence
gacattattccacagttctctgaat

SEQ ID NO: 97039 - DNA, 25 bp, Probe Sequence
ccacagaagaggatgtcaagatgaa

SEQ ID NO: 97040 - DNA, 25 bp, Probe Sequence
aagccctcattaaccatttcaatct

SEQ ID NO: 97041 - DNA, 25 bp, Probe Sequence
cattattccacagttctctgaatgc

SEQ ID NO: 97042 - DNA, 25 bp, Probe Sequence
gaagccctcattaaccatttcaatc

SEQ ID NO: 97043 - DNA, 25 bp, Probe Sequence
ttccacagttctctgaatgccaata

SEQ ID NO: 97044 - DNA, 25 bp, Probe Sequence
acattattccacagttctctgaatg

SEQ ID NO: 97045 - DNA, 25 bp, Probe Sequence
agccctcattaaccatttcaatctg

SEQ ID NO: 97046 - DNA, 25 bp, Probe Sequence
aattcacgtaccaatggcactattc

SEQ ID NO: 97047 - DNA, 25 bp, Probe Sequence
ccctcattaaccatttcaatctgat

SEQ ID NO: 97048 - DNA, 25 bp, Probe Sequence
aaagtcaccaatgataccaaggaag

SEQ ID NO: 97049 - DNA, 25 bp, Probe Sequence
ggaagccctcattaaccatttcaat

SEQ ID NO: 97050 - DNA, 25 bp, Probe Sequence
cagaagaggatgtcaagatgaaatt

SEQ ID NO: 97051 - DNA, 25 bp, Probe Sequence
aagtcaccaatgataccaaggaagc

SEQ ID NO: 97052 - DNA, 25 bp, Probe Sequence
acagaagaggatgtcaagatgaaat

SEQ ID NO: 97053 - DNA, 25 bp, Probe Sequence
ctagtattccatctacagcacagta

SEQ ID NO: 97054 - DNA, 25 bp, Probe Sequence
cctagtattccatctacagcacagt

SEQ ID NO: 97055 - DNA, 25 bp, Probe Sequence
gcctagtattccatctacagcacag

SEQ ID NO: 97056 - DNA, 25 bp, Probe Sequence
actttgtgatggtgaggatactttg

SEQ ID NO: 97057 - DNA, 25 bp, Probe Sequence
ctcatcaagttcaaatgctactctg

SEQ ID NO: 97058 - DNA, 25 bp, Probe Sequence
actcatcaagttcaaatgctactct

SEQ ID NO: 97059 - DNA, 25 bp, Probe Sequence
catcaagttcaaatgctactctgtg

SEQ ID NO: 97060 - DNA, 25 bp, Probe Sequence
tcatcaagttcaaatgctactctgt

SEQ ID NO: 97061 - DNA, 25 bp, Probe Sequence
ctttgtgatggtgaggatactttgg

SEQ ID NO: 97062 - DNA, 25 bp, Probe Sequence
tagtattccatctacagcacagtag

SEQ ID NO: 97063 - DNA, 25 bp, Probe Sequence
tttgtgatggtgaggatactttgga

SEQ ID NO: 97064 - DNA, 25 bp, Probe Sequence
atcaagttcaaatgctactctgtgg

SEQ ID NO: 97065 - DNA, 25 bp, Probe Sequence
tttgtcttatttcaagcagaagttg

SEQ ID NO: 97066 - DNA, 25 bp, Probe Sequence
ttgtgatggtgaggatactttggag

SEQ ID NO: 97067 - DNA, 25 bp, Probe Sequence
atacactttgtgatggtgaggatac

SEQ ID NO: 97068 - DNA, 25 bp, Probe Sequence
aatacactttgtgatggtgaggata

SEQ ID NO: 97069 - DNA, 25 bp, Probe Sequence
gaatacactttgtgatggtgaggat

SEQ ID NO: 97070 - DNA, 25 bp, Probe Sequence
cactttgtgatggtgaggatacttt

SEQ ID NO: 97071 - DNA, 25 bp, Probe Sequence
caagttcaaatgctactctgtggag

SEQ ID NO: 97072 - DNA, 25 bp, Probe Sequence
tacactttgtgatggtgaggatact

SEQ ID NO: 97073 - DNA, 25 bp, Probe Sequence
ttacctatccgtaaactcatcaagt

SEQ ID NO: 97074 - DNA, 25 bp, Probe Sequence
tcaagttcaaatgctactctgtgga

SEQ ID NO: 97075 - DNA, 25 bp, Probe Sequence
acagcacagtagagttgatcattaa

SEQ ID NO: 97076 - DNA, 25 bp, Probe Sequence
tacagcacagtagagttgatcatta

SEQ ID NO: 97077 - DNA, 25 bp, Probe Sequence
cgagccttgtatgtatgttatggat

SEQ ID NO: 97078 - DNA, 25 bp, Probe Sequence
gaccgagccttgtatgtatgttatg

SEQ ID NO: 97079 - DNA, 25 bp, Probe Sequence
agaccgagccttgtatgtatgttat

SEQ ID NO: 97080 - DNA, 25 bp, Probe Sequence
aagaccgagccttgtatgtatgtta

SEQ ID NO: 97081 - DNA, 25 bp, Probe Sequence
gagccttgtatgtatgttatggata

SEQ ID NO: 97082 - DNA, 25 bp, Probe Sequence
tgtcaccagattcattacaattcaa

SEQ ID NO: 97083 - DNA, 25 bp, Probe Sequence
ccgagccttgtatgtatgttatgga

SEQ ID NO: 97084 - DNA, 25 bp, Probe Sequence
accgagccttgtatgtatgttatgg

SEQ ID NO: 97085 - DNA, 25 bp, Probe Sequence
aatccttgtcaccagattcattaca

SEQ ID NO: 97086 - DNA, 25 bp, Probe Sequence
gcaccaaagaagcaatcatcaaata

SEQ ID NO: 97087 - DNA, 25 bp, Probe Sequence
agccttgtatgtatgttatggatac

SEQ ID NO: 97088 - DNA, 25 bp, Probe Sequence
gttgtgaactgttatcccattgaaa

SEQ ID NO: 97089 - DNA, 25 bp, Probe Sequence
tttggacttgggacaggactttata

SEQ ID NO: 97090 - DNA, 25 bp, Probe Sequence
caccaaagaagcaatcatcaaataa

SEQ ID NO: 97091 - DNA, 25 bp, Probe Sequence
tttctatatgagtgggtttactggt

SEQ ID NO: 97092 - DNA, 25 bp, Probe Sequence
gcaatcatcaaataattctggaaca

SEQ ID NO: 97093 - DNA, 25 bp, Probe Sequence
ttggacttgggacaggactttatac

SEQ ID NO: 97094 - DNA, 25 bp, Probe Sequence
agcaccaaagaagcaatcatcaaat

SEQ ID NO: 97095 - DNA, 25 bp, Probe Sequence
agcaatcatcaaataattctggaac

SEQ ID NO: 97096 - DNA, 25 bp, Probe Sequence
tgaatgagaaacatgagggaaattg

SEQ ID NO: 97097 - DNA, 25 bp, Probe Sequence
gtcaccagattcattacaattcaaa

SEQ ID NO: 97098 - DNA, 25 bp, Probe Sequence
ctgaatgagaaacatgagggaaatt

SEQ ID NO: 97099 - DNA, 25 bp, Probe Sequence
tctgaatgagaaacatgagggaaat

SEQ ID NO: 97100 - DNA, 25 bp, Probe Sequence
ttctatatgagtgggtttactggta

SEQ ID NO: 97101 - DNA, 25 bp, Probe Sequence
acacggcttaattagaagaatgaac

SEQ ID NO: 97102 - DNA, 25 bp, Probe Sequence
cacggcttaattagaagaatgaact

SEQ ID NO: 97103 - DNA, 25 bp, Probe Sequence
aacacggcttaattagaagaatgaa

SEQ ID NO: 97104 - DNA, 25 bp, Probe Sequence
gaagaatgaactaaggtgtctacca

SEQ ID NO: 97105 - DNA, 25 bp, Probe Sequence
agaagaatgaactaaggtgtctacc

SEQ ID NO: 97106 - DNA, 25 bp, Probe Sequence
aagaatgaactaaggtgtctaccat

SEQ ID NO: 97107 - DNA, 25 bp, Probe Sequence
acggcttaattagaagaatgaacta

SEQ ID NO: 97108 - DNA, 25 bp, Probe Sequence
gaatgaactaaggtgtctaccatga

SEQ ID NO: 97109 - DNA, 25 bp, Probe Sequence
agaatgaactaaggtgtctaccatg

SEQ ID NO: 97110 - DNA, 25 bp, Probe Sequence
atgaactaaggtgtctaccatgatt

SEQ ID NO: 97111 - DNA, 25 bp, Probe Sequence
aatgaactaaggtgtctaccatgat

SEQ ID NO: 97112 - DNA, 25 bp, Probe Sequence
tgaactaaggtgtctaccatgatta

SEQ ID NO: 97113 - DNA, 25 bp, Probe Sequence
attagaagaatgaactaaggtgtct

SEQ ID NO: 97114 - DNA, 25 bp, Probe Sequence
tagaagaatgaactaaggtgtctac

SEQ ID NO: 97115 - DNA, 25 bp, Probe Sequence
gtcaaacacggcttaattagaagaa

SEQ ID NO: 97116 - DNA, 25 bp, Probe Sequence
gaactaaggtgtctaccatgattat

SEQ ID NO: 97117 - DNA, 25 bp, Probe Sequence
caaacacggcttaattagaagaatg

SEQ ID NO: 97118 - DNA, 25 bp, Probe Sequence
aaacacggcttaattagaagaatga

SEQ ID NO: 97119 - DNA, 25 bp, Probe Sequence
tcaaacacggcttaattagaagaat

SEQ ID NO: 97120 - DNA, 25 bp, Probe Sequence
taaacagtacctgctctcaaattga

SEQ ID NO: 97121 - DNA, 25 bp, Probe Sequence
ataaacagtacctgctctcaaattg

SEQ ID NO: 97122 - DNA, 25 bp, Probe Sequence
aacagtacctgctctcaaattgaaa

SEQ ID NO: 97123 - DNA, 25 bp, Probe Sequence
aaacagtacctgctctcaaattgaa

SEQ ID NO: 97124 - DNA, 25 bp, Probe Sequence
aattagaagaatgaactaaggtgtc

SEQ ID NO: 97125 - DNA, 25 bp, Probe Sequence
ggtgacaggagttacaggttctaag

SEQ ID NO: 97126 - DNA, 25 bp, Probe Sequence
gtgacaggagttacaggttctaagc

SEQ ID NO: 97127 - DNA, 25 bp, Probe Sequence
tatctcagaaagaatggtagtgtgg

SEQ ID NO: 97128 - DNA, 25 bp, Probe Sequence
gctatctcagaaagaatggtagtgt

SEQ ID NO: 97129 - DNA, 25 bp, Probe Sequence
tgctatctcagaaagaatggtagtg

SEQ ID NO: 97130 - DNA, 25 bp, Probe Sequence
ctcagaaagaatggtagtgtggttg

SEQ ID NO: 97131 - DNA, 25 bp, Probe Sequence
ctatctcagaaagaatggtagtgtg

SEQ ID NO: 97132 - DNA, 25 bp, Probe Sequence
atctcagaaagaatggtagtgtggt

SEQ ID NO: 97133 - DNA, 25 bp, Probe Sequence
tctcagaaagaatggtagtgtggtt

SEQ ID NO: 97134 - DNA, 25 bp, Probe Sequence
ctgctatctcagaaagaatggtagt

SEQ ID NO: 97135 - DNA, 25 bp, Probe Sequence
acaggagttacaggttctaagccag

SEQ ID NO: 97136 - DNA, 25 bp, Probe Sequence
gacaggagttacaggttctaagcca

SEQ ID NO: 97137 - DNA, 25 bp, Probe Sequence
tgacaggagttacaggttctaagcc

SEQ ID NO: 97138 - DNA, 25 bp, Probe Sequence
agaaagaatggtagtgtggttgctc

SEQ ID NO: 97139 - DNA, 25 bp, Probe Sequence
caggagttacaggttctaagccagg

SEQ ID NO: 97140 - DNA, 25 bp, Probe Sequence
gaaagaatggtagtgtggttgctca

SEQ ID NO: 97141 - DNA, 25 bp, Probe Sequence
cagaaagaatggtagtgtggttgct

SEQ ID NO: 97142 - DNA, 25 bp, Probe Sequence
tcagaaagaatggtagtgtggttgc

SEQ ID NO: 97143 - DNA, 25 bp, Probe Sequence
gggtgacaggagttacaggttctaa

SEQ ID NO: 97144 - DNA, 25 bp, Probe Sequence
aaagaatggtagtgtggttgctcac

SEQ ID NO: 97145 - DNA, 25 bp, Probe Sequence
gatctgctatctcagaaagaatggt

SEQ ID NO: 97146 - DNA, 25 bp, Probe Sequence
tctgctatctcagaaagaatggtag

SEQ ID NO: 97147 - DNA, 25 bp, Probe Sequence
gagttacaggttctaagccagggac

SEQ ID NO: 97148 - DNA, 25 bp, Probe Sequence
tgggtgacaggagttacaggttcta

SEQ ID NO: 97149 - DNA, 25 bp, Probe Sequence
tagcaacaatcactagactactcag

SEQ ID NO: 97150 - DNA, 25 bp, Probe Sequence
ttagcaacaatcactagactactca

SEQ ID NO: 97151 - DNA, 25 bp, Probe Sequence
tgaagattgaatcactccacagtac

SEQ ID NO: 97152 - DNA, 25 bp, Probe Sequence
agcaacaatcactagactactcagc

SEQ ID NO: 97153 - DNA, 25 bp, Probe Sequence
gagccagtgaccttaattgaaattc

SEQ ID NO: 97154 - DNA, 25 bp, Probe Sequence
agccagtgaccttaattgaaattct

SEQ ID NO: 97155 - DNA, 25 bp, Probe Sequence
agagccagtgaccttaattgaaatt

SEQ ID NO: 97156 - DNA, 25 bp, Probe Sequence
tttgtctacaggtgaataaaggctc

SEQ ID NO: 97157 - DNA, 25 bp, Probe Sequence
gaccctttcaacacatctacactag

SEQ ID NO: 97158 - DNA, 25 bp, Probe Sequence
cagagccagtgaccttaattgaaat

SEQ ID NO: 97159 - DNA, 25 bp, Probe Sequence
tactaccctgaatacctggatctac

SEQ ID NO: 97160 - DNA, 25 bp, Probe Sequence
agtttatgagagtgaccctttcaac

SEQ ID NO: 97161 - DNA, 25 bp, Probe Sequence
cagtttatgagagtgaccctttcaa

SEQ ID NO: 97162 - DNA, 25 bp, Probe Sequence
tactaccagcagtttatgagagtga

SEQ ID NO: 97163 - DNA, 25 bp, Probe Sequence
cttactaccctgaatacctggatct

SEQ ID NO: 97164 - DNA, 25 bp, Probe Sequence
ggtttagcaacaatcactagactac

SEQ ID NO: 97165 - DNA, 25 bp, Probe Sequence
gaggtttagcaacaatcactagact

SEQ ID NO: 97166 - DNA, 25 bp, Probe Sequence
agaggtttagcaacaatcactagac

SEQ ID NO: 97167 - DNA, 25 bp, Probe Sequence
cagaggtttagcaacaatcactaga

SEQ ID NO: 97168 - DNA, 25 bp, Probe Sequence
ttactaccctgaatacctggatcta

SEQ ID NO: 97169 - DNA, 25 bp, Probe Sequence
aggtttagcaacaatcactagacta

SEQ ID NO: 97170 - DNA, 25 bp, Probe Sequence
gtttatgagagtgaccctttcaaca

SEQ ID NO: 97171 - DNA, 25 bp, Probe Sequence
ctaccctgaatacctggatctactc

SEQ ID NO: 97172 - DNA, 25 bp, Probe Sequence
agtgaccttaattgaaattctgagt

SEQ ID NO: 97173 - DNA, 25 bp, Probe Sequence
atacttcaggaggcttagcatattg

SEQ ID NO: 97174 - DNA, 25 bp, Probe Sequence
aatacttcaggaggcttagcatatt

SEQ ID NO: 97175 - DNA, 25 bp, Probe Sequence
aagcagcacagaatgttatccttac

SEQ ID NO: 97176 - DNA, 25 bp, Probe Sequence
caagcagcacagaatgttatcctta

SEQ ID NO: 97177 - DNA, 25 bp, Probe Sequence
ctcttcacgtctctaacaatccttc

SEQ ID NO: 97178 - DNA, 25 bp, Probe Sequence
tctcttcacgtctctaacaatcctt

SEQ ID NO: 97179 - DNA, 25 bp, Probe Sequence
ttctcttcacgtctctaacaatcct

SEQ ID NO: 97180 - DNA, 25 bp, Probe Sequence
aagttggactgttgttcaataaacc

SEQ ID NO: 97181 - DNA, 25 bp, Probe Sequence
ctgtaaagttggactgttgttcaat

SEQ ID NO: 97182 - DNA, 25 bp, Probe Sequence
ttaatgctgtaaagttggactgttg

SEQ ID NO: 97183 - DNA, 25 bp, Probe Sequence
gttctcttcacgtctctaacaatcc

SEQ ID NO: 97184 - DNA, 25 bp, Probe Sequence
aaatacttcaggaggcttagcatat

SEQ ID NO: 97185 - DNA, 25 bp, Probe Sequence
tttaatgctgtaaagttggactgtt

SEQ ID NO: 97186 - DNA, 25 bp, Probe Sequence
taatgctgtaaagttggactgttgt

SEQ ID NO: 97187 - DNA, 25 bp, Probe Sequence
atttaatgctgtaaagttggactgt

SEQ ID NO: 97188 - DNA, 25 bp, Probe Sequence
cagaatgttatccttacgtcctgag

SEQ ID NO: 97189 - DNA, 25 bp, Probe Sequence
tgtaaagttggactgttgttcaata

SEQ ID NO: 97190 - DNA, 25 bp, Probe Sequence
aaagttggactgttgttcaataaac

SEQ ID NO: 97191 - DNA, 25 bp, Probe Sequence
agaatgttatccttacgtcctgagc

SEQ ID NO: 97192 - DNA, 25 bp, Probe Sequence
cccttatttaatgctgtaaagttgg

SEQ ID NO: 97193 - DNA, 25 bp, Probe Sequence
aatgctgtaaagttggactgttgtt

SEQ ID NO: 97194 - DNA, 25 bp, Probe Sequence
acagaatgttatccttacgtcctga

SEQ ID NO: 97195 - DNA, 25 bp, Probe Sequence
cacagaatgttatccttacgtcctg

SEQ ID NO: 97196 - DNA, 25 bp, Probe Sequence
tcttcacgtctctaacaatccttcg

SEQ ID NO: 97197 - DNA, 25 bp, Probe Sequence
tgtaagtcaagaccatgatgagatg

SEQ ID NO: 97198 - DNA, 25 bp, Probe Sequence
aatgtaagtcaagaccatgatgaga

SEQ ID NO: 97199 - DNA, 25 bp, Probe Sequence
atgtaagtcaagaccatgatgagat

SEQ ID NO: 97200 - DNA, 25 bp, Probe Sequence
gtaagtcaagaccatgatgagatgc

SEQ ID NO: 97201 - DNA, 25 bp, Probe Sequence
atttctaacaagtttccaggtgatg

SEQ ID NO: 97202 - DNA, 25 bp, Probe Sequence
catttctaacaagtttccaggtgat

SEQ ID NO: 97203 - DNA, 25 bp, Probe Sequence
taagtcaagaccatgatgagatgcc

SEQ ID NO: 97204 - DNA, 25 bp, Probe Sequence
tttctaacaagtttccaggtgatgc

SEQ ID NO: 97205 - DNA, 25 bp, Probe Sequence
gcatttctaacaagtttccaggtga

SEQ ID NO: 97206 - DNA, 25 bp, Probe Sequence
caatagcagaagaccagaagacagc

SEQ ID NO: 97207 - DNA, 25 bp, Probe Sequence
gcaatagcagaagaccagaagacag

SEQ ID NO: 97208 - DNA, 25 bp, Probe Sequence
ggaaatgtaagtcaagaccatgatg

SEQ ID NO: 97209 - DNA, 25 bp, Probe Sequence
gggaaatgtaagtcaagaccatgat

SEQ ID NO: 97210 - DNA, 25 bp, Probe Sequence
aaatgtaagtcaagaccatgatgag

SEQ ID NO: 97211 - DNA, 25 bp, Probe Sequence
gaaatgtaagtcaagaccatgatga

SEQ ID NO: 97212 - DNA, 25 bp, Probe Sequence
gactctgcatttctaacaagtttcc

SEQ ID NO: 97213 - DNA, 25 bp, Probe Sequence
agactctgcatttctaacaagtttc

SEQ ID NO: 97214 - DNA, 25 bp, Probe Sequence
aatagcagaagaccagaagacagcc

SEQ ID NO: 97215 - DNA, 25 bp, Probe Sequence
actctgcatttctaacaagtttcca

SEQ ID NO: 97216 - DNA, 25 bp, Probe Sequence
ttctaacaagtttccaggtgatgcc

SEQ ID NO: 97217 - DNA, 25 bp, Probe Sequence
cagactctgcatttctaacaagttt

SEQ ID NO: 97218 - DNA, 25 bp, Probe Sequence
ctctgcatttctaacaagtttccag

SEQ ID NO: 97219 - DNA, 25 bp, Probe Sequence
tgcatttctaacaagtttccaggtg

SEQ ID NO: 97220 - DNA, 25 bp, Probe Sequence
ccagactctgcatttctaacaagtt

SEQ ID NO: 97221 - DNA, 25 bp, Probe Sequence
gatgatggattgtggataactctgt

SEQ ID NO: 97222 - DNA, 25 bp, Probe Sequence
ggatgatggattgtggataactctg

SEQ ID NO: 97223 - DNA, 25 bp, Probe Sequence
atgatggattgtggataactctgtt

SEQ ID NO: 97224 - DNA, 25 bp, Probe Sequence
gatggattgtggataactctgtttg

SEQ ID NO: 97225 - DNA, 25 bp, Probe Sequence
tgatggattgtggataactctgttt

SEQ ID NO: 97226 - DNA, 25 bp, Probe Sequence
atggattgtggataactctgtttgc

SEQ ID NO: 97227 - DNA, 25 bp, Probe Sequence
gattgtggataactctgtttgcatt

SEQ ID NO: 97228 - DNA, 25 bp, Probe Sequence
attgtggataactctgtttgcattt

SEQ ID NO: 97229 - DNA, 25 bp, Probe Sequence
tgtggataactctgtttgcatttag

SEQ ID NO: 97230 - DNA, 25 bp, Probe Sequence
gtttgcatttagatcacatgagagc

SEQ ID NO: 97231 - DNA, 25 bp, Probe Sequence
gtggataactctgtttgcatttaga

SEQ ID NO: 97232 - DNA, 25 bp, Probe Sequence
ttgtggataactctgtttgcattta

SEQ ID NO: 97233 - DNA, 25 bp, Probe Sequence
caaggtttctggcatttgaagtcaa

SEQ ID NO: 97234 - DNA, 25 bp, Probe Sequence
actctgtttgcatttagatcacatg

SEQ ID NO: 97235 - DNA, 25 bp, Probe Sequence
tgtttgcatttagatcacatgagag

SEQ ID NO: 97236 - DNA, 25 bp, Probe Sequence
ctgtttgcatttagatcacatgaga

SEQ ID NO: 97237 - DNA, 25 bp, Probe Sequence
tctgtttgcatttagatcacatgag

SEQ ID NO: 97238 - DNA, 25 bp, Probe Sequence
ctctgtttgcatttagatcacatga

SEQ ID NO: 97239 - DNA, 25 bp, Probe Sequence
tggataactctgtttgcatttagat

SEQ ID NO: 97240 - DNA, 25 bp, Probe Sequence
aactctgtttgcatttagatcacat

SEQ ID NO: 97241 - DNA, 25 bp, Probe Sequence
ggattgtggataactctgtttgcat

SEQ ID NO: 97242 - DNA, 25 bp, Probe Sequence
taactctgtttgcatttagatcaca

SEQ ID NO: 97243 - DNA, 25 bp, Probe Sequence
ggataactctgtttgcatttagatc

SEQ ID NO: 97244 - DNA, 25 bp, Probe Sequence
ataactctgtttgcatttagatcac

SEQ ID NO: 97245 - DNA, 25 bp, Probe Sequence
gatgatggattgtggataactctgt

SEQ ID NO: 97246 - DNA, 25 bp, Probe Sequence
ggatgatggattgtggataactctg

SEQ ID NO: 97247 - DNA, 25 bp, Probe Sequence
atgatggattgtggataactctgtt

SEQ ID NO: 97248 - DNA, 25 bp, Probe Sequence
gatggattgtggataactctgtttg

SEQ ID NO: 97249 - DNA, 25 bp, Probe Sequence
tgatggattgtggataactctgttt

SEQ ID NO: 97250 - DNA, 25 bp, Probe Sequence
atggattgtggataactctgtttgc

SEQ ID NO: 97251 - DNA, 25 bp, Probe Sequence
gattgtggataactctgtttgcatt

SEQ ID NO: 97252 - DNA, 25 bp, Probe Sequence
attgtggataactctgtttgcattt

SEQ ID NO: 97253 - DNA, 25 bp, Probe Sequence
tgtggataactctgtttgcatttag

SEQ ID NO: 97254 - DNA, 25 bp, Probe Sequence
gtttgcatttagatcacatgagagc

SEQ ID NO: 97255 - DNA, 25 bp, Probe Sequence
gtggataactctgtttgcatttaga

SEQ ID NO: 97256 - DNA, 25 bp, Probe Sequence
ttgtggataactctgtttgcattta

SEQ ID NO: 97257 - DNA, 25 bp, Probe Sequence
caaggtttctggcatttgaagtcaa

SEQ ID NO: 97258 - DNA, 25 bp, Probe Sequence
actctgtttgcatttagatcacatg

SEQ ID NO: 97259 - DNA, 25 bp, Probe Sequence
tgtttgcatttagatcacatgagag

SEQ ID NO: 97260 - DNA, 25 bp, Probe Sequence
ctgtttgcatttagatcacatgaga

SEQ ID NO: 97261 - DNA, 25 bp, Probe Sequence
tctgtttgcatttagatcacatgag

SEQ ID NO: 97262 - DNA, 25 bp, Probe Sequence
ctctgtttgcatttagatcacatga

SEQ ID NO: 97263 - DNA, 25 bp, Probe Sequence
tggataactctgtttgcatttagat

SEQ ID NO: 97264 - DNA, 25 bp, Probe Sequence
aactctgtttgcatttagatcacat

SEQ ID NO: 97265 - DNA, 25 bp, Probe Sequence
ggattgtggataactctgtttgcat

SEQ ID NO: 97266 - DNA, 25 bp, Probe Sequence
taactctgtttgcatttagatcaca

SEQ ID NO: 97267 - DNA, 25 bp, Probe Sequence
ggataactctgtttgcatttagatc

SEQ ID NO: 97268 - DNA, 25 bp, Probe Sequence
ataactctgtttgcatttagatcac

SEQ ID NO: 97269 - DNA, 25 bp, Probe Sequence
gacatcagaacatgcttccatatat

SEQ ID NO: 97270 - DNA, 25 bp, Probe Sequence
ggacatcagaacatgcttccatata

SEQ ID NO: 97271 - DNA, 25 bp, Probe Sequence
tggatataacagaatctttgggact

SEQ ID NO: 97272 - DNA, 25 bp, Probe Sequence
atggatataacagaatctttgggac

SEQ ID NO: 97273 - DNA, 25 bp, Probe Sequence
gactgtgaagatcaacatctccatg

SEQ ID NO: 97274 - DNA, 25 bp, Probe Sequence
ggatataacagaatctttgggactg

SEQ ID NO: 97275 - DNA, 25 bp, Probe Sequence
cagaggactcaattccaggaatatg

SEQ ID NO: 97276 - DNA, 25 bp, Probe Sequence
acagaggactcaattccaggaatat

SEQ ID NO: 97277 - DNA, 25 bp, Probe Sequence
catggatataacagaatctttggga

SEQ ID NO: 97278 - DNA, 25 bp, Probe Sequence
tcatggatataacagaatctttggg

SEQ ID NO: 97279 - DNA, 25 bp, Probe Sequence
acacttgtgaaattcaatcagtaca

SEQ ID NO: 97280 - DNA, 25 bp, Probe Sequence
ggactgtgaagatcaacatctccat

SEQ ID NO: 97281 - DNA, 25 bp, Probe Sequence
tacatcatgtgtcagttatagggct

SEQ ID NO: 97282 - DNA, 25 bp, Probe Sequence
gtacatcatgtgtcagttatagggc

SEQ ID NO: 97283 - DNA, 25 bp, Probe Sequence
ccctcatggatataacagaatcttt

SEQ ID NO: 97284 - DNA, 25 bp, Probe Sequence
agaggactcaattccaggaatatgg

SEQ ID NO: 97285 - DNA, 25 bp, Probe Sequence
tttagacgatcttgtaccctcatgg

SEQ ID NO: 97286 - DNA, 25 bp, Probe Sequence
gaggttgcattgaccagagattatg

SEQ ID NO: 97287 - DNA, 25 bp, Probe Sequence
cacagaggactcaattccaggaata

SEQ ID NO: 97288 - DNA, 25 bp, Probe Sequence
ctttgggactgtgaagatcaacatc

SEQ ID NO: 97289 - DNA, 25 bp, Probe Sequence
ccacacttgtgaaattcaatcagta

SEQ ID NO: 97290 - DNA, 25 bp, Probe Sequence
tccctcatggatataacagaatctt

SEQ ID NO: 97291 - DNA, 25 bp, Probe Sequence
catttcactgtttcccagaccaaag

SEQ ID NO: 97292 - DNA, 25 bp, Probe Sequence
cacacttgtgaaattcaatcagtac

SEQ ID NO: 97293 - DNA, 25 bp, Probe Sequence
atacacataatgtcttggttcctcc

SEQ ID NO: 97294 - DNA, 25 bp, Probe Sequence
tcatacacataatgtcttggttcct

SEQ ID NO: 97295 - DNA, 25 bp, Probe Sequence
catacacataatgtcttggttcctc

SEQ ID NO: 97296 - DNA, 25 bp, Probe Sequence
atcatacacataatgtcttggttcc

SEQ ID NO: 97297 - DNA, 25 bp, Probe Sequence
ttaggtggaaagatgtattatgccg

SEQ ID NO: 97298 - DNA, 25 bp, Probe Sequence
tatacactccagaaagcgattaagc

SEQ ID NO: 97299 - DNA, 25 bp, Probe Sequence
gcttaggtggaaagatgtattatgc

SEQ ID NO: 97300 - DNA, 25 bp, Probe Sequence
ggtgcttaggtggaaagatgtatta

SEQ ID NO: 97301 - DNA, 25 bp, Probe Sequence
cttaggtggaaagatgtattatgcc

SEQ ID NO: 97302 - DNA, 25 bp, Probe Sequence
ggagagtcagaagatttcagagtat

SEQ ID NO: 97303 - DNA, 25 bp, Probe Sequence
taggtggaaagatgtattatgccga

SEQ ID NO: 97304 - DNA, 25 bp, Probe Sequence
cggagagtcagaagatttcagagta

SEQ ID NO: 97305 - DNA, 25 bp, Probe Sequence
tatatactgggtgcttaggtggaaa

SEQ ID NO: 97306 - DNA, 25 bp, Probe Sequence
tgcttaggtggaaagatgtattatg

SEQ ID NO: 97307 - DNA, 25 bp, Probe Sequence
gtgcttaggtggaaagatgtattat

SEQ ID NO: 97308 - DNA, 25 bp, Probe Sequence
gagagtcagaagatttcagagtatg

SEQ ID NO: 97309 - DNA, 25 bp, Probe Sequence
ctatatactgggtgcttaggtggaa

SEQ ID NO: 97310 - DNA, 25 bp, Probe Sequence
agagtcagaagatttcagagtatga

SEQ ID NO: 97311 - DNA, 25 bp, Probe Sequence
atatactgggtgcttaggtggaaag

SEQ ID NO: 97312 - DNA, 25 bp, Probe Sequence
tggaaagatgtattatgccgaggag

SEQ ID NO: 97313 - DNA, 25 bp, Probe Sequence
cttgctatatactgggtgcttaggt

SEQ ID NO: 97314 - DNA, 25 bp, Probe Sequence
atgcttgctatatactgggtgctta

SEQ ID NO: 97315 - DNA, 25 bp, Probe Sequence
gaagatttcagagtatgacatcact

SEQ ID NO: 97316 - DNA, 25 bp, Probe Sequence
agaagatttcagagtatgacatcac

SEQ ID NO: 97317 - DNA, 25 bp, Probe Sequence
cttctaagagtctgtgaggctattg

SEQ ID NO: 97318 - DNA, 25 bp, Probe Sequence
taagagtctgtgaggctattgtgta

SEQ ID NO: 97319 - DNA, 25 bp, Probe Sequence
gagtctgtgaggctattgtgtaatc

SEQ ID NO: 97320 - DNA, 25 bp, Probe Sequence
ttctaagagtctgtgaggctattgt

SEQ ID NO: 97321 - DNA, 25 bp, Probe Sequence
attgctccagttaagaattgttgaa

SEQ ID NO: 97322 - DNA, 25 bp, Probe Sequence
gattcacaccacagagactatctac

SEQ ID NO: 97323 - DNA, 25 bp, Probe Sequence
agagtctgtgaggctattgtgtaat

SEQ ID NO: 97324 - DNA, 25 bp, Probe Sequence
agtaagacatagttatggcaccttc

SEQ ID NO: 97325 - DNA, 25 bp, Probe Sequence
ttgctccagttaagaattgttgaac

SEQ ID NO: 97326 - DNA, 25 bp, Probe Sequence
attcacaccacagagactatctaca

SEQ ID NO: 97327 - DNA, 25 bp, Probe Sequence
tgattcacaccacagagactatcta

SEQ ID NO: 97328 - DNA, 25 bp, Probe Sequence
cagtaagacatagttatggcacctt

SEQ ID NO: 97329 - DNA, 25 bp, Probe Sequence
aacacagtaagacatagttatggca

SEQ ID NO: 97330 - DNA, 25 bp, Probe Sequence
acacagtaagacatagttatggcac

SEQ ID NO: 97331 - DNA, 25 bp, Probe Sequence
ttcacaccacagagactatctacaa

SEQ ID NO: 97332 - DNA, 25 bp, Probe Sequence
agtatcaagattctattgctccagt

SEQ ID NO: 97333 - DNA, 25 bp, Probe Sequence
tgtgaggctattgtgtaatcatctt

SEQ ID NO: 97334 - DNA, 25 bp, Probe Sequence
aagagtctgtgaggctattgtgtaa

SEQ ID NO: 97335 - DNA, 25 bp, Probe Sequence
ctgtgaggctattgtgtaatcatct

SEQ ID NO: 97336 - DNA, 25 bp, Probe Sequence
tctgtgaggctattgtgtaatcatc

SEQ ID NO: 97337 - DNA, 25 bp, Probe Sequence
tattgctccagttaagaattgttga

SEQ ID NO: 97338 - DNA, 25 bp, Probe Sequence
gtctgtgaggctattgtgtaatcat

SEQ ID NO: 97339 - DNA, 25 bp, Probe Sequence
tctaagagtctgtgaggctattgtg

SEQ ID NO: 97340 - DNA, 25 bp, Probe Sequence
ctattgctccagttaagaattgttg

SEQ ID NO: 97341 - DNA, 25 bp, Probe Sequence
actccctattcgtataagcaatctg

SEQ ID NO: 97342 - DNA, 25 bp, Probe Sequence
cactccctattcgtataagcaatct

SEQ ID NO: 97343 - DNA, 25 bp, Probe Sequence
acactccctattcgtataagcaatc

SEQ ID NO: 97344 - DNA, 25 bp, Probe Sequence
aacactccctattcgtataagcaat

SEQ ID NO: 97345 - DNA, 25 bp, Probe Sequence
gactgagacaaattgaggaggaata

SEQ ID NO: 97346 - DNA, 25 bp, Probe Sequence
actgagacaaattgaggaggaataa

SEQ ID NO: 97347 - DNA, 25 bp, Probe Sequence
aagaagactgagacaaattgaggag

SEQ ID NO: 97348 - DNA, 25 bp, Probe Sequence
taagaagactgagacaaattgagga

SEQ ID NO: 97349 - DNA, 25 bp, Probe Sequence
gaacactccctattcgtataagcaa

SEQ ID NO: 97350 - DNA, 25 bp, Probe Sequence
ggtgaacactccctattcgtataag

SEQ ID NO: 97351 - DNA, 25 bp, Probe Sequence
tgaacactccctattcgtataagca

SEQ ID NO: 97352 - DNA, 25 bp, Probe Sequence
ctgagacaaattgaggaggaataat

SEQ ID NO: 97353 - DNA, 25 bp, Probe Sequence
agactgagacaaattgaggaggaat

SEQ ID NO: 97354 - DNA, 25 bp, Probe Sequence
gtgaacactccctattcgtataagc

SEQ ID NO: 97355 - DNA, 25 bp, Probe Sequence
ataagaagactgagacaaattgagg

SEQ ID NO: 97356 - DNA, 25 bp, Probe Sequence
aagactgagacaaattgaggaggaa

SEQ ID NO: 97357 - DNA, 25 bp, Probe Sequence
gtcatgttctaccactgatcctgtc

SEQ ID NO: 97358 - DNA, 25 bp, Probe Sequence
gaagactgagacaaattgaggagga

SEQ ID NO: 97359 - DNA, 25 bp, Probe Sequence
agaagactgagacaaattgaggagg

SEQ ID NO: 97360 - DNA, 25 bp, Probe Sequence
aggtgaacactccctattcgtataa

SEQ ID NO: 97361 - DNA, 25 bp, Probe Sequence
agataagaagactgagacaaattga

SEQ ID NO: 97362 - DNA, 25 bp, Probe Sequence
gataagaagactgagacaaattgag

SEQ ID NO: 97363 - DNA, 25 bp, Probe Sequence
caggtgaacactccctattcgtata

SEQ ID NO: 97364 - DNA, 25 bp, Probe Sequence
tgagacaaattgaggaggaataatt

SEQ ID NO: 97365 - DNA, 25 bp, Probe Sequence
attagtcatccttctcatcctggta

SEQ ID NO: 97366 - DNA, 25 bp, Probe Sequence
cagcaatctccttgtaactcataga

SEQ ID NO: 97367 - DNA, 25 bp, Probe Sequence
ttatccaactaccagcaatctcctt

SEQ ID NO: 97368 - DNA, 25 bp, Probe Sequence
gattagtcatccttctcatcctggt

SEQ ID NO: 97369 - DNA, 25 bp, Probe Sequence
ccagcaatctccttgtaactcatag

SEQ ID NO: 97370 - DNA, 25 bp, Probe Sequence
ttagtcatccttctcatcctggtac

SEQ ID NO: 97371 - DNA, 25 bp, Probe Sequence
accagcaatctccttgtaactcata

SEQ ID NO: 97372 - DNA, 25 bp, Probe Sequence
taccagcaatctccttgtaactcat

SEQ ID NO: 97373 - DNA, 25 bp, Probe Sequence
tgattagtcatccttctcatcctgg

SEQ ID NO: 97374 - DNA, 25 bp, Probe Sequence
aactaccagcaatctccttgtaact

SEQ ID NO: 97375 - DNA, 25 bp, Probe Sequence
caactaccagcaatctccttgtaac

SEQ ID NO: 97376 - DNA, 25 bp, Probe Sequence
ggtacagagaggaagacacttacaa

SEQ ID NO: 97377 - DNA, 25 bp, Probe Sequence
gttatccaactaccagcaatctcct

SEQ ID NO: 97378 - DNA, 25 bp, Probe Sequence
ttctccactgagtctctaatgatta

SEQ ID NO: 97379 - DNA, 25 bp, Probe Sequence
ctaccagcaatctccttgtaactca

SEQ ID NO: 97380 - DNA, 25 bp, Probe Sequence
actaccagcaatctccttgtaactc

SEQ ID NO: 97381 - DNA, 25 bp, Probe Sequence
tatccaactaccagcaatctccttg

SEQ ID NO: 97382 - DNA, 25 bp, Probe Sequence
tagtcatccttctcatcctggtaca

SEQ ID NO: 97383 - DNA, 25 bp, Probe Sequence
actgtgacacctgagtcttattgat

SEQ ID NO: 97384 - DNA, 25 bp, Probe Sequence
ctgtgacacctgagtcttattgatc

SEQ ID NO: 97385 - DNA, 25 bp, Probe Sequence
ccactgagtctctaatgattagtca

SEQ ID NO: 97386 - DNA, 25 bp, Probe Sequence
aactgtgacacctgagtcttattga

SEQ ID NO: 97387 - DNA, 25 bp, Probe Sequence
tccactgagtctctaatgattagtc

SEQ ID NO: 97388 - DNA, 25 bp, Probe Sequence
ctccactgagtctctaatgattagt

SEQ ID NO: 97389 - DNA, 25 bp, Probe Sequence
tcttggtatgagactcttgaaggac

SEQ ID NO: 97390 - DNA, 25 bp, Probe Sequence
tatgagactcttgaaggaccagttg

SEQ ID NO: 97391 - DNA, 25 bp, Probe Sequence
gtatgagactcttgaaggaccagtt

SEQ ID NO: 97392 - DNA, 25 bp, Probe Sequence
ttcttataatgtggcttgtcctcaa

SEQ ID NO: 97393 - DNA, 25 bp, Probe Sequence
ttataatgtggcttgtcctcaactc

SEQ ID NO: 97394 - DNA, 25 bp, Probe Sequence
cttataatgtggcttgtcctcaact

SEQ ID NO: 97395 - DNA, 25 bp, Probe Sequence
tcttataatgtggcttgtcctcaac

SEQ ID NO: 97396 - DNA, 25 bp, Probe Sequence
ggtattagtagctcatccatctagg

SEQ ID NO: 97397 - DNA, 25 bp, Probe Sequence
tataatgtggcttgtcctcaactcc

SEQ ID NO: 97398 - DNA, 25 bp, Probe Sequence
ctacgtgaagataccgaagttagtc

SEQ ID NO: 97399 - DNA, 25 bp, Probe Sequence
cgtgaagataccgaagttagtctgg

SEQ ID NO: 97400 - DNA, 25 bp, Probe Sequence
ctctacgtgaagataccgaagttag

SEQ ID NO: 97401 - DNA, 25 bp, Probe Sequence
tctctacgtgaagataccgaagtta

SEQ ID NO: 97402 - DNA, 25 bp, Probe Sequence
aatgtgagtttactgattgtggaaa

SEQ ID NO: 97403 - DNA, 25 bp, Probe Sequence
tacgtgaagataccgaagttagtct

SEQ ID NO: 97404 - DNA, 25 bp, Probe Sequence
tctacgtgaagataccgaagttagt

SEQ ID NO: 97405 - DNA, 25 bp, Probe Sequence
gaaggaccagttgtgttcaatttac

SEQ ID NO: 97406 - DNA, 25 bp, Probe Sequence
aaggaccagttgtgttcaatttact

SEQ ID NO: 97407 - DNA, 25 bp, Probe Sequence
tctggtattagtagctcatccatct

SEQ ID NO: 97408 - DNA, 25 bp, Probe Sequence
ctctggtattagtagctcatccatc

SEQ ID NO: 97409 - DNA, 25 bp, Probe Sequence
actctggtattagtagctcatccat

SEQ ID NO: 97410 - DNA, 25 bp, Probe Sequence
tactctggtattagtagctcatcca

SEQ ID NO: 97411 - DNA, 25 bp, Probe Sequence
ctccagtctgagcaacaagaatgaa

SEQ ID NO: 97412 - DNA, 25 bp, Probe Sequence
ggaccagttgtgttcaatttactct

SEQ ID NO: 97413 - DNA, 25 bp, Probe Sequence
cagattcaagtaagaccattcaacg

SEQ ID NO: 97414 - DNA, 25 bp, Probe Sequence
tcagattcaagtaagaccattcaac

SEQ ID NO: 97415 - DNA, 25 bp, Probe Sequence
agaacatcagattcaagtaagacca

SEQ ID NO: 97416 - DNA, 25 bp, Probe Sequence
catcagattcaagtaagaccattca

SEQ ID NO: 97417 - DNA, 25 bp, Probe Sequence
acatcagattcaagtaagaccattc

SEQ ID NO: 97418 - DNA, 25 bp, Probe Sequence
tgttggcatagatattactgaacct

SEQ ID NO: 97419 - DNA, 25 bp, Probe Sequence
attcaagtaagaccattcaacgcat

SEQ ID NO: 97420 - DNA, 25 bp, Probe Sequence
acgcattgaagactaagaatatgag

SEQ ID NO: 97421 - DNA, 25 bp, Probe Sequence
ttcaagtaagaccattcaacgcatt

SEQ ID NO: 97422 - DNA, 25 bp, Probe Sequence
gttggcatagatattactgaacctc

SEQ ID NO: 97423 - DNA, 25 bp, Probe Sequence
ttggcatagatattactgaacctct

SEQ ID NO: 97424 - DNA, 25 bp, Probe Sequence
cgcattgaagactaagaatatgaga

SEQ ID NO: 97425 - DNA, 25 bp, Probe Sequence
gaacatcagattcaagtaagaccat

SEQ ID NO: 97426 - DNA, 25 bp, Probe Sequence
agattcaagtaagaccattcaacgc

SEQ ID NO: 97427 - DNA, 25 bp, Probe Sequence
aacatcagattcaagtaagaccatt

SEQ ID NO: 97428 - DNA, 25 bp, Probe Sequence
aacgcattgaagactaagaatatga

SEQ ID NO: 97429 - DNA, 25 bp, Probe Sequence
atgttggcatagatattactgaacc

SEQ ID NO: 97430 - DNA, 25 bp, Probe Sequence
gattcaagtaagaccattcaacgca

SEQ ID NO: 97431 - DNA, 25 bp, Probe Sequence
atcagattcaagtaagaccattcaa

SEQ ID NO: 97432 - DNA, 25 bp, Probe Sequence
caacgcattgaagactaagaatatg

SEQ ID NO: 97433 - DNA, 25 bp, Probe Sequence
tagaacatcagattcaagtaagacc

SEQ ID NO: 97434 - DNA, 25 bp, Probe Sequence
agaagatatagtggcaagtgagcag

SEQ ID NO: 97435 - DNA, 25 bp, Probe Sequence
agcagaagatatagtggcaagtgag

SEQ ID NO: 97436 - DNA, 25 bp, Probe Sequence
aagatatagtggcaagtgagcagtc

SEQ ID NO: 97437 - DNA, 25 bp, Probe Sequence
cgctttattaagaacagaagggaag

SEQ ID NO: 97438 - DNA, 25 bp, Probe Sequence
ctttattaagaacagaagggaagcc

SEQ ID NO: 97439 - DNA, 25 bp, Probe Sequence
gatttgaatgcttcgttatgggttt

SEQ ID NO: 97440 - DNA, 25 bp, Probe Sequence
cacaccgctttattaagaacagaag

SEQ ID NO: 97441 - DNA, 25 bp, Probe Sequence
ataaagccagcggtttgattagaaa

SEQ ID NO: 97442 - DNA, 25 bp, Probe Sequence
aataaagccagcggtttgattagaa

SEQ ID NO: 97443 - DNA, 25 bp, Probe Sequence
aaataaagccagcggtttgattaga

SEQ ID NO: 97444 - DNA, 25 bp, Probe Sequence
ccgctttattaagaacagaagggaa

SEQ ID NO: 97445 - DNA, 25 bp, Probe Sequence
acaccgctttattaagaacagaagg

SEQ ID NO: 97446 - DNA, 25 bp, Probe Sequence
gttgaaatgcctagaaacacacaaa

SEQ ID NO: 97447 - DNA, 25 bp, Probe Sequence
agttgaaatgcctagaaacacacaa

SEQ ID NO: 97448 - DNA, 25 bp, Probe Sequence
accgctttattaagaacagaaggga

SEQ ID NO: 97449 - DNA, 25 bp, Probe Sequence
caccgctttattaagaacagaaggg

SEQ ID NO: 97450 - DNA, 25 bp, Probe Sequence
tttattaagaacagaagggaagcct

SEQ ID NO: 97451 - DNA, 25 bp, Probe Sequence
ggatttgaatgcttcgttatgggtt

SEQ ID NO: 97452 - DNA, 25 bp, Probe Sequence
ttattaagaacagaagggaagcctg

SEQ ID NO: 97453 - DNA, 25 bp, Probe Sequence
gagttgaaatgcctagaaacacaca

SEQ ID NO: 97454 - DNA, 25 bp, Probe Sequence
gcacaccgctttattaagaacagaa

SEQ ID NO: 97455 - DNA, 25 bp, Probe Sequence
tgtgagtttgctatttaaagacctt

SEQ ID NO: 97456 - DNA, 25 bp, Probe Sequence
ttgtgagtttgctatttaaagacct

SEQ ID NO: 97457 - DNA, 25 bp, Probe Sequence
gttgtgagtttgctatttaaagacc

SEQ ID NO: 97458 - DNA, 25 bp, Probe Sequence
ggagttgaaatgcctagaaacacac

SEQ ID NO: 97459 - DNA, 25 bp, Probe Sequence
tgctatttaaagacctttctgaaca

SEQ ID NO: 97460 - DNA, 25 bp, Probe Sequence
cagttgtgagtttgctatttaaaga

SEQ ID NO: 97461 - DNA, 25 bp, Probe Sequence
atatctgacatcctggagtggaaga

SEQ ID NO: 97462 - DNA, 25 bp, Probe Sequence
catatctgacatcctggagtggaag

SEQ ID NO: 97463 - DNA, 25 bp, Probe Sequence
tcatatctgacatcctggagtggaa

SEQ ID NO: 97464 - DNA, 25 bp, Probe Sequence
tatctgacatcctggagtggaagac

SEQ ID NO: 97465 - DNA, 25 bp, Probe Sequence
ccgtggactgtgtgatatacctgag

SEQ ID NO: 97466 - DNA, 25 bp, Probe Sequence
gtggactgtgtgatatacctgagcc

SEQ ID NO: 97467 - DNA, 25 bp, Probe Sequence
ttaaacaaagaaaatcctgggcact

SEQ ID NO: 97468 - DNA, 25 bp, Probe Sequence
ggactgtgtgatatacctgagccag

SEQ ID NO: 97469 - DNA, 25 bp, Probe Sequence
taaacaaagaaaatcctgggcactt

SEQ ID NO: 97470 - DNA, 25 bp, Probe Sequence
cgtggactgtgtgatatacctgagc

SEQ ID NO: 97471 - DNA, 25 bp, Probe Sequence
tttaaacaaagaaaatcctgggcac

SEQ ID NO: 97472 - DNA, 25 bp, Probe Sequence
aaacaaagaaaatcctgggcacttc

SEQ ID NO: 97473 - DNA, 25 bp, Probe Sequence
ccctgaagacttgcttttaaacaaa

SEQ ID NO: 97474 - DNA, 25 bp, Probe Sequence
gactgtgtgatatacctgagccagc

SEQ ID NO: 97475 - DNA, 25 bp, Probe Sequence
agaccctgaagacttgcttttaaac

SEQ ID NO: 97476 - DNA, 25 bp, Probe Sequence
accctgaagacttgcttttaaacaa

SEQ ID NO: 97477 - DNA, 25 bp, Probe Sequence
gaccctgaagacttgcttttaaaca

SEQ ID NO: 97478 - DNA, 25 bp, Probe Sequence
gtgatatacctgagccagcacatca

SEQ ID NO: 97479 - DNA, 25 bp, Probe Sequence
ttttaaacaaagaaaatcctgggca

SEQ ID NO: 97480 - DNA, 25 bp, Probe Sequence
tggactgtgtgatatacctgagcca

SEQ ID NO: 97481 - DNA, 25 bp, Probe Sequence
ctgtgtgatatacctgagccagcac

SEQ ID NO: 97482 - DNA, 25 bp, Probe Sequence
cagaccctgaagacttgcttttaaa

SEQ ID NO: 97483 - DNA, 25 bp, Probe Sequence
gagctgacacccgtcttaataaaag

SEQ ID NO: 97484 - DNA, 25 bp, Probe Sequence
gtcatatctgacatcctggagtgga

SEQ ID NO: 97485 - DNA, 25 bp, Probe Sequence
acctcttcttcagtccatatccaat

SEQ ID NO: 97486 - DNA, 25 bp, Probe Sequence
cctcttcttcagtccatatccaatg

SEQ ID NO: 97487 - DNA, 25 bp, Probe Sequence
ttccacctcttcttcagtccatatc

SEQ ID NO: 97488 - DNA, 25 bp, Probe Sequence
cacctcttcttcagtccatatccaa

SEQ ID NO: 97489 - DNA, 25 bp, Probe Sequence
ggctgttatagattctgataccaca

SEQ ID NO: 97490 - DNA, 25 bp, Probe Sequence
gctgttatagattctgataccacaa

SEQ ID NO: 97491 - DNA, 25 bp, Probe Sequence
gctatcttacctagtaaccatacgg

SEQ ID NO: 97492 - DNA, 25 bp, Probe Sequence
ggctatcttacctagtaaccatacg

SEQ ID NO: 97493 - DNA, 25 bp, Probe Sequence
aaccattctgataggaattggctta

SEQ ID NO: 97494 - DNA, 25 bp, Probe Sequence
accattctgataggaattggcttat

SEQ ID NO: 97495 - DNA, 25 bp, Probe Sequence
cattctgataggaattggcttatgg

SEQ ID NO: 97496 - DNA, 25 bp, Probe Sequence
ccattctgataggaattggcttatg

SEQ ID NO: 97497 - DNA, 25 bp, Probe Sequence
ctctccaacatgattacaattagct

SEQ ID NO: 97498 - DNA, 25 bp, Probe Sequence
agctctccaacatgattacaattag

SEQ ID NO: 97499 - DNA, 25 bp, Probe Sequence
atcttacctagtaaccatacggtct

SEQ ID NO: 97500 - DNA, 25 bp, Probe Sequence
ttacctagtaaccatacggtctgag

SEQ ID NO: 97501 - DNA, 25 bp, Probe Sequence
cttacctagtaaccatacggtctga

SEQ ID NO: 97502 - DNA, 25 bp, Probe Sequence
tcttacctagtaaccatacggtctg

SEQ ID NO: 97503 - DNA, 25 bp, Probe Sequence
ctctctctttctctctccttctgta

SEQ ID NO: 97504 - DNA, 25 bp, Probe Sequence
atgaaacccacagtagagatttgat

SEQ ID NO: 97505 - DNA, 25 bp, Probe Sequence
tctctctttctctctccttctgtat

SEQ ID NO: 97506 - DNA, 25 bp, Probe Sequence
tatctctctctctctttctctctcc

SEQ ID NO: 97507 - DNA, 25 bp, Probe Sequence
cctctatctctctctctctttctct

SEQ ID NO: 97508 - DNA, 25 bp, Probe Sequence
ccctctatctctctctctctttctc

SEQ ID NO: 97509 - DNA, 25 bp, Probe Sequence
gccaatagagacatagagaagagac

SEQ ID NO: 97510 - DNA, 25 bp, Probe Sequence
ccaatagagacatagagaagagacc

SEQ ID NO: 97511 - DNA, 25 bp, Probe Sequence
caatagagacatagagaagagacct

SEQ ID NO: 97512 - DNA, 25 bp, Probe Sequence
agtgaacatacctaatgctcagatt

SEQ ID NO: 97513 - DNA, 25 bp, Probe Sequence
cagtgaacatacctaatgctcagat

SEQ ID NO: 97514 - DNA, 25 bp, Probe Sequence
agagacatagagaagagacctcata

SEQ ID NO: 97515 - DNA, 25 bp, Probe Sequence
tagagacatagagaagagacctcat

SEQ ID NO: 97516 - DNA, 25 bp, Probe Sequence
atagagacatagagaagagacctca

SEQ ID NO: 97517 - DNA, 25 bp, Probe Sequence
acatagagaagagacctcataatgg

SEQ ID NO: 97518 - DNA, 25 bp, Probe Sequence
gagacatagagaagagacctcataa

SEQ ID NO: 97519 - DNA, 25 bp, Probe Sequence
aatagagacatagagaagagacctc

SEQ ID NO: 97520 - DNA, 25 bp, Probe Sequence
gacatagagaagagacctcataatg

SEQ ID NO: 97521 - DNA, 25 bp, Probe Sequence
agacatagagaagagacctcataat

SEQ ID NO: 97522 - DNA, 25 bp, Probe Sequence
gattatgggagtgagcctgaaatat

SEQ ID NO: 97523 - DNA, 25 bp, Probe Sequence
tcagtggcagtgaacatacctaatg

SEQ ID NO: 97524 - DNA, 25 bp, Probe Sequence
agattatgggagtgagcctgaaata

SEQ ID NO: 97525 - DNA, 25 bp, Probe Sequence
gctcagatttagtgtctacatacca

SEQ ID NO: 97526 - DNA, 25 bp, Probe Sequence
tgctcagatttagtgtctacatacc

SEQ ID NO: 97527 - DNA, 25 bp, Probe Sequence
agtgtctacataccatttctctctt

SEQ ID NO: 97528 - DNA, 25 bp, Probe Sequence
ttggacaagtttgagacaatttgag

SEQ ID NO: 97529 - DNA, 25 bp, Probe Sequence
acaagtttgagacaatttgagcatc

SEQ ID NO: 97530 - DNA, 25 bp, Probe Sequence
gacaagtttgagacaatttgagcat

SEQ ID NO: 97531 - DNA, 25 bp, Probe Sequence
caagtttgagacaatttgagcatca

SEQ ID NO: 97532 - DNA, 25 bp, Probe Sequence
catagagaagagacctcataatggg

SEQ ID NO: 97533 - DNA, 25 bp, Probe Sequence
tgacagagatagtaagaaccacaga

SEQ ID NO: 97534 - DNA, 25 bp, Probe Sequence
gtgatattagtagtctccaaggtcc

SEQ ID NO: 97535 - DNA, 25 bp, Probe Sequence
ccagtgatattagtagtctccaagg

SEQ ID NO: 97536 - DNA, 25 bp, Probe Sequence
gacagagatagtaagaaccacagaa

SEQ ID NO: 97537 - DNA, 25 bp, Probe Sequence
cagtgatattagtagtctccaaggt

SEQ ID NO: 97538 - DNA, 25 bp, Probe Sequence
atattagtagtctccaaggtcctca

SEQ ID NO: 97539 - DNA, 25 bp, Probe Sequence
tgatattagtagtctccaaggtcct

SEQ ID NO: 97540 - DNA, 25 bp, Probe Sequence
tattagtagtctccaaggtcctcac

SEQ ID NO: 97541 - DNA, 25 bp, Probe Sequence
agtgatattagtagtctccaaggtc

SEQ ID NO: 97542 - DNA, 25 bp, Probe Sequence
tccagtgatattagtagtctccaag

SEQ ID NO: 97543 - DNA, 25 bp, Probe Sequence
gatattagtagtctccaaggtcctc

SEQ ID NO: 97544 - DNA, 25 bp, Probe Sequence
tagaggtgacagagatagtaagaac

SEQ ID NO: 97545 - DNA, 25 bp, Probe Sequence
gtagaggtgacagagatagtaagaa

SEQ ID NO: 97546 - DNA, 25 bp, Probe Sequence
tcagaaggtagatgagagagaagac

SEQ ID NO: 97547 - DNA, 25 bp, Probe Sequence
gtcagaaggtagatgagagagaaga

SEQ ID NO: 97548 - DNA, 25 bp, Probe Sequence
atccagtgatattagtagtctccaa

SEQ ID NO: 97549 - DNA, 25 bp, Probe Sequence
aatccagtgatattagtagtctcca

SEQ ID NO: 97550 - DNA, 25 bp, Probe Sequence
tgtagaggtgacagagatagtaaga

SEQ ID NO: 97551 - DNA, 25 bp, Probe Sequence
ggtcagaaggtagatgagagagaag

SEQ ID NO: 97552 - DNA, 25 bp, Probe Sequence
gtgacagagatagtaagaaccacag

SEQ ID NO: 97553 - DNA, 25 bp, Probe Sequence
attagtagtctccaaggtcctcact

SEQ ID NO: 97554 - DNA, 25 bp, Probe Sequence
agaggtgacagagatagtaagaacc

SEQ ID NO: 97555 - DNA, 25 bp, Probe Sequence
gaggtgacagagatagtaagaacca

SEQ ID NO: 97556 - DNA, 25 bp, Probe Sequence
aggtgacagagatagtaagaaccac

SEQ ID NO: 97557 - DNA, 25 bp, Probe Sequence
gagacgacaggaatattactaacca

SEQ ID NO: 97558 - DNA, 25 bp, Probe Sequence
ggagacgacaggaatattactaacc

SEQ ID NO: 97559 - DNA, 25 bp, Probe Sequence
acgacaggaatattactaaccaagc

SEQ ID NO: 97560 - DNA, 25 bp, Probe Sequence
agacgacaggaatattactaaccaa

SEQ ID NO: 97561 - DNA, 25 bp, Probe Sequence
gacgacaggaatattactaaccaag

SEQ ID NO: 97562 - DNA, 25 bp, Probe Sequence
cgacaggaatattactaaccaagct

SEQ ID NO: 97563 - DNA, 25 bp, Probe Sequence
ggaatattactaaccaagctgcgaa

SEQ ID NO: 97564 - DNA, 25 bp, Probe Sequence
aggaatattactaaccaagctgcga

SEQ ID NO: 97565 - DNA, 25 bp, Probe Sequence
gacaggaatattactaaccaagctg

SEQ ID NO: 97566 - DNA, 25 bp, Probe Sequence
acaggaatattactaaccaagctgc

SEQ ID NO: 97567 - DNA, 25 bp, Probe Sequence
caggaatattactaaccaagctgcg

SEQ ID NO: 97568 - DNA, 25 bp, Probe Sequence
cattaatcctgggagtctttgtttg

SEQ ID NO: 97569 - DNA, 25 bp, Probe Sequence
tcattaatcctgggagtctttgttt

SEQ ID NO: 97570 - DNA, 25 bp, Probe Sequence
gggagacgacaggaatattactaac

SEQ ID NO: 97571 - DNA, 25 bp, Probe Sequence
tgggagacgacaggaatattactaa

SEQ ID NO: 97572 - DNA, 25 bp, Probe Sequence
gaatattactaaccaagctgcgaaa

SEQ ID NO: 97573 - DNA, 25 bp, Probe Sequence
attaatcctgggagtctttgtttgc

SEQ ID NO: 97574 - DNA, 25 bp, Probe Sequence
ctcattaatcctgggagtctttgtt

SEQ ID NO: 97575 - DNA, 25 bp, Probe Sequence
ctgggagacgacaggaatattacta

SEQ ID NO: 97576 - DNA, 25 bp, Probe Sequence
ctgctcattaatcctgggagtcttt

SEQ ID NO: 97577 - DNA, 25 bp, Probe Sequence
gaactgtatagcagaactctggctg

SEQ ID NO: 97578 - DNA, 25 bp, Probe Sequence
gactgggagacgacaggaatattac

SEQ ID NO: 97579 - DNA, 25 bp, Probe Sequence
gctcattaatcctgggagtctttgt

SEQ ID NO: 97580 - DNA, 25 bp, Probe Sequence
tgctcattaatcctgggagtctttg

SEQ ID NO: 97581 - DNA, 25 bp, Probe Sequence
agagaccggagaatttgtagtttaa

SEQ ID NO: 97582 - DNA, 25 bp, Probe Sequence
gagagaccggagaatttgtagttta

SEQ ID NO: 97583 - DNA, 25 bp, Probe Sequence
tgaaacccagtctttacaaaataca

SEQ ID NO: 97584 - DNA, 25 bp, Probe Sequence
gtgaaacccagtctttacaaaatac

SEQ ID NO: 97585 - DNA, 25 bp, Probe Sequence
gagaccggagaatttgtagtttaaa

SEQ ID NO: 97586 - DNA, 25 bp, Probe Sequence
acaagcttaggagatcaagaccatc

SEQ ID NO: 97587 - DNA, 25 bp, Probe Sequence
atcacaagcttaggagatcaagacc

SEQ ID NO: 97588 - DNA, 25 bp, Probe Sequence
gaaacccagtctttacaaaatacaa

SEQ ID NO: 97589 - DNA, 25 bp, Probe Sequence
cacaagcttaggagatcaagaccat

SEQ ID NO: 97590 - DNA, 25 bp, Probe Sequence
aaaggagagaccggagaatttgtag

SEQ ID NO: 97591 - DNA, 25 bp, Probe Sequence
atggagaaaccctgtctctactaaa

SEQ ID NO: 97592 - DNA, 25 bp, Probe Sequence
ggagagaccggagaatttgtagttt

SEQ ID NO: 97593 - DNA, 25 bp, Probe Sequence
aacccagtctttacaaaatacaaaa

SEQ ID NO: 97594 - DNA, 25 bp, Probe Sequence
aaacccagtctttacaaaatacaaa

SEQ ID NO: 97595 - DNA, 25 bp, Probe Sequence
ggtgaaacccagtctttacaaaata

SEQ ID NO: 97596 - DNA, 25 bp, Probe Sequence
catggagaaaccctgtctctactaa

SEQ ID NO: 97597 - DNA, 25 bp, Probe Sequence
tggtgaaacccagtctttacaaaat

SEQ ID NO: 97598 - DNA, 25 bp, Probe Sequence
tcacaagcttaggagatcaagacca

SEQ ID NO: 97599 - DNA, 25 bp, Probe Sequence
aggagagaccggagaatttgtagtt

SEQ ID NO: 97600 - DNA, 25 bp, Probe Sequence
aaggagagaccggagaatttgtagt

SEQ ID NO: 97601 - DNA, 25 bp, Probe Sequence
acatggagaaaccctgtctctacta

SEQ ID NO: 97602 - DNA, 25 bp, Probe Sequence
gatcacaagcttaggagatcaagac

SEQ ID NO: 97603 - DNA, 25 bp, Probe Sequence
agatcacaagcttaggagatcaaga

SEQ ID NO: 97604 - DNA, 25 bp, Probe Sequence
cagatcacaagcttaggagatcaag

SEQ ID NO: 97605 - DNA, 25 bp, Probe Sequence
cccaataaaagcaattccaacctta

SEQ ID NO: 97606 - DNA, 25 bp, Probe Sequence
ccaataaaagcaattccaaccttaa

SEQ ID NO: 97607 - DNA, 25 bp, Probe Sequence
ccccaataaaagcaattccaacctt

SEQ ID NO: 97608 - DNA, 25 bp, Probe Sequence
ctctgagctttgcatgttccactaa

SEQ ID NO: 97609 - DNA, 25 bp, Probe Sequence
tctgagctttgcatgttccactaac

SEQ ID NO: 97610 - DNA, 25 bp, Probe Sequence
caataaaagcaattccaaccttaaa

SEQ ID NO: 97611 - DNA, 25 bp, Probe Sequence
aataaaagcaattccaaccttaaaa

SEQ ID NO: 97612 - DNA, 25 bp, Probe Sequence
ctgagctttgcatgttccactaacc

SEQ ID NO: 97613 - DNA, 25 bp, Probe Sequence
tctgtagaggccactgtgtttctag

SEQ ID NO: 97614 - DNA, 25 bp, Probe Sequence
ctctgttcccctagtaagtgccttc

SEQ ID NO: 97615 - DNA, 25 bp, Probe Sequence
cctctgagctttgcatgttccacta

SEQ ID NO: 97616 - DNA, 25 bp, Probe Sequence
gtctgtagaggccactgtgtttcta

SEQ ID NO: 97617 - DNA, 25 bp, Probe Sequence
gttcccctagtaagtgccttccatg

SEQ ID NO: 97618 - DNA, 25 bp, Probe Sequence
ctgtctgtagaggccactgtgtttc

SEQ ID NO: 97619 - DNA, 25 bp, Probe Sequence
tgttcccctagtaagtgccttccat

SEQ ID NO: 97620 - DNA, 25 bp, Probe Sequence
ttcccctagtaagtgccttccatgt

SEQ ID NO: 97621 - DNA, 25 bp, Probe Sequence
ctgtagaggccactgtgtttctagc

SEQ ID NO: 97622 - DNA, 25 bp, Probe Sequence
gtagaggccactgtgtttctagcac

SEQ ID NO: 97623 - DNA, 25 bp, Probe Sequence
cggaagtcatacagtcatcaatcat

SEQ ID NO: 97624 - DNA, 25 bp, Probe Sequence
ggaagtcatacagtcatcaatcata

SEQ ID NO: 97625 - DNA, 25 bp, Probe Sequence
tcaactatatacagtatggcgtgac

SEQ ID NO: 97626 - DNA, 25 bp, Probe Sequence
actcaactatatacagtatggcgtg

SEQ ID NO: 97627 - DNA, 25 bp, Probe Sequence
ctcaactatatacagtatggcgtga

SEQ ID NO: 97628 - DNA, 25 bp, Probe Sequence
gactcaactatatacagtatggcgt

SEQ ID NO: 97629 - DNA, 25 bp, Probe Sequence
ggactcaactatatacagtatggcg

SEQ ID NO: 97630 - DNA, 25 bp, Probe Sequence
aggactcaactatatacagtatggc

SEQ ID NO: 97631 - DNA, 25 bp, Probe Sequence
tctattagacctcttccattctgaa

SEQ ID NO: 97632 - DNA, 25 bp, Probe Sequence
agaggaggactcaactatatacagt

SEQ ID NO: 97633 - DNA, 25 bp, Probe Sequence
caactatatacagtatggcgtgacc

SEQ ID NO: 97634 - DNA, 25 bp, Probe Sequence
acagtcatcaatcataagagttaca

SEQ ID NO: 97635 - DNA, 25 bp, Probe Sequence
atctattagacctcttccattctga

SEQ ID NO: 97636 - DNA, 25 bp, Probe Sequence
gtgaccagtcatgtactataatgct

SEQ ID NO: 97637 - DNA, 25 bp, Probe Sequence
tgaccagtcatgtactataatgctt

SEQ ID NO: 97638 - DNA, 25 bp, Probe Sequence
tcatacagtcatcaatcataagagt

SEQ ID NO: 97639 - DNA, 25 bp, Probe Sequence
agtcatacagtcatcaatcataaga

SEQ ID NO: 97640 - DNA, 25 bp, Probe Sequence
tcagcataccagtttgtctcttatt

SEQ ID NO: 97641 - DNA, 25 bp, Probe Sequence
ttcagcataccagtttgtctcttat

SEQ ID NO: 97642 - DNA, 25 bp, Probe Sequence
gtcatacagtcatcaatcataagag

SEQ ID NO: 97643 - DNA, 25 bp, Probe Sequence
aatctattagacctcttccattctg

SEQ ID NO: 97644 - DNA, 25 bp, Probe Sequence
cgtgaccagtcatgtactataatgc

SEQ ID NO: 97645 - DNA, 25 bp, Probe Sequence
gcgtgaccagtcatgtactataatg

SEQ ID NO: 97646 - DNA, 25 bp, Probe Sequence
gaggaggactcaactatatacagta

SEQ ID NO: 97647 - DNA, 25 bp, Probe Sequence
aagaagaatcaagaatcaggtaaca

SEQ ID NO: 97648 - DNA, 25 bp, Probe Sequence
agaagaatcaagaatcaggtaacat

SEQ ID NO: 97649 - DNA, 25 bp, Probe Sequence
ttccaagtcagtctatgagaatgct

SEQ ID NO: 97650 - DNA, 25 bp, Probe Sequence
caagtcagtctatgagaatgctgtg

SEQ ID NO: 97651 - DNA, 25 bp, Probe Sequence
gaagaatcaagaatcaggtaacatt

SEQ ID NO: 97652 - DNA, 25 bp, Probe Sequence
gacaaagaagaatcaagaatcaggt

SEQ ID NO: 97653 - DNA, 25 bp, Probe Sequence
tcccattctgaaatacaaggtagtt

SEQ ID NO: 97654 - DNA, 25 bp, Probe Sequence
agttaccttctgcattacattaccg

SEQ ID NO: 97655 - DNA, 25 bp, Probe Sequence
tccaagtcagtctatgagaatgctg

SEQ ID NO: 97656 - DNA, 25 bp, Probe Sequence
ttaccttctgcattacattaccgtg

SEQ ID NO: 97657 - DNA, 25 bp, Probe Sequence
gttaccttctgcattacattaccgt

SEQ ID NO: 97658 - DNA, 25 bp, Probe Sequence
gtcattagttaccttctgcattaca

SEQ ID NO: 97659 - DNA, 25 bp, Probe Sequence
ttcccattctgaaatacaaggtagt

SEQ ID NO: 97660 - DNA, 25 bp, Probe Sequence
gtacaccaagaagatggaataacaa

SEQ ID NO: 97661 - DNA, 25 bp, Probe Sequence
cccattctgaaatacaaggtagttc

SEQ ID NO: 97662 - DNA, 25 bp, Probe Sequence
aagtcagtctatgagaatgctgtgg

SEQ ID NO: 97663 - DNA, 25 bp, Probe Sequence
ccaagtcagtctatgagaatgctgt

SEQ ID NO: 97664 - DNA, 25 bp, Probe Sequence
ccaaattcagacccttaggaaagta

SEQ ID NO: 97665 - DNA, 25 bp, Probe Sequence
ctcaagcaattcctttggttcttaa

SEQ ID NO: 97666 - DNA, 25 bp, Probe Sequence
tcaagcaattcctttggttcttaac

SEQ ID NO: 97667 - DNA, 25 bp, Probe Sequence
aagcaattcctttggttcttaacac

SEQ ID NO: 97668 - DNA, 25 bp, Probe Sequence
caagcaattcctttggttcttaaca

SEQ ID NO: 97669 - DNA, 25 bp, Probe Sequence
ctcaactactcaagcaattcctttg

SEQ ID NO: 97670 - DNA, 25 bp, Probe Sequence
agaatcaagaatcaggtaacattca

SEQ ID NO: 97671 - DNA, 25 bp, Probe Sequence
tggagagaagatgggatataaagga

SEQ ID NO: 97672 - DNA, 25 bp, Probe Sequence
gtgtttggagagaagatgggatata

SEQ ID NO: 97673 - DNA, 25 bp, Probe Sequence
ttggagagaagatgggatataaagg

SEQ ID NO: 97674 - DNA, 25 bp, Probe Sequence
ggagagaagatgggatataaaggaa

SEQ ID NO: 97675 - DNA, 25 bp, Probe Sequence
tgtttggagagaagatgggatataa

SEQ ID NO: 97676 - DNA, 25 bp, Probe Sequence
atgtgtttggagagaagatgggata

SEQ ID NO: 97677 - DNA, 25 bp, Probe Sequence
tatgtgtttggagagaagatgggat

SEQ ID NO: 97678 - DNA, 25 bp, Probe Sequence
tgtgtttggagagaagatgggatat

SEQ ID NO: 97679 - DNA, 25 bp, Probe Sequence
tcattggcaacaaacatcataagag

SEQ ID NO: 97680 - DNA, 25 bp, Probe Sequence
atcattggcaacaaacatcataaga

SEQ ID NO: 97681 - DNA, 25 bp, Probe Sequence
aatctatcattggcaacaaacatca

SEQ ID NO: 97682 - DNA, 25 bp, Probe Sequence
atctatcattggcaacaaacatcat

SEQ ID NO: 97683 - DNA, 25 bp, Probe Sequence
cattggcaacaaacatcataagagg

SEQ ID NO: 97684 - DNA, 25 bp, Probe Sequence
agagaagatgggatataaaggaact

SEQ ID NO: 97685 - DNA, 25 bp, Probe Sequence
tctatcattggcaacaaacatcata

SEQ ID NO: 97686 - DNA, 25 bp, Probe Sequence
gagagaagatgggatataaaggaac

SEQ ID NO: 97687 - DNA, 25 bp, Probe Sequence
cctattactgtataaacaacgacgc

SEQ ID NO: 97688 - DNA, 25 bp, Probe Sequence
gtttggagagaagatgggatataaa

SEQ ID NO: 97689 - DNA, 25 bp, Probe Sequence
ctattactgtataaacaacgacgca

SEQ ID NO: 97690 - DNA, 25 bp, Probe Sequence
gtatgtgtttggagagaagatggga

SEQ ID NO: 97691 - DNA, 25 bp, Probe Sequence
attggcaacaaacatcataagaggg

SEQ ID NO: 97692 - DNA, 25 bp, Probe Sequence
tatcattggcaacaaacatcataag

SEQ ID NO: 97693 - DNA, 25 bp, Probe Sequence
ctatcattggcaacaaacatcataa

SEQ ID NO: 97694 - DNA, 25 bp, Probe Sequence
tttggagagaagatgggatataaag

SEQ ID NO: 97695 - DNA, 25 bp, Probe Sequence
ttctccagttaataatgtaggcagg

SEQ ID NO: 97696 - DNA, 25 bp, Probe Sequence
aggttctccagttaataatgtaggc

SEQ ID NO: 97697 - DNA, 25 bp, Probe Sequence
ccagttaataatgtaggcaggagtt

SEQ ID NO: 97698 - DNA, 25 bp, Probe Sequence
ggttctccagttaataatgtaggca

SEQ ID NO: 97699 - DNA, 25 bp, Probe Sequence
cagttaataatgtaggcaggagttg

SEQ ID NO: 97700 - DNA, 25 bp, Probe Sequence
agttaataatgtaggcaggagttga

SEQ ID NO: 97701 - DNA, 25 bp, Probe Sequence
gttctccagttaataatgtaggcag

SEQ ID NO: 97702 - DNA, 25 bp, Probe Sequence
ctattccttcagatgttgctctctt

SEQ ID NO: 97703 - DNA, 25 bp, Probe Sequence
tattccttcagatgttgctctcttg

SEQ ID NO: 97704 - DNA, 25 bp, Probe Sequence
gttaataatgtaggcaggagttgaa

SEQ ID NO: 97705 - DNA, 25 bp, Probe Sequence
caggttctccagttaataatgtagg

SEQ ID NO: 97706 - DNA, 25 bp, Probe Sequence
tccttcagatgttgctctcttgtaa

SEQ ID NO: 97707 - DNA, 25 bp, Probe Sequence
ttccttcagatgttgctctcttgta

SEQ ID NO: 97708 - DNA, 25 bp, Probe Sequence
ttaataatgtaggcaggagttgaat

SEQ ID NO: 97709 - DNA, 25 bp, Probe Sequence
taataatgtaggcaggagttgaatt

SEQ ID NO: 97710 - DNA, 25 bp, Probe Sequence
attccttcagatgttgctctcttgt

SEQ ID NO: 97711 - DNA, 25 bp, Probe Sequence
tctccagttaataatgtaggcagga

SEQ ID NO: 97712 - DNA, 25 bp, Probe Sequence
tccagttaataatgtaggcaggagt

SEQ ID NO: 97713 - DNA, 25 bp, Probe Sequence
acataagaactaaggtagtgcgatt

SEQ ID NO: 97714 - DNA, 25 bp, Probe Sequence
tctcacataagaactaaggtagtgc

SEQ ID NO: 97715 - DNA, 25 bp, Probe Sequence
cacataagaactaaggtagtgcgat

SEQ ID NO: 97716 - DNA, 25 bp, Probe Sequence
gctattccttcagatgttgctctct

SEQ ID NO: 97717 - DNA, 25 bp, Probe Sequence
acaggttctccagttaataatgtag

SEQ ID NO: 97718 - DNA, 25 bp, Probe Sequence
gtaaatcaaacaggtagggacacta

SEQ ID NO: 97719 - DNA, 25 bp, Probe Sequence
ttcttgtcctagttgttccatgagt

SEQ ID NO: 97720 - DNA, 25 bp, Probe Sequence
tcttgtcctagttgttccatgagtc

SEQ ID NO: 97721 - DNA, 25 bp, Probe Sequence
catcagtaacagttggtgtgacaag

SEQ ID NO: 97722 - DNA, 25 bp, Probe Sequence
gttcatcagtaacagttggtgtgac

SEQ ID NO: 97723 - DNA, 25 bp, Probe Sequence
gttctttgtctttgtttcttgtcct

SEQ ID NO: 97724 - DNA, 25 bp, Probe Sequence
tgtgttctttgtctttgtttcttgt

SEQ ID NO: 97725 - DNA, 25 bp, Probe Sequence
tgtgtgttctttgtctttgtttctt

SEQ ID NO: 97726 - DNA, 25 bp, Probe Sequence
atcagtaacagttggtgtgacaaga

SEQ ID NO: 97727 - DNA, 25 bp, Probe Sequence
tgttctttgtctttgtttcttgtcc

SEQ ID NO: 97728 - DNA, 25 bp, Probe Sequence
gtgtgttctttgtctttgtttcttg

SEQ ID NO: 97729 - DNA, 25 bp, Probe Sequence
gtgttctttgtctttgtttcttgtc

SEQ ID NO: 97730 - DNA, 25 bp, Probe Sequence
gtgtgtgttctttgtctttgtttct

SEQ ID NO: 97731 - DNA, 25 bp, Probe Sequence
ttgtcctagttgttccatgagtcag

SEQ ID NO: 97732 - DNA, 25 bp, Probe Sequence
cttgtcctagttgttccatgagtca

SEQ ID NO: 97733 - DNA, 25 bp, Probe Sequence
taacagttggtgtgacaagacagaa

SEQ ID NO: 97734 - DNA, 25 bp, Probe Sequence
tcatcagtaacagttggtgtgacaa

SEQ ID NO: 97735 - DNA, 25 bp, Probe Sequence
ttcatcagtaacagttggtgtgaca

SEQ ID NO: 97736 - DNA, 25 bp, Probe Sequence
atttggtttgtatgttcatttggtg

SEQ ID NO: 97737 - DNA, 25 bp, Probe Sequence
ctttgtttcttgtcctagttgttcc

SEQ ID NO: 97738 - DNA, 25 bp, Probe Sequence
ttctttgtctttgtttcttgtccta

SEQ ID NO: 97739 - DNA, 25 bp, Probe Sequence
gtctttgtttcttgtcctagttgtt

SEQ ID NO: 97740 - DNA, 25 bp, Probe Sequence
ttgtctttgtttcttgtcctagttg

SEQ ID NO: 97741 - DNA, 25 bp, Probe Sequence
ttgtttcttgtcctagttgttccat

SEQ ID NO: 97742 - DNA, 25 bp, Probe Sequence
tgtctttgtttcttgtcctagttgt

SEQ ID NO: 97743 - DNA, 25 bp, Probe Sequence
tgataagatgagtaacgataatgcc

SEQ ID NO: 97744 - DNA, 25 bp, Probe Sequence
aagactccgtcatctacatcatcaa

SEQ ID NO: 97745 - DNA, 25 bp, Probe Sequence
gaagactccgtcatctacatcatca

SEQ ID NO: 97746 - DNA, 25 bp, Probe Sequence
agactccgtcatctacatcatcaac

SEQ ID NO: 97747 - DNA, 25 bp, Probe Sequence
ataagatgagtaacgataatgccca

SEQ ID NO: 97748 - DNA, 25 bp, Probe Sequence
gataagatgagtaacgataatgccc

SEQ ID NO: 97749 - DNA, 25 bp, Probe Sequence
ttgataagatgagtaacgataatgc

SEQ ID NO: 97750 - DNA, 25 bp, Probe Sequence
taagatgagtaacgataatgcccat

SEQ ID NO: 97751 - DNA, 25 bp, Probe Sequence
gttcaatgcttcttcatggaccatc

SEQ ID NO: 97752 - DNA, 25 bp, Probe Sequence
ggaagactccgtcatctacatcatc

SEQ ID NO: 97753 - DNA, 25 bp, Probe Sequence
aagatgagtaacgataatgcccatg

SEQ ID NO: 97754 - DNA, 25 bp, Probe Sequence
tgttcaatgcttcttcatggaccat

SEQ ID NO: 97755 - DNA, 25 bp, Probe Sequence
tcatctacatcatcaacgtccacag

SEQ ID NO: 97756 - DNA, 25 bp, Probe Sequence
gtcatctacatcatcaacgtccaca

SEQ ID NO: 97757 - DNA, 25 bp, Probe Sequence
gatgagtaacgataatgcccatgac

SEQ ID NO: 97758 - DNA, 25 bp, Probe Sequence
agatgagtaacgataatgcccatga

SEQ ID NO: 97759 - DNA, 25 bp, Probe Sequence
aaccctggaaacactgaagcataaa

SEQ ID NO: 97760 - DNA, 25 bp, Probe Sequence
gtgttcaatgcttcttcatggacca

SEQ ID NO: 97761 - DNA, 25 bp, Probe Sequence
gtgaccgtgttcaatgcttcttcat

SEQ ID NO: 97762 - DNA, 25 bp, Probe Sequence
cctactttgataagatgagtaacga

SEQ ID NO: 97763 - DNA, 25 bp, Probe Sequence
tcctactttgataagatgagtaacg

SEQ ID NO: 97764 - DNA, 25 bp, Probe Sequence
cctggaaacactgaagcataaaatc

SEQ ID NO: 97765 - DNA, 25 bp, Probe Sequence
caaccctggaaacactgaagcataa

SEQ ID NO: 97766 - DNA, 25 bp, Probe Sequence
ctacgctgcctccaagttatcctac

SEQ ID NO: 97767 - DNA, 25 bp, Probe Sequence
gtaagcaggtaaatgaatgaagcaa

SEQ ID NO: 97768 - DNA, 25 bp, Probe Sequence
taagcaggtaaatgaatgaagcaaa

SEQ ID NO: 97769 - DNA, 25 bp, Probe Sequence
agtaagcaggtaaatgaatgaagca

SEQ ID NO: 97770 - DNA, 25 bp, Probe Sequence
tatactccaactttactaaacgggc

SEQ ID NO: 97771 - DNA, 25 bp, Probe Sequence
tagtaagcaggtaaatgaatgaagc

SEQ ID NO: 97772 - DNA, 25 bp, Probe Sequence
aactttactaaacgggcaattcaaa

SEQ ID NO: 97773 - DNA, 25 bp, Probe Sequence
gctatactccaactttactaaacgg

SEQ ID NO: 97774 - DNA, 25 bp, Probe Sequence
caactttactaaacgggcaattcaa

SEQ ID NO: 97775 - DNA, 25 bp, Probe Sequence
ctatactccaactttactaaacggg

SEQ ID NO: 97776 - DNA, 25 bp, Probe Sequence
ggctgatgaggaaatgacattaaat

SEQ ID NO: 97777 - DNA, 25 bp, Probe Sequence
tggctgatgaggaaatgacattaaa

SEQ ID NO: 97778 - DNA, 25 bp, Probe Sequence
tccaactttactaaacgggcaattc

SEQ ID NO: 97779 - DNA, 25 bp, Probe Sequence
ctccaactttactaaacgggcaatt

SEQ ID NO: 97780 - DNA, 25 bp, Probe Sequence
ctggctgatgaggaaatgacattaa

SEQ ID NO: 97781 - DNA, 25 bp, Probe Sequence
atactccaactttactaaacgggca

SEQ ID NO: 97782 - DNA, 25 bp, Probe Sequence
ccaactttactaaacgggcaattca

SEQ ID NO: 97783 - DNA, 25 bp, Probe Sequence
tactccaactttactaaacgggcaa

SEQ ID NO: 97784 - DNA, 25 bp, Probe Sequence
tagaaggtgactagctatactccaa

SEQ ID NO: 97785 - DNA, 25 bp, Probe Sequence
ttagaaggtgactagctatactcca

SEQ ID NO: 97786 - DNA, 25 bp, Probe Sequence
taaatacaaagttgaactgtctggc

SEQ ID NO: 97787 - DNA, 25 bp, Probe Sequence
ctagcatgattgtaagggtgattat

SEQ ID NO: 97788 - DNA, 25 bp, Probe Sequence
aaggtgactagctatactccaactt

SEQ ID NO: 97789 - DNA, 25 bp, Probe Sequence
gaaggtgactagctatactccaact

SEQ ID NO: 97790 - DNA, 25 bp, Probe Sequence
agaaggtgactagctatactccaac

SEQ ID NO: 97791 - DNA, 25 bp, Probe Sequence
gttctgttccatatcgtctattcct

SEQ ID NO: 97792 - DNA, 25 bp, Probe Sequence
tgttctgttccatatcgtctattcc

SEQ ID NO: 97793 - DNA, 25 bp, Probe Sequence
ctctgttctgttccatatcgtctat

SEQ ID NO: 97794 - DNA, 25 bp, Probe Sequence
tctctgttctgttccatatcgtcta

SEQ ID NO: 97795 - DNA, 25 bp, Probe Sequence
ttctgttccatatcgtctattcctt

SEQ ID NO: 97796 - DNA, 25 bp, Probe Sequence
tctgttctgttccatatcgtctatt

SEQ ID NO: 97797 - DNA, 25 bp, Probe Sequence
ctgttctgttccatatcgtctattc

SEQ ID NO: 97798 - DNA, 25 bp, Probe Sequence
ctctctgttctgttccatatcgtct

SEQ ID NO: 97799 - DNA, 25 bp, Probe Sequence
caatcatgtatcaattccaggagtt

SEQ ID NO: 97800 - DNA, 25 bp, Probe Sequence
atcctaacagtgttgagtcttccta

SEQ ID NO: 97801 - DNA, 25 bp, Probe Sequence
tcctaacagtgttgagtcttcctac

SEQ ID NO: 97802 - DNA, 25 bp, Probe Sequence
acaatcatgtatcaattccaggagt

SEQ ID NO: 97803 - DNA, 25 bp, Probe Sequence
gaacatggaatacctcttcattagt

SEQ ID NO: 97804 - DNA, 25 bp, Probe Sequence
gacatcctaacagtgttgagtcttc

SEQ ID NO: 97805 - DNA, 25 bp, Probe Sequence
catcctaacagtgttgagtcttcct

SEQ ID NO: 97806 - DNA, 25 bp, Probe Sequence
gtttggtagtgtcagtcttcctaat

SEQ ID NO: 97807 - DNA, 25 bp, Probe Sequence
catatcgtctattcctttcaccagt

SEQ ID NO: 97808 - DNA, 25 bp, Probe Sequence
ttccatatcgtctattcctttcacc

SEQ ID NO: 97809 - DNA, 25 bp, Probe Sequence
ttaagtatgggagtttggtagtgtc

SEQ ID NO: 97810 - DNA, 25 bp, Probe Sequence
tgttccatatcgtctattcctttca

SEQ ID NO: 97811 - DNA, 25 bp, Probe Sequence
taagtatgggagtttggtagtgtca

SEQ ID NO: 97812 - DNA, 25 bp, Probe Sequence
gttccatatcgtctattcctttcac

SEQ ID NO: 97813 - DNA, 25 bp, Probe Sequence
tctgttccatatcgtctattccttt

SEQ ID NO: 97814 - DNA, 25 bp, Probe Sequence
tggtagtgtcagtcttcctaatttg

SEQ ID NO: 97815 - DNA, 25 bp, Probe Sequence
ccaaatcagtaaagagaaaggcaaa

SEQ ID NO: 97816 - DNA, 25 bp, Probe Sequence
acgatttattccttcactcccatta

SEQ ID NO: 97817 - DNA, 25 bp, Probe Sequence
atccaaatcagtaaagagaaaggca

SEQ ID NO: 97818 - DNA, 25 bp, Probe Sequence
gatccagagcaatcagacaagagaa

SEQ ID NO: 97819 - DNA, 25 bp, Probe Sequence
tccaaatcagtaaagagaaaggcaa

SEQ ID NO: 97820 - DNA, 25 bp, Probe Sequence
gagaatcgaatcaagaactcaatcc

SEQ ID NO: 97821 - DNA, 25 bp, Probe Sequence
caaatcagtaaagagaaaggcaaac

SEQ ID NO: 97822 - DNA, 25 bp, Probe Sequence
agggtatccaaatcagtaaagagaa

SEQ ID NO: 97823 - DNA, 25 bp, Probe Sequence
aagggtatccaaatcagtaaagaga

SEQ ID NO: 97824 - DNA, 25 bp, Probe Sequence
gacgatttattccttcactcccatt

SEQ ID NO: 97825 - DNA, 25 bp, Probe Sequence
tatccaaatcagtaaagagaaaggc

SEQ ID NO: 97826 - DNA, 25 bp, Probe Sequence
cgatttattccttcactcccattaa

SEQ ID NO: 97827 - DNA, 25 bp, Probe Sequence
gtaaagagaaaggcaaactgtcact

SEQ ID NO: 97828 - DNA, 25 bp, Probe Sequence
gggtatccaaatcagtaaagagaaa

SEQ ID NO: 97829 - DNA, 25 bp, Probe Sequence
aaagggtatccaaatcagtaaagag

SEQ ID NO: 97830 - DNA, 25 bp, Probe Sequence
attatttgaaattcttcggcaggga

SEQ ID NO: 97831 - DNA, 25 bp, Probe Sequence
aaatcagtaaagagaaaggcaaact

SEQ ID NO: 97832 - DNA, 25 bp, Probe Sequence
atccagagcaatcagacaagagaaa

SEQ ID NO: 97833 - DNA, 25 bp, Probe Sequence
aattatttgaaattcttcggcaggg

SEQ ID NO: 97834 - DNA, 25 bp, Probe Sequence
agtaaagagaaaggcaaactgtcac

SEQ ID NO: 97835 - DNA, 25 bp, Probe Sequence
taaagagaaaggcaaactgtcactc

SEQ ID NO: 97836 - DNA, 25 bp, Probe Sequence
ttatttgaaattcttcggcagggac

SEQ ID NO: 97837 - DNA, 25 bp, Probe Sequence
aaattatttgaaattcttcggcagg

SEQ ID NO: 97838 - DNA, 25 bp, Probe Sequence
gaaaggcaaactgtcactcttcatc

SEQ ID NO: 97839 - DNA, 25 bp, Probe Sequence
tctgtattgaggagaaggatgtata

SEQ ID NO: 97840 - DNA, 25 bp, Probe Sequence
agctaagatagatggtgttgattcc

SEQ ID NO: 97841 - DNA, 25 bp, Probe Sequence
gctaagctaagatagatggtgttga

SEQ ID NO: 97842 - DNA, 25 bp, Probe Sequence
ctgctaagctaagatagatggtgtt

SEQ ID NO: 97843 - DNA, 25 bp, Probe Sequence
tgctaagctaagatagatggtgttg

SEQ ID NO: 97844 - DNA, 25 bp, Probe Sequence
atacctgctaagctaagatagatgg

SEQ ID NO: 97845 - DNA, 25 bp, Probe Sequence
ctgtattgaggagaaggatgtataa

SEQ ID NO: 97846 - DNA, 25 bp, Probe Sequence
gctaagatagatggtgttgattcca

SEQ ID NO: 97847 - DNA, 25 bp, Probe Sequence
aagatagatggtgttgattccactg

SEQ ID NO: 97848 - DNA, 25 bp, Probe Sequence
taagatagatggtgttgattccact

SEQ ID NO: 97849 - DNA, 25 bp, Probe Sequence
aagctaagatagatggtgttgattc

SEQ ID NO: 97850 - DNA, 25 bp, Probe Sequence
ctaagatagatggtgttgattccac

SEQ ID NO: 97851 - DNA, 25 bp, Probe Sequence
tgaggagaaggatgtataaagcaac

SEQ ID NO: 97852 - DNA, 25 bp, Probe Sequence
attgaggagaaggatgtataaagca

SEQ ID NO: 97853 - DNA, 25 bp, Probe Sequence
cctgctaagctaagatagatggtgt

SEQ ID NO: 97854 - DNA, 25 bp, Probe Sequence
ttacattcctggttctgtattgagg

SEQ ID NO: 97855 - DNA, 25 bp, Probe Sequence
catacctgctaagctaagatagatg

SEQ ID NO: 97856 - DNA, 25 bp, Probe Sequence
ttgaggagaaggatgtataaagcaa

SEQ ID NO: 97857 - DNA, 25 bp, Probe Sequence
atgtcagattgatttgaaaggtgtg

SEQ ID NO: 97858 - DNA, 25 bp, Probe Sequence
tgaagccagtttgacatagagagat

SEQ ID NO: 97859 - DNA, 25 bp, Probe Sequence
gatgtcagattgatttgaaaggtgt

SEQ ID NO: 97860 - DNA, 25 bp, Probe Sequence
gaagccagtttgacatagagagatg

SEQ ID NO: 97861 - DNA, 25 bp, Probe Sequence
gttctgtattgaggagaaggatgta

SEQ ID NO: 97862 - DNA, 25 bp, Probe Sequence
agatgtcagattgatttgaaaggtg

SEQ ID NO: 97863 - DNA, 25 bp, Probe Sequence
ttactctagtccaagccatcattac

SEQ ID NO: 97864 - DNA, 25 bp, Probe Sequence
tactctagtccaagccatcattact

SEQ ID NO: 97865 - DNA, 25 bp, Probe Sequence
ggcgtacactctcatattgtctatt

SEQ ID NO: 97866 - DNA, 25 bp, Probe Sequence
gcgtacactctcatattgtctattg

SEQ ID NO: 97867 - DNA, 25 bp, Probe Sequence
tggcgtacactctcatattgtctat

SEQ ID NO: 97868 - DNA, 25 bp, Probe Sequence
ctctagtccaagccatcattactaa

SEQ ID NO: 97869 - DNA, 25 bp, Probe Sequence
actctagtccaagccatcattacta

SEQ ID NO: 97870 - DNA, 25 bp, Probe Sequence
tgtctggtgtaactgaaatgatagg

SEQ ID NO: 97871 - DNA, 25 bp, Probe Sequence
tctagtccaagccatcattactaat

SEQ ID NO: 97872 - DNA, 25 bp, Probe Sequence
cgtacactctcatattgtctattgt

SEQ ID NO: 97873 - DNA, 25 bp, Probe Sequence
ctggtgtaactgaaatgataggctc

SEQ ID NO: 97874 - DNA, 25 bp, Probe Sequence
atttactctagtccaagccatcatt

SEQ ID NO: 97875 - DNA, 25 bp, Probe Sequence
aatttactctagtccaagccatcat

SEQ ID NO: 97876 - DNA, 25 bp, Probe Sequence
ctagtccaagccatcattactaatt

SEQ ID NO: 97877 - DNA, 25 bp, Probe Sequence
tctggtgtaactgaaatgataggct

SEQ ID NO: 97878 - DNA, 25 bp, Probe Sequence
gtctggtgtaactgaaatgataggc

SEQ ID NO: 97879 - DNA, 25 bp, Probe Sequence
atgtctggtgtaactgaaatgatag

SEQ ID NO: 97880 - DNA, 25 bp, Probe Sequence
tttactctagtccaagccatcatta

SEQ ID NO: 97881 - DNA, 25 bp, Probe Sequence
taatttactctagtccaagccatca

SEQ ID NO: 97882 - DNA, 25 bp, Probe Sequence
gtggcgtacactctcatattgtcta

SEQ ID NO: 97883 - DNA, 25 bp, Probe Sequence
tactagagcatttcctgtgagcata

SEQ ID NO: 97884 - DNA, 25 bp, Probe Sequence
tctttactagagcatttcctgtgag

SEQ ID NO: 97885 - DNA, 25 bp, Probe Sequence
caatatgtctggtgtaactgaaatg

SEQ ID NO: 97886 - DNA, 25 bp, Probe Sequence
aatatgtctggtgtaactgaaatga

SEQ ID NO: 97887 - DNA, 25 bp, Probe Sequence
gcaatatgtgaggatgaagtaagac

SEQ ID NO: 97888 - DNA, 25 bp, Probe Sequence
cgcaatatgtgaggatgaagtaaga

SEQ ID NO: 97889 - DNA, 25 bp, Probe Sequence
tcgcaatatgtgaggatgaagtaag

SEQ ID NO: 97890 - DNA, 25 bp, Probe Sequence
ttcgcaatatgtgaggatgaagtaa

SEQ ID NO: 97891 - DNA, 25 bp, Probe Sequence
ttagtctcactgccgttaagattca

SEQ ID NO: 97892 - DNA, 25 bp, Probe Sequence
tgtgaggatgaagtaagacatagat

SEQ ID NO: 97893 - DNA, 25 bp, Probe Sequence
gtgaggatgaagtaagacatagatt

SEQ ID NO: 97894 - DNA, 25 bp, Probe Sequence
gttaagattcagagagattggctgg

SEQ ID NO: 97895 - DNA, 25 bp, Probe Sequence
caatatgtgaggatgaagtaagaca

SEQ ID NO: 97896 - DNA, 25 bp, Probe Sequence
ccgttaagattcagagagattggct

SEQ ID NO: 97897 - DNA, 25 bp, Probe Sequence
cgttaagattcagagagattggctg

SEQ ID NO: 97898 - DNA, 25 bp, Probe Sequence
ctgccgttaagattcagagagattg

SEQ ID NO: 97899 - DNA, 25 bp, Probe Sequence
tgccgttaagattcagagagattgg

SEQ ID NO: 97900 - DNA, 25 bp, Probe Sequence
actgccgttaagattcagagagatt

SEQ ID NO: 97901 - DNA, 25 bp, Probe Sequence
atatgcacagtatctattggaacca

SEQ ID NO: 97902 - DNA, 25 bp, Probe Sequence
attaggtcaattcttccactgataa

SEQ ID NO: 97903 - DNA, 25 bp, Probe Sequence
tagtctcactgccgttaagattcag

SEQ ID NO: 97904 - DNA, 25 bp, Probe Sequence
tgctaagaaagaaacttcaacactg

SEQ ID NO: 97905 - DNA, 25 bp, Probe Sequence
aattaggtcaattcttccactgata

SEQ ID NO: 97906 - DNA, 25 bp, Probe Sequence
tttcgcaatatgtgaggatgaagta

SEQ ID NO: 97907 - DNA, 25 bp, Probe Sequence
ctaagaaagaaacttcaacactgcc

SEQ ID NO: 97908 - DNA, 25 bp, Probe Sequence
tatgcacagtatctattggaaccaa

SEQ ID NO: 97909 - DNA, 25 bp, Probe Sequence
taagaaagaaacttcaacactgcca

SEQ ID NO: 97910 - DNA, 25 bp, Probe Sequence
gctaagaaagaaacttcaacactgc

SEQ ID NO: 97911 - DNA, 25 bp, Probe Sequence
ttaacagttggctctaagttgaatg

SEQ ID NO: 97912 - DNA, 25 bp, Probe Sequence
taacagttggctctaagttgaatgc

SEQ ID NO: 97913 - DNA, 25 bp, Probe Sequence
cttcaaggtccagataacatgagaa

SEQ ID NO: 97914 - DNA, 25 bp, Probe Sequence
tcttcaaggtccagataacatgaga

SEQ ID NO: 97915 - DNA, 25 bp, Probe Sequence
gtcttcaaggtccagataacatgag

SEQ ID NO: 97916 - DNA, 25 bp, Probe Sequence
caggaagatgattgtagtttgtgtt

SEQ ID NO: 97917 - DNA, 25 bp, Probe Sequence
tatgctaaatgatgggaaagtctgg

SEQ ID NO: 97918 - DNA, 25 bp, Probe Sequence
gcactaatctggtgtcactctctaa

SEQ ID NO: 97919 - DNA, 25 bp, Probe Sequence
ctctaagttgaatgcagtcctagtg

SEQ ID NO: 97920 - DNA, 25 bp, Probe Sequence
atatgctaaatgatgggaaagtctg

SEQ ID NO: 97921 - DNA, 25 bp, Probe Sequence
aggaagatgattgtagtttgtgttt

SEQ ID NO: 97922 - DNA, 25 bp, Probe Sequence
gtttaacagttggctctaagttgaa

SEQ ID NO: 97923 - DNA, 25 bp, Probe Sequence
ctgcctcaggaagatgattgtagtt

SEQ ID NO: 97924 - DNA, 25 bp, Probe Sequence
tcaggaagatgattgtagtttgtgt

SEQ ID NO: 97925 - DNA, 25 bp, Probe Sequence
actaatctggtgtcactctctaaat

SEQ ID NO: 97926 - DNA, 25 bp, Probe Sequence
ctcaggaagatgattgtagtttgtg

SEQ ID NO: 97927 - DNA, 25 bp, Probe Sequence
tttaacagttggctctaagttgaat

SEQ ID NO: 97928 - DNA, 25 bp, Probe Sequence
cgtcttcaaggtccagataacatga

SEQ ID NO: 97929 - DNA, 25 bp, Probe Sequence
ctaatctggtgtcactctctaaatg

SEQ ID NO: 97930 - DNA, 25 bp, Probe Sequence
cctcaggaagatgattgtagtttgt

SEQ ID NO: 97931 - DNA, 25 bp, Probe Sequence
aatctgcctcaggaagatgattgta

SEQ ID NO: 97932 - DNA, 25 bp, Probe Sequence
tccgtcttcaaggtccagataacat

SEQ ID NO: 97933 - DNA, 25 bp, Probe Sequence
tctaagttgaatgcagtcctagtgg

SEQ ID NO: 97934 - DNA, 25 bp, Probe Sequence
taatctggtgtcactctctaaatga

SEQ ID NO: 97935 - DNA, 25 bp, Probe Sequence
cttagcagattctctcctagtttgg

SEQ ID NO: 97936 - DNA, 25 bp, Probe Sequence
tcttagcagattctctcctagtttg

SEQ ID NO: 97937 - DNA, 25 bp, Probe Sequence
cgaacatctctcagcatttactgta

SEQ ID NO: 97938 - DNA, 25 bp, Probe Sequence
aaatggttggtgttgtgtttaaagt

SEQ ID NO: 97939 - DNA, 25 bp, Probe Sequence
gaacatctctcagcatttactgtac

SEQ ID NO: 97940 - DNA, 25 bp, Probe Sequence
aatggttggtgttgtgtttaaagtg

SEQ ID NO: 97941 - DNA, 25 bp, Probe Sequence
aacatctctcagcatttactgtacg

SEQ ID NO: 97942 - DNA, 25 bp, Probe Sequence
cttctcgaacatctctcagcattta

SEQ ID NO: 97943 - DNA, 25 bp, Probe Sequence
ggttggtgttgtgtttaaagtgttt

SEQ ID NO: 97944 - DNA, 25 bp, Probe Sequence
ttagcagattctctcctagtttggc

SEQ ID NO: 97945 - DNA, 25 bp, Probe Sequence
ttctcgaacatctctcagcatttac

SEQ ID NO: 97946 - DNA, 25 bp, Probe Sequence
taggtgtggagctaatattactctt

SEQ ID NO: 97947 - DNA, 25 bp, Probe Sequence
agtgcttaggtgtggagctaatatt

SEQ ID NO: 97948 - DNA, 25 bp, Probe Sequence
aagtgcttaggtgtggagctaatat

SEQ ID NO: 97949 - DNA, 25 bp, Probe Sequence
gttggtgttgtgtttaaagtgttta

SEQ ID NO: 97950 - DNA, 25 bp, Probe Sequence
atggttggtgttgtgtttaaagtgt

SEQ ID NO: 97951 - DNA, 25 bp, Probe Sequence
tctcgaacatctctcagcatttact

SEQ ID NO: 97952 - DNA, 25 bp, Probe Sequence
ttaggtgtggagctaatattactct

SEQ ID NO: 97953 - DNA, 25 bp, Probe Sequence
tggttggtgttgtgtttaaagtgtt

SEQ ID NO: 97954 - DNA, 25 bp, Probe Sequence
cttaggtgtggagctaatattactc

SEQ ID NO: 97955 - DNA, 25 bp, Probe Sequence
aatatgaagctgaatcttagcagat

SEQ ID NO: 97956 - DNA, 25 bp, Probe Sequence
gaagtgcttaggtgtggagctaata

SEQ ID NO: 97957 - DNA, 25 bp, Probe Sequence
atcttagcagattctctcctagttt

SEQ ID NO: 97958 - DNA, 25 bp, Probe Sequence
tgataaaatggttggtgttgtgttt

SEQ ID NO: 97959 - DNA, 25 bp, Probe Sequence
tataagagttatgttagccaggtgc

SEQ ID NO: 97960 - DNA, 25 bp, Probe Sequence
atataagagttatgttagccaggtg

SEQ ID NO: 97961 - DNA, 25 bp, Probe Sequence
gcatataagagttatgttagccagg

SEQ ID NO: 97962 - DNA, 25 bp, Probe Sequence
catataagagttatgttagccaggt

SEQ ID NO: 97963 - DNA, 25 bp, Probe Sequence
aataatcccaacaaggtgagttaaa

SEQ ID NO: 97964 - DNA, 25 bp, Probe Sequence
ataagagttatgttagccaggtgca

SEQ ID NO: 97965 - DNA, 25 bp, Probe Sequence
catacctgtaatcccagcaacttag

SEQ ID NO: 97966 - DNA, 25 bp, Probe Sequence
taagagttatgttagccaggtgcag

SEQ ID NO: 97967 - DNA, 25 bp, Probe Sequence
tcatacctgtaatcccagcaactta

SEQ ID NO: 97968 - DNA, 25 bp, Probe Sequence
tgcatataagagttatgttagccag

SEQ ID NO: 97969 - DNA, 25 bp, Probe Sequence
ctgcatataagagttatgttagcca

SEQ ID NO: 97970 - DNA, 25 bp, Probe Sequence
actgcatataagagttatgttagcc

SEQ ID NO: 97971 - DNA, 25 bp, Probe Sequence
atacctgtaatcccagcaacttagg

SEQ ID NO: 97972 - DNA, 25 bp, Probe Sequence
cactgcatataagagttatgttagc

SEQ ID NO: 97973 - DNA, 25 bp, Probe Sequence
tctcactgcatataagagttatgtt

SEQ ID NO: 97974 - DNA, 25 bp, Probe Sequence
ttctcactgcatataagagttatgt

SEQ ID NO: 97975 - DNA, 25 bp, Probe Sequence
tggtttctcactgcatataagagtt

SEQ ID NO: 97976 - DNA, 25 bp, Probe Sequence
ttggtttctcactgcatataagagt

SEQ ID NO: 97977 - DNA, 25 bp, Probe Sequence
gtcatacctgtaatcccagcaactt

SEQ ID NO: 97978 - DNA, 25 bp, Probe Sequence
tttggtttctcactgcatataagag

SEQ ID NO: 97979 - DNA, 25 bp, Probe Sequence
ggtttctcactgcatataagagtta

SEQ ID NO: 97980 - DNA, 25 bp, Probe Sequence
cccaacaaggtgagttaaaagaatc

SEQ ID NO: 97981 - DNA, 25 bp, Probe Sequence
tcccaacaaggtgagttaaaagaat

SEQ ID NO: 97982 - DNA, 25 bp, Probe Sequence
atcccaacaaggtgagttaaaagaa

SEQ ID NO: 97983 - DNA, 25 bp, Probe Sequence
cttcccaaatgtgtgtgagataata

SEQ ID NO: 97984 - DNA, 25 bp, Probe Sequence
ctaggatttgatgagtgtgaaggag

SEQ ID NO: 97985 - DNA, 25 bp, Probe Sequence
tcccaaatgtgtgtgagataatatc

SEQ ID NO: 97986 - DNA, 25 bp, Probe Sequence
ttcccaaatgtgtgtgagataatat

SEQ ID NO: 97987 - DNA, 25 bp, Probe Sequence
cccaaatgtgtgtgagataatatca

SEQ ID NO: 97988 - DNA, 25 bp, Probe Sequence
taggatttgatgagtgtgaaggagc

SEQ ID NO: 97989 - DNA, 25 bp, Probe Sequence
atctgaagctaggatttgatgagtg

SEQ ID NO: 97990 - DNA, 25 bp, Probe Sequence
gtgacatctgaagctaggatttgat

SEQ ID NO: 97991 - DNA, 25 bp, Probe Sequence
aagctaggatttgatgagtgtgaag

SEQ ID NO: 97992 - DNA, 25 bp, Probe Sequence
gaagctaggatttgatgagtgtgaa

SEQ ID NO: 97993 - DNA, 25 bp, Probe Sequence
gctaggatttgatgagtgtgaagga

SEQ ID NO: 97994 - DNA, 25 bp, Probe Sequence
atgtgacatctgaagctaggatttg

SEQ ID NO: 97995 - DNA, 25 bp, Probe Sequence
ctgaagctaggatttgatgagtgtg

SEQ ID NO: 97996 - DNA, 25 bp, Probe Sequence
tctgaagctaggatttgatgagtgt

SEQ ID NO: 97997 - DNA, 25 bp, Probe Sequence
tgaagctaggatttgatgagtgtga

SEQ ID NO: 97998 - DNA, 25 bp, Probe Sequence
tgtgacatctgaagctaggatttga

SEQ ID NO: 97999 - DNA, 25 bp, Probe Sequence
tgtgtgtgagataatatcatgacca

SEQ ID NO: 98000 - DNA, 25 bp, Probe Sequence
ccaaatgtgtgtgagataatatcat

SEQ ID NO: 98001 - DNA, 25 bp, Probe Sequence
agctaggatttgatgagtgtgaagg

SEQ ID NO: 98002 - DNA, 25 bp, Probe Sequence
gtgtgagataatatcatgaccacca

SEQ ID NO: 98003 - DNA, 25 bp, Probe Sequence
tgtgtgagataatatcatgaccacc

SEQ ID NO: 98004 - DNA, 25 bp, Probe Sequence
atgtgtgtgagataatatcatgacc

SEQ ID NO: 98005 - DNA, 25 bp, Probe Sequence
tgtgagataatatcatgaccaccat

SEQ ID NO: 98006 - DNA, 25 bp, Probe Sequence
gtgtgtgagataatatcatgaccac

SEQ ID NO: 98007 - DNA, 25 bp, Probe Sequence
gatacctcagcaagaacatacctaa

SEQ ID NO: 98008 - DNA, 25 bp, Probe Sequence
agatacctcagcaagaacataccta

SEQ ID NO: 98009 - DNA, 25 bp, Probe Sequence
atacctcagcaagaacatacctaat

SEQ ID NO: 98010 - DNA, 25 bp, Probe Sequence
acctcagcaagaacatacctaatat

SEQ ID NO: 98011 - DNA, 25 bp, Probe Sequence
gattaactgttatcacctctcctgt

SEQ ID NO: 98012 - DNA, 25 bp, Probe Sequence
aagatacctcagcaagaacatacct

SEQ ID NO: 98013 - DNA, 25 bp, Probe Sequence
tacctcagcaagaacatacctaata

SEQ ID NO: 98014 - DNA, 25 bp, Probe Sequence
ttaactgttatcacctctcctgtac

SEQ ID NO: 98015 - DNA, 25 bp, Probe Sequence
attaactgttatcacctctcctgta

SEQ ID NO: 98016 - DNA, 25 bp, Probe Sequence
gtcaggattaactgttatcacctct

SEQ ID NO: 98017 - DNA, 25 bp, Probe Sequence
agtcaggattaactgttatcacctc

SEQ ID NO: 98018 - DNA, 25 bp, Probe Sequence
tcaggattaactgttatcacctctc

SEQ ID NO: 98019 - DNA, 25 bp, Probe Sequence
cctcagcaagaacatacctaatata

SEQ ID NO: 98020 - DNA, 25 bp, Probe Sequence
aagtcaggattaactgttatcacct

SEQ ID NO: 98021 - DNA, 25 bp, Probe Sequence
ggattaactgttatcacctctcctg

SEQ ID NO: 98022 - DNA, 25 bp, Probe Sequence
caggattaactgttatcacctctcc

SEQ ID NO: 98023 - DNA, 25 bp, Probe Sequence
cttgagataagtcaggattaactgt

SEQ ID NO: 98024 - DNA, 25 bp, Probe Sequence
taagtcaggattaactgttatcacc

SEQ ID NO: 98025 - DNA, 25 bp, Probe Sequence
aaagatacctcagcaagaacatacc

SEQ ID NO: 98026 - DNA, 25 bp, Probe Sequence
gataaagatacctcagcaagaacat

SEQ ID NO: 98027 - DNA, 25 bp, Probe Sequence
ttgagataagtcaggattaactgtt

SEQ ID NO: 98028 - DNA, 25 bp, Probe Sequence
tgataaagatacctcagcaagaaca

SEQ ID NO: 98029 - DNA, 25 bp, Probe Sequence
taaagatacctcagcaagaacatac

SEQ ID NO: 98030 - DNA, 25 bp, Probe Sequence
tttcagaggtgacaatttagcattt

SEQ ID NO: 98031 - DNA, 25 bp, Probe Sequence
tgctaatatccattgaatcggtagt

SEQ ID NO: 98032 - DNA, 25 bp, Probe Sequence
gctaatatccattgaatcggtagtc

SEQ ID NO: 98033 - DNA, 25 bp, Probe Sequence
ctaatatccattgaatcggtagtcc

SEQ ID NO: 98034 - DNA, 25 bp, Probe Sequence
tgtaacactatggcattgcttctat

SEQ ID NO: 98035 - DNA, 25 bp, Probe Sequence
atgctaatatccattgaatcggtag

SEQ ID NO: 98036 - DNA, 25 bp, Probe Sequence
ccagtgtcaacagtatcatgctaat

SEQ ID NO: 98037 - DNA, 25 bp, Probe Sequence
gtaacactatggcattgcttctata

SEQ ID NO: 98038 - DNA, 25 bp, Probe Sequence
cagtgtcaacagtatcatgctaata

SEQ ID NO: 98039 - DNA, 25 bp, Probe Sequence
tcatgctaatatccattgaatcggt

SEQ ID NO: 98040 - DNA, 25 bp, Probe Sequence
catgctaatatccattgaatcggta

SEQ ID NO: 98041 - DNA, 25 bp, Probe Sequence
gtcaacagtatcatgctaatatcca

SEQ ID NO: 98042 - DNA, 25 bp, Probe Sequence
tgtcaacagtatcatgctaatatcc

SEQ ID NO: 98043 - DNA, 25 bp, Probe Sequence
atcatgctaatatccattgaatcgg

SEQ ID NO: 98044 - DNA, 25 bp, Probe Sequence
tccagtgtcaacagtatcatgctaa

SEQ ID NO: 98045 - DNA, 25 bp, Probe Sequence
agtgtcaacagtatcatgctaatat

SEQ ID NO: 98046 - DNA, 25 bp, Probe Sequence
taatatccattgaatcggtagtccc

SEQ ID NO: 98047 - DNA, 25 bp, Probe Sequence
caaggtgctctaagtaatattcgat

SEQ ID NO: 98048 - DNA, 25 bp, Probe Sequence
gtgtcaacagtatcatgctaatatc

SEQ ID NO: 98049 - DNA, 25 bp, Probe Sequence
gtccagtgtcaacagtatcatgcta

SEQ ID NO: 98050 - DNA, 25 bp, Probe Sequence
gtgcttctttaactacctttggaaa

SEQ ID NO: 98051 - DNA, 25 bp, Probe Sequence
agtattgtgtaacactatggcattg

SEQ ID NO: 98052 - DNA, 25 bp, Probe Sequence
tattgtgtaacactatggcattgct

SEQ ID NO: 98053 - DNA, 25 bp, Probe Sequence
gtattgtgtaacactatggcattgc

SEQ ID NO: 98054 - DNA, 25 bp, Probe Sequence
aatatccattgaatcggtagtccca

SEQ ID NO: 98055 - DNA, 25 bp, Probe Sequence
cttattccgagcattccagtaactt

SEQ ID NO: 98056 - DNA, 25 bp, Probe Sequence
ttattccgagcattccagtaacttt

SEQ ID NO: 98057 - DNA, 25 bp, Probe Sequence
ttgtctatgaagttgctgtttattt

SEQ ID NO: 98058 - DNA, 25 bp, Probe Sequence
tttgtctatgaagttgctgtttatt

SEQ ID NO: 98059 - DNA, 25 bp, Probe Sequence
tggtgtagtacaaatattcaaacga

SEQ ID NO: 98060 - DNA, 25 bp, Probe Sequence
tgtgaccatgttcattataatctca

SEQ ID NO: 98061 - DNA, 25 bp, Probe Sequence
ctggtgtagtacaaatattcaaacg

SEQ ID NO: 98062 - DNA, 25 bp, Probe Sequence
gtgtgaccatgttcattataatctc

SEQ ID NO: 98063 - DNA, 25 bp, Probe Sequence
ggtgtgaccatgttcattataatct

SEQ ID NO: 98064 - DNA, 25 bp, Probe Sequence
ggtgtagtacaaatattcaaacgag

SEQ ID NO: 98065 - DNA, 25 bp, Probe Sequence
tattccgagcattccagtaactttt

SEQ ID NO: 98066 - DNA, 25 bp, Probe Sequence
gtgaccatgttcattataatctcaa

SEQ ID NO: 98067 - DNA, 25 bp, Probe Sequence
ttctgactttacttgtggtgtgacc

SEQ ID NO: 98068 - DNA, 25 bp, Probe Sequence
aggaattttattttgctgagttgtt

SEQ ID NO: 98069 - DNA, 25 bp, Probe Sequence
gtgtagtacaaatattcaaacgaga

SEQ ID NO: 98070 - DNA, 25 bp, Probe Sequence
agtacaaatattcaaacgagaactt

SEQ ID NO: 98071 - DNA, 25 bp, Probe Sequence
tgcaagatctggtgtagtacaaata

SEQ ID NO: 98072 - DNA, 25 bp, Probe Sequence
tctggtgtagtacaaatattcaaac

SEQ ID NO: 98073 - DNA, 25 bp, Probe Sequence
ttccatgtgaacagcagttgaacat

SEQ ID NO: 98074 - DNA, 25 bp, Probe Sequence
caggaattttattttgctgagttgt

SEQ ID NO: 98075 - DNA, 25 bp, Probe Sequence
acaggaattttattttgctgagttg

SEQ ID NO: 98076 - DNA, 25 bp, Probe Sequence
ggaattttattttgctgagttgttc

SEQ ID NO: 98077 - DNA, 25 bp, Probe Sequence
gtgcaagatctggtgtagtacaaat

SEQ ID NO: 98078 - DNA, 25 bp, Probe Sequence
gcaagatctggtgtagtacaaatat

SEQ ID NO: 98079 - DNA, 25 bp, Probe Sequence
aacctccaagttcgttcatattcac

SEQ ID NO: 98080 - DNA, 25 bp, Probe Sequence
caacctccaagttcgttcatattca

SEQ ID NO: 98081 - DNA, 25 bp, Probe Sequence
acaacctccaagttcgttcatattc

SEQ ID NO: 98082 - DNA, 25 bp, Probe Sequence
gacaacctccaagttcgttcatatt

SEQ ID NO: 98083 - DNA, 25 bp, Probe Sequence
tggattcacacactggtatctgtaa

SEQ ID NO: 98084 - DNA, 25 bp, Probe Sequence
ctggattcacacactggtatctgta

SEQ ID NO: 98085 - DNA, 25 bp, Probe Sequence
ctgtaaagcactcaaagataacctg

SEQ ID NO: 98086 - DNA, 25 bp, Probe Sequence
actggtatctgtaaagcactcaaag

SEQ ID NO: 98087 - DNA, 25 bp, Probe Sequence
atgcctatgacaagatatccaagtt

SEQ ID NO: 98088 - DNA, 25 bp, Probe Sequence
aatgcctatgacaagatatccaagt

SEQ ID NO: 98089 - DNA, 25 bp, Probe Sequence
cactggtatctgtaaagcactcaaa

SEQ ID NO: 98090 - DNA, 25 bp, Probe Sequence
agaaggaagtgaatgtgaactgctt

SEQ ID NO: 98091 - DNA, 25 bp, Probe Sequence
tggattaagaaatgcctatgacaag

SEQ ID NO: 98092 - DNA, 25 bp, Probe Sequence
tctgtaaagcactcaaagataacct

SEQ ID NO: 98093 - DNA, 25 bp, Probe Sequence
ctggtatctgtaaagcactcaaaga

SEQ ID NO: 98094 - DNA, 25 bp, Probe Sequence
ggattaagaaatgcctatgacaaga

SEQ ID NO: 98095 - DNA, 25 bp, Probe Sequence
tgtaaagcactcaaagataacctga

SEQ ID NO: 98096 - DNA, 25 bp, Probe Sequence
gcctatgacaagatatccaagttga

SEQ ID NO: 98097 - DNA, 25 bp, Probe Sequence
tgcctatgacaagatatccaagttg

SEQ ID NO: 98098 - DNA, 25 bp, Probe Sequence
tccagtttcattgatctcctttctt

SEQ ID NO: 98099 - DNA, 25 bp, Probe Sequence
attggattaagaaatgcctatgaca

SEQ ID NO: 98100 - DNA, 25 bp, Probe Sequence
ccagtttcattgatctcctttcttt

SEQ ID NO: 98101 - DNA, 25 bp, Probe Sequence
atccagtttcattgatctcctttct

SEQ ID NO: 98102 - DNA, 25 bp, Probe Sequence
gtaaagcactcaaagataacctgat

SEQ ID NO: 98103 - DNA, 25 bp, Probe Sequence
ttattcttcttgatggcagtctgat

SEQ ID NO: 98104 - DNA, 25 bp, Probe Sequence
tattcttcttgatggcagtctgatg

SEQ ID NO: 98105 - DNA, 25 bp, Probe Sequence
gttattcttcttgatggcagtctga

SEQ ID NO: 98106 - DNA, 25 bp, Probe Sequence
ggttattcttcttgatggcagtctg

SEQ ID NO: 98107 - DNA, 25 bp, Probe Sequence
ctccatccttcatctctccaatctc

SEQ ID NO: 98108 - DNA, 25 bp, Probe Sequence
ttcttcttgatggcagtctgatgta

SEQ ID NO: 98109 - DNA, 25 bp, Probe Sequence
gactccatccttcatctctccaatc

SEQ ID NO: 98110 - DNA, 25 bp, Probe Sequence
attcttcttgatggcagtctgatgt

SEQ ID NO: 98111 - DNA, 25 bp, Probe Sequence
catccttcatctctccaatctcacc

SEQ ID NO: 98112 - DNA, 25 bp, Probe Sequence
ccatccttcatctctccaatctcac

SEQ ID NO: 98113 - DNA, 25 bp, Probe Sequence
tccatccttcatctctccaatctca

SEQ ID NO: 98114 - DNA, 25 bp, Probe Sequence
actccatccttcatctctccaatct

SEQ ID NO: 98115 - DNA, 25 bp, Probe Sequence
atccttcatctctccaatctcacca

SEQ ID NO: 98116 - DNA, 25 bp, Probe Sequence
tcttcttgatggcagtctgatgtac

SEQ ID NO: 98117 - DNA, 25 bp, Probe Sequence
tatttccgtgggttattcttcttga

SEQ ID NO: 98118 - DNA, 25 bp, Probe Sequence
atttccgtgggttattcttcttgat

SEQ ID NO: 98119 - DNA, 25 bp, Probe Sequence
tttctttatcttcagcctctccaac

SEQ ID NO: 98120 - DNA, 25 bp, Probe Sequence
ctctacagtttctccatctcctaca

SEQ ID NO: 98121 - DNA, 25 bp, Probe Sequence
atatttccgtgggttattcttcttg

SEQ ID NO: 98122 - DNA, 25 bp, Probe Sequence
tctacagtttctccatctcctacac

SEQ ID NO: 98123 - DNA, 25 bp, Probe Sequence
gatatttccgtgggttattcttctt

SEQ ID NO: 98124 - DNA, 25 bp, Probe Sequence
agatatttccgtgggttattcttct

SEQ ID NO: 98125 - DNA, 25 bp, Probe Sequence
cagatatttccgtgggttattcttc

SEQ ID NO: 98126 - DNA, 25 bp, Probe Sequence
tttccgtgggttattcttcttgatg

SEQ ID NO: 98127 - DNA, 25 bp, Probe Sequence
cagcacatagtatggtgatataaca

SEQ ID NO: 98128 - DNA, 25 bp, Probe Sequence
agtctgaggttaggaaatatctgga

SEQ ID NO: 98129 - DNA, 25 bp, Probe Sequence
gtctgaggttaggaaatatctggaa

SEQ ID NO: 98130 - DNA, 25 bp, Probe Sequence
tcagcacatagtatggtgatataac

SEQ ID NO: 98131 - DNA, 25 bp, Probe Sequence
tctgaggttaggaaatatctggaaa

SEQ ID NO: 98132 - DNA, 25 bp, Probe Sequence
aggaaatatctggaaactagcactg

SEQ ID NO: 98133 - DNA, 25 bp, Probe Sequence
ttgaaacagtctgaggttaggaaat

SEQ ID NO: 98134 - DNA, 25 bp, Probe Sequence
ggaaatatctggaaactagcactgt

SEQ ID NO: 98135 - DNA, 25 bp, Probe Sequence
tttgaaacagtctgaggttaggaaa

SEQ ID NO: 98136 - DNA, 25 bp, Probe Sequence
tgaggttaggaaatatctggaaact

SEQ ID NO: 98137 - DNA, 25 bp, Probe Sequence
tgaaacagtctgaggttaggaaata

SEQ ID NO: 98138 - DNA, 25 bp, Probe Sequence
ctgaggttaggaaatatctggaaac

SEQ ID NO: 98139 - DNA, 25 bp, Probe Sequence
atatctggaaactagcactgttacc

SEQ ID NO: 98140 - DNA, 25 bp, Probe Sequence
taggaaatatctggaaactagcact

SEQ ID NO: 98141 - DNA, 25 bp, Probe Sequence
ctgtccatcaactgttaccatcaca

SEQ ID NO: 98142 - DNA, 25 bp, Probe Sequence
aacagtctgaggttaggaaatatct

SEQ ID NO: 98143 - DNA, 25 bp, Probe Sequence
gcacatttctttggaaggtacttaa

SEQ ID NO: 98144 - DNA, 25 bp, Probe Sequence
cctgtccatcaactgttaccatcac

SEQ ID NO: 98145 - DNA, 25 bp, Probe Sequence
gaaatatctggaaactagcactgtt

SEQ ID NO: 98146 - DNA, 25 bp, Probe Sequence
taagttccaggcaagactagaaatc

SEQ ID NO: 98147 - DNA, 25 bp, Probe Sequence
ggttaggaaatatctggaaactagc

SEQ ID NO: 98148 - DNA, 25 bp, Probe Sequence
agcacatagtatggtgatataacat

SEQ ID NO: 98149 - DNA, 25 bp, Probe Sequence
ttaggaaatatctggaaactagcac

SEQ ID NO: 98150 - DNA, 25 bp, Probe Sequence
cagtctgaggttaggaaatatctgg

SEQ ID NO: 98151 - DNA, 25 bp, Probe Sequence
catccttactacagaatccgtcctt

SEQ ID NO: 98152 - DNA, 25 bp, Probe Sequence
tcatagttctgtggtagacattgtt

SEQ ID NO: 98153 - DNA, 25 bp, Probe Sequence
atcatagttctgtggtagacattgt

SEQ ID NO: 98154 - DNA, 25 bp, Probe Sequence
cacatccttactacagaatccgtcc

SEQ ID NO: 98155 - DNA, 25 bp, Probe Sequence
acatccttactacagaatccgtcct

SEQ ID NO: 98156 - DNA, 25 bp, Probe Sequence
caatgcacatccttactacagaatc

SEQ ID NO: 98157 - DNA, 25 bp, Probe Sequence
acaatgcacatccttactacagaat

SEQ ID NO: 98158 - DNA, 25 bp, Probe Sequence
tatcatagttctgtggtagacattg

SEQ ID NO: 98159 - DNA, 25 bp, Probe Sequence
cgtcctttcatttcaacttatagca

SEQ ID NO: 98160 - DNA, 25 bp, Probe Sequence
ccgtcctttcatttcaacttatagc

SEQ ID NO: 98161 - DNA, 25 bp, Probe Sequence
aatgcacatccttactacagaatcc

SEQ ID NO: 98162 - DNA, 25 bp, Probe Sequence
cttactacagaatccgtcctttcat

SEQ ID NO: 98163 - DNA, 25 bp, Probe Sequence
tactacagaatccgtcctttcattt

SEQ ID NO: 98164 - DNA, 25 bp, Probe Sequence
ttactacagaatccgtcctttcatt

SEQ ID NO: 98165 - DNA, 25 bp, Probe Sequence
cacaatgcacatccttactacagaa

SEQ ID NO: 98166 - DNA, 25 bp, Probe Sequence
aatccgtcctttcatttcaacttat

SEQ ID NO: 98167 - DNA, 25 bp, Probe Sequence
gaatccgtcctttcatttcaactta

SEQ ID NO: 98168 - DNA, 25 bp, Probe Sequence
tacagaatccgtcctttcatttcaa

SEQ ID NO: 98169 - DNA, 25 bp, Probe Sequence
atccttactacagaatccgtccttt

SEQ ID NO: 98170 - DNA, 25 bp, Probe Sequence
tccgtcctttcatttcaacttatag

SEQ ID NO: 98171 - DNA, 25 bp, Probe Sequence
gcacatccttactacagaatccgtc

SEQ ID NO: 98172 - DNA, 25 bp, Probe Sequence
gaggaaggaagaaatgcgtttagat

SEQ ID NO: 98173 - DNA, 25 bp, Probe Sequence
ctacagaatccgtcctttcatttca

SEQ ID NO: 98174 - DNA, 25 bp, Probe Sequence
actacagaatccgtcctttcatttc

SEQ ID NO: 98175 - DNA, 25 bp, Probe Sequence
ttcacacaatacttcagacacacaa

SEQ ID NO: 98176 - DNA, 25 bp, Probe Sequence
acacaatacttcagacacacaacaa

SEQ ID NO: 98177 - DNA, 25 bp, Probe Sequence
cacaatacttcagacacacaacaag

SEQ ID NO: 98178 - DNA, 25 bp, Probe Sequence
tcacacaatacttcagacacacaac

SEQ ID NO: 98179 - DNA, 25 bp, Probe Sequence
cttcagacacacaacaaggacataa

SEQ ID NO: 98180 - DNA, 25 bp, Probe Sequence
aatacttcagacacacaacaaggac

SEQ ID NO: 98181 - DNA, 25 bp, Probe Sequence
caatacttcagacacacaacaagga

SEQ ID NO: 98182 - DNA, 25 bp, Probe Sequence
acaatacttcagacacacaacaagg

SEQ ID NO: 98183 - DNA, 25 bp, Probe Sequence
cacacaatacttcagacacacaaca

SEQ ID NO: 98184 - DNA, 25 bp, Probe Sequence
acttcagacacacaacaaggacata

SEQ ID NO: 98185 - DNA, 25 bp, Probe Sequence
tacttcagacacacaacaaggacat

SEQ ID NO: 98186 - DNA, 25 bp, Probe Sequence
atacttcagacacacaacaaggaca

SEQ ID NO: 98187 - DNA, 25 bp, Probe Sequence
ctttcacacaatacttcagacacac

SEQ ID NO: 98188 - DNA, 25 bp, Probe Sequence
ttcagacacacaacaaggacataaa

SEQ ID NO: 98189 - DNA, 25 bp, Probe Sequence
tttcacacaatacttcagacacaca

SEQ ID NO: 98190 - DNA, 25 bp, Probe Sequence
ctctttcacacaatacttcagacac

SEQ ID NO: 98191 - DNA, 25 bp, Probe Sequence
tctctttcacacaatacttcagaca

SEQ ID NO: 98192 - DNA, 25 bp, Probe Sequence
tctttcacacaatacttcagacaca

SEQ ID NO: 98193 - DNA, 25 bp, Probe Sequence
ctctctttcacacaatacttcagac

SEQ ID NO: 98194 - DNA, 25 bp, Probe Sequence
gctctctttcacacaatacttcaga

SEQ ID NO: 98195 - DNA, 25 bp, Probe Sequence
aagctactccacatcactctacttg

SEQ ID NO: 98196 - DNA, 25 bp, Probe Sequence
aaatccagcatccattcctaataaa

SEQ ID NO: 98197 - DNA, 25 bp, Probe Sequence
acgtattaattcatcgctattacca

SEQ ID NO: 98198 - DNA, 25 bp, Probe Sequence
tactccacatcactctacttgatct

SEQ ID NO: 98199 - DNA, 25 bp, Probe Sequence
atggattatgattggcagagaacaa

SEQ ID NO: 98200 - DNA, 25 bp, Probe Sequence
attcttagaacacctgatacaatgc

SEQ ID NO: 98201 - DNA, 25 bp, Probe Sequence
catggattatgattggcagagaaca

SEQ ID NO: 98202 - DNA, 25 bp, Probe Sequence
acatggattatgattggcagagaac

SEQ ID NO: 98203 - DNA, 25 bp, Probe Sequence
cacatggattatgattggcagagaa

SEQ ID NO: 98204 - DNA, 25 bp, Probe Sequence
agcctgttctccaaagtataaatga

SEQ ID NO: 98205 - DNA, 25 bp, Probe Sequence
gtcatagcctgttctccaaagtata

SEQ ID NO: 98206 - DNA, 25 bp, Probe Sequence
gcagacattcaataaacacagtaga

SEQ ID NO: 98207 - DNA, 25 bp, Probe Sequence
ttcttagaacacctgatacaatgca

SEQ ID NO: 98208 - DNA, 25 bp, Probe Sequence
tcatagcctgttctccaaagtataa

SEQ ID NO: 98209 - DNA, 25 bp, Probe Sequence
tatttgctgaattactactgtgtgc

SEQ ID NO: 98210 - DNA, 25 bp, Probe Sequence
attatgattggcagagaacaattcc

SEQ ID NO: 98211 - DNA, 25 bp, Probe Sequence
ggattatgattggcagagaacaatt

SEQ ID NO: 98212 - DNA, 25 bp, Probe Sequence
tggattatgattggcagagaacaat

SEQ ID NO: 98213 - DNA, 25 bp, Probe Sequence
gtagagattgcagtgagacaagatt

SEQ ID NO: 98214 - DNA, 25 bp, Probe Sequence
ttatgattggcagagaacaattcca

SEQ ID NO: 98215 - DNA, 25 bp, Probe Sequence
ttactactgtgtgcaagttagagac

SEQ ID NO: 98216 - DNA, 25 bp, Probe Sequence
attactactgtgtgcaagttagaga

SEQ ID NO: 98217 - DNA, 25 bp, Probe Sequence
tagcctgttctccaaagtataaatg

SEQ ID NO: 98218 - DNA, 25 bp, Probe Sequence
catagcctgttctccaaagtataaa

SEQ ID NO: 98219 - DNA, 25 bp, Probe Sequence
tgtcatagcctgttctccaaagtat

SEQ ID NO: 98220 - DNA, 25 bp, Probe Sequence
tgaattactactgtgtgcaagttag

SEQ ID NO: 98221 - DNA, 25 bp, Probe Sequence
ctgaattactactgtgtgcaagtta

SEQ ID NO: 98222 - DNA, 25 bp, Probe Sequence
actcacagcctttattcttagaaca

SEQ ID NO: 98223 - DNA, 25 bp, Probe Sequence
agtgtgctaatgaatcctatctctt

SEQ ID NO: 98224 - DNA, 25 bp, Probe Sequence
aagtgtgctaatgaatcctatctct

SEQ ID NO: 98225 - DNA, 25 bp, Probe Sequence
aagaagacattatcaaggaccagat

SEQ ID NO: 98226 - DNA, 25 bp, Probe Sequence
agtaagaagacattatcaaggacca

SEQ ID NO: 98227 - DNA, 25 bp, Probe Sequence
taagaagacattatcaaggaccaga

SEQ ID NO: 98228 - DNA, 25 bp, Probe Sequence
gtaagaagacattatcaaggaccag

SEQ ID NO: 98229 - DNA, 25 bp, Probe Sequence
agaagacattatcaaggaccagatc

SEQ ID NO: 98230 - DNA, 25 bp, Probe Sequence
gtgtgctaatgaatcctatctctta

SEQ ID NO: 98231 - DNA, 25 bp, Probe Sequence
atatccaaccatgcttcattacact

SEQ ID NO: 98232 - DNA, 25 bp, Probe Sequence
caaccatgcttcattacactcaata

SEQ ID NO: 98233 - DNA, 25 bp, Probe Sequence
accatgcttcattacactcaatatg

SEQ ID NO: 98234 - DNA, 25 bp, Probe Sequence
gatgtatatccaaccatgcttcatt

SEQ ID NO: 98235 - DNA, 25 bp, Probe Sequence
tatccaaccatgcttcattacactc

SEQ ID NO: 98236 - DNA, 25 bp, Probe Sequence
tgatgtatatccaaccatgcttcat

SEQ ID NO: 98237 - DNA, 25 bp, Probe Sequence
atgatgtatatccaaccatgcttca

SEQ ID NO: 98238 - DNA, 25 bp, Probe Sequence
tatatccaaccatgcttcattacac

SEQ ID NO: 98239 - DNA, 25 bp, Probe Sequence
gtatatccaaccatgcttcattaca

SEQ ID NO: 98240 - DNA, 25 bp, Probe Sequence
tgtatatccaaccatgcttcattac

SEQ ID NO: 98241 - DNA, 25 bp, Probe Sequence
aaccatgcttcattacactcaatat

SEQ ID NO: 98242 - DNA, 25 bp, Probe Sequence
tagtaagaagacattatcaaggacc

SEQ ID NO: 98243 - DNA, 25 bp, Probe Sequence
tctcttatcagtcattgtaaggagt

SEQ ID NO: 98244 - DNA, 25 bp, Probe Sequence
tcagaattatagtccatgaggttca

SEQ ID NO: 98245 - DNA, 25 bp, Probe Sequence
acatcagaattatagtccatgaggt

SEQ ID NO: 98246 - DNA, 25 bp, Probe Sequence
tatgatgtatatccaaccatgcttc

SEQ ID NO: 98247 - DNA, 25 bp, Probe Sequence
agcagcataagaacagactaataca

SEQ ID NO: 98248 - DNA, 25 bp, Probe Sequence
gcagcataagaacagactaatacag

SEQ ID NO: 98249 - DNA, 25 bp, Probe Sequence
tagcagcataagaacagactaatac

SEQ ID NO: 98250 - DNA, 25 bp, Probe Sequence
cagcataagaacagactaatacagt

SEQ ID NO: 98251 - DNA, 25 bp, Probe Sequence
ccagtctcatctgaattgtagttcc

SEQ ID NO: 98252 - DNA, 25 bp, Probe Sequence
tctgttatagcttgtacctgtgttc

SEQ ID NO: 98253 - DNA, 25 bp, Probe Sequence
ctctgttatagcttgtacctgtgtt

SEQ ID NO: 98254 - DNA, 25 bp, Probe Sequence
ctgttatagcttgtacctgtgttca

SEQ ID NO: 98255 - DNA, 25 bp, Probe Sequence
atagcagcataagaacagactaata

SEQ ID NO: 98256 - DNA, 25 bp, Probe Sequence
tatagcagcataagaacagactaat

SEQ ID NO: 98257 - DNA, 25 bp, Probe Sequence
ttatagcagcataagaacagactaa

SEQ ID NO: 98258 - DNA, 25 bp, Probe Sequence
ccatgcagaactgtgaatcaattaa

SEQ ID NO: 98259 - DNA, 25 bp, Probe Sequence
gcagaactgtgaatcaattaaacct

SEQ ID NO: 98260 - DNA, 25 bp, Probe Sequence
cctctgttatagcttgtacctgtgt

SEQ ID NO: 98261 - DNA, 25 bp, Probe Sequence
gtctcatctgaattgtagttcccat

SEQ ID NO: 98262 - DNA, 25 bp, Probe Sequence
ttatagcttgtacctgtgttcagtg

SEQ ID NO: 98263 - DNA, 25 bp, Probe Sequence
gttatagcttgtacctgtgttcagt

SEQ ID NO: 98264 - DNA, 25 bp, Probe Sequence
tgttatagcttgtacctgtgttcag

SEQ ID NO: 98265 - DNA, 25 bp, Probe Sequence
tctgaattgtagttcccataatcct

SEQ ID NO: 98266 - DNA, 25 bp, Probe Sequence
tctcatctgaattgtagttcccata

SEQ ID NO: 98267 - DNA, 25 bp, Probe Sequence
agtctcatctgaattgtagttccca

SEQ ID NO: 98268 - DNA, 25 bp, Probe Sequence
ttagtgacaatgatagcttgctgtg

SEQ ID NO: 98269 - DNA, 25 bp, Probe Sequence
ctttatagcagcataagaacagact

SEQ ID NO: 98270 - DNA, 25 bp, Probe Sequence
cagaactgtgaatcaattaaacctc

SEQ ID NO: 98271 - DNA, 25 bp, Probe Sequence
ctaattcttcgcttcacaatgtctc

SEQ ID NO: 98272 - DNA, 25 bp, Probe Sequence
tctaattcttcgcttcacaatgtct

SEQ ID NO: 98273 - DNA, 25 bp, Probe Sequence
gtctaattcttcgcttcacaatgtc

SEQ ID NO: 98274 - DNA, 25 bp, Probe Sequence
agtctaattcttcgcttcacaatgt

SEQ ID NO: 98275 - DNA, 25 bp, Probe Sequence
aagtctaattcttcgcttcacaatg

SEQ ID NO: 98276 - DNA, 25 bp, Probe Sequence
ccaccaatactaccgacttacctaa

SEQ ID NO: 98277 - DNA, 25 bp, Probe Sequence
ctcaccaccattatgtcctgattag

SEQ ID NO: 98278 - DNA, 25 bp, Probe Sequence
taattcttcgcttcacaatgtctcg

SEQ ID NO: 98279 - DNA, 25 bp, Probe Sequence
ctatcctcaccaccattatgtcctg

SEQ ID NO: 98280 - DNA, 25 bp, Probe Sequence
cctcaccaccattatgtcctgatta

SEQ ID NO: 98281 - DNA, 25 bp, Probe Sequence
aatcactctttctctatacctccca

SEQ ID NO: 98282 - DNA, 25 bp, Probe Sequence
caccaatactaccgacttacctaaa

SEQ ID NO: 98283 - DNA, 25 bp, Probe Sequence
atcatcagaatcccaccaatactac

SEQ ID NO: 98284 - DNA, 25 bp, Probe Sequence
catcatcagaatcccaccaatacta

SEQ ID NO: 98285 - DNA, 25 bp, Probe Sequence
atcactctttctctatacctcccag

SEQ ID NO: 98286 - DNA, 25 bp, Probe Sequence
tcaccaccattatgtcctgattagg

SEQ ID NO: 98287 - DNA, 25 bp, Probe Sequence
tctttctctatacctcccagttcag

SEQ ID NO: 98288 - DNA, 25 bp, Probe Sequence
ctctttctctatacctcccagttca

SEQ ID NO: 98289 - DNA, 25 bp, Probe Sequence
tatcctcaccaccattatgtcctga

SEQ ID NO: 98290 - DNA, 25 bp, Probe Sequence
accaatactaccgacttacctaaag

SEQ ID NO: 98291 - DNA, 25 bp, Probe Sequence
ctcatcatcagaatcccaccaatac

SEQ ID NO: 98292 - DNA, 25 bp, Probe Sequence
cctaaagtctaattcttcgcttcac

SEQ ID NO: 98293 - DNA, 25 bp, Probe Sequence
acctaaagtctaattcttcgcttca

SEQ ID NO: 98294 - DNA, 25 bp, Probe Sequence
tcatcatcagaatcccaccaatact

SEQ ID NO: 98295 - DNA, 25 bp, Probe Sequence
ctcttagtgctattcattggtggta

SEQ ID NO: 98296 - DNA, 25 bp, Probe Sequence
tcttagtgctattcattggtggtaa

SEQ ID NO: 98297 - DNA, 25 bp, Probe Sequence
cctcttagtgctattcattggtggt

SEQ ID NO: 98298 - DNA, 25 bp, Probe Sequence
atgtggtagggtaatcttgtttgaa

SEQ ID NO: 98299 - DNA, 25 bp, Probe Sequence
ctaatggaggaagaaagatgactga

SEQ ID NO: 98300 - DNA, 25 bp, Probe Sequence
tgtggtagggtaatcttgtttgaaa

SEQ ID NO: 98301 - DNA, 25 bp, Probe Sequence
aatggaggaagaaagatgactgatg

SEQ ID NO: 98302 - DNA, 25 bp, Probe Sequence
gatgtggtagggtaatcttgtttga

SEQ ID NO: 98303 - DNA, 25 bp, Probe Sequence
ctgatgtggtagggtaatcttgttt

SEQ ID NO: 98304 - DNA, 25 bp, Probe Sequence
taatggaggaagaaagatgactgat

SEQ ID NO: 98305 - DNA, 25 bp, Probe Sequence
cttagtgctattcattggtggtaaa

SEQ ID NO: 98306 - DNA, 25 bp, Probe Sequence
tgatgtggtagggtaatcttgtttg

SEQ ID NO: 98307 - DNA, 25 bp, Probe Sequence
aagatgactgatgtggtagggtaat

SEQ ID NO: 98308 - DNA, 25 bp, Probe Sequence
gaagaaagatgactgatgtggtagg

SEQ ID NO: 98309 - DNA, 25 bp, Probe Sequence
ggaagaaagatgactgatgtggtag

SEQ ID NO: 98310 - DNA, 25 bp, Probe Sequence
atgactgatgtggtagggtaatctt

SEQ ID NO: 98311 - DNA, 25 bp, Probe Sequence
aaagatgactgatgtggtagggtaa

SEQ ID NO: 98312 - DNA, 25 bp, Probe Sequence
aggaagaaagatgactgatgtggta

SEQ ID NO: 98313 - DNA, 25 bp, Probe Sequence
gatgactgatgtggtagggtaatct

SEQ ID NO: 98314 - DNA, 25 bp, Probe Sequence
agatgactgatgtggtagggtaatc

SEQ ID NO: 98315 - DNA, 25 bp, Probe Sequence
atggaggaagaaagatgactgatgt

SEQ ID NO: 98316 - DNA, 25 bp, Probe Sequence
gaaagatgactgatgtggtagggta

SEQ ID NO: 98317 - DNA, 25 bp, Probe Sequence
actgatgtggtagggtaatcttgtt

SEQ ID NO: 98318 - DNA, 25 bp, Probe Sequence
gactgatgtggtagggtaatcttgt

SEQ ID NO: 98319 - DNA, 25 bp, Probe Sequence
acgaataatccactatgaatgctgt

SEQ ID NO: 98320 - DNA, 25 bp, Probe Sequence
taatccactatgaatgctgtaacct

SEQ ID NO: 98321 - DNA, 25 bp, Probe Sequence
aacgaataatccactatgaatgctg

SEQ ID NO: 98322 - DNA, 25 bp, Probe Sequence
aatccactatgaatgctgtaacctc

SEQ ID NO: 98323 - DNA, 25 bp, Probe Sequence
cgaataatccactatgaatgctgta

SEQ ID NO: 98324 - DNA, 25 bp, Probe Sequence
ataatccactatgaatgctgtaacc

SEQ ID NO: 98325 - DNA, 25 bp, Probe Sequence
agcagagaagaactaccttaataca

SEQ ID NO: 98326 - DNA, 25 bp, Probe Sequence
taacgaataatccactatgaatgct

SEQ ID NO: 98327 - DNA, 25 bp, Probe Sequence
gtaacgaataatccactatgaatgc

SEQ ID NO: 98328 - DNA, 25 bp, Probe Sequence
cattagttaataggacattggaggt

SEQ ID NO: 98329 - DNA, 25 bp, Probe Sequence
atccactatgaatgctgtaacctca

SEQ ID NO: 98330 - DNA, 25 bp, Probe Sequence
gcagagaagaactaccttaatacat

SEQ ID NO: 98331 - DNA, 25 bp, Probe Sequence
aagcagagaagaactaccttaatac

SEQ ID NO: 98332 - DNA, 25 bp, Probe Sequence
tccactatgaatgctgtaacctcaa

SEQ ID NO: 98333 - DNA, 25 bp, Probe Sequence
tcattagttaataggacattggagg

SEQ ID NO: 98334 - DNA, 25 bp, Probe Sequence
atggagcaggcagtcatattatcac

SEQ ID NO: 98335 - DNA, 25 bp, Probe Sequence
aataatccactatgaatgctgtaac

SEQ ID NO: 98336 - DNA, 25 bp, Probe Sequence
aataagaggaggagaaagaggaaga

SEQ ID NO: 98337 - DNA, 25 bp, Probe Sequence
gtcatattatcaccctatcccacag

SEQ ID NO: 98338 - DNA, 25 bp, Probe Sequence
cagtcatattatcaccctatcccac

SEQ ID NO: 98339 - DNA, 25 bp, Probe Sequence
tcatattatcaccctatcccacagt

SEQ ID NO: 98340 - DNA, 25 bp, Probe Sequence
agtcatattatcaccctatcccaca

SEQ ID NO: 98341 - DNA, 25 bp, Probe Sequence
ataagaggaggagaaagaggaagag

SEQ ID NO: 98342 - DNA, 25 bp, Probe Sequence
aaataagaggaggagaaagaggaag

SEQ ID NO: 98343 - DNA, 25 bp, Probe Sequence
aggatgatacgagagacattgtgaa

SEQ ID NO: 98344 - DNA, 25 bp, Probe Sequence
aaggatgatacgagagacattgtga

SEQ ID NO: 98345 - DNA, 25 bp, Probe Sequence
cattgtccaatctgttgaaggttaa

SEQ ID NO: 98346 - DNA, 25 bp, Probe Sequence
ccattgtccaatctgttgaaggtta

SEQ ID NO: 98347 - DNA, 25 bp, Probe Sequence
gggcaggatatacaaagagaaatga

SEQ ID NO: 98348 - DNA, 25 bp, Probe Sequence
tgggcaggatatacaaagagaaatg

SEQ ID NO: 98349 - DNA, 25 bp, Probe Sequence
gctaacttatttgggcaggatatac

SEQ ID NO: 98350 - DNA, 25 bp, Probe Sequence
aatgattgatatctcgacagcactt

SEQ ID NO: 98351 - DNA, 25 bp, Probe Sequence
aaaggatatgctaacttatttgggc

SEQ ID NO: 98352 - DNA, 25 bp, Probe Sequence
gatacgagagacattgtgaaaggtt

SEQ ID NO: 98353 - DNA, 25 bp, Probe Sequence
gatgatacgagagacattgtgaaag

SEQ ID NO: 98354 - DNA, 25 bp, Probe Sequence
ttgggcaggatatacaaagagaaat

SEQ ID NO: 98355 - DNA, 25 bp, Probe Sequence
ggcaggatatacaaagagaaatgat

SEQ ID NO: 98356 - DNA, 25 bp, Probe Sequence
atacgagagacattgtgaaaggttg

SEQ ID NO: 98357 - DNA, 25 bp, Probe Sequence
atgatacgagagacattgtgaaagg

SEQ ID NO: 98358 - DNA, 25 bp, Probe Sequence
ggatgatacgagagacattgtgaaa

SEQ ID NO: 98359 - DNA, 25 bp, Probe Sequence
aaaggatgatacgagagacattgtg

SEQ ID NO: 98360 - DNA, 25 bp, Probe Sequence
caaagggtcagaactacagcaatag

SEQ ID NO: 98361 - DNA, 25 bp, Probe Sequence
ttgtccaatctgttgaaggttaaat

SEQ ID NO: 98362 - DNA, 25 bp, Probe Sequence
tgatacgagagacattgtgaaaggt

SEQ ID NO: 98363 - DNA, 25 bp, Probe Sequence
ctaacttatttgggcaggatataca

SEQ ID NO: 98364 - DNA, 25 bp, Probe Sequence
tcagaactacagcaataggtaggtc

SEQ ID NO: 98365 - DNA, 25 bp, Probe Sequence
attgtccaatctgttgaaggttaaa

SEQ ID NO: 98366 - DNA, 25 bp, Probe Sequence
tgtccaatctgttgaaggttaaata

SEQ ID NO: 98367 - DNA, 25 bp, Probe Sequence
gatgtcatagttgtgatggtcaatg

SEQ ID NO: 98368 - DNA, 25 bp, Probe Sequence
agatgtcatagttgtgatggtcaat

SEQ ID NO: 98369 - DNA, 25 bp, Probe Sequence
gagatgtcatagttgtgatggtcaa

SEQ ID NO: 98370 - DNA, 25 bp, Probe Sequence
ctgagatgtcatagttgtgatggtc

SEQ ID NO: 98371 - DNA, 25 bp, Probe Sequence
gtctgagatgtcatagttgtgatgg

SEQ ID NO: 98372 - DNA, 25 bp, Probe Sequence
ggtctgagatgtcatagttgtgatg

SEQ ID NO: 98373 - DNA, 25 bp, Probe Sequence
aggtctgagatgtcatagttgtgat

SEQ ID NO: 98374 - DNA, 25 bp, Probe Sequence
gaagaaggagtaagaggtggaagag

SEQ ID NO: 98375 - DNA, 25 bp, Probe Sequence
caaggtctgagatgtcatagttgtg

SEQ ID NO: 98376 - DNA, 25 bp, Probe Sequence
tctgagatgtcatagttgtgatggt

SEQ ID NO: 98377 - DNA, 25 bp, Probe Sequence
aaggtctgagatgtcatagttgtga

SEQ ID NO: 98378 - DNA, 25 bp, Probe Sequence
tgagatgtcatagttgtgatggtca

SEQ ID NO: 98379 - DNA, 25 bp, Probe Sequence
gatcacgatgctatactccactagg

SEQ ID NO: 98380 - DNA, 25 bp, Probe Sequence
ccaaggtctgagatgtcatagttgt

SEQ ID NO: 98381 - DNA, 25 bp, Probe Sequence
atcacgatgctatactccactaggt

SEQ ID NO: 98382 - DNA, 25 bp, Probe Sequence
gaaagaggatgggatttagagatga

SEQ ID NO: 98383 - DNA, 25 bp, Probe Sequence
atttagagatgatttcccaacgatg

SEQ ID NO: 98384 - DNA, 25 bp, Probe Sequence
ggaagaaggagtaagaggtggaaga

SEQ ID NO: 98385 - DNA, 25 bp, Probe Sequence
cgaaagaggatgggatttagagatg

SEQ ID NO: 98386 - DNA, 25 bp, Probe Sequence
gatttagagatgatttcccaacgat

SEQ ID NO: 98387 - DNA, 25 bp, Probe Sequence
agaggatgggatttagagatgattt

SEQ ID NO: 98388 - DNA, 25 bp, Probe Sequence
aagaggatgggatttagagatgatt

SEQ ID NO: 98389 - DNA, 25 bp, Probe Sequence
aaagaggatgggatttagagatgat

SEQ ID NO: 98390 - DNA, 25 bp, Probe Sequence
gaggatgggatttagagatgatttc

SEQ ID NO: 98391 - DNA, 25 bp, Probe Sequence
cggaagaagtatagagcagataaca

SEQ ID NO: 98392 - DNA, 25 bp, Probe Sequence
acggaagaagtatagagcagataac

SEQ ID NO: 98393 - DNA, 25 bp, Probe Sequence
ggaagaagtatagagcagataacac

SEQ ID NO: 98394 - DNA, 25 bp, Probe Sequence
ttgtagagttggatgactatgtgtt

SEQ ID NO: 98395 - DNA, 25 bp, Probe Sequence
tacggaagaagtatagagcagataa

SEQ ID NO: 98396 - DNA, 25 bp, Probe Sequence
aacaattctgtcaactccatcacaa

SEQ ID NO: 98397 - DNA, 25 bp, Probe Sequence
gcagtaccattaccagtaatctcaa

SEQ ID NO: 98398 - DNA, 25 bp, Probe Sequence
agatacggaagaagtatagagcaga

SEQ ID NO: 98399 - DNA, 25 bp, Probe Sequence
gagatacggaagaagtatagagcag

SEQ ID NO: 98400 - DNA, 25 bp, Probe Sequence
agtatagagcagataacactgtgaa

SEQ ID NO: 98401 - DNA, 25 bp, Probe Sequence
aagtatagagcagataacactgtga

SEQ ID NO: 98402 - DNA, 25 bp, Probe Sequence
gatacggaagaagtatagagcagat

SEQ ID NO: 98403 - DNA, 25 bp, Probe Sequence
agaagtatagagcagataacactgt

SEQ ID NO: 98404 - DNA, 25 bp, Probe Sequence
gaagtatagagcagataacactgtg

SEQ ID NO: 98405 - DNA, 25 bp, Probe Sequence
gtgaagttaagctgtaagagagaga

SEQ ID NO: 98406 - DNA, 25 bp, Probe Sequence
ggagatacggaagaagtatagagca

SEQ ID NO: 98407 - DNA, 25 bp, Probe Sequence
ggtgaagttaagctgtaagagagag

SEQ ID NO: 98408 - DNA, 25 bp, Probe Sequence
tgaagttaagctgtaagagagagaa

SEQ ID NO: 98409 - DNA, 25 bp, Probe Sequence
acagaagtctataggaacaggcata

SEQ ID NO: 98410 - DNA, 25 bp, Probe Sequence
gctgatgattctagtgccttgaata

SEQ ID NO: 98411 - DNA, 25 bp, Probe Sequence
gaagaagtatagagcagataacact

SEQ ID NO: 98412 - DNA, 25 bp, Probe Sequence
ataggaacaggcatagaaagtgaaa

SEQ ID NO: 98413 - DNA, 25 bp, Probe Sequence
taggaacaggcatagaaagtgaaag

SEQ ID NO: 98414 - DNA, 25 bp, Probe Sequence
atacggaagaagtatagagcagata

SEQ ID NO: 98415 - DNA, 25 bp, Probe Sequence
tccagcagaattactacttgtgata

SEQ ID NO: 98416 - DNA, 25 bp, Probe Sequence
ttccagcagaattactacttgtgat

SEQ ID NO: 98417 - DNA, 25 bp, Probe Sequence
cttccagcagaattactacttgtga

SEQ ID NO: 98418 - DNA, 25 bp, Probe Sequence
ccagcagaattactacttgtgatag

SEQ ID NO: 98419 - DNA, 25 bp, Probe Sequence
tcttccagcagaattactacttgtg

SEQ ID NO: 98420 - DNA, 25 bp, Probe Sequence
ggttctatcagtagtgtaatccatt

SEQ ID NO: 98421 - DNA, 25 bp, Probe Sequence
catggttctatcagtagtgtaatcc

SEQ ID NO: 98422 - DNA, 25 bp, Probe Sequence
tggttctatcagtagtgtaatccat

SEQ ID NO: 98423 - DNA, 25 bp, Probe Sequence
atggttctatcagtagtgtaatcca

SEQ ID NO: 98424 - DNA, 25 bp, Probe Sequence
taatgaagaggtaatttgggacagt

SEQ ID NO: 98425 - DNA, 25 bp, Probe Sequence
gaactttgtggactgtaagatttgt

SEQ ID NO: 98426 - DNA, 25 bp, Probe Sequence
tgaactttgtggactgtaagatttg

SEQ ID NO: 98427 - DNA, 25 bp, Probe Sequence
ggtaatgaagaggtaatttgggaca

SEQ ID NO: 98428 - DNA, 25 bp, Probe Sequence
gtaatgaagaggtaatttgggacag

SEQ ID NO: 98429 - DNA, 25 bp, Probe Sequence
tgtccactacatggttctatcagta

SEQ ID NO: 98430 - DNA, 25 bp, Probe Sequence
ttgggtaatgaagaggtaatttggg

SEQ ID NO: 98431 - DNA, 25 bp, Probe Sequence
tttgggtaatgaagaggtaatttgg

SEQ ID NO: 98432 - DNA, 25 bp, Probe Sequence
aatgaagaggtaatttgggacagtg

SEQ ID NO: 98433 - DNA, 25 bp, Probe Sequence
cagcagaattactacttgtgatagt

SEQ ID NO: 98434 - DNA, 25 bp, Probe Sequence
gggtaatgaagaggtaatttgggac

SEQ ID NO: 98435 - DNA, 25 bp, Probe Sequence
tgagtgcttaatacaatgtaatgtg

SEQ ID NO: 98436 - DNA, 25 bp, Probe Sequence
ttcttccagcagaattactacttgt

SEQ ID NO: 98437 - DNA, 25 bp, Probe Sequence
atgaactttgtggactgtaagattt

SEQ ID NO: 98438 - DNA, 25 bp, Probe Sequence
tgggtaatgaagaggtaatttggga

SEQ ID NO: 98439 - DNA, 25 bp, Probe Sequence
ccattaaggaatcagagatcattga

SEQ ID NO: 98440 - DNA, 25 bp, Probe Sequence
cttggtcaagaacatgaagatcagg

SEQ ID NO: 98441 - DNA, 25 bp, Probe Sequence
tttgatgccatttctaagacctaca

SEQ ID NO: 98442 - DNA, 25 bp, Probe Sequence
ttgatgccatttctaagacctacag

SEQ ID NO: 98443 - DNA, 25 bp, Probe Sequence
ctttgatgccatttctaagacctac

SEQ ID NO: 98444 - DNA, 25 bp, Probe Sequence
cctttgatgccatttctaagaccta

SEQ ID NO: 98445 - DNA, 25 bp, Probe Sequence
tgtattcaccaagtctccctatcag

SEQ ID NO: 98446 - DNA, 25 bp, Probe Sequence
ctgtattcaccaagtctccctatca

SEQ ID NO: 98447 - DNA, 25 bp, Probe Sequence
ttggtcaagaacatgaagatcaggt

SEQ ID NO: 98448 - DNA, 25 bp, Probe Sequence
gcttggtcaagaacatgaagatcag

SEQ ID NO: 98449 - DNA, 25 bp, Probe Sequence
gtcaagaacatgaagatcaggtcct

SEQ ID NO: 98450 - DNA, 25 bp, Probe Sequence
cccattaaggaatcagagatcattg

SEQ ID NO: 98451 - DNA, 25 bp, Probe Sequence
tggtcaagaacatgaagatcaggtc

SEQ ID NO: 98452 - DNA, 25 bp, Probe Sequence
actgtattcaccaagtctccctatc

SEQ ID NO: 98453 - DNA, 25 bp, Probe Sequence
ctggaaggagactgtattcaccaag

SEQ ID NO: 98454 - DNA, 25 bp, Probe Sequence
acctttgatgccatttctaagacct

SEQ ID NO: 98455 - DNA, 25 bp, Probe Sequence
cacctttgatgccatttctaagacc

SEQ ID NO: 98456 - DNA, 25 bp, Probe Sequence
ccacctttgatgccatttctaagac

SEQ ID NO: 98457 - DNA, 25 bp, Probe Sequence
tcagagatcattgatttcttcctgg

SEQ ID NO: 98458 - DNA, 25 bp, Probe Sequence
gacctctggaaggagactgtattca

SEQ ID NO: 98459 - DNA, 25 bp, Probe Sequence
tcaagaacatgaagatcaggtcctg

SEQ ID NO: 98460 - DNA, 25 bp, Probe Sequence
tctggaaggagactgtattcaccaa

SEQ ID NO: 98461 - DNA, 25 bp, Probe Sequence
ggtcaagaacatgaagatcaggtcc

SEQ ID NO: 98462 - DNA, 25 bp, Probe Sequence
tgatgccatttctaagacctacagc

SEQ ID NO: 98463 - DNA, 25 bp, Probe Sequence
ccattaaggaatcagagatcattga

SEQ ID NO: 98464 - DNA, 25 bp, Probe Sequence
cttggtcaagaacatgaagatcagg

SEQ ID NO: 98465 - DNA, 25 bp, Probe Sequence
tttgatgccatttctaagacctaca

SEQ ID NO: 98466 - DNA, 25 bp, Probe Sequence
ttgatgccatttctaagacctacag

SEQ ID NO: 98467 - DNA, 25 bp, Probe Sequence
ctttgatgccatttctaagacctac

SEQ ID NO: 98468 - DNA, 25 bp, Probe Sequence
cctttgatgccatttctaagaccta

SEQ ID NO: 98469 - DNA, 25 bp, Probe Sequence
tgtattcaccaagtctccctatcag

SEQ ID NO: 98470 - DNA, 25 bp, Probe Sequence
ctgtattcaccaagtctccctatca

SEQ ID NO: 98471 - DNA, 25 bp, Probe Sequence
ttggtcaagaacatgaagatcaggt

SEQ ID NO: 98472 - DNA, 25 bp, Probe Sequence
gcttggtcaagaacatgaagatcag

SEQ ID NO: 98473 - DNA, 25 bp, Probe Sequence
gtcaagaacatgaagatcaggtcct

SEQ ID NO: 98474 - DNA, 25 bp, Probe Sequence
cccattaaggaatcagagatcattg

SEQ ID NO: 98475 - DNA, 25 bp, Probe Sequence
tggtcaagaacatgaagatcaggtc

SEQ ID NO: 98476 - DNA, 25 bp, Probe Sequence
actgtattcaccaagtctccctatc

SEQ ID NO: 98477 - DNA, 25 bp, Probe Sequence
ctggaaggagactgtattcaccaag

SEQ ID NO: 98478 - DNA, 25 bp, Probe Sequence
acctttgatgccatttctaagacct

SEQ ID NO: 98479 - DNA, 25 bp, Probe Sequence
cacctttgatgccatttctaagacc

SEQ ID NO: 98480 - DNA, 25 bp, Probe Sequence
ccacctttgatgccatttctaagac

SEQ ID NO: 98481 - DNA, 25 bp, Probe Sequence
tcagagatcattgatttcttcctgg

SEQ ID NO: 98482 - DNA, 25 bp, Probe Sequence
gacctctggaaggagactgtattca

SEQ ID NO: 98483 - DNA, 25 bp, Probe Sequence
tcaagaacatgaagatcaggtcctg

SEQ ID NO: 98484 - DNA, 25 bp, Probe Sequence
tctggaaggagactgtattcaccaa

SEQ ID NO: 98485 - DNA, 25 bp, Probe Sequence
ggtcaagaacatgaagatcaggtcc

SEQ ID NO: 98486 - DNA, 25 bp, Probe Sequence
tgatgccatttctaagacctacagc

SEQ ID NO: 98487 - DNA, 25 bp, Probe Sequence
atgattcttaacacagccttccttc

SEQ ID NO: 98488 - DNA, 25 bp, Probe Sequence
gatgattcttaacacagccttcctt

SEQ ID NO: 98489 - DNA, 25 bp, Probe Sequence
tgattcttaacacagccttccttct

SEQ ID NO: 98490 - DNA, 25 bp, Probe Sequence
gattcttaacacagccttccttctg

SEQ ID NO: 98491 - DNA, 25 bp, Probe Sequence
cgatgattcttaacacagccttcct

SEQ ID NO: 98492 - DNA, 25 bp, Probe Sequence
tggcttaaagtgaaggaaataaagg

SEQ ID NO: 98493 - DNA, 25 bp, Probe Sequence
ggcttaaagtgaaggaaataaaggt

SEQ ID NO: 98494 - DNA, 25 bp, Probe Sequence
atgattggcttaaagtgaaggaaat

SEQ ID NO: 98495 - DNA, 25 bp, Probe Sequence
tgattggcttaaagtgaaggaaata

SEQ ID NO: 98496 - DNA, 25 bp, Probe Sequence
catgattggcttaaagtgaaggaaa

SEQ ID NO: 98497 - DNA, 25 bp, Probe Sequence
ttggcttaaagtgaaggaaataaag

SEQ ID NO: 98498 - DNA, 25 bp, Probe Sequence
ccgatgattcttaacacagccttcc

SEQ ID NO: 98499 - DNA, 25 bp, Probe Sequence
gattggcttaaagtgaaggaaataa

SEQ ID NO: 98500 - DNA, 25 bp, Probe Sequence
attcttaacacagccttccttctgc

SEQ ID NO: 98501 - DNA, 25 bp, Probe Sequence
attggcttaaagtgaaggaaataaa

SEQ ID NO: 98502 - DNA, 25 bp, Probe Sequence
gcttaaagtgaaggaaataaaggta

SEQ ID NO: 98503 - DNA, 25 bp, Probe Sequence
tcgctttgatgctggagaactaatc

SEQ ID NO: 98504 - DNA, 25 bp, Probe Sequence
ctcgctttgatgctggagaactaat

SEQ ID NO: 98505 - DNA, 25 bp, Probe Sequence
cccgatgattcttaacacagccttc

SEQ ID NO: 98506 - DNA, 25 bp, Probe Sequence
ctttgatgctggagaactaatcacc

SEQ ID NO: 98507 - DNA, 25 bp, Probe Sequence
tggagaactaatcacccagagagag

SEQ ID NO: 98508 - DNA, 25 bp, Probe Sequence
atcacaactgagatcctcaagtcag

SEQ ID NO: 98509 - DNA, 25 bp, Probe Sequence
gagaactaatcacccagagagagct

SEQ ID NO: 98510 - DNA, 25 bp, Probe Sequence
ggagaactaatcacccagagagagc

SEQ ID NO: 98511 - DNA, 25 bp, Probe Sequence
atgattcttaacacagccttccttc

SEQ ID NO: 98512 - DNA, 25 bp, Probe Sequence
gatgattcttaacacagccttcctt

SEQ ID NO: 98513 - DNA, 25 bp, Probe Sequence
tgattcttaacacagccttccttct

SEQ ID NO: 98514 - DNA, 25 bp, Probe Sequence
gattcttaacacagccttccttctg

SEQ ID NO: 98515 - DNA, 25 bp, Probe Sequence
cgatgattcttaacacagccttcct

SEQ ID NO: 98516 - DNA, 25 bp, Probe Sequence
tggcttaaagtgaaggaaataaagg

SEQ ID NO: 98517 - DNA, 25 bp, Probe Sequence
ggcttaaagtgaaggaaataaaggt

SEQ ID NO: 98518 - DNA, 25 bp, Probe Sequence
atgattggcttaaagtgaaggaaat

SEQ ID NO: 98519 - DNA, 25 bp, Probe Sequence
tgattggcttaaagtgaaggaaata

SEQ ID NO: 98520 - DNA, 25 bp, Probe Sequence
catgattggcttaaagtgaaggaaa

SEQ ID NO: 98521 - DNA, 25 bp, Probe Sequence
ttggcttaaagtgaaggaaataaag

SEQ ID NO: 98522 - DNA, 25 bp, Probe Sequence
ccgatgattcttaacacagccttcc

SEQ ID NO: 98523 - DNA, 25 bp, Probe Sequence
gattggcttaaagtgaaggaaataa

SEQ ID NO: 98524 - DNA, 25 bp, Probe Sequence
attcttaacacagccttccttctgc

SEQ ID NO: 98525 - DNA, 25 bp, Probe Sequence
attggcttaaagtgaaggaaataaa

SEQ ID NO: 98526 - DNA, 25 bp, Probe Sequence
gcttaaagtgaaggaaataaaggta

SEQ ID NO: 98527 - DNA, 25 bp, Probe Sequence
tcgctttgatgctggagaactaatc

SEQ ID NO: 98528 - DNA, 25 bp, Probe Sequence
ctcgctttgatgctggagaactaat

SEQ ID NO: 98529 - DNA, 25 bp, Probe Sequence
cccgatgattcttaacacagccttc

SEQ ID NO: 98530 - DNA, 25 bp, Probe Sequence
ctttgatgctggagaactaatcacc

SEQ ID NO: 98531 - DNA, 25 bp, Probe Sequence
tggagaactaatcacccagagagag

SEQ ID NO: 98532 - DNA, 25 bp, Probe Sequence
atcacaactgagatcctcaagtcag

SEQ ID NO: 98533 - DNA, 25 bp, Probe Sequence
gagaactaatcacccagagagagct

SEQ ID NO: 98534 - DNA, 25 bp, Probe Sequence
ggagaactaatcacccagagagagc

SEQ ID NO: 98535 - DNA, 25 bp, Probe Sequence
aagaagaccaactaaggactctcaa

SEQ ID NO: 98536 - DNA, 25 bp, Probe Sequence
caagaagaccaactaaggactctca

SEQ ID NO: 98537 - DNA, 25 bp, Probe Sequence
ccaagaagaccaactaaggactctc

SEQ ID NO: 98538 - DNA, 25 bp, Probe Sequence
gcttagctctctacatacctatcat

SEQ ID NO: 98539 - DNA, 25 bp, Probe Sequence
aagccactatcatctgatgtgttag

SEQ ID NO: 98540 - DNA, 25 bp, Probe Sequence
aaaggaggaatgataacccaatctg

SEQ ID NO: 98541 - DNA, 25 bp, Probe Sequence
caactaaggactctcaaaccatacc

SEQ ID NO: 98542 - DNA, 25 bp, Probe Sequence
ccaactaaggactctcaaaccatac

SEQ ID NO: 98543 - DNA, 25 bp, Probe Sequence
accaactaaggactctcaaaccata

SEQ ID NO: 98544 - DNA, 25 bp, Probe Sequence
gaagaccaactaaggactctcaaac

SEQ ID NO: 98545 - DNA, 25 bp, Probe Sequence
agaagaccaactaaggactctcaaa

SEQ ID NO: 98546 - DNA, 25 bp, Probe Sequence
agccactatcatctgatgtgttagg

SEQ ID NO: 98547 - DNA, 25 bp, Probe Sequence
cttagctctctacatacctatcatg

SEQ ID NO: 98548 - DNA, 25 bp, Probe Sequence
gaccaactaaggactctcaaaccat

SEQ ID NO: 98549 - DNA, 25 bp, Probe Sequence
aatttcattcctcaaacctttcagg

SEQ ID NO: 98550 - DNA, 25 bp, Probe Sequence
taggtcaaagccactatcatctgat

SEQ ID NO: 98551 - DNA, 25 bp, Probe Sequence
aagcaaccatgttaactgtattgac

SEQ ID NO: 98552 - DNA, 25 bp, Probe Sequence
caagcaaccatgttaactgtattga

SEQ ID NO: 98553 - DNA, 25 bp, Probe Sequence
gatgtgttagggatgggttctgatt

SEQ ID NO: 98554 - DNA, 25 bp, Probe Sequence
ctagtcatttcacttctaacttggt

SEQ ID NO: 98555 - DNA, 25 bp, Probe Sequence
aactaaggactctcaaaccatacct

SEQ ID NO: 98556 - DNA, 25 bp, Probe Sequence
aagaccaactaaggactctcaaacc

SEQ ID NO: 98557 - DNA, 25 bp, Probe Sequence
ctaggtcaaagccactatcatctga

SEQ ID NO: 98558 - DNA, 25 bp, Probe Sequence
agcttagctctctacatacctatca

SEQ ID NO: 98559 - DNA, 25 bp, Probe Sequence
ttatacttaggagagagagcaacca

SEQ ID NO: 98560 - DNA, 25 bp, Probe Sequence
tatacttaggagagagagcaaccac

SEQ ID NO: 98561 - DNA, 25 bp, Probe Sequence
ttcatattcaaccagcaacagtcaa

SEQ ID NO: 98562 - DNA, 25 bp, Probe Sequence
atattcaaccagcaacagtcaacat

SEQ ID NO: 98563 - DNA, 25 bp, Probe Sequence
tattcaaccagcaacagtcaacatt

SEQ ID NO: 98564 - DNA, 25 bp, Probe Sequence
tcatattcaaccagcaacagtcaac

SEQ ID NO: 98565 - DNA, 25 bp, Probe Sequence
gtaggctaatcacactctgtaagtc

SEQ ID NO: 98566 - DNA, 25 bp, Probe Sequence
ggctaatcacactctgtaagtcaat

SEQ ID NO: 98567 - DNA, 25 bp, Probe Sequence
taggctaatcacactctgtaagtca

SEQ ID NO: 98568 - DNA, 25 bp, Probe Sequence
catattcaaccagcaacagtcaaca

SEQ ID NO: 98569 - DNA, 25 bp, Probe Sequence
attggtaggctaatcacactctgta

SEQ ID NO: 98570 - DNA, 25 bp, Probe Sequence
ttggtaggctaatcacactctgtaa

SEQ ID NO: 98571 - DNA, 25 bp, Probe Sequence
aggctaatcacactctgtaagtcaa

SEQ ID NO: 98572 - DNA, 25 bp, Probe Sequence
ggtaggctaatcacactctgtaagt

SEQ ID NO: 98573 - DNA, 25 bp, Probe Sequence
tggtaggctaatcacactctgtaag

SEQ ID NO: 98574 - DNA, 25 bp, Probe Sequence
gctaatcacactctgtaagtcaata

SEQ ID NO: 98575 - DNA, 25 bp, Probe Sequence
tcacactctgtaagtcaatattcca

SEQ ID NO: 98576 - DNA, 25 bp, Probe Sequence
cagtcaacatttcccttaatagcag

SEQ ID NO: 98577 - DNA, 25 bp, Probe Sequence
agtcaacatttcccttaatagcagt

SEQ ID NO: 98578 - DNA, 25 bp, Probe Sequence
gcaacagtcaacatttcccttaata

SEQ ID NO: 98579 - DNA, 25 bp, Probe Sequence
acagtcaacatttcccttaatagca

SEQ ID NO: 98580 - DNA, 25 bp, Probe Sequence
aagtcacatctactgaagctgattg

SEQ ID NO: 98581 - DNA, 25 bp, Probe Sequence
tttatacttaggagagagagcaacc

SEQ ID NO: 98582 - DNA, 25 bp, Probe Sequence
agaactctttaaggaaatgtcagca

SEQ ID NO: 98583 - DNA, 25 bp, Probe Sequence
atacacaccaagtaatccacgttaa

SEQ ID NO: 98584 - DNA, 25 bp, Probe Sequence
gatacacaccaagtaatccacgtta

SEQ ID NO: 98585 - DNA, 25 bp, Probe Sequence
tacacaccaagtaatccacgttaag

SEQ ID NO: 98586 - DNA, 25 bp, Probe Sequence
agctgatacacaccaagtaatccac

SEQ ID NO: 98587 - DNA, 25 bp, Probe Sequence
tgatacacaccaagtaatccacgtt

SEQ ID NO: 98588 - DNA, 25 bp, Probe Sequence
ctgatacacaccaagtaatccacgt

SEQ ID NO: 98589 - DNA, 25 bp, Probe Sequence
gctgatacacaccaagtaatccacg

SEQ ID NO: 98590 - DNA, 25 bp, Probe Sequence
acacaccaagtaatccacgttaagg

SEQ ID NO: 98591 - DNA, 25 bp, Probe Sequence
cacaccaagtaatccacgttaaggg

SEQ ID NO: 98592 - DNA, 25 bp, Probe Sequence
acaccaagtaatccacgttaagggg

SEQ ID NO: 98593 - DNA, 25 bp, Probe Sequence
ccaagtaatccacgttaaggggtcc

SEQ ID NO: 98594 - DNA, 25 bp, Probe Sequence
accaagtaatccacgttaaggggtc

SEQ ID NO: 98595 - DNA, 25 bp, Probe Sequence
caccaagtaatccacgttaaggggt

SEQ ID NO: 98596 - DNA, 25 bp, Probe Sequence
tagacctaactgttaccatctgact

SEQ ID NO: 98597 - DNA, 25 bp, Probe Sequence
ttagacctaactgttaccatctgac

SEQ ID NO: 98598 - DNA, 25 bp, Probe Sequence
atctgactgaggttactctggtatt

SEQ ID NO: 98599 - DNA, 25 bp, Probe Sequence
acctaactgttaccatctgactgag

SEQ ID NO: 98600 - DNA, 25 bp, Probe Sequence
gacctaactgttaccatctgactga

SEQ ID NO: 98601 - DNA, 25 bp, Probe Sequence
catctgactgaggttactctggtat

SEQ ID NO: 98602 - DNA, 25 bp, Probe Sequence
agacctaactgttaccatctgactg

SEQ ID NO: 98603 - DNA, 25 bp, Probe Sequence
aactgttaccatctgactgaggtta

SEQ ID NO: 98604 - DNA, 25 bp, Probe Sequence
taactgttaccatctgactgaggtt

SEQ ID NO: 98605 - DNA, 25 bp, Probe Sequence
tactctggtatttatctcttcgctg

SEQ ID NO: 98606 - DNA, 25 bp, Probe Sequence
ttaccatctgactgaggttactctg

SEQ ID NO: 98607 - DNA, 25 bp, Probe Sequence
gttaccatctgactgaggttactct

SEQ ID NO: 98608 - DNA, 25 bp, Probe Sequence
cttcgctgctgaaataataatggat

SEQ ID NO: 98609 - DNA, 25 bp, Probe Sequence
ttactctggtatttatctcttcgct

SEQ ID NO: 98610 - DNA, 25 bp, Probe Sequence
gttactctggtatttatctcttcgc

SEQ ID NO: 98611 - DNA, 25 bp, Probe Sequence
ctcttcgctgctgaaataataatgg

SEQ ID NO: 98612 - DNA, 25 bp, Probe Sequence
tctcttcgctgctgaaataataatg

SEQ ID NO: 98613 - DNA, 25 bp, Probe Sequence
ttcgctgctgaaataataatggatt

SEQ ID NO: 98614 - DNA, 25 bp, Probe Sequence
tcttcgctgctgaaataataatgga

SEQ ID NO: 98615 - DNA, 25 bp, Probe Sequence
tgttaccatctgactgaggttactc

SEQ ID NO: 98616 - DNA, 25 bp, Probe Sequence
ctgttaccatctgactgaggttact

SEQ ID NO: 98617 - DNA, 25 bp, Probe Sequence
ctaactgttaccatctgactgaggt

SEQ ID NO: 98618 - DNA, 25 bp, Probe Sequence
cctaactgttaccatctgactgagg

SEQ ID NO: 98619 - DNA, 25 bp, Probe Sequence
actgttaccatctgactgaggttac

SEQ ID NO: 98620 - DNA, 25 bp, Probe Sequence
aactcctacaactcaagcattcctc

SEQ ID NO: 98621 - DNA, 25 bp, Probe Sequence
tcgaatgtattggtgactgttgatt

SEQ ID NO: 98622 - DNA, 25 bp, Probe Sequence
gaactcctacaactcaagcattcct

SEQ ID NO: 98623 - DNA, 25 bp, Probe Sequence
gtattggtgactgttgatttgttga

SEQ ID NO: 98624 - DNA, 25 bp, Probe Sequence
tgtattggtgactgttgatttgttg

SEQ ID NO: 98625 - DNA, 25 bp, Probe Sequence
cgaatgtattggtgactgttgattt

SEQ ID NO: 98626 - DNA, 25 bp, Probe Sequence
atgtattggtgactgttgatttgtt

SEQ ID NO: 98627 - DNA, 25 bp, Probe Sequence
aatgtattggtgactgttgatttgt

SEQ ID NO: 98628 - DNA, 25 bp, Probe Sequence
tattggtgactgttgatttgttgaa

SEQ ID NO: 98629 - DNA, 25 bp, Probe Sequence
gaatgtattggtgactgttgatttg

SEQ ID NO: 98630 - DNA, 25 bp, Probe Sequence
attggtgactgttgatttgttgaac

SEQ ID NO: 98631 - DNA, 25 bp, Probe Sequence
tgaactcctacaactcaagcattcc

SEQ ID NO: 98632 - DNA, 25 bp, Probe Sequence
ctccttaagtcgaatgtattggtga

SEQ ID NO: 98633 - DNA, 25 bp, Probe Sequence
gtcgaatgtattggtgactgttgat

SEQ ID NO: 98634 - DNA, 25 bp, Probe Sequence
actccttaagtcgaatgtattggtg

SEQ ID NO: 98635 - DNA, 25 bp, Probe Sequence
tactccttaagtcgaatgtattggt

SEQ ID NO: 98636 - DNA, 25 bp, Probe Sequence
ttgtaactttggttgatgttaaggc

SEQ ID NO: 98637 - DNA, 25 bp, Probe Sequence
tccttaagtcgaatgtattggtgac

SEQ ID NO: 98638 - DNA, 25 bp, Probe Sequence
ttgaactcctacaactcaagcattc

SEQ ID NO: 98639 - DNA, 25 bp, Probe Sequence
ttactccttaagtcgaatgtattgg

SEQ ID NO: 98640 - DNA, 25 bp, Probe Sequence
catgtgatatgatgctcggctgatt

SEQ ID NO: 98641 - DNA, 25 bp, Probe Sequence
ctaagggtgttgttgtgtgatcttg

SEQ ID NO: 98642 - DNA, 25 bp, Probe Sequence
aataaagctcactgttactcgcaaa

SEQ ID NO: 98643 - DNA, 25 bp, Probe Sequence
aaataaagctcactgttactcgcaa

SEQ ID NO: 98644 - DNA, 25 bp, Probe Sequence
aactcctacaactcaagcattcctc

SEQ ID NO: 98645 - DNA, 25 bp, Probe Sequence
tcgaatgtattggtgactgttgatt

SEQ ID NO: 98646 - DNA, 25 bp, Probe Sequence
gaactcctacaactcaagcattcct

SEQ ID NO: 98647 - DNA, 25 bp, Probe Sequence
gtattggtgactgttgatttgttga

SEQ ID NO: 98648 - DNA, 25 bp, Probe Sequence
tgtattggtgactgttgatttgttg

SEQ ID NO: 98649 - DNA, 25 bp, Probe Sequence
cgaatgtattggtgactgttgattt

SEQ ID NO: 98650 - DNA, 25 bp, Probe Sequence
atgtattggtgactgttgatttgtt

SEQ ID NO: 98651 - DNA, 25 bp, Probe Sequence
aatgtattggtgactgttgatttgt

SEQ ID NO: 98652 - DNA, 25 bp, Probe Sequence
tattggtgactgttgatttgttgaa

SEQ ID NO: 98653 - DNA, 25 bp, Probe Sequence
gaatgtattggtgactgttgatttg

SEQ ID NO: 98654 - DNA, 25 bp, Probe Sequence
attggtgactgttgatttgttgaac

SEQ ID NO: 98655 - DNA, 25 bp, Probe Sequence
tgaactcctacaactcaagcattcc

SEQ ID NO: 98656 - DNA, 25 bp, Probe Sequence
ctccttaagtcgaatgtattggtga

SEQ ID NO: 98657 - DNA, 25 bp, Probe Sequence
gtcgaatgtattggtgactgttgat

SEQ ID NO: 98658 - DNA, 25 bp, Probe Sequence
actccttaagtcgaatgtattggtg

SEQ ID NO: 98659 - DNA, 25 bp, Probe Sequence
tactccttaagtcgaatgtattggt

SEQ ID NO: 98660 - DNA, 25 bp, Probe Sequence
ttgtaactttggttgatgttaaggc

SEQ ID NO: 98661 - DNA, 25 bp, Probe Sequence
tccttaagtcgaatgtattggtgac

SEQ ID NO: 98662 - DNA, 25 bp, Probe Sequence
ttgaactcctacaactcaagcattc

SEQ ID NO: 98663 - DNA, 25 bp, Probe Sequence
ttactccttaagtcgaatgtattgg

SEQ ID NO: 98664 - DNA, 25 bp, Probe Sequence
catgtgatatgatgctcggctgatt

SEQ ID NO: 98665 - DNA, 25 bp, Probe Sequence
ctaagggtgttgttgtgtgatcttg

SEQ ID NO: 98666 - DNA, 25 bp, Probe Sequence
aataaagctcactgttactcgcaaa

SEQ ID NO: 98667 - DNA, 25 bp, Probe Sequence
aaataaagctcactgttactcgcaa

SEQ ID NO: 98668 - DNA, 25 bp, Probe Sequence
gaacaaggtagcataagatggagat

SEQ ID NO: 98669 - DNA, 25 bp, Probe Sequence
gccttcattctcacctagtatcaat

SEQ ID NO: 98670 - DNA, 25 bp, Probe Sequence
acaaggtagcataagatggagataa

SEQ ID NO: 98671 - DNA, 25 bp, Probe Sequence
aacaaggtagcataagatggagata

SEQ ID NO: 98672 - DNA, 25 bp, Probe Sequence
aattactcttccaggtccaatagtg

SEQ ID NO: 98673 - DNA, 25 bp, Probe Sequence
agccttcattctcacctagtatcaa

SEQ ID NO: 98674 - DNA, 25 bp, Probe Sequence
attactcttccaggtccaatagtga

SEQ ID NO: 98675 - DNA, 25 bp, Probe Sequence
ggaacaaggtagcataagatggaga

SEQ ID NO: 98676 - DNA, 25 bp, Probe Sequence
cttccaggtccaatagtgacttaat

SEQ ID NO: 98677 - DNA, 25 bp, Probe Sequence
ttcttaattactcttccaggtccaa

SEQ ID NO: 98678 - DNA, 25 bp, Probe Sequence
aatagttggtactctgattcctctg

SEQ ID NO: 98679 - DNA, 25 bp, Probe Sequence
tcttaattactcttccaggtccaat

SEQ ID NO: 98680 - DNA, 25 bp, Probe Sequence
caaggtagcataagatggagataat

SEQ ID NO: 98681 - DNA, 25 bp, Probe Sequence
tcttccaggtccaatagtgacttaa

SEQ ID NO: 98682 - DNA, 25 bp, Probe Sequence
atagttggtactctgattcctctgg

SEQ ID NO: 98683 - DNA, 25 bp, Probe Sequence
ttccaggtccaatagtgacttaata

SEQ ID NO: 98684 - DNA, 25 bp, Probe Sequence
ctcttccaggtccaatagtgactta

SEQ ID NO: 98685 - DNA, 25 bp, Probe Sequence
gagccttcattctcacctagtatca

SEQ ID NO: 98686 - DNA, 25 bp, Probe Sequence
aatagtgacttaatattgccagcca

SEQ ID NO: 98687 - DNA, 25 bp, Probe Sequence
tccaggtccaatagtgacttaatat

SEQ ID NO: 98688 - DNA, 25 bp, Probe Sequence
atagtgacttaatattgccagccaa

SEQ ID NO: 98689 - DNA, 25 bp, Probe Sequence
ttactcttccaggtccaatagtgac

SEQ ID NO: 98690 - DNA, 25 bp, Probe Sequence
taattactcttccaggtccaatagt

SEQ ID NO: 98691 - DNA, 25 bp, Probe Sequence
ggagccttcattctcacctagtatc

SEQ ID NO: 98692 - DNA, 25 bp, Probe Sequence
accagcagaacacctgtaagtataa

SEQ ID NO: 98693 - DNA, 25 bp, Probe Sequence
caccagcagaacacctgtaagtata

SEQ ID NO: 98694 - DNA, 25 bp, Probe Sequence
ggcttgattctcttatttctgtcca

SEQ ID NO: 98695 - DNA, 25 bp, Probe Sequence
tgattctcttatttctgtccagcat

SEQ ID NO: 98696 - DNA, 25 bp, Probe Sequence
ttgattctcttatttctgtccagca

SEQ ID NO: 98697 - DNA, 25 bp, Probe Sequence
cttgattctcttatttctgtccagc

SEQ ID NO: 98698 - DNA, 25 bp, Probe Sequence
gcttgattctcttatttctgtccag

SEQ ID NO: 98699 - DNA, 25 bp, Probe Sequence
tttgaaatcataaacattgggcttg

SEQ ID NO: 98700 - DNA, 25 bp, Probe Sequence
cccattctgtgtatagagttctttg

SEQ ID NO: 98701 - DNA, 25 bp, Probe Sequence
gggcttgattctcttatttctgtcc

SEQ ID NO: 98702 - DNA, 25 bp, Probe Sequence
tcccattctgtgtatagagttcttt

SEQ ID NO: 98703 - DNA, 25 bp, Probe Sequence
atcccattctgtgtatagagttctt

SEQ ID NO: 98704 - DNA, 25 bp, Probe Sequence
aatcccattctgtgtatagagttct

SEQ ID NO: 98705 - DNA, 25 bp, Probe Sequence
ccatgtaatagcacagttattggta

SEQ ID NO: 98706 - DNA, 25 bp, Probe Sequence
ccattctgtgtatagagttctttgt

SEQ ID NO: 98707 - DNA, 25 bp, Probe Sequence
gattctcttatttctgtccagcata

SEQ ID NO: 98708 - DNA, 25 bp, Probe Sequence
ttgaaatcataaacattgggcttgt

SEQ ID NO: 98709 - DNA, 25 bp, Probe Sequence
tgaaatcataaacattgggcttgtc

SEQ ID NO: 98710 - DNA, 25 bp, Probe Sequence
tgtgtatagagttctttgtctttcc

SEQ ID NO: 98711 - DNA, 25 bp, Probe Sequence
tgtaatagcacagttattggtaatg

SEQ ID NO: 98712 - DNA, 25 bp, Probe Sequence
gtgtatagagttctttgtctttcct

SEQ ID NO: 98713 - DNA, 25 bp, Probe Sequence
aaatcccattctgtgtatagagttc

SEQ ID NO: 98714 - DNA, 25 bp, Probe Sequence
agcagaacacctgtaagtataaaca

SEQ ID NO: 98715 - DNA, 25 bp, Probe Sequence
agtataaacaaatgtcaggaaggaa

SEQ ID NO: 98716 - DNA, 25 bp, Probe Sequence
actaggttagaacattgcttaatcc

SEQ ID NO: 98717 - DNA, 25 bp, Probe Sequence
cacattcatttagcccagatttcaa

SEQ ID NO: 98718 - DNA, 25 bp, Probe Sequence
acattacacattcatttagcccaga

SEQ ID NO: 98719 - DNA, 25 bp, Probe Sequence
tacacattcatttagcccagatttc

SEQ ID NO: 98720 - DNA, 25 bp, Probe Sequence
cattacacattcatttagcccagat

SEQ ID NO: 98721 - DNA, 25 bp, Probe Sequence
acattcatttagcccagatttcaaa

SEQ ID NO: 98722 - DNA, 25 bp, Probe Sequence
ctaggttagaacattgcttaatcct

SEQ ID NO: 98723 - DNA, 25 bp, Probe Sequence
gccagatactgctagattgtaatat

SEQ ID NO: 98724 - DNA, 25 bp, Probe Sequence
acacattcatttagcccagatttca

SEQ ID NO: 98725 - DNA, 25 bp, Probe Sequence
tacattacacattcatttagcccag

SEQ ID NO: 98726 - DNA, 25 bp, Probe Sequence
tttatccttgtgggtcagatttcag

SEQ ID NO: 98727 - DNA, 25 bp, Probe Sequence
gctgccaaagaatagacttaatgaa

SEQ ID NO: 98728 - DNA, 25 bp, Probe Sequence
ttacacattcatttagcccagattt

SEQ ID NO: 98729 - DNA, 25 bp, Probe Sequence
taggttagaacattgcttaatcctt

SEQ ID NO: 98730 - DNA, 25 bp, Probe Sequence
attacacattcatttagcccagatt

SEQ ID NO: 98731 - DNA, 25 bp, Probe Sequence
ttacattacacattcatttagccca

SEQ ID NO: 98732 - DNA, 25 bp, Probe Sequence
agccaagactttaactttcattaca

SEQ ID NO: 98733 - DNA, 25 bp, Probe Sequence
cagccagatactgctagattgtaat

SEQ ID NO: 98734 - DNA, 25 bp, Probe Sequence
ttatccttgtgggtcagatttcaga

SEQ ID NO: 98735 - DNA, 25 bp, Probe Sequence
aaacattagtcgtgaaatccctagc

SEQ ID NO: 98736 - DNA, 25 bp, Probe Sequence
tatccttgtgggtcagatttcagag

SEQ ID NO: 98737 - DNA, 25 bp, Probe Sequence
agccagatactgctagattgtaata

SEQ ID NO: 98738 - DNA, 25 bp, Probe Sequence
acacgaatactgaaattgttggatt

SEQ ID NO: 98739 - DNA, 25 bp, Probe Sequence
tgccaaagaatagacttaatgaaga

SEQ ID NO: 98740 - DNA, 25 bp, Probe Sequence
acagagccagatcctatctcaataa

SEQ ID NO: 98741 - DNA, 25 bp, Probe Sequence
gacagagccagatcctatctcaata

SEQ ID NO: 98742 - DNA, 25 bp, Probe Sequence
tgacagagccagatcctatctcaat

SEQ ID NO: 98743 - DNA, 25 bp, Probe Sequence
gatcacttgaggtcagaaattcgag

SEQ ID NO: 98744 - DNA, 25 bp, Probe Sequence
atcacttgaggtcagaaattcgaga

SEQ ID NO: 98745 - DNA, 25 bp, Probe Sequence
cagagccagatcctatctcaataaa

SEQ ID NO: 98746 - DNA, 25 bp, Probe Sequence
ggatcacttgaggtcagaaattcga

SEQ ID NO: 98747 - DNA, 25 bp, Probe Sequence
gtgacagagccagatcctatctcaa

SEQ ID NO: 98748 - DNA, 25 bp, Probe Sequence
catagctaaaccctgtctctactaa

SEQ ID NO: 98749 - DNA, 25 bp, Probe Sequence
atagctaaaccctgtctctactaaa

SEQ ID NO: 98750 - DNA, 25 bp, Probe Sequence
acatagctaaaccctgtctctacta

SEQ ID NO: 98751 - DNA, 25 bp, Probe Sequence
tcacttgaggtcagaaattcgagac

SEQ ID NO: 98752 - DNA, 25 bp, Probe Sequence
aacatagctaaaccctgtctctact

SEQ ID NO: 98753 - DNA, 25 bp, Probe Sequence
caacatagctaaaccctgtctctac

SEQ ID NO: 98754 - DNA, 25 bp, Probe Sequence
cggatcacttgaggtcagaaattcg

SEQ ID NO: 98755 - DNA, 25 bp, Probe Sequence
gcggatcacttgaggtcagaaattc

SEQ ID NO: 98756 - DNA, 25 bp, Probe Sequence
ccaacatagctaaaccctgtctcta

SEQ ID NO: 98757 - DNA, 25 bp, Probe Sequence
caagagaatcgcttgaactctggag

SEQ ID NO: 98758 - DNA, 25 bp, Probe Sequence
agagccagatcctatctcaataaaa

SEQ ID NO: 98759 - DNA, 25 bp, Probe Sequence
ggtgacagagccagatcctatctca

SEQ ID NO: 98760 - DNA, 25 bp, Probe Sequence
tggtgacagagccagatcctatctc

SEQ ID NO: 98761 - DNA, 25 bp, Probe Sequence
tagctaaaccctgtctctactaaaa

SEQ ID NO: 98762 - DNA, 25 bp, Probe Sequence
aagagaatcgcttgaactctggagg

SEQ ID NO: 98763 - DNA, 25 bp, Probe Sequence
ggcggatcacttgaggtcagaaatt

SEQ ID NO: 98764 - DNA, 25 bp, Probe Sequence
atctaggtgaaccattgtaagttgc

SEQ ID NO: 98765 - DNA, 25 bp, Probe Sequence
aatctaggtgaaccattgtaagttg

SEQ ID NO: 98766 - DNA, 25 bp, Probe Sequence
atatagaagagaagtgatgagcacc

SEQ ID NO: 98767 - DNA, 25 bp, Probe Sequence
tatagaagagaagtgatgagcacca

SEQ ID NO: 98768 - DNA, 25 bp, Probe Sequence
atacctacctactgaacagtctgag

SEQ ID NO: 98769 - DNA, 25 bp, Probe Sequence
tatacctacctactgaacagtctga

SEQ ID NO: 98770 - DNA, 25 bp, Probe Sequence
atagaagagaagtgatgagcaccat

SEQ ID NO: 98771 - DNA, 25 bp, Probe Sequence
accattccttaggtagagacttcaa

SEQ ID NO: 98772 - DNA, 25 bp, Probe Sequence
tagaagagaagtgatgagcaccatt

SEQ ID NO: 98773 - DNA, 25 bp, Probe Sequence
tgtctctgtctgtgtgctaaataaa

SEQ ID NO: 98774 - DNA, 25 bp, Probe Sequence
atgtctctgtctgtgtgctaaataa

SEQ ID NO: 98775 - DNA, 25 bp, Probe Sequence
aggtagagacttcaaataatggcat

SEQ ID NO: 98776 - DNA, 25 bp, Probe Sequence
caccattccttaggtagagacttca

SEQ ID NO: 98777 - DNA, 25 bp, Probe Sequence
taggtagagacttcaaataatggca

SEQ ID NO: 98778 - DNA, 25 bp, Probe Sequence
tacctactgaacagtctgagcttag

SEQ ID NO: 98779 - DNA, 25 bp, Probe Sequence
ctacctactgaacagtctgagctta

SEQ ID NO: 98780 - DNA, 25 bp, Probe Sequence
ccattccttaggtagagacttcaaa

SEQ ID NO: 98781 - DNA, 25 bp, Probe Sequence
acctgtttactaagaaagtgttgga

SEQ ID NO: 98782 - DNA, 25 bp, Probe Sequence
agtttcacaccatcacaaagtcaaa

SEQ ID NO: 98783 - DNA, 25 bp, Probe Sequence
agaagtgatgagcaccattccttag

SEQ ID NO: 98784 - DNA, 25 bp, Probe Sequence
gagaagtgatgagcaccattcctta

SEQ ID NO: 98785 - DNA, 25 bp, Probe Sequence
ttaggtagagacttcaaataatggc

SEQ ID NO: 98786 - DNA, 25 bp, Probe Sequence
aacctgtttactaagaaagtgttgg

SEQ ID NO: 98787 - DNA, 25 bp, Probe Sequence
ggtagagacttcaaataatggcata

SEQ ID NO: 98788 - DNA, 25 bp, Probe Sequence
catagagagaagaaggacggttatc

SEQ ID NO: 98789 - DNA, 25 bp, Probe Sequence
tacatagagagaagaaggacggtta

SEQ ID NO: 98790 - DNA, 25 bp, Probe Sequence
atagagagaagaaggacggttatca

SEQ ID NO: 98791 - DNA, 25 bp, Probe Sequence
acatagagagaagaaggacggttat

SEQ ID NO: 98792 - DNA, 25 bp, Probe Sequence
tagagagaagaaggacggttatcag

SEQ ID NO: 98793 - DNA, 25 bp, Probe Sequence
ttaagagattggaagcaacctaagt

SEQ ID NO: 98794 - DNA, 25 bp, Probe Sequence
taagagattggaagcaacctaagtg

SEQ ID NO: 98795 - DNA, 25 bp, Probe Sequence
gaagaaggacggttatcagagagat

SEQ ID NO: 98796 - DNA, 25 bp, Probe Sequence
aagaaggacggttatcagagagatg

SEQ ID NO: 98797 - DNA, 25 bp, Probe Sequence
caacctaagtgcctatcaacagata

SEQ ID NO: 98798 - DNA, 25 bp, Probe Sequence
gagaagaaggacggttatcagagag

SEQ ID NO: 98799 - DNA, 25 bp, Probe Sequence
gagagaagaaggacggttatcagag

SEQ ID NO: 98800 - DNA, 25 bp, Probe Sequence
aacctaagtgcctatcaacagatat

SEQ ID NO: 98801 - DNA, 25 bp, Probe Sequence
gtacatagagagaagaaggacggtt

SEQ ID NO: 98802 - DNA, 25 bp, Probe Sequence
agaagaaggacggttatcagagaga

SEQ ID NO: 98803 - DNA, 25 bp, Probe Sequence
agagaagaaggacggttatcagaga

SEQ ID NO: 98804 - DNA, 25 bp, Probe Sequence
agagagaagaaggacggttatcaga

SEQ ID NO: 98805 - DNA, 25 bp, Probe Sequence
agtggtttgaatgaatgaataaggc

SEQ ID NO: 98806 - DNA, 25 bp, Probe Sequence
aattccttgctcatctctattctat

SEQ ID NO: 98807 - DNA, 25 bp, Probe Sequence
ttatcagagagatgggaaaggtagt

SEQ ID NO: 98808 - DNA, 25 bp, Probe Sequence
gttatcagagagatgggaaaggtag

SEQ ID NO: 98809 - DNA, 25 bp, Probe Sequence
gctgaggatggttaatgggtataaa

SEQ ID NO: 98810 - DNA, 25 bp, Probe Sequence
ttgatagcacaacagaatgactata

SEQ ID NO: 98811 - DNA, 25 bp, Probe Sequence
tgtttggaattgctcttgattgtta

SEQ ID NO: 98812 - DNA, 25 bp, Probe Sequence
tccttctacatcctccatacaactt

SEQ ID NO: 98813 - DNA, 25 bp, Probe Sequence
ttccttctacatcctccatacaact

SEQ ID NO: 98814 - DNA, 25 bp, Probe Sequence
ccttctacatcctccatacaacttg

SEQ ID NO: 98815 - DNA, 25 bp, Probe Sequence
tctaactcattaccattcgttcctt

SEQ ID NO: 98816 - DNA, 25 bp, Probe Sequence
gtctaactcattaccattcgttcct

SEQ ID NO: 98817 - DNA, 25 bp, Probe Sequence
ctacatcctccatacaacttgttct

SEQ ID NO: 98818 - DNA, 25 bp, Probe Sequence
tctacatcctccatacaacttgttc

SEQ ID NO: 98819 - DNA, 25 bp, Probe Sequence
cttctacatcctccatacaacttgt

SEQ ID NO: 98820 - DNA, 25 bp, Probe Sequence
tacatcctccatacaacttgttctt

SEQ ID NO: 98821 - DNA, 25 bp, Probe Sequence
ttctacatcctccatacaacttgtt

SEQ ID NO: 98822 - DNA, 25 bp, Probe Sequence
atctttcaaaccaactctttagcac

SEQ ID NO: 98823 - DNA, 25 bp, Probe Sequence
tttccttctacatcctccatacaac

SEQ ID NO: 98824 - DNA, 25 bp, Probe Sequence
tttagcaccttgtattagtccgttt

SEQ ID NO: 98825 - DNA, 25 bp, Probe Sequence
gctcctgacactctatcttatttct

SEQ ID NO: 98826 - DNA, 25 bp, Probe Sequence
gctccaaatcttatgttccaacttt

SEQ ID NO: 98827 - DNA, 25 bp, Probe Sequence
aaatcttatgttccaactttcccac

SEQ ID NO: 98828 - DNA, 25 bp, Probe Sequence
caaatcttatgttccaactttccca

SEQ ID NO: 98829 - DNA, 25 bp, Probe Sequence
ccaaatcttatgttccaactttccc

SEQ ID NO: 98830 - DNA, 25 bp, Probe Sequence
ggtctaactcattaccattcgttcc

SEQ ID NO: 98831 - DNA, 25 bp, Probe Sequence
tccaaatcttatgttccaactttcc

SEQ ID NO: 98832 - DNA, 25 bp, Probe Sequence
ctttagcaccttgtattagtccgtt

SEQ ID NO: 98833 - DNA, 25 bp, Probe Sequence
cttccacaccttacctcctcaattc

SEQ ID NO: 98834 - DNA, 25 bp, Probe Sequence
atttagtttcctttccatctcccta

SEQ ID NO: 98835 - DNA, 25 bp, Probe Sequence
tatttagtttcctttccatctccct

SEQ ID NO: 98836 - DNA, 25 bp, Probe Sequence
ggaggttgtgaacagatagagaatg

SEQ ID NO: 98837 - DNA, 25 bp, Probe Sequence
aggaggttgtgaacagatagagaat

SEQ ID NO: 98838 - DNA, 25 bp, Probe Sequence
aaggaggttgtgaacagatagagaa

SEQ ID NO: 98839 - DNA, 25 bp, Probe Sequence
gaggttgtgaacagatagagaatgt

SEQ ID NO: 98840 - DNA, 25 bp, Probe Sequence
ggttgtgaacagatagagaatgtga

SEQ ID NO: 98841 - DNA, 25 bp, Probe Sequence
aggttgtgaacagatagagaatgtg

SEQ ID NO: 98842 - DNA, 25 bp, Probe Sequence
gtgtgagacgacttatacagtgaag

SEQ ID NO: 98843 - DNA, 25 bp, Probe Sequence
gttgtgaacagatagagaatgtgat

SEQ ID NO: 98844 - DNA, 25 bp, Probe Sequence
tgtgtgagacgacttatacagtgaa

SEQ ID NO: 98845 - DNA, 25 bp, Probe Sequence
tgtgagacgacttatacagtgaagg

SEQ ID NO: 98846 - DNA, 25 bp, Probe Sequence
ttgtgaacagatagagaatgtgatt

SEQ ID NO: 98847 - DNA, 25 bp, Probe Sequence
agatagagaatgtgatttgctaccc

SEQ ID NO: 98848 - DNA, 25 bp, Probe Sequence
acacagaaagttataggttaggcat

SEQ ID NO: 98849 - DNA, 25 bp, Probe Sequence
gtgtgtgagacgacttatacagtga

SEQ ID NO: 98850 - DNA, 25 bp, Probe Sequence
atagagaatgtgatttgctacccag

SEQ ID NO: 98851 - DNA, 25 bp, Probe Sequence
gatagagaatgtgatttgctaccca

SEQ ID NO: 98852 - DNA, 25 bp, Probe Sequence
cagatagagaatgtgatttgctacc

SEQ ID NO: 98853 - DNA, 25 bp, Probe Sequence
aacacagaaagttataggttaggca

SEQ ID NO: 98854 - DNA, 25 bp, Probe Sequence
tgaaagatgaccaatgacaatccat

SEQ ID NO: 98855 - DNA, 25 bp, Probe Sequence
tggagaacacagaaagttataggtt

SEQ ID NO: 98856 - DNA, 25 bp, Probe Sequence
gaacacagaaagttataggttaggc

SEQ ID NO: 98857 - DNA, 25 bp, Probe Sequence
atggagaacacagaaagttataggt

SEQ ID NO: 98858 - DNA, 25 bp, Probe Sequence
aagttataggttaggcatacatgaa

SEQ ID NO: 98859 - DNA, 25 bp, Probe Sequence
ctgaaagatgaccaatgacaatcca

SEQ ID NO: 98860 - DNA, 25 bp, Probe Sequence
agtaatggaatacacaggcagagta

SEQ ID NO: 98861 - DNA, 25 bp, Probe Sequence
cacacacagtaatggaatacacagg

SEQ ID NO: 98862 - DNA, 25 bp, Probe Sequence
gtaatggaatacacaggcagagtac

SEQ ID NO: 98863 - DNA, 25 bp, Probe Sequence
gtcagtggactcagtaatctgtatt

SEQ ID NO: 98864 - DNA, 25 bp, Probe Sequence
gcacacacagtaatggaatacacag

SEQ ID NO: 98865 - DNA, 25 bp, Probe Sequence
tgtcagtggactcagtaatctgtat

SEQ ID NO: 98866 - DNA, 25 bp, Probe Sequence
cagtaatggaatacacaggcagagt

SEQ ID NO: 98867 - DNA, 25 bp, Probe Sequence
acagtaatggaatacacaggcagag

SEQ ID NO: 98868 - DNA, 25 bp, Probe Sequence
ctgtcagtggactcagtaatctgta

SEQ ID NO: 98869 - DNA, 25 bp, Probe Sequence
taatggaatacacaggcagagtacc

SEQ ID NO: 98870 - DNA, 25 bp, Probe Sequence
cacagtaatggaatacacaggcaga

SEQ ID NO: 98871 - DNA, 25 bp, Probe Sequence
acacagtaatggaatacacaggcag

SEQ ID NO: 98872 - DNA, 25 bp, Probe Sequence
caagacctactgaatcagagactct

SEQ ID NO: 98873 - DNA, 25 bp, Probe Sequence
tggatagattctgacagatgataga

SEQ ID NO: 98874 - DNA, 25 bp, Probe Sequence
aattcctggattatacgtgctcttg

SEQ ID NO: 98875 - DNA, 25 bp, Probe Sequence
ttaccatagatgtcaccgagtctgt

SEQ ID NO: 98876 - DNA, 25 bp, Probe Sequence
caaaggcaagcaattctggtttata

SEQ ID NO: 98877 - DNA, 25 bp, Probe Sequence
ctctgtcagtggactcagtaatctg

SEQ ID NO: 98878 - DNA, 25 bp, Probe Sequence
gactctgtcagtggactcagtaatc

SEQ ID NO: 98879 - DNA, 25 bp, Probe Sequence
taattcctggattatacgtgctctt

SEQ ID NO: 98880 - DNA, 25 bp, Probe Sequence
aaaggcaagcaattctggtttatat

SEQ ID NO: 98881 - DNA, 25 bp, Probe Sequence
atccaagacctactgaatcagagac

SEQ ID NO: 98882 - DNA, 25 bp, Probe Sequence
catccaagacctactgaatcagaga

SEQ ID NO: 98883 - DNA, 25 bp, Probe Sequence
ctggtttctttattggaggtcctaa

SEQ ID NO: 98884 - DNA, 25 bp, Probe Sequence
aaggatatgaacagacgcttctcaa

SEQ ID NO: 98885 - DNA, 25 bp, Probe Sequence
acacctaatagtgattatgaactgc

SEQ ID NO: 98886 - DNA, 25 bp, Probe Sequence
acaaggtcaggagatcaagactatc

SEQ ID NO: 98887 - DNA, 25 bp, Probe Sequence
cacaaggtcaggagatcaagactat

SEQ ID NO: 98888 - DNA, 25 bp, Probe Sequence
tcagaatctacaaagcacttaaaca

SEQ ID NO: 98889 - DNA, 25 bp, Probe Sequence
gaaactatcatcagagtgaacagga

SEQ ID NO: 98890 - DNA, 25 bp, Probe Sequence
agaaactatcatcagagtgaacagg

SEQ ID NO: 98891 - DNA, 25 bp, Probe Sequence
actatcatcagagtgaacaggaaac

SEQ ID NO: 98892 - DNA, 25 bp, Probe Sequence
aactatcatcagagtgaacaggaaa

SEQ ID NO: 98893 - DNA, 25 bp, Probe Sequence
aaactatcatcagagtgaacaggaa

SEQ ID NO: 98894 - DNA, 25 bp, Probe Sequence
tgacaaatgggatctgaattaaagc

SEQ ID NO: 98895 - DNA, 25 bp, Probe Sequence
atagtgattatgaactgcaagatgg

SEQ ID NO: 98896 - DNA, 25 bp, Probe Sequence
aaagtgggtgaaggatatgaacaga

SEQ ID NO: 98897 - DNA, 25 bp, Probe Sequence
caaggtcaggagatcaagactatcc

SEQ ID NO: 98898 - DNA, 25 bp, Probe Sequence
aagaagacatttaactttgggaggc

SEQ ID NO: 98899 - DNA, 25 bp, Probe Sequence
ctatcatcagagtgaacaggaaacc

SEQ ID NO: 98900 - DNA, 25 bp, Probe Sequence
tcacaaggtcaggagatcaagacta

SEQ ID NO: 98901 - DNA, 25 bp, Probe Sequence
cagaatctacaaagcacttaaacaa

SEQ ID NO: 98902 - DNA, 25 bp, Probe Sequence
aagaaactatcatcagagtgaacag

SEQ ID NO: 98903 - DNA, 25 bp, Probe Sequence
agacatttaactttgggaggctgat

SEQ ID NO: 98904 - DNA, 25 bp, Probe Sequence
aagtgggtgaaggatatgaacagac

SEQ ID NO: 98905 - DNA, 25 bp, Probe Sequence
gaagacatttaactttgggaggctg

SEQ ID NO: 98906 - DNA, 25 bp, Probe Sequence
ttcagaatctacaaagcacttaaac

SEQ ID NO: 98907 - DNA, 25 bp, Probe Sequence
gacatttaactttgggaggctgatg

SEQ ID NO: 98908 - DNA, 25 bp, Probe Sequence
ccatagagagttcctaaagggttac

SEQ ID NO: 98909 - DNA, 25 bp, Probe Sequence
tccatagagagttcctaaagggtta

SEQ ID NO: 98910 - DNA, 25 bp, Probe Sequence
tttaaccaaaggaggaaagagagga

SEQ ID NO: 98911 - DNA, 25 bp, Probe Sequence
ctatcaggtaggatattccagcagc

SEQ ID NO: 98912 - DNA, 25 bp, Probe Sequence
ttaaccaaaggaggaaagagaggag

SEQ ID NO: 98913 - DNA, 25 bp, Probe Sequence
tagagagttcctaaagggttactgg

SEQ ID NO: 98914 - DNA, 25 bp, Probe Sequence
atagagagttcctaaagggttactg

SEQ ID NO: 98915 - DNA, 25 bp, Probe Sequence
catagagagttcctaaagggttact

SEQ ID NO: 98916 - DNA, 25 bp, Probe Sequence
ctccatagagagttcctaaagggtt

SEQ ID NO: 98917 - DNA, 25 bp, Probe Sequence
actggctcatgttgtaagaaattat

SEQ ID NO: 98918 - DNA, 25 bp, Probe Sequence
taaccaaaggaggaaagagaggaga

SEQ ID NO: 98919 - DNA, 25 bp, Probe Sequence
taaagggttactggctcatgttgta

SEQ ID NO: 98920 - DNA, 25 bp, Probe Sequence
aatattcaagactatcagcttctct

SEQ ID NO: 98921 - DNA, 25 bp, Probe Sequence
ctggctcatgttgtaagaaattatg

SEQ ID NO: 98922 - DNA, 25 bp, Probe Sequence
tactggctcatgttgtaagaaatta

SEQ ID NO: 98923 - DNA, 25 bp, Probe Sequence
cctatcaggtaggatattccagcag

SEQ ID NO: 98924 - DNA, 25 bp, Probe Sequence
gttactggctcatgttgtaagaaat

SEQ ID NO: 98925 - DNA, 25 bp, Probe Sequence
tatcaggtaggatattccagcagcc

SEQ ID NO: 98926 - DNA, 25 bp, Probe Sequence
ttactggctcatgttgtaagaaatt

SEQ ID NO: 98927 - DNA, 25 bp, Probe Sequence
ggttactggctcatgttgtaagaaa

SEQ ID NO: 98928 - DNA, 25 bp, Probe Sequence
cctgttctccatagagagttcctaa

SEQ ID NO: 98929 - DNA, 25 bp, Probe Sequence
ctttaaccaaaggaggaaagagagg

SEQ ID NO: 98930 - DNA, 25 bp, Probe Sequence
atgctctttaaccaaaggaggaaag

SEQ ID NO: 98931 - DNA, 25 bp, Probe Sequence
gatgctctttaaccaaaggaggaaa

SEQ ID NO: 98932 - DNA, 25 bp, Probe Sequence
aagtggtttagttgctagaagtcat

SEQ ID NO: 98933 - DNA, 25 bp, Probe Sequence
gcacaatttatagcaagagtcaaag

SEQ ID NO: 98934 - DNA, 25 bp, Probe Sequence
ttcaagtggtttagttgctagaagt

SEQ ID NO: 98935 - DNA, 25 bp, Probe Sequence
tttcaagtggtttagttgctagaag

SEQ ID NO: 98936 - DNA, 25 bp, Probe Sequence
tcaagtggtttagttgctagaagtc

SEQ ID NO: 98937 - DNA, 25 bp, Probe Sequence
caagtggtttagttgctagaagtca

SEQ ID NO: 98938 - DNA, 25 bp, Probe Sequence
agtggtttagttgctagaagtcatg

SEQ ID NO: 98939 - DNA, 25 bp, Probe Sequence
atttcaagtggtttagttgctagaa

SEQ ID NO: 98940 - DNA, 25 bp, Probe Sequence
cacaatttatagcaagagtcaaagt

SEQ ID NO: 98941 - DNA, 25 bp, Probe Sequence
tatttcaagtggtttagttgctaga

SEQ ID NO: 98942 - DNA, 25 bp, Probe Sequence
acaatttatagcaagagtcaaagtt

SEQ ID NO: 98943 - DNA, 25 bp, Probe Sequence
ttagttgctagaagtcatgagtctt

SEQ ID NO: 98944 - DNA, 25 bp, Probe Sequence
atatttcaagtggtttagttgctag

SEQ ID NO: 98945 - DNA, 25 bp, Probe Sequence
caatttatagcaagagtcaaagttt

SEQ ID NO: 98946 - DNA, 25 bp, Probe Sequence
gtttagttgctagaagtcatgagtc

SEQ ID NO: 98947 - DNA, 25 bp, Probe Sequence
ggtttagttgctagaagtcatgagt

SEQ ID NO: 98948 - DNA, 25 bp, Probe Sequence
tggtttagttgctagaagtcatgag

SEQ ID NO: 98949 - DNA, 25 bp, Probe Sequence
aatatttcaagtggtttagttgcta

SEQ ID NO: 98950 - DNA, 25 bp, Probe Sequence
gtggtttagttgctagaagtcatga

SEQ ID NO: 98951 - DNA, 25 bp, Probe Sequence
tagttgctagaagtcatgagtcttt

SEQ ID NO: 98952 - DNA, 25 bp, Probe Sequence
tttagttgctagaagtcatgagtct

SEQ ID NO: 98953 - DNA, 25 bp, Probe Sequence
gcctatgcacaatttatagcaagag

SEQ ID NO: 98954 - DNA, 25 bp, Probe Sequence
tgcacaatttatagcaagagtcaaa

SEQ ID NO: 98955 - DNA, 25 bp, Probe Sequence
atgcacaatttatagcaagagtcaa

SEQ ID NO: 98956 - DNA, 25 bp, Probe Sequence
acaccaagataccattcatcaactg

SEQ ID NO: 98957 - DNA, 25 bp, Probe Sequence
cacaccaagataccattcatcaact

SEQ ID NO: 98958 - DNA, 25 bp, Probe Sequence
gcacaccaagataccattcatcaac

SEQ ID NO: 98959 - DNA, 25 bp, Probe Sequence
tccattgttgtccttgttgagagag

SEQ ID NO: 98960 - DNA, 25 bp, Probe Sequence
aactcctccattgaaataactcctc

SEQ ID NO: 98961 - DNA, 25 bp, Probe Sequence
gtgattgagagatcctgctgctatt

SEQ ID NO: 98962 - DNA, 25 bp, Probe Sequence
taactcctccattgaaataactcct

SEQ ID NO: 98963 - DNA, 25 bp, Probe Sequence
caccaagataccattcatcaactgg

SEQ ID NO: 98964 - DNA, 25 bp, Probe Sequence
ctccattgttgtccttgttgagaga

SEQ ID NO: 98965 - DNA, 25 bp, Probe Sequence
actcctccattgaaataactcctcc

SEQ ID NO: 98966 - DNA, 25 bp, Probe Sequence
ataactcctccattgaaataactcc

SEQ ID NO: 98967 - DNA, 25 bp, Probe Sequence
ggcacaccaagataccattcatcaa

SEQ ID NO: 98968 - DNA, 25 bp, Probe Sequence
atcacctccattgttgtccttgttg

SEQ ID NO: 98969 - DNA, 25 bp, Probe Sequence
atccaataggagacaccagttctga

SEQ ID NO: 98970 - DNA, 25 bp, Probe Sequence
gatcacctccattgttgtccttgtt

SEQ ID NO: 98971 - DNA, 25 bp, Probe Sequence
gatccaataggagacaccagttctg

SEQ ID NO: 98972 - DNA, 25 bp, Probe Sequence
ctcctccattgaaataactcctccc

SEQ ID NO: 98973 - DNA, 25 bp, Probe Sequence
tgattgagagatcctgctgctattt

SEQ ID NO: 98974 - DNA, 25 bp, Probe Sequence
gcaaataactcctccattgaaataa

SEQ ID NO: 98975 - DNA, 25 bp, Probe Sequence
ccaataggagacaccagttctgact

SEQ ID NO: 98976 - DNA, 25 bp, Probe Sequence
agtgatttcttccgaaccctcatag

SEQ ID NO: 98977 - DNA, 25 bp, Probe Sequence
cctccattgttgtccttgttgagag

SEQ ID NO: 98978 - DNA, 25 bp, Probe Sequence
gagtgatttcttccgaaccctcata

SEQ ID NO: 98979 - DNA, 25 bp, Probe Sequence
accaagataccattcatcaactggc

SEQ ID NO: 98980 - DNA, 25 bp, Probe Sequence
acaccaagataccattcatcaactg

SEQ ID NO: 98981 - DNA, 25 bp, Probe Sequence
cacaccaagataccattcatcaact

SEQ ID NO: 98982 - DNA, 25 bp, Probe Sequence
gcacaccaagataccattcatcaac

SEQ ID NO: 98983 - DNA, 25 bp, Probe Sequence
tccattgttgtccttgttgagagag

SEQ ID NO: 98984 - DNA, 25 bp, Probe Sequence
aactcctccattgaaataactcctc

SEQ ID NO: 98985 - DNA, 25 bp, Probe Sequence
gtgattgagagatcctgctgctatt

SEQ ID NO: 98986 - DNA, 25 bp, Probe Sequence
taactcctccattgaaataactcct

SEQ ID NO: 98987 - DNA, 25 bp, Probe Sequence
caccaagataccattcatcaactgg

SEQ ID NO: 98988 - DNA, 25 bp, Probe Sequence
ctccattgttgtccttgttgagaga

SEQ ID NO: 98989 - DNA, 25 bp, Probe Sequence
actcctccattgaaataactcctcc

SEQ ID NO: 98990 - DNA, 25 bp, Probe Sequence
ataactcctccattgaaataactcc

SEQ ID NO: 98991 - DNA, 25 bp, Probe Sequence
ggcacaccaagataccattcatcaa

SEQ ID NO: 98992 - DNA, 25 bp, Probe Sequence
atcacctccattgttgtccttgttg

SEQ ID NO: 98993 - DNA, 25 bp, Probe Sequence
atccaataggagacaccagttctga

SEQ ID NO: 98994 - DNA, 25 bp, Probe Sequence
gatcacctccattgttgtccttgtt

SEQ ID NO: 98995 - DNA, 25 bp, Probe Sequence
gatccaataggagacaccagttctg

SEQ ID NO: 98996 - DNA, 25 bp, Probe Sequence
ctcctccattgaaataactcctccc

SEQ ID NO: 98997 - DNA, 25 bp, Probe Sequence
tgattgagagatcctgctgctattt

SEQ ID NO: 98998 - DNA, 25 bp, Probe Sequence
gcaaataactcctccattgaaataa

SEQ ID NO: 98999 - DNA, 25 bp, Probe Sequence
ccaataggagacaccagttctgact

SEQ ID NO: 99000 - DNA, 25 bp, Probe Sequence
agtgatttcttccgaaccctcatag

SEQ ID NO: 99001 - DNA, 25 bp, Probe Sequence
cctccattgttgtccttgttgagag

SEQ ID NO: 99002 - DNA, 25 bp, Probe Sequence
gagtgatttcttccgaaccctcata

SEQ ID NO: 99003 - DNA, 25 bp, Probe Sequence
accaagataccattcatcaactggc

SEQ ID NO: 99004 - DNA, 25 bp, Probe Sequence
cagaattaggtaggaagagagaggc

SEQ ID NO: 99005 - DNA, 25 bp, Probe Sequence
gcagaattaggtaggaagagagagg

SEQ ID NO: 99006 - DNA, 25 bp, Probe Sequence
cagtaatgatggtttgcttggtaat

SEQ ID NO: 99007 - DNA, 25 bp, Probe Sequence
tgcagaattaggtaggaagagagag

SEQ ID NO: 99008 - DNA, 25 bp, Probe Sequence
agtaatgatggtttgcttggtaata

SEQ ID NO: 99009 - DNA, 25 bp, Probe Sequence
tgatggtttgcttggtaataataga

SEQ ID NO: 99010 - DNA, 25 bp, Probe Sequence
gatacaatgtcacacaggaaacaag

SEQ ID NO: 99011 - DNA, 25 bp, Probe Sequence
gtaatgatggtttgcttggtaataa

SEQ ID NO: 99012 - DNA, 25 bp, Probe Sequence
gttcggatacaatgtcacacaggaa

SEQ ID NO: 99013 - DNA, 25 bp, Probe Sequence
ggatacaatgtcacacaggaaacaa

SEQ ID NO: 99014 - DNA, 25 bp, Probe Sequence
acaggaaacaagctatgaccattag

SEQ ID NO: 99015 - DNA, 25 bp, Probe Sequence
gatggtttgcttggtaataatagaa

SEQ ID NO: 99016 - DNA, 25 bp, Probe Sequence
atgatggtttgcttggtaataatag

SEQ ID NO: 99017 - DNA, 25 bp, Probe Sequence
cacaggaaacaagctatgaccatta

SEQ ID NO: 99018 - DNA, 25 bp, Probe Sequence
tttgaggttccagtaatgatggttt

SEQ ID NO: 99019 - DNA, 25 bp, Probe Sequence
atacaatgtcacacaggaaacaagc

SEQ ID NO: 99020 - DNA, 25 bp, Probe Sequence
caggaaacaagctatgaccattagg

SEQ ID NO: 99021 - DNA, 25 bp, Probe Sequence
cggttggagagttaattagcagagc

SEQ ID NO: 99022 - DNA, 25 bp, Probe Sequence
ttgaggttccagtaatgatggtttg

SEQ ID NO: 99023 - DNA, 25 bp, Probe Sequence
atgtcaccttctcatgggcatattt

SEQ ID NO: 99024 - DNA, 25 bp, Probe Sequence
aatgtcaccttctcatgggcatatt

SEQ ID NO: 99025 - DNA, 25 bp, Probe Sequence
aatgatggtttgcttggtaataata

SEQ ID NO: 99026 - DNA, 25 bp, Probe Sequence
taatgatggtttgcttggtaataat

SEQ ID NO: 99027 - DNA, 25 bp, Probe Sequence
ccagtaatgatggtttgcttggtaa

SEQ ID NO: 99028 - DNA, 25 bp, Probe Sequence
tcagatgaggttgatgataagtcac

SEQ ID NO: 99029 - DNA, 25 bp, Probe Sequence
gtcagatgaggttgatgataagtca

SEQ ID NO: 99030 - DNA, 25 bp, Probe Sequence
tgtcagatgaggttgatgataagtc

SEQ ID NO: 99031 - DNA, 25 bp, Probe Sequence
agatgaggttgatgataagtcacac

SEQ ID NO: 99032 - DNA, 25 bp, Probe Sequence
cagatgaggttgatgataagtcaca

SEQ ID NO: 99033 - DNA, 25 bp, Probe Sequence
atgtcagatgaggttgatgataagt

SEQ ID NO: 99034 - DNA, 25 bp, Probe Sequence
aatgtcagatgaggttgatgataag

SEQ ID NO: 99035 - DNA, 25 bp, Probe Sequence
gctatgtggagtttgaggaagtata

SEQ ID NO: 99036 - DNA, 25 bp, Probe Sequence
ccttacaatccaaatgcgtctttaa

SEQ ID NO: 99037 - DNA, 25 bp, Probe Sequence
gatgaggttgatgataagtcacacc

SEQ ID NO: 99038 - DNA, 25 bp, Probe Sequence
ttattctcccttacaatccaaatgc

SEQ ID NO: 99039 - DNA, 25 bp, Probe Sequence
ttaagctaacttgaagtgtgagatg

SEQ ID NO: 99040 - DNA, 25 bp, Probe Sequence
taagctaacttgaagtgtgagatgc

SEQ ID NO: 99041 - DNA, 25 bp, Probe Sequence
tattctcccttacaatccaaatgcg

SEQ ID NO: 99042 - DNA, 25 bp, Probe Sequence
atgtggagtttgaggaagtataacg

SEQ ID NO: 99043 - DNA, 25 bp, Probe Sequence
tcttcagaaataattccagcagtct

SEQ ID NO: 99044 - DNA, 25 bp, Probe Sequence
ggtattgtgacagccaaatgaaata

SEQ ID NO: 99045 - DNA, 25 bp, Probe Sequence
aaagaggaaagtaagtcaagatagc

SEQ ID NO: 99046 - DNA, 25 bp, Probe Sequence
cctaatgaatgacagacttgggttc

SEQ ID NO: 99047 - DNA, 25 bp, Probe Sequence
cccttacaatccaaatgcgtcttta

SEQ ID NO: 99048 - DNA, 25 bp, Probe Sequence
gcacagttcttcagaaataattcca

SEQ ID NO: 99049 - DNA, 25 bp, Probe Sequence
gttcttcagaaataattccagcagt

SEQ ID NO: 99050 - DNA, 25 bp, Probe Sequence
cagttcttcagaaataattccagca

SEQ ID NO: 99051 - DNA, 25 bp, Probe Sequence
acagttcttcagaaataattccagc

SEQ ID NO: 99052 - DNA, 25 bp, Probe Sequence
agacaggaactaagtacaggaacaa

SEQ ID NO: 99053 - DNA, 25 bp, Probe Sequence
aagacaggaactaagtacaggaaca

SEQ ID NO: 99054 - DNA, 25 bp, Probe Sequence
aaggaagctatgtgaagaatggtag

SEQ ID NO: 99055 - DNA, 25 bp, Probe Sequence
gaaggaagctatgtgaagaatggta

SEQ ID NO: 99056 - DNA, 25 bp, Probe Sequence
ctgaaggaagctatgtgaagaatgg

SEQ ID NO: 99057 - DNA, 25 bp, Probe Sequence
aggtaaatcccagaatcaacagtta

SEQ ID NO: 99058 - DNA, 25 bp, Probe Sequence
gaggtaaatcccagaatcaacagtt

SEQ ID NO: 99059 - DNA, 25 bp, Probe Sequence
ggtaaatcccagaatcaacagttaa

SEQ ID NO: 99060 - DNA, 25 bp, Probe Sequence
cagaatcaacagttaatgtggctgg

SEQ ID NO: 99061 - DNA, 25 bp, Probe Sequence
tgaaggaagctatgtgaagaatggt

SEQ ID NO: 99062 - DNA, 25 bp, Probe Sequence
aaagacaggaactaagtacaggaac

SEQ ID NO: 99063 - DNA, 25 bp, Probe Sequence
gacaggaactaagtacaggaacaaa

SEQ ID NO: 99064 - DNA, 25 bp, Probe Sequence
aatcccagaatcaacagttaatgtg

SEQ ID NO: 99065 - DNA, 25 bp, Probe Sequence
attaaacaatgggcaaatgacatga

SEQ ID NO: 99066 - DNA, 25 bp, Probe Sequence
ttaaacaatgggcaaatgacatgag

SEQ ID NO: 99067 - DNA, 25 bp, Probe Sequence
ccagaatcaacagttaatgtggctg

SEQ ID NO: 99068 - DNA, 25 bp, Probe Sequence
aaatcccagaatcaacagttaatgt

SEQ ID NO: 99069 - DNA, 25 bp, Probe Sequence
taaggaggtaaatcccagaatcaac

SEQ ID NO: 99070 - DNA, 25 bp, Probe Sequence
aaacaatgggcaaatgacatgagta

SEQ ID NO: 99071 - DNA, 25 bp, Probe Sequence
taaacaatgggcaaatgacatgagt

SEQ ID NO: 99072 - DNA, 25 bp, Probe Sequence
cagtaataaggaggtaaatcccaga

SEQ ID NO: 99073 - DNA, 25 bp, Probe Sequence
tcagtaataaggaggtaaatcccag

SEQ ID NO: 99074 - DNA, 25 bp, Probe Sequence
ataaggaggtaaatcccagaatcaa

SEQ ID NO: 99075 - DNA, 25 bp, Probe Sequence
aataaggaggtaaatcccagaatca

SEQ ID NO: 99076 - DNA, 25 bp, Probe Sequence
gaaggcattgttatcatagaaggtg

SEQ ID NO: 99077 - DNA, 25 bp, Probe Sequence
agaaggcattgttatcatagaaggt

SEQ ID NO: 99078 - DNA, 25 bp, Probe Sequence
tccagaagaaggcattgttatcata

SEQ ID NO: 99079 - DNA, 25 bp, Probe Sequence
tactccagaagaaggcattgttatc

SEQ ID NO: 99080 - DNA, 25 bp, Probe Sequence
ccagaagaaggcattgttatcatag

SEQ ID NO: 99081 - DNA, 25 bp, Probe Sequence
ctccagaagaaggcattgttatcat

SEQ ID NO: 99082 - DNA, 25 bp, Probe Sequence
aagaaggcattgttatcatagaagg

SEQ ID NO: 99083 - DNA, 25 bp, Probe Sequence
cagaagaaggcattgttatcataga

SEQ ID NO: 99084 - DNA, 25 bp, Probe Sequence
aattcctattgctagtgatgtggtc

SEQ ID NO: 99085 - DNA, 25 bp, Probe Sequence
aaggcattgttatcatagaaggtga

SEQ ID NO: 99086 - DNA, 25 bp, Probe Sequence
aggcattgttatcatagaaggtgac

SEQ ID NO: 99087 - DNA, 25 bp, Probe Sequence
gtactccagaagaaggcattgttat

SEQ ID NO: 99088 - DNA, 25 bp, Probe Sequence
tattgctagtgatgtggtcattgta

SEQ ID NO: 99089 - DNA, 25 bp, Probe Sequence
cattgttatcatagaaggtgacagc

SEQ ID NO: 99090 - DNA, 25 bp, Probe Sequence
gcattgttatcatagaaggtgacag

SEQ ID NO: 99091 - DNA, 25 bp, Probe Sequence
attgctagtgatgtggtcattgtaa

SEQ ID NO: 99092 - DNA, 25 bp, Probe Sequence
actccagaagaaggcattgttatca

SEQ ID NO: 99093 - DNA, 25 bp, Probe Sequence
atgttcattgtgagccaaggttaat

SEQ ID NO: 99094 - DNA, 25 bp, Probe Sequence
agaagaaggcattgttatcatagaa

SEQ ID NO: 99095 - DNA, 25 bp, Probe Sequence
tgttcattgtgagccaaggttaatt

SEQ ID NO: 99096 - DNA, 25 bp, Probe Sequence
ctattgctagtgatgtggtcattgt

SEQ ID NO: 99097 - DNA, 25 bp, Probe Sequence
ggcattgttatcatagaaggtgaca

SEQ ID NO: 99098 - DNA, 25 bp, Probe Sequence
gaagaaggcattgttatcatagaag

SEQ ID NO: 99099 - DNA, 25 bp, Probe Sequence
aatgttcattgtgagccaaggttaa

SEQ ID NO: 99100 - DNA, 25 bp, Probe Sequence
aagcattagattctcataaggagca

SEQ ID NO: 99101 - DNA, 25 bp, Probe Sequence
caagcattagattctcataaggagc

SEQ ID NO: 99102 - DNA, 25 bp, Probe Sequence
ctatattgtgtcaggctgtcttgaa

SEQ ID NO: 99103 - DNA, 25 bp, Probe Sequence
agcattagattctcataaggagcac

SEQ ID NO: 99104 - DNA, 25 bp, Probe Sequence
tatattgtgtcaggctgtcttgaac

SEQ ID NO: 99105 - DNA, 25 bp, Probe Sequence
agtgacagatcatcaagcattagat

SEQ ID NO: 99106 - DNA, 25 bp, Probe Sequence
cagtgacagatcatcaagcattaga

SEQ ID NO: 99107 - DNA, 25 bp, Probe Sequence
actatattgtgtcaggctgtcttga

SEQ ID NO: 99108 - DNA, 25 bp, Probe Sequence
gtgacagatcatcaagcattagatt

SEQ ID NO: 99109 - DNA, 25 bp, Probe Sequence
acagtgacagatcatcaagcattag

SEQ ID NO: 99110 - DNA, 25 bp, Probe Sequence
gacagtgacagatcatcaagcatta

SEQ ID NO: 99111 - DNA, 25 bp, Probe Sequence
cagatcatcaagcattagattctca

SEQ ID NO: 99112 - DNA, 25 bp, Probe Sequence
acagatcatcaagcattagattctc

SEQ ID NO: 99113 - DNA, 25 bp, Probe Sequence
gacagatcatcaagcattagattct

SEQ ID NO: 99114 - DNA, 25 bp, Probe Sequence
tgacagatcatcaagcattagattc

SEQ ID NO: 99115 - DNA, 25 bp, Probe Sequence
cattagattctcataaggagcacgc

SEQ ID NO: 99116 - DNA, 25 bp, Probe Sequence
gcattagattctcataaggagcacg

SEQ ID NO: 99117 - DNA, 25 bp, Probe Sequence
tcaagcattagattctcataaggag

SEQ ID NO: 99118 - DNA, 25 bp, Probe Sequence
atcaagcattagattctcataagga

SEQ ID NO: 99119 - DNA, 25 bp, Probe Sequence
catcaagcattagattctcataagg

SEQ ID NO: 99120 - DNA, 25 bp, Probe Sequence
attagattctcataaggagcacgca

SEQ ID NO: 99121 - DNA, 25 bp, Probe Sequence
cactatattgtgtcaggctgtcttg

SEQ ID NO: 99122 - DNA, 25 bp, Probe Sequence
ttagattctcataaggagcacgcaa

SEQ ID NO: 99123 - DNA, 25 bp, Probe Sequence
tcactatattgtgtcaggctgtctt

SEQ ID NO: 99124 - DNA, 25 bp, Probe Sequence
tggagtgaagattattgctacaaga

SEQ ID NO: 99125 - DNA, 25 bp, Probe Sequence
ttggagtgaagattattgctacaag

SEQ ID NO: 99126 - DNA, 25 bp, Probe Sequence
gcaacacatattacactacagatcc

SEQ ID NO: 99127 - DNA, 25 bp, Probe Sequence
cacatattacactacagatcctcca

SEQ ID NO: 99128 - DNA, 25 bp, Probe Sequence
acacatattacactacagatcctcc

SEQ ID NO: 99129 - DNA, 25 bp, Probe Sequence
acatattacactacagatcctccag

SEQ ID NO: 99130 - DNA, 25 bp, Probe Sequence
ggagtgaagattattgctacaagat

SEQ ID NO: 99131 - DNA, 25 bp, Probe Sequence
catattacactacagatcctccaga

SEQ ID NO: 99132 - DNA, 25 bp, Probe Sequence
actagcaacacatattacactacag

SEQ ID NO: 99133 - DNA, 25 bp, Probe Sequence
agcaacacatattacactacagatc

SEQ ID NO: 99134 - DNA, 25 bp, Probe Sequence
ctagcaacacatattacactacaga

SEQ ID NO: 99135 - DNA, 25 bp, Probe Sequence
aactagcaacacatattacactaca

SEQ ID NO: 99136 - DNA, 25 bp, Probe Sequence
tagcaacacatattacactacagat

SEQ ID NO: 99137 - DNA, 25 bp, Probe Sequence
caacacatattacactacagatcct

SEQ ID NO: 99138 - DNA, 25 bp, Probe Sequence
gagtgaagattattgctacaagatg

SEQ ID NO: 99139 - DNA, 25 bp, Probe Sequence
tcagaatgaacatgataccataacg

SEQ ID NO: 99140 - DNA, 25 bp, Probe Sequence
agtgaagattattgctacaagatgt

SEQ ID NO: 99141 - DNA, 25 bp, Probe Sequence
atattacactacagatcctccagat

SEQ ID NO: 99142 - DNA, 25 bp, Probe Sequence
aacacatattacactacagatcctc

SEQ ID NO: 99143 - DNA, 25 bp, Probe Sequence
aatctgagtaagtctaaagttggca

SEQ ID NO: 99144 - DNA, 25 bp, Probe Sequence
atctgagtaagtctaaagttggcat

SEQ ID NO: 99145 - DNA, 25 bp, Probe Sequence
agcccacatattacaacttcagaat

SEQ ID NO: 99146 - DNA, 25 bp, Probe Sequence
tgagtttaacccaataggaaagaca

SEQ ID NO: 99147 - DNA, 25 bp, Probe Sequence
tctgagtaagtctaaagttggcata

SEQ ID NO: 99148 - DNA, 25 bp, Probe Sequence
ttgtgacttacttatctgtatcggt

SEQ ID NO: 99149 - DNA, 25 bp, Probe Sequence
attgtgacttacttatctgtatcgg

SEQ ID NO: 99150 - DNA, 25 bp, Probe Sequence
gacttacttatctgtatcggtcagg

SEQ ID NO: 99151 - DNA, 25 bp, Probe Sequence
tgtgacttacttatctgtatcggtc

SEQ ID NO: 99152 - DNA, 25 bp, Probe Sequence
gcctattgtgacttacttatctgta

SEQ ID NO: 99153 - DNA, 25 bp, Probe Sequence
tataaagaattactggtcgggttcc

SEQ ID NO: 99154 - DNA, 25 bp, Probe Sequence
gtataaagaattactggtcgggttc

SEQ ID NO: 99155 - DNA, 25 bp, Probe Sequence
aaccacatactaatttgaaagggaa

SEQ ID NO: 99156 - DNA, 25 bp, Probe Sequence
accacatactaatttgaaagggaaa

SEQ ID NO: 99157 - DNA, 25 bp, Probe Sequence
aaaccacatactaatttgaaaggga

SEQ ID NO: 99158 - DNA, 25 bp, Probe Sequence
ggtcagaagtttaagatcagcctag

SEQ ID NO: 99159 - DNA, 25 bp, Probe Sequence
gtcagaagtttaagatcagcctagc

SEQ ID NO: 99160 - DNA, 25 bp, Probe Sequence
ccacatactaatttgaaagggaaag

SEQ ID NO: 99161 - DNA, 25 bp, Probe Sequence
ggcctattgtgacttacttatctgt

SEQ ID NO: 99162 - DNA, 25 bp, Probe Sequence
agaagtttaagatcagcctagccaa

SEQ ID NO: 99163 - DNA, 25 bp, Probe Sequence
ttacttatctgtatcggtcagggtc

SEQ ID NO: 99164 - DNA, 25 bp, Probe Sequence
cttacttatctgtatcggtcagggt

SEQ ID NO: 99165 - DNA, 25 bp, Probe Sequence
acttacttatctgtatcggtcaggg

SEQ ID NO: 99166 - DNA, 25 bp, Probe Sequence
cggcctattgtgacttacttatctg

SEQ ID NO: 99167 - DNA, 25 bp, Probe Sequence
gaagtttaagatcagcctagccaac

SEQ ID NO: 99168 - DNA, 25 bp, Probe Sequence
tcagaagtttaagatcagcctagcc

SEQ ID NO: 99169 - DNA, 25 bp, Probe Sequence
agtataaagaattactggtcgggtt

SEQ ID NO: 99170 - DNA, 25 bp, Probe Sequence
aggtcagaagtttaagatcagccta

SEQ ID NO: 99171 - DNA, 25 bp, Probe Sequence
agtttaagatcagcctagccaacat

SEQ ID NO: 99172 - DNA, 25 bp, Probe Sequence
ttagacattgacttaggcgaggatt

SEQ ID NO: 99173 - DNA, 25 bp, Probe Sequence
atcttcacaatcacacatctgacaa

SEQ ID NO: 99174 - DNA, 25 bp, Probe Sequence
aatcttcacaatcacacatctgaca

SEQ ID NO: 99175 - DNA, 25 bp, Probe Sequence
gatcctcctctctcaccttatacaa

SEQ ID NO: 99176 - DNA, 25 bp, Probe Sequence
aatcaactaagatggatcaaggact

SEQ ID NO: 99177 - DNA, 25 bp, Probe Sequence
atcaactaagatggatcaaggactt

SEQ ID NO: 99178 - DNA, 25 bp, Probe Sequence
tcaactaagatggatcaaggactta

SEQ ID NO: 99179 - DNA, 25 bp, Probe Sequence
atcctcctctctcaccttatacaaa

SEQ ID NO: 99180 - DNA, 25 bp, Probe Sequence
caactaagatggatcaaggacttaa

SEQ ID NO: 99181 - DNA, 25 bp, Probe Sequence
tccagaaactacaacaaactcaaat

SEQ ID NO: 99182 - DNA, 25 bp, Probe Sequence
atccagaaactacaacaaactcaaa

SEQ ID NO: 99183 - DNA, 25 bp, Probe Sequence
cacacatctgacaaaggactaatat

SEQ ID NO: 99184 - DNA, 25 bp, Probe Sequence
atcacacatctgacaaaggactaat

SEQ ID NO: 99185 - DNA, 25 bp, Probe Sequence
aatcacacatctgacaaaggactaa

SEQ ID NO: 99186 - DNA, 25 bp, Probe Sequence
tagacattgacttaggcgaggattt

SEQ ID NO: 99187 - DNA, 25 bp, Probe Sequence
tttagacattgacttaggcgaggat

SEQ ID NO: 99188 - DNA, 25 bp, Probe Sequence
aaatcttcacaatcacacatctgac

SEQ ID NO: 99189 - DNA, 25 bp, Probe Sequence
tcacacatctgacaaaggactaata

SEQ ID NO: 99190 - DNA, 25 bp, Probe Sequence
cttcacaatcacacatctgacaaag

SEQ ID NO: 99191 - DNA, 25 bp, Probe Sequence
acacatctgacaaaggactaatatc

SEQ ID NO: 99192 - DNA, 25 bp, Probe Sequence
tatccagaaactacaacaaactcaa

SEQ ID NO: 99193 - DNA, 25 bp, Probe Sequence
caatcacacatctgacaaaggacta

SEQ ID NO: 99194 - DNA, 25 bp, Probe Sequence
tcttcacaatcacacatctgacaaa

SEQ ID NO: 99195 - DNA, 25 bp, Probe Sequence
ccagaaactacaacaaactcaaatt

SEQ ID NO: 99196 - DNA, 25 bp, Probe Sequence
atctcctccgaaatgaatgaacata

SEQ ID NO: 99197 - DNA, 25 bp, Probe Sequence
aatctcctccgaaatgaatgaacat

SEQ ID NO: 99198 - DNA, 25 bp, Probe Sequence
gaatctcctccgaaatgaatgaaca

SEQ ID NO: 99199 - DNA, 25 bp, Probe Sequence
tcctccgaaatgaatgaacatactc

SEQ ID NO: 99200 - DNA, 25 bp, Probe Sequence
ctcctccgaaatgaatgaacatact

SEQ ID NO: 99201 - DNA, 25 bp, Probe Sequence
tctcctccgaaatgaatgaacatac

SEQ ID NO: 99202 - DNA, 25 bp, Probe Sequence
ctccgaaatgaatgaacatactcac

SEQ ID NO: 99203 - DNA, 25 bp, Probe Sequence
cctccgaaatgaatgaacatactca

SEQ ID NO: 99204 - DNA, 25 bp, Probe Sequence
aatgaacatactcaccctagttagc

SEQ ID NO: 99205 - DNA, 25 bp, Probe Sequence
cgaaatgaatgaacatactcaccct

SEQ ID NO: 99206 - DNA, 25 bp, Probe Sequence
tccgaaatgaatgaacatactcacc

SEQ ID NO: 99207 - DNA, 25 bp, Probe Sequence
atgaatgaacatactcaccctagtt

SEQ ID NO: 99208 - DNA, 25 bp, Probe Sequence
aatgaatgaacatactcaccctagt

SEQ ID NO: 99209 - DNA, 25 bp, Probe Sequence
gaaatgaatgaacatactcacccta

SEQ ID NO: 99210 - DNA, 25 bp, Probe Sequence
atgaacatactcaccctagttagca

SEQ ID NO: 99211 - DNA, 25 bp, Probe Sequence
tgaatgaacatactcaccctagtta

SEQ ID NO: 99212 - DNA, 25 bp, Probe Sequence
aaatgaatgaacatactcaccctag

SEQ ID NO: 99213 - DNA, 25 bp, Probe Sequence
gaatgaacatactcaccctagttag

SEQ ID NO: 99214 - DNA, 25 bp, Probe Sequence
ccgaaatgaatgaacatactcaccc

SEQ ID NO: 99215 - DNA, 25 bp, Probe Sequence
tgaacatactcaccctagttagcac

SEQ ID NO: 99216 - DNA, 25 bp, Probe Sequence
ggaatctcctccgaaatgaatgaac

SEQ ID NO: 99217 - DNA, 25 bp, Probe Sequence
tggaatctcctccgaaatgaatgaa

SEQ ID NO: 99218 - DNA, 25 bp, Probe Sequence
aagtggaatctcctccgaaatgaat

SEQ ID NO: 99219 - DNA, 25 bp, Probe Sequence
cgagagcctaagaacattcaatgcc

SEQ ID NO: 99220 - DNA, 25 bp, Probe Sequence
agaatgtgaaggttatcagtaagca

SEQ ID NO: 99221 - DNA, 25 bp, Probe Sequence
gaatgtgaaggttatcagtaagcag

SEQ ID NO: 99222 - DNA, 25 bp, Probe Sequence
ttagtatcttcttcagcaactcagt

SEQ ID NO: 99223 - DNA, 25 bp, Probe Sequence
ccaagtagaatgtgaaggttatcag

SEQ ID NO: 99224 - DNA, 25 bp, Probe Sequence
gccaagtagaatgtgaaggttatca

SEQ ID NO: 99225 - DNA, 25 bp, Probe Sequence
aatgtgaaggttatcagtaagcagc

SEQ ID NO: 99226 - DNA, 25 bp, Probe Sequence
tagtatcttcttcagcaactcagta

SEQ ID NO: 99227 - DNA, 25 bp, Probe Sequence
caagtagaatgtgaaggttatcagt

SEQ ID NO: 99228 - DNA, 25 bp, Probe Sequence
agtatcttcttcagcaactcagtac

SEQ ID NO: 99229 - DNA, 25 bp, Probe Sequence
gtatcttcttcagcaactcagtacg

SEQ ID NO: 99230 - DNA, 25 bp, Probe Sequence
aagtctcagcatcctcatgtctata

SEQ ID NO: 99231 - DNA, 25 bp, Probe Sequence
tagaatgtgaaggttatcagtaagc

SEQ ID NO: 99232 - DNA, 25 bp, Probe Sequence
gaaggttatcagtaagcagctagag

SEQ ID NO: 99233 - DNA, 25 bp, Probe Sequence
tatcttcttcagcaactcagtacgg

SEQ ID NO: 99234 - DNA, 25 bp, Probe Sequence
aaggttatcagtaagcagctagagg

SEQ ID NO: 99235 - DNA, 25 bp, Probe Sequence
tgaaggttatcagtaagcagctaga

SEQ ID NO: 99236 - DNA, 25 bp, Probe Sequence
gtgaaggttatcagtaagcagctag

SEQ ID NO: 99237 - DNA, 25 bp, Probe Sequence
gcatcctcatgtctatagtcctgta

SEQ ID NO: 99238 - DNA, 25 bp, Probe Sequence
tctcagcatcctcatgtctatagtc

SEQ ID NO: 99239 - DNA, 25 bp, Probe Sequence
agtctcagcatcctcatgtctatag

SEQ ID NO: 99240 - DNA, 25 bp, Probe Sequence
catcctcatgtctatagtcctgtaa

SEQ ID NO: 99241 - DNA, 25 bp, Probe Sequence
gtctcagcatcctcatgtctatagt

SEQ ID NO: 99242 - DNA, 25 bp, Probe Sequence
atacagggtaatgctagaatgatgg

SEQ ID NO: 99243 - DNA, 25 bp, Probe Sequence
tgtgaaggttatcagtaagcagcta

SEQ ID NO: 99244 - DNA, 25 bp, Probe Sequence
taatccattcctctccttccaagtc

SEQ ID NO: 99245 - DNA, 25 bp, Probe Sequence
ctaatccattcctctccttccaagt

SEQ ID NO: 99246 - DNA, 25 bp, Probe Sequence
cctaatccattcctctccttccaag

SEQ ID NO: 99247 - DNA, 25 bp, Probe Sequence
ttcctgacctgaagttgttgttacc

SEQ ID NO: 99248 - DNA, 25 bp, Probe Sequence
aagtatccctttccctccttattcc

SEQ ID NO: 99249 - DNA, 25 bp, Probe Sequence
tttcctgacctgaagttgttgttac

SEQ ID NO: 99250 - DNA, 25 bp, Probe Sequence
gtatccctttccctccttattcctc

SEQ ID NO: 99251 - DNA, 25 bp, Probe Sequence
cattcctctccttccaagtccattg

SEQ ID NO: 99252 - DNA, 25 bp, Probe Sequence
cctgacctgaagttgttgttaccaa

SEQ ID NO: 99253 - DNA, 25 bp, Probe Sequence
tatccctttccctccttattcctca

SEQ ID NO: 99254 - DNA, 25 bp, Probe Sequence
agtatccctttccctccttattcct

SEQ ID NO: 99255 - DNA, 25 bp, Probe Sequence
ctgacctgaagttgttgttaccaaa

SEQ ID NO: 99256 - DNA, 25 bp, Probe Sequence
attcctctccttccaagtccattgt

SEQ ID NO: 99257 - DNA, 25 bp, Probe Sequence
tcctgacctgaagttgttgttacca

SEQ ID NO: 99258 - DNA, 25 bp, Probe Sequence
aatccattcctctccttccaagtcc

SEQ ID NO: 99259 - DNA, 25 bp, Probe Sequence
ttcctctccttccaagtccattgtt

SEQ ID NO: 99260 - DNA, 25 bp, Probe Sequence
gcctaatccattcctctccttccaa

SEQ ID NO: 99261 - DNA, 25 bp, Probe Sequence
ccagtgtgtcctgtaagacttcttg

SEQ ID NO: 99262 - DNA, 25 bp, Probe Sequence
ccattcctctccttccaagtccatt

SEQ ID NO: 99263 - DNA, 25 bp, Probe Sequence
gtcatttctctctgcactatttctg

SEQ ID NO: 99264 - DNA, 25 bp, Probe Sequence
ggtcatttctctctgcactatttct

SEQ ID NO: 99265 - DNA, 25 bp, Probe Sequence
tggtcatttctctctgcactatttc

SEQ ID NO: 99266 - DNA, 25 bp, Probe Sequence
ctggtcatttctctctgcactattt

SEQ ID NO: 99267 - DNA, 25 bp, Probe Sequence
tactggtcatttctctctgcactat

SEQ ID NO: 99268 - DNA, 25 bp, Probe Sequence
taagccgtagcctcttctgttaata

SEQ ID NO: 99269 - DNA, 25 bp, Probe Sequence
aggtaactggttagcatgacattaa

SEQ ID NO: 99270 - DNA, 25 bp, Probe Sequence
aaggtaactggttagcatgacatta

SEQ ID NO: 99271 - DNA, 25 bp, Probe Sequence
ccaatacagtacgaggcaataacaa

SEQ ID NO: 99272 - DNA, 25 bp, Probe Sequence
aagccgtagcctcttctgttaataa

SEQ ID NO: 99273 - DNA, 25 bp, Probe Sequence
ttaagccgtagcctcttctgttaat

SEQ ID NO: 99274 - DNA, 25 bp, Probe Sequence
caaggtaactggttagcatgacatt

SEQ ID NO: 99275 - DNA, 25 bp, Probe Sequence
acaaggtaactggttagcatgacat

SEQ ID NO: 99276 - DNA, 25 bp, Probe Sequence
agccgtagcctcttctgttaataac

SEQ ID NO: 99277 - DNA, 25 bp, Probe Sequence
gttaagccgtagcctcttctgttaa

SEQ ID NO: 99278 - DNA, 25 bp, Probe Sequence
taacaaggtaactggttagcatgac

SEQ ID NO: 99279 - DNA, 25 bp, Probe Sequence
aaattagtgtgggttgattctggaa

SEQ ID NO: 99280 - DNA, 25 bp, Probe Sequence
attagtgtgggttgattctggaatt

SEQ ID NO: 99281 - DNA, 25 bp, Probe Sequence
aattagtgtgggttgattctggaat

SEQ ID NO: 99282 - DNA, 25 bp, Probe Sequence
aacaaggtaactggttagcatgaca

SEQ ID NO: 99283 - DNA, 25 bp, Probe Sequence
gtctctgaacaaagcaacaatttaa

SEQ ID NO: 99284 - DNA, 25 bp, Probe Sequence
tggaaggaactttcggctataattc

SEQ ID NO: 99285 - DNA, 25 bp, Probe Sequence
ctggaaggaactttcggctataatt

SEQ ID NO: 99286 - DNA, 25 bp, Probe Sequence
ataagaccaactcaatttccacttg

SEQ ID NO: 99287 - DNA, 25 bp, Probe Sequence
caatacagtacgaggcaataacaaa

SEQ ID NO: 99288 - DNA, 25 bp, Probe Sequence
ttagtgtgggttgattctggaattg

SEQ ID NO: 99289 - DNA, 25 bp, Probe Sequence
agtacgaggcaataacaaattagtg

SEQ ID NO: 99290 - DNA, 25 bp, Probe Sequence
cagtacgaggcaataacaaattagt

SEQ ID NO: 99291 - DNA, 25 bp, Probe Sequence
acagtacgaggcaataacaaattag

SEQ ID NO: 99292 - DNA, 25 bp, Probe Sequence
aagagttctctaaccatccattctg

SEQ ID NO: 99293 - DNA, 25 bp, Probe Sequence
cttgcttataacagtggaggtatgt

SEQ ID NO: 99294 - DNA, 25 bp, Probe Sequence
tgcttataacagtggaggtatgtag

SEQ ID NO: 99295 - DNA, 25 bp, Probe Sequence
ttgcttataacagtggaggtatgta

SEQ ID NO: 99296 - DNA, 25 bp, Probe Sequence
gtcttgggctatctattactctcag

SEQ ID NO: 99297 - DNA, 25 bp, Probe Sequence
ttgattaggattgccaggaagtaaa

SEQ ID NO: 99298 - DNA, 25 bp, Probe Sequence
tttgattaggattgccaggaagtaa

SEQ ID NO: 99299 - DNA, 25 bp, Probe Sequence
attgtcttggtttgattaggattgc

SEQ ID NO: 99300 - DNA, 25 bp, Probe Sequence
gcattgtcttggtttgattaggatt

SEQ ID NO: 99301 - DNA, 25 bp, Probe Sequence
gtttgattaggattgccaggaagta

SEQ ID NO: 99302 - DNA, 25 bp, Probe Sequence
agagttctctaaccatccattctgc

SEQ ID NO: 99303 - DNA, 25 bp, Probe Sequence
ccttgcttataacagtggaggtatg

SEQ ID NO: 99304 - DNA, 25 bp, Probe Sequence
cagatttggtagaataacgggagtc

SEQ ID NO: 99305 - DNA, 25 bp, Probe Sequence
cttataacagtggaggtatgtagct

SEQ ID NO: 99306 - DNA, 25 bp, Probe Sequence
cacagatttggtagaataacgggag

SEQ ID NO: 99307 - DNA, 25 bp, Probe Sequence
cattgtcttggtttgattaggattg

SEQ ID NO: 99308 - DNA, 25 bp, Probe Sequence
acagatttggtagaataacgggagt

SEQ ID NO: 99309 - DNA, 25 bp, Probe Sequence
ttgggctatctattactctcagtct

SEQ ID NO: 99310 - DNA, 25 bp, Probe Sequence
tcttgggctatctattactctcagt

SEQ ID NO: 99311 - DNA, 25 bp, Probe Sequence
agtcttgggctatctattactctca

SEQ ID NO: 99312 - DNA, 25 bp, Probe Sequence
tcacagatttggtagaataacggga

SEQ ID NO: 99313 - DNA, 25 bp, Probe Sequence
cttgggctatctattactctcagtc

SEQ ID NO: 99314 - DNA, 25 bp, Probe Sequence
ttgtcttggtttgattaggattgcc

SEQ ID NO: 99315 - DNA, 25 bp, Probe Sequence
tgggctatctattactctcagtctg

SEQ ID NO: 99316 - DNA, 25 bp, Probe Sequence
cgacagaatacaagaacagtaacac

SEQ ID NO: 99317 - DNA, 25 bp, Probe Sequence
acgacagaatacaagaacagtaaca

SEQ ID NO: 99318 - DNA, 25 bp, Probe Sequence
cacgacagaatacaagaacagtaac

SEQ ID NO: 99319 - DNA, 25 bp, Probe Sequence
tcatataataagccagacgaaccaa

SEQ ID NO: 99320 - DNA, 25 bp, Probe Sequence
ccacgacagaatacaagaacagtaa

SEQ ID NO: 99321 - DNA, 25 bp, Probe Sequence
ttcatataataagccagacgaacca

SEQ ID NO: 99322 - DNA, 25 bp, Probe Sequence
tccacgacagaatacaagaacagta

SEQ ID NO: 99323 - DNA, 25 bp, Probe Sequence
gacagaatacaagaacagtaacact

SEQ ID NO: 99324 - DNA, 25 bp, Probe Sequence
atgttcatataataagccagacgaa

SEQ ID NO: 99325 - DNA, 25 bp, Probe Sequence
catgttcatataataagccagacga

SEQ ID NO: 99326 - DNA, 25 bp, Probe Sequence
tcatgttcatataataagccagacg

SEQ ID NO: 99327 - DNA, 25 bp, Probe Sequence
aagagtccacgacagaatacaagaa

SEQ ID NO: 99328 - DNA, 25 bp, Probe Sequence
tagcagaaggtaaggtaaaggacta

SEQ ID NO: 99329 - DNA, 25 bp, Probe Sequence
ggtaaggtaaaggactacaactgaa

SEQ ID NO: 99330 - DNA, 25 bp, Probe Sequence
aaggtaaggtaaaggactacaactg

SEQ ID NO: 99331 - DNA, 25 bp, Probe Sequence
gaaggtaaggtaaaggactacaact

SEQ ID NO: 99332 - DNA, 25 bp, Probe Sequence
agaaggtaaggtaaaggactacaac

SEQ ID NO: 99333 - DNA, 25 bp, Probe Sequence
cagaaggtaaggtaaaggactacaa

SEQ ID NO: 99334 - DNA, 25 bp, Probe Sequence
aggtaaggtaaaggactacaactga

SEQ ID NO: 99335 - DNA, 25 bp, Probe Sequence
acaaacttgccaataatgacctttc

SEQ ID NO: 99336 - DNA, 25 bp, Probe Sequence
ttagcagaaggtaaggtaaaggact

SEQ ID NO: 99337 - DNA, 25 bp, Probe Sequence
catataataagccagacgaaccaaa

SEQ ID NO: 99338 - DNA, 25 bp, Probe Sequence
cacaaacttgccaataatgaccttt

SEQ ID NO: 99339 - DNA, 25 bp, Probe Sequence
acactggtttatctcaactcatctt

SEQ ID NO: 99340 - DNA, 25 bp, Probe Sequence
ctactcctgctcgcatctgctatag

SEQ ID NO: 99341 - DNA, 25 bp, Probe Sequence
tactcctgctcgcatctgctatagt

SEQ ID NO: 99342 - DNA, 25 bp, Probe Sequence
agacatcgagtctcactctgttgtc

SEQ ID NO: 99343 - DNA, 25 bp, Probe Sequence
gagtctcactctgttgtccaggttg

SEQ ID NO: 99344 - DNA, 25 bp, Probe Sequence
catcgagtctcactctgttgtccag

SEQ ID NO: 99345 - DNA, 25 bp, Probe Sequence
gacatcgagtctcactctgttgtcc

SEQ ID NO: 99346 - DNA, 25 bp, Probe Sequence
aagtagcctatcatcagattccaga

SEQ ID NO: 99347 - DNA, 25 bp, Probe Sequence
agtagcctatcatcagattccagag

SEQ ID NO: 99348 - DNA, 25 bp, Probe Sequence
actcagattcaagtaggaagtgatg

SEQ ID NO: 99349 - DNA, 25 bp, Probe Sequence
aactcagattcaagtaggaagtgat

SEQ ID NO: 99350 - DNA, 25 bp, Probe Sequence
ctcagattcaagtaggaagtgatgg

SEQ ID NO: 99351 - DNA, 25 bp, Probe Sequence
aagtaggaagtgatggcagagtaag

SEQ ID NO: 99352 - DNA, 25 bp, Probe Sequence
caagtaggaagtgatggcagagtaa

SEQ ID NO: 99353 - DNA, 25 bp, Probe Sequence
gtagcctatcatcagattccagagc

SEQ ID NO: 99354 - DNA, 25 bp, Probe Sequence
gtaggaagtgatggcagagtaagtg

SEQ ID NO: 99355 - DNA, 25 bp, Probe Sequence
taggaagtgatggcagagtaagtga

SEQ ID NO: 99356 - DNA, 25 bp, Probe Sequence
agtaggaagtgatggcagagtaagt

SEQ ID NO: 99357 - DNA, 25 bp, Probe Sequence
attcaagtaggaagtgatggcagag

SEQ ID NO: 99358 - DNA, 25 bp, Probe Sequence
gattcaagtaggaagtgatggcaga

SEQ ID NO: 99359 - DNA, 25 bp, Probe Sequence
agattcaagtaggaagtgatggcag

SEQ ID NO: 99360 - DNA, 25 bp, Probe Sequence
tcagattcaagtaggaagtgatggc

SEQ ID NO: 99361 - DNA, 25 bp, Probe Sequence
attgtagagcatttgagtagttggt

SEQ ID NO: 99362 - DNA, 25 bp, Probe Sequence
cattgtagagcatttgagtagttgg

SEQ ID NO: 99363 - DNA, 25 bp, Probe Sequence
agcatttgagtagttggttccttta

SEQ ID NO: 99364 - DNA, 25 bp, Probe Sequence
actgctctgtgaaataaacctgtaa

SEQ ID NO: 99365 - DNA, 25 bp, Probe Sequence
ttgtagagcatttgagtagttggtt

SEQ ID NO: 99366 - DNA, 25 bp, Probe Sequence
ctgctctgtgaaataaacctgtaaa

SEQ ID NO: 99367 - DNA, 25 bp, Probe Sequence
gcattgtagagcatttgagtagttg

SEQ ID NO: 99368 - DNA, 25 bp, Probe Sequence
aaagtagcctatcatcagattccag

SEQ ID NO: 99369 - DNA, 25 bp, Probe Sequence
gcatttgagtagttggttcctttaa

SEQ ID NO: 99370 - DNA, 25 bp, Probe Sequence
caaagggataattcatcaacagcaa

SEQ ID NO: 99371 - DNA, 25 bp, Probe Sequence
aagggataattcatcaacagcaatg

SEQ ID NO: 99372 - DNA, 25 bp, Probe Sequence
aaagggataattcatcaacagcaat

SEQ ID NO: 99373 - DNA, 25 bp, Probe Sequence
taaagagaaccaaatgtctgtaagg

SEQ ID NO: 99374 - DNA, 25 bp, Probe Sequence
ccaaagggataattcatcaacagca

SEQ ID NO: 99375 - DNA, 25 bp, Probe Sequence
tgtgtataggtcggaaacaactaat

SEQ ID NO: 99376 - DNA, 25 bp, Probe Sequence
atgtgtataggtcggaaacaactaa

SEQ ID NO: 99377 - DNA, 25 bp, Probe Sequence
aatgtgtataggtcggaaacaacta

SEQ ID NO: 99378 - DNA, 25 bp, Probe Sequence
caatgtgtataggtcggaaacaact

SEQ ID NO: 99379 - DNA, 25 bp, Probe Sequence
aggtcggaaacaactaataatatga

SEQ ID NO: 99380 - DNA, 25 bp, Probe Sequence
gtgtataggtcggaaacaactaata

SEQ ID NO: 99381 - DNA, 25 bp, Probe Sequence
agggataattcatcaacagcaatgc

SEQ ID NO: 99382 - DNA, 25 bp, Probe Sequence
aaagagaaccaaatgtctgtaaggt

SEQ ID NO: 99383 - DNA, 25 bp, Probe Sequence
ccaatgtgtataggtcggaaacaac

SEQ ID NO: 99384 - DNA, 25 bp, Probe Sequence
ggtcggaaacaactaataatatgaa

SEQ ID NO: 99385 - DNA, 25 bp, Probe Sequence
cggaaacaactaataatatgaagga

SEQ ID NO: 99386 - DNA, 25 bp, Probe Sequence
tcggaaacaactaataatatgaagg

SEQ ID NO: 99387 - DNA, 25 bp, Probe Sequence
catgaaggaaaggaaagcaacgaaa

SEQ ID NO: 99388 - DNA, 25 bp, Probe Sequence
ttaaagagaaccaaatgtctgtaag

SEQ ID NO: 99389 - DNA, 25 bp, Probe Sequence
tccaatgtgtataggtcggaaacaa

SEQ ID NO: 99390 - DNA, 25 bp, Probe Sequence
tgtataggtcggaaacaactaataa

SEQ ID NO: 99391 - DNA, 25 bp, Probe Sequence
aggaaaggaaagcaacgaaaataat

SEQ ID NO: 99392 - DNA, 25 bp, Probe Sequence
aaggaaaggaaagcaacgaaaataa

SEQ ID NO: 99393 - DNA, 25 bp, Probe Sequence
gaaggaaaggaaagcaacgaaaata

SEQ ID NO: 99394 - DNA, 25 bp, Probe Sequence
cattctacatactggctaaggtcta

SEQ ID NO: 99395 - DNA, 25 bp, Probe Sequence
attctacatactggctaaggtctag

SEQ ID NO: 99396 - DNA, 25 bp, Probe Sequence
gcattctacatactggctaaggtct

SEQ ID NO: 99397 - DNA, 25 bp, Probe Sequence
cacgcacataatatcactatctcta

SEQ ID NO: 99398 - DNA, 25 bp, Probe Sequence
acgcacataatatcactatctctag

SEQ ID NO: 99399 - DNA, 25 bp, Probe Sequence
ggcattctacatactggctaaggtc

SEQ ID NO: 99400 - DNA, 25 bp, Probe Sequence
ggtataaggtgacaaatccagtgat

SEQ ID NO: 99401 - DNA, 25 bp, Probe Sequence
gtataaggtgacaaatccagtgatg

SEQ ID NO: 99402 - DNA, 25 bp, Probe Sequence
gtaactggtataaggtgacaaatcc

SEQ ID NO: 99403 - DNA, 25 bp, Probe Sequence
accactctgttacatttaccgaata

SEQ ID NO: 99404 - DNA, 25 bp, Probe Sequence
tgtaaagattggttaagtgtcctcg

SEQ ID NO: 99405 - DNA, 25 bp, Probe Sequence
atgtaaagattggttaagtgtcctc

SEQ ID NO: 99406 - DNA, 25 bp, Probe Sequence
ccactctgttacatttaccgaataa

SEQ ID NO: 99407 - DNA, 25 bp, Probe Sequence
aaccactctgttacatttaccgaat

SEQ ID NO: 99408 - DNA, 25 bp, Probe Sequence
aaaccactctgttacatttaccgaa

SEQ ID NO: 99409 - DNA, 25 bp, Probe Sequence
gtaaagattggttaagtgtcctcgg

SEQ ID NO: 99410 - DNA, 25 bp, Probe Sequence
actcgtgtttaatatagggaagtgc

SEQ ID NO: 99411 - DNA, 25 bp, Probe Sequence
aatgtaaagattggttaagtgtcct

SEQ ID NO: 99412 - DNA, 25 bp, Probe Sequence
aggaatgtaaagattggttaagtgt

SEQ ID NO: 99413 - DNA, 25 bp, Probe Sequence
attgggcattctacatactggctaa

SEQ ID NO: 99414 - DNA, 25 bp, Probe Sequence
gaatgtaaagattggttaagtgtcc

SEQ ID NO: 99415 - DNA, 25 bp, Probe Sequence
ggaatgtaaagattggttaagtgtc

SEQ ID NO: 99416 - DNA, 25 bp, Probe Sequence
gttcactaggaatgtaaagattggt

SEQ ID NO: 99417 - DNA, 25 bp, Probe Sequence
aactcgtgtttaatatagggaagtg

SEQ ID NO: 99418 - DNA, 25 bp, Probe Sequence
atctatatgaggacgagtggagagg

SEQ ID NO: 99419 - DNA, 25 bp, Probe Sequence
ctatatgaggacgagtggagaggag

SEQ ID NO: 99420 - DNA, 25 bp, Probe Sequence
attaaagcccaaattccattcactc

SEQ ID NO: 99421 - DNA, 25 bp, Probe Sequence
cattaaagcccaaattccattcact

SEQ ID NO: 99422 - DNA, 25 bp, Probe Sequence
tcattaaagcccaaattccattcac

SEQ ID NO: 99423 - DNA, 25 bp, Probe Sequence
tgccatattcattaaagcccaaatt

SEQ ID NO: 99424 - DNA, 25 bp, Probe Sequence
ttcattaaagcccaaattccattca

SEQ ID NO: 99425 - DNA, 25 bp, Probe Sequence
gccatattcattaaagcccaaattc

SEQ ID NO: 99426 - DNA, 25 bp, Probe Sequence
atgccatattcattaaagcccaaat

SEQ ID NO: 99427 - DNA, 25 bp, Probe Sequence
aataagagtgacggcttgcataatt

SEQ ID NO: 99428 - DNA, 25 bp, Probe Sequence
tatatgaggacgagtggagaggaga

SEQ ID NO: 99429 - DNA, 25 bp, Probe Sequence
taatttatcctggcgttcttgtgaa

SEQ ID NO: 99430 - DNA, 25 bp, Probe Sequence
ttctgtaggatatcatcattggtca

SEQ ID NO: 99431 - DNA, 25 bp, Probe Sequence
ccatattcattaaagcccaaattcc

SEQ ID NO: 99432 - DNA, 25 bp, Probe Sequence
tctgtaggatatcatcattggtcat

SEQ ID NO: 99433 - DNA, 25 bp, Probe Sequence
attcattaaagcccaaattccattc

SEQ ID NO: 99434 - DNA, 25 bp, Probe Sequence
gtaatttatcctggcgttcttgtga

SEQ ID NO: 99435 - DNA, 25 bp, Probe Sequence
gaataagagtgacggcttgcataat

SEQ ID NO: 99436 - DNA, 25 bp, Probe Sequence
gtggagaggagatttctaagaagtc

SEQ ID NO: 99437 - DNA, 25 bp, Probe Sequence
gagtggagaggagatttctaagaag

SEQ ID NO: 99438 - DNA, 25 bp, Probe Sequence
tctatatgaggacgagtggagagga

SEQ ID NO: 99439 - DNA, 25 bp, Probe Sequence
tagaataagagtgacggcttgcata

SEQ ID NO: 99440 - DNA, 25 bp, Probe Sequence
actggcaaatagaggatcaaatgag

SEQ ID NO: 99441 - DNA, 25 bp, Probe Sequence
gactggcaaatagaggatcaaatga

SEQ ID NO: 99442 - DNA, 25 bp, Probe Sequence
atggatgcttgagaagatggatatt

SEQ ID NO: 99443 - DNA, 25 bp, Probe Sequence
gatggatgcttgagaagatggatat

SEQ ID NO: 99444 - DNA, 25 bp, Probe Sequence
caaccttattccttacatctggcaa

SEQ ID NO: 99445 - DNA, 25 bp, Probe Sequence
aacaaccttattccttacatctggc

SEQ ID NO: 99446 - DNA, 25 bp, Probe Sequence
tggatgcttgagaagatggatattc

SEQ ID NO: 99447 - DNA, 25 bp, Probe Sequence
acaaccttattccttacatctggca

SEQ ID NO: 99448 - DNA, 25 bp, Probe Sequence
ggatggatgcttgagaagatggata

SEQ ID NO: 99449 - DNA, 25 bp, Probe Sequence
caatgaagtacaggcaatgaagact

SEQ ID NO: 99450 - DNA, 25 bp, Probe Sequence
ggatgcttgagaagatggatattcc

SEQ ID NO: 99451 - DNA, 25 bp, Probe Sequence
aaccttattccttacatctggcaaa

SEQ ID NO: 99452 - DNA, 25 bp, Probe Sequence
accttattccttacatctggcaaac

SEQ ID NO: 99453 - DNA, 25 bp, Probe Sequence
aaacaaccttattccttacatctgg

SEQ ID NO: 99454 - DNA, 25 bp, Probe Sequence
caaataggcagataaacaagaaagc

SEQ ID NO: 99455 - DNA, 25 bp, Probe Sequence
gcaatgaagtacaggcaatgaagac

SEQ ID NO: 99456 - DNA, 25 bp, Probe Sequence
tactatttgaaagcacaacagggta

SEQ ID NO: 99457 - DNA, 25 bp, Probe Sequence
gacctactatttgaaagcacaacag

SEQ ID NO: 99458 - DNA, 25 bp, Probe Sequence
gtctaattgcgttgtttgtaactca

SEQ ID NO: 99459 - DNA, 25 bp, Probe Sequence
agacctactatttgaaagcacaaca

SEQ ID NO: 99460 - DNA, 25 bp, Probe Sequence
aagacctactatttgaaagcacaac

SEQ ID NO: 99461 - DNA, 25 bp, Probe Sequence
ctatttgaaagcacaacagggtaac

SEQ ID NO: 99462 - DNA, 25 bp, Probe Sequence
tctaattgcgttgtttgtaactcaa

SEQ ID NO: 99463 - DNA, 25 bp, Probe Sequence
tatttgaaagcacaacagggtaact

SEQ ID NO: 99464 - DNA, 25 bp, Probe Sequence
actatttgaaagcacaacagggtaa

SEQ ID NO: 99465 - DNA, 25 bp, Probe Sequence
agtctaattgcgttgtttgtaactc

SEQ ID NO: 99466 - DNA, 25 bp, Probe Sequence
cctgctctagtaatgtctgactatc

SEQ ID NO: 99467 - DNA, 25 bp, Probe Sequence
tgctctagtaatgtctgactatcac

SEQ ID NO: 99468 - DNA, 25 bp, Probe Sequence
gctctagtaatgtctgactatcact

SEQ ID NO: 99469 - DNA, 25 bp, Probe Sequence
ctgctctagtaatgtctgactatca

SEQ ID NO: 99470 - DNA, 25 bp, Probe Sequence
gtcgtttaccacagtttccatttat

SEQ ID NO: 99471 - DNA, 25 bp, Probe Sequence
tagtaatgtctgactatcactccag

SEQ ID NO: 99472 - DNA, 25 bp, Probe Sequence
tcgtttaccacagtttccatttatg

SEQ ID NO: 99473 - DNA, 25 bp, Probe Sequence
ctagtaatgtctgactatcactcca

SEQ ID NO: 99474 - DNA, 25 bp, Probe Sequence
tctagtaatgtctgactatcactcc

SEQ ID NO: 99475 - DNA, 25 bp, Probe Sequence
tgtcgtttaccacagtttccattta

SEQ ID NO: 99476 - DNA, 25 bp, Probe Sequence
ctctagtaatgtctgactatcactc

SEQ ID NO: 99477 - DNA, 25 bp, Probe Sequence
agaggaagccttgatatctgataag

SEQ ID NO: 99478 - DNA, 25 bp, Probe Sequence
ccctgctctagtaatgtctgactat

SEQ ID NO: 99479 - DNA, 25 bp, Probe Sequence
cgtttaccacagtttccatttatgg

SEQ ID NO: 99480 - DNA, 25 bp, Probe Sequence
gtaatgtctgactatcactccagag

SEQ ID NO: 99481 - DNA, 25 bp, Probe Sequence
agtaatgtctgactatcactccaga

SEQ ID NO: 99482 - DNA, 25 bp, Probe Sequence
taatgtctgactatcactccagagg

SEQ ID NO: 99483 - DNA, 25 bp, Probe Sequence
catttatggagggctctctttctgg

SEQ ID NO: 99484 - DNA, 25 bp, Probe Sequence
atcactccagaggaagccttgatat

SEQ ID NO: 99485 - DNA, 25 bp, Probe Sequence
ctttgatctgtaatgcaccactgtc

SEQ ID NO: 99486 - DNA, 25 bp, Probe Sequence
ctaagtagtcatccttttccctttg

SEQ ID NO: 99487 - DNA, 25 bp, Probe Sequence
cccactttactaagtagtcatcctt

SEQ ID NO: 99488 - DNA, 25 bp, Probe Sequence
tttgtctagccctgctctagtaatg

SEQ ID NO: 99489 - DNA, 25 bp, Probe Sequence
gtttgtctagccctgctctagtaat

SEQ ID NO: 99490 - DNA, 25 bp, Probe Sequence
attcacacgtcaatagagataggtc

SEQ ID NO: 99491 - DNA, 25 bp, Probe Sequence
aattcacacgtcaatagagataggt

SEQ ID NO: 99492 - DNA, 25 bp, Probe Sequence
ataggtctccagaggatcttcagta

SEQ ID NO: 99493 - DNA, 25 bp, Probe Sequence
taggtctccagaggatcttcagtaa

SEQ ID NO: 99494 - DNA, 25 bp, Probe Sequence
ttcacacgtcaatagagataggtct

SEQ ID NO: 99495 - DNA, 25 bp, Probe Sequence
caccaggctcaaatgaacttctaaa

SEQ ID NO: 99496 - DNA, 25 bp, Probe Sequence
cgtgttagtgtttcaatgaagtgat

SEQ ID NO: 99497 - DNA, 25 bp, Probe Sequence
gataggtctccagaggatcttcagt

SEQ ID NO: 99498 - DNA, 25 bp, Probe Sequence
agataggtctccagaggatcttcag

SEQ ID NO: 99499 - DNA, 25 bp, Probe Sequence
tgattgatttcagaaaccgagatat

SEQ ID NO: 99500 - DNA, 25 bp, Probe Sequence
atgattgatttcagaaaccgagata

SEQ ID NO: 99501 - DNA, 25 bp, Probe Sequence
tatgattgatttcagaaaccgagat

SEQ ID NO: 99502 - DNA, 25 bp, Probe Sequence
atatgattgatttcagaaaccgaga

SEQ ID NO: 99503 - DNA, 25 bp, Probe Sequence
gtgttagtgtttcaatgaagtgatt

SEQ ID NO: 99504 - DNA, 25 bp, Probe Sequence
ccgtgttagtgtttcaatgaagtga

SEQ ID NO: 99505 - DNA, 25 bp, Probe Sequence
agatagagtctcactgtgttaccca

SEQ ID NO: 99506 - DNA, 25 bp, Probe Sequence
gcagatatcaatctcgcttaggtaa

SEQ ID NO: 99507 - DNA, 25 bp, Probe Sequence
gatagagtctcactgtgttacccag

SEQ ID NO: 99508 - DNA, 25 bp, Probe Sequence
aatagagataggtctccagaggatc

SEQ ID NO: 99509 - DNA, 25 bp, Probe Sequence
caatagagataggtctccagaggat

SEQ ID NO: 99510 - DNA, 25 bp, Probe Sequence
atagagataggtctccagaggatct

SEQ ID NO: 99511 - DNA, 25 bp, Probe Sequence
aaattcacacgtcaatagagatagg

SEQ ID NO: 99512 - DNA, 25 bp, Probe Sequence
aacagcagatatcaatctcgcttag

SEQ ID NO: 99513 - DNA, 25 bp, Probe Sequence
tagagataggtctccagaggatctt

SEQ ID NO: 99514 - DNA, 25 bp, Probe Sequence
aagtagtaatctttgccgttctcct

SEQ ID NO: 99515 - DNA, 25 bp, Probe Sequence
agtagtaatctttgccgttctcctc

SEQ ID NO: 99516 - DNA, 25 bp, Probe Sequence
cctccctggttacaaagtagtaatc

SEQ ID NO: 99517 - DNA, 25 bp, Probe Sequence
ctccctggttacaaagtagtaatct

SEQ ID NO: 99518 - DNA, 25 bp, Probe Sequence
tccctggttacaaagtagtaatctt

SEQ ID NO: 99519 - DNA, 25 bp, Probe Sequence
acctccctggttacaaagtagtaat

SEQ ID NO: 99520 - DNA, 25 bp, Probe Sequence
gtcctttgagctttcttgatttcct

SEQ ID NO: 99521 - DNA, 25 bp, Probe Sequence
gagctttcttgatttcctcagagag

SEQ ID NO: 99522 - DNA, 25 bp, Probe Sequence
cacctccctggttacaaagtagtaa

SEQ ID NO: 99523 - DNA, 25 bp, Probe Sequence
tcctttgagctttcttgatttcctc

SEQ ID NO: 99524 - DNA, 25 bp, Probe Sequence
aaagtagtaatctttgccgttctcc

SEQ ID NO: 99525 - DNA, 25 bp, Probe Sequence
gtagtaatctttgccgttctcctcg

SEQ ID NO: 99526 - DNA, 25 bp, Probe Sequence
ggtcctttgagctttcttgatttcc

SEQ ID NO: 99527 - DNA, 25 bp, Probe Sequence
gggtcctttgagctttcttgatttc

SEQ ID NO: 99528 - DNA, 25 bp, Probe Sequence
ccctggttacaaagtagtaatcttt

SEQ ID NO: 99529 - DNA, 25 bp, Probe Sequence
tcacctccctggttacaaagtagta

SEQ ID NO: 99530 - DNA, 25 bp, Probe Sequence
catcacctccctggttacaaagtag

SEQ ID NO: 99531 - DNA, 25 bp, Probe Sequence
aggctgtcgttaatgatgaccacat

SEQ ID NO: 99532 - DNA, 25 bp, Probe Sequence
atcacctccctggttacaaagtagt

SEQ ID NO: 99533 - DNA, 25 bp, Probe Sequence
cgggtcctttgagctttcttgattt

SEQ ID NO: 99534 - DNA, 25 bp, Probe Sequence
ctttgagctttcttgatttcctcag

SEQ ID NO: 99535 - DNA, 25 bp, Probe Sequence
tttgagctttcttgatttcctcaga

SEQ ID NO: 99536 - DNA, 25 bp, Probe Sequence
tagtaatctttgccgttctcctcgc

SEQ ID NO: 99537 - DNA, 25 bp, Probe Sequence
ggctgtcgttaatgatgaccacatc

SEQ ID NO: 99538 - DNA, 25 bp, Probe Sequence
cttccacaagagtctgttactacaa

SEQ ID NO: 99539 - DNA, 25 bp, Probe Sequence
ttccacaagagtctgttactacaat

SEQ ID NO: 99540 - DNA, 25 bp, Probe Sequence
tccacaagagtctgttactacaata

SEQ ID NO: 99541 - DNA, 25 bp, Probe Sequence
taagactggaactctgacacacatc

SEQ ID NO: 99542 - DNA, 25 bp, Probe Sequence
acaagagtctgttactacaataagc

SEQ ID NO: 99543 - DNA, 25 bp, Probe Sequence
ccagatgactctactcttccacaag

SEQ ID NO: 99544 - DNA, 25 bp, Probe Sequence
cttatgtcctgtaagactggaactc

SEQ ID NO: 99545 - DNA, 25 bp, Probe Sequence
gtaagactggaactctgacacacat

SEQ ID NO: 99546 - DNA, 25 bp, Probe Sequence
ttatgtcctgtaagactggaactct

SEQ ID NO: 99547 - DNA, 25 bp, Probe Sequence
aattctctgatgtcgattaaggtga

SEQ ID NO: 99548 - DNA, 25 bp, Probe Sequence
ccacaagagtctgttactacaataa

SEQ ID NO: 99549 - DNA, 25 bp, Probe Sequence
ccacgatggatacatagataaggtt

SEQ ID NO: 99550 - DNA, 25 bp, Probe Sequence
tatgtcctgtaagactggaactctg

SEQ ID NO: 99551 - DNA, 25 bp, Probe Sequence
actgataaggcttctcaccaagatg

SEQ ID NO: 99552 - DNA, 25 bp, Probe Sequence
cactgataaggcttctcaccaagat

SEQ ID NO: 99553 - DNA, 25 bp, Probe Sequence
atgacactgatgacctttctctcta

SEQ ID NO: 99554 - DNA, 25 bp, Probe Sequence
attctctgatgtcgattaaggtgag

SEQ ID NO: 99555 - DNA, 25 bp, Probe Sequence
tttccaagttagagccctcattatg

SEQ ID NO: 99556 - DNA, 25 bp, Probe Sequence
ctttccaagttagagccctcattat

SEQ ID NO: 99557 - DNA, 25 bp, Probe Sequence
cttgtctcctcacctgcaatattaa

SEQ ID NO: 99558 - DNA, 25 bp, Probe Sequence
cattctcaatccttgtctcctcacc

SEQ ID NO: 99559 - DNA, 25 bp, Probe Sequence
ccattctcaatccttgtctcctcac

SEQ ID NO: 99560 - DNA, 25 bp, Probe Sequence
ataaggcttctcaccaagatggatt

SEQ ID NO: 99561 - DNA, 25 bp, Probe Sequence
tatactcaatcttctctttgggctt

SEQ ID NO: 99562 - DNA, 25 bp, Probe Sequence
tgaggatacacatcacatatcactt

SEQ ID NO: 99563 - DNA, 25 bp, Probe Sequence
gattcattcttcgtaattagtccgc

SEQ ID NO: 99564 - DNA, 25 bp, Probe Sequence
accacataccaagcactattatatt

SEQ ID NO: 99565 - DNA, 25 bp, Probe Sequence
aaccacataccaagcactattatat

SEQ ID NO: 99566 - DNA, 25 bp, Probe Sequence
attcattcttcgtaattagtccgcc

SEQ ID NO: 99567 - DNA, 25 bp, Probe Sequence
ccgtagtcacatcttgattgttgtt

SEQ ID NO: 99568 - DNA, 25 bp, Probe Sequence
agattcattcttcgtaattagtccg

SEQ ID NO: 99569 - DNA, 25 bp, Probe Sequence
gttgatgactgactgtatttgttcg

SEQ ID NO: 99570 - DNA, 25 bp, Probe Sequence
tcattcttcgtaattagtccgcctt

SEQ ID NO: 99571 - DNA, 25 bp, Probe Sequence
ttcattcttcgtaattagtccgcct

SEQ ID NO: 99572 - DNA, 25 bp, Probe Sequence
ttctatggatctcctggtagctgta

SEQ ID NO: 99573 - DNA, 25 bp, Probe Sequence
tggatttgagttacttagggaaaca

SEQ ID NO: 99574 - DNA, 25 bp, Probe Sequence
tagtccgcctttcttatatgaatca

SEQ ID NO: 99575 - DNA, 25 bp, Probe Sequence
agtaggtagattcattcttcgtaat

SEQ ID NO: 99576 - DNA, 25 bp, Probe Sequence
gttctacatttacctgctcagatga

SEQ ID NO: 99577 - DNA, 25 bp, Probe Sequence
agttctacatttacctgctcagatg

SEQ ID NO: 99578 - DNA, 25 bp, Probe Sequence
ttcttctatggatctcctggtagct

SEQ ID NO: 99579 - DNA, 25 bp, Probe Sequence
ttctacatttacctgctcagatgat

SEQ ID NO: 99580 - DNA, 25 bp, Probe Sequence
tctatggatctcctggtagctgtag

SEQ ID NO: 99581 - DNA, 25 bp, Probe Sequence
ttggatttgagttacttagggaaac

SEQ ID NO: 99582 - DNA, 25 bp, Probe Sequence
ctttcttctatggatctcctggtag

SEQ ID NO: 99583 - DNA, 25 bp, Probe Sequence
ctagttctacatttacctgctcaga

SEQ ID NO: 99584 - DNA, 25 bp, Probe Sequence
agttgatgactgactgtatttgttc

SEQ ID NO: 99585 - DNA, 25 bp, Probe Sequence
tagttctacatttacctgctcagat

SEQ ID NO: 99586 - DNA, 25 bp, Probe Sequence
ctgctgaaggattacaagagataca

SEQ ID NO: 99587 - DNA, 25 bp, Probe Sequence
tgctgaaggattacaagagatacaa

SEQ ID NO: 99588 - DNA, 25 bp, Probe Sequence
gctgaaggattacaagagatacaag

SEQ ID NO: 99589 - DNA, 25 bp, Probe Sequence
tgaaggattacaagagatacaagga

SEQ ID NO: 99590 - DNA, 25 bp, Probe Sequence
ctgaaggattacaagagatacaagg

SEQ ID NO: 99591 - DNA, 25 bp, Probe Sequence
gctgctgaaggattacaagagatac

SEQ ID NO: 99592 - DNA, 25 bp, Probe Sequence
aggattacaagagatacaaggaaga

SEQ ID NO: 99593 - DNA, 25 bp, Probe Sequence
ggattacaagagatacaaggaagaa

SEQ ID NO: 99594 - DNA, 25 bp, Probe Sequence
aaggattacaagagatacaaggaag

SEQ ID NO: 99595 - DNA, 25 bp, Probe Sequence
gaaggattacaagagatacaaggaa

SEQ ID NO: 99596 - DNA, 25 bp, Probe Sequence
ggctgctgaaggattacaagagata

SEQ ID NO: 99597 - DNA, 25 bp, Probe Sequence
gatgatggaaatgatgataagcctg

SEQ ID NO: 99598 - DNA, 25 bp, Probe Sequence
tgatgatggaaatgatgataagcct

SEQ ID NO: 99599 - DNA, 25 bp, Probe Sequence
atgatgatggaaatgatgataagcc

SEQ ID NO: 99600 - DNA, 25 bp, Probe Sequence
acaagagatacaaggaagaaagtgc

SEQ ID NO: 99601 - DNA, 25 bp, Probe Sequence
agtctttatctaggtatgagggagc

SEQ ID NO: 99602 - DNA, 25 bp, Probe Sequence
ggaagtctttatctaggtatgaggg

SEQ ID NO: 99603 - DNA, 25 bp, Probe Sequence
atgatggaaatgatgataagcctgc

SEQ ID NO: 99604 - DNA, 25 bp, Probe Sequence
actgatgataatgtaatgatgatgg

SEQ ID NO: 99605 - DNA, 25 bp, Probe Sequence
caagagatacaaggaagaaagtgcc

SEQ ID NO: 99606 - DNA, 25 bp, Probe Sequence
tacaagagatacaaggaagaaagtg

SEQ ID NO: 99607 - DNA, 25 bp, Probe Sequence
ccaggaagtctttatctaggtatga

SEQ ID NO: 99608 - DNA, 25 bp, Probe Sequence
tccaggaagtctttatctaggtatg

SEQ ID NO: 99609 - DNA, 25 bp, Probe Sequence
tgctcttcagtttcctcatgtataa

SEQ ID NO: 99610 - DNA, 25 bp, Probe Sequence
aaatgaactgtgttggttgtttgag

SEQ ID NO: 99611 - DNA, 25 bp, Probe Sequence
gaagaaaggaggtggatagcaaatg

SEQ ID NO: 99612 - DNA, 25 bp, Probe Sequence
agaagaaaggaggtggatagcaaat

SEQ ID NO: 99613 - DNA, 25 bp, Probe Sequence
gatagcaaatgaactgtgttggttg

SEQ ID NO: 99614 - DNA, 25 bp, Probe Sequence
aaataaccagagttcgtttagtgaa

SEQ ID NO: 99615 - DNA, 25 bp, Probe Sequence
aagaagaaaggaggtggatagcaaa

SEQ ID NO: 99616 - DNA, 25 bp, Probe Sequence
aaagaagaaaggaggtggatagcaa

SEQ ID NO: 99617 - DNA, 25 bp, Probe Sequence
gaaaggaggtggatagcaaatgaac

SEQ ID NO: 99618 - DNA, 25 bp, Probe Sequence
agaaaggaggtggatagcaaatgaa

SEQ ID NO: 99619 - DNA, 25 bp, Probe Sequence
aagaaaggaggtggatagcaaatga

SEQ ID NO: 99620 - DNA, 25 bp, Probe Sequence
atagcaaatgaactgtgttggttgt

SEQ ID NO: 99621 - DNA, 25 bp, Probe Sequence
aaaggaggtggatagcaaatgaact

SEQ ID NO: 99622 - DNA, 25 bp, Probe Sequence
tagcaaatgaactgtgttggttgtt

SEQ ID NO: 99623 - DNA, 25 bp, Probe Sequence
aatgaactgtgttggttgtttgagt

SEQ ID NO: 99624 - DNA, 25 bp, Probe Sequence
ggatagcaaatgaactgtgttggtt

SEQ ID NO: 99625 - DNA, 25 bp, Probe Sequence
aacattctacgtattagtcatcgct

SEQ ID NO: 99626 - DNA, 25 bp, Probe Sequence
gaacattctacgtattagtcatcgc

SEQ ID NO: 99627 - DNA, 25 bp, Probe Sequence
aaggaggtggatagcaaatgaactg

SEQ ID NO: 99628 - DNA, 25 bp, Probe Sequence
acattctacgtattagtcatcgcta

SEQ ID NO: 99629 - DNA, 25 bp, Probe Sequence
ccgaacattctacgtattagtcatc

SEQ ID NO: 99630 - DNA, 25 bp, Probe Sequence
agcaaatgaactgtgttggttgttt

SEQ ID NO: 99631 - DNA, 25 bp, Probe Sequence
aggtggatagcaaatgaactgtgtt

SEQ ID NO: 99632 - DNA, 25 bp, Probe Sequence
gtggatagcaaatgaactgtgttgg

SEQ ID NO: 99633 - DNA, 25 bp, Probe Sequence
ggtggatagcaaatgaactgtgttg

SEQ ID NO: 99634 - DNA, 25 bp, Probe Sequence
catctgttacctatctcggcataat

SEQ ID NO: 99635 - DNA, 25 bp, Probe Sequence
gttacctatctcggcataattctca

SEQ ID NO: 99636 - DNA, 25 bp, Probe Sequence
tgttacctatctcggcataattctc

SEQ ID NO: 99637 - DNA, 25 bp, Probe Sequence
ctgttacctatctcggcataattct

SEQ ID NO: 99638 - DNA, 25 bp, Probe Sequence
tctgttacctatctcggcataattc

SEQ ID NO: 99639 - DNA, 25 bp, Probe Sequence
tcatctgttacctatctcggcataa

SEQ ID NO: 99640 - DNA, 25 bp, Probe Sequence
tcttcctcatctgttacctatctcg

SEQ ID NO: 99641 - DNA, 25 bp, Probe Sequence
ttcttcctcatctgttacctatctc

SEQ ID NO: 99642 - DNA, 25 bp, Probe Sequence
atctgttacctatctcggcataatt

SEQ ID NO: 99643 - DNA, 25 bp, Probe Sequence
acctatctcggcataattctcataa

SEQ ID NO: 99644 - DNA, 25 bp, Probe Sequence
ttacctatctcggcataattctcat

SEQ ID NO: 99645 - DNA, 25 bp, Probe Sequence
ctcatctgttacctatctcggcata

SEQ ID NO: 99646 - DNA, 25 bp, Probe Sequence
cttcctcatctgttacctatctcgg

SEQ ID NO: 99647 - DNA, 25 bp, Probe Sequence
tacctatctcggcataattctcata

SEQ ID NO: 99648 - DNA, 25 bp, Probe Sequence
ccattacttcaatcaagcccaaatt

SEQ ID NO: 99649 - DNA, 25 bp, Probe Sequence
tttcttcctcatctgttacctatct

SEQ ID NO: 99650 - DNA, 25 bp, Probe Sequence
cctatctcggcataattctcataaa

SEQ ID NO: 99651 - DNA, 25 bp, Probe Sequence
cctcatctgttacctatctcggcat

SEQ ID NO: 99652 - DNA, 25 bp, Probe Sequence
ttcctcatctgttacctatctcggc

SEQ ID NO: 99653 - DNA, 25 bp, Probe Sequence
cccattacttcaatcaagcccaaat

SEQ ID NO: 99654 - DNA, 25 bp, Probe Sequence
caatcgtgtccaactgatctctcaa

SEQ ID NO: 99655 - DNA, 25 bp, Probe Sequence
atttcttcctcatctgttacctatc

SEQ ID NO: 99656 - DNA, 25 bp, Probe Sequence
ccatgaattcctgttctagatctca

SEQ ID NO: 99657 - DNA, 25 bp, Probe Sequence
ccaaatttcttcctcatctgttacc

SEQ ID NO: 99658 - DNA, 25 bp, Probe Sequence
cctcagaataatagactccacacag

SEQ ID NO: 99659 - DNA, 25 bp, Probe Sequence
cacctcagaataatagactccacac

SEQ ID NO: 99660 - DNA, 25 bp, Probe Sequence
acctcagaataatagactccacaca

SEQ ID NO: 99661 - DNA, 25 bp, Probe Sequence
tccacctcagaataatagactccac

SEQ ID NO: 99662 - DNA, 25 bp, Probe Sequence
ccacctcagaataatagactccaca

SEQ ID NO: 99663 - DNA, 25 bp, Probe Sequence
ctcagaataatagactccacacagt

SEQ ID NO: 99664 - DNA, 25 bp, Probe Sequence
ggtaacagagtgagattccgtctaa

SEQ ID NO: 99665 - DNA, 25 bp, Probe Sequence
ctgtccacctcagaataatagactc

SEQ ID NO: 99666 - DNA, 25 bp, Probe Sequence
gtccacctcagaataatagactcca

SEQ ID NO: 99667 - DNA, 25 bp, Probe Sequence
tgtccacctcagaataatagactcc

SEQ ID NO: 99668 - DNA, 25 bp, Probe Sequence
cctgtccacctcagaataatagact

SEQ ID NO: 99669 - DNA, 25 bp, Probe Sequence
gctgaggtaggataattgcttcaac

SEQ ID NO: 99670 - DNA, 25 bp, Probe Sequence
ctcaagttagcctagtctaaggatg

SEQ ID NO: 99671 - DNA, 25 bp, Probe Sequence
caggacctagcagaactaacagatg

SEQ ID NO: 99672 - DNA, 25 bp, Probe Sequence
tcaagttagcctagtctaaggatgc

SEQ ID NO: 99673 - DNA, 25 bp, Probe Sequence
ctgaggtaggataattgcttcaacc

SEQ ID NO: 99674 - DNA, 25 bp, Probe Sequence
gtaacagagtgagattccgtctaaa

SEQ ID NO: 99675 - DNA, 25 bp, Probe Sequence
ccaacatagtgaaaccttgactcta

SEQ ID NO: 99676 - DNA, 25 bp, Probe Sequence
agtgaaaccttgactctactacaaa

SEQ ID NO: 99677 - DNA, 25 bp, Probe Sequence
caacatagtgaaaccttgactctac

SEQ ID NO: 99678 - DNA, 25 bp, Probe Sequence
aacatagtgaaaccttgactctact

SEQ ID NO: 99679 - DNA, 25 bp, Probe Sequence
gtgaaaccttgactctactacaaat

SEQ ID NO: 99680 - DNA, 25 bp, Probe Sequence
ataattgcttcaacccaggagaaag

SEQ ID NO: 99681 - DNA, 25 bp, Probe Sequence
gataattgcttcaacccaggagaaa

SEQ ID NO: 99682 - DNA, 25 bp, Probe Sequence
atataagtgtgctattgaatggctt

SEQ ID NO: 99683 - DNA, 25 bp, Probe Sequence
gtatataagtgtgctattgaatggc

SEQ ID NO: 99684 - DNA, 25 bp, Probe Sequence
tatataagtgtgctattgaatggct

SEQ ID NO: 99685 - DNA, 25 bp, Probe Sequence
tgaatcgtccttataacagcttatg

SEQ ID NO: 99686 - DNA, 25 bp, Probe Sequence
aatctactttgtctccataagcctg

SEQ ID NO: 99687 - DNA, 25 bp, Probe Sequence
aaatctactttgtctccataagcct

SEQ ID NO: 99688 - DNA, 25 bp, Probe Sequence
gaatcgtccttataacagcttatga

SEQ ID NO: 99689 - DNA, 25 bp, Probe Sequence
ctactttgtctccataagcctgttt

SEQ ID NO: 99690 - DNA, 25 bp, Probe Sequence
cattaccctgagaagaaaccttacc

SEQ ID NO: 99691 - DNA, 25 bp, Probe Sequence
tcattaccctgagaagaaaccttac

SEQ ID NO: 99692 - DNA, 25 bp, Probe Sequence
gtcattaccctgagaagaaacctta

SEQ ID NO: 99693 - DNA, 25 bp, Probe Sequence
atctactttgtctccataagcctgt

SEQ ID NO: 99694 - DNA, 25 bp, Probe Sequence
tataagtgtgctattgaatggcttt

SEQ ID NO: 99695 - DNA, 25 bp, Probe Sequence
aatcgtccttataacagcttatgaa

SEQ ID NO: 99696 - DNA, 25 bp, Probe Sequence
ttgaatcgtccttataacagcttat

SEQ ID NO: 99697 - DNA, 25 bp, Probe Sequence
tctactttgtctccataagcctgtt

SEQ ID NO: 99698 - DNA, 25 bp, Probe Sequence
attaccctgagaagaaaccttaccc

SEQ ID NO: 99699 - DNA, 25 bp, Probe Sequence
agtaatctacatgggtaacgatgac

SEQ ID NO: 99700 - DNA, 25 bp, Probe Sequence
tcaatacttagtacatcttcctctt

SEQ ID NO: 99701 - DNA, 25 bp, Probe Sequence
ttcaatacttagtacatcttcctct

SEQ ID NO: 99702 - DNA, 25 bp, Probe Sequence
tagtaatctacatgggtaacgatga

SEQ ID NO: 99703 - DNA, 25 bp, Probe Sequence
agtatataagtgtgctattgaatgg

SEQ ID NO: 99704 - DNA, 25 bp, Probe Sequence
ttagtaatctacatgggtaacgatg

SEQ ID NO: 99705 - DNA, 25 bp, Probe Sequence
tttgaatcgtccttataacagctta

SEQ ID NO: 99706 - DNA, 25 bp, Probe Sequence
gtcctggttcatcataagaatctca

SEQ ID NO: 99707 - DNA, 25 bp, Probe Sequence
ggtcctggttcatcataagaatctc

SEQ ID NO: 99708 - DNA, 25 bp, Probe Sequence
tgttacttagattggcagtgacatt

SEQ ID NO: 99709 - DNA, 25 bp, Probe Sequence
ttgttacttagattggcagtgacat

SEQ ID NO: 99710 - DNA, 25 bp, Probe Sequence
cctggttcatcataagaatctcagt

SEQ ID NO: 99711 - DNA, 25 bp, Probe Sequence
tcctggttcatcataagaatctcag

SEQ ID NO: 99712 - DNA, 25 bp, Probe Sequence
ctggttcatcataagaatctcagtt

SEQ ID NO: 99713 - DNA, 25 bp, Probe Sequence
ttcgttatctgtgagaatcctgtgg

SEQ ID NO: 99714 - DNA, 25 bp, Probe Sequence
gattggcagtgacatttagagttac

SEQ ID NO: 99715 - DNA, 25 bp, Probe Sequence
agattggcagtgacatttagagtta

SEQ ID NO: 99716 - DNA, 25 bp, Probe Sequence
tagattggcagtgacatttagagtt

SEQ ID NO: 99717 - DNA, 25 bp, Probe Sequence
ttagattggcagtgacatttagagt

SEQ ID NO: 99718 - DNA, 25 bp, Probe Sequence
gcccttgtagtagtgtaaatctgta

SEQ ID NO: 99719 - DNA, 25 bp, Probe Sequence
attggcagtgacatttagagttaca

SEQ ID NO: 99720 - DNA, 25 bp, Probe Sequence
agtgtaaatctgtatctcaaaccca

SEQ ID NO: 99721 - DNA, 25 bp, Probe Sequence
cttagattggcagtgacatttagag

SEQ ID NO: 99722 - DNA, 25 bp, Probe Sequence
tggcagtgacatttagagttacaaa

SEQ ID NO: 99723 - DNA, 25 bp, Probe Sequence
ctgcccttgtagtagtgtaaatctg

SEQ ID NO: 99724 - DNA, 25 bp, Probe Sequence
tacctgcccttgtagtagtgtaaat

SEQ ID NO: 99725 - DNA, 25 bp, Probe Sequence
cttatttgaggatgtgttcttacca

SEQ ID NO: 99726 - DNA, 25 bp, Probe Sequence
gaggttccttgttgcttacttctgt

SEQ ID NO: 99727 - DNA, 25 bp, Probe Sequence
ctttcgttatctgtgagaatcctgt

SEQ ID NO: 99728 - DNA, 25 bp, Probe Sequence
cggcaggagtatttcaagatattta

SEQ ID NO: 99729 - DNA, 25 bp, Probe Sequence
aagaccctttgttacttagattggc

SEQ ID NO: 99730 - DNA, 25 bp, Probe Sequence
agggtgatgtaactttgagaagaaa

SEQ ID NO: 99731 - DNA, 25 bp, Probe Sequence
aagggtgatgtaactttgagaagaa

SEQ ID NO: 99732 - DNA, 25 bp, Probe Sequence
gaagggtgatgtaactttgagaaga

SEQ ID NO: 99733 - DNA, 25 bp, Probe Sequence
agaagggtgatgtaactttgagaag

SEQ ID NO: 99734 - DNA, 25 bp, Probe Sequence
gagacctaaggagaaagagaaatca

SEQ ID NO: 99735 - DNA, 25 bp, Probe Sequence
tgagacctaaggagaaagagaaatc

SEQ ID NO: 99736 - DNA, 25 bp, Probe Sequence
cagaagggtgatgtaactttgagaa

SEQ ID NO: 99737 - DNA, 25 bp, Probe Sequence
gggtgatgtaactttgagaagaaat

SEQ ID NO: 99738 - DNA, 25 bp, Probe Sequence
agacctaaggagaaagagaaatcaa

SEQ ID NO: 99739 - DNA, 25 bp, Probe Sequence
atgagacctaaggagaaagagaaat

SEQ ID NO: 99740 - DNA, 25 bp, Probe Sequence
gctgagagttcaaagaatcaatagg

SEQ ID NO: 99741 - DNA, 25 bp, Probe Sequence
cccaagttaaatgccctatgagatg

SEQ ID NO: 99742 - DNA, 25 bp, Probe Sequence
atctcagaagggtgatgtaactttg

SEQ ID NO: 99743 - DNA, 25 bp, Probe Sequence
tgagagttcaaagaatcaataggga

SEQ ID NO: 99744 - DNA, 25 bp, Probe Sequence
gtgctgagagttcaaagaatcaata

SEQ ID NO: 99745 - DNA, 25 bp, Probe Sequence
agtgctgagagttcaaagaatcaat

SEQ ID NO: 99746 - DNA, 25 bp, Probe Sequence
ctgagagttcaaagaatcaataggg

SEQ ID NO: 99747 - DNA, 25 bp, Probe Sequence
aagtgctgagagttcaaagaatcaa

SEQ ID NO: 99748 - DNA, 25 bp, Probe Sequence
tgctgagagttcaaagaatcaatag

SEQ ID NO: 99749 - DNA, 25 bp, Probe Sequence
gagagttcaaagaatcaatagggaa

SEQ ID NO: 99750 - DNA, 25 bp, Probe Sequence
catgagacctaaggagaaagagaaa

SEQ ID NO: 99751 - DNA, 25 bp, Probe Sequence
ggtgatgtaactttgagaagaaatg

SEQ ID NO: 99752 - DNA, 25 bp, Probe Sequence
gaagtgctgagagttcaaagaatca

SEQ ID NO: 99753 - DNA, 25 bp, Probe Sequence
gacctaaggagaaagagaaatcaat

SEQ ID NO: 99754 - DNA, 25 bp, Probe Sequence
ctattagaaggattatggatgcggt

SEQ ID NO: 99755 - DNA, 25 bp, Probe Sequence
tattagaaggattatggatgcggtt

SEQ ID NO: 99756 - DNA, 25 bp, Probe Sequence
cggagagtatattgttgaagaggat

SEQ ID NO: 99757 - DNA, 25 bp, Probe Sequence
gatattggttatggttcattgtccg

SEQ ID NO: 99758 - DNA, 25 bp, Probe Sequence
attagaaggattatggatgcggttg

SEQ ID NO: 99759 - DNA, 25 bp, Probe Sequence
gctattagaaggattatggatgcgg

SEQ ID NO: 99760 - DNA, 25 bp, Probe Sequence
agagtatattgttgaagaggatagc

SEQ ID NO: 99761 - DNA, 25 bp, Probe Sequence
agctattagaaggattatggatgcg

SEQ ID NO: 99762 - DNA, 25 bp, Probe Sequence
ggatattggttatggttcattgtcc

SEQ ID NO: 99763 - DNA, 25 bp, Probe Sequence
ggagagtatattgttgaagaggata

SEQ ID NO: 99764 - DNA, 25 bp, Probe Sequence
gggatattggttatggttcattgtc

SEQ ID NO: 99765 - DNA, 25 bp, Probe Sequence
cgggatattggttatggttcattgt

SEQ ID NO: 99766 - DNA, 25 bp, Probe Sequence
ttagaaggattatggatgcggttgc

SEQ ID NO: 99767 - DNA, 25 bp, Probe Sequence
gagtatattgttgaagaggatagct

SEQ ID NO: 99768 - DNA, 25 bp, Probe Sequence
caaagatggtagagtagatgacggg

SEQ ID NO: 99769 - DNA, 25 bp, Probe Sequence
ggattaattagtacgggaagggtat

SEQ ID NO: 99770 - DNA, 25 bp, Probe Sequence
gggattaattagtacgggaagggta

SEQ ID NO: 99771 - DNA, 25 bp, Probe Sequence
aagatggtagagtagatgacgggtt

SEQ ID NO: 99772 - DNA, 25 bp, Probe Sequence
aaagatggtagagtagatgacgggt

SEQ ID NO: 99773 - DNA, 25 bp, Probe Sequence
atattggttatggttcattgtccgg

SEQ ID NO: 99774 - DNA, 25 bp, Probe Sequence
ccggagagtatattgttgaagagga

SEQ ID NO: 99775 - DNA, 25 bp, Probe Sequence
tagaaggattatggatgcggttgct

SEQ ID NO: 99776 - DNA, 25 bp, Probe Sequence
gcaaagatggtagagtagatgacgg

SEQ ID NO: 99777 - DNA, 25 bp, Probe Sequence
gagagtatattgttgaagaggatag

SEQ ID NO: 99778 - DNA, 25 bp, Probe Sequence
ataaccacttcctatctgtatgacc

SEQ ID NO: 99779 - DNA, 25 bp, Probe Sequence
tcttctattaatgacagtaacagcg

SEQ ID NO: 99780 - DNA, 25 bp, Probe Sequence
gataaccacttcctatctgtatgac

SEQ ID NO: 99781 - DNA, 25 bp, Probe Sequence
ggataaccacttcctatctgtatga

SEQ ID NO: 99782 - DNA, 25 bp, Probe Sequence
ctgccataatctctgtgaatttgtc

SEQ ID NO: 99783 - DNA, 25 bp, Probe Sequence
aaataactgctttagacactggctt

SEQ ID NO: 99784 - DNA, 25 bp, Probe Sequence
taaccacttcctatctgtatgaccc

SEQ ID NO: 99785 - DNA, 25 bp, Probe Sequence
aagatgtaggagaggaacactgact

SEQ ID NO: 99786 - DNA, 25 bp, Probe Sequence
taaataactgctttagacactggct

SEQ ID NO: 99787 - DNA, 25 bp, Probe Sequence
attggtagcaagtttctatctggaa

SEQ ID NO: 99788 - DNA, 25 bp, Probe Sequence
agcaagatttgatactttggtgatg

SEQ ID NO: 99789 - DNA, 25 bp, Probe Sequence
agattgaccagtagcaagatttgat

SEQ ID NO: 99790 - DNA, 25 bp, Probe Sequence
gccataatctctgtgaatttgtcct

SEQ ID NO: 99791 - DNA, 25 bp, Probe Sequence
ataaataactgctttagacactggc

SEQ ID NO: 99792 - DNA, 25 bp, Probe Sequence
cattggtagcaagtttctatctgga

SEQ ID NO: 99793 - DNA, 25 bp, Probe Sequence
tcattggtagcaagtttctatctgg

SEQ ID NO: 99794 - DNA, 25 bp, Probe Sequence
ccagggaattgtctactcatcattg

SEQ ID NO: 99795 - DNA, 25 bp, Probe Sequence
aataactgctttagacactggcttg

SEQ ID NO: 99796 - DNA, 25 bp, Probe Sequence
gtagcaagatttgatactttggtga

SEQ ID NO: 99797 - DNA, 25 bp, Probe Sequence
tgccataatctctgtgaatttgtcc

SEQ ID NO: 99798 - DNA, 25 bp, Probe Sequence
ttcattggtagcaagtttctatctg

SEQ ID NO: 99799 - DNA, 25 bp, Probe Sequence
attgaccagtagcaagatttgatac

SEQ ID NO: 99800 - DNA, 25 bp, Probe Sequence
ggaattgtctactcatcattgcagg

SEQ ID NO: 99801 - DNA, 25 bp, Probe Sequence
cagattgaccagtagcaagatttga

SEQ ID NO: 99802 - DNA, 25 bp, Probe Sequence
gaggtcatgcttctgtatctacttc

SEQ ID NO: 99803 - DNA, 25 bp, Probe Sequence
ggtcatgcttctgtatctacttcat

SEQ ID NO: 99804 - DNA, 25 bp, Probe Sequence
aggtcatgcttctgtatctacttca

SEQ ID NO: 99805 - DNA, 25 bp, Probe Sequence
atgcttctgtatctacttcatgctg

SEQ ID NO: 99806 - DNA, 25 bp, Probe Sequence
cttctgtatctacttcatgctgacc

SEQ ID NO: 99807 - DNA, 25 bp, Probe Sequence
ggaggtcatgcttctgtatctactt

SEQ ID NO: 99808 - DNA, 25 bp, Probe Sequence
gatggaggtcatgcttctgtatcta

SEQ ID NO: 99809 - DNA, 25 bp, Probe Sequence
ttctgtatctacttcatgctgacca

SEQ ID NO: 99810 - DNA, 25 bp, Probe Sequence
atggaggtcatgcttctgtatctac

SEQ ID NO: 99811 - DNA, 25 bp, Probe Sequence
gcttctgtatctacttcatgctgac

SEQ ID NO: 99812 - DNA, 25 bp, Probe Sequence
tgcttctgtatctacttcatgctga

SEQ ID NO: 99813 - DNA, 25 bp, Probe Sequence
tgtatctacttcatgctgaccagag

SEQ ID NO: 99814 - DNA, 25 bp, Probe Sequence
gtaatacaagctgaaggtggaagtg

SEQ ID NO: 99815 - DNA, 25 bp, Probe Sequence
ctgtatctacttcatgctgaccaga

SEQ ID NO: 99816 - DNA, 25 bp, Probe Sequence
tctgtatctacttcatgctgaccag

SEQ ID NO: 99817 - DNA, 25 bp, Probe Sequence
tggaggtcatgcttctgtatctact

SEQ ID NO: 99818 - DNA, 25 bp, Probe Sequence
gtatctacttcatgctgaccagagg

SEQ ID NO: 99819 - DNA, 25 bp, Probe Sequence
ggtaatacaagctgaaggtggaagt

SEQ ID NO: 99820 - DNA, 25 bp, Probe Sequence
tggtaatacaagctgaaggtggaag

SEQ ID NO: 99821 - DNA, 25 bp, Probe Sequence
taatacaagctgaaggtggaagtgt

SEQ ID NO: 99822 - DNA, 25 bp, Probe Sequence
aagggctggtattgttgtggtaata

SEQ ID NO: 99823 - DNA, 25 bp, Probe Sequence
gtggtaatacaagctgaaggtggaa

SEQ ID NO: 99824 - DNA, 25 bp, Probe Sequence
cattcttgagggattagggatggag

SEQ ID NO: 99825 - DNA, 25 bp, Probe Sequence
acaaacagctcaccatcaatttaaa

SEQ ID NO: 99826 - DNA, 25 bp, Probe Sequence
agattaacttacaaccaacctccaa

SEQ ID NO: 99827 - DNA, 25 bp, Probe Sequence
gacagcagattaacttacaaccaac

SEQ ID NO: 99828 - DNA, 25 bp, Probe Sequence
agacagcagattaacttacaaccaa

SEQ ID NO: 99829 - DNA, 25 bp, Probe Sequence
cagattaacttacaaccaacctcca

SEQ ID NO: 99830 - DNA, 25 bp, Probe Sequence
gtcagacagcagattaacttacaac

SEQ ID NO: 99831 - DNA, 25 bp, Probe Sequence
gattaacttacaaccaacctccaat

SEQ ID NO: 99832 - DNA, 25 bp, Probe Sequence
tcagacagcagattaacttacaacc

SEQ ID NO: 99833 - DNA, 25 bp, Probe Sequence
agcagattaacttacaaccaacctc

SEQ ID NO: 99834 - DNA, 25 bp, Probe Sequence
cagacagcagattaacttacaacca

SEQ ID NO: 99835 - DNA, 25 bp, Probe Sequence
cagcagattaacttacaaccaacct

SEQ ID NO: 99836 - DNA, 25 bp, Probe Sequence
attaacttacaaccaacctccaatt

SEQ ID NO: 99837 - DNA, 25 bp, Probe Sequence
acagcagattaacttacaaccaacc

SEQ ID NO: 99838 - DNA, 25 bp, Probe Sequence
gcataaggtcattagttctagtcac

SEQ ID NO: 99839 - DNA, 25 bp, Probe Sequence
agtcagacagcagattaacttacaa

SEQ ID NO: 99840 - DNA, 25 bp, Probe Sequence
tcagtcagacagcagattaacttac

SEQ ID NO: 99841 - DNA, 25 bp, Probe Sequence
atcagtcagacagcagattaactta

SEQ ID NO: 99842 - DNA, 25 bp, Probe Sequence
cagtcagacagcagattaacttaca

SEQ ID NO: 99843 - DNA, 25 bp, Probe Sequence
ttgctaccttacctgtactctactc

SEQ ID NO: 99844 - DNA, 25 bp, Probe Sequence
gcagattaacttacaaccaacctcc

SEQ ID NO: 99845 - DNA, 25 bp, Probe Sequence
gatcagtcagacagcagattaactt

SEQ ID NO: 99846 - DNA, 25 bp, Probe Sequence
ggacacttagcttattcaacattgc

SEQ ID NO: 99847 - DNA, 25 bp, Probe Sequence
aggacacttagcttattcaacattg

SEQ ID NO: 99848 - DNA, 25 bp, Probe Sequence
gacacttagcttattcaacattgca

SEQ ID NO: 99849 - DNA, 25 bp, Probe Sequence
ggtgcataaggtcattagttctagt

SEQ ID NO: 99850 - DNA, 25 bp, Probe Sequence
aagattatagaatgtggtctggctg

SEQ ID NO: 99851 - DNA, 25 bp, Probe Sequence
attatagaatgtggtctggctgctt

SEQ ID NO: 99852 - DNA, 25 bp, Probe Sequence
ggactactataatggcttgtcatcc

SEQ ID NO: 99853 - DNA, 25 bp, Probe Sequence
taagaagcatgtgagaatcaatgtt

SEQ ID NO: 99854 - DNA, 25 bp, Probe Sequence
ttaagaagcatgtgagaatcaatgt

SEQ ID NO: 99855 - DNA, 25 bp, Probe Sequence
gactactataatggcttgtcatcca

SEQ ID NO: 99856 - DNA, 25 bp, Probe Sequence
gattatagaatgtggtctggctgct

SEQ ID NO: 99857 - DNA, 25 bp, Probe Sequence
agattatagaatgtggtctggctgc

SEQ ID NO: 99858 - DNA, 25 bp, Probe Sequence
aattctaaggcatgaagctaagagg

SEQ ID NO: 99859 - DNA, 25 bp, Probe Sequence
ggagaggttactttgataatgggaa

SEQ ID NO: 99860 - DNA, 25 bp, Probe Sequence
tgtggagaggttactttgataatgg

SEQ ID NO: 99861 - DNA, 25 bp, Probe Sequence
ttatagaatgtggtctggctgcttc

SEQ ID NO: 99862 - DNA, 25 bp, Probe Sequence
ctgtggagaggttactttgataatg

SEQ ID NO: 99863 - DNA, 25 bp, Probe Sequence
tggagaggttactttgataatggga

SEQ ID NO: 99864 - DNA, 25 bp, Probe Sequence
gtggagaggttactttgataatggg

SEQ ID NO: 99865 - DNA, 25 bp, Probe Sequence
ggcttgtcatccatgaataattaag

SEQ ID NO: 99866 - DNA, 25 bp, Probe Sequence
atatcccaaggtcaaactgtaaatg

SEQ ID NO: 99867 - DNA, 25 bp, Probe Sequence
caaagattatagaatgtggtctggc

SEQ ID NO: 99868 - DNA, 25 bp, Probe Sequence
attctaaggcatgaagctaagaggt

SEQ ID NO: 99869 - DNA, 25 bp, Probe Sequence
aatgggaagagaagtaagatatggt

SEQ ID NO: 99870 - DNA, 25 bp, Probe Sequence
aaagattatagaatgtggtctggct

SEQ ID NO: 99871 - DNA, 25 bp, Probe Sequence
attaagaagcatgtgagaatcaatg

SEQ ID NO: 99872 - DNA, 25 bp, Probe Sequence
aggttactttgataatgggaagaga

SEQ ID NO: 99873 - DNA, 25 bp, Probe Sequence
agaggttactttgataatgggaaga

SEQ ID NO: 99874 - DNA, 25 bp, Probe Sequence
gagatacatacacacacacacacac

SEQ ID NO: 99875 - DNA, 25 bp, Probe Sequence
tgagatacatacacacacacacaca

SEQ ID NO: 99876 - DNA, 25 bp, Probe Sequence
gatacatacacacacacacacacac

SEQ ID NO: 99877 - DNA, 25 bp, Probe Sequence
agatacatacacacacacacacaca

SEQ ID NO: 99878 - DNA, 25 bp, Probe Sequence
atacatacacacacacacacacaca

SEQ ID NO: 99879 - DNA, 25 bp, Probe Sequence
gtgagatacatacacacacacacac

SEQ ID NO: 99880 - DNA, 25 bp, Probe Sequence
tacatacacacacacacacacacac

SEQ ID NO: 99881 - DNA, 25 bp, Probe Sequence
aggttacaagactactacttcccat

SEQ ID NO: 99882 - DNA, 25 bp, Probe Sequence
aaaggttacaagactactacttccc

SEQ ID NO: 99883 - DNA, 25 bp, Probe Sequence
aaggttacaagactactacttccca

SEQ ID NO: 99884 - DNA, 25 bp, Probe Sequence
aaatgaagtaactcggaaatggaaa

SEQ ID NO: 99885 - DNA, 25 bp, Probe Sequence
ctaaatgaagtaactcggaaatgga

SEQ ID NO: 99886 - DNA, 25 bp, Probe Sequence
tctaaatgaagtaactcggaaatgg

SEQ ID NO: 99887 - DNA, 25 bp, Probe Sequence
ggttacaagactactacttcccata

SEQ ID NO: 99888 - DNA, 25 bp, Probe Sequence
taaatgaagtaactcggaaatggaa

SEQ ID NO: 99889 - DNA, 25 bp, Probe Sequence
caacagtggataaagaaatgtgaga

SEQ ID NO: 99890 - DNA, 25 bp, Probe Sequence
actgcttgagtacaggcttaatctg

SEQ ID NO: 99891 - DNA, 25 bp, Probe Sequence
cactgcttgagtacaggcttaatct

SEQ ID NO: 99892 - DNA, 25 bp, Probe Sequence
acgttatacagacaatgtcatgcaa

SEQ ID NO: 99893 - DNA, 25 bp, Probe Sequence
gaaataatggcatttgtagcaacct

SEQ ID NO: 99894 - DNA, 25 bp, Probe Sequence
aaataatggcatttgtagcaacctg

SEQ ID NO: 99895 - DNA, 25 bp, Probe Sequence
tgaaataatggcatttgtagcaacc

SEQ ID NO: 99896 - DNA, 25 bp, Probe Sequence
gaggacccaaacacctaagaataaa

SEQ ID NO: 99897 - DNA, 25 bp, Probe Sequence
atgaaataatggcatttgtagcaac

SEQ ID NO: 99898 - DNA, 25 bp, Probe Sequence
gcagcaccactatattatcatctct

SEQ ID NO: 99899 - DNA, 25 bp, Probe Sequence
cgcagcaccactatattatcatctc

SEQ ID NO: 99900 - DNA, 25 bp, Probe Sequence
ctcgcagcaccactatattatcatc

SEQ ID NO: 99901 - DNA, 25 bp, Probe Sequence
tcgcagcaccactatattatcatct

SEQ ID NO: 99902 - DNA, 25 bp, Probe Sequence
tctcgcagcaccactatattatcat

SEQ ID NO: 99903 - DNA, 25 bp, Probe Sequence
agcaccactatattatcatctctct

SEQ ID NO: 99904 - DNA, 25 bp, Probe Sequence
cagcaccactatattatcatctctc

SEQ ID NO: 99905 - DNA, 25 bp, Probe Sequence
gcaccactatattatcatctctctc

SEQ ID NO: 99906 - DNA, 25 bp, Probe Sequence
ctctcgcagcaccactatattatca

SEQ ID NO: 99907 - DNA, 25 bp, Probe Sequence
cctctcgcagcaccactatattatc

SEQ ID NO: 99908 - DNA, 25 bp, Probe Sequence
ttcagaggaggaaacatacacaaag

SEQ ID NO: 99909 - DNA, 25 bp, Probe Sequence
caccactatattatcatctctctct

SEQ ID NO: 99910 - DNA, 25 bp, Probe Sequence
tcagaggaggaaacatacacaaagg

SEQ ID NO: 99911 - DNA, 25 bp, Probe Sequence
tccaaccgagttactttaattaccg

SEQ ID NO: 99912 - DNA, 25 bp, Probe Sequence
ttccaaccgagttactttaattacc

SEQ ID NO: 99913 - DNA, 25 bp, Probe Sequence
tttcagaggaggaaacatacacaaa

SEQ ID NO: 99914 - DNA, 25 bp, Probe Sequence
ccaaccgagttactttaattaccgc

SEQ ID NO: 99915 - DNA, 25 bp, Probe Sequence
tttccaaccgagttactttaattac

SEQ ID NO: 99916 - DNA, 25 bp, Probe Sequence
cagaggaggaaacatacacaaaggc

SEQ ID NO: 99917 - DNA, 25 bp, Probe Sequence
tattatcatctctctctatcacaga

SEQ ID NO: 99918 - DNA, 25 bp, Probe Sequence
cagttttccaaccgagttactttaa

SEQ ID NO: 99919 - DNA, 25 bp, Probe Sequence
tcagttttccaaccgagttacttta

SEQ ID NO: 99920 - DNA, 25 bp, Probe Sequence
ccctctcgcagcaccactatattat

SEQ ID NO: 99921 - DNA, 25 bp, Probe Sequence
agttttccaaccgagttactttaat

SEQ ID NO: 99922 - DNA, 25 bp, Probe Sequence
tgacctgtgactgtatcattaactg

SEQ ID NO: 99923 - DNA, 25 bp, Probe Sequence
cctgtgactgtatcattaactgctt

SEQ ID NO: 99924 - DNA, 25 bp, Probe Sequence
gacctgtgactgtatcattaactgc

SEQ ID NO: 99925 - DNA, 25 bp, Probe Sequence
acctgtgactgtatcattaactgct

SEQ ID NO: 99926 - DNA, 25 bp, Probe Sequence
tatagattacatgacctgtgactgt

SEQ ID NO: 99927 - DNA, 25 bp, Probe Sequence
tctaaataaatcctcctgtttcccg

SEQ ID NO: 99928 - DNA, 25 bp, Probe Sequence
ctaaataaatcctcctgtttcccgt

SEQ ID NO: 99929 - DNA, 25 bp, Probe Sequence
taaataaatcctcctgtttcccgtg

SEQ ID NO: 99930 - DNA, 25 bp, Probe Sequence
ttgcttctgtaagtttgcctataaa

SEQ ID NO: 99931 - DNA, 25 bp, Probe Sequence
tttgcttctgtaagtttgcctataa

SEQ ID NO: 99932 - DNA, 25 bp, Probe Sequence
tgctatagattacatgacctgtgac

SEQ ID NO: 99933 - DNA, 25 bp, Probe Sequence
gctatagattacatgacctgtgact

SEQ ID NO: 99934 - DNA, 25 bp, Probe Sequence
tttcgccaagggttgtatttagtaa

SEQ ID NO: 99935 - DNA, 25 bp, Probe Sequence
cgccaagggttgtatttagtaagat

SEQ ID NO: 99936 - DNA, 25 bp, Probe Sequence
ctgtgactgtatcattaactgcttt

SEQ ID NO: 99937 - DNA, 25 bp, Probe Sequence
gattacatgacctgtgactgtatca

SEQ ID NO: 99938 - DNA, 25 bp, Probe Sequence
agattacatgacctgtgactgtatc

SEQ ID NO: 99939 - DNA, 25 bp, Probe Sequence
gccaagggttgtatttagtaagatt

SEQ ID NO: 99940 - DNA, 25 bp, Probe Sequence
atgctatagattacatgacctgtga

SEQ ID NO: 99941 - DNA, 25 bp, Probe Sequence
atctaaataaatcctcctgtttccc

SEQ ID NO: 99942 - DNA, 25 bp, Probe Sequence
ttcgccaagggttgtatttagtaag

SEQ ID NO: 99943 - DNA, 25 bp, Probe Sequence
gtttcgccaagggttgtatttagta

SEQ ID NO: 99944 - DNA, 25 bp, Probe Sequence
atgacctgtgactgtatcattaact

SEQ ID NO: 99945 - DNA, 25 bp, Probe Sequence
tagattacatgacctgtgactgtat

SEQ ID NO: 99946 - DNA, 25 bp, Probe Sequence
ccttacattccacattccaatcatt

SEQ ID NO: 99947 - DNA, 25 bp, Probe Sequence
gcttacacactcaaccattcttata

SEQ ID NO: 99948 - DNA, 25 bp, Probe Sequence
gtattctacactggacagatgacaa

SEQ ID NO: 99949 - DNA, 25 bp, Probe Sequence
tgtgtagatgattcaagactctgac

SEQ ID NO: 99950 - DNA, 25 bp, Probe Sequence
aaggtattctacactggacagatga

SEQ ID NO: 99951 - DNA, 25 bp, Probe Sequence
ctacctctctaagcactgactctag

SEQ ID NO: 99952 - DNA, 25 bp, Probe Sequence
gtgtagatgattcaagactctgacc

SEQ ID NO: 99953 - DNA, 25 bp, Probe Sequence
atgtgtagatgattcaagactctga

SEQ ID NO: 99954 - DNA, 25 bp, Probe Sequence
aatgttagttgaatgactggagagc

SEQ ID NO: 99955 - DNA, 25 bp, Probe Sequence
aggtattctacactggacagatgac

SEQ ID NO: 99956 - DNA, 25 bp, Probe Sequence
ctgtagcaacatctcttcctcatta

SEQ ID NO: 99957 - DNA, 25 bp, Probe Sequence
tgtagcaacatctcttcctcattaa

SEQ ID NO: 99958 - DNA, 25 bp, Probe Sequence
ggtattctacactggacagatgaca

SEQ ID NO: 99959 - DNA, 25 bp, Probe Sequence
catgtgtagatgattcaagactctg

SEQ ID NO: 99960 - DNA, 25 bp, Probe Sequence
acactcaaccattcttatatgtgct

SEQ ID NO: 99961 - DNA, 25 bp, Probe Sequence
cactcaaccattcttatatgtgctt

SEQ ID NO: 99962 - DNA, 25 bp, Probe Sequence
agcttacacactcaaccattcttat

SEQ ID NO: 99963 - DNA, 25 bp, Probe Sequence
cttgtacctggatcatatcacctga

SEQ ID NO: 99964 - DNA, 25 bp, Probe Sequence
ccttgtacctggatcatatcacctg

SEQ ID NO: 99965 - DNA, 25 bp, Probe Sequence
caacatctcttcctcattaaactgc

SEQ ID NO: 99966 - DNA, 25 bp, Probe Sequence
gcaacatctcttcctcattaaactg

SEQ ID NO: 99967 - DNA, 25 bp, Probe Sequence
agcaacatctcttcctcattaaact

SEQ ID NO: 99968 - DNA, 25 bp, Probe Sequence
tacctctctaagcactgactctagc

SEQ ID NO: 99969 - DNA, 25 bp, Probe Sequence
cctgtagcaacatctcttcctcatt

SEQ ID NO: 99970 - DNA, 25 bp, Probe Sequence
agaagtctctaatctacaagcacat

SEQ ID NO: 99971 - DNA, 25 bp, Probe Sequence
gaagtctctaatctacaagcacatt

SEQ ID NO: 99972 - DNA, 25 bp, Probe Sequence
tgtacctagtcacattactgccaat

SEQ ID NO: 99973 - DNA, 25 bp, Probe Sequence
tagaagtctctaatctacaagcaca

SEQ ID NO: 99974 - DNA, 25 bp, Probe Sequence
ataatgatacagaccagccaaagtt

SEQ ID NO: 99975 - DNA, 25 bp, Probe Sequence
aataatgatacagaccagccaaagt

SEQ ID NO: 99976 - DNA, 25 bp, Probe Sequence
ttactctgcatagccaaccttatat

SEQ ID NO: 99977 - DNA, 25 bp, Probe Sequence
aggtattcccattatgttaagcagg

SEQ ID NO: 99978 - DNA, 25 bp, Probe Sequence
aaataatgatacagaccagccaaag

SEQ ID NO: 99979 - DNA, 25 bp, Probe Sequence
taatgatacagaccagccaaagttc

SEQ ID NO: 99980 - DNA, 25 bp, Probe Sequence
accttatatgttatattctggcagt

SEQ ID NO: 99981 - DNA, 25 bp, Probe Sequence
gcgttaaggataggaaactgtagta

SEQ ID NO: 99982 - DNA, 25 bp, Probe Sequence
aagcgttaaggataggaaactgtag

SEQ ID NO: 99983 - DNA, 25 bp, Probe Sequence
gaagcgttaaggataggaaactgta

SEQ ID NO: 99984 - DNA, 25 bp, Probe Sequence
agcgttaaggataggaaactgtagt

SEQ ID NO: 99985 - DNA, 25 bp, Probe Sequence
agtctctaatctacaagcacatttg

SEQ ID NO: 99986 - DNA, 25 bp, Probe Sequence
gtacctagtcacattactgccaatg

SEQ ID NO: 99987 - DNA, 25 bp, Probe Sequence
aagtctctaatctacaagcacattt

SEQ ID NO: 99988 - DNA, 25 bp, Probe Sequence
atagaagtctctaatctacaagcac

SEQ ID NO: 99989 - DNA, 25 bp, Probe Sequence
tactctgcatagccaaccttatatg

SEQ ID NO: 99990 - DNA, 25 bp, Probe Sequence
tctgcatagccaaccttatatgtta

SEQ ID NO: 99991 - DNA, 25 bp, Probe Sequence
taggtattcccattatgttaagcag

SEQ ID NO: 99992 - DNA, 25 bp, Probe Sequence
agaagcgttaaggataggaaactgt

SEQ ID NO: 99993 - DNA, 25 bp, Probe Sequence
acagaagcgttaaggataggaaact

SEQ ID NO: 99994 - DNA, 25 bp, Probe Sequence
cagagttattgatgcaggaatgtct

SEQ ID NO: 99995 - DNA, 25 bp, Probe Sequence
ctcatcatagctccttcaccagtag

SEQ ID NO: 99996 - DNA, 25 bp, Probe Sequence
ccagagttattgatgcaggaatgtc

SEQ ID NO: 99997 - DNA, 25 bp, Probe Sequence
catcatagctccttcaccagtagac

SEQ ID NO: 99998 - DNA, 25 bp, Probe Sequence
tcatcatagctccttcaccagtaga

SEQ ID NO: 99999 - DNA, 25 bp, Probe Sequence
agagttattgatgcaggaatgtctg

SEQ ID NO: 100000 - DNA, 25 bp, Probe Sequence
accatgctcttctaggagactttag

SEQ ID NO: 100001 - DNA, 25 bp, Probe Sequence
atcatagctccttcaccagtagacc

SEQ ID NO: 100002 - DNA, 25 bp, Probe Sequence
cctcatcatagctccttcaccagta

SEQ ID NO: 100003 - DNA, 25 bp, Probe Sequence
caccatgctcttctaggagacttta

SEQ ID NO: 100004 - DNA, 25 bp, Probe Sequence
ctcaccatgctcttctaggagactt

SEQ ID NO: 100005 - DNA, 25 bp, Probe Sequence
ctcttctaggagactttagccttgg

SEQ ID NO: 100006 - DNA, 25 bp, Probe Sequence
atagctccttcaccagtagaccatg

SEQ ID NO: 100007 - DNA, 25 bp, Probe Sequence
catagctccttcaccagtagaccat

SEQ ID NO: 100008 - DNA, 25 bp, Probe Sequence
gttttgttttgttttgagatggagt

SEQ ID NO: 100009 - DNA, 25 bp, Probe Sequence
tgttttgttttgttttgagatggag

SEQ ID NO: 100010 - DNA, 25 bp, Probe Sequence
ttttgttttgttttgagatggagtc

SEQ ID NO: 100011 - DNA, 25 bp, Probe Sequence
tttgttttgttttgagatggagtct

SEQ ID NO: 100012 - DNA, 25 bp, Probe Sequence
gtcttgaccctttaccatattttgt

SEQ ID NO: 100013 - DNA, 25 bp, Probe Sequence
ttgttttgttttgttttgagatgga

SEQ ID NO: 100014 - DNA, 25 bp, Probe Sequence
tcttgaccctttaccatattttgtt

SEQ ID NO: 100015 - DNA, 25 bp, Probe Sequence
tcaccatgctcttctaggagacttt

SEQ ID NO: 100016 - DNA, 25 bp, Probe Sequence
gaccctttaccatattttgttttgt

SEQ ID NO: 100017 - DNA, 25 bp, Probe Sequence
tgaccctttaccatattttgttttg

SEQ ID NO: 100018 - DNA, 25 bp, Probe Sequence
ttctatgctaagtgtactcaaggac

SEQ ID NO: 100019 - DNA, 25 bp, Probe Sequence
cttctatgctaagtgtactcaagga

SEQ ID NO: 100020 - DNA, 25 bp, Probe Sequence
tccttctatgctaagtgtactcaag

SEQ ID NO: 100021 - DNA, 25 bp, Probe Sequence
ttccttctatgctaagtgtactcaa

SEQ ID NO: 100022 - DNA, 25 bp, Probe Sequence
ctaagtgtactcaaggactactcag

SEQ ID NO: 100023 - DNA, 25 bp, Probe Sequence
tctatgctaagtgtactcaaggact

SEQ ID NO: 100024 - DNA, 25 bp, Probe Sequence
tatgctaagtgtactcaaggactac

SEQ ID NO: 100025 - DNA, 25 bp, Probe Sequence
atgctaagtgtactcaaggactact

SEQ ID NO: 100026 - DNA, 25 bp, Probe Sequence
ctatgctaagtgtactcaaggacta

SEQ ID NO: 100027 - DNA, 25 bp, Probe Sequence
ctcaaggactactcagctaatcatt

SEQ ID NO: 100028 - DNA, 25 bp, Probe Sequence
tactcaaggactactcagctaatca

SEQ ID NO: 100029 - DNA, 25 bp, Probe Sequence
gtactcaaggactactcagctaatc

SEQ ID NO: 100030 - DNA, 25 bp, Probe Sequence
taagtgtactcaaggactactcagc

SEQ ID NO: 100031 - DNA, 25 bp, Probe Sequence
gctaagtgtactcaaggactactca

SEQ ID NO: 100032 - DNA, 25 bp, Probe Sequence
tgctaagtgtactcaaggactactc

SEQ ID NO: 100033 - DNA, 25 bp, Probe Sequence
tagtaattaacataccacactcggc

SEQ ID NO: 100034 - DNA, 25 bp, Probe Sequence
tgtactcaaggactactcagctaat

SEQ ID NO: 100035 - DNA, 25 bp, Probe Sequence
actcaaggactactcagctaatcat

SEQ ID NO: 100036 - DNA, 25 bp, Probe Sequence
aggactactcagctaatcattacaa

SEQ ID NO: 100037 - DNA, 25 bp, Probe Sequence
aaggactactcagctaatcattaca

SEQ ID NO: 100038 - DNA, 25 bp, Probe Sequence
caaggactactcagctaatcattac

SEQ ID NO: 100039 - DNA, 25 bp, Probe Sequence
tcaaggactactcagctaatcatta

SEQ ID NO: 100040 - DNA, 25 bp, Probe Sequence
gataccatctaacactggaatgacc

SEQ ID NO: 100041 - DNA, 25 bp, Probe Sequence
gtgtactcaaggactactcagctaa

SEQ ID NO: 100042 - DNA, 25 bp, Probe Sequence
aagttaatgatgtgagatgagagat

SEQ ID NO: 100043 - DNA, 25 bp, Probe Sequence
agaagtataactacctgtggttgaa

SEQ ID NO: 100044 - DNA, 25 bp, Probe Sequence
gatcttctcgcctacatggatagtc

SEQ ID NO: 100045 - DNA, 25 bp, Probe Sequence
taagttaatgatgtgagatgagaga

SEQ ID NO: 100046 - DNA, 25 bp, Probe Sequence
tagaagtataactacctgtggttga

SEQ ID NO: 100047 - DNA, 25 bp, Probe Sequence
aagcaagtctagtttcaaggtctaa

SEQ ID NO: 100048 - DNA, 25 bp, Probe Sequence
agcaagtctagtttcaaggtctaaa

SEQ ID NO: 100049 - DNA, 25 bp, Probe Sequence
gaagcaagtctagtttcaaggtcta

SEQ ID NO: 100050 - DNA, 25 bp, Probe Sequence
gcaagtctagtttcaaggtctaaat

SEQ ID NO: 100051 - DNA, 25 bp, Probe Sequence
agttaatgatgtgagatgagagata

SEQ ID NO: 100052 - DNA, 25 bp, Probe Sequence
gaatccatttcaacctagagtctga

SEQ ID NO: 100053 - DNA, 25 bp, Probe Sequence
aatccatttcaacctagagtctgac

SEQ ID NO: 100054 - DNA, 25 bp, Probe Sequence
taaataacaagagtccgtgtatggg

SEQ ID NO: 100055 - DNA, 25 bp, Probe Sequence
ttagaagtataactacctgtggttg

SEQ ID NO: 100056 - DNA, 25 bp, Probe Sequence
ctaaataacaagagtccgtgtatgg

SEQ ID NO: 100057 - DNA, 25 bp, Probe Sequence
tgatacagttatttgacagtgatga

SEQ ID NO: 100058 - DNA, 25 bp, Probe Sequence
tctgacttgaaataaaccagttctg

SEQ ID NO: 100059 - DNA, 25 bp, Probe Sequence
gtctgacttgaaataaaccagttct

SEQ ID NO: 100060 - DNA, 25 bp, Probe Sequence
actaaataacaagagtccgtgtatg

SEQ ID NO: 100061 - DNA, 25 bp, Probe Sequence
gctctttgtggttataatttgcttt

SEQ ID NO: 100062 - DNA, 25 bp, Probe Sequence
atccatttcaacctagagtctgact

SEQ ID NO: 100063 - DNA, 25 bp, Probe Sequence
cctagagtctgacttgaaataaacc

SEQ ID NO: 100064 - DNA, 25 bp, Probe Sequence
ccatttcaacctagagtctgacttg

SEQ ID NO: 100065 - DNA, 25 bp, Probe Sequence
tccatttcaacctagagtctgactt

SEQ ID NO: 100066 - DNA, 25 bp, Probe Sequence
gtaggaaggatctctgagttctctc

SEQ ID NO: 100067 - DNA, 25 bp, Probe Sequence
ggtaggaaggatctctgagttctct

SEQ ID NO: 100068 - DNA, 25 bp, Probe Sequence
taggaaggatctctgagttctctcc

SEQ ID NO: 100069 - DNA, 25 bp, Probe Sequence
gatgggtagatagtgtgttggagac

SEQ ID NO: 100070 - DNA, 25 bp, Probe Sequence
tctgtgatgggtagatagtgtgttg

SEQ ID NO: 100071 - DNA, 25 bp, Probe Sequence
gtctgtgatgggtagatagtgtgtt

SEQ ID NO: 100072 - DNA, 25 bp, Probe Sequence
catacctgtagccatgtgtgtaaca

SEQ ID NO: 100073 - DNA, 25 bp, Probe Sequence
tgatgggtagatagtgtgttggaga

SEQ ID NO: 100074 - DNA, 25 bp, Probe Sequence
gtgatgggtagatagtgtgttggag

SEQ ID NO: 100075 - DNA, 25 bp, Probe Sequence
atattctgcgtctttctctcccttg

SEQ ID NO: 100076 - DNA, 25 bp, Probe Sequence
gacatacttgagggtaggaaggatc

SEQ ID NO: 100077 - DNA, 25 bp, Probe Sequence
atacttgagggtaggaaggatctct

SEQ ID NO: 100078 - DNA, 25 bp, Probe Sequence
catacttgagggtaggaaggatctc

SEQ ID NO: 100079 - DNA, 25 bp, Probe Sequence
acatacttgagggtaggaaggatct

SEQ ID NO: 100080 - DNA, 25 bp, Probe Sequence
ctgtgatgggtagatagtgtgttgg

SEQ ID NO: 100081 - DNA, 25 bp, Probe Sequence
aaagagctggaaattagggacaaag

SEQ ID NO: 100082 - DNA, 25 bp, Probe Sequence
aatattctgcgtctttctctccctt

SEQ ID NO: 100083 - DNA, 25 bp, Probe Sequence
caaagagctggaaattagggacaaa

SEQ ID NO: 100084 - DNA, 25 bp, Probe Sequence
tgtgatgggtagatagtgtgttgga

SEQ ID NO: 100085 - DNA, 25 bp, Probe Sequence
ggacatacttgagggtaggaaggat

SEQ ID NO: 100086 - DNA, 25 bp, Probe Sequence
acaggagttctttaggaaagtgtag

SEQ ID NO: 100087 - DNA, 25 bp, Probe Sequence
gacaggagttctttaggaaagtgta

SEQ ID NO: 100088 - DNA, 25 bp, Probe Sequence
caggagttctttaggaaagtgtaga

SEQ ID NO: 100089 - DNA, 25 bp, Probe Sequence
gcatacctgtagccatgtgtgtaac

SEQ ID NO: 100090 - DNA, 25 bp, Probe Sequence
tagtagtgctatctaggtttgtctg

SEQ ID NO: 100091 - DNA, 25 bp, Probe Sequence
agtagtgctatctaggtttgtctgg

SEQ ID NO: 100092 - DNA, 25 bp, Probe Sequence
atttgatacataggtcgttgactcc

SEQ ID NO: 100093 - DNA, 25 bp, Probe Sequence
gactccctcctagtagtgctatcta

SEQ ID NO: 100094 - DNA, 25 bp, Probe Sequence
gctgggatctatttgatacataggt

SEQ ID NO: 100095 - DNA, 25 bp, Probe Sequence
ggctgggatctatttgatacatagg

SEQ ID NO: 100096 - DNA, 25 bp, Probe Sequence
gggatctatttgatacataggtcgt

SEQ ID NO: 100097 - DNA, 25 bp, Probe Sequence
tgggatctatttgatacataggtcg

SEQ ID NO: 100098 - DNA, 25 bp, Probe Sequence
cggctgggatctatttgatacatag

SEQ ID NO: 100099 - DNA, 25 bp, Probe Sequence
tatttgatacataggtcgttgactc

SEQ ID NO: 100100 - DNA, 25 bp, Probe Sequence
tctatttgatacataggtcgttgac

SEQ ID NO: 100101 - DNA, 25 bp, Probe Sequence
ctatttgatacataggtcgttgact

SEQ ID NO: 100102 - DNA, 25 bp, Probe Sequence
ttgactccctcctagtagtgctatc

SEQ ID NO: 100103 - DNA, 25 bp, Probe Sequence
tttgatacataggtcgttgactccc

SEQ ID NO: 100104 - DNA, 25 bp, Probe Sequence
ctgggatctatttgatacataggtc

SEQ ID NO: 100105 - DNA, 25 bp, Probe Sequence
ctagtagtgctatctaggtttgtct

SEQ ID NO: 100106 - DNA, 25 bp, Probe Sequence
ggatctatttgatacataggtcgtt

SEQ ID NO: 100107 - DNA, 25 bp, Probe Sequence
actccctcctagtagtgctatctag

SEQ ID NO: 100108 - DNA, 25 bp, Probe Sequence
gttgactccctcctagtagtgctat

SEQ ID NO: 100109 - DNA, 25 bp, Probe Sequence
atctatttgatacataggtcgttga

SEQ ID NO: 100110 - DNA, 25 bp, Probe Sequence
tgactccctcctagtagtgctatct

SEQ ID NO: 100111 - DNA, 25 bp, Probe Sequence
ttgatacataggtcgttgactccct

SEQ ID NO: 100112 - DNA, 25 bp, Probe Sequence
gatctatttgatacataggtcgttg

SEQ ID NO: 100113 - DNA, 25 bp, Probe Sequence
tgatacataggtcgttgactccctc

SEQ ID NO: 100114 - DNA, 25 bp, Probe Sequence
acgcatattcacatagcaagacata

SEQ ID NO: 100115 - DNA, 25 bp, Probe Sequence
tacgcatattcacatagcaagacat

SEQ ID NO: 100116 - DNA, 25 bp, Probe Sequence
atacgcatattcacatagcaagaca

SEQ ID NO: 100117 - DNA, 25 bp, Probe Sequence
cgcatattcacatagcaagacatat

SEQ ID NO: 100118 - DNA, 25 bp, Probe Sequence
aatacgcatattcacatagcaagac

SEQ ID NO: 100119 - DNA, 25 bp, Probe Sequence
taatacgcatattcacatagcaaga

SEQ ID NO: 100120 - DNA, 25 bp, Probe Sequence
gtcatctgttaatacgcatattcac

SEQ ID NO: 100121 - DNA, 25 bp, Probe Sequence
tgttaatacgcatattcacatagca

SEQ ID NO: 100122 - DNA, 25 bp, Probe Sequence
gttaatacgcatattcacatagcaa

SEQ ID NO: 100123 - DNA, 25 bp, Probe Sequence
tcatctgttaatacgcatattcaca

SEQ ID NO: 100124 - DNA, 25 bp, Probe Sequence
gcatattcacatagcaagacatatt

SEQ ID NO: 100125 - DNA, 25 bp, Probe Sequence
ctgttaatacgcatattcacatagc

SEQ ID NO: 100126 - DNA, 25 bp, Probe Sequence
ttaatacgcatattcacatagcaag

SEQ ID NO: 100127 - DNA, 25 bp, Probe Sequence
agaagaagaccattactttaggcaa

SEQ ID NO: 100128 - DNA, 25 bp, Probe Sequence
catctgttaatacgcatattcacat

SEQ ID NO: 100129 - DNA, 25 bp, Probe Sequence
cagaagaagaccattactttaggca

SEQ ID NO: 100130 - DNA, 25 bp, Probe Sequence
gaagaagaccattactttaggcaaa

SEQ ID NO: 100131 - DNA, 25 bp, Probe Sequence
aagaagaccattactttaggcaaat

SEQ ID NO: 100132 - DNA, 25 bp, Probe Sequence
agaagaccattactttaggcaaatt

SEQ ID NO: 100133 - DNA, 25 bp, Probe Sequence
gcagaagaagaccattactttaggc

SEQ ID NO: 100134 - DNA, 25 bp, Probe Sequence
aggtacttacacactgtgcaataat

SEQ ID NO: 100135 - DNA, 25 bp, Probe Sequence
gaggtacttacacactgtgcaataa

SEQ ID NO: 100136 - DNA, 25 bp, Probe Sequence
accattactttaggcaaattaacac

SEQ ID NO: 100137 - DNA, 25 bp, Probe Sequence
ggtacttacacactgtgcaataata

SEQ ID NO: 100138 - DNA, 25 bp, Probe Sequence
ttgtacggtggatgtctatataagc

SEQ ID NO: 100139 - DNA, 25 bp, Probe Sequence
gtacggtggatgtctatataagcag

SEQ ID NO: 100140 - DNA, 25 bp, Probe Sequence
tgtacggtggatgtctatataagca

SEQ ID NO: 100141 - DNA, 25 bp, Probe Sequence
tacggtggatgtctatataagcaga

SEQ ID NO: 100142 - DNA, 25 bp, Probe Sequence
tagtagtcatcgctattaccatgtg

SEQ ID NO: 100143 - DNA, 25 bp, Probe Sequence
gtagtagtcatcgctattaccatgt

SEQ ID NO: 100144 - DNA, 25 bp, Probe Sequence
gttgtacggtggatgtctatataag

SEQ ID NO: 100145 - DNA, 25 bp, Probe Sequence
cgtagtagtcatcgctattaccatg

SEQ ID NO: 100146 - DNA, 25 bp, Probe Sequence
gtagtcatcgctattaccatgtgat

SEQ ID NO: 100147 - DNA, 25 bp, Probe Sequence
acggtggatgtctatataagcagag

SEQ ID NO: 100148 - DNA, 25 bp, Probe Sequence
agtagtcatcgctattaccatgtga

SEQ ID NO: 100149 - DNA, 25 bp, Probe Sequence
acgtagtagtcatcgctattaccat

SEQ ID NO: 100150 - DNA, 25 bp, Probe Sequence
cggtggatgtctatataagcagagc

SEQ ID NO: 100151 - DNA, 25 bp, Probe Sequence
cgttgtacggtggatgtctatataa

SEQ ID NO: 100152 - DNA, 25 bp, Probe Sequence
gcaagtcatagaagtcgaaacatag

SEQ ID NO: 100153 - DNA, 25 bp, Probe Sequence
caagtcatagaagtcgaaacatagg

SEQ ID NO: 100154 - DNA, 25 bp, Probe Sequence
ggcaagtcatagaagtcgaaacata

SEQ ID NO: 100155 - DNA, 25 bp, Probe Sequence
tacgtagtagtcatcgctattacca

SEQ ID NO: 100156 - DNA, 25 bp, Probe Sequence
ggtggatgtctatataagcagagct

SEQ ID NO: 100157 - DNA, 25 bp, Probe Sequence
gcgttgtacggtggatgtctatata

SEQ ID NO: 100158 - DNA, 25 bp, Probe Sequence
tatgttggtgggcaagtcatagaag

SEQ ID NO: 100159 - DNA, 25 bp, Probe Sequence
cgggatcttaacatcaggaattctc

SEQ ID NO: 100160 - DNA, 25 bp, Probe Sequence
gactttccagatgtcgtacaactcc

SEQ ID NO: 100161 - DNA, 25 bp, Probe Sequence
gggcaagtcatagaagtcgaaacat

SEQ ID NO: 100162 - DNA, 25 bp, Probe Sequence
tatatgagaaccgagaccttggaat

SEQ ID NO: 100163 - DNA, 25 bp, Probe Sequence
ctatatgagaaccgagaccttggaa

SEQ ID NO: 100164 - DNA, 25 bp, Probe Sequence
atatgagaaccgagaccttggaatg

SEQ ID NO: 100165 - DNA, 25 bp, Probe Sequence
cactatatgagaaccgagaccttgg

SEQ ID NO: 100166 - DNA, 25 bp, Probe Sequence
ccactatatgagaaccgagaccttg

SEQ ID NO: 100167 - DNA, 25 bp, Probe Sequence
actatatgagaaccgagaccttgga

SEQ ID NO: 100168 - DNA, 25 bp, Probe Sequence
ctgaagcagcaacattgtaacattg

SEQ ID NO: 100169 - DNA, 25 bp, Probe Sequence
tctgaagcagcaacattgtaacatt

SEQ ID NO: 100170 - DNA, 25 bp, Probe Sequence
aagcagcaacattgtaacattggtt

SEQ ID NO: 100171 - DNA, 25 bp, Probe Sequence
gctctcgatatgctcctacttctaa

SEQ ID NO: 100172 - DNA, 25 bp, Probe Sequence
aaggattctgggatgtattatctgc

SEQ ID NO: 100173 - DNA, 25 bp, Probe Sequence
atttggaggaatgaacagatggaaa

SEQ ID NO: 100174 - DNA, 25 bp, Probe Sequence
ctctgaagcagcaacattgtaacat

SEQ ID NO: 100175 - DNA, 25 bp, Probe Sequence
aaagactacatccaaatccttagca

SEQ ID NO: 100176 - DNA, 25 bp, Probe Sequence
aagactacatccaaatccttagcag

SEQ ID NO: 100177 - DNA, 25 bp, Probe Sequence
caaagactacatccaaatccttagc

SEQ ID NO: 100178 - DNA, 25 bp, Probe Sequence
gaagcagcaacattgtaacattggt

SEQ ID NO: 100179 - DNA, 25 bp, Probe Sequence
tgaagcagcaacattgtaacattgg

SEQ ID NO: 100180 - DNA, 25 bp, Probe Sequence
gaattgtctctgaagcagcaacatt

SEQ ID NO: 100181 - DNA, 25 bp, Probe Sequence
ggttgagatacaaagactacatcca

SEQ ID NO: 100182 - DNA, 25 bp, Probe Sequence
atttaactcaacctttctggaatgt

SEQ ID NO: 100183 - DNA, 25 bp, Probe Sequence
acggttgagatacaaagactacatc

SEQ ID NO: 100184 - DNA, 25 bp, Probe Sequence
cacggttgagatacaaagactacat

SEQ ID NO: 100185 - DNA, 25 bp, Probe Sequence
tatgagaaccgagaccttggaatgt

SEQ ID NO: 100186 - DNA, 25 bp, Probe Sequence
gtggtttcatcaatcatgcctattt

SEQ ID NO: 100187 - DNA, 25 bp, Probe Sequence
caatcatgcctatttaatggaacct

SEQ ID NO: 100188 - DNA, 25 bp, Probe Sequence
tcaatcatgcctatttaatggaacc

SEQ ID NO: 100189 - DNA, 25 bp, Probe Sequence
agtggtttcatcaatcatgcctatt

SEQ ID NO: 100190 - DNA, 25 bp, Probe Sequence
aatcatgcctatttaatggaacctc

SEQ ID NO: 100191 - DNA, 25 bp, Probe Sequence
tggtttcatcaatcatgcctattta

SEQ ID NO: 100192 - DNA, 25 bp, Probe Sequence
cagtggtttcatcaatcatgcctat

SEQ ID NO: 100193 - DNA, 25 bp, Probe Sequence
tcatcaatcatgcctatttaatgga

SEQ ID NO: 100194 - DNA, 25 bp, Probe Sequence
atcatgcctatttaatggaacctcc

SEQ ID NO: 100195 - DNA, 25 bp, Probe Sequence
ggtttcatcaatcatgcctatttaa

SEQ ID NO: 100196 - DNA, 25 bp, Probe Sequence
atcaatcatgcctatttaatggaac

SEQ ID NO: 100197 - DNA, 25 bp, Probe Sequence
catcaatcatgcctatttaatggaa

SEQ ID NO: 100198 - DNA, 25 bp, Probe Sequence
ttcatcaatcatgcctatttaatgg

SEQ ID NO: 100199 - DNA, 25 bp, Probe Sequence
ccagtggtttcatcaatcatgccta

SEQ ID NO: 100200 - DNA, 25 bp, Probe Sequence
tttcatcaatcatgcctatttaatg

SEQ ID NO: 100201 - DNA, 25 bp, Probe Sequence
gtttcatcaatcatgcctatttaat

SEQ ID NO: 100202 - DNA, 25 bp, Probe Sequence
tcatgcctatttaatggaacctcca

SEQ ID NO: 100203 - DNA, 25 bp, Probe Sequence
aaacctgaaaggacagggttctagg

SEQ ID NO: 100204 - DNA, 25 bp, Probe Sequence
aaaacctgaaaggacagggttctag

SEQ ID NO: 100205 - DNA, 25 bp, Probe Sequence
aacctgaaaggacagggttctagga

SEQ ID NO: 100206 - DNA, 25 bp, Probe Sequence
acctgaaaggacagggttctaggag

SEQ ID NO: 100207 - DNA, 25 bp, Probe Sequence
cccatttgagatgccttattcctat

SEQ ID NO: 100208 - DNA, 25 bp, Probe Sequence
agccagatagtctcatatttaggga

SEQ ID NO: 100209 - DNA, 25 bp, Probe Sequence
gccagatagtctcatatttagggaa

SEQ ID NO: 100210 - DNA, 25 bp, Probe Sequence
cgccttaccaaatcctagtgttata

SEQ ID NO: 100211 - DNA, 25 bp, Probe Sequence
ccatttgagatgccttattcctatt

SEQ ID NO: 100212 - DNA, 25 bp, Probe Sequence
tgagatgccttattcctattactaa

SEQ ID NO: 100213 - DNA, 25 bp, Probe Sequence
ttgagatgccttattcctattacta

SEQ ID NO: 100214 - DNA, 25 bp, Probe Sequence
gccttaccaaatcctagtgttatac

SEQ ID NO: 100215 - DNA, 25 bp, Probe Sequence
tagccagatagtctcatatttaggg

SEQ ID NO: 100216 - DNA, 25 bp, Probe Sequence
ttcacttagtctgagaaatagccag

SEQ ID NO: 100217 - DNA, 25 bp, Probe Sequence
caggatgttccaaatctgacctata

SEQ ID NO: 100218 - DNA, 25 bp, Probe Sequence
ttaatattgtaagcccaggatgttc

SEQ ID NO: 100219 - DNA, 25 bp, Probe Sequence
tccaccaatgtgtaaaggaacttaa

SEQ ID NO: 100220 - DNA, 25 bp, Probe Sequence
actaatgatgtaagtacgaggatta

SEQ ID NO: 100221 - DNA, 25 bp, Probe Sequence
ggaatttaatattgtaagcccagga

SEQ ID NO: 100222 - DNA, 25 bp, Probe Sequence
aggaatttaatattgtaagcccagg

SEQ ID NO: 100223 - DNA, 25 bp, Probe Sequence
tttgagatgccttattcctattact

SEQ ID NO: 100224 - DNA, 25 bp, Probe Sequence
ctccaccaatgtgtaaaggaactta

SEQ ID NO: 100225 - DNA, 25 bp, Probe Sequence
aggatgttccaaatctgacctataa

SEQ ID NO: 100226 - DNA, 25 bp, Probe Sequence
gccttattcctattactaatgatgt

SEQ ID NO: 100227 - DNA, 25 bp, Probe Sequence
tgccttattcctattactaatgatg

SEQ ID NO: 100228 - DNA, 25 bp, Probe Sequence
ccgccttaccaaatcctagtgttat

SEQ ID NO: 100229 - DNA, 25 bp, Probe Sequence
tttaatattgtaagcccaggatgtt

SEQ ID NO: 100230 - DNA, 25 bp, Probe Sequence
gagaactttcaactctttgcccttc

SEQ ID NO: 100231 - DNA, 25 bp, Probe Sequence
aataaggagaacaggacagactaac

SEQ ID NO: 100232 - DNA, 25 bp, Probe Sequence
ataaggagaacaggacagactaact

SEQ ID NO: 100233 - DNA, 25 bp, Probe Sequence
gaataaggagaacaggacagactaa

SEQ ID NO: 100234 - DNA, 25 bp, Probe Sequence
ggaataaggagaacaggacagacta

SEQ ID NO: 100235 - DNA, 25 bp, Probe Sequence
taaggagaacaggacagactaactt

SEQ ID NO: 100236 - DNA, 25 bp, Probe Sequence
aaggaataaggagaacaggacagac

SEQ ID NO: 100237 - DNA, 25 bp, Probe Sequence
aggaataaggagaacaggacagact

SEQ ID NO: 100238 - DNA, 25 bp, Probe Sequence
gaaaggaataaggagaacaggacag

SEQ ID NO: 100239 - DNA, 25 bp, Probe Sequence
aaaggaataaggagaacaggacaga

SEQ ID NO: 100240 - DNA, 25 bp, Probe Sequence
tgaaaggaataaggagaacaggaca

SEQ ID NO: 100241 - DNA, 25 bp, Probe Sequence
ggtgtctgaaaggaataaggagaac

SEQ ID NO: 100242 - DNA, 25 bp, Probe Sequence
aaggagaacaggacagactaacttt

SEQ ID NO: 100243 - DNA, 25 bp, Probe Sequence
tggtgtctgaaaggaataaggagaa

SEQ ID NO: 100244 - DNA, 25 bp, Probe Sequence
gtgtctgaaaggaataaggagaaca

SEQ ID NO: 100245 - DNA, 25 bp, Probe Sequence
actggtgtctgaaaggaataaggag

SEQ ID NO: 100246 - DNA, 25 bp, Probe Sequence
ctggtgtctgaaaggaataaggaga

SEQ ID NO: 100247 - DNA, 25 bp, Probe Sequence
tgtctgaaaggaataaggagaacag

SEQ ID NO: 100248 - DNA, 25 bp, Probe Sequence
cagaaactgagagcagaaataacag

SEQ ID NO: 100249 - DNA, 25 bp, Probe Sequence
atccagaaactgagagcagaaataa

SEQ ID NO: 100250 - DNA, 25 bp, Probe Sequence
ctgaaaggaataaggagaacaggac

SEQ ID NO: 100251 - DNA, 25 bp, Probe Sequence
tctgaaaggaataaggagaacagga

SEQ ID NO: 100252 - DNA, 25 bp, Probe Sequence
gtctgaaaggaataaggagaacagg

SEQ ID NO: 100253 - DNA, 25 bp, Probe Sequence
tccagaaactgagagcagaaataac

SEQ ID NO: 100254 - DNA, 25 bp, Probe Sequence
ccagaaactgagagcagaaataaca

SEQ ID NO: 100255 - DNA, 25 bp, Probe Sequence
aataaggagaacaggacagactaac

SEQ ID NO: 100256 - DNA, 25 bp, Probe Sequence
ataaggagaacaggacagactaact

SEQ ID NO: 100257 - DNA, 25 bp, Probe Sequence
gaataaggagaacaggacagactaa

SEQ ID NO: 100258 - DNA, 25 bp, Probe Sequence
ggaataaggagaacaggacagacta

SEQ ID NO: 100259 - DNA, 25 bp, Probe Sequence
taaggagaacaggacagactaactt

SEQ ID NO: 100260 - DNA, 25 bp, Probe Sequence
aaggaataaggagaacaggacagac

SEQ ID NO: 100261 - DNA, 25 bp, Probe Sequence
aggaataaggagaacaggacagact

SEQ ID NO: 100262 - DNA, 25 bp, Probe Sequence
gaaaggaataaggagaacaggacag

SEQ ID NO: 100263 - DNA, 25 bp, Probe Sequence
aaaggaataaggagaacaggacaga

SEQ ID NO: 100264 - DNA, 25 bp, Probe Sequence
tgaaaggaataaggagaacaggaca

SEQ ID NO: 100265 - DNA, 25 bp, Probe Sequence
ggtgtctgaaaggaataaggagaac

SEQ ID NO: 100266 - DNA, 25 bp, Probe Sequence
aaggagaacaggacagactaacttt

SEQ ID NO: 100267 - DNA, 25 bp, Probe Sequence
tggtgtctgaaaggaataaggagaa

SEQ ID NO: 100268 - DNA, 25 bp, Probe Sequence
gtgtctgaaaggaataaggagaaca

SEQ ID NO: 100269 - DNA, 25 bp, Probe Sequence
actggtgtctgaaaggaataaggag

SEQ ID NO: 100270 - DNA, 25 bp, Probe Sequence
ctggtgtctgaaaggaataaggaga

SEQ ID NO: 100271 - DNA, 25 bp, Probe Sequence
tgtctgaaaggaataaggagaacag

SEQ ID NO: 100272 - DNA, 25 bp, Probe Sequence
cagaaactgagagcagaaataacag

SEQ ID NO: 100273 - DNA, 25 bp, Probe Sequence
atccagaaactgagagcagaaataa

SEQ ID NO: 100274 - DNA, 25 bp, Probe Sequence
ctgaaaggaataaggagaacaggac

SEQ ID NO: 100275 - DNA, 25 bp, Probe Sequence
tctgaaaggaataaggagaacagga

SEQ ID NO: 100276 - DNA, 25 bp, Probe Sequence
gtctgaaaggaataaggagaacagg

SEQ ID NO: 100277 - DNA, 25 bp, Probe Sequence
tccagaaactgagagcagaaataac

SEQ ID NO: 100278 - DNA, 25 bp, Probe Sequence
ccagaaactgagagcagaaataaca

SEQ ID NO: 100279 - DNA, 25 bp, Probe Sequence
ttactgacacttacatacttggacc

SEQ ID NO: 100280 - DNA, 25 bp, Probe Sequence
tactgacacttacatacttggacca

SEQ ID NO: 100281 - DNA, 25 bp, Probe Sequence
gatcatattgccacatggtctatca

SEQ ID NO: 100282 - DNA, 25 bp, Probe Sequence
atcatattgccacatggtctatcaa

SEQ ID NO: 100283 - DNA, 25 bp, Probe Sequence
tattgccacatggtctatcaactat

SEQ ID NO: 100284 - DNA, 25 bp, Probe Sequence
atattgccacatggtctatcaacta

SEQ ID NO: 100285 - DNA, 25 bp, Probe Sequence
acatggtctatcaactatggttact

SEQ ID NO: 100286 - DNA, 25 bp, Probe Sequence
cacatggtctatcaactatggttac

SEQ ID NO: 100287 - DNA, 25 bp, Probe Sequence
attgccacatggtctatcaactatg

SEQ ID NO: 100288 - DNA, 25 bp, Probe Sequence
catattgccacatggtctatcaact

SEQ ID NO: 100289 - DNA, 25 bp, Probe Sequence
tcatattgccacatggtctatcaac

SEQ ID NO: 100290 - DNA, 25 bp, Probe Sequence
tggtctatcaactatggttactatg

SEQ ID NO: 100291 - DNA, 25 bp, Probe Sequence
cccagcattaaagtgaaaccaatat

SEQ ID NO: 100292 - DNA, 25 bp, Probe Sequence
actgacacttacatacttggaccaa

SEQ ID NO: 100293 - DNA, 25 bp, Probe Sequence
tcccagcattaaagtgaaaccaata

SEQ ID NO: 100294 - DNA, 25 bp, Probe Sequence
ccacatggtctatcaactatggtta

SEQ ID NO: 100295 - DNA, 25 bp, Probe Sequence
ctaatcccagcattaaagtgaaacc

SEQ ID NO: 100296 - DNA, 25 bp, Probe Sequence
atcccagcattaaagtgaaaccaat

SEQ ID NO: 100297 - DNA, 25 bp, Probe Sequence
taatcccagcattaaagtgaaacca

SEQ ID NO: 100298 - DNA, 25 bp, Probe Sequence
tctaatcccagcattaaagtgaaac

SEQ ID NO: 100299 - DNA, 25 bp, Probe Sequence
tcttaatgaccactgaacaaatgat

SEQ ID NO: 100300 - DNA, 25 bp, Probe Sequence
atcttaatgaccactgaacaaatga

SEQ ID NO: 100301 - DNA, 25 bp, Probe Sequence
aatcccagcattaaagtgaaaccaa

SEQ ID NO: 100302 - DNA, 25 bp, Probe Sequence
ggtctatcaactatggttactatga

SEQ ID NO: 100303 - DNA, 25 bp, Probe Sequence
tacctgtgctgccttattatactac

SEQ ID NO: 100304 - DNA, 25 bp, Probe Sequence
ttacctgtgctgccttattatacta

SEQ ID NO: 100305 - DNA, 25 bp, Probe Sequence
ggaagcatctgacaacctgatatat

SEQ ID NO: 100306 - DNA, 25 bp, Probe Sequence
cctgtgctgccttattatactacat

SEQ ID NO: 100307 - DNA, 25 bp, Probe Sequence
gaagcatctgacaacctgatatatt

SEQ ID NO: 100308 - DNA, 25 bp, Probe Sequence
acctgtgctgccttattatactaca

SEQ ID NO: 100309 - DNA, 25 bp, Probe Sequence
aggaagcatctgacaacctgatata

SEQ ID NO: 100310 - DNA, 25 bp, Probe Sequence
tgtgctgccttattatactacatgg

SEQ ID NO: 100311 - DNA, 25 bp, Probe Sequence
ctgtgctgccttattatactacatg

SEQ ID NO: 100312 - DNA, 25 bp, Probe Sequence
taagtggaggtttgtgttatgagaa

SEQ ID NO: 100313 - DNA, 25 bp, Probe Sequence
ttgaagaaagaaataacatcctgcc

SEQ ID NO: 100314 - DNA, 25 bp, Probe Sequence
aagtggaggtttgtgttatgagaat

SEQ ID NO: 100315 - DNA, 25 bp, Probe Sequence
tttacctgtgctgccttattatact

SEQ ID NO: 100316 - DNA, 25 bp, Probe Sequence
gaagaaagaaataacatcctgccat

SEQ ID NO: 100317 - DNA, 25 bp, Probe Sequence
tgaagaaagaaataacatcctgcca

SEQ ID NO: 100318 - DNA, 25 bp, Probe Sequence
ttaagtggaggtttgtgttatgaga

SEQ ID NO: 100319 - DNA, 25 bp, Probe Sequence
tgccattagatacccagacattaaa

SEQ ID NO: 100320 - DNA, 25 bp, Probe Sequence
ccttattatactacatggcagttga

SEQ ID NO: 100321 - DNA, 25 bp, Probe Sequence
gtggaggtttgtgttatgagaattt

SEQ ID NO: 100322 - DNA, 25 bp, Probe Sequence
agtggaggtttgtgttatgagaatt

SEQ ID NO: 100323 - DNA, 25 bp, Probe Sequence
gatgccattagatacccagacatta

SEQ ID NO: 100324 - DNA, 25 bp, Probe Sequence
tttaagtggaggtttgtgttatgag

SEQ ID NO: 100325 - DNA, 25 bp, Probe Sequence
tctgttagaggaagcatctgacaac

SEQ ID NO: 100326 - DNA, 25 bp, Probe Sequence
tggcacatttaggaacagttacatt

SEQ ID NO: 100327 - DNA, 25 bp, Probe Sequence
ccctgaccgtttgctatattccttt

SEQ ID NO: 100328 - DNA, 25 bp, Probe Sequence
ctgaccctgaccgtttgctatattc

SEQ ID NO: 100329 - DNA, 25 bp, Probe Sequence
cctgaccgtttgctatattcctttt

SEQ ID NO: 100330 - DNA, 25 bp, Probe Sequence
accctgaccgtttgctatattcctt

SEQ ID NO: 100331 - DNA, 25 bp, Probe Sequence
gaccctgaccgtttgctatattcct

SEQ ID NO: 100332 - DNA, 25 bp, Probe Sequence
tgaccctgaccgtttgctatattcc

SEQ ID NO: 100333 - DNA, 25 bp, Probe Sequence
cctgaccctgaccgtttgctatatt

SEQ ID NO: 100334 - DNA, 25 bp, Probe Sequence
tgataataaaacagctttgacttga

SEQ ID NO: 100335 - DNA, 25 bp, Probe Sequence
gacttcccaaaatgtcgtacactcc

SEQ ID NO: 100336 - DNA, 25 bp, Probe Sequence
ggacttcccaaaatgtcgtacactc

SEQ ID NO: 100337 - DNA, 25 bp, Probe Sequence
gataataaaacagctttgacttgaa

SEQ ID NO: 100338 - DNA, 25 bp, Probe Sequence
atgataataaaacagctttgacttg

SEQ ID NO: 100339 - DNA, 25 bp, Probe Sequence
tgaatgataataaaacagctttgac

SEQ ID NO: 100340 - DNA, 25 bp, Probe Sequence
gtgaatgataataaaacagctttga

SEQ ID NO: 100341 - DNA, 25 bp, Probe Sequence
tgtgaatgataataaaacagctttg

SEQ ID NO: 100342 - DNA, 25 bp, Probe Sequence
tttatgtacaaccctgaccctgacc

SEQ ID NO: 100343 - DNA, 25 bp, Probe Sequence
gaatgataataaaacagctttgact

SEQ ID NO: 100344 - DNA, 25 bp, Probe Sequence
taataaaacagctttgacttgaaaa

SEQ ID NO: 100345 - DNA, 25 bp, Probe Sequence
ttttatgtacaaccctgaccctgac

SEQ ID NO: 100346 - DNA, 25 bp, Probe Sequence
ataataaaacagctttgacttgaaa

SEQ ID NO: 100347 - DNA, 25 bp, Probe Sequence
aatgataataaaacagctttgactt

SEQ ID NO: 100348 - DNA, 25 bp, Probe Sequence
gatgtaaagaacgcgacttccacaa

SEQ ID NO: 100349 - DNA, 25 bp, Probe Sequence
cagatgtaaagaacgcgacttccac

SEQ ID NO: 100350 - DNA, 25 bp, Probe Sequence
atgtaaagaacgcgacttccacaac

SEQ ID NO: 100351 - DNA, 25 bp, Probe Sequence
gaattagtaatacacactcggtgac

SEQ ID NO: 100352 - DNA, 25 bp, Probe Sequence
aattagtaatacacactcggtgacc

SEQ ID NO: 100353 - DNA, 25 bp, Probe Sequence
gcggagatcgaattagtaatacaca

SEQ ID NO: 100354 - DNA, 25 bp, Probe Sequence
cggagatcgaattagtaatacacac

SEQ ID NO: 100355 - DNA, 25 bp, Probe Sequence
ggcggagatcgaattagtaatacac

SEQ ID NO: 100356 - DNA, 25 bp, Probe Sequence
cgaattagtaatacacactcggtga

SEQ ID NO: 100357 - DNA, 25 bp, Probe Sequence
ttccttagcatctgtggtgtcttta

SEQ ID NO: 100358 - DNA, 25 bp, Probe Sequence
tccttagcatctgtggtgtctttaa

SEQ ID NO: 100359 - DNA, 25 bp, Probe Sequence
aacattcatcccttccttagcatct

SEQ ID NO: 100360 - DNA, 25 bp, Probe Sequence
caacattcatcccttccttagcatc

SEQ ID NO: 100361 - DNA, 25 bp, Probe Sequence
ggagatcgaattagtaatacacact

SEQ ID NO: 100362 - DNA, 25 bp, Probe Sequence
cggcggagatcgaattagtaataca

SEQ ID NO: 100363 - DNA, 25 bp, Probe Sequence
attcatcccttccttagcatctgtg

SEQ ID NO: 100364 - DNA, 25 bp, Probe Sequence
cattcatcccttccttagcatctgt

SEQ ID NO: 100365 - DNA, 25 bp, Probe Sequence
acattcatcccttccttagcatctg

SEQ ID NO: 100366 - DNA, 25 bp, Probe Sequence
cttagcatctgtggtgtctttaagg

SEQ ID NO: 100367 - DNA, 25 bp, Probe Sequence
ccttagcatctgtggtgtctttaag

SEQ ID NO: 100368 - DNA, 25 bp, Probe Sequence
ttagcatctgtggtgtctttaaggg

SEQ ID NO: 100369 - DNA, 25 bp, Probe Sequence
atcgaattagtaatacacactcggt

SEQ ID NO: 100370 - DNA, 25 bp, Probe Sequence
tcgaattagtaatacacactcggtg

SEQ ID NO: 100371 - DNA, 25 bp, Probe Sequence
tagtttctccaatgctgaggtactt

SEQ ID NO: 100372 - DNA, 25 bp, Probe Sequence
tgaccaacattcatcccttccttag

SEQ ID NO: 100373 - DNA, 25 bp, Probe Sequence
gatcgaattagtaatacacactcgg

SEQ ID NO: 100374 - DNA, 25 bp, Probe Sequence
cttccttagcatctgtggtgtcttt

SEQ ID NO: 100375 - DNA, 25 bp, Probe Sequence
atatctatgtatgcgagtgtactcc

SEQ ID NO: 100376 - DNA, 25 bp, Probe Sequence
tatctatgtatgcgagtgtactccg

SEQ ID NO: 100377 - DNA, 25 bp, Probe Sequence
gatatctatgtatgcgagtgtactc

SEQ ID NO: 100378 - DNA, 25 bp, Probe Sequence
tgtatccttgcagttatgtgactta

SEQ ID NO: 100379 - DNA, 25 bp, Probe Sequence
ttgtatccttgcagttatgtgactt

SEQ ID NO: 100380 - DNA, 25 bp, Probe Sequence
gtatccttgcagttatgtgacttaa

SEQ ID NO: 100381 - DNA, 25 bp, Probe Sequence
ttgttcctgactactgtctctccat

SEQ ID NO: 100382 - DNA, 25 bp, Probe Sequence
gcagttatgtgacttaaagtgactc

SEQ ID NO: 100383 - DNA, 25 bp, Probe Sequence
atgtgacttaaagtgactcagagat

SEQ ID NO: 100384 - DNA, 25 bp, Probe Sequence
tgtgacttaaagtgactcagagata

SEQ ID NO: 100385 - DNA, 25 bp, Probe Sequence
tatgtgacttaaagtgactcagaga

SEQ ID NO: 100386 - DNA, 25 bp, Probe Sequence
cagttatgtgacttaaagtgactca

SEQ ID NO: 100387 - DNA, 25 bp, Probe Sequence
gttatgtgacttaaagtgactcaga

SEQ ID NO: 100388 - DNA, 25 bp, Probe Sequence
agttatgtgacttaaagtgactcag

SEQ ID NO: 100389 - DNA, 25 bp, Probe Sequence
cttgttcctgactactgtctctcca

SEQ ID NO: 100390 - DNA, 25 bp, Probe Sequence
ttatgtgacttaaagtgactcagag

SEQ ID NO: 100391 - DNA, 25 bp, Probe Sequence
ttgtttgtatccttgcagttatgtg

SEQ ID NO: 100392 - DNA, 25 bp, Probe Sequence
gtgtttgtttgtatccttgcagtta

SEQ ID NO: 100393 - DNA, 25 bp, Probe Sequence
gtttgtatccttgcagttatgtgac

SEQ ID NO: 100394 - DNA, 25 bp, Probe Sequence
ctagtgtttgtttgtatccttgcag

SEQ ID NO: 100395 - DNA, 25 bp, Probe Sequence
tttgtttgtatccttgcagttatgt

SEQ ID NO: 100396 - DNA, 25 bp, Probe Sequence
tgtttgtttgtatccttgcagttat

SEQ ID NO: 100397 - DNA, 25 bp, Probe Sequence
tgtttgtatccttgcagttatgtga

SEQ ID NO: 100398 - DNA, 25 bp, Probe Sequence
gtttgtttgtatccttgcagttatg

SEQ ID NO: 100399 - DNA, 25 bp, Probe Sequence
cttgcactggtatgtgaactacatt

SEQ ID NO: 100400 - DNA, 25 bp, Probe Sequence
cactggtatgtgaactacatttcaa

SEQ ID NO: 100401 - DNA, 25 bp, Probe Sequence
gcactggtatgtgaactacatttca

SEQ ID NO: 100402 - DNA, 25 bp, Probe Sequence
actggtatgtgaactacatttcaat

SEQ ID NO: 100403 - DNA, 25 bp, Probe Sequence
aaaagaaaatagcagactggaccca

SEQ ID NO: 100404 - DNA, 25 bp, Probe Sequence
ttgcactggtatgtgaactacattt

SEQ ID NO: 100405 - DNA, 25 bp, Probe Sequence
tgcactggtatgtgaactacatttc

SEQ ID NO: 100406 - DNA, 25 bp, Probe Sequence
ctggtatgtgaactacatttcaata

SEQ ID NO: 100407 - DNA, 25 bp, Probe Sequence
tggtatgtgaactacatttcaataa

SEQ ID NO: 100408 - DNA, 25 bp, Probe Sequence
gtgaactacatttcaataaagttgt

SEQ ID NO: 100409 - DNA, 25 bp, Probe Sequence
tgtgaactacatttcaataaagttg

SEQ ID NO: 100410 - DNA, 25 bp, Probe Sequence
aaagaaaatagcagactggacccag

SEQ ID NO: 100411 - DNA, 25 bp, Probe Sequence
gaaaatagcagactggacccagatg

SEQ ID NO: 100412 - DNA, 25 bp, Probe Sequence
agaaaatagcagactggacccagat

SEQ ID NO: 100413 - DNA, 25 bp, Probe Sequence
aagaaaatagcagactggacccaga

SEQ ID NO: 100414 - DNA, 25 bp, Probe Sequence
tgaactacatttcaataaagttgtt

SEQ ID NO: 100415 - DNA, 25 bp, Probe Sequence
ggtatgtgaactacatttcaataaa

SEQ ID NO: 100416 - DNA, 25 bp, Probe Sequence
atgtgaactacatttcaataaagtt

SEQ ID NO: 100417 - DNA, 25 bp, Probe Sequence
aaaatagcagactggacccagatgg

SEQ ID NO: 100418 - DNA, 25 bp, Probe Sequence
ctcaatctgaaggagcagtatctgt

SEQ ID NO: 100419 - DNA, 25 bp, Probe Sequence
tcaatctgaaggagcagtatctgtg

SEQ ID NO: 100420 - DNA, 25 bp, Probe Sequence
aacctcaatctgaaggagcagtatc

SEQ ID NO: 100421 - DNA, 25 bp, Probe Sequence
aatctgaaggagcagtatctgtgtg

SEQ ID NO: 100422 - DNA, 25 bp, Probe Sequence
caatctgaaggagcagtatctgtgt

SEQ ID NO: 100423 - DNA, 25 bp, Probe Sequence
caacctcaatctgaaggagcagtat

SEQ ID NO: 100424 - DNA, 25 bp, Probe Sequence
cctcaatctgaaggagcagtatctg

SEQ ID NO: 100425 - DNA, 25 bp, Probe Sequence
acctcaatctgaaggagcagtatct

SEQ ID NO: 100426 - DNA, 25 bp, Probe Sequence
acaacctcaatctgaaggagcagta

SEQ ID NO: 100427 - DNA, 25 bp, Probe Sequence
atctgaaggagcagtatctgtgtgg

SEQ ID NO: 100428 - DNA, 25 bp, Probe Sequence
atgtgcttagaagtcaaggttagtg

SEQ ID NO: 100429 - DNA, 25 bp, Probe Sequence
tcatgtgcttagaagtcaaggttag

SEQ ID NO: 100430 - DNA, 25 bp, Probe Sequence
catgtgcttagaagtcaaggttagt

SEQ ID NO: 100431 - DNA, 25 bp, Probe Sequence
gtcatgtgcttagaagtcaaggtta

SEQ ID NO: 100432 - DNA, 25 bp, Probe Sequence
ccatgataagtgttctgttgacctt

SEQ ID NO: 100433 - DNA, 25 bp, Probe Sequence
gttgatattggcatgatggttggaa

SEQ ID NO: 100434 - DNA, 25 bp, Probe Sequence
tgtgcttagaagtcaaggttagtgg

SEQ ID NO: 100435 - DNA, 25 bp, Probe Sequence
caaggtcatgtgcttagaagtcaag

SEQ ID NO: 100436 - DNA, 25 bp, Probe Sequence
tagcgttacgttggaggtctatata

SEQ ID NO: 100437 - DNA, 25 bp, Probe Sequence
ttacgttggaggtctatataagcga

SEQ ID NO: 100438 - DNA, 25 bp, Probe Sequence
gttacgttggaggtctatataagcg

SEQ ID NO: 100439 - DNA, 25 bp, Probe Sequence
cgttacgttggaggtctatataagc

SEQ ID NO: 100440 - DNA, 25 bp, Probe Sequence
gcgttacgttggaggtctatataag

SEQ ID NO: 100441 - DNA, 25 bp, Probe Sequence
agcgttacgttggaggtctatataa

SEQ ID NO: 100442 - DNA, 25 bp, Probe Sequence
ttagcgttacgttggaggtctatat

SEQ ID NO: 100443 - DNA, 25 bp, Probe Sequence
tacgttggaggtctatataagcgag

SEQ ID NO: 100444 - DNA, 25 bp, Probe Sequence
tgataagtgttctgttgacctttac

SEQ ID NO: 100445 - DNA, 25 bp, Probe Sequence
taagtgttctgttgacctttactca

SEQ ID NO: 100446 - DNA, 25 bp, Probe Sequence
gtggttgatattggcatgatggttg

SEQ ID NO: 100447 - DNA, 25 bp, Probe Sequence
gttagcgttacgttggaggtctata

SEQ ID NO: 100448 - DNA, 25 bp, Probe Sequence
aaggtcatgtgcttagaagtcaagg

SEQ ID NO: 100449 - DNA, 25 bp, Probe Sequence
ataagtgttctgttgacctttactc

SEQ ID NO: 100450 - DNA, 25 bp, Probe Sequence
gataagtgttctgttgacctttact

SEQ ID NO: 100451 - DNA, 25 bp, Probe Sequence
catgataagtgttctgttgaccttt

SEQ ID NO: 100452 - DNA, 25 bp, Probe Sequence
aatcagagaacattcaacgaccaac

SEQ ID NO: 100453 - DNA, 25 bp, Probe Sequence
ttagatggtgattgttgtctgtggt

SEQ ID NO: 100454 - DNA, 25 bp, Probe Sequence
tagatggtgattgttgtctgtggtc

SEQ ID NO: 100455 - DNA, 25 bp, Probe Sequence
cactacattccagtaatgaagagga

SEQ ID NO: 100456 - DNA, 25 bp, Probe Sequence
acactacattccagtaatgaagagg

SEQ ID NO: 100457 - DNA, 25 bp, Probe Sequence
gaatcagagaacattcaacgaccaa

SEQ ID NO: 100458 - DNA, 25 bp, Probe Sequence
gatggtgattgttgtctgtggtctt

SEQ ID NO: 100459 - DNA, 25 bp, Probe Sequence
ggatgaatttctcaggtgacatttc

SEQ ID NO: 100460 - DNA, 25 bp, Probe Sequence
gatcattggacactggacacactag

SEQ ID NO: 100461 - DNA, 25 bp, Probe Sequence
aggatgaatttctcaggtgacattt

SEQ ID NO: 100462 - DNA, 25 bp, Probe Sequence
aaggatgaatttctcaggtgacatt

SEQ ID NO: 100463 - DNA, 25 bp, Probe Sequence
aaaggatgaatttctcaggtgacat

SEQ ID NO: 100464 - DNA, 25 bp, Probe Sequence
atcagagaacattcaacgaccaacc

SEQ ID NO: 100465 - DNA, 25 bp, Probe Sequence
tttagatggtgattgttgtctgtgg

SEQ ID NO: 100466 - DNA, 25 bp, Probe Sequence
gatgaatttctcaggtgacatttct

SEQ ID NO: 100467 - DNA, 25 bp, Probe Sequence
aacactacattccagtaatgaagag

SEQ ID NO: 100468 - DNA, 25 bp, Probe Sequence
aagtgacttgagcatctgaagattt

SEQ ID NO: 100469 - DNA, 25 bp, Probe Sequence
aaagtgacttgagcatctgaagatt

SEQ ID NO: 100470 - DNA, 25 bp, Probe Sequence
tctcaggtgacatttctatatctgc

SEQ ID NO: 100471 - DNA, 25 bp, Probe Sequence
agatcattggacactggacacacta

SEQ ID NO: 100472 - DNA, 25 bp, Probe Sequence
aagttgaagaaatggagatgagcct

SEQ ID NO: 100473 - DNA, 25 bp, Probe Sequence
caagttgaagaaatggagatgagcc

SEQ ID NO: 100474 - DNA, 25 bp, Probe Sequence
cagtaatgaagaggaagaccctttc

SEQ ID NO: 100475 - DNA, 25 bp, Probe Sequence
caaagtgacttgagcatctgaagat

SEQ ID NO: 100476 - DNA, 25 bp, Probe Sequence
gcaacatggagaataagcacagatt

SEQ ID NO: 100477 - DNA, 25 bp, Probe Sequence
gaaccttgtggtgagtaactatcag

SEQ ID NO: 100478 - DNA, 25 bp, Probe Sequence
agaataagcacagatttggagagaa

SEQ ID NO: 100479 - DNA, 25 bp, Probe Sequence
gaataagcacagatttggagagaag

SEQ ID NO: 100480 - DNA, 25 bp, Probe Sequence
gagaataagcacagatttggagaga

SEQ ID NO: 100481 - DNA, 25 bp, Probe Sequence
atggagaataagcacagatttggag

SEQ ID NO: 100482 - DNA, 25 bp, Probe Sequence
ggagaataagcacagatttggagag

SEQ ID NO: 100483 - DNA, 25 bp, Probe Sequence
aataagcacagatttggagagaagc

SEQ ID NO: 100484 - DNA, 25 bp, Probe Sequence
cagagcagactccatctcatgttaa

SEQ ID NO: 100485 - DNA, 25 bp, Probe Sequence
ataaattggacccacagaaactatg

SEQ ID NO: 100486 - DNA, 25 bp, Probe Sequence
ctatctccaatccatctcggacatc

SEQ ID NO: 100487 - DNA, 25 bp, Probe Sequence
ggaaccttgtggtgagtaactatca

SEQ ID NO: 100488 - DNA, 25 bp, Probe Sequence
tggagaataagcacagatttggaga

SEQ ID NO: 100489 - DNA, 25 bp, Probe Sequence
cacctagaacaagcactagagaagt

SEQ ID NO: 100490 - DNA, 25 bp, Probe Sequence
taaattggacccacagaaactatgc

SEQ ID NO: 100491 - DNA, 25 bp, Probe Sequence
atcaataaattggacccacagaaac

SEQ ID NO: 100492 - DNA, 25 bp, Probe Sequence
aacatggagaataagcacagatttg

SEQ ID NO: 100493 - DNA, 25 bp, Probe Sequence
caacatggagaataagcacagattt

SEQ ID NO: 100494 - DNA, 25 bp, Probe Sequence
tcaataaattggacccacagaaact

SEQ ID NO: 100495 - DNA, 25 bp, Probe Sequence
tagtgtaaagtaccatgtccaaagg

SEQ ID NO: 100496 - DNA, 25 bp, Probe Sequence
caataaattggacccacagaaacta

SEQ ID NO: 100497 - DNA, 25 bp, Probe Sequence
agatcaataaattggacccacagaa

SEQ ID NO: 100498 - DNA, 25 bp, Probe Sequence
aagatcaataaattggacccacaga

SEQ ID NO: 100499 - DNA, 25 bp, Probe Sequence
aataaattggacccacagaaactat

SEQ ID NO: 100500 - DNA, 25 bp, Probe Sequence
acgtgtatattaaggaactgatgca

SEQ ID NO: 100501 - DNA, 25 bp, Probe Sequence
catcgttgaacactttagccttaat

SEQ ID NO: 100502 - DNA, 25 bp, Probe Sequence
cgttgaacactttagccttaattga

SEQ ID NO: 100503 - DNA, 25 bp, Probe Sequence
tcgttgaacactttagccttaattg

SEQ ID NO: 100504 - DNA, 25 bp, Probe Sequence
atcgttgaacactttagccttaatt

SEQ ID NO: 100505 - DNA, 25 bp, Probe Sequence
tcatcgttgaacactttagccttaa

SEQ ID NO: 100506 - DNA, 25 bp, Probe Sequence
cttggtgagaggtttggtttgatac

SEQ ID NO: 100507 - DNA, 25 bp, Probe Sequence
ctcatcgttgaacactttagcctta

SEQ ID NO: 100508 - DNA, 25 bp, Probe Sequence
cccacactgtatctaatgtatcaca

SEQ ID NO: 100509 - DNA, 25 bp, Probe Sequence
gttgaacactttagccttaattgaa

SEQ ID NO: 100510 - DNA, 25 bp, Probe Sequence
tttctcatcgttgaacactttagcc

SEQ ID NO: 100511 - DNA, 25 bp, Probe Sequence
tgttctaaatagcttcgtctcagtt

SEQ ID NO: 100512 - DNA, 25 bp, Probe Sequence
tctaaatagcttcgtctcagtttcc

SEQ ID NO: 100513 - DNA, 25 bp, Probe Sequence
gttctaaatagcttcgtctcagttt

SEQ ID NO: 100514 - DNA, 25 bp, Probe Sequence
ttgaacactttagccttaattgaaa

SEQ ID NO: 100515 - DNA, 25 bp, Probe Sequence
ttctaaatagcttcgtctcagtttc

SEQ ID NO: 100516 - DNA, 25 bp, Probe Sequence
ctaaatagcttcgtctcagtttccc

SEQ ID NO: 100517 - DNA, 25 bp, Probe Sequence
tctcatcgttgaacactttagcctt

SEQ ID NO: 100518 - DNA, 25 bp, Probe Sequence
ttctcatcgttgaacactttagcct

SEQ ID NO: 100519 - DNA, 25 bp, Probe Sequence
ctgttctaaatagcttcgtctcagt

SEQ ID NO: 100520 - DNA, 25 bp, Probe Sequence
catctgagcattctgaaagaaagaa

SEQ ID NO: 100521 - DNA, 25 bp, Probe Sequence
gcttggtgagaggtttggtttgata

SEQ ID NO: 100522 - DNA, 25 bp, Probe Sequence
atctgagcattctgaaagaaagaaa

SEQ ID NO: 100523 - DNA, 25 bp, Probe Sequence
cgtgtatattaaggaactgatgcat

SEQ ID NO: 100524 - DNA, 25 bp, Probe Sequence
tttattaccaagcccagagatacag

SEQ ID NO: 100525 - DNA, 25 bp, Probe Sequence
tattaccaagcccagagatacagat

SEQ ID NO: 100526 - DNA, 25 bp, Probe Sequence
cacacctacgctatgatggaatctc

SEQ ID NO: 100527 - DNA, 25 bp, Probe Sequence
ttattaccaagcccagagatacaga

SEQ ID NO: 100528 - DNA, 25 bp, Probe Sequence
ctttattaccaagcccagagataca

SEQ ID NO: 100529 - DNA, 25 bp, Probe Sequence
cctttattaccaagcccagagatac

SEQ ID NO: 100530 - DNA, 25 bp, Probe Sequence
tataaccttaaagtctcccagtctg

SEQ ID NO: 100531 - DNA, 25 bp, Probe Sequence
acacacctacgctatgatggaatct

SEQ ID NO: 100532 - DNA, 25 bp, Probe Sequence
cacacacctacgctatgatggaatc

SEQ ID NO: 100533 - DNA, 25 bp, Probe Sequence
attaccaagcccagagatacagatg

SEQ ID NO: 100534 - DNA, 25 bp, Probe Sequence
ccttataaccttaaagtctcccagt

SEQ ID NO: 100535 - DNA, 25 bp, Probe Sequence
gcctttattaccaagcccagagata

SEQ ID NO: 100536 - DNA, 25 bp, Probe Sequence
tccttataaccttaaagtctcccag

SEQ ID NO: 100537 - DNA, 25 bp, Probe Sequence
ttataaccttaaagtctcccagtct

SEQ ID NO: 100538 - DNA, 25 bp, Probe Sequence
ttccttataaccttaaagtctccca

SEQ ID NO: 100539 - DNA, 25 bp, Probe Sequence
cttataaccttaaagtctcccagtc

SEQ ID NO: 100540 - DNA, 25 bp, Probe Sequence
ctggctcatgaaggaagaattattc

SEQ ID NO: 100541 - DNA, 25 bp, Probe Sequence
acacctacgctatgatggaatctcg

SEQ ID NO: 100542 - DNA, 25 bp, Probe Sequence
ttaccaagcccagagatacagatgt

SEQ ID NO: 100543 - DNA, 25 bp, Probe Sequence
gctggctcatgaaggaagaattatt

SEQ ID NO: 100544 - DNA, 25 bp, Probe Sequence
attccttataaccttaaagtctccc

SEQ ID NO: 100545 - DNA, 25 bp, Probe Sequence
aagtatgcagcctttattaccaagc

SEQ ID NO: 100546 - DNA, 25 bp, Probe Sequence
taccaagcccagagatacagatgtc

SEQ ID NO: 100547 - DNA, 25 bp, Probe Sequence
cacctacgctatgatggaatctcga

SEQ ID NO: 100548 - DNA, 25 bp, Probe Sequence
aacaatcggagacctatacagaaga

SEQ ID NO: 100549 - DNA, 25 bp, Probe Sequence
acaatcggagacctatacagaagat

SEQ ID NO: 100550 - DNA, 25 bp, Probe Sequence
accaatgacagacttagacatacaa

SEQ ID NO: 100551 - DNA, 25 bp, Probe Sequence
tctatctcagaagacagcagtagta

SEQ ID NO: 100552 - DNA, 25 bp, Probe Sequence
atctatctcagaagacagcagtagt

SEQ ID NO: 100553 - DNA, 25 bp, Probe Sequence
caatcggagacctatacagaagata

SEQ ID NO: 100554 - DNA, 25 bp, Probe Sequence
ttgctaagtctgctaatcttctgtg

SEQ ID NO: 100555 - DNA, 25 bp, Probe Sequence
tatctcagaagacagcagtagtaac

SEQ ID NO: 100556 - DNA, 25 bp, Probe Sequence
atctcagaagacagcagtagtaaca

SEQ ID NO: 100557 - DNA, 25 bp, Probe Sequence
ctatctcagaagacagcagtagtaa

SEQ ID NO: 100558 - DNA, 25 bp, Probe Sequence
taccaatgacagacttagacataca

SEQ ID NO: 100559 - DNA, 25 bp, Probe Sequence
caggaggaagtatcaatgatggatt

SEQ ID NO: 100560 - DNA, 25 bp, Probe Sequence
ccaatgacagacttagacatacaat

SEQ ID NO: 100561 - DNA, 25 bp, Probe Sequence
gtcatcaccaggaggaagtatcaat

SEQ ID NO: 100562 - DNA, 25 bp, Probe Sequence
aatgtcatcaccaggaggaagtatc

SEQ ID NO: 100563 - DNA, 25 bp, Probe Sequence
tctcagaagacagcagtagtaacag

SEQ ID NO: 100564 - DNA, 25 bp, Probe Sequence
gatctatctcagaagacagcagtag

SEQ ID NO: 100565 - DNA, 25 bp, Probe Sequence
aatcggagacctatacagaagatat

SEQ ID NO: 100566 - DNA, 25 bp, Probe Sequence
tcatcaccaggaggaagtatcaatg

SEQ ID NO: 100567 - DNA, 25 bp, Probe Sequence
caatgtcatcaccaggaggaagtat

SEQ ID NO: 100568 - DNA, 25 bp, Probe Sequence
ttgtcactggatacattcagaacta

SEQ ID NO: 100569 - DNA, 25 bp, Probe Sequence
gtaccaatgacagacttagacatac

SEQ ID NO: 100570 - DNA, 25 bp, Probe Sequence
ctagtaccaatgacagacttagaca

SEQ ID NO: 100571 - DNA, 25 bp, Probe Sequence
tgtcactggatacattcagaactag

SEQ ID NO: 100572 - DNA, 25 bp, Probe Sequence
ctgtgtggatatggcaccaattcta

SEQ ID NO: 100573 - DNA, 25 bp, Probe Sequence
tgtgtggatatggcaccaattctac

SEQ ID NO: 100574 - DNA, 25 bp, Probe Sequence
gactgaaggtgaaagaggtggaatc

SEQ ID NO: 100575 - DNA, 25 bp, Probe Sequence
gtgtggatatggcaccaattctacc

SEQ ID NO: 100576 - DNA, 25 bp, Probe Sequence
gaggtctgacagggtaggaatatgt

SEQ ID NO: 100577 - DNA, 25 bp, Probe Sequence
ctaaacattgaaagctgggtgtagg

SEQ ID NO: 100578 - DNA, 25 bp, Probe Sequence
ggaggtctgacagggtaggaatatg

SEQ ID NO: 100579 - DNA, 25 bp, Probe Sequence
aggtctgacagggtaggaatatgtg

SEQ ID NO: 100580 - DNA, 25 bp, Probe Sequence
tggaggtctgacagggtaggaatat

SEQ ID NO: 100581 - DNA, 25 bp, Probe Sequence
ctcttttccttttcccagactcaga

SEQ ID NO: 100582 - DNA, 25 bp, Probe Sequence
ctgacagggtaggaatatgtgggag

SEQ ID NO: 100583 - DNA, 25 bp, Probe Sequence
ggactgaaggtgaaagaggtggaat

SEQ ID NO: 100584 - DNA, 25 bp, Probe Sequence
actgcgggatgctaaacattgaaag

SEQ ID NO: 100585 - DNA, 25 bp, Probe Sequence
gactgcgggatgctaaacattgaaa

SEQ ID NO: 100586 - DNA, 25 bp, Probe Sequence
tcttttccttttcccagactcagac

SEQ ID NO: 100587 - DNA, 25 bp, Probe Sequence
gtctgacagggtaggaatatgtggg

SEQ ID NO: 100588 - DNA, 25 bp, Probe Sequence
ggtctgacagggtaggaatatgtgg

SEQ ID NO: 100589 - DNA, 25 bp, Probe Sequence
actgaaggtgaaagaggtggaatcc

SEQ ID NO: 100590 - DNA, 25 bp, Probe Sequence
caccaattctaccctgctcctcttt

SEQ ID NO: 100591 - DNA, 25 bp, Probe Sequence
tctgacagggtaggaatatgtggga

SEQ ID NO: 100592 - DNA, 25 bp, Probe Sequence
gctaaacattgaaagctgggtgtag

SEQ ID NO: 100593 - DNA, 25 bp, Probe Sequence
ctcctcttttccttttcccagactc

SEQ ID NO: 100594 - DNA, 25 bp, Probe Sequence
ctaccctgctcctcttttccttttc

SEQ ID NO: 100595 - DNA, 25 bp, Probe Sequence
taaacattgaaagctgggtgtaggc

SEQ ID NO: 100596 - DNA, 25 bp, Probe Sequence
caccgagatgctcagagataatata

SEQ ID NO: 100597 - DNA, 25 bp, Probe Sequence
accgagatgctcagagataatataa

SEQ ID NO: 100598 - DNA, 25 bp, Probe Sequence
ccaccgagatgctcagagataatat

SEQ ID NO: 100599 - DNA, 25 bp, Probe Sequence
ccgagatgctcagagataatataag

SEQ ID NO: 100600 - DNA, 25 bp, Probe Sequence
atagaatggaagtgagcaaaggaaa

SEQ ID NO: 100601 - DNA, 25 bp, Probe Sequence
cgatatactcatagaatggaagtga

SEQ ID NO: 100602 - DNA, 25 bp, Probe Sequence
ttaagtaaatgaggaatagccaccg

SEQ ID NO: 100603 - DNA, 25 bp, Probe Sequence
taagtaaatgaggaatagccaccga

SEQ ID NO: 100604 - DNA, 25 bp, Probe Sequence
atttaccctaataaagccaccactt

SEQ ID NO: 100605 - DNA, 25 bp, Probe Sequence
catagaatggaagtgagcaaaggaa

SEQ ID NO: 100606 - DNA, 25 bp, Probe Sequence
tatttaccctaataaagccaccact

SEQ ID NO: 100607 - DNA, 25 bp, Probe Sequence
aatataagccttccaaagtcagcag

SEQ ID NO: 100608 - DNA, 25 bp, Probe Sequence
gaatataagccttccaaagtcagca

SEQ ID NO: 100609 - DNA, 25 bp, Probe Sequence
tcagagataatataagccatgagtg

SEQ ID NO: 100610 - DNA, 25 bp, Probe Sequence
tttaccctaataaagccaccacttg

SEQ ID NO: 100611 - DNA, 25 bp, Probe Sequence
acaatgaatataagccttccaaagt

SEQ ID NO: 100612 - DNA, 25 bp, Probe Sequence
cagagataatataagccatgagtgg

SEQ ID NO: 100613 - DNA, 25 bp, Probe Sequence
caactgtagatgaaattgtcttcct

SEQ ID NO: 100614 - DNA, 25 bp, Probe Sequence
agatgctcagagataatataagcca

SEQ ID NO: 100615 - DNA, 25 bp, Probe Sequence
tgaatataagccttccaaagtcagc

SEQ ID NO: 100616 - DNA, 25 bp, Probe Sequence
atgaatataagccttccaaagtcag

SEQ ID NO: 100617 - DNA, 25 bp, Probe Sequence
atatttaccctaataaagccaccac

SEQ ID NO: 100618 - DNA, 25 bp, Probe Sequence
cgagatgctcagagataatataagc

SEQ ID NO: 100619 - DNA, 25 bp, Probe Sequence
cagggttgttgtgaggattacatat

SEQ ID NO: 100620 - DNA, 25 bp, Probe Sequence
ttggttggtatagaatggttggaat

SEQ ID NO: 100621 - DNA, 25 bp, Probe Sequence
tggttggtatagaatggttggaatt

SEQ ID NO: 100622 - DNA, 25 bp, Probe Sequence
ttcttcagtgtggagtatattcagt

SEQ ID NO: 100623 - DNA, 25 bp, Probe Sequence
gttggttggtatagaatggttggaa

SEQ ID NO: 100624 - DNA, 25 bp, Probe Sequence
atattctgccataggaacacttctg

SEQ ID NO: 100625 - DNA, 25 bp, Probe Sequence
ttcagtgtggagtatattcagtagt

SEQ ID NO: 100626 - DNA, 25 bp, Probe Sequence
caaggctgtgatatggaactagaag

SEQ ID NO: 100627 - DNA, 25 bp, Probe Sequence
tcttcagtgtggagtatattcagta

SEQ ID NO: 100628 - DNA, 25 bp, Probe Sequence
cttcagtgtggagtatattcagtag

SEQ ID NO: 100629 - DNA, 25 bp, Probe Sequence
gtggttggttggtatagaatggttg

SEQ ID NO: 100630 - DNA, 25 bp, Probe Sequence
tcagtgtggagtatattcagtagta

SEQ ID NO: 100631 - DNA, 25 bp, Probe Sequence
tgtggttggttggtatagaatggtt

SEQ ID NO: 100632 - DNA, 25 bp, Probe Sequence
tgtgatatggaactagaaggctgtt

SEQ ID NO: 100633 - DNA, 25 bp, Probe Sequence
ctgtgatatggaactagaaggctgt

SEQ ID NO: 100634 - DNA, 25 bp, Probe Sequence
aaggctgtgatatggaactagaagg

SEQ ID NO: 100635 - DNA, 25 bp, Probe Sequence
ggaagccatgaattagaactacatt

SEQ ID NO: 100636 - DNA, 25 bp, Probe Sequence
tattctgccataggaacacttctgt

SEQ ID NO: 100637 - DNA, 25 bp, Probe Sequence
cttctgtctacatgccttctcattc

SEQ ID NO: 100638 - DNA, 25 bp, Probe Sequence
aatattctgccataggaacacttct

SEQ ID NO: 100639 - DNA, 25 bp, Probe Sequence
ggttggttggtatagaatggttgga

SEQ ID NO: 100640 - DNA, 25 bp, Probe Sequence
ctgtctacatgccttctcattcaag

SEQ ID NO: 100641 - DNA, 25 bp, Probe Sequence
ccataggaacacttctgtctacatg

SEQ ID NO: 100642 - DNA, 25 bp, Probe Sequence
tctgtctacatgccttctcattcaa

SEQ ID NO: 100643 - DNA, 25 bp, Probe Sequence
ttctgtctacatgccttctcattca

SEQ ID NO: 100644 - DNA, 25 bp, Probe Sequence
ttggctagtgacagggctaattaat

SEQ ID NO: 100645 - DNA, 25 bp, Probe Sequence
tttggctagtgacagggctaattaa

SEQ ID NO: 100646 - DNA, 25 bp, Probe Sequence
ctttggctagtgacagggctaatta

SEQ ID NO: 100647 - DNA, 25 bp, Probe Sequence
acaacggacaataaaagaatgaaca

SEQ ID NO: 100648 - DNA, 25 bp, Probe Sequence
caacggacaataaaagaatgaacac

SEQ ID NO: 100649 - DNA, 25 bp, Probe Sequence
tagtgacagggctaattaatttgct

SEQ ID NO: 100650 - DNA, 25 bp, Probe Sequence
ctagtgacagggctaattaatttgc

SEQ ID NO: 100651 - DNA, 25 bp, Probe Sequence
gctagtgacagggctaattaatttg

SEQ ID NO: 100652 - DNA, 25 bp, Probe Sequence
gtgacagggctaattaatttgcttt

SEQ ID NO: 100653 - DNA, 25 bp, Probe Sequence
ggctagtgacagggctaattaattt

SEQ ID NO: 100654 - DNA, 25 bp, Probe Sequence
agtgacagggctaattaatttgctt

SEQ ID NO: 100655 - DNA, 25 bp, Probe Sequence
tgacagggctaattaatttgcttta

SEQ ID NO: 100656 - DNA, 25 bp, Probe Sequence
actttggctagtgacagggctaatt

SEQ ID NO: 100657 - DNA, 25 bp, Probe Sequence
tggctagtgacagggctaattaatt

SEQ ID NO: 100658 - DNA, 25 bp, Probe Sequence
cactttggctagtgacagggctaat

SEQ ID NO: 100659 - DNA, 25 bp, Probe Sequence
gtcattgctagaagagaggaacata

SEQ ID NO: 100660 - DNA, 25 bp, Probe Sequence
gctggaatctgaagaatgaatacat

SEQ ID NO: 100661 - DNA, 25 bp, Probe Sequence
tcattgctagaagagaggaacataa

SEQ ID NO: 100662 - DNA, 25 bp, Probe Sequence
gaggttagagaggaaggcttgtatg

SEQ ID NO: 100663 - DNA, 25 bp, Probe Sequence
gactgtcattgctagaagagaggaa

SEQ ID NO: 100664 - DNA, 25 bp, Probe Sequence
actgtcattgctagaagagaggaac

SEQ ID NO: 100665 - DNA, 25 bp, Probe Sequence
agctggaatctgaagaatgaataca

SEQ ID NO: 100666 - DNA, 25 bp, Probe Sequence
gagactgtcattgctagaagagagg

SEQ ID NO: 100667 - DNA, 25 bp, Probe Sequence
ggagactgtcattgctagaagagag

SEQ ID NO: 100668 - DNA, 25 bp, Probe Sequence
tgtcattgctagaagagaggaacat

SEQ ID NO: 100669 - DNA, 25 bp, Probe Sequence
agactgtcattgctagaagagagga

SEQ ID NO: 100670 - DNA, 25 bp, Probe Sequence
caggataacctagcaattatagagc

SEQ ID NO: 100671 - DNA, 25 bp, Probe Sequence
tcaaacaactatgctactctccttt

SEQ ID NO: 100672 - DNA, 25 bp, Probe Sequence
ttcaaacaactatgctactctcctt

SEQ ID NO: 100673 - DNA, 25 bp, Probe Sequence
tttcaaacaactatgctactctcct

SEQ ID NO: 100674 - DNA, 25 bp, Probe Sequence
gctttcaaacaactatgctactctc

SEQ ID NO: 100675 - DNA, 25 bp, Probe Sequence
atgctttcaaacaactatgctactc

SEQ ID NO: 100676 - DNA, 25 bp, Probe Sequence
atctaacaatcctcacaaccctatg

SEQ ID NO: 100677 - DNA, 25 bp, Probe Sequence
caaacaactatgctactctcctttc

SEQ ID NO: 100678 - DNA, 25 bp, Probe Sequence
ctttcaaacaactatgctactctcc

SEQ ID NO: 100679 - DNA, 25 bp, Probe Sequence
aaacaactatgctactctcctttcc

SEQ ID NO: 100680 - DNA, 25 bp, Probe Sequence
tgctttcaaacaactatgctactct

SEQ ID NO: 100681 - DNA, 25 bp, Probe Sequence
ctgtcattgctagaagagaggaaca

SEQ ID NO: 100682 - DNA, 25 bp, Probe Sequence
cctcaggataacctagcaattatag

SEQ ID NO: 100683 - DNA, 25 bp, Probe Sequence
acagcaactttctctttattctcag

SEQ ID NO: 100684 - DNA, 25 bp, Probe Sequence
cagcaactttctctttattctcagt

SEQ ID NO: 100685 - DNA, 25 bp, Probe Sequence
tacagcaactttctctttattctca

SEQ ID NO: 100686 - DNA, 25 bp, Probe Sequence
ttctgattacagcaactttctcttt

SEQ ID NO: 100687 - DNA, 25 bp, Probe Sequence
tttctgattacagcaactttctctt

SEQ ID NO: 100688 - DNA, 25 bp, Probe Sequence
tgtgatttggtttggtttggtgttt

SEQ ID NO: 100689 - DNA, 25 bp, Probe Sequence
ttgtgatttggtttggtttggtgtt

SEQ ID NO: 100690 - DNA, 25 bp, Probe Sequence
tttgtgatttggtttggtttggtgt

SEQ ID NO: 100691 - DNA, 25 bp, Probe Sequence
tttgaaatggagtctcgctttgttg

SEQ ID NO: 100692 - DNA, 25 bp, Probe Sequence
ttacagcaactttctctttattctc

SEQ ID NO: 100693 - DNA, 25 bp, Probe Sequence
tctgattacagcaactttctcttta

SEQ ID NO: 100694 - DNA, 25 bp, Probe Sequence
cgtactttgttgcagactatgattt

SEQ ID NO: 100695 - DNA, 25 bp, Probe Sequence
acgtactttgttgcagactatgatt

SEQ ID NO: 100696 - DNA, 25 bp, Probe Sequence
ctagcagactggaatgttgaccatt

SEQ ID NO: 100697 - DNA, 25 bp, Probe Sequence
tgattacagcaactttctctttatt

SEQ ID NO: 100698 - DNA, 25 bp, Probe Sequence
gaaatggagtctcgctttgttgttc

SEQ ID NO: 100699 - DNA, 25 bp, Probe Sequence
aacgtactttgttgcagactatgat

SEQ ID NO: 100700 - DNA, 25 bp, Probe Sequence
ggtagagacagggtttcaccatatt

SEQ ID NO: 100701 - DNA, 25 bp, Probe Sequence
tgttgcagactatgatttagacttt

SEQ ID NO: 100702 - DNA, 25 bp, Probe Sequence
ttgttgcagactatgatttagactt

SEQ ID NO: 100703 - DNA, 25 bp, Probe Sequence
tttgttgcagactatgatttagact

SEQ ID NO: 100704 - DNA, 25 bp, Probe Sequence
actttgttgcagactatgatttaga

SEQ ID NO: 100705 - DNA, 25 bp, Probe Sequence
tttctagcagactggaatgttgacc

SEQ ID NO: 100706 - DNA, 25 bp, Probe Sequence
ctttgttgcagactatgatttagac

SEQ ID NO: 100707 - DNA, 25 bp, Probe Sequence
tgaggattcagactaagtttggaaa

SEQ ID NO: 100708 - DNA, 25 bp, Probe Sequence
gaggattcagactaagtttggaaac

SEQ ID NO: 100709 - DNA, 25 bp, Probe Sequence
aggattcagactaagtttggaaact

SEQ ID NO: 100710 - DNA, 25 bp, Probe Sequence
ggattcagactaagtttggaaactc

SEQ ID NO: 100711 - DNA, 25 bp, Probe Sequence
gattcagactaagtttggaaactct

SEQ ID NO: 100712 - DNA, 25 bp, Probe Sequence
ctgaggattcagactaagtttggaa

SEQ ID NO: 100713 - DNA, 25 bp, Probe Sequence
caacgctgaggattcagactaagtt

SEQ ID NO: 100714 - DNA, 25 bp, Probe Sequence
agactaagtttggaaactctggagg

SEQ ID NO: 100715 - DNA, 25 bp, Probe Sequence
actaagtttggaaactctggaggtc

SEQ ID NO: 100716 - DNA, 25 bp, Probe Sequence
gactaagtttggaaactctggaggt

SEQ ID NO: 100717 - DNA, 25 bp, Probe Sequence
ttcagactaagtttggaaactctgg

SEQ ID NO: 100718 - DNA, 25 bp, Probe Sequence
cagactaagtttggaaactctggag

SEQ ID NO: 100719 - DNA, 25 bp, Probe Sequence
attcagactaagtttggaaactctg

SEQ ID NO: 100720 - DNA, 25 bp, Probe Sequence
tcagactaagtttggaaactctgga

SEQ ID NO: 100721 - DNA, 25 bp, Probe Sequence
gctgaggattcagactaagtttgga

SEQ ID NO: 100722 - DNA, 25 bp, Probe Sequence
aacgctgaggattcagactaagttt

SEQ ID NO: 100723 - DNA, 25 bp, Probe Sequence
ctaagtttggaaactctggaggtcc

SEQ ID NO: 100724 - DNA, 25 bp, Probe Sequence
acgctgaggattcagactaagtttg

SEQ ID NO: 100725 - DNA, 25 bp, Probe Sequence
cgctgaggattcagactaagtttgg

SEQ ID NO: 100726 - DNA, 25 bp, Probe Sequence
taagtttggaaactctggaggtccc

SEQ ID NO: 100727 - DNA, 25 bp, Probe Sequence
gcaacgctgaggattcagactaagt

SEQ ID NO: 100728 - DNA, 25 bp, Probe Sequence
atgaagatgcagagagatgaagcta

SEQ ID NO: 100729 - DNA, 25 bp, Probe Sequence
aagatgcagagagatgaagctactt

SEQ ID NO: 100730 - DNA, 25 bp, Probe Sequence
gaagatgcagagagatgaagctact

SEQ ID NO: 100731 - DNA, 25 bp, Probe Sequence
aatgaagatgcagagagatgaagct

SEQ ID NO: 100732 - DNA, 25 bp, Probe Sequence
tgaagatgcagagagatgaagctac

SEQ ID NO: 100733 - DNA, 25 bp, Probe Sequence
aaatgaagatgcagagagatgaagc

SEQ ID NO: 100734 - DNA, 25 bp, Probe Sequence
gatgcagagagatgaagctactttc

SEQ ID NO: 100735 - DNA, 25 bp, Probe Sequence
agatgcagagagatgaagctacttt

SEQ ID NO: 100736 - DNA, 25 bp, Probe Sequence
taactgatttaacccctgaaacaac

SEQ ID NO: 100737 - DNA, 25 bp, Probe Sequence
cagagagatgaagctactttcccag

SEQ ID NO: 100738 - DNA, 25 bp, Probe Sequence
atacacagtcagcaggcttcttctc

SEQ ID NO: 100739 - DNA, 25 bp, Probe Sequence
ccatcttaactgatttaacccctga

SEQ ID NO: 100740 - DNA, 25 bp, Probe Sequence
ttccccatcttaactgatttaaccc

SEQ ID NO: 100741 - DNA, 25 bp, Probe Sequence
gcattccccatcttaactgatttaa

SEQ ID NO: 100742 - DNA, 25 bp, Probe Sequence
cttaactgatttaacccctgaaaca

SEQ ID NO: 100743 - DNA, 25 bp, Probe Sequence
aactgatttaacccctgaaacaacc

SEQ ID NO: 100744 - DNA, 25 bp, Probe Sequence
tcttaactgatttaacccctgaaac

SEQ ID NO: 100745 - DNA, 25 bp, Probe Sequence
cccatcttaactgatttaacccctg

SEQ ID NO: 100746 - DNA, 25 bp, Probe Sequence
atgcagagagatgaagctactttcc

SEQ ID NO: 100747 - DNA, 25 bp, Probe Sequence
ttaactgatttaacccctgaaacaa

SEQ ID NO: 100748 - DNA, 25 bp, Probe Sequence
attccccatcttaactgatttaacc

SEQ ID NO: 100749 - DNA, 25 bp, Probe Sequence
catcttaactgatttaacccctgaa

SEQ ID NO: 100750 - DNA, 25 bp, Probe Sequence
catacacagtcagcaggcttcttct

SEQ ID NO: 100751 - DNA, 25 bp, Probe Sequence
tcatacacagtcagcaggcttcttc

SEQ ID NO: 100752 - DNA, 25 bp, Probe Sequence
aagtattcaggttgtgttgctttct

SEQ ID NO: 100753 - DNA, 25 bp, Probe Sequence
caagtattcaggttgtgttgctttc

SEQ ID NO: 100754 - DNA, 25 bp, Probe Sequence
agtattcaggttgtgttgctttctg

SEQ ID NO: 100755 - DNA, 25 bp, Probe Sequence
gtattcaggttgtgttgctttctgc

SEQ ID NO: 100756 - DNA, 25 bp, Probe Sequence
acaagtattcaggttgtgttgcttt

SEQ ID NO: 100757 - DNA, 25 bp, Probe Sequence
tattcaggttgtgttgctttctgcc

SEQ ID NO: 100758 - DNA, 25 bp, Probe Sequence
tgtataattcattaaagcggtggtc

SEQ ID NO: 100759 - DNA, 25 bp, Probe Sequence
ctgtataattcattaaagcggtggt

SEQ ID NO: 100760 - DNA, 25 bp, Probe Sequence
actgtataattcattaaagcggtgg

SEQ ID NO: 100761 - DNA, 25 bp, Probe Sequence
gtataattcattaaagcggtggtct

SEQ ID NO: 100762 - DNA, 25 bp, Probe Sequence
ggactgtataattcattaaagcggt

SEQ ID NO: 100763 - DNA, 25 bp, Probe Sequence
aggactgtataattcattaaagcgg

SEQ ID NO: 100764 - DNA, 25 bp, Probe Sequence
caaagatgagaacttcccactattt

SEQ ID NO: 100765 - DNA, 25 bp, Probe Sequence
gcaaagatgagaacttcccactatt

SEQ ID NO: 100766 - DNA, 25 bp, Probe Sequence
gactgtataattcattaaagcggtg

SEQ ID NO: 100767 - DNA, 25 bp, Probe Sequence
tataattcattaaagcggtggtctt

SEQ ID NO: 100768 - DNA, 25 bp, Probe Sequence
ctgtcaatgagtgagattgttgaac

SEQ ID NO: 100769 - DNA, 25 bp, Probe Sequence
tctgtcaatgagtgagattgttgaa

SEQ ID NO: 100770 - DNA, 25 bp, Probe Sequence
ttctgtcaatgagtgagattgttga

SEQ ID NO: 100771 - DNA, 25 bp, Probe Sequence
tgtcaatgagtgagattgttgaaca

SEQ ID NO: 100772 - DNA, 25 bp, Probe Sequence
aaggactgtataattcattaaagcg

SEQ ID NO: 100773 - DNA, 25 bp, Probe Sequence
ggcaaagatgagaacttcccactat

SEQ ID NO: 100774 - DNA, 25 bp, Probe Sequence
ataggcaaagatgagaacttcccac

SEQ ID NO: 100775 - DNA, 25 bp, Probe Sequence
cataggcaaagatgagaacttccca

SEQ ID NO: 100776 - DNA, 25 bp, Probe Sequence
tttctgtcaatgagtgagattgttg

SEQ ID NO: 100777 - DNA, 25 bp, Probe Sequence
taattcattaaagcggtggtctttc

SEQ ID NO: 100778 - DNA, 25 bp, Probe Sequence
accgtgatcatcatctcttgtaatt

SEQ ID NO: 100779 - DNA, 25 bp, Probe Sequence
aaccgtgatcatcatctcttgtaat

SEQ ID NO: 100780 - DNA, 25 bp, Probe Sequence
ctaaccgtgatcatcatctcttgta

SEQ ID NO: 100781 - DNA, 25 bp, Probe Sequence
gtaactaaccgtgatcatcatctct

SEQ ID NO: 100782 - DNA, 25 bp, Probe Sequence
ggtccaactcaaagtaaacaagtat

SEQ ID NO: 100783 - DNA, 25 bp, Probe Sequence
attgtccaaggtagaaacttctctt

SEQ ID NO: 100784 - DNA, 25 bp, Probe Sequence
tggtccaactcaaagtaaacaagta

SEQ ID NO: 100785 - DNA, 25 bp, Probe Sequence
tcatattgtccaaggtagaaacttc

SEQ ID NO: 100786 - DNA, 25 bp, Probe Sequence
atggtccaactcaaagtaaacaagt

SEQ ID NO: 100787 - DNA, 25 bp, Probe Sequence
tatggtccaactcaaagtaaacaag

SEQ ID NO: 100788 - DNA, 25 bp, Probe Sequence
tattgtccaaggtagaaacttctct

SEQ ID NO: 100789 - DNA, 25 bp, Probe Sequence
ttatggtccaactcaaagtaaacaa

SEQ ID NO: 100790 - DNA, 25 bp, Probe Sequence
tttatggtccaactcaaagtaaaca

SEQ ID NO: 100791 - DNA, 25 bp, Probe Sequence
gtccaactcaaagtaaacaagtatg

SEQ ID NO: 100792 - DNA, 25 bp, Probe Sequence
catattgtccaaggtagaaacttct

SEQ ID NO: 100793 - DNA, 25 bp, Probe Sequence
atcatattgtccaaggtagaaactt

SEQ ID NO: 100794 - DNA, 25 bp, Probe Sequence
gatcatattgtccaaggtagaaact

SEQ ID NO: 100795 - DNA, 25 bp, Probe Sequence
atattgtccaaggtagaaacttctc

SEQ ID NO: 100796 - DNA, 25 bp, Probe Sequence
aactcaaagtaaacaagtatggaga

SEQ ID NO: 100797 - DNA, 25 bp, Probe Sequence
caactcaaagtaaacaagtatggag

SEQ ID NO: 100798 - DNA, 25 bp, Probe Sequence
aggtagaaacttctcttgaaatgaa

SEQ ID NO: 100799 - DNA, 25 bp, Probe Sequence
aaggtagaaacttctcttgaaatga

SEQ ID NO: 100800 - DNA, 25 bp, Probe Sequence
actcaaagtaaacaagtatggagat

SEQ ID NO: 100801 - DNA, 25 bp, Probe Sequence
ccaactcaaagtaaacaagtatgga

SEQ ID NO: 100802 - DNA, 25 bp, Probe Sequence
tccaactcaaagtaaacaagtatgg

SEQ ID NO: 100803 - DNA, 25 bp, Probe Sequence
actgatcatattgtccaaggtagaa

SEQ ID NO: 100804 - DNA, 25 bp, Probe Sequence
tactgatcatattgtccaaggtaga

SEQ ID NO: 100805 - DNA, 25 bp, Probe Sequence
ggtagaaacttctcttgaaatgaat

SEQ ID NO: 100806 - DNA, 25 bp, Probe Sequence
tacatccaggtggaatacatctact

SEQ ID NO: 100807 - DNA, 25 bp, Probe Sequence
atacatccaggtggaatacatctac

SEQ ID NO: 100808 - DNA, 25 bp, Probe Sequence
catacatccaggtggaatacatcta

SEQ ID NO: 100809 - DNA, 25 bp, Probe Sequence
catccaggtggaatacatctacttg

SEQ ID NO: 100810 - DNA, 25 bp, Probe Sequence
atccaggtggaatacatctacttgt

SEQ ID NO: 100811 - DNA, 25 bp, Probe Sequence
acatccaggtggaatacatctactt

SEQ ID NO: 100812 - DNA, 25 bp, Probe Sequence
ctttgagacatgctactgaatttgg

SEQ ID NO: 100813 - DNA, 25 bp, Probe Sequence
tttgagacatgctactgaatttgga

SEQ ID NO: 100814 - DNA, 25 bp, Probe Sequence
ttgagacatgctactgaatttggag

SEQ ID NO: 100815 - DNA, 25 bp, Probe Sequence
gctttgagacatgctactgaatttg

SEQ ID NO: 100816 - DNA, 25 bp, Probe Sequence
tccaggtggaatacatctacttgtg

SEQ ID NO: 100817 - DNA, 25 bp, Probe Sequence
caggtggaatacatctacttgtggc

SEQ ID NO: 100818 - DNA, 25 bp, Probe Sequence
ccatacatccaggtggaatacatct

SEQ ID NO: 100819 - DNA, 25 bp, Probe Sequence
ccaggtggaatacatctacttgtgg

SEQ ID NO: 100820 - DNA, 25 bp, Probe Sequence
ggctttgagacatgctactgaattt

SEQ ID NO: 100821 - DNA, 25 bp, Probe Sequence
taaggctttgagacatgctactgaa

SEQ ID NO: 100822 - DNA, 25 bp, Probe Sequence
cacgaagaacagtgagattgtcaaa

SEQ ID NO: 100823 - DNA, 25 bp, Probe Sequence
aggctttgagacatgctactgaatt

SEQ ID NO: 100824 - DNA, 25 bp, Probe Sequence
aaggctttgagacatgctactgaat

SEQ ID NO: 100825 - DNA, 25 bp, Probe Sequence
tgagacatgctactgaatttggagg

SEQ ID NO: 100826 - DNA, 25 bp, Probe Sequence
gtaaggctttgagacatgctactga

SEQ ID NO: 100827 - DNA, 25 bp, Probe Sequence
gcacgaagaacagtgagattgtcaa

SEQ ID NO: 100828 - DNA, 25 bp, Probe Sequence
gagacatgctactgaatttggaggg

SEQ ID NO: 100829 - DNA, 25 bp, Probe Sequence
ccaatacaaaacccatacatccagg

SEQ ID NO: 100830 - DNA, 25 bp, Probe Sequence
tacagcttccgaagaactgaccatt

SEQ ID NO: 100831 - DNA, 25 bp, Probe Sequence
ctacagcttccgaagaactgaccat

SEQ ID NO: 100832 - DNA, 25 bp, Probe Sequence
gactacagcttccgaagaactgacc

SEQ ID NO: 100833 - DNA, 25 bp, Probe Sequence
ggactacagcttccgaagaactgac

SEQ ID NO: 100834 - DNA, 25 bp, Probe Sequence
caccaagttttccattactttcagt

SEQ ID NO: 100835 - DNA, 25 bp, Probe Sequence
accaagttttccattactttcagtc

SEQ ID NO: 100836 - DNA, 25 bp, Probe Sequence
aagttttccattactttcagtctgg

SEQ ID NO: 100837 - DNA, 25 bp, Probe Sequence
ccaagttttccattactttcagtct

SEQ ID NO: 100838 - DNA, 25 bp, Probe Sequence
gcaccaagttttccattactttcag

SEQ ID NO: 100839 - DNA, 25 bp, Probe Sequence
caagttttccattactttcagtctg

SEQ ID NO: 100840 - DNA, 25 bp, Probe Sequence
ggcaccaagttttccattactttca

SEQ ID NO: 100841 - DNA, 25 bp, Probe Sequence
gggcaccaagttttccattactttc

SEQ ID NO: 100842 - DNA, 25 bp, Probe Sequence
agggcaccaagttttccattacttt

SEQ ID NO: 100843 - DNA, 25 bp, Probe Sequence
gagggcaccaagttttccattactt

SEQ ID NO: 100844 - DNA, 25 bp, Probe Sequence
agttttccattactttcagtctgga

SEQ ID NO: 100845 - DNA, 25 bp, Probe Sequence
gaggagggcaccaagttttccatta

SEQ ID NO: 100846 - DNA, 25 bp, Probe Sequence
ggagggcaccaagttttccattact

SEQ ID NO: 100847 - DNA, 25 bp, Probe Sequence
aggagggcaccaagttttccattac

SEQ ID NO: 100848 - DNA, 25 bp, Probe Sequence
ttctggatgtataagtctgtgtgtc

SEQ ID NO: 100849 - DNA, 25 bp, Probe Sequence
gttctggatgtataagtctgtgtgt

SEQ ID NO: 100850 - DNA, 25 bp, Probe Sequence
tgttctggatgtataagtctgtgtg

SEQ ID NO: 100851 - DNA, 25 bp, Probe Sequence
ttgttctggatgtataagtctgtgt

SEQ ID NO: 100852 - DNA, 25 bp, Probe Sequence
tctggatgtataagtctgtgtgtca

SEQ ID NO: 100853 - DNA, 25 bp, Probe Sequence
attgttctggatgtataagtctgtg

SEQ ID NO: 100854 - DNA, 25 bp, Probe Sequence
agtgtgtgataaggtctgctgataa

SEQ ID NO: 100855 - DNA, 25 bp, Probe Sequence
aagtgtgtgataaggtctgctgata

SEQ ID NO: 100856 - DNA, 25 bp, Probe Sequence
cattgttctggatgtataagtctgt

SEQ ID NO: 100857 - DNA, 25 bp, Probe Sequence
tcattgttctggatgtataagtctg

SEQ ID NO: 100858 - DNA, 25 bp, Probe Sequence
gatgtataagtctgtgtgtcaggta

SEQ ID NO: 100859 - DNA, 25 bp, Probe Sequence
ctggatgtataagtctgtgtgtcag

SEQ ID NO: 100860 - DNA, 25 bp, Probe Sequence
atgtataagtctgtgtgtcaggtac

SEQ ID NO: 100861 - DNA, 25 bp, Probe Sequence
ttcattgttctggatgtataagtct

SEQ ID NO: 100862 - DNA, 25 bp, Probe Sequence
ggatgtataagtctgtgtgtcaggt

SEQ ID NO: 100863 - DNA, 25 bp, Probe Sequence
tggatgtataagtctgtgtgtcagg

SEQ ID NO: 100864 - DNA, 25 bp, Probe Sequence
caagtgtgtgataaggtctgctgat

SEQ ID NO: 100865 - DNA, 25 bp, Probe Sequence
gtgtgtgataaggtctgctgataaa

SEQ ID NO: 100866 - DNA, 25 bp, Probe Sequence
ttctcaagtgtgtgataaggtctgc

SEQ ID NO: 100867 - DNA, 25 bp, Probe Sequence
ctttctcaagtgtgtgataaggtct

SEQ ID NO: 100868 - DNA, 25 bp, Probe Sequence
actcctttctcaagtgtgtgataag

SEQ ID NO: 100869 - DNA, 25 bp, Probe Sequence
gactcctttctcaagtgtgtgataa

SEQ ID NO: 100870 - DNA, 25 bp, Probe Sequence
tgtataagtctgtgtgtcaggtaca

SEQ ID NO: 100871 - DNA, 25 bp, Probe Sequence
tttctcaagtgtgtgataaggtctg

SEQ ID NO: 100872 - DNA, 25 bp, Probe Sequence
cctatttggaatcttcaacttctga

SEQ ID NO: 100873 - DNA, 25 bp, Probe Sequence
tcctatttggaatcttcaacttctg

SEQ ID NO: 100874 - DNA, 25 bp, Probe Sequence
cccacttattctcctatttggaatc

SEQ ID NO: 100875 - DNA, 25 bp, Probe Sequence
ctcctatttggaatcttcaacttct

SEQ ID NO: 100876 - DNA, 25 bp, Probe Sequence
tctcctatttggaatcttcaacttc

SEQ ID NO: 100877 - DNA, 25 bp, Probe Sequence
ttctcctatttggaatcttcaactt

SEQ ID NO: 100878 - DNA, 25 bp, Probe Sequence
ccacttattctcctatttggaatct

SEQ ID NO: 100879 - DNA, 25 bp, Probe Sequence
ctctccccacttattctcctatttg

SEQ ID NO: 100880 - DNA, 25 bp, Probe Sequence
attctcctatttggaatcttcaact

SEQ ID NO: 100881 - DNA, 25 bp, Probe Sequence
cctctccccacttattctcctattt

SEQ ID NO: 100882 - DNA, 25 bp, Probe Sequence
ccctctccccacttattctcctatt

SEQ ID NO: 100883 - DNA, 25 bp, Probe Sequence
ccccacttattctcctatttggaat

SEQ ID NO: 100884 - DNA, 25 bp, Probe Sequence
tattctcctatttggaatcttcaac

SEQ ID NO: 100885 - DNA, 25 bp, Probe Sequence
cacttattctcctatttggaatctt

SEQ ID NO: 100886 - DNA, 25 bp, Probe Sequence
tccccacttattctcctatttggaa

SEQ ID NO: 100887 - DNA, 25 bp, Probe Sequence
ctccccacttattctcctatttgga

SEQ ID NO: 100888 - DNA, 25 bp, Probe Sequence
tctccccacttattctcctatttgg

SEQ ID NO: 100889 - DNA, 25 bp, Probe Sequence
ctatttggaatcttcaacttctgaa

SEQ ID NO: 100890 - DNA, 25 bp, Probe Sequence
cttattctcctatttggaatcttca

SEQ ID NO: 100891 - DNA, 25 bp, Probe Sequence
acttattctcctatttggaatcttc

SEQ ID NO: 100892 - DNA, 25 bp, Probe Sequence
aaactgaaaataaagagagagagag

SEQ ID NO: 100893 - DNA, 25 bp, Probe Sequence
ttattctcctatttggaatcttcaa

SEQ ID NO: 100894 - DNA, 25 bp, Probe Sequence
cccctctccccacttattctcctat

SEQ ID NO: 100895 - DNA, 25 bp, Probe Sequence
tcccctctccccacttattctccta

SEQ ID NO: 100896 - DNA, 25 bp, Probe Sequence
tggatggttttgtttattaaaagag

SEQ ID NO: 100897 - DNA, 25 bp, Probe Sequence
ggatggttttgtttattaaaagaga

SEQ ID NO: 100898 - DNA, 25 bp, Probe Sequence
ttggatggttttgtttattaaaaga

SEQ ID NO: 100899 - DNA, 25 bp, Probe Sequence
cttggatggttttgtttattaaaag

SEQ ID NO: 100900 - DNA, 25 bp, Probe Sequence
gtttattaaaagagaaacctgaagt

SEQ ID NO: 100901 - DNA, 25 bp, Probe Sequence
tgtttattaaaagagaaacctgaag

SEQ ID NO: 100902 - DNA, 25 bp, Probe Sequence
ttgtttattaaaagagaaacctgaa

SEQ ID NO: 100903 - DNA, 25 bp, Probe Sequence
tttgtttattaaaagagaaacctga

SEQ ID NO: 100904 - DNA, 25 bp, Probe Sequence
tggttttgtttattaaaagagaaac

SEQ ID NO: 100905 - DNA, 25 bp, Probe Sequence
tatctgctattcgggtaatcttcac

SEQ ID NO: 100906 - DNA, 25 bp, Probe Sequence
gtcaggtattagaggaaagagaagg

SEQ ID NO: 100907 - DNA, 25 bp, Probe Sequence
aaggagagtcaggtattagaggaaa

SEQ ID NO: 100908 - DNA, 25 bp, Probe Sequence
tttggattatctgctattcgggtaa

SEQ ID NO: 100909 - DNA, 25 bp, Probe Sequence
aggtattagaggaaagagaagggta

SEQ ID NO: 100910 - DNA, 25 bp, Probe Sequence
agagtcaggtattagaggaaagaga

SEQ ID NO: 100911 - DNA, 25 bp, Probe Sequence
atttggattatctgctattcgggta

SEQ ID NO: 100912 - DNA, 25 bp, Probe Sequence
ggagagtcaggtattagaggaaaga

SEQ ID NO: 100913 - DNA, 25 bp, Probe Sequence
aggagagtcaggtattagaggaaag

SEQ ID NO: 100914 - DNA, 25 bp, Probe Sequence
ttatctgctattcgggtaatcttca

SEQ ID NO: 100915 - DNA, 25 bp, Probe Sequence
gagagtcaggtattagaggaaagag

SEQ ID NO: 100916 - DNA, 25 bp, Probe Sequence
tcaggtattagaggaaagagaaggg

SEQ ID NO: 100917 - DNA, 25 bp, Probe Sequence
caatttggattatctgctattcggg

SEQ ID NO: 100918 - DNA, 25 bp, Probe Sequence
aatttggattatctgctattcgggt

SEQ ID NO: 100919 - DNA, 25 bp, Probe Sequence
atgccaaaccaaactaaaccaattt

SEQ ID NO: 100920 - DNA, 25 bp, Probe Sequence
ttagaggaaagagaagggtatttgt

SEQ ID NO: 100921 - DNA, 25 bp, Probe Sequence
caggtattagaggaaagagaagggt

SEQ ID NO: 100922 - DNA, 25 bp, Probe Sequence
agtcaggtattagaggaaagagaag

SEQ ID NO: 100923 - DNA, 25 bp, Probe Sequence
gagtcaggtattagaggaaagagaa

SEQ ID NO: 100924 - DNA, 25 bp, Probe Sequence
agaggaaagagaagggtatttgtat

SEQ ID NO: 100925 - DNA, 25 bp, Probe Sequence
ttggattatctgctattcgggtaat

SEQ ID NO: 100926 - DNA, 25 bp, Probe Sequence
ggtattagaggaaagagaagggtat

SEQ ID NO: 100927 - DNA, 25 bp, Probe Sequence
agaaatgactgagagaagaatctgc

SEQ ID NO: 100928 - DNA, 25 bp, Probe Sequence
gctattcgggtaatcttcacagaaa

SEQ ID NO: 100929 - DNA, 25 bp, Probe Sequence
gatgaagaagcagatcggaagtaac

SEQ ID NO: 100930 - DNA, 25 bp, Probe Sequence
atgaagaagcagatcggaagtaact

SEQ ID NO: 100931 - DNA, 25 bp, Probe Sequence
tgatgaagaagcagatcggaagtaa

SEQ ID NO: 100932 - DNA, 25 bp, Probe Sequence
ttgatgaagaagcagatcggaagta

SEQ ID NO: 100933 - DNA, 25 bp, Probe Sequence
tatttacatccgtccttacaaccat

SEQ ID NO: 100934 - DNA, 25 bp, Probe Sequence
tctatttacatccgtccttacaacc

SEQ ID NO: 100935 - DNA, 25 bp, Probe Sequence
ctatttacatccgtccttacaacca

SEQ ID NO: 100936 - DNA, 25 bp, Probe Sequence
gtctatttacatccgtccttacaac

SEQ ID NO: 100937 - DNA, 25 bp, Probe Sequence
atttacatccgtccttacaaccatc

SEQ ID NO: 100938 - DNA, 25 bp, Probe Sequence
tatatgggcttgctacttcctgtaa

SEQ ID NO: 100939 - DNA, 25 bp, Probe Sequence
tacatccgtccttacaaccatcctt

SEQ ID NO: 100940 - DNA, 25 bp, Probe Sequence
ttacatccgtccttacaaccatcct

SEQ ID NO: 100941 - DNA, 25 bp, Probe Sequence
atatgggcttgctacttcctgtaat

SEQ ID NO: 100942 - DNA, 25 bp, Probe Sequence
cttgatgaagaagcagatcggaagt

SEQ ID NO: 100943 - DNA, 25 bp, Probe Sequence
ctgtctatttacatccgtccttaca

SEQ ID NO: 100944 - DNA, 25 bp, Probe Sequence
actgtctatttacatccgtccttac

SEQ ID NO: 100945 - DNA, 25 bp, Probe Sequence
cactgtctatttacatccgtcctta

SEQ ID NO: 100946 - DNA, 25 bp, Probe Sequence
atatatgggcttgctacttcctgta

SEQ ID NO: 100947 - DNA, 25 bp, Probe Sequence
tgtctatttacatccgtccttacaa

SEQ ID NO: 100948 - DNA, 25 bp, Probe Sequence
tgaagaagcagatcggaagtaactg

SEQ ID NO: 100949 - DNA, 25 bp, Probe Sequence
tatgggcttgctacttcctgtaatg

SEQ ID NO: 100950 - DNA, 25 bp, Probe Sequence
tttacatccgtccttacaaccatcc

SEQ ID NO: 100951 - DNA, 25 bp, Probe Sequence
aagacagccaatagcacccattaaa

SEQ ID NO: 100952 - DNA, 25 bp, Probe Sequence
tatcaagctctttcccatgacattt

SEQ ID NO: 100953 - DNA, 25 bp, Probe Sequence
gctcaagacttcattatttgccttt

SEQ ID NO: 100954 - DNA, 25 bp, Probe Sequence
atgctcaagacttcattatttgcct

SEQ ID NO: 100955 - DNA, 25 bp, Probe Sequence
tgctcaagacttcattatttgcctt

SEQ ID NO: 100956 - DNA, 25 bp, Probe Sequence
aatgctcaagacttcattatttgcc

SEQ ID NO: 100957 - DNA, 25 bp, Probe Sequence
aaatgctcaagacttcattatttgc

SEQ ID NO: 100958 - DNA, 25 bp, Probe Sequence
ctgttgaaatgctcaagacttcatt

SEQ ID NO: 100959 - DNA, 25 bp, Probe Sequence
catctgttgaaatgctcaagacttc

SEQ ID NO: 100960 - DNA, 25 bp, Probe Sequence
tgttgaaatgctcaagacttcatta

SEQ ID NO: 100961 - DNA, 25 bp, Probe Sequence
tctgttgaaatgctcaagacttcat

SEQ ID NO: 100962 - DNA, 25 bp, Probe Sequence
atctgttgaaatgctcaagacttca

SEQ ID NO: 100963 - DNA, 25 bp, Probe Sequence
tcaagacttcattatttgccttttg

SEQ ID NO: 100964 - DNA, 25 bp, Probe Sequence
caagacttcattatttgccttttga

SEQ ID NO: 100965 - DNA, 25 bp, Probe Sequence
ctcaagacttcattatttgcctttt

SEQ ID NO: 100966 - DNA, 25 bp, Probe Sequence
gaaatgctcaagacttcattatttg

SEQ ID NO: 100967 - DNA, 25 bp, Probe Sequence
gttgaaatgctcaagacttcattat

SEQ ID NO: 100968 - DNA, 25 bp, Probe Sequence
cattatttgccttttgaaatcactg

SEQ ID NO: 100969 - DNA, 25 bp, Probe Sequence
tcattatttgccttttgaaatcact

SEQ ID NO: 100970 - DNA, 25 bp, Probe Sequence
tgaaatgctcaagacttcattattt

SEQ ID NO: 100971 - DNA, 25 bp, Probe Sequence
ttgaaatgctcaagacttcattatt

SEQ ID NO: 100972 - DNA, 25 bp, Probe Sequence
agacttcattatttgccttttgaaa

SEQ ID NO: 100973 - DNA, 25 bp, Probe Sequence
aagacttcattatttgccttttgaa

SEQ ID NO: 100974 - DNA, 25 bp, Probe Sequence
ttcattatttgccttttgaaatcac

SEQ ID NO: 100975 - DNA, 25 bp, Probe Sequence
cttcattatttgccttttgaaatca

SEQ ID NO: 100976 - DNA, 25 bp, Probe Sequence
acttcattatttgccttttgaaatc

SEQ ID NO: 100977 - DNA, 25 bp, Probe Sequence
gacttcattatttgccttttgaaat

SEQ ID NO: 100978 - DNA, 25 bp, Probe Sequence
cacatagatgcgatcattaagatgc

SEQ ID NO: 100979 - DNA, 25 bp, Probe Sequence
atagatgcgatcattaagatgcgaa

SEQ ID NO: 100980 - DNA, 25 bp, Probe Sequence
tagatgcgatcattaagatgcgaag

SEQ ID NO: 100981 - DNA, 25 bp, Probe Sequence
catagatgcgatcattaagatgcga

SEQ ID NO: 100982 - DNA, 25 bp, Probe Sequence
acatagatgcgatcattaagatgcg

SEQ ID NO: 100983 - DNA, 25 bp, Probe Sequence
tccaagatcattctacaagatgtca

SEQ ID NO: 100984 - DNA, 25 bp, Probe Sequence
agatcattctacaagatgtcagtgc

SEQ ID NO: 100985 - DNA, 25 bp, Probe Sequence
ccaagatcattctacaagatgtcag

SEQ ID NO: 100986 - DNA, 25 bp, Probe Sequence
aagatcattctacaagatgtcagtg

SEQ ID NO: 100987 - DNA, 25 bp, Probe Sequence
caagatcattctacaagatgtcagt

SEQ ID NO: 100988 - DNA, 25 bp, Probe Sequence
ttccaagatcattctacaagatgtc

SEQ ID NO: 100989 - DNA, 25 bp, Probe Sequence
ctgtaaagagtgggtcaaagtaaac

SEQ ID NO: 100990 - DNA, 25 bp, Probe Sequence
aagataatgaatgtgaaactgctcc

SEQ ID NO: 100991 - DNA, 25 bp, Probe Sequence
agataatgaatgtgaaactgctcca

SEQ ID NO: 100992 - DNA, 25 bp, Probe Sequence
caagataatgaatgtgaaactgctc

SEQ ID NO: 100993 - DNA, 25 bp, Probe Sequence
tgtaaagagtgggtcaaagtaaact

SEQ ID NO: 100994 - DNA, 25 bp, Probe Sequence
actgtaaagagtgggtcaaagtaaa

SEQ ID NO: 100995 - DNA, 25 bp, Probe Sequence
aactgtaaagagtgggtcaaagtaa

SEQ ID NO: 100996 - DNA, 25 bp, Probe Sequence
aaactgtaaagagtgggtcaaagta

SEQ ID NO: 100997 - DNA, 25 bp, Probe Sequence
taaactgtaaagagtgggtcaaagt

SEQ ID NO: 100998 - DNA, 25 bp, Probe Sequence
aagagtgggtcaaagtaaactgaat

SEQ ID NO: 100999 - DNA, 25 bp, Probe Sequence
taaagagtgggtcaaagtaaactga

SEQ ID NO: 101000 - DNA, 25 bp, Probe Sequence
gtaaagagtgggtcaaagtaaactg

SEQ ID NO: 101001 - DNA, 25 bp, Probe Sequence
gggtcaaagtaaactgaattggaaa

SEQ ID NO: 101002 - DNA, 25 bp, Probe Sequence
agaatagaagattggctcatcagtg

SEQ ID NO: 101003 - DNA, 25 bp, Probe Sequence
cagaatagaagattggctcatcagt

SEQ ID NO: 101004 - DNA, 25 bp, Probe Sequence
attaagttgaacgaatggaagatgg

SEQ ID NO: 101005 - DNA, 25 bp, Probe Sequence
ttaagttgaacgaatggaagatggt

SEQ ID NO: 101006 - DNA, 25 bp, Probe Sequence
taagttgaacgaatggaagatggtc

SEQ ID NO: 101007 - DNA, 25 bp, Probe Sequence
acgatattaagttgaacgaatggaa

SEQ ID NO: 101008 - DNA, 25 bp, Probe Sequence
aatagaagattggctcatcagtgaa

SEQ ID NO: 101009 - DNA, 25 bp, Probe Sequence
atagaagattggctcatcagtgaag

SEQ ID NO: 101010 - DNA, 25 bp, Probe Sequence
gaatagaagattggctcatcagtga

SEQ ID NO: 101011 - DNA, 25 bp, Probe Sequence
gcagaatagaagattggctcatcag

SEQ ID NO: 101012 - DNA, 25 bp, Probe Sequence
cgatattaagttgaacgaatggaag

SEQ ID NO: 101013 - DNA, 25 bp, Probe Sequence
tacgatattaagttgaacgaatgga

SEQ ID NO: 101014 - DNA, 25 bp, Probe Sequence
gaagtgctatacggttaggtctgtt

SEQ ID NO: 101015 - DNA, 25 bp, Probe Sequence
tctggacaatgtggaatattacgat

SEQ ID NO: 101016 - DNA, 25 bp, Probe Sequence
tggtctggacaatgtggaatattac

SEQ ID NO: 101017 - DNA, 25 bp, Probe Sequence
gtggtctggacaatgtggaatatta

SEQ ID NO: 101018 - DNA, 25 bp, Probe Sequence
gtctggacaatgtggaatattacga

SEQ ID NO: 101019 - DNA, 25 bp, Probe Sequence
atatgtcatctcctattcattgctt

SEQ ID NO: 101020 - DNA, 25 bp, Probe Sequence
ttggcagaatagaagattggctcat

SEQ ID NO: 101021 - DNA, 25 bp, Probe Sequence
acttcagactcatcagagactctaa

SEQ ID NO: 101022 - DNA, 25 bp, Probe Sequence
gacttcagactcatcagagactcta

SEQ ID NO: 101023 - DNA, 25 bp, Probe Sequence
ttacgatattaagttgaacgaatgg

SEQ ID NO: 101024 - DNA, 25 bp, Probe Sequence
catcacagaagtgctatacggttag

SEQ ID NO: 101025 - DNA, 25 bp, Probe Sequence
tattaagttgaacgaatggaagatg

SEQ ID NO: 101026 - DNA, 25 bp, Probe Sequence
tatgattagagggatgagacagaca

SEQ ID NO: 101027 - DNA, 25 bp, Probe Sequence
gattagagggatgagacagacattc

SEQ ID NO: 101028 - DNA, 25 bp, Probe Sequence
atgattagagggatgagacagacat

SEQ ID NO: 101029 - DNA, 25 bp, Probe Sequence
tgattagagggatgagacagacatt

SEQ ID NO: 101030 - DNA, 25 bp, Probe Sequence
atatgattagagggatgagacagac

SEQ ID NO: 101031 - DNA, 25 bp, Probe Sequence
ttcctagtaaccctaagttgctaac

SEQ ID NO: 101032 - DNA, 25 bp, Probe Sequence
cttcctagtaaccctaagttgctaa

SEQ ID NO: 101033 - DNA, 25 bp, Probe Sequence
gcatcccaggttctgttaatttagt

SEQ ID NO: 101034 - DNA, 25 bp, Probe Sequence
catcccaggttctgttaatttagta

SEQ ID NO: 101035 - DNA, 25 bp, Probe Sequence
cgcatcccaggttctgttaatttag

SEQ ID NO: 101036 - DNA, 25 bp, Probe Sequence
tcccaggttctgttaatttagtaaa

SEQ ID NO: 101037 - DNA, 25 bp, Probe Sequence
agtagcattcatgtaataaacaggt

SEQ ID NO: 101038 - DNA, 25 bp, Probe Sequence
acagtcatctagaattcattgagtt

SEQ ID NO: 101039 - DNA, 25 bp, Probe Sequence
aacagtcatctagaattcattgagt

SEQ ID NO: 101040 - DNA, 25 bp, Probe Sequence
atcccaggttctgttaatttagtaa

SEQ ID NO: 101041 - DNA, 25 bp, Probe Sequence
tactgtacttcctagtaaccctaag

SEQ ID NO: 101042 - DNA, 25 bp, Probe Sequence
gtagcattcatgtaataaacaggtt

SEQ ID NO: 101043 - DNA, 25 bp, Probe Sequence
acatatgattagagggatgagacag

SEQ ID NO: 101044 - DNA, 25 bp, Probe Sequence
ttctcataagtagcattcatgtaat

SEQ ID NO: 101045 - DNA, 25 bp, Probe Sequence
attctcataagtagcattcatgtaa

SEQ ID NO: 101046 - DNA, 25 bp, Probe Sequence
aattctcataagtagcattcatgta

SEQ ID NO: 101047 - DNA, 25 bp, Probe Sequence
catatgattagagggatgagacaga

SEQ ID NO: 101048 - DNA, 25 bp, Probe Sequence
actgtacttcctagtaaccctaagt

SEQ ID NO: 101049 - DNA, 25 bp, Probe Sequence
tcctagtaaccctaagttgctaact

SEQ ID NO: 101050 - DNA, 25 bp, Probe Sequence
tatgttaccaatgtgtatcgtctcc

SEQ ID NO: 101051 - DNA, 25 bp, Probe Sequence
cctatgttaccaatgtgtatcgtct

SEQ ID NO: 101052 - DNA, 25 bp, Probe Sequence
tcctatgttaccaatgtgtatcgtc

SEQ ID NO: 101053 - DNA, 25 bp, Probe Sequence
ctcctatgttaccaatgtgtatcgt

SEQ ID NO: 101054 - DNA, 25 bp, Probe Sequence
tctcctatgttaccaatgtgtatcg

SEQ ID NO: 101055 - DNA, 25 bp, Probe Sequence
ctatgttaccaatgtgtatcgtctc

SEQ ID NO: 101056 - DNA, 25 bp, Probe Sequence
ttaccaatgtgtatcgtctccttct

SEQ ID NO: 101057 - DNA, 25 bp, Probe Sequence
gttaccaatgtgtatcgtctccttc

SEQ ID NO: 101058 - DNA, 25 bp, Probe Sequence
atgttaccaatgtgtatcgtctcct

SEQ ID NO: 101059 - DNA, 25 bp, Probe Sequence
ctgatctcctatgttaccaatgtgt

SEQ ID NO: 101060 - DNA, 25 bp, Probe Sequence
taccaatgtgtatcgtctccttctc

SEQ ID NO: 101061 - DNA, 25 bp, Probe Sequence
tgttaccaatgtgtatcgtctcctt

SEQ ID NO: 101062 - DNA, 25 bp, Probe Sequence
cctgatctcctatgttaccaatgtg

SEQ ID NO: 101063 - DNA, 25 bp, Probe Sequence
tatcacctgttcagatgagaagatt

SEQ ID NO: 101064 - DNA, 25 bp, Probe Sequence
ttatcacctgttcagatgagaagat

SEQ ID NO: 101065 - DNA, 25 bp, Probe Sequence
tgatctcctatgttaccaatgtgta

SEQ ID NO: 101066 - DNA, 25 bp, Probe Sequence
atctcctatgttaccaatgtgtatc

SEQ ID NO: 101067 - DNA, 25 bp, Probe Sequence
acactgtggtacatataagcaactt

SEQ ID NO: 101068 - DNA, 25 bp, Probe Sequence
tacactgtggtacatataagcaact

SEQ ID NO: 101069 - DNA, 25 bp, Probe Sequence
actgataaccaggagaagccattaa

SEQ ID NO: 101070 - DNA, 25 bp, Probe Sequence
ttacactgtggtacatataagcaac

SEQ ID NO: 101071 - DNA, 25 bp, Probe Sequence
gatctcctatgttaccaatgtgtat

SEQ ID NO: 101072 - DNA, 25 bp, Probe Sequence
cactgataaccaggagaagccatta

SEQ ID NO: 101073 - DNA, 25 bp, Probe Sequence
ttgtagcactgataaccaggagaag

SEQ ID NO: 101074 - DNA, 25 bp, Probe Sequence
cacagaatatggagaactcaacaga

SEQ ID NO: 101075 - DNA, 25 bp, Probe Sequence
acacagaatatggagaactcaacag

SEQ ID NO: 101076 - DNA, 25 bp, Probe Sequence
cacacagaatatggagaactcaaca

SEQ ID NO: 101077 - DNA, 25 bp, Probe Sequence
acagaatatggagaactcaacagag

SEQ ID NO: 101078 - DNA, 25 bp, Probe Sequence
ccacacagaatatggagaactcaac

SEQ ID NO: 101079 - DNA, 25 bp, Probe Sequence
tacatttccttgcctgacagtattt

SEQ ID NO: 101080 - DNA, 25 bp, Probe Sequence
ttacatttccttgcctgacagtatt

SEQ ID NO: 101081 - DNA, 25 bp, Probe Sequence
tttacatttccttgcctgacagtat

SEQ ID NO: 101082 - DNA, 25 bp, Probe Sequence
ttcatcatgtctatagttcctgaga

SEQ ID NO: 101083 - DNA, 25 bp, Probe Sequence
tcatcatgtctatagttcctgagat

SEQ ID NO: 101084 - DNA, 25 bp, Probe Sequence
catcatgtctatagttcctgagatt

SEQ ID NO: 101085 - DNA, 25 bp, Probe Sequence
cagaatatggagaactcaacagagt

SEQ ID NO: 101086 - DNA, 25 bp, Probe Sequence
gattttacatttccttgcctgacag

SEQ ID NO: 101087 - DNA, 25 bp, Probe Sequence
ttttacatttccttgcctgacagta

SEQ ID NO: 101088 - DNA, 25 bp, Probe Sequence
acatttccttgcctgacagtatttt

SEQ ID NO: 101089 - DNA, 25 bp, Probe Sequence
attttacatttccttgcctgacagt

SEQ ID NO: 101090 - DNA, 25 bp, Probe Sequence
tttcatcatgtctatagttcctgag

SEQ ID NO: 101091 - DNA, 25 bp, Probe Sequence
ctgtggaaaagtacaatgtcatctg

SEQ ID NO: 101092 - DNA, 25 bp, Probe Sequence
actgtggaaaagtacaatgtcatct

SEQ ID NO: 101093 - DNA, 25 bp, Probe Sequence
atcatgtctatagttcctgagattt

SEQ ID NO: 101094 - DNA, 25 bp, Probe Sequence
tccacacagaatatggagaactcaa

SEQ ID NO: 101095 - DNA, 25 bp, Probe Sequence
ttccacacagaatatggagaactca

SEQ ID NO: 101096 - DNA, 25 bp, Probe Sequence
ggattttacatttccttgcctgaca

SEQ ID NO: 101097 - DNA, 25 bp, Probe Sequence
tactgtggaaaagtacaatgtcatc

SEQ ID NO: 101098 - DNA, 25 bp, Probe Sequence
tatgtagccatgtcactgtgaataa

SEQ ID NO: 101099 - DNA, 25 bp, Probe Sequence
ctatgtagccatgtcactgtgaata

SEQ ID NO: 101100 - DNA, 25 bp, Probe Sequence
cattctatgtagccatgtcactgtg

SEQ ID NO: 101101 - DNA, 25 bp, Probe Sequence
atgtagccatgtcactgtgaataac

SEQ ID NO: 101102 - DNA, 25 bp, Probe Sequence
tctatgtagccatgtcactgtgaat

SEQ ID NO: 101103 - DNA, 25 bp, Probe Sequence
attctatgtagccatgtcactgtga

SEQ ID NO: 101104 - DNA, 25 bp, Probe Sequence
ttctatgtagccatgtcactgtgaa

SEQ ID NO: 101105 - DNA, 25 bp, Probe Sequence
tagccatgtcactgtgaataacgat

SEQ ID NO: 101106 - DNA, 25 bp, Probe Sequence
gcattctatgtagccatgtcactgt

SEQ ID NO: 101107 - DNA, 25 bp, Probe Sequence
tcctgtttgatttatacttctctgt

SEQ ID NO: 101108 - DNA, 25 bp, Probe Sequence
agccatgtcactgtgaataacgatt

SEQ ID NO: 101109 - DNA, 25 bp, Probe Sequence
gtagccatgtcactgtgaataacga

SEQ ID NO: 101110 - DNA, 25 bp, Probe Sequence
acgatttcttgcatatttagccatt

SEQ ID NO: 101111 - DNA, 25 bp, Probe Sequence
aacgatttcttgcatatttagccat

SEQ ID NO: 101112 - DNA, 25 bp, Probe Sequence
tgtagccatgtcactgtgaataacg

SEQ ID NO: 101113 - DNA, 25 bp, Probe Sequence
taacgatttcttgcatatttagcca

SEQ ID NO: 101114 - DNA, 25 bp, Probe Sequence
cactgtgaataacgatttcttgcat

SEQ ID NO: 101115 - DNA, 25 bp, Probe Sequence
tgcattctatgtagccatgtcactg

SEQ ID NO: 101116 - DNA, 25 bp, Probe Sequence
cctgtttgatttatacttctctgtt

SEQ ID NO: 101117 - DNA, 25 bp, Probe Sequence
cgatttcttgcatatttagccattt

SEQ ID NO: 101118 - DNA, 25 bp, Probe Sequence
actgtgaataacgatttcttgcata

SEQ ID NO: 101119 - DNA, 25 bp, Probe Sequence
ttcctgtttgatttatacttctctg

SEQ ID NO: 101120 - DNA, 25 bp, Probe Sequence
agccattttgattcctgtttgattt

SEQ ID NO: 101121 - DNA, 25 bp, Probe Sequence
tttagccattttgattcctgtttga

SEQ ID NO: 101122 - DNA, 25 bp, Probe Sequence
cacacttggtccacttacttataat

SEQ ID NO: 101123 - DNA, 25 bp, Probe Sequence
ccacacttggtccacttacttataa

SEQ ID NO: 101124 - DNA, 25 bp, Probe Sequence
acacttggtccacttacttataata

SEQ ID NO: 101125 - DNA, 25 bp, Probe Sequence
aaagtgctggaatttacaggtagga

SEQ ID NO: 101126 - DNA, 25 bp, Probe Sequence
caaagtgctggaatttacaggtagg

SEQ ID NO: 101127 - DNA, 25 bp, Probe Sequence
cacttggtccacttacttataataa

SEQ ID NO: 101128 - DNA, 25 bp, Probe Sequence
ccaaagtgctggaatttacaggtag

SEQ ID NO: 101129 - DNA, 25 bp, Probe Sequence
aagtgctggaatttacaggtaggac

SEQ ID NO: 101130 - DNA, 25 bp, Probe Sequence
ataataaacattgatttggtcgttc

SEQ ID NO: 101131 - DNA, 25 bp, Probe Sequence
cccaaagtgctggaatttacaggta

SEQ ID NO: 101132 - DNA, 25 bp, Probe Sequence
gaatttacaggtaggaccaccacac

SEQ ID NO: 101133 - DNA, 25 bp, Probe Sequence
atttacaggtaggaccaccacactt

SEQ ID NO: 101134 - DNA, 25 bp, Probe Sequence
aatttacaggtaggaccaccacact

SEQ ID NO: 101135 - DNA, 25 bp, Probe Sequence
ctggaatttacaggtaggaccacca

SEQ ID NO: 101136 - DNA, 25 bp, Probe Sequence
accacacttggtccacttacttata

SEQ ID NO: 101137 - DNA, 25 bp, Probe Sequence
ttggtccacttacttataataaaca

SEQ ID NO: 101138 - DNA, 25 bp, Probe Sequence
ggaatttacaggtaggaccaccaca

SEQ ID NO: 101139 - DNA, 25 bp, Probe Sequence
tggaatttacaggtaggaccaccac

SEQ ID NO: 101140 - DNA, 25 bp, Probe Sequence
tataataaacattgatttggtcgtt

SEQ ID NO: 101141 - DNA, 25 bp, Probe Sequence
tggtccacttacttataataaacat

SEQ ID NO: 101142 - DNA, 25 bp, Probe Sequence
agtgctggaatttacaggtaggacc

SEQ ID NO: 101143 - DNA, 25 bp, Probe Sequence
acttggtccacttacttataataaa

SEQ ID NO: 101144 - DNA, 25 bp, Probe Sequence
tttacaggtaggaccaccacacttg

SEQ ID NO: 101145 - DNA, 25 bp, Probe Sequence
cttggtccacttacttataataaac

SEQ ID NO: 101146 - DNA, 25 bp, Probe Sequence
aatcaagttccatcctcagacaaga

SEQ ID NO: 101147 - DNA, 25 bp, Probe Sequence
atcaagttccatcctcagacaagag

SEQ ID NO: 101148 - DNA, 25 bp, Probe Sequence
gaaaccgttcctccattatttgaat

SEQ ID NO: 101149 - DNA, 25 bp, Probe Sequence
aaatcaagttccatcctcagacaag

SEQ ID NO: 101150 - DNA, 25 bp, Probe Sequence
gaagaaaccgttcctccattatttg

SEQ ID NO: 101151 - DNA, 25 bp, Probe Sequence
agaaaccgttcctccattatttgaa

SEQ ID NO: 101152 - DNA, 25 bp, Probe Sequence
aagaaaccgttcctccattatttga

SEQ ID NO: 101153 - DNA, 25 bp, Probe Sequence
accgttcctccattatttgaattac

SEQ ID NO: 101154 - DNA, 25 bp, Probe Sequence
aaaccgttcctccattatttgaatt

SEQ ID NO: 101155 - DNA, 25 bp, Probe Sequence
ccgttcctccattatttgaattact

SEQ ID NO: 101156 - DNA, 25 bp, Probe Sequence
ctcagacaagaggtaaagaaggaaa

SEQ ID NO: 101157 - DNA, 25 bp, Probe Sequence
aaccgttcctccattatttgaatta

SEQ ID NO: 101158 - DNA, 25 bp, Probe Sequence
cgaagaaaccgttcctccattattt

SEQ ID NO: 101159 - DNA, 25 bp, Probe Sequence
cgttcctccattatttgaattactg

SEQ ID NO: 101160 - DNA, 25 bp, Probe Sequence
aataaattcagggtctgtcatctcc

SEQ ID NO: 101161 - DNA, 25 bp, Probe Sequence
attcagggtctgtcatctcctataa

SEQ ID NO: 101162 - DNA, 25 bp, Probe Sequence
aattcagggtctgtcatctcctata

SEQ ID NO: 101163 - DNA, 25 bp, Probe Sequence
taaattcagggtctgtcatctccta

SEQ ID NO: 101164 - DNA, 25 bp, Probe Sequence
ttcagggtctgtcatctcctataag

SEQ ID NO: 101165 - DNA, 25 bp, Probe Sequence
aaattcagggtctgtcatctcctat

SEQ ID NO: 101166 - DNA, 25 bp, Probe Sequence
ataaattcagggtctgtcatctcct

SEQ ID NO: 101167 - DNA, 25 bp, Probe Sequence
tcagggtctgtcatctcctataaga

SEQ ID NO: 101168 - DNA, 25 bp, Probe Sequence
taataaattcagggtctgtcatctc

SEQ ID NO: 101169 - DNA, 25 bp, Probe Sequence
tctttaataaattcagggtctgtca

SEQ ID NO: 101170 - DNA, 25 bp, Probe Sequence
taacagcatagtgaatggtaagact

SEQ ID NO: 101171 - DNA, 25 bp, Probe Sequence
ataacagcatagtgaatggtaagac

SEQ ID NO: 101172 - DNA, 25 bp, Probe Sequence
tacctggcactagcaacattagaat

SEQ ID NO: 101173 - DNA, 25 bp, Probe Sequence
attacctggcactagcaacattaga

SEQ ID NO: 101174 - DNA, 25 bp, Probe Sequence
cattacctggcactagcaacattag

SEQ ID NO: 101175 - DNA, 25 bp, Probe Sequence
ttacctggcactagcaacattagaa

SEQ ID NO: 101176 - DNA, 25 bp, Probe Sequence
ttgtgtgtctcctcttaattgaagg

SEQ ID NO: 101177 - DNA, 25 bp, Probe Sequence
acagcatagtgaatggtaagactag

SEQ ID NO: 101178 - DNA, 25 bp, Probe Sequence
aacagcatagtgaatggtaagacta

SEQ ID NO: 101179 - DNA, 25 bp, Probe Sequence
acctggcactagcaacattagaatt

SEQ ID NO: 101180 - DNA, 25 bp, Probe Sequence
actggatgctacagacttataacag

SEQ ID NO: 101181 - DNA, 25 bp, Probe Sequence
gacttataacagcatagtgaatggt

SEQ ID NO: 101182 - DNA, 25 bp, Probe Sequence
cagagatttacctaaccaacagact

SEQ ID NO: 101183 - DNA, 25 bp, Probe Sequence
acagagatttacctaaccaacagac

SEQ ID NO: 101184 - DNA, 25 bp, Probe Sequence
tgaacagagatttacctaaccaaca

SEQ ID NO: 101185 - DNA, 25 bp, Probe Sequence
cagtgaacagagatttacctaacca

SEQ ID NO: 101186 - DNA, 25 bp, Probe Sequence
ctgtgttattgaggatttgtttgga

SEQ ID NO: 101187 - DNA, 25 bp, Probe Sequence
tctgtgttattgaggatttgtttgg

SEQ ID NO: 101188 - DNA, 25 bp, Probe Sequence
ggtttctgtgttattgaggatttgt

SEQ ID NO: 101189 - DNA, 25 bp, Probe Sequence
gggtttctgtgttattgaggatttg

SEQ ID NO: 101190 - DNA, 25 bp, Probe Sequence
aacagagatttacctaaccaacaga

SEQ ID NO: 101191 - DNA, 25 bp, Probe Sequence
gtgaacagagatttacctaaccaac

SEQ ID NO: 101192 - DNA, 25 bp, Probe Sequence
agtgaacagagatttacctaaccaa

SEQ ID NO: 101193 - DNA, 25 bp, Probe Sequence
tataacagcatagtgaatggtaaga

SEQ ID NO: 101194 - DNA, 25 bp, Probe Sequence
ctctcctttctatgaccgcttctcc

SEQ ID NO: 101195 - DNA, 25 bp, Probe Sequence
ctcggttgagagtaaaaggcttttc

SEQ ID NO: 101196 - DNA, 25 bp, Probe Sequence
tcggttgagagtaaaaggcttttct

SEQ ID NO: 101197 - DNA, 25 bp, Probe Sequence
atcctcggttgagagtaaaaggctt

SEQ ID NO: 101198 - DNA, 25 bp, Probe Sequence
cctcggttgagagtaaaaggctttt

SEQ ID NO: 101199 - DNA, 25 bp, Probe Sequence
tcctcggttgagagtaaaaggcttt

SEQ ID NO: 101200 - DNA, 25 bp, Probe Sequence
ctgcatcctcggttgagagtaaaag

SEQ ID NO: 101201 - DNA, 25 bp, Probe Sequence
ttgagagtaaaaggcttttctccct

SEQ ID NO: 101202 - DNA, 25 bp, Probe Sequence
gttgagagtaaaaggcttttctccc

SEQ ID NO: 101203 - DNA, 25 bp, Probe Sequence
ggttgagagtaaaaggcttttctcc

SEQ ID NO: 101204 - DNA, 25 bp, Probe Sequence
catcctcggttgagagtaaaaggct

SEQ ID NO: 101205 - DNA, 25 bp, Probe Sequence
cggttgagagtaaaaggcttttctc

SEQ ID NO: 101206 - DNA, 25 bp, Probe Sequence
tgagagtaaaaggcttttctccctt

SEQ ID NO: 101207 - DNA, 25 bp, Probe Sequence
cctgcatcctcggttgagagtaaaa

SEQ ID NO: 101208 - DNA, 25 bp, Probe Sequence
tgcatcctcggttgagagtaaaagg

SEQ ID NO: 101209 - DNA, 25 bp, Probe Sequence
aagaagccttcactaggagtgggat

SEQ ID NO: 101210 - DNA, 25 bp, Probe Sequence
agaagccttcactaggagtgggatc

SEQ ID NO: 101211 - DNA, 25 bp, Probe Sequence
tttatgaaactgagacctggagaaa

SEQ ID NO: 101212 - DNA, 25 bp, Probe Sequence
aagactcttgatgaagaaggaaaca

SEQ ID NO: 101213 - DNA, 25 bp, Probe Sequence
agactcttgatgaagaaggaaacag

SEQ ID NO: 101214 - DNA, 25 bp, Probe Sequence
aaagactcttgatgaagaaggaaac

SEQ ID NO: 101215 - DNA, 25 bp, Probe Sequence
ttatgaaactgagacctggagaaaa

SEQ ID NO: 101216 - DNA, 25 bp, Probe Sequence
ttttatgaaactgagacctggagaa

SEQ ID NO: 101217 - DNA, 25 bp, Probe Sequence
agattttatgaaactgagacctgga

SEQ ID NO: 101218 - DNA, 25 bp, Probe Sequence
gattttatgaaactgagacctggag

SEQ ID NO: 101219 - DNA, 25 bp, Probe Sequence
aagattttatgaaactgagacctgg

SEQ ID NO: 101220 - DNA, 25 bp, Probe Sequence
ctcttgatgaagaaggaaacagcag

SEQ ID NO: 101221 - DNA, 25 bp, Probe Sequence
gactcttgatgaagaaggaaacagc

SEQ ID NO: 101222 - DNA, 25 bp, Probe Sequence
ttgatgaagaaggaaacagcagcag

SEQ ID NO: 101223 - DNA, 25 bp, Probe Sequence
cttgatgaagaaggaaacagcagca

SEQ ID NO: 101224 - DNA, 25 bp, Probe Sequence
actcttgatgaagaaggaaacagca

SEQ ID NO: 101225 - DNA, 25 bp, Probe Sequence
aaagattttatgaaactgagacctg

SEQ ID NO: 101226 - DNA, 25 bp, Probe Sequence
gaaagattttatgaaactgagacct

SEQ ID NO: 101227 - DNA, 25 bp, Probe Sequence
agaaagattttatgaaactgagacc

SEQ ID NO: 101228 - DNA, 25 bp, Probe Sequence
tcttgatgaagaaggaaacagcagc

SEQ ID NO: 101229 - DNA, 25 bp, Probe Sequence
aaaagactcttgatgaagaaggaaa

SEQ ID NO: 101230 - DNA, 25 bp, Probe Sequence
aagaaagattttatgaaactgagac

SEQ ID NO: 101231 - DNA, 25 bp, Probe Sequence
gaacacatagtcgtcattcttgctg

SEQ ID NO: 101232 - DNA, 25 bp, Probe Sequence
cgtgaacacatagtcgtcattcttg

SEQ ID NO: 101233 - DNA, 25 bp, Probe Sequence
tgaacacatagtcgtcattcttgct

SEQ ID NO: 101234 - DNA, 25 bp, Probe Sequence
gtgaacacatagtcgtcattcttgc

SEQ ID NO: 101235 - DNA, 25 bp, Probe Sequence
tccatgtaactttcatactccatcc

SEQ ID NO: 101236 - DNA, 25 bp, Probe Sequence
gactccatgtaactttcatactcca

SEQ ID NO: 101237 - DNA, 25 bp, Probe Sequence
actccatgtaactttcatactccat

SEQ ID NO: 101238 - DNA, 25 bp, Probe Sequence
ccatgtaactttcatactccatccc

SEQ ID NO: 101239 - DNA, 25 bp, Probe Sequence
ctccatgtaactttcatactccatc

SEQ ID NO: 101240 - DNA, 25 bp, Probe Sequence
tgactccatgtaactttcatactcc

SEQ ID NO: 101241 - DNA, 25 bp, Probe Sequence
ggtgactccatgtaactttcatact

SEQ ID NO: 101242 - DNA, 25 bp, Probe Sequence
gtgactccatgtaactttcatactc

SEQ ID NO: 101243 - DNA, 25 bp, Probe Sequence
gggtgactccatgtaactttcatac

SEQ ID NO: 101244 - DNA, 25 bp, Probe Sequence
aacacatagtcgtcattcttgctgc

SEQ ID NO: 101245 - DNA, 25 bp, Probe Sequence
tgggtgactccatgtaactttcata

SEQ ID NO: 101246 - DNA, 25 bp, Probe Sequence
catgtaactttcatactccatcccc

SEQ ID NO: 101247 - DNA, 25 bp, Probe Sequence
acgtgaacacatagtcgtcattctt

SEQ ID NO: 101248 - DNA, 25 bp, Probe Sequence
gtgggtgactccatgtaactttcat

SEQ ID NO: 101249 - DNA, 25 bp, Probe Sequence
ggtgggtgactccatgtaactttca

SEQ ID NO: 101250 - DNA, 25 bp, Probe Sequence
tggtgggtgactccatgtaactttc

SEQ ID NO: 101251 - DNA, 25 bp, Probe Sequence
ataaggcccagcccttaggagttag

SEQ ID NO: 101252 - DNA, 25 bp, Probe Sequence
gataaggcccagcccttaggagtta

SEQ ID NO: 101253 - DNA, 25 bp, Probe Sequence
caagccatgaccacattggagaaat

SEQ ID NO: 101254 - DNA, 25 bp, Probe Sequence
aagccatgaccacattggagaaatg

SEQ ID NO: 101255 - DNA, 25 bp, Probe Sequence
ctcaagccatgaccacattggagaa

SEQ ID NO: 101256 - DNA, 25 bp, Probe Sequence
tcaagccatgaccacattggagaaa

SEQ ID NO: 101257 - DNA, 25 bp, Probe Sequence
catgaccacattggagaaatggttt

SEQ ID NO: 101258 - DNA, 25 bp, Probe Sequence
ccatgaccacattggagaaatggtt

SEQ ID NO: 101259 - DNA, 25 bp, Probe Sequence
atgaccacattggagaaatggtttt

SEQ ID NO: 101260 - DNA, 25 bp, Probe Sequence
gcccactaaactatgctttcttata

SEQ ID NO: 101261 - DNA, 25 bp, Probe Sequence
agcccactaaactatgctttcttat

SEQ ID NO: 101262 - DNA, 25 bp, Probe Sequence
cccactaaactatgctttcttataa

SEQ ID NO: 101263 - DNA, 25 bp, Probe Sequence
actaaactatgctttcttataatgc

SEQ ID NO: 101264 - DNA, 25 bp, Probe Sequence
aagcccactaaactatgctttctta

SEQ ID NO: 101265 - DNA, 25 bp, Probe Sequence
gaagcccactaaactatgctttctt

SEQ ID NO: 101266 - DNA, 25 bp, Probe Sequence
tgaagcccactaaactatgctttct

SEQ ID NO: 101267 - DNA, 25 bp, Probe Sequence
ctaaactatgctttcttataatgca

SEQ ID NO: 101268 - DNA, 25 bp, Probe Sequence
cttataatgcatatttcttctcagt

SEQ ID NO: 101269 - DNA, 25 bp, Probe Sequence
gctttcttataatgcatatttcttc

SEQ ID NO: 101270 - DNA, 25 bp, Probe Sequence
tgctttcttataatgcatatttctt

SEQ ID NO: 101271 - DNA, 25 bp, Probe Sequence
atgctttcttataatgcatatttct

SEQ ID NO: 101272 - DNA, 25 bp, Probe Sequence
catcctcagttgtttattggaagaa

SEQ ID NO: 101273 - DNA, 25 bp, Probe Sequence
ggttgccatcctcagttgtttattg

SEQ ID NO: 101274 - DNA, 25 bp, Probe Sequence
ccatcctcagttgtttattggaaga

SEQ ID NO: 101275 - DNA, 25 bp, Probe Sequence
atcctcagttgtttattggaagaaa

SEQ ID NO: 101276 - DNA, 25 bp, Probe Sequence
gccatcctcagttgtttattggaag

SEQ ID NO: 101277 - DNA, 25 bp, Probe Sequence
aggttgccatcctcagttgtttatt

SEQ ID NO: 101278 - DNA, 25 bp, Probe Sequence
tgccatcctcagttgtttattggaa

SEQ ID NO: 101279 - DNA, 25 bp, Probe Sequence
ttgccatcctcagttgtttattgga

SEQ ID NO: 101280 - DNA, 25 bp, Probe Sequence
gttgccatcctcagttgtttattgg

SEQ ID NO: 101281 - DNA, 25 bp, Probe Sequence
caggttgccatcctcagttgtttat

SEQ ID NO: 101282 - DNA, 25 bp, Probe Sequence
tcctcagttgtttattggaagaaaa

SEQ ID NO: 101283 - DNA, 25 bp, Probe Sequence
cctcagttgtttattggaagaaaac

SEQ ID NO: 101284 - DNA, 25 bp, Probe Sequence
ccaggttgccatcctcagttgttta

SEQ ID NO: 101285 - DNA, 25 bp, Probe Sequence
tggaagaaaacagcccaaagatgag

SEQ ID NO: 101286 - DNA, 25 bp, Probe Sequence
tttattggaagaaaacagcccaaag

SEQ ID NO: 101287 - DNA, 25 bp, Probe Sequence
gtttattggaagaaaacagcccaaa

SEQ ID NO: 101288 - DNA, 25 bp, Probe Sequence
tattggaagaaaacagcccaaagat

SEQ ID NO: 101289 - DNA, 25 bp, Probe Sequence
ttattggaagaaaacagcccaaaga

SEQ ID NO: 101290 - DNA, 25 bp, Probe Sequence
attggaagaaaacagcccaaagatg

SEQ ID NO: 101291 - DNA, 25 bp, Probe Sequence
ttggaagaaaacagcccaaagatga

SEQ ID NO: 101292 - DNA, 25 bp, Probe Sequence
tgtatgagagagagaaatgctaacc

SEQ ID NO: 101293 - DNA, 25 bp, Probe Sequence
gtgtgtatgagagagagaaatgcta

SEQ ID NO: 101294 - DNA, 25 bp, Probe Sequence
ctgtgtgtgtatgagagagagaaat

SEQ ID NO: 101295 - DNA, 25 bp, Probe Sequence
atgagagagagaaatgctaaccttg

SEQ ID NO: 101296 - DNA, 25 bp, Probe Sequence
tgtgtgtgtatgagagagagaaatg

SEQ ID NO: 101297 - DNA, 25 bp, Probe Sequence
gtatgagagagagaaatgctaacct

SEQ ID NO: 101298 - DNA, 25 bp, Probe Sequence
tgtgtatgagagagagaaatgctaa

SEQ ID NO: 101299 - DNA, 25 bp, Probe Sequence
gtgtatgagagagagaaatgctaac

SEQ ID NO: 101300 - DNA, 25 bp, Probe Sequence
tatgagagagagaaatgctaacctt

SEQ ID NO: 101301 - DNA, 25 bp, Probe Sequence
tgagagagagaaatgctaaccttgt

SEQ ID NO: 101302 - DNA, 25 bp, Probe Sequence
tctgtgtgtgtatgagagagagaaa

SEQ ID NO: 101303 - DNA, 25 bp, Probe Sequence
tgtgtgtatgagagagagaaatgct

SEQ ID NO: 101304 - DNA, 25 bp, Probe Sequence
gtgtgtgtatgagagagagaaatgc

SEQ ID NO: 101305 - DNA, 25 bp, Probe Sequence
ctctgtgtgtgtatgagagagagaa

SEQ ID NO: 101306 - DNA, 25 bp, Probe Sequence
cagcaagacgaagatgaagaaatgg

SEQ ID NO: 101307 - DNA, 25 bp, Probe Sequence
gcagcaagacgaagatgaagaaatg

SEQ ID NO: 101308 - DNA, 25 bp, Probe Sequence
tgcagcaagacgaagatgaagaaat

SEQ ID NO: 101309 - DNA, 25 bp, Probe Sequence
tgtgttgcttttgtaataggaaaat

SEQ ID NO: 101310 - DNA, 25 bp, Probe Sequence
atgtgttgcttttgtaataggaaaa

SEQ ID NO: 101311 - DNA, 25 bp, Probe Sequence
gtgttgcttttgtaataggaaaata

SEQ ID NO: 101312 - DNA, 25 bp, Probe Sequence
tgttgcttttgtaataggaaaataa

SEQ ID NO: 101313 - DNA, 25 bp, Probe Sequence
agattatcctgatggagatggagtc

SEQ ID NO: 101314 - DNA, 25 bp, Probe Sequence
gagattatcctgatggagatggagt

SEQ ID NO: 101315 - DNA, 25 bp, Probe Sequence
gattatcctgatggagatggagtcc

SEQ ID NO: 101316 - DNA, 25 bp, Probe Sequence
cgagattatcctgatggagatggag

SEQ ID NO: 101317 - DNA, 25 bp, Probe Sequence
aagtaagaggtgcagagatgaggtc

SEQ ID NO: 101318 - DNA, 25 bp, Probe Sequence
caagtaagaggtgcagagatgaggt

SEQ ID NO: 101319 - DNA, 25 bp, Probe Sequence
tcaagtaagaggtgcagagatgagg

SEQ ID NO: 101320 - DNA, 25 bp, Probe Sequence
attatcctgatggagatggagtccc

SEQ ID NO: 101321 - DNA, 25 bp, Probe Sequence
ctcaagtaagaggtgcagagatgag

SEQ ID NO: 101322 - DNA, 25 bp, Probe Sequence
ttatcctgatggagatggagtccca

SEQ ID NO: 101323 - DNA, 25 bp, Probe Sequence
taagaggtgcagagatgaggtcctt

SEQ ID NO: 101324 - DNA, 25 bp, Probe Sequence
agtaagaggtgcagagatgaggtcc

SEQ ID NO: 101325 - DNA, 25 bp, Probe Sequence
gtaagaggtgcagagatgaggtcct

SEQ ID NO: 101326 - DNA, 25 bp, Probe Sequence
cagagatgaggtccttctggactaa

SEQ ID NO: 101327 - DNA, 25 bp, Probe Sequence
ctcctcaagtaagaggtgcagagat

SEQ ID NO: 101328 - DNA, 25 bp, Probe Sequence
cctcaagtaagaggtgcagagatga

SEQ ID NO: 101329 - DNA, 25 bp, Probe Sequence
tcctcaagtaagaggtgcagagatg

SEQ ID NO: 101330 - DNA, 25 bp, Probe Sequence
tatcctgatggagatggagtcccat

SEQ ID NO: 101331 - DNA, 25 bp, Probe Sequence
agagatgaggtccttctggactaaa

SEQ ID NO: 101332 - DNA, 25 bp, Probe Sequence
ctgatggagatggagtcccatgatg

SEQ ID NO: 101333 - DNA, 25 bp, Probe Sequence
agatgaggtccttctggactaaaag

SEQ ID NO: 101334 - DNA, 25 bp, Probe Sequence
gagatgaggtccttctggactaaaa

SEQ ID NO: 101335 - DNA, 25 bp, Probe Sequence
gcagagatgaggtccttctggacta

SEQ ID NO: 101336 - DNA, 25 bp, Probe Sequence
gatgaggtccttctggactaaaagc

SEQ ID NO: 101337 - DNA, 25 bp, Probe Sequence
tagaacagataaatgcgaaggaaac

SEQ ID NO: 101338 - DNA, 25 bp, Probe Sequence
ttagaacagataaatgcgaaggaaa

SEQ ID NO: 101339 - DNA, 25 bp, Probe Sequence
attagaacagataaatgcgaaggaa

SEQ ID NO: 101340 - DNA, 25 bp, Probe Sequence
aacagataaatgcgaaggaaaccat

SEQ ID NO: 101341 - DNA, 25 bp, Probe Sequence
agaacagataaatgcgaaggaaacc

SEQ ID NO: 101342 - DNA, 25 bp, Probe Sequence
agccactaagttatttgtctactct

SEQ ID NO: 101343 - DNA, 25 bp, Probe Sequence
gccactaagttatttgtctactctc

SEQ ID NO: 101344 - DNA, 25 bp, Probe Sequence
gaacagataaatgcgaaggaaacca

SEQ ID NO: 101345 - DNA, 25 bp, Probe Sequence
gataaatgcgaaggaaaccatgtat

SEQ ID NO: 101346 - DNA, 25 bp, Probe Sequence
agataaatgcgaaggaaaccatgta

SEQ ID NO: 101347 - DNA, 25 bp, Probe Sequence
gtctactctcactttaaactcacca

SEQ ID NO: 101348 - DNA, 25 bp, Probe Sequence
tgtctactctcactttaaactcacc

SEQ ID NO: 101349 - DNA, 25 bp, Probe Sequence
tctactctcactttaaactcaccaa

SEQ ID NO: 101350 - DNA, 25 bp, Probe Sequence
tagccactaagttatttgtctactc

SEQ ID NO: 101351 - DNA, 25 bp, Probe Sequence
ccactaagttatttgtctactctca

SEQ ID NO: 101352 - DNA, 25 bp, Probe Sequence
ctactctcactttaaactcaccaaa

SEQ ID NO: 101353 - DNA, 25 bp, Probe Sequence
cagataaatgcgaaggaaaccatgt

SEQ ID NO: 101354 - DNA, 25 bp, Probe Sequence
acagataaatgcgaaggaaaccatg

SEQ ID NO: 101355 - DNA, 25 bp, Probe Sequence
ttgtctactctcactttaaactcac

SEQ ID NO: 101356 - DNA, 25 bp, Probe Sequence
ccattagaacagataaatgcgaagg

SEQ ID NO: 101357 - DNA, 25 bp, Probe Sequence
gccattagaacagataaatgcgaag

SEQ ID NO: 101358 - DNA, 25 bp, Probe Sequence
cattagaacagataaatgcgaagga

SEQ ID NO: 101359 - DNA, 25 bp, Probe Sequence
tttgtctactctcactttaaactca

SEQ ID NO: 101360 - DNA, 25 bp, Probe Sequence
ttagccactaagttatttgtctact

SEQ ID NO: 101361 - DNA, 25 bp, Probe Sequence
aggagaattgcttggattgctacat

SEQ ID NO: 101362 - DNA, 25 bp, Probe Sequence
aaggagaattgcttggattgctaca

SEQ ID NO: 101363 - DNA, 25 bp, Probe Sequence
gagaattgcttggattgctacatgg

SEQ ID NO: 101364 - DNA, 25 bp, Probe Sequence
ggagaattgcttggattgctacatg

SEQ ID NO: 101365 - DNA, 25 bp, Probe Sequence
agaattgcttggattgctacatgga

SEQ ID NO: 101366 - DNA, 25 bp, Probe Sequence
aaaggagaattgcttggattgctac

SEQ ID NO: 101367 - DNA, 25 bp, Probe Sequence
aaggaaaggaatctctggaaaacta

SEQ ID NO: 101368 - DNA, 25 bp, Probe Sequence
gaaggaaaggaatctctggaaaact

SEQ ID NO: 101369 - DNA, 25 bp, Probe Sequence
aggaaaggaatctctggaaaactat

SEQ ID NO: 101370 - DNA, 25 bp, Probe Sequence
ggaaaggaatctctggaaaactatc

SEQ ID NO: 101371 - DNA, 25 bp, Probe Sequence
gaaaggaatctctggaaaactatca

SEQ ID NO: 101372 - DNA, 25 bp, Probe Sequence
ggaaggaaaggaatctctggaaaac

SEQ ID NO: 101373 - DNA, 25 bp, Probe Sequence
aaaaggagaattgcttggattgcta

SEQ ID NO: 101374 - DNA, 25 bp, Probe Sequence
gggaaggaaaggaatctctggaaaa

SEQ ID NO: 101375 - DNA, 25 bp, Probe Sequence
aaaggaatctctggaaaactatcag

SEQ ID NO: 101376 - DNA, 25 bp, Probe Sequence
caaaaggagaattgcttggattgct

SEQ ID NO: 101377 - DNA, 25 bp, Probe Sequence
ggggaaggaaaggaatctctggaaa

SEQ ID NO: 101378 - DNA, 25 bp, Probe Sequence
aaggaatctctggaaaactatcaga

SEQ ID NO: 101379 - DNA, 25 bp, Probe Sequence
ctgccacagagcaaaaggagaattg

SEQ ID NO: 101380 - DNA, 25 bp, Probe Sequence
gcaaaaggagaattgcttggattgc

SEQ ID NO: 101381 - DNA, 25 bp, Probe Sequence
tcctgccgtataatctgttcttcta

SEQ ID NO: 101382 - DNA, 25 bp, Probe Sequence
agccagttgttcttgatgaatctat

SEQ ID NO: 101383 - DNA, 25 bp, Probe Sequence
tagccagttgttcttgatgaatcta

SEQ ID NO: 101384 - DNA, 25 bp, Probe Sequence
ttagccagttgttcttgatgaatct

SEQ ID NO: 101385 - DNA, 25 bp, Probe Sequence
gttagccagttgttcttgatgaatc

SEQ ID NO: 101386 - DNA, 25 bp, Probe Sequence
gccagttgttcttgatgaatctata

SEQ ID NO: 101387 - DNA, 25 bp, Probe Sequence
cgttagccagttgttcttgatgaat

SEQ ID NO: 101388 - DNA, 25 bp, Probe Sequence
gtcctgccgtataatctgttcttct

SEQ ID NO: 101389 - DNA, 25 bp, Probe Sequence
ggtcctgccgtataatctgttcttc

SEQ ID NO: 101390 - DNA, 25 bp, Probe Sequence
ccagttgttcttgatgaatctatat

SEQ ID NO: 101391 - DNA, 25 bp, Probe Sequence
tggcaggtttgttgaaatacagttt

SEQ ID NO: 101392 - DNA, 25 bp, Probe Sequence
ctggcaggtttgttgaaatacagtt

SEQ ID NO: 101393 - DNA, 25 bp, Probe Sequence
acgttagccagttgttcttgatgaa

SEQ ID NO: 101394 - DNA, 25 bp, Probe Sequence
cagttgttcttgatgaatctatatg

SEQ ID NO: 101395 - DNA, 25 bp, Probe Sequence
agttgttcttgatgaatctatatga

SEQ ID NO: 101396 - DNA, 25 bp, Probe Sequence
cagttttgagttattttgatgtggc

SEQ ID NO: 101397 - DNA, 25 bp, Probe Sequence
agttttgagttattttgatgtggct

SEQ ID NO: 101398 - DNA, 25 bp, Probe Sequence
gttgttcttgatgaatctatatgag

SEQ ID NO: 101399 - DNA, 25 bp, Probe Sequence
gttttgagttattttgatgtggctt

SEQ ID NO: 101400 - DNA, 25 bp, Probe Sequence
cacgttagccagttgttcttgatga

SEQ ID NO: 101401 - DNA, 25 bp, Probe Sequence
tttgagttattttgatgtggctttt

SEQ ID NO: 101402 - DNA, 25 bp, Probe Sequence
ttttgagttattttgatgtggcttt

SEQ ID NO: 101403 - DNA, 25 bp, Probe Sequence
gcaggtttgttgaaatacagttttg

SEQ ID NO: 101404 - DNA, 25 bp, Probe Sequence
atgggtagctaatgttgtattgttt

SEQ ID NO: 101405 - DNA, 25 bp, Probe Sequence
tcactaccaatcctccaacttgatg

SEQ ID NO: 101406 - DNA, 25 bp, Probe Sequence
gtcactaccaatcctccaacttgat

SEQ ID NO: 101407 - DNA, 25 bp, Probe Sequence
ttgtcactaccaatcctccaacttg

SEQ ID NO: 101408 - DNA, 25 bp, Probe Sequence
ttctttctttgtcactaccaatcct

SEQ ID NO: 101409 - DNA, 25 bp, Probe Sequence
cttctttctttgtcactaccaatcc

SEQ ID NO: 101410 - DNA, 25 bp, Probe Sequence
tctttctttgtcactaccaatcctc

SEQ ID NO: 101411 - DNA, 25 bp, Probe Sequence
gcttctttctttgtcactaccaatc

SEQ ID NO: 101412 - DNA, 25 bp, Probe Sequence
ctttctttgtcactaccaatcctcc

SEQ ID NO: 101413 - DNA, 25 bp, Probe Sequence
ggcttctttctttgtcactaccaat

SEQ ID NO: 101414 - DNA, 25 bp, Probe Sequence
ttctttgtcactaccaatcctccaa

SEQ ID NO: 101415 - DNA, 25 bp, Probe Sequence
tttctttgtcactaccaatcctcca

SEQ ID NO: 101416 - DNA, 25 bp, Probe Sequence
aggtcacagacaaatagtttagaga

SEQ ID NO: 101417 - DNA, 25 bp, Probe Sequence
tgtcactaccaatcctccaacttga

SEQ ID NO: 101418 - DNA, 25 bp, Probe Sequence
tttgtcactaccaatcctccaactt

SEQ ID NO: 101419 - DNA, 25 bp, Probe Sequence
aatcctccaacttgatgcagaagaa

SEQ ID NO: 101420 - DNA, 25 bp, Probe Sequence
cttacgcctataatcccagcacttt

SEQ ID NO: 101421 - DNA, 25 bp, Probe Sequence
cactaccaatcctccaacttgatgc

SEQ ID NO: 101422 - DNA, 25 bp, Probe Sequence
ggtcacagacaaatagtttagagat

SEQ ID NO: 101423 - DNA, 25 bp, Probe Sequence
ctttgtcactaccaatcctccaact

SEQ ID NO: 101424 - DNA, 25 bp, Probe Sequence
tctttgtcactaccaatcctccaac

SEQ ID NO: 101425 - DNA, 25 bp, Probe Sequence
atgcagaagaaacacaaacagtaaa

SEQ ID NO: 101426 - DNA, 25 bp, Probe Sequence
gatgcagaagaaacacaaacagtaa

SEQ ID NO: 101427 - DNA, 25 bp, Probe Sequence
ttacgcctataatcccagcactttg

SEQ ID NO: 101428 - DNA, 25 bp, Probe Sequence
tgatgcagaagaaacacaaacagta

SEQ ID NO: 101429 - DNA, 25 bp, Probe Sequence
gtttactcatacagtacgtgtcctg

SEQ ID NO: 101430 - DNA, 25 bp, Probe Sequence
tgtttactcatacagtacgtgtcct

SEQ ID NO: 101431 - DNA, 25 bp, Probe Sequence
ttactcatacagtacgtgtcctgtt

SEQ ID NO: 101432 - DNA, 25 bp, Probe Sequence
gttagccacgctgtttactcataca

SEQ ID NO: 101433 - DNA, 25 bp, Probe Sequence
tgttagccacgctgtttactcatac

SEQ ID NO: 101434 - DNA, 25 bp, Probe Sequence
gtgttagccacgctgtttactcata

SEQ ID NO: 101435 - DNA, 25 bp, Probe Sequence
ctgtttactcatacagtacgtgtcc

SEQ ID NO: 101436 - DNA, 25 bp, Probe Sequence
tactcatacagtacgtgtcctgttt

SEQ ID NO: 101437 - DNA, 25 bp, Probe Sequence
tttactcatacagtacgtgtcctgt

SEQ ID NO: 101438 - DNA, 25 bp, Probe Sequence
ctactgccaaagaggtgacaggaag

SEQ ID NO: 101439 - DNA, 25 bp, Probe Sequence
gctgtttactcatacagtacgtgtc

SEQ ID NO: 101440 - DNA, 25 bp, Probe Sequence
ttagccacgctgtttactcatacag

SEQ ID NO: 101441 - DNA, 25 bp, Probe Sequence
ccacgctgtttactcatacagtacg

SEQ ID NO: 101442 - DNA, 25 bp, Probe Sequence
cgctgtttactcatacagtacgtgt

SEQ ID NO: 101443 - DNA, 25 bp, Probe Sequence
acgctgtttactcatacagtacgtg

SEQ ID NO: 101444 - DNA, 25 bp, Probe Sequence
cacgctgtttactcatacagtacgt

SEQ ID NO: 101445 - DNA, 25 bp, Probe Sequence
cacattgggagtctgtttgttccaa

SEQ ID NO: 101446 - DNA, 25 bp, Probe Sequence
gccacgctgtttactcatacagtac

SEQ ID NO: 101447 - DNA, 25 bp, Probe Sequence
agccacgctgtttactcatacagta

SEQ ID NO: 101448 - DNA, 25 bp, Probe Sequence
tagccacgctgtttactcatacagt

SEQ ID NO: 101449 - DNA, 25 bp, Probe Sequence
tattctgagtttgcgcgagaacttt

SEQ ID NO: 101450 - DNA, 25 bp, Probe Sequence
actcatacagtacgtgtcctgtttt

SEQ ID NO: 101451 - DNA, 25 bp, Probe Sequence
ctattctgagtttgcgcgagaactt

SEQ ID NO: 101452 - DNA, 25 bp, Probe Sequence
attctgagtttgcgcgagaactttc

SEQ ID NO: 101453 - DNA, 25 bp, Probe Sequence
ctacagagagtccaaccacacttac

SEQ ID NO: 101454 - DNA, 25 bp, Probe Sequence
ccacacttacgtcattgtagtattg

SEQ ID NO: 101455 - DNA, 25 bp, Probe Sequence
accacacttacgtcattgtagtatt

SEQ ID NO: 101456 - DNA, 25 bp, Probe Sequence
aaccacacttacgtcattgtagtat

SEQ ID NO: 101457 - DNA, 25 bp, Probe Sequence
cacacttacgtcattgtagtattgt

SEQ ID NO: 101458 - DNA, 25 bp, Probe Sequence
caaccacacttacgtcattgtagta

SEQ ID NO: 101459 - DNA, 25 bp, Probe Sequence
acacttacgtcattgtagtattgtt

SEQ ID NO: 101460 - DNA, 25 bp, Probe Sequence
aaacttcctttcctctatgtggtgg

SEQ ID NO: 101461 - DNA, 25 bp, Probe Sequence
tacagagagtccaaccacacttacg

SEQ ID NO: 101462 - DNA, 25 bp, Probe Sequence
gctacagagagtccaaccacactta

SEQ ID NO: 101463 - DNA, 25 bp, Probe Sequence
tccaaccacacttacgtcattgtag

SEQ ID NO: 101464 - DNA, 25 bp, Probe Sequence
taaaacttcctttcctctatgtggt

SEQ ID NO: 101465 - DNA, 25 bp, Probe Sequence
ccaaccacacttacgtcattgtagt

SEQ ID NO: 101466 - DNA, 25 bp, Probe Sequence
gtccaaccacacttacgtcattgta

SEQ ID NO: 101467 - DNA, 25 bp, Probe Sequence
tacgtcattgtagtattgtttgtga

SEQ ID NO: 101468 - DNA, 25 bp, Probe Sequence
aaaacttcctttcctctatgtggtg

SEQ ID NO: 101469 - DNA, 25 bp, Probe Sequence
ttacgtcattgtagtattgtttgtg

SEQ ID NO: 101470 - DNA, 25 bp, Probe Sequence
cttcctttcctctatgtggtggcta

SEQ ID NO: 101471 - DNA, 25 bp, Probe Sequence
cttacgtcattgtagtattgtttgt

SEQ ID NO: 101472 - DNA, 25 bp, Probe Sequence
ataaaacttcctttcctctatgtgg

SEQ ID NO: 101473 - DNA, 25 bp, Probe Sequence
ttcctttcctctatgtggtggctac

SEQ ID NO: 101474 - DNA, 25 bp, Probe Sequence
acttacgtcattgtagtattgtttg

SEQ ID NO: 101475 - DNA, 25 bp, Probe Sequence
cacttacgtcattgtagtattgttt

SEQ ID NO: 101476 - DNA, 25 bp, Probe Sequence
ctttcctctatgtggtggctacaga

SEQ ID NO: 101477 - DNA, 25 bp, Probe Sequence
aactcataacctgtcatcatcagta

SEQ ID NO: 101478 - DNA, 25 bp, Probe Sequence
actcataacctgtcatcatcagtac

SEQ ID NO: 101479 - DNA, 25 bp, Probe Sequence
aaagaatcacctcccagtaaagtag

SEQ ID NO: 101480 - DNA, 25 bp, Probe Sequence
gaaagaatcacctcccagtaaagta

SEQ ID NO: 101481 - DNA, 25 bp, Probe Sequence
aagaaagaatcacctcccagtaaag

SEQ ID NO: 101482 - DNA, 25 bp, Probe Sequence
caagaaagaatcacctcccagtaaa

SEQ ID NO: 101483 - DNA, 25 bp, Probe Sequence
tgaagtcaaatgaagttaccaaagt

SEQ ID NO: 101484 - DNA, 25 bp, Probe Sequence
ctcatcttctggtcccataattctc

SEQ ID NO: 101485 - DNA, 25 bp, Probe Sequence
agaaagaatcacctcccagtaaagt

SEQ ID NO: 101486 - DNA, 25 bp, Probe Sequence
tgaaactcataacctgtcatcatca

SEQ ID NO: 101487 - DNA, 25 bp, Probe Sequence
aagactgtccaagttcaaggagaag

SEQ ID NO: 101488 - DNA, 25 bp, Probe Sequence
cctcatcttctggtcccataattct

SEQ ID NO: 101489 - DNA, 25 bp, Probe Sequence
gaagtcaaatgaagttaccaaagtt

SEQ ID NO: 101490 - DNA, 25 bp, Probe Sequence
gaagactgtccaagttcaaggagaa

SEQ ID NO: 101491 - DNA, 25 bp, Probe Sequence
tcatcttctggtcccataattctcc

SEQ ID NO: 101492 - DNA, 25 bp, Probe Sequence
aagaatcacctcccagtaaagtagc

SEQ ID NO: 101493 - DNA, 25 bp, Probe Sequence
aaactcataacctgtcatcatcagt

SEQ ID NO: 101494 - DNA, 25 bp, Probe Sequence
ccaagaaagaatcacctcccagtaa

SEQ ID NO: 101495 - DNA, 25 bp, Probe Sequence
gaaactcataacctgtcatcatcag

SEQ ID NO: 101496 - DNA, 25 bp, Probe Sequence
ttgaagtcaaatgaagttaccaaag

SEQ ID NO: 101497 - DNA, 25 bp, Probe Sequence
cttgaagtcaaatgaagttaccaaa

SEQ ID NO: 101498 - DNA, 25 bp, Probe Sequence
atcttctggtcccataattctccat

SEQ ID NO: 101499 - DNA, 25 bp, Probe Sequence
tccaagaaagaatcacctcccagta

SEQ ID NO: 101500 - DNA, 25 bp, Probe Sequence
ataacctgtcatcatcagtactcac

SEQ ID NO: 101501 - DNA, 25 bp, Probe Sequence
caagaagaccatcctggacaaggac

SEQ ID NO: 101502 - DNA, 25 bp, Probe Sequence
tcaagaagaccatcctggacaagga

SEQ ID NO: 101503 - DNA, 25 bp, Probe Sequence
tttcatttggggcaaagaaacaacg

SEQ ID NO: 101504 - DNA, 25 bp, Probe Sequence
catttggggcaaagaaacaacgtag

SEQ ID NO: 101505 - DNA, 25 bp, Probe Sequence
ggggcaaagaaacaacgtagttttg

SEQ ID NO: 101506 - DNA, 25 bp, Probe Sequence
gggcaaagaaacaacgtagttttgt

SEQ ID NO: 101507 - DNA, 25 bp, Probe Sequence
tggggcaaagaaacaacgtagtttt

SEQ ID NO: 101508 - DNA, 25 bp, Probe Sequence
ttggggcaaagaaacaacgtagttt

SEQ ID NO: 101509 - DNA, 25 bp, Probe Sequence
atttggggcaaagaaacaacgtagt

SEQ ID NO: 101510 - DNA, 25 bp, Probe Sequence
tcatttggggcaaagaaacaacgta

SEQ ID NO: 101511 - DNA, 25 bp, Probe Sequence
tttggggcaaagaaacaacgtagtt

SEQ ID NO: 101512 - DNA, 25 bp, Probe Sequence
ttcatttggggcaaagaaacaacgt

SEQ ID NO: 101513 - DNA, 25 bp, Probe Sequence
gatttcttagagagacgcctacaga

SEQ ID NO: 101514 - DNA, 25 bp, Probe Sequence
atttcttagagagacgcctacagac

SEQ ID NO: 101515 - DNA, 25 bp, Probe Sequence
ggatttcttagagagacgcctacag

SEQ ID NO: 101516 - DNA, 25 bp, Probe Sequence
ggagaccacaaggaggaggattaag

SEQ ID NO: 101517 - DNA, 25 bp, Probe Sequence
gaggatttcttagagagacgcctac

SEQ ID NO: 101518 - DNA, 25 bp, Probe Sequence
agaggatttcttagagagacgccta

SEQ ID NO: 101519 - DNA, 25 bp, Probe Sequence
gagaccacaaggaggaggattaagc

SEQ ID NO: 101520 - DNA, 25 bp, Probe Sequence
aggatttcttagagagacgcctaca

SEQ ID NO: 101521 - DNA, 25 bp, Probe Sequence
tttcttagagagacgcctacagacc

SEQ ID NO: 101522 - DNA, 25 bp, Probe Sequence
gacttctctctgtgctctccctatg

SEQ ID NO: 101523 - DNA, 25 bp, Probe Sequence
cattgtctagttttcctgccaaata

SEQ ID NO: 101524 - DNA, 25 bp, Probe Sequence
ttgtctagttttcctgccaaataaa

SEQ ID NO: 101525 - DNA, 25 bp, Probe Sequence
attgtctagttttcctgccaaataa

SEQ ID NO: 101526 - DNA, 25 bp, Probe Sequence
gagctgaagctgatcgaagagtatg

SEQ ID NO: 101527 - DNA, 25 bp, Probe Sequence
agagctgaagctgatcgaagagtat

SEQ ID NO: 101528 - DNA, 25 bp, Probe Sequence
aagagctgaagctgatcgaagagta

SEQ ID NO: 101529 - DNA, 25 bp, Probe Sequence
tggagaccacaaggaggaggattaa

SEQ ID NO: 101530 - DNA, 25 bp, Probe Sequence
gtctagttttcctgccaaataaaca

SEQ ID NO: 101531 - DNA, 25 bp, Probe Sequence
tgtctagttttcctgccaaataaac

SEQ ID NO: 101532 - DNA, 25 bp, Probe Sequence
ctggagaccacaaggaggaggatta

SEQ ID NO: 101533 - DNA, 25 bp, Probe Sequence
tctagttttcctgccaaataaacag

SEQ ID NO: 101534 - DNA, 25 bp, Probe Sequence
agatcctttgagaaatctcgtctcg

SEQ ID NO: 101535 - DNA, 25 bp, Probe Sequence
acttctctctgtgctctccctatgg

SEQ ID NO: 101536 - DNA, 25 bp, Probe Sequence
cgacttctctctgtgctctccctat

SEQ ID NO: 101537 - DNA, 25 bp, Probe Sequence
tcctgaggtgcatttcctgttgtac

SEQ ID NO: 101538 - DNA, 25 bp, Probe Sequence
gtcctgaggtgcatttcctgttgta

SEQ ID NO: 101539 - DNA, 25 bp, Probe Sequence
ctgaggtgcatttcctgttgtacac

SEQ ID NO: 101540 - DNA, 25 bp, Probe Sequence
gtgcatttcctgttgtacacacaag

SEQ ID NO: 101541 - DNA, 25 bp, Probe Sequence
gaggtgcatttcctgttgtacacac

SEQ ID NO: 101542 - DNA, 25 bp, Probe Sequence
tgaggtgcatttcctgttgtacaca

SEQ ID NO: 101543 - DNA, 25 bp, Probe Sequence
aggtgcatttcctgttgtacacaca

SEQ ID NO: 101544 - DNA, 25 bp, Probe Sequence
tgcatttcctgttgtacacacaagg

SEQ ID NO: 101545 - DNA, 25 bp, Probe Sequence
cctgaggtgcatttcctgttgtaca

SEQ ID NO: 101546 - DNA, 25 bp, Probe Sequence
ggtgcatttcctgttgtacacacaa

SEQ ID NO: 101547 - DNA, 25 bp, Probe Sequence
catttcctgttgtacacacaagggc

SEQ ID NO: 101548 - DNA, 25 bp, Probe Sequence
gcatttcctgttgtacacacaaggg

SEQ ID NO: 101549 - DNA, 25 bp, Probe Sequence
tgatctgttcagtgtcactctgtac

SEQ ID NO: 101550 - DNA, 25 bp, Probe Sequence
gatctgttcagtgtcactctgtacc

SEQ ID NO: 101551 - DNA, 25 bp, Probe Sequence
gtttctcgtgctttgtgatctgttc

SEQ ID NO: 101552 - DNA, 25 bp, Probe Sequence
tttctcgtgctttgtgatctgttca

SEQ ID NO: 101553 - DNA, 25 bp, Probe Sequence
tgtttctcgtgctttgtgatctgtt

SEQ ID NO: 101554 - DNA, 25 bp, Probe Sequence
ttctcgtgctttgtgatctgttcag

SEQ ID NO: 101555 - DNA, 25 bp, Probe Sequence
gtgctttgtgatctgttcagtgtca

SEQ ID NO: 101556 - DNA, 25 bp, Probe Sequence
gtgatctgttcagtgtcactctgta

SEQ ID NO: 101557 - DNA, 25 bp, Probe Sequence
ttgtgatctgttcagtgtcactctg

SEQ ID NO: 101558 - DNA, 25 bp, Probe Sequence
atctgttcagtgtcactctgtaccc

SEQ ID NO: 101559 - DNA, 25 bp, Probe Sequence
ttcagtgtcactctgtaccctcaac

SEQ ID NO: 101560 - DNA, 25 bp, Probe Sequence
gttcagtgtcactctgtaccctcaa

SEQ ID NO: 101561 - DNA, 25 bp, Probe Sequence
ctcgtgctttgtgatctgttcagtg

SEQ ID NO: 101562 - DNA, 25 bp, Probe Sequence
tctcgtgctttgtgatctgttcagt

SEQ ID NO: 101563 - DNA, 25 bp, Probe Sequence
cgtgctttgtgatctgttcagtgtc

SEQ ID NO: 101564 - DNA, 25 bp, Probe Sequence
ctttgtgatctgttcagtgtcactc

SEQ ID NO: 101565 - DNA, 25 bp, Probe Sequence
ctgttcagtgtcactctgtaccctc

SEQ ID NO: 101566 - DNA, 25 bp, Probe Sequence
tttgtgatctgttcagtgtcactct

SEQ ID NO: 101567 - DNA, 25 bp, Probe Sequence
tgtgatctgttcagtgtcactctgt

SEQ ID NO: 101568 - DNA, 25 bp, Probe Sequence
tcgtgctttgtgatctgttcagtgt

SEQ ID NO: 101569 - DNA, 25 bp, Probe Sequence
tctgttcagtgtcactctgtaccct

SEQ ID NO: 101570 - DNA, 25 bp, Probe Sequence
tcagtgtcactctgtaccctcaaca

SEQ ID NO: 101571 - DNA, 25 bp, Probe Sequence
tgttcagtgtcactctgtaccctca

SEQ ID NO: 101572 - DNA, 25 bp, Probe Sequence
gctttgtgatctgttcagtgtcact

SEQ ID NO: 101573 - DNA, 25 bp, Probe Sequence
tgctttgtgatctgttcagtgtcac

SEQ ID NO: 101574 - DNA, 25 bp, Probe Sequence
caaggatgaagatgggagagaggtg

SEQ ID NO: 101575 - DNA, 25 bp, Probe Sequence
gagtacagctctctggaacatgagg

SEQ ID NO: 101576 - DNA, 25 bp, Probe Sequence
ctttcttcttacccagagtgcaagg

SEQ ID NO: 101577 - DNA, 25 bp, Probe Sequence
gtacagctctctggaacatgaggtg

SEQ ID NO: 101578 - DNA, 25 bp, Probe Sequence
tacagctctctggaacatgaggtga

SEQ ID NO: 101579 - DNA, 25 bp, Probe Sequence
agtacagctctctggaacatgaggt

SEQ ID NO: 101580 - DNA, 25 bp, Probe Sequence
gctttcttcttacccagagtgcaag

SEQ ID NO: 101581 - DNA, 25 bp, Probe Sequence
ctgctgctttcttcttacccagagt

SEQ ID NO: 101582 - DNA, 25 bp, Probe Sequence
aaggatgaagatgggagagaggtgg

SEQ ID NO: 101583 - DNA, 25 bp, Probe Sequence
tgctgctttcttcttacccagagtg

SEQ ID NO: 101584 - DNA, 25 bp, Probe Sequence
cacctagctgctgctttcttcttac

SEQ ID NO: 101585 - DNA, 25 bp, Probe Sequence
tcacctagctgctgctttcttctta

SEQ ID NO: 101586 - DNA, 25 bp, Probe Sequence
tagctgctgctttcttcttacccag

SEQ ID NO: 101587 - DNA, 25 bp, Probe Sequence
ctagctgctgctttcttcttaccca

SEQ ID NO: 101588 - DNA, 25 bp, Probe Sequence
acctagctgctgctttcttcttacc

SEQ ID NO: 101589 - DNA, 25 bp, Probe Sequence
tgctttcttcttacccagagtgcaa

SEQ ID NO: 101590 - DNA, 25 bp, Probe Sequence
tttcttcttacccagagtgcaaggg

SEQ ID NO: 101591 - DNA, 25 bp, Probe Sequence
gtcacctagctgctgctttcttctt

SEQ ID NO: 101592 - DNA, 25 bp, Probe Sequence
ctgctttcttcttacccagagtgca

SEQ ID NO: 101593 - DNA, 25 bp, Probe Sequence
ttaatggagacagtgagaaggcaac

SEQ ID NO: 101594 - DNA, 25 bp, Probe Sequence
taatgggtttaatggagacagtgag

SEQ ID NO: 101595 - DNA, 25 bp, Probe Sequence
ttaatgggtttaatggagacagtga

SEQ ID NO: 101596 - DNA, 25 bp, Probe Sequence
gttaatgggtttaatggagacagtg

SEQ ID NO: 101597 - DNA, 25 bp, Probe Sequence
atgggtttaatggagacagtgagaa

SEQ ID NO: 101598 - DNA, 25 bp, Probe Sequence
aatgggtttaatggagacagtgaga

SEQ ID NO: 101599 - DNA, 25 bp, Probe Sequence
tgttaatgggtttaatggagacagt

SEQ ID NO: 101600 - DNA, 25 bp, Probe Sequence
atgttaatgggtttaatggagacag

SEQ ID NO: 101601 - DNA, 25 bp, Probe Sequence
tttaatggagacagtgagaaggcaa

SEQ ID NO: 101602 - DNA, 25 bp, Probe Sequence
gcatgttaatgggtttaatggagac

SEQ ID NO: 101603 - DNA, 25 bp, Probe Sequence
tgggtttaatggagacagtgagaag

SEQ ID NO: 101604 - DNA, 25 bp, Probe Sequence
catgttaatgggtttaatggagaca

SEQ ID NO: 101605 - DNA, 25 bp, Probe Sequence
gtttaatggagacagtgagaaggca

SEQ ID NO: 101606 - DNA, 25 bp, Probe Sequence
gggtttaatggagacagtgagaagg

SEQ ID NO: 101607 - DNA, 25 bp, Probe Sequence
taatggagacagtgagaaggcaacc

SEQ ID NO: 101608 - DNA, 25 bp, Probe Sequence
ggtttaatggagacagtgagaaggc

SEQ ID NO: 101609 - DNA, 25 bp, Probe Sequence
gagacagtgagaaggcaaccaaagt

SEQ ID NO: 101610 - DNA, 25 bp, Probe Sequence
aaaatgtcacccttggacaaggtcc

SEQ ID NO: 101611 - DNA, 25 bp, Probe Sequence
accactgtcaagtaatccttaaaag

SEQ ID NO: 101612 - DNA, 25 bp, Probe Sequence
ccactgtcaagtaatccttaaaaga

SEQ ID NO: 101613 - DNA, 25 bp, Probe Sequence
agaatatcttggaaaaggaaacaga

SEQ ID NO: 101614 - DNA, 25 bp, Probe Sequence
cactgtcaagtaatccttaaaagaa

SEQ ID NO: 101615 - DNA, 25 bp, Probe Sequence
actgtcaagtaatccttaaaagaat

SEQ ID NO: 101616 - DNA, 25 bp, Probe Sequence
gaatatcttggaaaaggaaacagat

SEQ ID NO: 101617 - DNA, 25 bp, Probe Sequence
aagaatatcttggaaaaggaaacag

SEQ ID NO: 101618 - DNA, 25 bp, Probe Sequence
aaagaatatcttggaaaaggaaaca

SEQ ID NO: 101619 - DNA, 25 bp, Probe Sequence
aaaagaatatcttggaaaaggaaac

SEQ ID NO: 101620 - DNA, 25 bp, Probe Sequence
cttaaaagaatatcttggaaaagga

SEQ ID NO: 101621 - DNA, 25 bp, Probe Sequence
tccttaaaagaatatcttggaaaag

SEQ ID NO: 101622 - DNA, 25 bp, Probe Sequence
ccttaaaagaatatcttggaaaagg

SEQ ID NO: 101623 - DNA, 25 bp, Probe Sequence
tgcgtagaaattgagttgtattgtc

SEQ ID NO: 101624 - DNA, 25 bp, Probe Sequence
gtgcgtagaaattgagttgtattgt

SEQ ID NO: 101625 - DNA, 25 bp, Probe Sequence
tgtgcgtagaaattgagttgtattg

SEQ ID NO: 101626 - DNA, 25 bp, Probe Sequence
ctttgtgcgtagaaattgagttgta

SEQ ID NO: 101627 - DNA, 25 bp, Probe Sequence
ttgtgcgtagaaattgagttgtatt

SEQ ID NO: 101628 - DNA, 25 bp, Probe Sequence
tttgtgcgtagaaattgagttgtat

SEQ ID NO: 101629 - DNA, 25 bp, Probe Sequence
gcgtagaaattgagttgtattgtca

SEQ ID NO: 101630 - DNA, 25 bp, Probe Sequence
tactttgtgcgtagaaattgagttg

SEQ ID NO: 101631 - DNA, 25 bp, Probe Sequence
ctgtactttgtgcgtagaaattgag

SEQ ID NO: 101632 - DNA, 25 bp, Probe Sequence
gtactttgtgcgtagaaattgagtt

SEQ ID NO: 101633 - DNA, 25 bp, Probe Sequence
actttgtgcgtagaaattgagttgt

SEQ ID NO: 101634 - DNA, 25 bp, Probe Sequence
tgtactttgtgcgtagaaattgagt

SEQ ID NO: 101635 - DNA, 25 bp, Probe Sequence
gctgtactttgtgcgtagaaattga

SEQ ID NO: 101636 - DNA, 25 bp, Probe Sequence
tgctgtactttgtgcgtagaaattg

SEQ ID NO: 101637 - DNA, 25 bp, Probe Sequence
gtgctgtactttgtgcgtagaaatt

SEQ ID NO: 101638 - DNA, 25 bp, Probe Sequence
tctcacctatactttggggatgata

SEQ ID NO: 101639 - DNA, 25 bp, Probe Sequence
cacctatactttggggatgataatc

SEQ ID NO: 101640 - DNA, 25 bp, Probe Sequence
atctcacctatactttggggatgat

SEQ ID NO: 101641 - DNA, 25 bp, Probe Sequence
ctcacctatactttggggatgataa

SEQ ID NO: 101642 - DNA, 25 bp, Probe Sequence
atgatctcacctatactttggggat

SEQ ID NO: 101643 - DNA, 25 bp, Probe Sequence
tcacctatactttggggatgataat

SEQ ID NO: 101644 - DNA, 25 bp, Probe Sequence
tgatctcacctatactttggggatg

SEQ ID NO: 101645 - DNA, 25 bp, Probe Sequence
ctcatgatctcacctatactttggg

SEQ ID NO: 101646 - DNA, 25 bp, Probe Sequence
tctcatgatctcacctatactttgg

SEQ ID NO: 101647 - DNA, 25 bp, Probe Sequence
gtttctgctttgtttcatacctggc

SEQ ID NO: 101648 - DNA, 25 bp, Probe Sequence
aaaggtttctgctttgtttcatacc

SEQ ID NO: 101649 - DNA, 25 bp, Probe Sequence
gaaaggtttctgctttgtttcatac

SEQ ID NO: 101650 - DNA, 25 bp, Probe Sequence
ggtttctgctttgtttcatacctgg

SEQ ID NO: 101651 - DNA, 25 bp, Probe Sequence
gagaaaggtttctgctttgtttcat

SEQ ID NO: 101652 - DNA, 25 bp, Probe Sequence
agaaaggtttctgctttgtttcata

SEQ ID NO: 101653 - DNA, 25 bp, Probe Sequence
tacgagaaaggtttctgctttgttt

SEQ ID NO: 101654 - DNA, 25 bp, Probe Sequence
ctacgagaaaggtttctgctttgtt

SEQ ID NO: 101655 - DNA, 25 bp, Probe Sequence
cgagaaaggtttctgctttgtttca

SEQ ID NO: 101656 - DNA, 25 bp, Probe Sequence
acgagaaaggtttctgctttgtttc

SEQ ID NO: 101657 - DNA, 25 bp, Probe Sequence
tattctcctccccacctaagtctct

SEQ ID NO: 101658 - DNA, 25 bp, Probe Sequence
gtattctcctccccacctaagtctc

SEQ ID NO: 101659 - DNA, 25 bp, Probe Sequence
agggctggcattctgattgttcttt

SEQ ID NO: 101660 - DNA, 25 bp, Probe Sequence
aaagggctggcattctgattgttct

SEQ ID NO: 101661 - DNA, 25 bp, Probe Sequence
caaagggctggcattctgattgttc

SEQ ID NO: 101662 - DNA, 25 bp, Probe Sequence
aagggctggcattctgattgttctt

SEQ ID NO: 101663 - DNA, 25 bp, Probe Sequence
atcagtttgacagttttctcaaggg

SEQ ID NO: 101664 - DNA, 25 bp, Probe Sequence
aaggtttctgctttgtttcatacct

SEQ ID NO: 101665 - DNA, 25 bp, Probe Sequence
tttctgctttgtttcatacctggcc

SEQ ID NO: 101666 - DNA, 25 bp, Probe Sequence
aggtttctgctttgtttcatacctg

SEQ ID NO: 101667 - DNA, 25 bp, Probe Sequence
gggctggcattctgattgttctttt

SEQ ID NO: 101668 - DNA, 25 bp, Probe Sequence
ctcaagggcctatgtgcatgaattc

SEQ ID NO: 101669 - DNA, 25 bp, Probe Sequence
ctttgtttcatacctggcccacttg

SEQ ID NO: 101670 - DNA, 25 bp, Probe Sequence
attctcctccccacctaagtctctg

SEQ ID NO: 101671 - DNA, 25 bp, Probe Sequence
gtggaagctgagatatagttgatga

SEQ ID NO: 101672 - DNA, 25 bp, Probe Sequence
tggaagctgagatatagttgatgaa

SEQ ID NO: 101673 - DNA, 25 bp, Probe Sequence
ggtggaagctgagatatagttgatg

SEQ ID NO: 101674 - DNA, 25 bp, Probe Sequence
gttgatgaaatagcttccctaaaga

SEQ ID NO: 101675 - DNA, 25 bp, Probe Sequence
agttgatgaaatagcttccctaaag

SEQ ID NO: 101676 - DNA, 25 bp, Probe Sequence
ggaagctgagatatagttgatgaaa

SEQ ID NO: 101677 - DNA, 25 bp, Probe Sequence
gggtggaagctgagatatagttgat

SEQ ID NO: 101678 - DNA, 25 bp, Probe Sequence
tgatgaaatagcttccctaaagaaa

SEQ ID NO: 101679 - DNA, 25 bp, Probe Sequence
ttgatgaaatagcttccctaaagaa

SEQ ID NO: 101680 - DNA, 25 bp, Probe Sequence
ttgggtggaagctgagatatagttg

SEQ ID NO: 101681 - DNA, 25 bp, Probe Sequence
gttgggtggaagctgagatatagtt

SEQ ID NO: 101682 - DNA, 25 bp, Probe Sequence
tagttgatgaaatagcttccctaaa

SEQ ID NO: 101683 - DNA, 25 bp, Probe Sequence
atagttgatgaaatagcttccctaa

SEQ ID NO: 101684 - DNA, 25 bp, Probe Sequence
tgggtggaagctgagatatagttga

SEQ ID NO: 101685 - DNA, 25 bp, Probe Sequence
atatagttgatgaaatagcttccct

SEQ ID NO: 101686 - DNA, 25 bp, Probe Sequence
gatatagttgatgaaatagcttccc

SEQ ID NO: 101687 - DNA, 25 bp, Probe Sequence
gaagctgagatatagttgatgaaat

SEQ ID NO: 101688 - DNA, 25 bp, Probe Sequence
gctgagatatagttgatgaaatagc

SEQ ID NO: 101689 - DNA, 25 bp, Probe Sequence
aggttgggtggaagctgagatatag

SEQ ID NO: 101690 - DNA, 25 bp, Probe Sequence
tatagttgatgaaatagcttcccta

SEQ ID NO: 101691 - DNA, 25 bp, Probe Sequence
aaatagcttccctaaagaaaacacc

SEQ ID NO: 101692 - DNA, 25 bp, Probe Sequence
ggttgggtggaagctgagatatagt

SEQ ID NO: 101693 - DNA, 25 bp, Probe Sequence
aatagcttccctaaagaaaacaccg

SEQ ID NO: 101694 - DNA, 25 bp, Probe Sequence
tgaaatagcttccctaaagaaaaca

SEQ ID NO: 101695 - DNA, 25 bp, Probe Sequence
atttgatgacctagatggaacacat

SEQ ID NO: 101696 - DNA, 25 bp, Probe Sequence
ttgatgacctagatggaacacatgc

SEQ ID NO: 101697 - DNA, 25 bp, Probe Sequence
tttgatgacctagatggaacacatg

SEQ ID NO: 101698 - DNA, 25 bp, Probe Sequence
cctagatggaacacatgctctgatg

SEQ ID NO: 101699 - DNA, 25 bp, Probe Sequence
gatgacctagatggaacacatgctc

SEQ ID NO: 101700 - DNA, 25 bp, Probe Sequence
acctagatggaacacatgctctgat

SEQ ID NO: 101701 - DNA, 25 bp, Probe Sequence
atgacctagatggaacacatgctct

SEQ ID NO: 101702 - DNA, 25 bp, Probe Sequence
tgatgacctagatggaacacatgct

SEQ ID NO: 101703 - DNA, 25 bp, Probe Sequence
ctagatggaacacatgctctgatgc

SEQ ID NO: 101704 - DNA, 25 bp, Probe Sequence
gacctagatggaacacatgctctga

SEQ ID NO: 101705 - DNA, 25 bp, Probe Sequence
tgacctagatggaacacatgctctg

SEQ ID NO: 101706 - DNA, 25 bp, Probe Sequence
tagatggaacacatgctctgatgcg

SEQ ID NO: 101707 - DNA, 25 bp, Probe Sequence
ttgtgtctatgaagtgctggataat

SEQ ID NO: 101708 - DNA, 25 bp, Probe Sequence
actgtgtatggcattattaagaagc

SEQ ID NO: 101709 - DNA, 25 bp, Probe Sequence
tgtgtctatgaagtgctggataatt

SEQ ID NO: 101710 - DNA, 25 bp, Probe Sequence
ggatactatacaagcagaactgagg

SEQ ID NO: 101711 - DNA, 25 bp, Probe Sequence
gatactatacaagcagaactgaggc

SEQ ID NO: 101712 - DNA, 25 bp, Probe Sequence
atactatacaagcagaactgaggca

SEQ ID NO: 101713 - DNA, 25 bp, Probe Sequence
tatacaagcagaactgaggcactta

SEQ ID NO: 101714 - DNA, 25 bp, Probe Sequence
agaactgaggcacttaggacataac

SEQ ID NO: 101715 - DNA, 25 bp, Probe Sequence
tgtcaataataagtcaactgatgct

SEQ ID NO: 101716 - DNA, 25 bp, Probe Sequence
ctgaggcacttaggacataacactt

SEQ ID NO: 101717 - DNA, 25 bp, Probe Sequence
gaactgaggcacttaggacataaca

SEQ ID NO: 101718 - DNA, 25 bp, Probe Sequence
cagaactgaggcacttaggacataa

SEQ ID NO: 101719 - DNA, 25 bp, Probe Sequence
tcaataataagtcaactgatgctca

SEQ ID NO: 101720 - DNA, 25 bp, Probe Sequence
ttaagtgctatatggtggtgctgtt

SEQ ID NO: 101721 - DNA, 25 bp, Probe Sequence
tactatacaagcagaactgaggcac

SEQ ID NO: 101722 - DNA, 25 bp, Probe Sequence
ataataagtcaactgatgctcatcg

SEQ ID NO: 101723 - DNA, 25 bp, Probe Sequence
gtcaataataagtcaactgatgctc

SEQ ID NO: 101724 - DNA, 25 bp, Probe Sequence
aactgaggcacttaggacataacac

SEQ ID NO: 101725 - DNA, 25 bp, Probe Sequence
ctgtgtatggcattattaagaagct

SEQ ID NO: 101726 - DNA, 25 bp, Probe Sequence
gtgtctatgaagtgctggataatta

SEQ ID NO: 101727 - DNA, 25 bp, Probe Sequence
ttgtcaataataagtcaactgatgc

SEQ ID NO: 101728 - DNA, 25 bp, Probe Sequence
tgtctatgaagtgctggataattag

SEQ ID NO: 101729 - DNA, 25 bp, Probe Sequence
atacaagcagaactgaggcacttag

SEQ ID NO: 101730 - DNA, 25 bp, Probe Sequence
ctatacaagcagaactgaggcactt

SEQ ID NO: 101731 - DNA, 25 bp, Probe Sequence
ccctactttctgccaatgttgaatc

SEQ ID NO: 101732 - DNA, 25 bp, Probe Sequence
cctactttctgccaatgttgaatcg

SEQ ID NO: 101733 - DNA, 25 bp, Probe Sequence
gtaaattgcataatgggagtgttga

SEQ ID NO: 101734 - DNA, 25 bp, Probe Sequence
taaattgcataatgggagtgttgag

SEQ ID NO: 101735 - DNA, 25 bp, Probe Sequence
attgcataatgggagtgttgagtaa

SEQ ID NO: 101736 - DNA, 25 bp, Probe Sequence
aattgcataatgggagtgttgagta

SEQ ID NO: 101737 - DNA, 25 bp, Probe Sequence
ctgagttcacagagttcgcagtatg

SEQ ID NO: 101738 - DNA, 25 bp, Probe Sequence
ggtaaattgcataatgggagtgttg

SEQ ID NO: 101739 - DNA, 25 bp, Probe Sequence
gttgagtaacaagtgtggctttcag

SEQ ID NO: 101740 - DNA, 25 bp, Probe Sequence
aaattgcataatgggagtgttgagt

SEQ ID NO: 101741 - DNA, 25 bp, Probe Sequence
ctactttctgccaatgttgaatcgc

SEQ ID NO: 101742 - DNA, 25 bp, Probe Sequence
gggtaaattgcataatgggagtgtt

SEQ ID NO: 101743 - DNA, 25 bp, Probe Sequence
ttgcataatgggagtgttgagtaac

SEQ ID NO: 101744 - DNA, 25 bp, Probe Sequence
tgagttcacagagttcgcagtatgt

SEQ ID NO: 101745 - DNA, 25 bp, Probe Sequence
gccctactttctgccaatgttgaat

SEQ ID NO: 101746 - DNA, 25 bp, Probe Sequence
ataatgggagtgttgagtaacaagt

SEQ ID NO: 101747 - DNA, 25 bp, Probe Sequence
cataatgggagtgttgagtaacaag

SEQ ID NO: 101748 - DNA, 25 bp, Probe Sequence
taatgggagtgttgagtaacaagtg

SEQ ID NO: 101749 - DNA, 25 bp, Probe Sequence
gcataatgggagtgttgagtaacaa

SEQ ID NO: 101750 - DNA, 25 bp, Probe Sequence
tactttctgccaatgttgaatcgcc

SEQ ID NO: 101751 - DNA, 25 bp, Probe Sequence
gagtgttgagtaacaagtgtggctt

SEQ ID NO: 101752 - DNA, 25 bp, Probe Sequence
gctgagttcacagagttcgcagtat

SEQ ID NO: 101753 - DNA, 25 bp, Probe Sequence
aatgggagtgttgagtaacaagtgt

SEQ ID NO: 101754 - DNA, 25 bp, Probe Sequence
gtgttgagtaacaagtgtggctttc

SEQ ID NO: 101755 - DNA, 25 bp, Probe Sequence
ggttgtaaacagtacacatgtcatt

SEQ ID NO: 101756 - DNA, 25 bp, Probe Sequence
cggttgtaaacagtacacatgtcat

SEQ ID NO: 101757 - DNA, 25 bp, Probe Sequence
gttgtaaacagtacacatgtcattt

SEQ ID NO: 101758 - DNA, 25 bp, Probe Sequence
gtaaacagtacacatgtcattttgt

SEQ ID NO: 101759 - DNA, 25 bp, Probe Sequence
ccggttgtaaacagtacacatgtca

SEQ ID NO: 101760 - DNA, 25 bp, Probe Sequence
tgtaaacagtacacatgtcattttg

SEQ ID NO: 101761 - DNA, 25 bp, Probe Sequence
ttgtaaacagtacacatgtcatttt

SEQ ID NO: 101762 - DNA, 25 bp, Probe Sequence
taaacagtacacatgtcattttgtg

SEQ ID NO: 101763 - DNA, 25 bp, Probe Sequence
gaacaccatacctttgctactacta

SEQ ID NO: 101764 - DNA, 25 bp, Probe Sequence
aacaccatacctttgctactactat

SEQ ID NO: 101765 - DNA, 25 bp, Probe Sequence
atgaacaccatacctttgctactac

SEQ ID NO: 101766 - DNA, 25 bp, Probe Sequence
tgaacaccatacctttgctactact

SEQ ID NO: 101767 - DNA, 25 bp, Probe Sequence
catgaacaccatacctttgctacta

SEQ ID NO: 101768 - DNA, 25 bp, Probe Sequence
accatacctttgctactactatgtg

SEQ ID NO: 101769 - DNA, 25 bp, Probe Sequence
caccatacctttgctactactatgt

SEQ ID NO: 101770 - DNA, 25 bp, Probe Sequence
acaccatacctttgctactactatg

SEQ ID NO: 101771 - DNA, 25 bp, Probe Sequence
ccatacctttgctactactatgtgc

SEQ ID NO: 101772 - DNA, 25 bp, Probe Sequence
ttccatgaacaccatacctttgcta

SEQ ID NO: 101773 - DNA, 25 bp, Probe Sequence
ccatgaacaccatacctttgctact

SEQ ID NO: 101774 - DNA, 25 bp, Probe Sequence
tccatgaacaccatacctttgctac

SEQ ID NO: 101775 - DNA, 25 bp, Probe Sequence
tgttcatcccatgttagctccaaag

SEQ ID NO: 101776 - DNA, 25 bp, Probe Sequence
ctgttcatcccatgttagctccaaa

SEQ ID NO: 101777 - DNA, 25 bp, Probe Sequence
ctactactatgtgcaggaacccttg

SEQ ID NO: 101778 - DNA, 25 bp, Probe Sequence
atacctttgctactactatgtgcag

SEQ ID NO: 101779 - DNA, 25 bp, Probe Sequence
catacctttgctactactatgtgca

SEQ ID NO: 101780 - DNA, 25 bp, Probe Sequence
gcccttttatactaggactccttag

SEQ ID NO: 101781 - DNA, 25 bp, Probe Sequence
ctttgctactactatgtgcaggaac

SEQ ID NO: 101782 - DNA, 25 bp, Probe Sequence
cccttttatactaggactccttagg

SEQ ID NO: 101783 - DNA, 25 bp, Probe Sequence
tacctttgctactactatgtgcagg

SEQ ID NO: 101784 - DNA, 25 bp, Probe Sequence
cctagccattctggatcttgtgacc

SEQ ID NO: 101785 - DNA, 25 bp, Probe Sequence
cctttgctactactatgtgcaggaa

SEQ ID NO: 101786 - DNA, 25 bp, Probe Sequence
ccttttatactaggactccttagga

SEQ ID NO: 101787 - DNA, 25 bp, Probe Sequence
tatctgagccactgtacttcgttat

SEQ ID NO: 101788 - DNA, 25 bp, Probe Sequence
ttatctgagccactgtacttcgtta

SEQ ID NO: 101789 - DNA, 25 bp, Probe Sequence
atctgagccactgtacttcgttatc

SEQ ID NO: 101790 - DNA, 25 bp, Probe Sequence
gggatggctataatggatttggtaa

SEQ ID NO: 101791 - DNA, 25 bp, Probe Sequence
taatggatttggtaatgatggaagc

SEQ ID NO: 101792 - DNA, 25 bp, Probe Sequence
aatggatttggtaatgatggaagca

SEQ ID NO: 101793 - DNA, 25 bp, Probe Sequence
ggatggctataatggatttggtaat

SEQ ID NO: 101794 - DNA, 25 bp, Probe Sequence
ggatttggtaatgatggaagcaatt

SEQ ID NO: 101795 - DNA, 25 bp, Probe Sequence
cactgtacttcgttatcactgccat

SEQ ID NO: 101796 - DNA, 25 bp, Probe Sequence
tggatttggtaatgatggaagcaat

SEQ ID NO: 101797 - DNA, 25 bp, Probe Sequence
atggatttggtaatgatggaagcaa

SEQ ID NO: 101798 - DNA, 25 bp, Probe Sequence
actgtacttcgttatcactgccatg

SEQ ID NO: 101799 - DNA, 25 bp, Probe Sequence
tggctataatggatttggtaatgat

SEQ ID NO: 101800 - DNA, 25 bp, Probe Sequence
atggctataatggatttggtaatga

SEQ ID NO: 101801 - DNA, 25 bp, Probe Sequence
gatttggtaatgatggaagcaattt

SEQ ID NO: 101802 - DNA, 25 bp, Probe Sequence
gctataatggatttggtaatgatgg

SEQ ID NO: 101803 - DNA, 25 bp, Probe Sequence
ggctataatggatttggtaatgatg

SEQ ID NO: 101804 - DNA, 25 bp, Probe Sequence
gatggctataatggatttggtaatg

SEQ ID NO: 101805 - DNA, 25 bp, Probe Sequence
gaagacctttatctgagccactgta

SEQ ID NO: 101806 - DNA, 25 bp, Probe Sequence
gtccttgtgaagacctttatctgag

SEQ ID NO: 101807 - DNA, 25 bp, Probe Sequence
gagccactgtacttcgttatcactg

SEQ ID NO: 101808 - DNA, 25 bp, Probe Sequence
taattagggaggagtctgctactag

SEQ ID NO: 101809 - DNA, 25 bp, Probe Sequence
ttaattagggaggagtctgctacta

SEQ ID NO: 101810 - DNA, 25 bp, Probe Sequence
tttaattagggaggagtctgctact

SEQ ID NO: 101811 - DNA, 25 bp, Probe Sequence
agttatcttctttcttttgtcgcag

SEQ ID NO: 101812 - DNA, 25 bp, Probe Sequence
cagttatcttctttcttttgtcgca

SEQ ID NO: 101813 - DNA, 25 bp, Probe Sequence
gttatcttctttcttttgtcgcagc

SEQ ID NO: 101814 - DNA, 25 bp, Probe Sequence
gcagttatcttctttcttttgtcgc

SEQ ID NO: 101815 - DNA, 25 bp, Probe Sequence
ttatcttctttcttttgtcgcagcc

SEQ ID NO: 101816 - DNA, 25 bp, Probe Sequence
tgcagttatcttctttcttttgtcg

SEQ ID NO: 101817 - DNA, 25 bp, Probe Sequence
tatcttctttcttttgtcgcagcca

SEQ ID NO: 101818 - DNA, 25 bp, Probe Sequence
atgcagttatcttctttcttttgtc

SEQ ID NO: 101819 - DNA, 25 bp, Probe Sequence
aatgcagttatcttctttcttttgt

SEQ ID NO: 101820 - DNA, 25 bp, Probe Sequence
tttcttttgtcgcagccagtctttt

SEQ ID NO: 101821 - DNA, 25 bp, Probe Sequence
atcttctttcttttgtcgcagccag

SEQ ID NO: 101822 - DNA, 25 bp, Probe Sequence
ctttcttttgtcgcagccagtcttt

SEQ ID NO: 101823 - DNA, 25 bp, Probe Sequence
cttctttcttttgtcgcagccagtc

SEQ ID NO: 101824 - DNA, 25 bp, Probe Sequence
taatgcagttatcttctttcttttg

SEQ ID NO: 101825 - DNA, 25 bp, Probe Sequence
ataatgcagttatcttctttctttt

SEQ ID NO: 101826 - DNA, 25 bp, Probe Sequence
aagaaagaaagaaatggcagttacc

SEQ ID NO: 101827 - DNA, 25 bp, Probe Sequence
agaaagaaagaaagaaatggcagtt

SEQ ID NO: 101828 - DNA, 25 bp, Probe Sequence
aagaaagaaagaaagaaatggcagt

SEQ ID NO: 101829 - DNA, 25 bp, Probe Sequence
ttaccatctgtttcttctgtgtgag

SEQ ID NO: 101830 - DNA, 25 bp, Probe Sequence
gttaccatctgtttcttctgtgtga

SEQ ID NO: 101831 - DNA, 25 bp, Probe Sequence
agttaccatctgtttcttctgtgtg

SEQ ID NO: 101832 - DNA, 25 bp, Probe Sequence
aaagaaagaaagaaagaaatggcag

SEQ ID NO: 101833 - DNA, 25 bp, Probe Sequence
gaaagaaagaaagaaagaaatggca

SEQ ID NO: 101834 - DNA, 25 bp, Probe Sequence
aaagaaagaaagaaatggcagttac

SEQ ID NO: 101835 - DNA, 25 bp, Probe Sequence
agaaagaaagaaagaaagaaatggc

SEQ ID NO: 101836 - DNA, 25 bp, Probe Sequence
taccatctgtttcttctgtgtgaga

SEQ ID NO: 101837 - DNA, 25 bp, Probe Sequence
gaaagaaagaaagaaatggcagtta

SEQ ID NO: 101838 - DNA, 25 bp, Probe Sequence
ccttcctaataaatgttaccactct

SEQ ID NO: 101839 - DNA, 25 bp, Probe Sequence
tccttcctaataaatgttaccactc

SEQ ID NO: 101840 - DNA, 25 bp, Probe Sequence
ctccttcctaataaatgttaccact

SEQ ID NO: 101841 - DNA, 25 bp, Probe Sequence
tctccttcctaataaatgttaccac

SEQ ID NO: 101842 - DNA, 25 bp, Probe Sequence
catctgtttcttctgtgtgagacat

SEQ ID NO: 101843 - DNA, 25 bp, Probe Sequence
ctctccttcctaataaatgttacca

SEQ ID NO: 101844 - DNA, 25 bp, Probe Sequence
cagttaccatctgtttcttctgtgt

SEQ ID NO: 101845 - DNA, 25 bp, Probe Sequence
tctaactgaagtctctccttcctaa

SEQ ID NO: 101846 - DNA, 25 bp, Probe Sequence
tctctccttcctaataaatgttacc

SEQ ID NO: 101847 - DNA, 25 bp, Probe Sequence
gtctaactgaagtctctccttccta

SEQ ID NO: 101848 - DNA, 25 bp, Probe Sequence
ctaactgaagtctctccttcctaat

SEQ ID NO: 101849 - DNA, 25 bp, Probe Sequence
atctgtttcttctgtgtgagacatg

SEQ ID NO: 101850 - DNA, 25 bp, Probe Sequence
gatttctctttccacccatctattg

SEQ ID NO: 101851 - DNA, 25 bp, Probe Sequence
atttctctttccacccatctattgc

SEQ ID NO: 101852 - DNA, 25 bp, Probe Sequence
gtttggctcaacagatttctctttc

SEQ ID NO: 101853 - DNA, 25 bp, Probe Sequence
caacagatttctctttccacccatc

SEQ ID NO: 101854 - DNA, 25 bp, Probe Sequence
tttggctcaacagatttctctttcc

SEQ ID NO: 101855 - DNA, 25 bp, Probe Sequence
atctattgcaggtgtagtggtcttg

SEQ ID NO: 101856 - DNA, 25 bp, Probe Sequence
catctattgcaggtgtagtggtctt

SEQ ID NO: 101857 - DNA, 25 bp, Probe Sequence
ggtttggctcaacagatttctcttt

SEQ ID NO: 101858 - DNA, 25 bp, Probe Sequence
tcaacagatttctctttccacccat

SEQ ID NO: 101859 - DNA, 25 bp, Probe Sequence
ctcaacagatttctctttccaccca

SEQ ID NO: 101860 - DNA, 25 bp, Probe Sequence
cagatttctctttccacccatctat

SEQ ID NO: 101861 - DNA, 25 bp, Probe Sequence
agatttctctttccacccatctatt

SEQ ID NO: 101862 - DNA, 25 bp, Probe Sequence
acagatttctctttccacccatcta

SEQ ID NO: 101863 - DNA, 25 bp, Probe Sequence
gctccctgtgaaggattaacttaca

SEQ ID NO: 101864 - DNA, 25 bp, Probe Sequence
tttctctttccacccatctattgca

SEQ ID NO: 101865 - DNA, 25 bp, Probe Sequence
aacagatttctctttccacccatct

SEQ ID NO: 101866 - DNA, 25 bp, Probe Sequence
ttggctcaacagatttctctttcca

SEQ ID NO: 101867 - DNA, 25 bp, Probe Sequence
ggctccctgtgaaggattaacttac

SEQ ID NO: 101868 - DNA, 25 bp, Probe Sequence
ttctctttccacccatctattgcag

SEQ ID NO: 101869 - DNA, 25 bp, Probe Sequence
cctgtgaaggattaacttacagaga

SEQ ID NO: 101870 - DNA, 25 bp, Probe Sequence
gctcaacagatttctctttccaccc

SEQ ID NO: 101871 - DNA, 25 bp, Probe Sequence
ggctcaacagatttctctttccacc

SEQ ID NO: 101872 - DNA, 25 bp, Probe Sequence
tggctccctgtgaaggattaactta

SEQ ID NO: 101873 - DNA, 25 bp, Probe Sequence
ctgtgaaggattaacttacagagaa

SEQ ID NO: 101874 - DNA, 25 bp, Probe Sequence
catagtaactaatggtctgccgatt

SEQ ID NO: 101875 - DNA, 25 bp, Probe Sequence
actctctgttcatccattctctttc

SEQ ID NO: 101876 - DNA, 25 bp, Probe Sequence
tagattgtttccttaccgtgtttga

SEQ ID NO: 101877 - DNA, 25 bp, Probe Sequence
atagattgtttccttaccgtgtttg

SEQ ID NO: 101878 - DNA, 25 bp, Probe Sequence
atattgttctctttagttcccagcc

SEQ ID NO: 101879 - DNA, 25 bp, Probe Sequence
ctctctgttcatccattctctttcc

SEQ ID NO: 101880 - DNA, 25 bp, Probe Sequence
aatagattgtttccttaccgtgttt

SEQ ID NO: 101881 - DNA, 25 bp, Probe Sequence
aactctctgttcatccattctcttt

SEQ ID NO: 101882 - DNA, 25 bp, Probe Sequence
atagtaactaatggtctgccgattt

SEQ ID NO: 101883 - DNA, 25 bp, Probe Sequence
tattgttctctttagttcccagcct

SEQ ID NO: 101884 - DNA, 25 bp, Probe Sequence
agattgtttccttaccgtgtttgaa

SEQ ID NO: 101885 - DNA, 25 bp, Probe Sequence
gttaaatctctcagtcacaacaaga

SEQ ID NO: 101886 - DNA, 25 bp, Probe Sequence
tatattgttctctttagttcccagc

SEQ ID NO: 101887 - DNA, 25 bp, Probe Sequence
taatagattgtttccttaccgtgtt

SEQ ID NO: 101888 - DNA, 25 bp, Probe Sequence
taaatctctcagtcacaacaagaaa

SEQ ID NO: 101889 - DNA, 25 bp, Probe Sequence
ttaaatctctcagtcacaacaagaa

SEQ ID NO: 101890 - DNA, 25 bp, Probe Sequence
ctctgttcatccattctctttccct

SEQ ID NO: 101891 - DNA, 25 bp, Probe Sequence
tctctgttcatccattctctttccc

SEQ ID NO: 101892 - DNA, 25 bp, Probe Sequence
ttctctttagttcccagcctgattt

SEQ ID NO: 101893 - DNA, 25 bp, Probe Sequence
gatccctagaagtttatgagagaga

SEQ ID NO: 101894 - DNA, 25 bp, Probe Sequence
gctatgttaaatctctcagtcacaa

SEQ ID NO: 101895 - DNA, 25 bp, Probe Sequence
tccctagaagtttatgagagagatt

SEQ ID NO: 101896 - DNA, 25 bp, Probe Sequence
tctgttcatccattctctttccctg

SEQ ID NO: 101897 - DNA, 25 bp, Probe Sequence
aaagacatactgtgggaaagaaagc

SEQ ID NO: 101898 - DNA, 25 bp, Probe Sequence
caagttatctcctctgctaagacaa

SEQ ID NO: 101899 - DNA, 25 bp, Probe Sequence
ctcaagttatctcctctgctaagac

SEQ ID NO: 101900 - DNA, 25 bp, Probe Sequence
tcaagttatctcctctgctaagaca

SEQ ID NO: 101901 - DNA, 25 bp, Probe Sequence
cctcaagttatctcctctgctaaga

SEQ ID NO: 101902 - DNA, 25 bp, Probe Sequence
aagttatctcctctgctaagacaaa

SEQ ID NO: 101903 - DNA, 25 bp, Probe Sequence
cagatgcagactctcagtaatatcc

SEQ ID NO: 101904 - DNA, 25 bp, Probe Sequence
ccagatgcagactctcagtaatatc

SEQ ID NO: 101905 - DNA, 25 bp, Probe Sequence
tccagatgcagactctcagtaatat

SEQ ID NO: 101906 - DNA, 25 bp, Probe Sequence
ttccagatgcagactctcagtaata

SEQ ID NO: 101907 - DNA, 25 bp, Probe Sequence
taatatcccttgtttctgcctccat

SEQ ID NO: 101908 - DNA, 25 bp, Probe Sequence
cagactctcagtaatatcccttgtt

SEQ ID NO: 101909 - DNA, 25 bp, Probe Sequence
actctcagtaatatcccttgtttct

SEQ ID NO: 101910 - DNA, 25 bp, Probe Sequence
agactctcagtaatatcccttgttt

SEQ ID NO: 101911 - DNA, 25 bp, Probe Sequence
ccctcaagttatctcctctgctaag

SEQ ID NO: 101912 - DNA, 25 bp, Probe Sequence
gactctcagtaatatcccttgtttc

SEQ ID NO: 101913 - DNA, 25 bp, Probe Sequence
agtaatatcccttgtttctgcctcc

SEQ ID NO: 101914 - DNA, 25 bp, Probe Sequence
tctcagtaatatcccttgtttctgc

SEQ ID NO: 101915 - DNA, 25 bp, Probe Sequence
tccctcaagttatctcctctgctaa

SEQ ID NO: 101916 - DNA, 25 bp, Probe Sequence
gcagactctcagtaatatcccttgt

SEQ ID NO: 101917 - DNA, 25 bp, Probe Sequence
cttccagatgcagactctcagtaat

SEQ ID NO: 101918 - DNA, 25 bp, Probe Sequence
gtaatatcccttgtttctgcctcca

SEQ ID NO: 101919 - DNA, 25 bp, Probe Sequence
cagtaatatcccttgtttctgcctc

SEQ ID NO: 101920 - DNA, 25 bp, Probe Sequence
ctcagtaatatcccttgtttctgcc

SEQ ID NO: 101921 - DNA, 25 bp, Probe Sequence
ctctcagtaatatcccttgtttctg

SEQ ID NO: 101922 - DNA, 25 bp, Probe Sequence
ctgaccagtgtagagattccattac

SEQ ID NO: 101923 - DNA, 25 bp, Probe Sequence
gaccagtgtagagattccattacct

SEQ ID NO: 101924 - DNA, 25 bp, Probe Sequence
tgaccagtgtagagattccattacc

SEQ ID NO: 101925 - DNA, 25 bp, Probe Sequence
cctgaccagtgtagagattccatta

SEQ ID NO: 101926 - DNA, 25 bp, Probe Sequence
cagtgtagagattccattacctcat

SEQ ID NO: 101927 - DNA, 25 bp, Probe Sequence
ccagtgtagagattccattacctca

SEQ ID NO: 101928 - DNA, 25 bp, Probe Sequence
accagtgtagagattccattacctc

SEQ ID NO: 101929 - DNA, 25 bp, Probe Sequence
agtgtagagattccattacctcata

SEQ ID NO: 101930 - DNA, 25 bp, Probe Sequence
aacggtcagtcaaggatcataagtt

SEQ ID NO: 101931 - DNA, 25 bp, Probe Sequence
catcaccactagcagcatatcagaa

SEQ ID NO: 101932 - DNA, 25 bp, Probe Sequence
gaacggtcagtcaaggatcataagt

SEQ ID NO: 101933 - DNA, 25 bp, Probe Sequence
aatagaagagactaaaccctgtgtg

SEQ ID NO: 101934 - DNA, 25 bp, Probe Sequence
atacagaaatcactccagaagcaaa

SEQ ID NO: 101935 - DNA, 25 bp, Probe Sequence
tacagaaatcactccagaagcaaag

SEQ ID NO: 101936 - DNA, 25 bp, Probe Sequence
catacagaaatcactccagaagcaa

SEQ ID NO: 101937 - DNA, 25 bp, Probe Sequence
ggaagaaatgtcagcaggaagtaaa

SEQ ID NO: 101938 - DNA, 25 bp, Probe Sequence
ttgagaaattcgtggaagaaatgtc

SEQ ID NO: 101939 - DNA, 25 bp, Probe Sequence
gagaaattcgtggaagaaatgtcag

SEQ ID NO: 101940 - DNA, 25 bp, Probe Sequence
attgagaaattcgtggaagaaatgt

SEQ ID NO: 101941 - DNA, 25 bp, Probe Sequence
aaatcactccagaagcaaagacaaa

SEQ ID NO: 101942 - DNA, 25 bp, Probe Sequence
cagtattgagaaattcgtggaagaa

SEQ ID NO: 101943 - DNA, 25 bp, Probe Sequence
gtgtagagattccattacctcatat

SEQ ID NO: 101944 - DNA, 25 bp, Probe Sequence
taatagaagagactaaaccctgtgt

SEQ ID NO: 101945 - DNA, 25 bp, Probe Sequence
cactagcagcatatcagaaatctct

SEQ ID NO: 101946 - DNA, 25 bp, Probe Sequence
tattagcaagtacgtggcaatgttc

SEQ ID NO: 101947 - DNA, 25 bp, Probe Sequence
gtattagcaagtacgtggcaatgtt

SEQ ID NO: 101948 - DNA, 25 bp, Probe Sequence
tggcaatgttcattccaatcagatg

SEQ ID NO: 101949 - DNA, 25 bp, Probe Sequence
gtggcaatgttcattccaatcagat

SEQ ID NO: 101950 - DNA, 25 bp, Probe Sequence
tagcaagtacgtggcaatgttcatt

SEQ ID NO: 101951 - DNA, 25 bp, Probe Sequence
attagcaagtacgtggcaatgttca

SEQ ID NO: 101952 - DNA, 25 bp, Probe Sequence
gtacgtggcaatgttcattccaatc

SEQ ID NO: 101953 - DNA, 25 bp, Probe Sequence
cgtggcaatgttcattccaatcaga

SEQ ID NO: 101954 - DNA, 25 bp, Probe Sequence
tacgtggcaatgttcattccaatca

SEQ ID NO: 101955 - DNA, 25 bp, Probe Sequence
agtacgtggcaatgttcattccaat

SEQ ID NO: 101956 - DNA, 25 bp, Probe Sequence
aagtacgtggcaatgttcattccaa

SEQ ID NO: 101957 - DNA, 25 bp, Probe Sequence
agcaagtacgtggcaatgttcattc

SEQ ID NO: 101958 - DNA, 25 bp, Probe Sequence
caagtacgtggcaatgttcattcca

SEQ ID NO: 101959 - DNA, 25 bp, Probe Sequence
acgtggcaatgttcattccaatcag

SEQ ID NO: 101960 - DNA, 25 bp, Probe Sequence
cgtattagcaagtacgtggcaatgt

SEQ ID NO: 101961 - DNA, 25 bp, Probe Sequence
tgaaacccgtattagcaagtacgtg

SEQ ID NO: 101962 - DNA, 25 bp, Probe Sequence
gtgaaacccgtattagcaagtacgt

SEQ ID NO: 101963 - DNA, 25 bp, Probe Sequence
ccgtattagcaagtacgtggcaatg

SEQ ID NO: 101964 - DNA, 25 bp, Probe Sequence
gaaacccgtattagcaagtacgtgg

SEQ ID NO: 101965 - DNA, 25 bp, Probe Sequence
tgccattcgctattgagaactagaa

SEQ ID NO: 101966 - DNA, 25 bp, Probe Sequence
ctgccattcgctattgagaactaga

SEQ ID NO: 101967 - DNA, 25 bp, Probe Sequence
tctgccattcgctattgagaactag

SEQ ID NO: 101968 - DNA, 25 bp, Probe Sequence
gtctgccattcgctattgagaacta

SEQ ID NO: 101969 - DNA, 25 bp, Probe Sequence
ttgagaactagaaatgaggaaggac

SEQ ID NO: 101970 - DNA, 25 bp, Probe Sequence
cgctattgagaactagaaatgagga

SEQ ID NO: 101971 - DNA, 25 bp, Probe Sequence
tcgctattgagaactagaaatgagg

SEQ ID NO: 101972 - DNA, 25 bp, Probe Sequence
gagaactagaaatgaggaaggacag

SEQ ID NO: 101973 - DNA, 25 bp, Probe Sequence
ctagaaatgaggaaggacagttacg

SEQ ID NO: 101974 - DNA, 25 bp, Probe Sequence
tgagaactagaaatgaggaaggaca

SEQ ID NO: 101975 - DNA, 25 bp, Probe Sequence
attgagaactagaaatgaggaagga

SEQ ID NO: 101976 - DNA, 25 bp, Probe Sequence
gtgacagagagaggacagttaggag

SEQ ID NO: 101977 - DNA, 25 bp, Probe Sequence
ccattcgctattgagaactagaaat

SEQ ID NO: 101978 - DNA, 25 bp, Probe Sequence
actagaaatgaggaaggacagttac

SEQ ID NO: 101979 - DNA, 25 bp, Probe Sequence
aaatgaggaaggacagttacgctaa

SEQ ID NO: 101980 - DNA, 25 bp, Probe Sequence
gccattcgctattgagaactagaaa

SEQ ID NO: 101981 - DNA, 25 bp, Probe Sequence
agaactagaaatgaggaaggacagt

SEQ ID NO: 101982 - DNA, 25 bp, Probe Sequence
ttcgctattgagaactagaaatgag

SEQ ID NO: 101983 - DNA, 25 bp, Probe Sequence
gctattgagaactagaaatgaggaa

SEQ ID NO: 101984 - DNA, 25 bp, Probe Sequence
aatgaggaaggacagttacgctaac

SEQ ID NO: 101985 - DNA, 25 bp, Probe Sequence
agccacctttcatgtcttcatattt

SEQ ID NO: 101986 - DNA, 25 bp, Probe Sequence
gaaatgaggaaggacagttacgcta

SEQ ID NO: 101987 - DNA, 25 bp, Probe Sequence
tagaaatgaggaaggacagttacgc

SEQ ID NO: 101988 - DNA, 25 bp, Probe Sequence
cagccacctttcatgtcttcatatt

SEQ ID NO: 101989 - DNA, 25 bp, Probe Sequence
ggagtgtatcagtgcttgtcttatt

SEQ ID NO: 101990 - DNA, 25 bp, Probe Sequence
taggagtgtatcagtgcttgtctta

SEQ ID NO: 101991 - DNA, 25 bp, Probe Sequence
ttgtgaaggtattaagaatcggtct

SEQ ID NO: 101992 - DNA, 25 bp, Probe Sequence
aggagtgtatcagtgcttgtcttat

SEQ ID NO: 101993 - DNA, 25 bp, Probe Sequence
tgaaggtattaagaatcggtctgtg

SEQ ID NO: 101994 - DNA, 25 bp, Probe Sequence
gtgaaggtattaagaatcggtctgt

SEQ ID NO: 101995 - DNA, 25 bp, Probe Sequence
tgtgaaggtattaagaatcggtctg

SEQ ID NO: 101996 - DNA, 25 bp, Probe Sequence
attgtgaaggtattaagaatcggtc

SEQ ID NO: 101997 - DNA, 25 bp, Probe Sequence
ttaggagtgtatcagtgcttgtctt

SEQ ID NO: 101998 - DNA, 25 bp, Probe Sequence
gaaggtattaagaatcggtctgtgg

SEQ ID NO: 101999 - DNA, 25 bp, Probe Sequence
gagtgtatcagtgcttgtcttatta

SEQ ID NO: 102000 - DNA, 25 bp, Probe Sequence
gttaggagtgtatcagtgcttgtct

SEQ ID NO: 102001 - DNA, 25 bp, Probe Sequence
agtgtatcagtgcttgtcttattat

SEQ ID NO: 102002 - DNA, 25 bp, Probe Sequence
tgttaggagtgtatcagtgcttgtc

SEQ ID NO: 102003 - DNA, 25 bp, Probe Sequence
gcctggattgtgaaggtattaagaa

SEQ ID NO: 102004 - DNA, 25 bp, Probe Sequence
aagcctggattgtgaaggtattaag

SEQ ID NO: 102005 - DNA, 25 bp, Probe Sequence
caagcctggattgtgaaggtattaa

SEQ ID NO: 102006 - DNA, 25 bp, Probe Sequence
agcctggattgtgaaggtattaaga

SEQ ID NO: 102007 - DNA, 25 bp, Probe Sequence
ggattgtgaaggtattaagaatcgg

SEQ ID NO: 102008 - DNA, 25 bp, Probe Sequence
cctggattgtgaaggtattaagaat

SEQ ID NO: 102009 - DNA, 25 bp, Probe Sequence
gattgtgaaggtattaagaatcggt

SEQ ID NO: 102010 - DNA, 25 bp, Probe Sequence
tggattgtgaaggtattaagaatcg

SEQ ID NO: 102011 - DNA, 25 bp, Probe Sequence
atttcatcagagattacagccagat

SEQ ID NO: 102012 - DNA, 25 bp, Probe Sequence
ctaatcttggcaaatgacctttacc

SEQ ID NO: 102013 - DNA, 25 bp, Probe Sequence
gctgtgtttgcttattcaagagatc

SEQ ID NO: 102014 - DNA, 25 bp, Probe Sequence
ttagctgtgtttgcttattcaagag

SEQ ID NO: 102015 - DNA, 25 bp, Probe Sequence
cttagctgtgtttgcttattcaaga

SEQ ID NO: 102016 - DNA, 25 bp, Probe Sequence
gtaccttagctgtgtttgcttattc

SEQ ID NO: 102017 - DNA, 25 bp, Probe Sequence
taccttagctgtgtttgcttattca

SEQ ID NO: 102018 - DNA, 25 bp, Probe Sequence
tagctgtgtttgcttattcaagaga

SEQ ID NO: 102019 - DNA, 25 bp, Probe Sequence
ccttagctgtgtttgcttattcaag

SEQ ID NO: 102020 - DNA, 25 bp, Probe Sequence
tgtaccttagctgtgtttgcttatt

SEQ ID NO: 102021 - DNA, 25 bp, Probe Sequence
tcaagagatcttcattaagtaccca

SEQ ID NO: 102022 - DNA, 25 bp, Probe Sequence
ctgtgtttgcttattcaagagatct

SEQ ID NO: 102023 - DNA, 25 bp, Probe Sequence
agctgtgtttgcttattcaagagat

SEQ ID NO: 102024 - DNA, 25 bp, Probe Sequence
accttagctgtgtttgcttattcaa

SEQ ID NO: 102025 - DNA, 25 bp, Probe Sequence
ctgtaccttagctgtgtttgcttat

SEQ ID NO: 102026 - DNA, 25 bp, Probe Sequence
tgtgtttgcttattcaagagatctt

SEQ ID NO: 102027 - DNA, 25 bp, Probe Sequence
gggtaaaatataagggagaacttca

SEQ ID NO: 102028 - DNA, 25 bp, Probe Sequence
tgggtaaaatataagggagaacttc

SEQ ID NO: 102029 - DNA, 25 bp, Probe Sequence
gatgggtaaaatataagggagaact

SEQ ID NO: 102030 - DNA, 25 bp, Probe Sequence
agatgggtaaaatataagggagaac

SEQ ID NO: 102031 - DNA, 25 bp, Probe Sequence
tgtttgcttattcaagagatcttca

SEQ ID NO: 102032 - DNA, 25 bp, Probe Sequence
cacaaagatgggtaaaatataaggg

SEQ ID NO: 102033 - DNA, 25 bp, Probe Sequence
caagagatcttcattaagtacccaa

SEQ ID NO: 102034 - DNA, 25 bp, Probe Sequence
gtgtttgcttattcaagagatcttc

SEQ ID NO: 102035 - DNA, 25 bp, Probe Sequence
acaaagatgggtaaaatataaggga

SEQ ID NO: 102036 - DNA, 25 bp, Probe Sequence
ttcaagagatcttcattaagtaccc

SEQ ID NO: 102037 - DNA, 25 bp, Probe Sequence
aaaggagaagaggaaacacaagaag

SEQ ID NO: 102038 - DNA, 25 bp, Probe Sequence
aaggagaagaggaaacacaagaaga

SEQ ID NO: 102039 - DNA, 25 bp, Probe Sequence
ctctgaatcaagatgagtgggaaac

SEQ ID NO: 102040 - DNA, 25 bp, Probe Sequence
tctgaatcaagatgagtgggaaacc

SEQ ID NO: 102041 - DNA, 25 bp, Probe Sequence
tgaatcaagatgagtgggaaaccat

SEQ ID NO: 102042 - DNA, 25 bp, Probe Sequence
aaaaggagaagaggaaacacaagaa

SEQ ID NO: 102043 - DNA, 25 bp, Probe Sequence
agaaaaggagaagaggaaacacaag

SEQ ID NO: 102044 - DNA, 25 bp, Probe Sequence
gaaaaggagaagaggaaacacaaga

SEQ ID NO: 102045 - DNA, 25 bp, Probe Sequence
cagaaaaggagaagaggaaacacaa

SEQ ID NO: 102046 - DNA, 25 bp, Probe Sequence
aatgcccaggatgctataaaatcat

SEQ ID NO: 102047 - DNA, 25 bp, Probe Sequence
actaaaagcactctgaatcaagatg

SEQ ID NO: 102048 - DNA, 25 bp, Probe Sequence
cactaaaagcactctgaatcaagat

SEQ ID NO: 102049 - DNA, 25 bp, Probe Sequence
taaaatcatcacggtctttagccat

SEQ ID NO: 102050 - DNA, 25 bp, Probe Sequence
ataaaatcatcacggtctttagcca

SEQ ID NO: 102051 - DNA, 25 bp, Probe Sequence
atgctataaaatcatcacggtcttt

SEQ ID NO: 102052 - DNA, 25 bp, Probe Sequence
agcactaaaagcactctgaatcaag

SEQ ID NO: 102053 - DNA, 25 bp, Probe Sequence
tataaaatcatcacggtctttagcc

SEQ ID NO: 102054 - DNA, 25 bp, Probe Sequence
ctaaaagcactctgaatcaagatga

SEQ ID NO: 102055 - DNA, 25 bp, Probe Sequence
ctgaatcaagatgagtgggaaacca

SEQ ID NO: 102056 - DNA, 25 bp, Probe Sequence
taaaagcactctgaatcaagatgag

SEQ ID NO: 102057 - DNA, 25 bp, Probe Sequence
gcactaaaagcactctgaatcaaga

SEQ ID NO: 102058 - DNA, 25 bp, Probe Sequence
aattcctgcttcatggatgtgaaat

SEQ ID NO: 102059 - DNA, 25 bp, Probe Sequence
tgctataaaatcatcacggtcttta

SEQ ID NO: 102060 - DNA, 25 bp, Probe Sequence
gaatcaagatgagtgggaaaccatc

SEQ ID NO: 102061 - DNA, 25 bp, Probe Sequence
aagtctgatctgtagatgtctgatg

SEQ ID NO: 102062 - DNA, 25 bp, Probe Sequence
tctgatctgtagatgtctgatggtt

SEQ ID NO: 102063 - DNA, 25 bp, Probe Sequence
agtctgatctgtagatgtctgatgg

SEQ ID NO: 102064 - DNA, 25 bp, Probe Sequence
gtctgatctgtagatgtctgatggt

SEQ ID NO: 102065 - DNA, 25 bp, Probe Sequence
tagatgtctgatggtttgaggagaa

SEQ ID NO: 102066 - DNA, 25 bp, Probe Sequence
atctgtagatgtctgatggtttgag

SEQ ID NO: 102067 - DNA, 25 bp, Probe Sequence
gatctgtagatgtctgatggtttga

SEQ ID NO: 102068 - DNA, 25 bp, Probe Sequence
ctgatctgtagatgtctgatggttt

SEQ ID NO: 102069 - DNA, 25 bp, Probe Sequence
tgatctgtagatgtctgatggtttg

SEQ ID NO: 102070 - DNA, 25 bp, Probe Sequence
gtagatgtctgatggtttgaggaga

SEQ ID NO: 102071 - DNA, 25 bp, Probe Sequence
tgtagatgtctgatggtttgaggag

SEQ ID NO: 102072 - DNA, 25 bp, Probe Sequence
ctgtagatgtctgatggtttgagga

SEQ ID NO: 102073 - DNA, 25 bp, Probe Sequence
tctgtagatgtctgatggtttgagg

SEQ ID NO: 102074 - DNA, 25 bp, Probe Sequence
gctaaagtctgatctgtagatgtct

SEQ ID NO: 102075 - DNA, 25 bp, Probe Sequence
atgtctgatggtttgaggagaagaa

SEQ ID NO: 102076 - DNA, 25 bp, Probe Sequence
tgtctgatggtttgaggagaagaaa

SEQ ID NO: 102077 - DNA, 25 bp, Probe Sequence
aaagtctgatctgtagatgtctgat

SEQ ID NO: 102078 - DNA, 25 bp, Probe Sequence
ctgtaatctcagctactcaaggagg

SEQ ID NO: 102079 - DNA, 25 bp, Probe Sequence
gatgtctgatggtttgaggagaaga

SEQ ID NO: 102080 - DNA, 25 bp, Probe Sequence
agatgtctgatggtttgaggagaag

SEQ ID NO: 102081 - DNA, 25 bp, Probe Sequence
cctgtaatctcagctactcaaggag

SEQ ID NO: 102082 - DNA, 25 bp, Probe Sequence
taaagtctgatctgtagatgtctga

SEQ ID NO: 102083 - DNA, 25 bp, Probe Sequence
ctaaagtctgatctgtagatgtctg

SEQ ID NO: 102084 - DNA, 25 bp, Probe Sequence
ccaaagagctaaagtctgatctgta

SEQ ID NO: 102085 - DNA, 25 bp, Probe Sequence
ctcaatctgaaggagcagtgtctgt

SEQ ID NO: 102086 - DNA, 25 bp, Probe Sequence
tcaatctgaaggagcagtgtctgtg

SEQ ID NO: 102087 - DNA, 25 bp, Probe Sequence
aacctcaatctgaaggagcagtgtc

SEQ ID NO: 102088 - DNA, 25 bp, Probe Sequence
aatctgaaggagcagtgtctgtgtg

SEQ ID NO: 102089 - DNA, 25 bp, Probe Sequence
caatctgaaggagcagtgtctgtgt

SEQ ID NO: 102090 - DNA, 25 bp, Probe Sequence
caacctcaatctgaaggagcagtgt

SEQ ID NO: 102091 - DNA, 25 bp, Probe Sequence
acaacctcaatctgaaggagcagtg

SEQ ID NO: 102092 - DNA, 25 bp, Probe Sequence
cctcaatctgaaggagcagtgtctg

SEQ ID NO: 102093 - DNA, 25 bp, Probe Sequence
caagatgctgatgcctaagaagaac

SEQ ID NO: 102094 - DNA, 25 bp, Probe Sequence
tagccagtatctccgtgattacctt

SEQ ID NO: 102095 - DNA, 25 bp, Probe Sequence
aagatgctgatgcctaagaagaacc

SEQ ID NO: 102096 - DNA, 25 bp, Probe Sequence
ccaagatgctgatgcctaagaagaa

SEQ ID NO: 102097 - DNA, 25 bp, Probe Sequence
gtagccagtatctccgtgattacct

SEQ ID NO: 102098 - DNA, 25 bp, Probe Sequence
tcacattgaataaacttacagccaa

SEQ ID NO: 102099 - DNA, 25 bp, Probe Sequence
cacattgaataaacttacagccaaa

SEQ ID NO: 102100 - DNA, 25 bp, Probe Sequence
attggagaggattatttcacattga

SEQ ID NO: 102101 - DNA, 25 bp, Probe Sequence
agccagtatctccgtgattaccttc

SEQ ID NO: 102102 - DNA, 25 bp, Probe Sequence
aattggagaggattatttcacattg

SEQ ID NO: 102103 - DNA, 25 bp, Probe Sequence
cagagatacctacagacggtgttct

SEQ ID NO: 102104 - DNA, 25 bp, Probe Sequence
gccagtatctccgtgattaccttca

SEQ ID NO: 102105 - DNA, 25 bp, Probe Sequence
acagagatacctacagacggtgttc

SEQ ID NO: 102106 - DNA, 25 bp, Probe Sequence
gacagagatacctacagacggtgtt

SEQ ID NO: 102107 - DNA, 25 bp, Probe Sequence
taagaagaaccggattgccattcat

SEQ ID NO: 102108 - DNA, 25 bp, Probe Sequence
ctgacagagatacctacagacggtg

SEQ ID NO: 102109 - DNA, 25 bp, Probe Sequence
aaattggagaggattatttcacatt

SEQ ID NO: 102110 - DNA, 25 bp, Probe Sequence
ttcacattgaataaacttacagcca

SEQ ID NO: 102111 - DNA, 25 bp, Probe Sequence
agatgctgatgcctaagaagaaccg

SEQ ID NO: 102112 - DNA, 25 bp, Probe Sequence
aattccagtttagaggcagatgtgg

SEQ ID NO: 102113 - DNA, 25 bp, Probe Sequence
gaattccagtttagaggcagatgtg

SEQ ID NO: 102114 - DNA, 25 bp, Probe Sequence
ctaagaagaaccggattgccattca

SEQ ID NO: 102115 - DNA, 25 bp, Probe Sequence
ttggagaggattatttcacattgaa

SEQ ID NO: 102116 - DNA, 25 bp, Probe Sequence
gccaagatgctgatgcctaagaaga

SEQ ID NO: 102117 - DNA, 25 bp, Probe Sequence
aatgtatgtattggcaatgatgtca

SEQ ID NO: 102118 - DNA, 25 bp, Probe Sequence
ctaccaatggaccaagatatgttgt

SEQ ID NO: 102119 - DNA, 25 bp, Probe Sequence
taccaatggaccaagatatgttgtg

SEQ ID NO: 102120 - DNA, 25 bp, Probe Sequence
atgtatgtattggcaatgatgtcat

SEQ ID NO: 102121 - DNA, 25 bp, Probe Sequence
ttatgctagagatcatcaaccatgc

SEQ ID NO: 102122 - DNA, 25 bp, Probe Sequence
ctgtgtccaggaagattagatagaa

SEQ ID NO: 102123 - DNA, 25 bp, Probe Sequence
gctaccaatggaccaagatatgttg

SEQ ID NO: 102124 - DNA, 25 bp, Probe Sequence
ttgctgtgtccaggaagattagata

SEQ ID NO: 102125 - DNA, 25 bp, Probe Sequence
attatgctagagatcatcaaccatg

SEQ ID NO: 102126 - DNA, 25 bp, Probe Sequence
gctgtgtccaggaagattagataga

SEQ ID NO: 102127 - DNA, 25 bp, Probe Sequence
gcatgacagatgttgacttagtgta

SEQ ID NO: 102128 - DNA, 25 bp, Probe Sequence
tgctgtgtccaggaagattagatag

SEQ ID NO: 102129 - DNA, 25 bp, Probe Sequence
catgacagatgttgacttagtgtaa

SEQ ID NO: 102130 - DNA, 25 bp, Probe Sequence
aattatgctagagatcatcaaccat

SEQ ID NO: 102131 - DNA, 25 bp, Probe Sequence
ttgaaagtggtttgagatagtggta

SEQ ID NO: 102132 - DNA, 25 bp, Probe Sequence
attgaaagtggtttgagatagtggt

SEQ ID NO: 102133 - DNA, 25 bp, Probe Sequence
tgaaagtggtttgagatagtggtat

SEQ ID NO: 102134 - DNA, 25 bp, Probe Sequence
taatgtatgtattggcaatgatgtc

SEQ ID NO: 102135 - DNA, 25 bp, Probe Sequence
tgccaaatgaacaaacaagattaga

SEQ ID NO: 102136 - DNA, 25 bp, Probe Sequence
gccaaatgaacaaacaagattagac

SEQ ID NO: 102137 - DNA, 25 bp, Probe Sequence
tgctttggatatgactacactaact

SEQ ID NO: 102138 - DNA, 25 bp, Probe Sequence
cttattctgagattggagggctatc

SEQ ID NO: 102139 - DNA, 25 bp, Probe Sequence
cgggaattaagagaggtgatagaat

SEQ ID NO: 102140 - DNA, 25 bp, Probe Sequence
ggagttactgaatcaaatggatgga

SEQ ID NO: 102141 - DNA, 25 bp, Probe Sequence
gaagctacagattcagtgtgtggtg

SEQ ID NO: 102142 - DNA, 25 bp, Probe Sequence
gatatcgcagctttcaacaagatct

SEQ ID NO: 102143 - DNA, 25 bp, Probe Sequence
ctacagattcagtgtgtggtggagg

SEQ ID NO: 102144 - DNA, 25 bp, Probe Sequence
aagatctgaagcctgagtgtgtgta

SEQ ID NO: 102145 - DNA, 25 bp, Probe Sequence
tacagattcagtgtgtggtggagga

SEQ ID NO: 102146 - DNA, 25 bp, Probe Sequence
atatcgcagctttcaacaagatctg

SEQ ID NO: 102147 - DNA, 25 bp, Probe Sequence
ggaagctacagattcagtgtgtggt

SEQ ID NO: 102148 - DNA, 25 bp, Probe Sequence
gctacagattcagtgtgtggtggag

SEQ ID NO: 102149 - DNA, 25 bp, Probe Sequence
agatctgaagcctgagtgtgtgtac

SEQ ID NO: 102150 - DNA, 25 bp, Probe Sequence
ggaggagatcaccaagtttgaggag

SEQ ID NO: 102151 - DNA, 25 bp, Probe Sequence
gaggaggagatcaccaagtttgagg

SEQ ID NO: 102152 - DNA, 25 bp, Probe Sequence
ggaggaggagatcaccaagtttgag

SEQ ID NO: 102153 - DNA, 25 bp, Probe Sequence
caacaagatctgaagcctgagtgtg

SEQ ID NO: 102154 - DNA, 25 bp, Probe Sequence
tcaacaagatctgaagcctgagtgt

SEQ ID NO: 102155 - DNA, 25 bp, Probe Sequence
tatcgcagctttcaacaagatctga

SEQ ID NO: 102156 - DNA, 25 bp, Probe Sequence
aagctacagattcagtgtgtggtgg

SEQ ID NO: 102157 - DNA, 25 bp, Probe Sequence
ttcaacaagatctgaagcctgagtg

SEQ ID NO: 102158 - DNA, 25 bp, Probe Sequence
aacaagatctgaagcctgagtgtgt

SEQ ID NO: 102159 - DNA, 25 bp, Probe Sequence
aggaggagatcaccaagtttgagga

SEQ ID NO: 102160 - DNA, 25 bp, Probe Sequence
ctttcaacaagatctgaagcctgag

SEQ ID NO: 102161 - DNA, 25 bp, Probe Sequence
caagatctgaagcctgagtgtgtgt

SEQ ID NO: 102162 - DNA, 25 bp, Probe Sequence
gaggagatcaccaagtttgaggagc

SEQ ID NO: 102163 - DNA, 25 bp, Probe Sequence
tttcaacaagatctgaagcctgagt

SEQ ID NO: 102164 - DNA, 25 bp, Probe Sequence
ctggaggaggagatcaccaagtttg

SEQ ID NO: 102165 - DNA, 25 bp, Probe Sequence
gcttcaccaagttcaatgttgatga

SEQ ID NO: 102166 - DNA, 25 bp, Probe Sequence
cagaacaaggagcatgtaattgagg

SEQ ID NO: 102167 - DNA, 25 bp, Probe Sequence
aagttatcatgtccatccacaccaa

SEQ ID NO: 102168 - DNA, 25 bp, Probe Sequence
gcagaacaaggagcatgtaattgag

SEQ ID NO: 102169 - DNA, 25 bp, Probe Sequence
agttatcatgtccatccacaccaag

SEQ ID NO: 102170 - DNA, 25 bp, Probe Sequence
cttcaccaagttcaatgttgatgaa

SEQ ID NO: 102171 - DNA, 25 bp, Probe Sequence
gttgatgaatttgaagacatggtgg

SEQ ID NO: 102172 - DNA, 25 bp, Probe Sequence
tcaccaagttcaatgttgatgaatt

SEQ ID NO: 102173 - DNA, 25 bp, Probe Sequence
ttcaccaagttcaatgttgatgaat

SEQ ID NO: 102174 - DNA, 25 bp, Probe Sequence
ggcttcaccaagttcaatgttgatg

SEQ ID NO: 102175 - DNA, 25 bp, Probe Sequence
caagttatcatgtccatccacacca

SEQ ID NO: 102176 - DNA, 25 bp, Probe Sequence
tgttgatgaatttgaagacatggtg

SEQ ID NO: 102177 - DNA, 25 bp, Probe Sequence
agaacaaggagcatgtaattgaggc

SEQ ID NO: 102178 - DNA, 25 bp, Probe Sequence
ccaagttatcatgtccatccacacc

SEQ ID NO: 102179 - DNA, 25 bp, Probe Sequence
ttgatgaatttgaagacatggtggc

SEQ ID NO: 102180 - DNA, 25 bp, Probe Sequence
aatttgaagacatggtggctgagaa

SEQ ID NO: 102181 - DNA, 25 bp, Probe Sequence
atttgaagacatggtggctgagaag

SEQ ID NO: 102182 - DNA, 25 bp, Probe Sequence
gaatttgaagacatggtggctgaga

SEQ ID NO: 102183 - DNA, 25 bp, Probe Sequence
accaagttcaatgttgatgaatttg

SEQ ID NO: 102184 - DNA, 25 bp, Probe Sequence
caccaagttcaatgttgatgaattt

SEQ ID NO: 102185 - DNA, 25 bp, Probe Sequence
gttatcatgtccatccacaccaagc

SEQ ID NO: 102186 - DNA, 25 bp, Probe Sequence
gccaagttatcatgtccatccacac

SEQ ID NO: 102187 - DNA, 25 bp, Probe Sequence
atgttgatgaatttgaagacatggt

SEQ ID NO: 102188 - DNA, 25 bp, Probe Sequence
ccaagttcaatgttgatgaatttga

SEQ ID NO: 102189 - DNA, 25 bp, Probe Sequence
tgtaagaatcaagtcactctcatgg

SEQ ID NO: 102190 - DNA, 25 bp, Probe Sequence
attgtaagaatcaagtcactctcat

SEQ ID NO: 102191 - DNA, 25 bp, Probe Sequence
ttgtaagaatcaagtcactctcatg

SEQ ID NO: 102192 - DNA, 25 bp, Probe Sequence
ggattgtaagaatcaagtcactctc

SEQ ID NO: 102193 - DNA, 25 bp, Probe Sequence
gactggaatgtttggagattgttaa

SEQ ID NO: 102194 - DNA, 25 bp, Probe Sequence
gattgtaagaatcaagtcactctca

SEQ ID NO: 102195 - DNA, 25 bp, Probe Sequence
ggactggaatgtttggagattgtta

SEQ ID NO: 102196 - DNA, 25 bp, Probe Sequence
actggaatgtttggagattgttaaa

SEQ ID NO: 102197 - DNA, 25 bp, Probe Sequence
ccacaaactgccctctaataagata

SEQ ID NO: 102198 - DNA, 25 bp, Probe Sequence
attggactggaatgtttggagattg

SEQ ID NO: 102199 - DNA, 25 bp, Probe Sequence
acgactctaacgggattgtaagaat

SEQ ID NO: 102200 - DNA, 25 bp, Probe Sequence
cacaaactgccctctaataagatat

SEQ ID NO: 102201 - DNA, 25 bp, Probe Sequence
accacaaactgccctctaataagat

SEQ ID NO: 102202 - DNA, 25 bp, Probe Sequence
ctggaatgtttggagattgttaaat

SEQ ID NO: 102203 - DNA, 25 bp, Probe Sequence
taagaatcaagtcactctcatggga

SEQ ID NO: 102204 - DNA, 25 bp, Probe Sequence
gtaagaatcaagtcactctcatggg

SEQ ID NO: 102205 - DNA, 25 bp, Probe Sequence
caagtcactctcatgggaagaattt

SEQ ID NO: 102206 - DNA, 25 bp, Probe Sequence
ctgtaggactcacacacgactctaa

SEQ ID NO: 102207 - DNA, 25 bp, Probe Sequence
tggactggaatgtttggagattgtt

SEQ ID NO: 102208 - DNA, 25 bp, Probe Sequence
ttggactggaatgtttggagattgt

SEQ ID NO: 102209 - DNA, 25 bp, Probe Sequence
atcaagtcactctcatgggaagaat

SEQ ID NO: 102210 - DNA, 25 bp, Probe Sequence
tggaatgtttggagattgttaaatt

SEQ ID NO: 102211 - DNA, 25 bp, Probe Sequence
cacgactctaacgggattgtaagaa

SEQ ID NO: 102212 - DNA, 25 bp, Probe Sequence
taacgggattgtaagaatcaagtca

SEQ ID NO: 102213 - DNA, 25 bp, Probe Sequence
ggagagatgcttagtgtaattatga

SEQ ID NO: 102214 - DNA, 25 bp, Probe Sequence
aggagagatgcttagtgtaattatg

SEQ ID NO: 102215 - DNA, 25 bp, Probe Sequence
agagatgcttagtgtaattatgagt

SEQ ID NO: 102216 - DNA, 25 bp, Probe Sequence
tactcaccggaactcctataatgtc

SEQ ID NO: 102217 - DNA, 25 bp, Probe Sequence
gagagatgcttagtgtaattatgag

SEQ ID NO: 102218 - DNA, 25 bp, Probe Sequence
gtactcaccggaactcctataatgt

SEQ ID NO: 102219 - DNA, 25 bp, Probe Sequence
gagatgcttagtgtaattatgagtt

SEQ ID NO: 102220 - DNA, 25 bp, Probe Sequence
aagtactcaccggaactcctataat

SEQ ID NO: 102221 - DNA, 25 bp, Probe Sequence
agtactcaccggaactcctataatg

SEQ ID NO: 102222 - DNA, 25 bp, Probe Sequence
caagtactcaccggaactcctataa

SEQ ID NO: 102223 - DNA, 25 bp, Probe Sequence
ccaatagtgatctcacaagtactca

SEQ ID NO: 102224 - DNA, 25 bp, Probe Sequence
accaatagtgatctcacaagtactc

SEQ ID NO: 102225 - DNA, 25 bp, Probe Sequence
caccaatagtgatctcacaagtact

SEQ ID NO: 102226 - DNA, 25 bp, Probe Sequence
agtgtaattatgagttaacaagcct

SEQ ID NO: 102227 - DNA, 25 bp, Probe Sequence
acaagtactcaccggaactcctata

SEQ ID NO: 102228 - DNA, 25 bp, Probe Sequence
gtgtaattatgagttaacaagcctt

SEQ ID NO: 102229 - DNA, 25 bp, Probe Sequence
tatgagttaacaagcctttggatca

SEQ ID NO: 102230 - DNA, 25 bp, Probe Sequence
ttatgagttaacaagcctttggatc

SEQ ID NO: 102231 - DNA, 25 bp, Probe Sequence
tgcctgtatgtcttctgcataagaa

SEQ ID NO: 102232 - DNA, 25 bp, Probe Sequence
tcaccaatagtgatctcacaagtac

SEQ ID NO: 102233 - DNA, 25 bp, Probe Sequence
gtcaccaatagtgatctcacaagta

SEQ ID NO: 102234 - DNA, 25 bp, Probe Sequence
aattatgagttaacaagcctttgga

SEQ ID NO: 102235 - DNA, 25 bp, Probe Sequence
attatgagttaacaagcctttggat

SEQ ID NO: 102236 - DNA, 25 bp, Probe Sequence
atgagttaacaagcctttggatcag

SEQ ID NO: 102237 - DNA, 25 bp, Probe Sequence
ttatttccaaagaatcagtgtcaca

SEQ ID NO: 102238 - DNA, 25 bp, Probe Sequence
tttatttccaaagaatcagtgtcac

SEQ ID NO: 102239 - DNA, 25 bp, Probe Sequence
tatttccaaagaatcagtgtcacac

SEQ ID NO: 102240 - DNA, 25 bp, Probe Sequence
tttccaaagaatcagtgtcacacat

SEQ ID NO: 102241 - DNA, 25 bp, Probe Sequence
atttccaaagaatcagtgtcacaca

SEQ ID NO: 102242 - DNA, 25 bp, Probe Sequence
gcagcttccactctttatttccaaa

SEQ ID NO: 102243 - DNA, 25 bp, Probe Sequence
aagaatcagtgtcacacatgcagat

SEQ ID NO: 102244 - DNA, 25 bp, Probe Sequence
ttccaaagaatcagtgtcacacatg

SEQ ID NO: 102245 - DNA, 25 bp, Probe Sequence
cagcttccactctttatttccaaag

SEQ ID NO: 102246 - DNA, 25 bp, Probe Sequence
agaatcagtgtcacacatgcagatc

SEQ ID NO: 102247 - DNA, 25 bp, Probe Sequence
ctttatttccaaagaatcagtgtca

SEQ ID NO: 102248 - DNA, 25 bp, Probe Sequence
gaatcagtgtcacacatgcagatca

SEQ ID NO: 102249 - DNA, 25 bp, Probe Sequence
tgcagcttccactctttatttccaa

SEQ ID NO: 102250 - DNA, 25 bp, Probe Sequence
aatcagtgtcacacatgcagatcac

SEQ ID NO: 102251 - DNA, 25 bp, Probe Sequence
caaagaatcagtgtcacacatgcag

SEQ ID NO: 102252 - DNA, 25 bp, Probe Sequence
aaagaatcagtgtcacacatgcaga

SEQ ID NO: 102253 - DNA, 25 bp, Probe Sequence
tccaaagaatcagtgtcacacatgc

SEQ ID NO: 102254 - DNA, 25 bp, Probe Sequence
ccaaagaatcagtgtcacacatgca

SEQ ID NO: 102255 - DNA, 25 bp, Probe Sequence
gcttccactctttatttccaaagaa

SEQ ID NO: 102256 - DNA, 25 bp, Probe Sequence
agcttccactctttatttccaaaga

SEQ ID NO: 102257 - DNA, 25 bp, Probe Sequence
tccactctttatttccaaagaatca

SEQ ID NO: 102258 - DNA, 25 bp, Probe Sequence
ccactctttatttccaaagaatcag

SEQ ID NO: 102259 - DNA, 25 bp, Probe Sequence
tctttatttccaaagaatcagtgtc

SEQ ID NO: 102260 - DNA, 25 bp, Probe Sequence
ctctttatttccaaagaatcagtgt

SEQ ID NO: 102261 - DNA, 25 bp, Probe Sequence
gctgtaatccataacctgtgaagac

SEQ ID NO: 102262 - DNA, 25 bp, Probe Sequence
attagccattggtacttactgtagc

SEQ ID NO: 102263 - DNA, 25 bp, Probe Sequence
ctgtaatccataacctgtgaagaca

SEQ ID NO: 102264 - DNA, 25 bp, Probe Sequence
aattagccattggtacttactgtag

SEQ ID NO: 102265 - DNA, 25 bp, Probe Sequence
ggctgtaatccataacctgtgaaga

SEQ ID NO: 102266 - DNA, 25 bp, Probe Sequence
atggatctatgattgacctcctagt

SEQ ID NO: 102267 - DNA, 25 bp, Probe Sequence
tggatctatgattgacctcctagta

SEQ ID NO: 102268 - DNA, 25 bp, Probe Sequence
catcggagtagtttagttgtttgac

SEQ ID NO: 102269 - DNA, 25 bp, Probe Sequence
tatccttctttccttaccctttgtc

SEQ ID NO: 102270 - DNA, 25 bp, Probe Sequence
ttctgcttatccttctttccttacc

SEQ ID NO: 102271 - DNA, 25 bp, Probe Sequence
catggatctatgattgacctcctag

SEQ ID NO: 102272 - DNA, 25 bp, Probe Sequence
gtcttgtattccttgccactttatt

SEQ ID NO: 102273 - DNA, 25 bp, Probe Sequence
ttatccttctttccttaccctttgt

SEQ ID NO: 102274 - DNA, 25 bp, Probe Sequence
gcttatccttctttccttacccttt

SEQ ID NO: 102275 - DNA, 25 bp, Probe Sequence
ggcttcatcctttccatattcttac

SEQ ID NO: 102276 - DNA, 25 bp, Probe Sequence
cacatcatctaaatcccattccaaa

SEQ ID NO: 102277 - DNA, 25 bp, Probe Sequence
cctttctgcttatccttctttcctt

SEQ ID NO: 102278 - DNA, 25 bp, Probe Sequence
ttcctttctgcttatccttctttcc

SEQ ID NO: 102279 - DNA, 25 bp, Probe Sequence
cattcctttctgcttatccttcttt

SEQ ID NO: 102280 - DNA, 25 bp, Probe Sequence
ttaattagccattggtacttactgt

SEQ ID NO: 102281 - DNA, 25 bp, Probe Sequence
cttctttccttaccctttgtccttt

SEQ ID NO: 102282 - DNA, 25 bp, Probe Sequence
cttatccttctttccttaccctttg

SEQ ID NO: 102283 - DNA, 25 bp, Probe Sequence
attcctttctgcttatccttctttc

SEQ ID NO: 102284 - DNA, 25 bp, Probe Sequence
acagcacatcatctaaatcccattc

SEQ ID NO: 102285 - DNA, 25 bp, Probe Sequence
cagacgcaaggaagaaaaggtataa

SEQ ID NO: 102286 - DNA, 25 bp, Probe Sequence
acagacgcaaggaagaaaaggtata

SEQ ID NO: 102287 - DNA, 25 bp, Probe Sequence
gacagacgcaaggaagaaaaggtat

SEQ ID NO: 102288 - DNA, 25 bp, Probe Sequence
ggaacctttcatgacgacagagatg

SEQ ID NO: 102289 - DNA, 25 bp, Probe Sequence
aggaacctttcatgacgacagagat

SEQ ID NO: 102290 - DNA, 25 bp, Probe Sequence
aacctttcatgacgacagagatgat

SEQ ID NO: 102291 - DNA, 25 bp, Probe Sequence
ttcatgacgacagagatgatggtgt

SEQ ID NO: 102292 - DNA, 25 bp, Probe Sequence
ctttcatgacgacagagatgatggt

SEQ ID NO: 102293 - DNA, 25 bp, Probe Sequence
acctttcatgacgacagagatgatg

SEQ ID NO: 102294 - DNA, 25 bp, Probe Sequence
gaacctttcatgacgacagagatga

SEQ ID NO: 102295 - DNA, 25 bp, Probe Sequence
gaggaacctttcatgacgacagaga

SEQ ID NO: 102296 - DNA, 25 bp, Probe Sequence
tttcatgacgacagagatgatggtg

SEQ ID NO: 102297 - DNA, 25 bp, Probe Sequence
ggacagacgcaaggaagaaaaggta

SEQ ID NO: 102298 - DNA, 25 bp, Probe Sequence
cctttcatgacgacagagatgatgg

SEQ ID NO: 102299 - DNA, 25 bp, Probe Sequence
tcatgacgacagagatgatggtgtg

SEQ ID NO: 102300 - DNA, 25 bp, Probe Sequence
gcttcgttctcttaacatactcagt

SEQ ID NO: 102301 - DNA, 25 bp, Probe Sequence
ggcttcgttctcttaacatactcag

SEQ ID NO: 102302 - DNA, 25 bp, Probe Sequence
ctggcttcgttctcttaacatactc

SEQ ID NO: 102303 - DNA, 25 bp, Probe Sequence
aacatactcagtaatgactcaagcc

SEQ ID NO: 102304 - DNA, 25 bp, Probe Sequence
gactggcttcgttctcttaacatac

SEQ ID NO: 102305 - DNA, 25 bp, Probe Sequence
catactcagtaatgactcaagcctc

SEQ ID NO: 102306 - DNA, 25 bp, Probe Sequence
tggcttcgttctcttaacatactca

SEQ ID NO: 102307 - DNA, 25 bp, Probe Sequence
actggcttcgttctcttaacatact

SEQ ID NO: 102308 - DNA, 25 bp, Probe Sequence
acatactcagtaatgactcaagcct

SEQ ID NO: 102309 - DNA, 25 bp, Probe Sequence
taacatactcagtaatgactcaagc

SEQ ID NO: 102310 - DNA, 25 bp, Probe Sequence
ggactggcttcgttctcttaacata

SEQ ID NO: 102311 - DNA, 25 bp, Probe Sequence
cttcgttctcttaacatactcagta

SEQ ID NO: 102312 - DNA, 25 bp, Probe Sequence
catttagtttgtatctttccaggca

SEQ ID NO: 102313 - DNA, 25 bp, Probe Sequence
gcatttagtttgtatctttccaggc

SEQ ID NO: 102314 - DNA, 25 bp, Probe Sequence
ttcgttctcttaacatactcagtaa

SEQ ID NO: 102315 - DNA, 25 bp, Probe Sequence
cgttctcttaacatactcagtaatg

SEQ ID NO: 102316 - DNA, 25 bp, Probe Sequence
tcgttctcttaacatactcagtaat

SEQ ID NO: 102317 - DNA, 25 bp, Probe Sequence
gctattaacataccctagttgccat

SEQ ID NO: 102318 - DNA, 25 bp, Probe Sequence
atttagtttgtatctttccaggcaa

SEQ ID NO: 102319 - DNA, 25 bp, Probe Sequence
tcttaacatactcagtaatgactca

SEQ ID NO: 102320 - DNA, 25 bp, Probe Sequence
ctattaacataccctagttgccatt

SEQ ID NO: 102321 - DNA, 25 bp, Probe Sequence
tctcttaacatactcagtaatgact

SEQ ID NO: 102322 - DNA, 25 bp, Probe Sequence
tattaacataccctagttgccattt

SEQ ID NO: 102323 - DNA, 25 bp, Probe Sequence
ctcttaacatactcagtaatgactc

SEQ ID NO: 102324 - DNA, 25 bp, Probe Sequence
cactggttgtttattgaaaggctaa

SEQ ID NO: 102325 - DNA, 25 bp, Probe Sequence
actggttgtttattgaaaggctaag

SEQ ID NO: 102326 - DNA, 25 bp, Probe Sequence
atctcactggttgtttattgaaagg

SEQ ID NO: 102327 - DNA, 25 bp, Probe Sequence
tcactggttgtttattgaaaggcta

SEQ ID NO: 102328 - DNA, 25 bp, Probe Sequence
ctggttgtttattgaaaggctaagc

SEQ ID NO: 102329 - DNA, 25 bp, Probe Sequence
tattgaaaggctaagcaagtaggtt

SEQ ID NO: 102330 - DNA, 25 bp, Probe Sequence
ttattgaaaggctaagcaagtaggt

SEQ ID NO: 102331 - DNA, 25 bp, Probe Sequence
ttgtttattgaaaggctaagcaagt

SEQ ID NO: 102332 - DNA, 25 bp, Probe Sequence
ggttgtttattgaaaggctaagcaa

SEQ ID NO: 102333 - DNA, 25 bp, Probe Sequence
gttgtttattgaaaggctaagcaag

SEQ ID NO: 102334 - DNA, 25 bp, Probe Sequence
tttattgaaaggctaagcaagtagg

SEQ ID NO: 102335 - DNA, 25 bp, Probe Sequence
tggttgtttattgaaaggctaagca

SEQ ID NO: 102336 - DNA, 25 bp, Probe Sequence
aggatctcactggttgtttattgaa

SEQ ID NO: 102337 - DNA, 25 bp, Probe Sequence
tgtttattgaaaggctaagcaagta

SEQ ID NO: 102338 - DNA, 25 bp, Probe Sequence
ggatctcactggttgtttattgaaa

SEQ ID NO: 102339 - DNA, 25 bp, Probe Sequence
gaggatctcactggttgtttattga

SEQ ID NO: 102340 - DNA, 25 bp, Probe Sequence
ctcactggttgtttattgaaaggct

SEQ ID NO: 102341 - DNA, 25 bp, Probe Sequence
tctcactggttgtttattgaaaggc

SEQ ID NO: 102342 - DNA, 25 bp, Probe Sequence
actttgaacctcagtttcctcatct

SEQ ID NO: 102343 - DNA, 25 bp, Probe Sequence
cactttgaacctcagtttcctcatc

SEQ ID NO: 102344 - DNA, 25 bp, Probe Sequence
attgaaaggctaagcaagtaggttg

SEQ ID NO: 102345 - DNA, 25 bp, Probe Sequence
gtttattgaaaggctaagcaagtag

SEQ ID NO: 102346 - DNA, 25 bp, Probe Sequence
ttgaacctcagtttcctcatctgta

SEQ ID NO: 102347 - DNA, 25 bp, Probe Sequence
aacctcagtttcctcatctgtagat

SEQ ID NO: 102348 - DNA, 25 bp, Probe Sequence
cgaagatatgctcatgtggtattga

SEQ ID NO: 102349 - DNA, 25 bp, Probe Sequence
ccgaagatatgctcatgtggtattg

SEQ ID NO: 102350 - DNA, 25 bp, Probe Sequence
taggtgtgtccaagaagaaataagt

SEQ ID NO: 102351 - DNA, 25 bp, Probe Sequence
gtaggtgtgtccaagaagaaataag

SEQ ID NO: 102352 - DNA, 25 bp, Probe Sequence
aggtgtgtccaagaagaaataagtc

SEQ ID NO: 102353 - DNA, 25 bp, Probe Sequence
cgtaggtgtgtccaagaagaaataa

SEQ ID NO: 102354 - DNA, 25 bp, Probe Sequence
aagacctggagcgactgaagaatat

SEQ ID NO: 102355 - DNA, 25 bp, Probe Sequence
gtattgaggaaagcagacattgacc

SEQ ID NO: 102356 - DNA, 25 bp, Probe Sequence
ggtattgaggaaagcagacattgac

SEQ ID NO: 102357 - DNA, 25 bp, Probe Sequence
tttgaacagacagaaggatgtaaag

SEQ ID NO: 102358 - DNA, 25 bp, Probe Sequence
gtggtattgaggaaagcagacattg

SEQ ID NO: 102359 - DNA, 25 bp, Probe Sequence
gccgaagatatgctcatgtggtatt

SEQ ID NO: 102360 - DNA, 25 bp, Probe Sequence
ccgtaggtgtgtccaagaagaaata

SEQ ID NO: 102361 - DNA, 25 bp, Probe Sequence
tggtattgaggaaagcagacattga

SEQ ID NO: 102362 - DNA, 25 bp, Probe Sequence
gaagacctggagcgactgaagaata

SEQ ID NO: 102363 - DNA, 25 bp, Probe Sequence
agacctggagcgactgaagaatatt

SEQ ID NO: 102364 - DNA, 25 bp, Probe Sequence
tattgaggaaagcagacattgacct

SEQ ID NO: 102365 - DNA, 25 bp, Probe Sequence
tgtggtattgaggaaagcagacatt

SEQ ID NO: 102366 - DNA, 25 bp, Probe Sequence
gatatgctcatgtggtattgaggaa

SEQ ID NO: 102367 - DNA, 25 bp, Probe Sequence
aagatatgctcatgtggtattgagg

SEQ ID NO: 102368 - DNA, 25 bp, Probe Sequence
gaagatatgctcatgtggtattgag

SEQ ID NO: 102369 - DNA, 25 bp, Probe Sequence
agatatgctcatgtggtattgagga

SEQ ID NO: 102370 - DNA, 25 bp, Probe Sequence
tcatgtggtattgaggaaagcagac

SEQ ID NO: 102371 - DNA, 25 bp, Probe Sequence
catgtggtattgaggaaagcagaca

SEQ ID NO: 102372 - DNA, 25 bp, Probe Sequence
taaggcttaacagatccaattccag

SEQ ID NO: 102373 - DNA, 25 bp, Probe Sequence
gtaaggcttaacagatccaattcca

SEQ ID NO: 102374 - DNA, 25 bp, Probe Sequence
ggactaatgtgtaaggcttaacaga

SEQ ID NO: 102375 - DNA, 25 bp, Probe Sequence
gtgtaaggcttaacagatccaattc

SEQ ID NO: 102376 - DNA, 25 bp, Probe Sequence
atgtgtaaggcttaacagatccaat

SEQ ID NO: 102377 - DNA, 25 bp, Probe Sequence
taatgtgtaaggcttaacagatcca

SEQ ID NO: 102378 - DNA, 25 bp, Probe Sequence
tgtgtaaggcttaacagatccaatt

SEQ ID NO: 102379 - DNA, 25 bp, Probe Sequence
aatgtgtaaggcttaacagatccaa

SEQ ID NO: 102380 - DNA, 25 bp, Probe Sequence
gactaatgtgtaaggcttaacagat

SEQ ID NO: 102381 - DNA, 25 bp, Probe Sequence
tgtaaggcttaacagatccaattcc

SEQ ID NO: 102382 - DNA, 25 bp, Probe Sequence
ctaatgtgtaaggcttaacagatcc

SEQ ID NO: 102383 - DNA, 25 bp, Probe Sequence
aggcttaacagatccaattccagaa

SEQ ID NO: 102384 - DNA, 25 bp, Probe Sequence
aaggcttaacagatccaattccaga

SEQ ID NO: 102385 - DNA, 25 bp, Probe Sequence
agagagagagagagaggagagagag

SEQ ID NO: 102386 - DNA, 25 bp, Probe Sequence
agagagagagagagagaggagagag

SEQ ID NO: 102387 - DNA, 25 bp, Probe Sequence
agagagagagagagagagaggagag

SEQ ID NO: 102388 - DNA, 25 bp, Probe Sequence
agagagagagagagagagagaggag

SEQ ID NO: 102389 - DNA, 25 bp, Probe Sequence
aggagagagagagagagagagagag

SEQ ID NO: 102390 - DNA, 25 bp, Probe Sequence
gagagagagagagagaggagagaga

SEQ ID NO: 102391 - DNA, 25 bp, Probe Sequence
gagagagagagagagagaggagaga

SEQ ID NO: 102392 - DNA, 25 bp, Probe Sequence
gagagagagagagagagagaggaga

SEQ ID NO: 102393 - DNA, 25 bp, Probe Sequence
actaatgtgtaaggcttaacagatc

SEQ ID NO: 102394 - DNA, 25 bp, Probe Sequence
caggagagagagagagagagagaga

SEQ ID NO: 102395 - DNA, 25 bp, Probe Sequence
gagagagaggagagagagaaagaac

SEQ ID NO: 102396 - DNA, 25 bp, Probe Sequence
cagaagactcctgcgaatctgactc

SEQ ID NO: 102397 - DNA, 25 bp, Probe Sequence
gcttggtattcattacttcatctgt

SEQ ID NO: 102398 - DNA, 25 bp, Probe Sequence
tgcttggtattcattacttcatctg

SEQ ID NO: 102399 - DNA, 25 bp, Probe Sequence
tcattacttcatctgtatcaagcac

SEQ ID NO: 102400 - DNA, 25 bp, Probe Sequence
ttgcttggtattcattacttcatct

SEQ ID NO: 102401 - DNA, 25 bp, Probe Sequence
tctgtatgttctgttgtgcctagta

SEQ ID NO: 102402 - DNA, 25 bp, Probe Sequence
tgatactcttatagtctgccttcaa

SEQ ID NO: 102403 - DNA, 25 bp, Probe Sequence
ttgatactcttatagtctgccttca

SEQ ID NO: 102404 - DNA, 25 bp, Probe Sequence
ttcattacttcatctgtatcaagca

SEQ ID NO: 102405 - DNA, 25 bp, Probe Sequence
ctgtatgttctgttgtgcctagtac

SEQ ID NO: 102406 - DNA, 25 bp, Probe Sequence
cattacttcatctgtatcaagcaca

SEQ ID NO: 102407 - DNA, 25 bp, Probe Sequence
tcttgatactcttatagtctgcctt

SEQ ID NO: 102408 - DNA, 25 bp, Probe Sequence
ttcttgatactcttatagtctgcct

SEQ ID NO: 102409 - DNA, 25 bp, Probe Sequence
cttgatactcttatagtctgccttc

SEQ ID NO: 102410 - DNA, 25 bp, Probe Sequence
ttctgtatgttctgttgtgcctagt

SEQ ID NO: 102411 - DNA, 25 bp, Probe Sequence
attgcttggtattcattacttcatc

SEQ ID NO: 102412 - DNA, 25 bp, Probe Sequence
gatactcttatagtctgccttcaat

SEQ ID NO: 102413 - DNA, 25 bp, Probe Sequence
ctttcttcctcctctgttctctaaa

SEQ ID NO: 102414 - DNA, 25 bp, Probe Sequence
tctttcttcctcctctgttctctaa

SEQ ID NO: 102415 - DNA, 25 bp, Probe Sequence
attcattacttcatctgtatcaagc

SEQ ID NO: 102416 - DNA, 25 bp, Probe Sequence
ctctttcttcctcctctgttctcta

SEQ ID NO: 102417 - DNA, 25 bp, Probe Sequence
tatgttctgttgtgcctagtacact

SEQ ID NO: 102418 - DNA, 25 bp, Probe Sequence
gtatgttctgttgtgcctagtacac

SEQ ID NO: 102419 - DNA, 25 bp, Probe Sequence
tcttgtcaccaaccattcctacttg

SEQ ID NO: 102420 - DNA, 25 bp, Probe Sequence
gtcttgtcaccaaccattcctactt

SEQ ID NO: 102421 - DNA, 25 bp, Probe Sequence
aatcagtgaagaatgacaagaacaa

SEQ ID NO: 102422 - DNA, 25 bp, Probe Sequence
taatcagtgaagaatgacaagaaca

SEQ ID NO: 102423 - DNA, 25 bp, Probe Sequence
caccaaccagaccaggacttaataa

SEQ ID NO: 102424 - DNA, 25 bp, Probe Sequence
gttcactagatgtggaattgagact

SEQ ID NO: 102425 - DNA, 25 bp, Probe Sequence
tgttcactagatgtggaattgagac

SEQ ID NO: 102426 - DNA, 25 bp, Probe Sequence
gtgttcactagatgtggaattgaga

SEQ ID NO: 102427 - DNA, 25 bp, Probe Sequence
ctaatcagtgaagaatgacaagaac

SEQ ID NO: 102428 - DNA, 25 bp, Probe Sequence
tctaatcagtgaagaatgacaagaa

SEQ ID NO: 102429 - DNA, 25 bp, Probe Sequence
tcactagatgtggaattgagactaa

SEQ ID NO: 102430 - DNA, 25 bp, Probe Sequence
ttcactagatgtggaattgagacta

SEQ ID NO: 102431 - DNA, 25 bp, Probe Sequence
catctaatcagtgaagaatgacaag

SEQ ID NO: 102432 - DNA, 25 bp, Probe Sequence
ggtgttcactagatgtggaattgag

SEQ ID NO: 102433 - DNA, 25 bp, Probe Sequence
atctaatcagtgaagaatgacaaga

SEQ ID NO: 102434 - DNA, 25 bp, Probe Sequence
ctttaggtctattccagtgagtgaa

SEQ ID NO: 102435 - DNA, 25 bp, Probe Sequence
gtggtgttcactagatgtggaattg

SEQ ID NO: 102436 - DNA, 25 bp, Probe Sequence
tggtgttcactagatgtggaattga

SEQ ID NO: 102437 - DNA, 25 bp, Probe Sequence
tttaggtctattccagtgagtgaaa

SEQ ID NO: 102438 - DNA, 25 bp, Probe Sequence
actttaggtctattccagtgagtga

SEQ ID NO: 102439 - DNA, 25 bp, Probe Sequence
atcagtgaagaatgacaagaacaaa

SEQ ID NO: 102440 - DNA, 25 bp, Probe Sequence
ccaccaaccagaccaggacttaata

SEQ ID NO: 102441 - DNA, 25 bp, Probe Sequence
attcacctgttcaagatttcgatac

SEQ ID NO: 102442 - DNA, 25 bp, Probe Sequence
gattcacctgttcaagatttcgata

SEQ ID NO: 102443 - DNA, 25 bp, Probe Sequence
gaagagcatatcccagaaggtgaag

SEQ ID NO: 102444 - DNA, 25 bp, Probe Sequence
tcatctaatcagtgaagaatgacaa

SEQ ID NO: 102445 - DNA, 25 bp, Probe Sequence
ggagcaagtatgttcagatgtagtt

SEQ ID NO: 102446 - DNA, 25 bp, Probe Sequence
gagcaagtatgttcagatgtagtta

SEQ ID NO: 102447 - DNA, 25 bp, Probe Sequence
agcaagtatgttcagatgtagttaa

SEQ ID NO: 102448 - DNA, 25 bp, Probe Sequence
aatcccatacaccatcttgactatt

SEQ ID NO: 102449 - DNA, 25 bp, Probe Sequence
tttaatcccatacaccatcttgact

SEQ ID NO: 102450 - DNA, 25 bp, Probe Sequence
gtttaatcccatacaccatcttgac

SEQ ID NO: 102451 - DNA, 25 bp, Probe Sequence
tagggagcaagtatgttcagatgta

SEQ ID NO: 102452 - DNA, 25 bp, Probe Sequence
ttaatcccatacaccatcttgacta

SEQ ID NO: 102453 - DNA, 25 bp, Probe Sequence
tcccatacaccatcttgactattat

SEQ ID NO: 102454 - DNA, 25 bp, Probe Sequence
atcccatacaccatcttgactatta

SEQ ID NO: 102455 - DNA, 25 bp, Probe Sequence
taatcccatacaccatcttgactat

SEQ ID NO: 102456 - DNA, 25 bp, Probe Sequence
atagggagcaagtatgttcagatgt

SEQ ID NO: 102457 - DNA, 25 bp, Probe Sequence
agggagcaagtatgttcagatgtag

SEQ ID NO: 102458 - DNA, 25 bp, Probe Sequence
tgtttaatcccatacaccatcttga

SEQ ID NO: 102459 - DNA, 25 bp, Probe Sequence
attggctaggtcaaatgtggttaaa

SEQ ID NO: 102460 - DNA, 25 bp, Probe Sequence
aattggctaggtcaaatgtggttaa

SEQ ID NO: 102461 - DNA, 25 bp, Probe Sequence
aaattggctaggtcaaatgtggtta

SEQ ID NO: 102462 - DNA, 25 bp, Probe Sequence
taaattggctaggtcaaatgtggtt

SEQ ID NO: 102463 - DNA, 25 bp, Probe Sequence
atgtttaatcccatacaccatcttg

SEQ ID NO: 102464 - DNA, 25 bp, Probe Sequence
ctaaattggctaggtcaaatgtggt

SEQ ID NO: 102465 - DNA, 25 bp, Probe Sequence
gggagcaagtatgttcagatgtagt

SEQ ID NO: 102466 - DNA, 25 bp, Probe Sequence
catagggagcaagtatgttcagatg

SEQ ID NO: 102467 - DNA, 25 bp, Probe Sequence
aatgtttaatcccatacaccatctt

SEQ ID NO: 102468 - DNA, 25 bp, Probe Sequence
aaatgtttaatcccatacaccatct

SEQ ID NO: 102469 - DNA, 25 bp, Probe Sequence
aattaccgagagacaacttgacatt

SEQ ID NO: 102470 - DNA, 25 bp, Probe Sequence
ggcattgctgaacttgatacattaa

SEQ ID NO: 102471 - DNA, 25 bp, Probe Sequence
attaccgagagacaacttgacattg

SEQ ID NO: 102472 - DNA, 25 bp, Probe Sequence
aggcattgctgaacttgatacatta

SEQ ID NO: 102473 - DNA, 25 bp, Probe Sequence
caattaccgagagacaacttgacat

SEQ ID NO: 102474 - DNA, 25 bp, Probe Sequence
aacttgacattgtggacactggata

SEQ ID NO: 102475 - DNA, 25 bp, Probe Sequence
aaggcattgctgaacttgatacatt

SEQ ID NO: 102476 - DNA, 25 bp, Probe Sequence
gatgaaggcattgctgaacttgata

SEQ ID NO: 102477 - DNA, 25 bp, Probe Sequence
gaaggcattgctgaacttgatacat

SEQ ID NO: 102478 - DNA, 25 bp, Probe Sequence
atgaaggcattgctgaacttgatac

SEQ ID NO: 102479 - DNA, 25 bp, Probe Sequence
acttgacattgtggacactggatac

SEQ ID NO: 102480 - DNA, 25 bp, Probe Sequence
atttatggcagatgtgtgttacttt

SEQ ID NO: 102481 - DNA, 25 bp, Probe Sequence
caatttatggcagatgtgtgttact

SEQ ID NO: 102482 - DNA, 25 bp, Probe Sequence
gctaataatgcaattaccgagagac

SEQ ID NO: 102483 - DNA, 25 bp, Probe Sequence
ataatgcaattaccgagagacaact

SEQ ID NO: 102484 - DNA, 25 bp, Probe Sequence
aataatgcaattaccgagagacaac

SEQ ID NO: 102485 - DNA, 25 bp, Probe Sequence
taatgcaattaccgagagacaactt

SEQ ID NO: 102486 - DNA, 25 bp, Probe Sequence
aatttatggcagatgtgtgttactt

SEQ ID NO: 102487 - DNA, 25 bp, Probe Sequence
cgctaataatgcaattaccgagaga

SEQ ID NO: 102488 - DNA, 25 bp, Probe Sequence
ctaataatgcaattaccgagagaca

SEQ ID NO: 102489 - DNA, 25 bp, Probe Sequence
acgctaataatgcaattaccgagag

SEQ ID NO: 102490 - DNA, 25 bp, Probe Sequence
gtcagtcacaacaagcataccaaga

SEQ ID NO: 102491 - DNA, 25 bp, Probe Sequence
taataatgcaattaccgagagacaa

SEQ ID NO: 102492 - DNA, 25 bp, Probe Sequence
cacgctaataatgcaattaccgaga

SEQ ID NO: 102493 - DNA, 25 bp, Probe Sequence
ttaagtggacaggagataatatgtt

SEQ ID NO: 102494 - DNA, 25 bp, Probe Sequence
ggtctttaagtggacaggagataat

SEQ ID NO: 102495 - DNA, 25 bp, Probe Sequence
aggtctttaagtggacaggagataa

SEQ ID NO: 102496 - DNA, 25 bp, Probe Sequence
gaggtctttaagtggacaggagata

SEQ ID NO: 102497 - DNA, 25 bp, Probe Sequence
gtctttaagtggacaggagataata

SEQ ID NO: 102498 - DNA, 25 bp, Probe Sequence
ctttaagtggacaggagataatatg

SEQ ID NO: 102499 - DNA, 25 bp, Probe Sequence
taagtggacaggagataatatgttt

SEQ ID NO: 102500 - DNA, 25 bp, Probe Sequence
tttaagtggacaggagataatatgt

SEQ ID NO: 102501 - DNA, 25 bp, Probe Sequence
tctttaagtggacaggagataatat

SEQ ID NO: 102502 - DNA, 25 bp, Probe Sequence
cgttagcatctgaaccactgaaagt

SEQ ID NO: 102503 - DNA, 25 bp, Probe Sequence
aagtggacaggagataatatgtttt

SEQ ID NO: 102504 - DNA, 25 bp, Probe Sequence
gcgttagcatctgaaccactgaaag

SEQ ID NO: 102505 - DNA, 25 bp, Probe Sequence
atctgaaccactgaaagtgagtgat

SEQ ID NO: 102506 - DNA, 25 bp, Probe Sequence
ttagcatctgaaccactgaaagtga

SEQ ID NO: 102507 - DNA, 25 bp, Probe Sequence
gttagcatctgaaccactgaaagtg

SEQ ID NO: 102508 - DNA, 25 bp, Probe Sequence
tagcatctgaaccactgaaagtgag

SEQ ID NO: 102509 - DNA, 25 bp, Probe Sequence
tctgaaccactgaaagtgagtgatg

SEQ ID NO: 102510 - DNA, 25 bp, Probe Sequence
catctgaaccactgaaagtgagtga

SEQ ID NO: 102511 - DNA, 25 bp, Probe Sequence
ctgaaccactgaaagtgagtgatgg

SEQ ID NO: 102512 - DNA, 25 bp, Probe Sequence
tgcgttagcatctgaaccactgaaa

SEQ ID NO: 102513 - DNA, 25 bp, Probe Sequence
gcatctgaaccactgaaagtgagtg

SEQ ID NO: 102514 - DNA, 25 bp, Probe Sequence
agcatctgaaccactgaaagtgagt

SEQ ID NO: 102515 - DNA, 25 bp, Probe Sequence
accactgaaagtgagtgatggcttt

SEQ ID NO: 102516 - DNA, 25 bp, Probe Sequence
aaccactgaaagtgagtgatggctt

SEQ ID NO: 102517 - DNA, 25 bp, Probe Sequence
gaaccactgaaagtgagtgatggct

SEQ ID NO: 102518 - DNA, 25 bp, Probe Sequence
cttattattccacctgctgctatga

SEQ ID NO: 102519 - DNA, 25 bp, Probe Sequence
ttattattccacctgctgctatgaa

SEQ ID NO: 102520 - DNA, 25 bp, Probe Sequence
atctgtatctctggacctgaatgtt

SEQ ID NO: 102521 - DNA, 25 bp, Probe Sequence
tattattccacctgctgctatgaag

SEQ ID NO: 102522 - DNA, 25 bp, Probe Sequence
tgtatctctggacctgaatgttgat

SEQ ID NO: 102523 - DNA, 25 bp, Probe Sequence
aattgttgccgatgtctatatccac

SEQ ID NO: 102524 - DNA, 25 bp, Probe Sequence
gacatctgtatctctggacctgaat

SEQ ID NO: 102525 - DNA, 25 bp, Probe Sequence
gcttattattccacctgctgctatg

SEQ ID NO: 102526 - DNA, 25 bp, Probe Sequence
gtatctctggacctgaatgttgatc

SEQ ID NO: 102527 - DNA, 25 bp, Probe Sequence
ctgtatctctggacctgaatgttga

SEQ ID NO: 102528 - DNA, 25 bp, Probe Sequence
tctgtatctctggacctgaatgttg

SEQ ID NO: 102529 - DNA, 25 bp, Probe Sequence
catctgtatctctggacctgaatgt

SEQ ID NO: 102530 - DNA, 25 bp, Probe Sequence
gagcaagagaagaacttccttacta

SEQ ID NO: 102531 - DNA, 25 bp, Probe Sequence
caataggatcaacgattcttgtgtg

SEQ ID NO: 102532 - DNA, 25 bp, Probe Sequence
agcaagagaagaacttccttactaa

SEQ ID NO: 102533 - DNA, 25 bp, Probe Sequence
ttgagcaagagaagaacttccttac

SEQ ID NO: 102534 - DNA, 25 bp, Probe Sequence
acatctgtatctctggacctgaatg

SEQ ID NO: 102535 - DNA, 25 bp, Probe Sequence
aggatctcttatacagacacaccaa

SEQ ID NO: 102536 - DNA, 25 bp, Probe Sequence
aaggatctcttatacagacacacca

SEQ ID NO: 102537 - DNA, 25 bp, Probe Sequence
ataggatcaacgattcttgtgtgaa

SEQ ID NO: 102538 - DNA, 25 bp, Probe Sequence
aataggatcaacgattcttgtgtga

SEQ ID NO: 102539 - DNA, 25 bp, Probe Sequence
tgagcaagagaagaacttccttact

SEQ ID NO: 102540 - DNA, 25 bp, Probe Sequence
gcaagagaagaacttccttactaat

SEQ ID NO: 102541 - DNA, 25 bp, Probe Sequence
caagaactggaagcctaagtgttag

SEQ ID NO: 102542 - DNA, 25 bp, Probe Sequence
tcttcagaacaatgtagacttccaa

SEQ ID NO: 102543 - DNA, 25 bp, Probe Sequence
ttcttcagaacaatgtagacttcca

SEQ ID NO: 102544 - DNA, 25 bp, Probe Sequence
tgattaggaattgctagatagtgtt

SEQ ID NO: 102545 - DNA, 25 bp, Probe Sequence
tgtgctaagggtccagtatttattt

SEQ ID NO: 102546 - DNA, 25 bp, Probe Sequence
tgctaagggtccagtatttatttga

SEQ ID NO: 102547 - DNA, 25 bp, Probe Sequence
gtgctaagggtccagtatttatttg

SEQ ID NO: 102548 - DNA, 25 bp, Probe Sequence
atgattaggaattgctagatagtgt

SEQ ID NO: 102549 - DNA, 25 bp, Probe Sequence
gctaagggtccagtatttatttgat

SEQ ID NO: 102550 - DNA, 25 bp, Probe Sequence
cttcagaacaatgtagacttccaaa

SEQ ID NO: 102551 - DNA, 25 bp, Probe Sequence
tttacattctgtttactgccacaag

SEQ ID NO: 102552 - DNA, 25 bp, Probe Sequence
tttcttcagaacaatgtagacttcc

SEQ ID NO: 102553 - DNA, 25 bp, Probe Sequence
ctgtgctaagggtccagtatttatt

SEQ ID NO: 102554 - DNA, 25 bp, Probe Sequence
tctgtgctaagggtccagtatttat

SEQ ID NO: 102555 - DNA, 25 bp, Probe Sequence
ttctgtgctaagggtccagtattta

SEQ ID NO: 102556 - DNA, 25 bp, Probe Sequence
aatgattaggaattgctagatagtg

SEQ ID NO: 102557 - DNA, 25 bp, Probe Sequence
tttctgtgctaagggtccagtattt

SEQ ID NO: 102558 - DNA, 25 bp, Probe Sequence
ttacattctgtttactgccacaagc

SEQ ID NO: 102559 - DNA, 25 bp, Probe Sequence
aataattttctgtgctaagggtcca

SEQ ID NO: 102560 - DNA, 25 bp, Probe Sequence
ctaagggtccagtatttatttgatt

SEQ ID NO: 102561 - DNA, 25 bp, Probe Sequence
gattaggaattgctagatagtgttt

SEQ ID NO: 102562 - DNA, 25 bp, Probe Sequence
taataattttctgtgctaagggtcc

SEQ ID NO: 102563 - DNA, 25 bp, Probe Sequence
ttcagaacaatgtagacttccaaaa

SEQ ID NO: 102564 - DNA, 25 bp, Probe Sequence
cagaacaatgtagacttccaaaatg

SEQ ID NO: 102565 - DNA, 25 bp, Probe Sequence
cactgtggcaataacttttgaattt

SEQ ID NO: 102566 - DNA, 25 bp, Probe Sequence
gcccgaaacacatattatttgactc

SEQ ID NO: 102567 - DNA, 25 bp, Probe Sequence
cccgaaacacatattatttgactct

SEQ ID NO: 102568 - DNA, 25 bp, Probe Sequence
ccgaaacacatattatttgactcta

SEQ ID NO: 102569 - DNA, 25 bp, Probe Sequence
aatggcccgaaacacatattatttg

SEQ ID NO: 102570 - DNA, 25 bp, Probe Sequence
caatggcccgaaacacatattattt

SEQ ID NO: 102571 - DNA, 25 bp, Probe Sequence
atggcccgaaacacatattatttga

SEQ ID NO: 102572 - DNA, 25 bp, Probe Sequence
tcaatggcccgaaacacatattatt

SEQ ID NO: 102573 - DNA, 25 bp, Probe Sequence
ggcccgaaacacatattatttgact

SEQ ID NO: 102574 - DNA, 25 bp, Probe Sequence
tggcccgaaacacatattatttgac

SEQ ID NO: 102575 - DNA, 25 bp, Probe Sequence
gtcaatggcccgaaacacatattat

SEQ ID NO: 102576 - DNA, 25 bp, Probe Sequence
cgaaacacatattatttgactctat

SEQ ID NO: 102577 - DNA, 25 bp, Probe Sequence
tgtcaatggcccgaaacacatatta

SEQ ID NO: 102578 - DNA, 25 bp, Probe Sequence
gtgtcaatggcccgaaacacatatt

SEQ ID NO: 102579 - DNA, 25 bp, Probe Sequence
tatccagagatacacttccttgttc

SEQ ID NO: 102580 - DNA, 25 bp, Probe Sequence
atccagagatacacttccttgttct

SEQ ID NO: 102581 - DNA, 25 bp, Probe Sequence
ttatccagagatacacttccttgtt

SEQ ID NO: 102582 - DNA, 25 bp, Probe Sequence
tccagagatacacttccttgttctt

SEQ ID NO: 102583 - DNA, 25 bp, Probe Sequence
gcatcatcatcgttacaattatcat

SEQ ID NO: 102584 - DNA, 25 bp, Probe Sequence
atctcatcatatctcatctcatcat

SEQ ID NO: 102585 - DNA, 25 bp, Probe Sequence
aattacagactgtgttaccttggac

SEQ ID NO: 102586 - DNA, 25 bp, Probe Sequence
caattacagactgtgttaccttgga

SEQ ID NO: 102587 - DNA, 25 bp, Probe Sequence
tcaattacagactgtgttaccttgg

SEQ ID NO: 102588 - DNA, 25 bp, Probe Sequence
gcagcacgtctatctatacacatta

SEQ ID NO: 102589 - DNA, 25 bp, Probe Sequence
ttcaattacagactgtgttaccttg

SEQ ID NO: 102590 - DNA, 25 bp, Probe Sequence
gccatttacttaatagggttgtgag

SEQ ID NO: 102591 - DNA, 25 bp, Probe Sequence
tgccatttacttaatagggttgtga

SEQ ID NO: 102592 - DNA, 25 bp, Probe Sequence
tgcatcatcatcgttacaattatca

SEQ ID NO: 102593 - DNA, 25 bp, Probe Sequence
taattcatataaagcccatagcgga

SEQ ID NO: 102594 - DNA, 25 bp, Probe Sequence
atgccatttacttaatagggttgtg

SEQ ID NO: 102595 - DNA, 25 bp, Probe Sequence
agggttgtgaggattaaatgagata

SEQ ID NO: 102596 - DNA, 25 bp, Probe Sequence
tagggttgtgaggattaaatgagat

SEQ ID NO: 102597 - DNA, 25 bp, Probe Sequence
atagggttgtgaggattaaatgaga

SEQ ID NO: 102598 - DNA, 25 bp, Probe Sequence
ccatttacttaatagggttgtgagg

SEQ ID NO: 102599 - DNA, 25 bp, Probe Sequence
gatgccatttacttaatagggttgt

SEQ ID NO: 102600 - DNA, 25 bp, Probe Sequence
tgatgccatttacttaatagggttg

SEQ ID NO: 102601 - DNA, 25 bp, Probe Sequence
attcatataaagcccatagcggaag

SEQ ID NO: 102602 - DNA, 25 bp, Probe Sequence
cctagagtgtccttggagtttaatt

SEQ ID NO: 102603 - DNA, 25 bp, Probe Sequence
catcaggtaatctgctaaggaggaa

SEQ ID NO: 102604 - DNA, 25 bp, Probe Sequence
tcatcaggtaatctgctaaggagga

SEQ ID NO: 102605 - DNA, 25 bp, Probe Sequence
atcaggtaatctgctaaggaggaaa

SEQ ID NO: 102606 - DNA, 25 bp, Probe Sequence
tcaggtaatctgctaaggaggaaaa

SEQ ID NO: 102607 - DNA, 25 bp, Probe Sequence
tacagagatacagcaaggatatacc

SEQ ID NO: 102608 - DNA, 25 bp, Probe Sequence
ctacagagatacagcaaggatatac

SEQ ID NO: 102609 - DNA, 25 bp, Probe Sequence
cctacagagatacagcaaggatata

SEQ ID NO: 102610 - DNA, 25 bp, Probe Sequence
agatacagcaaggatatacccagtt

SEQ ID NO: 102611 - DNA, 25 bp, Probe Sequence
agagatacagcaaggatatacccag

SEQ ID NO: 102612 - DNA, 25 bp, Probe Sequence
gagatacagcaaggatatacccagt

SEQ ID NO: 102613 - DNA, 25 bp, Probe Sequence
cagagatacagcaaggatataccca

SEQ ID NO: 102614 - DNA, 25 bp, Probe Sequence
acagagatacagcaaggatataccc

SEQ ID NO: 102615 - DNA, 25 bp, Probe Sequence
gatacagcaaggatatacccagttg

SEQ ID NO: 102616 - DNA, 25 bp, Probe Sequence
atacagcaaggatatacccagttgg

SEQ ID NO: 102617 - DNA, 25 bp, Probe Sequence
aaggatatacccagttggtcaagtg

SEQ ID NO: 102618 - DNA, 25 bp, Probe Sequence
caaggatatacccagttggtcaagt

SEQ ID NO: 102619 - DNA, 25 bp, Probe Sequence
tcctacagagatacagcaaggatat

SEQ ID NO: 102620 - DNA, 25 bp, Probe Sequence
gatatacccagttggtcaagtggtg

SEQ ID NO: 102621 - DNA, 25 bp, Probe Sequence
gtcctacagagatacagcaaggata

SEQ ID NO: 102622 - DNA, 25 bp, Probe Sequence
tacagcaaggatatacccagttggt

SEQ ID NO: 102623 - DNA, 25 bp, Probe Sequence
atatacccagttggtcaagtggtga

SEQ ID NO: 102624 - DNA, 25 bp, Probe Sequence
gcaaggatatacccagttggtcaag

SEQ ID NO: 102625 - DNA, 25 bp, Probe Sequence
gcagtcctacagagatacagcaagg

SEQ ID NO: 102626 - DNA, 25 bp, Probe Sequence
tatacccagttggtcaagtggtgaa

SEQ ID NO: 102627 - DNA, 25 bp, Probe Sequence
agcaaggatatacccagttggtcaa

SEQ ID NO: 102628 - DNA, 25 bp, Probe Sequence
agtcctacagagatacagcaaggat

SEQ ID NO: 102629 - DNA, 25 bp, Probe Sequence
aggatatacccagttggtcaagtgg

SEQ ID NO: 102630 - DNA, 25 bp, Probe Sequence
cagttggtcaagtggtgaaaagaac

SEQ ID NO: 102631 - DNA, 25 bp, Probe Sequence
aatacacctccgagctgaatatgaa

SEQ ID NO: 102632 - DNA, 25 bp, Probe Sequence
caatacacctccgagctgaatatga

SEQ ID NO: 102633 - DNA, 25 bp, Probe Sequence
gacaatacacctccgagctgaatat

SEQ ID NO: 102634 - DNA, 25 bp, Probe Sequence
tttacagtgagaaattgtgtggagt

SEQ ID NO: 102635 - DNA, 25 bp, Probe Sequence
acaatacacctccgagctgaatatg

SEQ ID NO: 102636 - DNA, 25 bp, Probe Sequence
ttacagtgagaaattgtgtggagtg

SEQ ID NO: 102637 - DNA, 25 bp, Probe Sequence
tacagtgagaaattgtgtggagtga

SEQ ID NO: 102638 - DNA, 25 bp, Probe Sequence
agacaatacacctccgagctgaata

SEQ ID NO: 102639 - DNA, 25 bp, Probe Sequence
atacacctccgagctgaatatgaaa

SEQ ID NO: 102640 - DNA, 25 bp, Probe Sequence
acagtgagaaattgtgtggagtgac

SEQ ID NO: 102641 - DNA, 25 bp, Probe Sequence
tggtcagttttacagtgagaaattg

SEQ ID NO: 102642 - DNA, 25 bp, Probe Sequence
gttttacagtgagaaattgtgtgga

SEQ ID NO: 102643 - DNA, 25 bp, Probe Sequence
agttttacagtgagaaattgtgtgg

SEQ ID NO: 102644 - DNA, 25 bp, Probe Sequence
ttttacagtgagaaattgtgtggag

SEQ ID NO: 102645 - DNA, 25 bp, Probe Sequence
ggtcagttttacagtgagaaattgt

SEQ ID NO: 102646 - DNA, 25 bp, Probe Sequence
cagttttacagtgagaaattgtgtg

SEQ ID NO: 102647 - DNA, 25 bp, Probe Sequence
tcagttttacagtgagaaattgtgt

SEQ ID NO: 102648 - DNA, 25 bp, Probe Sequence
ctggtcagttttacagtgagaaatt

SEQ ID NO: 102649 - DNA, 25 bp, Probe Sequence
gtcagttttacagtgagaaattgtg

SEQ ID NO: 102650 - DNA, 25 bp, Probe Sequence
gagaaattgtgtggagtgacggaac

SEQ ID NO: 102651 - DNA, 25 bp, Probe Sequence
cagtgagaaattgtgtggagtgacg

SEQ ID NO: 102652 - DNA, 25 bp, Probe Sequence
gagacaatacacctccgagctgaat

SEQ ID NO: 102653 - DNA, 25 bp, Probe Sequence
tcattaggaagctggtcagttttac

SEQ ID NO: 102654 - DNA, 25 bp, Probe Sequence
gtcattaggaagctggtcagtttta

SEQ ID NO: 102655 - DNA, 25 bp, Probe Sequence
ctacagcagaaagcctgtgatttgg

SEQ ID NO: 102656 - DNA, 25 bp, Probe Sequence
cctacagcagaaagcctgtgatttg

SEQ ID NO: 102657 - DNA, 25 bp, Probe Sequence
aaacgactaattcatcttttcctga

SEQ ID NO: 102658 - DNA, 25 bp, Probe Sequence
aacgactaattcatcttttcctgat

SEQ ID NO: 102659 - DNA, 25 bp, Probe Sequence
ctaattcatcttttcctgatcgtca

SEQ ID NO: 102660 - DNA, 25 bp, Probe Sequence
actaattcatcttttcctgatcgtc

SEQ ID NO: 102661 - DNA, 25 bp, Probe Sequence
gactaattcatcttttcctgatcgt

SEQ ID NO: 102662 - DNA, 25 bp, Probe Sequence
acgactaattcatcttttcctgatc

SEQ ID NO: 102663 - DNA, 25 bp, Probe Sequence
tgatcgtcaggaccctaaagaatgg

SEQ ID NO: 102664 - DNA, 25 bp, Probe Sequence
aaaacgactaattcatcttttcctg

SEQ ID NO: 102665 - DNA, 25 bp, Probe Sequence
gttaggagcaaaggaaaggggaaaa

SEQ ID NO: 102666 - DNA, 25 bp, Probe Sequence
cgactaattcatcttttcctgatcg

SEQ ID NO: 102667 - DNA, 25 bp, Probe Sequence
ctgatcgtcaggaccctaaagaatg

SEQ ID NO: 102668 - DNA, 25 bp, Probe Sequence
gatcgtcaggaccctaaagaatggc

SEQ ID NO: 102669 - DNA, 25 bp, Probe Sequence
taattcatcttttcctgatcgtcag

SEQ ID NO: 102670 - DNA, 25 bp, Probe Sequence
ggttaggagcaaaggaaaggggaaa

SEQ ID NO: 102671 - DNA, 25 bp, Probe Sequence
cctaattgcttcctctaccatctgg

SEQ ID NO: 102672 - DNA, 25 bp, Probe Sequence
tgaaattaggtccagagttgaagtt

SEQ ID NO: 102673 - DNA, 25 bp, Probe Sequence
atgaaattaggtccagagttgaagt

SEQ ID NO: 102674 - DNA, 25 bp, Probe Sequence
aaattaggtccagagttgaagttcc

SEQ ID NO: 102675 - DNA, 25 bp, Probe Sequence
gaaattaggtccagagttgaagttc

SEQ ID NO: 102676 - DNA, 25 bp, Probe Sequence
aatgaaattaggtccagagttgaag

SEQ ID NO: 102677 - DNA, 25 bp, Probe Sequence
aagtgtgcaactgcttatattctct

SEQ ID NO: 102678 - DNA, 25 bp, Probe Sequence
tgaagccttggagataaatgaaatt

SEQ ID NO: 102679 - DNA, 25 bp, Probe Sequence
atgaagccttggagataaatgaaat

SEQ ID NO: 102680 - DNA, 25 bp, Probe Sequence
aaatgaaattaggtccagagttgaa

SEQ ID NO: 102681 - DNA, 25 bp, Probe Sequence
catgaagccttggagataaatgaaa

SEQ ID NO: 102682 - DNA, 25 bp, Probe Sequence
aattaggtccagagttgaagttccc

SEQ ID NO: 102683 - DNA, 25 bp, Probe Sequence
taaatgaaattaggtccagagttga

SEQ ID NO: 102684 - DNA, 25 bp, Probe Sequence
gccttggagataaatgaaattaggt

SEQ ID NO: 102685 - DNA, 25 bp, Probe Sequence
agccttggagataaatgaaattagg

SEQ ID NO: 102686 - DNA, 25 bp, Probe Sequence
ccctaattgcttcctctaccatctg

SEQ ID NO: 102687 - DNA, 25 bp, Probe Sequence
ctaattgcttcctctaccatctggg

SEQ ID NO: 102688 - DNA, 25 bp, Probe Sequence
agataaatgaaattaggtccagagt

SEQ ID NO: 102689 - DNA, 25 bp, Probe Sequence
aagccttggagataaatgaaattag

SEQ ID NO: 102690 - DNA, 25 bp, Probe Sequence
gaagccttggagataaatgaaatta

SEQ ID NO: 102691 - DNA, 25 bp, Probe Sequence
ataaatgaaattaggtccagagttg

SEQ ID NO: 102692 - DNA, 25 bp, Probe Sequence
aaagtgtgcaactgcttatattctc

SEQ ID NO: 102693 - DNA, 25 bp, Probe Sequence
caaagtgtgcaactgcttatattct

SEQ ID NO: 102694 - DNA, 25 bp, Probe Sequence
cttcctctaccatctgggagataaa

SEQ ID NO: 102695 - DNA, 25 bp, Probe Sequence
ctggacagatgaagagtgacttgtt

SEQ ID NO: 102696 - DNA, 25 bp, Probe Sequence
gttctcctcatctgtctcttcctgg

SEQ ID NO: 102697 - DNA, 25 bp, Probe Sequence
ttgctggacagatgaagagtgactt

SEQ ID NO: 102698 - DNA, 25 bp, Probe Sequence
cgttctcctcatctgtctcttcctg

SEQ ID NO: 102699 - DNA, 25 bp, Probe Sequence
tgctggacagatgaagagtgacttg

SEQ ID NO: 102700 - DNA, 25 bp, Probe Sequence
ctgcgttctcctcatctgtctcttc

SEQ ID NO: 102701 - DNA, 25 bp, Probe Sequence
ctttgctggacagatgaagagtgac

SEQ ID NO: 102702 - DNA, 25 bp, Probe Sequence
gctggacagatgaagagtgacttgt

SEQ ID NO: 102703 - DNA, 25 bp, Probe Sequence
tttgctggacagatgaagagtgact

SEQ ID NO: 102704 - DNA, 25 bp, Probe Sequence
cctttgctggacagatgaagagtga

SEQ ID NO: 102705 - DNA, 25 bp, Probe Sequence
ttctcctcatctgtctcttcctggg

SEQ ID NO: 102706 - DNA, 25 bp, Probe Sequence
tatgtgtttctgattgcttcctgtt

SEQ ID NO: 102707 - DNA, 25 bp, Probe Sequence
ttctggtatgtgtttctgattgctt

SEQ ID NO: 102708 - DNA, 25 bp, Probe Sequence
tagagtaggctgtggcaatggaata

SEQ ID NO: 102709 - DNA, 25 bp, Probe Sequence
tagatttggcttctggtatgtgttt

SEQ ID NO: 102710 - DNA, 25 bp, Probe Sequence
tctggtatgtgtttctgattgcttc

SEQ ID NO: 102711 - DNA, 25 bp, Probe Sequence
cttctggtatgtgtttctgattgct

SEQ ID NO: 102712 - DNA, 25 bp, Probe Sequence
gtatgtgtttctgattgcttcctgt

SEQ ID NO: 102713 - DNA, 25 bp, Probe Sequence
gatttggcttctggtatgtgtttct

SEQ ID NO: 102714 - DNA, 25 bp, Probe Sequence
gtagatttggcttctggtatgtgtt

SEQ ID NO: 102715 - DNA, 25 bp, Probe Sequence
atttggcttctggtatgtgtttctg

SEQ ID NO: 102716 - DNA, 25 bp, Probe Sequence
agatttggcttctggtatgtgtttc

SEQ ID NO: 102717 - DNA, 25 bp, Probe Sequence
gtctgagaaattgttggcgtagatt

SEQ ID NO: 102718 - DNA, 25 bp, Probe Sequence
ggtatgtgtttctgattgcttcctg

SEQ ID NO: 102719 - DNA, 25 bp, Probe Sequence
ctggtatgtgtttctgattgcttcc

SEQ ID NO: 102720 - DNA, 25 bp, Probe Sequence
ggcttctggtatgtgtttctgattg

SEQ ID NO: 102721 - DNA, 25 bp, Probe Sequence
ctgagaaattgttggcgtagatttg

SEQ ID NO: 102722 - DNA, 25 bp, Probe Sequence
tctgagaaattgttggcgtagattt

SEQ ID NO: 102723 - DNA, 25 bp, Probe Sequence
atgtgtttctgattgcttcctgttg

SEQ ID NO: 102724 - DNA, 25 bp, Probe Sequence
tggtatgtgtttctgattgcttcct

SEQ ID NO: 102725 - DNA, 25 bp, Probe Sequence
tggcttctggtatgtgtttctgatt

SEQ ID NO: 102726 - DNA, 25 bp, Probe Sequence
ttggcttctggtatgtgtttctgat

SEQ ID NO: 102727 - DNA, 25 bp, Probe Sequence
agagtaggctgtggcaatggaataa

SEQ ID NO: 102728 - DNA, 25 bp, Probe Sequence
gtgtttctgattgcttcctgttgag

SEQ ID NO: 102729 - DNA, 25 bp, Probe Sequence
gcttctggtatgtgtttctgattgc

SEQ ID NO: 102730 - DNA, 25 bp, Probe Sequence
ggacttcatcttacctatcagtgac

SEQ ID NO: 102731 - DNA, 25 bp, Probe Sequence
gacttcatcttacctatcagtgacg

SEQ ID NO: 102732 - DNA, 25 bp, Probe Sequence
attccagttcctgtatgatgttcag

SEQ ID NO: 102733 - DNA, 25 bp, Probe Sequence
gattccagttcctgtatgatgttca

SEQ ID NO: 102734 - DNA, 25 bp, Probe Sequence
aagatattgaactctctcctgaggc

SEQ ID NO: 102735 - DNA, 25 bp, Probe Sequence
gaatatacagaggagaacatccagc

SEQ ID NO: 102736 - DNA, 25 bp, Probe Sequence
cgattccagttcctgtatgatgttc

SEQ ID NO: 102737 - DNA, 25 bp, Probe Sequence
agaatatacagaggagaacatccag

SEQ ID NO: 102738 - DNA, 25 bp, Probe Sequence
aagaatatacagaggagaacatcca

SEQ ID NO: 102739 - DNA, 25 bp, Probe Sequence
tccaccaagactgaaagaaactaat

SEQ ID NO: 102740 - DNA, 25 bp, Probe Sequence
ctccaccaagactgaaagaaactaa

SEQ ID NO: 102741 - DNA, 25 bp, Probe Sequence
ttggtgaagaaggatttgtagtgac

SEQ ID NO: 102742 - DNA, 25 bp, Probe Sequence
gttggtgaagaaggatttgtagtga

SEQ ID NO: 102743 - DNA, 25 bp, Probe Sequence
aattgtggacaagataaggaccatt

SEQ ID NO: 102744 - DNA, 25 bp, Probe Sequence
ccaccaagactgaaagaaactaatt

SEQ ID NO: 102745 - DNA, 25 bp, Probe Sequence
aagttaaaggcttgttctaagtgga

SEQ ID NO: 102746 - DNA, 25 bp, Probe Sequence
gatattgaactctctcctgaggcac

SEQ ID NO: 102747 - DNA, 25 bp, Probe Sequence
ataccgaaacagaacaagttaaagg

SEQ ID NO: 102748 - DNA, 25 bp, Probe Sequence
agatattgaactctctcctgaggca

SEQ ID NO: 102749 - DNA, 25 bp, Probe Sequence
ccaaagatattgaactctctcctga

SEQ ID NO: 102750 - DNA, 25 bp, Probe Sequence
attgtggacaagataaggaccattg

SEQ ID NO: 102751 - DNA, 25 bp, Probe Sequence
agttaaaggcttgttctaagtggac

SEQ ID NO: 102752 - DNA, 25 bp, Probe Sequence
gaagaaggatttgtagtgaccgaag

SEQ ID NO: 102753 - DNA, 25 bp, Probe Sequence
ctggttggtgaagaaggatttgtag

SEQ ID NO: 102754 - DNA, 25 bp, Probe Sequence
aatttagcatttgcatttcagtact

SEQ ID NO: 102755 - DNA, 25 bp, Probe Sequence
aaatttagcatttgcatttcagtac

SEQ ID NO: 102756 - DNA, 25 bp, Probe Sequence
ggtttccttaaatttagcatttgca

SEQ ID NO: 102757 - DNA, 25 bp, Probe Sequence
aggtttccttaaatttagcatttgc

SEQ ID NO: 102758 - DNA, 25 bp, Probe Sequence
ccttaaatttagcatttgcatttca

SEQ ID NO: 102759 - DNA, 25 bp, Probe Sequence
gtttccttaaatttagcatttgcat

SEQ ID NO: 102760 - DNA, 25 bp, Probe Sequence
tccttaaatttagcatttgcatttc

SEQ ID NO: 102761 - DNA, 25 bp, Probe Sequence
ttaaatttagcatttgcatttcagt

SEQ ID NO: 102762 - DNA, 25 bp, Probe Sequence
ttccttaaatttagcatttgcattt

SEQ ID NO: 102763 - DNA, 25 bp, Probe Sequence
tttccttaaatttagcatttgcatt

SEQ ID NO: 102764 - DNA, 25 bp, Probe Sequence
cttaaatttagcatttgcatttcag

SEQ ID NO: 102765 - DNA, 25 bp, Probe Sequence
taaatttagcatttgcatttcagta

SEQ ID NO: 102766 - DNA, 25 bp, Probe Sequence
aaggtttccttaaatttagcatttg

SEQ ID NO: 102767 - DNA, 25 bp, Probe Sequence
caaggtttccttaaatttagcattt

SEQ ID NO: 102768 - DNA, 25 bp, Probe Sequence
cactagaaggcactatgttgaacta

SEQ ID NO: 102769 - DNA, 25 bp, Probe Sequence
actagaaggcactatgttgaactat

SEQ ID NO: 102770 - DNA, 25 bp, Probe Sequence
ttctcacttcatggttgctgtatta

SEQ ID NO: 102771 - DNA, 25 bp, Probe Sequence
tattctcacttcatggttgctgtat

SEQ ID NO: 102772 - DNA, 25 bp, Probe Sequence
attctcacttcatggttgctgtatt

SEQ ID NO: 102773 - DNA, 25 bp, Probe Sequence
tctcacttcatggttgctgtattac

SEQ ID NO: 102774 - DNA, 25 bp, Probe Sequence
gtattctcacttcatggttgctgta

SEQ ID NO: 102775 - DNA, 25 bp, Probe Sequence
ctagaaggcactatgttgaactatt

SEQ ID NO: 102776 - DNA, 25 bp, Probe Sequence
agaaggcactatgttgaactattaa

SEQ ID NO: 102777 - DNA, 25 bp, Probe Sequence
tgtattacaggtacggtattctcac

SEQ ID NO: 102778 - DNA, 25 bp, Probe Sequence
agctattatacagtacatggcagaa

SEQ ID NO: 102779 - DNA, 25 bp, Probe Sequence
ctcacttcatggttgctgtattaca

SEQ ID NO: 102780 - DNA, 25 bp, Probe Sequence
tagaaggcactatgttgaactatta

SEQ ID NO: 102781 - DNA, 25 bp, Probe Sequence
gtattacaggtacggtattctcacc

SEQ ID NO: 102782 - DNA, 25 bp, Probe Sequence
tattacaggtacggtattctcacca

SEQ ID NO: 102783 - DNA, 25 bp, Probe Sequence
tactatatgcttgttacagtgatcc

SEQ ID NO: 102784 - DNA, 25 bp, Probe Sequence
tttataccctccaaattatgcgtct

SEQ ID NO: 102785 - DNA, 25 bp, Probe Sequence
ttataccctccaaattatgcgtctg

SEQ ID NO: 102786 - DNA, 25 bp, Probe Sequence
aatagttcctctgtttatcacctga

SEQ ID NO: 102787 - DNA, 25 bp, Probe Sequence
gcactagaaggcactatgttgaact

SEQ ID NO: 102788 - DNA, 25 bp, Probe Sequence
attacaggtacggtattctcaccaa

SEQ ID NO: 102789 - DNA, 25 bp, Probe Sequence
agtattctcacttcatggttgctgt

SEQ ID NO: 102790 - DNA, 25 bp, Probe Sequence
gcagaaacacaattcaaactcaagt

SEQ ID NO: 102791 - DNA, 25 bp, Probe Sequence
agttcctctgtttatcacctgattt

SEQ ID NO: 102792 - DNA, 25 bp, Probe Sequence
cctatacatagtttatgttcctggc

SEQ ID NO: 102793 - DNA, 25 bp, Probe Sequence
ccctatacatagtttatgttcctgg

SEQ ID NO: 102794 - DNA, 25 bp, Probe Sequence
ctatacatagtttatgttcctggcc

SEQ ID NO: 102795 - DNA, 25 bp, Probe Sequence
gcccctatacatagtttatgttcct

SEQ ID NO: 102796 - DNA, 25 bp, Probe Sequence
cccctatacatagtttatgttcctg

SEQ ID NO: 102797 - DNA, 25 bp, Probe Sequence
ggcccctatacatagtttatgttcc

SEQ ID NO: 102798 - DNA, 25 bp, Probe Sequence
cggcccctatacatagtttatgttc

SEQ ID NO: 102799 - DNA, 25 bp, Probe Sequence
ccggcccctatacatagtttatgtt

SEQ ID NO: 102800 - DNA, 25 bp, Probe Sequence
ctcatccccaacttggctatgaagg

SEQ ID NO: 102801 - DNA, 25 bp, Probe Sequence
cccggcccctatacatagtttatgt

SEQ ID NO: 102802 - DNA, 25 bp, Probe Sequence
tattcatgttccatcgtgtcatctg

SEQ ID NO: 102803 - DNA, 25 bp, Probe Sequence
gtattcatgttccatcgtgtcatct

SEQ ID NO: 102804 - DNA, 25 bp, Probe Sequence
agtattcatgttccatcgtgtcatc

SEQ ID NO: 102805 - DNA, 25 bp, Probe Sequence
ttcagtattcatgttccatcgtgtc

SEQ ID NO: 102806 - DNA, 25 bp, Probe Sequence
cttcagtattcatgttccatcgtgt

SEQ ID NO: 102807 - DNA, 25 bp, Probe Sequence
cagtattcatgttccatcgtgtcat

SEQ ID NO: 102808 - DNA, 25 bp, Probe Sequence
agattgtcagcttcagtattcatgt

SEQ ID NO: 102809 - DNA, 25 bp, Probe Sequence
attgtcagcttcagtattcatgttc

SEQ ID NO: 102810 - DNA, 25 bp, Probe Sequence
gattgtcagcttcagtattcatgtt

SEQ ID NO: 102811 - DNA, 25 bp, Probe Sequence
aagattgtcagcttcagtattcatg

SEQ ID NO: 102812 - DNA, 25 bp, Probe Sequence
tcagcttcagtattcatgttccatc

SEQ ID NO: 102813 - DNA, 25 bp, Probe Sequence
ttgtcagcttcagtattcatgttcc

SEQ ID NO: 102814 - DNA, 25 bp, Probe Sequence
gtcagcttcagtattcatgttccat

SEQ ID NO: 102815 - DNA, 25 bp, Probe Sequence
tcagtattcatgttccatcgtgtca

SEQ ID NO: 102816 - DNA, 25 bp, Probe Sequence
aggctagtgtttccatttattccat

SEQ ID NO: 102817 - DNA, 25 bp, Probe Sequence
gcttcagtattcatgttccatcgtg

SEQ ID NO: 102818 - DNA, 25 bp, Probe Sequence
aaggctagtgtttccatttattcca

SEQ ID NO: 102819 - DNA, 25 bp, Probe Sequence
aaaggctagtgtttccatttattcc

SEQ ID NO: 102820 - DNA, 25 bp, Probe Sequence
cagcttcagtattcatgttccatcg

SEQ ID NO: 102821 - DNA, 25 bp, Probe Sequence
tgtcagcttcagtattcatgttcca

SEQ ID NO: 102822 - DNA, 25 bp, Probe Sequence
agcttcagtattcatgttccatcgt

SEQ ID NO: 102823 - DNA, 25 bp, Probe Sequence
ggctagtgtttccatttattccatg

SEQ ID NO: 102824 - DNA, 25 bp, Probe Sequence
gctagtgtttccatttattccatgt

SEQ ID NO: 102825 - DNA, 25 bp, Probe Sequence
aaatgactttagagatgagtggttt

SEQ ID NO: 102826 - DNA, 25 bp, Probe Sequence
taagtggtccatgaagagtttgatt

SEQ ID NO: 102827 - DNA, 25 bp, Probe Sequence
ctaagtggtccatgaagagtttgat

SEQ ID NO: 102828 - DNA, 25 bp, Probe Sequence
aagtggtccatgaagagtttgattt

SEQ ID NO: 102829 - DNA, 25 bp, Probe Sequence
cctaagtggtccatgaagagtttga

SEQ ID NO: 102830 - DNA, 25 bp, Probe Sequence
tgaagagtttgattttgttttgagc

SEQ ID NO: 102831 - DNA, 25 bp, Probe Sequence
ccctaagtggtccatgaagagtttg

SEQ ID NO: 102832 - DNA, 25 bp, Probe Sequence
ggtccatgaagagtttgattttgtt

SEQ ID NO: 102833 - DNA, 25 bp, Probe Sequence
gtggtccatgaagagtttgattttg

SEQ ID NO: 102834 - DNA, 25 bp, Probe Sequence
agtggtccatgaagagtttgatttt

SEQ ID NO: 102835 - DNA, 25 bp, Probe Sequence
tggtccatgaagagtttgattttgt

SEQ ID NO: 102836 - DNA, 25 bp, Probe Sequence
gtccatgaagagtttgattttgttt

SEQ ID NO: 102837 - DNA, 25 bp, Probe Sequence
ccatgaagagtttgattttgttttg

SEQ ID NO: 102838 - DNA, 25 bp, Probe Sequence
tccatgaagagtttgattttgtttt

SEQ ID NO: 102839 - DNA, 25 bp, Probe Sequence
accctaagtggtccatgaagagttt

SEQ ID NO: 102840 - DNA, 25 bp, Probe Sequence
aaccctaagtggtccatgaagagtt

SEQ ID NO: 102841 - DNA, 25 bp, Probe Sequence
atgaagagtttgattttgttttgag

SEQ ID NO: 102842 - DNA, 25 bp, Probe Sequence
catgaagagtttgattttgttttga

SEQ ID NO: 102843 - DNA, 25 bp, Probe Sequence
caaccctaagtggtccatgaagagt

SEQ ID NO: 102844 - DNA, 25 bp, Probe Sequence
acaaccctaagtggtccatgaagag

SEQ ID NO: 102845 - DNA, 25 bp, Probe Sequence
gacaaccctaagtggtccatgaaga

SEQ ID NO: 102846 - DNA, 25 bp, Probe Sequence
ggacaaccctaagtggtccatgaag

SEQ ID NO: 102847 - DNA, 25 bp, Probe Sequence
aggacaaccctaagtggtccatgaa

SEQ ID NO: 102848 - DNA, 25 bp, Probe Sequence
ttaagagtaaccttgagattgggag

SEQ ID NO: 102849 - DNA, 25 bp, Probe Sequence
tttaagagtaaccttgagattggga

SEQ ID NO: 102850 - DNA, 25 bp, Probe Sequence
gaatagaggaggctggtacaaatag

SEQ ID NO: 102851 - DNA, 25 bp, Probe Sequence
cttgagattgggaggaatagaggag

SEQ ID NO: 102852 - DNA, 25 bp, Probe Sequence
atagaggaggctggtacaaatagat

SEQ ID NO: 102853 - DNA, 25 bp, Probe Sequence
aatagaggaggctggtacaaataga

SEQ ID NO: 102854 - DNA, 25 bp, Probe Sequence
aagagttataggcttaaagatgtcg

SEQ ID NO: 102855 - DNA, 25 bp, Probe Sequence
atttaagagtaaccttgagattggg

SEQ ID NO: 102856 - DNA, 25 bp, Probe Sequence
tagaggaggctggtacaaatagatg

SEQ ID NO: 102857 - DNA, 25 bp, Probe Sequence
ggaatagaggaggctggtacaaata

SEQ ID NO: 102858 - DNA, 25 bp, Probe Sequence
taaccttgagattgggaggaataga

SEQ ID NO: 102859 - DNA, 25 bp, Probe Sequence
gtaaccttgagattgggaggaatag

SEQ ID NO: 102860 - DNA, 25 bp, Probe Sequence
agtaaccttgagattgggaggaata

SEQ ID NO: 102861 - DNA, 25 bp, Probe Sequence
taagagtaaccttgagattgggagg

SEQ ID NO: 102862 - DNA, 25 bp, Probe Sequence
aggcttaaagatgtcgagtaactaa

SEQ ID NO: 102863 - DNA, 25 bp, Probe Sequence
ataggcttaaagatgtcgagtaact

SEQ ID NO: 102864 - DNA, 25 bp, Probe Sequence
agttataggcttaaagatgtcgagt

SEQ ID NO: 102865 - DNA, 25 bp, Probe Sequence
agagttataggcttaaagatgtcga

SEQ ID NO: 102866 - DNA, 25 bp, Probe Sequence
aaccttgagattgggaggaatagag

SEQ ID NO: 102867 - DNA, 25 bp, Probe Sequence
ggcttaaagatgtcgagtaactaaa

SEQ ID NO: 102868 - DNA, 25 bp, Probe Sequence
gagttataggcttaaagatgtcgag

SEQ ID NO: 102869 - DNA, 25 bp, Probe Sequence
taggcttaaagatgtcgagtaacta

SEQ ID NO: 102870 - DNA, 25 bp, Probe Sequence
ttgagattgggaggaatagaggagg

SEQ ID NO: 102871 - DNA, 25 bp, Probe Sequence
gagtaaccttgagattgggaggaat

SEQ ID NO: 102872 - DNA, 25 bp, Probe Sequence
attcagttgttcaggttcattcgtc

SEQ ID NO: 102873 - DNA, 25 bp, Probe Sequence
cattcagttgttcaggttcattcgt

SEQ ID NO: 102874 - DNA, 25 bp, Probe Sequence
acattcagttgttcaggttcattcg

SEQ ID NO: 102875 - DNA, 25 bp, Probe Sequence
tggttaggaaatgtttagttggaga

SEQ ID NO: 102876 - DNA, 25 bp, Probe Sequence
ttcagttgttcaggttcattcgtca

SEQ ID NO: 102877 - DNA, 25 bp, Probe Sequence
caggttcattcgtcaaagttaagtt

SEQ ID NO: 102878 - DNA, 25 bp, Probe Sequence
gttcaggttcattcgtcaaagttaa

SEQ ID NO: 102879 - DNA, 25 bp, Probe Sequence
ttcaggttcattcgtcaaagttaag

SEQ ID NO: 102880 - DNA, 25 bp, Probe Sequence
aggttcattcgtcaaagttaagttt

SEQ ID NO: 102881 - DNA, 25 bp, Probe Sequence
tcaggttcattcgtcaaagttaagt

SEQ ID NO: 102882 - DNA, 25 bp, Probe Sequence
tgttcaggttcattcgtcaaagtta

SEQ ID NO: 102883 - DNA, 25 bp, Probe Sequence
cgtctcacttgaaattgctttgtat

SEQ ID NO: 102884 - DNA, 25 bp, Probe Sequence
atggttaggaaatgtttagttggag

SEQ ID NO: 102885 - DNA, 25 bp, Probe Sequence
gtagattctgttagattagggaggc

SEQ ID NO: 102886 - DNA, 25 bp, Probe Sequence
ggttaggaaatgtttagttggagat

SEQ ID NO: 102887 - DNA, 25 bp, Probe Sequence
tcagttgttcaggttcattcgtcaa

SEQ ID NO: 102888 - DNA, 25 bp, Probe Sequence
gccttacagactgactttacttaaa

SEQ ID NO: 102889 - DNA, 25 bp, Probe Sequence
gcgtgaatttgttattaagcatttg

SEQ ID NO: 102890 - DNA, 25 bp, Probe Sequence
agcgtgaatttgttattaagcattt

SEQ ID NO: 102891 - DNA, 25 bp, Probe Sequence
aagcgtgaatttgttattaagcatt

SEQ ID NO: 102892 - DNA, 25 bp, Probe Sequence
gctctgaaggatttagtagattctg

SEQ ID NO: 102893 - DNA, 25 bp, Probe Sequence
aaagcgtgaatttgttattaagcat

SEQ ID NO: 102894 - DNA, 25 bp, Probe Sequence
agtagattctgttagattagggagg

SEQ ID NO: 102895 - DNA, 25 bp, Probe Sequence
gattacaaattgaaacaaccattgc

SEQ ID NO: 102896 - DNA, 25 bp, Probe Sequence
ctgtgagcaatgtgaggattctatt

SEQ ID NO: 102897 - DNA, 25 bp, Probe Sequence
tagacagcaatgttattaggagcat

SEQ ID NO: 102898 - DNA, 25 bp, Probe Sequence
atagacagcaatgttattaggagca

SEQ ID NO: 102899 - DNA, 25 bp, Probe Sequence
gcaagatgtatctgtactgatgtct

SEQ ID NO: 102900 - DNA, 25 bp, Probe Sequence
agcaagatgtatctgtactgatgtc

SEQ ID NO: 102901 - DNA, 25 bp, Probe Sequence
aagcaagatgtatctgtactgatgt

SEQ ID NO: 102902 - DNA, 25 bp, Probe Sequence
gttcagagaggtagcaactaggtaa

SEQ ID NO: 102903 - DNA, 25 bp, Probe Sequence
agttaagacaccttaccattgctta

SEQ ID NO: 102904 - DNA, 25 bp, Probe Sequence
aagttaagacaccttaccattgctt

SEQ ID NO: 102905 - DNA, 25 bp, Probe Sequence
ttcaagttaagacaccttaccattg

SEQ ID NO: 102906 - DNA, 25 bp, Probe Sequence
gttaagacaccttaccattgcttat

SEQ ID NO: 102907 - DNA, 25 bp, Probe Sequence
caagatgtatctgtactgatgtctc

SEQ ID NO: 102908 - DNA, 25 bp, Probe Sequence
caagttaagacaccttaccattgct

SEQ ID NO: 102909 - DNA, 25 bp, Probe Sequence
tcaagttaagacaccttaccattgc

SEQ ID NO: 102910 - DNA, 25 bp, Probe Sequence
ctggaattattggtagatggcagtc

SEQ ID NO: 102911 - DNA, 25 bp, Probe Sequence
aagatgtatctgtactgatgtctca

SEQ ID NO: 102912 - DNA, 25 bp, Probe Sequence
tatagacagcaatgttattaggagc

SEQ ID NO: 102913 - DNA, 25 bp, Probe Sequence
ttaagacaccttaccattgcttatt

SEQ ID NO: 102914 - DNA, 25 bp, Probe Sequence
taagcaagatgtatctgtactgatg

SEQ ID NO: 102915 - DNA, 25 bp, Probe Sequence
ctggctgactctgtaccttacttac

SEQ ID NO: 102916 - DNA, 25 bp, Probe Sequence
ctctcctggtaatgtttgtggttat

SEQ ID NO: 102917 - DNA, 25 bp, Probe Sequence
tgtgagcaatgtgaggattctattt

SEQ ID NO: 102918 - DNA, 25 bp, Probe Sequence
agggcttccacacacttatttattt

SEQ ID NO: 102919 - DNA, 25 bp, Probe Sequence
tctcctggtaatgtttgtggttata

SEQ ID NO: 102920 - DNA, 25 bp, Probe Sequence
caagtacatcgacctagacaaagac

SEQ ID NO: 102921 - DNA, 25 bp, Probe Sequence
aagtacatcgacctagacaaagacc

SEQ ID NO: 102922 - DNA, 25 bp, Probe Sequence
ccaagtacatcgacctagacaaaga

SEQ ID NO: 102923 - DNA, 25 bp, Probe Sequence
ctcctctcctcccacagattacaaa

SEQ ID NO: 102924 - DNA, 25 bp, Probe Sequence
tacatcgacctagacaaagaccctt

SEQ ID NO: 102925 - DNA, 25 bp, Probe Sequence
gtacatcgacctagacaaagaccct

SEQ ID NO: 102926 - DNA, 25 bp, Probe Sequence
agtacatcgacctagacaaagaccc

SEQ ID NO: 102927 - DNA, 25 bp, Probe Sequence
atcgacctagacaaagacccttctg

SEQ ID NO: 102928 - DNA, 25 bp, Probe Sequence
catcgacctagacaaagacccttct

SEQ ID NO: 102929 - DNA, 25 bp, Probe Sequence
tcctctcctcccacagattacaaaa

SEQ ID NO: 102930 - DNA, 25 bp, Probe Sequence
acatcgacctagacaaagacccttc

SEQ ID NO: 102931 - DNA, 25 bp, Probe Sequence
cctcctctcctcccacagattacaa

SEQ ID NO: 102932 - DNA, 25 bp, Probe Sequence
gaacatgaggaccctctggattaat

SEQ ID NO: 102933 - DNA, 25 bp, Probe Sequence
agaacatgaggaccctctggattaa

SEQ ID NO: 102934 - DNA, 25 bp, Probe Sequence
aagaacatgaggaccctctggatta

SEQ ID NO: 102935 - DNA, 25 bp, Probe Sequence
cagatgatgtccatgttttgtgtga

SEQ ID NO: 102936 - DNA, 25 bp, Probe Sequence
cctctggattaatcgaattacagct

SEQ ID NO: 102937 - DNA, 25 bp, Probe Sequence
gagcctcacagatgatgtccatgtt

SEQ ID NO: 102938 - DNA, 25 bp, Probe Sequence
aaagaacatgaggaccctctggatt

SEQ ID NO: 102939 - DNA, 25 bp, Probe Sequence
ctcacagatgatgtccatgttttgt

SEQ ID NO: 102940 - DNA, 25 bp, Probe Sequence
acagatgatgtccatgttttgtgtg

SEQ ID NO: 102941 - DNA, 25 bp, Probe Sequence
cctcacagatgatgtccatgttttg

SEQ ID NO: 102942 - DNA, 25 bp, Probe Sequence
cagagcctcacagatgatgtccatg

SEQ ID NO: 102943 - DNA, 25 bp, Probe Sequence
gaccctctggattaatcgaattaca

SEQ ID NO: 102944 - DNA, 25 bp, Probe Sequence
agcctcacagatgatgtccatgttt

SEQ ID NO: 102945 - DNA, 25 bp, Probe Sequence
ggaccctctggattaatcgaattac

SEQ ID NO: 102946 - DNA, 25 bp, Probe Sequence
aggaccctctggattaatcgaatta

SEQ ID NO: 102947 - DNA, 25 bp, Probe Sequence
accctctggattaatcgaattacag

SEQ ID NO: 102948 - DNA, 25 bp, Probe Sequence
ccctctggattaatcgaattacagc

SEQ ID NO: 102949 - DNA, 25 bp, Probe Sequence
aacatgaggaccctctggattaatc

SEQ ID NO: 102950 - DNA, 25 bp, Probe Sequence
gaggaccctctggattaatcgaatt

SEQ ID NO: 102951 - DNA, 25 bp, Probe Sequence
gcctcacagatgatgtccatgtttt

SEQ ID NO: 102952 - DNA, 25 bp, Probe Sequence
aaaagaacatgaggaccctctggat

SEQ ID NO: 102953 - DNA, 25 bp, Probe Sequence
tgaggaccctctggattaatcgaat

SEQ ID NO: 102954 - DNA, 25 bp, Probe Sequence
atgaggaccctctggattaatcgaa

SEQ ID NO: 102955 - DNA, 25 bp, Probe Sequence
catgaggaccctctggattaatcga

SEQ ID NO: 102956 - DNA, 25 bp, Probe Sequence
agcctattccaagagtctggtttag

SEQ ID NO: 102957 - DNA, 25 bp, Probe Sequence
atctctaaggatttctgaggagctg

SEQ ID NO: 102958 - DNA, 25 bp, Probe Sequence
gagcctattccaagagtctggttta

SEQ ID NO: 102959 - DNA, 25 bp, Probe Sequence
aatctctaaggatttctgaggagct

SEQ ID NO: 102960 - DNA, 25 bp, Probe Sequence
ctctaaggatttctgaggagctgtc

SEQ ID NO: 102961 - DNA, 25 bp, Probe Sequence
ctattccaagagtctggtttagggc

SEQ ID NO: 102962 - DNA, 25 bp, Probe Sequence
tctctaaggatttctgaggagctgt

SEQ ID NO: 102963 - DNA, 25 bp, Probe Sequence
tctaaggatttctgaggagctgtca

SEQ ID NO: 102964 - DNA, 25 bp, Probe Sequence
tattccaagagtctggtttagggct

SEQ ID NO: 102965 - DNA, 25 bp, Probe Sequence
agagcctattccaagagtctggttt

SEQ ID NO: 102966 - DNA, 25 bp, Probe Sequence
cttcacctctgagtcttaggcgatg

SEQ ID NO: 102967 - DNA, 25 bp, Probe Sequence
cctattccaagagtctggtttaggg

SEQ ID NO: 102968 - DNA, 25 bp, Probe Sequence
tcttcacctctgagtcttaggcgat

SEQ ID NO: 102969 - DNA, 25 bp, Probe Sequence
atcttcacctctgagtcttaggcga

SEQ ID NO: 102970 - DNA, 25 bp, Probe Sequence
gcctattccaagagtctggtttagg

SEQ ID NO: 102971 - DNA, 25 bp, Probe Sequence
tgtctcatctcatgattcacattaa

SEQ ID NO: 102972 - DNA, 25 bp, Probe Sequence
ttgtctcatctcatgattcacatta

SEQ ID NO: 102973 - DNA, 25 bp, Probe Sequence
tctcatgattcacattaaactctgt

SEQ ID NO: 102974 - DNA, 25 bp, Probe Sequence
aaatctctaaggatttctgaggagc

SEQ ID NO: 102975 - DNA, 25 bp, Probe Sequence
atctcatgattcacattaaactctg

SEQ ID NO: 102976 - DNA, 25 bp, Probe Sequence
catctcatgattcacattaaactct

SEQ ID NO: 102977 - DNA, 25 bp, Probe Sequence
cagagcctattccaagagtctggtt

SEQ ID NO: 102978 - DNA, 25 bp, Probe Sequence
attccaagagtctggtttagggctg

SEQ ID NO: 102979 - DNA, 25 bp, Probe Sequence
gattcacattaaactctgtgccatg

SEQ ID NO: 102980 - DNA, 25 bp, Probe Sequence
caaacagagagaagccactttattc

SEQ ID NO: 102981 - DNA, 25 bp, Probe Sequence
tagaaacccatacacaaagttgagt

SEQ ID NO: 102982 - DNA, 25 bp, Probe Sequence
taatacacagcttgttcaggagttc

SEQ ID NO: 102983 - DNA, 25 bp, Probe Sequence
atgtaatacacagcttgttcaggag

SEQ ID NO: 102984 - DNA, 25 bp, Probe Sequence
gtaatacacagcttgttcaggagtt

SEQ ID NO: 102985 - DNA, 25 bp, Probe Sequence
aaacagagagaagccactttattcc

SEQ ID NO: 102986 - DNA, 25 bp, Probe Sequence
ttagaaacccatacacaaagttgag

SEQ ID NO: 102987 - DNA, 25 bp, Probe Sequence
catgtaatacacagcttgttcagga

SEQ ID NO: 102988 - DNA, 25 bp, Probe Sequence
tttagaaacccatacacaaagttga

SEQ ID NO: 102989 - DNA, 25 bp, Probe Sequence
gcaaacagagagaagccactttatt

SEQ ID NO: 102990 - DNA, 25 bp, Probe Sequence
taatttctacctgtaattccagccc

SEQ ID NO: 102991 - DNA, 25 bp, Probe Sequence
tgtaatacacagcttgttcaggagt

SEQ ID NO: 102992 - DNA, 25 bp, Probe Sequence
gtaatttctacctgtaattccagcc

SEQ ID NO: 102993 - DNA, 25 bp, Probe Sequence
aatacacagcttgttcaggagttct

SEQ ID NO: 102994 - DNA, 25 bp, Probe Sequence
tgcatgtaatacacagcttgttcag

SEQ ID NO: 102995 - DNA, 25 bp, Probe Sequence
ctgcatgtaatacacagcttgttca

SEQ ID NO: 102996 - DNA, 25 bp, Probe Sequence
gcatgtaatacacagcttgttcagg

SEQ ID NO: 102997 - DNA, 25 bp, Probe Sequence
atttctacctgtaattccagccctt

SEQ ID NO: 102998 - DNA, 25 bp, Probe Sequence
aatttctacctgtaattccagccct

SEQ ID NO: 102999 - DNA, 25 bp, Probe Sequence
agaaacccatacacaaagttgagtg

SEQ ID NO: 103000 - DNA, 25 bp, Probe Sequence
atacacagcttgttcaggagttctc

SEQ ID NO: 103001 - DNA, 25 bp, Probe Sequence
aacagagagaagccactttattccc

SEQ ID NO: 103002 - DNA, 25 bp, Probe Sequence
tttctacctgtaattccagcccttt

SEQ ID NO: 103003 - DNA, 25 bp, Probe Sequence
cctgcatgtaatacacagcttgttc

SEQ ID NO: 103004 - DNA, 25 bp, Probe Sequence
cagatgaatacgaggtggactggag

SEQ ID NO: 103005 - DNA, 25 bp, Probe Sequence
ttgcagatgaatacgaggtggactg

SEQ ID NO: 103006 - DNA, 25 bp, Probe Sequence
tttgcagatgaatacgaggtggact

SEQ ID NO: 103007 - DNA, 25 bp, Probe Sequence
cttttgcagatgaatacgaggtgga

SEQ ID NO: 103008 - DNA, 25 bp, Probe Sequence
ttttgcagatgaatacgaggtggac

SEQ ID NO: 103009 - DNA, 25 bp, Probe Sequence
gcttttgcagatgaatacgaggtgg

SEQ ID NO: 103010 - DNA, 25 bp, Probe Sequence
ggcttttgcagatgaatacgaggtg

SEQ ID NO: 103011 - DNA, 25 bp, Probe Sequence
atctcggcttttgcagatgaatacg

SEQ ID NO: 103012 - DNA, 25 bp, Probe Sequence
tctcggcttttgcagatgaatacga

SEQ ID NO: 103013 - DNA, 25 bp, Probe Sequence
catccaactcctgaaatccaataaa

SEQ ID NO: 103014 - DNA, 25 bp, Probe Sequence
tcatccaactcctgaaatccaataa

SEQ ID NO: 103015 - DNA, 25 bp, Probe Sequence
gtcatccaactcctgaaatccaata

SEQ ID NO: 103016 - DNA, 25 bp, Probe Sequence
catctaaacagtcgtcatccaactc

SEQ ID NO: 103017 - DNA, 25 bp, Probe Sequence
atctaaacagtcgtcatccaactcc

SEQ ID NO: 103018 - DNA, 25 bp, Probe Sequence
ccatctaaacagtcgtcatccaact

SEQ ID NO: 103019 - DNA, 25 bp, Probe Sequence
atgtcccatctaaacagtcgtcatc

SEQ ID NO: 103020 - DNA, 25 bp, Probe Sequence
ccaactcctgaaatccaataaaaca

SEQ ID NO: 103021 - DNA, 25 bp, Probe Sequence
tccaactcctgaaatccaataaaac

SEQ ID NO: 103022 - DNA, 25 bp, Probe Sequence
cgtcatccaactcctgaaatccaat

SEQ ID NO: 103023 - DNA, 25 bp, Probe Sequence
tacagggagttgagactgatgatgt

SEQ ID NO: 103024 - DNA, 25 bp, Probe Sequence
cccatctaaacagtcgtcatccaac

SEQ ID NO: 103025 - DNA, 25 bp, Probe Sequence
tcccatctaaacagtcgtcatccaa

SEQ ID NO: 103026 - DNA, 25 bp, Probe Sequence
gtacagggagttgagactgatgatg

SEQ ID NO: 103027 - DNA, 25 bp, Probe Sequence
tctaaacagtcgtcatccaactcct

SEQ ID NO: 103028 - DNA, 25 bp, Probe Sequence
atccaactcctgaaatccaataaaa

SEQ ID NO: 103029 - DNA, 25 bp, Probe Sequence
ctaaacagtcgtcatccaactcctg

SEQ ID NO: 103030 - DNA, 25 bp, Probe Sequence
caactcctgaaatccaataaaacaa

SEQ ID NO: 103031 - DNA, 25 bp, Probe Sequence
gagactgatgatgtcccatctaaac

SEQ ID NO: 103032 - DNA, 25 bp, Probe Sequence
ctgatgatgtcccatctaaacagtc

SEQ ID NO: 103033 - DNA, 25 bp, Probe Sequence
gactgatgatgtcccatctaaacag

SEQ ID NO: 103034 - DNA, 25 bp, Probe Sequence
tgagactgatgatgtcccatctaaa

SEQ ID NO: 103035 - DNA, 25 bp, Probe Sequence
ttgagactgatgatgtcccatctaa

SEQ ID NO: 103036 - DNA, 25 bp, Probe Sequence
ctaagtgtggtacagggagttgaga

SEQ ID NO: 103037 - DNA, 25 bp, Probe Sequence
ctgtgtgaactctcagacatctctt

SEQ ID NO: 103038 - DNA, 25 bp, Probe Sequence
gtttacttggagaagagattgaagc

SEQ ID NO: 103039 - DNA, 25 bp, Probe Sequence
caaaccaacaaacccaactctaatg

SEQ ID NO: 103040 - DNA, 25 bp, Probe Sequence
ctctaatgctgcatcttggactatc

SEQ ID NO: 103041 - DNA, 25 bp, Probe Sequence
tgtttacttggagaagagattgaag

SEQ ID NO: 103042 - DNA, 25 bp, Probe Sequence
ttaactcttatgttacttctcctgg

SEQ ID NO: 103043 - DNA, 25 bp, Probe Sequence
actctaatgctgcatcttggactat

SEQ ID NO: 103044 - DNA, 25 bp, Probe Sequence
gaagcctggatctgtgtgtatgtac

SEQ ID NO: 103045 - DNA, 25 bp, Probe Sequence
ccaaaccaacaaacccaactctaat

SEQ ID NO: 103046 - DNA, 25 bp, Probe Sequence
actcttatcaatcccaaccatcctc

SEQ ID NO: 103047 - DNA, 25 bp, Probe Sequence
aactctaatgctgcatcttggacta

SEQ ID NO: 103048 - DNA, 25 bp, Probe Sequence
ttgtttacttggagaagagattgaa

SEQ ID NO: 103049 - DNA, 25 bp, Probe Sequence
tttgtttacttggagaagagattga

SEQ ID NO: 103050 - DNA, 25 bp, Probe Sequence
cttatcaatcccaaccatcctcctt

SEQ ID NO: 103051 - DNA, 25 bp, Probe Sequence
cactcttatcaatcccaaccatcct

SEQ ID NO: 103052 - DNA, 25 bp, Probe Sequence
gtgtgaactctcagacatctctttc

SEQ ID NO: 103053 - DNA, 25 bp, Probe Sequence
aaaccaacaaacccaactctaatgc

SEQ ID NO: 103054 - DNA, 25 bp, Probe Sequence
ctcttatcaatcccaaccatcctcc

SEQ ID NO: 103055 - DNA, 25 bp, Probe Sequence
atgtgtgtgtgtgaatagctctctg

SEQ ID NO: 103056 - DNA, 25 bp, Probe Sequence
catgtgtgtgtgtgaatagctctct

SEQ ID NO: 103057 - DNA, 25 bp, Probe Sequence
tgtgtgaactctcagacatctcttt

SEQ ID NO: 103058 - DNA, 25 bp, Probe Sequence
tttacttggagaagagattgaagct

SEQ ID NO: 103059 - DNA, 25 bp, Probe Sequence
taactcttatgttacttctcctggg

SEQ ID NO: 103060 - DNA, 25 bp, Probe Sequence
ttatcaatcccaaccatcctccttg

SEQ ID NO: 103061 - DNA, 25 bp, Probe Sequence
tggacaactaagaataacaagcctt

SEQ ID NO: 103062 - DNA, 25 bp, Probe Sequence
ttggacaactaagaataacaagcct

SEQ ID NO: 103063 - DNA, 25 bp, Probe Sequence
acaatctgattagcatctctactga

SEQ ID NO: 103064 - DNA, 25 bp, Probe Sequence
cacaatctgattagcatctctactg

SEQ ID NO: 103065 - DNA, 25 bp, Probe Sequence
ggaatctcaataatgacacagaggt

SEQ ID NO: 103066 - DNA, 25 bp, Probe Sequence
tggaatctcaataatgacacagagg

SEQ ID NO: 103067 - DNA, 25 bp, Probe Sequence
tcacaatctgattagcatctctact

SEQ ID NO: 103068 - DNA, 25 bp, Probe Sequence
ctcacaatctgattagcatctctac

SEQ ID NO: 103069 - DNA, 25 bp, Probe Sequence
taatcctgctcttaatcgtgtgaga

SEQ ID NO: 103070 - DNA, 25 bp, Probe Sequence
gtaatcctgctcttaatcgtgtgag

SEQ ID NO: 103071 - DNA, 25 bp, Probe Sequence
gtggaatctcaataatgacacagag

SEQ ID NO: 103072 - DNA, 25 bp, Probe Sequence
cttgttgttggtggtacatattcag

SEQ ID NO: 103073 - DNA, 25 bp, Probe Sequence
tcttgttgttggtggtacatattca

SEQ ID NO: 103074 - DNA, 25 bp, Probe Sequence
caatctgattagcatctctactgat

SEQ ID NO: 103075 - DNA, 25 bp, Probe Sequence
ggacagattgttatatacgatgtgg

SEQ ID NO: 103076 - DNA, 25 bp, Probe Sequence
aatcctgctcttaatcgtgtgagat

SEQ ID NO: 103077 - DNA, 25 bp, Probe Sequence
ggtaatcctgctcttaatcgtgtga

SEQ ID NO: 103078 - DNA, 25 bp, Probe Sequence
tacacctatccatgttcattctgac

SEQ ID NO: 103079 - DNA, 25 bp, Probe Sequence
aggatagcatggagttggttcataa

SEQ ID NO: 103080 - DNA, 25 bp, Probe Sequence
gaatctcaataatgacacagaggta

SEQ ID NO: 103081 - DNA, 25 bp, Probe Sequence
atacacctatccatgttcattctga

SEQ ID NO: 103082 - DNA, 25 bp, Probe Sequence
catacacctatccatgttcattctg

SEQ ID NO: 103083 - DNA, 25 bp, Probe Sequence
gcatacacctatccatgttcattct

SEQ ID NO: 103084 - DNA, 25 bp, Probe Sequence
ttgttgttggtggtacatattcagg

SEQ ID NO: 103085 - DNA, 25 bp, Probe Sequence
tagaccagtgaggcagaatatgtat

SEQ ID NO: 103086 - DNA, 25 bp, Probe Sequence
gtagaccagtgaggcagaatatgta

SEQ ID NO: 103087 - DNA, 25 bp, Probe Sequence
gagagtacggcaatgaagaagataa

SEQ ID NO: 103088 - DNA, 25 bp, Probe Sequence
agaccagtgaggcagaatatgtatc

SEQ ID NO: 103089 - DNA, 25 bp, Probe Sequence
agagagtacggcaatgaagaagata

SEQ ID NO: 103090 - DNA, 25 bp, Probe Sequence
tagagagtacggcaatgaagaagat

SEQ ID NO: 103091 - DNA, 25 bp, Probe Sequence
gcagcagatcgtaaccattatagac

SEQ ID NO: 103092 - DNA, 25 bp, Probe Sequence
ctagagagtacggcaatgaagaaga

SEQ ID NO: 103093 - DNA, 25 bp, Probe Sequence
taggagatgaagagactgtggagtt

SEQ ID NO: 103094 - DNA, 25 bp, Probe Sequence
tgtaggagatgaagagactgtggag

SEQ ID NO: 103095 - DNA, 25 bp, Probe Sequence
gaccagtgaggcagaatatgtatcg

SEQ ID NO: 103096 - DNA, 25 bp, Probe Sequence
gtttgatgttgttgaaggagaagag

SEQ ID NO: 103097 - DNA, 25 bp, Probe Sequence
gagtttgatgttgttgaaggagaag

SEQ ID NO: 103098 - DNA, 25 bp, Probe Sequence
agtttgatgttgttgaaggagaaga

SEQ ID NO: 103099 - DNA, 25 bp, Probe Sequence
ctaaatcacaagatggcaaagagac

SEQ ID NO: 103100 - DNA, 25 bp, Probe Sequence
tatgcagcagatcgtaaccattata

SEQ ID NO: 103101 - DNA, 25 bp, Probe Sequence
atatgcagcagatcgtaaccattat

SEQ ID NO: 103102 - DNA, 25 bp, Probe Sequence
aatatgcagcagatcgtaaccatta

SEQ ID NO: 103103 - DNA, 25 bp, Probe Sequence
taaatcacaagatggcaaagagaca

SEQ ID NO: 103104 - DNA, 25 bp, Probe Sequence
aaggtagaccagtgaggcagaatat

SEQ ID NO: 103105 - DNA, 25 bp, Probe Sequence
cctagagagtacggcaatgaagaag

SEQ ID NO: 103106 - DNA, 25 bp, Probe Sequence
tacaccagactgccataaagaataa

SEQ ID NO: 103107 - DNA, 25 bp, Probe Sequence
atgcagcagatcgtaaccattatag

SEQ ID NO: 103108 - DNA, 25 bp, Probe Sequence
tttgatgttgttgaaggagaagagg

SEQ ID NO: 103109 - DNA, 25 bp, Probe Sequence
ctatggctatgttgatgctacctac

SEQ ID NO: 103110 - DNA, 25 bp, Probe Sequence
tctatggctatgttgatgctaccta

SEQ ID NO: 103111 - DNA, 25 bp, Probe Sequence
atctatggctatgttgatgctacct

SEQ ID NO: 103112 - DNA, 25 bp, Probe Sequence
tatggctatgttgatgctacctacc

SEQ ID NO: 103113 - DNA, 25 bp, Probe Sequence
ttaaggagatgtgttaccgataccg

SEQ ID NO: 103114 - DNA, 25 bp, Probe Sequence
tttaaggagatgtgttaccgatacc

SEQ ID NO: 103115 - DNA, 25 bp, Probe Sequence
ctttaaggagatgtgttaccgatac

SEQ ID NO: 103116 - DNA, 25 bp, Probe Sequence
tctttaaggagatgtgttaccgata

SEQ ID NO: 103117 - DNA, 25 bp, Probe Sequence
ctctttaaggagatgtgttaccgat

SEQ ID NO: 103118 - DNA, 25 bp, Probe Sequence
caataagagatgccctgtactgatg

SEQ ID NO: 103119 - DNA, 25 bp, Probe Sequence
ctcctacatctatggctatgttgat

SEQ ID NO: 103120 - DNA, 25 bp, Probe Sequence
ctacatctatggctatgttgatgct

SEQ ID NO: 103121 - DNA, 25 bp, Probe Sequence
tcctacatctatggctatgttgatg

SEQ ID NO: 103122 - DNA, 25 bp, Probe Sequence
cagcctctttaaggagatgtgttac

SEQ ID NO: 103123 - DNA, 25 bp, Probe Sequence
acatctatggctatgttgatgctac

SEQ ID NO: 103124 - DNA, 25 bp, Probe Sequence
tacatctatggctatgttgatgcta

SEQ ID NO: 103125 - DNA, 25 bp, Probe Sequence
catctatggctatgttgatgctacc

SEQ ID NO: 103126 - DNA, 25 bp, Probe Sequence
cctacatctatggctatgttgatgc

SEQ ID NO: 103127 - DNA, 25 bp, Probe Sequence
gctcctacatctatggctatgttga

SEQ ID NO: 103128 - DNA, 25 bp, Probe Sequence
tcctgggattctagtatgcaataag

SEQ ID NO: 103129 - DNA, 25 bp, Probe Sequence
aataagagatgccctgtactgatgc

SEQ ID NO: 103130 - DNA, 25 bp, Probe Sequence
cctctttaaggagatgtgttaccga

SEQ ID NO: 103131 - DNA, 25 bp, Probe Sequence
cctgggattctagtatgcaataaga

SEQ ID NO: 103132 - DNA, 25 bp, Probe Sequence
atcctgggattctagtatgcaataa

SEQ ID NO: 103133 - DNA, 25 bp, Probe Sequence
gtataaaatggttgggaagctgcac

SEQ ID NO: 103134 - DNA, 25 bp, Probe Sequence
tgtataaaatggttgggaagctgca

SEQ ID NO: 103135 - DNA, 25 bp, Probe Sequence
tataaaatggttgggaagctgcacc

SEQ ID NO: 103136 - DNA, 25 bp, Probe Sequence
ttctcaacagacattccagtgatag

SEQ ID NO: 103137 - DNA, 25 bp, Probe Sequence
caacagacattccagtgatagcatc

SEQ ID NO: 103138 - DNA, 25 bp, Probe Sequence
gtgatagcatccaatgacctatgta

SEQ ID NO: 103139 - DNA, 25 bp, Probe Sequence
agacattccagtgatagcatccaat

SEQ ID NO: 103140 - DNA, 25 bp, Probe Sequence
atagcatccaatgacctatgtaacg

SEQ ID NO: 103141 - DNA, 25 bp, Probe Sequence
tgatagcatccaatgacctatgtaa

SEQ ID NO: 103142 - DNA, 25 bp, Probe Sequence
gatagcatccaatgacctatgtaac

SEQ ID NO: 103143 - DNA, 25 bp, Probe Sequence
cagtgatagcatccaatgacctatg

SEQ ID NO: 103144 - DNA, 25 bp, Probe Sequence
agtgatagcatccaatgacctatgt

SEQ ID NO: 103145 - DNA, 25 bp, Probe Sequence
tagcatccaatgacctatgtaacgg

SEQ ID NO: 103146 - DNA, 25 bp, Probe Sequence
tcaacagacattccagtgatagcat

SEQ ID NO: 103147 - DNA, 25 bp, Probe Sequence
ccagtgatagcatccaatgacctat

SEQ ID NO: 103148 - DNA, 25 bp, Probe Sequence
cagacattccagtgatagcatccaa

SEQ ID NO: 103149 - DNA, 25 bp, Probe Sequence
aacagacattccagtgatagcatcc

SEQ ID NO: 103150 - DNA, 25 bp, Probe Sequence
tctcaacagacattccagtgatagc

SEQ ID NO: 103151 - DNA, 25 bp, Probe Sequence
attccagtgatagcatccaatgacc

SEQ ID NO: 103152 - DNA, 25 bp, Probe Sequence
ctcaacagacattccagtgatagca

SEQ ID NO: 103153 - DNA, 25 bp, Probe Sequence
tccagtgatagcatccaatgaccta

SEQ ID NO: 103154 - DNA, 25 bp, Probe Sequence
cgtttatttctcaacagacattcca

SEQ ID NO: 103155 - DNA, 25 bp, Probe Sequence
ttatttctcaacagacattccagtg

SEQ ID NO: 103156 - DNA, 25 bp, Probe Sequence
tttctcaacagacattccagtgata

SEQ ID NO: 103157 - DNA, 25 bp, Probe Sequence
tatttctcaacagacattccagtga

SEQ ID NO: 103158 - DNA, 25 bp, Probe Sequence
atttctcaacagacattccagtgat

SEQ ID NO: 103159 - DNA, 25 bp, Probe Sequence
tttatttctcaacagacattccagt

SEQ ID NO: 103160 - DNA, 25 bp, Probe Sequence
cacatggggtatgaaattgttgata

SEQ ID NO: 103161 - DNA, 25 bp, Probe Sequence
tcacatggggtatgaaattgttgat

SEQ ID NO: 103162 - DNA, 25 bp, Probe Sequence
tggggtatgaaattgttgatacttt

SEQ ID NO: 103163 - DNA, 25 bp, Probe Sequence
atggggtatgaaattgttgatactt

SEQ ID NO: 103164 - DNA, 25 bp, Probe Sequence
acatggggtatgaaattgttgatac

SEQ ID NO: 103165 - DNA, 25 bp, Probe Sequence
catggggtatgaaattgttgatact

SEQ ID NO: 103166 - DNA, 25 bp, Probe Sequence
ggtatgaaattgttgatactttagg

SEQ ID NO: 103167 - DNA, 25 bp, Probe Sequence
gggtatgaaattgttgatactttag

SEQ ID NO: 103168 - DNA, 25 bp, Probe Sequence
ggggtatgaaattgttgatacttta

SEQ ID NO: 103169 - DNA, 25 bp, Probe Sequence
gttcacatggggtatgaaattgttg

SEQ ID NO: 103170 - DNA, 25 bp, Probe Sequence
ttcacatggggtatgaaattgttga

SEQ ID NO: 103171 - DNA, 25 bp, Probe Sequence
gtatgaaattgttgatactttaggt

SEQ ID NO: 103172 - DNA, 25 bp, Probe Sequence
cgttcacatggggtatgaaattgtt

SEQ ID NO: 103173 - DNA, 25 bp, Probe Sequence
gtcgttcacatggggtatgaaattg

SEQ ID NO: 103174 - DNA, 25 bp, Probe Sequence
tcgttcacatggggtatgaaattgt

SEQ ID NO: 103175 - DNA, 25 bp, Probe Sequence
cgtcgttcacatggggtatgaaatt

SEQ ID NO: 103176 - DNA, 25 bp, Probe Sequence
tcgtcgttcacatggggtatgaaat

SEQ ID NO: 103177 - DNA, 25 bp, Probe Sequence
atcgtcgttcacatggggtatgaaa

SEQ ID NO: 103178 - DNA, 25 bp, Probe Sequence
catcgtcgttcacatggggtatgaa

SEQ ID NO: 103179 - DNA, 25 bp, Probe Sequence
ccaatgacttttctttactccccag

SEQ ID NO: 103180 - DNA, 25 bp, Probe Sequence
caatgacttttctttactccccagc

SEQ ID NO: 103181 - DNA, 25 bp, Probe Sequence
gtgtcccaatgacttttctttactc

SEQ ID NO: 103182 - DNA, 25 bp, Probe Sequence
tgtgtcccaatgacttttctttact

SEQ ID NO: 103183 - DNA, 25 bp, Probe Sequence
tgtcccaatgacttttctttactcc

SEQ ID NO: 103184 - DNA, 25 bp, Probe Sequence
tcccaatgacttttctttactcccc

SEQ ID NO: 103185 - DNA, 25 bp, Probe Sequence
gtcccaatgacttttctttactccc

SEQ ID NO: 103186 - DNA, 25 bp, Probe Sequence
cccaatgacttttctttactcccca

SEQ ID NO: 103187 - DNA, 25 bp, Probe Sequence
aatgacttttctttactccccagct

SEQ ID NO: 103188 - DNA, 25 bp, Probe Sequence
taatgataatggagatgtctggacc

SEQ ID NO: 103189 - DNA, 25 bp, Probe Sequence
ttaatgataatggagatgtctggac

SEQ ID NO: 103190 - DNA, 25 bp, Probe Sequence
tttctcttccactcctatcctcttt

SEQ ID NO: 103191 - DNA, 25 bp, Probe Sequence
agcaccgtgatttcaagtaataaac

SEQ ID NO: 103192 - DNA, 25 bp, Probe Sequence
gagcaccgtgatttcaagtaataaa

SEQ ID NO: 103193 - DNA, 25 bp, Probe Sequence
gcaccgtgatttcaagtaataaaca

SEQ ID NO: 103194 - DNA, 25 bp, Probe Sequence
gtttctcttccactcctatcctctt

SEQ ID NO: 103195 - DNA, 25 bp, Probe Sequence
cttcatttctttaacaaggagagca

SEQ ID NO: 103196 - DNA, 25 bp, Probe Sequence
accgtgatttcaagtaataaacaga

SEQ ID NO: 103197 - DNA, 25 bp, Probe Sequence
tcatttctttaacaaggagagcaaa

SEQ ID NO: 103198 - DNA, 25 bp, Probe Sequence
ttcatttctttaacaaggagagcaa

SEQ ID NO: 103199 - DNA, 25 bp, Probe Sequence
caccgtgatttcaagtaataaacag

SEQ ID NO: 103200 - DNA, 25 bp, Probe Sequence
tgaagaactgtcttggatacctatt

SEQ ID NO: 103201 - DNA, 25 bp, Probe Sequence
ttgaagaactgtcttggatacctat

SEQ ID NO: 103202 - DNA, 25 bp, Probe Sequence
ctgtttctcttccactcctatcctc

SEQ ID NO: 103203 - DNA, 25 bp, Probe Sequence
cgagcaccgtgatttcaagtaataa

SEQ ID NO: 103204 - DNA, 25 bp, Probe Sequence
aatgataatggagatgtctggaccc

SEQ ID NO: 103205 - DNA, 25 bp, Probe Sequence
tgtttctcttccactcctatcctct

SEQ ID NO: 103206 - DNA, 25 bp, Probe Sequence
gactgtttctcttccactcctatcc

SEQ ID NO: 103207 - DNA, 25 bp, Probe Sequence
actgtttctcttccactcctatcct

SEQ ID NO: 103208 - DNA, 25 bp, Probe Sequence
ccgtgatttcaagtaataaacagaa

SEQ ID NO: 103209 - DNA, 25 bp, Probe Sequence
gataatggagatgtctggacccttc

SEQ ID NO: 103210 - DNA, 25 bp, Probe Sequence
tttaatgataatggagatgtctgga

SEQ ID NO: 103211 - DNA, 25 bp, Probe Sequence
atgataatggagatgtctggaccct

SEQ ID NO: 103212 - DNA, 25 bp, Probe Sequence
catttctttcatgttgtgggttctg

SEQ ID NO: 103213 - DNA, 25 bp, Probe Sequence
atttctttcatgttgtgggttctgg

SEQ ID NO: 103214 - DNA, 25 bp, Probe Sequence
gtggaggaagtaaagaaacagaccc

SEQ ID NO: 103215 - DNA, 25 bp, Probe Sequence
gtagcaccatttctttcatgttgtg

SEQ ID NO: 103216 - DNA, 25 bp, Probe Sequence
cgtggaggaagtaaagaaacagacc

SEQ ID NO: 103217 - DNA, 25 bp, Probe Sequence
ccgtggaggaagtaaagaaacagac

SEQ ID NO: 103218 - DNA, 25 bp, Probe Sequence
ccatttctttcatgttgtgggttct

SEQ ID NO: 103219 - DNA, 25 bp, Probe Sequence
tagcaccatttctttcatgttgtgg

SEQ ID NO: 103220 - DNA, 25 bp, Probe Sequence
ggtagcaccatttctttcatgttgt

SEQ ID NO: 103221 - DNA, 25 bp, Probe Sequence
accatttctttcatgttgtgggttc

SEQ ID NO: 103222 - DNA, 25 bp, Probe Sequence
caccatttctttcatgttgtgggtt

SEQ ID NO: 103223 - DNA, 25 bp, Probe Sequence
gggtagcaccatttctttcatgttg

SEQ ID NO: 103224 - DNA, 25 bp, Probe Sequence
tttctttcatgttgtgggttctggg

SEQ ID NO: 103225 - DNA, 25 bp, Probe Sequence
tgggtagcaccatttctttcatgtt

SEQ ID NO: 103226 - DNA, 25 bp, Probe Sequence
tggaggaagtaaagaaacagacccg

SEQ ID NO: 103227 - DNA, 25 bp, Probe Sequence
tccgtggaggaagtaaagaaacaga

SEQ ID NO: 103228 - DNA, 25 bp, Probe Sequence
aggaagtaaagaaacagacccgctt

SEQ ID NO: 103229 - DNA, 25 bp, Probe Sequence
ctgggtagcaccatttctttcatgt

SEQ ID NO: 103230 - DNA, 25 bp, Probe Sequence
ctccgtggaggaagtaaagaaacag

SEQ ID NO: 103231 - DNA, 25 bp, Probe Sequence
gactccgtggaggaagtaaagaaac

SEQ ID NO: 103232 - DNA, 25 bp, Probe Sequence
gaggaagtaaagaaacagacccgct

SEQ ID NO: 103233 - DNA, 25 bp, Probe Sequence
ttctttcatgttgtgggttctggga

SEQ ID NO: 103234 - DNA, 25 bp, Probe Sequence
gaagtaaagaaacagacccgcttct

SEQ ID NO: 103235 - DNA, 25 bp, Probe Sequence
actccgtggaggaagtaaagaaaca

SEQ ID NO: 103236 - DNA, 25 bp, Probe Sequence
gataagcacactaagacactggtag

SEQ ID NO: 103237 - DNA, 25 bp, Probe Sequence
agataagcacactaagacactggta

SEQ ID NO: 103238 - DNA, 25 bp, Probe Sequence
ttgttgtctactcttccacttcctt

SEQ ID NO: 103239 - DNA, 25 bp, Probe Sequence
aagataagcacactaagacactggt

SEQ ID NO: 103240 - DNA, 25 bp, Probe Sequence
tactatgtgtcaggcactcatctaa

SEQ ID NO: 103241 - DNA, 25 bp, Probe Sequence
ttactatgtgtcaggcactcatcta

SEQ ID NO: 103242 - DNA, 25 bp, Probe Sequence
ctcatctaagaactcgtagctcatt

SEQ ID NO: 103243 - DNA, 25 bp, Probe Sequence
actcatctaagaactcgtagctcat

SEQ ID NO: 103244 - DNA, 25 bp, Probe Sequence
tatgtgtcaggcactcatctaagaa

SEQ ID NO: 103245 - DNA, 25 bp, Probe Sequence
caggcactcatctaagaactcgtag

SEQ ID NO: 103246 - DNA, 25 bp, Probe Sequence
ttgtgacaggtatgttgaatcttat

SEQ ID NO: 103247 - DNA, 25 bp, Probe Sequence
taagcacactaagacactggtagta

SEQ ID NO: 103248 - DNA, 25 bp, Probe Sequence
ctaacaacaacctgtgtggtatgta

SEQ ID NO: 103249 - DNA, 25 bp, Probe Sequence
ctatgtgtcaggcactcatctaaga

SEQ ID NO: 103250 - DNA, 25 bp, Probe Sequence
cttacgtctcttactatgtgtcagg

SEQ ID NO: 103251 - DNA, 25 bp, Probe Sequence
tcttacgtctcttactatgtgtcag

SEQ ID NO: 103252 - DNA, 25 bp, Probe Sequence
tcaggcactcatctaagaactcgta

SEQ ID NO: 103253 - DNA, 25 bp, Probe Sequence
ataagcacactaagacactggtagt

SEQ ID NO: 103254 - DNA, 25 bp, Probe Sequence
ctcatttaagcctaacaacaacctg

SEQ ID NO: 103255 - DNA, 25 bp, Probe Sequence
actatgtgtcaggcactcatctaag

SEQ ID NO: 103256 - DNA, 25 bp, Probe Sequence
cttactatgtgtcaggcactcatct

SEQ ID NO: 103257 - DNA, 25 bp, Probe Sequence
tcttactatgtgtcaggcactcatc

SEQ ID NO: 103258 - DNA, 25 bp, Probe Sequence
ctcttactatgtgtcaggcactcat

SEQ ID NO: 103259 - DNA, 25 bp, Probe Sequence
aaagataagcacactaagacactgg

SEQ ID NO: 103260 - DNA, 25 bp, Probe Sequence
gtagtgctaataactctcctgtctg

SEQ ID NO: 103261 - DNA, 25 bp, Probe Sequence
gagttcctgatggcattagtcatat

SEQ ID NO: 103262 - DNA, 25 bp, Probe Sequence
tattcatacctctgagttcctgatg

SEQ ID NO: 103263 - DNA, 25 bp, Probe Sequence
ttcctgatggcattagtcatatagt

SEQ ID NO: 103264 - DNA, 25 bp, Probe Sequence
agttcctgatggcattagtcatata

SEQ ID NO: 103265 - DNA, 25 bp, Probe Sequence
cctattcatacctctgagttcctga

SEQ ID NO: 103266 - DNA, 25 bp, Probe Sequence
ctattcatacctctgagttcctgat

SEQ ID NO: 103267 - DNA, 25 bp, Probe Sequence
ggtagtgctaataactctcctgtct

SEQ ID NO: 103268 - DNA, 25 bp, Probe Sequence
gttcctgatggcattagtcatatag

SEQ ID NO: 103269 - DNA, 25 bp, Probe Sequence
tacttcttcaccaggtcattgattg

SEQ ID NO: 103270 - DNA, 25 bp, Probe Sequence
tgagttcctgatggcattagtcata

SEQ ID NO: 103271 - DNA, 25 bp, Probe Sequence
atcggtagtgctaataactctcctg

SEQ ID NO: 103272 - DNA, 25 bp, Probe Sequence
catcggtagtgctaataactctcct

SEQ ID NO: 103273 - DNA, 25 bp, Probe Sequence
cttgtacttcttcaccaggtcattg

SEQ ID NO: 103274 - DNA, 25 bp, Probe Sequence
tagtgctaataactctcctgtctgc

SEQ ID NO: 103275 - DNA, 25 bp, Probe Sequence
gtacttcttcaccaggtcattgatt

SEQ ID NO: 103276 - DNA, 25 bp, Probe Sequence
tcctgatggcattagtcatatagta

SEQ ID NO: 103277 - DNA, 25 bp, Probe Sequence
attcatacctctgagttcctgatgg

SEQ ID NO: 103278 - DNA, 25 bp, Probe Sequence
atatactcggacgacatcttctgta

SEQ ID NO: 103279 - DNA, 25 bp, Probe Sequence
tgtacttcttcaccaggtcattgat

SEQ ID NO: 103280 - DNA, 25 bp, Probe Sequence
tatactcggacgacatcttctgtac

SEQ ID NO: 103281 - DNA, 25 bp, Probe Sequence
cggtagtgctaataactctcctgtc

SEQ ID NO: 103282 - DNA, 25 bp, Probe Sequence
ttgtacttcttcaccaggtcattga

SEQ ID NO: 103283 - DNA, 25 bp, Probe Sequence
cctgatggcattagtcatatagtaa

SEQ ID NO: 103284 - DNA, 25 bp, Probe Sequence
tgacttacctatatgactaatgcca

SEQ ID NO: 103285 - DNA, 25 bp, Probe Sequence
atatgactaatgccatcaggaactc

SEQ ID NO: 103286 - DNA, 25 bp, Probe Sequence
catcaggaactcagaggtatgaata

SEQ ID NO: 103287 - DNA, 25 bp, Probe Sequence
tcaggaactcagaggtatgaatagg

SEQ ID NO: 103288 - DNA, 25 bp, Probe Sequence
tatatgactaatgccatcaggaact

SEQ ID NO: 103289 - DNA, 25 bp, Probe Sequence
atcaggaactcagaggtatgaatag

SEQ ID NO: 103290 - DNA, 25 bp, Probe Sequence
ctatatgactaatgccatcaggaac

SEQ ID NO: 103291 - DNA, 25 bp, Probe Sequence
tatgactaatgccatcaggaactca

SEQ ID NO: 103292 - DNA, 25 bp, Probe Sequence
ccatcaggaactcagaggtatgaat

SEQ ID NO: 103293 - DNA, 25 bp, Probe Sequence
cctatatgactaatgccatcaggaa

SEQ ID NO: 103294 - DNA, 25 bp, Probe Sequence
acctatatgactaatgccatcagga

SEQ ID NO: 103295 - DNA, 25 bp, Probe Sequence
atgacttacctatatgactaatgcc

SEQ ID NO: 103296 - DNA, 25 bp, Probe Sequence
tacctatatgactaatgccatcagg

SEQ ID NO: 103297 - DNA, 25 bp, Probe Sequence
aatcttattaccaactccttgtgat

SEQ ID NO: 103298 - DNA, 25 bp, Probe Sequence
acttacctatatgactaatgccatc

SEQ ID NO: 103299 - DNA, 25 bp, Probe Sequence
gacttacctatatgactaatgccat

SEQ ID NO: 103300 - DNA, 25 bp, Probe Sequence
atgactaatgccatcaggaactcag

SEQ ID NO: 103301 - DNA, 25 bp, Probe Sequence
ttacctatatgactaatgccatcag

SEQ ID NO: 103302 - DNA, 25 bp, Probe Sequence
cttacctatatgactaatgccatca

SEQ ID NO: 103303 - DNA, 25 bp, Probe Sequence
atggtccagccttcagttattcttc

SEQ ID NO: 103304 - DNA, 25 bp, Probe Sequence
taatgccatcaggaactcagaggta

SEQ ID NO: 103305 - DNA, 25 bp, Probe Sequence
gactaatgccatcaggaactcagag

SEQ ID NO: 103306 - DNA, 25 bp, Probe Sequence
gtccagccttcagttattcttcact

SEQ ID NO: 103307 - DNA, 25 bp, Probe Sequence
gagggcagagaagactttatacaac

SEQ ID NO: 103308 - DNA, 25 bp, Probe Sequence
agtaactatgtgctaatacctgagg

SEQ ID NO: 103309 - DNA, 25 bp, Probe Sequence
tgagtaactatgtgctaatacctga

SEQ ID NO: 103310 - DNA, 25 bp, Probe Sequence
gagtaactatgtgctaatacctgag

SEQ ID NO: 103311 - DNA, 25 bp, Probe Sequence
atgagtaactatgtgctaatacctg

SEQ ID NO: 103312 - DNA, 25 bp, Probe Sequence
ttgagattctatccagggcaataag

SEQ ID NO: 103313 - DNA, 25 bp, Probe Sequence
tgagattctatccagggcaataaga

SEQ ID NO: 103314 - DNA, 25 bp, Probe Sequence
gttgagattctatccagggcaataa

SEQ ID NO: 103315 - DNA, 25 bp, Probe Sequence
tgctagaaagacataaactaccact

SEQ ID NO: 103316 - DNA, 25 bp, Probe Sequence
acttagatgaaattgacagattgct

SEQ ID NO: 103317 - DNA, 25 bp, Probe Sequence
tgttatagttgagattctatccagg

SEQ ID NO: 103318 - DNA, 25 bp, Probe Sequence
agttgagattctatccagggcaata

SEQ ID NO: 103319 - DNA, 25 bp, Probe Sequence
tagttgagattctatccagggcaat

SEQ ID NO: 103320 - DNA, 25 bp, Probe Sequence
aaattgacagattgctagaaagaca

SEQ ID NO: 103321 - DNA, 25 bp, Probe Sequence
tcagattagaaaggaagaaataggc

SEQ ID NO: 103322 - DNA, 25 bp, Probe Sequence
gtaactatgtgctaatacctgaggt

SEQ ID NO: 103323 - DNA, 25 bp, Probe Sequence
ttgctagaaagacataaactaccac

SEQ ID NO: 103324 - DNA, 25 bp, Probe Sequence
aattgacagattgctagaaagacat

SEQ ID NO: 103325 - DNA, 25 bp, Probe Sequence
tgaaattgacagattgctagaaaga

SEQ ID NO: 103326 - DNA, 25 bp, Probe Sequence
tatagttgagattctatccagggca

SEQ ID NO: 103327 - DNA, 25 bp, Probe Sequence
gaaattgacagattgctagaaagac

SEQ ID NO: 103328 - DNA, 25 bp, Probe Sequence
agatgaaattgacagattgctagaa

SEQ ID NO: 103329 - DNA, 25 bp, Probe Sequence
ttatagttgagattctatccagggc

SEQ ID NO: 103330 - DNA, 25 bp, Probe Sequence
cctgaggtaacttagatgaaattga

SEQ ID NO: 103331 - DNA, 25 bp, Probe Sequence
gctagaaagacataaactaccactt

SEQ ID NO: 103332 - DNA, 25 bp, Probe Sequence
caattctagtatggcttgttggcaa

SEQ ID NO: 103333 - DNA, 25 bp, Probe Sequence
agtgtaatggaagacctttgagaac

SEQ ID NO: 103334 - DNA, 25 bp, Probe Sequence
tagtgtaatggaagacctttgagaa

SEQ ID NO: 103335 - DNA, 25 bp, Probe Sequence
aacctgggtgtattaactttgtgta

SEQ ID NO: 103336 - DNA, 25 bp, Probe Sequence
ttgagaacctgggtgtattaacttt

SEQ ID NO: 103337 - DNA, 25 bp, Probe Sequence
tttgagaacctgggtgtattaactt

SEQ ID NO: 103338 - DNA, 25 bp, Probe Sequence
acctgggtgtattaactttgtgtat

SEQ ID NO: 103339 - DNA, 25 bp, Probe Sequence
ctttgagaacctgggtgtattaact

SEQ ID NO: 103340 - DNA, 25 bp, Probe Sequence
gagaacctgggtgtattaactttgt

SEQ ID NO: 103341 - DNA, 25 bp, Probe Sequence
tgagaacctgggtgtattaactttg

SEQ ID NO: 103342 - DNA, 25 bp, Probe Sequence
gtaatggaagacctttgagaacctg

SEQ ID NO: 103343 - DNA, 25 bp, Probe Sequence
agaacctgggtgtattaactttgtg

SEQ ID NO: 103344 - DNA, 25 bp, Probe Sequence
tgtaatggaagacctttgagaacct

SEQ ID NO: 103345 - DNA, 25 bp, Probe Sequence
gtgtaatggaagacctttgagaacc

SEQ ID NO: 103346 - DNA, 25 bp, Probe Sequence
gaacctgggtgtattaactttgtgt

SEQ ID NO: 103347 - DNA, 25 bp, Probe Sequence
cctttgagaacctgggtgtattaac

SEQ ID NO: 103348 - DNA, 25 bp, Probe Sequence
cctgggtgtattaactttgtgtata

SEQ ID NO: 103349 - DNA, 25 bp, Probe Sequence
aattctagtatggcttgttggcaaa

SEQ ID NO: 103350 - DNA, 25 bp, Probe Sequence
taatggaagacctttgagaacctgg

SEQ ID NO: 103351 - DNA, 25 bp, Probe Sequence
attctagtatggcttgttggcaaag

SEQ ID NO: 103352 - DNA, 25 bp, Probe Sequence
ttctagtatggcttgttggcaaaga

SEQ ID NO: 103353 - DNA, 25 bp, Probe Sequence
acctttgagaacctgggtgtattaa

SEQ ID NO: 103354 - DNA, 25 bp, Probe Sequence
gttagaggccaacaattctagtatg

SEQ ID NO: 103355 - DNA, 25 bp, Probe Sequence
gacctttgagaacctgggtgtatta

SEQ ID NO: 103356 - DNA, 25 bp, Probe Sequence
tattaacataccagacattgacagc

SEQ ID NO: 103357 - DNA, 25 bp, Probe Sequence
attaacataccagacattgacagcg

SEQ ID NO: 103358 - DNA, 25 bp, Probe Sequence
taacataccagacattgacagcgaa

SEQ ID NO: 103359 - DNA, 25 bp, Probe Sequence
ttaacataccagacattgacagcga

SEQ ID NO: 103360 - DNA, 25 bp, Probe Sequence
ataccagacattgacagcgaacatt

SEQ ID NO: 103361 - DNA, 25 bp, Probe Sequence
ttctggttaaaggtatagtggatgc

SEQ ID NO: 103362 - DNA, 25 bp, Probe Sequence
ctggttaaaggtatagtggatgcta

SEQ ID NO: 103363 - DNA, 25 bp, Probe Sequence
ctccagatagtgcctttgattgaaa

SEQ ID NO: 103364 - DNA, 25 bp, Probe Sequence
tctggttaaaggtatagtggatgct

SEQ ID NO: 103365 - DNA, 25 bp, Probe Sequence
ataacctgaaatgtttacttgtgcc

SEQ ID NO: 103366 - DNA, 25 bp, Probe Sequence
cttgaaagttactgctgctctatta

SEQ ID NO: 103367 - DNA, 25 bp, Probe Sequence
taacctgaaatgtttacttgtgcct

SEQ ID NO: 103368 - DNA, 25 bp, Probe Sequence
gataacctgaaatgtttacttgtgc

SEQ ID NO: 103369 - DNA, 25 bp, Probe Sequence
acctgaaatgtttacttgtgccttt

SEQ ID NO: 103370 - DNA, 25 bp, Probe Sequence
agttactgctgctctattattaaca

SEQ ID NO: 103371 - DNA, 25 bp, Probe Sequence
gcttgaaagttactgctgctctatt

SEQ ID NO: 103372 - DNA, 25 bp, Probe Sequence
tctccagatagtgcctttgattgaa

SEQ ID NO: 103373 - DNA, 25 bp, Probe Sequence
taactctccagatagtgcctttgat

SEQ ID NO: 103374 - DNA, 25 bp, Probe Sequence
tttctggttaaaggtatagtggatg

SEQ ID NO: 103375 - DNA, 25 bp, Probe Sequence
tgaaagttactgctgctctattatt

SEQ ID NO: 103376 - DNA, 25 bp, Probe Sequence
ttgaaagttactgctgctctattat

SEQ ID NO: 103377 - DNA, 25 bp, Probe Sequence
atattaacataccagacattgacag

SEQ ID NO: 103378 - DNA, 25 bp, Probe Sequence
aacctgaaatgtttacttgtgcctt

SEQ ID NO: 103379 - DNA, 25 bp, Probe Sequence
cataccagacattgacagcgaacat

SEQ ID NO: 103380 - DNA, 25 bp, Probe Sequence
aaagtaactgtggtgatggaaatgt

SEQ ID NO: 103381 - DNA, 25 bp, Probe Sequence
atgtaagcataaagtgatgtgatgg

SEQ ID NO: 103382 - DNA, 25 bp, Probe Sequence
actactgaggtggttctttctatcc

SEQ ID NO: 103383 - DNA, 25 bp, Probe Sequence
aagtaactgtggtgatggaaatgtg

SEQ ID NO: 103384 - DNA, 25 bp, Probe Sequence
ggtggttctttctatcctagtacag

SEQ ID NO: 103385 - DNA, 25 bp, Probe Sequence
gtggttctttctatcctagtacagt

SEQ ID NO: 103386 - DNA, 25 bp, Probe Sequence
aactgtggtgatggaaatgtgttag

SEQ ID NO: 103387 - DNA, 25 bp, Probe Sequence
tgtaagcataaagtgatgtgatggc

SEQ ID NO: 103388 - DNA, 25 bp, Probe Sequence
tggttctttctatcctagtacagtc

SEQ ID NO: 103389 - DNA, 25 bp, Probe Sequence
ggttctttctatcctagtacagtct

SEQ ID NO: 103390 - DNA, 25 bp, Probe Sequence
gtaactgtggtgatggaaatgtgtt

SEQ ID NO: 103391 - DNA, 25 bp, Probe Sequence
tactgaggtggttctttctatccta

SEQ ID NO: 103392 - DNA, 25 bp, Probe Sequence
aaatacttaacactttgtggcaaca

SEQ ID NO: 103393 - DNA, 25 bp, Probe Sequence
cactactgaggtggttctttctatc

SEQ ID NO: 103394 - DNA, 25 bp, Probe Sequence
tgaggtggttctttctatcctagta

SEQ ID NO: 103395 - DNA, 25 bp, Probe Sequence
acactactgaggtggttctttctat

SEQ ID NO: 103396 - DNA, 25 bp, Probe Sequence
agtaactgtggtgatggaaatgtgt

SEQ ID NO: 103397 - DNA, 25 bp, Probe Sequence
ctactgaggtggttctttctatcct

SEQ ID NO: 103398 - DNA, 25 bp, Probe Sequence
catgtaagcataaagtgatgtgatg

SEQ ID NO: 103399 - DNA, 25 bp, Probe Sequence
taactgtggtgatggaaatgtgtta

SEQ ID NO: 103400 - DNA, 25 bp, Probe Sequence
aggtggttctttctatcctagtaca

SEQ ID NO: 103401 - DNA, 25 bp, Probe Sequence
gaggtggttctttctatcctagtac

SEQ ID NO: 103402 - DNA, 25 bp, Probe Sequence
ctgaggtggttctttctatcctagt

SEQ ID NO: 103403 - DNA, 25 bp, Probe Sequence
actgaggtggttctttctatcctag

SEQ ID NO: 103404 - DNA, 25 bp, Probe Sequence
cactacagaactccatcttactcaa

SEQ ID NO: 103405 - DNA, 25 bp, Probe Sequence
tcactacagaactccatcttactca

SEQ ID NO: 103406 - DNA, 25 bp, Probe Sequence
actacagaactccatcttactcaag

SEQ ID NO: 103407 - DNA, 25 bp, Probe Sequence
atcactacagaactccatcttactc

SEQ ID NO: 103408 - DNA, 25 bp, Probe Sequence
gcaaccataacttatcttgtccttc

SEQ ID NO: 103409 - DNA, 25 bp, Probe Sequence
ttcttatacatctcctccatctgaa

SEQ ID NO: 103410 - DNA, 25 bp, Probe Sequence
caaccataacttatcttgtccttct

SEQ ID NO: 103411 - DNA, 25 bp, Probe Sequence
ttgtccttctaagccagattctcaa

SEQ ID NO: 103412 - DNA, 25 bp, Probe Sequence
aacttatcttgtccttctaagccag

SEQ ID NO: 103413 - DNA, 25 bp, Probe Sequence
tatcactacagaactccatcttact

SEQ ID NO: 103414 - DNA, 25 bp, Probe Sequence
tcttgtccttctaagccagattctc

SEQ ID NO: 103415 - DNA, 25 bp, Probe Sequence
taacttatcttgtccttctaagcca

SEQ ID NO: 103416 - DNA, 25 bp, Probe Sequence
acttatcttgtccttctaagccaga

SEQ ID NO: 103417 - DNA, 25 bp, Probe Sequence
cttgtccttctaagccagattctca

SEQ ID NO: 103418 - DNA, 25 bp, Probe Sequence
gaattatcactacagaactccatct

SEQ ID NO: 103419 - DNA, 25 bp, Probe Sequence
tgaattatcactacagaactccatc

SEQ ID NO: 103420 - DNA, 25 bp, Probe Sequence
ttatcactacagaactccatcttac

SEQ ID NO: 103421 - DNA, 25 bp, Probe Sequence
ataacttatcttgtccttctaagcc

SEQ ID NO: 103422 - DNA, 25 bp, Probe Sequence
aattatcactacagaactccatctt

SEQ ID NO: 103423 - DNA, 25 bp, Probe Sequence
tacatctcctccatctgaaacaaag

SEQ ID NO: 103424 - DNA, 25 bp, Probe Sequence
atacatctcctccatctgaaacaaa

SEQ ID NO: 103425 - DNA, 25 bp, Probe Sequence
gctttcttatacatctcctccatct

SEQ ID NO: 103426 - DNA, 25 bp, Probe Sequence
catctgaaacaaaggaaagcaaaca

SEQ ID NO: 103427 - DNA, 25 bp, Probe Sequence
accataacttatcttgtccttctaa

SEQ ID NO: 103428 - DNA, 25 bp, Probe Sequence
aagtgtatctatgtgctcaaggaac

SEQ ID NO: 103429 - DNA, 25 bp, Probe Sequence
ctcagccttatagtaggaatgtgtc

SEQ ID NO: 103430 - DNA, 25 bp, Probe Sequence
ttctcagccttatagtaggaatgtg

SEQ ID NO: 103431 - DNA, 25 bp, Probe Sequence
tctcagccttatagtaggaatgtgt

SEQ ID NO: 103432 - DNA, 25 bp, Probe Sequence
agtgtatctatgtgctcaaggaaca

SEQ ID NO: 103433 - DNA, 25 bp, Probe Sequence
tcagccttatagtaggaatgtgtcc

SEQ ID NO: 103434 - DNA, 25 bp, Probe Sequence
aaagtgtatctatgtgctcaaggaa

SEQ ID NO: 103435 - DNA, 25 bp, Probe Sequence
tcaaggaacatacagaatgcagata

SEQ ID NO: 103436 - DNA, 25 bp, Probe Sequence
caaggaacatacagaatgcagataa

SEQ ID NO: 103437 - DNA, 25 bp, Probe Sequence
ctcaaggaacatacagaatgcagat

SEQ ID NO: 103438 - DNA, 25 bp, Probe Sequence
cagtaagtattgaactcccttctct

SEQ ID NO: 103439 - DNA, 25 bp, Probe Sequence
tcagtaagtattgaactcccttctc

SEQ ID NO: 103440 - DNA, 25 bp, Probe Sequence
aggaacatacagaatgcagataatt

SEQ ID NO: 103441 - DNA, 25 bp, Probe Sequence
aaggaacatacagaatgcagataat

SEQ ID NO: 103442 - DNA, 25 bp, Probe Sequence
agtaagtattgaactcccttctctt

SEQ ID NO: 103443 - DNA, 25 bp, Probe Sequence
atcacacctgtaatttcagcattct

SEQ ID NO: 103444 - DNA, 25 bp, Probe Sequence
gtgtatctatgtgctcaaggaacat

SEQ ID NO: 103445 - DNA, 25 bp, Probe Sequence
gtaagtattgaactcccttctcttt

SEQ ID NO: 103446 - DNA, 25 bp, Probe Sequence
ctcaactcagagtccaaccacttac

SEQ ID NO: 103447 - DNA, 25 bp, Probe Sequence
tttctcagccttatagtaggaatgt

SEQ ID NO: 103448 - DNA, 25 bp, Probe Sequence
tctcaactcagagtccaaccactta

SEQ ID NO: 103449 - DNA, 25 bp, Probe Sequence
gatcacacctgtaatttcagcattc

SEQ ID NO: 103450 - DNA, 25 bp, Probe Sequence
tcacacctgtaatttcagcattctg

SEQ ID NO: 103451 - DNA, 25 bp, Probe Sequence
atgtgctcaaggaacatacagaatg

SEQ ID NO: 103452 - DNA, 25 bp, Probe Sequence
gcttagatgtgttagaatgaatgaa

SEQ ID NO: 103453 - DNA, 25 bp, Probe Sequence
gttagaatgaatgaaataggctggg

SEQ ID NO: 103454 - DNA, 25 bp, Probe Sequence
gctcagcttagatgtgttagaatga

SEQ ID NO: 103455 - DNA, 25 bp, Probe Sequence
tgttagaatgaatgaaataggctgg

SEQ ID NO: 103456 - DNA, 25 bp, Probe Sequence
ttagaatgaatgaaataggctgggc

SEQ ID NO: 103457 - DNA, 25 bp, Probe Sequence
cagcttagatgtgttagaatgaatg

SEQ ID NO: 103458 - DNA, 25 bp, Probe Sequence
ctcagcttagatgtgttagaatgaa

SEQ ID NO: 103459 - DNA, 25 bp, Probe Sequence
agcttagatgtgttagaatgaatga

SEQ ID NO: 103460 - DNA, 25 bp, Probe Sequence
tgtgttagaatgaatgaaataggct

SEQ ID NO: 103461 - DNA, 25 bp, Probe Sequence
tagattccctgtcacctactttctc

SEQ ID NO: 103462 - DNA, 25 bp, Probe Sequence
gtgttagaatgaatgaaataggctg

SEQ ID NO: 103463 - DNA, 25 bp, Probe Sequence
tcagcttagatgtgttagaatgaat

SEQ ID NO: 103464 - DNA, 25 bp, Probe Sequence
atgtgttagaatgaatgaaataggc

SEQ ID NO: 103465 - DNA, 25 bp, Probe Sequence
agctcagcttagatgtgttagaatg

SEQ ID NO: 103466 - DNA, 25 bp, Probe Sequence
aaccacttgtcttggctgtagattc

SEQ ID NO: 103467 - DNA, 25 bp, Probe Sequence
tagaatgaatgaaataggctgggcg

SEQ ID NO: 103468 - DNA, 25 bp, Probe Sequence
caaccacttgtcttggctgtagatt

SEQ ID NO: 103469 - DNA, 25 bp, Probe Sequence
attccctgtcacctactttctcctc

SEQ ID NO: 103470 - DNA, 25 bp, Probe Sequence
gattccctgtcacctactttctcct

SEQ ID NO: 103471 - DNA, 25 bp, Probe Sequence
agattccctgtcacctactttctcc

SEQ ID NO: 103472 - DNA, 25 bp, Probe Sequence
gtagattccctgtcacctactttct

SEQ ID NO: 103473 - DNA, 25 bp, Probe Sequence
tgtagattccctgtcacctactttc

SEQ ID NO: 103474 - DNA, 25 bp, Probe Sequence
ctgtagattccctgtcacctacttt

SEQ ID NO: 103475 - DNA, 25 bp, Probe Sequence
ccctgtcacctactttctcctcaaa

SEQ ID NO: 103476 - DNA, 25 bp, Probe Sequence
taataaaagctaggcgtgtttgatg

SEQ ID NO: 103477 - DNA, 25 bp, Probe Sequence
aataataaaagctaggcgtgtttga

SEQ ID NO: 103478 - DNA, 25 bp, Probe Sequence
ataataaaagctaggcgtgtttgat

SEQ ID NO: 103479 - DNA, 25 bp, Probe Sequence
tatactgaggggtctataggtttgt

SEQ ID NO: 103480 - DNA, 25 bp, Probe Sequence
gaggggtctataggtttgtgattaa

SEQ ID NO: 103481 - DNA, 25 bp, Probe Sequence
tgaggggtctataggtttgtgatta

SEQ ID NO: 103482 - DNA, 25 bp, Probe Sequence
aaataataaaagctaggcgtgtttg

SEQ ID NO: 103483 - DNA, 25 bp, Probe Sequence
aggggtctataggtttgtgattaaa

SEQ ID NO: 103484 - DNA, 25 bp, Probe Sequence
atactgaggggtctataggtttgtg

SEQ ID NO: 103485 - DNA, 25 bp, Probe Sequence
ggtatactgaggggtctataggttt

SEQ ID NO: 103486 - DNA, 25 bp, Probe Sequence
gtatactgaggggtctataggtttg

SEQ ID NO: 103487 - DNA, 25 bp, Probe Sequence
ggggtctataggtttgtgattaaaa

SEQ ID NO: 103488 - DNA, 25 bp, Probe Sequence
ctgaggggtctataggtttgtgatt

SEQ ID NO: 103489 - DNA, 25 bp, Probe Sequence
aaaataataaaagctaggcgtgttt

SEQ ID NO: 103490 - DNA, 25 bp, Probe Sequence
cagacctatatctggagtgagaggc

SEQ ID NO: 103491 - DNA, 25 bp, Probe Sequence
ggatgaattttccagacctatatct

SEQ ID NO: 103492 - DNA, 25 bp, Probe Sequence
tactgaggggtctataggtttgtga

SEQ ID NO: 103493 - DNA, 25 bp, Probe Sequence
gggtatactgaggggtctataggtt

SEQ ID NO: 103494 - DNA, 25 bp, Probe Sequence
gagggtatactgaggggtctatagg

SEQ ID NO: 103495 - DNA, 25 bp, Probe Sequence
ggagggtatactgaggggtctatag

SEQ ID NO: 103496 - DNA, 25 bp, Probe Sequence
aataaaagctaggcgtgtttgatgc

SEQ ID NO: 103497 - DNA, 25 bp, Probe Sequence
actgaggggtctataggtttgtgat

SEQ ID NO: 103498 - DNA, 25 bp, Probe Sequence
taaaataataaaagctaggcgtgtt

SEQ ID NO: 103499 - DNA, 25 bp, Probe Sequence
ttaaaataataaaagctaggcgtgt

SEQ ID NO: 103500 - DNA, 25 bp, Probe Sequence
gagtgtattggtctgtctgctatca

SEQ ID NO: 103501 - DNA, 25 bp, Probe Sequence
agtgtattggtctgtctgctatcag

SEQ ID NO: 103502 - DNA, 25 bp, Probe Sequence
cgagtgtattggtctgtctgctatc

SEQ ID NO: 103503 - DNA, 25 bp, Probe Sequence
acgagtgtattggtctgtctgctat

SEQ ID NO: 103504 - DNA, 25 bp, Probe Sequence
tattggtctgtctgctatcagctat

SEQ ID NO: 103505 - DNA, 25 bp, Probe Sequence
gtattggtctgtctgctatcagcta

SEQ ID NO: 103506 - DNA, 25 bp, Probe Sequence
cacgagtgtattggtctgtctgcta

SEQ ID NO: 103507 - DNA, 25 bp, Probe Sequence
attggtctgtctgctatcagctatg

SEQ ID NO: 103508 - DNA, 25 bp, Probe Sequence
gtgtattggtctgtctgctatcagc

SEQ ID NO: 103509 - DNA, 25 bp, Probe Sequence
tgtattggtctgtctgctatcagct

SEQ ID NO: 103510 - DNA, 25 bp, Probe Sequence
ttggtctgtctgctatcagctatgc

SEQ ID NO: 103511 - DNA, 25 bp, Probe Sequence
ctcattcggtgttttgggaagagag

SEQ ID NO: 103512 - DNA, 25 bp, Probe Sequence
cattcggtgttttgggaagagagtc

SEQ ID NO: 103513 - DNA, 25 bp, Probe Sequence
gtctcattcggtgttttgggaagag

SEQ ID NO: 103514 - DNA, 25 bp, Probe Sequence
ctacctgcacgagtgtattggtctg

SEQ ID NO: 103515 - DNA, 25 bp, Probe Sequence
tcattcggtgttttgggaagagagt

SEQ ID NO: 103516 - DNA, 25 bp, Probe Sequence
aaggtctcattcggtgttttgggaa

SEQ ID NO: 103517 - DNA, 25 bp, Probe Sequence
gagagaaggtctcattcggtgtttt

SEQ ID NO: 103518 - DNA, 25 bp, Probe Sequence
cttccactacctgcacgagtgtatt

SEQ ID NO: 103519 - DNA, 25 bp, Probe Sequence
attcggtgttttgggaagagagtcg

SEQ ID NO: 103520 - DNA, 25 bp, Probe Sequence
aggtctcattcggtgttttgggaag

SEQ ID NO: 103521 - DNA, 25 bp, Probe Sequence
gaaggtctcattcggtgttttggga

SEQ ID NO: 103522 - DNA, 25 bp, Probe Sequence
ggtctcattcggtgttttgggaaga

SEQ ID NO: 103523 - DNA, 25 bp, Probe Sequence
agaaggtctcattcggtgttttggg

SEQ ID NO: 103524 - DNA, 25 bp, Probe Sequence
tcagaagcagtaatgcagcagtaag

SEQ ID NO: 103525 - DNA, 25 bp, Probe Sequence
ctcagaagcagtaatgcagcagtaa

SEQ ID NO: 103526 - DNA, 25 bp, Probe Sequence
cagtaatgcagcagtaagccgaaag

SEQ ID NO: 103527 - DNA, 25 bp, Probe Sequence
taatgcagcagtaagccgaaaggat

SEQ ID NO: 103528 - DNA, 25 bp, Probe Sequence
cagaagcagtaatgcagcagtaagc

SEQ ID NO: 103529 - DNA, 25 bp, Probe Sequence
taagtgacaacccctcttgactcag

SEQ ID NO: 103530 - DNA, 25 bp, Probe Sequence
gtaagtgacaacccctcttgactca

SEQ ID NO: 103531 - DNA, 25 bp, Probe Sequence
cttgactcagtacgtggacaccatc

SEQ ID NO: 103532 - DNA, 25 bp, Probe Sequence
agtgacaacccctcttgactcagta

SEQ ID NO: 103533 - DNA, 25 bp, Probe Sequence
gtgacaacccctcttgactcagtac

SEQ ID NO: 103534 - DNA, 25 bp, Probe Sequence
ggtaagtgacaacccctcttgactc

SEQ ID NO: 103535 - DNA, 25 bp, Probe Sequence
tctttgtgaatagaaactggatgcc

SEQ ID NO: 103536 - DNA, 25 bp, Probe Sequence
tgtcatggaaatgtaagagtggaat

SEQ ID NO: 103537 - DNA, 25 bp, Probe Sequence
ttgtcatggaaatgtaagagtggaa

SEQ ID NO: 103538 - DNA, 25 bp, Probe Sequence
tttgtcatggaaatgtaagagtgga

SEQ ID NO: 103539 - DNA, 25 bp, Probe Sequence
gtttgtcatggaaatgtaagagtgg

SEQ ID NO: 103540 - DNA, 25 bp, Probe Sequence
tgtttgtcatggaaatgtaagagtg

SEQ ID NO: 103541 - DNA, 25 bp, Probe Sequence
ctgtttgtcatggaaatgtaagagt

SEQ ID NO: 103542 - DNA, 25 bp, Probe Sequence
tcagtttagttctgtaatgtcagga

SEQ ID NO: 103543 - DNA, 25 bp, Probe Sequence
tctgtttgtcatggaaatgtaagag

SEQ ID NO: 103544 - DNA, 25 bp, Probe Sequence
gttgatgctgagatccatatttagt

SEQ ID NO: 103545 - DNA, 25 bp, Probe Sequence
tgttgatgctgagatccatatttag

SEQ ID NO: 103546 - DNA, 25 bp, Probe Sequence
ctgttgatgctgagatccatattta

SEQ ID NO: 103547 - DNA, 25 bp, Probe Sequence
gctgttgatgctgagatccatattt

SEQ ID NO: 103548 - DNA, 25 bp, Probe Sequence
ttctgtttgtcatggaaatgtaaga

SEQ ID NO: 103549 - DNA, 25 bp, Probe Sequence
cagtttagttctgtaatgtcaggaa

SEQ ID NO: 103550 - DNA, 25 bp, Probe Sequence
ttcagtttagttctgtaatgtcagg

SEQ ID NO: 103551 - DNA, 25 bp, Probe Sequence
gtcatggaaatgtaagagtggaata

SEQ ID NO: 103552 - DNA, 25 bp, Probe Sequence
tgatgctgagatccatatttagttt

SEQ ID NO: 103553 - DNA, 25 bp, Probe Sequence
ttgatgctgagatccatatttagtt

SEQ ID NO: 103554 - DNA, 25 bp, Probe Sequence
agtttagttctgtaatgtcaggaat

SEQ ID NO: 103555 - DNA, 25 bp, Probe Sequence
ctttgtgaatagaaactggatgcca

SEQ ID NO: 103556 - DNA, 25 bp, Probe Sequence
tcatggaaatgtaagagtggaatat

SEQ ID NO: 103557 - DNA, 25 bp, Probe Sequence
tttgtgaatagaaactggatgccac

SEQ ID NO: 103558 - DNA, 25 bp, Probe Sequence
ttctttgtgaatagaaactggatgc

SEQ ID NO: 103559 - DNA, 25 bp, Probe Sequence
gaagagtattaacctgtgtgctgta

SEQ ID NO: 103560 - DNA, 25 bp, Probe Sequence
attatgaggaggttggagcagatag

SEQ ID NO: 103561 - DNA, 25 bp, Probe Sequence
gattatgaggaggttggagcagata

SEQ ID NO: 103562 - DNA, 25 bp, Probe Sequence
aagagtattaacctgtgtgctgtac

SEQ ID NO: 103563 - DNA, 25 bp, Probe Sequence
gtgaagagtattaacctgtgtgctg

SEQ ID NO: 103564 - DNA, 25 bp, Probe Sequence
gagaaggattatgaggaggttggag

SEQ ID NO: 103565 - DNA, 25 bp, Probe Sequence
tgaagagtattaacctgtgtgctgt

SEQ ID NO: 103566 - DNA, 25 bp, Probe Sequence
tgagaaggattatgaggaggttgga

SEQ ID NO: 103567 - DNA, 25 bp, Probe Sequence
ttatgaggaggttggagcagatagt

SEQ ID NO: 103568 - DNA, 25 bp, Probe Sequence
cttactgtagcagagatcaccaatg

SEQ ID NO: 103569 - DNA, 25 bp, Probe Sequence
tttgttctgtaaatgtctattgccg

SEQ ID NO: 103570 - DNA, 25 bp, Probe Sequence
tgttctgtaaatgtctattgccgta

SEQ ID NO: 103571 - DNA, 25 bp, Probe Sequence
ctggcttcaaggttggcattaatta

SEQ ID NO: 103572 - DNA, 25 bp, Probe Sequence
gttctgtaaatgtctattgccgtaa

SEQ ID NO: 103573 - DNA, 25 bp, Probe Sequence
cctttgtcttggaactgtcttattt

SEQ ID NO: 103574 - DNA, 25 bp, Probe Sequence
gagaggatgagggtgaagagtatta

SEQ ID NO: 103575 - DNA, 25 bp, Probe Sequence
gagtattaacctgtgtgctgtactt

SEQ ID NO: 103576 - DNA, 25 bp, Probe Sequence
gaggatgagggtgaagagtattaac

SEQ ID NO: 103577 - DNA, 25 bp, Probe Sequence
agaggatgagggtgaagagtattaa

SEQ ID NO: 103578 - DNA, 25 bp, Probe Sequence
tggcttcaaggttggcattaattac

SEQ ID NO: 103579 - DNA, 25 bp, Probe Sequence
ttgttctgtaaatgtctattgccgt

SEQ ID NO: 103580 - DNA, 25 bp, Probe Sequence
ttctgtaaatgtctattgccgtaaa

SEQ ID NO: 103581 - DNA, 25 bp, Probe Sequence
agagtattaacctgtgtgctgtact

SEQ ID NO: 103582 - DNA, 25 bp, Probe Sequence
tatgaggaggttggagcagatagtg

SEQ ID NO: 103583 - DNA, 25 bp, Probe Sequence
aatgagttaatatgtgtgaggtagc

SEQ ID NO: 103584 - DNA, 25 bp, Probe Sequence
ctgatgatggtgcttatgagaatgg

SEQ ID NO: 103585 - DNA, 25 bp, Probe Sequence
gctgatgatggtgcttatgagaatg

SEQ ID NO: 103586 - DNA, 25 bp, Probe Sequence
aatcacttaactcctctgaaccaca

SEQ ID NO: 103587 - DNA, 25 bp, Probe Sequence
agttaatatgtgtgaggtagctgag

SEQ ID NO: 103588 - DNA, 25 bp, Probe Sequence
gagttaatatgtgtgaggtagctga

SEQ ID NO: 103589 - DNA, 25 bp, Probe Sequence
tgagttaatatgtgtgaggtagctg

SEQ ID NO: 103590 - DNA, 25 bp, Probe Sequence
atgagttaatatgtgtgaggtagct

SEQ ID NO: 103591 - DNA, 25 bp, Probe Sequence
gacaacatcaagaccttcctcctag

SEQ ID NO: 103592 - DNA, 25 bp, Probe Sequence
gttaatatgtgtgaggtagctgagc

SEQ ID NO: 103593 - DNA, 25 bp, Probe Sequence
atcacttaactcctctgaaccacag

SEQ ID NO: 103594 - DNA, 25 bp, Probe Sequence
cctaacagtaatatcagtgtcaaga

SEQ ID NO: 103595 - DNA, 25 bp, Probe Sequence
tcctaacagtaatatcagtgtcaag

SEQ ID NO: 103596 - DNA, 25 bp, Probe Sequence
tatactgggatggttgtgaggatta

SEQ ID NO: 103597 - DNA, 25 bp, Probe Sequence
aaataaatgaatgtgggaagtgctt

SEQ ID NO: 103598 - DNA, 25 bp, Probe Sequence
caacatcaagaccttcctcctagag

SEQ ID NO: 103599 - DNA, 25 bp, Probe Sequence
acaacatcaagaccttcctcctaga

SEQ ID NO: 103600 - DNA, 25 bp, Probe Sequence
ggctgatgatggtgcttatgagaat

SEQ ID NO: 103601 - DNA, 25 bp, Probe Sequence
gatggttgtgaggattaaatgagtt

SEQ ID NO: 103602 - DNA, 25 bp, Probe Sequence
ggatggttgtgaggattaaatgagt

SEQ ID NO: 103603 - DNA, 25 bp, Probe Sequence
cttgagcaaatgacttctttctgaa

SEQ ID NO: 103604 - DNA, 25 bp, Probe Sequence
ttgagcaaatgacttctttctgaac

SEQ ID NO: 103605 - DNA, 25 bp, Probe Sequence
taaatgaatgtgggaagtgcttaaa

SEQ ID NO: 103606 - DNA, 25 bp, Probe Sequence
taaataaatgaatgtgggaagtgct

SEQ ID NO: 103607 - DNA, 25 bp, Probe Sequence
aactgacaacatgctaggtagtgac

SEQ ID NO: 103608 - DNA, 25 bp, Probe Sequence
caactgacaacatgctaggtagtga

SEQ ID NO: 103609 - DNA, 25 bp, Probe Sequence
acctaaccacttagcatgtgtgatt

SEQ ID NO: 103610 - DNA, 25 bp, Probe Sequence
gacctaaccacttagcatgtgtgat

SEQ ID NO: 103611 - DNA, 25 bp, Probe Sequence
ctaaccacttagcatgtgtgatttc

SEQ ID NO: 103612 - DNA, 25 bp, Probe Sequence
taaccacttagcatgtgtgatttca

SEQ ID NO: 103613 - DNA, 25 bp, Probe Sequence
ccaactgacaacatgctaggtagtg

SEQ ID NO: 103614 - DNA, 25 bp, Probe Sequence
cctaaccacttagcatgtgtgattt

SEQ ID NO: 103615 - DNA, 25 bp, Probe Sequence
gtgacctaaccacttagcatgtgtg

SEQ ID NO: 103616 - DNA, 25 bp, Probe Sequence
aaccacttagcatgtgtgatttcac

SEQ ID NO: 103617 - DNA, 25 bp, Probe Sequence
tgacctaaccacttagcatgtgtga

SEQ ID NO: 103618 - DNA, 25 bp, Probe Sequence
gccctgtcctaagcactttataaat

SEQ ID NO: 103619 - DNA, 25 bp, Probe Sequence
actgacaacatgctaggtagtgacc

SEQ ID NO: 103620 - DNA, 25 bp, Probe Sequence
agcactttataaatatcaacccact

SEQ ID NO: 103621 - DNA, 25 bp, Probe Sequence
tagtgacctaaccacttagcatgtg

SEQ ID NO: 103622 - DNA, 25 bp, Probe Sequence
gtagtgacctaaccacttagcatgt

SEQ ID NO: 103623 - DNA, 25 bp, Probe Sequence
ccctgtcctaagcactttataaata

SEQ ID NO: 103624 - DNA, 25 bp, Probe Sequence
gatttcaccccacagacacttacat

SEQ ID NO: 103625 - DNA, 25 bp, Probe Sequence
gccaactgacaacatgctaggtagt

SEQ ID NO: 103626 - DNA, 25 bp, Probe Sequence
gcactttataaatatcaacccactt

SEQ ID NO: 103627 - DNA, 25 bp, Probe Sequence
aagcactttataaatatcaacccac

SEQ ID NO: 103628 - DNA, 25 bp, Probe Sequence
accacttagcatgtgtgatttcacc

SEQ ID NO: 103629 - DNA, 25 bp, Probe Sequence
ctgtgttcctggagcatttgttgac

SEQ ID NO: 103630 - DNA, 25 bp, Probe Sequence
ggtagtgacctaaccacttagcatg

SEQ ID NO: 103631 - DNA, 25 bp, Probe Sequence
gtcacactaacctgtcacttgttgg

SEQ ID NO: 103632 - DNA, 25 bp, Probe Sequence
tatgttacaaggcacttgagtatgg

SEQ ID NO: 103633 - DNA, 25 bp, Probe Sequence
cagctttctgtctggaacattaata

SEQ ID NO: 103634 - DNA, 25 bp, Probe Sequence
atatgttacaaggcacttgagtatg

SEQ ID NO: 103635 - DNA, 25 bp, Probe Sequence
ggttgcatgtccaaatataaatgtt

SEQ ID NO: 103636 - DNA, 25 bp, Probe Sequence
agctttctgtctggaacattaataa

SEQ ID NO: 103637 - DNA, 25 bp, Probe Sequence
ttaatatgttacaaggcacttgagt

SEQ ID NO: 103638 - DNA, 25 bp, Probe Sequence
ggtcacactaacctgtcacttgttg

SEQ ID NO: 103639 - DNA, 25 bp, Probe Sequence
aatatgttacaaggcacttgagtat

SEQ ID NO: 103640 - DNA, 25 bp, Probe Sequence
gcagctttctgtctggaacattaat

SEQ ID NO: 103641 - DNA, 25 bp, Probe Sequence
tggttgcatgtccaaatataaatgt

SEQ ID NO: 103642 - DNA, 25 bp, Probe Sequence
tgagtatggttgcatgtccaaatat

SEQ ID NO: 103643 - DNA, 25 bp, Probe Sequence
gctttctgtctggaacattaataat

SEQ ID NO: 103644 - DNA, 25 bp, Probe Sequence
ttgagtatggttgcatgtccaaata

SEQ ID NO: 103645 - DNA, 25 bp, Probe Sequence
gttacaaggcacttgagtatggttg

SEQ ID NO: 103646 - DNA, 25 bp, Probe Sequence
atgttacaaggcacttgagtatggt

SEQ ID NO: 103647 - DNA, 25 bp, Probe Sequence
gagtatggttgcatgtccaaatata

SEQ ID NO: 103648 - DNA, 25 bp, Probe Sequence
aagatgcagatggacggtatgtgat

SEQ ID NO: 103649 - DNA, 25 bp, Probe Sequence
aagaagatgcagatggacggtatgt

SEQ ID NO: 103650 - DNA, 25 bp, Probe Sequence
tgttacaaggcacttgagtatggtt

SEQ ID NO: 103651 - DNA, 25 bp, Probe Sequence
taatatgttacaaggcacttgagta

SEQ ID NO: 103652 - DNA, 25 bp, Probe Sequence
cctatttaatatgttacaaggcact

SEQ ID NO: 103653 - DNA, 25 bp, Probe Sequence
ctgtctggaacattaataatgatct

SEQ ID NO: 103654 - DNA, 25 bp, Probe Sequence
tctgtctggaacattaataatgatc

SEQ ID NO: 103655 - DNA, 25 bp, Probe Sequence
tataggaagtgaagaggctgagtta

SEQ ID NO: 103656 - DNA, 25 bp, Probe Sequence
ataggaagtgaagaggctgagttag

SEQ ID NO: 103657 - DNA, 25 bp, Probe Sequence
cagataactcagaagaagcaagcac

SEQ ID NO: 103658 - DNA, 25 bp, Probe Sequence
taggaagtgaagaggctgagttagt

SEQ ID NO: 103659 - DNA, 25 bp, Probe Sequence
ccagataactcagaagaagcaagca

SEQ ID NO: 103660 - DNA, 25 bp, Probe Sequence
tacatctataggaagtgaagaggct

SEQ ID NO: 103661 - DNA, 25 bp, Probe Sequence
gtacatctataggaagtgaagaggc

SEQ ID NO: 103662 - DNA, 25 bp, Probe Sequence
ctataggaagtgaagaggctgagtt

SEQ ID NO: 103663 - DNA, 25 bp, Probe Sequence
atctataggaagtgaagaggctgag

SEQ ID NO: 103664 - DNA, 25 bp, Probe Sequence
catctataggaagtgaagaggctga

SEQ ID NO: 103665 - DNA, 25 bp, Probe Sequence
agataactcagaagaagcaagcacg

SEQ ID NO: 103666 - DNA, 25 bp, Probe Sequence
acatctataggaagtgaagaggctg

SEQ ID NO: 103667 - DNA, 25 bp, Probe Sequence
agtacatctataggaagtgaagagg

SEQ ID NO: 103668 - DNA, 25 bp, Probe Sequence
aggaagtgaagaggctgagttagtc

SEQ ID NO: 103669 - DNA, 25 bp, Probe Sequence
tctataggaagtgaagaggctgagt

SEQ ID NO: 103670 - DNA, 25 bp, Probe Sequence
tcagtacatctataggaagtgaaga

SEQ ID NO: 103671 - DNA, 25 bp, Probe Sequence
tctcagtacatctataggaagtgaa

SEQ ID NO: 103672 - DNA, 25 bp, Probe Sequence
cagtacatctataggaagtgaagag

SEQ ID NO: 103673 - DNA, 25 bp, Probe Sequence
cgccagataactcagaagaagcaag

SEQ ID NO: 103674 - DNA, 25 bp, Probe Sequence
ctcagtacatctataggaagtgaag

SEQ ID NO: 103675 - DNA, 25 bp, Probe Sequence
atctcagtacatctataggaagtga

SEQ ID NO: 103676 - DNA, 25 bp, Probe Sequence
aatctcagtacatctataggaagtg

SEQ ID NO: 103677 - DNA, 25 bp, Probe Sequence
gccagataactcagaagaagcaagc

SEQ ID NO: 103678 - DNA, 25 bp, Probe Sequence
acgccagataactcagaagaagcaa

SEQ ID NO: 103679 - DNA, 25 bp, Probe Sequence
atcaatgttgaatctgtgaatggtt

SEQ ID NO: 103680 - DNA, 25 bp, Probe Sequence
agtaatatccttcaccttcagtgtg

SEQ ID NO: 103681 - DNA, 25 bp, Probe Sequence
atatccttcaccttcagtgtgtaac

SEQ ID NO: 103682 - DNA, 25 bp, Probe Sequence
gtaatatccttcaccttcagtgtgt

SEQ ID NO: 103683 - DNA, 25 bp, Probe Sequence
gagtaatatccttcaccttcagtgt

SEQ ID NO: 103684 - DNA, 25 bp, Probe Sequence
aatatccttcaccttcagtgtgtaa

SEQ ID NO: 103685 - DNA, 25 bp, Probe Sequence
tatcaatgttgaatctgtgaatggt

SEQ ID NO: 103686 - DNA, 25 bp, Probe Sequence
ggagtaatatccttcaccttcagtg

SEQ ID NO: 103687 - DNA, 25 bp, Probe Sequence
atggagtaatatccttcaccttcag

SEQ ID NO: 103688 - DNA, 25 bp, Probe Sequence
taatatccttcaccttcagtgtgta

SEQ ID NO: 103689 - DNA, 25 bp, Probe Sequence
tggagtaatatccttcaccttcagt

SEQ ID NO: 103690 - DNA, 25 bp, Probe Sequence
gtatcaatgttgaatctgtgaatgg

SEQ ID NO: 103691 - DNA, 25 bp, Probe Sequence
aatggagtaatatccttcaccttca

SEQ ID NO: 103692 - DNA, 25 bp, Probe Sequence
tatccttcaccttcagtgtgtaacc

SEQ ID NO: 103693 - DNA, 25 bp, Probe Sequence
agtatcaatgttgaatctgtgaatg

SEQ ID NO: 103694 - DNA, 25 bp, Probe Sequence
tgtgatgtgctactgtaaatatacc

SEQ ID NO: 103695 - DNA, 25 bp, Probe Sequence
cagtatcaatgttgaatctgtgaat

SEQ ID NO: 103696 - DNA, 25 bp, Probe Sequence
gtgatgtgctactgtaaatatacct

SEQ ID NO: 103697 - DNA, 25 bp, Probe Sequence
tgatgtgctactgtaaatatacctc

SEQ ID NO: 103698 - DNA, 25 bp, Probe Sequence
taattacttctggtctctttggtga

SEQ ID NO: 103699 - DNA, 25 bp, Probe Sequence
tcaatgttgaatctgtgaatggttt

SEQ ID NO: 103700 - DNA, 25 bp, Probe Sequence
aattacttctggtctctttggtgac

SEQ ID NO: 103701 - DNA, 25 bp, Probe Sequence
gatgtgctactgtaaatatacctct

SEQ ID NO: 103702 - DNA, 25 bp, Probe Sequence
ttaattacttctggtctctttggtg

SEQ ID NO: 103703 - DNA, 25 bp, Probe Sequence
aatacaaacaattagctgagtgtgg

SEQ ID NO: 103704 - DNA, 25 bp, Probe Sequence
atacaaacaattagctgagtgtggt

SEQ ID NO: 103705 - DNA, 25 bp, Probe Sequence
atggtgaaaccctgtctgtactaaa

SEQ ID NO: 103706 - DNA, 25 bp, Probe Sequence
tacaaacaattagctgagtgtggtg

SEQ ID NO: 103707 - DNA, 25 bp, Probe Sequence
aaatacaaacaattagctgagtgtg

SEQ ID NO: 103708 - DNA, 25 bp, Probe Sequence
catggtgaaaccctgtctgtactaa

SEQ ID NO: 103709 - DNA, 25 bp, Probe Sequence
ctaacatggtgaaaccctgtctgta

SEQ ID NO: 103710 - DNA, 25 bp, Probe Sequence
taacatggtgaaaccctgtctgtac

SEQ ID NO: 103711 - DNA, 25 bp, Probe Sequence
tagatcacaaggtcaggagatcgag

SEQ ID NO: 103712 - DNA, 25 bp, Probe Sequence
gtagatcacaaggtcaggagatcga

SEQ ID NO: 103713 - DNA, 25 bp, Probe Sequence
acatggtgaaaccctgtctgtacta

SEQ ID NO: 103714 - DNA, 25 bp, Probe Sequence
ggtagatcacaaggtcaggagatcg

SEQ ID NO: 103715 - DNA, 25 bp, Probe Sequence
tgggtagatcacaaggtcaggagat

SEQ ID NO: 103716 - DNA, 25 bp, Probe Sequence
acaaacaattagctgagtgtggtgg

SEQ ID NO: 103717 - DNA, 25 bp, Probe Sequence
tggtgaaaccctgtctgtactaaaa

SEQ ID NO: 103718 - DNA, 25 bp, Probe Sequence
gaaattgtgccacttcactccagtc

SEQ ID NO: 103719 - DNA, 25 bp, Probe Sequence
aacatggtgaaaccctgtctgtact

SEQ ID NO: 103720 - DNA, 25 bp, Probe Sequence
aaaatacaaacaattagctgagtgt

SEQ ID NO: 103721 - DNA, 25 bp, Probe Sequence
aaattgtgccacttcactccagtct

SEQ ID NO: 103722 - DNA, 25 bp, Probe Sequence
gggtagatcacaaggtcaggagatc

SEQ ID NO: 103723 - DNA, 25 bp, Probe Sequence
catgcctgtagtcctagctacttgg

SEQ ID NO: 103724 - DNA, 25 bp, Probe Sequence
gtgggtagatcacaaggtcaggaga

SEQ ID NO: 103725 - DNA, 25 bp, Probe Sequence
caaacaattagctgagtgtggtggc

SEQ ID NO: 103726 - DNA, 25 bp, Probe Sequence
gctaacatggtgaaaccctgtctgt

SEQ ID NO: 103727 - DNA, 25 bp, Probe Sequence
ctcttcaaagaaataggagcaaccc

SEQ ID NO: 103728 - DNA, 25 bp, Probe Sequence
acctcttcaaagaaataggagcaac

SEQ ID NO: 103729 - DNA, 25 bp, Probe Sequence
cctcttcaaagaaataggagcaacc

SEQ ID NO: 103730 - DNA, 25 bp, Probe Sequence
tcttcaaagaaataggagcaacccc

SEQ ID NO: 103731 - DNA, 25 bp, Probe Sequence
gtaaaccgtgctctctaatttatcg

SEQ ID NO: 103732 - DNA, 25 bp, Probe Sequence
cgtaaaccgtgctctctaatttatc

SEQ ID NO: 103733 - DNA, 25 bp, Probe Sequence
ccgtaaaccgtgctctctaatttat

SEQ ID NO: 103734 - DNA, 25 bp, Probe Sequence
taagtcatgctgtttcctcaaagaa

SEQ ID NO: 103735 - DNA, 25 bp, Probe Sequence
ctaagtcatgctgtttcctcaaaga

SEQ ID NO: 103736 - DNA, 25 bp, Probe Sequence
actaagtcatgctgtttcctcaaag

SEQ ID NO: 103737 - DNA, 25 bp, Probe Sequence
ccctaaatcaggtagagaaagcaaa

SEQ ID NO: 103738 - DNA, 25 bp, Probe Sequence
cactaagtcatgctgtttcctcaaa

SEQ ID NO: 103739 - DNA, 25 bp, Probe Sequence
tgttaacgtattactcagagtcacc

SEQ ID NO: 103740 - DNA, 25 bp, Probe Sequence
aagtcatgctgtttcctcaaagaag

SEQ ID NO: 103741 - DNA, 25 bp, Probe Sequence
aaaccctaaatcaggtagagaaagc

SEQ ID NO: 103742 - DNA, 25 bp, Probe Sequence
ttgttaacgtattactcagagtcac

SEQ ID NO: 103743 - DNA, 25 bp, Probe Sequence
accctaaatcaggtagagaaagcaa

SEQ ID NO: 103744 - DNA, 25 bp, Probe Sequence
aaccctaaatcaggtagagaaagca

SEQ ID NO: 103745 - DNA, 25 bp, Probe Sequence
taacgtattactcagagtcacccaa

SEQ ID NO: 103746 - DNA, 25 bp, Probe Sequence
ttaacgtattactcagagtcaccca

SEQ ID NO: 103747 - DNA, 25 bp, Probe Sequence
ctctctaatttatcggcagcttctg

SEQ ID NO: 103748 - DNA, 25 bp, Probe Sequence
ctagtgtcacctcaaatccatgtcc

SEQ ID NO: 103749 - DNA, 25 bp, Probe Sequence
cctagtgtcacctcaaatccatgtc

SEQ ID NO: 103750 - DNA, 25 bp, Probe Sequence
gccgtaaaccgtgctctctaattta

SEQ ID NO: 103751 - DNA, 25 bp, Probe Sequence
ctctaatttatcggcagcttctgtg

SEQ ID NO: 103752 - DNA, 25 bp, Probe Sequence
tctctaatttatcggcagcttctgt

SEQ ID NO: 103753 - DNA, 25 bp, Probe Sequence
aaccctagtgtcacctcaaatccat

SEQ ID NO: 103754 - DNA, 25 bp, Probe Sequence
atgacccacctgcattaaacctatt

SEQ ID NO: 103755 - DNA, 25 bp, Probe Sequence
ttaggcgaaggaacagaacaatatg

SEQ ID NO: 103756 - DNA, 25 bp, Probe Sequence
cgaaggaacagaacaatatgtcaat

SEQ ID NO: 103757 - DNA, 25 bp, Probe Sequence
gcgaaggaacagaacaatatgtcaa

SEQ ID NO: 103758 - DNA, 25 bp, Probe Sequence
taggcgaaggaacagaacaatatgt

SEQ ID NO: 103759 - DNA, 25 bp, Probe Sequence
aggaacagaacaatatgtcaatagt

SEQ ID NO: 103760 - DNA, 25 bp, Probe Sequence
tttaggcgaaggaacagaacaatat

SEQ ID NO: 103761 - DNA, 25 bp, Probe Sequence
ctttaggcgaaggaacagaacaata

SEQ ID NO: 103762 - DNA, 25 bp, Probe Sequence
aaggaacagaacaatatgtcaatag

SEQ ID NO: 103763 - DNA, 25 bp, Probe Sequence
gaaggaacagaacaatatgtcaata

SEQ ID NO: 103764 - DNA, 25 bp, Probe Sequence
aggcgaaggaacagaacaatatgtc

SEQ ID NO: 103765 - DNA, 25 bp, Probe Sequence
ggaacagaacaatatgtcaatagta

SEQ ID NO: 103766 - DNA, 25 bp, Probe Sequence
ggcgaaggaacagaacaatatgtca

SEQ ID NO: 103767 - DNA, 25 bp, Probe Sequence
acagaacaatatgtcaatagtatct

SEQ ID NO: 103768 - DNA, 25 bp, Probe Sequence
aacaatatgtcaatagtatctcaga

SEQ ID NO: 103769 - DNA, 25 bp, Probe Sequence
agaacaatatgtcaatagtatctca

SEQ ID NO: 103770 - DNA, 25 bp, Probe Sequence
gaacaatatgtcaatagtatctcag

SEQ ID NO: 103771 - DNA, 25 bp, Probe Sequence
cagaacaatatgtcaatagtatctc

SEQ ID NO: 103772 - DNA, 25 bp, Probe Sequence
acaatatgtcaatagtatctcagat

SEQ ID NO: 103773 - DNA, 25 bp, Probe Sequence
aacagaacaatatgtcaatagtatc

SEQ ID NO: 103774 - DNA, 25 bp, Probe Sequence
gaacagaacaatatgtcaatagtat

SEQ ID NO: 103775 - DNA, 25 bp, Probe Sequence
aatgcctagtacagtgttagaagtt

SEQ ID NO: 103776 - DNA, 25 bp, Probe Sequence
tacagtcctagcagatgagagaatg

SEQ ID NO: 103777 - DNA, 25 bp, Probe Sequence
atctggcttatgtctataatcctga

SEQ ID NO: 103778 - DNA, 25 bp, Probe Sequence
gtacagtcctagcagatgagagaat

SEQ ID NO: 103779 - DNA, 25 bp, Probe Sequence
aagcattaacatggtacagtcctag

SEQ ID NO: 103780 - DNA, 25 bp, Probe Sequence
gaagcattaacatggtacagtccta

SEQ ID NO: 103781 - DNA, 25 bp, Probe Sequence
tagaagcattaacatggtacagtcc

SEQ ID NO: 103782 - DNA, 25 bp, Probe Sequence
ttaacatggtacagtcctagcagat

SEQ ID NO: 103783 - DNA, 25 bp, Probe Sequence
attaacatggtacagtcctagcaga

SEQ ID NO: 103784 - DNA, 25 bp, Probe Sequence
tctggcttatgtctataatcctgac

SEQ ID NO: 103785 - DNA, 25 bp, Probe Sequence
cattaacatggtacagtcctagcag

SEQ ID NO: 103786 - DNA, 25 bp, Probe Sequence
atagaagcattaacatggtacagtc

SEQ ID NO: 103787 - DNA, 25 bp, Probe Sequence
gatagaagcattaacatggtacagt

SEQ ID NO: 103788 - DNA, 25 bp, Probe Sequence
tgatagaagcattaacatggtacag

SEQ ID NO: 103789 - DNA, 25 bp, Probe Sequence
ttcctggaagagcttacattatgac

SEQ ID NO: 103790 - DNA, 25 bp, Probe Sequence
taacatggtacagtcctagcagatg

SEQ ID NO: 103791 - DNA, 25 bp, Probe Sequence
agaagcattaacatggtacagtcct

SEQ ID NO: 103792 - DNA, 25 bp, Probe Sequence
agatcgtacatatcaagtagtagga

SEQ ID NO: 103793 - DNA, 25 bp, Probe Sequence
atgatagaagcattaacatggtaca

SEQ ID NO: 103794 - DNA, 25 bp, Probe Sequence
acccaatatacattatgacccaaca

SEQ ID NO: 103795 - DNA, 25 bp, Probe Sequence
gagatcgtacatatcaagtagtagg

SEQ ID NO: 103796 - DNA, 25 bp, Probe Sequence
tgacccaatatacattatgacccaa

SEQ ID NO: 103797 - DNA, 25 bp, Probe Sequence
tatctggcttatgtctataatcctg

SEQ ID NO: 103798 - DNA, 25 bp, Probe Sequence
ttaaattccatctctgccacttact

SEQ ID NO: 103799 - DNA, 25 bp, Probe Sequence
aattaaattatggggattttggagt

SEQ ID NO: 103800 - DNA, 25 bp, Probe Sequence
attaaattatggggattttggagta

SEQ ID NO: 103801 - DNA, 25 bp, Probe Sequence
cctaattaaattatggggattttgg

SEQ ID NO: 103802 - DNA, 25 bp, Probe Sequence
taattaaattatggggattttggag

SEQ ID NO: 103803 - DNA, 25 bp, Probe Sequence
ctaattaaattatggggattttgga

SEQ ID NO: 103804 - DNA, 25 bp, Probe Sequence
tcctaattaaattatggggattttg

SEQ ID NO: 103805 - DNA, 25 bp, Probe Sequence
tagagagactgatgaggatgaagat

SEQ ID NO: 103806 - DNA, 25 bp, Probe Sequence
gagactgatgaggatgaagatgatg

SEQ ID NO: 103807 - DNA, 25 bp, Probe Sequence
agagactgatgaggatgaagatgat

SEQ ID NO: 103808 - DNA, 25 bp, Probe Sequence
aggaagaggatatagtggaagatgg

SEQ ID NO: 103809 - DNA, 25 bp, Probe Sequence
aaggaagaggatatagtggaagatg

SEQ ID NO: 103810 - DNA, 25 bp, Probe Sequence
gactgatgaggatgaagatgatgtg

SEQ ID NO: 103811 - DNA, 25 bp, Probe Sequence
agactgatgaggatgaagatgatgt

SEQ ID NO: 103812 - DNA, 25 bp, Probe Sequence
aataccttactgcttaatctgtggc

SEQ ID NO: 103813 - DNA, 25 bp, Probe Sequence
acctgtgagtagtagccttagaatc

SEQ ID NO: 103814 - DNA, 25 bp, Probe Sequence
gacctgtgagtagtagccttagaat

SEQ ID NO: 103815 - DNA, 25 bp, Probe Sequence
gagagactgatgaggatgaagatga

SEQ ID NO: 103816 - DNA, 25 bp, Probe Sequence
agagagactgatgaggatgaagatg

SEQ ID NO: 103817 - DNA, 25 bp, Probe Sequence
gaagaggatatagtggaagatggct

SEQ ID NO: 103818 - DNA, 25 bp, Probe Sequence
ttgctgttctaagagttgtctgtag

SEQ ID NO: 103819 - DNA, 25 bp, Probe Sequence
ctagagagactgatgaggatgaaga

SEQ ID NO: 103820 - DNA, 25 bp, Probe Sequence
gagtagtagccttagaatcagcctt

SEQ ID NO: 103821 - DNA, 25 bp, Probe Sequence
aagaggatatagtggaagatggctg

SEQ ID NO: 103822 - DNA, 25 bp, Probe Sequence
gcaagtggaagagagaatagttgaa

SEQ ID NO: 103823 - DNA, 25 bp, Probe Sequence
ataccttactgcttaatctgtggct

SEQ ID NO: 103824 - DNA, 25 bp, Probe Sequence
agtagtagccttagaatcagccttc

SEQ ID NO: 103825 - DNA, 25 bp, Probe Sequence
cagacgctcagactattaaggaaga

SEQ ID NO: 103826 - DNA, 25 bp, Probe Sequence
taccttactgcttaatctgtggctt

SEQ ID NO: 103827 - DNA, 25 bp, Probe Sequence
cctgtgagtagtagccttagaatca

SEQ ID NO: 103828 - DNA, 25 bp, Probe Sequence
cttgacctgtgagtagtagccttag

SEQ ID NO: 103829 - DNA, 25 bp, Probe Sequence
ttcctataccctcttcagattaccc

SEQ ID NO: 103830 - DNA, 25 bp, Probe Sequence
cttcctataccctcttcagattacc

SEQ ID NO: 103831 - DNA, 25 bp, Probe Sequence
tcctataccctcttcagattaccct

SEQ ID NO: 103832 - DNA, 25 bp, Probe Sequence
tcttcctataccctcttcagattac

SEQ ID NO: 103833 - DNA, 25 bp, Probe Sequence
ctataccctcttcagattaccctgt

SEQ ID NO: 103834 - DNA, 25 bp, Probe Sequence
tataccctcttcagattaccctgta

SEQ ID NO: 103835 - DNA, 25 bp, Probe Sequence
cctataccctcttcagattaccctg

SEQ ID NO: 103836 - DNA, 25 bp, Probe Sequence
ataccctcttcagattaccctgtac

SEQ ID NO: 103837 - DNA, 25 bp, Probe Sequence
aaatcttcctataccctcttcagat

SEQ ID NO: 103838 - DNA, 25 bp, Probe Sequence
aacatcaagtaaccagagatggaaa

SEQ ID NO: 103839 - DNA, 25 bp, Probe Sequence
atcttcctataccctcttcagatta

SEQ ID NO: 103840 - DNA, 25 bp, Probe Sequence
aaaatcttcctataccctcttcaga

SEQ ID NO: 103841 - DNA, 25 bp, Probe Sequence
cctcttcagattaccctgtacatta

SEQ ID NO: 103842 - DNA, 25 bp, Probe Sequence
ccctcttcagattaccctgtacatt

SEQ ID NO: 103843 - DNA, 25 bp, Probe Sequence
taccctcttcagattaccctgtaca

SEQ ID NO: 103844 - DNA, 25 bp, Probe Sequence
ctcttcagattaccctgtacattat

SEQ ID NO: 103845 - DNA, 25 bp, Probe Sequence
accctcttcagattaccctgtacat

SEQ ID NO: 103846 - DNA, 25 bp, Probe Sequence
acatcaagtaaccagagatggaaaa

SEQ ID NO: 103847 - DNA, 25 bp, Probe Sequence
tcttcagattaccctgtacattatt

SEQ ID NO: 103848 - DNA, 25 bp, Probe Sequence
aatcttcctataccctcttcagatt

SEQ ID NO: 103849 - DNA, 25 bp, Probe Sequence
cttcagattaccctgtacattattt

SEQ ID NO: 103850 - DNA, 25 bp, Probe Sequence
cagattaccctgtacattattttga

SEQ ID NO: 103851 - DNA, 25 bp, Probe Sequence
tcagattaccctgtacattattttg

SEQ ID NO: 103852 - DNA, 25 bp, Probe Sequence
gattaccctgtacattattttgatg

SEQ ID NO: 103853 - DNA, 25 bp, Probe Sequence
tcctctggttatagtagactgtgtg

SEQ ID NO: 103854 - DNA, 25 bp, Probe Sequence
ttagaatggtgagtgcttcagttat

SEQ ID NO: 103855 - DNA, 25 bp, Probe Sequence
attagaatggtgagtgcttcagtta

SEQ ID NO: 103856 - DNA, 25 bp, Probe Sequence
tattagaatggtgagtgcttcagtt

SEQ ID NO: 103857 - DNA, 25 bp, Probe Sequence
ttattagaatggtgagtgcttcagt

SEQ ID NO: 103858 - DNA, 25 bp, Probe Sequence
tcttattagaatggtgagtgcttca

SEQ ID NO: 103859 - DNA, 25 bp, Probe Sequence
cttattagaatggtgagtgcttcag

SEQ ID NO: 103860 - DNA, 25 bp, Probe Sequence
ctctcttattagaatggtgagtgct

SEQ ID NO: 103861 - DNA, 25 bp, Probe Sequence
tctcttattagaatggtgagtgctt

SEQ ID NO: 103862 - DNA, 25 bp, Probe Sequence
ctcttattagaatggtgagtgcttc

SEQ ID NO: 103863 - DNA, 25 bp, Probe Sequence
ttgtcctctggttatagtagactgt

SEQ ID NO: 103864 - DNA, 25 bp, Probe Sequence
cttgtcctctggttatagtagactg

SEQ ID NO: 103865 - DNA, 25 bp, Probe Sequence
ccttgtcctctggttatagtagact

SEQ ID NO: 103866 - DNA, 25 bp, Probe Sequence
gtcctctggttatagtagactgtgt

SEQ ID NO: 103867 - DNA, 25 bp, Probe Sequence
tgtcctctggttatagtagactgtg

SEQ ID NO: 103868 - DNA, 25 bp, Probe Sequence
ctctggttatagtagactgtgtgcc

SEQ ID NO: 103869 - DNA, 25 bp, Probe Sequence
cctctggttatagtagactgtgtgc

SEQ ID NO: 103870 - DNA, 25 bp, Probe Sequence
ctccagtgatggcattattagacat

SEQ ID NO: 103871 - DNA, 25 bp, Probe Sequence
accttgtcctctggttatagtagac

SEQ ID NO: 103872 - DNA, 25 bp, Probe Sequence
gtccagatgtaggtttatatgctca

SEQ ID NO: 103873 - DNA, 25 bp, Probe Sequence
ggtccagatgtaggtttatatgctc

SEQ ID NO: 103874 - DNA, 25 bp, Probe Sequence
agacttatctgcaatcataactggt

SEQ ID NO: 103875 - DNA, 25 bp, Probe Sequence
ccattctcataccacagactaaaga

SEQ ID NO: 103876 - DNA, 25 bp, Probe Sequence
gtgttggtccagatgtaggtttata

SEQ ID NO: 103877 - DNA, 25 bp, Probe Sequence
taggaaccttggaagagatcattga

SEQ ID NO: 103878 - DNA, 25 bp, Probe Sequence
gtaggaaccttggaagagatcattg

SEQ ID NO: 103879 - DNA, 25 bp, Probe Sequence
agtaggaaccttggaagagatcatt

SEQ ID NO: 103880 - DNA, 25 bp, Probe Sequence
gaaccttggaagagatcattgatga

SEQ ID NO: 103881 - DNA, 25 bp, Probe Sequence
ggaaccttggaagagatcattgatg

SEQ ID NO: 103882 - DNA, 25 bp, Probe Sequence
aggaaccttggaagagatcattgat

SEQ ID NO: 103883 - DNA, 25 bp, Probe Sequence
ccttggaagagatcattgatgacaa

SEQ ID NO: 103884 - DNA, 25 bp, Probe Sequence
aaccttggaagagatcattgatgac

SEQ ID NO: 103885 - DNA, 25 bp, Probe Sequence
accttggaagagatcattgatgaca

SEQ ID NO: 103886 - DNA, 25 bp, Probe Sequence
aagataagactccaattctggtggt

SEQ ID NO: 103887 - DNA, 25 bp, Probe Sequence
ataagactccaattctggtggtgag

SEQ ID NO: 103888 - DNA, 25 bp, Probe Sequence
gataagactccaattctggtggtga

SEQ ID NO: 103889 - DNA, 25 bp, Probe Sequence
agataagactccaattctggtggtg

SEQ ID NO: 103890 - DNA, 25 bp, Probe Sequence
taagactccaattctggtggtgaga

SEQ ID NO: 103891 - DNA, 25 bp, Probe Sequence
aaagataagactccaattctggtgg

SEQ ID NO: 103892 - DNA, 25 bp, Probe Sequence
aagactccaattctggtggtgagag

SEQ ID NO: 103893 - DNA, 25 bp, Probe Sequence
aaatggttgggagatttctcagtcc

SEQ ID NO: 103894 - DNA, 25 bp, Probe Sequence
aaaatggttgggagatttctcagtc

SEQ ID NO: 103895 - DNA, 25 bp, Probe Sequence
aaaagataagactccaattctggtg

SEQ ID NO: 103896 - DNA, 25 bp, Probe Sequence
agactccaattctggtggtgagaga

SEQ ID NO: 103897 - DNA, 25 bp, Probe Sequence
gaaaatggttgggagatttctcagt

SEQ ID NO: 103898 - DNA, 25 bp, Probe Sequence
ggaaaatggttgggagatttctcag

SEQ ID NO: 103899 - DNA, 25 bp, Probe Sequence
gtacttacctactcacattggagag

SEQ ID NO: 103900 - DNA, 25 bp, Probe Sequence
ctgtacttacctactcacattggag

SEQ ID NO: 103901 - DNA, 25 bp, Probe Sequence
tgtacttacctactcacattggaga

SEQ ID NO: 103902 - DNA, 25 bp, Probe Sequence
cctgtacttacctactcacattgga

SEQ ID NO: 103903 - DNA, 25 bp, Probe Sequence
tgattgattgtttgttatgaggtgg

SEQ ID NO: 103904 - DNA, 25 bp, Probe Sequence
gattgtttgttatgaggtggagttt

SEQ ID NO: 103905 - DNA, 25 bp, Probe Sequence
attgattgtttgttatgaggtggag

SEQ ID NO: 103906 - DNA, 25 bp, Probe Sequence
gattgattgtttgttatgaggtgga

SEQ ID NO: 103907 - DNA, 25 bp, Probe Sequence
tgattgtttgttatgaggtggagtt

SEQ ID NO: 103908 - DNA, 25 bp, Probe Sequence
ttgattgtttgttatgaggtggagt

SEQ ID NO: 103909 - DNA, 25 bp, Probe Sequence
ttgattgattgtttgttatgaggtg

SEQ ID NO: 103910 - DNA, 25 bp, Probe Sequence
tttgattgattgtttgttatgaggt

SEQ ID NO: 103911 - DNA, 25 bp, Probe Sequence
tttactcttgttgtctaggctggag

SEQ ID NO: 103912 - DNA, 25 bp, Probe Sequence
agtagttaagccagccttctgagag

SEQ ID NO: 103913 - DNA, 25 bp, Probe Sequence
gagtagttaagccagccttctgaga

SEQ ID NO: 103914 - DNA, 25 bp, Probe Sequence
ctccttgccatctgctaagaagact

SEQ ID NO: 103915 - DNA, 25 bp, Probe Sequence
ccctgtacttacctactcacattgg

SEQ ID NO: 103916 - DNA, 25 bp, Probe Sequence
tgagtagttaagccagccttctgag

SEQ ID NO: 103917 - DNA, 25 bp, Probe Sequence
ctgagtagttaagccagccttctga

SEQ ID NO: 103918 - DNA, 25 bp, Probe Sequence
tacttacctactcacattggagagt

SEQ ID NO: 103919 - DNA, 25 bp, Probe Sequence
cttacctactcacattggagagttc

SEQ ID NO: 103920 - DNA, 25 bp, Probe Sequence
ttacctactcacattggagagttct

SEQ ID NO: 103921 - DNA, 25 bp, Probe Sequence
tccttgccatctgctaagaagactg

SEQ ID NO: 103922 - DNA, 25 bp, Probe Sequence
acttacctactcacattggagagtt

SEQ ID NO: 103923 - DNA, 25 bp, Probe Sequence
aatacctgtgccattctcaataaga

SEQ ID NO: 103924 - DNA, 25 bp, Probe Sequence
taatacctgtgccattctcaataag

SEQ ID NO: 103925 - DNA, 25 bp, Probe Sequence
ttaggagcaggaatggcagtaataa

SEQ ID NO: 103926 - DNA, 25 bp, Probe Sequence
attaggagcaggaatggcagtaata

SEQ ID NO: 103927 - DNA, 25 bp, Probe Sequence
ttaatacctgtgccattctcaataa

SEQ ID NO: 103928 - DNA, 25 bp, Probe Sequence
cttcacactctctgtctcatctctc

SEQ ID NO: 103929 - DNA, 25 bp, Probe Sequence
tctcatctctcctcctttctcatta

SEQ ID NO: 103930 - DNA, 25 bp, Probe Sequence
ctcatctctcctcctttctcattag

SEQ ID NO: 103931 - DNA, 25 bp, Probe Sequence
tcatctctcctcctttctcattagc

SEQ ID NO: 103932 - DNA, 25 bp, Probe Sequence
gtctcatctctcctcctttctcatt

SEQ ID NO: 103933 - DNA, 25 bp, Probe Sequence
aataagaatttatgagatgccagcg

SEQ ID NO: 103934 - DNA, 25 bp, Probe Sequence
taggagcaggaatggcagtaataaa

SEQ ID NO: 103935 - DNA, 25 bp, Probe Sequence
atacctgtgccattctcaataagaa

SEQ ID NO: 103936 - DNA, 25 bp, Probe Sequence
aattgacatttctcgtagactaccc

SEQ ID NO: 103937 - DNA, 25 bp, Probe Sequence
ataagaatttatgagatgccagcgg

SEQ ID NO: 103938 - DNA, 25 bp, Probe Sequence
caataagaatttatgagatgccagc

SEQ ID NO: 103939 - DNA, 25 bp, Probe Sequence
tttaatacctgtgccattctcaata

SEQ ID NO: 103940 - DNA, 25 bp, Probe Sequence
actctctgtctcatctctcctcctt

SEQ ID NO: 103941 - DNA, 25 bp, Probe Sequence
attgacatttctcgtagactaccca

SEQ ID NO: 103942 - DNA, 25 bp, Probe Sequence
ttcacactctctgtctcatctctcc

SEQ ID NO: 103943 - DNA, 25 bp, Probe Sequence
ccttcacactctctgtctcatctct

SEQ ID NO: 103944 - DNA, 25 bp, Probe Sequence
catctctcctcctttctcattagcc

SEQ ID NO: 103945 - DNA, 25 bp, Probe Sequence
tgtctcatctctcctcctttctcat

SEQ ID NO: 103946 - DNA, 25 bp, Probe Sequence
attagtgtagcttctcctttgtctc

SEQ ID NO: 103947 - DNA, 25 bp, Probe Sequence
aaaacgtcctacagcaaaagaactt

SEQ ID NO: 103948 - DNA, 25 bp, Probe Sequence
aaacgtcctacagcaaaagaacttc

SEQ ID NO: 103949 - DNA, 25 bp, Probe Sequence
ctcaaaacgtcctacagcaaaagaa

SEQ ID NO: 103950 - DNA, 25 bp, Probe Sequence
caaaacgtcctacagcaaaagaact

SEQ ID NO: 103951 - DNA, 25 bp, Probe Sequence
tcaaaacgtcctacagcaaaagaac

SEQ ID NO: 103952 - DNA, 25 bp, Probe Sequence
cttatgactcaaaacgtcctacagc

SEQ ID NO: 103953 - DNA, 25 bp, Probe Sequence
gcttatgactcaaaacgtcctacag

SEQ ID NO: 103954 - DNA, 25 bp, Probe Sequence
cagcttatgactcaaaacgtcctac

SEQ ID NO: 103955 - DNA, 25 bp, Probe Sequence
tcagcttatgactcaaaacgtccta

SEQ ID NO: 103956 - DNA, 25 bp, Probe Sequence
agcttatgactcaaaacgtcctaca

SEQ ID NO: 103957 - DNA, 25 bp, Probe Sequence
aacgtcctacagcaaaagaacttct

SEQ ID NO: 103958 - DNA, 25 bp, Probe Sequence
actcaaaacgtcctacagcaaaaga

SEQ ID NO: 103959 - DNA, 25 bp, Probe Sequence
tatgactcaaaacgtcctacagcaa

SEQ ID NO: 103960 - DNA, 25 bp, Probe Sequence
ttatgactcaaaacgtcctacagca

SEQ ID NO: 103961 - DNA, 25 bp, Probe Sequence
gactcaaaacgtcctacagcaaaag

SEQ ID NO: 103962 - DNA, 25 bp, Probe Sequence
atgactcaaaacgtcctacagcaaa

SEQ ID NO: 103963 - DNA, 25 bp, Probe Sequence
tgactcaaaacgtcctacagcaaaa

SEQ ID NO: 103964 - DNA, 25 bp, Probe Sequence
acgtcctacagcaaaagaacttctg

SEQ ID NO: 103965 - DNA, 25 bp, Probe Sequence
gtcagcttatgactcaaaacgtcct

SEQ ID NO: 103966 - DNA, 25 bp, Probe Sequence
ttagaagcacgaactataaccttga

SEQ ID NO: 103967 - DNA, 25 bp, Probe Sequence
agaagcacgaactataaccttgata

SEQ ID NO: 103968 - DNA, 25 bp, Probe Sequence
tagaagcacgaactataaccttgat

SEQ ID NO: 103969 - DNA, 25 bp, Probe Sequence
aagcacgaactataaccttgataag

SEQ ID NO: 103970 - DNA, 25 bp, Probe Sequence
gaagcacgaactataaccttgataa

SEQ ID NO: 103971 - DNA, 25 bp, Probe Sequence
agcacgaactataaccttgataagt

SEQ ID NO: 103972 - DNA, 25 bp, Probe Sequence
gcacgaactataaccttgataagta

SEQ ID NO: 103973 - DNA, 25 bp, Probe Sequence
taataatgctcaagatgcctgataa

SEQ ID NO: 103974 - DNA, 25 bp, Probe Sequence
gttagaagcacgaactataaccttg

SEQ ID NO: 103975 - DNA, 25 bp, Probe Sequence
ataataatgctcaagatgcctgata

SEQ ID NO: 103976 - DNA, 25 bp, Probe Sequence
tataataatgctcaagatgcctgat

SEQ ID NO: 103977 - DNA, 25 bp, Probe Sequence
aagtggatcgtcatgttcagtagtt

SEQ ID NO: 103978 - DNA, 25 bp, Probe Sequence
ttattcctggtgttcacatctgtcc

SEQ ID NO: 103979 - DNA, 25 bp, Probe Sequence
attaggtggtttgtattgtctggtt

SEQ ID NO: 103980 - DNA, 25 bp, Probe Sequence
tattaggtggtttgtattgtctggt

SEQ ID NO: 103981 - DNA, 25 bp, Probe Sequence
ttaggtggtttgtattgtctggttt

SEQ ID NO: 103982 - DNA, 25 bp, Probe Sequence
gtggtttgtattgtctggtttctaa

SEQ ID NO: 103983 - DNA, 25 bp, Probe Sequence
actttggtatgggctttaatttcac

SEQ ID NO: 103984 - DNA, 25 bp, Probe Sequence
cactttggtatgggctttaatttca

SEQ ID NO: 103985 - DNA, 25 bp, Probe Sequence
ctttggtatgggctttaatttcact

SEQ ID NO: 103986 - DNA, 25 bp, Probe Sequence
tttacagtttacagttccagaagtg

SEQ ID NO: 103987 - DNA, 25 bp, Probe Sequence
gtttacagtttacagttccagaagt

SEQ ID NO: 103988 - DNA, 25 bp, Probe Sequence
ggtggtttgtattgtctggtttcta

SEQ ID NO: 103989 - DNA, 25 bp, Probe Sequence
taggtggtttgtattgtctggtttc

SEQ ID NO: 103990 - DNA, 25 bp, Probe Sequence
aatggcttaattctgacactacctt

SEQ ID NO: 103991 - DNA, 25 bp, Probe Sequence
atgtggatgataagtctgcttgatt

SEQ ID NO: 103992 - DNA, 25 bp, Probe Sequence
gagatacgctagtaactgtgatacc

SEQ ID NO: 103993 - DNA, 25 bp, Probe Sequence
ggagatacgctagtaactgtgatac

SEQ ID NO: 103994 - DNA, 25 bp, Probe Sequence
gatacgctagtaactgtgataccat

SEQ ID NO: 103995 - DNA, 25 bp, Probe Sequence
tggagatacgctagtaactgtgata

SEQ ID NO: 103996 - DNA, 25 bp, Probe Sequence
ttgacattggagatacgctagtaac

SEQ ID NO: 103997 - DNA, 25 bp, Probe Sequence
tacgctagtaactgtgataccatac

SEQ ID NO: 103998 - DNA, 25 bp, Probe Sequence
agatacgctagtaactgtgatacca

SEQ ID NO: 103999 - DNA, 25 bp, Probe Sequence
gacattggagatacgctagtaactg

SEQ ID NO: 104000 - DNA, 25 bp, Probe Sequence
atggtaatggcttgagtaacatcat

SEQ ID NO: 104001 - DNA, 25 bp, Probe Sequence
ggtaatggcttgagtaacatcatct

SEQ ID NO: 104002 - DNA, 25 bp, Probe Sequence
ttggagatacgctagtaactgtgat

SEQ ID NO: 104003 - DNA, 25 bp, Probe Sequence
attggagatacgctagtaactgtga

SEQ ID NO: 104004 - DNA, 25 bp, Probe Sequence
cattggagatacgctagtaactgtg

SEQ ID NO: 104005 - DNA, 25 bp, Probe Sequence
tgacattggagatacgctagtaact

SEQ ID NO: 104006 - DNA, 25 bp, Probe Sequence
gtaatggcttgagtaacatcatctt

SEQ ID NO: 104007 - DNA, 25 bp, Probe Sequence
tggtaatggcttgagtaacatcatc

SEQ ID NO: 104008 - DNA, 25 bp, Probe Sequence
atacgctagtaactgtgataccata

SEQ ID NO: 104009 - DNA, 25 bp, Probe Sequence
tagcacttggcatgtagaatatgta

SEQ ID NO: 104010 - DNA, 25 bp, Probe Sequence
tgtattagtctgtgacatcttgtga

SEQ ID NO: 104011 - DNA, 25 bp, Probe Sequence
ctagcacttggcatgtagaatatgt

SEQ ID NO: 104012 - DNA, 25 bp, Probe Sequence
ggaagttgtattagtctgtgacatc

SEQ ID NO: 104013 - DNA, 25 bp, Probe Sequence
catgtggatgataagtctgcttgat

SEQ ID NO: 104014 - DNA, 25 bp, Probe Sequence
ccaaatctcatcagttttattgcct

SEQ ID NO: 104015 - DNA, 25 bp, Probe Sequence
cccaaatctcatcagttttattgcc

SEQ ID NO: 104016 - DNA, 25 bp, Probe Sequence
cgcccaaatctcatcagttttattg

SEQ ID NO: 104017 - DNA, 25 bp, Probe Sequence
gcccaaatctcatcagttttattgc

SEQ ID NO: 104018 - DNA, 25 bp, Probe Sequence
aaatctcatcagttttattgcctgc

SEQ ID NO: 104019 - DNA, 25 bp, Probe Sequence
aatctcatcagttttattgcctgct

SEQ ID NO: 104020 - DNA, 25 bp, Probe Sequence
caaatctcatcagttttattgcctg

SEQ ID NO: 104021 - DNA, 25 bp, Probe Sequence
atctcatcagttttattgcctgctc

SEQ ID NO: 104022 - DNA, 25 bp, Probe Sequence
tctcatcagttttattgcctgctcg

SEQ ID NO: 104023 - DNA, 25 bp, Probe Sequence
ctgagcgaaagaaggaaggacagac

SEQ ID NO: 104024 - DNA, 25 bp, Probe Sequence
gtctgtcagagttcggagaacactg

SEQ ID NO: 104025 - DNA, 25 bp, Probe Sequence
ctgtctgtcagagttcggagaacac

SEQ ID NO: 104026 - DNA, 25 bp, Probe Sequence
gcgcccaaatctcatcagttttatt

SEQ ID NO: 104027 - DNA, 25 bp, Probe Sequence
tttggttcctggacatttggtattc

SEQ ID NO: 104028 - DNA, 25 bp, Probe Sequence
ctttggttcctggacatttggtatt

SEQ ID NO: 104029 - DNA, 25 bp, Probe Sequence
aaaggtgagaaattcaggtacgaaa

SEQ ID NO: 104030 - DNA, 25 bp, Probe Sequence
ttggttcctggacatttggtattct

SEQ ID NO: 104031 - DNA, 25 bp, Probe Sequence
aaggtgagaaattcaggtacgaaac

SEQ ID NO: 104032 - DNA, 25 bp, Probe Sequence
gaatccaggcaatctgtttagagac

SEQ ID NO: 104033 - DNA, 25 bp, Probe Sequence
aaattcaggtacgaaaccatcaatg

SEQ ID NO: 104034 - DNA, 25 bp, Probe Sequence
gaaattcaggtacgaaaccatcaat

SEQ ID NO: 104035 - DNA, 25 bp, Probe Sequence
tggttcctggacatttggtattctg

SEQ ID NO: 104036 - DNA, 25 bp, Probe Sequence
agaaattcaggtacgaaaccatcaa

SEQ ID NO: 104037 - DNA, 25 bp, Probe Sequence
gagaaattcaggtacgaaaccatca

SEQ ID NO: 104038 - DNA, 25 bp, Probe Sequence
tgagaaattcaggtacgaaaccatc

SEQ ID NO: 104039 - DNA, 25 bp, Probe Sequence
cctttggttcctggacatttggtat

SEQ ID NO: 104040 - DNA, 25 bp, Probe Sequence
gtgagaaattcaggtacgaaaccat

SEQ ID NO: 104041 - DNA, 25 bp, Probe Sequence
ggaatccaggcaatctgtttagaga

SEQ ID NO: 104042 - DNA, 25 bp, Probe Sequence
aatccaggcaatctgtttagagacc

SEQ ID NO: 104043 - DNA, 25 bp, Probe Sequence
atttatccttttcctttccttcccc

SEQ ID NO: 104044 - DNA, 25 bp, Probe Sequence
tatccttttcctttccttcccctaa

SEQ ID NO: 104045 - DNA, 25 bp, Probe Sequence
ttatccttttcctttccttccccta

SEQ ID NO: 104046 - DNA, 25 bp, Probe Sequence
aattcaggtacgaaaccatcaatgg

SEQ ID NO: 104047 - DNA, 25 bp, Probe Sequence
gtcagggcatttctctacaaagtgg

SEQ ID NO: 104048 - DNA, 25 bp, Probe Sequence
ggtcagggcatttctctacaaagtg

SEQ ID NO: 104049 - DNA, 25 bp, Probe Sequence
gaggtcagggcatttctctacaaag

SEQ ID NO: 104050 - DNA, 25 bp, Probe Sequence
aatttatccttttcctttccttccc

SEQ ID NO: 104051 - DNA, 25 bp, Probe Sequence
agttgatgctgacaggatgaagatt

SEQ ID NO: 104052 - DNA, 25 bp, Probe Sequence
ctcttacatcctgtctccttcactt

SEQ ID NO: 104053 - DNA, 25 bp, Probe Sequence
gaactcttacatcctgtctccttca

SEQ ID NO: 104054 - DNA, 25 bp, Probe Sequence
ttgttaatgaggcacagtaatcctg

SEQ ID NO: 104055 - DNA, 25 bp, Probe Sequence
tcttacatcctgtctccttcacttg

SEQ ID NO: 104056 - DNA, 25 bp, Probe Sequence
aactcttacatcctgtctccttcac

SEQ ID NO: 104057 - DNA, 25 bp, Probe Sequence
gagttgatgctgacaggatgaagat

SEQ ID NO: 104058 - DNA, 25 bp, Probe Sequence
gaataaatatgcctgggaagagact

SEQ ID NO: 104059 - DNA, 25 bp, Probe Sequence
cctcaggtgaaccacataattcttg

SEQ ID NO: 104060 - DNA, 25 bp, Probe Sequence
aataaatatgcctgggaagagactg

SEQ ID NO: 104061 - DNA, 25 bp, Probe Sequence
tgctcaaagtctaaccatcataaag

SEQ ID NO: 104062 - DNA, 25 bp, Probe Sequence
ttgatgctgacaggatgaagattta

SEQ ID NO: 104063 - DNA, 25 bp, Probe Sequence
ggagataggaatttgctgctaagat

SEQ ID NO: 104064 - DNA, 25 bp, Probe Sequence
ggaataaatatgcctgggaagagac

SEQ ID NO: 104065 - DNA, 25 bp, Probe Sequence
gctgacaggatgaagatttaggaat

SEQ ID NO: 104066 - DNA, 25 bp, Probe Sequence
tgatgctgacaggatgaagatttag

SEQ ID NO: 104067 - DNA, 25 bp, Probe Sequence
atagtgctgagggagataggaattt

SEQ ID NO: 104068 - DNA, 25 bp, Probe Sequence
gttggaaggaagcagtttgttaatg

SEQ ID NO: 104069 - DNA, 25 bp, Probe Sequence
agttggaaggaagcagtttgttaat

SEQ ID NO: 104070 - DNA, 25 bp, Probe Sequence
ataattcttgggtttccgttcctac

SEQ ID NO: 104071 - DNA, 25 bp, Probe Sequence
cataattcttgggtttccgttccta

SEQ ID NO: 104072 - DNA, 25 bp, Probe Sequence
actcttacatcctgtctccttcact

SEQ ID NO: 104073 - DNA, 25 bp, Probe Sequence
ttggaaggaagcagtttgttaatga

SEQ ID NO: 104074 - DNA, 25 bp, Probe Sequence
ctcaggtgaaccacataattcttgg

SEQ ID NO: 104075 - DNA, 25 bp, Probe Sequence
tacaagcaccttatctatcacagac

SEQ ID NO: 104076 - DNA, 25 bp, Probe Sequence
caccttatctatcacagaccagtag

SEQ ID NO: 104077 - DNA, 25 bp, Probe Sequence
cttatctatcacagaccagtagcaa

SEQ ID NO: 104078 - DNA, 25 bp, Probe Sequence
ccttatctatcacagaccagtagca

SEQ ID NO: 104079 - DNA, 25 bp, Probe Sequence
accttatctatcacagaccagtagc

SEQ ID NO: 104080 - DNA, 25 bp, Probe Sequence
gcaccttatctatcacagaccagta

SEQ ID NO: 104081 - DNA, 25 bp, Probe Sequence
gtacaagcaccttatctatcacaga

SEQ ID NO: 104082 - DNA, 25 bp, Probe Sequence
aagcaccttatctatcacagaccag

SEQ ID NO: 104083 - DNA, 25 bp, Probe Sequence
cactgttctaatcattcaccaggaa

SEQ ID NO: 104084 - DNA, 25 bp, Probe Sequence
cttctcaccattctccttcttctcc

SEQ ID NO: 104085 - DNA, 25 bp, Probe Sequence
ccttctcaccattctccttcttctc

SEQ ID NO: 104086 - DNA, 25 bp, Probe Sequence
caagcaccttatctatcacagacca

SEQ ID NO: 104087 - DNA, 25 bp, Probe Sequence
acaagcaccttatctatcacagacc

SEQ ID NO: 104088 - DNA, 25 bp, Probe Sequence
ttgagtggcactgttctaatcattc

SEQ ID NO: 104089 - DNA, 25 bp, Probe Sequence
ttctggtacaagcaccttatctatc

SEQ ID NO: 104090 - DNA, 25 bp, Probe Sequence
ggtacaagcaccttatctatcacag

SEQ ID NO: 104091 - DNA, 25 bp, Probe Sequence
ctggtacaagcaccttatctatcac

SEQ ID NO: 104092 - DNA, 25 bp, Probe Sequence
tctggtacaagcaccttatctatca

SEQ ID NO: 104093 - DNA, 25 bp, Probe Sequence
attctggtacaagcaccttatctat

SEQ ID NO: 104094 - DNA, 25 bp, Probe Sequence
agcaccttatctatcacagaccagt

SEQ ID NO: 104095 - DNA, 25 bp, Probe Sequence
ttctaatcattcaccaggaaacaca

SEQ ID NO: 104096 - DNA, 25 bp, Probe Sequence
gttctaatcattcaccaggaaacac

SEQ ID NO: 104097 - DNA, 25 bp, Probe Sequence
tatctatcacagaccagtagcaaac

SEQ ID NO: 104098 - DNA, 25 bp, Probe Sequence
ctaatcattcaccaggaaacacaga

SEQ ID NO: 104099 - DNA, 25 bp, Probe Sequence
cttggaataagttgtgaatgtcagc

SEQ ID NO: 104100 - DNA, 25 bp, Probe Sequence
tcttggaataagttgtgaatgtcag

SEQ ID NO: 104101 - DNA, 25 bp, Probe Sequence
catcttggaataagttgtgaatgtc

SEQ ID NO: 104102 - DNA, 25 bp, Probe Sequence
atcttggaataagttgtgaatgtca

SEQ ID NO: 104103 - DNA, 25 bp, Probe Sequence
ccatcttggaataagttgtgaatgt

SEQ ID NO: 104104 - DNA, 25 bp, Probe Sequence
acaaatcacaaggaaaccaataagt

SEQ ID NO: 104105 - DNA, 25 bp, Probe Sequence
gtatatttgaagccctctacagact

SEQ ID NO: 104106 - DNA, 25 bp, Probe Sequence
ttggaataagttgtgaatgtcagct

SEQ ID NO: 104107 - DNA, 25 bp, Probe Sequence
tatatttgaagccctctacagactg

SEQ ID NO: 104108 - DNA, 25 bp, Probe Sequence
taattctttgttcactgtgttaccc

SEQ ID NO: 104109 - DNA, 25 bp, Probe Sequence
tggaataagttgtgaatgtcagctc

SEQ ID NO: 104110 - DNA, 25 bp, Probe Sequence
agtgcagcttcaagatattgtgtaa

SEQ ID NO: 104111 - DNA, 25 bp, Probe Sequence
aagtgcagcttcaagatattgtgta

SEQ ID NO: 104112 - DNA, 25 bp, Probe Sequence
attctttgttcactgtgttacccat

SEQ ID NO: 104113 - DNA, 25 bp, Probe Sequence
atatttgaagccctctacagactga

SEQ ID NO: 104114 - DNA, 25 bp, Probe Sequence
aattctttgttcactgtgttaccca

SEQ ID NO: 104115 - DNA, 25 bp, Probe Sequence
tcacctgacctttgtaatgttattt

SEQ ID NO: 104116 - DNA, 25 bp, Probe Sequence
tcacaaggaaaccaataagttgaaa

SEQ ID NO: 104117 - DNA, 25 bp, Probe Sequence
ggatcacctgacctttgtaatgtta

SEQ ID NO: 104118 - DNA, 25 bp, Probe Sequence
ctttgttcactgtgttacccatctt

SEQ ID NO: 104119 - DNA, 25 bp, Probe Sequence
ttctttgttcactgtgttacccatc

SEQ ID NO: 104120 - DNA, 25 bp, Probe Sequence
tattgtgtaaatactgagccaagac

SEQ ID NO: 104121 - DNA, 25 bp, Probe Sequence
atcacaaggaaaccaataagttgaa

SEQ ID NO: 104122 - DNA, 25 bp, Probe Sequence
aatcacaaggaaaccaataagttga

SEQ ID NO: 104123 - DNA, 25 bp, Probe Sequence
ttcttgtcttcttgtattgtgtaga

SEQ ID NO: 104124 - DNA, 25 bp, Probe Sequence
gcatgttaattgttaaggatggaca

SEQ ID NO: 104125 - DNA, 25 bp, Probe Sequence
aatgccaacaacttcttaaatgagg

SEQ ID NO: 104126 - DNA, 25 bp, Probe Sequence
caacaacttcttaaatgaggatgcc

SEQ ID NO: 104127 - DNA, 25 bp, Probe Sequence
ccaacaacttcttaaatgaggatgc

SEQ ID NO: 104128 - DNA, 25 bp, Probe Sequence
gccaacaacttcttaaatgaggatg

SEQ ID NO: 104129 - DNA, 25 bp, Probe Sequence
ggaatgccaacaacttcttaaatga

SEQ ID NO: 104130 - DNA, 25 bp, Probe Sequence
tgcatgttaattgttaaggatggac

SEQ ID NO: 104131 - DNA, 25 bp, Probe Sequence
tgccaacaacttcttaaatgaggat

SEQ ID NO: 104132 - DNA, 25 bp, Probe Sequence
atgccaacaacttcttaaatgagga

SEQ ID NO: 104133 - DNA, 25 bp, Probe Sequence
ctgcatgttaattgttaaggatgga

SEQ ID NO: 104134 - DNA, 25 bp, Probe Sequence
gaatgccaacaacttcttaaatgag

SEQ ID NO: 104135 - DNA, 25 bp, Probe Sequence
tcttgtattgtgtagaacctccaaa

SEQ ID NO: 104136 - DNA, 25 bp, Probe Sequence
tgtatccaacttgccaaattatctt

SEQ ID NO: 104137 - DNA, 25 bp, Probe Sequence
gtcttgtatccaacttgccaaatta

SEQ ID NO: 104138 - DNA, 25 bp, Probe Sequence
tcttcttgtattgtgtagaacctcc

SEQ ID NO: 104139 - DNA, 25 bp, Probe Sequence
gggaatgccaacaacttcttaaatg

SEQ ID NO: 104140 - DNA, 25 bp, Probe Sequence
agggaatgccaacaacttcttaaat

SEQ ID NO: 104141 - DNA, 25 bp, Probe Sequence
ttcttgtattgtgtagaacctccaa

SEQ ID NO: 104142 - DNA, 25 bp, Probe Sequence
cttcttgtattgtgtagaacctcca

SEQ ID NO: 104143 - DNA, 25 bp, Probe Sequence
tgtcttcttgtattgtgtagaacct

SEQ ID NO: 104144 - DNA, 25 bp, Probe Sequence
aagggaatgccaacaacttcttaaa

SEQ ID NO: 104145 - DNA, 25 bp, Probe Sequence
gctatgtaccaagattgataaaccc

SEQ ID NO: 104146 - DNA, 25 bp, Probe Sequence
gtcttcttgtattgtgtagaacctc

SEQ ID NO: 104147 - DNA, 25 bp, Probe Sequence
gttaattcaccagttgccttcacag

SEQ ID NO: 104148 - DNA, 25 bp, Probe Sequence
catcgttaattcaccagttgccttc

SEQ ID NO: 104149 - DNA, 25 bp, Probe Sequence
taattcaccagttgccttcacagtt

SEQ ID NO: 104150 - DNA, 25 bp, Probe Sequence
ttaattcaccagttgccttcacagt

SEQ ID NO: 104151 - DNA, 25 bp, Probe Sequence
cctgatggtagtgacaaagaatatg

SEQ ID NO: 104152 - DNA, 25 bp, Probe Sequence
atcgttaattcaccagttgccttca

SEQ ID NO: 104153 - DNA, 25 bp, Probe Sequence
caaagaatatgtgtcccatcgttaa

SEQ ID NO: 104154 - DNA, 25 bp, Probe Sequence
aaagaatatgtgtcccatcgttaat

SEQ ID NO: 104155 - DNA, 25 bp, Probe Sequence
aagaatatgtgtcccatcgttaatt

SEQ ID NO: 104156 - DNA, 25 bp, Probe Sequence
acaaagaatatgtgtcccatcgtta

SEQ ID NO: 104157 - DNA, 25 bp, Probe Sequence
gatggtagtgacaaagaatatgtgt

SEQ ID NO: 104158 - DNA, 25 bp, Probe Sequence
tgatggtagtgacaaagaatatgtg

SEQ ID NO: 104159 - DNA, 25 bp, Probe Sequence
aatatgtgtcccatcgttaattcac

SEQ ID NO: 104160 - DNA, 25 bp, Probe Sequence
ctgatggtagtgacaaagaatatgt

SEQ ID NO: 104161 - DNA, 25 bp, Probe Sequence
atatgtgtcccatcgttaattcacc

SEQ ID NO: 104162 - DNA, 25 bp, Probe Sequence
tcgttaattcaccagttgccttcac

SEQ ID NO: 104163 - DNA, 25 bp, Probe Sequence
ccatcgttaattcaccagttgcctt

SEQ ID NO: 104164 - DNA, 25 bp, Probe Sequence
acctgatggtagtgacaaagaatat

SEQ ID NO: 104165 - DNA, 25 bp, Probe Sequence
gaatatgtgtcccatcgttaattca

SEQ ID NO: 104166 - DNA, 25 bp, Probe Sequence
agaatatgtgtcccatcgttaattc

SEQ ID NO: 104167 - DNA, 25 bp, Probe Sequence
cgttaattcaccagttgccttcaca

SEQ ID NO: 104168 - DNA, 25 bp, Probe Sequence
tatgtgtcccatcgttaattcacca

SEQ ID NO: 104169 - DNA, 25 bp, Probe Sequence
aattcaccagttgccttcacagttg

SEQ ID NO: 104170 - DNA, 25 bp, Probe Sequence
tgtcccatcgttaattcaccagttg

SEQ ID NO: 104171 - DNA, 25 bp, Probe Sequence
ctgtatctggacggatggactgaat

SEQ ID NO: 104172 - DNA, 25 bp, Probe Sequence
tgtatctggacggatggactgaatg

SEQ ID NO: 104173 - DNA, 25 bp, Probe Sequence
tactgtatctggacggatggactga

SEQ ID NO: 104174 - DNA, 25 bp, Probe Sequence
gtactgtatctggacggatggactg

SEQ ID NO: 104175 - DNA, 25 bp, Probe Sequence
catgagtactgtatctggacggatg

SEQ ID NO: 104176 - DNA, 25 bp, Probe Sequence
caagcatgagtactgtatctggacg

SEQ ID NO: 104177 - DNA, 25 bp, Probe Sequence
actgtatctggacggatggactgaa

SEQ ID NO: 104178 - DNA, 25 bp, Probe Sequence
atgagtactgtatctggacggatgg

SEQ ID NO: 104179 - DNA, 25 bp, Probe Sequence
gtatctggacggatggactgaatgc

SEQ ID NO: 104180 - DNA, 25 bp, Probe Sequence
gagtactgtatctggacggatggac

SEQ ID NO: 104181 - DNA, 25 bp, Probe Sequence
gcatgagtactgtatctggacggat

SEQ ID NO: 104182 - DNA, 25 bp, Probe Sequence
aagcatgagtactgtatctggacgg

SEQ ID NO: 104183 - DNA, 25 bp, Probe Sequence
tgagtactgtatctggacggatgga

SEQ ID NO: 104184 - DNA, 25 bp, Probe Sequence
agtactgtatctggacggatggact

SEQ ID NO: 104185 - DNA, 25 bp, Probe Sequence
agcatgagtactgtatctggacgga

SEQ ID NO: 104186 - DNA, 25 bp, Probe Sequence
cattattgcttccagttgttcttgt

SEQ ID NO: 104187 - DNA, 25 bp, Probe Sequence
tattgcttccagttgttcttgtagt

SEQ ID NO: 104188 - DNA, 25 bp, Probe Sequence
ttattgcttccagttgttcttgtag

SEQ ID NO: 104189 - DNA, 25 bp, Probe Sequence
gctcatattggcaacttactaacat

SEQ ID NO: 104190 - DNA, 25 bp, Probe Sequence
attattgcttccagttgttcttgta

SEQ ID NO: 104191 - DNA, 25 bp, Probe Sequence
cctacggagaactacatctatgact

SEQ ID NO: 104192 - DNA, 25 bp, Probe Sequence
gacgctcatattggcaacttactaa

SEQ ID NO: 104193 - DNA, 25 bp, Probe Sequence
cgctcatattggcaacttactaaca

SEQ ID NO: 104194 - DNA, 25 bp, Probe Sequence
acgctcatattggcaacttactaac

SEQ ID NO: 104195 - DNA, 25 bp, Probe Sequence
attgcttccagttgttcttgtagtg

SEQ ID NO: 104196 - DNA, 25 bp, Probe Sequence
gaagaagtgaagcgagaactgataa

SEQ ID NO: 104197 - DNA, 25 bp, Probe Sequence
tcatattggcaacttactaacatca

SEQ ID NO: 104198 - DNA, 25 bp, Probe Sequence
tagaagagtcatggtgtgtaagaag

SEQ ID NO: 104199 - DNA, 25 bp, Probe Sequence
ctagaagagtcatggtgtgtaagaa

SEQ ID NO: 104200 - DNA, 25 bp, Probe Sequence
aagagtcatggtgtgtaagaagatc

SEQ ID NO: 104201 - DNA, 25 bp, Probe Sequence
gaagagtcatggtgtgtaagaagat

SEQ ID NO: 104202 - DNA, 25 bp, Probe Sequence
gacattattgcttccagttgttctt

SEQ ID NO: 104203 - DNA, 25 bp, Probe Sequence
aagacattattgcttccagttgttc

SEQ ID NO: 104204 - DNA, 25 bp, Probe Sequence
ctacggagaactacatctatgacta

SEQ ID NO: 104205 - DNA, 25 bp, Probe Sequence
acattattgcttccagttgttcttg

SEQ ID NO: 104206 - DNA, 25 bp, Probe Sequence
tattagcagcaatgtcaatacaagg

SEQ ID NO: 104207 - DNA, 25 bp, Probe Sequence
agacattattgcttccagttgttct

SEQ ID NO: 104208 - DNA, 25 bp, Probe Sequence
attagcagcaatgtcaatacaaggt

SEQ ID NO: 104209 - DNA, 25 bp, Probe Sequence
agaagagtcatggtgtgtaagaaga

SEQ ID NO: 104210 - DNA, 25 bp, Probe Sequence
tctaacctgatacaagtagttgaca

SEQ ID NO: 104211 - DNA, 25 bp, Probe Sequence
ggagtagatggttgtagattgacta

SEQ ID NO: 104212 - DNA, 25 bp, Probe Sequence
ttcaactatcaatcaccagtccaac

SEQ ID NO: 104213 - DNA, 25 bp, Probe Sequence
agtctaacctgatacaagtagttga

SEQ ID NO: 104214 - DNA, 25 bp, Probe Sequence
acctgatacaagtagttgacagatt

SEQ ID NO: 104215 - DNA, 25 bp, Probe Sequence
aacctgatacaagtagttgacagat

SEQ ID NO: 104216 - DNA, 25 bp, Probe Sequence
attcaagatactaccagtcaacatc

SEQ ID NO: 104217 - DNA, 25 bp, Probe Sequence
taacctgatacaagtagttgacaga

SEQ ID NO: 104218 - DNA, 25 bp, Probe Sequence
ctaacctgatacaagtagttgacag

SEQ ID NO: 104219 - DNA, 25 bp, Probe Sequence
gtctaacctgatacaagtagttgac

SEQ ID NO: 104220 - DNA, 25 bp, Probe Sequence
gagtagatggttgtagattgactaa

SEQ ID NO: 104221 - DNA, 25 bp, Probe Sequence
gtccaacccatttctcatttaacag

SEQ ID NO: 104222 - DNA, 25 bp, Probe Sequence
cagtccaacccatttctcatttaac

SEQ ID NO: 104223 - DNA, 25 bp, Probe Sequence
ggtagtctaacctgatacaagtagt

SEQ ID NO: 104224 - DNA, 25 bp, Probe Sequence
tcaactatcaatcaccagtccaacc

SEQ ID NO: 104225 - DNA, 25 bp, Probe Sequence
agtccaacccatttctcatttaaca

SEQ ID NO: 104226 - DNA, 25 bp, Probe Sequence
gtagtctaacctgatacaagtagtt

SEQ ID NO: 104227 - DNA, 25 bp, Probe Sequence
tctaccatacttcaagggactacag

SEQ ID NO: 104228 - DNA, 25 bp, Probe Sequence
gtattcaagatactaccagtcaaca

SEQ ID NO: 104229 - DNA, 25 bp, Probe Sequence
catacttcaagggactacaggtaag

SEQ ID NO: 104230 - DNA, 25 bp, Probe Sequence
tagtctaacctgatacaagtagttg

SEQ ID NO: 104231 - DNA, 25 bp, Probe Sequence
tccaacccatttctcatttaacaga

SEQ ID NO: 104232 - DNA, 25 bp, Probe Sequence
ccaacccatttctcatttaacagat

SEQ ID NO: 104233 - DNA, 25 bp, Probe Sequence
ttccttaacctcctttacccttaac

SEQ ID NO: 104234 - DNA, 25 bp, Probe Sequence
tactaccttagaggatagcagttcc

SEQ ID NO: 104235 - DNA, 25 bp, Probe Sequence
ctcctagatccttgaagtgtgaact

SEQ ID NO: 104236 - DNA, 25 bp, Probe Sequence
ggatagcagttcctaatacctactt

SEQ ID NO: 104237 - DNA, 25 bp, Probe Sequence
atactaccttagaggatagcagttc

SEQ ID NO: 104238 - DNA, 25 bp, Probe Sequence
gaaaccataccaactgaaagacaaa

SEQ ID NO: 104239 - DNA, 25 bp, Probe Sequence
aaccataccaactgaaagacaaatc

SEQ ID NO: 104240 - DNA, 25 bp, Probe Sequence
agaaaccataccaactgaaagacaa

SEQ ID NO: 104241 - DNA, 25 bp, Probe Sequence
aatactaccttagaggatagcagtt

SEQ ID NO: 104242 - DNA, 25 bp, Probe Sequence
aaaccataccaactgaaagacaaat

SEQ ID NO: 104243 - DNA, 25 bp, Probe Sequence
tgtaatactaccttagaggatagca

SEQ ID NO: 104244 - DNA, 25 bp, Probe Sequence
gctcctagatccttgaagtgtgaac

SEQ ID NO: 104245 - DNA, 25 bp, Probe Sequence
accataccaactgaaagacaaatca

SEQ ID NO: 104246 - DNA, 25 bp, Probe Sequence
gtgtaatactaccttagaggatagc

SEQ ID NO: 104247 - DNA, 25 bp, Probe Sequence
taatactaccttagaggatagcagt

SEQ ID NO: 104248 - DNA, 25 bp, Probe Sequence
gtaatactaccttagaggatagcag

SEQ ID NO: 104249 - DNA, 25 bp, Probe Sequence
atcacagaaaccataccaactgaaa

SEQ ID NO: 104250 - DNA, 25 bp, Probe Sequence
tgtcactctctattagataatggag

SEQ ID NO: 104251 - DNA, 25 bp, Probe Sequence
cagaaaccataccaactgaaagaca

SEQ ID NO: 104252 - DNA, 25 bp, Probe Sequence
acagaaaccataccaactgaaagac

SEQ ID NO: 104253 - DNA, 25 bp, Probe Sequence
cacagaaaccataccaactgaaaga

SEQ ID NO: 104254 - DNA, 25 bp, Probe Sequence
tcacagaaaccataccaactgaaag

SEQ ID NO: 104255 - DNA, 25 bp, Probe Sequence
tcctagatccttgaagtgtgaactt

SEQ ID NO: 104256 - DNA, 25 bp, Probe Sequence
agctcctagatccttgaagtgtgaa

SEQ ID NO: 104257 - DNA, 25 bp, Probe Sequence
ttgtcactctctattagataatgga

SEQ ID NO: 104258 - DNA, 25 bp, Probe Sequence
gaggattttacccagaatacttgcc

SEQ ID NO: 104259 - DNA, 25 bp, Probe Sequence
ggaggattttacccagaatacttgc

SEQ ID NO: 104260 - DNA, 25 bp, Probe Sequence
cccagtacaaaggtgtctcttgatc

SEQ ID NO: 104261 - DNA, 25 bp, Probe Sequence
aaggtgtctcttgatcacagtaacc

SEQ ID NO: 104262 - DNA, 25 bp, Probe Sequence
cgggtaattaggacaaagccaaagg

SEQ ID NO: 104263 - DNA, 25 bp, Probe Sequence
aggattttacccagaatacttgccg

SEQ ID NO: 104264 - DNA, 25 bp, Probe Sequence
aaaggtgtctcttgatcacagtaac

SEQ ID NO: 104265 - DNA, 25 bp, Probe Sequence
caaaggtgtctcttgatcacagtaa

SEQ ID NO: 104266 - DNA, 25 bp, Probe Sequence
gggaagactttgggaggattttacc

SEQ ID NO: 104267 - DNA, 25 bp, Probe Sequence
ggggaagactttgggaggattttac

SEQ ID NO: 104268 - DNA, 25 bp, Probe Sequence
gtacaaaggtgtctcttgatcacag

SEQ ID NO: 104269 - DNA, 25 bp, Probe Sequence
cagtacaaaggtgtctcttgatcac

SEQ ID NO: 104270 - DNA, 25 bp, Probe Sequence
acaaaggtgtctcttgatcacagta

SEQ ID NO: 104271 - DNA, 25 bp, Probe Sequence
tacaaaggtgtctcttgatcacagt

SEQ ID NO: 104272 - DNA, 25 bp, Probe Sequence
agtacaaaggtgtctcttgatcaca

SEQ ID NO: 104273 - DNA, 25 bp, Probe Sequence
ccagtacaaaggtgtctcttgatca

SEQ ID NO: 104274 - DNA, 25 bp, Probe Sequence
gggaggattttacccagaatacttg

SEQ ID NO: 104275 - DNA, 25 bp, Probe Sequence
ccgggtaattaggacaaagccaaag

SEQ ID NO: 104276 - DNA, 25 bp, Probe Sequence
gattttacccagaatacttgccgcc

SEQ ID NO: 104277 - DNA, 25 bp, Probe Sequence
ggattttacccagaatacttgccgc

SEQ ID NO: 104278 - DNA, 25 bp, Probe Sequence
attttacccagaatacttgccgcct

SEQ ID NO: 104279 - DNA, 25 bp, Probe Sequence
ccccagtacaaaggtgtctcttgat

SEQ ID NO: 104280 - DNA, 25 bp, Probe Sequence
ggaagactttgggaggattttaccc

SEQ ID NO: 104281 - DNA, 25 bp, Probe Sequence
attcactccccagtacaaaggtgtc

SEQ ID NO: 104282 - DNA, 25 bp, Probe Sequence
ccttactcttggatgcttcttaacc

SEQ ID NO: 104283 - DNA, 25 bp, Probe Sequence
ttggagtttctgtttagggcattaa

SEQ ID NO: 104284 - DNA, 25 bp, Probe Sequence
attcccgcaaactataaagagcaat

SEQ ID NO: 104285 - DNA, 25 bp, Probe Sequence
gttggagtttctgtttagggcatta

SEQ ID NO: 104286 - DNA, 25 bp, Probe Sequence
cttactcttggatgcttcttaaccc

SEQ ID NO: 104287 - DNA, 25 bp, Probe Sequence
cccttactcttggatgcttcttaac

SEQ ID NO: 104288 - DNA, 25 bp, Probe Sequence
tggagtttctgtttagggcattaaa

SEQ ID NO: 104289 - DNA, 25 bp, Probe Sequence
ttactcttggatgcttcttaaccct

SEQ ID NO: 104290 - DNA, 25 bp, Probe Sequence
aattcccgcaaactataaagagcaa

SEQ ID NO: 104291 - DNA, 25 bp, Probe Sequence
aaattcccgcaaactataaagagca

SEQ ID NO: 104292 - DNA, 25 bp, Probe Sequence
ttcccgcaaactataaagagcaatg

SEQ ID NO: 104293 - DNA, 25 bp, Probe Sequence
tactcttggatgcttcttaaccctc

SEQ ID NO: 104294 - DNA, 25 bp, Probe Sequence
atgaggctgttggagtttctgttta

SEQ ID NO: 104295 - DNA, 25 bp, Probe Sequence
cccgcaaactataaagagcaatgtt

SEQ ID NO: 104296 - DNA, 25 bp, Probe Sequence
cttacccagtcttcccttactcttg

SEQ ID NO: 104297 - DNA, 25 bp, Probe Sequence
tcccttactcttggatgcttcttaa

SEQ ID NO: 104298 - DNA, 25 bp, Probe Sequence
ttcccttactcttggatgcttctta

SEQ ID NO: 104299 - DNA, 25 bp, Probe Sequence
tcccgcaaactataaagagcaatgt

SEQ ID NO: 104300 - DNA, 25 bp, Probe Sequence
tgttggagtttctgtttagggcatt

SEQ ID NO: 104301 - DNA, 25 bp, Probe Sequence
ctcttggatgcttcttaaccctcag

SEQ ID NO: 104302 - DNA, 25 bp, Probe Sequence
tgaggctgttggagtttctgtttag

SEQ ID NO: 104303 - DNA, 25 bp, Probe Sequence
ctttgcttacccagtcttcccttac

SEQ ID NO: 104304 - DNA, 25 bp, Probe Sequence
ctgttggagtttctgtttagggcat

SEQ ID NO: 104305 - DNA, 25 bp, Probe Sequence
ccgcaaactataaagagcaatgttt

SEQ ID NO: 104306 - DNA, 25 bp, Probe Sequence
ttctctggatgaattatttgcatgg

SEQ ID NO: 104307 - DNA, 25 bp, Probe Sequence
tctctggatgaattatttgcatggg

SEQ ID NO: 104308 - DNA, 25 bp, Probe Sequence
ctctggatgaattatttgcatgggt

SEQ ID NO: 104309 - DNA, 25 bp, Probe Sequence
tctggatgaattatttgcatgggtg

SEQ ID NO: 104310 - DNA, 25 bp, Probe Sequence
attctctggatgaattatttgcatg

SEQ ID NO: 104311 - DNA, 25 bp, Probe Sequence
gttccttacactctgcttcaggctc

SEQ ID NO: 104312 - DNA, 25 bp, Probe Sequence
ctggatgaattatttgcatgggtgc

SEQ ID NO: 104313 - DNA, 25 bp, Probe Sequence
aaattctctggatgaattatttgca

SEQ ID NO: 104314 - DNA, 25 bp, Probe Sequence
aattctctggatgaattatttgcat

SEQ ID NO: 104315 - DNA, 25 bp, Probe Sequence
taaattctctggatgaattatttgc

SEQ ID NO: 104316 - DNA, 25 bp, Probe Sequence
gactggacatatctcgttctacaat

SEQ ID NO: 104317 - DNA, 25 bp, Probe Sequence
actggacatatctcgttctacaatg

SEQ ID NO: 104318 - DNA, 25 bp, Probe Sequence
cagacaggaatagtgaacaacagag

SEQ ID NO: 104319 - DNA, 25 bp, Probe Sequence
agactggacatatctcgttctacaa

SEQ ID NO: 104320 - DNA, 25 bp, Probe Sequence
ctggacatatctcgttctacaatgc

SEQ ID NO: 104321 - DNA, 25 bp, Probe Sequence
gagtgtcttggttgagagaataacg

SEQ ID NO: 104322 - DNA, 25 bp, Probe Sequence
cggatggatctcatatctacacatt

SEQ ID NO: 104323 - DNA, 25 bp, Probe Sequence
ctctgagcctctgtatcctgtattc

SEQ ID NO: 104324 - DNA, 25 bp, Probe Sequence
gacatatctcgttctacaatgccac

SEQ ID NO: 104325 - DNA, 25 bp, Probe Sequence
ggatctgaacaacaatgactaacat

SEQ ID NO: 104326 - DNA, 25 bp, Probe Sequence
acggatggatctcatatctacacat

SEQ ID NO: 104327 - DNA, 25 bp, Probe Sequence
aagcagacaggaatagtgaacaaca

SEQ ID NO: 104328 - DNA, 25 bp, Probe Sequence
ctggactatgagactggacatatct

SEQ ID NO: 104329 - DNA, 25 bp, Probe Sequence
cacggatggatctcatatctacaca

SEQ ID NO: 104330 - DNA, 25 bp, Probe Sequence
aagtgcttgtcaagttctagttgtt

SEQ ID NO: 104331 - DNA, 25 bp, Probe Sequence
tgaaggaagctagaagaattacagg

SEQ ID NO: 104332 - DNA, 25 bp, Probe Sequence
ttggatgaaggaagctagaagaatt

SEQ ID NO: 104333 - DNA, 25 bp, Probe Sequence
agacaggaatagtgaacaacagagc

SEQ ID NO: 104334 - DNA, 25 bp, Probe Sequence
tggatgaaggaagctagaagaatta

SEQ ID NO: 104335 - DNA, 25 bp, Probe Sequence
agtgcttgtcaagttctagttgttc

SEQ ID NO: 104336 - DNA, 25 bp, Probe Sequence
ggacatatctcgttctacaatgcca

SEQ ID NO: 104337 - DNA, 25 bp, Probe Sequence
tggacatatctcgttctacaatgcc

SEQ ID NO: 104338 - DNA, 25 bp, Probe Sequence
ggatgaaggaagctagaagaattac

SEQ ID NO: 104339 - DNA, 25 bp, Probe Sequence
tctgagcctctgtatcctgtattca

SEQ ID NO: 104340 - DNA, 25 bp, Probe Sequence
tgatgaggtattagtggcttagaag

SEQ ID NO: 104341 - DNA, 25 bp, Probe Sequence
gatgaggtattagtggcttagaaga

SEQ ID NO: 104342 - DNA, 25 bp, Probe Sequence
ttgatgaggtattagtggcttagaa

SEQ ID NO: 104343 - DNA, 25 bp, Probe Sequence
gagaattgatgaggtattagtggct

SEQ ID NO: 104344 - DNA, 25 bp, Probe Sequence
agagaattgatgaggtattagtggc

SEQ ID NO: 104345 - DNA, 25 bp, Probe Sequence
agaattgatgaggtattagtggctt

SEQ ID NO: 104346 - DNA, 25 bp, Probe Sequence
attgatgaggtattagtggcttaga

SEQ ID NO: 104347 - DNA, 25 bp, Probe Sequence
tgaggtattagtggcttagaagaat

SEQ ID NO: 104348 - DNA, 25 bp, Probe Sequence
atgaggtattagtggcttagaagaa

SEQ ID NO: 104349 - DNA, 25 bp, Probe Sequence
tggcaagagaattgatgaggtatta

SEQ ID NO: 104350 - DNA, 25 bp, Probe Sequence
ggcaagagaattgatgaggtattag

SEQ ID NO: 104351 - DNA, 25 bp, Probe Sequence
ctggcaagagaattgatgaggtatt

SEQ ID NO: 104352 - DNA, 25 bp, Probe Sequence
aattgatgaggtattagtggcttag

SEQ ID NO: 104353 - DNA, 25 bp, Probe Sequence
gaattgatgaggtattagtggctta

SEQ ID NO: 104354 - DNA, 25 bp, Probe Sequence
gcaagagaattgatgaggtattagt

SEQ ID NO: 104355 - DNA, 25 bp, Probe Sequence
gaatcctcctacttgagacactgta

SEQ ID NO: 104356 - DNA, 25 bp, Probe Sequence
tcttccttgtgaacatgaaccatat

SEQ ID NO: 104357 - DNA, 25 bp, Probe Sequence
ttcttccttgtgaacatgaaccata

SEQ ID NO: 104358 - DNA, 25 bp, Probe Sequence
gaggtattagtggcttagaagaatt

SEQ ID NO: 104359 - DNA, 25 bp, Probe Sequence
aagagaattgatgaggtattagtgg

SEQ ID NO: 104360 - DNA, 25 bp, Probe Sequence
ggcataagttggtcttaggttgtat

SEQ ID NO: 104361 - DNA, 25 bp, Probe Sequence
ctaacgaatcctcctacttgagaca

SEQ ID NO: 104362 - DNA, 25 bp, Probe Sequence
cttatgtgtatatagcatcctgagc

SEQ ID NO: 104363 - DNA, 25 bp, Probe Sequence
aattgaaggcataagttggtcttag

SEQ ID NO: 104364 - DNA, 25 bp, Probe Sequence
atactggactctttcaacttctctc

SEQ ID NO: 104365 - DNA, 25 bp, Probe Sequence
cctatactggactctttcaacttct

SEQ ID NO: 104366 - DNA, 25 bp, Probe Sequence
tactggactctttcaacttctctca

SEQ ID NO: 104367 - DNA, 25 bp, Probe Sequence
gcctatactggactctttcaacttc

SEQ ID NO: 104368 - DNA, 25 bp, Probe Sequence
agcctatactggactctttcaactt

SEQ ID NO: 104369 - DNA, 25 bp, Probe Sequence
gataactttgaccaggagcctatac

SEQ ID NO: 104370 - DNA, 25 bp, Probe Sequence
agataactttgaccaggagcctata

SEQ ID NO: 104371 - DNA, 25 bp, Probe Sequence
ataactttgaccaggagcctatact

SEQ ID NO: 104372 - DNA, 25 bp, Probe Sequence
ctggactctttcaacttctctcaag

SEQ ID NO: 104373 - DNA, 25 bp, Probe Sequence
tatactggactctttcaacttctct

SEQ ID NO: 104374 - DNA, 25 bp, Probe Sequence
actggactctttcaacttctctcaa

SEQ ID NO: 104375 - DNA, 25 bp, Probe Sequence
ctatactggactctttcaacttctc

SEQ ID NO: 104376 - DNA, 25 bp, Probe Sequence
ggcacttgatggctacaaataaatg

SEQ ID NO: 104377 - DNA, 25 bp, Probe Sequence
aggcacttgatggctacaaataaat

SEQ ID NO: 104378 - DNA, 25 bp, Probe Sequence
cttgatggctacaaataaatgtccc

SEQ ID NO: 104379 - DNA, 25 bp, Probe Sequence
acttgatggctacaaataaatgtcc

SEQ ID NO: 104380 - DNA, 25 bp, Probe Sequence
gcacttgatggctacaaataaatgt

SEQ ID NO: 104381 - DNA, 25 bp, Probe Sequence
cagataactttgaccaggagcctat

SEQ ID NO: 104382 - DNA, 25 bp, Probe Sequence
gttcttcagtcctgctccagataac

SEQ ID NO: 104383 - DNA, 25 bp, Probe Sequence
tcttcagtcctgctccagataactt

SEQ ID NO: 104384 - DNA, 25 bp, Probe Sequence
ttcttcagtcctgctccagataact

SEQ ID NO: 104385 - DNA, 25 bp, Probe Sequence
cacttgatggctacaaataaatgtc

SEQ ID NO: 104386 - DNA, 25 bp, Probe Sequence
caggcacttgatggctacaaataaa

SEQ ID NO: 104387 - DNA, 25 bp, Probe Sequence
gagcctatactggactctttcaact

SEQ ID NO: 104388 - DNA, 25 bp, Probe Sequence
tgcttctcttcttacagtagttcaa

SEQ ID NO: 104389 - DNA, 25 bp, Probe Sequence
atgcttctcttcttacagtagttca

SEQ ID NO: 104390 - DNA, 25 bp, Probe Sequence
aatgcttctcttcttacagtagttc

SEQ ID NO: 104391 - DNA, 25 bp, Probe Sequence
ccattggattgtacttctcttctga

SEQ ID NO: 104392 - DNA, 25 bp, Probe Sequence
cattggattgtacttctcttctgaa

SEQ ID NO: 104393 - DNA, 25 bp, Probe Sequence
gcacactgaatagtctaatctacat

SEQ ID NO: 104394 - DNA, 25 bp, Probe Sequence
taatgcttctcttcttacagtagtt

SEQ ID NO: 104395 - DNA, 25 bp, Probe Sequence
ttaatgcttctcttcttacagtagt

SEQ ID NO: 104396 - DNA, 25 bp, Probe Sequence
gaccctactggacatttattgactt

SEQ ID NO: 104397 - DNA, 25 bp, Probe Sequence
tttgaccctactggacatttattga

SEQ ID NO: 104398 - DNA, 25 bp, Probe Sequence
ttgaccctactggacatttattgac

SEQ ID NO: 104399 - DNA, 25 bp, Probe Sequence
accctactggacatttattgactta

SEQ ID NO: 104400 - DNA, 25 bp, Probe Sequence
tgaccctactggacatttattgact

SEQ ID NO: 104401 - DNA, 25 bp, Probe Sequence
gcttctcttcttacagtagttcaaa

SEQ ID NO: 104402 - DNA, 25 bp, Probe Sequence
tgcacactgaatagtctaatctaca

SEQ ID NO: 104403 - DNA, 25 bp, Probe Sequence
catcactttgggacttggtagtatt

SEQ ID NO: 104404 - DNA, 25 bp, Probe Sequence
tgtttggaggctgtactatatgaag

SEQ ID NO: 104405 - DNA, 25 bp, Probe Sequence
gtgtttggaggctgtactatatgaa

SEQ ID NO: 104406 - DNA, 25 bp, Probe Sequence
cttaggtctgagagtcaaacaatgt

SEQ ID NO: 104407 - DNA, 25 bp, Probe Sequence
taaagttgagaacaggtataagtgc

SEQ ID NO: 104408 - DNA, 25 bp, Probe Sequence
tcactttgggacttggtagtattat

SEQ ID NO: 104409 - DNA, 25 bp, Probe Sequence
atcactttgggacttggtagtatta

SEQ ID NO: 104410 - DNA, 25 bp, Probe Sequence
ctgcatatactgtgagctgtgattg

SEQ ID NO: 104411 - DNA, 25 bp, Probe Sequence
ccctactggacatttattgacttaa

SEQ ID NO: 104412 - DNA, 25 bp, Probe Sequence
aagtgtttctgtatatccgtctgta

SEQ ID NO: 104413 - DNA, 25 bp, Probe Sequence
ctttcagttatacgaatgccatcag

SEQ ID NO: 104414 - DNA, 25 bp, Probe Sequence
gaagtgtttctgtatatccgtctgt

SEQ ID NO: 104415 - DNA, 25 bp, Probe Sequence
aaataagggttggcttctgaactac

SEQ ID NO: 104416 - DNA, 25 bp, Probe Sequence
actttcagttatacgaatgccatca

SEQ ID NO: 104417 - DNA, 25 bp, Probe Sequence
agtgtttctgtatatccgtctgtac

SEQ ID NO: 104418 - DNA, 25 bp, Probe Sequence
cagttatacgaatgccatcagcttg

SEQ ID NO: 104419 - DNA, 25 bp, Probe Sequence
tcagttatacgaatgccatcagctt

SEQ ID NO: 104420 - DNA, 25 bp, Probe Sequence
tttcagttatacgaatgccatcagc

SEQ ID NO: 104421 - DNA, 25 bp, Probe Sequence
ttcagttatacgaatgccatcagct

SEQ ID NO: 104422 - DNA, 25 bp, Probe Sequence
gaagaccatccagagcctacagatt

SEQ ID NO: 104423 - DNA, 25 bp, Probe Sequence
aaattgagaacatcactgctccaaa

SEQ ID NO: 104424 - DNA, 25 bp, Probe Sequence
gttatacgaatgccatcagcttgac

SEQ ID NO: 104425 - DNA, 25 bp, Probe Sequence
agttatacgaatgccatcagcttga

SEQ ID NO: 104426 - DNA, 25 bp, Probe Sequence
aattgagaacatcactgctccaaag

SEQ ID NO: 104427 - DNA, 25 bp, Probe Sequence
agaaatatgaaatgaaccatgctca

SEQ ID NO: 104428 - DNA, 25 bp, Probe Sequence
aagaaatatgaaatgaaccatgctc

SEQ ID NO: 104429 - DNA, 25 bp, Probe Sequence
gcctacagatttctgctatcattct

SEQ ID NO: 104430 - DNA, 25 bp, Probe Sequence
attgagaacatcactgctccaaaga

SEQ ID NO: 104431 - DNA, 25 bp, Probe Sequence
aaagaaatatgaaatgaaccatgct

SEQ ID NO: 104432 - DNA, 25 bp, Probe Sequence
gaaagaaatatgaaatgaaccatgc

SEQ ID NO: 104433 - DNA, 25 bp, Probe Sequence
ttatacgaatgccatcagcttgacc

SEQ ID NO: 104434 - DNA, 25 bp, Probe Sequence
agaagtgtttctgtatatccgtctg

SEQ ID NO: 104435 - DNA, 25 bp, Probe Sequence
gagaagtgtttctgtatatccgtct

SEQ ID NO: 104436 - DNA, 25 bp, Probe Sequence
ggagaagacctagagagaattatgg

SEQ ID NO: 104437 - DNA, 25 bp, Probe Sequence
gaagacctagagagaattatggact

SEQ ID NO: 104438 - DNA, 25 bp, Probe Sequence
agaagacctagagagaattatggac

SEQ ID NO: 104439 - DNA, 25 bp, Probe Sequence
gagaattatggactccttactggtt

SEQ ID NO: 104440 - DNA, 25 bp, Probe Sequence
gagagaattatggactccttactgg

SEQ ID NO: 104441 - DNA, 25 bp, Probe Sequence
gagaagacctagagagaattatgga

SEQ ID NO: 104442 - DNA, 25 bp, Probe Sequence
agagaattatggactccttactggt

SEQ ID NO: 104443 - DNA, 25 bp, Probe Sequence
gctatgttgctatctataccattga

SEQ ID NO: 104444 - DNA, 25 bp, Probe Sequence
acctagagagaattatggactcctt

SEQ ID NO: 104445 - DNA, 25 bp, Probe Sequence
gacctagagagaattatggactcct

SEQ ID NO: 104446 - DNA, 25 bp, Probe Sequence
agacctagagagaattatggactcc

SEQ ID NO: 104447 - DNA, 25 bp, Probe Sequence
tgatgctgttacaataattacgctg

SEQ ID NO: 104448 - DNA, 25 bp, Probe Sequence
agagagaattatggactccttactg

SEQ ID NO: 104449 - DNA, 25 bp, Probe Sequence
gctgttacaataattacgctggtac

SEQ ID NO: 104450 - DNA, 25 bp, Probe Sequence
gatgctgttacaataattacgctgg

SEQ ID NO: 104451 - DNA, 25 bp, Probe Sequence
tgctgttacaataattacgctggta

SEQ ID NO: 104452 - DNA, 25 bp, Probe Sequence
atgatgctgttacaataattacgct

SEQ ID NO: 104453 - DNA, 25 bp, Probe Sequence
atgctgttacaataattacgctggt

SEQ ID NO: 104454 - DNA, 25 bp, Probe Sequence
atgctacctgattgtataaggaaca

SEQ ID NO: 104455 - DNA, 25 bp, Probe Sequence
aagacctagagagaattatggactc

SEQ ID NO: 104456 - DNA, 25 bp, Probe Sequence
aatgatgctgttacaataattacgc

SEQ ID NO: 104457 - DNA, 25 bp, Probe Sequence
acaataattacgctggtacaagtta

SEQ ID NO: 104458 - DNA, 25 bp, Probe Sequence
tacaataattacgctggtacaagtt

SEQ ID NO: 104459 - DNA, 25 bp, Probe Sequence
ttacaataattacgctggtacaagt

SEQ ID NO: 104460 - DNA, 25 bp, Probe Sequence
atctttgattcagacagcttatggg

SEQ ID NO: 104461 - DNA, 25 bp, Probe Sequence
aatctttgattcagacagcttatgg

SEQ ID NO: 104462 - DNA, 25 bp, Probe Sequence
cccagctctttgttcagttgactta

SEQ ID NO: 104463 - DNA, 25 bp, Probe Sequence
aaatctttgattcagacagcttatg

SEQ ID NO: 104464 - DNA, 25 bp, Probe Sequence
cgtaggagctcacagtctagattag

SEQ ID NO: 104465 - DNA, 25 bp, Probe Sequence
taggagctcacagtctagattagaa

SEQ ID NO: 104466 - DNA, 25 bp, Probe Sequence
gtaggagctcacagtctagattaga

SEQ ID NO: 104467 - DNA, 25 bp, Probe Sequence
aggagctcacagtctagattagaag

SEQ ID NO: 104468 - DNA, 25 bp, Probe Sequence
ggagctcacagtctagattagaagt

SEQ ID NO: 104469 - DNA, 25 bp, Probe Sequence
ccgtaggagctcacagtctagatta

SEQ ID NO: 104470 - DNA, 25 bp, Probe Sequence
ctttgattcagacagcttatggggt

SEQ ID NO: 104471 - DNA, 25 bp, Probe Sequence
tctttgattcagacagcttatgggg

SEQ ID NO: 104472 - DNA, 25 bp, Probe Sequence
aaaatctttgattcagacagcttat

SEQ ID NO: 104473 - DNA, 25 bp, Probe Sequence
tccgtaggagctcacagtctagatt

SEQ ID NO: 104474 - DNA, 25 bp, Probe Sequence
aaagcccagctctttgttcagttga

SEQ ID NO: 104475 - DNA, 25 bp, Probe Sequence
ctccgtaggagctcacagtctagat

SEQ ID NO: 104476 - DNA, 25 bp, Probe Sequence
cttaaagatccaaactgagaaagca

SEQ ID NO: 104477 - DNA, 25 bp, Probe Sequence
ttaaagatccaaactgagaaagcag

SEQ ID NO: 104478 - DNA, 25 bp, Probe Sequence
gagcttaaagatccaaactgagaaa

SEQ ID NO: 104479 - DNA, 25 bp, Probe Sequence
taaagatccaaactgagaaagcagg

SEQ ID NO: 104480 - DNA, 25 bp, Probe Sequence
agcttaaagatccaaactgagaaag

SEQ ID NO: 104481 - DNA, 25 bp, Probe Sequence
ggagcttaaagatccaaactgagaa

SEQ ID NO: 104482 - DNA, 25 bp, Probe Sequence
gatcacttaaggtcaggagtttgag

SEQ ID NO: 104483 - DNA, 25 bp, Probe Sequence
atcacttaaggtcaggagtttgaga

SEQ ID NO: 104484 - DNA, 25 bp, Probe Sequence
catacctgtaatcccagctactcag

SEQ ID NO: 104485 - DNA, 25 bp, Probe Sequence
cacatacctgtaatcccagctactc

SEQ ID NO: 104486 - DNA, 25 bp, Probe Sequence
ggatcacttaaggtcaggagtttga

SEQ ID NO: 104487 - DNA, 25 bp, Probe Sequence
acatacctgtaatcccagctactca

SEQ ID NO: 104488 - DNA, 25 bp, Probe Sequence
tggatcacttaaggtcaggagtttg

SEQ ID NO: 104489 - DNA, 25 bp, Probe Sequence
tcacttaaggtcaggagtttgagac

SEQ ID NO: 104490 - DNA, 25 bp, Probe Sequence
gtggatcacttaaggtcaggagttt

SEQ ID NO: 104491 - DNA, 25 bp, Probe Sequence
aaagatccaaactgagaaagcaggc

SEQ ID NO: 104492 - DNA, 25 bp, Probe Sequence
aaattaagttgcatagctgctttgc

SEQ ID NO: 104493 - DNA, 25 bp, Probe Sequence
ggtggatcacttaaggtcaggagtt

SEQ ID NO: 104494 - DNA, 25 bp, Probe Sequence
agtggcttttcctccattaatacat

SEQ ID NO: 104495 - DNA, 25 bp, Probe Sequence
agagtggcttttcctccattaatac

SEQ ID NO: 104496 - DNA, 25 bp, Probe Sequence
cagagtggcttttcctccattaata

SEQ ID NO: 104497 - DNA, 25 bp, Probe Sequence
gagtggcttttcctccattaataca

SEQ ID NO: 104498 - DNA, 25 bp, Probe Sequence
gtggcttttcctccattaatacata

SEQ ID NO: 104499 - DNA, 25 bp, Probe Sequence
ctcagagtggcttttcctccattaa

SEQ ID NO: 104500 - DNA, 25 bp, Probe Sequence
ctttctaagtgtccctttcctatgt

SEQ ID NO: 104501 - DNA, 25 bp, Probe Sequence
cctttctaagtgtccctttcctatg

SEQ ID NO: 104502 - DNA, 25 bp, Probe Sequence
tcctttctaagtgtccctttcctat

SEQ ID NO: 104503 - DNA, 25 bp, Probe Sequence
gaacagacatttaggtatctcaggt

SEQ ID NO: 104504 - DNA, 25 bp, Probe Sequence
ctaagtgtccctttcctatgtatgc

SEQ ID NO: 104505 - DNA, 25 bp, Probe Sequence
tctaagtgtccctttcctatgtatg

SEQ ID NO: 104506 - DNA, 25 bp, Probe Sequence
agaacagacatttaggtatctcagg

SEQ ID NO: 104507 - DNA, 25 bp, Probe Sequence
gtatctcaggtcctttctaagtgtc

SEQ ID NO: 104508 - DNA, 25 bp, Probe Sequence
tttctaagtgtccctttcctatgta

SEQ ID NO: 104509 - DNA, 25 bp, Probe Sequence
tatctcaggtcctttctaagtgtcc

SEQ ID NO: 104510 - DNA, 25 bp, Probe Sequence
ttctaagtgtccctttcctatgtat

SEQ ID NO: 104511 - DNA, 25 bp, Probe Sequence
gtcctttctaagtgtccctttccta

SEQ ID NO: 104512 - DNA, 25 bp, Probe Sequence
ggtatctcaggtcctttctaagtgt

SEQ ID NO: 104513 - DNA, 25 bp, Probe Sequence
gtagaagtttctttacctgctgaca

SEQ ID NO: 104514 - DNA, 25 bp, Probe Sequence
aacagacatttaggtatctcaggtc

SEQ ID NO: 104515 - DNA, 25 bp, Probe Sequence
tttgggatggtagaagtttctttac

SEQ ID NO: 104516 - DNA, 25 bp, Probe Sequence
ctttgggatggtagaagtttcttta

SEQ ID NO: 104517 - DNA, 25 bp, Probe Sequence
acatttaggtatctcaggtcctttc

SEQ ID NO: 104518 - DNA, 25 bp, Probe Sequence
gacatttaggtatctcaggtccttt

SEQ ID NO: 104519 - DNA, 25 bp, Probe Sequence
taggtatctcaggtcctttctaagt

SEQ ID NO: 104520 - DNA, 25 bp, Probe Sequence
agacatttaggtatctcaggtcctt

SEQ ID NO: 104521 - DNA, 25 bp, Probe Sequence
catttaggtatctcaggtcctttct

SEQ ID NO: 104522 - DNA, 25 bp, Probe Sequence
tagaagtttctttacctgctgacag

SEQ ID NO: 104523 - DNA, 25 bp, Probe Sequence
acagacatttaggtatctcaggtcc

SEQ ID NO: 104524 - DNA, 25 bp, Probe Sequence
agagtatgtcagagaaggaagagta

SEQ ID NO: 104525 - DNA, 25 bp, Probe Sequence
agtatgtcagagaaggaagagtagg

SEQ ID NO: 104526 - DNA, 25 bp, Probe Sequence
gagtatgtcagagaaggaagagtag

SEQ ID NO: 104527 - DNA, 25 bp, Probe Sequence
cagagtatgtcagagaaggaagagt

SEQ ID NO: 104528 - DNA, 25 bp, Probe Sequence
ccagagtatgtcagagaaggaagag

SEQ ID NO: 104529 - DNA, 25 bp, Probe Sequence
aagcagcaagagtctacttaacctt

SEQ ID NO: 104530 - DNA, 25 bp, Probe Sequence
ttccaataccaagatgtcttcacag

SEQ ID NO: 104531 - DNA, 25 bp, Probe Sequence
agtgaattaatgttgacatctgctc

SEQ ID NO: 104532 - DNA, 25 bp, Probe Sequence
gtgaattaatgttgacatctgctcc

SEQ ID NO: 104533 - DNA, 25 bp, Probe Sequence
tgaattaatgttgacatctgctcca

SEQ ID NO: 104534 - DNA, 25 bp, Probe Sequence
gaattaatgttgacatctgctccaa

SEQ ID NO: 104535 - DNA, 25 bp, Probe Sequence
gtgaaagaaccaacaaagacctatc

SEQ ID NO: 104536 - DNA, 25 bp, Probe Sequence
ctgatgtttccaataccaagatgtc

SEQ ID NO: 104537 - DNA, 25 bp, Probe Sequence
cagtgaattaatgttgacatctgct

SEQ ID NO: 104538 - DNA, 25 bp, Probe Sequence
acagtgaattaatgttgacatctgc

SEQ ID NO: 104539 - DNA, 25 bp, Probe Sequence
cctgagacagtgaattaatgttgac

SEQ ID NO: 104540 - DNA, 25 bp, Probe Sequence
acctgagacagtgaattaatgttga

SEQ ID NO: 104541 - DNA, 25 bp, Probe Sequence
tgatgtttccaataccaagatgtct

SEQ ID NO: 104542 - DNA, 25 bp, Probe Sequence
gaaagaaccaacaaagacctatcct

SEQ ID NO: 104543 - DNA, 25 bp, Probe Sequence
tataacaaagcagcaagagtctact

SEQ ID NO: 104544 - DNA, 25 bp, Probe Sequence
ctgagacagtgaattaatgttgaca

SEQ ID NO: 104545 - DNA, 25 bp, Probe Sequence
aaagaaccaacaaagacctatcctg

SEQ ID NO: 104546 - DNA, 25 bp, Probe Sequence
tgaaagaaccaacaaagacctatcc

SEQ ID NO: 104547 - DNA, 25 bp, Probe Sequence
cacctgagacagtgaattaatgttg

SEQ ID NO: 104548 - DNA, 25 bp, Probe Sequence
aattacgatgtcctcaggttatcat

SEQ ID NO: 104549 - DNA, 25 bp, Probe Sequence
gcttgcttagtgattaactgcttat

SEQ ID NO: 104550 - DNA, 25 bp, Probe Sequence
ttacgatgtcctcaggttatcataa

SEQ ID NO: 104551 - DNA, 25 bp, Probe Sequence
attacgatgtcctcaggttatcata

SEQ ID NO: 104552 - DNA, 25 bp, Probe Sequence
agagagacagatgtaggtataagat

SEQ ID NO: 104553 - DNA, 25 bp, Probe Sequence
ggtttgaataggaagagaagagaca

SEQ ID NO: 104554 - DNA, 25 bp, Probe Sequence
aggtttgaataggaagagaagagac

SEQ ID NO: 104555 - DNA, 25 bp, Probe Sequence
tcaggagaaagaaacaacatagaga

SEQ ID NO: 104556 - DNA, 25 bp, Probe Sequence
ggagaaagaaacaacatagagagac

SEQ ID NO: 104557 - DNA, 25 bp, Probe Sequence
aggagaaagaaacaacatagagaga

SEQ ID NO: 104558 - DNA, 25 bp, Probe Sequence
caggagaaagaaacaacatagagag

SEQ ID NO: 104559 - DNA, 25 bp, Probe Sequence
aaggtttgaataggaagagaagaga

SEQ ID NO: 104560 - DNA, 25 bp, Probe Sequence
gaagagaagagacatttcaggagaa

SEQ ID NO: 104561 - DNA, 25 bp, Probe Sequence
taggaagagaagagacatttcagga

SEQ ID NO: 104562 - DNA, 25 bp, Probe Sequence
ataggaagagaagagacatttcagg

SEQ ID NO: 104563 - DNA, 25 bp, Probe Sequence
aaattacgatgtcctcaggttatca

SEQ ID NO: 104564 - DNA, 25 bp, Probe Sequence
cactaaattacgatgtcctcaggtt

SEQ ID NO: 104565 - DNA, 25 bp, Probe Sequence
actaaattacgatgtcctcaggtta

SEQ ID NO: 104566 - DNA, 25 bp, Probe Sequence
ctatcatctagtgcagagaacttgt

SEQ ID NO: 104567 - DNA, 25 bp, Probe Sequence
tctatcatctagtgcagagaacttg

SEQ ID NO: 104568 - DNA, 25 bp, Probe Sequence
tatcatctagtgcagagaacttgtt

SEQ ID NO: 104569 - DNA, 25 bp, Probe Sequence
gacagatgtaggtataagatatggt

SEQ ID NO: 104570 - DNA, 25 bp, Probe Sequence
tagagagacagatgtaggtataaga

SEQ ID NO: 104571 - DNA, 25 bp, Probe Sequence
acgatgtcctcaggttatcataaac

SEQ ID NO: 104572 - DNA, 25 bp, Probe Sequence
gccaacaactctgattaactattcc

SEQ ID NO: 104573 - DNA, 25 bp, Probe Sequence
agccaacaactctgattaactattc

SEQ ID NO: 104574 - DNA, 25 bp, Probe Sequence
ccaacaactctgattaactattcct

SEQ ID NO: 104575 - DNA, 25 bp, Probe Sequence
tgagccaacaactctgattaactat

SEQ ID NO: 104576 - DNA, 25 bp, Probe Sequence
ttgagccaacaactctgattaacta

SEQ ID NO: 104577 - DNA, 25 bp, Probe Sequence
gagccaacaactctgattaactatt

SEQ ID NO: 104578 - DNA, 25 bp, Probe Sequence
aaccttggatactgagtctcctaat

SEQ ID NO: 104579 - DNA, 25 bp, Probe Sequence
ccttggatactgagtctcctaatct

SEQ ID NO: 104580 - DNA, 25 bp, Probe Sequence
accttggatactgagtctcctaatc

SEQ ID NO: 104581 - DNA, 25 bp, Probe Sequence
cttggatactgagtctcctaatctt

SEQ ID NO: 104582 - DNA, 25 bp, Probe Sequence
ttggatactgagtctcctaatctta

SEQ ID NO: 104583 - DNA, 25 bp, Probe Sequence
tggatactgagtctcctaatcttat

SEQ ID NO: 104584 - DNA, 25 bp, Probe Sequence
tttgagccaacaactctgattaact

SEQ ID NO: 104585 - DNA, 25 bp, Probe Sequence
actgagtctcctaatcttatcaatt

SEQ ID NO: 104586 - DNA, 25 bp, Probe Sequence
agtgaacaaacaatatgtggtcaat

SEQ ID NO: 104587 - DNA, 25 bp, Probe Sequence
gagtctcctaatcttatcaattctg

SEQ ID NO: 104588 - DNA, 25 bp, Probe Sequence
tagtgaacaaacaatatgtggtcaa

SEQ ID NO: 104589 - DNA, 25 bp, Probe Sequence
ttagtgaacaaacaatatgtggtca

SEQ ID NO: 104590 - DNA, 25 bp, Probe Sequence
gtgaacaaacaatatgtggtcaatt

SEQ ID NO: 104591 - DNA, 25 bp, Probe Sequence
ggatactgagtctcctaatcttatc

SEQ ID NO: 104592 - DNA, 25 bp, Probe Sequence
agtctcctaatcttatcaattctga

SEQ ID NO: 104593 - DNA, 25 bp, Probe Sequence
tgagtctcctaatcttatcaattct

SEQ ID NO: 104594 - DNA, 25 bp, Probe Sequence
caacaactctgattaactattccta

SEQ ID NO: 104595 - DNA, 25 bp, Probe Sequence
ctgagtctcctaatcttatcaattc

SEQ ID NO: 104596 - DNA, 25 bp, Probe Sequence
tgcctctcacctgtaagatattatt

SEQ ID NO: 104597 - DNA, 25 bp, Probe Sequence
tctcactaatgacagtccatgattc

SEQ ID NO: 104598 - DNA, 25 bp, Probe Sequence
ttctcactaatgacagtccatgatt

SEQ ID NO: 104599 - DNA, 25 bp, Probe Sequence
agtaattgctgttgcttgttgtcaa

SEQ ID NO: 104600 - DNA, 25 bp, Probe Sequence
ctcactaatgacagtccatgattcg

SEQ ID NO: 104601 - DNA, 25 bp, Probe Sequence
acctattctccacctaaatctctga

SEQ ID NO: 104602 - DNA, 25 bp, Probe Sequence
ttaaagcaataacaagaaggaaggc

SEQ ID NO: 104603 - DNA, 25 bp, Probe Sequence
tttaatttgtagttggatgtcgtgg

SEQ ID NO: 104604 - DNA, 25 bp, Probe Sequence
ttaatttgtagttggatgtcgtgga

SEQ ID NO: 104605 - DNA, 25 bp, Probe Sequence
cgggttggaaagggatatttaatct

SEQ ID NO: 104606 - DNA, 25 bp, Probe Sequence
tctaaacagattggagttggcatat

SEQ ID NO: 104607 - DNA, 25 bp, Probe Sequence
ttctaaacagattggagttggcata

SEQ ID NO: 104608 - DNA, 25 bp, Probe Sequence
cctattctccacctaaatctctgaa

SEQ ID NO: 104609 - DNA, 25 bp, Probe Sequence
aacagattggagttggcatataaac

SEQ ID NO: 104610 - DNA, 25 bp, Probe Sequence
tacctattctccacctaaatctctg

SEQ ID NO: 104611 - DNA, 25 bp, Probe Sequence
acagattggagttggcatataaaca

SEQ ID NO: 104612 - DNA, 25 bp, Probe Sequence
tggagttggcatataaacaaatacg

SEQ ID NO: 104613 - DNA, 25 bp, Probe Sequence
cagattggagttggcatataaacaa

SEQ ID NO: 104614 - DNA, 25 bp, Probe Sequence
tttctaaacagattggagttggcat

SEQ ID NO: 104615 - DNA, 25 bp, Probe Sequence
actagaagttacctattctccacct

SEQ ID NO: 104616 - DNA, 25 bp, Probe Sequence
cactagaagttacctattctccacc

SEQ ID NO: 104617 - DNA, 25 bp, Probe Sequence
gtgagccagatgctgaatagatatt

SEQ ID NO: 104618 - DNA, 25 bp, Probe Sequence
aaacagattggagttggcatataaa

SEQ ID NO: 104619 - DNA, 25 bp, Probe Sequence
agttacctattctccacctaaatct

SEQ ID NO: 104620 - DNA, 25 bp, Probe Sequence
tgatgatatgcgtaagtgctgtaag

SEQ ID NO: 104621 - DNA, 25 bp, Probe Sequence
gtgatgatatgcgtaagtgctgtaa

SEQ ID NO: 104622 - DNA, 25 bp, Probe Sequence
gatgatatgcgtaagtgctgtaagg

SEQ ID NO: 104623 - DNA, 25 bp, Probe Sequence
agtgatgatatgcgtaagtgctgta

SEQ ID NO: 104624 - DNA, 25 bp, Probe Sequence
gtaagtgctgtaaggcttgtaactg

SEQ ID NO: 104625 - DNA, 25 bp, Probe Sequence
atgatatgcgtaagtgctgtaaggc

SEQ ID NO: 104626 - DNA, 25 bp, Probe Sequence
gatatgcgtaagtgctgtaaggctt

SEQ ID NO: 104627 - DNA, 25 bp, Probe Sequence
cgtaagtgctgtaaggcttgtaact

SEQ ID NO: 104628 - DNA, 25 bp, Probe Sequence
atatgcgtaagtgctgtaaggcttg

SEQ ID NO: 104629 - DNA, 25 bp, Probe Sequence
ttagcagtgatgatatgcgtaagtg

SEQ ID NO: 104630 - DNA, 25 bp, Probe Sequence
cagtgatgatatgcgtaagtgctgt

SEQ ID NO: 104631 - DNA, 25 bp, Probe Sequence
tgatatgcgtaagtgctgtaaggct

SEQ ID NO: 104632 - DNA, 25 bp, Probe Sequence
gcgtaagtgctgtaaggcttgtaac

SEQ ID NO: 104633 - DNA, 25 bp, Probe Sequence
tttagcagtgatgatatgcgtaagt

SEQ ID NO: 104634 - DNA, 25 bp, Probe Sequence
atgcgtaagtgctgtaaggcttgta

SEQ ID NO: 104635 - DNA, 25 bp, Probe Sequence
tatgcgtaagtgctgtaaggcttgt

SEQ ID NO: 104636 - DNA, 25 bp, Probe Sequence
tagcagtgatgatatgcgtaagtgc

SEQ ID NO: 104637 - DNA, 25 bp, Probe Sequence
tgcgtaagtgctgtaaggcttgtaa

SEQ ID NO: 104638 - DNA, 25 bp, Probe Sequence
gcagtgatgatatgcgtaagtgctg

SEQ ID NO: 104639 - DNA, 25 bp, Probe Sequence
ttcattttagcagtgatgatatgcg

SEQ ID NO: 104640 - DNA, 25 bp, Probe Sequence
ttttagcagtgatgatatgcgtaag

SEQ ID NO: 104641 - DNA, 25 bp, Probe Sequence
cattttagcagtgatgatatgcgta

SEQ ID NO: 104642 - DNA, 25 bp, Probe Sequence
tcattttagcagtgatgatatgcgt

SEQ ID NO: 104643 - DNA, 25 bp, Probe Sequence
attttagcagtgatgatatgcgtaa

SEQ ID NO: 104644 - DNA, 25 bp, Probe Sequence
actcattgtattcatcctgtgactt

SEQ ID NO: 104645 - DNA, 25 bp, Probe Sequence
aactcattgtattcatcctgtgact

SEQ ID NO: 104646 - DNA, 25 bp, Probe Sequence
tcctcaaccagtgtaatatgaagaa

SEQ ID NO: 104647 - DNA, 25 bp, Probe Sequence
ttcctcaaccagtgtaatatgaaga

SEQ ID NO: 104648 - DNA, 25 bp, Probe Sequence
agcatgtctcatagtcgtctgtatc

SEQ ID NO: 104649 - DNA, 25 bp, Probe Sequence
cctcaaccagtgtaatatgaagaat

SEQ ID NO: 104650 - DNA, 25 bp, Probe Sequence
cagaaggtatcaggtgtcattgaac

SEQ ID NO: 104651 - DNA, 25 bp, Probe Sequence
tcagaaggtatcaggtgtcattgaa

SEQ ID NO: 104652 - DNA, 25 bp, Probe Sequence
ttcagaaggtatcaggtgtcattga

SEQ ID NO: 104653 - DNA, 25 bp, Probe Sequence
gctctaagaatgaacacatcagatg

SEQ ID NO: 104654 - DNA, 25 bp, Probe Sequence
attgaacacctgatatgaaggatgt

SEQ ID NO: 104655 - DNA, 25 bp, Probe Sequence
cattgaacacctgatatgaaggatg

SEQ ID NO: 104656 - DNA, 25 bp, Probe Sequence
atatcagtgaagatcaaccatgtgt

SEQ ID NO: 104657 - DNA, 25 bp, Probe Sequence
tgaacacctgatatgaaggatgtaa

SEQ ID NO: 104658 - DNA, 25 bp, Probe Sequence
ttgaacacctgatatgaaggatgta

SEQ ID NO: 104659 - DNA, 25 bp, Probe Sequence
tatcagtgaagatcaaccatgtgtg

SEQ ID NO: 104660 - DNA, 25 bp, Probe Sequence
agaaggtatcaggtgtcattgaaca

SEQ ID NO: 104661 - DNA, 25 bp, Probe Sequence
aagcatgtctcatagtcgtctgtat

SEQ ID NO: 104662 - DNA, 25 bp, Probe Sequence
agctctaagaatgaacacatcagat

SEQ ID NO: 104663 - DNA, 25 bp, Probe Sequence
tatatcagtgaagatcaaccatgtg

SEQ ID NO: 104664 - DNA, 25 bp, Probe Sequence
gcctgaaatgtctttgaagtcttat

SEQ ID NO: 104665 - DNA, 25 bp, Probe Sequence
agcctgaaatgtctttgaagtctta

SEQ ID NO: 104666 - DNA, 25 bp, Probe Sequence
cagtgaactcacctacttaggaatt

SEQ ID NO: 104667 - DNA, 25 bp, Probe Sequence
attgtcagtgaactcacctacttag

SEQ ID NO: 104668 - DNA, 25 bp, Probe Sequence
tacagacaaggcaagagatgataag

SEQ ID NO: 104669 - DNA, 25 bp, Probe Sequence
gatacagacaaggcaagagatgata

SEQ ID NO: 104670 - DNA, 25 bp, Probe Sequence
atagatacagacaaggcaagagatg

SEQ ID NO: 104671 - DNA, 25 bp, Probe Sequence
catagatacagacaaggcaagagat

SEQ ID NO: 104672 - DNA, 25 bp, Probe Sequence
atacagacaaggcaagagatgataa

SEQ ID NO: 104673 - DNA, 25 bp, Probe Sequence
tagatacagacaaggcaagagatga

SEQ ID NO: 104674 - DNA, 25 bp, Probe Sequence
tcatagatacagacaaggcaagaga

SEQ ID NO: 104675 - DNA, 25 bp, Probe Sequence
agatacagacaaggcaagagatgat

SEQ ID NO: 104676 - DNA, 25 bp, Probe Sequence
tctcatagatacagacaaggcaaga

SEQ ID NO: 104677 - DNA, 25 bp, Probe Sequence
gttctaattctaggttcacagaggt

SEQ ID NO: 104678 - DNA, 25 bp, Probe Sequence
ctcatagatacagacaaggcaagag

SEQ ID NO: 104679 - DNA, 25 bp, Probe Sequence
attctaggttcacagaggtatgaga

SEQ ID NO: 104680 - DNA, 25 bp, Probe Sequence
aattctaggttcacagaggtatgag

SEQ ID NO: 104681 - DNA, 25 bp, Probe Sequence
tctaggttcacagaggtatgagaag

SEQ ID NO: 104682 - DNA, 25 bp, Probe Sequence
tgttctaattctaggttcacagagg

SEQ ID NO: 104683 - DNA, 25 bp, Probe Sequence
ttctaattctaggttcacagaggta

SEQ ID NO: 104684 - DNA, 25 bp, Probe Sequence
tgctctctcttatgtggtacaatac

SEQ ID NO: 104685 - DNA, 25 bp, Probe Sequence
gatgctctctcttatgtggtacaat

SEQ ID NO: 104686 - DNA, 25 bp, Probe Sequence
tgacttgttctaattctaggttcac

SEQ ID NO: 104687 - DNA, 25 bp, Probe Sequence
ctaattctaggttcacagaggtatg

SEQ ID NO: 104688 - DNA, 25 bp, Probe Sequence
tctaattctaggttcacagaggtat

SEQ ID NO: 104689 - DNA, 25 bp, Probe Sequence
taattctaggttcacagaggtatga

SEQ ID NO: 104690 - DNA, 25 bp, Probe Sequence
atgctctctcttatgtggtacaata

SEQ ID NO: 104691 - DNA, 25 bp, Probe Sequence
acttgttctaattctaggttcacag

SEQ ID NO: 104692 - DNA, 25 bp, Probe Sequence
tggcatatacagataggaagaaacc

SEQ ID NO: 104693 - DNA, 25 bp, Probe Sequence
gcctggcatatacagataggaagaa

SEQ ID NO: 104694 - DNA, 25 bp, Probe Sequence
atatacagataggaagaaacctggc

SEQ ID NO: 104695 - DNA, 25 bp, Probe Sequence
ggcatatacagataggaagaaacct

SEQ ID NO: 104696 - DNA, 25 bp, Probe Sequence
cctggcatatacagataggaagaaa

SEQ ID NO: 104697 - DNA, 25 bp, Probe Sequence
tatacagataggaagaaacctggct

SEQ ID NO: 104698 - DNA, 25 bp, Probe Sequence
ctggcatatacagataggaagaaac

SEQ ID NO: 104699 - DNA, 25 bp, Probe Sequence
atacagataggaagaaacctggctt

SEQ ID NO: 104700 - DNA, 25 bp, Probe Sequence
gcatatacagataggaagaaacctg

SEQ ID NO: 104701 - DNA, 25 bp, Probe Sequence
catatacagataggaagaaacctgg

SEQ ID NO: 104702 - DNA, 25 bp, Probe Sequence
tacagataggaagaaacctggcttg

SEQ ID NO: 104703 - DNA, 25 bp, Probe Sequence
gataggaagaaacctggcttgtgag

SEQ ID NO: 104704 - DNA, 25 bp, Probe Sequence
cagataggaagaaacctggcttgtg

SEQ ID NO: 104705 - DNA, 25 bp, Probe Sequence
agataggaagaaacctggcttgtga

SEQ ID NO: 104706 - DNA, 25 bp, Probe Sequence
acagataggaagaaacctggcttgt

SEQ ID NO: 104707 - DNA, 25 bp, Probe Sequence
tgcctggcatatacagataggaaga

SEQ ID NO: 104708 - DNA, 25 bp, Probe Sequence
ataggaagaaacctggcttgtgagg

SEQ ID NO: 104709 - DNA, 25 bp, Probe Sequence
taggaagaaacctggcttgtgagga

SEQ ID NO: 104710 - DNA, 25 bp, Probe Sequence
atgcctggcatatacagataggaag

SEQ ID NO: 104711 - DNA, 25 bp, Probe Sequence
gatgcctggcatatacagataggaa

SEQ ID NO: 104712 - DNA, 25 bp, Probe Sequence
agatgcctggcatatacagatagga

SEQ ID NO: 104713 - DNA, 25 bp, Probe Sequence
cagatgcctggcatatacagatagg

SEQ ID NO: 104714 - DNA, 25 bp, Probe Sequence
gcagatgcctggcatatacagatag

SEQ ID NO: 104715 - DNA, 25 bp, Probe Sequence
ggcagatgcctggcatatacagata

SEQ ID NO: 104716 - DNA, 25 bp, Probe Sequence
ctgtgggttccagaactctataact

SEQ ID NO: 104717 - DNA, 25 bp, Probe Sequence
tgtgggttccagaactctataactg

SEQ ID NO: 104718 - DNA, 25 bp, Probe Sequence
gctagtgagatgccttagtctgtgg

SEQ ID NO: 104719 - DNA, 25 bp, Probe Sequence
gctgtgggttccagaactctataac

SEQ ID NO: 104720 - DNA, 25 bp, Probe Sequence
cgctagtgagatgccttagtctgtg

SEQ ID NO: 104721 - DNA, 25 bp, Probe Sequence
gttttcctttgtgagtcttggttgg

SEQ ID NO: 104722 - DNA, 25 bp, Probe Sequence
ctagtgagatgccttagtctgtggg

SEQ ID NO: 104723 - DNA, 25 bp, Probe Sequence
cgttttcctttgtgagtcttggttg

SEQ ID NO: 104724 - DNA, 25 bp, Probe Sequence
ggctgtgggttccagaactctataa

SEQ ID NO: 104725 - DNA, 25 bp, Probe Sequence
gtgttctctgtccctagcctcaaac

SEQ ID NO: 104726 - DNA, 25 bp, Probe Sequence
ccgttttcctttgtgagtcttggtt

SEQ ID NO: 104727 - DNA, 25 bp, Probe Sequence
tgtgttctctgtccctagcctcaaa

SEQ ID NO: 104728 - DNA, 25 bp, Probe Sequence
ttttcctttgtgagtcttggttggc

SEQ ID NO: 104729 - DNA, 25 bp, Probe Sequence
gtgggttccagaactctataactgg

SEQ ID NO: 104730 - DNA, 25 bp, Probe Sequence
tagtgagatgccttagtctgtgggg

SEQ ID NO: 104731 - DNA, 25 bp, Probe Sequence
tgggttccagaactctataactggg

SEQ ID NO: 104732 - DNA, 25 bp, Probe Sequence
gggttccagaactctataactgggc

SEQ ID NO: 104733 - DNA, 25 bp, Probe Sequence
ggttccagaactctataactgggcc

SEQ ID NO: 104734 - DNA, 25 bp, Probe Sequence
gtaggtgaacatgccaatgactatg

SEQ ID NO: 104735 - DNA, 25 bp, Probe Sequence
tcttctgtcttcctttgctaactta

SEQ ID NO: 104736 - DNA, 25 bp, Probe Sequence
gtcttctgtcttcctttgctaactt

SEQ ID NO: 104737 - DNA, 25 bp, Probe Sequence
agaagaagtgctttattgaggagat

SEQ ID NO: 104738 - DNA, 25 bp, Probe Sequence
gagaagaagtgctttattgaggaga

SEQ ID NO: 104739 - DNA, 25 bp, Probe Sequence
cttctgtcttcctttgctaacttag

SEQ ID NO: 104740 - DNA, 25 bp, Probe Sequence
ctgctaaagacaagttgagtgagtt

SEQ ID NO: 104741 - DNA, 25 bp, Probe Sequence
ggagaagaagtgctttattgaggag

SEQ ID NO: 104742 - DNA, 25 bp, Probe Sequence
aaattgctgctaaagacaagttgag

SEQ ID NO: 104743 - DNA, 25 bp, Probe Sequence
gaaattgctgctaaagacaagttga

SEQ ID NO: 104744 - DNA, 25 bp, Probe Sequence
agaaattgctgctaaagacaagttg

SEQ ID NO: 104745 - DNA, 25 bp, Probe Sequence
ggtaggtgaacatgccaatgactat

SEQ ID NO: 104746 - DNA, 25 bp, Probe Sequence
ttcactccaattccaccaagttctc

SEQ ID NO: 104747 - DNA, 25 bp, Probe Sequence
cttcactccaattccaccaagttct

SEQ ID NO: 104748 - DNA, 25 bp, Probe Sequence
tcttcactccaattccaccaagttc

SEQ ID NO: 104749 - DNA, 25 bp, Probe Sequence
aagaagtgctttattgaggagatcc

SEQ ID NO: 104750 - DNA, 25 bp, Probe Sequence
gaagaagtgctttattgaggagatc

SEQ ID NO: 104751 - DNA, 25 bp, Probe Sequence
tgctaaagacaagttgagtgagttg

SEQ ID NO: 104752 - DNA, 25 bp, Probe Sequence
gacggagaagaagtgctttattgag

SEQ ID NO: 104753 - DNA, 25 bp, Probe Sequence
gagacggagaagaagtgctttattg

SEQ ID NO: 104754 - DNA, 25 bp, Probe Sequence
agagacggagaagaagtgctttatt

SEQ ID NO: 104755 - DNA, 25 bp, Probe Sequence
aattgctgctaaagacaagttgagt

SEQ ID NO: 104756 - DNA, 25 bp, Probe Sequence
gtcttcactccaattccaccaagtt

SEQ ID NO: 104757 - DNA, 25 bp, Probe Sequence
gatctgtcttcactccaattccacc

SEQ ID NO: 104758 - DNA, 25 bp, Probe Sequence
ttaacaggttcttcttgtgtagtca

SEQ ID NO: 104759 - DNA, 25 bp, Probe Sequence
cctcattactgtagagttcagacat

SEQ ID NO: 104760 - DNA, 25 bp, Probe Sequence
aagcctcattactgtagagttcaga

SEQ ID NO: 104761 - DNA, 25 bp, Probe Sequence
taacaggttcttcttgtgtagtcac

SEQ ID NO: 104762 - DNA, 25 bp, Probe Sequence
agcctcattactgtagagttcagac

SEQ ID NO: 104763 - DNA, 25 bp, Probe Sequence
gcctcattactgtagagttcagaca

SEQ ID NO: 104764 - DNA, 25 bp, Probe Sequence
ttactcctataatcccagcactttg

SEQ ID NO: 104765 - DNA, 25 bp, Probe Sequence
cttactcctataatcccagcacttt

SEQ ID NO: 104766 - DNA, 25 bp, Probe Sequence
ctcattactgtagagttcagacatg

SEQ ID NO: 104767 - DNA, 25 bp, Probe Sequence
cagagaagggaaatctaaatcgtct

SEQ ID NO: 104768 - DNA, 25 bp, Probe Sequence
aagggaaatctaaatcgtcttcaga

SEQ ID NO: 104769 - DNA, 25 bp, Probe Sequence
acagagaagggaaatctaaatcgtc

SEQ ID NO: 104770 - DNA, 25 bp, Probe Sequence
agagaagggaaatctaaatcgtctt

SEQ ID NO: 104771 - DNA, 25 bp, Probe Sequence
tacagagaagggaaatctaaatcgt

SEQ ID NO: 104772 - DNA, 25 bp, Probe Sequence
cattactgtagagttcagacatgat

SEQ ID NO: 104773 - DNA, 25 bp, Probe Sequence
ctacagagaagggaaatctaaatcg

SEQ ID NO: 104774 - DNA, 25 bp, Probe Sequence
attactgtagagttcagacatgatc

SEQ ID NO: 104775 - DNA, 25 bp, Probe Sequence
taaagcctcattactgtagagttca

SEQ ID NO: 104776 - DNA, 25 bp, Probe Sequence
aaagcctcattactgtagagttcag

SEQ ID NO: 104777 - DNA, 25 bp, Probe Sequence
tcattactgtagagttcagacatga

SEQ ID NO: 104778 - DNA, 25 bp, Probe Sequence
ggtaaagcctcattactgtagagtt

SEQ ID NO: 104779 - DNA, 25 bp, Probe Sequence
atgtggtaaagcctcattactgtag

SEQ ID NO: 104780 - DNA, 25 bp, Probe Sequence
gtggtaaagcctcattactgtagag

SEQ ID NO: 104781 - DNA, 25 bp, Probe Sequence
tggtaaagcctcattactgtagagt

SEQ ID NO: 104782 - DNA, 25 bp, Probe Sequence
aataattgaaggcactgaagttgtc

SEQ ID NO: 104783 - DNA, 25 bp, Probe Sequence
ataattgaaggcactgaagttgtcc

SEQ ID NO: 104784 - DNA, 25 bp, Probe Sequence
taattgaaggcactgaagttgtcca

SEQ ID NO: 104785 - DNA, 25 bp, Probe Sequence
agaataagcagaaagtaggaccaag

SEQ ID NO: 104786 - DNA, 25 bp, Probe Sequence
gaataagcagaaagtaggaccaagt

SEQ ID NO: 104787 - DNA, 25 bp, Probe Sequence
cagaataagcagaaagtaggaccaa

SEQ ID NO: 104788 - DNA, 25 bp, Probe Sequence
aataagcagaaagtaggaccaagtg

SEQ ID NO: 104789 - DNA, 25 bp, Probe Sequence
aaataattgaaggcactgaagttgt

SEQ ID NO: 104790 - DNA, 25 bp, Probe Sequence
ttcagaataagcagaaagtaggacc

SEQ ID NO: 104791 - DNA, 25 bp, Probe Sequence
tcagaataagcagaaagtaggacca

SEQ ID NO: 104792 - DNA, 25 bp, Probe Sequence
gttgtccaggaaattcagaataagc

SEQ ID NO: 104793 - DNA, 25 bp, Probe Sequence
ttgtccaggaaattcagaataagca

SEQ ID NO: 104794 - DNA, 25 bp, Probe Sequence
gggattgtgaaggtgtggaaataaa

SEQ ID NO: 104795 - DNA, 25 bp, Probe Sequence
taagcagaaagtaggaccaagtgat

SEQ ID NO: 104796 - DNA, 25 bp, Probe Sequence
ataagcagaaagtaggaccaagtga

SEQ ID NO: 104797 - DNA, 25 bp, Probe Sequence
gtccaggaaattcagaataagcaga

SEQ ID NO: 104798 - DNA, 25 bp, Probe Sequence
tccaggaaattcagaataagcagaa

SEQ ID NO: 104799 - DNA, 25 bp, Probe Sequence
ccaggaaattcagaataagcagaaa

SEQ ID NO: 104800 - DNA, 25 bp, Probe Sequence
tgtccaggaaattcagaataagcag

SEQ ID NO: 104801 - DNA, 25 bp, Probe Sequence
agttgtccaggaaattcagaataag

SEQ ID NO: 104802 - DNA, 25 bp, Probe Sequence
gaagttgtccaggaaattcagaata

SEQ ID NO: 104803 - DNA, 25 bp, Probe Sequence
aagttgtccaggaaattcagaataa

SEQ ID NO: 104804 - DNA, 25 bp, Probe Sequence
aggaaattcagaataagcagaaagt

SEQ ID NO: 104805 - DNA, 25 bp, Probe Sequence
actgactgactaaatgacacccaaa

SEQ ID NO: 104806 - DNA, 25 bp, Probe Sequence
taagattgttctcagcataaccgta

SEQ ID NO: 104807 - DNA, 25 bp, Probe Sequence
aagattgttctcagcataaccgtaa

SEQ ID NO: 104808 - DNA, 25 bp, Probe Sequence
tctaagattgttctcagcataaccg

SEQ ID NO: 104809 - DNA, 25 bp, Probe Sequence
ctaagattgttctcagcataaccgt

SEQ ID NO: 104810 - DNA, 25 bp, Probe Sequence
ttctaagattgttctcagcataacc

SEQ ID NO: 104811 - DNA, 25 bp, Probe Sequence
ctgtcattgatcctcagtcttacat

SEQ ID NO: 104812 - DNA, 25 bp, Probe Sequence
ttctgtcattgatcctcagtcttac

SEQ ID NO: 104813 - DNA, 25 bp, Probe Sequence
cttctgtcattgatcctcagtctta

SEQ ID NO: 104814 - DNA, 25 bp, Probe Sequence
gtcattgatcctcagtcttacatgg

SEQ ID NO: 104815 - DNA, 25 bp, Probe Sequence
cttctaagattgttctcagcataac

SEQ ID NO: 104816 - DNA, 25 bp, Probe Sequence
tgtcattgatcctcagtcttacatg

SEQ ID NO: 104817 - DNA, 25 bp, Probe Sequence
tgacttatatggtaataggcttgtt

SEQ ID NO: 104818 - DNA, 25 bp, Probe Sequence
tgagatgacttatatggtaataggc

SEQ ID NO: 104819 - DNA, 25 bp, Probe Sequence
tctgtcattgatcctcagtcttaca

SEQ ID NO: 104820 - DNA, 25 bp, Probe Sequence
tccagttcttattgtgttggttcta

SEQ ID NO: 104821 - DNA, 25 bp, Probe Sequence
attccagttcttattgtgttggttc

SEQ ID NO: 104822 - DNA, 25 bp, Probe Sequence
tcatattccagttcttattgtgttg

SEQ ID NO: 104823 - DNA, 25 bp, Probe Sequence
ttccagttcttattgtgttggttct

SEQ ID NO: 104824 - DNA, 25 bp, Probe Sequence
atgacttatatggtaataggcttgt

SEQ ID NO: 104825 - DNA, 25 bp, Probe Sequence
gagatgacttatatggtaataggct

SEQ ID NO: 104826 - DNA, 25 bp, Probe Sequence
ccagttcttattgtgttggttctaa

SEQ ID NO: 104827 - DNA, 25 bp, Probe Sequence
aatccttctgtcattgatcctcagt

SEQ ID NO: 104828 - DNA, 25 bp, Probe Sequence
cgaagaagtctggaagaagaggaag

SEQ ID NO: 104829 - DNA, 25 bp, Probe Sequence
cataaccgtaaagacacctaacaaa

SEQ ID NO: 104830 - DNA, 25 bp, Probe Sequence
tagcaatccatcagacaatccacac

SEQ ID NO: 104831 - DNA, 25 bp, Probe Sequence
aaatgtaatgaatgtggcaaagtct

SEQ ID NO: 104832 - DNA, 25 bp, Probe Sequence
caaatgtaatgaatgtggcaaagtc

SEQ ID NO: 104833 - DNA, 25 bp, Probe Sequence
aatgtaatgaatgtggcaaagtctt

SEQ ID NO: 104834 - DNA, 25 bp, Probe Sequence
aatgtaatgaatgtggcaagctctt

SEQ ID NO: 104835 - DNA, 25 bp, Probe Sequence
ctagcaatccatcagacaatccaca

SEQ ID NO: 104836 - DNA, 25 bp, Probe Sequence
ttagtgttcgttcaagcctagcaat

SEQ ID NO: 104837 - DNA, 25 bp, Probe Sequence
aatgtattgaatgtggcaagagctt

SEQ ID NO: 104838 - DNA, 25 bp, Probe Sequence
atcggagagttcatactggtgagaa

SEQ ID NO: 104839 - DNA, 25 bp, Probe Sequence
atgtaatgaatgtggcaaagtcttt

SEQ ID NO: 104840 - DNA, 25 bp, Probe Sequence
aattcacactggagagaaaccttac

SEQ ID NO: 104841 - DNA, 25 bp, Probe Sequence
cttacaagtgtaatgaatgtggcaa

SEQ ID NO: 104842 - DNA, 25 bp, Probe Sequence
atgaatgtggcaaagtctttaggta

SEQ ID NO: 104843 - DNA, 25 bp, Probe Sequence
taatgaatgtggcaaagtctttagg

SEQ ID NO: 104844 - DNA, 25 bp, Probe Sequence
aagcctagcaatccatcagacaatc

SEQ ID NO: 104845 - DNA, 25 bp, Probe Sequence
aaccttacaagtgtaatgaatgtgg

SEQ ID NO: 104846 - DNA, 25 bp, Probe Sequence
atgtaatgaatgtggcaagctcttc

SEQ ID NO: 104847 - DNA, 25 bp, Probe Sequence
tgtaatgaatgtggcaaagtcttta

SEQ ID NO: 104848 - DNA, 25 bp, Probe Sequence
gtggcaaagtctttaggtacaattc

SEQ ID NO: 104849 - DNA, 25 bp, Probe Sequence
ggcaaagtctttaggtacaattcat

SEQ ID NO: 104850 - DNA, 25 bp, Probe Sequence
tggcaaagtctttaggtacaattca

SEQ ID NO: 104851 - DNA, 25 bp, Probe Sequence
tacaattcatacctcggaaggcatc

SEQ ID NO: 104852 - DNA, 25 bp, Probe Sequence
atgtattgaatgtggcaagagcttc

SEQ ID NO: 104853 - DNA, 25 bp, Probe Sequence
aatgaatgtggcaaagtctttaggt

SEQ ID NO: 104854 - DNA, 25 bp, Probe Sequence
agggctaatatccagaatctacaaa

SEQ ID NO: 104855 - DNA, 25 bp, Probe Sequence
caaaggatatgaacagacacttctc

SEQ ID NO: 104856 - DNA, 25 bp, Probe Sequence
gggctaatatccagaatctacaaag

SEQ ID NO: 104857 - DNA, 25 bp, Probe Sequence
atttacgatagcaaagacttggaac

SEQ ID NO: 104858 - DNA, 25 bp, Probe Sequence
ataagtgggaactgaacaatgagaa

SEQ ID NO: 104859 - DNA, 25 bp, Probe Sequence
gcaaaggatatgaacagacacttct

SEQ ID NO: 104860 - DNA, 25 bp, Probe Sequence
aaaggatatgaacagacacttctca

SEQ ID NO: 104861 - DNA, 25 bp, Probe Sequence
gaaccaacccaaatcaatgatagac

SEQ ID NO: 104862 - DNA, 25 bp, Probe Sequence
cataagtgggaactgaacaatgaga

SEQ ID NO: 104863 - DNA, 25 bp, Probe Sequence
aaccaacccaaatcaatgatagact

SEQ ID NO: 104864 - DNA, 25 bp, Probe Sequence
taagtgggaactgaacaatgagaac

SEQ ID NO: 104865 - DNA, 25 bp, Probe Sequence
actcataagtgggaactgaacaatg

SEQ ID NO: 104866 - DNA, 25 bp, Probe Sequence
tttacgatagcaaagacttggaacc

SEQ ID NO: 104867 - DNA, 25 bp, Probe Sequence
agcactatttacgatagcaaagact

SEQ ID NO: 104868 - DNA, 25 bp, Probe Sequence
cagcactatttacgatagcaaagac

SEQ ID NO: 104869 - DNA, 25 bp, Probe Sequence
accaacccaaatcaatgatagactg

SEQ ID NO: 104870 - DNA, 25 bp, Probe Sequence
ggaaccaacccaaatcaatgataga

SEQ ID NO: 104871 - DNA, 25 bp, Probe Sequence
gcactatttacgatagcaaagactt

SEQ ID NO: 104872 - DNA, 25 bp, Probe Sequence
actatttacgatagcaaagacttgg

SEQ ID NO: 104873 - DNA, 25 bp, Probe Sequence
ggcaaaggatatgaacagacacttc

SEQ ID NO: 104874 - DNA, 25 bp, Probe Sequence
tatttacgatagcaaagacttggaa

SEQ ID NO: 104875 - DNA, 25 bp, Probe Sequence
gaactgaacaatgagaacaccagga

SEQ ID NO: 104876 - DNA, 25 bp, Probe Sequence
ctatttacgatagcaaagacttgga

SEQ ID NO: 104877 - DNA, 25 bp, Probe Sequence
gcagcactatttacgatagcaaaga

SEQ ID NO: 104878 - DNA, 25 bp, Probe Sequence
ggagatcaagatccacagatgagaa

SEQ ID NO: 104879 - DNA, 25 bp, Probe Sequence
aaagtatctcaaacctgaatccaca

SEQ ID NO: 104880 - DNA, 25 bp, Probe Sequence
caaagtatctcaaacctgaatccac

SEQ ID NO: 104881 - DNA, 25 bp, Probe Sequence
tcaaagtatctcaaacctgaatcca

SEQ ID NO: 104882 - DNA, 25 bp, Probe Sequence
gtcaaagtatctcaaacctgaatcc

SEQ ID NO: 104883 - DNA, 25 bp, Probe Sequence
cgtgatgagctatgataacactatg

SEQ ID NO: 104884 - DNA, 25 bp, Probe Sequence
aagtatctcaaacctgaatccacac

SEQ ID NO: 104885 - DNA, 25 bp, Probe Sequence
agagtcaaagtatctcaaacctgaa

SEQ ID NO: 104886 - DNA, 25 bp, Probe Sequence
agtcaaagtatctcaaacctgaatc

SEQ ID NO: 104887 - DNA, 25 bp, Probe Sequence
aacgtgatgagctatgataacacta

SEQ ID NO: 104888 - DNA, 25 bp, Probe Sequence
tcttgtagaattaacagccctcaac

SEQ ID NO: 104889 - DNA, 25 bp, Probe Sequence
tagagtcaaagtatctcaaacctga

SEQ ID NO: 104890 - DNA, 25 bp, Probe Sequence
acgtgatgagctatgataacactat

SEQ ID NO: 104891 - DNA, 25 bp, Probe Sequence
gtatctcaaacctgaatccacactg

SEQ ID NO: 104892 - DNA, 25 bp, Probe Sequence
agtatctcaaacctgaatccacact

SEQ ID NO: 104893 - DNA, 25 bp, Probe Sequence
gagtcaaagtatctcaaacctgaat

SEQ ID NO: 104894 - DNA, 25 bp, Probe Sequence
gagatcaagatccacagatgagaaa

SEQ ID NO: 104895 - DNA, 25 bp, Probe Sequence
gatcaagatccacagatgagaaact

SEQ ID NO: 104896 - DNA, 25 bp, Probe Sequence
agatcaagatccacagatgagaaac

SEQ ID NO: 104897 - DNA, 25 bp, Probe Sequence
tactcggagatcaagatccacagat

SEQ ID NO: 104898 - DNA, 25 bp, Probe Sequence
caacgtgatgagctatgataacact

SEQ ID NO: 104899 - DNA, 25 bp, Probe Sequence
tcaacgtgatgagctatgataacac

SEQ ID NO: 104900 - DNA, 25 bp, Probe Sequence
tgatgagctatgataacactatgaa

SEQ ID NO: 104901 - DNA, 25 bp, Probe Sequence
tatctcaaacctgaatccacactgt

SEQ ID NO: 104902 - DNA, 25 bp, Probe Sequence
taatgattctctaggacagcaggta

SEQ ID NO: 104903 - DNA, 25 bp, Probe Sequence
gttaatgattctctaggacagcagg

SEQ ID NO: 104904 - DNA, 25 bp, Probe Sequence
aatgattctctaggacagcaggtaa

SEQ ID NO: 104905 - DNA, 25 bp, Probe Sequence
ttaatgattctctaggacagcaggt

SEQ ID NO: 104906 - DNA, 25 bp, Probe Sequence
tacttagcctcttctgacttctcaa

SEQ ID NO: 104907 - DNA, 25 bp, Probe Sequence
tatgaaggcagaagatgtggatgaa

SEQ ID NO: 104908 - DNA, 25 bp, Probe Sequence
tgttaatgattctctaggacagcag

SEQ ID NO: 104909 - DNA, 25 bp, Probe Sequence
ttgttaatgattctctaggacagca

SEQ ID NO: 104910 - DNA, 25 bp, Probe Sequence
ctatgaaggcagaagatgtggatga

SEQ ID NO: 104911 - DNA, 25 bp, Probe Sequence
gaaggagatgaaggagtgtgtgtag

SEQ ID NO: 104912 - DNA, 25 bp, Probe Sequence
atgaaggcagaagatgtggatgaat

SEQ ID NO: 104913 - DNA, 25 bp, Probe Sequence
gacaatcggatacatatcttcctga

SEQ ID NO: 104914 - DNA, 25 bp, Probe Sequence
aaggacaatcggatacatatcttcc

SEQ ID NO: 104915 - DNA, 25 bp, Probe Sequence
gtacttagcctcttctgacttctca

SEQ ID NO: 104916 - DNA, 25 bp, Probe Sequence
acaatcggatacatatcttcctgaa

SEQ ID NO: 104917 - DNA, 25 bp, Probe Sequence
ggacaatcggatacatatcttcctg

SEQ ID NO: 104918 - DNA, 25 bp, Probe Sequence
tgaaggcagaagatgtggatgaatt

SEQ ID NO: 104919 - DNA, 25 bp, Probe Sequence
agaaggagatgaaggagtgtgtgta

SEQ ID NO: 104920 - DNA, 25 bp, Probe Sequence
ataccatcctgataagctctgtgaa

SEQ ID NO: 104921 - DNA, 25 bp, Probe Sequence
aagtgattctgtaaccaacattaga

SEQ ID NO: 104922 - DNA, 25 bp, Probe Sequence
gataccatcctgataagctctgtga

SEQ ID NO: 104923 - DNA, 25 bp, Probe Sequence
gacagcaggtaaatgagttaagttg

SEQ ID NO: 104924 - DNA, 25 bp, Probe Sequence
taggacagcaggtaaatgagttaag

SEQ ID NO: 104925 - DNA, 25 bp, Probe Sequence
ttctcaaaggacaatcggatacata

SEQ ID NO: 104926 - DNA, 25 bp, Probe Sequence
gaaatcaaaggaaagggaagtggag

SEQ ID NO: 104927 - DNA, 25 bp, Probe Sequence
caggaaatcaaaggaaagggaagtg

SEQ ID NO: 104928 - DNA, 25 bp, Probe Sequence
aaatcaaaggaaagggaagtggagg

SEQ ID NO: 104929 - DNA, 25 bp, Probe Sequence
ggaaatcaaaggaaagggaagtgga

SEQ ID NO: 104930 - DNA, 25 bp, Probe Sequence
aggaaatcaaaggaaagggaagtgg

SEQ ID NO: 104931 - DNA, 25 bp, Probe Sequence
ccaggaaatcaaaggaaagggaagt

SEQ ID NO: 104932 - DNA, 25 bp, Probe Sequence
tccaggaaatcaaaggaaagggaag

SEQ ID NO: 104933 - DNA, 25 bp, Probe Sequence
tgaggtccaggaaatcaaaggaaag

SEQ ID NO: 104934 - DNA, 25 bp, Probe Sequence
gtccaggaaatcaaaggaaagggaa

SEQ ID NO: 104935 - DNA, 25 bp, Probe Sequence
aaggaaagggaagtggaggcttaaa

SEQ ID NO: 104936 - DNA, 25 bp, Probe Sequence
aaaggaaagggaagtggaggcttaa

SEQ ID NO: 104937 - DNA, 25 bp, Probe Sequence
gaggtccaggaaatcaaaggaaagg

SEQ ID NO: 104938 - DNA, 25 bp, Probe Sequence
attgaggtccaggaaatcaaaggaa

SEQ ID NO: 104939 - DNA, 25 bp, Probe Sequence
ttgaggtccaggaaatcaaaggaaa

SEQ ID NO: 104940 - DNA, 25 bp, Probe Sequence
cattgaggtccaggaaatcaaagga

SEQ ID NO: 104941 - DNA, 25 bp, Probe Sequence
caaaggaaagggaagtggaggctta

SEQ ID NO: 104942 - DNA, 25 bp, Probe Sequence
aatcaaaggaaagggaagtggaggc

SEQ ID NO: 104943 - DNA, 25 bp, Probe Sequence
ggtccaggaaatcaaaggaaaggga

SEQ ID NO: 104944 - DNA, 25 bp, Probe Sequence
aggtccaggaaatcaaaggaaaggg

SEQ ID NO: 104945 - DNA, 25 bp, Probe Sequence
gcattgaggtccaggaaatcaaagg

SEQ ID NO: 104946 - DNA, 25 bp, Probe Sequence
ccattctttgcttgaacacagtatt

SEQ ID NO: 104947 - DNA, 25 bp, Probe Sequence
cattctttgcttgaacacagtattt

SEQ ID NO: 104948 - DNA, 25 bp, Probe Sequence
agaagatgcaagagaaacagaaact

SEQ ID NO: 104949 - DNA, 25 bp, Probe Sequence
cagaagatgcaagagaaacagaaac

SEQ ID NO: 104950 - DNA, 25 bp, Probe Sequence
gatgcaagagaaacagaaactgatc

SEQ ID NO: 104951 - DNA, 25 bp, Probe Sequence
gaagatgcaagagaaacagaaactg

SEQ ID NO: 104952 - DNA, 25 bp, Probe Sequence
agatgcaagagaaacagaaactgat

SEQ ID NO: 104953 - DNA, 25 bp, Probe Sequence
aagatgcaagagaaacagaaactga

SEQ ID NO: 104954 - DNA, 25 bp, Probe Sequence
tctttgcttgaacacagtattttcc

SEQ ID NO: 104955 - DNA, 25 bp, Probe Sequence
gaacacagtattttcccaatagcac

SEQ ID NO: 104956 - DNA, 25 bp, Probe Sequence
tgaacacagtattttcccaatagca

SEQ ID NO: 104957 - DNA, 25 bp, Probe Sequence
ttgaacacagtattttcccaatagc

SEQ ID NO: 104958 - DNA, 25 bp, Probe Sequence
gcttgaacacagtattttcccaata

SEQ ID NO: 104959 - DNA, 25 bp, Probe Sequence
ctttgcttgaacacagtattttccc

SEQ ID NO: 104960 - DNA, 25 bp, Probe Sequence
cacagtattttcccaatagcacttt

SEQ ID NO: 104961 - DNA, 25 bp, Probe Sequence
ttctttgcttgaacacagtattttc

SEQ ID NO: 104962 - DNA, 25 bp, Probe Sequence
cagtattttcccaatagcactttca

SEQ ID NO: 104963 - DNA, 25 bp, Probe Sequence
acagtattttcccaatagcactttc

SEQ ID NO: 104964 - DNA, 25 bp, Probe Sequence
acacagtattttcccaatagcactt

SEQ ID NO: 104965 - DNA, 25 bp, Probe Sequence
aacacagtattttcccaatagcact

SEQ ID NO: 104966 - DNA, 25 bp, Probe Sequence
tttgcttgaacacagtattttccca

SEQ ID NO: 104967 - DNA, 25 bp, Probe Sequence
tgcttgaacacagtattttcccaat

SEQ ID NO: 104968 - DNA, 25 bp, Probe Sequence
agtattttcccaatagcactttcat

SEQ ID NO: 104969 - DNA, 25 bp, Probe Sequence
ttgcttgaacacagtattttcccaa

SEQ ID NO: 104970 - DNA, 25 bp, Probe Sequence
gaaatgatagacgaaatgctccacc

SEQ ID NO: 104971 - DNA, 25 bp, Probe Sequence
aaatgatagacgaaatgctccacct

SEQ ID NO: 104972 - DNA, 25 bp, Probe Sequence
cgaaatgatagacgaaatgctccac

SEQ ID NO: 104973 - DNA, 25 bp, Probe Sequence
atagacgaaatgctccacctgtaag

SEQ ID NO: 104974 - DNA, 25 bp, Probe Sequence
gatagacgaaatgctccacctgtaa

SEQ ID NO: 104975 - DNA, 25 bp, Probe Sequence
aatgatagacgaaatgctccacctg

SEQ ID NO: 104976 - DNA, 25 bp, Probe Sequence
tagacgaaatgctccacctgtaaga

SEQ ID NO: 104977 - DNA, 25 bp, Probe Sequence
tgatagacgaaatgctccacctgta

SEQ ID NO: 104978 - DNA, 25 bp, Probe Sequence
gacgaaatgctccacctgtaagaac

SEQ ID NO: 104979 - DNA, 25 bp, Probe Sequence
atgatagacgaaatgctccacctgt

SEQ ID NO: 104980 - DNA, 25 bp, Probe Sequence
agacctcgaaatgatagacgaaatg

SEQ ID NO: 104981 - DNA, 25 bp, Probe Sequence
cagacctcgaaatgatagacgaaat

SEQ ID NO: 104982 - DNA, 25 bp, Probe Sequence
agacgaaatgctccacctgtaagaa

SEQ ID NO: 104983 - DNA, 25 bp, Probe Sequence
ctcgaaatgatagacgaaatgctcc

SEQ ID NO: 104984 - DNA, 25 bp, Probe Sequence
cctcgaaatgatagacgaaatgctc

SEQ ID NO: 104985 - DNA, 25 bp, Probe Sequence
gacctcgaaatgatagacgaaatgc

SEQ ID NO: 104986 - DNA, 25 bp, Probe Sequence
tcgaaatgatagacgaaatgctcca

SEQ ID NO: 104987 - DNA, 25 bp, Probe Sequence
acctcgaaatgatagacgaaatgct

SEQ ID NO: 104988 - DNA, 25 bp, Probe Sequence
gcagacctcgaaatgatagacgaaa

SEQ ID NO: 104989 - DNA, 25 bp, Probe Sequence
acgaaatgctccacctgtaagaaca

SEQ ID NO: 104990 - DNA, 25 bp, Probe Sequence
cgaaatgctccacctgtaagaacag

SEQ ID NO: 104991 - DNA, 25 bp, Probe Sequence
cgcagacctcgaaatgatagacgaa

SEQ ID NO: 104992 - DNA, 25 bp, Probe Sequence
gtcaaataccctgttcagatatgga

SEQ ID NO: 104993 - DNA, 25 bp, Probe Sequence
tgtcaaataccctgttcagatatgg

SEQ ID NO: 104994 - DNA, 25 bp, Probe Sequence
tcaaataccctgttcagatatggaa

SEQ ID NO: 104995 - DNA, 25 bp, Probe Sequence
cgaagcattaaacagcctcattaaa

SEQ ID NO: 104996 - DNA, 25 bp, Probe Sequence
aaatgttcataggagcaaataacca

SEQ ID NO: 104997 - DNA, 25 bp, Probe Sequence
atgtcaaataccctgttcagatatg

SEQ ID NO: 104998 - DNA, 25 bp, Probe Sequence
caaataccctgttcagatatggaaa

SEQ ID NO: 104999 - DNA, 25 bp, Probe Sequence
aatgttcataggagcaaataaccat

SEQ ID NO: 105000 - DNA, 25 bp, Probe Sequence
ccatgtcaaataccctgttcagata

SEQ ID NO: 105001 - DNA, 25 bp, Probe Sequence
gagcaaataaccatgtcaaataccc

SEQ ID NO: 105002 - DNA, 25 bp, Probe Sequence
ggagcaaataaccatgtcaaatacc

SEQ ID NO: 105003 - DNA, 25 bp, Probe Sequence
aggagcaaataaccatgtcaaatac

SEQ ID NO: 105004 - DNA, 25 bp, Probe Sequence
caaataaccatgtcaaataccctgt

SEQ ID NO: 105005 - DNA, 25 bp, Probe Sequence
gcaaataaccatgtcaaataccctg

SEQ ID NO: 105006 - DNA, 25 bp, Probe Sequence
agcaaataaccatgtcaaataccct

SEQ ID NO: 105007 - DNA, 25 bp, Probe Sequence
ccagcattgactaatgttcagtgaa

SEQ ID NO: 105008 - DNA, 25 bp, Probe Sequence
tcataggagcaaataaccatgtcaa

SEQ ID NO: 105009 - DNA, 25 bp, Probe Sequence
ttcataggagcaaataaccatgtca

SEQ ID NO: 105010 - DNA, 25 bp, Probe Sequence
cataggagcaaataaccatgtcaaa

SEQ ID NO: 105011 - DNA, 25 bp, Probe Sequence
gaagcattaaacagcctcattaaat

SEQ ID NO: 105012 - DNA, 25 bp, Probe Sequence
ataaccatgtcaaataccctgttca

SEQ ID NO: 105013 - DNA, 25 bp, Probe Sequence
gttcataggagcaaataaccatgtc

SEQ ID NO: 105014 - DNA, 25 bp, Probe Sequence
tgttcataggagcaaataaccatgt

SEQ ID NO: 105015 - DNA, 25 bp, Probe Sequence
atgttcataggagcaaataaccatg

SEQ ID NO: 105016 - DNA, 25 bp, Probe Sequence
ttagaaactccaatgaaagacactg

SEQ ID NO: 105017 - DNA, 25 bp, Probe Sequence
tagaaactccaatgaaagacactgt

SEQ ID NO: 105018 - DNA, 25 bp, Probe Sequence
tttagaaactccaatgaaagacact

SEQ ID NO: 105019 - DNA, 25 bp, Probe Sequence
agaaactccaatgaaagacactgtt

SEQ ID NO: 105020 - DNA, 25 bp, Probe Sequence
catctgggtttgtttacagcaattc

SEQ ID NO: 105021 - DNA, 25 bp, Probe Sequence
tttgtttacagcaattcctggactc

SEQ ID NO: 105022 - DNA, 25 bp, Probe Sequence
atctgggtttgtttacagcaattcc

SEQ ID NO: 105023 - DNA, 25 bp, Probe Sequence
gtttgtttacagcaattcctggact

SEQ ID NO: 105024 - DNA, 25 bp, Probe Sequence
aatgaaagacactgtttctcctgtt

SEQ ID NO: 105025 - DNA, 25 bp, Probe Sequence
aactccaatgaaagacactgtttct

SEQ ID NO: 105026 - DNA, 25 bp, Probe Sequence
aaactccaatgaaagacactgtttc

SEQ ID NO: 105027 - DNA, 25 bp, Probe Sequence
gaaactccaatgaaagacactgttt

SEQ ID NO: 105028 - DNA, 25 bp, Probe Sequence
actccaatgaaagacactgtttctc

SEQ ID NO: 105029 - DNA, 25 bp, Probe Sequence
atgaaagacactgtttctcctgttg

SEQ ID NO: 105030 - DNA, 25 bp, Probe Sequence
caatgaaagacactgtttctcctgt

SEQ ID NO: 105031 - DNA, 25 bp, Probe Sequence
ctgggtttgtttacagcaattcctg

SEQ ID NO: 105032 - DNA, 25 bp, Probe Sequence
gcatctgggtttgtttacagcaatt

SEQ ID NO: 105033 - DNA, 25 bp, Probe Sequence
ggtttgtttacagcaattcctggac

SEQ ID NO: 105034 - DNA, 25 bp, Probe Sequence
tctgggtttgtttacagcaattcct

SEQ ID NO: 105035 - DNA, 25 bp, Probe Sequence
ctccaatgaaagacactgtttctcc

SEQ ID NO: 105036 - DNA, 25 bp, Probe Sequence
ccaatgaaagacactgtttctcctg

SEQ ID NO: 105037 - DNA, 25 bp, Probe Sequence
tccaatgaaagacactgtttctcct

SEQ ID NO: 105038 - DNA, 25 bp, Probe Sequence
ttgatcctgcatctgggtttgttta

SEQ ID NO: 105039 - DNA, 25 bp, Probe Sequence
ttttagaaactccaatgaaagacac

SEQ ID NO: 105040 - DNA, 25 bp, Probe Sequence
ccggtatgagatcaattccctggtg

SEQ ID NO: 105041 - DNA, 25 bp, Probe Sequence
tttacctaaatatcagtctccacgg

SEQ ID NO: 105042 - DNA, 25 bp, Probe Sequence
ttacctaaatatcagtctccacggg

SEQ ID NO: 105043 - DNA, 25 bp, Probe Sequence
cttgagttgtatgtgagtctgtgcc

SEQ ID NO: 105044 - DNA, 25 bp, Probe Sequence
gatcctccagtaaagtgaaattcag

SEQ ID NO: 105045 - DNA, 25 bp, Probe Sequence
atcctccagtaaagtgaaattcagc

SEQ ID NO: 105046 - DNA, 25 bp, Probe Sequence
cgcttgagttgtatgtgagtctgtg

SEQ ID NO: 105047 - DNA, 25 bp, Probe Sequence
gcttgagttgtatgtgagtctgtgc

SEQ ID NO: 105048 - DNA, 25 bp, Probe Sequence
tcctccagtaaagtgaaattcagca

SEQ ID NO: 105049 - DNA, 25 bp, Probe Sequence
agatgtagaagctgactgagacctg

SEQ ID NO: 105050 - DNA, 25 bp, Probe Sequence
acgcttgagttgtatgtgagtctgt

SEQ ID NO: 105051 - DNA, 25 bp, Probe Sequence
tacctaaatatcagtctccacggga

SEQ ID NO: 105052 - DNA, 25 bp, Probe Sequence
cctccagtaaagtgaaattcagcac

SEQ ID NO: 105053 - DNA, 25 bp, Probe Sequence
caccttcattcatgccttcttgtcc

SEQ ID NO: 105054 - DNA, 25 bp, Probe Sequence
ccaccttcattcatgccttcttgtc

SEQ ID NO: 105055 - DNA, 25 bp, Probe Sequence
cacgcttgagttgtatgtgagtctg

SEQ ID NO: 105056 - DNA, 25 bp, Probe Sequence
cagatgtagaagctgactgagacct

SEQ ID NO: 105057 - DNA, 25 bp, Probe Sequence
ttttacctaaatatcagtctccacg

SEQ ID NO: 105058 - DNA, 25 bp, Probe Sequence
ttgagttgtatgtgagtctgtgccg

SEQ ID NO: 105059 - DNA, 25 bp, Probe Sequence
acctaaatatcagtctccacgggac

SEQ ID NO: 105060 - DNA, 25 bp, Probe Sequence
cttcattcatgccttcttgtccctg

SEQ ID NO: 105061 - DNA, 25 bp, Probe Sequence
ccagatgtagaagctgactgagacc

SEQ ID NO: 105062 - DNA, 25 bp, Probe Sequence
gatgtagaagctgactgagacctgc

SEQ ID NO: 105063 - DNA, 25 bp, Probe Sequence
cctaaatatcagtctccacgggacc

SEQ ID NO: 105064 - DNA, 25 bp, Probe Sequence
gaaggaataggagggtttgggtgtg

SEQ ID NO: 105065 - DNA, 25 bp, Probe Sequence
gataaggagatgctgaagaagtgtc

SEQ ID NO: 105066 - DNA, 25 bp, Probe Sequence
ctgataaggagatgctgaagaagtg

SEQ ID NO: 105067 - DNA, 25 bp, Probe Sequence
cactgataaggagatgctgaagaag

SEQ ID NO: 105068 - DNA, 25 bp, Probe Sequence
tgataaggagatgctgaagaagtgt

SEQ ID NO: 105069 - DNA, 25 bp, Probe Sequence
atgagatacatagcaaccatcactg

SEQ ID NO: 105070 - DNA, 25 bp, Probe Sequence
tacatagcaaccatcactgataagg

SEQ ID NO: 105071 - DNA, 25 bp, Probe Sequence
gagatacatagcaaccatcactgat

SEQ ID NO: 105072 - DNA, 25 bp, Probe Sequence
agatacatagcaaccatcactgata

SEQ ID NO: 105073 - DNA, 25 bp, Probe Sequence
tagcaaccatcactgataaggagat

SEQ ID NO: 105074 - DNA, 25 bp, Probe Sequence
atagcaaccatcactgataaggaga

SEQ ID NO: 105075 - DNA, 25 bp, Probe Sequence
catagcaaccatcactgataaggag

SEQ ID NO: 105076 - DNA, 25 bp, Probe Sequence
agataactcctcttatggcagcatt

SEQ ID NO: 105077 - DNA, 25 bp, Probe Sequence
actgataaggagatgctgaagaagt

SEQ ID NO: 105078 - DNA, 25 bp, Probe Sequence
tcactgataaggagatgctgaagaa

SEQ ID NO: 105079 - DNA, 25 bp, Probe Sequence
tgagatacatagcaaccatcactga

SEQ ID NO: 105080 - DNA, 25 bp, Probe Sequence
taaggagatgctgaagaagtgtcat

SEQ ID NO: 105081 - DNA, 25 bp, Probe Sequence
ataaggagatgctgaagaagtgtca

SEQ ID NO: 105082 - DNA, 25 bp, Probe Sequence
acatagcaaccatcactgataagga

SEQ ID NO: 105083 - DNA, 25 bp, Probe Sequence
atacatagcaaccatcactgataag

SEQ ID NO: 105084 - DNA, 25 bp, Probe Sequence
gatacatagcaaccatcactgataa

SEQ ID NO: 105085 - DNA, 25 bp, Probe Sequence
cagataaccgcaagataactcctct

SEQ ID NO: 105086 - DNA, 25 bp, Probe Sequence
atcactgataaggagatgctgaaga

SEQ ID NO: 105087 - DNA, 25 bp, Probe Sequence
tatgagatacatagcaaccatcact

SEQ ID NO: 105088 - DNA, 25 bp, Probe Sequence
gtatgagatacatagcaaccatcac

SEQ ID NO: 105089 - DNA, 25 bp, Probe Sequence
ttatttctaggtggttcttcagtcc

SEQ ID NO: 105090 - DNA, 25 bp, Probe Sequence
attctgctgagttatttctaggtgg

SEQ ID NO: 105091 - DNA, 25 bp, Probe Sequence
gctgagttatttctaggtggttctt

SEQ ID NO: 105092 - DNA, 25 bp, Probe Sequence
agttatttctaggtggttcttcagt

SEQ ID NO: 105093 - DNA, 25 bp, Probe Sequence
gttatttctaggtggttcttcagtc

SEQ ID NO: 105094 - DNA, 25 bp, Probe Sequence
gagttatttctaggtggttcttcag

SEQ ID NO: 105095 - DNA, 25 bp, Probe Sequence
ctgagttatttctaggtggttcttc

SEQ ID NO: 105096 - DNA, 25 bp, Probe Sequence
ctgctgagttatttctaggtggttc

SEQ ID NO: 105097 - DNA, 25 bp, Probe Sequence
aattctgctgagttatttctaggtg

SEQ ID NO: 105098 - DNA, 25 bp, Probe Sequence
tgctgagttatttctaggtggttct

SEQ ID NO: 105099 - DNA, 25 bp, Probe Sequence
tctgctgagttatttctaggtggtt

SEQ ID NO: 105100 - DNA, 25 bp, Probe Sequence
ttctgctgagttatttctaggtggt

SEQ ID NO: 105101 - DNA, 25 bp, Probe Sequence
tgagttatttctaggtggttcttca

SEQ ID NO: 105102 - DNA, 25 bp, Probe Sequence
tggattatcaacatgacgtacataa

SEQ ID NO: 105103 - DNA, 25 bp, Probe Sequence
ttggattatcaacatgacgtacata

SEQ ID NO: 105104 - DNA, 25 bp, Probe Sequence
gattatcaacatgacgtacataacc

SEQ ID NO: 105105 - DNA, 25 bp, Probe Sequence
ggattatcaacatgacgtacataac

SEQ ID NO: 105106 - DNA, 25 bp, Probe Sequence
tatttctaggtggttcttcagtcca

SEQ ID NO: 105107 - DNA, 25 bp, Probe Sequence
ccatttggattatcaacatgacgta

SEQ ID NO: 105108 - DNA, 25 bp, Probe Sequence
ctccatttggattatcaacatgacg

SEQ ID NO: 105109 - DNA, 25 bp, Probe Sequence
cgtctccatttggattatcaacatg

SEQ ID NO: 105110 - DNA, 25 bp, Probe Sequence
ttatcaacatgacgtacataacccg

SEQ ID NO: 105111 - DNA, 25 bp, Probe Sequence
attatcaacatgacgtacataaccc

SEQ ID NO: 105112 - DNA, 25 bp, Probe Sequence
ctgagcagtctttcacactctcttt

SEQ ID NO: 105113 - DNA, 25 bp, Probe Sequence
cactatgcttaggactccagagaac

SEQ ID NO: 105114 - DNA, 25 bp, Probe Sequence
acactatgcttaggactccagagaa

SEQ ID NO: 105115 - DNA, 25 bp, Probe Sequence
aacactatgcttaggactccagaga

SEQ ID NO: 105116 - DNA, 25 bp, Probe Sequence
ctttgtagacctgcctgatttaatg

SEQ ID NO: 105117 - DNA, 25 bp, Probe Sequence
gattaaatgtgctgatgtgtccaat

SEQ ID NO: 105118 - DNA, 25 bp, Probe Sequence
gaatgctgattaaatgtgctgatgt

SEQ ID NO: 105119 - DNA, 25 bp, Probe Sequence
attaaatgtgctgatgtgtccaatc

SEQ ID NO: 105120 - DNA, 25 bp, Probe Sequence
aatgctgattaaatgtgctgatgtg

SEQ ID NO: 105121 - DNA, 25 bp, Probe Sequence
cctttgtagacctgcctgatttaat

SEQ ID NO: 105122 - DNA, 25 bp, Probe Sequence
ataaacactatgcttaggactccag

SEQ ID NO: 105123 - DNA, 25 bp, Probe Sequence
gataaacactatgcttaggactcca

SEQ ID NO: 105124 - DNA, 25 bp, Probe Sequence
tgataaacactatgcttaggactcc

SEQ ID NO: 105125 - DNA, 25 bp, Probe Sequence
taaacactatgcttaggactccaga

SEQ ID NO: 105126 - DNA, 25 bp, Probe Sequence
tgattaaatgtgctgatgtgtccaa

SEQ ID NO: 105127 - DNA, 25 bp, Probe Sequence
aaacgaatgctgattaaatgtgctg

SEQ ID NO: 105128 - DNA, 25 bp, Probe Sequence
caaacgaatgctgattaaatgtgct

SEQ ID NO: 105129 - DNA, 25 bp, Probe Sequence
ccaaatcccaaatctctttcattga

SEQ ID NO: 105130 - DNA, 25 bp, Probe Sequence
taaatactggaaaggactggacgaa

SEQ ID NO: 105131 - DNA, 25 bp, Probe Sequence
cccaaatcccaaatctctttcattg

SEQ ID NO: 105132 - DNA, 25 bp, Probe Sequence
ttaaatactggaaaggactggacga

SEQ ID NO: 105133 - DNA, 25 bp, Probe Sequence
cgaatgctgattaaatgtgctgatg

SEQ ID NO: 105134 - DNA, 25 bp, Probe Sequence
actatgcttaggactccagagaacc

SEQ ID NO: 105135 - DNA, 25 bp, Probe Sequence
atgctgattaaatgtgctgatgtgt

SEQ ID NO: 105136 - DNA, 25 bp, Probe Sequence
tttgtagacctgcctgatttaatgc

SEQ ID NO: 105137 - DNA, 25 bp, Probe Sequence
gaatgccttgtgattatcttctcca

SEQ ID NO: 105138 - DNA, 25 bp, Probe Sequence
aatcctgtcatacctcatctcttcc

SEQ ID NO: 105139 - DNA, 25 bp, Probe Sequence
gaggttcttcatattccagagtcac

SEQ ID NO: 105140 - DNA, 25 bp, Probe Sequence
atgtgatgtgagaggacgattactt

SEQ ID NO: 105141 - DNA, 25 bp, Probe Sequence
aatgtgatgtgagaggacgattact

SEQ ID NO: 105142 - DNA, 25 bp, Probe Sequence
tgaggttcttcatattccagagtca

SEQ ID NO: 105143 - DNA, 25 bp, Probe Sequence
atcctgtcatacctcatctcttcct

SEQ ID NO: 105144 - DNA, 25 bp, Probe Sequence
ctgaggttcttcatattccagagtc

SEQ ID NO: 105145 - DNA, 25 bp, Probe Sequence
tcctgaggttcttcatattccagag

SEQ ID NO: 105146 - DNA, 25 bp, Probe Sequence
ctcctgaggttcttcatattccaga

SEQ ID NO: 105147 - DNA, 25 bp, Probe Sequence
aggtatctcctcaatgaatactgtt

SEQ ID NO: 105148 - DNA, 25 bp, Probe Sequence
aatgccttgtgattatcttctccac

SEQ ID NO: 105149 - DNA, 25 bp, Probe Sequence
cctgaggttcttcatattccagagt

SEQ ID NO: 105150 - DNA, 25 bp, Probe Sequence
tcctgtcatacctcatctcttcctc

SEQ ID NO: 105151 - DNA, 25 bp, Probe Sequence
ctgtcatacctcatctcttcctcag

SEQ ID NO: 105152 - DNA, 25 bp, Probe Sequence
tccaagcatagtaattagttcacaa

SEQ ID NO: 105153 - DNA, 25 bp, Probe Sequence
ttccaagcatagtaattagttcaca

SEQ ID NO: 105154 - DNA, 25 bp, Probe Sequence
cattagtcagttctctaagtacagc

SEQ ID NO: 105155 - DNA, 25 bp, Probe Sequence
cctgtcatacctcatctcttcctca

SEQ ID NO: 105156 - DNA, 25 bp, Probe Sequence
aaatcctgtcatacctcatctcttc

SEQ ID NO: 105157 - DNA, 25 bp, Probe Sequence
ccaagcatagtaattagttcacaac

SEQ ID NO: 105158 - DNA, 25 bp, Probe Sequence
gatgtgagaggacgattactttgta

SEQ ID NO: 105159 - DNA, 25 bp, Probe Sequence
ctaccagcgtacaacagtgatacat

SEQ ID NO: 105160 - DNA, 25 bp, Probe Sequence
aaatgtgatgtgagaggacgattac

SEQ ID NO: 105161 - DNA, 25 bp, Probe Sequence
atacttcggcttggcatacttattc

SEQ ID NO: 105162 - DNA, 25 bp, Probe Sequence
aatacttcggcttggcatacttatt

SEQ ID NO: 105163 - DNA, 25 bp, Probe Sequence
aagtaatagaggagcagttggaacc

SEQ ID NO: 105164 - DNA, 25 bp, Probe Sequence
tacttcggcttggcatacttattca

SEQ ID NO: 105165 - DNA, 25 bp, Probe Sequence
agtcttattgaccataactctgtgc

SEQ ID NO: 105166 - DNA, 25 bp, Probe Sequence
aagattcacttattagtctgctgtt

SEQ ID NO: 105167 - DNA, 25 bp, Probe Sequence
tctgtgttagaattgattcctgaat

SEQ ID NO: 105168 - DNA, 25 bp, Probe Sequence
atctgtgttagaattgattcctgaa

SEQ ID NO: 105169 - DNA, 25 bp, Probe Sequence
aagtcttattgaccataactctgtg

SEQ ID NO: 105170 - DNA, 25 bp, Probe Sequence
ttcggcttggcatacttattcagaa

SEQ ID NO: 105171 - DNA, 25 bp, Probe Sequence
gtgtttcctctcattgtagtttcag

SEQ ID NO: 105172 - DNA, 25 bp, Probe Sequence
ccctgctctgtttcatttatttcat

SEQ ID NO: 105173 - DNA, 25 bp, Probe Sequence
ttccctgctctgtttcatttatttc

SEQ ID NO: 105174 - DNA, 25 bp, Probe Sequence
gtttccctgctctgtttcatttatt

SEQ ID NO: 105175 - DNA, 25 bp, Probe Sequence
tgtgtttcctctcattgtagtttca

SEQ ID NO: 105176 - DNA, 25 bp, Probe Sequence
cttgaaataaccaggcgatactttg

SEQ ID NO: 105177 - DNA, 25 bp, Probe Sequence
tcttgaaataaccaggcgatacttt

SEQ ID NO: 105178 - DNA, 25 bp, Probe Sequence
tccctgctctgtttcatttatttca

SEQ ID NO: 105179 - DNA, 25 bp, Probe Sequence
tttccctgctctgtttcatttattt

SEQ ID NO: 105180 - DNA, 25 bp, Probe Sequence
gtaatagaggagcagttggaaccag

SEQ ID NO: 105181 - DNA, 25 bp, Probe Sequence
ttcttgaaataaccaggcgatactt

SEQ ID NO: 105182 - DNA, 25 bp, Probe Sequence
aaagtaatagaggagcagttggaac

SEQ ID NO: 105183 - DNA, 25 bp, Probe Sequence
ctcttcttgaaataaccaggcgata

SEQ ID NO: 105184 - DNA, 25 bp, Probe Sequence
cttcggcttggcatacttattcaga

SEQ ID NO: 105185 - DNA, 25 bp, Probe Sequence
acctatgagatcagaatatgtatgc

SEQ ID NO: 105186 - DNA, 25 bp, Probe Sequence
atttatggttctctccgcaagtata

SEQ ID NO: 105187 - DNA, 25 bp, Probe Sequence
catttatggttctctccgcaagtat

SEQ ID NO: 105188 - DNA, 25 bp, Probe Sequence
ttatggttctctccgcaagtataaa

SEQ ID NO: 105189 - DNA, 25 bp, Probe Sequence
tttatggttctctccgcaagtataa

SEQ ID NO: 105190 - DNA, 25 bp, Probe Sequence
tccaataaagcagtatttctaccct

SEQ ID NO: 105191 - DNA, 25 bp, Probe Sequence
ccacctatgagatcagaatatgtat

SEQ ID NO: 105192 - DNA, 25 bp, Probe Sequence
tcccacctatgagatcagaatatgt

SEQ ID NO: 105193 - DNA, 25 bp, Probe Sequence
tgagatcagaatatgtatgcagttc

SEQ ID NO: 105194 - DNA, 25 bp, Probe Sequence
ccaataaagcagtatttctaccctt

SEQ ID NO: 105195 - DNA, 25 bp, Probe Sequence
atccaataaagcagtatttctaccc

SEQ ID NO: 105196 - DNA, 25 bp, Probe Sequence
atcccacctatgagatcagaatatg

SEQ ID NO: 105197 - DNA, 25 bp, Probe Sequence
cccacctatgagatcagaatatgta

SEQ ID NO: 105198 - DNA, 25 bp, Probe Sequence
atgagatcagaatatgtatgcagtt

SEQ ID NO: 105199 - DNA, 25 bp, Probe Sequence
cctatgagatcagaatatgtatgca

SEQ ID NO: 105200 - DNA, 25 bp, Probe Sequence
tcacctgttatctactcccagaaat

SEQ ID NO: 105201 - DNA, 25 bp, Probe Sequence
atcacctgttatctactcccagaaa

SEQ ID NO: 105202 - DNA, 25 bp, Probe Sequence
aatcacctgttatctactcccagaa

SEQ ID NO: 105203 - DNA, 25 bp, Probe Sequence
aaatcacctgttatctactcccaga

SEQ ID NO: 105204 - DNA, 25 bp, Probe Sequence
cacctgttatctactcccagaaata

SEQ ID NO: 105205 - DNA, 25 bp, Probe Sequence
acctgttatctactcccagaaataa

SEQ ID NO: 105206 - DNA, 25 bp, Probe Sequence
cacctatgagatcagaatatgtatg

SEQ ID NO: 105207 - DNA, 25 bp, Probe Sequence
tatgagatcagaatatgtatgcagt

SEQ ID NO: 105208 - DNA, 25 bp, Probe Sequence
tttattggtaaacattggcttgcct

SEQ ID NO: 105209 - DNA, 25 bp, Probe Sequence
ttcatattaaccctacctgtcaacg

SEQ ID NO: 105210 - DNA, 25 bp, Probe Sequence
gcttcatattaaccctacctgtcaa

SEQ ID NO: 105211 - DNA, 25 bp, Probe Sequence
ggtatttgatttcctgtgtgtgttg

SEQ ID NO: 105212 - DNA, 25 bp, Probe Sequence
tggtatttgatttcctgtgtgtgtt

SEQ ID NO: 105213 - DNA, 25 bp, Probe Sequence
aatgctggtatttgatttcctgtgt

SEQ ID NO: 105214 - DNA, 25 bp, Probe Sequence
cttcatattaaccctacctgtcaac

SEQ ID NO: 105215 - DNA, 25 bp, Probe Sequence
attccttagtcatggtgttgcgtaa

SEQ ID NO: 105216 - DNA, 25 bp, Probe Sequence
aattccttagtcatggtgttgcgta

SEQ ID NO: 105217 - DNA, 25 bp, Probe Sequence
gtatttgatttcctgtgtgtgttgc

SEQ ID NO: 105218 - DNA, 25 bp, Probe Sequence
ctggtatttgatttcctgtgtgtgt

SEQ ID NO: 105219 - DNA, 25 bp, Probe Sequence
atgctggtatttgatttcctgtgtg

SEQ ID NO: 105220 - DNA, 25 bp, Probe Sequence
gagaaattccttagtcatggtgttg

SEQ ID NO: 105221 - DNA, 25 bp, Probe Sequence
aaatgctggtatttgatttcctgtg

SEQ ID NO: 105222 - DNA, 25 bp, Probe Sequence
cgtgtaaatgctggtatttgatttc

SEQ ID NO: 105223 - DNA, 25 bp, Probe Sequence
gtcatggtgttgcgtaaatcatatt

SEQ ID NO: 105224 - DNA, 25 bp, Probe Sequence
tagtcatggtgttgcgtaaatcata

SEQ ID NO: 105225 - DNA, 25 bp, Probe Sequence
ttcctactgacaacattataactgt

SEQ ID NO: 105226 - DNA, 25 bp, Probe Sequence
gtgtaaatgctggtatttgatttcc

SEQ ID NO: 105227 - DNA, 25 bp, Probe Sequence
taaatgctggtatttgatttcctgt

SEQ ID NO: 105228 - DNA, 25 bp, Probe Sequence
tgtaaatgctggtatttgatttcct

SEQ ID NO: 105229 - DNA, 25 bp, Probe Sequence
tatttgatttcctgtgtgtgttgcc

SEQ ID NO: 105230 - DNA, 25 bp, Probe Sequence
agtcatggtgttgcgtaaatcatat

SEQ ID NO: 105231 - DNA, 25 bp, Probe Sequence
ttagtcatggtgttgcgtaaatcat

SEQ ID NO: 105232 - DNA, 25 bp, Probe Sequence
gtaaatgctggtatttgatttcctg

SEQ ID NO: 105233 - DNA, 25 bp, Probe Sequence
ttgctacctgtttaagaaagtgaaa

SEQ ID NO: 105234 - DNA, 25 bp, Probe Sequence
tttgctacctgtttaagaaagtgaa

SEQ ID NO: 105235 - DNA, 25 bp, Probe Sequence
tgctacctgtttaagaaagtgaaat

SEQ ID NO: 105236 - DNA, 25 bp, Probe Sequence
atttgctacctgtttaagaaagtga

SEQ ID NO: 105237 - DNA, 25 bp, Probe Sequence
agaaagtgaaatgttatggtctccc

SEQ ID NO: 105238 - DNA, 25 bp, Probe Sequence
aagaaagtgaaatgttatggtctcc

SEQ ID NO: 105239 - DNA, 25 bp, Probe Sequence
gctacctgtttaagaaagtgaaatg

SEQ ID NO: 105240 - DNA, 25 bp, Probe Sequence
ctacctgtttaagaaagtgaaatgt

SEQ ID NO: 105241 - DNA, 25 bp, Probe Sequence
tatttgctacctgtttaagaaagtg

SEQ ID NO: 105242 - DNA, 25 bp, Probe Sequence
acctgtttaagaaagtgaaatgtta

SEQ ID NO: 105243 - DNA, 25 bp, Probe Sequence
tacctgtttaagaaagtgaaatgtt

SEQ ID NO: 105244 - DNA, 25 bp, Probe Sequence
taagaaagtgaaatgttatggtctc

SEQ ID NO: 105245 - DNA, 25 bp, Probe Sequence
ttatttgctacctgtttaagaaagt

SEQ ID NO: 105246 - DNA, 25 bp, Probe Sequence
tcattatttgctacctgtttaagaa

SEQ ID NO: 105247 - DNA, 25 bp, Probe Sequence
ttcattatttgctacctgtttaaga

SEQ ID NO: 105248 - DNA, 25 bp, Probe Sequence
cccaacagtatataaatcttcaaca

SEQ ID NO: 105249 - DNA, 25 bp, Probe Sequence
tcttcaacatgagaggatgtatatt

SEQ ID NO: 105250 - DNA, 25 bp, Probe Sequence
aatcttcaacatgagaggatgtata

SEQ ID NO: 105251 - DNA, 25 bp, Probe Sequence
ttaagaaagtgaaatgttatggtct

SEQ ID NO: 105252 - DNA, 25 bp, Probe Sequence
gaaagtgaaatgttatggtctcccc

SEQ ID NO: 105253 - DNA, 25 bp, Probe Sequence
tcccaacagtatataaatcttcaac

SEQ ID NO: 105254 - DNA, 25 bp, Probe Sequence
atcttcaacatgagaggatgtatat

SEQ ID NO: 105255 - DNA, 25 bp, Probe Sequence
gtttaagaaagtgaaatgttatggt

SEQ ID NO: 105256 - DNA, 25 bp, Probe Sequence
tgtttaagaaagtgaaatgttatgg

SEQ ID NO: 105257 - DNA, 25 bp, Probe Sequence
gcagttagtaaatcataagcccaaa

SEQ ID NO: 105258 - DNA, 25 bp, Probe Sequence
aaatcataagcccaaataaacaggt

SEQ ID NO: 105259 - DNA, 25 bp, Probe Sequence
aatcataagcccaaataaacaggtt

SEQ ID NO: 105260 - DNA, 25 bp, Probe Sequence
atcataagcccaaataaacaggttg

SEQ ID NO: 105261 - DNA, 25 bp, Probe Sequence
tcataagcccaaataaacaggttgt

SEQ ID NO: 105262 - DNA, 25 bp, Probe Sequence
taaatcataagcccaaataaacagg

SEQ ID NO: 105263 - DNA, 25 bp, Probe Sequence
cagttagtaaatcataagcccaaat

SEQ ID NO: 105264 - DNA, 25 bp, Probe Sequence
tgcagttagtaaatcataagcccaa

SEQ ID NO: 105265 - DNA, 25 bp, Probe Sequence
agtaaatcataagcccaaataaaca

SEQ ID NO: 105266 - DNA, 25 bp, Probe Sequence
gtaaatcataagcccaaataaacag

SEQ ID NO: 105267 - DNA, 25 bp, Probe Sequence
ctagctgcttggtaactgtgtcatg

SEQ ID NO: 105268 - DNA, 25 bp, Probe Sequence
caccaacaaatctaagccctcccta

SEQ ID NO: 105269 - DNA, 25 bp, Probe Sequence
accaacaaatctaagccctccctag

SEQ ID NO: 105270 - DNA, 25 bp, Probe Sequence
cataagcccaaataaacaggttgtt

SEQ ID NO: 105271 - DNA, 25 bp, Probe Sequence
agttagtaaatcataagcccaaata

SEQ ID NO: 105272 - DNA, 25 bp, Probe Sequence
cctagctgcttggtaactgtgtcat

SEQ ID NO: 105273 - DNA, 25 bp, Probe Sequence
tagtaaatcataagcccaaataaac

SEQ ID NO: 105274 - DNA, 25 bp, Probe Sequence
gttagtaaatcataagcccaaataa

SEQ ID NO: 105275 - DNA, 25 bp, Probe Sequence
tagctgcttggtaactgtgtcatga

SEQ ID NO: 105276 - DNA, 25 bp, Probe Sequence
ccaacaaatctaagccctccctagc

SEQ ID NO: 105277 - DNA, 25 bp, Probe Sequence
cttggtaactgtgtcatgaagctgc

SEQ ID NO: 105278 - DNA, 25 bp, Probe Sequence
gctgcttggtaactgtgtcatgaag

SEQ ID NO: 105279 - DNA, 25 bp, Probe Sequence
agctgcttggtaactgtgtcatgaa

SEQ ID NO: 105280 - DNA, 25 bp, Probe Sequence
aacaaatctaagccctccctagctg

SEQ ID NO: 105281 - DNA, 25 bp, Probe Sequence
ttacaactctgaacctatcctcgga

SEQ ID NO: 105282 - DNA, 25 bp, Probe Sequence
gttacaactctgaacctatcctcgg

SEQ ID NO: 105283 - DNA, 25 bp, Probe Sequence
atgtttcaataaagttgctgtgctg

SEQ ID NO: 105284 - DNA, 25 bp, Probe Sequence
tacaactctgaacctatcctcggag

SEQ ID NO: 105285 - DNA, 25 bp, Probe Sequence
catgtttcaataaagttgctgtgct

SEQ ID NO: 105286 - DNA, 25 bp, Probe Sequence
tgtttcaataaagttgctgtgctgg

SEQ ID NO: 105287 - DNA, 25 bp, Probe Sequence
tttcaataaagttgctgtgctggga

SEQ ID NO: 105288 - DNA, 25 bp, Probe Sequence
gtttcaataaagttgctgtgctggg

SEQ ID NO: 105289 - DNA, 25 bp, Probe Sequence
agagggtagtcagcatctccaattt

SEQ ID NO: 105290 - DNA, 25 bp, Probe Sequence
ggtagtcagcatctccaattttcag

SEQ ID NO: 105291 - DNA, 25 bp, Probe Sequence
ttcaataaagttgctgtgctgggag

SEQ ID NO: 105292 - DNA, 25 bp, Probe Sequence
tggttacaactctgaacctatcctc

SEQ ID NO: 105293 - DNA, 25 bp, Probe Sequence
ctggttacaactctgaacctatcct

SEQ ID NO: 105294 - DNA, 25 bp, Probe Sequence
gtagtcagcatctccaattttcagc

SEQ ID NO: 105295 - DNA, 25 bp, Probe Sequence
gcctcggcatgtttcaataaagttg

SEQ ID NO: 105296 - DNA, 25 bp, Probe Sequence
ggcatgtttcaataaagttgctgtg

SEQ ID NO: 105297 - DNA, 25 bp, Probe Sequence
tagtcagcatctccaattttcagca

SEQ ID NO: 105298 - DNA, 25 bp, Probe Sequence
agggtagtcagcatctccaattttc

SEQ ID NO: 105299 - DNA, 25 bp, Probe Sequence
gggtagtcagcatctccaattttca

SEQ ID NO: 105300 - DNA, 25 bp, Probe Sequence
gcatgtttcaataaagttgctgtgc

SEQ ID NO: 105301 - DNA, 25 bp, Probe Sequence
cctggttacaactctgaacctatcc

SEQ ID NO: 105302 - DNA, 25 bp, Probe Sequence
atggaccctggttacaactctgaac

SEQ ID NO: 105303 - DNA, 25 bp, Probe Sequence
ggttacaactctgaacctatcctcg

SEQ ID NO: 105304 - DNA, 25 bp, Probe Sequence
ctcggcatgtttcaataaagttgct

SEQ ID NO: 105305 - DNA, 25 bp, Probe Sequence
gactaagccgagatagaaatggaag

SEQ ID NO: 105306 - DNA, 25 bp, Probe Sequence
agactaagccgagatagaaatggaa

SEQ ID NO: 105307 - DNA, 25 bp, Probe Sequence
tgtgttccataaattatcttgcctt

SEQ ID NO: 105308 - DNA, 25 bp, Probe Sequence
ttgtgttccataaattatcttgcct

SEQ ID NO: 105309 - DNA, 25 bp, Probe Sequence
agaatgatgctaggtttgtgagttt

SEQ ID NO: 105310 - DNA, 25 bp, Probe Sequence
tacctggtttgtgaatgtattggag

SEQ ID NO: 105311 - DNA, 25 bp, Probe Sequence
ctagtgctttagggatattgtgttc

SEQ ID NO: 105312 - DNA, 25 bp, Probe Sequence
aagagaatgatgctaggtttgtgag

SEQ ID NO: 105313 - DNA, 25 bp, Probe Sequence
gaagagaatgatgctaggtttgtga

SEQ ID NO: 105314 - DNA, 25 bp, Probe Sequence
gctagtgctttagggatattgtgtt

SEQ ID NO: 105315 - DNA, 25 bp, Probe Sequence
gaatgatgctaggtttgtgagtttc

SEQ ID NO: 105316 - DNA, 25 bp, Probe Sequence
gagaatgatgctaggtttgtgagtt

SEQ ID NO: 105317 - DNA, 25 bp, Probe Sequence
ctggtttgtgaatgtattggagagg

SEQ ID NO: 105318 - DNA, 25 bp, Probe Sequence
cctggtttgtgaatgtattggagag

SEQ ID NO: 105319 - DNA, 25 bp, Probe Sequence
cagactaagccgagatagaaatgga

SEQ ID NO: 105320 - DNA, 25 bp, Probe Sequence
atgtctacagaatttctcctccttc

SEQ ID NO: 105321 - DNA, 25 bp, Probe Sequence
gtctacagaatttctcctccttcag

SEQ ID NO: 105322 - DNA, 25 bp, Probe Sequence
gtttgtgaatgtattggagaggcat

SEQ ID NO: 105323 - DNA, 25 bp, Probe Sequence
tgtctacagaatttctcctccttca

SEQ ID NO: 105324 - DNA, 25 bp, Probe Sequence
agtctgtgaagcatatgtagtcaat

SEQ ID NO: 105325 - DNA, 25 bp, Probe Sequence
gagtctgtgaagcatatgtagtcaa

SEQ ID NO: 105326 - DNA, 25 bp, Probe Sequence
aatgatgctaggtttgtgagtttca

SEQ ID NO: 105327 - DNA, 25 bp, Probe Sequence
ggaagagaatgatgctaggtttgtg

SEQ ID NO: 105328 - DNA, 25 bp, Probe Sequence
gtgttccataaattatcttgccttt

SEQ ID NO: 105329 - DNA, 25 bp, Probe Sequence
tagccctgatctacctaatactgca

SEQ ID NO: 105330 - DNA, 25 bp, Probe Sequence
gactacttttctggaatgtgctctt

SEQ ID NO: 105331 - DNA, 25 bp, Probe Sequence
ctacttttctggaatgtgctcttct

SEQ ID NO: 105332 - DNA, 25 bp, Probe Sequence
cttgctgactacttttctggaatgt

SEQ ID NO: 105333 - DNA, 25 bp, Probe Sequence
tacttttctggaatgtgctcttctg

SEQ ID NO: 105334 - DNA, 25 bp, Probe Sequence
actacttttctggaatgtgctcttc

SEQ ID NO: 105335 - DNA, 25 bp, Probe Sequence
ttgctgactacttttctggaatgtg

SEQ ID NO: 105336 - DNA, 25 bp, Probe Sequence
ctgactacttttctggaatgtgctc

SEQ ID NO: 105337 - DNA, 25 bp, Probe Sequence
gtagccctgatctacctaatactgc

SEQ ID NO: 105338 - DNA, 25 bp, Probe Sequence
ccttgctgactacttttctggaatg

SEQ ID NO: 105339 - DNA, 25 bp, Probe Sequence
tgactacttttctggaatgtgctct

SEQ ID NO: 105340 - DNA, 25 bp, Probe Sequence
gtagcttccgccagtacaagtatga

SEQ ID NO: 105341 - DNA, 25 bp, Probe Sequence
agtagcttccgccagtacaagtatg

SEQ ID NO: 105342 - DNA, 25 bp, Probe Sequence
cagtagcttccgccagtacaagtat

SEQ ID NO: 105343 - DNA, 25 bp, Probe Sequence
cccttgctgactacttttctggaat

SEQ ID NO: 105344 - DNA, 25 bp, Probe Sequence
ctccttctggggaaataaacaagtg

SEQ ID NO: 105345 - DNA, 25 bp, Probe Sequence
ctcaccaacttctgactggacttcc

SEQ ID NO: 105346 - DNA, 25 bp, Probe Sequence
cctcaccaacttctgactggacttc

SEQ ID NO: 105347 - DNA, 25 bp, Probe Sequence
gctgactacttttctggaatgtgct

SEQ ID NO: 105348 - DNA, 25 bp, Probe Sequence
cttctggggaaataaacaagtgcct

SEQ ID NO: 105349 - DNA, 25 bp, Probe Sequence
acttttctggaatgtgctcttctgg

SEQ ID NO: 105350 - DNA, 25 bp, Probe Sequence
cctccttctggggaaataaacaagt

SEQ ID NO: 105351 - DNA, 25 bp, Probe Sequence
tcagtagcttccgccagtacaagta

SEQ ID NO: 105352 - DNA, 25 bp, Probe Sequence
caccaacttctgactggacttcctg

SEQ ID NO: 105353 - DNA, 25 bp, Probe Sequence
ataagtgaaggcaactcataaggaa

SEQ ID NO: 105354 - DNA, 25 bp, Probe Sequence
gataagtgaaggcaactcataagga

SEQ ID NO: 105355 - DNA, 25 bp, Probe Sequence
agataagtgaaggcaactcataagg

SEQ ID NO: 105356 - DNA, 25 bp, Probe Sequence
tgaagataagtgaaggcaactcata

SEQ ID NO: 105357 - DNA, 25 bp, Probe Sequence
cgagtgttcattgtagtacctgtaa

SEQ ID NO: 105358 - DNA, 25 bp, Probe Sequence
ctgaagataagtgaaggcaactcat

SEQ ID NO: 105359 - DNA, 25 bp, Probe Sequence
tgttcattgtagtacctgtaagagt

SEQ ID NO: 105360 - DNA, 25 bp, Probe Sequence
agtgttcattgtagtacctgtaaga

SEQ ID NO: 105361 - DNA, 25 bp, Probe Sequence
gaagataagtgaaggcaactcataa

SEQ ID NO: 105362 - DNA, 25 bp, Probe Sequence
aagataagtgaaggcaactcataag

SEQ ID NO: 105363 - DNA, 25 bp, Probe Sequence
gtgttcattgtagtacctgtaagag

SEQ ID NO: 105364 - DNA, 25 bp, Probe Sequence
gagtgttcattgtagtacctgtaag

SEQ ID NO: 105365 - DNA, 25 bp, Probe Sequence
gttcattgtagtacctgtaagagtt

SEQ ID NO: 105366 - DNA, 25 bp, Probe Sequence
ttcagcatatcaagagcacttccaa

SEQ ID NO: 105367 - DNA, 25 bp, Probe Sequence
gcgagtgttcattgtagtacctgta

SEQ ID NO: 105368 - DNA, 25 bp, Probe Sequence
tacctgtaagagtttatgaccgaag

SEQ ID NO: 105369 - DNA, 25 bp, Probe Sequence
caaactgaagaacaaatagggcaaa

SEQ ID NO: 105370 - DNA, 25 bp, Probe Sequence
gccgcatacttctttatttgtgtag

SEQ ID NO: 105371 - DNA, 25 bp, Probe Sequence
aaaccgcaaactgaagaacaaatag

SEQ ID NO: 105372 - DNA, 25 bp, Probe Sequence
atgaaacaacaacacttccatacag

SEQ ID NO: 105373 - DNA, 25 bp, Probe Sequence
gatgaaacaacaacacttccataca

SEQ ID NO: 105374 - DNA, 25 bp, Probe Sequence
tgatgaaacaacaacacttccatac

SEQ ID NO: 105375 - DNA, 25 bp, Probe Sequence
caaaccgcaaactgaagaacaaata

SEQ ID NO: 105376 - DNA, 25 bp, Probe Sequence
catttcagcatatcaagagcacttc

SEQ ID NO: 105377 - DNA, 25 bp, Probe Sequence
ttattaagagcagagaccacatcac

SEQ ID NO: 105378 - DNA, 25 bp, Probe Sequence
cagagaccacatcaccttctataac

SEQ ID NO: 105379 - DNA, 25 bp, Probe Sequence
cttattaagagcagagaccacatca

SEQ ID NO: 105380 - DNA, 25 bp, Probe Sequence
gagaccacatcaccttctataacac

SEQ ID NO: 105381 - DNA, 25 bp, Probe Sequence
agagaccacatcaccttctataaca

SEQ ID NO: 105382 - DNA, 25 bp, Probe Sequence
ccttattaagagcagagaccacatc

SEQ ID NO: 105383 - DNA, 25 bp, Probe Sequence
tattaagagcagagaccacatcacc

SEQ ID NO: 105384 - DNA, 25 bp, Probe Sequence
accacatcaccttctataacacgaa

SEQ ID NO: 105385 - DNA, 25 bp, Probe Sequence
gaccacatcaccttctataacacga

SEQ ID NO: 105386 - DNA, 25 bp, Probe Sequence
gcagagaccacatcaccttctataa

SEQ ID NO: 105387 - DNA, 25 bp, Probe Sequence
agaccacatcaccttctataacacg

SEQ ID NO: 105388 - DNA, 25 bp, Probe Sequence
gccttattaagagcagagaccacat

SEQ ID NO: 105389 - DNA, 25 bp, Probe Sequence
ggttcactctgagtcatcaattctg

SEQ ID NO: 105390 - DNA, 25 bp, Probe Sequence
agcagagaccacatcaccttctata

SEQ ID NO: 105391 - DNA, 25 bp, Probe Sequence
gatttcttcgttctctgggataatg

SEQ ID NO: 105392 - DNA, 25 bp, Probe Sequence
ggatttcttcgttctctgggataat

SEQ ID NO: 105393 - DNA, 25 bp, Probe Sequence
atcaccttctataacacgaaacact

SEQ ID NO: 105394 - DNA, 25 bp, Probe Sequence
catcaccttctataacacgaaacac

SEQ ID NO: 105395 - DNA, 25 bp, Probe Sequence
cacatcaccttctataacacgaaac

SEQ ID NO: 105396 - DNA, 25 bp, Probe Sequence
acatcaccttctataacacgaaaca

SEQ ID NO: 105397 - DNA, 25 bp, Probe Sequence
ttctataacacgaaacactgctcat

SEQ ID NO: 105398 - DNA, 25 bp, Probe Sequence
gttcactctgagtcatcaattctgc

SEQ ID NO: 105399 - DNA, 25 bp, Probe Sequence
atttcttcgttctctgggataatgc

SEQ ID NO: 105400 - DNA, 25 bp, Probe Sequence
tcaccttctataacacgaaacactg

SEQ ID NO: 105401 - DNA, 25 bp, Probe Sequence
atatccagcaataagttgttctcca

SEQ ID NO: 105402 - DNA, 25 bp, Probe Sequence
tatccagcaataagttgttctccag

SEQ ID NO: 105403 - DNA, 25 bp, Probe Sequence
tatatccagcaataagttgttctcc

SEQ ID NO: 105404 - DNA, 25 bp, Probe Sequence
atccagcaataagttgttctccaga

SEQ ID NO: 105405 - DNA, 25 bp, Probe Sequence
aaggactcttctatgaggaacgaac

SEQ ID NO: 105406 - DNA, 25 bp, Probe Sequence
tccagcaataagttgttctccagaa

SEQ ID NO: 105407 - DNA, 25 bp, Probe Sequence
ggctgctaacaaataatcttcactt

SEQ ID NO: 105408 - DNA, 25 bp, Probe Sequence
actatccaaggctgctaacaaataa

SEQ ID NO: 105409 - DNA, 25 bp, Probe Sequence
aactatccaaggctgctaacaaata

SEQ ID NO: 105410 - DNA, 25 bp, Probe Sequence
ctcacactggactataaataccctc

SEQ ID NO: 105411 - DNA, 25 bp, Probe Sequence
attatcccagagaacgaagaaatcc

SEQ ID NO: 105412 - DNA, 25 bp, Probe Sequence
cattatcccagagaacgaagaaatc

SEQ ID NO: 105413 - DNA, 25 bp, Probe Sequence
aggctgctaacaaataatcttcact

SEQ ID NO: 105414 - DNA, 25 bp, Probe Sequence
atccaaggctgctaacaaataatct

SEQ ID NO: 105415 - DNA, 25 bp, Probe Sequence
tatccaaggctgctaacaaataatc

SEQ ID NO: 105416 - DNA, 25 bp, Probe Sequence
ctatccaaggctgctaacaaataat

SEQ ID NO: 105417 - DNA, 25 bp, Probe Sequence
aaactatccaaggctgctaacaaat

SEQ ID NO: 105418 - DNA, 25 bp, Probe Sequence
aaggctgctaacaaataatcttcac

SEQ ID NO: 105419 - DNA, 25 bp, Probe Sequence
caaggctgctaacaaataatcttca

SEQ ID NO: 105420 - DNA, 25 bp, Probe Sequence
cctcacactggactataaataccct

SEQ ID NO: 105421 - DNA, 25 bp, Probe Sequence
ccaaggctgctaacaaataatcttc

SEQ ID NO: 105422 - DNA, 25 bp, Probe Sequence
tccaaggctgctaacaaataatctt

SEQ ID NO: 105423 - DNA, 25 bp, Probe Sequence
gcattatcccagagaacgaagaaat

SEQ ID NO: 105424 - DNA, 25 bp, Probe Sequence
aagatgcgatgaatacccagaacta

SEQ ID NO: 105425 - DNA, 25 bp, Probe Sequence
agttgatgtggtgtgagtgatatat

SEQ ID NO: 105426 - DNA, 25 bp, Probe Sequence
gttgatgtggtgtgagtgatatatt

SEQ ID NO: 105427 - DNA, 25 bp, Probe Sequence
tgatgtggtgtgagtgatatatttc

SEQ ID NO: 105428 - DNA, 25 bp, Probe Sequence
gatgtggtgtgagtgatatatttct

SEQ ID NO: 105429 - DNA, 25 bp, Probe Sequence
ttgatgtggtgtgagtgatatattt

SEQ ID NO: 105430 - DNA, 25 bp, Probe Sequence
tggtgtgagtgatatatttctatgt

SEQ ID NO: 105431 - DNA, 25 bp, Probe Sequence
tgtggtgtgagtgatatatttctat

SEQ ID NO: 105432 - DNA, 25 bp, Probe Sequence
atgtggtgtgagtgatatatttcta

SEQ ID NO: 105433 - DNA, 25 bp, Probe Sequence
gtggtgtgagtgatatatttctatg

SEQ ID NO: 105434 - DNA, 25 bp, Probe Sequence
caacacgcacattcacagtagttcc

SEQ ID NO: 105435 - DNA, 25 bp, Probe Sequence
ccaacacgcacattcacagtagttc

SEQ ID NO: 105436 - DNA, 25 bp, Probe Sequence
agaaagtactgaaatcccaccttat

SEQ ID NO: 105437 - DNA, 25 bp, Probe Sequence
ggtgtgagtgatatatttctatgtt

SEQ ID NO: 105438 - DNA, 25 bp, Probe Sequence
cagaaagtactgaaatcccacctta

SEQ ID NO: 105439 - DNA, 25 bp, Probe Sequence
gcagaaagtactgaaatcccacctt

SEQ ID NO: 105440 - DNA, 25 bp, Probe Sequence
gtgtgagtgatatatttctatgttt

SEQ ID NO: 105441 - DNA, 25 bp, Probe Sequence
cagcagaaagtactgaaatcccacc

SEQ ID NO: 105442 - DNA, 25 bp, Probe Sequence
agcagaaagtactgaaatcccacct

SEQ ID NO: 105443 - DNA, 25 bp, Probe Sequence
cagggcagcagaaagtactgaaatc

SEQ ID NO: 105444 - DNA, 25 bp, Probe Sequence
gcagcagaaagtactgaaatcccac

SEQ ID NO: 105445 - DNA, 25 bp, Probe Sequence
agggcagcagaaagtactgaaatcc

SEQ ID NO: 105446 - DNA, 25 bp, Probe Sequence
ggcagcagaaagtactgaaatccca

SEQ ID NO: 105447 - DNA, 25 bp, Probe Sequence
ccagggcagcagaaagtactgaaat

SEQ ID NO: 105448 - DNA, 25 bp, Probe Sequence
ctggctcagtcaataaaggatccgg

SEQ ID NO: 105449 - DNA, 25 bp, Probe Sequence
agagattgttgcttcattgctagtt

SEQ ID NO: 105450 - DNA, 25 bp, Probe Sequence
attggcatatatacttggcattcct

SEQ ID NO: 105451 - DNA, 25 bp, Probe Sequence
aattggcatatatacttggcattcc

SEQ ID NO: 105452 - DNA, 25 bp, Probe Sequence
aagagattgttgcttcattgctagt

SEQ ID NO: 105453 - DNA, 25 bp, Probe Sequence
gtctcatgtctcgttccttcttaat

SEQ ID NO: 105454 - DNA, 25 bp, Probe Sequence
ttggcatatatacttggcattcctg

SEQ ID NO: 105455 - DNA, 25 bp, Probe Sequence
aatatgtctcatgtctcgttccttc

SEQ ID NO: 105456 - DNA, 25 bp, Probe Sequence
tctcatgtctcgttccttcttaata

SEQ ID NO: 105457 - DNA, 25 bp, Probe Sequence
gcatatatacttggcattcctgtcc

SEQ ID NO: 105458 - DNA, 25 bp, Probe Sequence
ggcatatatacttggcattcctgtc

SEQ ID NO: 105459 - DNA, 25 bp, Probe Sequence
taatatgtctcatgtctcgttcctt

SEQ ID NO: 105460 - DNA, 25 bp, Probe Sequence
ttaatatgtctcatgtctcgttcct

SEQ ID NO: 105461 - DNA, 25 bp, Probe Sequence
aatggctgatctaataatgttgaca

SEQ ID NO: 105462 - DNA, 25 bp, Probe Sequence
tatacacctggaggcatctgttatt

SEQ ID NO: 105463 - DNA, 25 bp, Probe Sequence
tgtctcgttccttcttaatatgatt

SEQ ID NO: 105464 - DNA, 25 bp, Probe Sequence
atatgtctcatgtctcgttccttct

SEQ ID NO: 105465 - DNA, 25 bp, Probe Sequence
tgtctcatgtctcgttccttcttaa

SEQ ID NO: 105466 - DNA, 25 bp, Probe Sequence
tgaatggctgatctaataatgttga

SEQ ID NO: 105467 - DNA, 25 bp, Probe Sequence
acttgaatggctgatctaataatgt

SEQ ID NO: 105468 - DNA, 25 bp, Probe Sequence
atgtctcatgtctcgttccttctta

SEQ ID NO: 105469 - DNA, 25 bp, Probe Sequence
tatgtctcatgtctcgttccttctt

SEQ ID NO: 105470 - DNA, 25 bp, Probe Sequence
tggcatatatacttggcattcctgt

SEQ ID NO: 105471 - DNA, 25 bp, Probe Sequence
atggctgatctaataatgttgacat

SEQ ID NO: 105472 - DNA, 25 bp, Probe Sequence
gaatggctgatctaataatgttgac

SEQ ID NO: 105473 - DNA, 25 bp, Probe Sequence
accttccctccaaattcttcaataa

SEQ ID NO: 105474 - DNA, 25 bp, Probe Sequence
aaccttccctccaaattcttcaata

SEQ ID NO: 105475 - DNA, 25 bp, Probe Sequence
ccttccctccaaattcttcaataaa

SEQ ID NO: 105476 - DNA, 25 bp, Probe Sequence
cgtagggaaatgttaaggacttctg

SEQ ID NO: 105477 - DNA, 25 bp, Probe Sequence
gtagggaaatgttaaggacttctgc

SEQ ID NO: 105478 - DNA, 25 bp, Probe Sequence
gaaccttccctccaaattcttcaat

SEQ ID NO: 105479 - DNA, 25 bp, Probe Sequence
tagggaaatgttaaggacttctgca

SEQ ID NO: 105480 - DNA, 25 bp, Probe Sequence
tccctccaaattcttcaataaaagt

SEQ ID NO: 105481 - DNA, 25 bp, Probe Sequence
ggaaccttccctccaaattcttcaa

SEQ ID NO: 105482 - DNA, 25 bp, Probe Sequence
ccctccaaattcttcaataaaagtt

SEQ ID NO: 105483 - DNA, 25 bp, Probe Sequence
cttccctccaaattcttcaataaaa

SEQ ID NO: 105484 - DNA, 25 bp, Probe Sequence
tccaaattcttcaataaaagttgct

SEQ ID NO: 105485 - DNA, 25 bp, Probe Sequence
ttccctccaaattcttcaataaaag

SEQ ID NO: 105486 - DNA, 25 bp, Probe Sequence
ctccaaattcttcaataaaagttgc

SEQ ID NO: 105487 - DNA, 25 bp, Probe Sequence
ccaaattcttcaataaaagttgctt

SEQ ID NO: 105488 - DNA, 25 bp, Probe Sequence
cctccaaattcttcaataaaagttg

SEQ ID NO: 105489 - DNA, 25 bp, Probe Sequence
tatggaaccttccctccaaattctt

SEQ ID NO: 105490 - DNA, 25 bp, Probe Sequence
atggaaccttccctccaaattcttc

SEQ ID NO: 105491 - DNA, 25 bp, Probe Sequence
caaattcttcaataaaagttgcttt

SEQ ID NO: 105492 - DNA, 25 bp, Probe Sequence
tggaaccttccctccaaattcttca

SEQ ID NO: 105493 - DNA, 25 bp, Probe Sequence
aattcttcaataaaagttgcttttc

SEQ ID NO: 105494 - DNA, 25 bp, Probe Sequence
aaattcttcaataaaagttgctttt

SEQ ID NO: 105495 - DNA, 25 bp, Probe Sequence
tttgatcatctactgtggagtggtg

SEQ ID NO: 105496 - DNA, 25 bp, Probe Sequence
ttgatcatctactgtggagtggtgg

SEQ ID NO: 105497 - DNA, 25 bp, Probe Sequence
gttttgatcatctactgtggagtgg

SEQ ID NO: 105498 - DNA, 25 bp, Probe Sequence
ggttttgatcatctactgtggagtg

SEQ ID NO: 105499 - DNA, 25 bp, Probe Sequence
ttttgatcatctactgtggagtggt

SEQ ID NO: 105500 - DNA, 25 bp, Probe Sequence
tggttttgatcatctactgtggagt

SEQ ID NO: 105501 - DNA, 25 bp, Probe Sequence
ggatgataatctcaaggagtgtctc

SEQ ID NO: 105502 - DNA, 25 bp, Probe Sequence
ctcagtggatgataatctcaaggag

SEQ ID NO: 105503 - DNA, 25 bp, Probe Sequence
tggatgataatctcaaggagtgtct

SEQ ID NO: 105504 - DNA, 25 bp, Probe Sequence
gtggatgataatctcaaggagtgtc

SEQ ID NO: 105505 - DNA, 25 bp, Probe Sequence
cagtggatgataatctcaaggagtg

SEQ ID NO: 105506 - DNA, 25 bp, Probe Sequence
tcagtggatgataatctcaaggagt

SEQ ID NO: 105507 - DNA, 25 bp, Probe Sequence
agtggatgataatctcaaggagtgt

SEQ ID NO: 105508 - DNA, 25 bp, Probe Sequence
attactctgctatgactctgtcttc

SEQ ID NO: 105509 - DNA, 25 bp, Probe Sequence
ttactctgctatgactctgtcttcc

SEQ ID NO: 105510 - DNA, 25 bp, Probe Sequence
tattactctgctatgactctgtctt

SEQ ID NO: 105511 - DNA, 25 bp, Probe Sequence
ttattactctgctatgactctgtct

SEQ ID NO: 105512 - DNA, 25 bp, Probe Sequence
cctcagtggatgataatctcaagga

SEQ ID NO: 105513 - DNA, 25 bp, Probe Sequence
tgcttctttattactctgctatgac

SEQ ID NO: 105514 - DNA, 25 bp, Probe Sequence
gcttctttattactctgctatgact

SEQ ID NO: 105515 - DNA, 25 bp, Probe Sequence
aaatctatcaccaagcaacagaagg

SEQ ID NO: 105516 - DNA, 25 bp, Probe Sequence
aatctatcaccaagcaacagaaggt

SEQ ID NO: 105517 - DNA, 25 bp, Probe Sequence
ctttattactctgctatgactctgt

SEQ ID NO: 105518 - DNA, 25 bp, Probe Sequence
atgcttctttattactctgctatga

SEQ ID NO: 105519 - DNA, 25 bp, Probe Sequence
aaacatgcttctttattactctgct

SEQ ID NO: 105520 - DNA, 25 bp, Probe Sequence
caaacatgcttctttattactctgc

SEQ ID NO: 105521 - DNA, 25 bp, Probe Sequence
tctttattactctgctatgactctg

SEQ ID NO: 105522 - DNA, 25 bp, Probe Sequence
aacatgcttctttattactctgcta

SEQ ID NO: 105523 - DNA, 25 bp, Probe Sequence
acatgcttctttattactctgctat

SEQ ID NO: 105524 - DNA, 25 bp, Probe Sequence
catgcttctttattactctgctatg

SEQ ID NO: 105525 - DNA, 25 bp, Probe Sequence
aatacttgatgacacagaagacaca

SEQ ID NO: 105526 - DNA, 25 bp, Probe Sequence
atacttgatgacacagaagacacag

SEQ ID NO: 105527 - DNA, 25 bp, Probe Sequence
tacttgatgacacagaagacacagt

SEQ ID NO: 105528 - DNA, 25 bp, Probe Sequence
cttgatgacacagaagacacagttg

SEQ ID NO: 105529 - DNA, 25 bp, Probe Sequence
tgtaataagaagaagctgaagtcgt

SEQ ID NO: 105530 - DNA, 25 bp, Probe Sequence
atcaaccaagaagaagagagattaa

SEQ ID NO: 105531 - DNA, 25 bp, Probe Sequence
gtaataagaagaagctgaagtcgtt

SEQ ID NO: 105532 - DNA, 25 bp, Probe Sequence
atgtaataagaagaagctgaagtcg

SEQ ID NO: 105533 - DNA, 25 bp, Probe Sequence
acttgatgacacagaagacacagtt

SEQ ID NO: 105534 - DNA, 25 bp, Probe Sequence
tcaaatcaaccaagaagaagagaga

SEQ ID NO: 105535 - DNA, 25 bp, Probe Sequence
gaaagcgaagaagaaacacactaac

SEQ ID NO: 105536 - DNA, 25 bp, Probe Sequence
tgaaagcgaagaagaaacacactaa

SEQ ID NO: 105537 - DNA, 25 bp, Probe Sequence
aagaatgagagaactgtgtttgttg

SEQ ID NO: 105538 - DNA, 25 bp, Probe Sequence
caaatcaaccaagaagaagagagat

SEQ ID NO: 105539 - DNA, 25 bp, Probe Sequence
aaatacttgatgacacagaagacac

SEQ ID NO: 105540 - DNA, 25 bp, Probe Sequence
aagaagaaattcaccagaaacaagg

SEQ ID NO: 105541 - DNA, 25 bp, Probe Sequence
ttcaaatcaaccaagaagaagagag

SEQ ID NO: 105542 - DNA, 25 bp, Probe Sequence
aaagaatgagagaactgtgtttgtt

SEQ ID NO: 105543 - DNA, 25 bp, Probe Sequence
ttgatgacacagaagacacagttgt

SEQ ID NO: 105544 - DNA, 25 bp, Probe Sequence
aagaagaaacacactaacgcagaaa

SEQ ID NO: 105545 - DNA, 25 bp, Probe Sequence
cacagttgtcagtcaaagaaagaaa

SEQ ID NO: 105546 - DNA, 25 bp, Probe Sequence
agaagaagaaattcaccagaaacaa

SEQ ID NO: 105547 - DNA, 25 bp, Probe Sequence
aaacggaatgaggaggaagaaagta

SEQ ID NO: 105548 - DNA, 25 bp, Probe Sequence
gcgagtgctgatttagaagaagaaa

SEQ ID NO: 105549 - DNA, 25 bp, Probe Sequence
ctattcactgtcgagatggctaatc

SEQ ID NO: 105550 - DNA, 25 bp, Probe Sequence
actattcactgtcgagatggctaat

SEQ ID NO: 105551 - DNA, 25 bp, Probe Sequence
tattcactgtcgagatggctaatca

SEQ ID NO: 105552 - DNA, 25 bp, Probe Sequence
aactattcactgtcgagatggctaa

SEQ ID NO: 105553 - DNA, 25 bp, Probe Sequence
gtcgagatggctaatcagtattgag

SEQ ID NO: 105554 - DNA, 25 bp, Probe Sequence
tgtcgagatggctaatcagtattga

SEQ ID NO: 105555 - DNA, 25 bp, Probe Sequence
gaactattcactgtcgagatggcta

SEQ ID NO: 105556 - DNA, 25 bp, Probe Sequence
ctgtcgagatggctaatcagtattg

SEQ ID NO: 105557 - DNA, 25 bp, Probe Sequence
tcgagatggctaatcagtattgagg

SEQ ID NO: 105558 - DNA, 25 bp, Probe Sequence
cgagatggctaatcagtattgaggc

SEQ ID NO: 105559 - DNA, 25 bp, Probe Sequence
attcactgtcgagatggctaatcag

SEQ ID NO: 105560 - DNA, 25 bp, Probe Sequence
cttgaactattcactgtcgagatgg

SEQ ID NO: 105561 - DNA, 25 bp, Probe Sequence
ccttgaactattcactgtcgagatg

SEQ ID NO: 105562 - DNA, 25 bp, Probe Sequence
aatgccttgaactattcactgtcga

SEQ ID NO: 105563 - DNA, 25 bp, Probe Sequence
gccttgaactattcactgtcgagat

SEQ ID NO: 105564 - DNA, 25 bp, Probe Sequence
aaatgccttgaactattcactgtcg

SEQ ID NO: 105565 - DNA, 25 bp, Probe Sequence
ttgaactattcactgtcgagatggc

SEQ ID NO: 105566 - DNA, 25 bp, Probe Sequence
atgccttgaactattcactgtcgag

SEQ ID NO: 105567 - DNA, 25 bp, Probe Sequence
ctcaattaaaagcctatcagtttgt

SEQ ID NO: 105568 - DNA, 25 bp, Probe Sequence
actgtcgagatggctaatcagtatt

SEQ ID NO: 105569 - DNA, 25 bp, Probe Sequence
cactgtcgagatggctaatcagtat

SEQ ID NO: 105570 - DNA, 25 bp, Probe Sequence
tgaactattcactgtcgagatggct

SEQ ID NO: 105571 - DNA, 25 bp, Probe Sequence
cgctcaattaaaagcctatcagttt

SEQ ID NO: 105572 - DNA, 25 bp, Probe Sequence
gctcaattaaaagcctatcagtttg

SEQ ID NO: 105573 - DNA, 25 bp, Probe Sequence
gaatggaagaactgggaaagagaaa

SEQ ID NO: 105574 - DNA, 25 bp, Probe Sequence
agaatggaagaactgggaaagagaa

SEQ ID NO: 105575 - DNA, 25 bp, Probe Sequence
tggagcatctcttgataaaggaaag

SEQ ID NO: 105576 - DNA, 25 bp, Probe Sequence
ctggagcatctcttgataaaggaaa

SEQ ID NO: 105577 - DNA, 25 bp, Probe Sequence
catctcttgataaaggaaagggcac

SEQ ID NO: 105578 - DNA, 25 bp, Probe Sequence
gagaatggaagaactgggaaagaga

SEQ ID NO: 105579 - DNA, 25 bp, Probe Sequence
agagaatggaagaactgggaaagag

SEQ ID NO: 105580 - DNA, 25 bp, Probe Sequence
gagagaatggaagaactgggaaaga

SEQ ID NO: 105581 - DNA, 25 bp, Probe Sequence
gagcatctcttgataaaggaaaggg

SEQ ID NO: 105582 - DNA, 25 bp, Probe Sequence
ggagcatctcttgataaaggaaagg

SEQ ID NO: 105583 - DNA, 25 bp, Probe Sequence
tgagagaatggaagaactgggaaag

SEQ ID NO: 105584 - DNA, 25 bp, Probe Sequence
ctgagagaatggaagaactgggaaa

SEQ ID NO: 105585 - DNA, 25 bp, Probe Sequence
ataaaggaaagggcaccatcttcat

SEQ ID NO: 105586 - DNA, 25 bp, Probe Sequence
ttgataaaggaaagggcaccatctt

SEQ ID NO: 105587 - DNA, 25 bp, Probe Sequence
atctcttgataaaggaaagggcacc

SEQ ID NO: 105588 - DNA, 25 bp, Probe Sequence
aatatcaagacaattgcagaaggct

SEQ ID NO: 105589 - DNA, 25 bp, Probe Sequence
gataaaggaaagggcaccatcttca

SEQ ID NO: 105590 - DNA, 25 bp, Probe Sequence
tgataaaggaaagggcaccatcttc

SEQ ID NO: 105591 - DNA, 25 bp, Probe Sequence
cttgataaaggaaagggcaccatct

SEQ ID NO: 105592 - DNA, 25 bp, Probe Sequence
tcttgataaaggaaagggcaccatc

SEQ ID NO: 105593 - DNA, 25 bp, Probe Sequence
ctcttgataaaggaaagggcaccat

SEQ ID NO: 105594 - DNA, 25 bp, Probe Sequence
agcatctcttgataaaggaaagggc

SEQ ID NO: 105595 - DNA, 25 bp, Probe Sequence
gcatctcttgataaaggaaagggca

SEQ ID NO: 105596 - DNA, 25 bp, Probe Sequence
gctggagcatctcttgataaaggaa

SEQ ID NO: 105597 - DNA, 25 bp, Probe Sequence
gatgatgatgatgaagttccaggat

SEQ ID NO: 105598 - DNA, 25 bp, Probe Sequence
atgatgatgatgaagttccaggatc

SEQ ID NO: 105599 - DNA, 25 bp, Probe Sequence
gatgatgatgaagttccaggatctt

SEQ ID NO: 105600 - DNA, 25 bp, Probe Sequence
atgatgatgaagttccaggatcttg

SEQ ID NO: 105601 - DNA, 25 bp, Probe Sequence
tgatgatgatgaagttccaggatct

SEQ ID NO: 105602 - DNA, 25 bp, Probe Sequence
gatgatgaagttccaggatcttgtg

SEQ ID NO: 105603 - DNA, 25 bp, Probe Sequence
tgatgatgaagttccaggatcttgt

SEQ ID NO: 105604 - DNA, 25 bp, Probe Sequence
ggatgatgatgatgaagttccagga

SEQ ID NO: 105605 - DNA, 25 bp, Probe Sequence
aggatgatgatgatgaagttccagg

SEQ ID NO: 105606 - DNA, 25 bp, Probe Sequence
atgatgaagttccaggatcttgtgg

SEQ ID NO: 105607 - DNA, 25 bp, Probe Sequence
ctgggaatcaagtttgaaacaaaga

SEQ ID NO: 105608 - DNA, 25 bp, Probe Sequence
gaagcctgggaatcaagtttgaaac

SEQ ID NO: 105609 - DNA, 25 bp, Probe Sequence
tgggaatcaagtttgaaacaaagat

SEQ ID NO: 105610 - DNA, 25 bp, Probe Sequence
agaagcctgggaatcaagtttgaaa

SEQ ID NO: 105611 - DNA, 25 bp, Probe Sequence
aagaagcctgggaatcaagtttgaa

SEQ ID NO: 105612 - DNA, 25 bp, Probe Sequence
cctgggaatcaagtttgaaacaaag

SEQ ID NO: 105613 - DNA, 25 bp, Probe Sequence
gggaatcaagtttgaaacaaagatt

SEQ ID NO: 105614 - DNA, 25 bp, Probe Sequence
ggatcttgtggagaattttgatgag

SEQ ID NO: 105615 - DNA, 25 bp, Probe Sequence
aggatcttgtggagaattttgatga

SEQ ID NO: 105616 - DNA, 25 bp, Probe Sequence
gaagaagcctgggaatcaagtttga

SEQ ID NO: 105617 - DNA, 25 bp, Probe Sequence
caggatcttgtggagaattttgatg

SEQ ID NO: 105618 - DNA, 25 bp, Probe Sequence
agcctgggaatcaagtttgaaacaa

SEQ ID NO: 105619 - DNA, 25 bp, Probe Sequence
aagcctgggaatcaagtttgaaaca

SEQ ID NO: 105620 - DNA, 25 bp, Probe Sequence
gcctgggaatcaagtttgaaacaaa

SEQ ID NO: 105621 - DNA, 25 bp, Probe Sequence
tagaaggaagaaggtggttcataga

SEQ ID NO: 105622 - DNA, 25 bp, Probe Sequence
gtagaaggaagaaggtggttcatag

SEQ ID NO: 105623 - DNA, 25 bp, Probe Sequence
agaaggaagaaggtggttcatagaa

SEQ ID NO: 105624 - DNA, 25 bp, Probe Sequence
atgatgatgatgaagttcctgatct

SEQ ID NO: 105625 - DNA, 25 bp, Probe Sequence
gatgatgatgatgaagttcctgatc

SEQ ID NO: 105626 - DNA, 25 bp, Probe Sequence
atgatgatgaagttcctgatcttgt

SEQ ID NO: 105627 - DNA, 25 bp, Probe Sequence
atagaacagccacagcagatgataa

SEQ ID NO: 105628 - DNA, 25 bp, Probe Sequence
tgatgatgatgaagttcctgatctt

SEQ ID NO: 105629 - DNA, 25 bp, Probe Sequence
gatgatgatgaagttcctgatcttg

SEQ ID NO: 105630 - DNA, 25 bp, Probe Sequence
tgatgatgaagttcctgatcttgtg

SEQ ID NO: 105631 - DNA, 25 bp, Probe Sequence
cgtagaaggaagaaggtggttcata

SEQ ID NO: 105632 - DNA, 25 bp, Probe Sequence
gatgatgaagttcctgatcttgtgg

SEQ ID NO: 105633 - DNA, 25 bp, Probe Sequence
ggatgatgatgatgaagttcctgat

SEQ ID NO: 105634 - DNA, 25 bp, Probe Sequence
catagaacagccacagcagatgata

SEQ ID NO: 105635 - DNA, 25 bp, Probe Sequence
gaagttcctgatcttgtggagaatt

SEQ ID NO: 105636 - DNA, 25 bp, Probe Sequence
gaaatgctacccaacatcttaaacc

SEQ ID NO: 105637 - DNA, 25 bp, Probe Sequence
acagaaatgctacccaacatcttaa

SEQ ID NO: 105638 - DNA, 25 bp, Probe Sequence
agaaatgctacccaacatcttaaac

SEQ ID NO: 105639 - DNA, 25 bp, Probe Sequence
cagaaatgctacccaacatcttaaa

SEQ ID NO: 105640 - DNA, 25 bp, Probe Sequence
aaatgctacccaacatcttaaacca

SEQ ID NO: 105641 - DNA, 25 bp, Probe Sequence
gacagaaatgctacccaacatctta

SEQ ID NO: 105642 - DNA, 25 bp, Probe Sequence
tgaagttcctgatcttgtggagaat

SEQ ID NO: 105643 - DNA, 25 bp, Probe Sequence
atgaagttcctgatcttgtggagaa

SEQ ID NO: 105644 - DNA, 25 bp, Probe Sequence
atgatgaagttcctgatcttgtgga

SEQ ID NO: 105645 - DNA, 25 bp, Probe Sequence
atgatctatacaagctccaaggatg

SEQ ID NO: 105646 - DNA, 25 bp, Probe Sequence
aatgatctatacaagctccaaggat

SEQ ID NO: 105647 - DNA, 25 bp, Probe Sequence
attcttagtagagtcagggtttcac

SEQ ID NO: 105648 - DNA, 25 bp, Probe Sequence
ctatacaagctccaaggatgcaatc

SEQ ID NO: 105649 - DNA, 25 bp, Probe Sequence
tgtagatcatcattcagtgccacaa

SEQ ID NO: 105650 - DNA, 25 bp, Probe Sequence
tagatcatcattcagtgccacaaat

SEQ ID NO: 105651 - DNA, 25 bp, Probe Sequence
tctatacaagctccaaggatgcaat

SEQ ID NO: 105652 - DNA, 25 bp, Probe Sequence
tgatctatacaagctccaaggatgc

SEQ ID NO: 105653 - DNA, 25 bp, Probe Sequence
tgtattcttagtagagtcagggttt

SEQ ID NO: 105654 - DNA, 25 bp, Probe Sequence
ttgtattcttagtagagtcagggtt

SEQ ID NO: 105655 - DNA, 25 bp, Probe Sequence
tttgtattcttagtagagtcagggt

SEQ ID NO: 105656 - DNA, 25 bp, Probe Sequence
atctatacaagctccaaggatgcaa

SEQ ID NO: 105657 - DNA, 25 bp, Probe Sequence
tattcttagtagagtcagggtttca

SEQ ID NO: 105658 - DNA, 25 bp, Probe Sequence
gatcatcattcagtgccacaaattg

SEQ ID NO: 105659 - DNA, 25 bp, Probe Sequence
agatcatcattcagtgccacaaatt

SEQ ID NO: 105660 - DNA, 25 bp, Probe Sequence
tatacaagctccaaggatgcaatca

SEQ ID NO: 105661 - DNA, 25 bp, Probe Sequence
gtagatcatcattcagtgccacaaa

SEQ ID NO: 105662 - DNA, 25 bp, Probe Sequence
gtattcttagtagagtcagggtttc

SEQ ID NO: 105663 - DNA, 25 bp, Probe Sequence
ctgtgtagatcatcattcagtgcca

SEQ ID NO: 105664 - DNA, 25 bp, Probe Sequence
gatctatacaagctccaaggatgca

SEQ ID NO: 105665 - DNA, 25 bp, Probe Sequence
atcatcattcagtgccacaaattga

SEQ ID NO: 105666 - DNA, 25 bp, Probe Sequence
aaatgatctatacaagctccaagga

SEQ ID NO: 105667 - DNA, 25 bp, Probe Sequence
gtgtagatcatcattcagtgccaca

SEQ ID NO: 105668 - DNA, 25 bp, Probe Sequence
tgtgtagatcatcattcagtgccac

SEQ ID NO: 105669 - DNA, 25 bp, Probe Sequence
ttcagtcttctccttcctctcttgt

SEQ ID NO: 105670 - DNA, 25 bp, Probe Sequence
tcagtcttctccttcctctcttgtc

SEQ ID NO: 105671 - DNA, 25 bp, Probe Sequence
ttgaataatagtgccctctttgaaa

SEQ ID NO: 105672 - DNA, 25 bp, Probe Sequence
attgaataatagtgccctctttgaa

SEQ ID NO: 105673 - DNA, 25 bp, Probe Sequence
atagtgccctctttgaaagtgttaa

SEQ ID NO: 105674 - DNA, 25 bp, Probe Sequence
aatagtgccctctttgaaagtgtta

SEQ ID NO: 105675 - DNA, 25 bp, Probe Sequence
taatagtgccctctttgaaagtgtt

SEQ ID NO: 105676 - DNA, 25 bp, Probe Sequence
ataatagtgccctctttgaaagtgt

SEQ ID NO: 105677 - DNA, 25 bp, Probe Sequence
gtgaaagtaagtcagtattcttggg

SEQ ID NO: 105678 - DNA, 25 bp, Probe Sequence
ggtgaaagtaagtcagtattcttgg

SEQ ID NO: 105679 - DNA, 25 bp, Probe Sequence
aataatagtgccctctttgaaagtg

SEQ ID NO: 105680 - DNA, 25 bp, Probe Sequence
aattgaataatagtgccctctttga

SEQ ID NO: 105681 - DNA, 25 bp, Probe Sequence
gtctttggagatagagttatttgct

SEQ ID NO: 105682 - DNA, 25 bp, Probe Sequence
agtctttggagatagagttatttgc

SEQ ID NO: 105683 - DNA, 25 bp, Probe Sequence
gaataatagtgccctctttgaaagt

SEQ ID NO: 105684 - DNA, 25 bp, Probe Sequence
tgaataatagtgccctctttgaaag

SEQ ID NO: 105685 - DNA, 25 bp, Probe Sequence
tggtgaaagtaagtcagtattcttg

SEQ ID NO: 105686 - DNA, 25 bp, Probe Sequence
gcattggcactttgatcttgaaatt

SEQ ID NO: 105687 - DNA, 25 bp, Probe Sequence
caaattcctgagaagcagtaacttt

SEQ ID NO: 105688 - DNA, 25 bp, Probe Sequence
tcaaattcctgagaagcagtaactt

SEQ ID NO: 105689 - DNA, 25 bp, Probe Sequence
cattggcactttgatcttgaaatta

SEQ ID NO: 105690 - DNA, 25 bp, Probe Sequence
tggagatagagttatttgctagaga

SEQ ID NO: 105691 - DNA, 25 bp, Probe Sequence
acctaagtctttggagatagagtta

SEQ ID NO: 105692 - DNA, 25 bp, Probe Sequence
tacctaagtctttggagatagagtt

SEQ ID NO: 105693 - DNA, 25 bp, Probe Sequence
actgtcttaaagagagagagagaga

SEQ ID NO: 105694 - DNA, 25 bp, Probe Sequence
aactgtcttaaagagagagagagag

SEQ ID NO: 105695 - DNA, 25 bp, Probe Sequence
ctgtcttaaagagagagagagagaa

SEQ ID NO: 105696 - DNA, 25 bp, Probe Sequence
gcattaactgtcttaaagagagaga

SEQ ID NO: 105697 - DNA, 25 bp, Probe Sequence
tgtcttaaagagagagagagagaat

SEQ ID NO: 105698 - DNA, 25 bp, Probe Sequence
agcattaactgtcttaaagagagag

SEQ ID NO: 105699 - DNA, 25 bp, Probe Sequence
cagcattaactgtcttaaagagaga

SEQ ID NO: 105700 - DNA, 25 bp, Probe Sequence
taactgtcttaaagagagagagaga

SEQ ID NO: 105701 - DNA, 25 bp, Probe Sequence
gtcttaaagagagagagagagaatt

SEQ ID NO: 105702 - DNA, 25 bp, Probe Sequence
ttaactgtcttaaagagagagagag

SEQ ID NO: 105703 - DNA, 25 bp, Probe Sequence
cattaactgtcttaaagagagagag

SEQ ID NO: 105704 - DNA, 25 bp, Probe Sequence
attaactgtcttaaagagagagaga

SEQ ID NO: 105705 - DNA, 25 bp, Probe Sequence
cttaaagagagagagagagaattcc

SEQ ID NO: 105706 - DNA, 25 bp, Probe Sequence
tcttaaagagagagagagagaattc

SEQ ID NO: 105707 - DNA, 25 bp, Probe Sequence
acagcattaactgtcttaaagagag

SEQ ID NO: 105708 - DNA, 25 bp, Probe Sequence
gtttctcagtttcccgtttcgtttg

SEQ ID NO: 105709 - DNA, 25 bp, Probe Sequence
catgtgtttctcagtttcccgtttc

SEQ ID NO: 105710 - DNA, 25 bp, Probe Sequence
ttctcagtttcccgtttcgtttgtt

SEQ ID NO: 105711 - DNA, 25 bp, Probe Sequence
tttctcagtttcccgtttcgtttgt

SEQ ID NO: 105712 - DNA, 25 bp, Probe Sequence
tgtttctcagtttcccgtttcgttt

SEQ ID NO: 105713 - DNA, 25 bp, Probe Sequence
atgtgtttctcagtttcccgtttcg

SEQ ID NO: 105714 - DNA, 25 bp, Probe Sequence
tctcagtttcccgtttcgtttgttg

SEQ ID NO: 105715 - DNA, 25 bp, Probe Sequence
gtgtttctcagtttcccgtttcgtt

SEQ ID NO: 105716 - DNA, 25 bp, Probe Sequence
ccatgtgtttctcagtttcccgttt

SEQ ID NO: 105717 - DNA, 25 bp, Probe Sequence
ttctaccacggctggagagttgata

SEQ ID NO: 105718 - DNA, 25 bp, Probe Sequence
cagcttttgtgttaatccccttcag

SEQ ID NO: 105719 - DNA, 25 bp, Probe Sequence
ccctagctcttttattctaccacgg

SEQ ID NO: 105720 - DNA, 25 bp, Probe Sequence
cccctagctcttttattctaccacg

SEQ ID NO: 105721 - DNA, 25 bp, Probe Sequence
gcccctagctcttttattctaccac

SEQ ID NO: 105722 - DNA, 25 bp, Probe Sequence
ctcagtttcccgtttcgtttgttgg

SEQ ID NO: 105723 - DNA, 25 bp, Probe Sequence
tgtgtttctcagtttcccgtttcgt

SEQ ID NO: 105724 - DNA, 25 bp, Probe Sequence
ttcagcccctagctcttttattcta

SEQ ID NO: 105725 - DNA, 25 bp, Probe Sequence
cctagctcttttattctaccacggc

SEQ ID NO: 105726 - DNA, 25 bp, Probe Sequence
ctcttttattctaccacggctggag

SEQ ID NO: 105727 - DNA, 25 bp, Probe Sequence
cttttgtgttaatccccttcagccc

SEQ ID NO: 105728 - DNA, 25 bp, Probe Sequence
tcagcccctagctcttttattctac

SEQ ID NO: 105729 - DNA, 25 bp, Probe Sequence
tcttttattctaccacggctggaga

SEQ ID NO: 105730 - DNA, 25 bp, Probe Sequence
cttcagcccctagctcttttattct

SEQ ID NO: 105731 - DNA, 25 bp, Probe Sequence
ctagctcttttattctaccacggct

SEQ ID NO: 105732 - DNA, 25 bp, Probe Sequence
ccattatatcaaggctacaaggtct

SEQ ID NO: 105733 - DNA, 25 bp, Probe Sequence
tccattatatcaaggctacaaggtc

SEQ ID NO: 105734 - DNA, 25 bp, Probe Sequence
ctccattatatcaaggctacaaggt

SEQ ID NO: 105735 - DNA, 25 bp, Probe Sequence
tctccattatatcaaggctacaagg

SEQ ID NO: 105736 - DNA, 25 bp, Probe Sequence
caaggtctatgagcaataatgtgat

SEQ ID NO: 105737 - DNA, 25 bp, Probe Sequence
ataaccttaatgtgacacctgagac

SEQ ID NO: 105738 - DNA, 25 bp, Probe Sequence
agttctccattatatcaaggctaca

SEQ ID NO: 105739 - DNA, 25 bp, Probe Sequence
acagttctccattatatcaaggcta

SEQ ID NO: 105740 - DNA, 25 bp, Probe Sequence
tacagttctccattatatcaaggct

SEQ ID NO: 105741 - DNA, 25 bp, Probe Sequence
cagttctccattatatcaaggctac

SEQ ID NO: 105742 - DNA, 25 bp, Probe Sequence
tataaccttaatgtgacacctgaga

SEQ ID NO: 105743 - DNA, 25 bp, Probe Sequence
atatcaaggctacaaggtctatgag

SEQ ID NO: 105744 - DNA, 25 bp, Probe Sequence
gttctccattatatcaaggctacaa

SEQ ID NO: 105745 - DNA, 25 bp, Probe Sequence
tggataattctcactgatggatctc

SEQ ID NO: 105746 - DNA, 25 bp, Probe Sequence
aaggtctatgagcaataatgtgatt

SEQ ID NO: 105747 - DNA, 25 bp, Probe Sequence
gtacagttctccattatatcaaggc

SEQ ID NO: 105748 - DNA, 25 bp, Probe Sequence
ttctccattatatcaaggctacaag

SEQ ID NO: 105749 - DNA, 25 bp, Probe Sequence
acaaggtctatgagcaataatgtga

SEQ ID NO: 105750 - DNA, 25 bp, Probe Sequence
atggataattctcactgatggatct

SEQ ID NO: 105751 - DNA, 25 bp, Probe Sequence
ggataattctcactgatggatctca

SEQ ID NO: 105752 - DNA, 25 bp, Probe Sequence
taattctcactgatggatctcaagc

SEQ ID NO: 105753 - DNA, 25 bp, Probe Sequence
taaccttaatgtgacacctgagacc

SEQ ID NO: 105754 - DNA, 25 bp, Probe Sequence
catggataattctcactgatggatc

SEQ ID NO: 105755 - DNA, 25 bp, Probe Sequence
tacaaggtctatgagcaataatgtg

SEQ ID NO: 105756 - DNA, 25 bp, Probe Sequence
aatctatcttactgtggttctccat

SEQ ID NO: 105757 - DNA, 25 bp, Probe Sequence
atctatcttactgtggttctccatg

SEQ ID NO: 105758 - DNA, 25 bp, Probe Sequence
ctcggttctcttctctcctctgaat

SEQ ID NO: 105759 - DNA, 25 bp, Probe Sequence
gaaatctatcttactgtggttctcc

SEQ ID NO: 105760 - DNA, 25 bp, Probe Sequence
tcggttctcttctctcctctgaatg

SEQ ID NO: 105761 - DNA, 25 bp, Probe Sequence
gcatgagaaatctatcttactgtgg

SEQ ID NO: 105762 - DNA, 25 bp, Probe Sequence
tgagaaatctatcttactgtggttc

SEQ ID NO: 105763 - DNA, 25 bp, Probe Sequence
ctcttctctcctctgaatggctgaa

SEQ ID NO: 105764 - DNA, 25 bp, Probe Sequence
ttctcttctctcctctgaatggctg

SEQ ID NO: 105765 - DNA, 25 bp, Probe Sequence
gttctcttctctcctctgaatggct

SEQ ID NO: 105766 - DNA, 25 bp, Probe Sequence
gatgatccaaagaagacagagaggt

SEQ ID NO: 105767 - DNA, 25 bp, Probe Sequence
aaataggagaaggtggaaatgggtg

SEQ ID NO: 105768 - DNA, 25 bp, Probe Sequence
ccttccctagagctagtatcctaaa

SEQ ID NO: 105769 - DNA, 25 bp, Probe Sequence
atccttccctagagctagtatccta

SEQ ID NO: 105770 - DNA, 25 bp, Probe Sequence
aaatccttccctagagctagtatcc

SEQ ID NO: 105771 - DNA, 25 bp, Probe Sequence
tccttccctagagctagtatcctaa

SEQ ID NO: 105772 - DNA, 25 bp, Probe Sequence
ttctctcctctgaatggctgaagac

SEQ ID NO: 105773 - DNA, 25 bp, Probe Sequence
aatccttccctagagctagtatcct

SEQ ID NO: 105774 - DNA, 25 bp, Probe Sequence
ttctcggttctcttctctcctctga

SEQ ID NO: 105775 - DNA, 25 bp, Probe Sequence
cttccctagagctagtatcctaaag

SEQ ID NO: 105776 - DNA, 25 bp, Probe Sequence
atgagaaatctatcttactgtggtt

SEQ ID NO: 105777 - DNA, 25 bp, Probe Sequence
aaatctatcttactgtggttctcca

SEQ ID NO: 105778 - DNA, 25 bp, Probe Sequence
catgagaaatctatcttactgtggt

SEQ ID NO: 105779 - DNA, 25 bp, Probe Sequence
tctcggttctcttctctcctctgaa

SEQ ID NO: 105780 - DNA, 25 bp, Probe Sequence
aatgttcatgatgctgactcttgtg

SEQ ID NO: 105781 - DNA, 25 bp, Probe Sequence
atgttcatgatgctgactcttgtga

SEQ ID NO: 105782 - DNA, 25 bp, Probe Sequence
taaatgttcatgatgctgactcttg

SEQ ID NO: 105783 - DNA, 25 bp, Probe Sequence
aaatgttcatgatgctgactcttgt

SEQ ID NO: 105784 - DNA, 25 bp, Probe Sequence
ataaatgttcatgatgctgactctt

SEQ ID NO: 105785 - DNA, 25 bp, Probe Sequence
aataaatgttcatgatgctgactct

SEQ ID NO: 105786 - DNA, 25 bp, Probe Sequence
taataaatgttcatgatgctgactc

SEQ ID NO: 105787 - DNA, 25 bp, Probe Sequence
cataataaatgttcatgatgctgac

SEQ ID NO: 105788 - DNA, 25 bp, Probe Sequence
ataataaatgttcatgatgctgact

SEQ ID NO: 105789 - DNA, 25 bp, Probe Sequence
gaagtgccctttctctcttaggtac

SEQ ID NO: 105790 - DNA, 25 bp, Probe Sequence
ggaagtgccctttctctcttaggta

SEQ ID NO: 105791 - DNA, 25 bp, Probe Sequence
catgtaggcccaagtactcagtctc

SEQ ID NO: 105792 - DNA, 25 bp, Probe Sequence
ctgggaagtgccctttctctcttag

SEQ ID NO: 105793 - DNA, 25 bp, Probe Sequence
atgtaggcccaagtactcagtctca

SEQ ID NO: 105794 - DNA, 25 bp, Probe Sequence
tctgggaagtgccctttctctctta

SEQ ID NO: 105795 - DNA, 25 bp, Probe Sequence
tgtaggcccaagtactcagtctcag

SEQ ID NO: 105796 - DNA, 25 bp, Probe Sequence
aagtgccctttctctcttaggtacc

SEQ ID NO: 105797 - DNA, 25 bp, Probe Sequence
ttctctcttaggtaccacctcatgg

SEQ ID NO: 105798 - DNA, 25 bp, Probe Sequence
ctttctctcttaggtaccacctcat

SEQ ID NO: 105799 - DNA, 25 bp, Probe Sequence
tttctctcttaggtaccacctcatg

SEQ ID NO: 105800 - DNA, 25 bp, Probe Sequence
ctctcttaggtaccacctcatggag

SEQ ID NO: 105801 - DNA, 25 bp, Probe Sequence
gtgccctttctctcttaggtaccac

SEQ ID NO: 105802 - DNA, 25 bp, Probe Sequence
agtgccctttctctcttaggtacca

SEQ ID NO: 105803 - DNA, 25 bp, Probe Sequence
ctcttaggtaccacctcatggagac

SEQ ID NO: 105804 - DNA, 25 bp, Probe Sequence
tctcttaggtaccacctcatggaga

SEQ ID NO: 105805 - DNA, 25 bp, Probe Sequence
tctctcttaggtaccacctcatgga

SEQ ID NO: 105806 - DNA, 25 bp, Probe Sequence
cctttctctcttaggtaccacctca

SEQ ID NO: 105807 - DNA, 25 bp, Probe Sequence
ccctttctctcttaggtaccacctc

SEQ ID NO: 105808 - DNA, 25 bp, Probe Sequence
tcttaggtaccacctcatggagacc

SEQ ID NO: 105809 - DNA, 25 bp, Probe Sequence
gccctttctctcttaggtaccacct

SEQ ID NO: 105810 - DNA, 25 bp, Probe Sequence
aacactcctctggatgtgattaaga

SEQ ID NO: 105811 - DNA, 25 bp, Probe Sequence
acactcctctggatgtgattaagac

SEQ ID NO: 105812 - DNA, 25 bp, Probe Sequence
cactcctctggatgtgattaagacc

SEQ ID NO: 105813 - DNA, 25 bp, Probe Sequence
aaacactcctctggatgtgattaag

SEQ ID NO: 105814 - DNA, 25 bp, Probe Sequence
gaaacactcctctggatgtgattaa

SEQ ID NO: 105815 - DNA, 25 bp, Probe Sequence
atctatgatgaagtggtgaagctgc

SEQ ID NO: 105816 - DNA, 25 bp, Probe Sequence
ctatgatgaagtggtgaagctgctc

SEQ ID NO: 105817 - DNA, 25 bp, Probe Sequence
gagaccatcaaggtgaagttcatcc

SEQ ID NO: 105818 - DNA, 25 bp, Probe Sequence
ggagaccatcaaggtgaagttcatc

SEQ ID NO: 105819 - DNA, 25 bp, Probe Sequence
ggaaacactcctctggatgtgatta

SEQ ID NO: 105820 - DNA, 25 bp, Probe Sequence
catctatgatgaagtggtgaagctg

SEQ ID NO: 105821 - DNA, 25 bp, Probe Sequence
tctatgatgaagtggtgaagctgct

SEQ ID NO: 105822 - DNA, 25 bp, Probe Sequence
aacaaagtgtggaagacggactaag

SEQ ID NO: 105823 - DNA, 25 bp, Probe Sequence
gaccatcaaggtgaagttcatccac

SEQ ID NO: 105824 - DNA, 25 bp, Probe Sequence
caacaaagtgtggaagacggactaa

SEQ ID NO: 105825 - DNA, 25 bp, Probe Sequence
catcaaggtgaagttcatccacgac

SEQ ID NO: 105826 - DNA, 25 bp, Probe Sequence
agaccatcaaggtgaagttcatcca

SEQ ID NO: 105827 - DNA, 25 bp, Probe Sequence
tggagaccatcaaggtgaagttcat

SEQ ID NO: 105828 - DNA, 25 bp, Probe Sequence
tggaagacggactaagcctagagag

SEQ ID NO: 105829 - DNA, 25 bp, Probe Sequence
ctacctttgtctcacgattccagtg

SEQ ID NO: 105830 - DNA, 25 bp, Probe Sequence
tatgatgaagtggtgaagctgctca

SEQ ID NO: 105831 - DNA, 25 bp, Probe Sequence
actcctctggatgtgattaagaccc

SEQ ID NO: 105832 - DNA, 25 bp, Probe Sequence
gtctttggaaacactcctctggatg

SEQ ID NO: 105833 - DNA, 25 bp, Probe Sequence
gtggaagacggactaagcctagaga

SEQ ID NO: 105834 - DNA, 25 bp, Probe Sequence
gagaaggtgcgtgtaaagagatata

SEQ ID NO: 105835 - DNA, 25 bp, Probe Sequence
ctgcaccatccatcattatgtagat

SEQ ID NO: 105836 - DNA, 25 bp, Probe Sequence
attcctcaggtcaacaccatcatta

SEQ ID NO: 105837 - DNA, 25 bp, Probe Sequence
ttcctcaggtcaacaccatcattaa

SEQ ID NO: 105838 - DNA, 25 bp, Probe Sequence
gcctctttgctattctattggagta

SEQ ID NO: 105839 - DNA, 25 bp, Probe Sequence
agaaggtgcgtgtaaagagatatat

SEQ ID NO: 105840 - DNA, 25 bp, Probe Sequence
caacaccatcattaaatgcgagttt

SEQ ID NO: 105841 - DNA, 25 bp, Probe Sequence
caggtaaatgctcattcccaagtag

SEQ ID NO: 105842 - DNA, 25 bp, Probe Sequence
gaaggtgcgtgtaaagagatatatt

SEQ ID NO: 105843 - DNA, 25 bp, Probe Sequence
aacctgcaccatccatcattatgta

SEQ ID NO: 105844 - DNA, 25 bp, Probe Sequence
ggagaaggtgcgtgtaaagagatat

SEQ ID NO: 105845 - DNA, 25 bp, Probe Sequence
tcaacaccatcattaaatgcgagtt

SEQ ID NO: 105846 - DNA, 25 bp, Probe Sequence
cctctttgctattctattggagtag

SEQ ID NO: 105847 - DNA, 25 bp, Probe Sequence
cctgcaccatccatcattatgtaga

SEQ ID NO: 105848 - DNA, 25 bp, Probe Sequence
aaggtgcgtgtaaagagatatattt

SEQ ID NO: 105849 - DNA, 25 bp, Probe Sequence
acctgcaccatccatcattatgtag

SEQ ID NO: 105850 - DNA, 25 bp, Probe Sequence
gattcctcaggtcaacaccatcatt

SEQ ID NO: 105851 - DNA, 25 bp, Probe Sequence
gcaccatccatcattatgtagatga

SEQ ID NO: 105852 - DNA, 25 bp, Probe Sequence
gtcaacaccatcattaaatgcgagt

SEQ ID NO: 105853 - DNA, 25 bp, Probe Sequence
caattccctcatctgtaggatttgg

SEQ ID NO: 105854 - DNA, 25 bp, Probe Sequence
ccaattccctcatctgtaggatttg

SEQ ID NO: 105855 - DNA, 25 bp, Probe Sequence
ctcaggtcaacaccatcattaaatg

SEQ ID NO: 105856 - DNA, 25 bp, Probe Sequence
cattcccaagtagcaaagagaccat

SEQ ID NO: 105857 - DNA, 25 bp, Probe Sequence
cctcaggtcaacaccatcattaaat

SEQ ID NO: 105858 - DNA, 25 bp, Probe Sequence
attacctgaatgaacaagtgaaggc

SEQ ID NO: 105859 - DNA, 25 bp, Probe Sequence
cattacctgaatgaacaagtgaagg

SEQ ID NO: 105860 - DNA, 25 bp, Probe Sequence
gagacacattacctgaatgaacaag

SEQ ID NO: 105861 - DNA, 25 bp, Probe Sequence
cacattacctgaatgaacaagtgaa

SEQ ID NO: 105862 - DNA, 25 bp, Probe Sequence
gacacattacctgaatgaacaagtg

SEQ ID NO: 105863 - DNA, 25 bp, Probe Sequence
agacacattacctgaatgaacaagt

SEQ ID NO: 105864 - DNA, 25 bp, Probe Sequence
tgagacacattacctgaatgaacaa

SEQ ID NO: 105865 - DNA, 25 bp, Probe Sequence
ttgagacacattacctgaatgaaca

SEQ ID NO: 105866 - DNA, 25 bp, Probe Sequence
acattacctgaatgaacaagtgaag

SEQ ID NO: 105867 - DNA, 25 bp, Probe Sequence
acacattacctgaatgaacaagtga

SEQ ID NO: 105868 - DNA, 25 bp, Probe Sequence
attgagacacattacctgaatgaac

SEQ ID NO: 105869 - DNA, 25 bp, Probe Sequence
cattgagacacattacctgaatgaa

SEQ ID NO: 105870 - DNA, 25 bp, Probe Sequence
aattgatgaagctgtagaaccaacg

SEQ ID NO: 105871 - DNA, 25 bp, Probe Sequence
ttctataagttgttccaagacaccc

SEQ ID NO: 105872 - DNA, 25 bp, Probe Sequence
cttactactttgacagcgatgatgt

SEQ ID NO: 105873 - DNA, 25 bp, Probe Sequence
tttctataagttgttccaagacacc

SEQ ID NO: 105874 - DNA, 25 bp, Probe Sequence
ggaacatgctgagaaattgatgaag

SEQ ID NO: 105875 - DNA, 25 bp, Probe Sequence
ttactactttgacagcgatgatgtg

SEQ ID NO: 105876 - DNA, 25 bp, Probe Sequence
ctataagttgttccaagacacccac

SEQ ID NO: 105877 - DNA, 25 bp, Probe Sequence
tctataagttgttccaagacaccca

SEQ ID NO: 105878 - DNA, 25 bp, Probe Sequence
attgatgaagctgtagaaccaacga

SEQ ID NO: 105879 - DNA, 25 bp, Probe Sequence
tataagttgttccaagacacccact

SEQ ID NO: 105880 - DNA, 25 bp, Probe Sequence
cagaatacctctttgacaagcacac

SEQ ID NO: 105881 - DNA, 25 bp, Probe Sequence
gagaaattgatgaagctgtagaacc

SEQ ID NO: 105882 - DNA, 25 bp, Probe Sequence
ctgctaacaaggacaactggaataa

SEQ ID NO: 105883 - DNA, 25 bp, Probe Sequence
taacatggcattcatcttcctcaat

SEQ ID NO: 105884 - DNA, 25 bp, Probe Sequence
ataacatggcattcatcttcctcaa

SEQ ID NO: 105885 - DNA, 25 bp, Probe Sequence
gataacatggcattcatcttcctca

SEQ ID NO: 105886 - DNA, 25 bp, Probe Sequence
aacatggcattcatcttcctcaatc

SEQ ID NO: 105887 - DNA, 25 bp, Probe Sequence
gctaacaaggacaactggaataaat

SEQ ID NO: 105888 - DNA, 25 bp, Probe Sequence
tgctaacaaggacaactggaataaa

SEQ ID NO: 105889 - DNA, 25 bp, Probe Sequence
gctgctaacaaggacaactggaata

SEQ ID NO: 105890 - DNA, 25 bp, Probe Sequence
gttggtagagctgaggaagagttag

SEQ ID NO: 105891 - DNA, 25 bp, Probe Sequence
ggataacatggcattcatcttcctc

SEQ ID NO: 105892 - DNA, 25 bp, Probe Sequence
agttggtagagctgaggaagagtta

SEQ ID NO: 105893 - DNA, 25 bp, Probe Sequence
tagttggtagagctgaggaagagtt

SEQ ID NO: 105894 - DNA, 25 bp, Probe Sequence
agtagttggtagagctgaggaagag

SEQ ID NO: 105895 - DNA, 25 bp, Probe Sequence
tttcaggatacagacattccctttg

SEQ ID NO: 105896 - DNA, 25 bp, Probe Sequence
tacctgtagacaaagccttctatga

SEQ ID NO: 105897 - DNA, 25 bp, Probe Sequence
tactacctgtagacaaagccttcta

SEQ ID NO: 105898 - DNA, 25 bp, Probe Sequence
ctacctgtagacaaagccttctatg

SEQ ID NO: 105899 - DNA, 25 bp, Probe Sequence
ctaacaaggacaactggaataaatt

SEQ ID NO: 105900 - DNA, 25 bp, Probe Sequence
ctgggataacatggcattcatcttc

SEQ ID NO: 105901 - DNA, 25 bp, Probe Sequence
ttggtagagctgaggaagagttagg

SEQ ID NO: 105902 - DNA, 25 bp, Probe Sequence
gtagttggtagagctgaggaagagt

SEQ ID NO: 105903 - DNA, 25 bp, Probe Sequence
actacctgtagacaaagccttctat

SEQ ID NO: 105904 - DNA, 25 bp, Probe Sequence
tttcctttcagtagttggtagagct

SEQ ID NO: 105905 - DNA, 25 bp, Probe Sequence
ttcaggatacagacattccctttga

SEQ ID NO: 105906 - DNA, 25 bp, Probe Sequence
agacaaaactctctgacccagcatc

SEQ ID NO: 105907 - DNA, 25 bp, Probe Sequence
cagacaaaactctctgacccagcat

SEQ ID NO: 105908 - DNA, 25 bp, Probe Sequence
agaaatctatctacaaactaccctg

SEQ ID NO: 105909 - DNA, 25 bp, Probe Sequence
tgagaaatctatctacaaactaccc

SEQ ID NO: 105910 - DNA, 25 bp, Probe Sequence
gagaaatctatctacaaactaccct

SEQ ID NO: 105911 - DNA, 25 bp, Probe Sequence
atttggtccaagtcgaattgaaagg

SEQ ID NO: 105912 - DNA, 25 bp, Probe Sequence
ttctctagggaggaggcaaatgtag

SEQ ID NO: 105913 - DNA, 25 bp, Probe Sequence
cttctctagggaggaggcaaatgta

SEQ ID NO: 105914 - DNA, 25 bp, Probe Sequence
gaggaggcaaatgtaggtcatgttt

SEQ ID NO: 105915 - DNA, 25 bp, Probe Sequence
atgagaaatctatctacaaactacc

SEQ ID NO: 105916 - DNA, 25 bp, Probe Sequence
tttggtccaagtcgaattgaaagga

SEQ ID NO: 105917 - DNA, 25 bp, Probe Sequence
gtcgaattgaaaggactgtcgtttc

SEQ ID NO: 105918 - DNA, 25 bp, Probe Sequence
tagggaggaggcaaatgtaggtcat

SEQ ID NO: 105919 - DNA, 25 bp, Probe Sequence
aggaggcaaatgtaggtcatgtttt

SEQ ID NO: 105920 - DNA, 25 bp, Probe Sequence
tctctagggaggaggcaaatgtagg

SEQ ID NO: 105921 - DNA, 25 bp, Probe Sequence
ggaggaggcaaatgtaggtcatgtt

SEQ ID NO: 105922 - DNA, 25 bp, Probe Sequence
tctagggaggaggcaaatgtaggtc

SEQ ID NO: 105923 - DNA, 25 bp, Probe Sequence
gaattgaaaggactgtcgtttcctc

SEQ ID NO: 105924 - DNA, 25 bp, Probe Sequence
tcgaattgaaaggactgtcgtttcc

SEQ ID NO: 105925 - DNA, 25 bp, Probe Sequence
ctagggaggaggcaaatgtaggtca

SEQ ID NO: 105926 - DNA, 25 bp, Probe Sequence
ctctagggaggaggcaaatgtaggt

SEQ ID NO: 105927 - DNA, 25 bp, Probe Sequence
agtcgaattgaaaggactgtcgttt

SEQ ID NO: 105928 - DNA, 25 bp, Probe Sequence
aagtcgaattgaaaggactgtcgtt

SEQ ID NO: 105929 - DNA, 25 bp, Probe Sequence
tccaagtcgaattgaaaggactgtc

SEQ ID NO: 105930 - DNA, 25 bp, Probe Sequence
gatcacaccttctctagggaggagg

SEQ ID NO: 105931 - DNA, 25 bp, Probe Sequence
aattgaaaggactgtcgtttcctcc

SEQ ID NO: 105932 - DNA, 25 bp, Probe Sequence
aaactgaagtctgaaatttggtcaa

SEQ ID NO: 105933 - DNA, 25 bp, Probe Sequence
aaccattaaaactgaagtctgaaat

SEQ ID NO: 105934 - DNA, 25 bp, Probe Sequence
accattaaaactgaagtctgaaatt

SEQ ID NO: 105935 - DNA, 25 bp, Probe Sequence
aaaactgaagtctgaaatttggtca

SEQ ID NO: 105936 - DNA, 25 bp, Probe Sequence
taaccattaaaactgaagtctgaaa

SEQ ID NO: 105937 - DNA, 25 bp, Probe Sequence
taaaactgaagtctgaaatttggtc

SEQ ID NO: 105938 - DNA, 25 bp, Probe Sequence
ttaaaactgaagtctgaaatttggt

SEQ ID NO: 105939 - DNA, 25 bp, Probe Sequence
attaaaactgaagtctgaaatttgg

SEQ ID NO: 105940 - DNA, 25 bp, Probe Sequence
ccattaaaactgaagtctgaaattt

SEQ ID NO: 105941 - DNA, 25 bp, Probe Sequence
cattaaaactgaagtctgaaatttg

SEQ ID NO: 105942 - DNA, 25 bp, Probe Sequence
taccactaagacttctgactccaat

SEQ ID NO: 105943 - DNA, 25 bp, Probe Sequence
ttaccactaagacttctgactccaa

SEQ ID NO: 105944 - DNA, 25 bp, Probe Sequence
accactaagacttctgactccaatt

SEQ ID NO: 105945 - DNA, 25 bp, Probe Sequence
atttaccactaagacttctgactcc

SEQ ID NO: 105946 - DNA, 25 bp, Probe Sequence
ccactaagacttctgactccaattt

SEQ ID NO: 105947 - DNA, 25 bp, Probe Sequence
tttaccactaagacttctgactcca

SEQ ID NO: 105948 - DNA, 25 bp, Probe Sequence
cactaagacttctgactccaattta

SEQ ID NO: 105949 - DNA, 25 bp, Probe Sequence
agacttctgactccaatttaaacca

SEQ ID NO: 105950 - DNA, 25 bp, Probe Sequence
tatttaccactaagacttctgactc

SEQ ID NO: 105951 - DNA, 25 bp, Probe Sequence
aagacttctgactccaatttaaacc

SEQ ID NO: 105952 - DNA, 25 bp, Probe Sequence
actaagacttctgactccaatttaa

SEQ ID NO: 105953 - DNA, 25 bp, Probe Sequence
gacttctgactccaatttaaaccag

SEQ ID NO: 105954 - DNA, 25 bp, Probe Sequence
atatttaccactaagacttctgact

SEQ ID NO: 105955 - DNA, 25 bp, Probe Sequence
acttctgactccaatttaaaccagg

SEQ ID NO: 105956 - DNA, 25 bp, Probe Sequence
ctgactccaatttaaaccaggaaag

SEQ ID NO: 105957 - DNA, 25 bp, Probe Sequence
tctgactccaatttaaaccaggaaa

SEQ ID NO: 105958 - DNA, 25 bp, Probe Sequence
ttctgactccaatttaaaccaggaa

SEQ ID NO: 105959 - DNA, 25 bp, Probe Sequence
cttctgactccaatttaaaccagga

SEQ ID NO: 105960 - DNA, 25 bp, Probe Sequence
ctccaatttaaaccaggaaagggat

SEQ ID NO: 105961 - DNA, 25 bp, Probe Sequence
tccaatttaaaccaggaaagggatg

SEQ ID NO: 105962 - DNA, 25 bp, Probe Sequence
tgactccaatttaaaccaggaaagg

SEQ ID NO: 105963 - DNA, 25 bp, Probe Sequence
ctgttctttcctagccacctttctg

SEQ ID NO: 105964 - DNA, 25 bp, Probe Sequence
gactccaatttaaaccaggaaaggg

SEQ ID NO: 105965 - DNA, 25 bp, Probe Sequence
actccaatttaaaccaggaaaggga

SEQ ID NO: 105966 - DNA, 25 bp, Probe Sequence
cagtgataatgccatagagtccctg

SEQ ID NO: 105967 - DNA, 25 bp, Probe Sequence
ccagtgataatgccatagagtccct

SEQ ID NO: 105968 - DNA, 25 bp, Probe Sequence
gtgataatgccatagagtccctgga

SEQ ID NO: 105969 - DNA, 25 bp, Probe Sequence
agtgataatgccatagagtccctgg

SEQ ID NO: 105970 - DNA, 25 bp, Probe Sequence
ctgaataaagaatggagaggccctc

SEQ ID NO: 105971 - DNA, 25 bp, Probe Sequence
gccagtgataatgccatagagtccc

SEQ ID NO: 105972 - DNA, 25 bp, Probe Sequence
actgaataaagaatggagaggccct

SEQ ID NO: 105973 - DNA, 25 bp, Probe Sequence
tgataatgccatagagtccctggac

SEQ ID NO: 105974 - DNA, 25 bp, Probe Sequence
gataatgccatagagtccctggacg

SEQ ID NO: 105975 - DNA, 25 bp, Probe Sequence
tgaataaagaatggagaggccctct

SEQ ID NO: 105976 - DNA, 25 bp, Probe Sequence
aggccagtgataatgccatagagtc

SEQ ID NO: 105977 - DNA, 25 bp, Probe Sequence
caggccagtgataatgccatagagt

SEQ ID NO: 105978 - DNA, 25 bp, Probe Sequence
ctggttttatcaccgttggctccta

SEQ ID NO: 105979 - DNA, 25 bp, Probe Sequence
tggttttatcaccgttggctcctag

SEQ ID NO: 105980 - DNA, 25 bp, Probe Sequence
ggccagtgataatgccatagagtcc

SEQ ID NO: 105981 - DNA, 25 bp, Probe Sequence
tagtttgattctggtttccctccta

SEQ ID NO: 105982 - DNA, 25 bp, Probe Sequence
agtttgattctggtttccctcctac

SEQ ID NO: 105983 - DNA, 25 bp, Probe Sequence
gtagtttgattctggtttccctcct

SEQ ID NO: 105984 - DNA, 25 bp, Probe Sequence
agtagtttgattctggtttccctcc

SEQ ID NO: 105985 - DNA, 25 bp, Probe Sequence
gtttgattctggtttccctcctaca

SEQ ID NO: 105986 - DNA, 25 bp, Probe Sequence
ccttctctacaggaatctctggaaa

SEQ ID NO: 105987 - DNA, 25 bp, Probe Sequence
tttgattctggtttccctcctacag

SEQ ID NO: 105988 - DNA, 25 bp, Probe Sequence
cccttctctacaggaatctctggaa

SEQ ID NO: 105989 - DNA, 25 bp, Probe Sequence
ttgattctggtttccctcctacagt

SEQ ID NO: 105990 - DNA, 25 bp, Probe Sequence
ttctctacaggaatctctggaaaac

SEQ ID NO: 105991 - DNA, 25 bp, Probe Sequence
cttctctacaggaatctctggaaaa

SEQ ID NO: 105992 - DNA, 25 bp, Probe Sequence
tctctacaggaatctctggaaaact

SEQ ID NO: 105993 - DNA, 25 bp, Probe Sequence
ctcccttctctacaggaatctctgg

SEQ ID NO: 105994 - DNA, 25 bp, Probe Sequence
ctctacaggaatctctggaaaacta

SEQ ID NO: 105995 - DNA, 25 bp, Probe Sequence
tctacaggaatctctggaaaactat

SEQ ID NO: 105996 - DNA, 25 bp, Probe Sequence
ctacaggaatctctggaaaactatc

SEQ ID NO: 105997 - DNA, 25 bp, Probe Sequence
tcccttctctacaggaatctctgga

SEQ ID NO: 105998 - DNA, 25 bp, Probe Sequence
gattctggtttccctcctacagtgt

SEQ ID NO: 105999 - DNA, 25 bp, Probe Sequence
tgattctggtttccctcctacagtg

SEQ ID NO: 106000 - DNA, 25 bp, Probe Sequence
gctcccttctctacaggaatctctg

SEQ ID NO: 106001 - DNA, 25 bp, Probe Sequence
ctgctcccttctctacaggaatctc

SEQ ID NO: 106002 - DNA, 25 bp, Probe Sequence
attctggtttccctcctacagtgtg

SEQ ID NO: 106003 - DNA, 25 bp, Probe Sequence
tgctcccttctctacaggaatctct

SEQ ID NO: 106004 - DNA, 25 bp, Probe Sequence
ttctggtttccctcctacagtgtgt

SEQ ID NO: 106005 - DNA, 25 bp, Probe Sequence
cctgctcccttctctacaggaatct

SEQ ID NO: 106006 - DNA, 25 bp, Probe Sequence
gaatcttatcacagtgaaatggagc

SEQ ID NO: 106007 - DNA, 25 bp, Probe Sequence
aatcttatcacagtgaaatggagca

SEQ ID NO: 106008 - DNA, 25 bp, Probe Sequence
atcttatcacagtgaaatggagcag

SEQ ID NO: 106009 - DNA, 25 bp, Probe Sequence
acagaatcttatcacagtgaaatgg

SEQ ID NO: 106010 - DNA, 25 bp, Probe Sequence
cagaatcttatcacagtgaaatgga

SEQ ID NO: 106011 - DNA, 25 bp, Probe Sequence
agaatcttatcacagtgaaatggag

SEQ ID NO: 106012 - DNA, 25 bp, Probe Sequence
tccacagaatcttatcacagtgaaa

SEQ ID NO: 106013 - DNA, 25 bp, Probe Sequence
ccacagaatcttatcacagtgaaat

SEQ ID NO: 106014 - DNA, 25 bp, Probe Sequence
cacagaatcttatcacagtgaaatg

SEQ ID NO: 106015 - DNA, 25 bp, Probe Sequence
tcttatcacagtgaaatggagcagg

SEQ ID NO: 106016 - DNA, 25 bp, Probe Sequence
cttatcacagtgaaatggagcaggc

SEQ ID NO: 106017 - DNA, 25 bp, Probe Sequence
cagacttggtcaggtactttcaggg

SEQ ID NO: 106018 - DNA, 25 bp, Probe Sequence
ccagacttggtcaggtactttcagg

SEQ ID NO: 106019 - DNA, 25 bp, Probe Sequence
gagccagacttggtcaggtactttc

SEQ ID NO: 106020 - DNA, 25 bp, Probe Sequence
gccagacttggtcaggtactttcag

SEQ ID NO: 106021 - DNA, 25 bp, Probe Sequence
agagccagacttggtcaggtacttt

SEQ ID NO: 106022 - DNA, 25 bp, Probe Sequence
ttatcacagtgaaatggagcaggcc

SEQ ID NO: 106023 - DNA, 25 bp, Probe Sequence
ttggaagtcttaggtggtatgtaac

SEQ ID NO: 106024 - DNA, 25 bp, Probe Sequence
cttggaagtcttaggtggtatgtaa

SEQ ID NO: 106025 - DNA, 25 bp, Probe Sequence
ggaagtcttaggtggtatgtaacaa

SEQ ID NO: 106026 - DNA, 25 bp, Probe Sequence
tggaagtcttaggtggtatgtaaca

SEQ ID NO: 106027 - DNA, 25 bp, Probe Sequence
aattgtgtatctaagacctccaagc

SEQ ID NO: 106028 - DNA, 25 bp, Probe Sequence
gcttggaagtcttaggtggtatgta

SEQ ID NO: 106029 - DNA, 25 bp, Probe Sequence
cagataattgtattgctgtccaaca

SEQ ID NO: 106030 - DNA, 25 bp, Probe Sequence
actgagacagataattgtattgctg

SEQ ID NO: 106031 - DNA, 25 bp, Probe Sequence
aactgagacagataattgtattgct

SEQ ID NO: 106032 - DNA, 25 bp, Probe Sequence
gaactgagacagataattgtattgc

SEQ ID NO: 106033 - DNA, 25 bp, Probe Sequence
attgtgtatctaagacctccaagct

SEQ ID NO: 106034 - DNA, 25 bp, Probe Sequence
atttctaattgacctgagggacatt

SEQ ID NO: 106035 - DNA, 25 bp, Probe Sequence
tttctaattgacctgagggacattc

SEQ ID NO: 106036 - DNA, 25 bp, Probe Sequence
catttctaattgacctgagggacat

SEQ ID NO: 106037 - DNA, 25 bp, Probe Sequence
taatttcttgtatcttggctgtctg

SEQ ID NO: 106038 - DNA, 25 bp, Probe Sequence
tctaatttcttgtatcttggctgtc

SEQ ID NO: 106039 - DNA, 25 bp, Probe Sequence
ttaattccaaggtgttgtttgcttt

SEQ ID NO: 106040 - DNA, 25 bp, Probe Sequence
tttaattccaaggtgttgtttgctt

SEQ ID NO: 106041 - DNA, 25 bp, Probe Sequence
ctaatttcttgtatcttggctgtct

SEQ ID NO: 106042 - DNA, 25 bp, Probe Sequence
aatttcttgtatcttggctgtctgg

SEQ ID NO: 106043 - DNA, 25 bp, Probe Sequence
tccgtttgaaatgtactgaagttac

SEQ ID NO: 106044 - DNA, 25 bp, Probe Sequence
gaagtcttaggtggtatgtaacaaa

SEQ ID NO: 106045 - DNA, 25 bp, Probe Sequence
ttctaatttcttgtatcttggctgt

SEQ ID NO: 106046 - DNA, 25 bp, Probe Sequence
attccgtttgaaatgtactgaagtt

SEQ ID NO: 106047 - DNA, 25 bp, Probe Sequence
aacttcttactgctctcacaattct

SEQ ID NO: 106048 - DNA, 25 bp, Probe Sequence
acttcttactgctctcacaattcta

SEQ ID NO: 106049 - DNA, 25 bp, Probe Sequence
tactgctctcacaattctaaggaag

SEQ ID NO: 106050 - DNA, 25 bp, Probe Sequence
ttactgctctcacaattctaaggaa

SEQ ID NO: 106051 - DNA, 25 bp, Probe Sequence
taacttcttactgctctcacaattc

SEQ ID NO: 106052 - DNA, 25 bp, Probe Sequence
catcttaggaactgctgaagtaact

SEQ ID NO: 106053 - DNA, 25 bp, Probe Sequence
cttcttactgctctcacaattctaa

SEQ ID NO: 106054 - DNA, 25 bp, Probe Sequence
cttactgctctcacaattctaagga

SEQ ID NO: 106055 - DNA, 25 bp, Probe Sequence
tcttactgctctcacaattctaagg

SEQ ID NO: 106056 - DNA, 25 bp, Probe Sequence
atcttaggaactgctgaagtaactt

SEQ ID NO: 106057 - DNA, 25 bp, Probe Sequence
cttctggatgctgttaagatgtacc

SEQ ID NO: 106058 - DNA, 25 bp, Probe Sequence
ccttctggatgctgttaagatgtac

SEQ ID NO: 106059 - DNA, 25 bp, Probe Sequence
ttcttactgctctcacaattctaag

SEQ ID NO: 106060 - DNA, 25 bp, Probe Sequence
gtaacttcttactgctctcacaatt

SEQ ID NO: 106061 - DNA, 25 bp, Probe Sequence
gccttctggatgctgttaagatgta

SEQ ID NO: 106062 - DNA, 25 bp, Probe Sequence
ctaagctctgtgtctagtgtagaac

SEQ ID NO: 106063 - DNA, 25 bp, Probe Sequence
tctaagctctgtgtctagtgtagaa

SEQ ID NO: 106064 - DNA, 25 bp, Probe Sequence
ttccctctttatcccaagcctttat

SEQ ID NO: 106065 - DNA, 25 bp, Probe Sequence
ctctaagctctgtgtctagtgtaga

SEQ ID NO: 106066 - DNA, 25 bp, Probe Sequence
taagctctgtgtctagtgtagaaca

SEQ ID NO: 106067 - DNA, 25 bp, Probe Sequence
tttccctctttatcccaagccttta

SEQ ID NO: 106068 - DNA, 25 bp, Probe Sequence
aagctctgtgtctagtgtagaacat

SEQ ID NO: 106069 - DNA, 25 bp, Probe Sequence
tccctctttatcccaagcctttatg

SEQ ID NO: 106070 - DNA, 25 bp, Probe Sequence
agctctgtgtctagtgtagaacatg

SEQ ID NO: 106071 - DNA, 25 bp, Probe Sequence
ttctgagtcaatctgaggctaagga

SEQ ID NO: 106072 - DNA, 25 bp, Probe Sequence
gtatttctgagtcaatctgaggcta

SEQ ID NO: 106073 - DNA, 25 bp, Probe Sequence
atttctgagtcaatctgaggctaag

SEQ ID NO: 106074 - DNA, 25 bp, Probe Sequence
tatttctgagtcaatctgaggctaa

SEQ ID NO: 106075 - DNA, 25 bp, Probe Sequence
atttgggagtctatgcggttaatca

SEQ ID NO: 106076 - DNA, 25 bp, Probe Sequence
ggctctgtatcaggcactttattaa

SEQ ID NO: 106077 - DNA, 25 bp, Probe Sequence
gctctgtatcaggcactttattaaa

SEQ ID NO: 106078 - DNA, 25 bp, Probe Sequence
tgagtcaatctgaggctaaggacat

SEQ ID NO: 106079 - DNA, 25 bp, Probe Sequence
gagtcaatctgaggctaaggacatg

SEQ ID NO: 106080 - DNA, 25 bp, Probe Sequence
tttctgagtcaatctgaggctaagg

SEQ ID NO: 106081 - DNA, 25 bp, Probe Sequence
tggctctgtatcaggcactttatta

SEQ ID NO: 106082 - DNA, 25 bp, Probe Sequence
ggtatttctgagtcaatctgaggct

SEQ ID NO: 106083 - DNA, 25 bp, Probe Sequence
tttgggagtctatgcggttaatcag

SEQ ID NO: 106084 - DNA, 25 bp, Probe Sequence
ggatttgggagtctatgcggttaat

SEQ ID NO: 106085 - DNA, 25 bp, Probe Sequence
tctgagtcaatctgaggctaaggac

SEQ ID NO: 106086 - DNA, 25 bp, Probe Sequence
ctgagtcaatctgaggctaaggaca

SEQ ID NO: 106087 - DNA, 25 bp, Probe Sequence
gatttgggagtctatgcggttaatc

SEQ ID NO: 106088 - DNA, 25 bp, Probe Sequence
tacaggaataaacacacctacgctc

SEQ ID NO: 106089 - DNA, 25 bp, Probe Sequence
gggtatttctgagtcaatctgaggc

SEQ ID NO: 106090 - DNA, 25 bp, Probe Sequence
ctggctctgtatcaggcactttatt

SEQ ID NO: 106091 - DNA, 25 bp, Probe Sequence
tctgtatcaggcactttattaaagc

SEQ ID NO: 106092 - DNA, 25 bp, Probe Sequence
gtatcaggcactttattaaagctgg

SEQ ID NO: 106093 - DNA, 25 bp, Probe Sequence
cagacttggttttgtaatgatttgt

SEQ ID NO: 106094 - DNA, 25 bp, Probe Sequence
gtacaggaataaacacacctacgct

SEQ ID NO: 106095 - DNA, 25 bp, Probe Sequence
gtgtgcctgctgaataacttctatc

SEQ ID NO: 106096 - DNA, 25 bp, Probe Sequence
tgtgtgcctgctgaataacttctat

SEQ ID NO: 106097 - DNA, 25 bp, Probe Sequence
ttgtgtgcctgctgaataacttcta

SEQ ID NO: 106098 - DNA, 25 bp, Probe Sequence
tgtgcctgctgaataacttctatcc

SEQ ID NO: 106099 - DNA, 25 bp, Probe Sequence
ggacagatttcactctcactatcag

SEQ ID NO: 106100 - DNA, 25 bp, Probe Sequence
cagatttcactctcactatcagcag

SEQ ID NO: 106101 - DNA, 25 bp, Probe Sequence
gacagatttcactctcactatcagc

SEQ ID NO: 106102 - DNA, 25 bp, Probe Sequence
aaagcagactacgagaaacacaaag

SEQ ID NO: 106103 - DNA, 25 bp, Probe Sequence
tgaataacttctatcccagagaggc

SEQ ID NO: 106104 - DNA, 25 bp, Probe Sequence
acagatttcactctcactatcagca

SEQ ID NO: 106105 - DNA, 25 bp, Probe Sequence
gggacagatttcactctcactatca

SEQ ID NO: 106106 - DNA, 25 bp, Probe Sequence
tgggacagatttcactctcactatc

SEQ ID NO: 106107 - DNA, 25 bp, Probe Sequence
caaagcagactacgagaaacacaaa

SEQ ID NO: 106108 - DNA, 25 bp, Probe Sequence
caaagtacagtggaaggtggataac

SEQ ID NO: 106109 - DNA, 25 bp, Probe Sequence
gctgaataacttctatcccagagag

SEQ ID NO: 106110 - DNA, 25 bp, Probe Sequence
ctgaataacttctatcccagagagg

SEQ ID NO: 106111 - DNA, 25 bp, Probe Sequence
ctgctgaataacttctatcccagag

SEQ ID NO: 106112 - DNA, 25 bp, Probe Sequence
tgctgaataacttctatcccagaga

SEQ ID NO: 106113 - DNA, 25 bp, Probe Sequence
ctgggacagatttcactctcactat

SEQ ID NO: 106114 - DNA, 25 bp, Probe Sequence
taggagacagagtcaccatcacttg

SEQ ID NO: 106115 - DNA, 25 bp, Probe Sequence
gtaggagacagagtcaccatcactt

SEQ ID NO: 106116 - DNA, 25 bp, Probe Sequence
cctgctgaataacttctatcccaga

SEQ ID NO: 106117 - DNA, 25 bp, Probe Sequence
agatttcactctcactatcagcagc

SEQ ID NO: 106118 - DNA, 25 bp, Probe Sequence
gttgtgtgcctgctgaataacttct

SEQ ID NO: 106119 - DNA, 25 bp, Probe Sequence
ctgagacaggagaatcacttgaacc

SEQ ID NO: 106120 - DNA, 25 bp, Probe Sequence
gctgagacaggagaatcacttgaac

SEQ ID NO: 106121 - DNA, 25 bp, Probe Sequence
ggctgagacaggagaatcacttgaa

SEQ ID NO: 106122 - DNA, 25 bp, Probe Sequence
gaggctgagacaggagaatcacttg

SEQ ID NO: 106123 - DNA, 25 bp, Probe Sequence
tgagacaggagaatcacttgaaccc

SEQ ID NO: 106124 - DNA, 25 bp, Probe Sequence
aggctgagacaggagaatcacttga

SEQ ID NO: 106125 - DNA, 25 bp, Probe Sequence
gagacaggagaatcacttgaacccg

SEQ ID NO: 106126 - DNA, 25 bp, Probe Sequence
ctgttctgggcaggtccataagaag

SEQ ID NO: 106127 - DNA, 25 bp, Probe Sequence
atcgtcaaaaggaagggattggttt

SEQ ID NO: 106128 - DNA, 25 bp, Probe Sequence
catcgtcaaaaggaagggattggtt

SEQ ID NO: 106129 - DNA, 25 bp, Probe Sequence
aaaggaagggattggtttggcaaga

SEQ ID NO: 106130 - DNA, 25 bp, Probe Sequence
aaaaggaagggattggtttggcaag

SEQ ID NO: 106131 - DNA, 25 bp, Probe Sequence
tcgtcaaaaggaagggattggtttg

SEQ ID NO: 106132 - DNA, 25 bp, Probe Sequence
caaaaggaagggattggtttggcaa

SEQ ID NO: 106133 - DNA, 25 bp, Probe Sequence
cgtcaaaaggaagggattggtttgg

SEQ ID NO: 106134 - DNA, 25 bp, Probe Sequence
gtcaaaaggaagggattggtttggc

SEQ ID NO: 106135 - DNA, 25 bp, Probe Sequence
tcaaaaggaagggattggtttggca

SEQ ID NO: 106136 - DNA, 25 bp, Probe Sequence
ggagagacaaatatagtccatactg

SEQ ID NO: 106137 - DNA, 25 bp, Probe Sequence
aggagagacaaatatagtccatact

SEQ ID NO: 106138 - DNA, 25 bp, Probe Sequence
ggagaaaggaaaaggagagacaaat

SEQ ID NO: 106139 - DNA, 25 bp, Probe Sequence
agagacaaatatagtccatactgag

SEQ ID NO: 106140 - DNA, 25 bp, Probe Sequence
gagagacaaatatagtccatactga

SEQ ID NO: 106141 - DNA, 25 bp, Probe Sequence
aaggagagacaaatatagtccatac

SEQ ID NO: 106142 - DNA, 25 bp, Probe Sequence
gagaaaggaaaaggagagacaaata

SEQ ID NO: 106143 - DNA, 25 bp, Probe Sequence
agaaaggaaaaggagagacaaatat

SEQ ID NO: 106144 - DNA, 25 bp, Probe Sequence
gggagaaaggaaaaggagagacaaa

SEQ ID NO: 106145 - DNA, 25 bp, Probe Sequence
aaagatggggagaaaggaaaaggag

SEQ ID NO: 106146 - DNA, 25 bp, Probe Sequence
aaaggagagacaaatatagtccata

SEQ ID NO: 106147 - DNA, 25 bp, Probe Sequence
caaagatggggagaaaggaaaagga

SEQ ID NO: 106148 - DNA, 25 bp, Probe Sequence
aaggaaaaggagagacaaatatagt

SEQ ID NO: 106149 - DNA, 25 bp, Probe Sequence
ggaaaaggagagacaaatatagtcc

SEQ ID NO: 106150 - DNA, 25 bp, Probe Sequence
aggaaaaggagagacaaatatagtc

SEQ ID NO: 106151 - DNA, 25 bp, Probe Sequence
aagatggggagaaaggaaaaggaga

SEQ ID NO: 106152 - DNA, 25 bp, Probe Sequence
gaaaaggagagacaaatatagtcca

SEQ ID NO: 106153 - DNA, 25 bp, Probe Sequence
gatggggagaaaggaaaaggagaga

SEQ ID NO: 106154 - DNA, 25 bp, Probe Sequence
agatggggagaaaggaaaaggagag

SEQ ID NO: 106155 - DNA, 25 bp, Probe Sequence
acatgtaaattaagcccaaagatgg

SEQ ID NO: 106156 - DNA, 25 bp, Probe Sequence
aaaggaaaaggagagacaaatatag

SEQ ID NO: 106157 - DNA, 25 bp, Probe Sequence
gaaaggaaaaggagagacaaatata

SEQ ID NO: 106158 - DNA, 25 bp, Probe Sequence
aaaaggagagacaaatatagtccat

SEQ ID NO: 106159 - DNA, 25 bp, Probe Sequence
atggggagaaaggaaaaggagagac

SEQ ID NO: 106160 - DNA, 25 bp, Probe Sequence
gagtctaagtattgtatgaagtgcc

SEQ ID NO: 106161 - DNA, 25 bp, Probe Sequence
tgtatagaagcatattcagtggtct

SEQ ID NO: 106162 - DNA, 25 bp, Probe Sequence
agagtctaagtattgtatgaagtgc

SEQ ID NO: 106163 - DNA, 25 bp, Probe Sequence
atgtatagaagcatattcagtggtc

SEQ ID NO: 106164 - DNA, 25 bp, Probe Sequence
cctggttcagtatgtatagaagcat

SEQ ID NO: 106165 - DNA, 25 bp, Probe Sequence
ttgcctggttcagtatgtatagaag

SEQ ID NO: 106166 - DNA, 25 bp, Probe Sequence
gtatagaagcatattcagtggtctt

SEQ ID NO: 106167 - DNA, 25 bp, Probe Sequence
ataaggagatgatgttgaacacact

SEQ ID NO: 106168 - DNA, 25 bp, Probe Sequence
tgataaggagatgatgttgaacaca

SEQ ID NO: 106169 - DNA, 25 bp, Probe Sequence
gataaggagatgatgttgaacacac

SEQ ID NO: 106170 - DNA, 25 bp, Probe Sequence
ctgataaggagatgatgttgaacac

SEQ ID NO: 106171 - DNA, 25 bp, Probe Sequence
ctagataatccagtgtcaggaagac

SEQ ID NO: 106172 - DNA, 25 bp, Probe Sequence
aacatgctagataatccagtgtcag

SEQ ID NO: 106173 - DNA, 25 bp, Probe Sequence
taaggagatgatgttgaacacactg

SEQ ID NO: 106174 - DNA, 25 bp, Probe Sequence
taacatgctagataatccagtgtca

SEQ ID NO: 106175 - DNA, 25 bp, Probe Sequence
actaacatgctagataatccagtgt

SEQ ID NO: 106176 - DNA, 25 bp, Probe Sequence
atgctagataatccagtgtcaggaa

SEQ ID NO: 106177 - DNA, 25 bp, Probe Sequence
ctaacatgctagataatccagtgtc

SEQ ID NO: 106178 - DNA, 25 bp, Probe Sequence
aactaacatgctagataatccagtg

SEQ ID NO: 106179 - DNA, 25 bp, Probe Sequence
agtctaagtattgtatgaagtgccc

SEQ ID NO: 106180 - DNA, 25 bp, Probe Sequence
gtctaagtattgtatgaagtgccca

SEQ ID NO: 106181 - DNA, 25 bp, Probe Sequence
gctagataatccagtgtcaggaaga

SEQ ID NO: 106182 - DNA, 25 bp, Probe Sequence
gcctggttcagtatgtatagaagca

SEQ ID NO: 106183 - DNA, 25 bp, Probe Sequence
tgcctggttcagtatgtatagaagc

SEQ ID NO: 106184 - DNA, 25 bp, Probe Sequence
ctaagaactggaatagacaaggacg

SEQ ID NO: 106185 - DNA, 25 bp, Probe Sequence
aaccaatacatcacatcagcagaat

SEQ ID NO: 106186 - DNA, 25 bp, Probe Sequence
tagcaagagcaattaggcaagataa

SEQ ID NO: 106187 - DNA, 25 bp, Probe Sequence
ctagcaagagcaattaggcaagata

SEQ ID NO: 106188 - DNA, 25 bp, Probe Sequence
caatacatcacatcagcagaatgaa

SEQ ID NO: 106189 - DNA, 25 bp, Probe Sequence
aatacatcacatcagcagaatgaag

SEQ ID NO: 106190 - DNA, 25 bp, Probe Sequence
accaatacatcacatcagcagaatg

SEQ ID NO: 106191 - DNA, 25 bp, Probe Sequence
acatagtattggaagtcctagcaag

SEQ ID NO: 106192 - DNA, 25 bp, Probe Sequence
caacatagtattggaagtcctagca

SEQ ID NO: 106193 - DNA, 25 bp, Probe Sequence
tcaacatagtattggaagtcctagc

SEQ ID NO: 106194 - DNA, 25 bp, Probe Sequence
atacatcacatcagcagaatgaagg

SEQ ID NO: 106195 - DNA, 25 bp, Probe Sequence
catagtattggaagtcctagcaaga

SEQ ID NO: 106196 - DNA, 25 bp, Probe Sequence
atagtattggaagtcctagcaagag

SEQ ID NO: 106197 - DNA, 25 bp, Probe Sequence
aacatagtattggaagtcctagcaa

SEQ ID NO: 106198 - DNA, 25 bp, Probe Sequence
taagaactggaatagacaaggacgg

SEQ ID NO: 106199 - DNA, 25 bp, Probe Sequence
ccaatacatcacatcagcagaatga

SEQ ID NO: 106200 - DNA, 25 bp, Probe Sequence
tagtattggaagtcctagcaagagc

SEQ ID NO: 106201 - DNA, 25 bp, Probe Sequence
tacatcacatcagcagaatgaagga

SEQ ID NO: 106202 - DNA, 25 bp, Probe Sequence
cctctaagaactggaatagacaagg

SEQ ID NO: 106203 - DNA, 25 bp, Probe Sequence
tctaagaactggaatagacaaggac

SEQ ID NO: 106204 - DNA, 25 bp, Probe Sequence
ctctaagaactggaatagacaagga

SEQ ID NO: 106205 - DNA, 25 bp, Probe Sequence
tcctctaagaactggaatagacaag

SEQ ID NO: 106206 - DNA, 25 bp, Probe Sequence
ttggaagtcctagcaagagcaatta

SEQ ID NO: 106207 - DNA, 25 bp, Probe Sequence
caagtacagaaggaacatacctcaa

SEQ ID NO: 106208 - DNA, 25 bp, Probe Sequence
atgaagccttacataagatgattgc

SEQ ID NO: 106209 - DNA, 25 bp, Probe Sequence
aatgaagccttacataagatgattg

SEQ ID NO: 106210 - DNA, 25 bp, Probe Sequence
tgaagccttacataagatgattgca

SEQ ID NO: 106211 - DNA, 25 bp, Probe Sequence
gaaagagaaggggaagaaaatgaag

SEQ ID NO: 106212 - DNA, 25 bp, Probe Sequence
agaaagagaaggggaagaaaatgaa

SEQ ID NO: 106213 - DNA, 25 bp, Probe Sequence
cttgctgactgctaagaaatgacca

SEQ ID NO: 106214 - DNA, 25 bp, Probe Sequence
acttgctgactgctaagaaatgacc

SEQ ID NO: 106215 - DNA, 25 bp, Probe Sequence
tagaaagagaaggggaagaaaatga

SEQ ID NO: 106216 - DNA, 25 bp, Probe Sequence
gcaagattttagaaagagaagggga

SEQ ID NO: 106217 - DNA, 25 bp, Probe Sequence
aaatgaagccttacataagatgatt

SEQ ID NO: 106218 - DNA, 25 bp, Probe Sequence
ctgactgctaagaaatgaccagagg

SEQ ID NO: 106219 - DNA, 25 bp, Probe Sequence
agattttagaaagagaaggggaaga

SEQ ID NO: 106220 - DNA, 25 bp, Probe Sequence
gggaagaaaatgaagccttacataa

SEQ ID NO: 106221 - DNA, 25 bp, Probe Sequence
ggggaagaaaatgaagccttacata

SEQ ID NO: 106222 - DNA, 25 bp, Probe Sequence
ttagaaagagaaggggaagaaaatg

SEQ ID NO: 106223 - DNA, 25 bp, Probe Sequence
caagattttagaaagagaaggggaa

SEQ ID NO: 106224 - DNA, 25 bp, Probe Sequence
aaagagaaggggaagaaaatgaagc

SEQ ID NO: 106225 - DNA, 25 bp, Probe Sequence
gattttagaaagagaaggggaagaa

SEQ ID NO: 106226 - DNA, 25 bp, Probe Sequence
aagattttagaaagagaaggggaag

SEQ ID NO: 106227 - DNA, 25 bp, Probe Sequence
gaagccttacataagatgattgcaa

SEQ ID NO: 106228 - DNA, 25 bp, Probe Sequence
ttgctgactgctaagaaatgaccag

SEQ ID NO: 106229 - DNA, 25 bp, Probe Sequence
tttagaaagagaaggggaagaaaat

SEQ ID NO: 106230 - DNA, 25 bp, Probe Sequence
attttagaaagagaaggggaagaaa

SEQ ID NO: 106231 - DNA, 25 bp, Probe Sequence
ctaagaaatgaccagaggggaagag

SEQ ID NO: 106232 - DNA, 25 bp, Probe Sequence
caacttgtatctttctagcagcaga

SEQ ID NO: 106233 - DNA, 25 bp, Probe Sequence
atccatacagtcaagatacatagta

SEQ ID NO: 106234 - DNA, 25 bp, Probe Sequence
acaacttgtatctttctagcagcag

SEQ ID NO: 106235 - DNA, 25 bp, Probe Sequence
gacaacttgtatctttctagcagca

SEQ ID NO: 106236 - DNA, 25 bp, Probe Sequence
gggacaacttgtatctttctagcag

SEQ ID NO: 106237 - DNA, 25 bp, Probe Sequence
ggacaacttgtatctttctagcagc

SEQ ID NO: 106238 - DNA, 25 bp, Probe Sequence
aacttgtatctttctagcagcagat

SEQ ID NO: 106239 - DNA, 25 bp, Probe Sequence
tatccatacagtcaagatacatagt

SEQ ID NO: 106240 - DNA, 25 bp, Probe Sequence
acttgtatctttctagcagcagatc

SEQ ID NO: 106241 - DNA, 25 bp, Probe Sequence
aaagaaatttgatgcccagataata

SEQ ID NO: 106242 - DNA, 25 bp, Probe Sequence
aagaaatttgatgcccagataatat

SEQ ID NO: 106243 - DNA, 25 bp, Probe Sequence
atatccatacagtcaagatacatag

SEQ ID NO: 106244 - DNA, 25 bp, Probe Sequence
cttgtatctttctagcagcagatct

SEQ ID NO: 106245 - DNA, 25 bp, Probe Sequence
cggtgattttcgtgtaagaatgaaa

SEQ ID NO: 106246 - DNA, 25 bp, Probe Sequence
ggggacaacttgtatctttctagca

SEQ ID NO: 106247 - DNA, 25 bp, Probe Sequence
agaaatttgatgcccagataatata

SEQ ID NO: 106248 - DNA, 25 bp, Probe Sequence
aaaagaaatttgatgcccagataat

SEQ ID NO: 106249 - DNA, 25 bp, Probe Sequence
atgacggtgattttcgtgtaagaat

SEQ ID NO: 106250 - DNA, 25 bp, Probe Sequence
acggtgattttcgtgtaagaatgaa

SEQ ID NO: 106251 - DNA, 25 bp, Probe Sequence
gacggtgattttcgtgtaagaatga

SEQ ID NO: 106252 - DNA, 25 bp, Probe Sequence
tgacggtgattttcgtgtaagaatg

SEQ ID NO: 106253 - DNA, 25 bp, Probe Sequence
ttaaaatgccagatgttgttcgggg

SEQ ID NO: 106254 - DNA, 25 bp, Probe Sequence
catgacggtgattttcgtgtaagaa

SEQ ID NO: 106255 - DNA, 25 bp, Probe Sequence
gaaatttgatgcccagataatatat

SEQ ID NO: 106256 - DNA, 25 bp, Probe Sequence
ctaaccatcttatgagtgccaatgt

SEQ ID NO: 106257 - DNA, 25 bp, Probe Sequence
taaccatcttatgagtgccaatgtg

SEQ ID NO: 106258 - DNA, 25 bp, Probe Sequence
taacaattactgtcaggtgtcatca

SEQ ID NO: 106259 - DNA, 25 bp, Probe Sequence
ttaacaattactgtcaggtgtcatc

SEQ ID NO: 106260 - DNA, 25 bp, Probe Sequence
gctaaccatcttatgagtgccaatg

SEQ ID NO: 106261 - DNA, 25 bp, Probe Sequence
aacaattactgtcaggtgtcatcac

SEQ ID NO: 106262 - DNA, 25 bp, Probe Sequence
ccttctcagtatcattcgattgcta

SEQ ID NO: 106263 - DNA, 25 bp, Probe Sequence
taactgactaatcttacttccacaa

SEQ ID NO: 106264 - DNA, 25 bp, Probe Sequence
ttaactgactaatcttacttccaca

SEQ ID NO: 106265 - DNA, 25 bp, Probe Sequence
caattactgtcaggtgtcatcactg

SEQ ID NO: 106266 - DNA, 25 bp, Probe Sequence
aaccatcttatgagtgccaatgtgt

SEQ ID NO: 106267 - DNA, 25 bp, Probe Sequence
cttctcagtatcattcgattgctat

SEQ ID NO: 106268 - DNA, 25 bp, Probe Sequence
ctgtctgtaaggcgtagaatctgtc

SEQ ID NO: 106269 - DNA, 25 bp, Probe Sequence
gtctgtctgtaaggcgtagaatctg

SEQ ID NO: 106270 - DNA, 25 bp, Probe Sequence
ctgtctgtctgtaaggcgtagaatc

SEQ ID NO: 106271 - DNA, 25 bp, Probe Sequence
attactgtcaggtgtcatcactgtt

SEQ ID NO: 106272 - DNA, 25 bp, Probe Sequence
aattactgtcaggtgtcatcactgt

SEQ ID NO: 106273 - DNA, 25 bp, Probe Sequence
acaattactgtcaggtgtcatcact

SEQ ID NO: 106274 - DNA, 25 bp, Probe Sequence
ggaatttatagaggctacaaccaca

SEQ ID NO: 106275 - DNA, 25 bp, Probe Sequence
ggtttaagtcctgtctgtctgtaag

SEQ ID NO: 106276 - DNA, 25 bp, Probe Sequence
ttaaattaaggtaaaggctgctggt

SEQ ID NO: 106277 - DNA, 25 bp, Probe Sequence
aatatgtgaatttgctgcttctgag

SEQ ID NO: 106278 - DNA, 25 bp, Probe Sequence
cgtagaatgagggttgttaatccat

SEQ ID NO: 106279 - DNA, 25 bp, Probe Sequence
gtagaatgagggttgttaatccatc

SEQ ID NO: 106280 - DNA, 25 bp, Probe Sequence
aaatcttcagcactccctcaacatc

SEQ ID NO: 106281 - DNA, 25 bp, Probe Sequence
caaatcttcagcactccctcaacat

SEQ ID NO: 106282 - DNA, 25 bp, Probe Sequence
gaacaaatcttcagcactccctcaa

SEQ ID NO: 106283 - DNA, 25 bp, Probe Sequence
aacaaatcttcagcactccctcaac

SEQ ID NO: 106284 - DNA, 25 bp, Probe Sequence
acaaatcttcagcactccctcaaca

SEQ ID NO: 106285 - DNA, 25 bp, Probe Sequence
aatcttcagcactccctcaacatcc

SEQ ID NO: 106286 - DNA, 25 bp, Probe Sequence
ggaacaaatcttcagcactccctca

SEQ ID NO: 106287 - DNA, 25 bp, Probe Sequence
gatgcggaacaaatcttcagcactc

SEQ ID NO: 106288 - DNA, 25 bp, Probe Sequence
ctgatgcggaacaaatcttcagcac

SEQ ID NO: 106289 - DNA, 25 bp, Probe Sequence
atattgaatatcctgtggacttgga

SEQ ID NO: 106290 - DNA, 25 bp, Probe Sequence
aagaggttgagataagtcgaagagt

SEQ ID NO: 106291 - DNA, 25 bp, Probe Sequence
gggtgattgtaactttattgccatt

SEQ ID NO: 106292 - DNA, 25 bp, Probe Sequence
gatgggtgattgtaactttattgcc

SEQ ID NO: 106293 - DNA, 25 bp, Probe Sequence
agatgggtgattgtaactttattgc

SEQ ID NO: 106294 - DNA, 25 bp, Probe Sequence
aacaagaggttgagataagtcgaag

SEQ ID NO: 106295 - DNA, 25 bp, Probe Sequence
caagaggttgagataagtcgaagag

SEQ ID NO: 106296 - DNA, 25 bp, Probe Sequence
atatccagtcagacaagatacgcac

SEQ ID NO: 106297 - DNA, 25 bp, Probe Sequence
gaggttgagataagtcgaagagtga

SEQ ID NO: 106298 - DNA, 25 bp, Probe Sequence
agaggttgagataagtcgaagagtg

SEQ ID NO: 106299 - DNA, 25 bp, Probe Sequence
acaagaggttgagataagtcgaaga

SEQ ID NO: 106300 - DNA, 25 bp, Probe Sequence
agtataaagttgtcgcccatcaata

SEQ ID NO: 106301 - DNA, 25 bp, Probe Sequence
tatctaggagtataaagttgtcgcc

SEQ ID NO: 106302 - DNA, 25 bp, Probe Sequence
gtataaagttgtcgcccatcaataa

SEQ ID NO: 106303 - DNA, 25 bp, Probe Sequence
tctgttgactctaacttccaaatca

SEQ ID NO: 106304 - DNA, 25 bp, Probe Sequence
agcttctgttgactctaacttccaa

SEQ ID NO: 106305 - DNA, 25 bp, Probe Sequence
ttctgttgactctaacttccaaatc

SEQ ID NO: 106306 - DNA, 25 bp, Probe Sequence
cttctgttgactctaacttccaaat

SEQ ID NO: 106307 - DNA, 25 bp, Probe Sequence
tataaagttgtcgcccatcaataaa

SEQ ID NO: 106308 - DNA, 25 bp, Probe Sequence
gagtataaagttgtcgcccatcaat

SEQ ID NO: 106309 - DNA, 25 bp, Probe Sequence
gcttctgttgactctaacttccaaa

SEQ ID NO: 106310 - DNA, 25 bp, Probe Sequence
attgtactgagagaaactgcttacg

SEQ ID NO: 106311 - DNA, 25 bp, Probe Sequence
aattgtactgagagaaactgcttac

SEQ ID NO: 106312 - DNA, 25 bp, Probe Sequence
aatattgaatatcctgtggacttgg

SEQ ID NO: 106313 - DNA, 25 bp, Probe Sequence
cttgtggaatcagagccttacttat

SEQ ID NO: 106314 - DNA, 25 bp, Probe Sequence
gtggaatcagagccttacttatgta

SEQ ID NO: 106315 - DNA, 25 bp, Probe Sequence
ttgtggaatcagagccttacttatg

SEQ ID NO: 106316 - DNA, 25 bp, Probe Sequence
cttgagacagacgaaccttgaatta

SEQ ID NO: 106317 - DNA, 25 bp, Probe Sequence
tagactctctgtattgcttggtaag

SEQ ID NO: 106318 - DNA, 25 bp, Probe Sequence
ttgagacagacgaaccttgaattac

SEQ ID NO: 106319 - DNA, 25 bp, Probe Sequence
ttagactctctgtattgcttggtaa

SEQ ID NO: 106320 - DNA, 25 bp, Probe Sequence
tgtggaatcagagccttacttatgt

SEQ ID NO: 106321 - DNA, 25 bp, Probe Sequence
acttgtggaatcagagccttactta

SEQ ID NO: 106322 - DNA, 25 bp, Probe Sequence
tacttgtggaatcagagccttactt

SEQ ID NO: 106323 - DNA, 25 bp, Probe Sequence
ttacttgtggaatcagagccttact

SEQ ID NO: 106324 - DNA, 25 bp, Probe Sequence
tacttgagacagacgaaccttgaat

SEQ ID NO: 106325 - DNA, 25 bp, Probe Sequence
ttacttgagacagacgaaccttgaa

SEQ ID NO: 106326 - DNA, 25 bp, Probe Sequence
aagaggaggaagttaccacattctg

SEQ ID NO: 106327 - DNA, 25 bp, Probe Sequence
acttgagacagacgaaccttgaatt

SEQ ID NO: 106328 - DNA, 25 bp, Probe Sequence
tggaatcagagccttacttatgtaa

SEQ ID NO: 106329 - DNA, 25 bp, Probe Sequence
ggaagttaccacattctggaagatt

SEQ ID NO: 106330 - DNA, 25 bp, Probe Sequence
gcctgattgtgtttgaagtaaatga

SEQ ID NO: 106331 - DNA, 25 bp, Probe Sequence
agcctgattgtgtttgaagtaaatg

SEQ ID NO: 106332 - DNA, 25 bp, Probe Sequence
ctttacttgtggaatcagagcctta

SEQ ID NO: 106333 - DNA, 25 bp, Probe Sequence
tttacttgtggaatcagagccttac

SEQ ID NO: 106334 - DNA, 25 bp, Probe Sequence
gatttacttgagacagacgaacctt

SEQ ID NO: 106335 - DNA, 25 bp, Probe Sequence
tgagacagacgaaccttgaattacg

SEQ ID NO: 106336 - DNA, 25 bp, Probe Sequence
gaagatttacttgagacagacgaac

SEQ ID NO: 106337 - DNA, 25 bp, Probe Sequence
taatgtcctgtcttctaagatgtgc

SEQ ID NO: 106338 - DNA, 25 bp, Probe Sequence
ataatgtcctgtcttctaagatgtg

SEQ ID NO: 106339 - DNA, 25 bp, Probe Sequence
gataatgtcctgtcttctaagatgt

SEQ ID NO: 106340 - DNA, 25 bp, Probe Sequence
agataatgtcctgtcttctaagatg

SEQ ID NO: 106341 - DNA, 25 bp, Probe Sequence
cagcaagataatgtcctgtcttcta

SEQ ID NO: 106342 - DNA, 25 bp, Probe Sequence
agcaagataatgtcctgtcttctaa

SEQ ID NO: 106343 - DNA, 25 bp, Probe Sequence
cctgtcttctaagatgtgcatcaag

SEQ ID NO: 106344 - DNA, 25 bp, Probe Sequence
gcaagataatgtcctgtcttctaag

SEQ ID NO: 106345 - DNA, 25 bp, Probe Sequence
taatgatcccagcaagataatgtcc

SEQ ID NO: 106346 - DNA, 25 bp, Probe Sequence
cctaatgatcccagcaagataatgt

SEQ ID NO: 106347 - DNA, 25 bp, Probe Sequence
ataccctaatgatcccagcaagata

SEQ ID NO: 106348 - DNA, 25 bp, Probe Sequence
ctaatgatcccagcaagataatgtc

SEQ ID NO: 106349 - DNA, 25 bp, Probe Sequence
taccctaatgatcccagcaagataa

SEQ ID NO: 106350 - DNA, 25 bp, Probe Sequence
tcctgtcttctaagatgtgcatcaa

SEQ ID NO: 106351 - DNA, 25 bp, Probe Sequence
atgtcctgtcttctaagatgtgcat

SEQ ID NO: 106352 - DNA, 25 bp, Probe Sequence
ccctaatgatcccagcaagataatg

SEQ ID NO: 106353 - DNA, 25 bp, Probe Sequence
aatgtcctgtcttctaagatgtgca

SEQ ID NO: 106354 - DNA, 25 bp, Probe Sequence
accctaatgatcccagcaagataat

SEQ ID NO: 106355 - DNA, 25 bp, Probe Sequence
ctgtcttctaagatgtgcatcaagc

SEQ ID NO: 106356 - DNA, 25 bp, Probe Sequence
aatgatcccagcaagataatgtcct

SEQ ID NO: 106357 - DNA, 25 bp, Probe Sequence
gtcctgtcttctaagatgtgcatca

SEQ ID NO: 106358 - DNA, 25 bp, Probe Sequence
tgtcctgtcttctaagatgtgcatc

SEQ ID NO: 106359 - DNA, 25 bp, Probe Sequence
cataccctaatgatcccagcaagat

SEQ ID NO: 106360 - DNA, 25 bp, Probe Sequence
caagataatgtcctgtcttctaaga

SEQ ID NO: 106361 - DNA, 25 bp, Probe Sequence
taccttccactcctctggagaaaag

SEQ ID NO: 106362 - DNA, 25 bp, Probe Sequence
gtaccttccactcctctggagaaaa

SEQ ID NO: 106363 - DNA, 25 bp, Probe Sequence
ggtaccttccactcctctggagaaa

SEQ ID NO: 106364 - DNA, 25 bp, Probe Sequence
atagaagttggagtagtgacagttg

SEQ ID NO: 106365 - DNA, 25 bp, Probe Sequence
aatagaagttggagtagtgacagtt

SEQ ID NO: 106366 - DNA, 25 bp, Probe Sequence
tagaagttggagtagtgacagttga

SEQ ID NO: 106367 - DNA, 25 bp, Probe Sequence
atgcctgtctactgttctatcaatt

SEQ ID NO: 106368 - DNA, 25 bp, Probe Sequence
agaagttggagtagtgacagttgaa

SEQ ID NO: 106369 - DNA, 25 bp, Probe Sequence
aattggtatagatgaagagcaaggc

SEQ ID NO: 106370 - DNA, 25 bp, Probe Sequence
catgcctgtctactgttctatcaat

SEQ ID NO: 106371 - DNA, 25 bp, Probe Sequence
tgtcagaggttaagactgtgtagta

SEQ ID NO: 106372 - DNA, 25 bp, Probe Sequence
gtcagaggttaagactgtgtagtaa

SEQ ID NO: 106373 - DNA, 25 bp, Probe Sequence
ggttaagactgtgtagtaattgtcc

SEQ ID NO: 106374 - DNA, 25 bp, Probe Sequence
ccgaagtggttaggactctatataa

SEQ ID NO: 106375 - DNA, 25 bp, Probe Sequence
taattggtatagatgaagagcaagg

SEQ ID NO: 106376 - DNA, 25 bp, Probe Sequence
gaggttaagactgtgtagtaattgt

SEQ ID NO: 106377 - DNA, 25 bp, Probe Sequence
attgatgctcatcttgttgctctag

SEQ ID NO: 106378 - DNA, 25 bp, Probe Sequence
gattgatgctcatcttgttgctcta

SEQ ID NO: 106379 - DNA, 25 bp, Probe Sequence
ttacatgcctgtctactgttctatc

SEQ ID NO: 106380 - DNA, 25 bp, Probe Sequence
tcagaggttaagactgtgtagtaat

SEQ ID NO: 106381 - DNA, 25 bp, Probe Sequence
ctgtcagaggttaagactgtgtagt

SEQ ID NO: 106382 - DNA, 25 bp, Probe Sequence
aattacatgcctgtctactgttcta

SEQ ID NO: 106383 - DNA, 25 bp, Probe Sequence
agaggttaagactgtgtagtaattg

SEQ ID NO: 106384 - DNA, 25 bp, Probe Sequence
attacatgcctgtctactgttctat

SEQ ID NO: 106385 - DNA, 25 bp, Probe Sequence
tacatgcctgtctactgttctatca

SEQ ID NO: 106386 - DNA, 25 bp, Probe Sequence
caattacatgcctgtctactgttct

SEQ ID NO: 106387 - DNA, 25 bp, Probe Sequence
aggttaagactgtgtagtaattgtc

SEQ ID NO: 106388 - DNA, 25 bp, Probe Sequence
gtgggtataatgtagacttccgaat

SEQ ID NO: 106389 - DNA, 25 bp, Probe Sequence
tgggtataatgtagacttccgaata

SEQ ID NO: 106390 - DNA, 25 bp, Probe Sequence
ggtgggtataatgtagacttccgaa

SEQ ID NO: 106391 - DNA, 25 bp, Probe Sequence
aacaggtgggtataatgtagacttc

SEQ ID NO: 106392 - DNA, 25 bp, Probe Sequence
aaacaggtgggtataatgtagactt

SEQ ID NO: 106393 - DNA, 25 bp, Probe Sequence
ggtataatgtagacttccgaataag

SEQ ID NO: 106394 - DNA, 25 bp, Probe Sequence
agaaagaacttataaacaggtgggt

SEQ ID NO: 106395 - DNA, 25 bp, Probe Sequence
gcagaaagaacttataaacaggtgg

SEQ ID NO: 106396 - DNA, 25 bp, Probe Sequence
cagaaagaacttataaacaggtggg

SEQ ID NO: 106397 - DNA, 25 bp, Probe Sequence
agcagaaagaacttataaacaggtg

SEQ ID NO: 106398 - DNA, 25 bp, Probe Sequence
aggtgggtataatgtagacttccga

SEQ ID NO: 106399 - DNA, 25 bp, Probe Sequence
caggtgggtataatgtagacttccg

SEQ ID NO: 106400 - DNA, 25 bp, Probe Sequence
acaggtgggtataatgtagacttcc

SEQ ID NO: 106401 - DNA, 25 bp, Probe Sequence
gggtataatgtagacttccgaataa

SEQ ID NO: 106402 - DNA, 25 bp, Probe Sequence
taaacaggtgggtataatgtagact

SEQ ID NO: 106403 - DNA, 25 bp, Probe Sequence
gaaagaacttataaacaggtgggta

SEQ ID NO: 106404 - DNA, 25 bp, Probe Sequence
ataaacaggtgggtataatgtagac

SEQ ID NO: 106405 - DNA, 25 bp, Probe Sequence
tagcagaaagaacttataaacaggt

SEQ ID NO: 106406 - DNA, 25 bp, Probe Sequence
aaagaacttataaacaggtgggtat

SEQ ID NO: 106407 - DNA, 25 bp, Probe Sequence
gtagcagaaagaacttataaacagg

SEQ ID NO: 106408 - DNA, 25 bp, Probe Sequence
gtataatgtagacttccgaataaga

SEQ ID NO: 106409 - DNA, 25 bp, Probe Sequence
aatgtagacttccgaataagaatat

SEQ ID NO: 106410 - DNA, 25 bp, Probe Sequence
ataatgtagacttccgaataagaat

SEQ ID NO: 106411 - DNA, 25 bp, Probe Sequence
aagaacttataaacaggtgggtata

SEQ ID NO: 106412 - DNA, 25 bp, Probe Sequence
attcagcctcattgtgtagtatgtt

SEQ ID NO: 106413 - DNA, 25 bp, Probe Sequence
tccttcctctattgtctaatgttga

SEQ ID NO: 106414 - DNA, 25 bp, Probe Sequence
aattcagcctcattgtgtagtatgt

SEQ ID NO: 106415 - DNA, 25 bp, Probe Sequence
ttccttcctctattgtctaatgttg

SEQ ID NO: 106416 - DNA, 25 bp, Probe Sequence
acttatcatgttggtgtgttaggta

SEQ ID NO: 106417 - DNA, 25 bp, Probe Sequence
tctattgtctaatgttgaggttgtt

SEQ ID NO: 106418 - DNA, 25 bp, Probe Sequence
gaacttatcatgttggtgtgttagg

SEQ ID NO: 106419 - DNA, 25 bp, Probe Sequence
ggtacatgcctatacagaacttaac

SEQ ID NO: 106420 - DNA, 25 bp, Probe Sequence
aacttatcatgttggtgtgttaggt

SEQ ID NO: 106421 - DNA, 25 bp, Probe Sequence
ccttcctctattgtctaatgttgag

SEQ ID NO: 106422 - DNA, 25 bp, Probe Sequence
ctctattgtctaatgttgaggttgt

SEQ ID NO: 106423 - DNA, 25 bp, Probe Sequence
cttatcatgttggtgtgttaggtaa

SEQ ID NO: 106424 - DNA, 25 bp, Probe Sequence
agaacttatcatgttggtgtgttag

SEQ ID NO: 106425 - DNA, 25 bp, Probe Sequence
gagaacttatcatgttggtgtgtta

SEQ ID NO: 106426 - DNA, 25 bp, Probe Sequence
tgagaacttatcatgttggtgtgtt

SEQ ID NO: 106427 - DNA, 25 bp, Probe Sequence
tacggcatgagttctgttaggaata

SEQ ID NO: 106428 - DNA, 25 bp, Probe Sequence
gtacatgcctatacagaacttaaca

SEQ ID NO: 106429 - DNA, 25 bp, Probe Sequence
ttcaaggaatgtaatactggagctt

SEQ ID NO: 106430 - DNA, 25 bp, Probe Sequence
acatgcctatacagaacttaacatt

SEQ ID NO: 106431 - DNA, 25 bp, Probe Sequence
tatcactttgctcttaccattcctt

SEQ ID NO: 106432 - DNA, 25 bp, Probe Sequence
tgtcatatcactttgctcttaccat

SEQ ID NO: 106433 - DNA, 25 bp, Probe Sequence
atatcactttgctcttaccattcct

SEQ ID NO: 106434 - DNA, 25 bp, Probe Sequence
catatcactttgctcttaccattcc

SEQ ID NO: 106435 - DNA, 25 bp, Probe Sequence
atgtcatatcactttgctcttacca

SEQ ID NO: 106436 - DNA, 25 bp, Probe Sequence
acaatcagtccctaacttatatccc

SEQ ID NO: 106437 - DNA, 25 bp, Probe Sequence
cctctgtttgaaatacctagtgtgg

SEQ ID NO: 106438 - DNA, 25 bp, Probe Sequence
ccctctgtttgaaatacctagtgtg

SEQ ID NO: 106439 - DNA, 25 bp, Probe Sequence
gcacaatcagtccctaacttatatc

SEQ ID NO: 106440 - DNA, 25 bp, Probe Sequence
cacaatcagtccctaacttatatcc

SEQ ID NO: 106441 - DNA, 25 bp, Probe Sequence
tctgtttgaaatacctagtgtggtt

SEQ ID NO: 106442 - DNA, 25 bp, Probe Sequence
tacctagtgtggtttctatttcctg

SEQ ID NO: 106443 - DNA, 25 bp, Probe Sequence
ctctgtttgaaatacctagtgtggt

SEQ ID NO: 106444 - DNA, 25 bp, Probe Sequence
ctgtttgaaatacctagtgtggttt

SEQ ID NO: 106445 - DNA, 25 bp, Probe Sequence
ctctgtttggtcccatttccatatt

SEQ ID NO: 106446 - DNA, 25 bp, Probe Sequence
ctctgagattctgcaacatccactt

SEQ ID NO: 106447 - DNA, 25 bp, Probe Sequence
atacctagtgtggtttctatttcct

SEQ ID NO: 106448 - DNA, 25 bp, Probe Sequence
tctgtttggtcccatttccatattg

SEQ ID NO: 106449 - DNA, 25 bp, Probe Sequence
tgtttgaaatacctagtgtggtttc

SEQ ID NO: 106450 - DNA, 25 bp, Probe Sequence
gtttgaaatacctagtgtggtttct

SEQ ID NO: 106451 - DNA, 25 bp, Probe Sequence
tgcacaatcagtccctaacttatat

SEQ ID NO: 106452 - DNA, 25 bp, Probe Sequence
aatacctagtgtggtttctatttcc

SEQ ID NO: 106453 - DNA, 25 bp, Probe Sequence
cacagaactcagaagtcagaccact

SEQ ID NO: 106454 - DNA, 25 bp, Probe Sequence
caagtatccagctctgagattctgc

SEQ ID NO: 106455 - DNA, 25 bp, Probe Sequence
gcaagtatccagctctgagattctg

SEQ ID NO: 106456 - DNA, 25 bp, Probe Sequence
ctgcacaatcagtccctaacttata

SEQ ID NO: 106457 - DNA, 25 bp, Probe Sequence
tgcaagtatccagctctgagattct

SEQ ID NO: 106458 - DNA, 25 bp, Probe Sequence
acagaactcagaagtcagaccactg

SEQ ID NO: 106459 - DNA, 25 bp, Probe Sequence
ctgcaagtatccagctctgagattc

SEQ ID NO: 106460 - DNA, 25 bp, Probe Sequence
ctataaggacactatggacttcagg

SEQ ID NO: 106461 - DNA, 25 bp, Probe Sequence
gctataaggacactatggacttcag

SEQ ID NO: 106462 - DNA, 25 bp, Probe Sequence
tataaggacactatggacttcaggc

SEQ ID NO: 106463 - DNA, 25 bp, Probe Sequence
aagctataaggacactatggacttc

SEQ ID NO: 106464 - DNA, 25 bp, Probe Sequence
agctataaggacactatggacttca

SEQ ID NO: 106465 - DNA, 25 bp, Probe Sequence
ggtgatggtgaagaacagaataaag

SEQ ID NO: 106466 - DNA, 25 bp, Probe Sequence
atggtgaagaacagaataaagaagc

SEQ ID NO: 106467 - DNA, 25 bp, Probe Sequence
tttacatttggcgtcagaatttagg

SEQ ID NO: 106468 - DNA, 25 bp, Probe Sequence
gtgatggtgaagaacagaataaaga

SEQ ID NO: 106469 - DNA, 25 bp, Probe Sequence
gggtgatggtgaagaacagaataaa

SEQ ID NO: 106470 - DNA, 25 bp, Probe Sequence
taaggacactatggacttcaggcat

SEQ ID NO: 106471 - DNA, 25 bp, Probe Sequence
ataaggacactatggacttcaggca

SEQ ID NO: 106472 - DNA, 25 bp, Probe Sequence
tacatttggcgtcagaatttaggtt

SEQ ID NO: 106473 - DNA, 25 bp, Probe Sequence
ttacatttggcgtcagaatttaggt

SEQ ID NO: 106474 - DNA, 25 bp, Probe Sequence
tggtgaagaacagaataaagaagcg

SEQ ID NO: 106475 - DNA, 25 bp, Probe Sequence
tgatggtgaagaacagaataaagaa

SEQ ID NO: 106476 - DNA, 25 bp, Probe Sequence
agggtgatggtgaagaacagaataa

SEQ ID NO: 106477 - DNA, 25 bp, Probe Sequence
gatggtgaagaacagaataaagaag

SEQ ID NO: 106478 - DNA, 25 bp, Probe Sequence
cagggtgatggtgaagaacagaata

SEQ ID NO: 106479 - DNA, 25 bp, Probe Sequence
acatttggcgtcagaatttaggttc

SEQ ID NO: 106480 - DNA, 25 bp, Probe Sequence
ctgagtgaagaaagctataaggaca

SEQ ID NO: 106481 - DNA, 25 bp, Probe Sequence
tgatgatacaattgcagaactggat

SEQ ID NO: 106482 - DNA, 25 bp, Probe Sequence
gaaagctataaggacactatggact

SEQ ID NO: 106483 - DNA, 25 bp, Probe Sequence
agaaagctataaggacactatggac

SEQ ID NO: 106484 - DNA, 25 bp, Probe Sequence
tctataagactgaagtgctggttac

SEQ ID NO: 106485 - DNA, 25 bp, Probe Sequence
ctataagactgaagtgctggttacc

SEQ ID NO: 106486 - DNA, 25 bp, Probe Sequence
ttctataagactgaagtgctggtta

SEQ ID NO: 106487 - DNA, 25 bp, Probe Sequence
actatgttgaataggagtggtgatt

SEQ ID NO: 106488 - DNA, 25 bp, Probe Sequence
ggctaatatccagaatctacaatga

SEQ ID NO: 106489 - DNA, 25 bp, Probe Sequence
atgaacaatgagaacacatggacaa

SEQ ID NO: 106490 - DNA, 25 bp, Probe Sequence
aatgaacaatgagaacacatggaca

SEQ ID NO: 106491 - DNA, 25 bp, Probe Sequence
tatccagaatctacaatgaactcaa

SEQ ID NO: 106492 - DNA, 25 bp, Probe Sequence
atatccagaatctacaatgaactca

SEQ ID NO: 106493 - DNA, 25 bp, Probe Sequence
ataggtgggaaatgaacaatgagaa

SEQ ID NO: 106494 - DNA, 25 bp, Probe Sequence
gagataccatttcacaccagttaga

SEQ ID NO: 106495 - DNA, 25 bp, Probe Sequence
tttatttccttctcctgcttgattg

SEQ ID NO: 106496 - DNA, 25 bp, Probe Sequence
atgtaaatgatgagttaatgggtgc

SEQ ID NO: 106497 - DNA, 25 bp, Probe Sequence
actcatctgacaaagggctaatatc

SEQ ID NO: 106498 - DNA, 25 bp, Probe Sequence
ctttatttccttctcctgcttgatt

SEQ ID NO: 106499 - DNA, 25 bp, Probe Sequence
ctactcatctgacaaagggctaata

SEQ ID NO: 106500 - DNA, 25 bp, Probe Sequence
cctttatttccttctcctgcttgat

SEQ ID NO: 106501 - DNA, 25 bp, Probe Sequence
taggtgggaaatgaacaatgagaac

SEQ ID NO: 106502 - DNA, 25 bp, Probe Sequence
agataccatttcacaccagttagaa

SEQ ID NO: 106503 - DNA, 25 bp, Probe Sequence
aatcaacaagtgggctaaggatatg

SEQ ID NO: 106504 - DNA, 25 bp, Probe Sequence
caatcaacaagtgggctaaggatat

SEQ ID NO: 106505 - DNA, 25 bp, Probe Sequence
caacaagtgggctaaggatatgaaa

SEQ ID NO: 106506 - DNA, 25 bp, Probe Sequence
ctcatctgacaaagggctaatatcc

SEQ ID NO: 106507 - DNA, 25 bp, Probe Sequence
gggactgtaaactcattcaaccatt

SEQ ID NO: 106508 - DNA, 25 bp, Probe Sequence
taaggatgaggtaggtaggcaggaa

SEQ ID NO: 106509 - DNA, 25 bp, Probe Sequence
atccttggtgacagagtgagacatc

SEQ ID NO: 106510 - DNA, 25 bp, Probe Sequence
ttaaggatgaggtaggtaggcagga

SEQ ID NO: 106511 - DNA, 25 bp, Probe Sequence
catccttggtgacagagtgagacat

SEQ ID NO: 106512 - DNA, 25 bp, Probe Sequence
gacagagtgagacatcgtttccaaa

SEQ ID NO: 106513 - DNA, 25 bp, Probe Sequence
tttaaggatgaggtaggtaggcagg

SEQ ID NO: 106514 - DNA, 25 bp, Probe Sequence
cttggtgacagagtgagacatcgtt

SEQ ID NO: 106515 - DNA, 25 bp, Probe Sequence
ttttaaggatgaggtaggtaggcag

SEQ ID NO: 106516 - DNA, 25 bp, Probe Sequence
tgacagagtgagacatcgtttccaa

SEQ ID NO: 106517 - DNA, 25 bp, Probe Sequence
ttggtgacagagtgagacatcgttt

SEQ ID NO: 106518 - DNA, 25 bp, Probe Sequence
acagagtgagacatcgtttccaaaa

SEQ ID NO: 106519 - DNA, 25 bp, Probe Sequence
tctacagaaatgctctatttacaaa

SEQ ID NO: 106520 - DNA, 25 bp, Probe Sequence
ttctacagaaatgctctatttacaa

SEQ ID NO: 106521 - DNA, 25 bp, Probe Sequence
aaggatgaggtaggtaggcaggaaa

SEQ ID NO: 106522 - DNA, 25 bp, Probe Sequence
gtgacagagtgagacatcgtttcca

SEQ ID NO: 106523 - DNA, 25 bp, Probe Sequence
tggtgacagagtgagacatcgtttc

SEQ ID NO: 106524 - DNA, 25 bp, Probe Sequence
attctacagaaatgctctatttaca

SEQ ID NO: 106525 - DNA, 25 bp, Probe Sequence
ctacagaaatgctctatttacaaat

SEQ ID NO: 106526 - DNA, 25 bp, Probe Sequence
ggtgacagagtgagacatcgtttcc

SEQ ID NO: 106527 - DNA, 25 bp, Probe Sequence
aattctacagaaatgctctatttac

SEQ ID NO: 106528 - DNA, 25 bp, Probe Sequence
acagaaatgctctatttacaaattt

SEQ ID NO: 106529 - DNA, 25 bp, Probe Sequence
tacagaaatgctctatttacaaatt

SEQ ID NO: 106530 - DNA, 25 bp, Probe Sequence
ggatgaggtaggtaggcaggaaaac

SEQ ID NO: 106531 - DNA, 25 bp, Probe Sequence
aggatgaggtaggtaggcaggaaaa

SEQ ID NO: 106532 - DNA, 25 bp, Probe Sequence
gaaccatgccattagaactgaatat

SEQ ID NO: 106533 - DNA, 25 bp, Probe Sequence
ggaaccatgccattagaactgaata

SEQ ID NO: 106534 - DNA, 25 bp, Probe Sequence
ccacagtgaattatgattacaccac

SEQ ID NO: 106535 - DNA, 25 bp, Probe Sequence
cacagtgaattatgattacaccacg

SEQ ID NO: 106536 - DNA, 25 bp, Probe Sequence
acagtgaattatgattacaccacgg

SEQ ID NO: 106537 - DNA, 25 bp, Probe Sequence
aaccatgccattagaactgaatatt

SEQ ID NO: 106538 - DNA, 25 bp, Probe Sequence
gccacagtgaattatgattacacca

SEQ ID NO: 106539 - DNA, 25 bp, Probe Sequence
attatgattacaccacgggactcta

SEQ ID NO: 106540 - DNA, 25 bp, Probe Sequence
accatgccattagaactgaatatta

SEQ ID NO: 106541 - DNA, 25 bp, Probe Sequence
catagccagaccttgtttctactaa

SEQ ID NO: 106542 - DNA, 25 bp, Probe Sequence
atagccagaccttgtttctactaaa

SEQ ID NO: 106543 - DNA, 25 bp, Probe Sequence
tcatagccagaccttgtttctacta

SEQ ID NO: 106544 - DNA, 25 bp, Probe Sequence
tgccattagaactgaatattaggaa

SEQ ID NO: 106545 - DNA, 25 bp, Probe Sequence
gaattatgattacaccacgggactc

SEQ ID NO: 106546 - DNA, 25 bp, Probe Sequence
gccattagaactgaatattaggaac

SEQ ID NO: 106547 - DNA, 25 bp, Probe Sequence
catgccattagaactgaatattagg

SEQ ID NO: 106548 - DNA, 25 bp, Probe Sequence
ccatgccattagaactgaatattag

SEQ ID NO: 106549 - DNA, 25 bp, Probe Sequence
atcatagccagaccttgtttctact

SEQ ID NO: 106550 - DNA, 25 bp, Probe Sequence
catcatagccagaccttgtttctac

SEQ ID NO: 106551 - DNA, 25 bp, Probe Sequence
ccaaagatgaatatatgaagccagc

SEQ ID NO: 106552 - DNA, 25 bp, Probe Sequence
aattatgattacaccacgggactct

SEQ ID NO: 106553 - DNA, 25 bp, Probe Sequence
actgaatattaggaactgtgatctt

SEQ ID NO: 106554 - DNA, 25 bp, Probe Sequence
aactgaatattaggaactgtgatct

SEQ ID NO: 106555 - DNA, 25 bp, Probe Sequence
agaactgaatattaggaactgtgat

SEQ ID NO: 106556 - DNA, 25 bp, Probe Sequence
atgaagagacagtgatccagaagaa

SEQ ID NO: 106557 - DNA, 25 bp, Probe Sequence
tgaagagacagtgatccagaagaag

SEQ ID NO: 106558 - DNA, 25 bp, Probe Sequence
catgaagagacagtgatccagaaga

SEQ ID NO: 106559 - DNA, 25 bp, Probe Sequence
acaatgactcaagcagaaattaagc

SEQ ID NO: 106560 - DNA, 25 bp, Probe Sequence
ccatgaagagacagtgatccagaag

SEQ ID NO: 106561 - DNA, 25 bp, Probe Sequence
gaagagacagtgatccagaagaagc

SEQ ID NO: 106562 - DNA, 25 bp, Probe Sequence
gagacagtgatccagaagaagcatc

SEQ ID NO: 106563 - DNA, 25 bp, Probe Sequence
cagtacaatgactcaagcagaaatt

SEQ ID NO: 106564 - DNA, 25 bp, Probe Sequence
agagacagtgatccagaagaagcat

SEQ ID NO: 106565 - DNA, 25 bp, Probe Sequence
accatgaagagacagtgatccagaa

SEQ ID NO: 106566 - DNA, 25 bp, Probe Sequence
agacagtgatccagaagaagcatct

SEQ ID NO: 106567 - DNA, 25 bp, Probe Sequence
ccagtacaatgactcaagcagaaat

SEQ ID NO: 106568 - DNA, 25 bp, Probe Sequence
aagagacagtgatccagaagaagca

SEQ ID NO: 106569 - DNA, 25 bp, Probe Sequence
tacaatgactcaagcagaaattaag

SEQ ID NO: 106570 - DNA, 25 bp, Probe Sequence
agtacaatgactcaagcagaaatta

SEQ ID NO: 106571 - DNA, 25 bp, Probe Sequence
gtacaatgactcaagcagaaattaa

SEQ ID NO: 106572 - DNA, 25 bp, Probe Sequence
gacagtgatccagaagaagcatctt

SEQ ID NO: 106573 - DNA, 25 bp, Probe Sequence
gatggaaagcaaaataaaggaggtg

SEQ ID NO: 106574 - DNA, 25 bp, Probe Sequence
cccagtacaatgactcaagcagaaa

SEQ ID NO: 106575 - DNA, 25 bp, Probe Sequence
ggatggaaagcaaaataaaggaggt

SEQ ID NO: 106576 - DNA, 25 bp, Probe Sequence
caccatgaagagacagtgatccaga

SEQ ID NO: 106577 - DNA, 25 bp, Probe Sequence
aatgactcaagcagaaattaagctc

SEQ ID NO: 106578 - DNA, 25 bp, Probe Sequence
caatgactcaagcagaaattaagct

SEQ ID NO: 106579 - DNA, 25 bp, Probe Sequence
gggatggaaagcaaaataaaggagg

SEQ ID NO: 106580 - DNA, 25 bp, Probe Sequence
cttgtgagcagttgtcttctatgat

SEQ ID NO: 106581 - DNA, 25 bp, Probe Sequence
ttgtgagcagttgtcttctatgatc

SEQ ID NO: 106582 - DNA, 25 bp, Probe Sequence
acttgtgagcagttgtcttctatga

SEQ ID NO: 106583 - DNA, 25 bp, Probe Sequence
cacttgtgagcagttgtcttctatg

SEQ ID NO: 106584 - DNA, 25 bp, Probe Sequence
gaagaagtgccagaagagacagtag

SEQ ID NO: 106585 - DNA, 25 bp, Probe Sequence
tgtgagcagttgtcttctatgatcc

SEQ ID NO: 106586 - DNA, 25 bp, Probe Sequence
agaagaagtgccagaagagacagta

SEQ ID NO: 106587 - DNA, 25 bp, Probe Sequence
gtgtgctatctgtatttcccttgta

SEQ ID NO: 106588 - DNA, 25 bp, Probe Sequence
atgtatgctaatgagatttacccgt

SEQ ID NO: 106589 - DNA, 25 bp, Probe Sequence
atttacccgtgtgctatctgtattt

SEQ ID NO: 106590 - DNA, 25 bp, Probe Sequence
ctaatgagatttacccgtgtgctat

SEQ ID NO: 106591 - DNA, 25 bp, Probe Sequence
tatgctaatgagatttacccgtgtg

SEQ ID NO: 106592 - DNA, 25 bp, Probe Sequence
taatgagatttacccgtgtgctatc

SEQ ID NO: 106593 - DNA, 25 bp, Probe Sequence
gtatgctaatgagatttacccgtgt

SEQ ID NO: 106594 - DNA, 25 bp, Probe Sequence
tgtatgctaatgagatttacccgtg

SEQ ID NO: 106595 - DNA, 25 bp, Probe Sequence
gatttacccgtgtgctatctgtatt

SEQ ID NO: 106596 - DNA, 25 bp, Probe Sequence
tttacccgtgtgctatctgtatttc

SEQ ID NO: 106597 - DNA, 25 bp, Probe Sequence
ggaaggactctcacttatttgtttc

SEQ ID NO: 106598 - DNA, 25 bp, Probe Sequence
gctccaggtttaagaatgaatatgt

SEQ ID NO: 106599 - DNA, 25 bp, Probe Sequence
gggaaggactctcacttatttgttt

SEQ ID NO: 106600 - DNA, 25 bp, Probe Sequence
tctgaaatcatctctagtcttgctt

SEQ ID NO: 106601 - DNA, 25 bp, Probe Sequence
aagaagtgccagaagagacagtagt

SEQ ID NO: 106602 - DNA, 25 bp, Probe Sequence
gaaggactctcacttatttgtttca

SEQ ID NO: 106603 - DNA, 25 bp, Probe Sequence
tcacttgtgagcagttgtcttctat

SEQ ID NO: 106604 - DNA, 25 bp, Probe Sequence
gccatacttgaagaagaagaattgt

SEQ ID NO: 106605 - DNA, 25 bp, Probe Sequence
gagtgcttatgatatacttgtctgc

SEQ ID NO: 106606 - DNA, 25 bp, Probe Sequence
tgagtgcttatgatatacttgtctg

SEQ ID NO: 106607 - DNA, 25 bp, Probe Sequence
gtgagtgcttatgatatacttgtct

SEQ ID NO: 106608 - DNA, 25 bp, Probe Sequence
agtgagtgcttatgatatacttgtc

SEQ ID NO: 106609 - DNA, 25 bp, Probe Sequence
ccatacttgaagaagaagaattgtc

SEQ ID NO: 106610 - DNA, 25 bp, Probe Sequence
ttgtgtcagttcatcattaagctaa

SEQ ID NO: 106611 - DNA, 25 bp, Probe Sequence
tgtttgtgtcagttcatcattaagc

SEQ ID NO: 106612 - DNA, 25 bp, Probe Sequence
aactacactaacaatagctgatgag

SEQ ID NO: 106613 - DNA, 25 bp, Probe Sequence
gcctcacataaactacactaacaat

SEQ ID NO: 106614 - DNA, 25 bp, Probe Sequence
tcttaaatcagggatgtccaatctt

SEQ ID NO: 106615 - DNA, 25 bp, Probe Sequence
ttcttaaatcagggatgtccaatct

SEQ ID NO: 106616 - DNA, 25 bp, Probe Sequence
ttgtgtctgtgaaatgataaatcct

SEQ ID NO: 106617 - DNA, 25 bp, Probe Sequence
catacttgaagaagaagaattgtct

SEQ ID NO: 106618 - DNA, 25 bp, Probe Sequence
cttaaatcagggatgtccaatcttt

SEQ ID NO: 106619 - DNA, 25 bp, Probe Sequence
tttcttaaatcagggatgtccaatc

SEQ ID NO: 106620 - DNA, 25 bp, Probe Sequence
agttgtgggaatactaaagcagttt

SEQ ID NO: 106621 - DNA, 25 bp, Probe Sequence
tagtgagtgcttatgatatacttgt

SEQ ID NO: 106622 - DNA, 25 bp, Probe Sequence
cctaaatgctagttgtgggaatact

SEQ ID NO: 106623 - DNA, 25 bp, Probe Sequence
tgtgtctgtgaaatgataaatccta

SEQ ID NO: 106624 - DNA, 25 bp, Probe Sequence
atagtagtttcatgccctcacatac

SEQ ID NO: 106625 - DNA, 25 bp, Probe Sequence
aaatagtagtttcatgccctcacat

SEQ ID NO: 106626 - DNA, 25 bp, Probe Sequence
aatagtagtttcatgccctcacata

SEQ ID NO: 106627 - DNA, 25 bp, Probe Sequence
cagaaagttactgatgtttgtgtca

SEQ ID NO: 106628 - DNA, 25 bp, Probe Sequence
aataagatgtatgaacggagcagaa

SEQ ID NO: 106629 - DNA, 25 bp, Probe Sequence
caataagatgtatgaacggagcaga

SEQ ID NO: 106630 - DNA, 25 bp, Probe Sequence
cttcttctgttcattggattcgtct

SEQ ID NO: 106631 - DNA, 25 bp, Probe Sequence
ttcttctgttcattggattcgtctg

SEQ ID NO: 106632 - DNA, 25 bp, Probe Sequence
gatgttattgttgaacctccaagtg

SEQ ID NO: 106633 - DNA, 25 bp, Probe Sequence
atgatgttattgttgaacctccaag

SEQ ID NO: 106634 - DNA, 25 bp, Probe Sequence
tgatgttattgttgaacctccaagt

SEQ ID NO: 106635 - DNA, 25 bp, Probe Sequence
atgttattgttgaacctccaagtgt

SEQ ID NO: 106636 - DNA, 25 bp, Probe Sequence
ggctgtaccaatcctctaatatgaa

SEQ ID NO: 106637 - DNA, 25 bp, Probe Sequence
atagattccttcttctgttcattgg

SEQ ID NO: 106638 - DNA, 25 bp, Probe Sequence
aactagagtgtgtgatggtagatta

SEQ ID NO: 106639 - DNA, 25 bp, Probe Sequence
taactagagtgtgtgatggtagatt

SEQ ID NO: 106640 - DNA, 25 bp, Probe Sequence
ttaactagagtgtgtgatggtagat

SEQ ID NO: 106641 - DNA, 25 bp, Probe Sequence
gaacaataagatgtatgaacggagc

SEQ ID NO: 106642 - DNA, 25 bp, Probe Sequence
cctgaacaataagatgtatgaacgg

SEQ ID NO: 106643 - DNA, 25 bp, Probe Sequence
ccttcttctgttcattggattcgtc

SEQ ID NO: 106644 - DNA, 25 bp, Probe Sequence
tgttattgttgaacctccaagtgtc

SEQ ID NO: 106645 - DNA, 25 bp, Probe Sequence
aacaataagatgtatgaacggagca

SEQ ID NO: 106646 - DNA, 25 bp, Probe Sequence
actagagtgtgtgatggtagattat

SEQ ID NO: 106647 - DNA, 25 bp, Probe Sequence
ttatgatgttattgttgaacctcca

SEQ ID NO: 106648 - DNA, 25 bp, Probe Sequence
ctcaatagattccttcttctgttca

SEQ ID NO: 106649 - DNA, 25 bp, Probe Sequence
actcaatagattccttcttctgttc

SEQ ID NO: 106650 - DNA, 25 bp, Probe Sequence
tatgatgttattgttgaacctccaa

SEQ ID NO: 106651 - DNA, 25 bp, Probe Sequence
cttctgttcattggattcgtctgtg

SEQ ID NO: 106652 - DNA, 25 bp, Probe Sequence
gaaggtgaactggaatttgaagaaa

SEQ ID NO: 106653 - DNA, 25 bp, Probe Sequence
agaaggtgaactggaatttgaagaa

SEQ ID NO: 106654 - DNA, 25 bp, Probe Sequence
aagagaaggtgaactggaatttgaa

SEQ ID NO: 106655 - DNA, 25 bp, Probe Sequence
aaagagaaggtgaactggaatttga

SEQ ID NO: 106656 - DNA, 25 bp, Probe Sequence
taaagagaaggtgaactggaatttg

SEQ ID NO: 106657 - DNA, 25 bp, Probe Sequence
gagaaggtgaactggaatttgaaga

SEQ ID NO: 106658 - DNA, 25 bp, Probe Sequence
agagaaggtgaactggaatttgaag

SEQ ID NO: 106659 - DNA, 25 bp, Probe Sequence
tctaaagagaaggtgaactggaatt

SEQ ID NO: 106660 - DNA, 25 bp, Probe Sequence
ctaaagagaaggtgaactggaattt

SEQ ID NO: 106661 - DNA, 25 bp, Probe Sequence
aaggtgaactggaatttgaagaaat

SEQ ID NO: 106662 - DNA, 25 bp, Probe Sequence
gtaatacatactgacaacccattca

SEQ ID NO: 106663 - DNA, 25 bp, Probe Sequence
aactggaatttgaagaaatacaggg

SEQ ID NO: 106664 - DNA, 25 bp, Probe Sequence
ggtgaactggaatttgaagaaatac

SEQ ID NO: 106665 - DNA, 25 bp, Probe Sequence
aggtgaactggaatttgaagaaata

SEQ ID NO: 106666 - DNA, 25 bp, Probe Sequence
cagcttattgccctttcatgtaatt

SEQ ID NO: 106667 - DNA, 25 bp, Probe Sequence
agcttattgccctttcatgtaattt

SEQ ID NO: 106668 - DNA, 25 bp, Probe Sequence
taagtacaaagtcatggtgagtgtt

SEQ ID NO: 106669 - DNA, 25 bp, Probe Sequence
ttaagtacaaagtcatggtgagtgt

SEQ ID NO: 106670 - DNA, 25 bp, Probe Sequence
tcagcttattgccctttcatgtaat

SEQ ID NO: 106671 - DNA, 25 bp, Probe Sequence
gaactggaatttgaagaaatacagg

SEQ ID NO: 106672 - DNA, 25 bp, Probe Sequence
tggtaatacatactgacaacccatt

SEQ ID NO: 106673 - DNA, 25 bp, Probe Sequence
ttggtaatacatactgacaacccat

SEQ ID NO: 106674 - DNA, 25 bp, Probe Sequence
ggtaatacatactgacaacccattc

SEQ ID NO: 106675 - DNA, 25 bp, Probe Sequence
gtgaactggaatttgaagaaataca

SEQ ID NO: 106676 - DNA, 25 bp, Probe Sequence
catttctcagacatctcccaagttc

SEQ ID NO: 106677 - DNA, 25 bp, Probe Sequence
acatttctcagacatctcccaagtt

SEQ ID NO: 106678 - DNA, 25 bp, Probe Sequence
agtgctccttatgtgaatttcaaac

SEQ ID NO: 106679 - DNA, 25 bp, Probe Sequence
aagtgctccttatgtgaatttcaaa

SEQ ID NO: 106680 - DNA, 25 bp, Probe Sequence
atttctcagacatctcccaagttcc

SEQ ID NO: 106681 - DNA, 25 bp, Probe Sequence
gacatttctcagacatctcccaagt

SEQ ID NO: 106682 - DNA, 25 bp, Probe Sequence
gtgctccttatgtgaatttcaaaca

SEQ ID NO: 106683 - DNA, 25 bp, Probe Sequence
tctaagtgctccttatgtgaatttc

SEQ ID NO: 106684 - DNA, 25 bp, Probe Sequence
tgctccttatgtgaatttcaaacac

SEQ ID NO: 106685 - DNA, 25 bp, Probe Sequence
ctaagtgctccttatgtgaatttca

SEQ ID NO: 106686 - DNA, 25 bp, Probe Sequence
gcaacttgaattgtcaatgagtatt

SEQ ID NO: 106687 - DNA, 25 bp, Probe Sequence
ttctaagtgctccttatgtgaattt

SEQ ID NO: 106688 - DNA, 25 bp, Probe Sequence
tttctaagtgctccttatgtgaatt

SEQ ID NO: 106689 - DNA, 25 bp, Probe Sequence
taagtgctccttatgtgaatttcaa

SEQ ID NO: 106690 - DNA, 25 bp, Probe Sequence
gctccttatgtgaatttcaaacacg

SEQ ID NO: 106691 - DNA, 25 bp, Probe Sequence
ccttcggacatttctcagacatctc

SEQ ID NO: 106692 - DNA, 25 bp, Probe Sequence
ttcttgacctggtataatgaaagta

SEQ ID NO: 106693 - DNA, 25 bp, Probe Sequence
tcttgacctggtataatgaaagtat

SEQ ID NO: 106694 - DNA, 25 bp, Probe Sequence
gtgcaacttgaattgtcaatgagta

SEQ ID NO: 106695 - DNA, 25 bp, Probe Sequence
tgcaacttgaattgtcaatgagtat

SEQ ID NO: 106696 - DNA, 25 bp, Probe Sequence
aagtgcaacttgaattgtcaatgag

SEQ ID NO: 106697 - DNA, 25 bp, Probe Sequence
cttttgtttgagagttggttgtttt

SEQ ID NO: 106698 - DNA, 25 bp, Probe Sequence
ctccttatgtgaatttcaaacacgt

SEQ ID NO: 106699 - DNA, 25 bp, Probe Sequence
tgtgaatttcaaacacgtatggaat

SEQ ID NO: 106700 - DNA, 25 bp, Probe Sequence
gtgtggttgtagagattgtagagag

SEQ ID NO: 106701 - DNA, 25 bp, Probe Sequence
agtgtggttgtagagattgtagaga

SEQ ID NO: 106702 - DNA, 25 bp, Probe Sequence
cagtgtggttgtagagattgtagag

SEQ ID NO: 106703 - DNA, 25 bp, Probe Sequence
tgtggttgtagagattgtagagagg

SEQ ID NO: 106704 - DNA, 25 bp, Probe Sequence
gaactaggatgtaactggagagcta

SEQ ID NO: 106705 - DNA, 25 bp, Probe Sequence
aactaggatgtaactggagagctac

SEQ ID NO: 106706 - DNA, 25 bp, Probe Sequence
cagaactaggatgtaactggagagc

SEQ ID NO: 106707 - DNA, 25 bp, Probe Sequence
gcagaactaggatgtaactggagag

SEQ ID NO: 106708 - DNA, 25 bp, Probe Sequence
ccagtgtggttgtagagattgtaga

SEQ ID NO: 106709 - DNA, 25 bp, Probe Sequence
agaactaggatgtaactggagagct

SEQ ID NO: 106710 - DNA, 25 bp, Probe Sequence
gtggttgtagagattgtagagaggg

SEQ ID NO: 106711 - DNA, 25 bp, Probe Sequence
actaggatgtaactggagagctacg

SEQ ID NO: 106712 - DNA, 25 bp, Probe Sequence
gccagtgtggttgtagagattgtag

SEQ ID NO: 106713 - DNA, 25 bp, Probe Sequence
ctaggatgtaactggagagctacgg

SEQ ID NO: 106714 - DNA, 25 bp, Probe Sequence
tgcagaactaggatgtaactggaga

SEQ ID NO: 106715 - DNA, 25 bp, Probe Sequence
agccagtgtggttgtagagattgta

SEQ ID NO: 106716 - DNA, 25 bp, Probe Sequence
gagccagtgtggttgtagagattgt

SEQ ID NO: 106717 - DNA, 25 bp, Probe Sequence
gaagttggaagatgagggaaggcat

SEQ ID NO: 106718 - DNA, 25 bp, Probe Sequence
cagaaaacacgaatgcaaagtcaag

SEQ ID NO: 106719 - DNA, 25 bp, Probe Sequence
atgcagaagttggaagatgagggaa

SEQ ID NO: 106720 - DNA, 25 bp, Probe Sequence
agaaaacacgaatgcaaagtcaagt

SEQ ID NO: 106721 - DNA, 25 bp, Probe Sequence
acagaaaacacgaatgcaaagtcaa

SEQ ID NO: 106722 - DNA, 25 bp, Probe Sequence
aaagtcaagtggagggcatttggaa

SEQ ID NO: 106723 - DNA, 25 bp, Probe Sequence
cagaagttggaagatgagggaaggc

SEQ ID NO: 106724 - DNA, 25 bp, Probe Sequence
gtttgcattttgaaaggttattggg

SEQ ID NO: 106725 - DNA, 25 bp, Probe Sequence
tttgcattttgaaaggttattgggt

SEQ ID NO: 106726 - DNA, 25 bp, Probe Sequence
ttgcattttgaaaggttattgggtc

SEQ ID NO: 106727 - DNA, 25 bp, Probe Sequence
agtttgcattttgaaaggttattgg

SEQ ID NO: 106728 - DNA, 25 bp, Probe Sequence
cattttgaaaggttattgggtccct

SEQ ID NO: 106729 - DNA, 25 bp, Probe Sequence
atctgtgggatatctcatcagcctt

SEQ ID NO: 106730 - DNA, 25 bp, Probe Sequence
cagtttgcattttgaaaggttattg

SEQ ID NO: 106731 - DNA, 25 bp, Probe Sequence
gcattttgaaaggttattgggtccc

SEQ ID NO: 106732 - DNA, 25 bp, Probe Sequence
tgcattttgaaaggttattgggtcc

SEQ ID NO: 106733 - DNA, 25 bp, Probe Sequence
aaataaaatgcagaacgtactctac

SEQ ID NO: 106734 - DNA, 25 bp, Probe Sequence
ctgtgggatatctcatcagccttga

SEQ ID NO: 106735 - DNA, 25 bp, Probe Sequence
tctgtgggatatctcatcagccttg

SEQ ID NO: 106736 - DNA, 25 bp, Probe Sequence
agcattttctcctggactccttgat

SEQ ID NO: 106737 - DNA, 25 bp, Probe Sequence
gaagcattttctcctggactccttg

SEQ ID NO: 106738 - DNA, 25 bp, Probe Sequence
gaaataaaatgcagaacgtactcta

SEQ ID NO: 106739 - DNA, 25 bp, Probe Sequence
aggaggagaatgaagacatggtacc

SEQ ID NO: 106740 - DNA, 25 bp, Probe Sequence
cattttctcctggactccttgatgc

SEQ ID NO: 106741 - DNA, 25 bp, Probe Sequence
gcattttctcctggactccttgatg

SEQ ID NO: 106742 - DNA, 25 bp, Probe Sequence
tgtgggatatctcatcagccttgat

SEQ ID NO: 106743 - DNA, 25 bp, Probe Sequence
aagcattttctcctggactccttga

SEQ ID NO: 106744 - DNA, 25 bp, Probe Sequence
gcagtttgcattttgaaaggttatt

SEQ ID NO: 106745 - DNA, 25 bp, Probe Sequence
agcagtttgcattttgaaaggttat

SEQ ID NO: 106746 - DNA, 25 bp, Probe Sequence
cagcagtttgcattttgaaaggtta

SEQ ID NO: 106747 - DNA, 25 bp, Probe Sequence
attttgaaaggttattgggtccctt

SEQ ID NO: 106748 - DNA, 25 bp, Probe Sequence
gaggaagagttgagttgtatgagtg

SEQ ID NO: 106749 - DNA, 25 bp, Probe Sequence
ttggaggaagagttgagttgtatga

SEQ ID NO: 106750 - DNA, 25 bp, Probe Sequence
gagaagtatgaatgcgtgtgtctaa

SEQ ID NO: 106751 - DNA, 25 bp, Probe Sequence
ggaggaagagttgagttgtatgagt

SEQ ID NO: 106752 - DNA, 25 bp, Probe Sequence
tggaggaagagttgagttgtatgag

SEQ ID NO: 106753 - DNA, 25 bp, Probe Sequence
aggaagagttgagttgtatgagtgg

SEQ ID NO: 106754 - DNA, 25 bp, Probe Sequence
ggagaagtatgaatgcgtgtgtcta

SEQ ID NO: 106755 - DNA, 25 bp, Probe Sequence
gaagtatgaatgcgtgtgtctaaat

SEQ ID NO: 106756 - DNA, 25 bp, Probe Sequence
tttggaggaagagttgagttgtatg

SEQ ID NO: 106757 - DNA, 25 bp, Probe Sequence
gtttggaggaagagttgagttgtat

SEQ ID NO: 106758 - DNA, 25 bp, Probe Sequence
cgtcacccaaagtagatgttagaaa

SEQ ID NO: 106759 - DNA, 25 bp, Probe Sequence
ctcgctaattgaatgtggaaagtag

SEQ ID NO: 106760 - DNA, 25 bp, Probe Sequence
aagtatgaatgcgtgtgtctaaatt

SEQ ID NO: 106761 - DNA, 25 bp, Probe Sequence
agaagtatgaatgcgtgtgtctaaa

SEQ ID NO: 106762 - DNA, 25 bp, Probe Sequence
cctcgctaattgaatgtggaaagta

SEQ ID NO: 106763 - DNA, 25 bp, Probe Sequence
agtttggaggaagagttgagttgta

SEQ ID NO: 106764 - DNA, 25 bp, Probe Sequence
aacctctttgggagaagtatgaatg

SEQ ID NO: 106765 - DNA, 25 bp, Probe Sequence
caacctctttgggagaagtatgaat

SEQ ID NO: 106766 - DNA, 25 bp, Probe Sequence
ggaagagttgagttgtatgagtggc

SEQ ID NO: 106767 - DNA, 25 bp, Probe Sequence
ctaattgaatgtggaaagtagcacc

SEQ ID NO: 106768 - DNA, 25 bp, Probe Sequence
ctctccaggattgtatgtttcaagc

SEQ ID NO: 106769 - DNA, 25 bp, Probe Sequence
gaagagttgagttgtatgagtggcg

SEQ ID NO: 106770 - DNA, 25 bp, Probe Sequence
gctctgtgtattgctctttgaatcg

SEQ ID NO: 106771 - DNA, 25 bp, Probe Sequence
cgctctgtgtattgctctttgaatc

SEQ ID NO: 106772 - DNA, 25 bp, Probe Sequence
aagaaggcgaggactaacttatagg

SEQ ID NO: 106773 - DNA, 25 bp, Probe Sequence
gaaggcgaggactaacttataggtg

SEQ ID NO: 106774 - DNA, 25 bp, Probe Sequence
agaaggcgaggactaacttataggt

SEQ ID NO: 106775 - DNA, 25 bp, Probe Sequence
aggcgaggactaacttataggtgaa

SEQ ID NO: 106776 - DNA, 25 bp, Probe Sequence
aaggcgaggactaacttataggtga

SEQ ID NO: 106777 - DNA, 25 bp, Probe Sequence
gcgaggactaacttataggtgaaat

SEQ ID NO: 106778 - DNA, 25 bp, Probe Sequence
aaagaaggcgaggactaacttatag

SEQ ID NO: 106779 - DNA, 25 bp, Probe Sequence
ttaaagaaggcgaggactaacttat

SEQ ID NO: 106780 - DNA, 25 bp, Probe Sequence
cgaggactaacttataggtgaaatc

SEQ ID NO: 106781 - DNA, 25 bp, Probe Sequence
gaactgagaaccaaagtatccaaac

SEQ ID NO: 106782 - DNA, 25 bp, Probe Sequence
taaagaaggcgaggactaacttata

SEQ ID NO: 106783 - DNA, 25 bp, Probe Sequence
aactgagaaccaaagtatccaaaca

SEQ ID NO: 106784 - DNA, 25 bp, Probe Sequence
ggagaatcaacagaaagggaacttc

SEQ ID NO: 106785 - DNA, 25 bp, Probe Sequence
ggcgaggactaacttataggtgaaa

SEQ ID NO: 106786 - DNA, 25 bp, Probe Sequence
caaagtgggagaatcaacagaaagg

SEQ ID NO: 106787 - DNA, 25 bp, Probe Sequence
attgatgactacagtgccctaagac

SEQ ID NO: 106788 - DNA, 25 bp, Probe Sequence
cattgatgactacagtgccctaaga

SEQ ID NO: 106789 - DNA, 25 bp, Probe Sequence
actgagaaccaaagtatccaaacag

SEQ ID NO: 106790 - DNA, 25 bp, Probe Sequence
acattgatgactacagtgccctaag

SEQ ID NO: 106791 - DNA, 25 bp, Probe Sequence
gcaaagtgggagaatcaacagaaag

SEQ ID NO: 106792 - DNA, 25 bp, Probe Sequence
ggactaacttataggtgaaatccct

SEQ ID NO: 106793 - DNA, 25 bp, Probe Sequence
aggactaacttataggtgaaatccc

SEQ ID NO: 106794 - DNA, 25 bp, Probe Sequence
ctgagaaccaaagtatccaaacagg

SEQ ID NO: 106795 - DNA, 25 bp, Probe Sequence
tttaaagaaggcgaggactaactta

SEQ ID NO: 106796 - DNA, 25 bp, Probe Sequence
cacgcttacttgatctattatgact

SEQ ID NO: 106797 - DNA, 25 bp, Probe Sequence
tcacgcttacttgatctattatgac

SEQ ID NO: 106798 - DNA, 25 bp, Probe Sequence
acgcttacttgatctattatgactt

SEQ ID NO: 106799 - DNA, 25 bp, Probe Sequence
ctcacgcttacttgatctattatga

SEQ ID NO: 106800 - DNA, 25 bp, Probe Sequence
tctcacgcttacttgatctattatg

SEQ ID NO: 106801 - DNA, 25 bp, Probe Sequence
ttgttctgttagctgatgtatgtag

SEQ ID NO: 106802 - DNA, 25 bp, Probe Sequence
atcactatcgctctatctcacaaag

SEQ ID NO: 106803 - DNA, 25 bp, Probe Sequence
caaatcactatcgctctatctcaca

SEQ ID NO: 106804 - DNA, 25 bp, Probe Sequence
acaaatcactatcgctctatctcac

SEQ ID NO: 106805 - DNA, 25 bp, Probe Sequence
aatcactatcgctctatctcacaaa

SEQ ID NO: 106806 - DNA, 25 bp, Probe Sequence
aaatcactatcgctctatctcacaa

SEQ ID NO: 106807 - DNA, 25 bp, Probe Sequence
tacaaatcactatcgctctatctca

SEQ ID NO: 106808 - DNA, 25 bp, Probe Sequence
ttctcacgcttacttgatctattat

SEQ ID NO: 106809 - DNA, 25 bp, Probe Sequence
tcactatcgctctatctcacaaaga

SEQ ID NO: 106810 - DNA, 25 bp, Probe Sequence
tgtttctcacgcttacttgatctat

SEQ ID NO: 106811 - DNA, 25 bp, Probe Sequence
atgtttctcacgcttacttgatcta

SEQ ID NO: 106812 - DNA, 25 bp, Probe Sequence
atacaaatcactatcgctctatctc

SEQ ID NO: 106813 - DNA, 25 bp, Probe Sequence
tgtaaattccagacactgtatgaga

SEQ ID NO: 106814 - DNA, 25 bp, Probe Sequence
ctgtaaattccagacactgtatgag

SEQ ID NO: 106815 - DNA, 25 bp, Probe Sequence
gtttctcacgcttacttgatctatt

SEQ ID NO: 106816 - DNA, 25 bp, Probe Sequence
gtaaattccagacactgtatgagaa

SEQ ID NO: 106817 - DNA, 25 bp, Probe Sequence
tgttctgttagctgatgtatgtagc

SEQ ID NO: 106818 - DNA, 25 bp, Probe Sequence
acttctcctgttgtccttctcagtt

SEQ ID NO: 106819 - DNA, 25 bp, Probe Sequence
catgtttctcacgcttacttgatct

SEQ ID NO: 106820 - DNA, 25 bp, Probe Sequence
ttgttctcaggctttgataagtagt

SEQ ID NO: 106821 - DNA, 25 bp, Probe Sequence
tgttctcaggctttgataagtagtg

SEQ ID NO: 106822 - DNA, 25 bp, Probe Sequence
cttgttctcaggctttgataagtag

SEQ ID NO: 106823 - DNA, 25 bp, Probe Sequence
aggctttgataagtagtgctgtttg

SEQ ID NO: 106824 - DNA, 25 bp, Probe Sequence
gcttgttctcaggctttgataagta

SEQ ID NO: 106825 - DNA, 25 bp, Probe Sequence
cccacagcaatttaagttacttgaa

SEQ ID NO: 106826 - DNA, 25 bp, Probe Sequence
ctttgataagtagtgctgtttgcca

SEQ ID NO: 106827 - DNA, 25 bp, Probe Sequence
ttctcaggctttgataagtagtgct

SEQ ID NO: 106828 - DNA, 25 bp, Probe Sequence
gttctcaggctttgataagtagtgc

SEQ ID NO: 106829 - DNA, 25 bp, Probe Sequence
ccacagcaatttaagttacttgaaa

SEQ ID NO: 106830 - DNA, 25 bp, Probe Sequence
caggctttgataagtagtgctgttt

SEQ ID NO: 106831 - DNA, 25 bp, Probe Sequence
tttgataagtagtgctgtttgccag

SEQ ID NO: 106832 - DNA, 25 bp, Probe Sequence
gcccacagcaatttaagttacttga

SEQ ID NO: 106833 - DNA, 25 bp, Probe Sequence
tcaggctttgataagtagtgctgtt

SEQ ID NO: 106834 - DNA, 25 bp, Probe Sequence
cacagcaatttaagttacttgaaac

SEQ ID NO: 106835 - DNA, 25 bp, Probe Sequence
gctttgataagtagtgctgtttgcc

SEQ ID NO: 106836 - DNA, 25 bp, Probe Sequence
ggctttgataagtagtgctgtttgc

SEQ ID NO: 106837 - DNA, 25 bp, Probe Sequence
tctcaggctttgataagtagtgctg

SEQ ID NO: 106838 - DNA, 25 bp, Probe Sequence
tagagtgtatcgcagtgttgggtaa

SEQ ID NO: 106839 - DNA, 25 bp, Probe Sequence
ctcaggctttgataagtagtgctgt

SEQ ID NO: 106840 - DNA, 25 bp, Probe Sequence
tatcgcagtgttgggtaagactttg

SEQ ID NO: 106841 - DNA, 25 bp, Probe Sequence
gtatcgcagtgttgggtaagacttt

SEQ ID NO: 106842 - DNA, 25 bp, Probe Sequence
atacatatttgcatcctgactaggc

SEQ ID NO: 106843 - DNA, 25 bp, Probe Sequence
gcaatttaagttacttgaaactcgc

SEQ ID NO: 106844 - DNA, 25 bp, Probe Sequence
ggtgcccaactattgtaagaaatat

SEQ ID NO: 106845 - DNA, 25 bp, Probe Sequence
ttaattacattgggagcagttcatg

SEQ ID NO: 106846 - DNA, 25 bp, Probe Sequence
tcacaatgtcgtgctaaataaatgt

SEQ ID NO: 106847 - DNA, 25 bp, Probe Sequence
tgtatttcacaatgtcgtgctaaat

SEQ ID NO: 106848 - DNA, 25 bp, Probe Sequence
gtgtatttcacaatgtcgtgctaaa

SEQ ID NO: 106849 - DNA, 25 bp, Probe Sequence
tttaattacattgggagcagttcat

SEQ ID NO: 106850 - DNA, 25 bp, Probe Sequence
atttaattacattgggagcagttca

SEQ ID NO: 106851 - DNA, 25 bp, Probe Sequence
cctcagaaatggactaggaatagaa

SEQ ID NO: 106852 - DNA, 25 bp, Probe Sequence
ctcagaaatggactaggaatagaaa

SEQ ID NO: 106853 - DNA, 25 bp, Probe Sequence
ttcacaatgtcgtgctaaataaatg

SEQ ID NO: 106854 - DNA, 25 bp, Probe Sequence
atgtcgtgctaaataaatgtatgtt

SEQ ID NO: 106855 - DNA, 25 bp, Probe Sequence
aatgtcgtgctaaataaatgtatgt

SEQ ID NO: 106856 - DNA, 25 bp, Probe Sequence
aaattcctgctttctcagttacatg

SEQ ID NO: 106857 - DNA, 25 bp, Probe Sequence
tggtgcccaactattgtaagaaata

SEQ ID NO: 106858 - DNA, 25 bp, Probe Sequence
caatgtcgtgctaaataaatgtatg

SEQ ID NO: 106859 - DNA, 25 bp, Probe Sequence
cacaatgtcgtgctaaataaatgta

SEQ ID NO: 106860 - DNA, 25 bp, Probe Sequence
tttcacaatgtcgtgctaaataaat

SEQ ID NO: 106861 - DNA, 25 bp, Probe Sequence
atttcacaatgtcgtgctaaataaa

SEQ ID NO: 106862 - DNA, 25 bp, Probe Sequence
tgtcgtgctaaataaatgtatgtta

SEQ ID NO: 106863 - DNA, 25 bp, Probe Sequence
acaatgtcgtgctaaataaatgtat

SEQ ID NO: 106864 - DNA, 25 bp, Probe Sequence
gtcgtgctaaataaatgtatgttac

SEQ ID NO: 106865 - DNA, 25 bp, Probe Sequence
tatttaattacattgggagcagttc

SEQ ID NO: 106866 - DNA, 25 bp, Probe Sequence
gtgcccaactattgtaagaaatatt

SEQ ID NO: 106867 - DNA, 25 bp, Probe Sequence
gtatttcacaatgtcgtgctaaata

SEQ ID NO: 106868 - DNA, 25 bp, Probe Sequence
caccatcttagactcttctgaggaa

SEQ ID NO: 106869 - DNA, 25 bp, Probe Sequence
agagacatcagtcaccatcttagac

SEQ ID NO: 106870 - DNA, 25 bp, Probe Sequence
tcaccatcttagactcttctgagga

SEQ ID NO: 106871 - DNA, 25 bp, Probe Sequence
aagaccgcttctataacaatcatgc

SEQ ID NO: 106872 - DNA, 25 bp, Probe Sequence
ttaccaagaagatgtcgattccatt

SEQ ID NO: 106873 - DNA, 25 bp, Probe Sequence
atctcagaggttatgtgttctaact

SEQ ID NO: 106874 - DNA, 25 bp, Probe Sequence
taccaagaagatgtcgattccattc

SEQ ID NO: 106875 - DNA, 25 bp, Probe Sequence
cttaccaagaagatgtcgattccat

SEQ ID NO: 106876 - DNA, 25 bp, Probe Sequence
ggaaggaagatttgatgttgtgaaa

SEQ ID NO: 106877 - DNA, 25 bp, Probe Sequence
gtcaccatcttagactcttctgagg

SEQ ID NO: 106878 - DNA, 25 bp, Probe Sequence
aggaaggaagatttgatgttgtgaa

SEQ ID NO: 106879 - DNA, 25 bp, Probe Sequence
tctcagaggttatgtgttctaacta

SEQ ID NO: 106880 - DNA, 25 bp, Probe Sequence
gaggaaggaagatttgatgttgtga

SEQ ID NO: 106881 - DNA, 25 bp, Probe Sequence
ctgaggaaggaagatttgatgttgt

SEQ ID NO: 106882 - DNA, 25 bp, Probe Sequence
gatctcagaggttatgtgttctaac

SEQ ID NO: 106883 - DNA, 25 bp, Probe Sequence
tgaggaaggaagatttgatgttgtg

SEQ ID NO: 106884 - DNA, 25 bp, Probe Sequence
tccatcaaccttcttattaatgtca

SEQ ID NO: 106885 - DNA, 25 bp, Probe Sequence
gaagatgtcgattccattctccaac

SEQ ID NO: 106886 - DNA, 25 bp, Probe Sequence
gaagagacatcagtcaccatcttag

SEQ ID NO: 106887 - DNA, 25 bp, Probe Sequence
atccaaatccatcaaccttcttatt

SEQ ID NO: 106888 - DNA, 25 bp, Probe Sequence
aatccaaatccatcaaccttcttat

SEQ ID NO: 106889 - DNA, 25 bp, Probe Sequence
ataatccaaatccatcaaccttctt

SEQ ID NO: 106890 - DNA, 25 bp, Probe Sequence
aataatccaaatccatcaaccttct

SEQ ID NO: 106891 - DNA, 25 bp, Probe Sequence
aagagacatcagtcaccatcttaga

SEQ ID NO: 106892 - DNA, 25 bp, Probe Sequence
ttgtcttccatcatgttgtctatca

SEQ ID NO: 106893 - DNA, 25 bp, Probe Sequence
tgtcttccatcatgttgtctatcac

SEQ ID NO: 106894 - DNA, 25 bp, Probe Sequence
ttccatcatgttgtctatcacagtt

SEQ ID NO: 106895 - DNA, 25 bp, Probe Sequence
tcttccatcatgttgtctatcacag

SEQ ID NO: 106896 - DNA, 25 bp, Probe Sequence
cttccatcatgttgtctatcacagt

SEQ ID NO: 106897 - DNA, 25 bp, Probe Sequence
gtcttccatcatgttgtctatcaca

SEQ ID NO: 106898 - DNA, 25 bp, Probe Sequence
gctgtgacaatgatgggaaattatt

SEQ ID NO: 106899 - DNA, 25 bp, Probe Sequence
agtcctgtttctctgattgttaagc

SEQ ID NO: 106900 - DNA, 25 bp, Probe Sequence
tgctgtgacaatgatgggaaattat

SEQ ID NO: 106901 - DNA, 25 bp, Probe Sequence
atgctgtgacaatgatgggaaatta

SEQ ID NO: 106902 - DNA, 25 bp, Probe Sequence
actttgtcttccatcatgttgtcta

SEQ ID NO: 106903 - DNA, 25 bp, Probe Sequence
tactttgtcttccatcatgttgtct

SEQ ID NO: 106904 - DNA, 25 bp, Probe Sequence
atactttgtcttccatcatgttgtc

SEQ ID NO: 106905 - DNA, 25 bp, Probe Sequence
tttgtcttccatcatgttgtctatc

SEQ ID NO: 106906 - DNA, 25 bp, Probe Sequence
ctttgtcttccatcatgttgtctat

SEQ ID NO: 106907 - DNA, 25 bp, Probe Sequence
catactttgtcttccatcatgttgt

SEQ ID NO: 106908 - DNA, 25 bp, Probe Sequence
cagtcctgtttctctgattgttaag

SEQ ID NO: 106909 - DNA, 25 bp, Probe Sequence
tcatactttgtcttccatcatgttg

SEQ ID NO: 106910 - DNA, 25 bp, Probe Sequence
gtaaatccatgctgtgacaatgatg

SEQ ID NO: 106911 - DNA, 25 bp, Probe Sequence
ccatcatgttgtctatcacagtttg

SEQ ID NO: 106912 - DNA, 25 bp, Probe Sequence
tccatcatgttgtctatcacagttt

SEQ ID NO: 106913 - DNA, 25 bp, Probe Sequence
catcatgttgtctatcacagtttgt

SEQ ID NO: 106914 - DNA, 25 bp, Probe Sequence
atcatactttgtcttccatcatgtt

SEQ ID NO: 106915 - DNA, 25 bp, Probe Sequence
aatcatactttgtcttccatcatgt

SEQ ID NO: 106916 - DNA, 25 bp, Probe Sequence
ccatcctgacctcctattaaagaaa

SEQ ID NO: 106917 - DNA, 25 bp, Probe Sequence
accatcctgacctcctattaaagaa

SEQ ID NO: 106918 - DNA, 25 bp, Probe Sequence
gaccatcctgacctcctattaaaga

SEQ ID NO: 106919 - DNA, 25 bp, Probe Sequence
tgaccatcctgacctcctattaaag

SEQ ID NO: 106920 - DNA, 25 bp, Probe Sequence
ctgaccatcctgacctcctattaaa

SEQ ID NO: 106921 - DNA, 25 bp, Probe Sequence
gctgaccatcctgacctcctattaa

SEQ ID NO: 106922 - DNA, 25 bp, Probe Sequence
agctgaccatcctgacctcctatta

SEQ ID NO: 106923 - DNA, 25 bp, Probe Sequence
cctgacctcctattaaagaaaatga

SEQ ID NO: 106924 - DNA, 25 bp, Probe Sequence
tcctgacctcctattaaagaaaatg

SEQ ID NO: 106925 - DNA, 25 bp, Probe Sequence
catcctgacctcctattaaagaaaa

SEQ ID NO: 106926 - DNA, 25 bp, Probe Sequence
ctaaacttaggggagatactggagc

SEQ ID NO: 106927 - DNA, 25 bp, Probe Sequence
tgacctcctattaaagaaaatgagc

SEQ ID NO: 106928 - DNA, 25 bp, Probe Sequence
tcctattaaagaaaatgagctgctg

SEQ ID NO: 106929 - DNA, 25 bp, Probe Sequence
aaaggctagaggtaaagctgtatcc

SEQ ID NO: 106930 - DNA, 25 bp, Probe Sequence
atcctgacctcctattaaagaaaat

SEQ ID NO: 106931 - DNA, 25 bp, Probe Sequence
cctcctattaaagaaaatgagctgc

SEQ ID NO: 106932 - DNA, 25 bp, Probe Sequence
ctcctattaaagaaaatgagctgct

SEQ ID NO: 106933 - DNA, 25 bp, Probe Sequence
taaacttaggggagatactggagct

SEQ ID NO: 106934 - DNA, 25 bp, Probe Sequence
acctcctattaaagaaaatgagctg

SEQ ID NO: 106935 - DNA, 25 bp, Probe Sequence
gacctcctattaaagaaaatgagct

SEQ ID NO: 106936 - DNA, 25 bp, Probe Sequence
ctgacctcctattaaagaaaatgag

SEQ ID NO: 106937 - DNA, 25 bp, Probe Sequence
aaggctagaggtaaagctgtatccc

SEQ ID NO: 106938 - DNA, 25 bp, Probe Sequence
aaaaggctagaggtaaagctgtatc

SEQ ID NO: 106939 - DNA, 25 bp, Probe Sequence
caaaaggctagaggtaaagctgtat

SEQ ID NO: 106940 - DNA, 25 bp, Probe Sequence
gatgcgtgtttaatgatgatgactc

SEQ ID NO: 106941 - DNA, 25 bp, Probe Sequence
tgtttaatgatgatgactccgcaag

SEQ ID NO: 106942 - DNA, 25 bp, Probe Sequence
atgcgtgtttaatgatgatgactcc

SEQ ID NO: 106943 - DNA, 25 bp, Probe Sequence
gtgtttaatgatgatgactccgcaa

SEQ ID NO: 106944 - DNA, 25 bp, Probe Sequence
cgatgcgtgtttaatgatgatgact

SEQ ID NO: 106945 - DNA, 25 bp, Probe Sequence
attcgatgcgtgtttaatgatgatg

SEQ ID NO: 106946 - DNA, 25 bp, Probe Sequence
gtttaatgatgatgactccgcaagc

SEQ ID NO: 106947 - DNA, 25 bp, Probe Sequence
ttcgatgcgtgtttaatgatgatga

SEQ ID NO: 106948 - DNA, 25 bp, Probe Sequence
tcgatgcgtgtttaatgatgatgac

SEQ ID NO: 106949 - DNA, 25 bp, Probe Sequence
tttaatgatgatgactccgcaagcc

SEQ ID NO: 106950 - DNA, 25 bp, Probe Sequence
cattcgatgcgtgtttaatgatgat

SEQ ID NO: 106951 - DNA, 25 bp, Probe Sequence
cgtgtttaatgatgatgactccgca

SEQ ID NO: 106952 - DNA, 25 bp, Probe Sequence
tgcgtgtttaatgatgatgactccg

SEQ ID NO: 106953 - DNA, 25 bp, Probe Sequence
gcattcgatgcgtgtttaatgatga

SEQ ID NO: 106954 - DNA, 25 bp, Probe Sequence
ggcattcgatgcgtgtttaatgatg

SEQ ID NO: 106955 - DNA, 25 bp, Probe Sequence
aggcattcgatgcgtgtttaatgat

SEQ ID NO: 106956 - DNA, 25 bp, Probe Sequence
caaggcattcgatgcgtgtttaatg

SEQ ID NO: 106957 - DNA, 25 bp, Probe Sequence
aaggcattcgatgcgtgtttaatga

SEQ ID NO: 106958 - DNA, 25 bp, Probe Sequence
gcgtgtttaatgatgatgactccgc

SEQ ID NO: 106959 - DNA, 25 bp, Probe Sequence
ccaaggcattcgatgcgtgtttaat

SEQ ID NO: 106960 - DNA, 25 bp, Probe Sequence
tgttcctcttagaagtcagatcatc

SEQ ID NO: 106961 - DNA, 25 bp, Probe Sequence
gttcctcttagaagtcagatcatct

SEQ ID NO: 106962 - DNA, 25 bp, Probe Sequence
ttgttcctcttagaagtcagatcat

SEQ ID NO: 106963 - DNA, 25 bp, Probe Sequence
atatgaactgttaatcttggtggat

SEQ ID NO: 106964 - DNA, 25 bp, Probe Sequence
gtatatgaactgttaatcttggtgg

SEQ ID NO: 106965 - DNA, 25 bp, Probe Sequence
ggtatatgaactgttaatcttggtg

SEQ ID NO: 106966 - DNA, 25 bp, Probe Sequence
tatatgaactgttaatcttggtgga

SEQ ID NO: 106967 - DNA, 25 bp, Probe Sequence
aggtatatgaactgttaatcttggt

SEQ ID NO: 106968 - DNA, 25 bp, Probe Sequence
atgaactgttaatcttggtggattc

SEQ ID NO: 106969 - DNA, 25 bp, Probe Sequence
tgaactgttaatcttggtggattcc

SEQ ID NO: 106970 - DNA, 25 bp, Probe Sequence
gcaacgccatagcaaatataaagat

SEQ ID NO: 106971 - DNA, 25 bp, Probe Sequence
acaagtggtagtagagtggtttaac

SEQ ID NO: 106972 - DNA, 25 bp, Probe Sequence
gtgagttccttagcttctgcctata

SEQ ID NO: 106973 - DNA, 25 bp, Probe Sequence
gtcagtcattggctttgtcatttac

SEQ ID NO: 106974 - DNA, 25 bp, Probe Sequence
agtcagtcattggctttgtcattta

SEQ ID NO: 106975 - DNA, 25 bp, Probe Sequence
ctttctcatctgtcaaatgctatgg

SEQ ID NO: 106976 - DNA, 25 bp, Probe Sequence
tctcatctgtcaaatgctatggttt

SEQ ID NO: 106977 - DNA, 25 bp, Probe Sequence
ttctcatctgtcaaatgctatggtt

SEQ ID NO: 106978 - DNA, 25 bp, Probe Sequence
tttctcatctgtcaaatgctatggt

SEQ ID NO: 106979 - DNA, 25 bp, Probe Sequence
gctttctcatctgtcaaatgctatg

SEQ ID NO: 106980 - DNA, 25 bp, Probe Sequence
tgagttccttagcttctgcctatag

SEQ ID NO: 106981 - DNA, 25 bp, Probe Sequence
tgaagggaggaaatgttacagtaat

SEQ ID NO: 106982 - DNA, 25 bp, Probe Sequence
tttagagtcagtcattggctttgtc

SEQ ID NO: 106983 - DNA, 25 bp, Probe Sequence
caagtggtagtagagtggtttaacg

SEQ ID NO: 106984 - DNA, 25 bp, Probe Sequence
caccactgttatattaccttctcca

SEQ ID NO: 106985 - DNA, 25 bp, Probe Sequence
tcaccactgttatattaccttctcc

SEQ ID NO: 106986 - DNA, 25 bp, Probe Sequence
gacttggatacattacagcagacat

SEQ ID NO: 106987 - DNA, 25 bp, Probe Sequence
aagacttggatacattacagcagac

SEQ ID NO: 106988 - DNA, 25 bp, Probe Sequence
gtcaccactgttatattaccttctc

SEQ ID NO: 106989 - DNA, 25 bp, Probe Sequence
gaatgattgcttaggaactgacaac

SEQ ID NO: 106990 - DNA, 25 bp, Probe Sequence
agaatgattgcttaggaactgacaa

SEQ ID NO: 106991 - DNA, 25 bp, Probe Sequence
agacttggatacattacagcagaca

SEQ ID NO: 106992 - DNA, 25 bp, Probe Sequence
atgattgcttaggaactgacaacaa

SEQ ID NO: 106993 - DNA, 25 bp, Probe Sequence
aatgattgcttaggaactgacaaca

SEQ ID NO: 106994 - DNA, 25 bp, Probe Sequence
aagttgaggttgatcttgatctaca

SEQ ID NO: 106995 - DNA, 25 bp, Probe Sequence
agtcaccactgttatattaccttct

SEQ ID NO: 106996 - DNA, 25 bp, Probe Sequence
agttgaggttgatcttgatctacaa

SEQ ID NO: 106997 - DNA, 25 bp, Probe Sequence
aataagccatagacatgaacaacac

SEQ ID NO: 106998 - DNA, 25 bp, Probe Sequence
accactgttatattaccttctccag

SEQ ID NO: 106999 - DNA, 25 bp, Probe Sequence
cattgaagacgcatcacctagttaa

SEQ ID NO: 107000 - DNA, 25 bp, Probe Sequence
tacaagacttggatacattacagca

SEQ ID NO: 107001 - DNA, 25 bp, Probe Sequence
aatcagacgatgagactagaaggag

SEQ ID NO: 107002 - DNA, 25 bp, Probe Sequence
acttggatacattacagcagacatg

SEQ ID NO: 107003 - DNA, 25 bp, Probe Sequence
ccactgttatattaccttctccagg

SEQ ID NO: 107004 - DNA, 25 bp, Probe Sequence
caagacttggatacattacagcaga

SEQ ID NO: 107005 - DNA, 25 bp, Probe Sequence
atagacatgaacaacacctcactac

SEQ ID NO: 107006 - DNA, 25 bp, Probe Sequence
catagacatgaacaacacctcacta

SEQ ID NO: 107007 - DNA, 25 bp, Probe Sequence
cagaatgattgcttaggaactgaca

SEQ ID NO: 107008 - DNA, 25 bp, Probe Sequence
gctgttcacggtcttatactattgt

SEQ ID NO: 107009 - DNA, 25 bp, Probe Sequence
ctgttcacggtcttatactattgtt

SEQ ID NO: 107010 - DNA, 25 bp, Probe Sequence
atcttgaattatgccaactccagac

SEQ ID NO: 107011 - DNA, 25 bp, Probe Sequence
catcttgaattatgccaactccaga

SEQ ID NO: 107012 - DNA, 25 bp, Probe Sequence
gaattatgccaactccagacttctc

SEQ ID NO: 107013 - DNA, 25 bp, Probe Sequence
ttgaattatgccaactccagacttc

SEQ ID NO: 107014 - DNA, 25 bp, Probe Sequence
cttgaattatgccaactccagactt

SEQ ID NO: 107015 - DNA, 25 bp, Probe Sequence
tgaattatgccaactccagacttct

SEQ ID NO: 107016 - DNA, 25 bp, Probe Sequence
tggaatatgtcacatgatgaagttg

SEQ ID NO: 107017 - DNA, 25 bp, Probe Sequence
tcttgaattatgccaactccagact

SEQ ID NO: 107018 - DNA, 25 bp, Probe Sequence
gagctgttcacggtcttatactatt

SEQ ID NO: 107019 - DNA, 25 bp, Probe Sequence
ctggaatatgtcacatgatgaagtt

SEQ ID NO: 107020 - DNA, 25 bp, Probe Sequence
agctgttcacggtcttatactattg

SEQ ID NO: 107021 - DNA, 25 bp, Probe Sequence
ggaatatgtcacatgatgaagttgt

SEQ ID NO: 107022 - DNA, 25 bp, Probe Sequence
gctggaatatgtcacatgatgaagt

SEQ ID NO: 107023 - DNA, 25 bp, Probe Sequence
aattatgccaactccagacttctcc

SEQ ID NO: 107024 - DNA, 25 bp, Probe Sequence
agctggaatatgtcacatgatgaag

SEQ ID NO: 107025 - DNA, 25 bp, Probe Sequence
agtaatgttatttgctctgtgtgtt

SEQ ID NO: 107026 - DNA, 25 bp, Probe Sequence
tgagctgttcacggtcttatactat

SEQ ID NO: 107027 - DNA, 25 bp, Probe Sequence
cctccaggttctttcagtaatgtta

SEQ ID NO: 107028 - DNA, 25 bp, Probe Sequence
atttaatagcctccaggttctttca

SEQ ID NO: 107029 - DNA, 25 bp, Probe Sequence
tttaatagcctccaggttctttcag

SEQ ID NO: 107030 - DNA, 25 bp, Probe Sequence
tgtatttaatagcctccaggttctt

SEQ ID NO: 107031 - DNA, 25 bp, Probe Sequence
ttgtatttaatagcctccaggttct

SEQ ID NO: 107032 - DNA, 25 bp, Probe Sequence
ctctctgctcaccttccttggtatt

SEQ ID NO: 107033 - DNA, 25 bp, Probe Sequence
tctctctgctcaccttccttggtat

SEQ ID NO: 107034 - DNA, 25 bp, Probe Sequence
ctctctctgctcaccttccttggta

SEQ ID NO: 107035 - DNA, 25 bp, Probe Sequence
taactcgacccagtggtacaatgag

SEQ ID NO: 107036 - DNA, 25 bp, Probe Sequence
gtaactcgacccagtggtacaatga

SEQ ID NO: 107037 - DNA, 25 bp, Probe Sequence
ctatctgaactggatcgcctccaag

SEQ ID NO: 107038 - DNA, 25 bp, Probe Sequence
tgtatgttcacttacgcctctcaag

SEQ ID NO: 107039 - DNA, 25 bp, Probe Sequence
agatgaactgggaagagatgaaatg

SEQ ID NO: 107040 - DNA, 25 bp, Probe Sequence
gatgaactgggaagagatgaaatgt

SEQ ID NO: 107041 - DNA, 25 bp, Probe Sequence
atgaactgggaagagatgaaatgtt

SEQ ID NO: 107042 - DNA, 25 bp, Probe Sequence
tgaactgggaagagatgaaatgttt

SEQ ID NO: 107043 - DNA, 25 bp, Probe Sequence
aaactgaggaatttgaagtgaccaa

SEQ ID NO: 107044 - DNA, 25 bp, Probe Sequence
cagaactgctttcctatgtttaccc

SEQ ID NO: 107045 - DNA, 25 bp, Probe Sequence
cagatgaactgggaagagatgaaat

SEQ ID NO: 107046 - DNA, 25 bp, Probe Sequence
agaactgctttcctatgtttaccca

SEQ ID NO: 107047 - DNA, 25 bp, Probe Sequence
ctactctaaagccgcatttgaaagg

SEQ ID NO: 107048 - DNA, 25 bp, Probe Sequence
cctactctaaagccgcatttgaaag

SEQ ID NO: 107049 - DNA, 25 bp, Probe Sequence
gtgtatgttcacttacgcctctcaa

SEQ ID NO: 107050 - DNA, 25 bp, Probe Sequence
tcagatgaactgggaagagatgaaa

SEQ ID NO: 107051 - DNA, 25 bp, Probe Sequence
gaactgctttcctatgtttacccag

SEQ ID NO: 107052 - DNA, 25 bp, Probe Sequence
gtatgttcacttacgcctctcaagg

SEQ ID NO: 107053 - DNA, 25 bp, Probe Sequence
ctttcagatgaactgggaagagatg

SEQ ID NO: 107054 - DNA, 25 bp, Probe Sequence
tatgttcacttacgcctctcaagga

SEQ ID NO: 107055 - DNA, 25 bp, Probe Sequence
tttcagatgaactgggaagagatga

SEQ ID NO: 107056 - DNA, 25 bp, Probe Sequence
gtacttcacacagttcaaggcagag

SEQ ID NO: 107057 - DNA, 25 bp, Probe Sequence
ctaaagccgcatttgaaagggaaag

SEQ ID NO: 107058 - DNA, 25 bp, Probe Sequence
cctttcagatgaactgggaagagat

SEQ ID NO: 107059 - DNA, 25 bp, Probe Sequence
aatatacgtgtatgttcacttacgc

SEQ ID NO: 107060 - DNA, 25 bp, Probe Sequence
atatacgtgtatgttcacttacgcc

SEQ ID NO: 107061 - DNA, 25 bp, Probe Sequence
cgcatttgaaagggaaagtgatgtc

SEQ ID NO: 107062 - DNA, 25 bp, Probe Sequence
tactgtaggactggatattaggtgt

SEQ ID NO: 107063 - DNA, 25 bp, Probe Sequence
atacattcttcaacagcattaacgg

SEQ ID NO: 107064 - DNA, 25 bp, Probe Sequence
tcggagtgtataagaatgcttgtaa

SEQ ID NO: 107065 - DNA, 25 bp, Probe Sequence
gtcagtgtcggagtgtataagaatg

SEQ ID NO: 107066 - DNA, 25 bp, Probe Sequence
tacattcttcaacagcattaacgga

SEQ ID NO: 107067 - DNA, 25 bp, Probe Sequence
gtcggagtgtataagaatgcttgta

SEQ ID NO: 107068 - DNA, 25 bp, Probe Sequence
catacattcttcaacagcattaacg

SEQ ID NO: 107069 - DNA, 25 bp, Probe Sequence
tagagtctgatgtgtcttagagcat

SEQ ID NO: 107070 - DNA, 25 bp, Probe Sequence
ttactgtaggactggatattaggtg

SEQ ID NO: 107071 - DNA, 25 bp, Probe Sequence
cttaccacagcacagaacatacatt

SEQ ID NO: 107072 - DNA, 25 bp, Probe Sequence
tgtcagtgtcggagtgtataagaat

SEQ ID NO: 107073 - DNA, 25 bp, Probe Sequence
ttaccacagcacagaacatacattc

SEQ ID NO: 107074 - DNA, 25 bp, Probe Sequence
attcttcaacagcattaacggagtt

SEQ ID NO: 107075 - DNA, 25 bp, Probe Sequence
cattcttcaacagcattaacggagt

SEQ ID NO: 107076 - DNA, 25 bp, Probe Sequence
acattcttcaacagcattaacggag

SEQ ID NO: 107077 - DNA, 25 bp, Probe Sequence
acatacattcttcaacagcattaac

SEQ ID NO: 107078 - DNA, 25 bp, Probe Sequence
gtgtcggagtgtataagaatgcttg

SEQ ID NO: 107079 - DNA, 25 bp, Probe Sequence
ctagagtctgatgtgtcttagagca

SEQ ID NO: 107080 - DNA, 25 bp, Probe Sequence
ttattagcaccatgaactcgtacta

SEQ ID NO: 107081 - DNA, 25 bp, Probe Sequence
tattagcaccatgaactcgtactat

SEQ ID NO: 107082 - DNA, 25 bp, Probe Sequence
ctgtcagtgtcggagtgtataagaa

SEQ ID NO: 107083 - DNA, 25 bp, Probe Sequence
agtgtcggagtgtataagaatgctt

SEQ ID NO: 107084 - DNA, 25 bp, Probe Sequence
tgtaggactggatattaggtgtcat

SEQ ID NO: 107085 - DNA, 25 bp, Probe Sequence
gaaggtggttatgtaagaggcttaa

SEQ ID NO: 107086 - DNA, 25 bp, Probe Sequence
atttggcatctgaagcatataaagg

SEQ ID NO: 107087 - DNA, 25 bp, Probe Sequence
tttggcatctgaagcatataaaggt

SEQ ID NO: 107088 - DNA, 25 bp, Probe Sequence
catctgaagcatataaaggtctggg

SEQ ID NO: 107089 - DNA, 25 bp, Probe Sequence
ttggcatctgaagcatataaaggtc

SEQ ID NO: 107090 - DNA, 25 bp, Probe Sequence
gatttggcatctgaagcatataaag

SEQ ID NO: 107091 - DNA, 25 bp, Probe Sequence
gcatctgaagcatataaaggtctgg

SEQ ID NO: 107092 - DNA, 25 bp, Probe Sequence
ggcatctgaagcatataaaggtctg

SEQ ID NO: 107093 - DNA, 25 bp, Probe Sequence
tggcatctgaagcatataaaggtct

SEQ ID NO: 107094 - DNA, 25 bp, Probe Sequence
ttctgtgctggatgctcttcaagta

SEQ ID NO: 107095 - DNA, 25 bp, Probe Sequence
tcttagatttggcatctgaagcata

SEQ ID NO: 107096 - DNA, 25 bp, Probe Sequence
cttagatttggcatctgaagcatat

SEQ ID NO: 107097 - DNA, 25 bp, Probe Sequence
ttcttagatttggcatctgaagcat

SEQ ID NO: 107098 - DNA, 25 bp, Probe Sequence
ttaaggaaggtttgtacgttctgtg

SEQ ID NO: 107099 - DNA, 25 bp, Probe Sequence
aatcaatttgaggagggagccttaa

SEQ ID NO: 107100 - DNA, 25 bp, Probe Sequence
aaatcaatttgaggagggagcctta

SEQ ID NO: 107101 - DNA, 25 bp, Probe Sequence
agatttggcatctgaagcatataaa

SEQ ID NO: 107102 - DNA, 25 bp, Probe Sequence
gttcttagatttggcatctgaagca

SEQ ID NO: 107103 - DNA, 25 bp, Probe Sequence
cttaaggaaggtttgtacgttctgt

SEQ ID NO: 107104 - DNA, 25 bp, Probe Sequence
tagatttggcatctgaagcatataa

SEQ ID NO: 107105 - DNA, 25 bp, Probe Sequence
ttagatttggcatctgaagcatata

SEQ ID NO: 107106 - DNA, 25 bp, Probe Sequence
ggttcttagatttggcatctgaagc

SEQ ID NO: 107107 - DNA, 25 bp, Probe Sequence
atgtttcactagctcatgtaaactg

SEQ ID NO: 107108 - DNA, 25 bp, Probe Sequence
atctgaagcatataaaggtctgggg

SEQ ID NO: 107109 - DNA, 25 bp, Probe Sequence
tctgtgctggatgctcttcaagtac

SEQ ID NO: 107110 - DNA, 25 bp, Probe Sequence
attgagactgtattgttatgagcct

SEQ ID NO: 107111 - DNA, 25 bp, Probe Sequence
ttgagactgtattgttatgagccta

SEQ ID NO: 107112 - DNA, 25 bp, Probe Sequence
tgagactgtattgttatgagcctag

SEQ ID NO: 107113 - DNA, 25 bp, Probe Sequence
tattgagactgtattgttatgagcc

SEQ ID NO: 107114 - DNA, 25 bp, Probe Sequence
aattcctcacagattaaccagtatt

SEQ ID NO: 107115 - DNA, 25 bp, Probe Sequence
gtattgagactgtattgttatgagc

SEQ ID NO: 107116 - DNA, 25 bp, Probe Sequence
ttctgatcttctagtggctacttaa

SEQ ID NO: 107117 - DNA, 25 bp, Probe Sequence
tctgatcttctagtggctacttaat

SEQ ID NO: 107118 - DNA, 25 bp, Probe Sequence
gaacacatagaactgatggaggctt

SEQ ID NO: 107119 - DNA, 25 bp, Probe Sequence
cagactattcacagccctatttact

SEQ ID NO: 107120 - DNA, 25 bp, Probe Sequence
gttaggaaatggaatggtctctttg

SEQ ID NO: 107121 - DNA, 25 bp, Probe Sequence
tgttaggaaatggaatggtctcttt

SEQ ID NO: 107122 - DNA, 25 bp, Probe Sequence
ttgttaggaaatggaatggtctctt

SEQ ID NO: 107123 - DNA, 25 bp, Probe Sequence
tttgttaggaaatggaatggtctct

SEQ ID NO: 107124 - DNA, 25 bp, Probe Sequence
gtttgttaggaaatggaatggtctc

SEQ ID NO: 107125 - DNA, 25 bp, Probe Sequence
gaaagataaatgatgaagtgctggg

SEQ ID NO: 107126 - DNA, 25 bp, Probe Sequence
agtaaaggaggcaaagaagaaagat

SEQ ID NO: 107127 - DNA, 25 bp, Probe Sequence
gaagtaaaggaggcaaagaagaaag

SEQ ID NO: 107128 - DNA, 25 bp, Probe Sequence
ttaggaaatggaatggtctctttga

SEQ ID NO: 107129 - DNA, 25 bp, Probe Sequence
ctgtttgttaggaaatggaatggtc

SEQ ID NO: 107130 - DNA, 25 bp, Probe Sequence
agataaatgatgaagtgctgggaat

SEQ ID NO: 107131 - DNA, 25 bp, Probe Sequence
aagtaaaggaggcaaagaagaaaga

SEQ ID NO: 107132 - DNA, 25 bp, Probe Sequence
aggaaatggaatggtctctttgatt

SEQ ID NO: 107133 - DNA, 25 bp, Probe Sequence
taggaaatggaatggtctctttgat

SEQ ID NO: 107134 - DNA, 25 bp, Probe Sequence
ctatgtgaggaagcagtaagaaggt

SEQ ID NO: 107135 - DNA, 25 bp, Probe Sequence
tatgtgaggaagcagtaagaaggtg

SEQ ID NO: 107136 - DNA, 25 bp, Probe Sequence
aatgtaccagcaccttagtcttgta

SEQ ID NO: 107137 - DNA, 25 bp, Probe Sequence
actatgtgaggaagcagtaagaagg

SEQ ID NO: 107138 - DNA, 25 bp, Probe Sequence
cactatgtgaggaagcagtaagaag

SEQ ID NO: 107139 - DNA, 25 bp, Probe Sequence
gaggaagcagtaagaaggtgtcatt

SEQ ID NO: 107140 - DNA, 25 bp, Probe Sequence
aggaagcagtaagaaggtgtcattc

SEQ ID NO: 107141 - DNA, 25 bp, Probe Sequence
taccagcaccttagtcttgtacttc

SEQ ID NO: 107142 - DNA, 25 bp, Probe Sequence
gcctattattctgttctactattgg

SEQ ID NO: 107143 - DNA, 25 bp, Probe Sequence
agcagtaagaaggtgtcattctatg

SEQ ID NO: 107144 - DNA, 25 bp, Probe Sequence
aagcagtaagaaggtgtcattctat

SEQ ID NO: 107145 - DNA, 25 bp, Probe Sequence
gaagcagtaagaaggtgtcattcta

SEQ ID NO: 107146 - DNA, 25 bp, Probe Sequence
gtatgacattaagcctttggaacca

SEQ ID NO: 107147 - DNA, 25 bp, Probe Sequence
ctgtatgacattaagcctttggaac

SEQ ID NO: 107148 - DNA, 25 bp, Probe Sequence
gcagtaagaaggtgtcattctatga

SEQ ID NO: 107149 - DNA, 25 bp, Probe Sequence
tttccctgtatgacattaagccttt

SEQ ID NO: 107150 - DNA, 25 bp, Probe Sequence
aagaaggtgtcattctatgaaccag

SEQ ID NO: 107151 - DNA, 25 bp, Probe Sequence
taagaaggtgtcattctatgaacca

SEQ ID NO: 107152 - DNA, 25 bp, Probe Sequence
gtaagaaggtgtcattctatgaacc

SEQ ID NO: 107153 - DNA, 25 bp, Probe Sequence
cctgtatgacattaagcctttggaa

SEQ ID NO: 107154 - DNA, 25 bp, Probe Sequence
ttccctgtatgacattaagcctttg

SEQ ID NO: 107155 - DNA, 25 bp, Probe Sequence
ttcctggcctattattctgttctac

SEQ ID NO: 107156 - DNA, 25 bp, Probe Sequence
atgtgaggaagcagtaagaaggtgt

SEQ ID NO: 107157 - DNA, 25 bp, Probe Sequence
cttcctggcctattattctgttcta

SEQ ID NO: 107158 - DNA, 25 bp, Probe Sequence
gctactaacaagagagagaacacat

SEQ ID NO: 107159 - DNA, 25 bp, Probe Sequence
atagaagagacagtgaagcaagtaa

SEQ ID NO: 107160 - DNA, 25 bp, Probe Sequence
aatagaagagacagtgaagcaagta

SEQ ID NO: 107161 - DNA, 25 bp, Probe Sequence
atcagtctacctctactccattcta

SEQ ID NO: 107162 - DNA, 25 bp, Probe Sequence
tcagtctacctctactccattctag

SEQ ID NO: 107163 - DNA, 25 bp, Probe Sequence
tactaacaagagagagaacacatgc

SEQ ID NO: 107164 - DNA, 25 bp, Probe Sequence
aagatcagtctacctctactccatt

SEQ ID NO: 107165 - DNA, 25 bp, Probe Sequence
gatcagtctacctctactccattct

SEQ ID NO: 107166 - DNA, 25 bp, Probe Sequence
agatcagtctacctctactccattc

SEQ ID NO: 107167 - DNA, 25 bp, Probe Sequence
ctactaacaagagagagaacacatg

SEQ ID NO: 107168 - DNA, 25 bp, Probe Sequence
aagctactaacaagagagagaacac

SEQ ID NO: 107169 - DNA, 25 bp, Probe Sequence
caagctactaacaagagagagaaca

SEQ ID NO: 107170 - DNA, 25 bp, Probe Sequence
acaagctactaacaagagagagaac

SEQ ID NO: 107171 - DNA, 25 bp, Probe Sequence
aacaagctactaacaagagagagaa

SEQ ID NO: 107172 - DNA, 25 bp, Probe Sequence
agctactaacaagagagagaacaca

SEQ ID NO: 107173 - DNA, 25 bp, Probe Sequence
taacaagagagagaacacatgcaat

SEQ ID NO: 107174 - DNA, 25 bp, Probe Sequence
aaatagaagagacagtgaagcaagt

SEQ ID NO: 107175 - DNA, 25 bp, Probe Sequence
tagaagagacagtgaagcaagtaaa

SEQ ID NO: 107176 - DNA, 25 bp, Probe Sequence
taatgggcagggttaagaaagttat

SEQ ID NO: 107177 - DNA, 25 bp, Probe Sequence
tgggcagggttaagaaagttattta

SEQ ID NO: 107178 - DNA, 25 bp, Probe Sequence
atgggcagggttaagaaagttattt

SEQ ID NO: 107179 - DNA, 25 bp, Probe Sequence
aatgggcagggttaagaaagttatt

SEQ ID NO: 107180 - DNA, 25 bp, Probe Sequence
ctaacaagagagagaacacatgcaa

SEQ ID NO: 107181 - DNA, 25 bp, Probe Sequence
aacaagagagagaacacatgcaatt

SEQ ID NO: 107182 - DNA, 25 bp, Probe Sequence
tggagattgtggtgagctgagattg

SEQ ID NO: 107183 - DNA, 25 bp, Probe Sequence
gtggagattgtggtgagctgagatt

SEQ ID NO: 107184 - DNA, 25 bp, Probe Sequence
ctgaccaatatagagaaaccccgtc

SEQ ID NO: 107185 - DNA, 25 bp, Probe Sequence
tgaccaatatagagaaaccccgtct

SEQ ID NO: 107186 - DNA, 25 bp, Probe Sequence
cagcctggacaatgagagtgaaact

SEQ ID NO: 107187 - DNA, 25 bp, Probe Sequence
gagattgtggtgagctgagattgca

SEQ ID NO: 107188 - DNA, 25 bp, Probe Sequence
gctgaccaatatagagaaaccccgt

SEQ ID NO: 107189 - DNA, 25 bp, Probe Sequence
agctgaccaatatagagaaaccccg

SEQ ID NO: 107190 - DNA, 25 bp, Probe Sequence
gaccaatatagagaaaccccgtctc

SEQ ID NO: 107191 - DNA, 25 bp, Probe Sequence
gaggcaagaggatcacttgaacctg

SEQ ID NO: 107192 - DNA, 25 bp, Probe Sequence
ctgaggcaagaggatcacttgaacc

SEQ ID NO: 107193 - DNA, 25 bp, Probe Sequence
caagaggatcacttgaacctgggag

SEQ ID NO: 107194 - DNA, 25 bp, Probe Sequence
agcctggacaatgagagtgaaactc

SEQ ID NO: 107195 - DNA, 25 bp, Probe Sequence
gatcacctgaggtcaggagattgag

SEQ ID NO: 107196 - DNA, 25 bp, Probe Sequence
cagatcacctgaggtcaggagattg

SEQ ID NO: 107197 - DNA, 25 bp, Probe Sequence
atcacctgaggtcaggagattgaga

SEQ ID NO: 107198 - DNA, 25 bp, Probe Sequence
agatcacctgaggtcaggagattga

SEQ ID NO: 107199 - DNA, 25 bp, Probe Sequence
tcacctgaggtcaggagattgagac

SEQ ID NO: 107200 - DNA, 25 bp, Probe Sequence
acagagtaaaatgtgatgcgaattt

SEQ ID NO: 107201 - DNA, 25 bp, Probe Sequence
aacagagtaaaatgtgatgcgaatt

SEQ ID NO: 107202 - DNA, 25 bp, Probe Sequence
aaacagagtaaaatgtgatgcgaat

SEQ ID NO: 107203 - DNA, 25 bp, Probe Sequence
actaaacagagtaaaatgtgatgcg

SEQ ID NO: 107204 - DNA, 25 bp, Probe Sequence
ctaaacagagtaaaatgtgatgcga

SEQ ID NO: 107205 - DNA, 25 bp, Probe Sequence
taaacagagtaaaatgtgatgcgaa

SEQ ID NO: 107206 - DNA, 25 bp, Probe Sequence
cactaaacagagtaaaatgtgatgc

SEQ ID NO: 107207 - DNA, 25 bp, Probe Sequence
cccactcatcactaaacagagtaaa

SEQ ID NO: 107208 - DNA, 25 bp, Probe Sequence
ctcatcactaaacagagtaaaatgt

SEQ ID NO: 107209 - DNA, 25 bp, Probe Sequence
tcatcactaaacagagtaaaatgtg

SEQ ID NO: 107210 - DNA, 25 bp, Probe Sequence
gagtaaaatgtgatgcgaattttcc

SEQ ID NO: 107211 - DNA, 25 bp, Probe Sequence
agtaaaatgtgatgcgaattttccc

SEQ ID NO: 107212 - DNA, 25 bp, Probe Sequence
cagagtaaaatgtgatgcgaatttt

SEQ ID NO: 107213 - DNA, 25 bp, Probe Sequence
agagtaaaatgtgatgcgaattttc

SEQ ID NO: 107214 - DNA, 25 bp, Probe Sequence
taaaatgtgatgcgaattttcccga

SEQ ID NO: 107215 - DNA, 25 bp, Probe Sequence
gtaaaatgtgatgcgaattttcccg

SEQ ID NO: 107216 - DNA, 25 bp, Probe Sequence
ccactcatcactaaacagagtaaaa

SEQ ID NO: 107217 - DNA, 25 bp, Probe Sequence
ccccactcatcactaaacagagtaa

SEQ ID NO: 107218 - DNA, 25 bp, Probe Sequence
cgaccaacctgattcgctagatttt

SEQ ID NO: 107219 - DNA, 25 bp, Probe Sequence
ccgaccaacctgattcgctagattt

SEQ ID NO: 107220 - DNA, 25 bp, Probe Sequence
aaatgtgatgcgaattttcccgacc

SEQ ID NO: 107221 - DNA, 25 bp, Probe Sequence
tccccactcatcactaaacagagta

SEQ ID NO: 107222 - DNA, 25 bp, Probe Sequence
aaaatgtgatgcgaattttcccgac

SEQ ID NO: 107223 - DNA, 25 bp, Probe Sequence
cgaattttcccgaccaacctgattc

SEQ ID NO: 107224 - DNA, 25 bp, Probe Sequence
aaattttcctactctcacactggtt

SEQ ID NO: 107225 - DNA, 25 bp, Probe Sequence
tgtgattttgagtaaagctcctatc

SEQ ID NO: 107226 - DNA, 25 bp, Probe Sequence
gtgtctttgtgattttgagtaaagc

SEQ ID NO: 107227 - DNA, 25 bp, Probe Sequence
tagtgtctttgtgattttgagtaaa

SEQ ID NO: 107228 - DNA, 25 bp, Probe Sequence
gattttgagtaaagctcctatctgt

SEQ ID NO: 107229 - DNA, 25 bp, Probe Sequence
tgattttgagtaaagctcctatctg

SEQ ID NO: 107230 - DNA, 25 bp, Probe Sequence
gtgattttgagtaaagctcctatct

SEQ ID NO: 107231 - DNA, 25 bp, Probe Sequence
tttgtgattttgagtaaagctccta

SEQ ID NO: 107232 - DNA, 25 bp, Probe Sequence
aaatagtgtctttgtgattttgagt

SEQ ID NO: 107233 - DNA, 25 bp, Probe Sequence
tttgagtaaagctcctatctgtttt

SEQ ID NO: 107234 - DNA, 25 bp, Probe Sequence
ttttgagtaaagctcctatctgttt

SEQ ID NO: 107235 - DNA, 25 bp, Probe Sequence
ttgtgattttgagtaaagctcctat

SEQ ID NO: 107236 - DNA, 25 bp, Probe Sequence
atagtgtctttgtgattttgagtaa

SEQ ID NO: 107237 - DNA, 25 bp, Probe Sequence
aatagtgtctttgtgattttgagta

SEQ ID NO: 107238 - DNA, 25 bp, Probe Sequence
attttgagtaaagctcctatctgtt

SEQ ID NO: 107239 - DNA, 25 bp, Probe Sequence
agtgtctttgtgattttgagtaaag

SEQ ID NO: 107240 - DNA, 25 bp, Probe Sequence
ctttgtgattttgagtaaagctcct

SEQ ID NO: 107241 - DNA, 25 bp, Probe Sequence
tctttgtgattttgagtaaagctcc

SEQ ID NO: 107242 - DNA, 25 bp, Probe Sequence
tgtctttgtgattttgagtaaagct

SEQ ID NO: 107243 - DNA, 25 bp, Probe Sequence
gtctttgtgattttgagtaaagctc

SEQ ID NO: 107244 - DNA, 25 bp, Probe Sequence
aaaattttcctactctcacactggt

SEQ ID NO: 107245 - DNA, 25 bp, Probe Sequence
aaaatagtgtctttgtgattttgag

SEQ ID NO: 107246 - DNA, 25 bp, Probe Sequence
cacactgatcctgccagaaaatttt

SEQ ID NO: 107247 - DNA, 25 bp, Probe Sequence
catactgttagagaccactggatta

SEQ ID NO: 107248 - DNA, 25 bp, Probe Sequence
atactgttagagaccactggattag

SEQ ID NO: 107249 - DNA, 25 bp, Probe Sequence
tactgttagagaccactggattagc

SEQ ID NO: 107250 - DNA, 25 bp, Probe Sequence
gccttatcaatgaagctactagaca

SEQ ID NO: 107251 - DNA, 25 bp, Probe Sequence
tcaatgaagctactagacaagttgc

SEQ ID NO: 107252 - DNA, 25 bp, Probe Sequence
atcaatgaagctactagacaagttg

SEQ ID NO: 107253 - DNA, 25 bp, Probe Sequence
agggagtgatatttatcttgatggt

SEQ ID NO: 107254 - DNA, 25 bp, Probe Sequence
actgttagagaccactggattagca

SEQ ID NO: 107255 - DNA, 25 bp, Probe Sequence
ccttatcaatgaagctactagacaa

SEQ ID NO: 107256 - DNA, 25 bp, Probe Sequence
gttagagaccactggattagcagac

SEQ ID NO: 107257 - DNA, 25 bp, Probe Sequence
ctgttagagaccactggattagcag

SEQ ID NO: 107258 - DNA, 25 bp, Probe Sequence
tgttagagaccactggattagcaga

SEQ ID NO: 107259 - DNA, 25 bp, Probe Sequence
tatcaatgaagctactagacaagtt

SEQ ID NO: 107260 - DNA, 25 bp, Probe Sequence
ttatcaatgaagctactagacaagt

SEQ ID NO: 107261 - DNA, 25 bp, Probe Sequence
ggccttatcaatgaagctactagac

SEQ ID NO: 107262 - DNA, 25 bp, Probe Sequence
tggccttatcaatgaagctactaga

SEQ ID NO: 107263 - DNA, 25 bp, Probe Sequence
gggagtgatatttatcttgatggta

SEQ ID NO: 107264 - DNA, 25 bp, Probe Sequence
tgctgaattagggagtgatatttat

SEQ ID NO: 107265 - DNA, 25 bp, Probe Sequence
cttatcaatgaagctactagacaag

SEQ ID NO: 107266 - DNA, 25 bp, Probe Sequence
caatgaagctactagacaagttgct

SEQ ID NO: 107267 - DNA, 25 bp, Probe Sequence
agtggccttagagctattgagaatt

SEQ ID NO: 107268 - DNA, 25 bp, Probe Sequence
tagggagtgatatttatcttgatgg

SEQ ID NO: 107269 - DNA, 25 bp, Probe Sequence
ttagagaccactggattagcagacc

SEQ ID NO: 107270 - DNA, 25 bp, Probe Sequence
gctgaattagggagtgatatttatc

SEQ ID NO: 107271 - DNA, 25 bp, Probe Sequence
taagtcttacaggaagcctctcata

SEQ ID NO: 107272 - DNA, 25 bp, Probe Sequence
ttaagtcttacaggaagcctctcat

SEQ ID NO: 107273 - DNA, 25 bp, Probe Sequence
gtcttacaggaagcctctcatagaa

SEQ ID NO: 107274 - DNA, 25 bp, Probe Sequence
aagtcttacaggaagcctctcatag

SEQ ID NO: 107275 - DNA, 25 bp, Probe Sequence
cagaacgtagtgagccttgattata

SEQ ID NO: 107276 - DNA, 25 bp, Probe Sequence
agaacgtagtgagccttgattatac

SEQ ID NO: 107277 - DNA, 25 bp, Probe Sequence
agtcttacaggaagcctctcataga

SEQ ID NO: 107278 - DNA, 25 bp, Probe Sequence
gaacgtagtgagccttgattatacc

SEQ ID NO: 107279 - DNA, 25 bp, Probe Sequence
gatgttattcttccttcccaactca

SEQ ID NO: 107280 - DNA, 25 bp, Probe Sequence
atgttattcttccttcccaactcac

SEQ ID NO: 107281 - DNA, 25 bp, Probe Sequence
aacgtagtgagccttgattatacca

SEQ ID NO: 107282 - DNA, 25 bp, Probe Sequence
ttattcttccttcccaactcactgt

SEQ ID NO: 107283 - DNA, 25 bp, Probe Sequence
aaccattcatctttcctttgctctg

SEQ ID NO: 107284 - DNA, 25 bp, Probe Sequence
gttattcttccttcccaactcactg

SEQ ID NO: 107285 - DNA, 25 bp, Probe Sequence
tgttattcttccttcccaactcact

SEQ ID NO: 107286 - DNA, 25 bp, Probe Sequence
caaccattcatctttcctttgctct

SEQ ID NO: 107287 - DNA, 25 bp, Probe Sequence
atacaccgaatgaccaggtaacatc

SEQ ID NO: 107288 - DNA, 25 bp, Probe Sequence
gatacaccgaatgaccaggtaacat

SEQ ID NO: 107289 - DNA, 25 bp, Probe Sequence
tacaggaagcctctcatagaaattg

SEQ ID NO: 107290 - DNA, 25 bp, Probe Sequence
cttacaggaagcctctcatagaaat

SEQ ID NO: 107291 - DNA, 25 bp, Probe Sequence
taacctttaagtcttacaggaagcc

SEQ ID NO: 107292 - DNA, 25 bp, Probe Sequence
atagaaattgcctccagtccagttt

SEQ ID NO: 107293 - DNA, 25 bp, Probe Sequence
ttacaggaagcctctcatagaaatt

SEQ ID NO: 107294 - DNA, 25 bp, Probe Sequence
ctttaagtcttacaggaagcctctc

SEQ ID NO: 107295 - DNA, 25 bp, Probe Sequence
agattctatatgctgcactaacctt

SEQ ID NO: 107296 - DNA, 25 bp, Probe Sequence
aagattctatatgctgcactaacct

SEQ ID NO: 107297 - DNA, 25 bp, Probe Sequence
tttgcctattgtgattatcgctatc

SEQ ID NO: 107298 - DNA, 25 bp, Probe Sequence
taagattctatatgctgcactaacc

SEQ ID NO: 107299 - DNA, 25 bp, Probe Sequence
agttcgtctttcaaagtaatccttg

SEQ ID NO: 107300 - DNA, 25 bp, Probe Sequence
ttgcctattgtgattatcgctatca

SEQ ID NO: 107301 - DNA, 25 bp, Probe Sequence
aagttcgtctttcaaagtaatcctt

SEQ ID NO: 107302 - DNA, 25 bp, Probe Sequence
taagggaaaccatgatgtctgagta

SEQ ID NO: 107303 - DNA, 25 bp, Probe Sequence
taagttcgtctttcaaagtaatcct

SEQ ID NO: 107304 - DNA, 25 bp, Probe Sequence
agggaaaccatgatgtctgagtaaa

SEQ ID NO: 107305 - DNA, 25 bp, Probe Sequence
aagggaaaccatgatgtctgagtaa

SEQ ID NO: 107306 - DNA, 25 bp, Probe Sequence
actgataagttcgtctttcaaagta

SEQ ID NO: 107307 - DNA, 25 bp, Probe Sequence
tactgataagttcgtctttcaaagt

SEQ ID NO: 107308 - DNA, 25 bp, Probe Sequence
ctaagggaaaccatgatgtctgagt

SEQ ID NO: 107309 - DNA, 25 bp, Probe Sequence
actaagggaaaccatgatgtctgag

SEQ ID NO: 107310 - DNA, 25 bp, Probe Sequence
ctccctaacagataaacagcccttg

SEQ ID NO: 107311 - DNA, 25 bp, Probe Sequence
attctatatgctgcactaacctttg

SEQ ID NO: 107312 - DNA, 25 bp, Probe Sequence
gtactgataagttcgtctttcaaag

SEQ ID NO: 107313 - DNA, 25 bp, Probe Sequence
ttctatatgctgcactaacctttgg

SEQ ID NO: 107314 - DNA, 25 bp, Probe Sequence
gattctatatgctgcactaaccttt

SEQ ID NO: 107315 - DNA, 25 bp, Probe Sequence
ataagttcgtctttcaaagtaatcc

SEQ ID NO: 107316 - DNA, 25 bp, Probe Sequence
ttaagattctatatgctgcactaac

SEQ ID NO: 107317 - DNA, 25 bp, Probe Sequence
ctgataagttcgtctttcaaagtaa

SEQ ID NO: 107318 - DNA, 25 bp, Probe Sequence
tgtttaagattctatatgctgcact

SEQ ID NO: 107319 - DNA, 25 bp, Probe Sequence
agcaagaagttcggagacatgagac

SEQ ID NO: 107320 - DNA, 25 bp, Probe Sequence
cagcaagaagttcggagacatgaga

SEQ ID NO: 107321 - DNA, 25 bp, Probe Sequence
caagaagttcggagacatgagacga

SEQ ID NO: 107322 - DNA, 25 bp, Probe Sequence
gacatgagacgaaagtaggcggtac

SEQ ID NO: 107323 - DNA, 25 bp, Probe Sequence
agacatgagacgaaagtaggcggta

SEQ ID NO: 107324 - DNA, 25 bp, Probe Sequence
aagaagttcggagacatgagacgaa

SEQ ID NO: 107325 - DNA, 25 bp, Probe Sequence
gttcggagacatgagacgaaagtag

SEQ ID NO: 107326 - DNA, 25 bp, Probe Sequence
agttcggagacatgagacgaaagta

SEQ ID NO: 107327 - DNA, 25 bp, Probe Sequence
gaagttcggagacatgagacgaaag

SEQ ID NO: 107328 - DNA, 25 bp, Probe Sequence
agaagttcggagacatgagacgaaa

SEQ ID NO: 107329 - DNA, 25 bp, Probe Sequence
ttcggagacatgagacgaaagtagg

SEQ ID NO: 107330 - DNA, 25 bp, Probe Sequence
aagttcggagacatgagacgaaagt

SEQ ID NO: 107331 - DNA, 25 bp, Probe Sequence
gaaattgtaatgacacagtctccag

SEQ ID NO: 107332 - DNA, 25 bp, Probe Sequence
agaaattgtaatgacacagtctcca

SEQ ID NO: 107333 - DNA, 25 bp, Probe Sequence
aattgtaatgacacagtctccagcc

SEQ ID NO: 107334 - DNA, 25 bp, Probe Sequence
cggagaaattgtaatgacacagtct

SEQ ID NO: 107335 - DNA, 25 bp, Probe Sequence
aaattgtaatgacacagtctccagc

SEQ ID NO: 107336 - DNA, 25 bp, Probe Sequence
attgtaatgacacagtctccagcca

SEQ ID NO: 107337 - DNA, 25 bp, Probe Sequence
ggacagacttcactctcaccatcag

SEQ ID NO: 107338 - DNA, 25 bp, Probe Sequence
gataccaccggagaaattgtaatga

SEQ ID NO: 107339 - DNA, 25 bp, Probe Sequence
agataccaccggagaaattgtaatg

SEQ ID NO: 107340 - DNA, 25 bp, Probe Sequence
cagataccaccggagaaattgtaat

SEQ ID NO: 107341 - DNA, 25 bp, Probe Sequence
ataccaccggagaaattgtaatgac

SEQ ID NO: 107342 - DNA, 25 bp, Probe Sequence
cagacttcactctcaccatcagcag

SEQ ID NO: 107343 - DNA, 25 bp, Probe Sequence
gacagacttcactctcaccatcagc

SEQ ID NO: 107344 - DNA, 25 bp, Probe Sequence
gagaaattgtaatgacacagtctcc

SEQ ID NO: 107345 - DNA, 25 bp, Probe Sequence
ggagaaattgtaatgacacagtctc

SEQ ID NO: 107346 - DNA, 25 bp, Probe Sequence
ccagataccaccggagaaattgtaa

SEQ ID NO: 107347 - DNA, 25 bp, Probe Sequence
agagtgttagcagcagctacttatc

SEQ ID NO: 107348 - DNA, 25 bp, Probe Sequence
ttgtaatgacacagtctccagccac

SEQ ID NO: 107349 - DNA, 25 bp, Probe Sequence
taccaccggagaaattgtaatgaca

SEQ ID NO: 107350 - DNA, 25 bp, Probe Sequence
ccggagaaattgtaatgacacagtc

SEQ ID NO: 107351 - DNA, 25 bp, Probe Sequence
caccggagaaattgtaatgacacag

SEQ ID NO: 107352 - DNA, 25 bp, Probe Sequence
cagagtgttagcagcagctacttat

SEQ ID NO: 107353 - DNA, 25 bp, Probe Sequence
accggagaaattgtaatgacacagt

SEQ ID NO: 107354 - DNA, 25 bp, Probe Sequence
ttagcagcagctacttatcctggta

SEQ ID NO: 107355 - DNA, 25 bp, Probe Sequence
cttgtgaagcaggacttatgagatt

SEQ ID NO: 107356 - DNA, 25 bp, Probe Sequence
ttgtgaagcaggacttatgagattg

SEQ ID NO: 107357 - DNA, 25 bp, Probe Sequence
ttctaccttgtgaagcaggacttat

SEQ ID NO: 107358 - DNA, 25 bp, Probe Sequence
gctctgtctttctaccctctaattt

SEQ ID NO: 107359 - DNA, 25 bp, Probe Sequence
ctcccttatctcacttctaccttgt

SEQ ID NO: 107360 - DNA, 25 bp, Probe Sequence
actcccttatctcacttctaccttg

SEQ ID NO: 107361 - DNA, 25 bp, Probe Sequence
cactcccttatctcacttctacctt

SEQ ID NO: 107362 - DNA, 25 bp, Probe Sequence
taccttgtgaagcaggacttatgag

SEQ ID NO: 107363 - DNA, 25 bp, Probe Sequence
ctaccttgtgaagcaggacttatga

SEQ ID NO: 107364 - DNA, 25 bp, Probe Sequence
tctaccttgtgaagcaggacttatg

SEQ ID NO: 107365 - DNA, 25 bp, Probe Sequence
caggacttatgagattgccatctag

SEQ ID NO: 107366 - DNA, 25 bp, Probe Sequence
ctcactcccttatctcacttctacc

SEQ ID NO: 107367 - DNA, 25 bp, Probe Sequence
cctcactcccttatctcacttctac

SEQ ID NO: 107368 - DNA, 25 bp, Probe Sequence
tcctcactcccttatctcacttcta

SEQ ID NO: 107369 - DNA, 25 bp, Probe Sequence
ctttcctcactcccttatctcactt

SEQ ID NO: 107370 - DNA, 25 bp, Probe Sequence
tttcctcactcccttatctcacttc

SEQ ID NO: 107371 - DNA, 25 bp, Probe Sequence
ccttgtgaagcaggacttatgagat

SEQ ID NO: 107372 - DNA, 25 bp, Probe Sequence
tcactcccttatctcacttctacct

SEQ ID NO: 107373 - DNA, 25 bp, Probe Sequence
aggacttatgagattgccatctagg

SEQ ID NO: 107374 - DNA, 25 bp, Probe Sequence
gcataagagtcaataaaccctactt

SEQ ID NO: 107375 - DNA, 25 bp, Probe Sequence
ttcctcactcccttatctcacttct

SEQ ID NO: 107376 - DNA, 25 bp, Probe Sequence
ttcctttaatcctttgactgtcaga

SEQ ID NO: 107377 - DNA, 25 bp, Probe Sequence
aatttcctttaatcctttgactgtc

SEQ ID NO: 107378 - DNA, 25 bp, Probe Sequence
agctctgtctttctaccctctaatt

SEQ ID NO: 107379 - DNA, 25 bp, Probe Sequence
atgtaagagaccaggatatgtaact

SEQ ID NO: 107380 - DNA, 25 bp, Probe Sequence
tgtaagagaccaggatatgtaactc

SEQ ID NO: 107381 - DNA, 25 bp, Probe Sequence
gcatgtaagagaccaggatatgtaa

SEQ ID NO: 107382 - DNA, 25 bp, Probe Sequence
gagttcattgctctcagtataagat

SEQ ID NO: 107383 - DNA, 25 bp, Probe Sequence
agttcattgctctcagtataagatt

SEQ ID NO: 107384 - DNA, 25 bp, Probe Sequence
catgtaagagaccaggatatgtaac

SEQ ID NO: 107385 - DNA, 25 bp, Probe Sequence
gtccaacagttgaattgaatgtcta

SEQ ID NO: 107386 - DNA, 25 bp, Probe Sequence
tgtccaacagttgaattgaatgtct

SEQ ID NO: 107387 - DNA, 25 bp, Probe Sequence
gtgtccaacagttgaattgaatgtc

SEQ ID NO: 107388 - DNA, 25 bp, Probe Sequence
tactgtcatacttgctatttcctgg

SEQ ID NO: 107389 - DNA, 25 bp, Probe Sequence
ctgtcatacttgctatttcctggta

SEQ ID NO: 107390 - DNA, 25 bp, Probe Sequence
tccaacagttgaattgaatgtctat

SEQ ID NO: 107391 - DNA, 25 bp, Probe Sequence
gtgtgtccaacagttgaattgaatg

SEQ ID NO: 107392 - DNA, 25 bp, Probe Sequence
tgtgtccaacagttgaattgaatgt

SEQ ID NO: 107393 - DNA, 25 bp, Probe Sequence
tgtgtgtccaacagttgaattgaat

SEQ ID NO: 107394 - DNA, 25 bp, Probe Sequence
gctttcatcatcagaggtcaaatta

SEQ ID NO: 107395 - DNA, 25 bp, Probe Sequence
tgcatgtaagagaccaggatatgta

SEQ ID NO: 107396 - DNA, 25 bp, Probe Sequence
gaatattgccacagagttcattgct

SEQ ID NO: 107397 - DNA, 25 bp, Probe Sequence
cagttgaattgaatgtctataaggt

SEQ ID NO: 107398 - DNA, 25 bp, Probe Sequence
tgctttcatcatcagaggtcaaatt

SEQ ID NO: 107399 - DNA, 25 bp, Probe Sequence
gcaatctttgtgatattacttcgct

SEQ ID NO: 107400 - DNA, 25 bp, Probe Sequence
agcaatctttgtgatattacttcgc

SEQ ID NO: 107401 - DNA, 25 bp, Probe Sequence
atgccatttcataaagtctgaggat

SEQ ID NO: 107402 - DNA, 25 bp, Probe Sequence
gccatttcataaagtctgaggattt

SEQ ID NO: 107403 - DNA, 25 bp, Probe Sequence
gcatggtgaaacctcatctctacta

SEQ ID NO: 107404 - DNA, 25 bp, Probe Sequence
agaaatgaatggctttgagtctggc

SEQ ID NO: 107405 - DNA, 25 bp, Probe Sequence
ggcagaaatgaatggctttgagtct

SEQ ID NO: 107406 - DNA, 25 bp, Probe Sequence
ttatccaacatcccagggcagaaat

SEQ ID NO: 107407 - DNA, 25 bp, Probe Sequence
cagcatggtgaaacctcatctctac

SEQ ID NO: 107408 - DNA, 25 bp, Probe Sequence
agcatggtgaaacctcatctctact

SEQ ID NO: 107409 - DNA, 25 bp, Probe Sequence
gggcagaaatgaatggctttgagtc

SEQ ID NO: 107410 - DNA, 25 bp, Probe Sequence
cagggcagaaatgaatggctttgag

SEQ ID NO: 107411 - DNA, 25 bp, Probe Sequence
acagcatggtgaaacctcatctcta

SEQ ID NO: 107412 - DNA, 25 bp, Probe Sequence
caacatcccagggcagaaatgaatg

SEQ ID NO: 107413 - DNA, 25 bp, Probe Sequence
cttatccaacatcccagggcagaaa

SEQ ID NO: 107414 - DNA, 25 bp, Probe Sequence
gaaatgaatggctttgagtctggcg

SEQ ID NO: 107415 - DNA, 25 bp, Probe Sequence
tatccaacatcccagggcagaaatg

SEQ ID NO: 107416 - DNA, 25 bp, Probe Sequence
cagaaatgaatggctttgagtctgg

SEQ ID NO: 107417 - DNA, 25 bp, Probe Sequence
cagaacccaaaccagacatcctcag

SEQ ID NO: 107418 - DNA, 25 bp, Probe Sequence
agggcagaaatgaatggctttgagt

SEQ ID NO: 107419 - DNA, 25 bp, Probe Sequence
gcagaaatgaatggctttgagtctg

SEQ ID NO: 107420 - DNA, 25 bp, Probe Sequence
gacagcatggtgaaacctcatctct

SEQ ID NO: 107421 - DNA, 25 bp, Probe Sequence
actcaatgtactgtaataatcgcaa

SEQ ID NO: 107422 - DNA, 25 bp, Probe Sequence
ttatgtcagtagtcaccttgctcac

SEQ ID NO: 107423 - DNA, 25 bp, Probe Sequence
tactcaatgtactgtaataatcgca

SEQ ID NO: 107424 - DNA, 25 bp, Probe Sequence
attatacttctgacctttgggcttt

SEQ ID NO: 107425 - DNA, 25 bp, Probe Sequence
ggaagataaagatggtcacacaaac

SEQ ID NO: 107426 - DNA, 25 bp, Probe Sequence
agataaagatggtcacacaaacagt

SEQ ID NO: 107427 - DNA, 25 bp, Probe Sequence
aagataaagatggtcacacaaacag

SEQ ID NO: 107428 - DNA, 25 bp, Probe Sequence
gaagataaagatggtcacacaaaca

SEQ ID NO: 107429 - DNA, 25 bp, Probe Sequence
gataaagatggtcacacaaacagtt

SEQ ID NO: 107430 - DNA, 25 bp, Probe Sequence
atttatgtcagtagtcaccttgctc

SEQ ID NO: 107431 - DNA, 25 bp, Probe Sequence
ttatacttctgacctttgggctttc

SEQ ID NO: 107432 - DNA, 25 bp, Probe Sequence
gcatagagacctttaagcaaactac

SEQ ID NO: 107433 - DNA, 25 bp, Probe Sequence
ctttaagcaaactactacagccaac

SEQ ID NO: 107434 - DNA, 25 bp, Probe Sequence
cattatacttctgacctttgggctt

SEQ ID NO: 107435 - DNA, 25 bp, Probe Sequence
tttaagcaaactactacagccaact

SEQ ID NO: 107436 - DNA, 25 bp, Probe Sequence
agagacctttaagcaaactactaca

SEQ ID NO: 107437 - DNA, 25 bp, Probe Sequence
aatttatgtcagtagtcaccttgct

SEQ ID NO: 107438 - DNA, 25 bp, Probe Sequence
atacctctaaagaattgctgctact

SEQ ID NO: 107439 - DNA, 25 bp, Probe Sequence
gggaagataaagatggtcacacaaa

SEQ ID NO: 107440 - DNA, 25 bp, Probe Sequence
agacctttaagcaaactactacagc

SEQ ID NO: 107441 - DNA, 25 bp, Probe Sequence
gagacctttaagcaaactactacag

SEQ ID NO: 107442 - DNA, 25 bp, Probe Sequence
ttaagcaaactactacagccaactc

SEQ ID NO: 107443 - DNA, 25 bp, Probe Sequence
tacctctaaagaattgctgctactt

SEQ ID NO: 107444 - DNA, 25 bp, Probe Sequence
aattaacctctcaaagcacagaatg

SEQ ID NO: 107445 - DNA, 25 bp, Probe Sequence
gtagcaaggcacatatagaagaaga

SEQ ID NO: 107446 - DNA, 25 bp, Probe Sequence
tagcaaggcacatatagaagaagaa

SEQ ID NO: 107447 - DNA, 25 bp, Probe Sequence
atacagacttatctcctcactcctt

SEQ ID NO: 107448 - DNA, 25 bp, Probe Sequence
aatacagacttatctcctcactcct

SEQ ID NO: 107449 - DNA, 25 bp, Probe Sequence
taatacagacttatctcctcactcc

SEQ ID NO: 107450 - DNA, 25 bp, Probe Sequence
ttgtagcaaggcacatatagaagaa

SEQ ID NO: 107451 - DNA, 25 bp, Probe Sequence
tgtagcaaggcacatatagaagaag

SEQ ID NO: 107452 - DNA, 25 bp, Probe Sequence
actaatacagacttatctcctcact

SEQ ID NO: 107453 - DNA, 25 bp, Probe Sequence
ttcaatatgtcagtatagaggctct

SEQ ID NO: 107454 - DNA, 25 bp, Probe Sequence
ctaatacagacttatctcctcactc

SEQ ID NO: 107455 - DNA, 25 bp, Probe Sequence
aactaatacagacttatctcctcac

SEQ ID NO: 107456 - DNA, 25 bp, Probe Sequence
agcaaggcacatatagaagaagaaa

SEQ ID NO: 107457 - DNA, 25 bp, Probe Sequence
gcaaggcacatatagaagaagaaat

SEQ ID NO: 107458 - DNA, 25 bp, Probe Sequence
tccttacctttaccactaataccag

SEQ ID NO: 107459 - DNA, 25 bp, Probe Sequence
ctccttacctttaccactaatacca

SEQ ID NO: 107460 - DNA, 25 bp, Probe Sequence
tctccttacctttaccactaatacc

SEQ ID NO: 107461 - DNA, 25 bp, Probe Sequence
tacagacttatctcctcactccttt

SEQ ID NO: 107462 - DNA, 25 bp, Probe Sequence
tttctctccttacctttaccactaa

SEQ ID NO: 107463 - DNA, 25 bp, Probe Sequence
ttctctccttacctttaccactaat

SEQ ID NO: 107464 - DNA, 25 bp, Probe Sequence
ccttacctttaccactaataccagt

SEQ ID NO: 107465 - DNA, 25 bp, Probe Sequence
tttgtagcaaggcacatatagaaga

SEQ ID NO: 107466 - DNA, 25 bp, Probe Sequence
ggtttatttgtagcaaggcacatat

SEQ ID NO: 107467 - DNA, 25 bp, Probe Sequence
atttgtagcaaggcacatatagaag

SEQ ID NO: 107468 - DNA, 25 bp, Probe Sequence
tggtttatttgtagcaaggcacata

SEQ ID NO: 107469 - DNA, 25 bp, Probe Sequence
ggttctgcttcaatgactccaatat

SEQ ID NO: 107470 - DNA, 25 bp, Probe Sequence
gttctgcttcaatgactccaatatt

SEQ ID NO: 107471 - DNA, 25 bp, Probe Sequence
tggttctgcttcaatgactccaata

SEQ ID NO: 107472 - DNA, 25 bp, Probe Sequence
ttctgcttcaatgactccaatattt

SEQ ID NO: 107473 - DNA, 25 bp, Probe Sequence
tctgcttcaatgactccaatatttg

SEQ ID NO: 107474 - DNA, 25 bp, Probe Sequence
atggttctgcttcaatgactccaat

SEQ ID NO: 107475 - DNA, 25 bp, Probe Sequence
aatggttctgcttcaatgactccaa

SEQ ID NO: 107476 - DNA, 25 bp, Probe Sequence
ctgcttcaatgactccaatatttgc

SEQ ID NO: 107477 - DNA, 25 bp, Probe Sequence
gaaaatggttctgcttcaatgactc

SEQ ID NO: 107478 - DNA, 25 bp, Probe Sequence
gggagttatcaagcaaaagcaaatg

SEQ ID NO: 107479 - DNA, 25 bp, Probe Sequence
agggagttatcaagcaaaagcaaat

SEQ ID NO: 107480 - DNA, 25 bp, Probe Sequence
gatggaaaatggttctgcttcaatg

SEQ ID NO: 107481 - DNA, 25 bp, Probe Sequence
atggaaaatggttctgcttcaatga

SEQ ID NO: 107482 - DNA, 25 bp, Probe Sequence
aaatggttctgcttcaatgactcca

SEQ ID NO: 107483 - DNA, 25 bp, Probe Sequence
aaaatggttctgcttcaatgactcc

SEQ ID NO: 107484 - DNA, 25 bp, Probe Sequence
ggatggaaaatggttctgcttcaat

SEQ ID NO: 107485 - DNA, 25 bp, Probe Sequence
cagggagttatcaagcaaaagcaaa

SEQ ID NO: 107486 - DNA, 25 bp, Probe Sequence
ggaaaatggttctgcttcaatgact

SEQ ID NO: 107487 - DNA, 25 bp, Probe Sequence
gactccttgatttgccttgactgtg

SEQ ID NO: 107488 - DNA, 25 bp, Probe Sequence
tggaaaatggttctgcttcaatgac

SEQ ID NO: 107489 - DNA, 25 bp, Probe Sequence
tacggaaatcctaactaccactggt

SEQ ID NO: 107490 - DNA, 25 bp, Probe Sequence
gaatgctgtggatggaaaatggttc

SEQ ID NO: 107491 - DNA, 25 bp, Probe Sequence
atcctaactaccactggtaagaaac

SEQ ID NO: 107492 - DNA, 25 bp, Probe Sequence
ggaaatcctaactaccactggtaag

SEQ ID NO: 107493 - DNA, 25 bp, Probe Sequence
gacccaataaaggctttgaacccat

SEQ ID NO: 107494 - DNA, 25 bp, Probe Sequence
cctggattcagtgagtgaaaccatc

SEQ ID NO: 107495 - DNA, 25 bp, Probe Sequence
ctggattcagtgagtgaaaccatcc

SEQ ID NO: 107496 - DNA, 25 bp, Probe Sequence
ccctggattcagtgagtgaaaccat

SEQ ID NO: 107497 - DNA, 25 bp, Probe Sequence
gaagccctggattcagtgagtgaaa

SEQ ID NO: 107498 - DNA, 25 bp, Probe Sequence
tggattcagtgagtgaaaccatccc

SEQ ID NO: 107499 - DNA, 25 bp, Probe Sequence
aagccctggattcagtgagtgaaac

SEQ ID NO: 107500 - DNA, 25 bp, Probe Sequence
caaattcttgagccatgaaaggatg

SEQ ID NO: 107501 - DNA, 25 bp, Probe Sequence
aaattcttgagccatgaaaggatgc

SEQ ID NO: 107502 - DNA, 25 bp, Probe Sequence
ttaagtacctcccacactacacaga

SEQ ID NO: 107503 - DNA, 25 bp, Probe Sequence
gcaaattcttgagccatgaaaggat

SEQ ID NO: 107504 - DNA, 25 bp, Probe Sequence
taagtacctcccacactacacagac

SEQ ID NO: 107505 - DNA, 25 bp, Probe Sequence
agcaaattcttgagccatgaaagga

SEQ ID NO: 107506 - DNA, 25 bp, Probe Sequence
cagcaaattcttgagccatgaaagg

SEQ ID NO: 107507 - DNA, 25 bp, Probe Sequence
cttaagtacctcccacactacacag

SEQ ID NO: 107508 - DNA, 25 bp, Probe Sequence
gcagcaaattcttgagccatgaaag

SEQ ID NO: 107509 - DNA, 25 bp, Probe Sequence
ctccttaagtacctcccacactaca

SEQ ID NO: 107510 - DNA, 25 bp, Probe Sequence
tccttaagtacctcccacactacac

SEQ ID NO: 107511 - DNA, 25 bp, Probe Sequence
attcttgagccatgaaaggatgctt

SEQ ID NO: 107512 - DNA, 25 bp, Probe Sequence
aattcttgagccatgaaaggatgct

SEQ ID NO: 107513 - DNA, 25 bp, Probe Sequence
ttcttgagccatgaaaggatgcttt

SEQ ID NO: 107514 - DNA, 25 bp, Probe Sequence
ccttaagtacctcccacactacaca

SEQ ID NO: 107515 - DNA, 25 bp, Probe Sequence
cctccttaagtacctcccacactac

SEQ ID NO: 107516 - DNA, 25 bp, Probe Sequence
tcctccttaagtacctcccacacta

SEQ ID NO: 107517 - DNA, 25 bp, Probe Sequence
aagtacctcccacactacacagaca

SEQ ID NO: 107518 - DNA, 25 bp, Probe Sequence
tcttgagccatgaaaggatgctttg

SEQ ID NO: 107519 - DNA, 25 bp, Probe Sequence
ctgaaagtgtcttgggctaaggacc

SEQ ID NO: 107520 - DNA, 25 bp, Probe Sequence
agtacctcccacactacacagacag

SEQ ID NO: 107521 - DNA, 25 bp, Probe Sequence
cctgaaagtgtcttgggctaaggac

SEQ ID NO: 107522 - DNA, 25 bp, Probe Sequence
cttgagccatgaaaggatgctttgg

SEQ ID NO: 107523 - DNA, 25 bp, Probe Sequence
gtcctccttaagtacctcccacact

SEQ ID NO: 107524 - DNA, 25 bp, Probe Sequence
tagaaggacaatgtgcatattacga

SEQ ID NO: 107525 - DNA, 25 bp, Probe Sequence
ctagaaggacaatgtgcatattacg

SEQ ID NO: 107526 - DNA, 25 bp, Probe Sequence
cgacaaacacaaagaaactatacca

SEQ ID NO: 107527 - DNA, 25 bp, Probe Sequence
acgacaaacacaaagaaactatacc

SEQ ID NO: 107528 - DNA, 25 bp, Probe Sequence
ataactgctgctaaatcaagaactg

SEQ ID NO: 107529 - DNA, 25 bp, Probe Sequence
aagaaactataccataacccaaggc

SEQ ID NO: 107530 - DNA, 25 bp, Probe Sequence
caagagaataactgctgctaaatca

SEQ ID NO: 107531 - DNA, 25 bp, Probe Sequence
acaagagaataactgctgctaaatc

SEQ ID NO: 107532 - DNA, 25 bp, Probe Sequence
taactgctgctaaatcaagaactgt

SEQ ID NO: 107533 - DNA, 25 bp, Probe Sequence
gagaataactgctgctaaatcaaga

SEQ ID NO: 107534 - DNA, 25 bp, Probe Sequence
agagaataactgctgctaaatcaag

SEQ ID NO: 107535 - DNA, 25 bp, Probe Sequence
aaacaagagaataactgctgctaaa

SEQ ID NO: 107536 - DNA, 25 bp, Probe Sequence
atgtaaacaagagaataactgctgc

SEQ ID NO: 107537 - DNA, 25 bp, Probe Sequence
gtaaacaagagaataactgctgcta

SEQ ID NO: 107538 - DNA, 25 bp, Probe Sequence
aataactgctgctaaatcaagaact

SEQ ID NO: 107539 - DNA, 25 bp, Probe Sequence
aacaagagaataactgctgctaaat

SEQ ID NO: 107540 - DNA, 25 bp, Probe Sequence
atttacatccttctttaagcccagt

SEQ ID NO: 107541 - DNA, 25 bp, Probe Sequence
tgtaaacaagagaataactgctgct

SEQ ID NO: 107542 - DNA, 25 bp, Probe Sequence
agaaggacaatgtgcatattacgac

SEQ ID NO: 107543 - DNA, 25 bp, Probe Sequence
gcatattacgacaaacacaaagaaa

SEQ ID NO: 107544 - DNA, 25 bp, Probe Sequence
gaataactgctgctaaatcaagaac

SEQ ID NO: 107545 - DNA, 25 bp, Probe Sequence
agaataactgctgctaaatcaagaa

SEQ ID NO: 107546 - DNA, 25 bp, Probe Sequence
aagagaataactgctgctaaatcaa

SEQ ID NO: 107547 - DNA, 25 bp, Probe Sequence
gaaactataccataacccaaggctg

SEQ ID NO: 107548 - DNA, 25 bp, Probe Sequence
cttcacgtttggaaatctgagagtc

SEQ ID NO: 107549 - DNA, 25 bp, Probe Sequence
ttcacgtttggaaatctgagagtca

SEQ ID NO: 107550 - DNA, 25 bp, Probe Sequence
ttgtccaggtcacagatagagcctt

SEQ ID NO: 107551 - DNA, 25 bp, Probe Sequence
gcttcacgtttggaaatctgagagt

SEQ ID NO: 107552 - DNA, 25 bp, Probe Sequence
gtccaggtcacagatagagccttct

SEQ ID NO: 107553 - DNA, 25 bp, Probe Sequence
ggcttcacgtttggaaatctgagag

SEQ ID NO: 107554 - DNA, 25 bp, Probe Sequence
gatagagccttctgtgttgcagatg

SEQ ID NO: 107555 - DNA, 25 bp, Probe Sequence
agatagagccttctgtgttgcagat

SEQ ID NO: 107556 - DNA, 25 bp, Probe Sequence
atagagccttctgtgttgcagatga

SEQ ID NO: 107557 - DNA, 25 bp, Probe Sequence
aggcttcacgtttggaaatctgaga

SEQ ID NO: 107558 - DNA, 25 bp, Probe Sequence
caggcttcacgtttggaaatctgag

SEQ ID NO: 107559 - DNA, 25 bp, Probe Sequence
tcacgtttggaaatctgagagtcag

SEQ ID NO: 107560 - DNA, 25 bp, Probe Sequence
cttctgtgttgcagatgacaaggac

SEQ ID NO: 107561 - DNA, 25 bp, Probe Sequence
cagatagagccttctgtgttgcaga

SEQ ID NO: 107562 - DNA, 25 bp, Probe Sequence
tagagccttctgtgttgcagatgac

SEQ ID NO: 107563 - DNA, 25 bp, Probe Sequence
tccaggtcacagatagagccttctg

SEQ ID NO: 107564 - DNA, 25 bp, Probe Sequence
ccttctgtgttgcagatgacaagga

SEQ ID NO: 107565 - DNA, 25 bp, Probe Sequence
ctcaacctggagcggataaattctt

SEQ ID NO: 107566 - DNA, 25 bp, Probe Sequence
tcaacctggagcggataaattcttg

SEQ ID NO: 107567 - DNA, 25 bp, Probe Sequence
caacctggagcggataaattcttgg

SEQ ID NO: 107568 - DNA, 25 bp, Probe Sequence
cctcaacctggagcggataaattct

SEQ ID NO: 107569 - DNA, 25 bp, Probe Sequence
cattgtgaagttgaccattgtgaag

SEQ ID NO: 107570 - DNA, 25 bp, Probe Sequence
attgtgaagttgaccattgtgaagt

SEQ ID NO: 107571 - DNA, 25 bp, Probe Sequence
ttgtgaagttgaccattgtgaagtt

SEQ ID NO: 107572 - DNA, 25 bp, Probe Sequence
taacagcattgtgaagttgaccatt

SEQ ID NO: 107573 - DNA, 25 bp, Probe Sequence
ctaacagcattgtgaagttgaccat

SEQ ID NO: 107574 - DNA, 25 bp, Probe Sequence
ttcctaacagcattgtgaagttgac

SEQ ID NO: 107575 - DNA, 25 bp, Probe Sequence
gcattgtgaagttgaccattgtgaa

SEQ ID NO: 107576 - DNA, 25 bp, Probe Sequence
tagaagagattatgggtgaagaagg

SEQ ID NO: 107577 - DNA, 25 bp, Probe Sequence
cattgtgaagtttctgtccctttag

SEQ ID NO: 107578 - DNA, 25 bp, Probe Sequence
attgtgaagtttctgtccctttaga

SEQ ID NO: 107579 - DNA, 25 bp, Probe Sequence
gaagttgaccattgtgaagtttctg

SEQ ID NO: 107580 - DNA, 25 bp, Probe Sequence
gggcagttagaatgttgatttccta

SEQ ID NO: 107581 - DNA, 25 bp, Probe Sequence
aagttgaccattgtgaagtttctgt

SEQ ID NO: 107582 - DNA, 25 bp, Probe Sequence
tctgtccctttagaagagattatgg

SEQ ID NO: 107583 - DNA, 25 bp, Probe Sequence
tgaagttgaccattgtgaagtttct

SEQ ID NO: 107584 - DNA, 25 bp, Probe Sequence
gtgaagttgaccattgtgaagtttc

SEQ ID NO: 107585 - DNA, 25 bp, Probe Sequence
ccattgtgaagtttctgtcccttta

SEQ ID NO: 107586 - DNA, 25 bp, Probe Sequence
aagagattatgggtgaagaagggag

SEQ ID NO: 107587 - DNA, 25 bp, Probe Sequence
gaagagattatgggtgaagaaggga

SEQ ID NO: 107588 - DNA, 25 bp, Probe Sequence
agaagagattatgggtgaagaaggg

SEQ ID NO: 107589 - DNA, 25 bp, Probe Sequence
tgtgaagttgaccattgtgaagttt

SEQ ID NO: 107590 - DNA, 25 bp, Probe Sequence
cctttagaagagattatgggtgaag

SEQ ID NO: 107591 - DNA, 25 bp, Probe Sequence
aacagcattgtgaagttgaccattg

SEQ ID NO: 107592 - DNA, 25 bp, Probe Sequence
agcattgtgaagttgaccattgtga

SEQ ID NO: 107593 - DNA, 25 bp, Probe Sequence
gaagaatgtcaccaacaacctcaag

SEQ ID NO: 107594 - DNA, 25 bp, Probe Sequence
aagaatgtcaccaacaacctcaagt

SEQ ID NO: 107595 - DNA, 25 bp, Probe Sequence
tgaagaatgtcaccaacaacctcaa

SEQ ID NO: 107596 - DNA, 25 bp, Probe Sequence
aattatcaccgtttctgctctgttc

SEQ ID NO: 107597 - DNA, 25 bp, Probe Sequence
cctcaatgacatgacctctatataa

SEQ ID NO: 107598 - DNA, 25 bp, Probe Sequence
taattatcaccgtttctgctctgtt

SEQ ID NO: 107599 - DNA, 25 bp, Probe Sequence
attatcaccgtttctgctctgttct

SEQ ID NO: 107600 - DNA, 25 bp, Probe Sequence
aatgtcaccaacaacctcaagtctc

SEQ ID NO: 107601 - DNA, 25 bp, Probe Sequence
gaatgtcaccaacaacctcaagtct

SEQ ID NO: 107602 - DNA, 25 bp, Probe Sequence
agaatgtcaccaacaacctcaagtc

SEQ ID NO: 107603 - DNA, 25 bp, Probe Sequence
ctgaagaatgtcaccaacaacctca

SEQ ID NO: 107604 - DNA, 25 bp, Probe Sequence
ccctcaatgacatgacctctatata

SEQ ID NO: 107605 - DNA, 25 bp, Probe Sequence
aagacaattgatgacctggaagatg

SEQ ID NO: 107606 - DNA, 25 bp, Probe Sequence
gacaattgatgacctggaagatgag

SEQ ID NO: 107607 - DNA, 25 bp, Probe Sequence
ctatgcccagaaactgaagtacaag

SEQ ID NO: 107608 - DNA, 25 bp, Probe Sequence
gccctcaatgacatgacctctatat

SEQ ID NO: 107609 - DNA, 25 bp, Probe Sequence
tctatgcccagaaactgaagtacaa

SEQ ID NO: 107610 - DNA, 25 bp, Probe Sequence
agacaattgatgacctggaagatga

SEQ ID NO: 107611 - DNA, 25 bp, Probe Sequence
ttatcaccgtttctgctctgttctg

SEQ ID NO: 107612 - DNA, 25 bp, Probe Sequence
agagtctaagtgttctgagctggag

SEQ ID NO: 107613 - DNA, 25 bp, Probe Sequence
ctctatgcccagaaactgaagtaca

SEQ ID NO: 107614 - DNA, 25 bp, Probe Sequence
atgtcaccaacaacctcaagtctct

SEQ ID NO: 107615 - DNA, 25 bp, Probe Sequence
caacttatgtattttcttccacccc

SEQ ID NO: 107616 - DNA, 25 bp, Probe Sequence
gcaacttatgtattttcttccaccc

SEQ ID NO: 107617 - DNA, 25 bp, Probe Sequence
cgtgtagtgtaactggaatctcttg

SEQ ID NO: 107618 - DNA, 25 bp, Probe Sequence
gtgtagtgtaactggaatctcttgc

SEQ ID NO: 107619 - DNA, 25 bp, Probe Sequence
tgtagtgtaactggaatctcttgcc

SEQ ID NO: 107620 - DNA, 25 bp, Probe Sequence
gcgtgtagtgtaactggaatctctt

SEQ ID NO: 107621 - DNA, 25 bp, Probe Sequence
tacctacaacatcaaagactccaca

SEQ ID NO: 107622 - DNA, 25 bp, Probe Sequence
gtttgtgacatctaagaagaatggg

SEQ ID NO: 107623 - DNA, 25 bp, Probe Sequence
gcaagtttgtgacatctaagaagaa

SEQ ID NO: 107624 - DNA, 25 bp, Probe Sequence
atggcaagtttgtgacatctaagaa

SEQ ID NO: 107625 - DNA, 25 bp, Probe Sequence
aatggcaagtttgtgacatctaaga

SEQ ID NO: 107626 - DNA, 25 bp, Probe Sequence
agtttgtgacatctaagaagaatgg

SEQ ID NO: 107627 - DNA, 25 bp, Probe Sequence
caatggcaagtttgtgacatctaag

SEQ ID NO: 107628 - DNA, 25 bp, Probe Sequence
tggcaagtttgtgacatctaagaag

SEQ ID NO: 107629 - DNA, 25 bp, Probe Sequence
ggcaagtttgtgacatctaagaaga

SEQ ID NO: 107630 - DNA, 25 bp, Probe Sequence
tttgtgacatctaagaagaatgggc

SEQ ID NO: 107631 - DNA, 25 bp, Probe Sequence
gtacctacaacatcaaagactccac

SEQ ID NO: 107632 - DNA, 25 bp, Probe Sequence
gtataactccaaacgcccatgatag

SEQ ID NO: 107633 - DNA, 25 bp, Probe Sequence
acctacaacatcaaagactccacag

SEQ ID NO: 107634 - DNA, 25 bp, Probe Sequence
ttgtgacatctaagaagaatgggca

SEQ ID NO: 107635 - DNA, 25 bp, Probe Sequence
tgtataactccaaacgcccatgata

SEQ ID NO: 107636 - DNA, 25 bp, Probe Sequence
tgtaagtgtcatttgtataactcca

SEQ ID NO: 107637 - DNA, 25 bp, Probe Sequence
ccaatggcaagtttgtgacatctaa

SEQ ID NO: 107638 - DNA, 25 bp, Probe Sequence
aagtttgtgacatctaagaagaatg

SEQ ID NO: 107639 - DNA, 25 bp, Probe Sequence
caagtttgtgacatctaagaagaat

SEQ ID NO: 107640 - DNA, 25 bp, Probe Sequence
agtagcttcaaactggaaatagtga

SEQ ID NO: 107641 - DNA, 25 bp, Probe Sequence
tacagatgatgaggcaatacaattc

SEQ ID NO: 107642 - DNA, 25 bp, Probe Sequence
acagatgatgaggcaatacaattcc

SEQ ID NO: 107643 - DNA, 25 bp, Probe Sequence
aatgaagagttctgttgtaatcacc

SEQ ID NO: 107644 - DNA, 25 bp, Probe Sequence
gtacagatgatgaggcaatacaatt

SEQ ID NO: 107645 - DNA, 25 bp, Probe Sequence
gactattggcaatgatacgacactg

SEQ ID NO: 107646 - DNA, 25 bp, Probe Sequence
agatgatgaggcaatacaattcctt

SEQ ID NO: 107647 - DNA, 25 bp, Probe Sequence
cagatgatgaggcaatacaattcct

SEQ ID NO: 107648 - DNA, 25 bp, Probe Sequence
cgctgtagtagtagtcgaattatca

SEQ ID NO: 107649 - DNA, 25 bp, Probe Sequence
ccgctgtagtagtagtcgaattatc

SEQ ID NO: 107650 - DNA, 25 bp, Probe Sequence
accgctgtagtagtagtcgaattat

SEQ ID NO: 107651 - DNA, 25 bp, Probe Sequence
tgttgtaatcaccctttcctattct

SEQ ID NO: 107652 - DNA, 25 bp, Probe Sequence
tctgttgtaatcaccctttcctatt

SEQ ID NO: 107653 - DNA, 25 bp, Probe Sequence
ttctgttgtaatcaccctttcctat

SEQ ID NO: 107654 - DNA, 25 bp, Probe Sequence
gttctgttgtaatcaccctttccta

SEQ ID NO: 107655 - DNA, 25 bp, Probe Sequence
cggtctctcagtatctaaagtccta

SEQ ID NO: 107656 - DNA, 25 bp, Probe Sequence
tattggcaatgatacgacactggtt

SEQ ID NO: 107657 - DNA, 25 bp, Probe Sequence
ctgttgtaatcaccctttcctattc

SEQ ID NO: 107658 - DNA, 25 bp, Probe Sequence
agtcgaattatcatctccttcaact

SEQ ID NO: 107659 - DNA, 25 bp, Probe Sequence
agtagtcgaattatcatctccttca

SEQ ID NO: 107660 - DNA, 25 bp, Probe Sequence
agagttctgttgtaatcaccctttc

SEQ ID NO: 107661 - DNA, 25 bp, Probe Sequence
ggtctctcagtatctaaagtcctac

SEQ ID NO: 107662 - DNA, 25 bp, Probe Sequence
aagagttctgttgtaatcacccttt

SEQ ID NO: 107663 - DNA, 25 bp, Probe Sequence
tagaggtgttctggtaaactgattg

SEQ ID NO: 107664 - DNA, 25 bp, Probe Sequence
ggactattggcaatgatacgacact

SEQ ID NO: 107665 - DNA, 25 bp, Probe Sequence
aatagtgttgtgtgaatgctgtaag

SEQ ID NO: 107666 - DNA, 25 bp, Probe Sequence
atagtgttgtgtgaatgctgtaagt

SEQ ID NO: 107667 - DNA, 25 bp, Probe Sequence
ttgtgtgaatgctgtaagtgttgta

SEQ ID NO: 107668 - DNA, 25 bp, Probe Sequence
aatgctataagtgaagacctacctt

SEQ ID NO: 107669 - DNA, 25 bp, Probe Sequence
tagtgttgtgtgaatgctgtaagtg

SEQ ID NO: 107670 - DNA, 25 bp, Probe Sequence
tgtgtgaatgctgtaagtgttgtac

SEQ ID NO: 107671 - DNA, 25 bp, Probe Sequence
gttgtgtgaatgctgtaagtgttgt

SEQ ID NO: 107672 - DNA, 25 bp, Probe Sequence
tgttgtgtgaatgctgtaagtgttg

SEQ ID NO: 107673 - DNA, 25 bp, Probe Sequence
gtgttgtgtgaatgctgtaagtgtt

SEQ ID NO: 107674 - DNA, 25 bp, Probe Sequence
aaatagtgttgtgtgaatgctgtaa

SEQ ID NO: 107675 - DNA, 25 bp, Probe Sequence
aaatgctataagtgaagacctacct

SEQ ID NO: 107676 - DNA, 25 bp, Probe Sequence
ttgttaaacctttaccagcatacca

SEQ ID NO: 107677 - DNA, 25 bp, Probe Sequence
gccagaatcagatatcaggaagtag

SEQ ID NO: 107678 - DNA, 25 bp, Probe Sequence
attgccagaatcagatatcaggaag

SEQ ID NO: 107679 - DNA, 25 bp, Probe Sequence
tataagtgaagacctacctttccct

SEQ ID NO: 107680 - DNA, 25 bp, Probe Sequence
ctataagtgaagacctacctttccc

SEQ ID NO: 107681 - DNA, 25 bp, Probe Sequence
tgctataagtgaagacctacctttc

SEQ ID NO: 107682 - DNA, 25 bp, Probe Sequence
gctataagtgaagacctacctttcc

SEQ ID NO: 107683 - DNA, 25 bp, Probe Sequence
gaaatgctataagtgaagacctacc

SEQ ID NO: 107684 - DNA, 25 bp, Probe Sequence
tattgccagaatcagatatcaggaa

SEQ ID NO: 107685 - DNA, 25 bp, Probe Sequence
ttgttccttggaccttaatcatttg

SEQ ID NO: 107686 - DNA, 25 bp, Probe Sequence
tcatttgttccttggaccttaatca

SEQ ID NO: 107687 - DNA, 25 bp, Probe Sequence
gttcatttgttccttggaccttaat

SEQ ID NO: 107688 - DNA, 25 bp, Probe Sequence
tgccagaatcagatatcaggaagta

SEQ ID NO: 107689 - DNA, 25 bp, Probe Sequence
gacatcaatcaggttctcttctctt

SEQ ID NO: 107690 - DNA, 25 bp, Probe Sequence
tgacagcattacctccagatataga

SEQ ID NO: 107691 - DNA, 25 bp, Probe Sequence
ctgtgaggtgacttatatgaggttc

SEQ ID NO: 107692 - DNA, 25 bp, Probe Sequence
aggtgacttatatgaggttccagat

SEQ ID NO: 107693 - DNA, 25 bp, Probe Sequence
gacagcattacctccagatatagaa

SEQ ID NO: 107694 - DNA, 25 bp, Probe Sequence
gaggtgacttatatgaggttccaga

SEQ ID NO: 107695 - DNA, 25 bp, Probe Sequence
atgacagcattacctccagatatag

SEQ ID NO: 107696 - DNA, 25 bp, Probe Sequence
tgaggtgacttatatgaggttccag

SEQ ID NO: 107697 - DNA, 25 bp, Probe Sequence
agacatcaatcaggttctcttctct

SEQ ID NO: 107698 - DNA, 25 bp, Probe Sequence
gtgaggtgacttatatgaggttcca

SEQ ID NO: 107699 - DNA, 25 bp, Probe Sequence
tgtgaggtgacttatatgaggttcc

SEQ ID NO: 107700 - DNA, 25 bp, Probe Sequence
ggtgacttatatgaggttccagatc

SEQ ID NO: 107701 - DNA, 25 bp, Probe Sequence
ggtgtaagttctgaatggttccttg

SEQ ID NO: 107702 - DNA, 25 bp, Probe Sequence
cagtgaatgtgagatgttccaagac

SEQ ID NO: 107703 - DNA, 25 bp, Probe Sequence
gtgacttatatgaggttccagatca

SEQ ID NO: 107704 - DNA, 25 bp, Probe Sequence
gctgtgaggtgacttatatgaggtt

SEQ ID NO: 107705 - DNA, 25 bp, Probe Sequence
tacatgagagacatcaatcaggttc

SEQ ID NO: 107706 - DNA, 25 bp, Probe Sequence
ttacatgagagacatcaatcaggtt

SEQ ID NO: 107707 - DNA, 25 bp, Probe Sequence
gttacatgagagacatcaatcaggt

SEQ ID NO: 107708 - DNA, 25 bp, Probe Sequence
taagttctgaatggttccttgctga

SEQ ID NO: 107709 - DNA, 25 bp, Probe Sequence
gtaagttctgaatggttccttgctg

SEQ ID NO: 107710 - DNA, 25 bp, Probe Sequence
tgacttatatgaggttccagatcaa

SEQ ID NO: 107711 - DNA, 25 bp, Probe Sequence
agtgctgtgaggtgacttatatgag

SEQ ID NO: 107712 - DNA, 25 bp, Probe Sequence
gaatgtgagatgttccaagacagac

SEQ ID NO: 107713 - DNA, 25 bp, Probe Sequence
taaggacagcattgatgattctacc

SEQ ID NO: 107714 - DNA, 25 bp, Probe Sequence
ctaaggacagcattgatgattctac

SEQ ID NO: 107715 - DNA, 25 bp, Probe Sequence
cctaaggacagcattgatgattcta

SEQ ID NO: 107716 - DNA, 25 bp, Probe Sequence
gtagacatccactgccttactagat

SEQ ID NO: 107717 - DNA, 25 bp, Probe Sequence
gacttgaacaatgagaacacttgga

SEQ ID NO: 107718 - DNA, 25 bp, Probe Sequence
cttgaacaatgagaacacttggaca

SEQ ID NO: 107719 - DNA, 25 bp, Probe Sequence
acttgaacaatgagaacacttggac

SEQ ID NO: 107720 - DNA, 25 bp, Probe Sequence
ctgtagacatccactgccttactag

SEQ ID NO: 107721 - DNA, 25 bp, Probe Sequence
ttgaacaatgagaacacttggacac

SEQ ID NO: 107722 - DNA, 25 bp, Probe Sequence
caatgagaacacttggacacagaag

SEQ ID NO: 107723 - DNA, 25 bp, Probe Sequence
atatcatgtcacaccagttagaatg

SEQ ID NO: 107724 - DNA, 25 bp, Probe Sequence
gaacaatgagaacacttggacacag

SEQ ID NO: 107725 - DNA, 25 bp, Probe Sequence
ggacttgaacaatgagaacacttgg

SEQ ID NO: 107726 - DNA, 25 bp, Probe Sequence
tgtagacatccactgccttactaga

SEQ ID NO: 107727 - DNA, 25 bp, Probe Sequence
acaatgagaacacttggacacagaa

SEQ ID NO: 107728 - DNA, 25 bp, Probe Sequence
aacaatgagaacacttggacacaga

SEQ ID NO: 107729 - DNA, 25 bp, Probe Sequence
ggagggttagcattaggagatatac

SEQ ID NO: 107730 - DNA, 25 bp, Probe Sequence
gggagggttagcattaggagatata

SEQ ID NO: 107731 - DNA, 25 bp, Probe Sequence
aatgtaaatgacgagttaatgggtg

SEQ ID NO: 107732 - DNA, 25 bp, Probe Sequence
aaatgtatatcttcagcccaacctc

SEQ ID NO: 107733 - DNA, 25 bp, Probe Sequence
gactttgctaacttgcctctaattt

SEQ ID NO: 107734 - DNA, 25 bp, Probe Sequence
gagatatcatgtcacaccagttaga

SEQ ID NO: 107735 - DNA, 25 bp, Probe Sequence
atgaggatgcttaaacaaagtagga

SEQ ID NO: 107736 - DNA, 25 bp, Probe Sequence
tatcatgtcacaccagttagaatgg

SEQ ID NO: 107737 - DNA, 25 bp, Probe Sequence
caataagatgctcggattcactctg

SEQ ID NO: 107738 - DNA, 25 bp, Probe Sequence
aataagatgctcggattcactctgt

SEQ ID NO: 107739 - DNA, 25 bp, Probe Sequence
ctgtgattccgtttgtatctgtaaa

SEQ ID NO: 107740 - DNA, 25 bp, Probe Sequence
tgtgattccgtttgtatctgtaaat

SEQ ID NO: 107741 - DNA, 25 bp, Probe Sequence
gctgtgattccgtttgtatctgtaa

SEQ ID NO: 107742 - DNA, 25 bp, Probe Sequence
ataagatgctcggattcactctgtg

SEQ ID NO: 107743 - DNA, 25 bp, Probe Sequence
gttctcgctcttcgtggattaactt

SEQ ID NO: 107744 - DNA, 25 bp, Probe Sequence
ctttgctgtgattccgtttgtatct

SEQ ID NO: 107745 - DNA, 25 bp, Probe Sequence
aactttgctgtgattccgtttgtat

SEQ ID NO: 107746 - DNA, 25 bp, Probe Sequence
tttgctgtgattccgtttgtatctg

SEQ ID NO: 107747 - DNA, 25 bp, Probe Sequence
actttgctgtgattccgtttgtatc

SEQ ID NO: 107748 - DNA, 25 bp, Probe Sequence
tgctgtgattccgtttgtatctgta

SEQ ID NO: 107749 - DNA, 25 bp, Probe Sequence
ttctcgctcttcgtggattaacttt

SEQ ID NO: 107750 - DNA, 25 bp, Probe Sequence
ctgttctcgctcttcgtggattaac

SEQ ID NO: 107751 - DNA, 25 bp, Probe Sequence
caactttgctgtgattccgtttgta

SEQ ID NO: 107752 - DNA, 25 bp, Probe Sequence
gtgattccgtttgtatctgtaaata

SEQ ID NO: 107753 - DNA, 25 bp, Probe Sequence
ttgctgtgattccgtttgtatctgt

SEQ ID NO: 107754 - DNA, 25 bp, Probe Sequence
cttcgtggattaactttccctgatg

SEQ ID NO: 107755 - DNA, 25 bp, Probe Sequence
tcttcgtggattaactttccctgat

SEQ ID NO: 107756 - DNA, 25 bp, Probe Sequence
tctcgctcttcgtggattaactttc

SEQ ID NO: 107757 - DNA, 25 bp, Probe Sequence
tgttctcgctcttcgtggattaact

SEQ ID NO: 107758 - DNA, 25 bp, Probe Sequence
ctcttcgtggattaactttccctga

SEQ ID NO: 107759 - DNA, 25 bp, Probe Sequence
cacttctaagccaaagaaaggagag

SEQ ID NO: 107760 - DNA, 25 bp, Probe Sequence
gtctggatggttttatagcaacttt

SEQ ID NO: 107761 - DNA, 25 bp, Probe Sequence
gagatggaagactcctatgacagtt

SEQ ID NO: 107762 - DNA, 25 bp, Probe Sequence
agatggaagactcctatgacagttt

SEQ ID NO: 107763 - DNA, 25 bp, Probe Sequence
ctggaggaagaggaggaaagtaagg

SEQ ID NO: 107764 - DNA, 25 bp, Probe Sequence
gctggaggaagaggaggaaagtaag

SEQ ID NO: 107765 - DNA, 25 bp, Probe Sequence
gatggaagactcctatgacagtttt

SEQ ID NO: 107766 - DNA, 25 bp, Probe Sequence
atggaagactcctatgacagttttg

SEQ ID NO: 107767 - DNA, 25 bp, Probe Sequence
tcatcttttacttctccacggacag

SEQ ID NO: 107768 - DNA, 25 bp, Probe Sequence
tggaggaagaggaggaaagtaaggg

SEQ ID NO: 107769 - DNA, 25 bp, Probe Sequence
tggaagactcctatgacagttttgg

SEQ ID NO: 107770 - DNA, 25 bp, Probe Sequence
catcttttacttctccacggacagg

SEQ ID NO: 107771 - DNA, 25 bp, Probe Sequence
agctggaggaagaggaggaaagtaa

SEQ ID NO: 107772 - DNA, 25 bp, Probe Sequence
ggaagactcctatgacagttttggg

SEQ ID NO: 107773 - DNA, 25 bp, Probe Sequence
atcttttacttctccacggacagga

SEQ ID NO: 107774 - DNA, 25 bp, Probe Sequence
ggagatggaagactcctatgacagt

SEQ ID NO: 107775 - DNA, 25 bp, Probe Sequence
tcttttacttctccacggacaggaa

SEQ ID NO: 107776 - DNA, 25 bp, Probe Sequence
gagctggaggaagaggaggaaagta

SEQ ID NO: 107777 - DNA, 25 bp, Probe Sequence
cggagatggaagactcctatgacag

SEQ ID NO: 107778 - DNA, 25 bp, Probe Sequence
cttttacttctccacggacaggaag

SEQ ID NO: 107779 - DNA, 25 bp, Probe Sequence
ttttacttctccacggacaggaagc

SEQ ID NO: 107780 - DNA, 25 bp, Probe Sequence
ccggagatggaagactcctatgaca

SEQ ID NO: 107781 - DNA, 25 bp, Probe Sequence
tggacaatgccagcatttggatttt

SEQ ID NO: 107782 - DNA, 25 bp, Probe Sequence
ctttgggcaggtgtagaaattattt

SEQ ID NO: 107783 - DNA, 25 bp, Probe Sequence
cctttgggcaggtgtagaaattatt

SEQ ID NO: 107784 - DNA, 25 bp, Probe Sequence
atgtctaggctaagtatgcacctaa

SEQ ID NO: 107785 - DNA, 25 bp, Probe Sequence
aatgtctaggctaagtatgcaccta

SEQ ID NO: 107786 - DNA, 25 bp, Probe Sequence
tttgggcaggtgtagaaattatttc

SEQ ID NO: 107787 - DNA, 25 bp, Probe Sequence
ttgggcaggtgtagaaattatttca

SEQ ID NO: 107788 - DNA, 25 bp, Probe Sequence
gggcaggtgtagaaattatttcaga

SEQ ID NO: 107789 - DNA, 25 bp, Probe Sequence
ggcaggtgtagaaattatttcagat

SEQ ID NO: 107790 - DNA, 25 bp, Probe Sequence
tgggcaggtgtagaaattatttcag

SEQ ID NO: 107791 - DNA, 25 bp, Probe Sequence
aaatgtctaggctaagtatgcacct

SEQ ID NO: 107792 - DNA, 25 bp, Probe Sequence
ggctaagtatgcacctaaatataag

SEQ ID NO: 107793 - DNA, 25 bp, Probe Sequence
atttcagatacaagcatgtaacaaa

SEQ ID NO: 107794 - DNA, 25 bp, Probe Sequence
gtctaggctaagtatgcacctaaat

SEQ ID NO: 107795 - DNA, 25 bp, Probe Sequence
tgtctaggctaagtatgcacctaaa

SEQ ID NO: 107796 - DNA, 25 bp, Probe Sequence
aggctaagtatgcacctaaatataa

SEQ ID NO: 107797 - DNA, 25 bp, Probe Sequence
aaaatgtctaggctaagtatgcacc

SEQ ID NO: 107798 - DNA, 25 bp, Probe Sequence
tctaggctaagtatgcacctaaata

SEQ ID NO: 107799 - DNA, 25 bp, Probe Sequence
gctaagtatgcacctaaatataagt

SEQ ID NO: 107800 - DNA, 25 bp, Probe Sequence
taaaatgtctaggctaagtatgcac

SEQ ID NO: 107801 - DNA, 25 bp, Probe Sequence
tatttcagatacaagcatgtaacaa

SEQ ID NO: 107802 - DNA, 25 bp, Probe Sequence
ttatttcagatacaagcatgtaaca

SEQ ID NO: 107803 - DNA, 25 bp, Probe Sequence
gcaggtgtagaaattatttcagata

SEQ ID NO: 107804 - DNA, 25 bp, Probe Sequence
cttaaaatgtctaggctaagtatgc

SEQ ID NO: 107805 - DNA, 25 bp, Probe Sequence
ttaaaatgtctaggctaagtatgca

SEQ ID NO: 107806 - DNA, 25 bp, Probe Sequence
gccattattacagtcatacaagtgc

SEQ ID NO: 107807 - DNA, 25 bp, Probe Sequence
tgccattattacagtcatacaagtg

SEQ ID NO: 107808 - DNA, 25 bp, Probe Sequence
ttgccattattacagtcatacaagt

SEQ ID NO: 107809 - DNA, 25 bp, Probe Sequence
ccattattacagtcatacaagtgca

SEQ ID NO: 107810 - DNA, 25 bp, Probe Sequence
attacagtcatacaagtgcatgtca

SEQ ID NO: 107811 - DNA, 25 bp, Probe Sequence
ttacagtcatacaagtgcatgtcaa

SEQ ID NO: 107812 - DNA, 25 bp, Probe Sequence
tattacagtcatacaagtgcatgtc

SEQ ID NO: 107813 - DNA, 25 bp, Probe Sequence
tacagtcatacaagtgcatgtcaag

SEQ ID NO: 107814 - DNA, 25 bp, Probe Sequence
ttattacagtcatacaagtgcatgt

SEQ ID NO: 107815 - DNA, 25 bp, Probe Sequence
tgtttgccattattacagtcataca

SEQ ID NO: 107816 - DNA, 25 bp, Probe Sequence
atccacctcatagctttacacattt

SEQ ID NO: 107817 - DNA, 25 bp, Probe Sequence
gtatccacctcatagctttacacat

SEQ ID NO: 107818 - DNA, 25 bp, Probe Sequence
catcagtatccacctcatagcttta

SEQ ID NO: 107819 - DNA, 25 bp, Probe Sequence
cattattacagtcatacaagtgcat

SEQ ID NO: 107820 - DNA, 25 bp, Probe Sequence
tatccacctcatagctttacacatt

SEQ ID NO: 107821 - DNA, 25 bp, Probe Sequence
atcagtatccacctcatagctttac

SEQ ID NO: 107822 - DNA, 25 bp, Probe Sequence
gtttgccattattacagtcatacaa

SEQ ID NO: 107823 - DNA, 25 bp, Probe Sequence
cagtatccacctcatagctttacac

SEQ ID NO: 107824 - DNA, 25 bp, Probe Sequence
tcagtatccacctcatagctttaca

SEQ ID NO: 107825 - DNA, 25 bp, Probe Sequence
attattacagtcatacaagtgcatg

SEQ ID NO: 107826 - DNA, 25 bp, Probe Sequence
tcaggcatcagtatccacctcatag

SEQ ID NO: 107827 - DNA, 25 bp, Probe Sequence
ctcaggcatcagtatccacctcata

SEQ ID NO: 107828 - DNA, 25 bp, Probe Sequence
agtatccacctcatagctttacaca

SEQ ID NO: 107829 - DNA, 25 bp, Probe Sequence
cagtcatacaagtgcatgtcaagtc

SEQ ID NO: 107830 - DNA, 25 bp, Probe Sequence
atcaggaagaacagaataactcagt

SEQ ID NO: 107831 - DNA, 25 bp, Probe Sequence
caatcaggaagaacagaataactca

SEQ ID NO: 107832 - DNA, 25 bp, Probe Sequence
acaatcaggaagaacagaataactc

SEQ ID NO: 107833 - DNA, 25 bp, Probe Sequence
gacaatcaggaagaacagaataact

SEQ ID NO: 107834 - DNA, 25 bp, Probe Sequence
aatcaggaagaacagaataactcag

SEQ ID NO: 107835 - DNA, 25 bp, Probe Sequence
atattgtaggcagaagagatccatc

SEQ ID NO: 107836 - DNA, 25 bp, Probe Sequence
tattgtaggcagaagagatccatca

SEQ ID NO: 107837 - DNA, 25 bp, Probe Sequence
tgacaatcaggaagaacagaataac

SEQ ID NO: 107838 - DNA, 25 bp, Probe Sequence
atgaataggtgttctcaggaggtag

SEQ ID NO: 107839 - DNA, 25 bp, Probe Sequence
gatgaataggtgttctcaggaggta

SEQ ID NO: 107840 - DNA, 25 bp, Probe Sequence
tcaggaagaacagaataactcagtt

SEQ ID NO: 107841 - DNA, 25 bp, Probe Sequence
agaacctagccaataagatagagaa

SEQ ID NO: 107842 - DNA, 25 bp, Probe Sequence
aagaacctagccaataagatagaga

SEQ ID NO: 107843 - DNA, 25 bp, Probe Sequence
tatattgtaggcagaagagatccat

SEQ ID NO: 107844 - DNA, 25 bp, Probe Sequence
aagatgaataggtgttctcaggagg

SEQ ID NO: 107845 - DNA, 25 bp, Probe Sequence
atatattgtaggcagaagagatcca

SEQ ID NO: 107846 - DNA, 25 bp, Probe Sequence
ttgacaatcaggaagaacagaataa

SEQ ID NO: 107847 - DNA, 25 bp, Probe Sequence
aacctagccaataagatagagaatg

SEQ ID NO: 107848 - DNA, 25 bp, Probe Sequence
attgtaggcagaagagatccatcaa

SEQ ID NO: 107849 - DNA, 25 bp, Probe Sequence
cagaagagatccatcaacagattgc

SEQ ID NO: 107850 - DNA, 25 bp, Probe Sequence
gcagaagagatccatcaacagattg

SEQ ID NO: 107851 - DNA, 25 bp, Probe Sequence
attgacaatcaggaagaacagaata

SEQ ID NO: 107852 - DNA, 25 bp, Probe Sequence
gaacctagccaataagatagagaat

SEQ ID NO: 107853 - DNA, 25 bp, Probe Sequence
acctagccaataagatagagaatgg

SEQ ID NO: 107854 - DNA, 25 bp, Probe Sequence
gattgaacttatctgatcgcttgag

SEQ ID NO: 107855 - DNA, 25 bp, Probe Sequence
actgtggctgtctaatgtaatcctt

SEQ ID NO: 107856 - DNA, 25 bp, Probe Sequence
cgttattgctaatcagtggtctcaa

SEQ ID NO: 107857 - DNA, 25 bp, Probe Sequence
attgaacttatctgatcgcttgaga

SEQ ID NO: 107858 - DNA, 25 bp, Probe Sequence
atctgatcgcttgagactcctaata

SEQ ID NO: 107859 - DNA, 25 bp, Probe Sequence
tatctgatcgcttgagactcctaat

SEQ ID NO: 107860 - DNA, 25 bp, Probe Sequence
ttatctgatcgcttgagactcctaa

SEQ ID NO: 107861 - DNA, 25 bp, Probe Sequence
ttgaacttatctgatcgcttgagac

SEQ ID NO: 107862 - DNA, 25 bp, Probe Sequence
gaacttatctgatcgcttgagactc

SEQ ID NO: 107863 - DNA, 25 bp, Probe Sequence
tctgatcgcttgagactcctaatag

SEQ ID NO: 107864 - DNA, 25 bp, Probe Sequence
cttatctgatcgcttgagactccta

SEQ ID NO: 107865 - DNA, 25 bp, Probe Sequence
tgaacttatctgatcgcttgagact

SEQ ID NO: 107866 - DNA, 25 bp, Probe Sequence
cactgtggctgtctaatgtaatcct

SEQ ID NO: 107867 - DNA, 25 bp, Probe Sequence
ctagtgtgctcatcctgaactgtta

SEQ ID NO: 107868 - DNA, 25 bp, Probe Sequence
atacgttattgctaatcagtggtct

SEQ ID NO: 107869 - DNA, 25 bp, Probe Sequence
tagtgtgctcatcctgaactgttac

SEQ ID NO: 107870 - DNA, 25 bp, Probe Sequence
tacgttattgctaatcagtggtctc

SEQ ID NO: 107871 - DNA, 25 bp, Probe Sequence
tgtggctgtctaatgtaatccttta

SEQ ID NO: 107872 - DNA, 25 bp, Probe Sequence
aacttatctgatcgcttgagactcc

SEQ ID NO: 107873 - DNA, 25 bp, Probe Sequence
ctcataatacacaaaggcttccaga

SEQ ID NO: 107874 - DNA, 25 bp, Probe Sequence
ctgtggctgtctaatgtaatccttt

SEQ ID NO: 107875 - DNA, 25 bp, Probe Sequence
taactgtcctctttcttgggtctaa

SEQ ID NO: 107876 - DNA, 25 bp, Probe Sequence
tcataatacacaaaggcttccagac

SEQ ID NO: 107877 - DNA, 25 bp, Probe Sequence
cgtaaccagtaatcacaaggaaagt

SEQ ID NO: 107878 - DNA, 25 bp, Probe Sequence
ctgtcatcttccacgtcatcttcac

SEQ ID NO: 107879 - DNA, 25 bp, Probe Sequence
cactgtcatcttccacgtcatcttc

SEQ ID NO: 107880 - DNA, 25 bp, Probe Sequence
gtcatcttccacgtcatcttcacac

SEQ ID NO: 107881 - DNA, 25 bp, Probe Sequence
actgtcatcttccacgtcatcttca

SEQ ID NO: 107882 - DNA, 25 bp, Probe Sequence
gacggagatcgagttcatgtacaag

SEQ ID NO: 107883 - DNA, 25 bp, Probe Sequence
tgtcatcttccacgtcatcttcaca

SEQ ID NO: 107884 - DNA, 25 bp, Probe Sequence
gagatcgagttcatgtacaagcctg

SEQ ID NO: 107885 - DNA, 25 bp, Probe Sequence
ctggacggagatcgagttcatgtac

SEQ ID NO: 107886 - DNA, 25 bp, Probe Sequence
atcttccacgtcatcttcacaccag

SEQ ID NO: 107887 - DNA, 25 bp, Probe Sequence
tcatcttccacgtcatcttcacacc

SEQ ID NO: 107888 - DNA, 25 bp, Probe Sequence
gactcccactattgcctctgtgatt

SEQ ID NO: 107889 - DNA, 25 bp, Probe Sequence
caggcagtttggactacaggagaaa

SEQ ID NO: 107890 - DNA, 25 bp, Probe Sequence
catcttccacgtcatcttcacacca

SEQ ID NO: 107891 - DNA, 25 bp, Probe Sequence
actcccactattgcctctgtgattg

SEQ ID NO: 107892 - DNA, 25 bp, Probe Sequence
gaaagaagtagctgtgttctcccag

SEQ ID NO: 107893 - DNA, 25 bp, Probe Sequence
actggacggagatcgagttcatgta

SEQ ID NO: 107894 - DNA, 25 bp, Probe Sequence
ggagatcgagttcatgtacaagcct

SEQ ID NO: 107895 - DNA, 25 bp, Probe Sequence
ggacggagatcgagttcatgtacaa

SEQ ID NO: 107896 - DNA, 25 bp, Probe Sequence
gcactgtcatcttccacgtcatctt

SEQ ID NO: 107897 - DNA, 25 bp, Probe Sequence
aagcactgtcatcttccacgtcatc

SEQ ID NO: 107898 - DNA, 25 bp, Probe Sequence
cagtttggactacaggagaaaagcc

SEQ ID NO: 107899 - DNA, 25 bp, Probe Sequence
ggcagtttggactacaggagaaaag

SEQ ID NO: 107900 - DNA, 25 bp, Probe Sequence
agatcgagttcatgtacaagcctgg

SEQ ID NO: 107901 - DNA, 25 bp, Probe Sequence
tttagatctgggcaccaataaaggc

SEQ ID NO: 107902 - DNA, 25 bp, Probe Sequence
cttaataaagactgggatgccaaat

SEQ ID NO: 107903 - DNA, 25 bp, Probe Sequence
ttaataaagactgggatgccaaatt

SEQ ID NO: 107904 - DNA, 25 bp, Probe Sequence
tcttaataaagactgggatgccaaa

SEQ ID NO: 107905 - DNA, 25 bp, Probe Sequence
taataaagactgggatgccaaattt

SEQ ID NO: 107906 - DNA, 25 bp, Probe Sequence
ttctaattccacgtatcttccagtc

SEQ ID NO: 107907 - DNA, 25 bp, Probe Sequence
gcatgttctaattccacgtatcttc

SEQ ID NO: 107908 - DNA, 25 bp, Probe Sequence
atgttctaattccacgtatcttcca

SEQ ID NO: 107909 - DNA, 25 bp, Probe Sequence
attgcatgttctaattccacgtatc

SEQ ID NO: 107910 - DNA, 25 bp, Probe Sequence
gttctaattccacgtatcttccagt

SEQ ID NO: 107911 - DNA, 25 bp, Probe Sequence
tgttctaattccacgtatcttccag

SEQ ID NO: 107912 - DNA, 25 bp, Probe Sequence
catgttctaattccacgtatcttcc

SEQ ID NO: 107913 - DNA, 25 bp, Probe Sequence
ctaattccacgtatcttccagtctc

SEQ ID NO: 107914 - DNA, 25 bp, Probe Sequence
tgcatgttctaattccacgtatctt

SEQ ID NO: 107915 - DNA, 25 bp, Probe Sequence
ttgcatgttctaattccacgtatct

SEQ ID NO: 107916 - DNA, 25 bp, Probe Sequence
taattccacgtatcttccagtctct

SEQ ID NO: 107917 - DNA, 25 bp, Probe Sequence
tctaattccacgtatcttccagtct

SEQ ID NO: 107918 - DNA, 25 bp, Probe Sequence
aattccacgtatcttccagtctctt

SEQ ID NO: 107919 - DNA, 25 bp, Probe Sequence
attccacgtatcttccagtctcttt

SEQ ID NO: 107920 - DNA, 25 bp, Probe Sequence
ccacgtatcttccagtctcttttat

SEQ ID NO: 107921 - DNA, 25 bp, Probe Sequence
tccacgtatcttccagtctctttta

SEQ ID NO: 107922 - DNA, 25 bp, Probe Sequence
ttccacgtatcttccagtctctttt

SEQ ID NO: 107923 - DNA, 25 bp, Probe Sequence
cacgtatcttccagtctcttttata

SEQ ID NO: 107924 - DNA, 25 bp, Probe Sequence
acgtatcttccagtctcttttataa

SEQ ID NO: 107925 - DNA, 25 bp, Probe Sequence
cgtatcttccagtctcttttataaa

SEQ ID NO: 107926 - DNA, 25 bp, Probe Sequence
tcttccagtctcttttataaagtct

SEQ ID NO: 107927 - DNA, 25 bp, Probe Sequence
cttccagtctcttttataaagtctc

SEQ ID NO: 107928 - DNA, 25 bp, Probe Sequence
atcttccagtctcttttataaagtc

SEQ ID NO: 107929 - DNA, 25 bp, Probe Sequence
tatcttccagtctcttttataaagt

SEQ ID NO: 107930 - DNA, 25 bp, Probe Sequence
gtatcttccagtctcttttataaag

SEQ ID NO: 107931 - DNA, 25 bp, Probe Sequence
ttatcttccaatgcaaggtaagagg

SEQ ID NO: 107932 - DNA, 25 bp, Probe Sequence
attatcttccaatgcaaggtaagag

SEQ ID NO: 107933 - DNA, 25 bp, Probe Sequence
aattatcttccaatgcaaggtaaga

SEQ ID NO: 107934 - DNA, 25 bp, Probe Sequence
aaagaaaggaaaccaaatggtcaag

SEQ ID NO: 107935 - DNA, 25 bp, Probe Sequence
cgggaagatttgaaaagaaaggaaa

SEQ ID NO: 107936 - DNA, 25 bp, Probe Sequence
gaaaggaaaccaaatggtcaagtac

SEQ ID NO: 107937 - DNA, 25 bp, Probe Sequence
agaaaggaaaccaaatggtcaagta

SEQ ID NO: 107938 - DNA, 25 bp, Probe Sequence
aaaggaaaccaaatggtcaagtaca

SEQ ID NO: 107939 - DNA, 25 bp, Probe Sequence
ggaagatttgaaaagaaaggaaacc

SEQ ID NO: 107940 - DNA, 25 bp, Probe Sequence
gggaagatttgaaaagaaaggaaac

SEQ ID NO: 107941 - DNA, 25 bp, Probe Sequence
acgggaagatttgaaaagaaaggaa

SEQ ID NO: 107942 - DNA, 25 bp, Probe Sequence
aagaaaggaaaccaaatggtcaagt

SEQ ID NO: 107943 - DNA, 25 bp, Probe Sequence
aaattatcttccaatgcaaggtaag

SEQ ID NO: 107944 - DNA, 25 bp, Probe Sequence
aaggaaaccaaatggtcaagtacac

SEQ ID NO: 107945 - DNA, 25 bp, Probe Sequence
gaagatttgaaaagaaaggaaacca

SEQ ID NO: 107946 - DNA, 25 bp, Probe Sequence
tatcttccaatgcaaggtaagaggc

SEQ ID NO: 107947 - DNA, 25 bp, Probe Sequence
aaaccaaatggtcaagtacacacag

SEQ ID NO: 107948 - DNA, 25 bp, Probe Sequence
gaaaccaaatggtcaagtacacaca

SEQ ID NO: 107949 - DNA, 25 bp, Probe Sequence
aagatttgaaaagaaaggaaaccaa

SEQ ID NO: 107950 - DNA, 25 bp, Probe Sequence
ggaaaccaaatggtcaagtacacac

SEQ ID NO: 107951 - DNA, 25 bp, Probe Sequence
aggaaaccaaatggtcaagtacaca

SEQ ID NO: 107952 - DNA, 25 bp, Probe Sequence
aaaagaaaggaaaccaaatggtcaa

SEQ ID NO: 107953 - DNA, 25 bp, Probe Sequence
gaaaagaaaggaaaccaaatggtca

SEQ ID NO: 107954 - DNA, 25 bp, Probe Sequence
tgaaaagaaaggaaaccaaatggtc

SEQ ID NO: 107955 - DNA, 25 bp, Probe Sequence
ataccatctcacaccagttagaatg

SEQ ID NO: 107956 - DNA, 25 bp, Probe Sequence
gataccatctcacaccagttagaat

SEQ ID NO: 107957 - DNA, 25 bp, Probe Sequence
gaattgaacaatgagaacacatgga

SEQ ID NO: 107958 - DNA, 25 bp, Probe Sequence
aattgaacaatgagaacacatggac

SEQ ID NO: 107959 - DNA, 25 bp, Probe Sequence
ggaattgaacaatgagaacacatgg

SEQ ID NO: 107960 - DNA, 25 bp, Probe Sequence
attgaacaatgagaacacatggaca

SEQ ID NO: 107961 - DNA, 25 bp, Probe Sequence
ttgaacaatgagaacacatggacac

SEQ ID NO: 107962 - DNA, 25 bp, Probe Sequence
ggagagaatgtggagaaataggaat

SEQ ID NO: 107963 - DNA, 25 bp, Probe Sequence
ggctaatacccagaatctacaatga

SEQ ID NO: 107964 - DNA, 25 bp, Probe Sequence
caaagacttagaaccaacccaaatg

SEQ ID NO: 107965 - DNA, 25 bp, Probe Sequence
cccagaatctacaatgaactcaaac

SEQ ID NO: 107966 - DNA, 25 bp, Probe Sequence
acccagaatctacaatgaactcaaa

SEQ ID NO: 107967 - DNA, 25 bp, Probe Sequence
aaagacttagaaccaacccaaatgt

SEQ ID NO: 107968 - DNA, 25 bp, Probe Sequence
tggagagaatgtggagaaataggaa

SEQ ID NO: 107969 - DNA, 25 bp, Probe Sequence
tacccagaatctacaatgaactcaa

SEQ ID NO: 107970 - DNA, 25 bp, Probe Sequence
gcaatctacttatctaacaaagggc

SEQ ID NO: 107971 - DNA, 25 bp, Probe Sequence
atacccagaatctacaatgaactca

SEQ ID NO: 107972 - DNA, 25 bp, Probe Sequence
gagggatagcattaggagagatacc

SEQ ID NO: 107973 - DNA, 25 bp, Probe Sequence
ggagggatagcattaggagagatac

SEQ ID NO: 107974 - DNA, 25 bp, Probe Sequence
ctagttcaaccattgtggaagtcag

SEQ ID NO: 107975 - DNA, 25 bp, Probe Sequence
gaacaatgagaacacatggacacag

SEQ ID NO: 107976 - DNA, 25 bp, Probe Sequence
agataccatctcacaccagttagaa

SEQ ID NO: 107977 - DNA, 25 bp, Probe Sequence
ctggagagaatgtggagaaatagga

SEQ ID NO: 107978 - DNA, 25 bp, Probe Sequence
ataggtgggaattgaacaatgagaa

SEQ ID NO: 107979 - DNA, 25 bp, Probe Sequence
agcacaagagttgatacataaggag

SEQ ID NO: 107980 - DNA, 25 bp, Probe Sequence
gcacaagagttgatacataaggagt

SEQ ID NO: 107981 - DNA, 25 bp, Probe Sequence
tagcacaagagttgatacataagga

SEQ ID NO: 107982 - DNA, 25 bp, Probe Sequence
gaggaagagtggcaattattgaatc

SEQ ID NO: 107983 - DNA, 25 bp, Probe Sequence
tggcaattattgaatcctcttgaga

SEQ ID NO: 107984 - DNA, 25 bp, Probe Sequence
gtggcaattattgaatcctcttgag

SEQ ID NO: 107985 - DNA, 25 bp, Probe Sequence
gcctagcacaagagttgatacataa

SEQ ID NO: 107986 - DNA, 25 bp, Probe Sequence
agtggcaattattgaatcctcttga

SEQ ID NO: 107987 - DNA, 25 bp, Probe Sequence
tgaggaagagtggcaattattgaat

SEQ ID NO: 107988 - DNA, 25 bp, Probe Sequence
ggcaattattgaatcctcttgagaa

SEQ ID NO: 107989 - DNA, 25 bp, Probe Sequence
ctagcacaagagttgatacataagg

SEQ ID NO: 107990 - DNA, 25 bp, Probe Sequence
cctagcacaagagttgatacataag

SEQ ID NO: 107991 - DNA, 25 bp, Probe Sequence
gaagagtggcaattattgaatcctc

SEQ ID NO: 107992 - DNA, 25 bp, Probe Sequence
gagtggcaattattgaatcctcttg

SEQ ID NO: 107993 - DNA, 25 bp, Probe Sequence
ctgaggaagagtggcaattattgaa

SEQ ID NO: 107994 - DNA, 25 bp, Probe Sequence
ttctgaggaagagtggcaattattg

SEQ ID NO: 107995 - DNA, 25 bp, Probe Sequence
gcaattattgaatcctcttgagaag

SEQ ID NO: 107996 - DNA, 25 bp, Probe Sequence
tctgaggaagagtggcaattattga

SEQ ID NO: 107997 - DNA, 25 bp, Probe Sequence
cacaagagttgatacataaggagta

SEQ ID NO: 107998 - DNA, 25 bp, Probe Sequence
aatcttgtactgttcacatcttcag

SEQ ID NO: 107999 - DNA, 25 bp, Probe Sequence
atcttgtactgttcacatcttcagc

SEQ ID NO: 108000 - DNA, 25 bp, Probe Sequence
ggaagagtggcaattattgaatcct

SEQ ID NO: 108001 - DNA, 25 bp, Probe Sequence
aggaagagtggcaattattgaatcc

SEQ ID NO: 108002 - DNA, 25 bp, Probe Sequence
agtgtagtgatgagattcctttagc

SEQ ID NO: 108003 - DNA, 25 bp, Probe Sequence
agccttctgttggttaatatggtat

SEQ ID NO: 108004 - DNA, 25 bp, Probe Sequence
tctgtatcttagtgtagcgatgtat

SEQ ID NO: 108005 - DNA, 25 bp, Probe Sequence
atctgtatcttagtgtagcgatgta

SEQ ID NO: 108006 - DNA, 25 bp, Probe Sequence
gatctgtatcttagtgtagcgatgt

SEQ ID NO: 108007 - DNA, 25 bp, Probe Sequence
gccttctgttggttaatatggtata

SEQ ID NO: 108008 - DNA, 25 bp, Probe Sequence
aagtcagccttctgttggttaatat

SEQ ID NO: 108009 - DNA, 25 bp, Probe Sequence
cagccttctgttggttaatatggta

SEQ ID NO: 108010 - DNA, 25 bp, Probe Sequence
agtcagccttctgttggttaatatg

SEQ ID NO: 108011 - DNA, 25 bp, Probe Sequence
ttcactggtgctgactacatagaat

SEQ ID NO: 108012 - DNA, 25 bp, Probe Sequence
attcactggtgctgactacatagaa

SEQ ID NO: 108013 - DNA, 25 bp, Probe Sequence
caagtcagccttctgttggttaata

SEQ ID NO: 108014 - DNA, 25 bp, Probe Sequence
gacaacgactgttcctatgaagaag

SEQ ID NO: 108015 - DNA, 25 bp, Probe Sequence
gtcagccttctgttggttaatatgg

SEQ ID NO: 108016 - DNA, 25 bp, Probe Sequence
ttcctatgaagaagccacttgtgtt

SEQ ID NO: 108017 - DNA, 25 bp, Probe Sequence
ctgtatcttagtgtagcgatgtata

SEQ ID NO: 108018 - DNA, 25 bp, Probe Sequence
gactgttcctatgaagaagccactt

SEQ ID NO: 108019 - DNA, 25 bp, Probe Sequence
tgacaacgactgttcctatgaagaa

SEQ ID NO: 108020 - DNA, 25 bp, Probe Sequence
tcactggtgctgactacatagaatg

SEQ ID NO: 108021 - DNA, 25 bp, Probe Sequence
cattcactggtgctgactacataga

SEQ ID NO: 108022 - DNA, 25 bp, Probe Sequence
tctgtttggttagtattggcatagt

SEQ ID NO: 108023 - DNA, 25 bp, Probe Sequence
aaagttctgtttggttagtattggc

SEQ ID NO: 108024 - DNA, 25 bp, Probe Sequence
tcagccttctgttggttaatatggt

SEQ ID NO: 108025 - DNA, 25 bp, Probe Sequence
agttctgtttggttagtattggcat

SEQ ID NO: 108026 - DNA, 25 bp, Probe Sequence
ctgttcctatgaagaagccacttgt

SEQ ID NO: 108027 - DNA, 25 bp, Probe Sequence
tcagaactacgacttgaatgtgatc

SEQ ID NO: 108028 - DNA, 25 bp, Probe Sequence
agtagaatgaggtatgcctgtattg

SEQ ID NO: 108029 - DNA, 25 bp, Probe Sequence
catagtagaatgaggtatgcctgta

SEQ ID NO: 108030 - DNA, 25 bp, Probe Sequence
tagaatgaggtatgcctgtattgct

SEQ ID NO: 108031 - DNA, 25 bp, Probe Sequence
gtagaatgaggtatgcctgtattgc

SEQ ID NO: 108032 - DNA, 25 bp, Probe Sequence
tagtagaatgaggtatgcctgtatt

SEQ ID NO: 108033 - DNA, 25 bp, Probe Sequence
taaagccaacatcacaataaagcaa

SEQ ID NO: 108034 - DNA, 25 bp, Probe Sequence
atagtagaatgaggtatgcctgtat

SEQ ID NO: 108035 - DNA, 25 bp, Probe Sequence
gtaaagccaacatcacaataaagca

SEQ ID NO: 108036 - DNA, 25 bp, Probe Sequence
aaacacagtattcacaaagcatagt

SEQ ID NO: 108037 - DNA, 25 bp, Probe Sequence
ccaacatcacaataaagcaaggaag

SEQ ID NO: 108038 - DNA, 25 bp, Probe Sequence
gctctttctgaagtggtgtgatata

SEQ ID NO: 108039 - DNA, 25 bp, Probe Sequence
aaagccaacatcacaataaagcaag

SEQ ID NO: 108040 - DNA, 25 bp, Probe Sequence
cggtaaagccaacatcacaataaag

SEQ ID NO: 108041 - DNA, 25 bp, Probe Sequence
aatgaggtatgcctgtattgctctt

SEQ ID NO: 108042 - DNA, 25 bp, Probe Sequence
acacagtattcacaaagcatagtag

SEQ ID NO: 108043 - DNA, 25 bp, Probe Sequence
aattactgatgaagcagcatgtgtt

SEQ ID NO: 108044 - DNA, 25 bp, Probe Sequence
aattatacaggaaggtgtgcgtagg

SEQ ID NO: 108045 - DNA, 25 bp, Probe Sequence
gtatgcctgtattgctctttctgaa

SEQ ID NO: 108046 - DNA, 25 bp, Probe Sequence
ggtaaagccaacatcacaataaagc

SEQ ID NO: 108047 - DNA, 25 bp, Probe Sequence
tcggtaaagccaacatcacaataaa

SEQ ID NO: 108048 - DNA, 25 bp, Probe Sequence
tatgcctgtattgctctttctgaag

SEQ ID NO: 108049 - DNA, 25 bp, Probe Sequence
cacagtattcacaaagcatagtaga

SEQ ID NO: 108050 - DNA, 25 bp, Probe Sequence
caacatcacaataaagcaaggaagc

SEQ ID NO: 108051 - DNA, 25 bp, Probe Sequence
agtatcactatcttctctcctcgtt

SEQ ID NO: 108052 - DNA, 25 bp, Probe Sequence
aaggcataagattacactgaacata

SEQ ID NO: 108053 - DNA, 25 bp, Probe Sequence
aggcataagattacactgaacatat

SEQ ID NO: 108054 - DNA, 25 bp, Probe Sequence
tagtatcactatcttctctcctcgt

SEQ ID NO: 108055 - DNA, 25 bp, Probe Sequence
atcttctctcctcgtttctctctta

SEQ ID NO: 108056 - DNA, 25 bp, Probe Sequence
tatcttctctcctcgtttctctctt

SEQ ID NO: 108057 - DNA, 25 bp, Probe Sequence
ggcataagattacactgaacatatt

SEQ ID NO: 108058 - DNA, 25 bp, Probe Sequence
agatgggaaccttatttgaatgtgt

SEQ ID NO: 108059 - DNA, 25 bp, Probe Sequence
atcactatcttctctcctcgtttct

SEQ ID NO: 108060 - DNA, 25 bp, Probe Sequence
ctatcttctctcctcgtttctctct

SEQ ID NO: 108061 - DNA, 25 bp, Probe Sequence
gtatcactatcttctctcctcgttt

SEQ ID NO: 108062 - DNA, 25 bp, Probe Sequence
aaaccagaagccttatttgtgattt

SEQ ID NO: 108063 - DNA, 25 bp, Probe Sequence
atcctcccagaatctaccagtttat

SEQ ID NO: 108064 - DNA, 25 bp, Probe Sequence
tatcactatcttctctcctcgtttc

SEQ ID NO: 108065 - DNA, 25 bp, Probe Sequence
actatcttctctcctcgtttctctc

SEQ ID NO: 108066 - DNA, 25 bp, Probe Sequence
caagtcctgcttcatttacaagaat

SEQ ID NO: 108067 - DNA, 25 bp, Probe Sequence
aatcaagtcctgcttcatttacaag

SEQ ID NO: 108068 - DNA, 25 bp, Probe Sequence
cttctctcctcgtttctctcttact

SEQ ID NO: 108069 - DNA, 25 bp, Probe Sequence
atcaagtcctgcttcatttacaaga

SEQ ID NO: 108070 - DNA, 25 bp, Probe Sequence
aagatgggaaccttatttgaatgtg

SEQ ID NO: 108071 - DNA, 25 bp, Probe Sequence
ttctctcctcgtttctctcttactc

SEQ ID NO: 108072 - DNA, 25 bp, Probe Sequence
tcttctctcctcgtttctctcttac

SEQ ID NO: 108073 - DNA, 25 bp, Probe Sequence
cactatcttctctcctcgtttctct

SEQ ID NO: 108074 - DNA, 25 bp, Probe Sequence
tcactatcttctctcctcgtttctc

SEQ ID NO: 108075 - DNA, 25 bp, Probe Sequence
ggcacaagattacactgaacattag

SEQ ID NO: 108076 - DNA, 25 bp, Probe Sequence
aggcacaagattacactgaacatta

SEQ ID NO: 108077 - DNA, 25 bp, Probe Sequence
gcacaagattacactgaacattagc

SEQ ID NO: 108078 - DNA, 25 bp, Probe Sequence
ggtatcagtatcttctctcctcgtt

SEQ ID NO: 108079 - DNA, 25 bp, Probe Sequence
aaggcacaagattacactgaacatt

SEQ ID NO: 108080 - DNA, 25 bp, Probe Sequence
cacaagattacactgaacattagct

SEQ ID NO: 108081 - DNA, 25 bp, Probe Sequence
ctcaagtatatcaagcattcacatt

SEQ ID NO: 108082 - DNA, 25 bp, Probe Sequence
tcaagtatatcaagcattcacattg

SEQ ID NO: 108083 - DNA, 25 bp, Probe Sequence
gtttatctcttacacctcatcctcc

SEQ ID NO: 108084 - DNA, 25 bp, Probe Sequence
gtgttgggtatcagtatcttctctc

SEQ ID NO: 108085 - DNA, 25 bp, Probe Sequence
ttgtgttgggtatcagtatcttctc

SEQ ID NO: 108086 - DNA, 25 bp, Probe Sequence
accagaaaccttatttgtgactttg

SEQ ID NO: 108087 - DNA, 25 bp, Probe Sequence
gtgggaaaggatttggataaagttt

SEQ ID NO: 108088 - DNA, 25 bp, Probe Sequence
gttgtgggaaaggatttggataaag

SEQ ID NO: 108089 - DNA, 25 bp, Probe Sequence
cagaaaccttatttgtgactttgga

SEQ ID NO: 108090 - DNA, 25 bp, Probe Sequence
actgccaagacattcaaacaaatag

SEQ ID NO: 108091 - DNA, 25 bp, Probe Sequence
ttctctcctcgtttatctcttacac

SEQ ID NO: 108092 - DNA, 25 bp, Probe Sequence
tgtgggaaaggatttggataaagtt

SEQ ID NO: 108093 - DNA, 25 bp, Probe Sequence
ttgtgggaaaggatttggataaagt

SEQ ID NO: 108094 - DNA, 25 bp, Probe Sequence
cgtttatctcttacacctcatcctc

SEQ ID NO: 108095 - DNA, 25 bp, Probe Sequence
ctcgtttatctcttacacctcatcc

SEQ ID NO: 108096 - DNA, 25 bp, Probe Sequence
cctcgtttatctcttacacctcatc

SEQ ID NO: 108097 - DNA, 25 bp, Probe Sequence
cactgccaagacattcaaacaaata

SEQ ID NO: 108098 - DNA, 25 bp, Probe Sequence
cttctctcctcgtttatctcttaca

SEQ ID NO: 108099 - DNA, 25 bp, Probe Sequence
ggtaatgaaccagaggaggtataat

SEQ ID NO: 108100 - DNA, 25 bp, Probe Sequence
atgaaccagaggaggtataatactc

SEQ ID NO: 108101 - DNA, 25 bp, Probe Sequence
atccttctgtaactttggtaactgc

SEQ ID NO: 108102 - DNA, 25 bp, Probe Sequence
aatccttctgtaactttggtaactg

SEQ ID NO: 108103 - DNA, 25 bp, Probe Sequence
aatgaaccagaggaggtataatact

SEQ ID NO: 108104 - DNA, 25 bp, Probe Sequence
gcatacttgttgtttggtaatgaac

SEQ ID NO: 108105 - DNA, 25 bp, Probe Sequence
tggaatccttctgtaactttggtaa

SEQ ID NO: 108106 - DNA, 25 bp, Probe Sequence
aatggaatccttctgtaactttggt

SEQ ID NO: 108107 - DNA, 25 bp, Probe Sequence
ggaatccttctgtaactttggtaac

SEQ ID NO: 108108 - DNA, 25 bp, Probe Sequence
atggaatccttctgtaactttggta

SEQ ID NO: 108109 - DNA, 25 bp, Probe Sequence
aaatggaatccttctgtaactttgg

SEQ ID NO: 108110 - DNA, 25 bp, Probe Sequence
gaatccttctgtaactttggtaact

SEQ ID NO: 108111 - DNA, 25 bp, Probe Sequence
taatgaaccagaggaggtataatac

SEQ ID NO: 108112 - DNA, 25 bp, Probe Sequence
gtaatgaaccagaggaggtataata

SEQ ID NO: 108113 - DNA, 25 bp, Probe Sequence
tgaaccagaggaggtataatactct

SEQ ID NO: 108114 - DNA, 25 bp, Probe Sequence
tctgtaactttggtaactgcatact

SEQ ID NO: 108115 - DNA, 25 bp, Probe Sequence
gtaactttggtaactgcatacttgt

SEQ ID NO: 108116 - DNA, 25 bp, Probe Sequence
tgtaactttggtaactgcatacttg

SEQ ID NO: 108117 - DNA, 25 bp, Probe Sequence
catacttgttgtttggtaatgaacc

SEQ ID NO: 108118 - DNA, 25 bp, Probe Sequence
ctgtaactttggtaactgcatactt

SEQ ID NO: 108119 - DNA, 25 bp, Probe Sequence
ttctgtaactttggtaactgcatac

SEQ ID NO: 108120 - DNA, 25 bp, Probe Sequence
ctgcatacttgttgtttggtaatga

SEQ ID NO: 108121 - DNA, 25 bp, Probe Sequence
actgcatacttgttgtttggtaatg

SEQ ID NO: 108122 - DNA, 25 bp, Probe Sequence
tgcatacttgttgtttggtaatgaa

SEQ ID NO: 108123 - DNA, 25 bp, Probe Sequence
gcaggcagcttaagtgtgagtttag

SEQ ID NO: 108124 - DNA, 25 bp, Probe Sequence
ttccagacattaacttacacattgt

SEQ ID NO: 108125 - DNA, 25 bp, Probe Sequence
ataaacccaagaatcaatgtagcct

SEQ ID NO: 108126 - DNA, 25 bp, Probe Sequence
gtaggtcagagatggattgttggtg

SEQ ID NO: 108127 - DNA, 25 bp, Probe Sequence
cttggagtttaccttgtttcagatg

SEQ ID NO: 108128 - DNA, 25 bp, Probe Sequence
cttcttggagtttaccttgtttcag

SEQ ID NO: 108129 - DNA, 25 bp, Probe Sequence
tcttcttggagtttaccttgtttca

SEQ ID NO: 108130 - DNA, 25 bp, Probe Sequence
aataaacccaagaatcaatgtagcc

SEQ ID NO: 108131 - DNA, 25 bp, Probe Sequence
ttcttcttggagtttaccttgtttc

SEQ ID NO: 108132 - DNA, 25 bp, Probe Sequence
catttcttcttggagtttaccttgt

SEQ ID NO: 108133 - DNA, 25 bp, Probe Sequence
gaatcaatgtagcctcttaatccca

SEQ ID NO: 108134 - DNA, 25 bp, Probe Sequence
taaacccaagaatcaatgtagcctc

SEQ ID NO: 108135 - DNA, 25 bp, Probe Sequence
tcatttcttcttggagtttaccttg

SEQ ID NO: 108136 - DNA, 25 bp, Probe Sequence
atcatttctgtgccttctaattcct

SEQ ID NO: 108137 - DNA, 25 bp, Probe Sequence
aatgtagcctcttaatcccatcaag

SEQ ID NO: 108138 - DNA, 25 bp, Probe Sequence
atcaatgtagcctcttaatcccatc

SEQ ID NO: 108139 - DNA, 25 bp, Probe Sequence
aatcaatgtagcctcttaatcccat

SEQ ID NO: 108140 - DNA, 25 bp, Probe Sequence
tttcttcttggagtttaccttgttt

SEQ ID NO: 108141 - DNA, 25 bp, Probe Sequence
tcttggagtttaccttgtttcagat

SEQ ID NO: 108142 - DNA, 25 bp, Probe Sequence
ttcttggagtttaccttgtttcaga

SEQ ID NO: 108143 - DNA, 25 bp, Probe Sequence
agaatcaatgtagcctcttaatccc

SEQ ID NO: 108144 - DNA, 25 bp, Probe Sequence
caatgtagcctcttaatcccatcaa

SEQ ID NO: 108145 - DNA, 25 bp, Probe Sequence
atttcttcttggagtttaccttgtt

SEQ ID NO: 108146 - DNA, 25 bp, Probe Sequence
caataaacccaagaatcaatgtagc

SEQ ID NO: 108147 - DNA, 25 bp, Probe Sequence
gcaataaacccaagaatcaatgtag

SEQ ID NO: 108148 - DNA, 25 bp, Probe Sequence
aatctggttatcatcagtctgcttc

SEQ ID NO: 108149 - DNA, 25 bp, Probe Sequence
gtcttgttgtcattgctccagatac

SEQ ID NO: 108150 - DNA, 25 bp, Probe Sequence
acagaatgtactcttatgtcacaga

SEQ ID NO: 108151 - DNA, 25 bp, Probe Sequence
atctggttatcatcagtctgcttca

SEQ ID NO: 108152 - DNA, 25 bp, Probe Sequence
ttatgttgatgccactgaagatcct

SEQ ID NO: 108153 - DNA, 25 bp, Probe Sequence
tatgttgatgccactgaagatcctt

SEQ ID NO: 108154 - DNA, 25 bp, Probe Sequence
agtaaatggaaggcttatgatgcta

SEQ ID NO: 108155 - DNA, 25 bp, Probe Sequence
cctttagtggatatttgggaacaga

SEQ ID NO: 108156 - DNA, 25 bp, Probe Sequence
gtaaatggaaggcttatgatgctac

SEQ ID NO: 108157 - DNA, 25 bp, Probe Sequence
taaatggaaggcttatgatgctacc

SEQ ID NO: 108158 - DNA, 25 bp, Probe Sequence
ctgataacttcatagctgcctgtac

SEQ ID NO: 108159 - DNA, 25 bp, Probe Sequence
tctggttatcatcagtctgcttcag

SEQ ID NO: 108160 - DNA, 25 bp, Probe Sequence
aaagtaaatggaaggcttatgatgc

SEQ ID NO: 108161 - DNA, 25 bp, Probe Sequence
aagtaaatggaaggcttatgatgct

SEQ ID NO: 108162 - DNA, 25 bp, Probe Sequence
aagcctttagtggatatttgggaac

SEQ ID NO: 108163 - DNA, 25 bp, Probe Sequence
ttgttgtcattgctccagataccag

SEQ ID NO: 108164 - DNA, 25 bp, Probe Sequence
cttgttgtcattgctccagatacca

SEQ ID NO: 108165 - DNA, 25 bp, Probe Sequence
tcttgttgtcattgctccagatacc

SEQ ID NO: 108166 - DNA, 25 bp, Probe Sequence
ggtcttgttgtcattgctccagata

SEQ ID NO: 108167 - DNA, 25 bp, Probe Sequence
tgtattggctctcaggtttaacttg

SEQ ID NO: 108168 - DNA, 25 bp, Probe Sequence
aaagcctttagtggatatttgggaa

SEQ ID NO: 108169 - DNA, 25 bp, Probe Sequence
ctttagtggatatttgggaacagat

SEQ ID NO: 108170 - DNA, 25 bp, Probe Sequence
ggaacagatcaaagtaaatggaagg

SEQ ID NO: 108171 - DNA, 25 bp, Probe Sequence
gggaacagatcaaagtaaatggaag

SEQ ID NO: 108172 - DNA, 25 bp, Probe Sequence
tagacttcttagtggtatccagcac

SEQ ID NO: 108173 - DNA, 25 bp, Probe Sequence
gtagacttcttagtggtatccagca

SEQ ID NO: 108174 - DNA, 25 bp, Probe Sequence
agacttcttagtggtatccagcacc

SEQ ID NO: 108175 - DNA, 25 bp, Probe Sequence
gacttcttagtggtatccagcacca

SEQ ID NO: 108176 - DNA, 25 bp, Probe Sequence
tcataaccaaagagaatcccacatt

SEQ ID NO: 108177 - DNA, 25 bp, Probe Sequence
taaccaaagagaatcccacattagc

SEQ ID NO: 108178 - DNA, 25 bp, Probe Sequence
aaattcatcattgggctcacttcta

SEQ ID NO: 108179 - DNA, 25 bp, Probe Sequence
ttcataaccaaagagaatcccacat

SEQ ID NO: 108180 - DNA, 25 bp, Probe Sequence
ttagggtttgagagaagggaatttg

SEQ ID NO: 108181 - DNA, 25 bp, Probe Sequence
gttagggtttgagagaagggaattt

SEQ ID NO: 108182 - DNA, 25 bp, Probe Sequence
cataaccaaagagaatcccacatta

SEQ ID NO: 108183 - DNA, 25 bp, Probe Sequence
ataaccaaagagaatcccacattag

SEQ ID NO: 108184 - DNA, 25 bp, Probe Sequence
tagggtttgagagaagggaatttgg

SEQ ID NO: 108185 - DNA, 25 bp, Probe Sequence
caaattcatcattgggctcacttct

SEQ ID NO: 108186 - DNA, 25 bp, Probe Sequence
attcataaccaaagagaatcccaca

SEQ ID NO: 108187 - DNA, 25 bp, Probe Sequence
cgttagggtttgagagaagggaatt

SEQ ID NO: 108188 - DNA, 25 bp, Probe Sequence
aattcataaccaaagagaatcccac

SEQ ID NO: 108189 - DNA, 25 bp, Probe Sequence
aagagaatcccacattagcttgtta

SEQ ID NO: 108190 - DNA, 25 bp, Probe Sequence
agagaatcccacattagcttgttag

SEQ ID NO: 108191 - DNA, 25 bp, Probe Sequence
aaattcataaccaaagagaatccca

SEQ ID NO: 108192 - DNA, 25 bp, Probe Sequence
agaatcccacattagcttgttagta

SEQ ID NO: 108193 - DNA, 25 bp, Probe Sequence
gagaatcccacattagcttgttagt

SEQ ID NO: 108194 - DNA, 25 bp, Probe Sequence
aaagagaatcccacattagcttgtt

SEQ ID NO: 108195 - DNA, 25 bp, Probe Sequence
ccagcttcaaatgcaaattcatcat

SEQ ID NO: 108196 - DNA, 25 bp, Probe Sequence
gaatcccacattagcttgttagtaa

SEQ ID NO: 108197 - DNA, 25 bp, Probe Sequence
caaagagaatcccacattagcttgt

SEQ ID NO: 108198 - DNA, 25 bp, Probe Sequence
aaccaaagagaatcccacattagct

SEQ ID NO: 108199 - DNA, 25 bp, Probe Sequence
ccaaagagaatcccacattagcttg

SEQ ID NO: 108200 - DNA, 25 bp, Probe Sequence
aaacatccagacatagaaactcttt

SEQ ID NO: 108201 - DNA, 25 bp, Probe Sequence
aacatccagacatagaaactctttt

SEQ ID NO: 108202 - DNA, 25 bp, Probe Sequence
aaaacatccagacatagaaactctt

SEQ ID NO: 108203 - DNA, 25 bp, Probe Sequence
taaaacatccagacatagaaactct

SEQ ID NO: 108204 - DNA, 25 bp, Probe Sequence
gttaaaacatccagacatagaaact

SEQ ID NO: 108205 - DNA, 25 bp, Probe Sequence
agttaaaacatccagacatagaaac

SEQ ID NO: 108206 - DNA, 25 bp, Probe Sequence
ttaaaacatccagacatagaaactc

SEQ ID NO: 108207 - DNA, 25 bp, Probe Sequence
aagttaaaacatccagacatagaaa

SEQ ID NO: 108208 - DNA, 25 bp, Probe Sequence
aaagttaaaacatccagacatagaa

SEQ ID NO: 108209 - DNA, 25 bp, Probe Sequence
aaaagttaaaacatccagacataga

SEQ ID NO: 108210 - DNA, 25 bp, Probe Sequence
taaaagttaaaacatccagacatag

SEQ ID NO: 108211 - DNA, 25 bp, Probe Sequence
ctttaaaagttaaaacatccagaca

SEQ ID NO: 108212 - DNA, 25 bp, Probe Sequence
tctttaaaagttaaaacatccagac

SEQ ID NO: 108213 - DNA, 25 bp, Probe Sequence
tttaaaagttaaaacatccagacat

SEQ ID NO: 108214 - DNA, 25 bp, Probe Sequence
aaacatccagatatagaaactcttt

SEQ ID NO: 108215 - DNA, 25 bp, Probe Sequence
aacatccagatatagaaactctttt

SEQ ID NO: 108216 - DNA, 25 bp, Probe Sequence
aaaacatccagatatagaaactctt

SEQ ID NO: 108217 - DNA, 25 bp, Probe Sequence
taaaacatccagatatagaaactct

SEQ ID NO: 108218 - DNA, 25 bp, Probe Sequence
tctttaaaagttaaaacatccagat

SEQ ID NO: 108219 - DNA, 25 bp, Probe Sequence
taagtagattacacatggttgaggt

SEQ ID NO: 108220 - DNA, 25 bp, Probe Sequence
catcaagtaattattgctgtggtct

SEQ ID NO: 108221 - DNA, 25 bp, Probe Sequence
ttaagtagattacacatggttgagg

SEQ ID NO: 108222 - DNA, 25 bp, Probe Sequence
atcaagtaattattgctgtggtctt

SEQ ID NO: 108223 - DNA, 25 bp, Probe Sequence
agattacacatggttgaggtgaata

SEQ ID NO: 108224 - DNA, 25 bp, Probe Sequence
tagattacacatggttgaggtgaat

SEQ ID NO: 108225 - DNA, 25 bp, Probe Sequence
gtagattacacatggttgaggtgaa

SEQ ID NO: 108226 - DNA, 25 bp, Probe Sequence
aagtagattacacatggttgaggtg

SEQ ID NO: 108227 - DNA, 25 bp, Probe Sequence
gattacacatggttgaggtgaataa

SEQ ID NO: 108228 - DNA, 25 bp, Probe Sequence
attattgctgtggtctttctactcc

SEQ ID NO: 108229 - DNA, 25 bp, Probe Sequence
agtagattacacatggttgaggtga

SEQ ID NO: 108230 - DNA, 25 bp, Probe Sequence
aattattgctgtggtctttctactc

SEQ ID NO: 108231 - DNA, 25 bp, Probe Sequence
gatgttctagggcataatgaggaaa

SEQ ID NO: 108232 - DNA, 25 bp, Probe Sequence
aatgatgttctagggcataatgagg

SEQ ID NO: 108233 - DNA, 25 bp, Probe Sequence
tcattaagacaacagatttgagcaa

SEQ ID NO: 108234 - DNA, 25 bp, Probe Sequence
atcattaagacaacagatttgagca

SEQ ID NO: 108235 - DNA, 25 bp, Probe Sequence
gtcaccttaagtagattacacatgg

SEQ ID NO: 108236 - DNA, 25 bp, Probe Sequence
atgatgttctagggcataatgagga

SEQ ID NO: 108237 - DNA, 25 bp, Probe Sequence
tgatgttctagggcataatgaggaa

SEQ ID NO: 108238 - DNA, 25 bp, Probe Sequence
agagtataatgatgttctagggcat

SEQ ID NO: 108239 - DNA, 25 bp, Probe Sequence
catgggaatttgctttcgtgatata

SEQ ID NO: 108240 - DNA, 25 bp, Probe Sequence
cccagtttcaggaattgagtataaa

SEQ ID NO: 108241 - DNA, 25 bp, Probe Sequence
tgggaatttgctttcgtgatatatt

SEQ ID NO: 108242 - DNA, 25 bp, Probe Sequence
atgggaatttgctttcgtgatatat

SEQ ID NO: 108243 - DNA, 25 bp, Probe Sequence
tgttgaagtattcttgtttcccttt

SEQ ID NO: 108244 - DNA, 25 bp, Probe Sequence
tggactgattaaagttcattgagga

SEQ ID NO: 108245 - DNA, 25 bp, Probe Sequence
atgttgaagtattcttgtttccctt

SEQ ID NO: 108246 - DNA, 25 bp, Probe Sequence
aatgttgaagtattcttgtttccct

SEQ ID NO: 108247 - DNA, 25 bp, Probe Sequence
ctggactgattaaagttcattgagg

SEQ ID NO: 108248 - DNA, 25 bp, Probe Sequence
cctggactgattaaagttcattgag

SEQ ID NO: 108249 - DNA, 25 bp, Probe Sequence
tgtagatttaatgtatgtgactggg

SEQ ID NO: 108250 - DNA, 25 bp, Probe Sequence
tcctggactgattaaagttcattga

SEQ ID NO: 108251 - DNA, 25 bp, Probe Sequence
ggactgattaaagttcattgaggaa

SEQ ID NO: 108252 - DNA, 25 bp, Probe Sequence
aaatgttgaagtattcttgtttccc

SEQ ID NO: 108253 - DNA, 25 bp, Probe Sequence
ataacattatgcccaagtggagagt

SEQ ID NO: 108254 - DNA, 25 bp, Probe Sequence
taacattatgcccaagtggagagtt

SEQ ID NO: 108255 - DNA, 25 bp, Probe Sequence
gtgtagatttaatgtatgtgactgg

SEQ ID NO: 108256 - DNA, 25 bp, Probe Sequence
ggttctgttatgaaataaatgttgc

SEQ ID NO: 108257 - DNA, 25 bp, Probe Sequence
tatgaaataaatgttgcactccctg

SEQ ID NO: 108258 - DNA, 25 bp, Probe Sequence
ccctcgtgtcaatatttgttataga

SEQ ID NO: 108259 - DNA, 25 bp, Probe Sequence
caaatgttgaagtattcttgtttcc

SEQ ID NO: 108260 - DNA, 25 bp, Probe Sequence
gactgattaaagttcattgaggaaa

SEQ ID NO: 108261 - DNA, 25 bp, Probe Sequence
atttccaaagtatgtttcatgcagc

SEQ ID NO: 108262 - DNA, 25 bp, Probe Sequence
gttatgaaataaatgttgcactccc

SEQ ID NO: 108263 - DNA, 25 bp, Probe Sequence
gtcctggactgattaaagttcattg

SEQ ID NO: 108264 - DNA, 25 bp, Probe Sequence
tttgtaggtcctggactgattaaag

SEQ ID NO: 108265 - DNA, 25 bp, Probe Sequence
aatttccaaagtatgtttcatgcag

SEQ ID NO: 108266 - DNA, 25 bp, Probe Sequence
ttatgaaataaatgttgcactccct

SEQ ID NO: 108267 - DNA, 25 bp, Probe Sequence
agtgagttgatgtctgtatgttgat

SEQ ID NO: 108268 - DNA, 25 bp, Probe Sequence
gagttgatgtctgtatgttgattgc

SEQ ID NO: 108269 - DNA, 25 bp, Probe Sequence
tgagttgatgtctgtatgttgattg

SEQ ID NO: 108270 - DNA, 25 bp, Probe Sequence
gtgagttgatgtctgtatgttgatt

SEQ ID NO: 108271 - DNA, 25 bp, Probe Sequence
cagtgagttgatgtctgtatgttga

SEQ ID NO: 108272 - DNA, 25 bp, Probe Sequence
tcagtgagttgatgtctgtatgttg

SEQ ID NO: 108273 - DNA, 25 bp, Probe Sequence
ctcagtgagttgatgtctgtatgtt

SEQ ID NO: 108274 - DNA, 25 bp, Probe Sequence
agttgatgtctgtatgttgattgca

SEQ ID NO: 108275 - DNA, 25 bp, Probe Sequence
gttgatgtctgtatgttgattgcag

SEQ ID NO: 108276 - DNA, 25 bp, Probe Sequence
ttgatgtctgtatgttgattgcagc

SEQ ID NO: 108277 - DNA, 25 bp, Probe Sequence
gatgtctgtatgttgattgcagcag

SEQ ID NO: 108278 - DNA, 25 bp, Probe Sequence
ttctgtccttagactagtggttctg

SEQ ID NO: 108279 - DNA, 25 bp, Probe Sequence
gtccttagactagtggttctggtag

SEQ ID NO: 108280 - DNA, 25 bp, Probe Sequence
tgtccttagactagtggttctggta

SEQ ID NO: 108281 - DNA, 25 bp, Probe Sequence
atgtctgtatgttgattgcagcagt

SEQ ID NO: 108282 - DNA, 25 bp, Probe Sequence
tgatgtctgtatgttgattgcagca

SEQ ID NO: 108283 - DNA, 25 bp, Probe Sequence
ttttagaaagtgctcccctatcttc

SEQ ID NO: 108284 - DNA, 25 bp, Probe Sequence
gttttagaaagtgctcccctatctt

SEQ ID NO: 108285 - DNA, 25 bp, Probe Sequence
gcaacagtgaatagaagttttgagt

SEQ ID NO: 108286 - DNA, 25 bp, Probe Sequence
gaagttttgagttttagaaagtgct

SEQ ID NO: 108287 - DNA, 25 bp, Probe Sequence
agaagttttgagttttagaaagtgc

SEQ ID NO: 108288 - DNA, 25 bp, Probe Sequence
tttagaaagtgctcccctatcttca

SEQ ID NO: 108289 - DNA, 25 bp, Probe Sequence
agttttagaaagtgctcccctatct

SEQ ID NO: 108290 - DNA, 25 bp, Probe Sequence
gcagtgcaacagtgaatagaagttt

SEQ ID NO: 108291 - DNA, 25 bp, Probe Sequence
atataacatactttgtaaccctgca

SEQ ID NO: 108292 - DNA, 25 bp, Probe Sequence
tatataacatactttgtaaccctgc

SEQ ID NO: 108293 - DNA, 25 bp, Probe Sequence
ccttatataacatactttgtaaccc

SEQ ID NO: 108294 - DNA, 25 bp, Probe Sequence
actcattcttgatgtggtgtaattg

SEQ ID NO: 108295 - DNA, 25 bp, Probe Sequence
aactcattcttgatgtggtgtaatt

SEQ ID NO: 108296 - DNA, 25 bp, Probe Sequence
aaactcattcttgatgtggtgtaat

SEQ ID NO: 108297 - DNA, 25 bp, Probe Sequence
cttgaaaactcattcttgatgtggt

SEQ ID NO: 108298 - DNA, 25 bp, Probe Sequence
ttgaaaactcattcttgatgtggtg

SEQ ID NO: 108299 - DNA, 25 bp, Probe Sequence
tcttgaaaactcattcttgatgtgg

SEQ ID NO: 108300 - DNA, 25 bp, Probe Sequence
gaaaactcattcttgatgtggtgta

SEQ ID NO: 108301 - DNA, 25 bp, Probe Sequence
aaaactcattcttgatgtggtgtaa

SEQ ID NO: 108302 - DNA, 25 bp, Probe Sequence
tgaaaactcattcttgatgtggtgt

SEQ ID NO: 108303 - DNA, 25 bp, Probe Sequence
atcttgaaaactcattcttgatgtg

SEQ ID NO: 108304 - DNA, 25 bp, Probe Sequence
gcaaaacatatcttgaaaactcatt

SEQ ID NO: 108305 - DNA, 25 bp, Probe Sequence
tatcttgaaaactcattcttgatgt

SEQ ID NO: 108306 - DNA, 25 bp, Probe Sequence
acatatcttgaaaactcattcttga

SEQ ID NO: 108307 - DNA, 25 bp, Probe Sequence
aacatatcttgaaaactcattcttg

SEQ ID NO: 108308 - DNA, 25 bp, Probe Sequence
atatcttgaaaactcattcttgatg

SEQ ID NO: 108309 - DNA, 25 bp, Probe Sequence
catatcttgaaaactcattcttgat

SEQ ID NO: 108310 - DNA, 25 bp, Probe Sequence
caaaacatatcttgaaaactcattc

SEQ ID NO: 108311 - DNA, 25 bp, Probe Sequence
aaacatatcttgaaaactcattctt

SEQ ID NO: 108312 - DNA, 25 bp, Probe Sequence
aaaacatatcttgaaaactcattct

SEQ ID NO: 108313 - DNA, 25 bp, Probe Sequence
gatcttgtgtctactctaggactgg

SEQ ID NO: 108314 - DNA, 25 bp, Probe Sequence
cgatcttgtgtctactctaggactg

SEQ ID NO: 108315 - DNA, 25 bp, Probe Sequence
ttgtatatgctgcattgagacttac

SEQ ID NO: 108316 - DNA, 25 bp, Probe Sequence
tgtatatgctgcattgagacttacg

SEQ ID NO: 108317 - DNA, 25 bp, Probe Sequence
actggttgccgaatttacttgtatt

SEQ ID NO: 108318 - DNA, 25 bp, Probe Sequence
cactgagcatcacaataaagagaac

SEQ ID NO: 108319 - DNA, 25 bp, Probe Sequence
actgcctttgtttagaagagagtag

SEQ ID NO: 108320 - DNA, 25 bp, Probe Sequence
tgagcatcacaataaagagaaccat

SEQ ID NO: 108321 - DNA, 25 bp, Probe Sequence
cactgcctttgtttagaagagagta

SEQ ID NO: 108322 - DNA, 25 bp, Probe Sequence
tttccactgagcatcacaataaaga

SEQ ID NO: 108323 - DNA, 25 bp, Probe Sequence
gtctttctcactgcctttgtttaga

SEQ ID NO: 108324 - DNA, 25 bp, Probe Sequence
ctgcctttgtttagaagagagtagc

SEQ ID NO: 108325 - DNA, 25 bp, Probe Sequence
gtatatgctgcattgagacttacgg

SEQ ID NO: 108326 - DNA, 25 bp, Probe Sequence
gcaccgttgactcagtatagtttaa

SEQ ID NO: 108327 - DNA, 25 bp, Probe Sequence
ctgagcatcacaataaagagaacca

SEQ ID NO: 108328 - DNA, 25 bp, Probe Sequence
actgagcatcacaataaagagaacc

SEQ ID NO: 108329 - DNA, 25 bp, Probe Sequence
ccactgagcatcacaataaagagaa

SEQ ID NO: 108330 - DNA, 25 bp, Probe Sequence
ttccactgagcatcacaataaagag

SEQ ID NO: 108331 - DNA, 25 bp, Probe Sequence
agtctttctcactgcctttgtttag

SEQ ID NO: 108332 - DNA, 25 bp, Probe Sequence
cactggttgccgaatttacttgtat

SEQ ID NO: 108333 - DNA, 25 bp, Probe Sequence
gagcatcacaataaagagaaccatg

SEQ ID NO: 108334 - DNA, 25 bp, Probe Sequence
gagtctttctcactgcctttgttta

SEQ ID NO: 108335 - DNA, 25 bp, Probe Sequence
ctcactgcctttgtttagaagagag

SEQ ID NO: 108336 - DNA, 25 bp, Probe Sequence
tccactgagcatcacaataaagaga

SEQ ID NO: 108337 - DNA, 25 bp, Probe Sequence
cctctctctgtcaacactggaataa

SEQ ID NO: 108338 - DNA, 25 bp, Probe Sequence
tgacctcttctgcttactgtaactg

SEQ ID NO: 108339 - DNA, 25 bp, Probe Sequence
gtgacctcttctgcttactgtaact

SEQ ID NO: 108340 - DNA, 25 bp, Probe Sequence
tgctggagaaccttgaatctaagag

SEQ ID NO: 108341 - DNA, 25 bp, Probe Sequence
gtgctggagaaccttgaatctaaga

SEQ ID NO: 108342 - DNA, 25 bp, Probe Sequence
tctctgtcaacactggaataaactt

SEQ ID NO: 108343 - DNA, 25 bp, Probe Sequence
ctctctctgtcaacactggaataaa

SEQ ID NO: 108344 - DNA, 25 bp, Probe Sequence
ctctctgtcaacactggaataaact

SEQ ID NO: 108345 - DNA, 25 bp, Probe Sequence
tctctctgtcaacactggaataaac

SEQ ID NO: 108346 - DNA, 25 bp, Probe Sequence
ctctgtcaacactggaataaacttt

SEQ ID NO: 108347 - DNA, 25 bp, Probe Sequence
tctgtcaacactggaataaactttg

SEQ ID NO: 108348 - DNA, 25 bp, Probe Sequence
caacactggaataaactttgccttt

SEQ ID NO: 108349 - DNA, 25 bp, Probe Sequence
gacctcttctgcttactgtaactgc

SEQ ID NO: 108350 - DNA, 25 bp, Probe Sequence
cgtgacctcttctgcttactgtaac

SEQ ID NO: 108351 - DNA, 25 bp, Probe Sequence
ctgtcaacactggaataaactttgc

SEQ ID NO: 108352 - DNA, 25 bp, Probe Sequence
tcaacactggaataaactttgcctt

SEQ ID NO: 108353 - DNA, 25 bp, Probe Sequence
cctcttaggtgaaggagatgacatg

SEQ ID NO: 108354 - DNA, 25 bp, Probe Sequence
gctggagaaccttgaatctaagagg

SEQ ID NO: 108355 - DNA, 25 bp, Probe Sequence
gtcaacactggaataaactttgcct

SEQ ID NO: 108356 - DNA, 25 bp, Probe Sequence
tgtcaacactggaataaactttgcc

SEQ ID NO: 108357 - DNA, 25 bp, Probe Sequence
ggtgctggagaaccttgaatctaag

SEQ ID NO: 108358 - DNA, 25 bp, Probe Sequence
ccgtgacctcttctgcttactgtaa

SEQ ID NO: 108359 - DNA, 25 bp, Probe Sequence
tctttctttgacatagaagagtgcc

SEQ ID NO: 108360 - DNA, 25 bp, Probe Sequence
ccctctctctgtcaacactggaata

SEQ ID NO: 108361 - DNA, 25 bp, Probe Sequence
tcataaaccagaaacagtacagaac

SEQ ID NO: 108362 - DNA, 25 bp, Probe Sequence
ggaagtgtatcataaaccagaaaca

SEQ ID NO: 108363 - DNA, 25 bp, Probe Sequence
atagcctttactttcctgaggtaga

SEQ ID NO: 108364 - DNA, 25 bp, Probe Sequence
cataaaccagaaacagtacagaact

SEQ ID NO: 108365 - DNA, 25 bp, Probe Sequence
aggcaaacaatggctgtaagtattt

SEQ ID NO: 108366 - DNA, 25 bp, Probe Sequence
aaggcaaacaatggctgtaagtatt

SEQ ID NO: 108367 - DNA, 25 bp, Probe Sequence
gtatagcctttactttcctgaggta

SEQ ID NO: 108368 - DNA, 25 bp, Probe Sequence
tatagcctttactttcctgaggtag

SEQ ID NO: 108369 - DNA, 25 bp, Probe Sequence
tgtatagcctttactttcctgaggt

SEQ ID NO: 108370 - DNA, 25 bp, Probe Sequence
tagcctttactttcctgaggtagag

SEQ ID NO: 108371 - DNA, 25 bp, Probe Sequence
aagtgtatcataaaccagaaacagt

SEQ ID NO: 108372 - DNA, 25 bp, Probe Sequence
atcataaaccagaaacagtacagaa

SEQ ID NO: 108373 - DNA, 25 bp, Probe Sequence
gaagtgtatcataaaccagaaacag

SEQ ID NO: 108374 - DNA, 25 bp, Probe Sequence
caaggcaaacaatggctgtaagtat

SEQ ID NO: 108375 - DNA, 25 bp, Probe Sequence
tggaagtgtatcataaaccagaaac

SEQ ID NO: 108376 - DNA, 25 bp, Probe Sequence
tttactttcctgaggtagagctgaa

SEQ ID NO: 108377 - DNA, 25 bp, Probe Sequence
aaacaatggctgtaagtatttgaaa

SEQ ID NO: 108378 - DNA, 25 bp, Probe Sequence
ctttactttcctgaggtagagctga

SEQ ID NO: 108379 - DNA, 25 bp, Probe Sequence
agtgtatcataaaccagaaacagta

SEQ ID NO: 108380 - DNA, 25 bp, Probe Sequence
gtatcataaaccagaaacagtacag

SEQ ID NO: 108381 - DNA, 25 bp, Probe Sequence
ttactttcctgaggtagagctgaag

SEQ ID NO: 108382 - DNA, 25 bp, Probe Sequence
tatcataaaccagaaacagtacaga

SEQ ID NO: 108383 - DNA, 25 bp, Probe Sequence
ttggaagtgtatcataaaccagaaa

SEQ ID NO: 108384 - DNA, 25 bp, Probe Sequence
tttggaagtgtatcataaaccagaa

SEQ ID NO: 108385 - DNA, 25 bp, Probe Sequence
gaaatcagggtcaaggtcgtagttc

SEQ ID NO: 108386 - DNA, 25 bp, Probe Sequence
cacttacgaaatcagggtcaaggtc

SEQ ID NO: 108387 - DNA, 25 bp, Probe Sequence
aaatcagggtcaaggtcgtagttcc

SEQ ID NO: 108388 - DNA, 25 bp, Probe Sequence
ccacttacgaaatcagggtcaaggt

SEQ ID NO: 108389 - DNA, 25 bp, Probe Sequence
accacttacgaaatcagggtcaagg

SEQ ID NO: 108390 - DNA, 25 bp, Probe Sequence
cgaaatcagggtcaaggtcgtagtt

SEQ ID NO: 108391 - DNA, 25 bp, Probe Sequence
acttacgaaatcagggtcaaggtcg

SEQ ID NO: 108392 - DNA, 25 bp, Probe Sequence
ccagtaatatgtctccttgcttctt

SEQ ID NO: 108393 - DNA, 25 bp, Probe Sequence
ttcctcaccagtaatatgtctcctt

SEQ ID NO: 108394 - DNA, 25 bp, Probe Sequence
cttcctcaccagtaatatgtctcct

SEQ ID NO: 108395 - DNA, 25 bp, Probe Sequence
accagtaatatgtctccttgcttct

SEQ ID NO: 108396 - DNA, 25 bp, Probe Sequence
caccagtaatatgtctccttgcttc

SEQ ID NO: 108397 - DNA, 25 bp, Probe Sequence
tcctcaccagtaatatgtctccttg

SEQ ID NO: 108398 - DNA, 25 bp, Probe Sequence
tcaccagtaatatgtctccttgctt

SEQ ID NO: 108399 - DNA, 25 bp, Probe Sequence
ttcagagaggctagaggttcttatt

SEQ ID NO: 108400 - DNA, 25 bp, Probe Sequence
gctagaggttcttattctggctata

SEQ ID NO: 108401 - DNA, 25 bp, Probe Sequence
agagaggctagaggttcttattctg

SEQ ID NO: 108402 - DNA, 25 bp, Probe Sequence
cagagaggctagaggttcttattct

SEQ ID NO: 108403 - DNA, 25 bp, Probe Sequence
tcagagaggctagaggttcttattc

SEQ ID NO: 108404 - DNA, 25 bp, Probe Sequence
ctcaccagtaatatgtctccttgct

SEQ ID NO: 108405 - DNA, 25 bp, Probe Sequence
gttcagagaggctagaggttcttat

SEQ ID NO: 108406 - DNA, 25 bp, Probe Sequence
ggctagaggttcttattctggctat

SEQ ID NO: 108407 - DNA, 25 bp, Probe Sequence
gagaggctagaggttcttattctgg

SEQ ID NO: 108408 - DNA, 25 bp, Probe Sequence
gcttcctcaccagtaatatgtctcc

SEQ ID NO: 108409 - DNA, 25 bp, Probe Sequence
ggcttcctcaccagtaatatgtctc

SEQ ID NO: 108410 - DNA, 25 bp, Probe Sequence
ttatcgtcatcatctgctctgagtg

SEQ ID NO: 108411 - DNA, 25 bp, Probe Sequence
aggctagaggttcttattctggcta

SEQ ID NO: 108412 - DNA, 25 bp, Probe Sequence
cctcaccagtaatatgtctccttgc

SEQ ID NO: 108413 - DNA, 25 bp, Probe Sequence
tggtgcattgtgtggtagaatatta

SEQ ID NO: 108414 - DNA, 25 bp, Probe Sequence
ccttgcttctttgatgtgatagttt

SEQ ID NO: 108415 - DNA, 25 bp, Probe Sequence
ctttctctctctctctctctctctt

SEQ ID NO: 108416 - DNA, 25 bp, Probe Sequence
cgagtatgaatgtaatgccacctgg

SEQ ID NO: 108417 - DNA, 25 bp, Probe Sequence
gcgagtatgaatgtaatgccacctg

SEQ ID NO: 108418 - DNA, 25 bp, Probe Sequence
ttgtgtaattattgaagtgcaatga

SEQ ID NO: 108419 - DNA, 25 bp, Probe Sequence
tgtaattattgaagtgcaatgatgt

SEQ ID NO: 108420 - DNA, 25 bp, Probe Sequence
tgtgtaattattgaagtgcaatgat

SEQ ID NO: 108421 - DNA, 25 bp, Probe Sequence
gtgtaattattgaagtgcaatgatg

SEQ ID NO: 108422 - DNA, 25 bp, Probe Sequence
gtaaagtacagcaaaacctacagat

SEQ ID NO: 108423 - DNA, 25 bp, Probe Sequence
catgtacttgtgtgttttgtgtaat

SEQ ID NO: 108424 - DNA, 25 bp, Probe Sequence
aaagtacagcaaaacctacagatat

SEQ ID NO: 108425 - DNA, 25 bp, Probe Sequence
atgtacttgtgtgttttgtgtaatt

SEQ ID NO: 108426 - DNA, 25 bp, Probe Sequence
taaagtacagcaaaacctacagata

SEQ ID NO: 108427 - DNA, 25 bp, Probe Sequence
gtgttttgtgtaattattgaagtgc

SEQ ID NO: 108428 - DNA, 25 bp, Probe Sequence
aagtacagcaaaacctacagatata

SEQ ID NO: 108429 - DNA, 25 bp, Probe Sequence
acagcaaaacctacagatatataca

SEQ ID NO: 108430 - DNA, 25 bp, Probe Sequence
tgtaaagtacagcaaaacctacaga

SEQ ID NO: 108431 - DNA, 25 bp, Probe Sequence
agcaaaacctacagatatatacagt

SEQ ID NO: 108432 - DNA, 25 bp, Probe Sequence
agtacagcaaaacctacagatatat

SEQ ID NO: 108433 - DNA, 25 bp, Probe Sequence
tgttttgtgtaattattgaagtgca

SEQ ID NO: 108434 - DNA, 25 bp, Probe Sequence
tgtacttgtgtgttttgtgtaatta

SEQ ID NO: 108435 - DNA, 25 bp, Probe Sequence
cagcaaaacctacagatatatacag

SEQ ID NO: 108436 - DNA, 25 bp, Probe Sequence
tttgtgtaattattgaagtgcaatg

SEQ ID NO: 108437 - DNA, 25 bp, Probe Sequence
gtaattattgaagtgcaatgatgta

SEQ ID NO: 108438 - DNA, 25 bp, Probe Sequence
acttgtgtgttttgtgtaattattg

SEQ ID NO: 108439 - DNA, 25 bp, Probe Sequence
tgtgttttgtgtaattattgaagtg

SEQ ID NO: 108440 - DNA, 25 bp, Probe Sequence
ttcttgaaggaaggtagcagtatta

SEQ ID NO: 108441 - DNA, 25 bp, Probe Sequence
tcttgaaggaaggtagcagtattaa

SEQ ID NO: 108442 - DNA, 25 bp, Probe Sequence
cttgaaggaaggtagcagtattaat

SEQ ID NO: 108443 - DNA, 25 bp, Probe Sequence
tttcttgaaggaaggtagcagtatt

SEQ ID NO: 108444 - DNA, 25 bp, Probe Sequence
gtttcttgaaggaaggtagcagtat

SEQ ID NO: 108445 - DNA, 25 bp, Probe Sequence
ttgaaggaaggtagcagtattaatt

SEQ ID NO: 108446 - DNA, 25 bp, Probe Sequence
atttgtttcttgaaggaaggtagca

SEQ ID NO: 108447 - DNA, 25 bp, Probe Sequence
tatttgtttcttgaaggaaggtagc

SEQ ID NO: 108448 - DNA, 25 bp, Probe Sequence
tttgtttcttgaaggaaggtagcag

SEQ ID NO: 108449 - DNA, 25 bp, Probe Sequence
tgtttcttgaaggaaggtagcagta

SEQ ID NO: 108450 - DNA, 25 bp, Probe Sequence
tgaaggaaggtagcagtattaatta

SEQ ID NO: 108451 - DNA, 25 bp, Probe Sequence
tgctcactaaagtttgaatgttaag

SEQ ID NO: 108452 - DNA, 25 bp, Probe Sequence
ttgtttcttgaaggaaggtagcagt

SEQ ID NO: 108453 - DNA, 25 bp, Probe Sequence
gctcactaaagtttgaatgttaaga

SEQ ID NO: 108454 - DNA, 25 bp, Probe Sequence
ttgctcactaaagtttgaatgttaa

SEQ ID NO: 108455 - DNA, 25 bp, Probe Sequence
tttgctcactaaagtttgaatgtta

SEQ ID NO: 108456 - DNA, 25 bp, Probe Sequence
ttatttgtttcttgaaggaaggtag

SEQ ID NO: 108457 - DNA, 25 bp, Probe Sequence
ctttgctcactaaagtttgaatgtt

SEQ ID NO: 108458 - DNA, 25 bp, Probe Sequence
tttatttgtttcttgaaggaaggta

SEQ ID NO: 108459 - DNA, 25 bp, Probe Sequence
cttgtaattttagcactttgggagg

SEQ ID NO: 108460 - DNA, 25 bp, Probe Sequence
atgcacctataatcccagctacttg

SEQ ID NO: 108461 - DNA, 25 bp, Probe Sequence
catgcacctataatcccagctactt

SEQ ID NO: 108462 - DNA, 25 bp, Probe Sequence
aacatggtgaaaccttgtctctaca

SEQ ID NO: 108463 - DNA, 25 bp, Probe Sequence
ttgtaattttagcactttgggaggc

SEQ ID NO: 108464 - DNA, 25 bp, Probe Sequence
ggttatcataaggtgttaagagtcc

SEQ ID NO: 108465 - DNA, 25 bp, Probe Sequence
aggatttgggttatcataaggtgtt

SEQ ID NO: 108466 - DNA, 25 bp, Probe Sequence
ctctgagttctacaccaccttcaag

SEQ ID NO: 108467 - DNA, 25 bp, Probe Sequence
acagtgtttaggatttgggttatca

SEQ ID NO: 108468 - DNA, 25 bp, Probe Sequence
tgggttatcataaggtgttaagagt

SEQ ID NO: 108469 - DNA, 25 bp, Probe Sequence
taggatttgggttatcataaggtgt

SEQ ID NO: 108470 - DNA, 25 bp, Probe Sequence
cagtgtttaggatttgggttatcat

SEQ ID NO: 108471 - DNA, 25 bp, Probe Sequence
acaactctagcatatctgtgagcag

SEQ ID NO: 108472 - DNA, 25 bp, Probe Sequence
gttatcataaggtgttaagagtccc

SEQ ID NO: 108473 - DNA, 25 bp, Probe Sequence
gggttatcataaggtgttaagagtc

SEQ ID NO: 108474 - DNA, 25 bp, Probe Sequence
gttgccacttggagtatgaacaatg

SEQ ID NO: 108475 - DNA, 25 bp, Probe Sequence
gaccaaggtatcctactacaaccag

SEQ ID NO: 108476 - DNA, 25 bp, Probe Sequence
ctgaccaaggtatcctactacaacc

SEQ ID NO: 108477 - DNA, 25 bp, Probe Sequence
ggatttgggttatcataaggtgtta

SEQ ID NO: 108478 - DNA, 25 bp, Probe Sequence
ttgggttatcataaggtgttaagag

SEQ ID NO: 108479 - DNA, 25 bp, Probe Sequence
gctgaccaaggtatcctactacaac

SEQ ID NO: 108480 - DNA, 25 bp, Probe Sequence
ttaggatttgggttatcataaggtg

SEQ ID NO: 108481 - DNA, 25 bp, Probe Sequence
tgttctcaactatgtgaccaccaac

SEQ ID NO: 108482 - DNA, 25 bp, Probe Sequence
tgaccaaggtatcctactacaacca

SEQ ID NO: 108483 - DNA, 25 bp, Probe Sequence
caacagtgtttaggatttgggttat

SEQ ID NO: 108484 - DNA, 25 bp, Probe Sequence
aacagtgtttaggatttgggttatc

SEQ ID NO: 108485 - DNA, 25 bp, Probe Sequence
aggtgttaagagtcccttgttaaag

SEQ ID NO: 108486 - DNA, 25 bp, Probe Sequence
tttgggttatcataaggtgttaaga

SEQ ID NO: 108487 - DNA, 25 bp, Probe Sequence
gtgtaaataaacctgtgttgccatg

SEQ ID NO: 108488 - DNA, 25 bp, Probe Sequence
cctcactgtaaaggttcatcaggat

SEQ ID NO: 108489 - DNA, 25 bp, Probe Sequence
actgtaaaggttcatcaggatcgtc

SEQ ID NO: 108490 - DNA, 25 bp, Probe Sequence
tcactgtaaaggttcatcaggatcg

SEQ ID NO: 108491 - DNA, 25 bp, Probe Sequence
cactgtaaaggttcatcaggatcgt

SEQ ID NO: 108492 - DNA, 25 bp, Probe Sequence
gtcctcactgtaaaggttcatcagg

SEQ ID NO: 108493 - DNA, 25 bp, Probe Sequence
cgtcctcactgtaaaggttcatcag

SEQ ID NO: 108494 - DNA, 25 bp, Probe Sequence
ctgtaaaggttcatcaggatcgtcc

SEQ ID NO: 108495 - DNA, 25 bp, Probe Sequence
gtaaaggttcatcaggatcgtccac

SEQ ID NO: 108496 - DNA, 25 bp, Probe Sequence
tgtaaaggttcatcaggatcgtcca

SEQ ID NO: 108497 - DNA, 25 bp, Probe Sequence
ccgtcctcactgtaaaggttcatca

SEQ ID NO: 108498 - DNA, 25 bp, Probe Sequence
taaaggttcatcaggatcgtccacc

SEQ ID NO: 108499 - DNA, 25 bp, Probe Sequence
tcctcactgtaaaggttcatcagga

SEQ ID NO: 108500 - DNA, 25 bp, Probe Sequence
tggttatcttactctgagtgtgatg

SEQ ID NO: 108501 - DNA, 25 bp, Probe Sequence
ctggttatcttactctgagtgtgat

SEQ ID NO: 108502 - DNA, 25 bp, Probe Sequence
cttgctggttatcttactctgagtg

SEQ ID NO: 108503 - DNA, 25 bp, Probe Sequence
ggttatcttactctgagtgtgatgc

SEQ ID NO: 108504 - DNA, 25 bp, Probe Sequence
ttaacatgaatcagaatcacctgga

SEQ ID NO: 108505 - DNA, 25 bp, Probe Sequence
taacatgaatcagaatcacctggag

SEQ ID NO: 108506 - DNA, 25 bp, Probe Sequence
ttgctggttatcttactctgagtgt

SEQ ID NO: 108507 - DNA, 25 bp, Probe Sequence
actttgtccctttacttctgatttg

SEQ ID NO: 108508 - DNA, 25 bp, Probe Sequence
ctttgtccctttacttctgatttga

SEQ ID NO: 108509 - DNA, 25 bp, Probe Sequence
gctggttatcttactctgagtgtga

SEQ ID NO: 108510 - DNA, 25 bp, Probe Sequence
ccttgctggttatcttactctgagt

SEQ ID NO: 108511 - DNA, 25 bp, Probe Sequence
aactttgtccctttacttctgattt

SEQ ID NO: 108512 - DNA, 25 bp, Probe Sequence
gaactttgtccctttacttctgatt

SEQ ID NO: 108513 - DNA, 25 bp, Probe Sequence
gttatcttactctgagtgtgatgca

SEQ ID NO: 108514 - DNA, 25 bp, Probe Sequence
tgctggttatcttactctgagtgtg

SEQ ID NO: 108515 - DNA, 25 bp, Probe Sequence
ttgtccctttacttctgatttgaaa

SEQ ID NO: 108516 - DNA, 25 bp, Probe Sequence
tttgtccctttacttctgatttgaa

SEQ ID NO: 108517 - DNA, 25 bp, Probe Sequence
ctcacacctgtaatccgactgtaag

SEQ ID NO: 108518 - DNA, 25 bp, Probe Sequence
taacatttctagcaagtttccaggt

SEQ ID NO: 108519 - DNA, 25 bp, Probe Sequence
ttctgattgtgatctgaggttctgc

SEQ ID NO: 108520 - DNA, 25 bp, Probe Sequence
ttaacatttctagcaagtttccagg

SEQ ID NO: 108521 - DNA, 25 bp, Probe Sequence
ctgtaatccgactgtaagctcatca

SEQ ID NO: 108522 - DNA, 25 bp, Probe Sequence
ttatcttactctgagtgtgatgcag

SEQ ID NO: 108523 - DNA, 25 bp, Probe Sequence
atttctagcaagtttccaggtgatg

SEQ ID NO: 108524 - DNA, 25 bp, Probe Sequence
tttaatccatacacaaagacggtac

SEQ ID NO: 108525 - DNA, 25 bp, Probe Sequence
gttttaatccatacacaaagacggt

SEQ ID NO: 108526 - DNA, 25 bp, Probe Sequence
ggttttaatccatacacaaagacgg

SEQ ID NO: 108527 - DNA, 25 bp, Probe Sequence
ttttaatccatacacaaagacggta

SEQ ID NO: 108528 - DNA, 25 bp, Probe Sequence
ccctggttttaatccatacacaaag

SEQ ID NO: 108529 - DNA, 25 bp, Probe Sequence
tggttttaatccatacacaaagacg

SEQ ID NO: 108530 - DNA, 25 bp, Probe Sequence
cctggttttaatccatacacaaaga

SEQ ID NO: 108531 - DNA, 25 bp, Probe Sequence
ctggttttaatccatacacaaagac

SEQ ID NO: 108532 - DNA, 25 bp, Probe Sequence
gccctggttttaatccatacacaaa

SEQ ID NO: 108533 - DNA, 25 bp, Probe Sequence
gaagtgccctggttttaatccatac

SEQ ID NO: 108534 - DNA, 25 bp, Probe Sequence
aagtgccctggttttaatccataca

SEQ ID NO: 108535 - DNA, 25 bp, Probe Sequence
tgttggaagtgccctggttttaatc

SEQ ID NO: 108536 - DNA, 25 bp, Probe Sequence
tgccctggttttaatccatacacaa

SEQ ID NO: 108537 - DNA, 25 bp, Probe Sequence
ggaagtgccctggttttaatccata

SEQ ID NO: 108538 - DNA, 25 bp, Probe Sequence
gtgttggaagtgccctggttttaat

SEQ ID NO: 108539 - DNA, 25 bp, Probe Sequence
agtgccctggttttaatccatacac

SEQ ID NO: 108540 - DNA, 25 bp, Probe Sequence
gtgccctggttttaatccatacaca

SEQ ID NO: 108541 - DNA, 25 bp, Probe Sequence
atgtgttggaagtgccctggtttta

SEQ ID NO: 108542 - DNA, 25 bp, Probe Sequence
tatgtgttggaagtgccctggtttt

SEQ ID NO: 108543 - DNA, 25 bp, Probe Sequence
gttggaagtgccctggttttaatcc

SEQ ID NO: 108544 - DNA, 25 bp, Probe Sequence
tgtgttggaagtgccctggttttaa

SEQ ID NO: 108545 - DNA, 25 bp, Probe Sequence
tggaagtgccctggttttaatccat

SEQ ID NO: 108546 - DNA, 25 bp, Probe Sequence
ttggaagtgccctggttttaatcca

SEQ ID NO: 108547 - DNA, 25 bp, Probe Sequence
aattcgcaagttccagattctcaat

SEQ ID NO: 108548 - DNA, 25 bp, Probe Sequence
gcaagttccagattctcaatgatga

SEQ ID NO: 108549 - DNA, 25 bp, Probe Sequence
attcgcaagttccagattctcaatg

SEQ ID NO: 108550 - DNA, 25 bp, Probe Sequence
taggaactcttgagaatattggctg

SEQ ID NO: 108551 - DNA, 25 bp, Probe Sequence
ttaggaactcttgagaatattggct

SEQ ID NO: 108552 - DNA, 25 bp, Probe Sequence
catcctggataagtacctgaagtca

SEQ ID NO: 108553 - DNA, 25 bp, Probe Sequence
ttgagaatattggctgctgattgtt

SEQ ID NO: 108554 - DNA, 25 bp, Probe Sequence
ctcttgagaatattggctgctgatt

SEQ ID NO: 108555 - DNA, 25 bp, Probe Sequence
ggttcattcattcattccataagaa

SEQ ID NO: 108556 - DNA, 25 bp, Probe Sequence
tcttgagaatattggctgctgattg

SEQ ID NO: 108557 - DNA, 25 bp, Probe Sequence
attaggaactcttgagaatattggc

SEQ ID NO: 108558 - DNA, 25 bp, Probe Sequence
cgcaagttccagattctcaatgatg

SEQ ID NO: 108559 - DNA, 25 bp, Probe Sequence
tcgcaagttccagattctcaatgat

SEQ ID NO: 108560 - DNA, 25 bp, Probe Sequence
cttgagaatattggctgctgattgt

SEQ ID NO: 108561 - DNA, 25 bp, Probe Sequence
ttcgcaagttccagattctcaatga

SEQ ID NO: 108562 - DNA, 25 bp, Probe Sequence
tagttctaagtcattgttcccatcc

SEQ ID NO: 108563 - DNA, 25 bp, Probe Sequence
atgcctttctctccgtaaactattt

SEQ ID NO: 108564 - DNA, 25 bp, Probe Sequence
atcctggataagtacctgaagtcag

SEQ ID NO: 108565 - DNA, 25 bp, Probe Sequence
taaatcccttgccagttaccattaa

SEQ ID NO: 108566 - DNA, 25 bp, Probe Sequence
ttaaatcccttgccagttaccatta

SEQ ID NO: 108567 - DNA, 25 bp, Probe Sequence
tgagaatattggctgctgattgttg

SEQ ID NO: 108568 - DNA, 25 bp, Probe Sequence
gaactcttgagaatattggctgctg

SEQ ID NO: 108569 - DNA, 25 bp, Probe Sequence
attaaatcccttgccagttaccatt

SEQ ID NO: 108570 - DNA, 25 bp, Probe Sequence
tttgaagaagatggtggagagaatt

SEQ ID NO: 108571 - DNA, 25 bp, Probe Sequence
cgagttccatcaccagcattattat

SEQ ID NO: 108572 - DNA, 25 bp, Probe Sequence
gttccatcaccagcattattatagt

SEQ ID NO: 108573 - DNA, 25 bp, Probe Sequence
agttccatcaccagcattattatag

SEQ ID NO: 108574 - DNA, 25 bp, Probe Sequence
gagttccatcaccagcattattata

SEQ ID NO: 108575 - DNA, 25 bp, Probe Sequence
ttccatcaccagcattattatagtg

SEQ ID NO: 108576 - DNA, 25 bp, Probe Sequence
agaattagagattccaactgacaga

SEQ ID NO: 108577 - DNA, 25 bp, Probe Sequence
agagacatgcacgattcaagaataa

SEQ ID NO: 108578 - DNA, 25 bp, Probe Sequence
gaattagagattccaactgacagaa

SEQ ID NO: 108579 - DNA, 25 bp, Probe Sequence
cagagacatgcacgattcaagaata

SEQ ID NO: 108580 - DNA, 25 bp, Probe Sequence
aagaattagagattccaactgacag

SEQ ID NO: 108581 - DNA, 25 bp, Probe Sequence
aaaccataaagaaacacagtcagta

SEQ ID NO: 108582 - DNA, 25 bp, Probe Sequence
taaagaactgtgggagtcaagtaaa

SEQ ID NO: 108583 - DNA, 25 bp, Probe Sequence
ttaaagaactgtgggagtcaagtaa

SEQ ID NO: 108584 - DNA, 25 bp, Probe Sequence
cttaaagaactgtgggagtcaagta

SEQ ID NO: 108585 - DNA, 25 bp, Probe Sequence
tacttaaagaactgtgggagtcaag

SEQ ID NO: 108586 - DNA, 25 bp, Probe Sequence
ctacttaaagaactgtgggagtcaa

SEQ ID NO: 108587 - DNA, 25 bp, Probe Sequence
gcgagttccatcaccagcattatta

SEQ ID NO: 108588 - DNA, 25 bp, Probe Sequence
aaccataaagaaacacagtcagtac

SEQ ID NO: 108589 - DNA, 25 bp, Probe Sequence
aattagagattccaactgacagaat

SEQ ID NO: 108590 - DNA, 25 bp, Probe Sequence
tgtacctttgtgagattgtatgttt

SEQ ID NO: 108591 - DNA, 25 bp, Probe Sequence
ttgtacctttgtgagattgtatgtt

SEQ ID NO: 108592 - DNA, 25 bp, Probe Sequence
attgtacctttgtgagattgtatgt

SEQ ID NO: 108593 - DNA, 25 bp, Probe Sequence
ctgacaaagttctgtttcttcacct

SEQ ID NO: 108594 - DNA, 25 bp, Probe Sequence
tccatcaccagcattattatagtgc

SEQ ID NO: 108595 - DNA, 25 bp, Probe Sequence
caagtgccatcagacaagatcagtt

SEQ ID NO: 108596 - DNA, 25 bp, Probe Sequence
tggaagcagcacagaagagagatag

SEQ ID NO: 108597 - DNA, 25 bp, Probe Sequence
agaagagagatagccaagtgccatc

SEQ ID NO: 108598 - DNA, 25 bp, Probe Sequence
cagcacagaagagagatagccaagt

SEQ ID NO: 108599 - DNA, 25 bp, Probe Sequence
atagccaagtgccatcagacaagat

SEQ ID NO: 108600 - DNA, 25 bp, Probe Sequence
cagaagagagatagccaagtgccat

SEQ ID NO: 108601 - DNA, 25 bp, Probe Sequence
aagagagatagccaagtgccatcag

SEQ ID NO: 108602 - DNA, 25 bp, Probe Sequence
gaagagagatagccaagtgccatca

SEQ ID NO: 108603 - DNA, 25 bp, Probe Sequence
ctggaagcagcacagaagagagata

SEQ ID NO: 108604 - DNA, 25 bp, Probe Sequence
gcaacagacaagattccctcttaaa

SEQ ID NO: 108605 - DNA, 25 bp, Probe Sequence
gatagccaagtgccatcagacaaga

SEQ ID NO: 108606 - DNA, 25 bp, Probe Sequence
agatagccaagtgccatcagacaag

SEQ ID NO: 108607 - DNA, 25 bp, Probe Sequence
gagatagccaagtgccatcagacaa

SEQ ID NO: 108608 - DNA, 25 bp, Probe Sequence
agcacagaagagagatagccaagtg

SEQ ID NO: 108609 - DNA, 25 bp, Probe Sequence
gagagatagccaagtgccatcagac

SEQ ID NO: 108610 - DNA, 25 bp, Probe Sequence
tagccaagtgccatcagacaagatc

SEQ ID NO: 108611 - DNA, 25 bp, Probe Sequence
taatcccagttactcggaggctaag

SEQ ID NO: 108612 - DNA, 25 bp, Probe Sequence
agagagatagccaagtgccatcaga

SEQ ID NO: 108613 - DNA, 25 bp, Probe Sequence
gaagcagcacagaagagagatagcc

SEQ ID NO: 108614 - DNA, 25 bp, Probe Sequence
ggaagcagcacagaagagagatagc

SEQ ID NO: 108615 - DNA, 25 bp, Probe Sequence
gtaatcccagttactcggaggctaa

SEQ ID NO: 108616 - DNA, 25 bp, Probe Sequence
ccaagtgccatcagacaagatcagt

SEQ ID NO: 108617 - DNA, 25 bp, Probe Sequence
ggcaacagacaagattccctcttaa

SEQ ID NO: 108618 - DNA, 25 bp, Probe Sequence
cacagaagagagatagccaagtgcc

SEQ ID NO: 108619 - DNA, 25 bp, Probe Sequence
tccagatcctaatttatgcctatgc

SEQ ID NO: 108620 - DNA, 25 bp, Probe Sequence
tcctgggagtgtgtatatatgtagc

SEQ ID NO: 108621 - DNA, 25 bp, Probe Sequence
ctgggagtgtgtatatatgtagcat

SEQ ID NO: 108622 - DNA, 25 bp, Probe Sequence
cctgggagtgtgtatatatgtagca

SEQ ID NO: 108623 - DNA, 25 bp, Probe Sequence
ctccagatcctaatttatgcctatg

SEQ ID NO: 108624 - DNA, 25 bp, Probe Sequence
atcctgggagtgtgtatatatgtag

SEQ ID NO: 108625 - DNA, 25 bp, Probe Sequence
tctccagatcctaatttatgcctat

SEQ ID NO: 108626 - DNA, 25 bp, Probe Sequence
catcctgggagtgtgtatatatgta

SEQ ID NO: 108627 - DNA, 25 bp, Probe Sequence
atgctgcactattggttcttaagtt

SEQ ID NO: 108628 - DNA, 25 bp, Probe Sequence
aatgctgcactattggttcttaagt

SEQ ID NO: 108629 - DNA, 25 bp, Probe Sequence
atctccagatcctaatttatgccta

SEQ ID NO: 108630 - DNA, 25 bp, Probe Sequence
tatctccagatcctaatttatgcct

SEQ ID NO: 108631 - DNA, 25 bp, Probe Sequence
gtgatactcagtttcttgttcctgg

SEQ ID NO: 108632 - DNA, 25 bp, Probe Sequence
ggtgatactcagtttcttgttcctg

SEQ ID NO: 108633 - DNA, 25 bp, Probe Sequence
ctgggtgatactcagtttcttgttc

SEQ ID NO: 108634 - DNA, 25 bp, Probe Sequence
gggtgatactcagtttcttgttcct

SEQ ID NO: 108635 - DNA, 25 bp, Probe Sequence
ttatctccagatcctaatttatgcc

SEQ ID NO: 108636 - DNA, 25 bp, Probe Sequence
tgggtgatactcagtttcttgttcc

SEQ ID NO: 108637 - DNA, 25 bp, Probe Sequence
caaatgctgcactattggttcttaa

SEQ ID NO: 108638 - DNA, 25 bp, Probe Sequence
tgggagtgtgtatatatgtagcata

SEQ ID NO: 108639 - DNA, 25 bp, Probe Sequence
ccatcctgggagtgtgtatatatgt

SEQ ID NO: 108640 - DNA, 25 bp, Probe Sequence
aaatgctgcactattggttcttaag

SEQ ID NO: 108641 - DNA, 25 bp, Probe Sequence
acaaatgctgcactattggttctta

SEQ ID NO: 108642 - DNA, 25 bp, Probe Sequence
tgatactcagtttcttgttcctggc

SEQ ID NO: 108643 - DNA, 25 bp, Probe Sequence
cttcttacctcctcacctacctctc

SEQ ID NO: 108644 - DNA, 25 bp, Probe Sequence
gacttcatagagctgtgtctgtata

SEQ ID NO: 108645 - DNA, 25 bp, Probe Sequence
acttcatagagctgtgtctgtatac

SEQ ID NO: 108646 - DNA, 25 bp, Probe Sequence
acttcttacctcctcacctacctct

SEQ ID NO: 108647 - DNA, 25 bp, Probe Sequence
cacttcttacctcctcacctacctc

SEQ ID NO: 108648 - DNA, 25 bp, Probe Sequence
ttcttacctcctcacctacctctcc

SEQ ID NO: 108649 - DNA, 25 bp, Probe Sequence
ccacttcttacctcctcacctacct

SEQ ID NO: 108650 - DNA, 25 bp, Probe Sequence
cttacctcctcacctacctctccag

SEQ ID NO: 108651 - DNA, 25 bp, Probe Sequence
agacttcatagagctgtgtctgtat

SEQ ID NO: 108652 - DNA, 25 bp, Probe Sequence
tcttacctcctcacctacctctcca

SEQ ID NO: 108653 - DNA, 25 bp, Probe Sequence
agccacttcttacctcctcacctac

SEQ ID NO: 108654 - DNA, 25 bp, Probe Sequence
cagccacttcttacctcctcaccta

SEQ ID NO: 108655 - DNA, 25 bp, Probe Sequence
tatacactgggtaacctgatcgtgg

SEQ ID NO: 108656 - DNA, 25 bp, Probe Sequence
gtatacactgggtaacctgatcgtg

SEQ ID NO: 108657 - DNA, 25 bp, Probe Sequence
cagtcacagctcagacttcatagag

SEQ ID NO: 108658 - DNA, 25 bp, Probe Sequence
gacactgaagtagtaggccagagtt

SEQ ID NO: 108659 - DNA, 25 bp, Probe Sequence
ttctgacactgaagtagtaggccag

SEQ ID NO: 108660 - DNA, 25 bp, Probe Sequence
ctgacactgaagtagtaggccagag

SEQ ID NO: 108661 - DNA, 25 bp, Probe Sequence
cactgaagtagtaggccagagtttg

SEQ ID NO: 108662 - DNA, 25 bp, Probe Sequence
tttctgacactgaagtagtaggcca

SEQ ID NO: 108663 - DNA, 25 bp, Probe Sequence
ccagtcacagctcagacttcataga

SEQ ID NO: 108664 - DNA, 25 bp, Probe Sequence
tccagtcacagctcagacttcatag

SEQ ID NO: 108665 - DNA, 25 bp, Probe Sequence
ctccagtcacagctcagacttcata

SEQ ID NO: 108666 - DNA, 25 bp, Probe Sequence
acactgaagtagtaggccagagttt

SEQ ID NO: 108667 - DNA, 25 bp, Probe Sequence
gagaggagaggattgatagagtgtt

SEQ ID NO: 108668 - DNA, 25 bp, Probe Sequence
agaggagaggattgatagagtgttg

SEQ ID NO: 108669 - DNA, 25 bp, Probe Sequence
ggagaggagaggattgatagagtgt

SEQ ID NO: 108670 - DNA, 25 bp, Probe Sequence
gaggagaggattgatagagtgttgc

SEQ ID NO: 108671 - DNA, 25 bp, Probe Sequence
taagggagaggagaggattgataga

SEQ ID NO: 108672 - DNA, 25 bp, Probe Sequence
gtaagggagaggagaggattgatag

SEQ ID NO: 108673 - DNA, 25 bp, Probe Sequence
aatctgtatgcctgagtaccatcct

SEQ ID NO: 108674 - DNA, 25 bp, Probe Sequence
aagggagaggagaggattgatagag

SEQ ID NO: 108675 - DNA, 25 bp, Probe Sequence
ggtaagggagaggagaggattgata

SEQ ID NO: 108676 - DNA, 25 bp, Probe Sequence
ttgagataaaggatttggtttccct

SEQ ID NO: 108677 - DNA, 25 bp, Probe Sequence
tcattgagataaaggatttggtttc

SEQ ID NO: 108678 - DNA, 25 bp, Probe Sequence
tgagataaaggatttggtttccctg

SEQ ID NO: 108679 - DNA, 25 bp, Probe Sequence
attgagataaaggatttggtttccc

SEQ ID NO: 108680 - DNA, 25 bp, Probe Sequence
atctgtatgcctgagtaccatcctg

SEQ ID NO: 108681 - DNA, 25 bp, Probe Sequence
tagaggtaagggagaggagaggatt

SEQ ID NO: 108682 - DNA, 25 bp, Probe Sequence
ttagaggtaagggagaggagaggat

SEQ ID NO: 108683 - DNA, 25 bp, Probe Sequence
aaatctgtatgcctgagtaccatcc

SEQ ID NO: 108684 - DNA, 25 bp, Probe Sequence
cattgagataaaggatttggtttcc

SEQ ID NO: 108685 - DNA, 25 bp, Probe Sequence
gggagaggagaggattgatagagtg

SEQ ID NO: 108686 - DNA, 25 bp, Probe Sequence
tcctggatgaatctagaaggtatgg

SEQ ID NO: 108687 - DNA, 25 bp, Probe Sequence
atcctggatgaatctagaaggtatg

SEQ ID NO: 108688 - DNA, 25 bp, Probe Sequence
aggagaggattgatagagtgttgca

SEQ ID NO: 108689 - DNA, 25 bp, Probe Sequence
gcatctctgaccaaatttcacataa

SEQ ID NO: 108690 - DNA, 25 bp, Probe Sequence
ttcattgagataaaggatttggttt

SEQ ID NO: 108691 - DNA, 25 bp, Probe Sequence
ccgaatcctacacatctcttatcag

SEQ ID NO: 108692 - DNA, 25 bp, Probe Sequence
cgaatcctacacatctcttatcagc

SEQ ID NO: 108693 - DNA, 25 bp, Probe Sequence
gccgaatcctacacatctcttatca

SEQ ID NO: 108694 - DNA, 25 bp, Probe Sequence
tgccgaatcctacacatctcttatc

SEQ ID NO: 108695 - DNA, 25 bp, Probe Sequence
ctgccgaatcctacacatctcttat

SEQ ID NO: 108696 - DNA, 25 bp, Probe Sequence
gaatcctacacatctcttatcagct

SEQ ID NO: 108697 - DNA, 25 bp, Probe Sequence
aatcctacacatctcttatcagctt

SEQ ID NO: 108698 - DNA, 25 bp, Probe Sequence
gttctagttagcttgttgacttgtt

SEQ ID NO: 108699 - DNA, 25 bp, Probe Sequence
actgccgaatcctacacatctctta

SEQ ID NO: 108700 - DNA, 25 bp, Probe Sequence
tactgccgaatcctacacatctctt

SEQ ID NO: 108701 - DNA, 25 bp, Probe Sequence
tgttgacttgttaaaccttctgttc

SEQ ID NO: 108702 - DNA, 25 bp, Probe Sequence
cttgttgacttgttaaaccttctgt

SEQ ID NO: 108703 - DNA, 25 bp, Probe Sequence
gatacagttaaagagcaacccaaag

SEQ ID NO: 108704 - DNA, 25 bp, Probe Sequence
aacagaggatacagttaaagagcaa

SEQ ID NO: 108705 - DNA, 25 bp, Probe Sequence
aaacagaggatacagttaaagagca

SEQ ID NO: 108706 - DNA, 25 bp, Probe Sequence
gttgacttgttaaaccttctgttct

SEQ ID NO: 108707 - DNA, 25 bp, Probe Sequence
cgttctagttagcttgttgacttgt

SEQ ID NO: 108708 - DNA, 25 bp, Probe Sequence
ttgttgacttgttaaaccttctgtt

SEQ ID NO: 108709 - DNA, 25 bp, Probe Sequence
acagaggatacagttaaagagcaac

SEQ ID NO: 108710 - DNA, 25 bp, Probe Sequence
ttgacttgttaaaccttctgttctt

SEQ ID NO: 108711 - DNA, 25 bp, Probe Sequence
gcttgttgacttgttaaaccttctg

SEQ ID NO: 108712 - DNA, 25 bp, Probe Sequence
gacgttctagttagcttgttgactt

SEQ ID NO: 108713 - DNA, 25 bp, Probe Sequence
cagaggatacagttaaagagcaacc

SEQ ID NO: 108714 - DNA, 25 bp, Probe Sequence
atacagttaaagagcaacccaaagg

SEQ ID NO: 108715 - DNA, 25 bp, Probe Sequence
tctattgttggaccacttacattgt

SEQ ID NO: 108716 - DNA, 25 bp, Probe Sequence
tcttctattgttggaccacttacat

SEQ ID NO: 108717 - DNA, 25 bp, Probe Sequence
cgaatgagacagagatcagaataca

SEQ ID NO: 108718 - DNA, 25 bp, Probe Sequence
ttctattgttggaccacttacattg

SEQ ID NO: 108719 - DNA, 25 bp, Probe Sequence
agtcttctattgttggaccacttac

SEQ ID NO: 108720 - DNA, 25 bp, Probe Sequence
cagtcttctattgttggaccactta

SEQ ID NO: 108721 - DNA, 25 bp, Probe Sequence
gtcttctattgttggaccacttaca

SEQ ID NO: 108722 - DNA, 25 bp, Probe Sequence
cttctattgttggaccacttacatt

SEQ ID NO: 108723 - DNA, 25 bp, Probe Sequence
agacagagatcagaatacattgact

SEQ ID NO: 108724 - DNA, 25 bp, Probe Sequence
tgagacagagatcagaatacattga

SEQ ID NO: 108725 - DNA, 25 bp, Probe Sequence
gcgaatgagacagagatcagaatac

SEQ ID NO: 108726 - DNA, 25 bp, Probe Sequence
agcgaatgagacagagatcagaata

SEQ ID NO: 108727 - DNA, 25 bp, Probe Sequence
gagacagagatcagaatacattgac

SEQ ID NO: 108728 - DNA, 25 bp, Probe Sequence
ctattgttggaccacttacattgta

SEQ ID NO: 108729 - DNA, 25 bp, Probe Sequence
tattgttggaccacttacattgtac

SEQ ID NO: 108730 - DNA, 25 bp, Probe Sequence
attgttggaccacttacattgtacc

SEQ ID NO: 108731 - DNA, 25 bp, Probe Sequence
gacagagatcagaatacattgactg

SEQ ID NO: 108732 - DNA, 25 bp, Probe Sequence
atgagacagagatcagaatacattg

SEQ ID NO: 108733 - DNA, 25 bp, Probe Sequence
aagcgaatgagacagagatcagaat

SEQ ID NO: 108734 - DNA, 25 bp, Probe Sequence
cagagatcagaatacattgactgtt

SEQ ID NO: 108735 - DNA, 25 bp, Probe Sequence
acagtcttctattgttggaccactt

SEQ ID NO: 108736 - DNA, 25 bp, Probe Sequence
ttcacagtcttctattgttggacca

SEQ ID NO: 108737 - DNA, 25 bp, Probe Sequence
gaatgagacagagatcagaatacat

SEQ ID NO: 108738 - DNA, 25 bp, Probe Sequence
aattgttaatgcaactgcttaatgg

SEQ ID NO: 108739 - DNA, 25 bp, Probe Sequence
aaagaaaccaccagaaacccagaag

SEQ ID NO: 108740 - DNA, 25 bp, Probe Sequence
agaaaccaccagaaacccagaagta

SEQ ID NO: 108741 - DNA, 25 bp, Probe Sequence
gaaaccaccagaaacccagaagtac

SEQ ID NO: 108742 - DNA, 25 bp, Probe Sequence
aagaaaccaccagaaacccagaagt

SEQ ID NO: 108743 - DNA, 25 bp, Probe Sequence
aaaagaaaccaccagaaacccagaa

SEQ ID NO: 108744 - DNA, 25 bp, Probe Sequence
gagctgcctaaatcctgattttaaa

SEQ ID NO: 108745 - DNA, 25 bp, Probe Sequence
aaaccaccagaaacccagaagtacc

SEQ ID NO: 108746 - DNA, 25 bp, Probe Sequence
ggagctgcctaaatcctgattttaa

SEQ ID NO: 108747 - DNA, 25 bp, Probe Sequence
tggagctgcctaaatcctgatttta

SEQ ID NO: 108748 - DNA, 25 bp, Probe Sequence
gtggagctgcctaaatcctgatttt

SEQ ID NO: 108749 - DNA, 25 bp, Probe Sequence
agctgcctaaatcctgattttaaaa

SEQ ID NO: 108750 - DNA, 25 bp, Probe Sequence
acatagaaatgaaaccacatccgtt

SEQ ID NO: 108751 - DNA, 25 bp, Probe Sequence
atagaaatgaaaccacatccgtttg

SEQ ID NO: 108752 - DNA, 25 bp, Probe Sequence
catagaaatgaaaccacatccgttt

SEQ ID NO: 108753 - DNA, 25 bp, Probe Sequence
tagaaatgaaaccacatccgtttgg

SEQ ID NO: 108754 - DNA, 25 bp, Probe Sequence
aaatgaaaccacatccgtttggaaa

SEQ ID NO: 108755 - DNA, 25 bp, Probe Sequence
gaaatgaaaccacatccgtttggaa

SEQ ID NO: 108756 - DNA, 25 bp, Probe Sequence
aatgaaaccacatccgtttggaaac

SEQ ID NO: 108757 - DNA, 25 bp, Probe Sequence
agaaatgaaaccacatccgtttgga

SEQ ID NO: 108758 - DNA, 25 bp, Probe Sequence
gaaaccacatccgtttggaaacgat

SEQ ID NO: 108759 - DNA, 25 bp, Probe Sequence
aaaccacatccgtttggaaacgatg

SEQ ID NO: 108760 - DNA, 25 bp, Probe Sequence
atgaaaccacatccgtttggaaacg

SEQ ID NO: 108761 - DNA, 25 bp, Probe Sequence
cctcatcctcatgtcatccttctag

SEQ ID NO: 108762 - DNA, 25 bp, Probe Sequence
ctcatcctcatgtcatccttctagg

SEQ ID NO: 108763 - DNA, 25 bp, Probe Sequence
attatttggaacagttagacttgcc

SEQ ID NO: 108764 - DNA, 25 bp, Probe Sequence
atatgcgtgtgattatttggaacag

SEQ ID NO: 108765 - DNA, 25 bp, Probe Sequence
cgtgtgattatttggaacagttaga

SEQ ID NO: 108766 - DNA, 25 bp, Probe Sequence
gcgtgtgattatttggaacagttag

SEQ ID NO: 108767 - DNA, 25 bp, Probe Sequence
gattatttggaacagttagacttgc

SEQ ID NO: 108768 - DNA, 25 bp, Probe Sequence
tatgcgtgtgattatttggaacagt

SEQ ID NO: 108769 - DNA, 25 bp, Probe Sequence
tgcgtgtgattatttggaacagtta

SEQ ID NO: 108770 - DNA, 25 bp, Probe Sequence
atgcgtgtgattatttggaacagtt

SEQ ID NO: 108771 - DNA, 25 bp, Probe Sequence
gtgtgattatttggaacagttagac

SEQ ID NO: 108772 - DNA, 25 bp, Probe Sequence
tgtgattatttggaacagttagact

SEQ ID NO: 108773 - DNA, 25 bp, Probe Sequence
ttatttggaacagttagacttgcca

SEQ ID NO: 108774 - DNA, 25 bp, Probe Sequence
gcctcatcctcatgtcatccttcta

SEQ ID NO: 108775 - DNA, 25 bp, Probe Sequence
tatttggaacagttagacttgccac

SEQ ID NO: 108776 - DNA, 25 bp, Probe Sequence
tgattatttggaacagttagacttg

SEQ ID NO: 108777 - DNA, 25 bp, Probe Sequence
gtgattatttggaacagttagactt

SEQ ID NO: 108778 - DNA, 25 bp, Probe Sequence
ctgccatcccaaagctattgttaag

SEQ ID NO: 108779 - DNA, 25 bp, Probe Sequence
cgttgggtcagttttagaaattgtt

SEQ ID NO: 108780 - DNA, 25 bp, Probe Sequence
catatgcgtgtgattatttggaaca

SEQ ID NO: 108781 - DNA, 25 bp, Probe Sequence
agtggtcctgacctctcttatcaag

SEQ ID NO: 108782 - DNA, 25 bp, Probe Sequence
gtatggaaaattgttgtggtgtgtg

SEQ ID NO: 108783 - DNA, 25 bp, Probe Sequence
gttgggtcagttttagaaattgttt

SEQ ID NO: 108784 - DNA, 25 bp, Probe Sequence
cagtggtcctgacctctcttatcaa

SEQ ID NO: 108785 - DNA, 25 bp, Probe Sequence
atgacaaagcttagacctttacctt

SEQ ID NO: 108786 - DNA, 25 bp, Probe Sequence
aatgacaaagcttagacctttacct

SEQ ID NO: 108787 - DNA, 25 bp, Probe Sequence
gaatgacaaagcttagacctttacc

SEQ ID NO: 108788 - DNA, 25 bp, Probe Sequence
ggaatgacaaagcttagacctttac

SEQ ID NO: 108789 - DNA, 25 bp, Probe Sequence
aggaatgacaaagcttagaccttta

SEQ ID NO: 108790 - DNA, 25 bp, Probe Sequence
tgacaaagcttagacctttaccttc

SEQ ID NO: 108791 - DNA, 25 bp, Probe Sequence
caggaatgacaaagcttagaccttt

SEQ ID NO: 108792 - DNA, 25 bp, Probe Sequence
gacaaagcttagacctttaccttcc

SEQ ID NO: 108793 - DNA, 25 bp, Probe Sequence
gcaggaatgacaaagcttagacctt

SEQ ID NO: 108794 - DNA, 25 bp, Probe Sequence
taaagcaggaatgacaaagcttaga

SEQ ID NO: 108795 - DNA, 25 bp, Probe Sequence
gtaaagcaggaatgacaaagcttag

SEQ ID NO: 108796 - DNA, 25 bp, Probe Sequence
agcaggaatgacaaagcttagacct

SEQ ID NO: 108797 - DNA, 25 bp, Probe Sequence
ggtaaagcaggaatgacaaagctta

SEQ ID NO: 108798 - DNA, 25 bp, Probe Sequence
aaagcaggaatgacaaagcttagac

SEQ ID NO: 108799 - DNA, 25 bp, Probe Sequence
aagcaggaatgacaaagcttagacc

SEQ ID NO: 108800 - DNA, 25 bp, Probe Sequence
gggatattcatttgattatacggat

SEQ ID NO: 108801 - DNA, 25 bp, Probe Sequence
ggggatattcatttgattatacgga

SEQ ID NO: 108802 - DNA, 25 bp, Probe Sequence
ggatattcatttgattatacggatc

SEQ ID NO: 108803 - DNA, 25 bp, Probe Sequence
gaagtggattctaagaagaggcaat

SEQ ID NO: 108804 - DNA, 25 bp, Probe Sequence
ggattctaagaagaggcaatgtgaa

SEQ ID NO: 108805 - DNA, 25 bp, Probe Sequence
aagtggattctaagaagaggcaatg

SEQ ID NO: 108806 - DNA, 25 bp, Probe Sequence
gtggattctaagaagaggcaatgtg

SEQ ID NO: 108807 - DNA, 25 bp, Probe Sequence
tggattctaagaagaggcaatgtga

SEQ ID NO: 108808 - DNA, 25 bp, Probe Sequence
agtggattctaagaagaggcaatgt

SEQ ID NO: 108809 - DNA, 25 bp, Probe Sequence
tggcaataataataatagcactcac

SEQ ID NO: 108810 - DNA, 25 bp, Probe Sequence
gaagaggcaatgtgaaataaatgga

SEQ ID NO: 108811 - DNA, 25 bp, Probe Sequence
agaagaggcaatgtgaaataaatgg

SEQ ID NO: 108812 - DNA, 25 bp, Probe Sequence
tatttgctatctttcccactactcc

SEQ ID NO: 108813 - DNA, 25 bp, Probe Sequence
gctatctttcccactactccataaa

SEQ ID NO: 108814 - DNA, 25 bp, Probe Sequence
tatctttcccactactccataaacc

SEQ ID NO: 108815 - DNA, 25 bp, Probe Sequence
agaggcaatgtgaaataaatggaaa

SEQ ID NO: 108816 - DNA, 25 bp, Probe Sequence
aagaggcaatgtgaaataaatggaa

SEQ ID NO: 108817 - DNA, 25 bp, Probe Sequence
tgctatctttcccactactccataa

SEQ ID NO: 108818 - DNA, 25 bp, Probe Sequence
ttgctatctttcccactactccata

SEQ ID NO: 108819 - DNA, 25 bp, Probe Sequence
cccactactccataaaccctctatt

SEQ ID NO: 108820 - DNA, 25 bp, Probe Sequence
ggcaataataataatagcactcact

SEQ ID NO: 108821 - DNA, 25 bp, Probe Sequence
ccactactccataaaccctctatta

SEQ ID NO: 108822 - DNA, 25 bp, Probe Sequence
tttgctatctttcccactactccat

SEQ ID NO: 108823 - DNA, 25 bp, Probe Sequence
atttgctatctttcccactactcca

SEQ ID NO: 108824 - DNA, 25 bp, Probe Sequence
ttatttgctatctttcccactactc

SEQ ID NO: 108825 - DNA, 25 bp, Probe Sequence
ctatctttcccactactccataaac

SEQ ID NO: 108826 - DNA, 25 bp, Probe Sequence
aagaagaggcaatgtgaaataaatg

SEQ ID NO: 108827 - DNA, 25 bp, Probe Sequence
tgttgttaatcgtagaaccgttgtc

SEQ ID NO: 108828 - DNA, 25 bp, Probe Sequence
ctgttgttaatcgtagaaccgttgt

SEQ ID NO: 108829 - DNA, 25 bp, Probe Sequence
tcagttcctgttgttaatcgtagaa

SEQ ID NO: 108830 - DNA, 25 bp, Probe Sequence
atcagttcctgttgttaatcgtaga

SEQ ID NO: 108831 - DNA, 25 bp, Probe Sequence
tcctatcagttcctgttgttaatcg

SEQ ID NO: 108832 - DNA, 25 bp, Probe Sequence
ggttcctatcagttcctgttgttaa

SEQ ID NO: 108833 - DNA, 25 bp, Probe Sequence
cctatcagttcctgttgttaatcgt

SEQ ID NO: 108834 - DNA, 25 bp, Probe Sequence
gttcctatcagttcctgttgttaat

SEQ ID NO: 108835 - DNA, 25 bp, Probe Sequence
tggttcctatcagttcctgttgtta

SEQ ID NO: 108836 - DNA, 25 bp, Probe Sequence
gttgttaatcgtagaaccgttgtcc

SEQ ID NO: 108837 - DNA, 25 bp, Probe Sequence
cctgttgttaatcgtagaaccgttg

SEQ ID NO: 108838 - DNA, 25 bp, Probe Sequence
tcctgttgttaatcgtagaaccgtt

SEQ ID NO: 108839 - DNA, 25 bp, Probe Sequence
ttcctgttgttaatcgtagaaccgt

SEQ ID NO: 108840 - DNA, 25 bp, Probe Sequence
ttcctatcagttcctgttgttaatc

SEQ ID NO: 108841 - DNA, 25 bp, Probe Sequence
tatcagttcctgttgttaatcgtag

SEQ ID NO: 108842 - DNA, 25 bp, Probe Sequence
ctatcagttcctgttgttaatcgta

SEQ ID NO: 108843 - DNA, 25 bp, Probe Sequence
cttctggttcctatcagttcctgtt

SEQ ID NO: 108844 - DNA, 25 bp, Probe Sequence
ttctggttcctatcagttcctgttg

SEQ ID NO: 108845 - DNA, 25 bp, Probe Sequence
aagaaccacaggatgttgaagacaa

SEQ ID NO: 108846 - DNA, 25 bp, Probe Sequence
ctggttcctatcagttcctgttgtt

SEQ ID NO: 108847 - DNA, 25 bp, Probe Sequence
gaagaaccacaggatgttgaagaca

SEQ ID NO: 108848 - DNA, 25 bp, Probe Sequence
caactgtctgaagtatttgtgaggg

SEQ ID NO: 108849 - DNA, 25 bp, Probe Sequence
ctctgtgttaagaataacgtgtcct

SEQ ID NO: 108850 - DNA, 25 bp, Probe Sequence
aactgtctgaagtatttgtgaggga

SEQ ID NO: 108851 - DNA, 25 bp, Probe Sequence
taggatgagagtcagagtataggtt

SEQ ID NO: 108852 - DNA, 25 bp, Probe Sequence
ataggatgagagtcagagtataggt

SEQ ID NO: 108853 - DNA, 25 bp, Probe Sequence
cataggatgagagtcagagtatagg

SEQ ID NO: 108854 - DNA, 25 bp, Probe Sequence
acataggatgagagtcagagtatag

SEQ ID NO: 108855 - DNA, 25 bp, Probe Sequence
gatcatggctatatgttgttgagat

SEQ ID NO: 108856 - DNA, 25 bp, Probe Sequence
atgttatagctctagcagtatggaa

SEQ ID NO: 108857 - DNA, 25 bp, Probe Sequence
gacataggatgagagtcagagtata

SEQ ID NO: 108858 - DNA, 25 bp, Probe Sequence
agttctctaagctggtctatgttat

SEQ ID NO: 108859 - DNA, 25 bp, Probe Sequence
tattgccctctttgtattcccattt

SEQ ID NO: 108860 - DNA, 25 bp, Probe Sequence
atattgccctctttgtattcccatt

SEQ ID NO: 108861 - DNA, 25 bp, Probe Sequence
gatattgccctctttgtattcccat

SEQ ID NO: 108862 - DNA, 25 bp, Probe Sequence
atgatattgccctctttgtattccc

SEQ ID NO: 108863 - DNA, 25 bp, Probe Sequence
tggtctatgttatagctctagcagt

SEQ ID NO: 108864 - DNA, 25 bp, Probe Sequence
tatgttatagctctagcagtatgga

SEQ ID NO: 108865 - DNA, 25 bp, Probe Sequence
ctggtctatgttatagctctagcag

SEQ ID NO: 108866 - DNA, 25 bp, Probe Sequence
cagttctctaagctggtctatgtta

SEQ ID NO: 108867 - DNA, 25 bp, Probe Sequence
atgtatctgaggaaagaaatctggt

SEQ ID NO: 108868 - DNA, 25 bp, Probe Sequence
ctctcagttctctaagctggtctat

SEQ ID NO: 108869 - DNA, 25 bp, Probe Sequence
ggtctatgttatagctctagcagta

SEQ ID NO: 108870 - DNA, 25 bp, Probe Sequence
tcagttctctaagctggtctatgtt

SEQ ID NO: 108871 - DNA, 25 bp, Probe Sequence
aggatgagagtcagagtataggttt

SEQ ID NO: 108872 - DNA, 25 bp, Probe Sequence
gtgggaatttgacataggatgagag

SEQ ID NO: 108873 - DNA, 25 bp, Probe Sequence
tgtatctgaggaaagaaatctggta

SEQ ID NO: 108874 - DNA, 25 bp, Probe Sequence
tctcagttctctaagctggtctatg

SEQ ID NO: 108875 - DNA, 25 bp, Probe Sequence
ctcttgacatcctagcttcttctaa

SEQ ID NO: 108876 - DNA, 25 bp, Probe Sequence
actcttgacatcctagcttcttcta

SEQ ID NO: 108877 - DNA, 25 bp, Probe Sequence
tcttgacatcctagcttcttctaag

SEQ ID NO: 108878 - DNA, 25 bp, Probe Sequence
ctctccatgactcttgacatcctag

SEQ ID NO: 108879 - DNA, 25 bp, Probe Sequence
tctctccatgactcttgacatccta

SEQ ID NO: 108880 - DNA, 25 bp, Probe Sequence
accaggaaagactattgaaagatgt

SEQ ID NO: 108881 - DNA, 25 bp, Probe Sequence
atgactcttgacatcctagcttctt

SEQ ID NO: 108882 - DNA, 25 bp, Probe Sequence
gactcttgacatcctagcttcttct

SEQ ID NO: 108883 - DNA, 25 bp, Probe Sequence
ccaggaaagactattgaaagatgtt

SEQ ID NO: 108884 - DNA, 25 bp, Probe Sequence
tgactcttgacatcctagcttcttc

SEQ ID NO: 108885 - DNA, 25 bp, Probe Sequence
catgactcttgacatcctagcttct

SEQ ID NO: 108886 - DNA, 25 bp, Probe Sequence
cttgacatcctagcttcttctaagg

SEQ ID NO: 108887 - DNA, 25 bp, Probe Sequence
taccaggaaagactattgaaagatg

SEQ ID NO: 108888 - DNA, 25 bp, Probe Sequence
ggagaaggaaaccaaaggatctaaa

SEQ ID NO: 108889 - DNA, 25 bp, Probe Sequence
tttctctgacctttccatccttgaa

SEQ ID NO: 108890 - DNA, 25 bp, Probe Sequence
attgatagttcatctggattaccaa

SEQ ID NO: 108891 - DNA, 25 bp, Probe Sequence
tttaccaggaaagactattgaaaga

SEQ ID NO: 108892 - DNA, 25 bp, Probe Sequence
ctctctccatgactcttgacatcct

SEQ ID NO: 108893 - DNA, 25 bp, Probe Sequence
ttaccaggaaagactattgaaagat

SEQ ID NO: 108894 - DNA, 25 bp, Probe Sequence
ccatgactcttgacatcctagcttc

SEQ ID NO: 108895 - DNA, 25 bp, Probe Sequence
caggaaagactattgaaagatgttt

SEQ ID NO: 108896 - DNA, 25 bp, Probe Sequence
gggagaaggaaaccaaaggatctaa

SEQ ID NO: 108897 - DNA, 25 bp, Probe Sequence
tctccatgactcttgacatcctagc

SEQ ID NO: 108898 - DNA, 25 bp, Probe Sequence
tccatgactcttgacatcctagctt

SEQ ID NO: 108899 - DNA, 25 bp, Probe Sequence
aaccagaagccttaccaataacata

SEQ ID NO: 108900 - DNA, 25 bp, Probe Sequence
taaccagaagccttaccaataacat

SEQ ID NO: 108901 - DNA, 25 bp, Probe Sequence
accagaagccttaccaataacatat

SEQ ID NO: 108902 - DNA, 25 bp, Probe Sequence
ttaaccagaagccttaccaataaca

SEQ ID NO: 108903 - DNA, 25 bp, Probe Sequence
tacctatgaccaatgctctctactc

SEQ ID NO: 108904 - DNA, 25 bp, Probe Sequence
ctacctatgaccaatgctctctact

SEQ ID NO: 108905 - DNA, 25 bp, Probe Sequence
cctacctatgaccaatgctctctac

SEQ ID NO: 108906 - DNA, 25 bp, Probe Sequence
ccagaagccttaccaataacatata

SEQ ID NO: 108907 - DNA, 25 bp, Probe Sequence
acctacctatgaccaatgctctcta

SEQ ID NO: 108908 - DNA, 25 bp, Probe Sequence
agccttaccaataacatatagtcaa

SEQ ID NO: 108909 - DNA, 25 bp, Probe Sequence
aagccttaccaataacatatagtca

SEQ ID NO: 108910 - DNA, 25 bp, Probe Sequence
agaagccttaccaataacatatagt

SEQ ID NO: 108911 - DNA, 25 bp, Probe Sequence
gaagccttaccaataacatatagtc

SEQ ID NO: 108912 - DNA, 25 bp, Probe Sequence
cagaagccttaccaataacatatag

SEQ ID NO: 108913 - DNA, 25 bp, Probe Sequence
acctatgaccaatgctctctactcc

SEQ ID NO: 108914 - DNA, 25 bp, Probe Sequence
cacctacctatgaccaatgctctct

SEQ ID NO: 108915 - DNA, 25 bp, Probe Sequence
gccttaccaataacatatagtcaat

SEQ ID NO: 108916 - DNA, 25 bp, Probe Sequence
tgttaaccagaagccttaccaataa

SEQ ID NO: 108917 - DNA, 25 bp, Probe Sequence
ctgttaaccagaagccttaccaata

SEQ ID NO: 108918 - DNA, 25 bp, Probe Sequence
ctatgaccaatgctctctactccct

SEQ ID NO: 108919 - DNA, 25 bp, Probe Sequence
accaataacatatagtcaattagca

SEQ ID NO: 108920 - DNA, 25 bp, Probe Sequence
gttaaccagaagccttaccaataac

SEQ ID NO: 108921 - DNA, 25 bp, Probe Sequence
ccacctacctatgaccaatgctctc

SEQ ID NO: 108922 - DNA, 25 bp, Probe Sequence
gagagccacctacctatgaccaatg

SEQ ID NO: 108923 - DNA, 25 bp, Probe Sequence
tgatggcagagaagataagaacttg

SEQ ID NO: 108924 - DNA, 25 bp, Probe Sequence
gatggcagagaagataagaacttgg

SEQ ID NO: 108925 - DNA, 25 bp, Probe Sequence
atggcagagaagataagaacttgga

SEQ ID NO: 108926 - DNA, 25 bp, Probe Sequence
gtagagtgatctgaattatctggca

SEQ ID NO: 108927 - DNA, 25 bp, Probe Sequence
ggtagagtgatctgaattatctggc

SEQ ID NO: 108928 - DNA, 25 bp, Probe Sequence
ctgatggcagagaagataagaactt

SEQ ID NO: 108929 - DNA, 25 bp, Probe Sequence
ccttacgctcgtagtacattatctt

SEQ ID NO: 108930 - DNA, 25 bp, Probe Sequence
tggcagagaagataagaacttggag

SEQ ID NO: 108931 - DNA, 25 bp, Probe Sequence
accttacgctcgtagtacattatct

SEQ ID NO: 108932 - DNA, 25 bp, Probe Sequence
caccttacgctcgtagtacattatc

SEQ ID NO: 108933 - DNA, 25 bp, Probe Sequence
ttcattcattattctagtcctgctt

SEQ ID NO: 108934 - DNA, 25 bp, Probe Sequence
attcattcattattctagtcctgct

SEQ ID NO: 108935 - DNA, 25 bp, Probe Sequence
tagagtgatctgaattatctggcac

SEQ ID NO: 108936 - DNA, 25 bp, Probe Sequence
gattcattcattattctagtcctgc

SEQ ID NO: 108937 - DNA, 25 bp, Probe Sequence
tagtcctgctttagtcctttgtaat

SEQ ID NO: 108938 - DNA, 25 bp, Probe Sequence
ttctcctttcctttctttccttcag

SEQ ID NO: 108939 - DNA, 25 bp, Probe Sequence
cttctcctttcctttctttccttca

SEQ ID NO: 108940 - DNA, 25 bp, Probe Sequence
ccctgtgtcaaagttgttaaatgtt

SEQ ID NO: 108941 - DNA, 25 bp, Probe Sequence
ccaccttacgctcgtagtacattat

SEQ ID NO: 108942 - DNA, 25 bp, Probe Sequence
gctttagtcctttgtaatttgtggt

SEQ ID NO: 108943 - DNA, 25 bp, Probe Sequence
tgctttagtcctttgtaatttgtgg

SEQ ID NO: 108944 - DNA, 25 bp, Probe Sequence
agtcctgctttagtcctttgtaatt

SEQ ID NO: 108945 - DNA, 25 bp, Probe Sequence
cttgaatttaggaccgagtatctgt

SEQ ID NO: 108946 - DNA, 25 bp, Probe Sequence
cctgctttagtcctttgtaatttgt

SEQ ID NO: 108947 - DNA, 25 bp, Probe Sequence
ttaagaagaggtggtgttcgaggtc

SEQ ID NO: 108948 - DNA, 25 bp, Probe Sequence
cttaagaagaggtggtgttcgaggt

SEQ ID NO: 108949 - DNA, 25 bp, Probe Sequence
aatgggcttaagaagaggtggtgtt

SEQ ID NO: 108950 - DNA, 25 bp, Probe Sequence
gcttaagaagaggtggtgttcgagg

SEQ ID NO: 108951 - DNA, 25 bp, Probe Sequence
ggcttaagaagaggtggtgttcgag

SEQ ID NO: 108952 - DNA, 25 bp, Probe Sequence
atgggcttaagaagaggtggtgttc

SEQ ID NO: 108953 - DNA, 25 bp, Probe Sequence
gaatgggcttaagaagaggtggtgt

SEQ ID NO: 108954 - DNA, 25 bp, Probe Sequence
ggtagaggtcggggtatgataggtc

SEQ ID NO: 108955 - DNA, 25 bp, Probe Sequence
gtggtagaggtcggggtatgatagg

SEQ ID NO: 108956 - DNA, 25 bp, Probe Sequence
ggtggtagaggtcggggtatgatag

SEQ ID NO: 108957 - DNA, 25 bp, Probe Sequence
gtagaggtcggggtatgataggtcg

SEQ ID NO: 108958 - DNA, 25 bp, Probe Sequence
ggttgaccaagatacagcatatact

SEQ ID NO: 108959 - DNA, 25 bp, Probe Sequence
cggttgaccaagatacagcatatac

SEQ ID NO: 108960 - DNA, 25 bp, Probe Sequence
cttgaccattgactatgacacagtt

SEQ ID NO: 108961 - DNA, 25 bp, Probe Sequence
acggttgaccaagatacagcatata

SEQ ID NO: 108962 - DNA, 25 bp, Probe Sequence
tgaccaagatacagcatatactgac

SEQ ID NO: 108963 - DNA, 25 bp, Probe Sequence
catatcacagttagatcaccatgct

SEQ ID NO: 108964 - DNA, 25 bp, Probe Sequence
tcatatcacagttagatcaccatgc

SEQ ID NO: 108965 - DNA, 25 bp, Probe Sequence
gaactgtcttgaccattgactatga

SEQ ID NO: 108966 - DNA, 25 bp, Probe Sequence
ctgaactgtcttgaccattgactat

SEQ ID NO: 108967 - DNA, 25 bp, Probe Sequence
gaccaagatacagcatatactgacc

SEQ ID NO: 108968 - DNA, 25 bp, Probe Sequence
ttgaccaagatacagcatatactga

SEQ ID NO: 108969 - DNA, 25 bp, Probe Sequence
gttgaccaagatacagcatatactg

SEQ ID NO: 108970 - DNA, 25 bp, Probe Sequence
tcttgaccattgactatgacacagt

SEQ ID NO: 108971 - DNA, 25 bp, Probe Sequence
aactgtcttgaccattgactatgac

SEQ ID NO: 108972 - DNA, 25 bp, Probe Sequence
tgaactgtcttgaccattgactatg

SEQ ID NO: 108973 - DNA, 25 bp, Probe Sequence
ccaagatacagcatatactgaccta

SEQ ID NO: 108974 - DNA, 25 bp, Probe Sequence
accaagatacagcatatactgacct

SEQ ID NO: 108975 - DNA, 25 bp, Probe Sequence
aatactgctcttgctgaactgtctt

SEQ ID NO: 108976 - DNA, 25 bp, Probe Sequence
tgccttattcatatcacagttagat

SEQ ID NO: 108977 - DNA, 25 bp, Probe Sequence
ttatgtctgtgagagagtgtgtgtg

SEQ ID NO: 108978 - DNA, 25 bp, Probe Sequence
gtcttgaccattgactatgacacag

SEQ ID NO: 108979 - DNA, 25 bp, Probe Sequence
tatgtctgtgagagagtgtgtgtgt

SEQ ID NO: 108980 - DNA, 25 bp, Probe Sequence
ttcatatcacagttagatcaccatg

SEQ ID NO: 108981 - DNA, 25 bp, Probe Sequence
atgccttattcatatcacagttaga

SEQ ID NO: 108982 - DNA, 25 bp, Probe Sequence
taatggaagaagatgacgatgctta

SEQ ID NO: 108983 - DNA, 25 bp, Probe Sequence
aagaagatgacgatgcttacaagaa

SEQ ID NO: 108984 - DNA, 25 bp, Probe Sequence
gctacttaatggaagaagatgacga

SEQ ID NO: 108985 - DNA, 25 bp, Probe Sequence
ataggatgattgttcgtgtaactga

SEQ ID NO: 108986 - DNA, 25 bp, Probe Sequence
ttaatggaagaagatgacgatgctt

SEQ ID NO: 108987 - DNA, 25 bp, Probe Sequence
taggatgattgttcgtgtaactgac

SEQ ID NO: 108988 - DNA, 25 bp, Probe Sequence
gaagaagatgacgatgcttacaaga

SEQ ID NO: 108989 - DNA, 25 bp, Probe Sequence
cttaatggaagaagatgacgatgct

SEQ ID NO: 108990 - DNA, 25 bp, Probe Sequence
ccaagtataggatgattgttcgtgt

SEQ ID NO: 108991 - DNA, 25 bp, Probe Sequence
aatggaagaagatgacgatgcttac

SEQ ID NO: 108992 - DNA, 25 bp, Probe Sequence
acttaatggaagaagatgacgatgc

SEQ ID NO: 108993 - DNA, 25 bp, Probe Sequence
tacttaatggaagaagatgacgatg

SEQ ID NO: 108994 - DNA, 25 bp, Probe Sequence
tataggatgattgttcgtgtaactg

SEQ ID NO: 108995 - DNA, 25 bp, Probe Sequence
gtataggatgattgttcgtgtaact

SEQ ID NO: 108996 - DNA, 25 bp, Probe Sequence
agtataggatgattgttcgtgtaac

SEQ ID NO: 108997 - DNA, 25 bp, Probe Sequence
cgctacttaatggaagaagatgacg

SEQ ID NO: 108998 - DNA, 25 bp, Probe Sequence
ttgttcgtgtaactgacagagatat

SEQ ID NO: 108999 - DNA, 25 bp, Probe Sequence
attgttcgtgtaactgacagagata

SEQ ID NO: 109000 - DNA, 25 bp, Probe Sequence
ggaagaagatgacgatgcttacaag

SEQ ID NO: 109001 - DNA, 25 bp, Probe Sequence
caagtataggatgattgttcgtgta

SEQ ID NO: 109002 - DNA, 25 bp, Probe Sequence
ctacttaatggaagaagatgacgat

SEQ ID NO: 109003 - DNA, 25 bp, Probe Sequence
gattgttcgtgtaactgacagagat

SEQ ID NO: 109004 - DNA, 25 bp, Probe Sequence
atgattgttcgtgtaactgacagag

SEQ ID NO: 109005 - DNA, 25 bp, Probe Sequence
gatgattgttcgtgtaactgacaga

SEQ ID NO: 109006 - DNA, 25 bp, Probe Sequence
aactcaggcaccaactattcaacat

SEQ ID NO: 109007 - DNA, 25 bp, Probe Sequence
aggcaccaactattcaacatctctg

SEQ ID NO: 109008 - DNA, 25 bp, Probe Sequence
caggcaccaactattcaacatctct

SEQ ID NO: 109009 - DNA, 25 bp, Probe Sequence
tcaggcaccaactattcaacatctc

SEQ ID NO: 109010 - DNA, 25 bp, Probe Sequence
ctcaggcaccaactattcaacatct

SEQ ID NO: 109011 - DNA, 25 bp, Probe Sequence
actcaggcaccaactattcaacatc

SEQ ID NO: 109012 - DNA, 25 bp, Probe Sequence
caactcaggcaccaactattcaaca

SEQ ID NO: 109013 - DNA, 25 bp, Probe Sequence
ggcaccaactattcaacatctctgg

SEQ ID NO: 109014 - DNA, 25 bp, Probe Sequence
gcaactcaggcaccaactattcaac

SEQ ID NO: 109015 - DNA, 25 bp, Probe Sequence
gcaccaactattcaacatctctggc

SEQ ID NO: 109016 - DNA, 25 bp, Probe Sequence
caccaactattcaacatctctggcc

SEQ ID NO: 109017 - DNA, 25 bp, Probe Sequence
actctgtatctagttaatctggtgg

SEQ ID NO: 109018 - DNA, 25 bp, Probe Sequence
caccaatagacactctgtatctagc

SEQ ID NO: 109019 - DNA, 25 bp, Probe Sequence
gcaccaatagacactctgtatctag

SEQ ID NO: 109020 - DNA, 25 bp, Probe Sequence
acactctgtatctagttaatctggt

SEQ ID NO: 109021 - DNA, 25 bp, Probe Sequence
tatgctaagtgaaagtgagaagtga

SEQ ID NO: 109022 - DNA, 25 bp, Probe Sequence
cactctgtatctagttaatctggtg

SEQ ID NO: 109023 - DNA, 25 bp, Probe Sequence
atgctaagtgaaagtgagaagtgac

SEQ ID NO: 109024 - DNA, 25 bp, Probe Sequence
atatgctaagtgaaagtgagaagtg

SEQ ID NO: 109025 - DNA, 25 bp, Probe Sequence
ctctgtatctagttaatctggtggg

SEQ ID NO: 109026 - DNA, 25 bp, Probe Sequence
aacactctgtatctagttaatctgg

SEQ ID NO: 109027 - DNA, 25 bp, Probe Sequence
aattggcactctgtatctagctcaa

SEQ ID NO: 109028 - DNA, 25 bp, Probe Sequence
ctaagtgaaagtgagaagtgacagc

SEQ ID NO: 109029 - DNA, 25 bp, Probe Sequence
gctaagtgaaagtgagaagtgacag

SEQ ID NO: 109030 - DNA, 25 bp, Probe Sequence
accaatagacactctgtatctagct

SEQ ID NO: 109031 - DNA, 25 bp, Probe Sequence
aatgcaccaatagacactctgtatc

SEQ ID NO: 109032 - DNA, 25 bp, Probe Sequence
gaatgcaccaatagacactctgtat

SEQ ID NO: 109033 - DNA, 25 bp, Probe Sequence
ttgtcaacactctgtatctagttaa

SEQ ID NO: 109034 - DNA, 25 bp, Probe Sequence
agacactctgtatctagctactctg

SEQ ID NO: 109035 - DNA, 25 bp, Probe Sequence
attggcactctgtatctagctcaag

SEQ ID NO: 109036 - DNA, 25 bp, Probe Sequence
atgcaccaatagacactctgtatct

SEQ ID NO: 109037 - DNA, 25 bp, Probe Sequence
tgtcaacactctgtatctagttaat

SEQ ID NO: 109038 - DNA, 25 bp, Probe Sequence
tgctaagtgaaagtgagaagtgaca

SEQ ID NO: 109039 - DNA, 25 bp, Probe Sequence
tgcaccaatagacactctgtatcta

SEQ ID NO: 109040 - DNA, 25 bp, Probe Sequence
tgaatgcaccaatagacactctgta

SEQ ID NO: 109041 - DNA, 25 bp, Probe Sequence
tatgactaagtaacatggcaacaca

SEQ ID NO: 109042 - DNA, 25 bp, Probe Sequence
gtatgactaagtaacatggcaacac

SEQ ID NO: 109043 - DNA, 25 bp, Probe Sequence
atgactaagtaacatggcaacacat

SEQ ID NO: 109044 - DNA, 25 bp, Probe Sequence
ttatgatctgcgttacctcaacatt

SEQ ID NO: 109045 - DNA, 25 bp, Probe Sequence
agtatgactaagtaacatggcaaca

SEQ ID NO: 109046 - DNA, 25 bp, Probe Sequence
gactaagtaacatggcaacacatct

SEQ ID NO: 109047 - DNA, 25 bp, Probe Sequence
actaagtaacatggcaacacatctg

SEQ ID NO: 109048 - DNA, 25 bp, Probe Sequence
tgactaagtaacatggcaacacatc

SEQ ID NO: 109049 - DNA, 25 bp, Probe Sequence
tatgatctgcgttacctcaacattg

SEQ ID NO: 109050 - DNA, 25 bp, Probe Sequence
tatggttcaagtagtagctgcctat

SEQ ID NO: 109051 - DNA, 25 bp, Probe Sequence
gctggctctctagtatgactaagta

SEQ ID NO: 109052 - DNA, 25 bp, Probe Sequence
taagtaacatggcaacacatctgtc

SEQ ID NO: 109053 - DNA, 25 bp, Probe Sequence
ctaagtaacatggcaacacatctgt

SEQ ID NO: 109054 - DNA, 25 bp, Probe Sequence
aaaggctaaatcaaccagaaacatc

SEQ ID NO: 109055 - DNA, 25 bp, Probe Sequence
gaaaggctaaatcaaccagaaacat

SEQ ID NO: 109056 - DNA, 25 bp, Probe Sequence
ggctctctagtatgactaagtaaca

SEQ ID NO: 109057 - DNA, 25 bp, Probe Sequence
tggctctctagtatgactaagtaac

SEQ ID NO: 109058 - DNA, 25 bp, Probe Sequence
gtatggttcaagtagtagctgccta

SEQ ID NO: 109059 - DNA, 25 bp, Probe Sequence
ttcaagtagtagctgcctatgagaa

SEQ ID NO: 109060 - DNA, 25 bp, Probe Sequence
ctggctctctagtatgactaagtaa

SEQ ID NO: 109061 - DNA, 25 bp, Probe Sequence
caccttcattattcaaacttggctg

SEQ ID NO: 109062 - DNA, 25 bp, Probe Sequence
caagtggcaagaggttaaagaagta

SEQ ID NO: 109063 - DNA, 25 bp, Probe Sequence
attggtgactggtacagagaatcag

SEQ ID NO: 109064 - DNA, 25 bp, Probe Sequence
gatctgcgttacctcaacattgttc

SEQ ID NO: 109065 - DNA, 25 bp, Probe Sequence
aaacagactaagaggaaacaaagcg

SEQ ID NO: 109066 - DNA, 25 bp, Probe Sequence
gactaagaggaaacaaagcgttctg

SEQ ID NO: 109067 - DNA, 25 bp, Probe Sequence
agactaagaggaaacaaagcgttct

SEQ ID NO: 109068 - DNA, 25 bp, Probe Sequence
cagactaagaggaaacaaagcgttc

SEQ ID NO: 109069 - DNA, 25 bp, Probe Sequence
aacagactaagaggaaacaaagcgt

SEQ ID NO: 109070 - DNA, 25 bp, Probe Sequence
acagactaagaggaaacaaagcgtt

SEQ ID NO: 109071 - DNA, 25 bp, Probe Sequence
aaaacagactaagaggaaacaaagc

SEQ ID NO: 109072 - DNA, 25 bp, Probe Sequence
agaaaacagactaagaggaaacaaa

SEQ ID NO: 109073 - DNA, 25 bp, Probe Sequence
aagaaaacagactaagaggaaacaa

SEQ ID NO: 109074 - DNA, 25 bp, Probe Sequence
aaagaaaacagactaagaggaaaca

SEQ ID NO: 109075 - DNA, 25 bp, Probe Sequence
gaaaacagactaagaggaaacaaag

SEQ ID NO: 109076 - DNA, 25 bp, Probe Sequence
acagagacagtacctgtaatgagaa

SEQ ID NO: 109077 - DNA, 25 bp, Probe Sequence
actaagaggaaacaaagcgttctgc

SEQ ID NO: 109078 - DNA, 25 bp, Probe Sequence
tgagaaacagtaaagaaaacagact

SEQ ID NO: 109079 - DNA, 25 bp, Probe Sequence
cacagagacagtacctgtaatgaga

SEQ ID NO: 109080 - DNA, 25 bp, Probe Sequence
acagtaaagaaaacagactaagagg

SEQ ID NO: 109081 - DNA, 25 bp, Probe Sequence
acacagagacagtacctgtaatgag

SEQ ID NO: 109082 - DNA, 25 bp, Probe Sequence
gacacagagacagtacctgtaatga

SEQ ID NO: 109083 - DNA, 25 bp, Probe Sequence
atgagaaacagtaaagaaaacagac

SEQ ID NO: 109084 - DNA, 25 bp, Probe Sequence
cagtaaagaaaacagactaagagga

SEQ ID NO: 109085 - DNA, 25 bp, Probe Sequence
ggacacagagacagtacctgtaatg

SEQ ID NO: 109086 - DNA, 25 bp, Probe Sequence
aatgagaaacagtaaagaaaacaga

SEQ ID NO: 109087 - DNA, 25 bp, Probe Sequence
agtaaagaaaacagactaagaggaa

SEQ ID NO: 109088 - DNA, 25 bp, Probe Sequence
taaagaaaacagactaagaggaaac

SEQ ID NO: 109089 - DNA, 25 bp, Probe Sequence
aattcggttatgtactattgtggct

SEQ ID NO: 109090 - DNA, 25 bp, Probe Sequence
attcggttatgtactattgtggctg

SEQ ID NO: 109091 - DNA, 25 bp, Probe Sequence
agttaattacactcatcaccactgt

SEQ ID NO: 109092 - DNA, 25 bp, Probe Sequence
aagttaattacactcatcaccactg

SEQ ID NO: 109093 - DNA, 25 bp, Probe Sequence
gttaattacactcatcaccactgtt

SEQ ID NO: 109094 - DNA, 25 bp, Probe Sequence
taggataattgtctagttcttgctt

SEQ ID NO: 109095 - DNA, 25 bp, Probe Sequence
atgtgtatgggtctgttattcttgc

SEQ ID NO: 109096 - DNA, 25 bp, Probe Sequence
ttcggttatgtactattgtggctgg

SEQ ID NO: 109097 - DNA, 25 bp, Probe Sequence
ttctgatgcttgtgtccatgtgtat

SEQ ID NO: 109098 - DNA, 25 bp, Probe Sequence
aaccaattatgagcaaattcacgaa

SEQ ID NO: 109099 - DNA, 25 bp, Probe Sequence
aaaccaattatgagcaaattcacga

SEQ ID NO: 109100 - DNA, 25 bp, Probe Sequence
gaaaccaattatgagcaaattcacg

SEQ ID NO: 109101 - DNA, 25 bp, Probe Sequence
gaattcggttatgtactattgtggc

SEQ ID NO: 109102 - DNA, 25 bp, Probe Sequence
agggataaggagactaattgccaag

SEQ ID NO: 109103 - DNA, 25 bp, Probe Sequence
catgtgtatgggtctgttattcttg

SEQ ID NO: 109104 - DNA, 25 bp, Probe Sequence
agtagttctgatgcttgtgtccatg

SEQ ID NO: 109105 - DNA, 25 bp, Probe Sequence
accaattatgagcaaattcacgaat

SEQ ID NO: 109106 - DNA, 25 bp, Probe Sequence
cagtagttctgatgcttgtgtccat

SEQ ID NO: 109107 - DNA, 25 bp, Probe Sequence
ctaggataattgtctagttcttgct

SEQ ID NO: 109108 - DNA, 25 bp, Probe Sequence
cagggataaggagactaattgccaa

SEQ ID NO: 109109 - DNA, 25 bp, Probe Sequence
ggataattgtctagttcttgctttg

SEQ ID NO: 109110 - DNA, 25 bp, Probe Sequence
aggataattgtctagttcttgcttt

SEQ ID NO: 109111 - DNA, 25 bp, Probe Sequence
ggttatgtactattgtggctggcaa

SEQ ID NO: 109112 - DNA, 25 bp, Probe Sequence
cacgataagcaaatctcacagtctg

SEQ ID NO: 109113 - DNA, 25 bp, Probe Sequence
tcaactgcttctaattcttcctcaa

SEQ ID NO: 109114 - DNA, 25 bp, Probe Sequence
ttcaactgcttctaattcttcctca

SEQ ID NO: 109115 - DNA, 25 bp, Probe Sequence
caccttcaactgcttctaattcttc

SEQ ID NO: 109116 - DNA, 25 bp, Probe Sequence
cttcaactgcttctaattcttcctc

SEQ ID NO: 109117 - DNA, 25 bp, Probe Sequence
tcaccttcaactgcttctaattctt

SEQ ID NO: 109118 - DNA, 25 bp, Probe Sequence
ttcaccttcaactgcttctaattct

SEQ ID NO: 109119 - DNA, 25 bp, Probe Sequence
caactgcttctaattcttcctcaat

SEQ ID NO: 109120 - DNA, 25 bp, Probe Sequence
ccttcaactgcttctaattcttcct

SEQ ID NO: 109121 - DNA, 25 bp, Probe Sequence
tataagacctctgtatctgccttgt

SEQ ID NO: 109122 - DNA, 25 bp, Probe Sequence
atataagacctctgtatctgccttg

SEQ ID NO: 109123 - DNA, 25 bp, Probe Sequence
catataagacctctgtatctgcctt

SEQ ID NO: 109124 - DNA, 25 bp, Probe Sequence
accttcaactgcttctaattcttcc

SEQ ID NO: 109125 - DNA, 25 bp, Probe Sequence
gttcaccttcaactgcttctaattc

SEQ ID NO: 109126 - DNA, 25 bp, Probe Sequence
tgttcaccttcaactgcttctaatt

SEQ ID NO: 109127 - DNA, 25 bp, Probe Sequence
ttgttcaccttcaactgcttctaat

SEQ ID NO: 109128 - DNA, 25 bp, Probe Sequence
ataagacctctgtatctgccttgtt

SEQ ID NO: 109129 - DNA, 25 bp, Probe Sequence
ctcaattccagtgtccaatgtcaat

SEQ ID NO: 109130 - DNA, 25 bp, Probe Sequence
tgcttctaattcttcctcaattcca

SEQ ID NO: 109131 - DNA, 25 bp, Probe Sequence
gcttctaattcttcctcaattccag

SEQ ID NO: 109132 - DNA, 25 bp, Probe Sequence
ctgcttctaattcttcctcaattcc

SEQ ID NO: 109133 - DNA, 25 bp, Probe Sequence
tctaattcttcctcaattccagtgt

SEQ ID NO: 109134 - DNA, 25 bp, Probe Sequence
taattcttcctcaattccagtgtcc

SEQ ID NO: 109135 - DNA, 25 bp, Probe Sequence
cttgttcaccttcaactgcttctaa

SEQ ID NO: 109136 - DNA, 25 bp, Probe Sequence
ctaattcttcctcaattccagtgtc

SEQ ID NO: 109137 - DNA, 25 bp, Probe Sequence
ggtcagttcggaaacttgaaataaa

SEQ ID NO: 109138 - DNA, 25 bp, Probe Sequence
taggtcagttcggaaacttgaaata

SEQ ID NO: 109139 - DNA, 25 bp, Probe Sequence
aggtcagttcggaaacttgaaataa

SEQ ID NO: 109140 - DNA, 25 bp, Probe Sequence
ctaggtcagttcggaaacttgaaat

SEQ ID NO: 109141 - DNA, 25 bp, Probe Sequence
agttcggaaacttgaaataaagagt

SEQ ID NO: 109142 - DNA, 25 bp, Probe Sequence
tcagttcggaaacttgaaataaaga

SEQ ID NO: 109143 - DNA, 25 bp, Probe Sequence
gtcagttcggaaacttgaaataaag

SEQ ID NO: 109144 - DNA, 25 bp, Probe Sequence
cagttcggaaacttgaaataaagag

SEQ ID NO: 109145 - DNA, 25 bp, Probe Sequence
gttcggaaacttgaaataaagagtt

SEQ ID NO: 109146 - DNA, 25 bp, Probe Sequence
gtactgtaagctccgtccatctctg

SEQ ID NO: 109147 - DNA, 25 bp, Probe Sequence
gctaggtcagttcggaaacttgaaa

SEQ ID NO: 109148 - DNA, 25 bp, Probe Sequence
ctgccttttgatgccgtactgtaag

SEQ ID NO: 109149 - DNA, 25 bp, Probe Sequence
cttttgatgccgtactgtaagctcc

SEQ ID NO: 109150 - DNA, 25 bp, Probe Sequence
ccttttgatgccgtactgtaagctc

SEQ ID NO: 109151 - DNA, 25 bp, Probe Sequence
cttgaaataaagagttttcctttgt

SEQ ID NO: 109152 - DNA, 25 bp, Probe Sequence
acttgaaataaagagttttcctttg

SEQ ID NO: 109153 - DNA, 25 bp, Probe Sequence
tctgccttttgatgccgtactgtaa

SEQ ID NO: 109154 - DNA, 25 bp, Probe Sequence
ggctaggtcagttcggaaacttgaa

SEQ ID NO: 109155 - DNA, 25 bp, Probe Sequence
ataaagagttttcctttgtaagttg

SEQ ID NO: 109156 - DNA, 25 bp, Probe Sequence
ttcggaaacttgaaataaagagttt

SEQ ID NO: 109157 - DNA, 25 bp, Probe Sequence
gtctgccttttgatgccgtactgta

SEQ ID NO: 109158 - DNA, 25 bp, Probe Sequence
aacttgaaataaagagttttccttt

SEQ ID NO: 109159 - DNA, 25 bp, Probe Sequence
aataaagagttttcctttgtaagtt

SEQ ID NO: 109160 - DNA, 25 bp, Probe Sequence
aaataaagagttttcctttgtaagt

SEQ ID NO: 109161 - DNA, 25 bp, Probe Sequence
gagtgtgtgcatgtaagtctgttgg

SEQ ID NO: 109162 - DNA, 25 bp, Probe Sequence
ggagtgtgtgcatgtaagtctgttg

SEQ ID NO: 109163 - DNA, 25 bp, Probe Sequence
cagagtgtgcttggagtcagagaac

SEQ ID NO: 109164 - DNA, 25 bp, Probe Sequence
gagtgtgcttggagtcagagaacaa

SEQ ID NO: 109165 - DNA, 25 bp, Probe Sequence
tggagtgtgtgcatgtaagtctgtt

SEQ ID NO: 109166 - DNA, 25 bp, Probe Sequence
gagactggagtgtgtgcatgtaagt

SEQ ID NO: 109167 - DNA, 25 bp, Probe Sequence
ctggagtgtgtgcatgtaagtctgt

SEQ ID NO: 109168 - DNA, 25 bp, Probe Sequence
actggagtgtgtgcatgtaagtctg

SEQ ID NO: 109169 - DNA, 25 bp, Probe Sequence
atgtaagtctgttgggtgcgagttc

SEQ ID NO: 109170 - DNA, 25 bp, Probe Sequence
agtgtgcttggagtcagagaacaag

SEQ ID NO: 109171 - DNA, 25 bp, Probe Sequence
gctggtcgtaaacagttttgtcact

SEQ ID NO: 109172 - DNA, 25 bp, Probe Sequence
gactggagtgtgtgcatgtaagtct

SEQ ID NO: 109173 - DNA, 25 bp, Probe Sequence
agactggagtgtgtgcatgtaagtc

SEQ ID NO: 109174 - DNA, 25 bp, Probe Sequence
ggctggtcgtaaacagttttgtcac

SEQ ID NO: 109175 - DNA, 25 bp, Probe Sequence
gtggctggtcgtaaacagttttgtc

SEQ ID NO: 109176 - DNA, 25 bp, Probe Sequence
ctggtcgtaaacagttttgtcactg

SEQ ID NO: 109177 - DNA, 25 bp, Probe Sequence
gtgtggctggtcgtaaacagttttg

SEQ ID NO: 109178 - DNA, 25 bp, Probe Sequence
tggctggtcgtaaacagttttgtca

SEQ ID NO: 109179 - DNA, 25 bp, Probe Sequence
atgaagatatctaggggcagagtgt

SEQ ID NO: 109180 - DNA, 25 bp, Probe Sequence
tggtcgtaaacagttttgtcactgg

SEQ ID NO: 109181 - DNA, 25 bp, Probe Sequence
tgaagatatctaggggcagagtgtg

SEQ ID NO: 109182 - DNA, 25 bp, Probe Sequence
gatatctaggggcagagtgtgcttg

SEQ ID NO: 109183 - DNA, 25 bp, Probe Sequence
ggtcgtaaacagttttgtcactggc

SEQ ID NO: 109184 - DNA, 25 bp, Probe Sequence
gtcgtaaacagttttgtcactggcc

SEQ ID NO: 109185 - DNA, 25 bp, Probe Sequence
gcaaatggaaatgactacaaacact

SEQ ID NO: 109186 - DNA, 25 bp, Probe Sequence
agcaaatggaaatgactacaaacac

SEQ ID NO: 109187 - DNA, 25 bp, Probe Sequence
cagcaaatggaaatgactacaaaca

SEQ ID NO: 109188 - DNA, 25 bp, Probe Sequence
aatggaaatgactacaaacactctc

SEQ ID NO: 109189 - DNA, 25 bp, Probe Sequence
caaatggaaatgactacaaacactc

SEQ ID NO: 109190 - DNA, 25 bp, Probe Sequence
aaatggaaatgactacaaacactct

SEQ ID NO: 109191 - DNA, 25 bp, Probe Sequence
gcagattgacatatttgaggataga

SEQ ID NO: 109192 - DNA, 25 bp, Probe Sequence
gcagcaaatggaaatgactacaaac

SEQ ID NO: 109193 - DNA, 25 bp, Probe Sequence
ggcagcaaatggaaatgactacaaa

SEQ ID NO: 109194 - DNA, 25 bp, Probe Sequence
atggaaatgactacaaacactctcc

SEQ ID NO: 109195 - DNA, 25 bp, Probe Sequence
taatgtaagggatgtggcagcaaat

SEQ ID NO: 109196 - DNA, 25 bp, Probe Sequence
tggaaatgactacaaacactctcct

SEQ ID NO: 109197 - DNA, 25 bp, Probe Sequence
tgcagattgacatatttgaggatag

SEQ ID NO: 109198 - DNA, 25 bp, Probe Sequence
atgtggcagcaaatggaaatgacta

SEQ ID NO: 109199 - DNA, 25 bp, Probe Sequence
tggcagcaaatggaaatgactacaa

SEQ ID NO: 109200 - DNA, 25 bp, Probe Sequence
cagattgacatatttgaggatagaa

SEQ ID NO: 109201 - DNA, 25 bp, Probe Sequence
gtggcagcaaatggaaatgactaca

SEQ ID NO: 109202 - DNA, 25 bp, Probe Sequence
aatgtaagggatgtggcagcaaatg

SEQ ID NO: 109203 - DNA, 25 bp, Probe Sequence
gatgtggcagcaaatggaaatgact

SEQ ID NO: 109204 - DNA, 25 bp, Probe Sequence
agattgacatatttgaggatagaat

SEQ ID NO: 109205 - DNA, 25 bp, Probe Sequence
taagggatgtggcagcaaatggaaa

SEQ ID NO: 109206 - DNA, 25 bp, Probe Sequence
gattgacatatttgaggatagaatc

SEQ ID NO: 109207 - DNA, 25 bp, Probe Sequence
cctgttctcactcatagatccataa

SEQ ID NO: 109208 - DNA, 25 bp, Probe Sequence
gcctgttctcactcatagatccata

SEQ ID NO: 109209 - DNA, 25 bp, Probe Sequence
catcattctcagcaaactatcacaa

SEQ ID NO: 109210 - DNA, 25 bp, Probe Sequence
atcattctcagcaaactatcacaag

SEQ ID NO: 109211 - DNA, 25 bp, Probe Sequence
attctcagcaaactatcacaaggac

SEQ ID NO: 109212 - DNA, 25 bp, Probe Sequence
cattctcagcaaactatcacaagga

SEQ ID NO: 109213 - DNA, 25 bp, Probe Sequence
tcattctcagcaaactatcacaagg

SEQ ID NO: 109214 - DNA, 25 bp, Probe Sequence
ccatcattctcagcaaactatcaca

SEQ ID NO: 109215 - DNA, 25 bp, Probe Sequence
accatcattctcagcaaactatcac

SEQ ID NO: 109216 - DNA, 25 bp, Probe Sequence
cagcaaactatcacaaggacagaaa

SEQ ID NO: 109217 - DNA, 25 bp, Probe Sequence
gttctcactcatagatccataaagc

SEQ ID NO: 109218 - DNA, 25 bp, Probe Sequence
tcagcaaactatcacaaggacagaa

SEQ ID NO: 109219 - DNA, 25 bp, Probe Sequence
ttctcagcaaactatcacaaggaca

SEQ ID NO: 109220 - DNA, 25 bp, Probe Sequence
cactcatagatccataaagctacca

SEQ ID NO: 109221 - DNA, 25 bp, Probe Sequence
actcatagatccataaagctaccag

SEQ ID NO: 109222 - DNA, 25 bp, Probe Sequence
tcactcatagatccataaagctacc

SEQ ID NO: 109223 - DNA, 25 bp, Probe Sequence
ctcagcaaactatcacaaggacaga

SEQ ID NO: 109224 - DNA, 25 bp, Probe Sequence
tctcagcaaactatcacaaggacag

SEQ ID NO: 109225 - DNA, 25 bp, Probe Sequence
ttctcactcatagatccataaagct

SEQ ID NO: 109226 - DNA, 25 bp, Probe Sequence
tgttctcactcatagatccataaag

SEQ ID NO: 109227 - DNA, 25 bp, Probe Sequence
ctgttctcactcatagatccataaa

SEQ ID NO: 109228 - DNA, 25 bp, Probe Sequence
ctcactcatagatccataaagctac

SEQ ID NO: 109229 - DNA, 25 bp, Probe Sequence
tctcactcatagatccataaagcta

SEQ ID NO: 109230 - DNA, 25 bp, Probe Sequence
cgcctgttctcactcatagatccat

SEQ ID NO: 109231 - DNA, 25 bp, Probe Sequence
cttatcactgtgcctttaacctact

SEQ ID NO: 109232 - DNA, 25 bp, Probe Sequence
ttatcactgtgcctttaacctactg

SEQ ID NO: 109233 - DNA, 25 bp, Probe Sequence
actgtgcctttaacctactgaaatg

SEQ ID NO: 109234 - DNA, 25 bp, Probe Sequence
ccttatcactgtgcctttaacctac

SEQ ID NO: 109235 - DNA, 25 bp, Probe Sequence
cactgtgcctttaacctactgaaat

SEQ ID NO: 109236 - DNA, 25 bp, Probe Sequence
tatgtcccttatcactgtgccttta

SEQ ID NO: 109237 - DNA, 25 bp, Probe Sequence
tatcactgtgcctttaacctactga

SEQ ID NO: 109238 - DNA, 25 bp, Probe Sequence
atgtcccttatcactgtgcctttaa

SEQ ID NO: 109239 - DNA, 25 bp, Probe Sequence
ttatgtcccttatcactgtgccttt

SEQ ID NO: 109240 - DNA, 25 bp, Probe Sequence
tttatgtcccttatcactgtgcctt

SEQ ID NO: 109241 - DNA, 25 bp, Probe Sequence
cccttatcactgtgcctttaaccta

SEQ ID NO: 109242 - DNA, 25 bp, Probe Sequence
ctgtgcctttaacctactgaaatgc

SEQ ID NO: 109243 - DNA, 25 bp, Probe Sequence
atcactgtgcctttaacctactgaa

SEQ ID NO: 109244 - DNA, 25 bp, Probe Sequence
tcactgtgcctttaacctactgaaa

SEQ ID NO: 109245 - DNA, 25 bp, Probe Sequence
aagtgcttacaggtacagctagtat

SEQ ID NO: 109246 - DNA, 25 bp, Probe Sequence
tgtcccttatcactgtgcctttaac

SEQ ID NO: 109247 - DNA, 25 bp, Probe Sequence
agtgcttacaggtacagctagtatg

SEQ ID NO: 109248 - DNA, 25 bp, Probe Sequence
gtgggtgagttatcgcagagttatg

SEQ ID NO: 109249 - DNA, 25 bp, Probe Sequence
tttatgtttgttggacagtgggtga

SEQ ID NO: 109250 - DNA, 25 bp, Probe Sequence
agtgggtgagttatcgcagagttat

SEQ ID NO: 109251 - DNA, 25 bp, Probe Sequence
caggccaacagatctcatataggag

SEQ ID NO: 109252 - DNA, 25 bp, Probe Sequence
tagccaggccaacagatctcatata

SEQ ID NO: 109253 - DNA, 25 bp, Probe Sequence
gtgcttacaggtacagctagtatgg

SEQ ID NO: 109254 - DNA, 25 bp, Probe Sequence
tcccttatcactgtgcctttaacct

SEQ ID NO: 109255 - DNA, 25 bp, Probe Sequence
gaggaattgatgaaccaaatgtgtc

SEQ ID NO: 109256 - DNA, 25 bp, Probe Sequence
tcacagatgacatattccaggatgg

SEQ ID NO: 109257 - DNA, 25 bp, Probe Sequence
ggaattgatgaaccaaatgtgtctg

SEQ ID NO: 109258 - DNA, 25 bp, Probe Sequence
aggaattgatgaaccaaatgtgtct

SEQ ID NO: 109259 - DNA, 25 bp, Probe Sequence
cagaacacagctcctagacaagtag

SEQ ID NO: 109260 - DNA, 25 bp, Probe Sequence
agaacacagctcctagacaagtaga

SEQ ID NO: 109261 - DNA, 25 bp, Probe Sequence
gaacacagctcctagacaagtagag

SEQ ID NO: 109262 - DNA, 25 bp, Probe Sequence
tcagaacacagctcctagacaagta

SEQ ID NO: 109263 - DNA, 25 bp, Probe Sequence
ggaggaattgatgaaccaaatgtgt

SEQ ID NO: 109264 - DNA, 25 bp, Probe Sequence
aacacagctcctagacaagtagagt

SEQ ID NO: 109265 - DNA, 25 bp, Probe Sequence
gggaggaattgatgaaccaaatgtg

SEQ ID NO: 109266 - DNA, 25 bp, Probe Sequence
gaattgatgaaccaaatgtgtctgg

SEQ ID NO: 109267 - DNA, 25 bp, Probe Sequence
acagctcctagacaagtagagtgag

SEQ ID NO: 109268 - DNA, 25 bp, Probe Sequence
gaggttaaaggagggaacacaactt

SEQ ID NO: 109269 - DNA, 25 bp, Probe Sequence
aactcagaacacagctcctagacaa

SEQ ID NO: 109270 - DNA, 25 bp, Probe Sequence
aattgatgaaccaaatgtgtctggg

SEQ ID NO: 109271 - DNA, 25 bp, Probe Sequence
cacagctcctagacaagtagagtga

SEQ ID NO: 109272 - DNA, 25 bp, Probe Sequence
ctgggaggaattgatgaaccaaatg

SEQ ID NO: 109273 - DNA, 25 bp, Probe Sequence
tttggtggctttaaatgtcacagat

SEQ ID NO: 109274 - DNA, 25 bp, Probe Sequence
ctcagaacacagctcctagacaagt

SEQ ID NO: 109275 - DNA, 25 bp, Probe Sequence
actcagaacacagctcctagacaag

SEQ ID NO: 109276 - DNA, 25 bp, Probe Sequence
gaactcagaacacagctcctagaca

SEQ ID NO: 109277 - DNA, 25 bp, Probe Sequence
acacagctcctagacaagtagagtg

SEQ ID NO: 109278 - DNA, 25 bp, Probe Sequence
cctatggcttcatcatcaaaatgta

SEQ ID NO: 109279 - DNA, 25 bp, Probe Sequence
tgaatgtattatcctgtgtgtgtct

SEQ ID NO: 109280 - DNA, 25 bp, Probe Sequence
tctgaatgtattatcctgtgtgtgt

SEQ ID NO: 109281 - DNA, 25 bp, Probe Sequence
ctgaatgtattatcctgtgtgtgtc

SEQ ID NO: 109282 - DNA, 25 bp, Probe Sequence
tgcctctgattctatgtaacttgtt

SEQ ID NO: 109283 - DNA, 25 bp, Probe Sequence
cctctgattctatgtaacttgttgc

SEQ ID NO: 109284 - DNA, 25 bp, Probe Sequence
gcctctgattctatgtaacttgttg

SEQ ID NO: 109285 - DNA, 25 bp, Probe Sequence
gtgcctctgattctatgtaacttgt

SEQ ID NO: 109286 - DNA, 25 bp, Probe Sequence
ttgaagtgcctctgattctatgtaa

SEQ ID NO: 109287 - DNA, 25 bp, Probe Sequence
tgaagtgcctctgattctatgtaac

SEQ ID NO: 109288 - DNA, 25 bp, Probe Sequence
catcacttacagaaccaattcactt

SEQ ID NO: 109289 - DNA, 25 bp, Probe Sequence
atctgaatgtattatcctgtgtgtg

SEQ ID NO: 109290 - DNA, 25 bp, Probe Sequence
agcacagacaattctaatggtaact

SEQ ID NO: 109291 - DNA, 25 bp, Probe Sequence
gcacagacaattctaatggtaactt

SEQ ID NO: 109292 - DNA, 25 bp, Probe Sequence
aagcacagacaattctaatggtaac

SEQ ID NO: 109293 - DNA, 25 bp, Probe Sequence
gaagtgcctctgattctatgtaact

SEQ ID NO: 109294 - DNA, 25 bp, Probe Sequence
agtgcctctgattctatgtaacttg

SEQ ID NO: 109295 - DNA, 25 bp, Probe Sequence
ccatcacttacagaaccaattcact

SEQ ID NO: 109296 - DNA, 25 bp, Probe Sequence
tgtgtgtctaggtagagatattgga

SEQ ID NO: 109297 - DNA, 25 bp, Probe Sequence
gtgtgtgtctaggtagagatattgg

SEQ ID NO: 109298 - DNA, 25 bp, Probe Sequence
gtgtctaggtagagatattggaagg

SEQ ID NO: 109299 - DNA, 25 bp, Probe Sequence
tctaggtagagatattggaaggctg

SEQ ID NO: 109300 - DNA, 25 bp, Probe Sequence
gtctaggtagagatattggaaggct

SEQ ID NO: 109301 - DNA, 25 bp, Probe Sequence
tgtgtgtgtctaggtagagatattg

SEQ ID NO: 109302 - DNA, 25 bp, Probe Sequence
gcagactggtgttaatgagtatatg

SEQ ID NO: 109303 - DNA, 25 bp, Probe Sequence
gtggaagtgttgagaagtatgagtt

SEQ ID NO: 109304 - DNA, 25 bp, Probe Sequence
attccactattatgcgtaatgctca

SEQ ID NO: 109305 - DNA, 25 bp, Probe Sequence
tgtctgccattctgaatatgcttat

SEQ ID NO: 109306 - DNA, 25 bp, Probe Sequence
ttccactattatgcgtaatgctcag

SEQ ID NO: 109307 - DNA, 25 bp, Probe Sequence
ttgtctgccattctgaatatgctta

SEQ ID NO: 109308 - DNA, 25 bp, Probe Sequence
gtctgccattctgaatatgcttatt

SEQ ID NO: 109309 - DNA, 25 bp, Probe Sequence
ttccttgtctgccattctgaatatg

SEQ ID NO: 109310 - DNA, 25 bp, Probe Sequence
gcaacacttgacttcatcttaatgt

SEQ ID NO: 109311 - DNA, 25 bp, Probe Sequence
aagacattccactattatgcgtaat

SEQ ID NO: 109312 - DNA, 25 bp, Probe Sequence
cttgtctgccattctgaatatgctt

SEQ ID NO: 109313 - DNA, 25 bp, Probe Sequence
ggtggaagtgttgagaagtatgagt

SEQ ID NO: 109314 - DNA, 25 bp, Probe Sequence
tctgccattctgaatatgcttatta

SEQ ID NO: 109315 - DNA, 25 bp, Probe Sequence
attccttgtctgccattctgaatat

SEQ ID NO: 109316 - DNA, 25 bp, Probe Sequence
tcttaatgcagccactataacttga

SEQ ID NO: 109317 - DNA, 25 bp, Probe Sequence
tggaagtgttgagaagtatgagttt

SEQ ID NO: 109318 - DNA, 25 bp, Probe Sequence
ctctgtttctcttctgctggattat

SEQ ID NO: 109319 - DNA, 25 bp, Probe Sequence
ttcttaatgcagccactataacttg

SEQ ID NO: 109320 - DNA, 25 bp, Probe Sequence
cattccttgtctgccattctgaata

SEQ ID NO: 109321 - DNA, 25 bp, Probe Sequence
cttaatgcagccactataacttgat

SEQ ID NO: 109322 - DNA, 25 bp, Probe Sequence
ttgcctacataatactgtgtgaata

SEQ ID NO: 109323 - DNA, 25 bp, Probe Sequence
tctgtttctcttctgctggattata

SEQ ID NO: 109324 - DNA, 25 bp, Probe Sequence
aaataattcccttctcccattcctt

SEQ ID NO: 109325 - DNA, 25 bp, Probe Sequence
ctgccattctgaatatgcttattaa

SEQ ID NO: 109326 - DNA, 25 bp, Probe Sequence
tgttcttaatgcagccactataact

SEQ ID NO: 109327 - DNA, 25 bp, Probe Sequence
tatatccctcccaaaaggaaacaag

SEQ ID NO: 109328 - DNA, 25 bp, Probe Sequence
atatatccctcccaaaaggaaacaa

SEQ ID NO: 109329 - DNA, 25 bp, Probe Sequence
agaaaatgaagctcaaaggtcaaaa

SEQ ID NO: 109330 - DNA, 25 bp, Probe Sequence
aagaaaatgaagctcaaaggtcaaa

SEQ ID NO: 109331 - DNA, 25 bp, Probe Sequence
gaagaaaatgaagctcaaaggtcaa

SEQ ID NO: 109332 - DNA, 25 bp, Probe Sequence
aagaagaaaatgaagctcaaaggtc

SEQ ID NO: 109333 - DNA, 25 bp, Probe Sequence
caagaagaaaatgaagctcaaaggt

SEQ ID NO: 109334 - DNA, 25 bp, Probe Sequence
acaagaagaaaatgaagctcaaagg

SEQ ID NO: 109335 - DNA, 25 bp, Probe Sequence
agaagaaaatgaagctcaaaggtca

SEQ ID NO: 109336 - DNA, 25 bp, Probe Sequence
atatccctcccaaaaggaaacaagg

SEQ ID NO: 109337 - DNA, 25 bp, Probe Sequence
gatatatccctcccaaaaggaaaca

SEQ ID NO: 109338 - DNA, 25 bp, Probe Sequence
aaaacggagtttggcctctcatctc

SEQ ID NO: 109339 - DNA, 25 bp, Probe Sequence
gatagtaggaaatcaggtctggaaa

SEQ ID NO: 109340 - DNA, 25 bp, Probe Sequence
tagtaggaaatcaggtctggaaatt

SEQ ID NO: 109341 - DNA, 25 bp, Probe Sequence
agatagtaggaaatcaggtctggaa

SEQ ID NO: 109342 - DNA, 25 bp, Probe Sequence
atagtaggaaatcaggtctggaaat

SEQ ID NO: 109343 - DNA, 25 bp, Probe Sequence
catgagactaaggctatctgcttcc

SEQ ID NO: 109344 - DNA, 25 bp, Probe Sequence
gggaactgtattgacacaaagattc

SEQ ID NO: 109345 - DNA, 25 bp, Probe Sequence
ggaactgtattgacacaaagattct

SEQ ID NO: 109346 - DNA, 25 bp, Probe Sequence
cgggaactgtattgacacaaagatt

SEQ ID NO: 109347 - DNA, 25 bp, Probe Sequence
gcatggtttctaataaaggattcaa

SEQ ID NO: 109348 - DNA, 25 bp, Probe Sequence
ctcatgcagatagtaggaaatcagg

SEQ ID NO: 109349 - DNA, 25 bp, Probe Sequence
catgcagatagtaggaaatcaggtc

SEQ ID NO: 109350 - DNA, 25 bp, Probe Sequence
aaaggcatgagactaaggctatctg

SEQ ID NO: 109351 - DNA, 25 bp, Probe Sequence
agtttgcatggtttctaataaagga

SEQ ID NO: 109352 - DNA, 25 bp, Probe Sequence
tcatgcagatagtaggaaatcaggt

SEQ ID NO: 109353 - DNA, 25 bp, Probe Sequence
atgcagatagtaggaaatcaggtct

SEQ ID NO: 109354 - DNA, 25 bp, Probe Sequence
tgcatggtttctaataaaggattca

SEQ ID NO: 109355 - DNA, 25 bp, Probe Sequence
tgacacaaagattcttattgcactt

SEQ ID NO: 109356 - DNA, 25 bp, Probe Sequence
ttgacacaaagattcttattgcact

SEQ ID NO: 109357 - DNA, 25 bp, Probe Sequence
gacacaaagattcttattgcacttg

SEQ ID NO: 109358 - DNA, 25 bp, Probe Sequence
gaactgtattgacacaaagattctt

SEQ ID NO: 109359 - DNA, 25 bp, Probe Sequence
agtaggaaatcaggtctggaaattt

SEQ ID NO: 109360 - DNA, 25 bp, Probe Sequence
aagtttgcatggtttctaataaagg

SEQ ID NO: 109361 - DNA, 25 bp, Probe Sequence
attgacacaaagattcttattgcac

SEQ ID NO: 109362 - DNA, 25 bp, Probe Sequence
gtttgcatggtttctaataaaggat

SEQ ID NO: 109363 - DNA, 25 bp, Probe Sequence
tgctgtatatgaatggtatgtatgc

SEQ ID NO: 109364 - DNA, 25 bp, Probe Sequence
gctgtatatgaatggtatgtatgct

SEQ ID NO: 109365 - DNA, 25 bp, Probe Sequence
attgtgctgtatatgaatggtatgt

SEQ ID NO: 109366 - DNA, 25 bp, Probe Sequence
ttgtgctgtatatgaatggtatgta

SEQ ID NO: 109367 - DNA, 25 bp, Probe Sequence
tgtgctgtatatgaatggtatgtat

SEQ ID NO: 109368 - DNA, 25 bp, Probe Sequence
gtgctgtatatgaatggtatgtatg

SEQ ID NO: 109369 - DNA, 25 bp, Probe Sequence
tattgtgctgtatatgaatggtatg

SEQ ID NO: 109370 - DNA, 25 bp, Probe Sequence
ctgtatatgaatggtatgtatgctt

SEQ ID NO: 109371 - DNA, 25 bp, Probe Sequence
ccaaaggtcagaaaatagtttaagg

SEQ ID NO: 109372 - DNA, 25 bp, Probe Sequence
tgtatatgaatggtatgtatgcttt

SEQ ID NO: 109373 - DNA, 25 bp, Probe Sequence
aggtcagaaaatagtttaaggatga

SEQ ID NO: 109374 - DNA, 25 bp, Probe Sequence
caaaggtcagaaaatagtttaagga

SEQ ID NO: 109375 - DNA, 25 bp, Probe Sequence
tccaaaggtcagaaaatagtttaag

SEQ ID NO: 109376 - DNA, 25 bp, Probe Sequence
aaggtcagaaaatagtttaaggatg

SEQ ID NO: 109377 - DNA, 25 bp, Probe Sequence
ggtcagaaaatagtttaaggatgaa

SEQ ID NO: 109378 - DNA, 25 bp, Probe Sequence
ttccaaaggtcagaaaatagtttaa

SEQ ID NO: 109379 - DNA, 25 bp, Probe Sequence
ttgcattgttttccaaaggtcagaa

SEQ ID NO: 109380 - DNA, 25 bp, Probe Sequence
aacttgcattgttttccaaaggtca

SEQ ID NO: 109381 - DNA, 25 bp, Probe Sequence
aaaggtcagaaaatagtttaaggat

SEQ ID NO: 109382 - DNA, 25 bp, Probe Sequence
cttgcattgttttccaaaggtcaga

SEQ ID NO: 109383 - DNA, 25 bp, Probe Sequence
acttgcattgttttccaaaggtcag

SEQ ID NO: 109384 - DNA, 25 bp, Probe Sequence
aaacttgcattgttttccaaaggtc

SEQ ID NO: 109385 - DNA, 25 bp, Probe Sequence
tgcattgttttccaaaggtcagaaa

SEQ ID NO: 109386 - DNA, 25 bp, Probe Sequence
tttccaaaggtcagaaaatagttta

SEQ ID NO: 109387 - DNA, 25 bp, Probe Sequence
tgctgtatatgaatggtatgtatgc

SEQ ID NO: 109388 - DNA, 25 bp, Probe Sequence
gctgtatatgaatggtatgtatgct

SEQ ID NO: 109389 - DNA, 25 bp, Probe Sequence
attgtgctgtatatgaatggtatgt

SEQ ID NO: 109390 - DNA, 25 bp, Probe Sequence
ttgtgctgtatatgaatggtatgta

SEQ ID NO: 109391 - DNA, 25 bp, Probe Sequence
tgtgctgtatatgaatggtatgtat

SEQ ID NO: 109392 - DNA, 25 bp, Probe Sequence
gtgctgtatatgaatggtatgtatg

SEQ ID NO: 109393 - DNA, 25 bp, Probe Sequence
tattgtgctgtatatgaatggtatg

SEQ ID NO: 109394 - DNA, 25 bp, Probe Sequence
ctgtatatgaatggtatgtatgctt

SEQ ID NO: 109395 - DNA, 25 bp, Probe Sequence
ccaaaggtcagaaaatagtttaagg

SEQ ID NO: 109396 - DNA, 25 bp, Probe Sequence
tgtatatgaatggtatgtatgcttt

SEQ ID NO: 109397 - DNA, 25 bp, Probe Sequence
aggtcagaaaatagtttaaggatga

SEQ ID NO: 109398 - DNA, 25 bp, Probe Sequence
caaaggtcagaaaatagtttaagga

SEQ ID NO: 109399 - DNA, 25 bp, Probe Sequence
tccaaaggtcagaaaatagtttaag

SEQ ID NO: 109400 - DNA, 25 bp, Probe Sequence
aaggtcagaaaatagtttaaggatg

SEQ ID NO: 109401 - DNA, 25 bp, Probe Sequence
ggtcagaaaatagtttaaggatgaa

SEQ ID NO: 109402 - DNA, 25 bp, Probe Sequence
ttccaaaggtcagaaaatagtttaa

SEQ ID NO: 109403 - DNA, 25 bp, Probe Sequence
ttgcattgttttccaaaggtcagaa

SEQ ID NO: 109404 - DNA, 25 bp, Probe Sequence
aacttgcattgttttccaaaggtca

SEQ ID NO: 109405 - DNA, 25 bp, Probe Sequence
aaaggtcagaaaatagtttaaggat

SEQ ID NO: 109406 - DNA, 25 bp, Probe Sequence
cttgcattgttttccaaaggtcaga

SEQ ID NO: 109407 - DNA, 25 bp, Probe Sequence
acttgcattgttttccaaaggtcag

SEQ ID NO: 109408 - DNA, 25 bp, Probe Sequence
aaacttgcattgttttccaaaggtc

SEQ ID NO: 109409 - DNA, 25 bp, Probe Sequence
tgcattgttttccaaaggtcagaaa

SEQ ID NO: 109410 - DNA, 25 bp, Probe Sequence
tttccaaaggtcagaaaatagttta

SEQ ID NO: 109411 - DNA, 25 bp, Probe Sequence
tgtattgtgctgtatatgaatgttc

SEQ ID NO: 109412 - DNA, 25 bp, Probe Sequence
gtattgtgctgtatatgaatgttct

SEQ ID NO: 109413 - DNA, 25 bp, Probe Sequence
atgtattgtgctgtatatgaatgtt

SEQ ID NO: 109414 - DNA, 25 bp, Probe Sequence
catgtattgtgctgtatatgaatgt

SEQ ID NO: 109415 - DNA, 25 bp, Probe Sequence
tattgtgctgtatatgaatgttctt

SEQ ID NO: 109416 - DNA, 25 bp, Probe Sequence
attgtgctgtatatgaatgttcttt

SEQ ID NO: 109417 - DNA, 25 bp, Probe Sequence
ttgtgctgtatatgaatgttcttta

SEQ ID NO: 109418 - DNA, 25 bp, Probe Sequence
tgtgctgtatatgaatgttctttaa

SEQ ID NO: 109419 - DNA, 25 bp, Probe Sequence
gtgctgtatatgaatgttctttaat

SEQ ID NO: 109420 - DNA, 25 bp, Probe Sequence
tgaatgttctttaattgagaagaca

SEQ ID NO: 109421 - DNA, 25 bp, Probe Sequence
ttttaggtattctgaaatgtgacag

SEQ ID NO: 109422 - DNA, 25 bp, Probe Sequence
tttaggtattctgaaatgtgacaga

SEQ ID NO: 109423 - DNA, 25 bp, Probe Sequence
tgctgtatatgaatgttctttaatt

SEQ ID NO: 109424 - DNA, 25 bp, Probe Sequence
gaatgttctttaattgagaagacaa

SEQ ID NO: 109425 - DNA, 25 bp, Probe Sequence
gctgtatatgaatgttctttaattg

SEQ ID NO: 109426 - DNA, 25 bp, Probe Sequence
atgaatgttctttaattgagaagac

SEQ ID NO: 109427 - DNA, 25 bp, Probe Sequence
aatgttctttaattgagaagacaat

SEQ ID NO: 109428 - DNA, 25 bp, Probe Sequence
tgttctttaattgagaagacaattt

SEQ ID NO: 109429 - DNA, 25 bp, Probe Sequence
atgttctttaattgagaagacaatt

SEQ ID NO: 109430 - DNA, 25 bp, Probe Sequence
gttctttaattgagaagacaatttc

SEQ ID NO: 109431 - DNA, 25 bp, Probe Sequence
tctttaattgagaagacaatttctt

SEQ ID NO: 109432 - DNA, 25 bp, Probe Sequence
ttctttaattgagaagacaatttct

SEQ ID NO: 109433 - DNA, 25 bp, Probe Sequence
atccattgcttataccttaaccagt

SEQ ID NO: 109434 - DNA, 25 bp, Probe Sequence
tccattgcttataccttaaccagta

SEQ ID NO: 109435 - DNA, 25 bp, Probe Sequence
aatccattgcttataccttaaccag

SEQ ID NO: 109436 - DNA, 25 bp, Probe Sequence
ccattgcttataccttaaccagtaa

SEQ ID NO: 109437 - DNA, 25 bp, Probe Sequence
acatgattcttctggatgacaactt

SEQ ID NO: 109438 - DNA, 25 bp, Probe Sequence
gacatgattcttctggatgacaact

SEQ ID NO: 109439 - DNA, 25 bp, Probe Sequence
ctgacatgattcttctggatgacaa

SEQ ID NO: 109440 - DNA, 25 bp, Probe Sequence
tgcttataccttaaccagtaacatt

SEQ ID NO: 109441 - DNA, 25 bp, Probe Sequence
ttgcttataccttaaccagtaacat

SEQ ID NO: 109442 - DNA, 25 bp, Probe Sequence
attgcttataccttaaccagtaaca

SEQ ID NO: 109443 - DNA, 25 bp, Probe Sequence
tgacatgattcttctggatgacaac

SEQ ID NO: 109444 - DNA, 25 bp, Probe Sequence
cattgcttataccttaaccagtaac

SEQ ID NO: 109445 - DNA, 25 bp, Probe Sequence
gcttataccttaaccagtaacattc

SEQ ID NO: 109446 - DNA, 25 bp, Probe Sequence
ttacttactttgtgattctggctga

SEQ ID NO: 109447 - DNA, 25 bp, Probe Sequence
tacttactttgtgattctggctgag

SEQ ID NO: 109448 - DNA, 25 bp, Probe Sequence
tttacttactttgtgattctggctg

SEQ ID NO: 109449 - DNA, 25 bp, Probe Sequence
ctttacttactttgtgattctggct

SEQ ID NO: 109450 - DNA, 25 bp, Probe Sequence
tctttacttactttgtgattctggc

SEQ ID NO: 109451 - DNA, 25 bp, Probe Sequence
ggaggcttctttacttactttgtga

SEQ ID NO: 109452 - DNA, 25 bp, Probe Sequence
tataccttaaccagtaacattcccg

SEQ ID NO: 109453 - DNA, 25 bp, Probe Sequence
atgattcttctggatgacaactttg

SEQ ID NO: 109454 - DNA, 25 bp, Probe Sequence
aattgtgactggagtagaggaaggt

SEQ ID NO: 109455 - DNA, 25 bp, Probe Sequence
gaggcttctttacttactttgtgat

SEQ ID NO: 109456 - DNA, 25 bp, Probe Sequence
tgataacttgaagaaatccattgct

SEQ ID NO: 109457 - DNA, 25 bp, Probe Sequence
attcttaaagttaccacatcccaca

SEQ ID NO: 109458 - DNA, 25 bp, Probe Sequence
tcttaaagttaccacatcccacaaa

SEQ ID NO: 109459 - DNA, 25 bp, Probe Sequence
ttcttaaagttaccacatcccacaa

SEQ ID NO: 109460 - DNA, 25 bp, Probe Sequence
tattcttaaagttaccacatcccac

SEQ ID NO: 109461 - DNA, 25 bp, Probe Sequence
tcatatttcatacatggcactttgg

SEQ ID NO: 109462 - DNA, 25 bp, Probe Sequence
atatttcatacatggcactttggca

SEQ ID NO: 109463 - DNA, 25 bp, Probe Sequence
catatttcatacatggcactttggc

SEQ ID NO: 109464 - DNA, 25 bp, Probe Sequence
gattacttgagcccaggaggattac

SEQ ID NO: 109465 - DNA, 25 bp, Probe Sequence
atttcatacatggcactttggcata

SEQ ID NO: 109466 - DNA, 25 bp, Probe Sequence
tatttcatacatggcactttggcat

SEQ ID NO: 109467 - DNA, 25 bp, Probe Sequence
acctctaacttactgataagatgtt

SEQ ID NO: 109468 - DNA, 25 bp, Probe Sequence
aacctctaacttactgataagatgt

SEQ ID NO: 109469 - DNA, 25 bp, Probe Sequence
atattcttaaagttaccacatccca

SEQ ID NO: 109470 - DNA, 25 bp, Probe Sequence
attacttgagcccaggaggattact

SEQ ID NO: 109471 - DNA, 25 bp, Probe Sequence
ttcatatttcatacatggcactttg

SEQ ID NO: 109472 - DNA, 25 bp, Probe Sequence
ttacttgagcccaggaggattactt

SEQ ID NO: 109473 - DNA, 25 bp, Probe Sequence
tttcatacatggcactttggcatac

SEQ ID NO: 109474 - DNA, 25 bp, Probe Sequence
tacttgagcccaggaggattacttc

SEQ ID NO: 109475 - DNA, 25 bp, Probe Sequence
tttcatatttcatacatggcacttt

SEQ ID NO: 109476 - DNA, 25 bp, Probe Sequence
gataagatgtttatgaagtatggca

SEQ ID NO: 109477 - DNA, 25 bp, Probe Sequence
tgataagatgtttatgaagtatggc

SEQ ID NO: 109478 - DNA, 25 bp, Probe Sequence
ggattacttgagcccaggaggatta

SEQ ID NO: 109479 - DNA, 25 bp, Probe Sequence
atttcatatttcatacatggcactt

SEQ ID NO: 109480 - DNA, 25 bp, Probe Sequence
aatttcatatttcatacatggcact

SEQ ID NO: 109481 - DNA, 25 bp, Probe Sequence
acactgcttagaatagatggaacaa

SEQ ID NO: 109482 - DNA, 25 bp, Probe Sequence
ttagaatagatggaacaagtgaggc

SEQ ID NO: 109483 - DNA, 25 bp, Probe Sequence
tacactgcttagaatagatggaaca

SEQ ID NO: 109484 - DNA, 25 bp, Probe Sequence
ggctctattacatctatccacttct

SEQ ID NO: 109485 - DNA, 25 bp, Probe Sequence
aggctctattacatctatccacttc

SEQ ID NO: 109486 - DNA, 25 bp, Probe Sequence
gctggttgaagagtgtaattgaatt

SEQ ID NO: 109487 - DNA, 25 bp, Probe Sequence
tgcttagaatagatggaacaagtga

SEQ ID NO: 109488 - DNA, 25 bp, Probe Sequence
ctgcttagaatagatggaacaagtg

SEQ ID NO: 109489 - DNA, 25 bp, Probe Sequence
cactgcttagaatagatggaacaag

SEQ ID NO: 109490 - DNA, 25 bp, Probe Sequence
aatagatggaacaagtgaggcaatt

SEQ ID NO: 109491 - DNA, 25 bp, Probe Sequence
gaatagatggaacaagtgaggcaat

SEQ ID NO: 109492 - DNA, 25 bp, Probe Sequence
gcttagaatagatggaacaagtgag

SEQ ID NO: 109493 - DNA, 25 bp, Probe Sequence
tagaatagatggaacaagtgaggca

SEQ ID NO: 109494 - DNA, 25 bp, Probe Sequence
aatggttcctattctgtgctattgc

SEQ ID NO: 109495 - DNA, 25 bp, Probe Sequence
actgcttagaatagatggaacaagt

SEQ ID NO: 109496 - DNA, 25 bp, Probe Sequence
cttagaatagatggaacaagtgagg

SEQ ID NO: 109497 - DNA, 25 bp, Probe Sequence
ctgtactgactgataaccttagcat

SEQ ID NO: 109498 - DNA, 25 bp, Probe Sequence
atgctgtactgactgataaccttag

SEQ ID NO: 109499 - DNA, 25 bp, Probe Sequence
gctctattacatctatccacttctg

SEQ ID NO: 109500 - DNA, 25 bp, Probe Sequence
gtatgctgtactgactgataacctt

SEQ ID NO: 109501 - DNA, 25 bp, Probe Sequence
tgtactgactgataaccttagcatt

SEQ ID NO: 109502 - DNA, 25 bp, Probe Sequence
ttgtatgctgtactgactgataacc

SEQ ID NO: 109503 - DNA, 25 bp, Probe Sequence
gagtgtaattgaattaagtgagcga

SEQ ID NO: 109504 - DNA, 25 bp, Probe Sequence
actaggctctattacatctatccac

SEQ ID NO: 109505 - DNA, 25 bp, Probe Sequence
cagattcctaattctatgacagtgt

SEQ ID NO: 109506 - DNA, 25 bp, Probe Sequence
acagattcctaattctatgacagtg

SEQ ID NO: 109507 - DNA, 25 bp, Probe Sequence
gatctagacatgccttaggtaactg

SEQ ID NO: 109508 - DNA, 25 bp, Probe Sequence
tgatctagacatgccttaggtaact

SEQ ID NO: 109509 - DNA, 25 bp, Probe Sequence
gtgatctagacatgccttaggtaac

SEQ ID NO: 109510 - DNA, 25 bp, Probe Sequence
tattcttatgtgtgctttaagggct

SEQ ID NO: 109511 - DNA, 25 bp, Probe Sequence
ttattcttatgtgtgctttaagggc

SEQ ID NO: 109512 - DNA, 25 bp, Probe Sequence
agattcctaattctatgacagtgta

SEQ ID NO: 109513 - DNA, 25 bp, Probe Sequence
tacagattcctaattctatgacagt

SEQ ID NO: 109514 - DNA, 25 bp, Probe Sequence
gattcctaattctatgacagtgtac

SEQ ID NO: 109515 - DNA, 25 bp, Probe Sequence
aaacacagaatttgattggatttgt

SEQ ID NO: 109516 - DNA, 25 bp, Probe Sequence
aattgtgtgatctagacatgcctta

SEQ ID NO: 109517 - DNA, 25 bp, Probe Sequence
taattgtgtgatctagacatgcctt

SEQ ID NO: 109518 - DNA, 25 bp, Probe Sequence
ttaattgtgtgatctagacatgcct

SEQ ID NO: 109519 - DNA, 25 bp, Probe Sequence
attgtgtgatctagacatgccttag

SEQ ID NO: 109520 - DNA, 25 bp, Probe Sequence
attcttatgtgtgctttaagggctg

SEQ ID NO: 109521 - DNA, 25 bp, Probe Sequence
tgtgatctagacatgccttaggtaa

SEQ ID NO: 109522 - DNA, 25 bp, Probe Sequence
atctagacatgccttaggtaactgc

SEQ ID NO: 109523 - DNA, 25 bp, Probe Sequence
ttgattggatttgttattcattggt

SEQ ID NO: 109524 - DNA, 25 bp, Probe Sequence
cctcagtgtatacctttaaacccat

SEQ ID NO: 109525 - DNA, 25 bp, Probe Sequence
gtgtgatctagacatgccttaggta

SEQ ID NO: 109526 - DNA, 25 bp, Probe Sequence
agtcatagtaaacatacagattcct

SEQ ID NO: 109527 - DNA, 25 bp, Probe Sequence
acacagaatttgattggatttgtta

SEQ ID NO: 109528 - DNA, 25 bp, Probe Sequence
tatgtgtgctttaagggctgtgttt

SEQ ID NO: 109529 - DNA, 25 bp, Probe Sequence
cagatgagctgaagcacattattgg

SEQ ID NO: 109530 - DNA, 25 bp, Probe Sequence
ccagatgagctgaagcacattattg

SEQ ID NO: 109531 - DNA, 25 bp, Probe Sequence
gccagatgagctgaagcacattatt

SEQ ID NO: 109532 - DNA, 25 bp, Probe Sequence
aattatgccagatgagctgaagcac

SEQ ID NO: 109533 - DNA, 25 bp, Probe Sequence
caattatgccagatgagctgaagca

SEQ ID NO: 109534 - DNA, 25 bp, Probe Sequence
tgcaattatgccagatgagctgaag

SEQ ID NO: 109535 - DNA, 25 bp, Probe Sequence
attacttgcaattatgccagatgag

SEQ ID NO: 109536 - DNA, 25 bp, Probe Sequence
aattacttgcaattatgccagatga

SEQ ID NO: 109537 - DNA, 25 bp, Probe Sequence
ttacttgcaattatgccagatgagc

SEQ ID NO: 109538 - DNA, 25 bp, Probe Sequence
tgccagatgagctgaagcacattat

SEQ ID NO: 109539 - DNA, 25 bp, Probe Sequence
atgccagatgagctgaagcacatta

SEQ ID NO: 109540 - DNA, 25 bp, Probe Sequence
tatgccagatgagctgaagcacatt

SEQ ID NO: 109541 - DNA, 25 bp, Probe Sequence
ttatgccagatgagctgaagcacat

SEQ ID NO: 109542 - DNA, 25 bp, Probe Sequence
attatgccagatgagctgaagcaca

SEQ ID NO: 109543 - DNA, 25 bp, Probe Sequence
tacttgcaattatgccagatgagct

SEQ ID NO: 109544 - DNA, 25 bp, Probe Sequence
gcaattatgccagatgagctgaagc

SEQ ID NO: 109545 - DNA, 25 bp, Probe Sequence
cgaaattacttgcaattatgccaga

SEQ ID NO: 109546 - DNA, 25 bp, Probe Sequence
aaattacttgcaattatgccagatg

SEQ ID NO: 109547 - DNA, 25 bp, Probe Sequence
gaaattacttgcaattatgccagat

SEQ ID NO: 109548 - DNA, 25 bp, Probe Sequence
ttgcaattatgccagatgagctgaa

SEQ ID NO: 109549 - DNA, 25 bp, Probe Sequence
cttgcaattatgccagatgagctga

SEQ ID NO: 109550 - DNA, 25 bp, Probe Sequence
acttgcaattatgccagatgagctg

SEQ ID NO: 109551 - DNA, 25 bp, Probe Sequence
ggagatagggtgtttaagcagtaat

SEQ ID NO: 109552 - DNA, 25 bp, Probe Sequence
atagttgggagatagggtgtttaag

SEQ ID NO: 109553 - DNA, 25 bp, Probe Sequence
aatatagttgggagatagggtgttt

SEQ ID NO: 109554 - DNA, 25 bp, Probe Sequence
aaatatagttgggagatagggtgtt

SEQ ID NO: 109555 - DNA, 25 bp, Probe Sequence
gagatagggtgtttaagcagtaatt

SEQ ID NO: 109556 - DNA, 25 bp, Probe Sequence
tatagttgggagatagggtgtttaa

SEQ ID NO: 109557 - DNA, 25 bp, Probe Sequence
cagtatgtcatatggatggtaggtg

SEQ ID NO: 109558 - DNA, 25 bp, Probe Sequence
tcagtatgtcatatggatggtaggt

SEQ ID NO: 109559 - DNA, 25 bp, Probe Sequence
gggagatagggtgtttaagcagtaa

SEQ ID NO: 109560 - DNA, 25 bp, Probe Sequence
tagttgggagatagggtgtttaagc

SEQ ID NO: 109561 - DNA, 25 bp, Probe Sequence
atatagttgggagatagggtgttta

SEQ ID NO: 109562 - DNA, 25 bp, Probe Sequence
atcagtatgtcatatggatggtagg

SEQ ID NO: 109563 - DNA, 25 bp, Probe Sequence
agatagggtgtttaagcagtaattt

SEQ ID NO: 109564 - DNA, 25 bp, Probe Sequence
agtatgtcatatggatggtaggtgc

SEQ ID NO: 109565 - DNA, 25 bp, Probe Sequence
tgggagatagggtgtttaagcagta

SEQ ID NO: 109566 - DNA, 25 bp, Probe Sequence
aatcagtatgtcatatggatggtag

SEQ ID NO: 109567 - DNA, 25 bp, Probe Sequence
gtatgtcatatggatggtaggtgcc

SEQ ID NO: 109568 - DNA, 25 bp, Probe Sequence
gttgggagatagggtgtttaagcag

SEQ ID NO: 109569 - DNA, 25 bp, Probe Sequence
tatgtcatatggatggtaggtgcct

SEQ ID NO: 109570 - DNA, 25 bp, Probe Sequence
ttaatcagtatgtcatatggatggt

SEQ ID NO: 109571 - DNA, 25 bp, Probe Sequence
gatagggtgtttaagcagtaattta

SEQ ID NO: 109572 - DNA, 25 bp, Probe Sequence
ttgggagatagggtgtttaagcagt

SEQ ID NO: 109573 - DNA, 25 bp, Probe Sequence
agttgggagatagggtgtttaagca

SEQ ID NO: 109574 - DNA, 25 bp, Probe Sequence
aaaatatagttgggagatagggtgt

SEQ ID NO: 109575 - DNA, 25 bp, Probe Sequence
ggtaaggtcacagatcaacaggatc

SEQ ID NO: 109576 - DNA, 25 bp, Probe Sequence
ctttcccgcctttctattccacaaa

SEQ ID NO: 109577 - DNA, 25 bp, Probe Sequence
tttctattccacaaagctgccattg

SEQ ID NO: 109578 - DNA, 25 bp, Probe Sequence
gggtaaggtcacagatcaacaggat

SEQ ID NO: 109579 - DNA, 25 bp, Probe Sequence
gcagaacaaaatgaaaagtctccca

SEQ ID NO: 109580 - DNA, 25 bp, Probe Sequence
ctttctattccacaaagctgccatt

SEQ ID NO: 109581 - DNA, 25 bp, Probe Sequence
agtgcagaacaaaatgaaaagtctc

SEQ ID NO: 109582 - DNA, 25 bp, Probe Sequence
tagtgcagaacaaaatgaaaagtct

SEQ ID NO: 109583 - DNA, 25 bp, Probe Sequence
ttagtgcagaacaaaatgaaaagtc

SEQ ID NO: 109584 - DNA, 25 bp, Probe Sequence
tttcccgcctttctattccacaaag

SEQ ID NO: 109585 - DNA, 25 bp, Probe Sequence
cttagtgcagaacaaaatgaaaagt

SEQ ID NO: 109586 - DNA, 25 bp, Probe Sequence
gtgcagaacaaaatgaaaagtctcc

SEQ ID NO: 109587 - DNA, 25 bp, Probe Sequence
tcttagtgcagaacaaaatgaaaag

SEQ ID NO: 109588 - DNA, 25 bp, Probe Sequence
cctttcccgcctttctattccacaa

SEQ ID NO: 109589 - DNA, 25 bp, Probe Sequence
tgcagaacaaaatgaaaagtctccc

SEQ ID NO: 109590 - DNA, 25 bp, Probe Sequence
cctttctattccacaaagctgccat

SEQ ID NO: 109591 - DNA, 25 bp, Probe Sequence
ttctattccacaaagctgccattgt

SEQ ID NO: 109592 - DNA, 25 bp, Probe Sequence
tattccacaaagctgccattgtcat

SEQ ID NO: 109593 - DNA, 25 bp, Probe Sequence
ttcttagtgcagaacaaaatgaaaa

SEQ ID NO: 109594 - DNA, 25 bp, Probe Sequence
tttcttagtgcagaacaaaatgaaa

SEQ ID NO: 109595 - DNA, 25 bp, Probe Sequence
ttttcttagtgcagaacaaaatgaa

SEQ ID NO: 109596 - DNA, 25 bp, Probe Sequence
tctattccacaaagctgccattgtc

SEQ ID NO: 109597 - DNA, 25 bp, Probe Sequence
gtaaggtcacagatcaacaggatcc

SEQ ID NO: 109598 - DNA, 25 bp, Probe Sequence
ctattccacaaagctgccattgtca

SEQ ID NO: 109599 - DNA, 25 bp, Probe Sequence
acttactatgaccttgaattcctgg

SEQ ID NO: 109600 - DNA, 25 bp, Probe Sequence
aacttactatgaccttgaattcctg

SEQ ID NO: 109601 - DNA, 25 bp, Probe Sequence
aaagcattgggattagaggtgtgag

SEQ ID NO: 109602 - DNA, 25 bp, Probe Sequence
ttagcctcacaaagcattgggatta

SEQ ID NO: 109603 - DNA, 25 bp, Probe Sequence
cactatcttagctcactgcaacctc

SEQ ID NO: 109604 - DNA, 25 bp, Probe Sequence
tagcctcacaaagcattgggattag

SEQ ID NO: 109605 - DNA, 25 bp, Probe Sequence
ctcacaaagcattgggattagaggt

SEQ ID NO: 109606 - DNA, 25 bp, Probe Sequence
caaagcattgggattagaggtgtga

SEQ ID NO: 109607 - DNA, 25 bp, Probe Sequence
cttactatgaccttgaattcctggg

SEQ ID NO: 109608 - DNA, 25 bp, Probe Sequence
taacttactatgaccttgaattcct

SEQ ID NO: 109609 - DNA, 25 bp, Probe Sequence
caccactacacctagctactttatt

SEQ ID NO: 109610 - DNA, 25 bp, Probe Sequence
ccttctgaatagctggaacaacagg

SEQ ID NO: 109611 - DNA, 25 bp, Probe Sequence
acaccactacacctagctactttat

SEQ ID NO: 109612 - DNA, 25 bp, Probe Sequence
acaaagcattgggattagaggtgtg

SEQ ID NO: 109613 - DNA, 25 bp, Probe Sequence
accactacacctagctactttattt

SEQ ID NO: 109614 - DNA, 25 bp, Probe Sequence
tcacaaagcattgggattagaggtg

SEQ ID NO: 109615 - DNA, 25 bp, Probe Sequence
cttagcctcacaaagcattgggatt

SEQ ID NO: 109616 - DNA, 25 bp, Probe Sequence
ctatcttagctcactgcaacctcca

SEQ ID NO: 109617 - DNA, 25 bp, Probe Sequence
actatcttagctcactgcaacctcc

SEQ ID NO: 109618 - DNA, 25 bp, Probe Sequence
cacaccactacacctagctacttta

SEQ ID NO: 109619 - DNA, 25 bp, Probe Sequence
cacaaagcattgggattagaggtgt

SEQ ID NO: 109620 - DNA, 25 bp, Probe Sequence
tatcttagctcactgcaacctccac

SEQ ID NO: 109621 - DNA, 25 bp, Probe Sequence
cttctgaatagctggaacaacaggc

SEQ ID NO: 109622 - DNA, 25 bp, Probe Sequence
gccttctgaatagctggaacaacag

SEQ ID NO: 109623 - DNA, 25 bp, Probe Sequence
acctgtaatcccagctactcgagag

SEQ ID NO: 109624 - DNA, 25 bp, Probe Sequence
ctctacaagcaattaggtgattcaa

SEQ ID NO: 109625 - DNA, 25 bp, Probe Sequence
tcctctacaagcaattaggtgattc

SEQ ID NO: 109626 - DNA, 25 bp, Probe Sequence
ctcctctacaagcaattaggtgatt

SEQ ID NO: 109627 - DNA, 25 bp, Probe Sequence
cctctacaagcaattaggtgattca

SEQ ID NO: 109628 - DNA, 25 bp, Probe Sequence
ttctggaatgttctctgtgcttacc

SEQ ID NO: 109629 - DNA, 25 bp, Probe Sequence
tttctggaatgttctctgtgcttac

SEQ ID NO: 109630 - DNA, 25 bp, Probe Sequence
tctacaagcaattaggtgattcaaa

SEQ ID NO: 109631 - DNA, 25 bp, Probe Sequence
gctcctctacaagcaattaggtgat

SEQ ID NO: 109632 - DNA, 25 bp, Probe Sequence
gacacaggagaattgcttgaaccag

SEQ ID NO: 109633 - DNA, 25 bp, Probe Sequence
aattaaccagacattgtggcatgtg

SEQ ID NO: 109634 - DNA, 25 bp, Probe Sequence
ttttctggaatgttctctgtgctta

SEQ ID NO: 109635 - DNA, 25 bp, Probe Sequence
gatcgtcctcattcagactctagct

SEQ ID NO: 109636 - DNA, 25 bp, Probe Sequence
aagcaattaggtgattcaaaagagc

SEQ ID NO: 109637 - DNA, 25 bp, Probe Sequence
gcaattaggtgattcaaaagagcaa

SEQ ID NO: 109638 - DNA, 25 bp, Probe Sequence
acaagcaattaggtgattcaaaaga

SEQ ID NO: 109639 - DNA, 25 bp, Probe Sequence
caattaggtgattcaaaagagcaac

SEQ ID NO: 109640 - DNA, 25 bp, Probe Sequence
attttctggaatgttctctgtgctt

SEQ ID NO: 109641 - DNA, 25 bp, Probe Sequence
ctgacacaggagaattgcttgaacc

SEQ ID NO: 109642 - DNA, 25 bp, Probe Sequence
aattaggtgattcaaaagagcaact

SEQ ID NO: 109643 - DNA, 25 bp, Probe Sequence
caagcaattaggtgattcaaaagag

SEQ ID NO: 109644 - DNA, 25 bp, Probe Sequence
attaggtgattcaaaagagcaactt

SEQ ID NO: 109645 - DNA, 25 bp, Probe Sequence
tgttacatagctgtgcctcagagaa

SEQ ID NO: 109646 - DNA, 25 bp, Probe Sequence
atcgtcctcattcagactctagctg

SEQ ID NO: 109647 - DNA, 25 bp, Probe Sequence
taggtgattcaaaagagcaacttag

SEQ ID NO: 109648 - DNA, 25 bp, Probe Sequence
ttctgaccatatccttcttaacacc

SEQ ID NO: 109649 - DNA, 25 bp, Probe Sequence
gctcttctgaccatatccttcttaa

SEQ ID NO: 109650 - DNA, 25 bp, Probe Sequence
cttctgaccatatccttcttaacac

SEQ ID NO: 109651 - DNA, 25 bp, Probe Sequence
tcttctgaccatatccttcttaaca

SEQ ID NO: 109652 - DNA, 25 bp, Probe Sequence
ctcttctgaccatatccttcttaac

SEQ ID NO: 109653 - DNA, 25 bp, Probe Sequence
gcgtcttcttaatccaattctaatt

SEQ ID NO: 109654 - DNA, 25 bp, Probe Sequence
agctcttctgaccatatccttctta

SEQ ID NO: 109655 - DNA, 25 bp, Probe Sequence
tatagcctcgatgatgagagagtta

SEQ ID NO: 109656 - DNA, 25 bp, Probe Sequence
tatatagcctcgatgatgagagagt

SEQ ID NO: 109657 - DNA, 25 bp, Probe Sequence
atatagcctcgatgatgagagagtt

SEQ ID NO: 109658 - DNA, 25 bp, Probe Sequence
cgatgatgagagagttacaaagaac

SEQ ID NO: 109659 - DNA, 25 bp, Probe Sequence
ttctaattctgaatgtttcgtgtgg

SEQ ID NO: 109660 - DNA, 25 bp, Probe Sequence
atagcctcgatgatgagagagttac

SEQ ID NO: 109661 - DNA, 25 bp, Probe Sequence
atatatagcctcgatgatgagagag

SEQ ID NO: 109662 - DNA, 25 bp, Probe Sequence
tctgaccatatccttcttaacaccc

SEQ ID NO: 109663 - DNA, 25 bp, Probe Sequence
ctctatgaacaacctcgtttccaaa

SEQ ID NO: 109664 - DNA, 25 bp, Probe Sequence
gatgatgagagagttacaaagaaca

SEQ ID NO: 109665 - DNA, 25 bp, Probe Sequence
aatatatagcctcgatgatgagaga

SEQ ID NO: 109666 - DNA, 25 bp, Probe Sequence
ctgaatgtttcgtgtgggcttaata

SEQ ID NO: 109667 - DNA, 25 bp, Probe Sequence
tgatgagagagttacaaagaacaaa

SEQ ID NO: 109668 - DNA, 25 bp, Probe Sequence
tctaattctgaatgtttcgtgtggg

SEQ ID NO: 109669 - DNA, 25 bp, Probe Sequence
gagatttggtgatggagatgtcaag

SEQ ID NO: 109670 - DNA, 25 bp, Probe Sequence
tgaatgtttcgtgtgggcttaatac

SEQ ID NO: 109671 - DNA, 25 bp, Probe Sequence
atgatgagagagttacaaagaacaa

SEQ ID NO: 109672 - DNA, 25 bp, Probe Sequence
aatcagtaggtgaactcagccatta

SEQ ID NO: 109673 - DNA, 25 bp, Probe Sequence
atcagtaggtgaactcagccattag

SEQ ID NO: 109674 - DNA, 25 bp, Probe Sequence
gaactcagccattagaggaagaact

SEQ ID NO: 109675 - DNA, 25 bp, Probe Sequence
tgaactcagccattagaggaagaac

SEQ ID NO: 109676 - DNA, 25 bp, Probe Sequence
gtgaactcagccattagaggaagaa

SEQ ID NO: 109677 - DNA, 25 bp, Probe Sequence
cagtaggtgaactcagccattagag

SEQ ID NO: 109678 - DNA, 25 bp, Probe Sequence
aactcagccattagaggaagaactg

SEQ ID NO: 109679 - DNA, 25 bp, Probe Sequence
aaagcaaaggagaaatcagtaggtg

SEQ ID NO: 109680 - DNA, 25 bp, Probe Sequence
tcagtaggtgaactcagccattaga

SEQ ID NO: 109681 - DNA, 25 bp, Probe Sequence
taggtgaactcagccattagaggaa

SEQ ID NO: 109682 - DNA, 25 bp, Probe Sequence
caaaggagaaatcagtaggtgaact

SEQ ID NO: 109683 - DNA, 25 bp, Probe Sequence
aaaggagaaatcagtaggtgaactc

SEQ ID NO: 109684 - DNA, 25 bp, Probe Sequence
aaggagaaatcagtaggtgaactca

SEQ ID NO: 109685 - DNA, 25 bp, Probe Sequence
aggagaaatcagtaggtgaactcag

SEQ ID NO: 109686 - DNA, 25 bp, Probe Sequence
gcaaaggagaaatcagtaggtgaac

SEQ ID NO: 109687 - DNA, 25 bp, Probe Sequence
gtaggtgaactcagccattagagga

SEQ ID NO: 109688 - DNA, 25 bp, Probe Sequence
agtaggtgaactcagccattagagg

SEQ ID NO: 109689 - DNA, 25 bp, Probe Sequence
agcaaaggagaaatcagtaggtgaa

SEQ ID NO: 109690 - DNA, 25 bp, Probe Sequence
aagcaaaggagaaatcagtaggtga

SEQ ID NO: 109691 - DNA, 25 bp, Probe Sequence
aaatcagtaggtgaactcagccatt

SEQ ID NO: 109692 - DNA, 25 bp, Probe Sequence
caggaatgtaaggacatgctgaatt

SEQ ID NO: 109693 - DNA, 25 bp, Probe Sequence
cattagaggaagaactggcacgtag

SEQ ID NO: 109694 - DNA, 25 bp, Probe Sequence
gaaatcagtaggtgaactcagccat

SEQ ID NO: 109695 - DNA, 25 bp, Probe Sequence
ggtgaactcagccattagaggaaga

SEQ ID NO: 109696 - DNA, 25 bp, Probe Sequence
tactgtgagtggtctgttattaagc

SEQ ID NO: 109697 - DNA, 25 bp, Probe Sequence
aatctattactgtgagtggtctgtt

SEQ ID NO: 109698 - DNA, 25 bp, Probe Sequence
tctattactgtgagtggtctgttat

SEQ ID NO: 109699 - DNA, 25 bp, Probe Sequence
atctattactgtgagtggtctgtta

SEQ ID NO: 109700 - DNA, 25 bp, Probe Sequence
ttactgtgagtggtctgttattaag

SEQ ID NO: 109701 - DNA, 25 bp, Probe Sequence
ctattactgtgagtggtctgttatt

SEQ ID NO: 109702 - DNA, 25 bp, Probe Sequence
attactgtgagtggtctgttattaa

SEQ ID NO: 109703 - DNA, 25 bp, Probe Sequence
actgtgagtggtctgttattaagcc

SEQ ID NO: 109704 - DNA, 25 bp, Probe Sequence
tattaagcccaatgagacatctagg

SEQ ID NO: 109705 - DNA, 25 bp, Probe Sequence
aaatctattactgtgagtggtctgt

SEQ ID NO: 109706 - DNA, 25 bp, Probe Sequence
tggaagaagaggaggatgatgactg

SEQ ID NO: 109707 - DNA, 25 bp, Probe Sequence
tgttattaagcccaatgagacatct

SEQ ID NO: 109708 - DNA, 25 bp, Probe Sequence
tctgttattaagcccaatgagacat

SEQ ID NO: 109709 - DNA, 25 bp, Probe Sequence
tattactgtgagtggtctgttatta

SEQ ID NO: 109710 - DNA, 25 bp, Probe Sequence
ctgttattaagcccaatgagacatc

SEQ ID NO: 109711 - DNA, 25 bp, Probe Sequence
gttattaagcccaatgagacatcta

SEQ ID NO: 109712 - DNA, 25 bp, Probe Sequence
catctagggagtccatacacatcag

SEQ ID NO: 109713 - DNA, 25 bp, Probe Sequence
ttattaagcccaatgagacatctag

SEQ ID NO: 109714 - DNA, 25 bp, Probe Sequence
atctagggagtccatacacatcagt

SEQ ID NO: 109715 - DNA, 25 bp, Probe Sequence
aatgagacatctagggagtccatac

SEQ ID NO: 109716 - DNA, 25 bp, Probe Sequence
caatgagacatctagggagtccata

SEQ ID NO: 109717 - DNA, 25 bp, Probe Sequence
acatctagggagtccatacacatca

SEQ ID NO: 109718 - DNA, 25 bp, Probe Sequence
ggaagaagaggaggatgatgactgg

SEQ ID NO: 109719 - DNA, 25 bp, Probe Sequence
gacatctagggagtccatacacatc

SEQ ID NO: 109720 - DNA, 25 bp, Probe Sequence
ttatttactgctacatctgccatca

SEQ ID NO: 109721 - DNA, 25 bp, Probe Sequence
tatttactgctacatctgccatcac

SEQ ID NO: 109722 - DNA, 25 bp, Probe Sequence
tttatttactgctacatctgccatc

SEQ ID NO: 109723 - DNA, 25 bp, Probe Sequence
ttctgtttaatttggtgattgggag

SEQ ID NO: 109724 - DNA, 25 bp, Probe Sequence
gagaacagtatgtgtagcaggctta

SEQ ID NO: 109725 - DNA, 25 bp, Probe Sequence
attctgtttaatttggtgattggga

SEQ ID NO: 109726 - DNA, 25 bp, Probe Sequence
cttaccataatggatgctctgtgaa

SEQ ID NO: 109727 - DNA, 25 bp, Probe Sequence
tctgtttaatttggtgattgggagg

SEQ ID NO: 109728 - DNA, 25 bp, Probe Sequence
agaacagtatgtgtagcaggcttac

SEQ ID NO: 109729 - DNA, 25 bp, Probe Sequence
agtatgtgtagcaggcttacaagaa

SEQ ID NO: 109730 - DNA, 25 bp, Probe Sequence
ccatcaccgagaacagtatgtgtag

SEQ ID NO: 109731 - DNA, 25 bp, Probe Sequence
tcaagataccaattaaatgagagca

SEQ ID NO: 109732 - DNA, 25 bp, Probe Sequence
aattctgtttaatttggtgattggg

SEQ ID NO: 109733 - DNA, 25 bp, Probe Sequence
ccttaccataatggatgctctgtga

SEQ ID NO: 109734 - DNA, 25 bp, Probe Sequence
aacagtatgtgtagcaggcttacaa

SEQ ID NO: 109735 - DNA, 25 bp, Probe Sequence
cagtatgtgtagcaggcttacaaga

SEQ ID NO: 109736 - DNA, 25 bp, Probe Sequence
gtttaatttggtgattgggaggcag

SEQ ID NO: 109737 - DNA, 25 bp, Probe Sequence
ctgtttaatttggtgattgggaggc

SEQ ID NO: 109738 - DNA, 25 bp, Probe Sequence
catcaccgagaacagtatgtgtagc

SEQ ID NO: 109739 - DNA, 25 bp, Probe Sequence
aggtttgctcagtatatctatcttt

SEQ ID NO: 109740 - DNA, 25 bp, Probe Sequence
aaaggtttgctcagtatatctatct

SEQ ID NO: 109741 - DNA, 25 bp, Probe Sequence
acagtatgtgtagcaggcttacaag

SEQ ID NO: 109742 - DNA, 25 bp, Probe Sequence
gaacagtatgtgtagcaggcttaca

SEQ ID NO: 109743 - DNA, 25 bp, Probe Sequence
aaggtttgctcagtatatctatctt

SEQ ID NO: 109744 - DNA, 25 bp, Probe Sequence
aatacacagattatgccaagaggta

SEQ ID NO: 109745 - DNA, 25 bp, Probe Sequence
ttcttagtcacttctgtcctaccat

SEQ ID NO: 109746 - DNA, 25 bp, Probe Sequence
atacacagattatgccaagaggtac

SEQ ID NO: 109747 - DNA, 25 bp, Probe Sequence
ctgataacacagagagaggaatgtc

SEQ ID NO: 109748 - DNA, 25 bp, Probe Sequence
tcttagtcacttctgtcctaccatg

SEQ ID NO: 109749 - DNA, 25 bp, Probe Sequence
aagcctcatcattgaatggagaatc

SEQ ID NO: 109750 - DNA, 25 bp, Probe Sequence
gaagcctcatcattgaatggagaat

SEQ ID NO: 109751 - DNA, 25 bp, Probe Sequence
cctcatcattgaatggagaatctca

SEQ ID NO: 109752 - DNA, 25 bp, Probe Sequence
agcctcatcattgaatggagaatct

SEQ ID NO: 109753 - DNA, 25 bp, Probe Sequence
ctcatcattgaatggagaatctcat

SEQ ID NO: 109754 - DNA, 25 bp, Probe Sequence
aaatacacagattatgccaagaggt

SEQ ID NO: 109755 - DNA, 25 bp, Probe Sequence
caaatacacagattatgccaagagg

SEQ ID NO: 109756 - DNA, 25 bp, Probe Sequence
gcctcatcattgaatggagaatctc

SEQ ID NO: 109757 - DNA, 25 bp, Probe Sequence
tcctacacagtcaaagaaagagaaa

SEQ ID NO: 109758 - DNA, 25 bp, Probe Sequence
agaagcctcatcattgaatggagaa

SEQ ID NO: 109759 - DNA, 25 bp, Probe Sequence
ataacacagagagaggaatgtccag

SEQ ID NO: 109760 - DNA, 25 bp, Probe Sequence
gataacacagagagaggaatgtcca

SEQ ID NO: 109761 - DNA, 25 bp, Probe Sequence
tgataacacagagagaggaatgtcc

SEQ ID NO: 109762 - DNA, 25 bp, Probe Sequence
cctaccaaacatttccagacttaac

SEQ ID NO: 109763 - DNA, 25 bp, Probe Sequence
atttcttagtcacttctgtcctacc

SEQ ID NO: 109764 - DNA, 25 bp, Probe Sequence
accaaacatttccagacttaacatt

SEQ ID NO: 109765 - DNA, 25 bp, Probe Sequence
ccaatttcttagtcacttctgtcct

SEQ ID NO: 109766 - DNA, 25 bp, Probe Sequence
tccaatttcttagtcacttctgtcc

SEQ ID NO: 109767 - DNA, 25 bp, Probe Sequence
tctccaatttcttagtcacttctgt

SEQ ID NO: 109768 - DNA, 25 bp, Probe Sequence
caccattcattctgtctgtctgttc

SEQ ID NO: 109769 - DNA, 25 bp, Probe Sequence
accattcattctgtctgtctgttcc

SEQ ID NO: 109770 - DNA, 25 bp, Probe Sequence
tttccttgctttcttgtttctgttt

SEQ ID NO: 109771 - DNA, 25 bp, Probe Sequence
tttactttctgctatctcccatctc

SEQ ID NO: 109772 - DNA, 25 bp, Probe Sequence
ctctgtgtttcattaggcattcatc

SEQ ID NO: 109773 - DNA, 25 bp, Probe Sequence
ccaccattcattctgtctgtctgtt

SEQ ID NO: 109774 - DNA, 25 bp, Probe Sequence
gattctctttcctctccactcctaa

SEQ ID NO: 109775 - DNA, 25 bp, Probe Sequence
gactgaagacctaagctgattctct

SEQ ID NO: 109776 - DNA, 25 bp, Probe Sequence
ttaaggattaggaggagaaagagtc

SEQ ID NO: 109777 - DNA, 25 bp, Probe Sequence
taaggattaggaggagaaagagtct

SEQ ID NO: 109778 - DNA, 25 bp, Probe Sequence
ttactttctgctatctcccatctcc

SEQ ID NO: 109779 - DNA, 25 bp, Probe Sequence
tctgtgtttcattaggcattcatcc

SEQ ID NO: 109780 - DNA, 25 bp, Probe Sequence
ttcctctccactcctaagaagcaat

SEQ ID NO: 109781 - DNA, 25 bp, Probe Sequence
attctctttcctctccactcctaag

SEQ ID NO: 109782 - DNA, 25 bp, Probe Sequence
tcctctccactcctaagaagcaatt

SEQ ID NO: 109783 - DNA, 25 bp, Probe Sequence
tttaaggattaggaggagaaagagt

SEQ ID NO: 109784 - DNA, 25 bp, Probe Sequence
gattaggaggagaaagagtcttcag

SEQ ID NO: 109785 - DNA, 25 bp, Probe Sequence
aaggattaggaggagaaagagtctt

SEQ ID NO: 109786 - DNA, 25 bp, Probe Sequence
gctagggtagtggtatgaggtttaa

SEQ ID NO: 109787 - DNA, 25 bp, Probe Sequence
aggattaggaggagaaagagtcttc

SEQ ID NO: 109788 - DNA, 25 bp, Probe Sequence
tgattctctttcctctccactccta

SEQ ID NO: 109789 - DNA, 25 bp, Probe Sequence
agagggcagatgcttgatagattat

SEQ ID NO: 109790 - DNA, 25 bp, Probe Sequence
attaggaggagaaagagtcttcagg

SEQ ID NO: 109791 - DNA, 25 bp, Probe Sequence
ggattaggaggagaaagagtcttca

SEQ ID NO: 109792 - DNA, 25 bp, Probe Sequence
aatagccagccagtcataatagtag

SEQ ID NO: 109793 - DNA, 25 bp, Probe Sequence
acctgtctacttctccatatctcat

SEQ ID NO: 109794 - DNA, 25 bp, Probe Sequence
atagccagccagtcataatagtaga

SEQ ID NO: 109795 - DNA, 25 bp, Probe Sequence
aacctgtctacttctccatatctca

SEQ ID NO: 109796 - DNA, 25 bp, Probe Sequence
aatagtagaggaatcagtcaagcaa

SEQ ID NO: 109797 - DNA, 25 bp, Probe Sequence
gccagtcataatagtagaggaatca

SEQ ID NO: 109798 - DNA, 25 bp, Probe Sequence
cagccagtcataatagtagaggaat

SEQ ID NO: 109799 - DNA, 25 bp, Probe Sequence
agccagtcataatagtagaggaatc

SEQ ID NO: 109800 - DNA, 25 bp, Probe Sequence
tagccagccagtcataatagtagag

SEQ ID NO: 109801 - DNA, 25 bp, Probe Sequence
ttaatagccagccagtcataatagt

SEQ ID NO: 109802 - DNA, 25 bp, Probe Sequence
tgaacctgtctacttctccatatct

SEQ ID NO: 109803 - DNA, 25 bp, Probe Sequence
cctgtctacttctccatatctcatt

SEQ ID NO: 109804 - DNA, 25 bp, Probe Sequence
gaacctgtctacttctccatatctc

SEQ ID NO: 109805 - DNA, 25 bp, Probe Sequence
ttgaacctgtctacttctccatatc

SEQ ID NO: 109806 - DNA, 25 bp, Probe Sequence
ccagccagtcataatagtagaggaa

SEQ ID NO: 109807 - DNA, 25 bp, Probe Sequence
taatagtagaggaatcagtcaagca

SEQ ID NO: 109808 - DNA, 25 bp, Probe Sequence
ccttggtaatggcatcactattcat

SEQ ID NO: 109809 - DNA, 25 bp, Probe Sequence
tgtctacttctccatatctcattgt

SEQ ID NO: 109810 - DNA, 25 bp, Probe Sequence
taatagccagccagtcataatagta

SEQ ID NO: 109811 - DNA, 25 bp, Probe Sequence
atatccgtacagagagttccagtaa

SEQ ID NO: 109812 - DNA, 25 bp, Probe Sequence
ctgtctacttctccatatctcattg

SEQ ID NO: 109813 - DNA, 25 bp, Probe Sequence
cttggtaatggcatcactattcatg

SEQ ID NO: 109814 - DNA, 25 bp, Probe Sequence
gtctacttctccatatctcattgtt

SEQ ID NO: 109815 - DNA, 25 bp, Probe Sequence
ccagtcataatagtagaggaatcag

SEQ ID NO: 109816 - DNA, 25 bp, Probe Sequence
agttgtatagatgtggaagtgtgaa

SEQ ID NO: 109817 - DNA, 25 bp, Probe Sequence
aagttgtatagatgtggaagtgtga

SEQ ID NO: 109818 - DNA, 25 bp, Probe Sequence
ttgtatagatgtggaagtgtgaacc

SEQ ID NO: 109819 - DNA, 25 bp, Probe Sequence
gtatagatgtggaagtgtgaacctg

SEQ ID NO: 109820 - DNA, 25 bp, Probe Sequence
tatagatgtggaagtgtgaacctgt

SEQ ID NO: 109821 - DNA, 25 bp, Probe Sequence
tgtatagatgtggaagtgtgaacct

SEQ ID NO: 109822 - DNA, 25 bp, Probe Sequence
gttgtatagatgtggaagtgtgaac

SEQ ID NO: 109823 - DNA, 25 bp, Probe Sequence
atgccttctaagttgttcacagatt

SEQ ID NO: 109824 - DNA, 25 bp, Probe Sequence
ctgtaccaagaagcaactaccttag

SEQ ID NO: 109825 - DNA, 25 bp, Probe Sequence
tgtagactgtaccaagaagcaacta

SEQ ID NO: 109826 - DNA, 25 bp, Probe Sequence
taattgtagactgtaccaagaagca

SEQ ID NO: 109827 - DNA, 25 bp, Probe Sequence
aattgtagactgtaccaagaagcaa

SEQ ID NO: 109828 - DNA, 25 bp, Probe Sequence
catcctgtgtataattgtagactgt

SEQ ID NO: 109829 - DNA, 25 bp, Probe Sequence
cttaatagtgcctcatcgtactctc

SEQ ID NO: 109830 - DNA, 25 bp, Probe Sequence
actgtaccaagaagcaactacctta

SEQ ID NO: 109831 - DNA, 25 bp, Probe Sequence
attgtagactgtaccaagaagcaac

SEQ ID NO: 109832 - DNA, 25 bp, Probe Sequence
cctgtgtataattgtagactgtacc

SEQ ID NO: 109833 - DNA, 25 bp, Probe Sequence
taatagtgcctcatcgtactctcaa

SEQ ID NO: 109834 - DNA, 25 bp, Probe Sequence
ttaatagtgcctcatcgtactctca

SEQ ID NO: 109835 - DNA, 25 bp, Probe Sequence
tcatcctgtgtataattgtagactg

SEQ ID NO: 109836 - DNA, 25 bp, Probe Sequence
tagactgtaccaagaagcaactacc

SEQ ID NO: 109837 - DNA, 25 bp, Probe Sequence
ataattgtagactgtaccaagaagc

SEQ ID NO: 109838 - DNA, 25 bp, Probe Sequence
catgccttctaagttgttcacagat

SEQ ID NO: 109839 - DNA, 25 bp, Probe Sequence
atagatgtggaagtgtgaacctgtg

SEQ ID NO: 109840 - DNA, 25 bp, Probe Sequence
agatggatatagtagcctcagaaga

SEQ ID NO: 109841 - DNA, 25 bp, Probe Sequence
gatggatatagtagcctcagaagaa

SEQ ID NO: 109842 - DNA, 25 bp, Probe Sequence
atctatgctgtggttcttatgagac

SEQ ID NO: 109843 - DNA, 25 bp, Probe Sequence
ctatgctgtggttcttatgagactt

SEQ ID NO: 109844 - DNA, 25 bp, Probe Sequence
cttatgagacttgtatgaagatgcc

SEQ ID NO: 109845 - DNA, 25 bp, Probe Sequence
aatctatgctgtggttcttatgaga

SEQ ID NO: 109846 - DNA, 25 bp, Probe Sequence
tgtggttcttatgagacttgtatga

SEQ ID NO: 109847 - DNA, 25 bp, Probe Sequence
gctgtggttcttatgagacttgtat

SEQ ID NO: 109848 - DNA, 25 bp, Probe Sequence
tatgctgtggttcttatgagacttg

SEQ ID NO: 109849 - DNA, 25 bp, Probe Sequence
ctgtggttcttatgagacttgtatg

SEQ ID NO: 109850 - DNA, 25 bp, Probe Sequence
tctatgctgtggttcttatgagact

SEQ ID NO: 109851 - DNA, 25 bp, Probe Sequence
tccttacctgctattcttgtacttg

SEQ ID NO: 109852 - DNA, 25 bp, Probe Sequence
tacctgctattcttgtacttgtctc

SEQ ID NO: 109853 - DNA, 25 bp, Probe Sequence
ccttacctgctattcttgtacttgt

SEQ ID NO: 109854 - DNA, 25 bp, Probe Sequence
ttacctgctattcttgtacttgtct

SEQ ID NO: 109855 - DNA, 25 bp, Probe Sequence
ttccttacctgctattcttgtactt

SEQ ID NO: 109856 - DNA, 25 bp, Probe Sequence
agagatggatatagtagcctcagaa

SEQ ID NO: 109857 - DNA, 25 bp, Probe Sequence
aagagatggatatagtagcctcaga

SEQ ID NO: 109858 - DNA, 25 bp, Probe Sequence
gtggttcttatgagacttgtatgaa

SEQ ID NO: 109859 - DNA, 25 bp, Probe Sequence
gagatggatatagtagcctcagaag

SEQ ID NO: 109860 - DNA, 25 bp, Probe Sequence
cttacctgctattcttgtacttgtc

SEQ ID NO: 109861 - DNA, 25 bp, Probe Sequence
attccttacctgctattcttgtact

SEQ ID NO: 109862 - DNA, 25 bp, Probe Sequence
ctgccatgtaatctgtatagttcca

SEQ ID NO: 109863 - DNA, 25 bp, Probe Sequence
ggaatactactgccatgtaatctgt

SEQ ID NO: 109864 - DNA, 25 bp, Probe Sequence
actcaaagacatagatgtgaaaatt

SEQ ID NO: 109865 - DNA, 25 bp, Probe Sequence
ttactcaaagacatagatgtgaaaa

SEQ ID NO: 109866 - DNA, 25 bp, Probe Sequence
tactcaaagacatagatgtgaaaat

SEQ ID NO: 109867 - DNA, 25 bp, Probe Sequence
atagatgtgaaaattttaggcaacc

SEQ ID NO: 109868 - DNA, 25 bp, Probe Sequence
ttttaggcaaccttctaaatctttt

SEQ ID NO: 109869 - DNA, 25 bp, Probe Sequence
atgtgaaaattttaggcaaccttct

SEQ ID NO: 109870 - DNA, 25 bp, Probe Sequence
agatgtgaaaattttaggcaacctt

SEQ ID NO: 109871 - DNA, 25 bp, Probe Sequence
gatgtgaaaattttaggcaaccttc

SEQ ID NO: 109872 - DNA, 25 bp, Probe Sequence
tgtgaaaattttaggcaaccttcta

SEQ ID NO: 109873 - DNA, 25 bp, Probe Sequence
ctcaaagacatagatgtgaaaattt

SEQ ID NO: 109874 - DNA, 25 bp, Probe Sequence
attttaggcaaccttctaaatcttt

SEQ ID NO: 109875 - DNA, 25 bp, Probe Sequence
aattttaggcaaccttctaaatctt

SEQ ID NO: 109876 - DNA, 25 bp, Probe Sequence
tagatgtgaaaattttaggcaacct

SEQ ID NO: 109877 - DNA, 25 bp, Probe Sequence
gacatagatgtgaaaattttaggca

SEQ ID NO: 109878 - DNA, 25 bp, Probe Sequence
gtgaaaattttaggcaaccttctaa

SEQ ID NO: 109879 - DNA, 25 bp, Probe Sequence
catagatgtgaaaattttaggcaac

SEQ ID NO: 109880 - DNA, 25 bp, Probe Sequence
agacatagatgtgaaaattttaggc

SEQ ID NO: 109881 - DNA, 25 bp, Probe Sequence
aaattttaggcaaccttctaaatct

SEQ ID NO: 109882 - DNA, 25 bp, Probe Sequence
acatagatgtgaaaattttaggcaa

SEQ ID NO: 109883 - DNA, 25 bp, Probe Sequence
tgaaaattttaggcaaccttctaaa

SEQ ID NO: 109884 - DNA, 25 bp, Probe Sequence
tcaaagacatagatgtgaaaatttt

SEQ ID NO: 109885 - DNA, 25 bp, Probe Sequence
aagacatagatgtgaaaattttagg

SEQ ID NO: 109886 - DNA, 25 bp, Probe Sequence
aaaattttaggcaaccttctaaatc

SEQ ID NO: 109887 - DNA, 25 bp, Probe Sequence
gaaaattttaggcaaccttctaaat

SEQ ID NO: 109888 - DNA, 25 bp, Probe Sequence
tttactgtgcttgctcagagaagag

SEQ ID NO: 109889 - DNA, 25 bp, Probe Sequence
ctgtgcttgctcagagaagaggtat

SEQ ID NO: 109890 - DNA, 25 bp, Probe Sequence
tgtgcttgctcagagaagaggtatg

SEQ ID NO: 109891 - DNA, 25 bp, Probe Sequence
ttactgtgcttgctcagagaagagg

SEQ ID NO: 109892 - DNA, 25 bp, Probe Sequence
ttttactgtgcttgctcagagaaga

SEQ ID NO: 109893 - DNA, 25 bp, Probe Sequence
tctactccagacagttattccataa

SEQ ID NO: 109894 - DNA, 25 bp, Probe Sequence
ctcctaatgacctggaattgttaga

SEQ ID NO: 109895 - DNA, 25 bp, Probe Sequence
tcctaatgacctggaattgttagaa

SEQ ID NO: 109896 - DNA, 25 bp, Probe Sequence
cctcctaatgacctggaattgttag

SEQ ID NO: 109897 - DNA, 25 bp, Probe Sequence
cctaatgacctggaattgttagaat

SEQ ID NO: 109898 - DNA, 25 bp, Probe Sequence
acctcctaatgacctggaattgtta

SEQ ID NO: 109899 - DNA, 25 bp, Probe Sequence
acagagaatgttaatggataccaga

SEQ ID NO: 109900 - DNA, 25 bp, Probe Sequence
aactggacctgtattatcctgaata

SEQ ID NO: 109901 - DNA, 25 bp, Probe Sequence
tccagacagttattccataaagcat

SEQ ID NO: 109902 - DNA, 25 bp, Probe Sequence
aacctcctaatgacctggaattgtt

SEQ ID NO: 109903 - DNA, 25 bp, Probe Sequence
ctccagacagttattccataaagca

SEQ ID NO: 109904 - DNA, 25 bp, Probe Sequence
gtgctagaatttatagttacaggcg

SEQ ID NO: 109905 - DNA, 25 bp, Probe Sequence
ccagacagttattccataaagcatt

SEQ ID NO: 109906 - DNA, 25 bp, Probe Sequence
gctagaatttatagttacaggcggt

SEQ ID NO: 109907 - DNA, 25 bp, Probe Sequence
tgctagaatttatagttacaggcgg

SEQ ID NO: 109908 - DNA, 25 bp, Probe Sequence
cagagaatgttaatggataccagaa

SEQ ID NO: 109909 - DNA, 25 bp, Probe Sequence
ctagaatttatagttacaggcggtg

SEQ ID NO: 109910 - DNA, 25 bp, Probe Sequence
actccagacagttattccataaagc

SEQ ID NO: 109911 - DNA, 25 bp, Probe Sequence
tagaatttatagttacaggcggtgt

SEQ ID NO: 109912 - DNA, 25 bp, Probe Sequence
agaatttatagttacaggcggtgtc

SEQ ID NO: 109913 - DNA, 25 bp, Probe Sequence
agtgctagaatttatagttacaggc

SEQ ID NO: 109914 - DNA, 25 bp, Probe Sequence
agagaatgttaatggataccagaat

SEQ ID NO: 109915 - DNA, 25 bp, Probe Sequence
gaatttatagttacaggcggtgtcc

SEQ ID NO: 109916 - DNA, 25 bp, Probe Sequence
agacagttattccataaagcatttg

SEQ ID NO: 109917 - DNA, 25 bp, Probe Sequence
taatctctgttaatcttacctgctt

SEQ ID NO: 109918 - DNA, 25 bp, Probe Sequence
ttaatctctgttaatcttacctgct

SEQ ID NO: 109919 - DNA, 25 bp, Probe Sequence
cagttctgcaatatggtaatcctta

SEQ ID NO: 109920 - DNA, 25 bp, Probe Sequence
agttcttgtgtgttcgtatctttat

SEQ ID NO: 109921 - DNA, 25 bp, Probe Sequence
aagttcttgtgtgttcgtatcttta

SEQ ID NO: 109922 - DNA, 25 bp, Probe Sequence
aatctctgttaatcttacctgcttt

SEQ ID NO: 109923 - DNA, 25 bp, Probe Sequence
gttctgcaatatggtaatccttatg

SEQ ID NO: 109924 - DNA, 25 bp, Probe Sequence
gttcttgtgtgttcgtatctttatt

SEQ ID NO: 109925 - DNA, 25 bp, Probe Sequence
agttctgcaatatggtaatccttat

SEQ ID NO: 109926 - DNA, 25 bp, Probe Sequence
attcccagagtcctcaatgtttcaa

SEQ ID NO: 109927 - DNA, 25 bp, Probe Sequence
aattcccagagtcctcaatgtttca

SEQ ID NO: 109928 - DNA, 25 bp, Probe Sequence
aatggttatgttctcacattgtcaa

SEQ ID NO: 109929 - DNA, 25 bp, Probe Sequence
ccagttctgcaatatggtaatcctt

SEQ ID NO: 109930 - DNA, 25 bp, Probe Sequence
ttcccagagtcctcaatgtttcaaa

SEQ ID NO: 109931 - DNA, 25 bp, Probe Sequence
atctctgttaatcttacctgcttta

SEQ ID NO: 109932 - DNA, 25 bp, Probe Sequence
tctctgttaatcttacctgctttaa

SEQ ID NO: 109933 - DNA, 25 bp, Probe Sequence
ttcttgtgtgttcgtatctttattt

SEQ ID NO: 109934 - DNA, 25 bp, Probe Sequence
tgtgttcgtatctttatttattccc

SEQ ID NO: 109935 - DNA, 25 bp, Probe Sequence
aaagttcttgtgtgttcgtatcttt

SEQ ID NO: 109936 - DNA, 25 bp, Probe Sequence
ttctgcaatatggtaatccttatgc

SEQ ID NO: 109937 - DNA, 25 bp, Probe Sequence
caggaaacaagagatggagcagatg

SEQ ID NO: 109938 - DNA, 25 bp, Probe Sequence
agaaaggaaaatggaaggtcagaat

SEQ ID NO: 109939 - DNA, 25 bp, Probe Sequence
tttaatctctgttaatcttacctgc

SEQ ID NO: 109940 - DNA, 25 bp, Probe Sequence
tcttgtgtgttcgtatctttattta

SEQ ID NO: 109941 - DNA, 25 bp, Probe Sequence
gatttgtttagactgaaggaagacg

SEQ ID NO: 109942 - DNA, 25 bp, Probe Sequence
agttgcctttcctctttgtagttag

SEQ ID NO: 109943 - DNA, 25 bp, Probe Sequence
atcagcagatgaatgtgttaagcac

SEQ ID NO: 109944 - DNA, 25 bp, Probe Sequence
ttaaagcacaaagagagggactaac

SEQ ID NO: 109945 - DNA, 25 bp, Probe Sequence
gcttgatttgtttagactgaaggaa

SEQ ID NO: 109946 - DNA, 25 bp, Probe Sequence
aagttgcctttcctctttgtagtta

SEQ ID NO: 109947 - DNA, 25 bp, Probe Sequence
taagttgcctttcctctttgtagtt

SEQ ID NO: 109948 - DNA, 25 bp, Probe Sequence
tgatttgtttagactgaaggaagac

SEQ ID NO: 109949 - DNA, 25 bp, Probe Sequence
tttcctctttgtagttagcgttcag

SEQ ID NO: 109950 - DNA, 25 bp, Probe Sequence
ctttcctctttgtagttagcgttca

SEQ ID NO: 109951 - DNA, 25 bp, Probe Sequence
ttaagttgcctttcctctttgtagt

SEQ ID NO: 109952 - DNA, 25 bp, Probe Sequence
cttaaagcacaaagagagggactaa

SEQ ID NO: 109953 - DNA, 25 bp, Probe Sequence
aaagcatcttccttaaagcacaaag

SEQ ID NO: 109954 - DNA, 25 bp, Probe Sequence
tttaagttgcctttcctctttgtag

SEQ ID NO: 109955 - DNA, 25 bp, Probe Sequence
ctttaagttgcctttcctctttgta

SEQ ID NO: 109956 - DNA, 25 bp, Probe Sequence
caaagcatcttccttaaagcacaaa

SEQ ID NO: 109957 - DNA, 25 bp, Probe Sequence
taaagcacaaagagagggactaact

SEQ ID NO: 109958 - DNA, 25 bp, Probe Sequence
ggcttgatttgtttagactgaagga

SEQ ID NO: 109959 - DNA, 25 bp, Probe Sequence
cctttcctctttgtagttagcgttc

SEQ ID NO: 109960 - DNA, 25 bp, Probe Sequence
ttgatttgtttagactgaaggaaga

SEQ ID NO: 109961 - DNA, 25 bp, Probe Sequence
cctttaagttgcctttcctctttgt

SEQ ID NO: 109962 - DNA, 25 bp, Probe Sequence
acctttaagttgcctttcctctttg

SEQ ID NO: 109963 - DNA, 25 bp, Probe Sequence
cacctttaagttgcctttcctcttt

SEQ ID NO: 109964 - DNA, 25 bp, Probe Sequence
acaaagcatcttccttaaagcacaa

SEQ ID NO: 109965 - DNA, 25 bp, Probe Sequence
atttgcttatatctgaagggaggtg

SEQ ID NO: 109966 - DNA, 25 bp, Probe Sequence
ctggatgtttggtctgaaagagtta

SEQ ID NO: 109967 - DNA, 25 bp, Probe Sequence
tatttgcttatatctgaagggaggt

SEQ ID NO: 109968 - DNA, 25 bp, Probe Sequence
ggatgtttggtctgaaagagttact

SEQ ID NO: 109969 - DNA, 25 bp, Probe Sequence
gatgtttggtctgaaagagttactt

SEQ ID NO: 109970 - DNA, 25 bp, Probe Sequence
tggatgtttggtctgaaagagttac

SEQ ID NO: 109971 - DNA, 25 bp, Probe Sequence
ggaaagaagtggagagaaaggtttg

SEQ ID NO: 109972 - DNA, 25 bp, Probe Sequence
atgtttccaaccctcttgaattaaa

SEQ ID NO: 109973 - DNA, 25 bp, Probe Sequence
tttatgtttccaaccctcttgaatt

SEQ ID NO: 109974 - DNA, 25 bp, Probe Sequence
ttatttgcttatatctgaagggagg

SEQ ID NO: 109975 - DNA, 25 bp, Probe Sequence
tttgcttatatctgaagggaggtgg

SEQ ID NO: 109976 - DNA, 25 bp, Probe Sequence
gaaagaagtggagagaaaggtttgc

SEQ ID NO: 109977 - DNA, 25 bp, Probe Sequence
tatgtttccaaccctcttgaattaa

SEQ ID NO: 109978 - DNA, 25 bp, Probe Sequence
ttatgtttccaaccctcttgaatta

SEQ ID NO: 109979 - DNA, 25 bp, Probe Sequence
tttgtagaaagggcaagattatttg

SEQ ID NO: 109980 - DNA, 25 bp, Probe Sequence
ggtgagttcagtagctttggtatta

SEQ ID NO: 109981 - DNA, 25 bp, Probe Sequence
aaagaagtggagagaaaggtttgct

SEQ ID NO: 109982 - DNA, 25 bp, Probe Sequence
gggaaagaagtggagagaaaggttt

SEQ ID NO: 109983 - DNA, 25 bp, Probe Sequence
aagaagtggagagaaaggtttgctt

SEQ ID NO: 109984 - DNA, 25 bp, Probe Sequence
gcaaatcataatagctccaatgtga

SEQ ID NO: 109985 - DNA, 25 bp, Probe Sequence
tgagttcagtagctttggtattatg

SEQ ID NO: 109986 - DNA, 25 bp, Probe Sequence
gtgagttcagtagctttggtattat

SEQ ID NO: 109987 - DNA, 25 bp, Probe Sequence
tcagtagctttggtattatgagtgc

SEQ ID NO: 109988 - DNA, 25 bp, Probe Sequence
tgcaaatcataatagctccaatgtg

SEQ ID NO: 109989 - DNA, 25 bp, Probe Sequence
acatagattagaagtgaaggcaagt

SEQ ID NO: 109990 - DNA, 25 bp, Probe Sequence
catagattagaagtgaaggcaagtc

SEQ ID NO: 109991 - DNA, 25 bp, Probe Sequence
tagattagaagtgaaggcaagtcaa

SEQ ID NO: 109992 - DNA, 25 bp, Probe Sequence
atagattagaagtgaaggcaagtca

SEQ ID NO: 109993 - DNA, 25 bp, Probe Sequence
gattagaagtgaaggcaagtcaact

SEQ ID NO: 109994 - DNA, 25 bp, Probe Sequence
agattagaagtgaaggcaagtcaac

SEQ ID NO: 109995 - DNA, 25 bp, Probe Sequence
attagaagtgaaggcaagtcaactg

SEQ ID NO: 109996 - DNA, 25 bp, Probe Sequence
gcatgacaacacatagattagaagt

SEQ ID NO: 109997 - DNA, 25 bp, Probe Sequence
acacatagattagaagtgaaggcaa

SEQ ID NO: 109998 - DNA, 25 bp, Probe Sequence
aacacatagattagaagtgaaggca

SEQ ID NO: 109999 - DNA, 25 bp, Probe Sequence
caacacatagattagaagtgaaggc

SEQ ID NO: 110000 - DNA, 25 bp, Probe Sequence
cacatagattagaagtgaaggcaag

SEQ ID NO: 110001 - DNA, 25 bp, Probe Sequence
acaacacatagattagaagtgaagg

SEQ ID NO: 110002 - DNA, 25 bp, Probe Sequence
tgcatgacaacacatagattagaag

SEQ ID NO: 110003 - DNA, 25 bp, Probe Sequence
tgacaacacatagattagaagtgaa

SEQ ID NO: 110004 - DNA, 25 bp, Probe Sequence
agacttgtggcgaactagaaattaa

SEQ ID NO: 110005 - DNA, 25 bp, Probe Sequence
aagacttgtggcgaactagaaatta

SEQ ID NO: 110006 - DNA, 25 bp, Probe Sequence
gacttgtggcgaactagaaattaag

SEQ ID NO: 110007 - DNA, 25 bp, Probe Sequence
atgacaacacatagattagaagtga

SEQ ID NO: 110008 - DNA, 25 bp, Probe Sequence
gacaacacatagattagaagtgaag

SEQ ID NO: 110009 - DNA, 25 bp, Probe Sequence
cttgtggcgaactagaaattaagta

SEQ ID NO: 110010 - DNA, 25 bp, Probe Sequence
ccaggtttctctgagtcatcattat

SEQ ID NO: 110011 - DNA, 25 bp, Probe Sequence
catgacaacacatagattagaagtg

SEQ ID NO: 110012 - DNA, 25 bp, Probe Sequence
tgtggcgaactagaaattaagtaaa

SEQ ID NO: 110013 - DNA, 25 bp, Probe Sequence
cagagatttgaacttgtttggaact

SEQ ID NO: 110014 - DNA, 25 bp, Probe Sequence
agatttgaacttgtttggaacttgt

SEQ ID NO: 110015 - DNA, 25 bp, Probe Sequence
gatttgaacttgtttggaacttgtc

SEQ ID NO: 110016 - DNA, 25 bp, Probe Sequence
gagatttgaacttgtttggaacttg

SEQ ID NO: 110017 - DNA, 25 bp, Probe Sequence
agagatttgaacttgtttggaactt

SEQ ID NO: 110018 - DNA, 25 bp, Probe Sequence
tttgaacttgtttggaacttgtcat

SEQ ID NO: 110019 - DNA, 25 bp, Probe Sequence
atttgaacttgtttggaacttgtca

SEQ ID NO: 110020 - DNA, 25 bp, Probe Sequence
tgaacttgtttggaacttgtcataa

SEQ ID NO: 110021 - DNA, 25 bp, Probe Sequence
ttgaacttgtttggaacttgtcata

SEQ ID NO: 110022 - DNA, 25 bp, Probe Sequence
tactagatcacttgtcctcttgcca

SEQ ID NO: 110023 - DNA, 25 bp, Probe Sequence
acagagatttgaacttgtttggaac

SEQ ID NO: 110024 - DNA, 25 bp, Probe Sequence
gaacttgtttggaacttgtcataaa

SEQ ID NO: 110025 - DNA, 25 bp, Probe Sequence
catgcctaaatggaaacctgataaa

SEQ ID NO: 110026 - DNA, 25 bp, Probe Sequence
tggcataacagagatttgaacttgt

SEQ ID NO: 110027 - DNA, 25 bp, Probe Sequence
ctggcataacagagatttgaacttg

SEQ ID NO: 110028 - DNA, 25 bp, Probe Sequence
actggcataacagagatttgaactt

SEQ ID NO: 110029 - DNA, 25 bp, Probe Sequence
aacactggcataacagagatttgaa

SEQ ID NO: 110030 - DNA, 25 bp, Probe Sequence
ctcttgccagctcatttgttaataa

SEQ ID NO: 110031 - DNA, 25 bp, Probe Sequence
cactggcataacagagatttgaact

SEQ ID NO: 110032 - DNA, 25 bp, Probe Sequence
tcttgccagctcatttgttaataaa

SEQ ID NO: 110033 - DNA, 25 bp, Probe Sequence
acactggcataacagagatttgaac

SEQ ID NO: 110034 - DNA, 25 bp, Probe Sequence
caacactggcataacagagatttga

SEQ ID NO: 110035 - DNA, 25 bp, Probe Sequence
cctcttgccagctcatttgttaata

SEQ ID NO: 110036 - DNA, 25 bp, Probe Sequence
actagatcacttgtcctcttgccag

SEQ ID NO: 110037 - DNA, 25 bp, Probe Sequence
cttattcatagtattgtcgcctggt

SEQ ID NO: 110038 - DNA, 25 bp, Probe Sequence
ttattcatagtattgtcgcctggtg

SEQ ID NO: 110039 - DNA, 25 bp, Probe Sequence
acttattcatagtattgtcgcctgg

SEQ ID NO: 110040 - DNA, 25 bp, Probe Sequence
gcctcctgacttattcatagtattg

SEQ ID NO: 110041 - DNA, 25 bp, Probe Sequence
tgacttattcatagtattgtcgcct

SEQ ID NO: 110042 - DNA, 25 bp, Probe Sequence
gacttattcatagtattgtcgcctg

SEQ ID NO: 110043 - DNA, 25 bp, Probe Sequence
ctgacttattcatagtattgtcgcc

SEQ ID NO: 110044 - DNA, 25 bp, Probe Sequence
cctgacttattcatagtattgtcgc

SEQ ID NO: 110045 - DNA, 25 bp, Probe Sequence
tattcatagtattgtcgcctggtgg

SEQ ID NO: 110046 - DNA, 25 bp, Probe Sequence
cctcctgacttattcatagtattgt

SEQ ID NO: 110047 - DNA, 25 bp, Probe Sequence
tcctgacttattcatagtattgtcg

SEQ ID NO: 110048 - DNA, 25 bp, Probe Sequence
ctgaggaaccagaatgcttagagtt

SEQ ID NO: 110049 - DNA, 25 bp, Probe Sequence
aactgaggaaccagaatgcttagag

SEQ ID NO: 110050 - DNA, 25 bp, Probe Sequence
aaatcttcatttaaggctgagtgtg

SEQ ID NO: 110051 - DNA, 25 bp, Probe Sequence
aaccagaatgcttagagttcataaa

SEQ ID NO: 110052 - DNA, 25 bp, Probe Sequence
aatcttcatttaaggctgagtgtgg

SEQ ID NO: 110053 - DNA, 25 bp, Probe Sequence
actgaggaaccagaatgcttagagt

SEQ ID NO: 110054 - DNA, 25 bp, Probe Sequence
tagttgaatgctcaattccttacaa

SEQ ID NO: 110055 - DNA, 25 bp, Probe Sequence
ttagttgaatgctcaattccttaca

SEQ ID NO: 110056 - DNA, 25 bp, Probe Sequence
atcttcatttaaggctgagtgtggt

SEQ ID NO: 110057 - DNA, 25 bp, Probe Sequence
ggcctcctgacttattcatagtatt

SEQ ID NO: 110058 - DNA, 25 bp, Probe Sequence
aaactgaggaaccagaatgcttaga

SEQ ID NO: 110059 - DNA, 25 bp, Probe Sequence
agaagtatgcaagactgattctgtt

SEQ ID NO: 110060 - DNA, 25 bp, Probe Sequence
ctcctgacttattcatagtattgtc

SEQ ID NO: 110061 - DNA, 25 bp, Probe Sequence
ctagacaagaaatgcaggaggacct

SEQ ID NO: 110062 - DNA, 25 bp, Probe Sequence
tctagacaagaaatgcaggaggacc

SEQ ID NO: 110063 - DNA, 25 bp, Probe Sequence
tagacaagaaatgcaggaggacctg

SEQ ID NO: 110064 - DNA, 25 bp, Probe Sequence
gcaacactcattcttcatccttatt

SEQ ID NO: 110065 - DNA, 25 bp, Probe Sequence
cactcattcttcatccttattctcc

SEQ ID NO: 110066 - DNA, 25 bp, Probe Sequence
ggcaacactcattcttcatccttat

SEQ ID NO: 110067 - DNA, 25 bp, Probe Sequence
acactcattcttcatccttattctc

SEQ ID NO: 110068 - DNA, 25 bp, Probe Sequence
caacactcattcttcatccttattc

SEQ ID NO: 110069 - DNA, 25 bp, Probe Sequence
aacactcattcttcatccttattct

SEQ ID NO: 110070 - DNA, 25 bp, Probe Sequence
tggcaacactcattcttcatcctta

SEQ ID NO: 110071 - DNA, 25 bp, Probe Sequence
tcattcttcatccttattctccctg

SEQ ID NO: 110072 - DNA, 25 bp, Probe Sequence
actcattcttcatccttattctccc

SEQ ID NO: 110073 - DNA, 25 bp, Probe Sequence
ctcattcttcatccttattctccct

SEQ ID NO: 110074 - DNA, 25 bp, Probe Sequence
cattcttcatccttattctccctgg

SEQ ID NO: 110075 - DNA, 25 bp, Probe Sequence
atcaggacccagaattacttacaga

SEQ ID NO: 110076 - DNA, 25 bp, Probe Sequence
tatcaggacccagaattacttacag

SEQ ID NO: 110077 - DNA, 25 bp, Probe Sequence
ctatcaggacccagaattacttaca

SEQ ID NO: 110078 - DNA, 25 bp, Probe Sequence
tgacacattaacattcaaatcaggc

SEQ ID NO: 110079 - DNA, 25 bp, Probe Sequence
tcaggacccagaattacttacagac

SEQ ID NO: 110080 - DNA, 25 bp, Probe Sequence
gtgacacattaacattcaaatcagg

SEQ ID NO: 110081 - DNA, 25 bp, Probe Sequence
attcttcatccttattctccctggc

SEQ ID NO: 110082 - DNA, 25 bp, Probe Sequence
cctatcaggacccagaattacttac

SEQ ID NO: 110083 - DNA, 25 bp, Probe Sequence
tctttcagcaccaagtcatgtttaa

SEQ ID NO: 110084 - DNA, 25 bp, Probe Sequence
caggacccagaattacttacagacc

SEQ ID NO: 110085 - DNA, 25 bp, Probe Sequence
ctttcagcaccaagtcatgtttaaa

SEQ ID NO: 110086 - DNA, 25 bp, Probe Sequence
gcctatcaggacccagaattactta

SEQ ID NO: 110087 - DNA, 25 bp, Probe Sequence
gtctttcagcaccaagtcatgttta

SEQ ID NO: 110088 - DNA, 25 bp, Probe Sequence
agtacagtctctcaaccatcctaag

SEQ ID NO: 110089 - DNA, 25 bp, Probe Sequence
gtacagtctctcaaccatcctaaga

SEQ ID NO: 110090 - DNA, 25 bp, Probe Sequence
gagtacagtctctcaaccatcctaa

SEQ ID NO: 110091 - DNA, 25 bp, Probe Sequence
tacttgttatgagcctgcattctat

SEQ ID NO: 110092 - DNA, 25 bp, Probe Sequence
atacttgttatgagcctgcattcta

SEQ ID NO: 110093 - DNA, 25 bp, Probe Sequence
agttgttctttctgagttcattgtc

SEQ ID NO: 110094 - DNA, 25 bp, Probe Sequence
acttgttatgagcctgcattctatt

SEQ ID NO: 110095 - DNA, 25 bp, Probe Sequence
aatacttgttatgagcctgcattct

SEQ ID NO: 110096 - DNA, 25 bp, Probe Sequence
aagttgttctttctgagttcattgt

SEQ ID NO: 110097 - DNA, 25 bp, Probe Sequence
acacacgattgaatatatctctaca

SEQ ID NO: 110098 - DNA, 25 bp, Probe Sequence
gttgttctttctgagttcattgtca

SEQ ID NO: 110099 - DNA, 25 bp, Probe Sequence
gaagttgttctttctgagttcattg

SEQ ID NO: 110100 - DNA, 25 bp, Probe Sequence
gcattctatttacagtgtacccttt

SEQ ID NO: 110101 - DNA, 25 bp, Probe Sequence
ctatttagagttgccttaacattgc

SEQ ID NO: 110102 - DNA, 25 bp, Probe Sequence
tatttacagtgtaccctttgaatgg

SEQ ID NO: 110103 - DNA, 25 bp, Probe Sequence
gctgtactaaacacacgattgaata

SEQ ID NO: 110104 - DNA, 25 bp, Probe Sequence
aacacacgattgaatatatctctac

SEQ ID NO: 110105 - DNA, 25 bp, Probe Sequence
tgcattctatttacagtgtaccctt

SEQ ID NO: 110106 - DNA, 25 bp, Probe Sequence
cctttgaatgggaatttacaagctg

SEQ ID NO: 110107 - DNA, 25 bp, Probe Sequence
ctatttacagtgtaccctttgaatg

SEQ ID NO: 110108 - DNA, 25 bp, Probe Sequence
cattctatttacagtgtaccctttg

SEQ ID NO: 110109 - DNA, 25 bp, Probe Sequence
ttctatttacagtgtaccctttgaa

SEQ ID NO: 110110 - DNA, 25 bp, Probe Sequence
cacacgattgaatatatctctacat

SEQ ID NO: 110111 - DNA, 25 bp, Probe Sequence
tacagtctctcaaccatcctaagag

SEQ ID NO: 110112 - DNA, 25 bp, Probe Sequence
accattcactcatgtaatcctcata

SEQ ID NO: 110113 - DNA, 25 bp, Probe Sequence
taccattcactcatgtaatcctcat

SEQ ID NO: 110114 - DNA, 25 bp, Probe Sequence
ataccattcactcatgtaatcctca

SEQ ID NO: 110115 - DNA, 25 bp, Probe Sequence
cataccattcactcatgtaatcctc

SEQ ID NO: 110116 - DNA, 25 bp, Probe Sequence
ccattcactcatgtaatcctcatat

SEQ ID NO: 110117 - DNA, 25 bp, Probe Sequence
cagttacatagaatagggcttgaca

SEQ ID NO: 110118 - DNA, 25 bp, Probe Sequence
acagttacatagaatagggcttgac

SEQ ID NO: 110119 - DNA, 25 bp, Probe Sequence
aacagttacatagaatagggcttga

SEQ ID NO: 110120 - DNA, 25 bp, Probe Sequence
agttacatagaatagggcttgacaa

SEQ ID NO: 110121 - DNA, 25 bp, Probe Sequence
ctgctctgaaagtttaacataccat

SEQ ID NO: 110122 - DNA, 25 bp, Probe Sequence
agaatagggcttgacaaagagttat

SEQ ID NO: 110123 - DNA, 25 bp, Probe Sequence
atagaatagggcttgacaaagagtt

SEQ ID NO: 110124 - DNA, 25 bp, Probe Sequence
catagaatagggcttgacaaagagt

SEQ ID NO: 110125 - DNA, 25 bp, Probe Sequence
acatagaatagggcttgacaaagag

SEQ ID NO: 110126 - DNA, 25 bp, Probe Sequence
agttattagcataaagcaaggaggt

SEQ ID NO: 110127 - DNA, 25 bp, Probe Sequence
aggtttgaaggaagttcgtctttaa

SEQ ID NO: 110128 - DNA, 25 bp, Probe Sequence
gagttattagcataaagcaaggagg

SEQ ID NO: 110129 - DNA, 25 bp, Probe Sequence
tgctctgaaagtttaacataccatt

SEQ ID NO: 110130 - DNA, 25 bp, Probe Sequence
gttattagcataaagcaaggaggtt

SEQ ID NO: 110131 - DNA, 25 bp, Probe Sequence
tagaatagggcttgacaaagagtta

SEQ ID NO: 110132 - DNA, 25 bp, Probe Sequence
tacatagaatagggcttgacaaaga

SEQ ID NO: 110133 - DNA, 25 bp, Probe Sequence
gttacatagaatagggcttgacaaa

SEQ ID NO: 110134 - DNA, 25 bp, Probe Sequence
gaggtttgaaggaagttcgtcttta

SEQ ID NO: 110135 - DNA, 25 bp, Probe Sequence
tattagcataaagcaaggaggtttg

SEQ ID NO: 110136 - DNA, 25 bp, Probe Sequence
tcacacacctcctaagaataagaac

SEQ ID NO: 110137 - DNA, 25 bp, Probe Sequence
cacctcctaagaataagaaccaaca

SEQ ID NO: 110138 - DNA, 25 bp, Probe Sequence
acacctcctaagaataagaaccaac

SEQ ID NO: 110139 - DNA, 25 bp, Probe Sequence
cacacctcctaagaataagaaccaa

SEQ ID NO: 110140 - DNA, 25 bp, Probe Sequence
catcacacacctcctaagaataaga

SEQ ID NO: 110141 - DNA, 25 bp, Probe Sequence
tcatcacacacctcctaagaataag

SEQ ID NO: 110142 - DNA, 25 bp, Probe Sequence
acctcctaagaataagaaccaacat

SEQ ID NO: 110143 - DNA, 25 bp, Probe Sequence
cacacacctcctaagaataagaacc

SEQ ID NO: 110144 - DNA, 25 bp, Probe Sequence
atcacacacctcctaagaataagaa

SEQ ID NO: 110145 - DNA, 25 bp, Probe Sequence
cttcatcacacacctcctaagaata

SEQ ID NO: 110146 - DNA, 25 bp, Probe Sequence
aatacttcatcacacacctcctaag

SEQ ID NO: 110147 - DNA, 25 bp, Probe Sequence
acacacctcctaagaataagaacca

SEQ ID NO: 110148 - DNA, 25 bp, Probe Sequence
ttcatcacacacctcctaagaataa

SEQ ID NO: 110149 - DNA, 25 bp, Probe Sequence
atacttcatcacacacctcctaaga

SEQ ID NO: 110150 - DNA, 25 bp, Probe Sequence
tacttcatcacacacctcctaagaa

SEQ ID NO: 110151 - DNA, 25 bp, Probe Sequence
cctcctaagaataagaaccaacatt

SEQ ID NO: 110152 - DNA, 25 bp, Probe Sequence
acttcatcacacacctcctaagaat

SEQ ID NO: 110153 - DNA, 25 bp, Probe Sequence
ataagaaccaacattatcacaccaa

SEQ ID NO: 110154 - DNA, 25 bp, Probe Sequence
aataagaaccaacattatcacacca

SEQ ID NO: 110155 - DNA, 25 bp, Probe Sequence
gaataagaaccaacattatcacacc

SEQ ID NO: 110156 - DNA, 25 bp, Probe Sequence
ttcttcgttcttggcaccatcttat

SEQ ID NO: 110157 - DNA, 25 bp, Probe Sequence
gaaccaacattatcacaccaaagaa

SEQ ID NO: 110158 - DNA, 25 bp, Probe Sequence
aagaaccaacattatcacaccaaag

SEQ ID NO: 110159 - DNA, 25 bp, Probe Sequence
ctaaatacttcatcacacacctcct

SEQ ID NO: 110160 - DNA, 25 bp, Probe Sequence
atgtcagagttgaagaagtagtcag

SEQ ID NO: 110161 - DNA, 25 bp, Probe Sequence
cctatgtcagagttgaagaagtagt

SEQ ID NO: 110162 - DNA, 25 bp, Probe Sequence
acctatgtcagagttgaagaagtag

SEQ ID NO: 110163 - DNA, 25 bp, Probe Sequence
tcagagttgaagaagtagtcaggaa

SEQ ID NO: 110164 - DNA, 25 bp, Probe Sequence
aacctatgtcagagttgaagaagta

SEQ ID NO: 110165 - DNA, 25 bp, Probe Sequence
gtatccaagtccattgttactaggt

SEQ ID NO: 110166 - DNA, 25 bp, Probe Sequence
tgtatccaagtccattgttactagg

SEQ ID NO: 110167 - DNA, 25 bp, Probe Sequence
tatgtcagagttgaagaagtagtca

SEQ ID NO: 110168 - DNA, 25 bp, Probe Sequence
atccaagtccattgttactaggttg

SEQ ID NO: 110169 - DNA, 25 bp, Probe Sequence
tatccaagtccattgttactaggtt

SEQ ID NO: 110170 - DNA, 25 bp, Probe Sequence
gtcagagttgaagaagtagtcagga

SEQ ID NO: 110171 - DNA, 25 bp, Probe Sequence
ctatgtcagagttgaagaagtagtc

SEQ ID NO: 110172 - DNA, 25 bp, Probe Sequence
tagatacttggtaggtatagagccg

SEQ ID NO: 110173 - DNA, 25 bp, Probe Sequence
tgtcagagttgaagaagtagtcagg

SEQ ID NO: 110174 - DNA, 25 bp, Probe Sequence
gtagatacttggtaggtatagagcc

SEQ ID NO: 110175 - DNA, 25 bp, Probe Sequence
ttgtatccaagtccattgttactag

SEQ ID NO: 110176 - DNA, 25 bp, Probe Sequence
agtagatacttggtaggtatagagc

SEQ ID NO: 110177 - DNA, 25 bp, Probe Sequence
cagagttgaagaagtagtcaggaaa

SEQ ID NO: 110178 - DNA, 25 bp, Probe Sequence
aaacctatgtcagagttgaagaagt

SEQ ID NO: 110179 - DNA, 25 bp, Probe Sequence
cctaacatatgagagtgctaaccag

SEQ ID NO: 110180 - DNA, 25 bp, Probe Sequence
tctttgtatccaagtccattgttac

SEQ ID NO: 110181 - DNA, 25 bp, Probe Sequence
gtctttgtatccaagtccattgtta

SEQ ID NO: 110182 - DNA, 25 bp, Probe Sequence
ctaggttggaggctggagattctaa

SEQ ID NO: 110183 - DNA, 25 bp, Probe Sequence
ctttgtatccaagtccattgttact

SEQ ID NO: 110184 - DNA, 25 bp, Probe Sequence
ctgagatggagtaaggagggagatg

SEQ ID NO: 110185 - DNA, 25 bp, Probe Sequence
gagcctctctgaagacctttaacag

SEQ ID NO: 110186 - DNA, 25 bp, Probe Sequence
gaggcatcatgtctgttagggaaag

SEQ ID NO: 110187 - DNA, 25 bp, Probe Sequence
gagatggaggcatcatgtctgttag

SEQ ID NO: 110188 - DNA, 25 bp, Probe Sequence
agatggagtaaggagggagatggag

SEQ ID NO: 110189 - DNA, 25 bp, Probe Sequence
ggagcctctctgaagacctttaaca

SEQ ID NO: 110190 - DNA, 25 bp, Probe Sequence
aggagcctctctgaagacctttaac

SEQ ID NO: 110191 - DNA, 25 bp, Probe Sequence
caggagcctctctgaagacctttaa

SEQ ID NO: 110192 - DNA, 25 bp, Probe Sequence
gagatggagtaaggagggagatgga

SEQ ID NO: 110193 - DNA, 25 bp, Probe Sequence
catcatgtctgttagggaaagcagg

SEQ ID NO: 110194 - DNA, 25 bp, Probe Sequence
atcatgtctgttagggaaagcagga

SEQ ID NO: 110195 - DNA, 25 bp, Probe Sequence
cctctctgaagacctttaacagggt

SEQ ID NO: 110196 - DNA, 25 bp, Probe Sequence
tgagatggagtaaggagggagatgg

SEQ ID NO: 110197 - DNA, 25 bp, Probe Sequence
agcctctctgaagacctttaacagg

SEQ ID NO: 110198 - DNA, 25 bp, Probe Sequence
ggaggcatcatgtctgttagggaaa

SEQ ID NO: 110199 - DNA, 25 bp, Probe Sequence
agatggaggcatcatgtctgttagg

SEQ ID NO: 110200 - DNA, 25 bp, Probe Sequence
ggagatggaggcatcatgtctgtta

SEQ ID NO: 110201 - DNA, 25 bp, Probe Sequence
gctgagatggagtaaggagggagat

SEQ ID NO: 110202 - DNA, 25 bp, Probe Sequence
gcatcatgtctgttagggaaagcag

SEQ ID NO: 110203 - DNA, 25 bp, Probe Sequence
tcatgtctgttagggaaagcaggag

SEQ ID NO: 110204 - DNA, 25 bp, Probe Sequence
atgctgagatggagtaaggagggag

SEQ ID NO: 110205 - DNA, 25 bp, Probe Sequence
gatggagtaaggagggagatggagg

SEQ ID NO: 110206 - DNA, 25 bp, Probe Sequence
gcctctctgaagacctttaacaggg

SEQ ID NO: 110207 - DNA, 25 bp, Probe Sequence
ctcatgctgagatggagtaaggagg

SEQ ID NO: 110208 - DNA, 25 bp, Probe Sequence
atgtgtctctcacggcttgtaaatt

SEQ ID NO: 110209 - DNA, 25 bp, Probe Sequence
tgtctctcacggcttgtaaattgtg

SEQ ID NO: 110210 - DNA, 25 bp, Probe Sequence
gtgtctctcacggcttgtaaattgt

SEQ ID NO: 110211 - DNA, 25 bp, Probe Sequence
tgtgtctctcacggcttgtaaattg

SEQ ID NO: 110212 - DNA, 25 bp, Probe Sequence
cacggcttgtaaattgtgaaacagc

SEQ ID NO: 110213 - DNA, 25 bp, Probe Sequence
ctctcacggcttgtaaattgtgaaa

SEQ ID NO: 110214 - DNA, 25 bp, Probe Sequence
tctcacggcttgtaaattgtgaaac

SEQ ID NO: 110215 - DNA, 25 bp, Probe Sequence
tcacggcttgtaaattgtgaaacag

SEQ ID NO: 110216 - DNA, 25 bp, Probe Sequence
ctcacggcttgtaaattgtgaaaca

SEQ ID NO: 110217 - DNA, 25 bp, Probe Sequence
tctctcacggcttgtaaattgtgaa

SEQ ID NO: 110218 - DNA, 25 bp, Probe Sequence
acggcttgtaaattgtgaaacagct

SEQ ID NO: 110219 - DNA, 25 bp, Probe Sequence
gtctctcacggcttgtaaattgtga

SEQ ID NO: 110220 - DNA, 25 bp, Probe Sequence
tcagatagaaaaggaggcaagagtt

SEQ ID NO: 110221 - DNA, 25 bp, Probe Sequence
cccaatcatctttcctgttccagag

SEQ ID NO: 110222 - DNA, 25 bp, Probe Sequence
atagaaaaggaggcaagagttgttc

SEQ ID NO: 110223 - DNA, 25 bp, Probe Sequence
gatagaaaaggaggcaagagttgtt

SEQ ID NO: 110224 - DNA, 25 bp, Probe Sequence
cagatagaaaaggaggcaagagttg

SEQ ID NO: 110225 - DNA, 25 bp, Probe Sequence
agatagaaaaggaggcaagagttgt

SEQ ID NO: 110226 - DNA, 25 bp, Probe Sequence
ctcagatagaaaaggaggcaagagt

SEQ ID NO: 110227 - DNA, 25 bp, Probe Sequence
gctcagatagaaaaggaggcaagag

SEQ ID NO: 110228 - DNA, 25 bp, Probe Sequence
tagaaaaggaggcaagagttgttcc

SEQ ID NO: 110229 - DNA, 25 bp, Probe Sequence
ccttccctattaaaattagaacctt

SEQ ID NO: 110230 - DNA, 25 bp, Probe Sequence
ccggttctcacaccatccagataat

SEQ ID NO: 110231 - DNA, 25 bp, Probe Sequence
ctccccaatcatctttcctgttcca

SEQ ID NO: 110232 - DNA, 25 bp, Probe Sequence
agctcagatagaaaaggaggcaaga

SEQ ID NO: 110233 - DNA, 25 bp, Probe Sequence
ccccaatcatctttcctgttccaga

SEQ ID NO: 110234 - DNA, 25 bp, Probe Sequence
tccccaatcatctttcctgttccag

SEQ ID NO: 110235 - DNA, 25 bp, Probe Sequence
cctccccaatcatctttcctgttcc

SEQ ID NO: 110236 - DNA, 25 bp, Probe Sequence
ccctccccaatcatctttcctgttc

SEQ ID NO: 110237 - DNA, 25 bp, Probe Sequence
tccctattaaaattagaaccttagt

SEQ ID NO: 110238 - DNA, 25 bp, Probe Sequence
gaagagctcagatagaaaaggaggc

SEQ ID NO: 110239 - DNA, 25 bp, Probe Sequence
gagctcagatagaaaaggaggcaag

SEQ ID NO: 110240 - DNA, 25 bp, Probe Sequence
gaaaaggaggcaagagttgttcctg

SEQ ID NO: 110241 - DNA, 25 bp, Probe Sequence
agagctcagatagaaaaggaggcaa

SEQ ID NO: 110242 - DNA, 25 bp, Probe Sequence
aagagctcagatagaaaaggaggca

SEQ ID NO: 110243 - DNA, 25 bp, Probe Sequence
agaaaaggaggcaagagttgttcct

SEQ ID NO: 110244 - DNA, 25 bp, Probe Sequence
tatgaatctagttggttgatgcctt

SEQ ID NO: 110245 - DNA, 25 bp, Probe Sequence
gtatgaatctagttggttgatgcct

SEQ ID NO: 110246 - DNA, 25 bp, Probe Sequence
agtatgaatctagttggttgatgcc

SEQ ID NO: 110247 - DNA, 25 bp, Probe Sequence
aagtatgaatctagttggttgatgc

SEQ ID NO: 110248 - DNA, 25 bp, Probe Sequence
gttacattgaatggtcagcgttaag

SEQ ID NO: 110249 - DNA, 25 bp, Probe Sequence
ttacattgaatggtcagcgttaagt

SEQ ID NO: 110250 - DNA, 25 bp, Probe Sequence
tacattgaatggtcagcgttaagtg

SEQ ID NO: 110251 - DNA, 25 bp, Probe Sequence
aacaagtatgaatctagttggttga

SEQ ID NO: 110252 - DNA, 25 bp, Probe Sequence
ggttacattgaatggtcagcgttaa

SEQ ID NO: 110253 - DNA, 25 bp, Probe Sequence
acaagtatgaatctagttggttgat

SEQ ID NO: 110254 - DNA, 25 bp, Probe Sequence
caagtatgaatctagttggttgatg

SEQ ID NO: 110255 - DNA, 25 bp, Probe Sequence
aagcatggttacattgaatggtcag

SEQ ID NO: 110256 - DNA, 25 bp, Probe Sequence
cattgaatggtcagcgttaagtgag

SEQ ID NO: 110257 - DNA, 25 bp, Probe Sequence
atgaatctagttggttgatgccttt

SEQ ID NO: 110258 - DNA, 25 bp, Probe Sequence
tggttacattgaatggtcagcgtta

SEQ ID NO: 110259 - DNA, 25 bp, Probe Sequence
acattgaatggtcagcgttaagtga

SEQ ID NO: 110260 - DNA, 25 bp, Probe Sequence
gaaagcatggttacattgaatggtc

SEQ ID NO: 110261 - DNA, 25 bp, Probe Sequence
atggttacattgaatggtcagcgtt

SEQ ID NO: 110262 - DNA, 25 bp, Probe Sequence
ttgggaaagcatggttacattgaat

SEQ ID NO: 110263 - DNA, 25 bp, Probe Sequence
tcaaacaagtatgaatctagttggt

SEQ ID NO: 110264 - DNA, 25 bp, Probe Sequence
aaagcatggttacattgaatggtca

SEQ ID NO: 110265 - DNA, 25 bp, Probe Sequence
ggaaagcatggttacattgaatggt

SEQ ID NO: 110266 - DNA, 25 bp, Probe Sequence
tgggaaagcatggttacattgaatg

SEQ ID NO: 110267 - DNA, 25 bp, Probe Sequence
attgaatggtcagcgttaagtgagc

SEQ ID NO: 110268 - DNA, 25 bp, Probe Sequence
gccacttagcacttgtataatcaga

SEQ ID NO: 110269 - DNA, 25 bp, Probe Sequence
ccacttagcacttgtataatcagac

SEQ ID NO: 110270 - DNA, 25 bp, Probe Sequence
tagcacttgtataatcagactggaa

SEQ ID NO: 110271 - DNA, 25 bp, Probe Sequence
ttagcacttgtataatcagactgga

SEQ ID NO: 110272 - DNA, 25 bp, Probe Sequence
cttagcacttgtataatcagactgg

SEQ ID NO: 110273 - DNA, 25 bp, Probe Sequence
cacttagcacttgtataatcagact

SEQ ID NO: 110274 - DNA, 25 bp, Probe Sequence
tccagttacattgtcttactctctt

SEQ ID NO: 110275 - DNA, 25 bp, Probe Sequence
ttccagttacattgtcttactctct

SEQ ID NO: 110276 - DNA, 25 bp, Probe Sequence
tcttccagttacattgtcttactct

SEQ ID NO: 110277 - DNA, 25 bp, Probe Sequence
acttagcacttgtataatcagactg

SEQ ID NO: 110278 - DNA, 25 bp, Probe Sequence
cttccagttacattgtcttactctc

SEQ ID NO: 110279 - DNA, 25 bp, Probe Sequence
caccattcaggaagattacctaaga

SEQ ID NO: 110280 - DNA, 25 bp, Probe Sequence
ataccttgatgccatgatgaatgag

SEQ ID NO: 110281 - DNA, 25 bp, Probe Sequence
attcaggaagattacctaagagagc

SEQ ID NO: 110282 - DNA, 25 bp, Probe Sequence
accattcaggaagattacctaagag

SEQ ID NO: 110283 - DNA, 25 bp, Probe Sequence
atcttccagttacattgtcttactc

SEQ ID NO: 110284 - DNA, 25 bp, Probe Sequence
ccattcaggaagattacctaagaga

SEQ ID NO: 110285 - DNA, 25 bp, Probe Sequence
cataccttgatgccatgatgaatga

SEQ ID NO: 110286 - DNA, 25 bp, Probe Sequence
gcaccattcaggaagattacctaag

SEQ ID NO: 110287 - DNA, 25 bp, Probe Sequence
aatcttccagttacattgtcttact

SEQ ID NO: 110288 - DNA, 25 bp, Probe Sequence
ccaaagacaaagatgactgaaagaa

SEQ ID NO: 110289 - DNA, 25 bp, Probe Sequence
cattcaggaagattacctaagagag

SEQ ID NO: 110290 - DNA, 25 bp, Probe Sequence
gaagattacctaagagagctgctga

SEQ ID NO: 110291 - DNA, 25 bp, Probe Sequence
agcacttgtataatcagactggaaa

SEQ ID NO: 110292 - DNA, 25 bp, Probe Sequence
attatctccactttcaatctccctc

SEQ ID NO: 110293 - DNA, 25 bp, Probe Sequence
tttgttgaatgtctcctctctcttt

SEQ ID NO: 110294 - DNA, 25 bp, Probe Sequence
tacttgtttgttgaatgtctcctct

SEQ ID NO: 110295 - DNA, 25 bp, Probe Sequence
catcatcctaagcccaaagtagaaa

SEQ ID NO: 110296 - DNA, 25 bp, Probe Sequence
aaatggtagaaggtagtgggtagaa

SEQ ID NO: 110297 - DNA, 25 bp, Probe Sequence
cccattccatttgtccagttaatac

SEQ ID NO: 110298 - DNA, 25 bp, Probe Sequence
gtttgttgaatgtctcctctctctt

SEQ ID NO: 110299 - DNA, 25 bp, Probe Sequence
atacttgtttgttgaatgtctcctc

SEQ ID NO: 110300 - DNA, 25 bp, Probe Sequence
ggtagaagtcactatataaggaagg

SEQ ID NO: 110301 - DNA, 25 bp, Probe Sequence
ttgtttgttgaatgtctcctctctc

SEQ ID NO: 110302 - DNA, 25 bp, Probe Sequence
cttgtttgttgaatgtctcctctct

SEQ ID NO: 110303 - DNA, 25 bp, Probe Sequence
taagtatgtccatttcccatctcag

SEQ ID NO: 110304 - DNA, 25 bp, Probe Sequence
ctaagtatgtccatttcccatctca

SEQ ID NO: 110305 - DNA, 25 bp, Probe Sequence
tctaagtatgtccatttcccatctc

SEQ ID NO: 110306 - DNA, 25 bp, Probe Sequence
aatggtagaaggtagtgggtagaag

SEQ ID NO: 110307 - DNA, 25 bp, Probe Sequence
ttgttgaatgtctcctctctctttc

SEQ ID NO: 110308 - DNA, 25 bp, Probe Sequence
ggaaatccaggctattaaagtcact

SEQ ID NO: 110309 - DNA, 25 bp, Probe Sequence
acttgtttgttgaatgtctcctctc

SEQ ID NO: 110310 - DNA, 25 bp, Probe Sequence
aatacttgtttgttgaatgtctcct

SEQ ID NO: 110311 - DNA, 25 bp, Probe Sequence
ttctaagtatgtccatttcccatct

SEQ ID NO: 110312 - DNA, 25 bp, Probe Sequence
ggtgtcagcagtattatctccactt

SEQ ID NO: 110313 - DNA, 25 bp, Probe Sequence
tattatctccactttcaatctccct

SEQ ID NO: 110314 - DNA, 25 bp, Probe Sequence
gtattatctccactttcaatctccc

SEQ ID NO: 110315 - DNA, 25 bp, Probe Sequence
gagagggaaatccaggctattaaag

SEQ ID NO: 110316 - DNA, 25 bp, Probe Sequence
tgtctcctgttttgtctccccttag

SEQ ID NO: 110317 - DNA, 25 bp, Probe Sequence
ctgtctcctgttttgtctcccctta

SEQ ID NO: 110318 - DNA, 25 bp, Probe Sequence
ctcctgttttgtctccccttaggtc

SEQ ID NO: 110319 - DNA, 25 bp, Probe Sequence
gtctcctgttttgtctccccttagg

SEQ ID NO: 110320 - DNA, 25 bp, Probe Sequence
tctcctgttttgtctccccttaggt

SEQ ID NO: 110321 - DNA, 25 bp, Probe Sequence
ctgacctgtctcctgttttgtctcc

SEQ ID NO: 110322 - DNA, 25 bp, Probe Sequence
cctgacctgtctcctgttttgtctc

SEQ ID NO: 110323 - DNA, 25 bp, Probe Sequence
gacctgacctgtctcctgttttgtc

SEQ ID NO: 110324 - DNA, 25 bp, Probe Sequence
ttctctaccctcgagtggtgagtat

SEQ ID NO: 110325 - DNA, 25 bp, Probe Sequence
tctctaccctcgagtggtgagtatc

SEQ ID NO: 110326 - DNA, 25 bp, Probe Sequence
gttctctaccctcgagtggtgagta

SEQ ID NO: 110327 - DNA, 25 bp, Probe Sequence
taaatggaatcaagactgtggagac

SEQ ID NO: 110328 - DNA, 25 bp, Probe Sequence
ttaaatggaatcaagactgtggaga

SEQ ID NO: 110329 - DNA, 25 bp, Probe Sequence
cttatgctggctttgtcttaaatgg

SEQ ID NO: 110330 - DNA, 25 bp, Probe Sequence
ccttatgctggctttgtcttaaatg

SEQ ID NO: 110331 - DNA, 25 bp, Probe Sequence
aggttaaagatgaatttccactgct

SEQ ID NO: 110332 - DNA, 25 bp, Probe Sequence
taggttaaagatgaatttccactgc

SEQ ID NO: 110333 - DNA, 25 bp, Probe Sequence
cttaaatggaatcaagactgtggag

SEQ ID NO: 110334 - DNA, 25 bp, Probe Sequence
tatgctggctttgtcttaaatggaa

SEQ ID NO: 110335 - DNA, 25 bp, Probe Sequence
ttatgctggctttgtcttaaatgga

SEQ ID NO: 110336 - DNA, 25 bp, Probe Sequence
ggttaaagatgaatttccactgctt

SEQ ID NO: 110337 - DNA, 25 bp, Probe Sequence
tggctttgtcttaaatggaatcaag

SEQ ID NO: 110338 - DNA, 25 bp, Probe Sequence
ctggctttgtcttaaatggaatcaa

SEQ ID NO: 110339 - DNA, 25 bp, Probe Sequence
gtaaagaaaccaagtggaagagtgt

SEQ ID NO: 110340 - DNA, 25 bp, Probe Sequence
atgctggctttgtcttaaatggaat

SEQ ID NO: 110341 - DNA, 25 bp, Probe Sequence
taaagaaaccaagtggaagagtgtt

SEQ ID NO: 110342 - DNA, 25 bp, Probe Sequence
taggaaaggaggcaaggatgtattc

SEQ ID NO: 110343 - DNA, 25 bp, Probe Sequence
gaagtacctgactgtgatttcaaac

SEQ ID NO: 110344 - DNA, 25 bp, Probe Sequence
agaagtacctgactgtgatttcaaa

SEQ ID NO: 110345 - DNA, 25 bp, Probe Sequence
gaagcagaagtacctgactgtgatt

SEQ ID NO: 110346 - DNA, 25 bp, Probe Sequence
gctggctttgtcttaaatggaatca

SEQ ID NO: 110347 - DNA, 25 bp, Probe Sequence
tgctggctttgtcttaaatggaatc

SEQ ID NO: 110348 - DNA, 25 bp, Probe Sequence
ctaggaaaggaggcaaggatgtatt

SEQ ID NO: 110349 - DNA, 25 bp, Probe Sequence
cgtgacgcagacctgtataaattag

SEQ ID NO: 110350 - DNA, 25 bp, Probe Sequence
taaacaggttcctttgctcagatga

SEQ ID NO: 110351 - DNA, 25 bp, Probe Sequence
ttacacagactgagaaggacaagac

SEQ ID NO: 110352 - DNA, 25 bp, Probe Sequence
gttacacagactgagaaggacaaga

SEQ ID NO: 110353 - DNA, 25 bp, Probe Sequence
aagaggttacacagactgagaagga

SEQ ID NO: 110354 - DNA, 25 bp, Probe Sequence
taatctgagctacttagagtgtggt

SEQ ID NO: 110355 - DNA, 25 bp, Probe Sequence
ggttacacagactgagaaggacaag

SEQ ID NO: 110356 - DNA, 25 bp, Probe Sequence
tgttcagacctcacatcttctaagc

SEQ ID NO: 110357 - DNA, 25 bp, Probe Sequence
gttcagacctcacatcttctaagcc

SEQ ID NO: 110358 - DNA, 25 bp, Probe Sequence
ctaatctgagctacttagagtgtgg

SEQ ID NO: 110359 - DNA, 25 bp, Probe Sequence
ccttctcatttgcctagtatctctg

SEQ ID NO: 110360 - DNA, 25 bp, Probe Sequence
aatctgagctacttagagtgtggtc

SEQ ID NO: 110361 - DNA, 25 bp, Probe Sequence
aggttacacagactgagaaggacaa

SEQ ID NO: 110362 - DNA, 25 bp, Probe Sequence
cttctcatttgcctagtatctctgc

SEQ ID NO: 110363 - DNA, 25 bp, Probe Sequence
cccttctcatttgcctagtatctct

SEQ ID NO: 110364 - DNA, 25 bp, Probe Sequence
agaggttacacagactgagaaggac

SEQ ID NO: 110365 - DNA, 25 bp, Probe Sequence
gacctgtttccttgagactttccta

SEQ ID NO: 110366 - DNA, 25 bp, Probe Sequence
aaagaggttacacagactgagaagg

SEQ ID NO: 110367 - DNA, 25 bp, Probe Sequence
tacacagactgagaaggacaagacc

SEQ ID NO: 110368 - DNA, 25 bp, Probe Sequence
gaggttacacagactgagaaggaca

SEQ ID NO: 110369 - DNA, 25 bp, Probe Sequence
atctgagctacttagagtgtggtct

SEQ ID NO: 110370 - DNA, 25 bp, Probe Sequence
atgttcagacctcacatcttctaag

SEQ ID NO: 110371 - DNA, 25 bp, Probe Sequence
ctaagcctcatttctcatgttcaga

SEQ ID NO: 110372 - DNA, 25 bp, Probe Sequence
taagcctcatttctcatgttcagac

SEQ ID NO: 110373 - DNA, 25 bp, Probe Sequence
acctgtttccttgagactttcctag

SEQ ID NO: 110374 - DNA, 25 bp, Probe Sequence
catgttcagacctcacatcttctaa

SEQ ID NO: 110375 - DNA, 25 bp, Probe Sequence
aattgctcaactaagaccaagtcct

SEQ ID NO: 110376 - DNA, 25 bp, Probe Sequence
catactatcctcctagccaaattgc

SEQ ID NO: 110377 - DNA, 25 bp, Probe Sequence
gcatactatcctcctagccaaattg

SEQ ID NO: 110378 - DNA, 25 bp, Probe Sequence
attgctcaactaagaccaagtcctc

SEQ ID NO: 110379 - DNA, 25 bp, Probe Sequence
caaattgctcaactaagaccaagtc

SEQ ID NO: 110380 - DNA, 25 bp, Probe Sequence
ccaaattgctcaactaagaccaagt

SEQ ID NO: 110381 - DNA, 25 bp, Probe Sequence
aaattgctcaactaagaccaagtcc

SEQ ID NO: 110382 - DNA, 25 bp, Probe Sequence
tgcatactatcctcctagccaaatt

SEQ ID NO: 110383 - DNA, 25 bp, Probe Sequence
gccaaattgctcaactaagaccaag

SEQ ID NO: 110384 - DNA, 25 bp, Probe Sequence
ctgcatactatcctcctagccaaat

SEQ ID NO: 110385 - DNA, 25 bp, Probe Sequence
atactatcctcctagccaaattgct

SEQ ID NO: 110386 - DNA, 25 bp, Probe Sequence
agacctcatcctgctgttcatgtac

SEQ ID NO: 110387 - DNA, 25 bp, Probe Sequence
ctcctagccaaattgctcaactaag

SEQ ID NO: 110388 - DNA, 25 bp, Probe Sequence
tactatcctcctagccaaattgctc

SEQ ID NO: 110389 - DNA, 25 bp, Probe Sequence
ctagccaaattgctcaactaagacc

SEQ ID NO: 110390 - DNA, 25 bp, Probe Sequence
cctagccaaattgctcaactaagac

SEQ ID NO: 110391 - DNA, 25 bp, Probe Sequence
tcctagccaaattgctcaactaaga

SEQ ID NO: 110392 - DNA, 25 bp, Probe Sequence
cagacctcatcctgctgttcatgta

SEQ ID NO: 110393 - DNA, 25 bp, Probe Sequence
ctatcctcctagccaaattgctcaa

SEQ ID NO: 110394 - DNA, 25 bp, Probe Sequence
tagccaaattgctcaactaagacca

SEQ ID NO: 110395 - DNA, 25 bp, Probe Sequence
tatcctcctagccaaattgctcaac

SEQ ID NO: 110396 - DNA, 25 bp, Probe Sequence
cctcctagccaaattgctcaactaa

SEQ ID NO: 110397 - DNA, 25 bp, Probe Sequence
agccaaattgctcaactaagaccaa

SEQ ID NO: 110398 - DNA, 25 bp, Probe Sequence
actatcctcctagccaaattgctca

SEQ ID NO: 110399 - DNA, 25 bp, Probe Sequence
tacatgaaggaggtgttgactaatc

SEQ ID NO: 110400 - DNA, 25 bp, Probe Sequence
gtacatgaaggaggtgttgactaat

SEQ ID NO: 110401 - DNA, 25 bp, Probe Sequence
ggagctactaggtatatggttcatt

SEQ ID NO: 110402 - DNA, 25 bp, Probe Sequence
agtacatgaaggaggtgttgactaa

SEQ ID NO: 110403 - DNA, 25 bp, Probe Sequence
ttcagtacatctggtagaggtaagc

SEQ ID NO: 110404 - DNA, 25 bp, Probe Sequence
aagcattgacactgactaaagagaa

SEQ ID NO: 110405 - DNA, 25 bp, Probe Sequence
cattgacactgactaaagagaaggt

SEQ ID NO: 110406 - DNA, 25 bp, Probe Sequence
gagtacatgaaggaggtgttgacta

SEQ ID NO: 110407 - DNA, 25 bp, Probe Sequence
agcattgacactgactaaagagaag

SEQ ID NO: 110408 - DNA, 25 bp, Probe Sequence
gactaatccagccaagggttattat

SEQ ID NO: 110409 - DNA, 25 bp, Probe Sequence
ctaatccagccaagggttattatgt

SEQ ID NO: 110410 - DNA, 25 bp, Probe Sequence
actaatccagccaagggttattatg

SEQ ID NO: 110411 - DNA, 25 bp, Probe Sequence
aaataaagtctactggtcccatcac

SEQ ID NO: 110412 - DNA, 25 bp, Probe Sequence
taatccagccaagggttattatgtg

SEQ ID NO: 110413 - DNA, 25 bp, Probe Sequence
atgaaggaggtgttgactaatccag

SEQ ID NO: 110414 - DNA, 25 bp, Probe Sequence
atccagccaagggttattatgtgta

SEQ ID NO: 110415 - DNA, 25 bp, Probe Sequence
gcattgacactgactaaagagaagg

SEQ ID NO: 110416 - DNA, 25 bp, Probe Sequence
caagcattgacactgactaaagaga

SEQ ID NO: 110417 - DNA, 25 bp, Probe Sequence
tgactaatccagccaagggttatta

SEQ ID NO: 110418 - DNA, 25 bp, Probe Sequence
atatgaaaggtgtcactaagtctgg

SEQ ID NO: 110419 - DNA, 25 bp, Probe Sequence
aataaagtctactggtcccatcact

SEQ ID NO: 110420 - DNA, 25 bp, Probe Sequence
attgacactgactaaagagaaggtc

SEQ ID NO: 110421 - DNA, 25 bp, Probe Sequence
acctgaaataagtcaaatctttggg

SEQ ID NO: 110422 - DNA, 25 bp, Probe Sequence
ttaagtgagattcaagcattgacac

SEQ ID NO: 110423 - DNA, 25 bp, Probe Sequence
aatccgatacatatacagcctacag

SEQ ID NO: 110424 - DNA, 25 bp, Probe Sequence
atccgatacatatacagcctacagt

SEQ ID NO: 110425 - DNA, 25 bp, Probe Sequence
attaacagaacaattagcaggacca

SEQ ID NO: 110426 - DNA, 25 bp, Probe Sequence
cagaacaggcaacagcattattaag

SEQ ID NO: 110427 - DNA, 25 bp, Probe Sequence
tccgatacatatacagcctacagtg

SEQ ID NO: 110428 - DNA, 25 bp, Probe Sequence
ttaacagaacaattagcaggaccac

SEQ ID NO: 110429 - DNA, 25 bp, Probe Sequence
ttgaaggcagcataattcgttgtat

SEQ ID NO: 110430 - DNA, 25 bp, Probe Sequence
aattaacagaacaattagcaggacc

SEQ ID NO: 110431 - DNA, 25 bp, Probe Sequence
taacagaacaattagcaggaccact

SEQ ID NO: 110432 - DNA, 25 bp, Probe Sequence
agaacaggcaacagcattattaagc

SEQ ID NO: 110433 - DNA, 25 bp, Probe Sequence
gcagaacaggcaacagcattattaa

SEQ ID NO: 110434 - DNA, 25 bp, Probe Sequence
tgctacttcttctgatgtaatagag

SEQ ID NO: 110435 - DNA, 25 bp, Probe Sequence
ccgatacatatacagcctacagtgc

SEQ ID NO: 110436 - DNA, 25 bp, Probe Sequence
aacagaacaattagcaggaccactt

SEQ ID NO: 110437 - DNA, 25 bp, Probe Sequence
gctacttcttctgatgtaatagaga

SEQ ID NO: 110438 - DNA, 25 bp, Probe Sequence
gatacatatacagcctacagtgcaa

SEQ ID NO: 110439 - DNA, 25 bp, Probe Sequence
tgtaatagagatgaaaggacgagtg

SEQ ID NO: 110440 - DNA, 25 bp, Probe Sequence
aaggcagcataattcgttgtatgag

SEQ ID NO: 110441 - DNA, 25 bp, Probe Sequence
gaaggcagcataattcgttgtatga

SEQ ID NO: 110442 - DNA, 25 bp, Probe Sequence
gtaatagagatgaaaggacgagtgg

SEQ ID NO: 110443 - DNA, 25 bp, Probe Sequence
gggatttgctacttcttctgatgta

SEQ ID NO: 110444 - DNA, 25 bp, Probe Sequence
tttaagaaggttgggatttgctact

SEQ ID NO: 110445 - DNA, 25 bp, Probe Sequence
aagaaatccgatacatatacagcct

SEQ ID NO: 110446 - DNA, 25 bp, Probe Sequence
aaatccgatacatatacagcctaca

SEQ ID NO: 110447 - DNA, 25 bp, Probe Sequence
cattttacagatggagaaaagtggg

SEQ ID NO: 110448 - DNA, 25 bp, Probe Sequence
gcctcattttacagatggagaaaag

SEQ ID NO: 110449 - DNA, 25 bp, Probe Sequence
tcattttacagatggagaaaagtgg

SEQ ID NO: 110450 - DNA, 25 bp, Probe Sequence
attttacagatggagaaaagtgggg

SEQ ID NO: 110451 - DNA, 25 bp, Probe Sequence
cctcattttacagatggagaaaagt

SEQ ID NO: 110452 - DNA, 25 bp, Probe Sequence
ctcattttacagatggagaaaagtg

SEQ ID NO: 110453 - DNA, 25 bp, Probe Sequence
ttttacagatggagaaaagtggggc

SEQ ID NO: 110454 - DNA, 25 bp, Probe Sequence
ggcctcattttacagatggagaaaa

SEQ ID NO: 110455 - DNA, 25 bp, Probe Sequence
tttacagatggagaaaagtggggcg

SEQ ID NO: 110456 - DNA, 25 bp, Probe Sequence
cggcctcattttacagatggagaaa

SEQ ID NO: 110457 - DNA, 25 bp, Probe Sequence
ccggcctcattttacagatggagaa

SEQ ID NO: 110458 - DNA, 25 bp, Probe Sequence
tagagaggaattcgtttccgggttg

SEQ ID NO: 110459 - DNA, 25 bp, Probe Sequence
gtagagaggaattcgtttccgggtt

SEQ ID NO: 110460 - DNA, 25 bp, Probe Sequence
actacaatacaggcatgacatcaat

SEQ ID NO: 110461 - DNA, 25 bp, Probe Sequence
accttaccaagccaatcattgataa

SEQ ID NO: 110462 - DNA, 25 bp, Probe Sequence
ccttaccaagccaatcattgataat

SEQ ID NO: 110463 - DNA, 25 bp, Probe Sequence
ctacaatacaggcatgacatcaatg

SEQ ID NO: 110464 - DNA, 25 bp, Probe Sequence
tacaatacaggcatgacatcaatga

SEQ ID NO: 110465 - DNA, 25 bp, Probe Sequence
gactacaatacaggcatgacatcaa

SEQ ID NO: 110466 - DNA, 25 bp, Probe Sequence
gaccttaccaagccaatcattgata

SEQ ID NO: 110467 - DNA, 25 bp, Probe Sequence
acaatacaggcatgacatcaatgaa

SEQ ID NO: 110468 - DNA, 25 bp, Probe Sequence
ttgactacaatacaggcatgacatc

SEQ ID NO: 110469 - DNA, 25 bp, Probe Sequence
ttaatgacgaccttaccaagccaat

SEQ ID NO: 110470 - DNA, 25 bp, Probe Sequence
cagatttgtagggagaatgaatgtg

SEQ ID NO: 110471 - DNA, 25 bp, Probe Sequence
ccagatttgtagggagaatgaatgt

SEQ ID NO: 110472 - DNA, 25 bp, Probe Sequence
tgactacaatacaggcatgacatca

SEQ ID NO: 110473 - DNA, 25 bp, Probe Sequence
taatgacgaccttaccaagccaatc

SEQ ID NO: 110474 - DNA, 25 bp, Probe Sequence
atcatcaatgtgtccaacaggtact

SEQ ID NO: 110475 - DNA, 25 bp, Probe Sequence
catcatcaatgtgtccaacaggtac

SEQ ID NO: 110476 - DNA, 25 bp, Probe Sequence
agatttgtagggagaatgaatgtgc

SEQ ID NO: 110477 - DNA, 25 bp, Probe Sequence
tgagaggactttgactacaatacag

SEQ ID NO: 110478 - DNA, 25 bp, Probe Sequence
gagaggactttgactacaatacagg

SEQ ID NO: 110479 - DNA, 25 bp, Probe Sequence
tcatcaatgtgtccaacaggtactt

SEQ ID NO: 110480 - DNA, 25 bp, Probe Sequence
ttgagaggactttgactacaataca

SEQ ID NO: 110481 - DNA, 25 bp, Probe Sequence
gccagatttgtagggagaatgaatg

SEQ ID NO: 110482 - DNA, 25 bp, Probe Sequence
agccagatttgtagggagaatgaat

SEQ ID NO: 110483 - DNA, 25 bp, Probe Sequence
ttacctgattgccatgtcttcaatt

SEQ ID NO: 110484 - DNA, 25 bp, Probe Sequence
atgtatggaggtgtgattctctgag

SEQ ID NO: 110485 - DNA, 25 bp, Probe Sequence
tatggaggtgtgattctctgaggaa

SEQ ID NO: 110486 - DNA, 25 bp, Probe Sequence
catgtatggaggtgtgattctctga

SEQ ID NO: 110487 - DNA, 25 bp, Probe Sequence
gtatggaggtgtgattctctgagga

SEQ ID NO: 110488 - DNA, 25 bp, Probe Sequence
tgtatggaggtgtgattctctgagg

SEQ ID NO: 110489 - DNA, 25 bp, Probe Sequence
gcatgtatggaggtgtgattctctg

SEQ ID NO: 110490 - DNA, 25 bp, Probe Sequence
atggaggtgtgattctctgaggaaa

SEQ ID NO: 110491 - DNA, 25 bp, Probe Sequence
ggaggtgtgattctctgaggaaaga

SEQ ID NO: 110492 - DNA, 25 bp, Probe Sequence
ggcatgtatggaggtgtgattctct

SEQ ID NO: 110493 - DNA, 25 bp, Probe Sequence
tggaggtgtgattctctgaggaaag

SEQ ID NO: 110494 - DNA, 25 bp, Probe Sequence
gaggtgtgattctctgaggaaagag

SEQ ID NO: 110495 - DNA, 25 bp, Probe Sequence
gggcatgtatggaggtgtgattctc

SEQ ID NO: 110496 - DNA, 25 bp, Probe Sequence
aattcattctgtaggttgttctgcc

SEQ ID NO: 110497 - DNA, 25 bp, Probe Sequence
aaattcattctgtaggttgttctgc

SEQ ID NO: 110498 - DNA, 25 bp, Probe Sequence
attcattctgtaggttgttctgcct

SEQ ID NO: 110499 - DNA, 25 bp, Probe Sequence
ttcattctgtaggttgttctgcctc

SEQ ID NO: 110500 - DNA, 25 bp, Probe Sequence
cattctgtaggttgttctgcctcaa

SEQ ID NO: 110501 - DNA, 25 bp, Probe Sequence
tcattctgtaggttgttctgcctca

SEQ ID NO: 110502 - DNA, 25 bp, Probe Sequence
attctgtaggttgttctgcctcaaa

SEQ ID NO: 110503 - DNA, 25 bp, Probe Sequence
ttctgtaggttgttctgcctcaaag

SEQ ID NO: 110504 - DNA, 25 bp, Probe Sequence
aaaattcattctgtaggttgttctg

SEQ ID NO: 110505 - DNA, 25 bp, Probe Sequence
ctttaaaagtcagtgccaagtgagt

SEQ ID NO: 110506 - DNA, 25 bp, Probe Sequence
tttaaaagtcagtgccaagtgagtg

SEQ ID NO: 110507 - DNA, 25 bp, Probe Sequence
tctgtaggttgttctgcctcaaagg

SEQ ID NO: 110508 - DNA, 25 bp, Probe Sequence
gtatacctaagacttactgctttaa

SEQ ID NO: 110509 - DNA, 25 bp, Probe Sequence
ctgtaggttgttctgcctcaaaggt

SEQ ID NO: 110510 - DNA, 25 bp, Probe Sequence
agtatacctaagacttactgcttta

SEQ ID NO: 110511 - DNA, 25 bp, Probe Sequence
gctttaaaagtcagtgccaagtgag

SEQ ID NO: 110512 - DNA, 25 bp, Probe Sequence
aagtatacctaagacttactgcttt

SEQ ID NO: 110513 - DNA, 25 bp, Probe Sequence
tgtaggttgttctgcctcaaaggtg

SEQ ID NO: 110514 - DNA, 25 bp, Probe Sequence
ttaaaagtcagtgccaagtgagtgg

SEQ ID NO: 110515 - DNA, 25 bp, Probe Sequence
aaagtcagtgccaagtgagtggaaa

SEQ ID NO: 110516 - DNA, 25 bp, Probe Sequence
gtacccatgtcaccactgtcattcc

SEQ ID NO: 110517 - DNA, 25 bp, Probe Sequence
ctgctttaaaagtcagtgccaagtg

SEQ ID NO: 110518 - DNA, 25 bp, Probe Sequence
tgctttaaaagtcagtgccaagtga

SEQ ID NO: 110519 - DNA, 25 bp, Probe Sequence
tatacctaagacttactgctttaaa

SEQ ID NO: 110520 - DNA, 25 bp, Probe Sequence
ctgaagcaggagaatcactttaacc

SEQ ID NO: 110521 - DNA, 25 bp, Probe Sequence
tgaagcaggagaatcactttaaccc

SEQ ID NO: 110522 - DNA, 25 bp, Probe Sequence
gctgaagcaggagaatcactttaac

SEQ ID NO: 110523 - DNA, 25 bp, Probe Sequence
caacataatcccagcactttggaac

SEQ ID NO: 110524 - DNA, 25 bp, Probe Sequence
tttcgcaacataatcccagcacttt

SEQ ID NO: 110525 - DNA, 25 bp, Probe Sequence
gaagcaggagaatcactttaacccg

SEQ ID NO: 110526 - DNA, 25 bp, Probe Sequence
ggctgaagcaggagaatcactttaa

SEQ ID NO: 110527 - DNA, 25 bp, Probe Sequence
aggctgaagcaggagaatcacttta

SEQ ID NO: 110528 - DNA, 25 bp, Probe Sequence
ttcgcaacataatcccagcactttg

SEQ ID NO: 110529 - DNA, 25 bp, Probe Sequence
aacataatcccagcactttggaacg

SEQ ID NO: 110530 - DNA, 25 bp, Probe Sequence
aacactcagcttttcgcaacataat

SEQ ID NO: 110531 - DNA, 25 bp, Probe Sequence
acactcagcttttcgcaacataatc

SEQ ID NO: 110532 - DNA, 25 bp, Probe Sequence
gcaacataatcccagcactttggaa

SEQ ID NO: 110533 - DNA, 25 bp, Probe Sequence
ttttcgcaacataatcccagcactt

SEQ ID NO: 110534 - DNA, 25 bp, Probe Sequence
caacactcagcttttcgcaacataa

SEQ ID NO: 110535 - DNA, 25 bp, Probe Sequence
cactcagcttttcgcaacataatcc

SEQ ID NO: 110536 - DNA, 25 bp, Probe Sequence
cttttcgcaacataatcccagcact

SEQ ID NO: 110537 - DNA, 25 bp, Probe Sequence
ctcacatctgtaatcccagccaagg

SEQ ID NO: 110538 - DNA, 25 bp, Probe Sequence
gaggctgaagcaggagaatcacttt

SEQ ID NO: 110539 - DNA, 25 bp, Probe Sequence
aaataagctgggtgtggtggaacat

SEQ ID NO: 110540 - DNA, 25 bp, Probe Sequence
tggcaaaaccccatctttaccaaaa

SEQ ID NO: 110541 - DNA, 25 bp, Probe Sequence
tcagcttttcgcaacataatcccag

SEQ ID NO: 110542 - DNA, 25 bp, Probe Sequence
ctcagcttttcgcaacataatccca

SEQ ID NO: 110543 - DNA, 25 bp, Probe Sequence
actcagcttttcgcaacataatccc

SEQ ID NO: 110544 - DNA, 25 bp, Probe Sequence
atctttagcatccttctcgtctttg

SEQ ID NO: 110545 - DNA, 25 bp, Probe Sequence
catctttagcatccttctcgtcttt

SEQ ID NO: 110546 - DNA, 25 bp, Probe Sequence
gattctcctgctcttaactcgatga

SEQ ID NO: 110547 - DNA, 25 bp, Probe Sequence
tcatctttagcatccttctcgtctt

SEQ ID NO: 110548 - DNA, 25 bp, Probe Sequence
attctcctgctcttaactcgatgac

SEQ ID NO: 110549 - DNA, 25 bp, Probe Sequence
tccataccctaaattctgagtttca

SEQ ID NO: 110550 - DNA, 25 bp, Probe Sequence
tctttagcatccttctcgtctttga

SEQ ID NO: 110551 - DNA, 25 bp, Probe Sequence
gctccataccctaaattctgagttt

SEQ ID NO: 110552 - DNA, 25 bp, Probe Sequence
ctcatctttagcatccttctcgtct

SEQ ID NO: 110553 - DNA, 25 bp, Probe Sequence
tcatctgtcccttcactgtttagag

SEQ ID NO: 110554 - DNA, 25 bp, Probe Sequence
ctccataccctaaattctgagtttc

SEQ ID NO: 110555 - DNA, 25 bp, Probe Sequence
aagtcatctgtcccttcactgttta

SEQ ID NO: 110556 - DNA, 25 bp, Probe Sequence
gtcatctgtcccttcactgtttaga

SEQ ID NO: 110557 - DNA, 25 bp, Probe Sequence
tagcatccttctcgtctttgactat

SEQ ID NO: 110558 - DNA, 25 bp, Probe Sequence
aattctaaatccttaacatccaggc

SEQ ID NO: 110559 - DNA, 25 bp, Probe Sequence
agtcatctgtcccttcactgtttag

SEQ ID NO: 110560 - DNA, 25 bp, Probe Sequence
ttagcatccttctcgtctttgacta

SEQ ID NO: 110561 - DNA, 25 bp, Probe Sequence
ctcctcatctttagcatccttctcg

SEQ ID NO: 110562 - DNA, 25 bp, Probe Sequence
ctcctgctcttaactcgatgacttg

SEQ ID NO: 110563 - DNA, 25 bp, Probe Sequence
ctttagcatccttctcgtctttgac

SEQ ID NO: 110564 - DNA, 25 bp, Probe Sequence
cctcatctttagcatccttctcgtc

SEQ ID NO: 110565 - DNA, 25 bp, Probe Sequence
tctcctgctcttaactcgatgactt

SEQ ID NO: 110566 - DNA, 25 bp, Probe Sequence
ttctcctgctcttaactcgatgact

SEQ ID NO: 110567 - DNA, 25 bp, Probe Sequence
cccttctactacttgagactttatt

SEQ ID NO: 110568 - DNA, 25 bp, Probe Sequence
cagatgtatttgagttccgttatgc

SEQ ID NO: 110569 - DNA, 25 bp, Probe Sequence
acagatgtatttgagttccgttatg

SEQ ID NO: 110570 - DNA, 25 bp, Probe Sequence
agatgtatttgagttccgttatgcc

SEQ ID NO: 110571 - DNA, 25 bp, Probe Sequence
gctacagatgtatttgagttccgtt

SEQ ID NO: 110572 - DNA, 25 bp, Probe Sequence
ctacagatgtatttgagttccgtta

SEQ ID NO: 110573 - DNA, 25 bp, Probe Sequence
cacgaaagctacagatgtatttgag

SEQ ID NO: 110574 - DNA, 25 bp, Probe Sequence
acgaaagctacagatgtatttgagt

SEQ ID NO: 110575 - DNA, 25 bp, Probe Sequence
cgaaagctacagatgtatttgagtt

SEQ ID NO: 110576 - DNA, 25 bp, Probe Sequence
tacagatgtatttgagttccgttat

SEQ ID NO: 110577 - DNA, 25 bp, Probe Sequence
aagctacagatgtatttgagttccg

SEQ ID NO: 110578 - DNA, 25 bp, Probe Sequence
aaagctacagatgtatttgagttcc

SEQ ID NO: 110579 - DNA, 25 bp, Probe Sequence
gcacgaaagctacagatgtatttga

SEQ ID NO: 110580 - DNA, 25 bp, Probe Sequence
agctacagatgtatttgagttccgt

SEQ ID NO: 110581 - DNA, 25 bp, Probe Sequence
gaaagctacagatgtatttgagttc

SEQ ID NO: 110582 - DNA, 25 bp, Probe Sequence
ggcacgaaagctacagatgtatttg

SEQ ID NO: 110583 - DNA, 25 bp, Probe Sequence
atggcacgaaagctacagatgtatt

SEQ ID NO: 110584 - DNA, 25 bp, Probe Sequence
aatggcacgaaagctacagatgtat

SEQ ID NO: 110585 - DNA, 25 bp, Probe Sequence
tggcacgaaagctacagatgtattt

SEQ ID NO: 110586 - DNA, 25 bp, Probe Sequence
caatggcacgaaagctacagatgta

SEQ ID NO: 110587 - DNA, 25 bp, Probe Sequence
tatgtcaaagaattcagagatggct

SEQ ID NO: 110588 - DNA, 25 bp, Probe Sequence
ctatgtcaaagaattcagagatggc

SEQ ID NO: 110589 - DNA, 25 bp, Probe Sequence
cctatgtcaaagaattcagagatgg

SEQ ID NO: 110590 - DNA, 25 bp, Probe Sequence
ccctatgtcaaagaattcagagatg

SEQ ID NO: 110591 - DNA, 25 bp, Probe Sequence
atgtcaaagaattcagagatggctg

SEQ ID NO: 110592 - DNA, 25 bp, Probe Sequence
agactagcccctatgtcaaagaatt

SEQ ID NO: 110593 - DNA, 25 bp, Probe Sequence
gagactagcccctatgtcaaagaat

SEQ ID NO: 110594 - DNA, 25 bp, Probe Sequence
cccctatgtcaaagaattcagagat

SEQ ID NO: 110595 - DNA, 25 bp, Probe Sequence
ctagcccctatgtcaaagaattcag

SEQ ID NO: 110596 - DNA, 25 bp, Probe Sequence
tagcccctatgtcaaagaattcaga

SEQ ID NO: 110597 - DNA, 25 bp, Probe Sequence
actagcccctatgtcaaagaattca

SEQ ID NO: 110598 - DNA, 25 bp, Probe Sequence
ggagactagcccctatgtcaaagaa

SEQ ID NO: 110599 - DNA, 25 bp, Probe Sequence
gactagcccctatgtcaaagaattc

SEQ ID NO: 110600 - DNA, 25 bp, Probe Sequence
tgtcaaagaattcagagatggctgc

SEQ ID NO: 110601 - DNA, 25 bp, Probe Sequence
gcccctatgtcaaagaattcagaga

SEQ ID NO: 110602 - DNA, 25 bp, Probe Sequence
agcccctatgtcaaagaattcagag

SEQ ID NO: 110603 - DNA, 25 bp, Probe Sequence
cagttctcttacgtggactcagagg

SEQ ID NO: 110604 - DNA, 25 bp, Probe Sequence
gtcaaagaattcagagatggctgcc

SEQ ID NO: 110605 - DNA, 25 bp, Probe Sequence
gcagttctcttacgtggactcagag

SEQ ID NO: 110606 - DNA, 25 bp, Probe Sequence
ctgatgcaggaagatgaggccatac

SEQ ID NO: 110607 - DNA, 25 bp, Probe Sequence
tctgatgcaggaagatgaggccata

SEQ ID NO: 110608 - DNA, 25 bp, Probe Sequence
caaagaattcagagatggctgccag

SEQ ID NO: 110609 - DNA, 25 bp, Probe Sequence
tcaaagaattcagagatggctgcca

SEQ ID NO: 110610 - DNA, 25 bp, Probe Sequence
agttctcttacgtggactcagaggg

SEQ ID NO: 110611 - DNA, 25 bp, Probe Sequence
aacctggcactatatcctaactgta

SEQ ID NO: 110612 - DNA, 25 bp, Probe Sequence
acctggcactatatcctaactgtag

SEQ ID NO: 110613 - DNA, 25 bp, Probe Sequence
atctttcccttgtcactttatctcc

SEQ ID NO: 110614 - DNA, 25 bp, Probe Sequence
gtgctgtccaatagaaagataatgc

SEQ ID NO: 110615 - DNA, 25 bp, Probe Sequence
ctctgtatctttcccttgtcacttt

SEQ ID NO: 110616 - DNA, 25 bp, Probe Sequence
cttgtcactttatctcctcatccta

SEQ ID NO: 110617 - DNA, 25 bp, Probe Sequence
tctgtatctttcccttgtcacttta

SEQ ID NO: 110618 - DNA, 25 bp, Probe Sequence
ctttcccttgtcactttatctcctc

SEQ ID NO: 110619 - DNA, 25 bp, Probe Sequence
tgtcactttatctcctcatcctatc

SEQ ID NO: 110620 - DNA, 25 bp, Probe Sequence
agtgctgtccaatagaaagataatg

SEQ ID NO: 110621 - DNA, 25 bp, Probe Sequence
cactttatctcctcatcctatctca

SEQ ID NO: 110622 - DNA, 25 bp, Probe Sequence
gtcactttatctcctcatcctatct

SEQ ID NO: 110623 - DNA, 25 bp, Probe Sequence
ttcccttgtcactttatctcctcat

SEQ ID NO: 110624 - DNA, 25 bp, Probe Sequence
tctttcccttgtcactttatctcct

SEQ ID NO: 110625 - DNA, 25 bp, Probe Sequence
tctctgtatctttcccttgtcactt

SEQ ID NO: 110626 - DNA, 25 bp, Probe Sequence
aaacctggcactatatcctaactgt

SEQ ID NO: 110627 - DNA, 25 bp, Probe Sequence
ttgtcactttatctcctcatcctat

SEQ ID NO: 110628 - DNA, 25 bp, Probe Sequence
tttcccttgtcactttatctcctca

SEQ ID NO: 110629 - DNA, 25 bp, Probe Sequence
ttacttaggcagtgctgtccaatag

SEQ ID NO: 110630 - DNA, 25 bp, Probe Sequence
tcactttatctcctcatcctatctc

SEQ ID NO: 110631 - DNA, 25 bp, Probe Sequence
cagtgctgtccaatagaaagataat

SEQ ID NO: 110632 - DNA, 25 bp, Probe Sequence
ccttgtcactttatctcctcatcct

SEQ ID NO: 110633 - DNA, 25 bp, Probe Sequence
tcccttgtcactttatctcctcatc

SEQ ID NO: 110634 - DNA, 25 bp, Probe Sequence
tgtatctttcccttgtcactttatc

SEQ ID NO: 110635 - DNA, 25 bp, Probe Sequence
taccaagtgacttaaccataacacc

SEQ ID NO: 110636 - DNA, 25 bp, Probe Sequence
attaccaagtgacttaaccataaca

SEQ ID NO: 110637 - DNA, 25 bp, Probe Sequence
ttaccaagtgacttaaccataacac

SEQ ID NO: 110638 - DNA, 25 bp, Probe Sequence
ccaagtgacttaaccataacaccaa

SEQ ID NO: 110639 - DNA, 25 bp, Probe Sequence
cctgtctgttattcgggtaaatgta

SEQ ID NO: 110640 - DNA, 25 bp, Probe Sequence
ctgtctgttattcgggtaaatgtag

SEQ ID NO: 110641 - DNA, 25 bp, Probe Sequence
gtctgttattcgggtaaatgtagca

SEQ ID NO: 110642 - DNA, 25 bp, Probe Sequence
tgtctgttattcgggtaaatgtagc

SEQ ID NO: 110643 - DNA, 25 bp, Probe Sequence
accaagtgacttaaccataacacca

SEQ ID NO: 110644 - DNA, 25 bp, Probe Sequence
aattaccaagtgacttaaccataac

SEQ ID NO: 110645 - DNA, 25 bp, Probe Sequence
acttaaccataacaccaaatgatga

SEQ ID NO: 110646 - DNA, 25 bp, Probe Sequence
tgacttaaccataacaccaaatgat

SEQ ID NO: 110647 - DNA, 25 bp, Probe Sequence
gacttaaccataacaccaaatgatg

SEQ ID NO: 110648 - DNA, 25 bp, Probe Sequence
actttgctttggaaacatggaaatt

SEQ ID NO: 110649 - DNA, 25 bp, Probe Sequence
ggaaattaccaagtgacttaaccat

SEQ ID NO: 110650 - DNA, 25 bp, Probe Sequence
ttgctttggaaacatggaaattacc

SEQ ID NO: 110651 - DNA, 25 bp, Probe Sequence
tttgctttggaaacatggaaattac

SEQ ID NO: 110652 - DNA, 25 bp, Probe Sequence
ctttgctttggaaacatggaaatta

SEQ ID NO: 110653 - DNA, 25 bp, Probe Sequence
tctgttattcgggtaaatgtagcag

SEQ ID NO: 110654 - DNA, 25 bp, Probe Sequence
cactttgctttggaaacatggaaat

SEQ ID NO: 110655 - DNA, 25 bp, Probe Sequence
gtgacttaaccataacaccaaatga

SEQ ID NO: 110656 - DNA, 25 bp, Probe Sequence
agtgacttaaccataacaccaaatg

SEQ ID NO: 110657 - DNA, 25 bp, Probe Sequence
aaattatggaaccagatgggacaca

SEQ ID NO: 110658 - DNA, 25 bp, Probe Sequence
gctccagctactctaaattatgtct

SEQ ID NO: 110659 - DNA, 25 bp, Probe Sequence
ggtgtgtatgctcttcattgtgtaa

SEQ ID NO: 110660 - DNA, 25 bp, Probe Sequence
aacatatagacctgagtgctattgt

SEQ ID NO: 110661 - DNA, 25 bp, Probe Sequence
caacatatagacctgagtgctattg

SEQ ID NO: 110662 - DNA, 25 bp, Probe Sequence
acatatagacctgagtgctattgta

SEQ ID NO: 110663 - DNA, 25 bp, Probe Sequence
tggtgtgtatgctcttcattgtgta

SEQ ID NO: 110664 - DNA, 25 bp, Probe Sequence
cttggtgtgtatgctcttcattgtg

SEQ ID NO: 110665 - DNA, 25 bp, Probe Sequence
gaagagagatggagtcacatggatt

SEQ ID NO: 110666 - DNA, 25 bp, Probe Sequence
ttggtgggcattattctaaactttc

SEQ ID NO: 110667 - DNA, 25 bp, Probe Sequence
gaacattagaactgggaagagagat

SEQ ID NO: 110668 - DNA, 25 bp, Probe Sequence
attaggtcttgtgtttgatgtgttc

SEQ ID NO: 110669 - DNA, 25 bp, Probe Sequence
gagaacattagaactgggaagagag

SEQ ID NO: 110670 - DNA, 25 bp, Probe Sequence
taggtcttgtgtttgatgtgttctt

SEQ ID NO: 110671 - DNA, 25 bp, Probe Sequence
ttaggtcttgtgtttgatgtgttct

SEQ ID NO: 110672 - DNA, 25 bp, Probe Sequence
gtgggcattattctaaactttcgta

SEQ ID NO: 110673 - DNA, 25 bp, Probe Sequence
agaacattagaactgggaagagaga

SEQ ID NO: 110674 - DNA, 25 bp, Probe Sequence
ctgagaacattagaactgggaagag

SEQ ID NO: 110675 - DNA, 25 bp, Probe Sequence
taatggaaaggagagttgactgaag

SEQ ID NO: 110676 - DNA, 25 bp, Probe Sequence
ctaatggaaaggagagttgactgaa

SEQ ID NO: 110677 - DNA, 25 bp, Probe Sequence
tttggtgggcattattctaaacttt

SEQ ID NO: 110678 - DNA, 25 bp, Probe Sequence
tgagaacattagaactgggaagaga

SEQ ID NO: 110679 - DNA, 25 bp, Probe Sequence
ttgtgtttgatgtgttcttgtgaat

SEQ ID NO: 110680 - DNA, 25 bp, Probe Sequence
cattaggtcttgtgtttgatgtgtt

SEQ ID NO: 110681 - DNA, 25 bp, Probe Sequence
aacattagaactgggaagagagatg

SEQ ID NO: 110682 - DNA, 25 bp, Probe Sequence
gtgtgtatgctcttcattgtgtaaa

SEQ ID NO: 110683 - DNA, 25 bp, Probe Sequence
ctatgggtttgctttggtgttgttt

SEQ ID NO: 110684 - DNA, 25 bp, Probe Sequence
cagttacctggttgctgttttaatt

SEQ ID NO: 110685 - DNA, 25 bp, Probe Sequence
tatgggtttgctttggtgttgtttt

SEQ ID NO: 110686 - DNA, 25 bp, Probe Sequence
agttacctggttgctgttttaatta

SEQ ID NO: 110687 - DNA, 25 bp, Probe Sequence
gctatgggtttgctttggtgttgtt

SEQ ID NO: 110688 - DNA, 25 bp, Probe Sequence
gcagttacctggttgctgttttaat

SEQ ID NO: 110689 - DNA, 25 bp, Probe Sequence
gttacctggttgctgttttaattaa

SEQ ID NO: 110690 - DNA, 25 bp, Probe Sequence
ggcagttacctggttgctgttttaa

SEQ ID NO: 110691 - DNA, 25 bp, Probe Sequence
acattatatccagaagtaattgcgg

SEQ ID NO: 110692 - DNA, 25 bp, Probe Sequence
attctgtgtgtattctgtgtcatgt

SEQ ID NO: 110693 - DNA, 25 bp, Probe Sequence
aattctgtgtgtattctgtgtcatg

SEQ ID NO: 110694 - DNA, 25 bp, Probe Sequence
ttctgtgtgtattctgtgtcatgtt

SEQ ID NO: 110695 - DNA, 25 bp, Probe Sequence
taattctgtgtgtattctgtgtcat

SEQ ID NO: 110696 - DNA, 25 bp, Probe Sequence
ataattctgtgtgtattctgtgtca

SEQ ID NO: 110697 - DNA, 25 bp, Probe Sequence
cctcctgctacattatatccagaag

SEQ ID NO: 110698 - DNA, 25 bp, Probe Sequence
ctcctgctacattatatccagaagt

SEQ ID NO: 110699 - DNA, 25 bp, Probe Sequence
tctgtgtgtattctgtgtcatgttg

SEQ ID NO: 110700 - DNA, 25 bp, Probe Sequence
ttatatccagaagtaattgcggagg

SEQ ID NO: 110701 - DNA, 25 bp, Probe Sequence
tcctgctacattatatccagaagta

SEQ ID NO: 110702 - DNA, 25 bp, Probe Sequence
gcctcctgctacattatatccagaa

SEQ ID NO: 110703 - DNA, 25 bp, Probe Sequence
cattatatccagaagtaattgcgga

SEQ ID NO: 110704 - DNA, 25 bp, Probe Sequence
ctgtgtgtattctgtgtcatgttgg

SEQ ID NO: 110705 - DNA, 25 bp, Probe Sequence
attatatccagaagtaattgcggag

SEQ ID NO: 110706 - DNA, 25 bp, Probe Sequence
caaaggaggagagtttaggattagg

SEQ ID NO: 110707 - DNA, 25 bp, Probe Sequence
gcaaaggaggagagtttaggattag

SEQ ID NO: 110708 - DNA, 25 bp, Probe Sequence
aaaggaggagagtttaggattaggg

SEQ ID NO: 110709 - DNA, 25 bp, Probe Sequence
cctgctacattatatccagaagtaa

SEQ ID NO: 110710 - DNA, 25 bp, Probe Sequence
tattccagcctcctgctacattata

SEQ ID NO: 110711 - DNA, 25 bp, Probe Sequence
tatatccagaagtaattgcggaggc

SEQ ID NO: 110712 - DNA, 25 bp, Probe Sequence
attccagcctcctgctacattatat

SEQ ID NO: 110713 - DNA, 25 bp, Probe Sequence
tacattatatccagaagtaattgcg

SEQ ID NO: 110714 - DNA, 25 bp, Probe Sequence
tgagatccattcttcctttacttcc

SEQ ID NO: 110715 - DNA, 25 bp, Probe Sequence
ctgtggcataatgtgatggtcaatt

SEQ ID NO: 110716 - DNA, 25 bp, Probe Sequence
gagccaattcccataacagatagat

SEQ ID NO: 110717 - DNA, 25 bp, Probe Sequence
ctttagcctctgaatgataccactg

SEQ ID NO: 110718 - DNA, 25 bp, Probe Sequence
atcagaagacagcaaagatttcctt

SEQ ID NO: 110719 - DNA, 25 bp, Probe Sequence
ttccagaagagatttgcctttgaat

SEQ ID NO: 110720 - DNA, 25 bp, Probe Sequence
agccaattcccataacagatagata

SEQ ID NO: 110721 - DNA, 25 bp, Probe Sequence
tttccagaagagatttgcctttgaa

SEQ ID NO: 110722 - DNA, 25 bp, Probe Sequence
tgagccaattcccataacagataga

SEQ ID NO: 110723 - DNA, 25 bp, Probe Sequence
gtgagccaattcccataacagatag

SEQ ID NO: 110724 - DNA, 25 bp, Probe Sequence
gccaattcccataacagatagataa

SEQ ID NO: 110725 - DNA, 25 bp, Probe Sequence
cctttagcctctgaatgataccact

SEQ ID NO: 110726 - DNA, 25 bp, Probe Sequence
gtttccagaagagatttgcctttga

SEQ ID NO: 110727 - DNA, 25 bp, Probe Sequence
tgtttccagaagagatttgcctttg

SEQ ID NO: 110728 - DNA, 25 bp, Probe Sequence
gtgtttccagaagagatttgccttt

SEQ ID NO: 110729 - DNA, 25 bp, Probe Sequence
tgtggcataatgtgatggtcaattt

SEQ ID NO: 110730 - DNA, 25 bp, Probe Sequence
tttagcctctgaatgataccactgg

SEQ ID NO: 110731 - DNA, 25 bp, Probe Sequence
cctgtggcataatgtgatggtcaat

SEQ ID NO: 110732 - DNA, 25 bp, Probe Sequence
gacagcaaagatttccttcagcaat

SEQ ID NO: 110733 - DNA, 25 bp, Probe Sequence
tgtgagccaattcccataacagata

SEQ ID NO: 110734 - DNA, 25 bp, Probe Sequence
atttgcctttgaatcagaagacagc

SEQ ID NO: 110735 - DNA, 25 bp, Probe Sequence
tgaatcagaagacagcaaagatttc

SEQ ID NO: 110736 - DNA, 25 bp, Probe Sequence
aagagatttgcctttgaatcagaag

SEQ ID NO: 110737 - DNA, 25 bp, Probe Sequence
gaagagatttgcctttgaatcagaa

SEQ ID NO: 110738 - DNA, 25 bp, Probe Sequence
gaatcagaagacagcaaagatttcc

SEQ ID NO: 110739 - DNA, 25 bp, Probe Sequence
cctcagctacccactttccttcatg

SEQ ID NO: 110740 - DNA, 25 bp, Probe Sequence
ctcagctacccactttccttcatga

SEQ ID NO: 110741 - DNA, 25 bp, Probe Sequence
aatgtggggagacagaagaggagaa

SEQ ID NO: 110742 - DNA, 25 bp, Probe Sequence
tttgaagcctcagctacccactttc

SEQ ID NO: 110743 - DNA, 25 bp, Probe Sequence
ctttgaagcctcagctacccacttt

SEQ ID NO: 110744 - DNA, 25 bp, Probe Sequence
atgtggggagacagaagaggagaag

SEQ ID NO: 110745 - DNA, 25 bp, Probe Sequence
aggccaaatatccctttaagaagcg

SEQ ID NO: 110746 - DNA, 25 bp, Probe Sequence
ccaaatatccctttaagaagcgggc

SEQ ID NO: 110747 - DNA, 25 bp, Probe Sequence
gccaaatatccctttaagaagcggg

SEQ ID NO: 110748 - DNA, 25 bp, Probe Sequence
ggccaaatatccctttaagaagcgg

SEQ ID NO: 110749 - DNA, 25 bp, Probe Sequence
caaggccaaatatccctttaagaag

SEQ ID NO: 110750 - DNA, 25 bp, Probe Sequence
ccaaggccaaatatccctttaagaa

SEQ ID NO: 110751 - DNA, 25 bp, Probe Sequence
aaggccaaatatccctttaagaagc

SEQ ID NO: 110752 - DNA, 25 bp, Probe Sequence
cccaaggccaaatatccctttaaga

SEQ ID NO: 110753 - DNA, 25 bp, Probe Sequence
caaatatccctttaagaagcgggcc

SEQ ID NO: 110754 - DNA, 25 bp, Probe Sequence
aaatatccctttaagaagcgggcca

SEQ ID NO: 110755 - DNA, 25 bp, Probe Sequence
gcccaaggccaaatatccctttaag

SEQ ID NO: 110756 - DNA, 25 bp, Probe Sequence
aatatccctttaagaagcgggccag

SEQ ID NO: 110757 - DNA, 25 bp, Probe Sequence
agcccaaggccaaatatccctttaa

SEQ ID NO: 110758 - DNA, 25 bp, Probe Sequence
aagcccaaggccaaatatcccttta

SEQ ID NO: 110759 - DNA, 25 bp, Probe Sequence
ggagagtaatgagacagaaggaatg

SEQ ID NO: 110760 - DNA, 25 bp, Probe Sequence
tagatatggctggagagtaatgaga

SEQ ID NO: 110761 - DNA, 25 bp, Probe Sequence
tggagagtaatgagacagaaggaat

SEQ ID NO: 110762 - DNA, 25 bp, Probe Sequence
ttagatatggctggagagtaatgag

SEQ ID NO: 110763 - DNA, 25 bp, Probe Sequence
gagatgtgccagattctatgtctaa

SEQ ID NO: 110764 - DNA, 25 bp, Probe Sequence
taagagatgtgccagattctatgtc

SEQ ID NO: 110765 - DNA, 25 bp, Probe Sequence
agatatggctggagagtaatgagac

SEQ ID NO: 110766 - DNA, 25 bp, Probe Sequence
agagatgtgccagattctatgtcta

SEQ ID NO: 110767 - DNA, 25 bp, Probe Sequence
agatgtgccagattctatgtctaat

SEQ ID NO: 110768 - DNA, 25 bp, Probe Sequence
ataagagatgtgccagattctatgt

SEQ ID NO: 110769 - DNA, 25 bp, Probe Sequence
gatatggctggagagtaatgagaca

SEQ ID NO: 110770 - DNA, 25 bp, Probe Sequence
tcataagagatgtgccagattctat

SEQ ID NO: 110771 - DNA, 25 bp, Probe Sequence
atgtgccagattctatgtctaattg

SEQ ID NO: 110772 - DNA, 25 bp, Probe Sequence
ctcataagagatgtgccagattcta

SEQ ID NO: 110773 - DNA, 25 bp, Probe Sequence
aagagatgtgccagattctatgtct

SEQ ID NO: 110774 - DNA, 25 bp, Probe Sequence
tgtgccagattctatgtctaattgc

SEQ ID NO: 110775 - DNA, 25 bp, Probe Sequence
gatgtgccagattctatgtctaatt

SEQ ID NO: 110776 - DNA, 25 bp, Probe Sequence
gagagtaatgagacagaaggaatgt

SEQ ID NO: 110777 - DNA, 25 bp, Probe Sequence
tcttatattgttctgactgctgaca

SEQ ID NO: 110778 - DNA, 25 bp, Probe Sequence
tgtcttatattgttctgactgctga

SEQ ID NO: 110779 - DNA, 25 bp, Probe Sequence
gtcttatattgttctgactgctgac

SEQ ID NO: 110780 - DNA, 25 bp, Probe Sequence
ttcctcataagagatgtgccagatt

SEQ ID NO: 110781 - DNA, 25 bp, Probe Sequence
ctcttcagaggagatgatgcttatt

SEQ ID NO: 110782 - DNA, 25 bp, Probe Sequence
atgtcttatattgttctgactgctg

SEQ ID NO: 110783 - DNA, 25 bp, Probe Sequence
tggtgcctgaacattaagagtagat

SEQ ID NO: 110784 - DNA, 25 bp, Probe Sequence
ttggtgcctgaacattaagagtaga

SEQ ID NO: 110785 - DNA, 25 bp, Probe Sequence
atctgttggtaattcattgaggcac

SEQ ID NO: 110786 - DNA, 25 bp, Probe Sequence
catctgttggtaattcattgaggca

SEQ ID NO: 110787 - DNA, 25 bp, Probe Sequence
ggtgcctgaacattaagagtagatc

SEQ ID NO: 110788 - DNA, 25 bp, Probe Sequence
aagactggagttattagttggctga

SEQ ID NO: 110789 - DNA, 25 bp, Probe Sequence
gcctgaacattaagagtagatcact

SEQ ID NO: 110790 - DNA, 25 bp, Probe Sequence
tgcctgaacattaagagtagatcac

SEQ ID NO: 110791 - DNA, 25 bp, Probe Sequence
gtgcctgaacattaagagtagatca

SEQ ID NO: 110792 - DNA, 25 bp, Probe Sequence
tgaacattaagagtagatcactgct

SEQ ID NO: 110793 - DNA, 25 bp, Probe Sequence
ctgaacattaagagtagatcactgc

SEQ ID NO: 110794 - DNA, 25 bp, Probe Sequence
gtaattcattgaggcactcttggtt

SEQ ID NO: 110795 - DNA, 25 bp, Probe Sequence
ttggtaattcattgaggcactcttg

SEQ ID NO: 110796 - DNA, 25 bp, Probe Sequence
gttggtaattcattgaggcactctt

SEQ ID NO: 110797 - DNA, 25 bp, Probe Sequence
cctgaacattaagagtagatcactg

SEQ ID NO: 110798 - DNA, 25 bp, Probe Sequence
gtcaactccacaagatgaacaagag

SEQ ID NO: 110799 - DNA, 25 bp, Probe Sequence
gaacattaagagtagatcactgctt

SEQ ID NO: 110800 - DNA, 25 bp, Probe Sequence
gactggagttattagttggctgact

SEQ ID NO: 110801 - DNA, 25 bp, Probe Sequence
agactggagttattagttggctgac

SEQ ID NO: 110802 - DNA, 25 bp, Probe Sequence
agtcaactccacaagatgaacaaga

SEQ ID NO: 110803 - DNA, 25 bp, Probe Sequence
cagtcaactccacaagatgaacaag

SEQ ID NO: 110804 - DNA, 25 bp, Probe Sequence
tctgttggtaattcattgaggcact

SEQ ID NO: 110805 - DNA, 25 bp, Probe Sequence
tagtacaacagagaaggtgactgaa

SEQ ID NO: 110806 - DNA, 25 bp, Probe Sequence
ctgttggtaattcattgaggcactc

SEQ ID NO: 110807 - DNA, 25 bp, Probe Sequence
agcaggaaaagaaccctactgacat

SEQ ID NO: 110808 - DNA, 25 bp, Probe Sequence
caggaaaagaaccctactgacatgc

SEQ ID NO: 110809 - DNA, 25 bp, Probe Sequence
gcaggaaaagaaccctactgacatg

SEQ ID NO: 110810 - DNA, 25 bp, Probe Sequence
gagcaggaaaagaaccctactgaca

SEQ ID NO: 110811 - DNA, 25 bp, Probe Sequence
tgagcaggaaaagaaccctactgac

SEQ ID NO: 110812 - DNA, 25 bp, Probe Sequence
gtgagcaggaaaagaaccctactga

SEQ ID NO: 110813 - DNA, 25 bp, Probe Sequence
ctgtgagcaggaaaagaaccctact

SEQ ID NO: 110814 - DNA, 25 bp, Probe Sequence
tctgtgagcaggaaaagaaccctac

SEQ ID NO: 110815 - DNA, 25 bp, Probe Sequence
ttctgtgagcaggaaaagaacccta

SEQ ID NO: 110816 - DNA, 25 bp, Probe Sequence
ctcttctgtgagcaggaaaagaacc

SEQ ID NO: 110817 - DNA, 25 bp, Probe Sequence
cctcttctgtgagcaggaaaagaac

SEQ ID NO: 110818 - DNA, 25 bp, Probe Sequence
tgtgagcaggaaaagaaccctactg

SEQ ID NO: 110819 - DNA, 25 bp, Probe Sequence
aggaaaagaaccctactgacatgca

SEQ ID NO: 110820 - DNA, 25 bp, Probe Sequence
ggaaaagaaccctactgacatgcat

SEQ ID NO: 110821 - DNA, 25 bp, Probe Sequence
ccctcttctgtgagcaggaaaagaa

SEQ ID NO: 110822 - DNA, 25 bp, Probe Sequence
cttctgtgagcaggaaaagaaccct

SEQ ID NO: 110823 - DNA, 25 bp, Probe Sequence
tcttctgtgagcaggaaaagaaccc

SEQ ID NO: 110824 - DNA, 25 bp, Probe Sequence
gaagtgcaacaagggtttggtaaag

SEQ ID NO: 110825 - DNA, 25 bp, Probe Sequence
tgaagtgcaacaagggtttggtaaa

SEQ ID NO: 110826 - DNA, 25 bp, Probe Sequence
aagtgcaacaagggtttggtaaagg

SEQ ID NO: 110827 - DNA, 25 bp, Probe Sequence
gtgaagtgcaacaagggtttggtaa

SEQ ID NO: 110828 - DNA, 25 bp, Probe Sequence
aacaagggtttggtaaaggctccag

SEQ ID NO: 110829 - DNA, 25 bp, Probe Sequence
aacctactgtctctgtcataacttg

SEQ ID NO: 110830 - DNA, 25 bp, Probe Sequence
ctactgtctctgtcataacttgtca

SEQ ID NO: 110831 - DNA, 25 bp, Probe Sequence
cctactgtctctgtcataacttgtc

SEQ ID NO: 110832 - DNA, 25 bp, Probe Sequence
tactgtctctgtcataacttgtcaa

SEQ ID NO: 110833 - DNA, 25 bp, Probe Sequence
acctactgtctctgtcataacttgt

SEQ ID NO: 110834 - DNA, 25 bp, Probe Sequence
actgtctctgtcataacttgtcaac

SEQ ID NO: 110835 - DNA, 25 bp, Probe Sequence
aatatgttcatccagagtgtgtctt

SEQ ID NO: 110836 - DNA, 25 bp, Probe Sequence
tatgttcatccagagtgtgtcttaa

SEQ ID NO: 110837 - DNA, 25 bp, Probe Sequence
atatgttcatccagagtgtgtctta

SEQ ID NO: 110838 - DNA, 25 bp, Probe Sequence
ataacttgtcaacactgctgtatga

SEQ ID NO: 110839 - DNA, 25 bp, Probe Sequence
tcataacttgtcaacactgctgtat

SEQ ID NO: 110840 - DNA, 25 bp, Probe Sequence
taacttgtcaacactgctgtatgaa

SEQ ID NO: 110841 - DNA, 25 bp, Probe Sequence
tctctgtcataacttgtcaacactg

SEQ ID NO: 110842 - DNA, 25 bp, Probe Sequence
gtctctgtcataacttgtcaacact

SEQ ID NO: 110843 - DNA, 25 bp, Probe Sequence
ctgtctctgtcataacttgtcaaca

SEQ ID NO: 110844 - DNA, 25 bp, Probe Sequence
tgtctctgtcataacttgtcaacac

SEQ ID NO: 110845 - DNA, 25 bp, Probe Sequence
gtcataacttgtcaacactgctgta

SEQ ID NO: 110846 - DNA, 25 bp, Probe Sequence
cataacttgtcaacactgctgtatg

SEQ ID NO: 110847 - DNA, 25 bp, Probe Sequence
aacttgtcaacactgctgtatgaag

SEQ ID NO: 110848 - DNA, 25 bp, Probe Sequence
tctcttagaagatgacatccatgtt

SEQ ID NO: 110849 - DNA, 25 bp, Probe Sequence
gcagccatagacaatacataaacaa

SEQ ID NO: 110850 - DNA, 25 bp, Probe Sequence
agcagccatagacaatacataaaca

SEQ ID NO: 110851 - DNA, 25 bp, Probe Sequence
ctctgtcataacttgtcaacactgc

SEQ ID NO: 110852 - DNA, 25 bp, Probe Sequence
aagcagccatagacaatacataaac

SEQ ID NO: 110853 - DNA, 25 bp, Probe Sequence
ccttatagtcctaagccaagacatt

SEQ ID NO: 110854 - DNA, 25 bp, Probe Sequence
atttgacctttgacatttgaccttt

SEQ ID NO: 110855 - DNA, 25 bp, Probe Sequence
agacatttgacctttgacatttgac

SEQ ID NO: 110856 - DNA, 25 bp, Probe Sequence
cctcattatttgtcctatctctccc

SEQ ID NO: 110857 - DNA, 25 bp, Probe Sequence
gtgataaactatttgccttctggag

SEQ ID NO: 110858 - DNA, 25 bp, Probe Sequence
catttgacctttgacatttgacctt

SEQ ID NO: 110859 - DNA, 25 bp, Probe Sequence
tttgacctttgacatttgacctttg

SEQ ID NO: 110860 - DNA, 25 bp, Probe Sequence
acctcattatttgtcctatctctcc

SEQ ID NO: 110861 - DNA, 25 bp, Probe Sequence
ctcattatttgtcctatctctccct

SEQ ID NO: 110862 - DNA, 25 bp, Probe Sequence
ctaaaccctgtctggatttctcttg

SEQ ID NO: 110863 - DNA, 25 bp, Probe Sequence
gacatttgacctttgacatttgacc

SEQ ID NO: 110864 - DNA, 25 bp, Probe Sequence
aagacatttgacctttgacatttga

SEQ ID NO: 110865 - DNA, 25 bp, Probe Sequence
ttaaagtcatctcttcagcaatcca

SEQ ID NO: 110866 - DNA, 25 bp, Probe Sequence
tgataaactatttgccttctggagc

SEQ ID NO: 110867 - DNA, 25 bp, Probe Sequence
taaagtcatctcttcagcaatccag

SEQ ID NO: 110868 - DNA, 25 bp, Probe Sequence
acatttgacctttgacatttgacct

SEQ ID NO: 110869 - DNA, 25 bp, Probe Sequence
tcattatttgtcctatctctccctt

SEQ ID NO: 110870 - DNA, 25 bp, Probe Sequence
caagacatttgacctttgacatttg

SEQ ID NO: 110871 - DNA, 25 bp, Probe Sequence
ccaagacatttgacctttgacattt

SEQ ID NO: 110872 - DNA, 25 bp, Probe Sequence
agtgataaactatttgccttctgga

SEQ ID NO: 110873 - DNA, 25 bp, Probe Sequence
aagtgataaactatttgccttctgg

SEQ ID NO: 110874 - DNA, 25 bp, Probe Sequence
gtctggatttctcttgggatctaac

SEQ ID NO: 110875 - DNA, 25 bp, Probe Sequence
ttgtcctatctctcccttatagtcc

SEQ ID NO: 110876 - DNA, 25 bp, Probe Sequence
tgtctggatttctcttgggatctaa

SEQ ID NO: 110877 - DNA, 25 bp, Probe Sequence
ccttaacctgtagtgcgtagaatat

SEQ ID NO: 110878 - DNA, 25 bp, Probe Sequence
ttaacctgtagtgcgtagaatatgc

SEQ ID NO: 110879 - DNA, 25 bp, Probe Sequence
gcctacagattagtaagcaattcct

SEQ ID NO: 110880 - DNA, 25 bp, Probe Sequence
cttaacctgtagtgcgtagaatatg

SEQ ID NO: 110881 - DNA, 25 bp, Probe Sequence
acagattagtaagcaattccttgga

SEQ ID NO: 110882 - DNA, 25 bp, Probe Sequence
ggtactgatctatccatccaatgtt

SEQ ID NO: 110883 - DNA, 25 bp, Probe Sequence
actgatctatccatccaatgttgtc

SEQ ID NO: 110884 - DNA, 25 bp, Probe Sequence
tactgatctatccatccaatgttgt

SEQ ID NO: 110885 - DNA, 25 bp, Probe Sequence
cagattagtaagcaattccttggat

SEQ ID NO: 110886 - DNA, 25 bp, Probe Sequence
gtactgatctatccatccaatgttg

SEQ ID NO: 110887 - DNA, 25 bp, Probe Sequence
tacagattagtaagcaattccttgg

SEQ ID NO: 110888 - DNA, 25 bp, Probe Sequence
aggcactgtgtaattctattgtaat

SEQ ID NO: 110889 - DNA, 25 bp, Probe Sequence
cattgtcaacacctccagttatcag

SEQ ID NO: 110890 - DNA, 25 bp, Probe Sequence
cctacagattagtaagcaattcctt

SEQ ID NO: 110891 - DNA, 25 bp, Probe Sequence
tgatctatccatccaatgttgtcat

SEQ ID NO: 110892 - DNA, 25 bp, Probe Sequence
ctgatctatccatccaatgttgtca

SEQ ID NO: 110893 - DNA, 25 bp, Probe Sequence
tcaggcactgtgtaattctattgta

SEQ ID NO: 110894 - DNA, 25 bp, Probe Sequence
ttcaggcactgtgtaattctattgt

SEQ ID NO: 110895 - DNA, 25 bp, Probe Sequence
gccttaacctgtagtgcgtagaata

SEQ ID NO: 110896 - DNA, 25 bp, Probe Sequence
caggcactgtgtaattctattgtaa

SEQ ID NO: 110897 - DNA, 25 bp, Probe Sequence
gacaaggaccataattaacatcact

SEQ ID NO: 110898 - DNA, 25 bp, Probe Sequence
gattagtaagcaattccttggatct

SEQ ID NO: 110899 - DNA, 25 bp, Probe Sequence
agattagtaagcaattccttggatc

SEQ ID NO: 110900 - DNA, 25 bp, Probe Sequence
cacctccagttatcaggaatacatt

SEQ ID NO: 110901 - DNA, 25 bp, Probe Sequence
atgacttctctgtgttctgtgtatt

SEQ ID NO: 110902 - DNA, 25 bp, Probe Sequence
gacttatgacttctctgtgttctgt

SEQ ID NO: 110903 - DNA, 25 bp, Probe Sequence
tgacttatgacttctctgtgttctg

SEQ ID NO: 110904 - DNA, 25 bp, Probe Sequence
gtgacttatgacttctctgtgttct

SEQ ID NO: 110905 - DNA, 25 bp, Probe Sequence
cctatgtgtgacttatgacttctct

SEQ ID NO: 110906 - DNA, 25 bp, Probe Sequence
tcctatgtgtgacttatgacttctc

SEQ ID NO: 110907 - DNA, 25 bp, Probe Sequence
ctcctatgtgtgacttatgacttct

SEQ ID NO: 110908 - DNA, 25 bp, Probe Sequence
cctcctatgtgtgacttatgacttc

SEQ ID NO: 110909 - DNA, 25 bp, Probe Sequence
cttatgacttctctgtgttctgtgt

SEQ ID NO: 110910 - DNA, 25 bp, Probe Sequence
acttatgacttctctgtgttctgtg

SEQ ID NO: 110911 - DNA, 25 bp, Probe Sequence
tgtgacttatgacttctctgtgttc

SEQ ID NO: 110912 - DNA, 25 bp, Probe Sequence
atgtgtgacttatgacttctctgtg

SEQ ID NO: 110913 - DNA, 25 bp, Probe Sequence
ttatgacttctctgtgttctgtgta

SEQ ID NO: 110914 - DNA, 25 bp, Probe Sequence
gtgtgacttatgacttctctgtgtt

SEQ ID NO: 110915 - DNA, 25 bp, Probe Sequence
tatgacttctctgtgttctgtgtat

SEQ ID NO: 110916 - DNA, 25 bp, Probe Sequence
tatgtgtgacttatgacttctctgt

SEQ ID NO: 110917 - DNA, 25 bp, Probe Sequence
ctatgtgtgacttatgacttctctg

SEQ ID NO: 110918 - DNA, 25 bp, Probe Sequence
tgtgtgacttatgacttctctgtgt

SEQ ID NO: 110919 - DNA, 25 bp, Probe Sequence
gcctcctatgtgtgacttatgactt

SEQ ID NO: 110920 - DNA, 25 bp, Probe Sequence
tgttgagtctcatcagaatatgtgg

SEQ ID NO: 110921 - DNA, 25 bp, Probe Sequence
atgttgagtctcatcagaatatgtg

SEQ ID NO: 110922 - DNA, 25 bp, Probe Sequence
ttctctgtgttctgtgtatttgtct

SEQ ID NO: 110923 - DNA, 25 bp, Probe Sequence
cttctctgtgttctgtgtatttgtc

SEQ ID NO: 110924 - DNA, 25 bp, Probe Sequence
gacttctctgtgttctgtgtatttg

SEQ ID NO: 110925 - DNA, 25 bp, Probe Sequence
ttactgagcatctgttaagtgttgg

SEQ ID NO: 110926 - DNA, 25 bp, Probe Sequence
taattacacaaggacctagagtacc

SEQ ID NO: 110927 - DNA, 25 bp, Probe Sequence
tataggtacagtgtgatctcagctt

SEQ ID NO: 110928 - DNA, 25 bp, Probe Sequence
aattacacaaggacctagagtacct

SEQ ID NO: 110929 - DNA, 25 bp, Probe Sequence
ttacacaaggacctagagtacctat

SEQ ID NO: 110930 - DNA, 25 bp, Probe Sequence
attacacaaggacctagagtaccta

SEQ ID NO: 110931 - DNA, 25 bp, Probe Sequence
tacacaaggacctagagtacctata

SEQ ID NO: 110932 - DNA, 25 bp, Probe Sequence
ctataggtacagtgtgatctcagct

SEQ ID NO: 110933 - DNA, 25 bp, Probe Sequence
agctataggtacagtgtgatctcag

SEQ ID NO: 110934 - DNA, 25 bp, Probe Sequence
caataattacacaaggacctagagt

SEQ ID NO: 110935 - DNA, 25 bp, Probe Sequence
aatctccagcaagcatctcatttaa

SEQ ID NO: 110936 - DNA, 25 bp, Probe Sequence
tcaataattacacaaggacctagag

SEQ ID NO: 110937 - DNA, 25 bp, Probe Sequence
ctcaataattacacaaggacctaga

SEQ ID NO: 110938 - DNA, 25 bp, Probe Sequence
cagagctataggtacagtgtgatct

SEQ ID NO: 110939 - DNA, 25 bp, Probe Sequence
tttatccgtatgtctttgttagtgg

SEQ ID NO: 110940 - DNA, 25 bp, Probe Sequence
cctcaataattacacaaggacctag

SEQ ID NO: 110941 - DNA, 25 bp, Probe Sequence
agagctataggtacagtgtgatctc

SEQ ID NO: 110942 - DNA, 25 bp, Probe Sequence
ccagagctataggtacagtgtgatc

SEQ ID NO: 110943 - DNA, 25 bp, Probe Sequence
gatccagagctataggtacagtgtg

SEQ ID NO: 110944 - DNA, 25 bp, Probe Sequence
ggaaaccaactaaatgccttctata

SEQ ID NO: 110945 - DNA, 25 bp, Probe Sequence
gagctataggtacagtgtgatctca

SEQ ID NO: 110946 - DNA, 25 bp, Probe Sequence
tgtttactgagcatctgttaagtgt

SEQ ID NO: 110947 - DNA, 25 bp, Probe Sequence
tttactgagcatctgttaagtgttg

SEQ ID NO: 110948 - DNA, 25 bp, Probe Sequence
gtttactgagcatctgttaagtgtt

SEQ ID NO: 110949 - DNA, 25 bp, Probe Sequence
gtggtttccgattgtttgatagtat

SEQ ID NO: 110950 - DNA, 25 bp, Probe Sequence
tctgtctaactacgtgaagaatgat

SEQ ID NO: 110951 - DNA, 25 bp, Probe Sequence
atctgtctaactacgtgaagaatga

SEQ ID NO: 110952 - DNA, 25 bp, Probe Sequence
catctgtctaactacgtgaagaatg

SEQ ID NO: 110953 - DNA, 25 bp, Probe Sequence
gtcatctgtctaactacgtgaagaa

SEQ ID NO: 110954 - DNA, 25 bp, Probe Sequence
tggtttccgattgtttgatagtatt

SEQ ID NO: 110955 - DNA, 25 bp, Probe Sequence
cgtggtttccgattgtttgatagta

SEQ ID NO: 110956 - DNA, 25 bp, Probe Sequence
tcatctgtctaactacgtgaagaat

SEQ ID NO: 110957 - DNA, 25 bp, Probe Sequence
agtcatctgtctaactacgtgaaga

SEQ ID NO: 110958 - DNA, 25 bp, Probe Sequence
ctgtctaactacgtgaagaatgatt

SEQ ID NO: 110959 - DNA, 25 bp, Probe Sequence
tgagcatttcttcaacatcttcaat

SEQ ID NO: 110960 - DNA, 25 bp, Probe Sequence
gagcatttcttcaacatcttcaatt

SEQ ID NO: 110961 - DNA, 25 bp, Probe Sequence
tactggagagatcatagaaacgact

SEQ ID NO: 110962 - DNA, 25 bp, Probe Sequence
ttactggagagatcatagaaacgac

SEQ ID NO: 110963 - DNA, 25 bp, Probe Sequence
tttactggagagatcatagaaacga

SEQ ID NO: 110964 - DNA, 25 bp, Probe Sequence
cagtcatctgtctaactacgtgaag

SEQ ID NO: 110965 - DNA, 25 bp, Probe Sequence
gagagatcatagaaacgactgtgaa

SEQ ID NO: 110966 - DNA, 25 bp, Probe Sequence
ggtttccgattgtttgatagtattt

SEQ ID NO: 110967 - DNA, 25 bp, Probe Sequence
agagatcatagaaacgactgtgaac

SEQ ID NO: 110968 - DNA, 25 bp, Probe Sequence
ccctgtgttcaaattcactgataaa

SEQ ID NO: 110969 - DNA, 25 bp, Probe Sequence
gatccagtcatctgtctaactacgt

SEQ ID NO: 110970 - DNA, 25 bp, Probe Sequence
ctggagagatcatagaaacgactgt

SEQ ID NO: 110971 - DNA, 25 bp, Probe Sequence
actggagagatcatagaaacgactg

SEQ ID NO: 110972 - DNA, 25 bp, Probe Sequence
accctgtgttcaaattcactgataa

SEQ ID NO: 110973 - DNA, 25 bp, Probe Sequence
ttatgcaacacttagaaggagaagg

SEQ ID NO: 110974 - DNA, 25 bp, Probe Sequence
attatgcaacacttagaaggagaag

SEQ ID NO: 110975 - DNA, 25 bp, Probe Sequence
aattatgcaacacttagaaggagaa

SEQ ID NO: 110976 - DNA, 25 bp, Probe Sequence
aagagaacctggagtactgtatcat

SEQ ID NO: 110977 - DNA, 25 bp, Probe Sequence
ctggagtactgtatcatggtcattg

SEQ ID NO: 110978 - DNA, 25 bp, Probe Sequence
agagaacctggagtactgtatcatg

SEQ ID NO: 110979 - DNA, 25 bp, Probe Sequence
tatgcaacacttagaaggagaaggc

SEQ ID NO: 110980 - DNA, 25 bp, Probe Sequence
cctggagtactgtatcatggtcatt

SEQ ID NO: 110981 - DNA, 25 bp, Probe Sequence
tggagtactgtatcatggtcattgg

SEQ ID NO: 110982 - DNA, 25 bp, Probe Sequence
gagaacctggagtactgtatcatgg

SEQ ID NO: 110983 - DNA, 25 bp, Probe Sequence
aaattatgcaacacttagaaggaga

SEQ ID NO: 110984 - DNA, 25 bp, Probe Sequence
ccaactgtgtaaaggatgaaaatgt

SEQ ID NO: 110985 - DNA, 25 bp, Probe Sequence
accaactgtgtaaaggatgaaaatg

SEQ ID NO: 110986 - DNA, 25 bp, Probe Sequence
caactgtgtaaaggatgaaaatgtc

SEQ ID NO: 110987 - DNA, 25 bp, Probe Sequence
taccaactgtgtaaaggatgaaaat

SEQ ID NO: 110988 - DNA, 25 bp, Probe Sequence
tcttacagagcagcagaaaattatg

SEQ ID NO: 110989 - DNA, 25 bp, Probe Sequence
tgtaaaggatgaaaatgtcaagcag

SEQ ID NO: 110990 - DNA, 25 bp, Probe Sequence
aaagagaacctggagtactgtatca

SEQ ID NO: 110991 - DNA, 25 bp, Probe Sequence
gtaaaggatgaaaatgtcaagcaga

SEQ ID NO: 110992 - DNA, 25 bp, Probe Sequence
gtgtaaaggatgaaaatgtcaagca

SEQ ID NO: 110993 - DNA, 25 bp, Probe Sequence
tgtgtaaaggatgaaaatgtcaagc

SEQ ID NO: 110994 - DNA, 25 bp, Probe Sequence
actgtgtaaaggatgaaaatgtcaa

SEQ ID NO: 110995 - DNA, 25 bp, Probe Sequence
aactgtgtaaaggatgaaaatgtca

SEQ ID NO: 110996 - DNA, 25 bp, Probe Sequence
taaaggatgaaaatgtcaagcagat

SEQ ID NO: 110997 - DNA, 25 bp, Probe Sequence
actatagatggaaatgtgtggcatg

SEQ ID NO: 110998 - DNA, 25 bp, Probe Sequence
tgtcactatagatggaaatgtgtgg

SEQ ID NO: 110999 - DNA, 25 bp, Probe Sequence
cactatagatggaaatgtgtggcat

SEQ ID NO: 111000 - DNA, 25 bp, Probe Sequence
ttgtcactatagatggaaatgtgtg

SEQ ID NO: 111001 - DNA, 25 bp, Probe Sequence
gtcactatagatggaaatgtgtggc

SEQ ID NO: 111002 - DNA, 25 bp, Probe Sequence
tcactatagatggaaatgtgtggca

SEQ ID NO: 111003 - DNA, 25 bp, Probe Sequence
tttgtcactatagatggaaatgtgt

SEQ ID NO: 111004 - DNA, 25 bp, Probe Sequence
atttgtcactatagatggaaatgtg

SEQ ID NO: 111005 - DNA, 25 bp, Probe Sequence
gatttgtcactatagatggaaatgt

SEQ ID NO: 111006 - DNA, 25 bp, Probe Sequence
tgatttgtcactatagatggaaatg

SEQ ID NO: 111007 - DNA, 25 bp, Probe Sequence
atgatttgtcactatagatggaaat

SEQ ID NO: 111008 - DNA, 25 bp, Probe Sequence
tatgatttgtcactatagatggaaa

SEQ ID NO: 111009 - DNA, 25 bp, Probe Sequence
cacgttacagttgttgcagataatt

SEQ ID NO: 111010 - DNA, 25 bp, Probe Sequence
gcatcagtaaagcagcatattcaaa

SEQ ID NO: 111011 - DNA, 25 bp, Probe Sequence
cacaaaccacagtagtattagcagt

SEQ ID NO: 111012 - DNA, 25 bp, Probe Sequence
aaagcagcatattcaaatgtggatt

SEQ ID NO: 111013 - DNA, 25 bp, Probe Sequence
gtaaagcagcatattcaaatgtgga

SEQ ID NO: 111014 - DNA, 25 bp, Probe Sequence
agtaaagcagcatattcaaatgtgg

SEQ ID NO: 111015 - DNA, 25 bp, Probe Sequence
taaagcagcatattcaaatgtggat

SEQ ID NO: 111016 - DNA, 25 bp, Probe Sequence
cagtaaagcagcatattcaaatgtg

SEQ ID NO: 111017 - DNA, 25 bp, Probe Sequence
tcagtaaagcagcatattcaaatgt

SEQ ID NO: 111018 - DNA, 25 bp, Probe Sequence
ccacaaaccacagtagtattagcag

SEQ ID NO: 111019 - DNA, 25 bp, Probe Sequence
agtgaaacccttaatcaatcagtca

SEQ ID NO: 111020 - DNA, 25 bp, Probe Sequence
agagtgaaacccttaatcaatcagt

SEQ ID NO: 111021 - DNA, 25 bp, Probe Sequence
acagagtgaaacccttaatcaatca

SEQ ID NO: 111022 - DNA, 25 bp, Probe Sequence
tgacagagtgaaacccttaatcaat

SEQ ID NO: 111023 - DNA, 25 bp, Probe Sequence
gagtgaaacccttaatcaatcagtc

SEQ ID NO: 111024 - DNA, 25 bp, Probe Sequence
cagagtgaaacccttaatcaatcag

SEQ ID NO: 111025 - DNA, 25 bp, Probe Sequence
gacagagtgaaacccttaatcaatc

SEQ ID NO: 111026 - DNA, 25 bp, Probe Sequence
gtgaaacccttaatcaatcagtcaa

SEQ ID NO: 111027 - DNA, 25 bp, Probe Sequence
catcagtaaagcagcatattcaaat

SEQ ID NO: 111028 - DNA, 25 bp, Probe Sequence
gtgacagagtgaaacccttaatcaa

SEQ ID NO: 111029 - DNA, 25 bp, Probe Sequence
aagcagcatattcaaatgtggattt

SEQ ID NO: 111030 - DNA, 25 bp, Probe Sequence
atcagtaaagcagcatattcaaatg

SEQ ID NO: 111031 - DNA, 25 bp, Probe Sequence
tgaaacccttaatcaatcagtcaat

SEQ ID NO: 111032 - DNA, 25 bp, Probe Sequence
gcagataatttccagagactgttta

SEQ ID NO: 111033 - DNA, 25 bp, Probe Sequence
aagtatcacagaaggaacaagaggc

SEQ ID NO: 111034 - DNA, 25 bp, Probe Sequence
tcaaagtatcacagaaggaacaaga

SEQ ID NO: 111035 - DNA, 25 bp, Probe Sequence
aaagtatcacagaaggaacaagagg

SEQ ID NO: 111036 - DNA, 25 bp, Probe Sequence
caaagtatcacagaaggaacaagag

SEQ ID NO: 111037 - DNA, 25 bp, Probe Sequence
ctcaaagtatcacagaaggaacaag

SEQ ID NO: 111038 - DNA, 25 bp, Probe Sequence
gtatcacagaaggaacaagaggctc

SEQ ID NO: 111039 - DNA, 25 bp, Probe Sequence
agtatcacagaaggaacaagaggct

SEQ ID NO: 111040 - DNA, 25 bp, Probe Sequence
actcaaagtatcacagaaggaacaa

SEQ ID NO: 111041 - DNA, 25 bp, Probe Sequence
cactcaaagtatcacagaaggaaca

SEQ ID NO: 111042 - DNA, 25 bp, Probe Sequence
ccactcaaagtatcacagaaggaac

SEQ ID NO: 111043 - DNA, 25 bp, Probe Sequence
gccactcaaagtatcacagaaggaa

SEQ ID NO: 111044 - DNA, 25 bp, Probe Sequence
tatcacagaaggaacaagaggctcc

SEQ ID NO: 111045 - DNA, 25 bp, Probe Sequence
ggccactcaaagtatcacagaagga

SEQ ID NO: 111046 - DNA, 25 bp, Probe Sequence
ttgagaacatattgaaggcattgac

SEQ ID NO: 111047 - DNA, 25 bp, Probe Sequence
cattcatcaagcacattatcagact

SEQ ID NO: 111048 - DNA, 25 bp, Probe Sequence
tgagaacatattgaaggcattgact

SEQ ID NO: 111049 - DNA, 25 bp, Probe Sequence
gcattcatcaagcacattatcagac

SEQ ID NO: 111050 - DNA, 25 bp, Probe Sequence
gagaacatattgaaggcattgactt

SEQ ID NO: 111051 - DNA, 25 bp, Probe Sequence
attcatcaagcacattatcagactt

SEQ ID NO: 111052 - DNA, 25 bp, Probe Sequence
tggtgcctataattgattggtcatt

SEQ ID NO: 111053 - DNA, 25 bp, Probe Sequence
ttggtgcctataattgattggtcat

SEQ ID NO: 111054 - DNA, 25 bp, Probe Sequence
ggcattcatcaagcacattatcaga

SEQ ID NO: 111055 - DNA, 25 bp, Probe Sequence
tggcattcatcaagcacattatcag

SEQ ID NO: 111056 - DNA, 25 bp, Probe Sequence
ttggcattcatcaagcacattatca

SEQ ID NO: 111057 - DNA, 25 bp, Probe Sequence
tttgagaaggtttatgggctatttg

SEQ ID NO: 111058 - DNA, 25 bp, Probe Sequence
tttgagaacatattgaaggcattga

SEQ ID NO: 111059 - DNA, 25 bp, Probe Sequence
cagactttgagaacatattgaaggc

SEQ ID NO: 111060 - DNA, 25 bp, Probe Sequence
ttgagaaggtttatgggctatttgg

SEQ ID NO: 111061 - DNA, 25 bp, Probe Sequence
gactttgagaacatattgaaggcat

SEQ ID NO: 111062 - DNA, 25 bp, Probe Sequence
agactttgagaacatattgaaggca

SEQ ID NO: 111063 - DNA, 25 bp, Probe Sequence
acatattgaaggcattgactttgaa

SEQ ID NO: 111064 - DNA, 25 bp, Probe Sequence
aacatattgaaggcattgactttga

SEQ ID NO: 111065 - DNA, 25 bp, Probe Sequence
gaagaaagcaatggagaagcaaatt

SEQ ID NO: 111066 - DNA, 25 bp, Probe Sequence
gaacatattgaaggcattgactttg

SEQ ID NO: 111067 - DNA, 25 bp, Probe Sequence
agaacatattgaaggcattgacttt

SEQ ID NO: 111068 - DNA, 25 bp, Probe Sequence
actttgagaacatattgaaggcatt

SEQ ID NO: 111069 - DNA, 25 bp, Probe Sequence
ctttgagaacatattgaaggcattg

SEQ ID NO: 111070 - DNA, 25 bp, Probe Sequence
aacaagcaaggaatccaagtgaata

SEQ ID NO: 111071 - DNA, 25 bp, Probe Sequence
taacaagcaaggaatccaagtgaat

SEQ ID NO: 111072 - DNA, 25 bp, Probe Sequence
aagcaaggaatccaagtgaatagtc

SEQ ID NO: 111073 - DNA, 25 bp, Probe Sequence
caagcaaggaatccaagtgaatagt

SEQ ID NO: 111074 - DNA, 25 bp, Probe Sequence
acaagcaaggaatccaagtgaatag

SEQ ID NO: 111075 - DNA, 25 bp, Probe Sequence
aaggaatccaagtgaatagtcagtt

SEQ ID NO: 111076 - DNA, 25 bp, Probe Sequence
caaggaatccaagtgaatagtcagt

SEQ ID NO: 111077 - DNA, 25 bp, Probe Sequence
ctagatgttgcttgttggagagatg

SEQ ID NO: 111078 - DNA, 25 bp, Probe Sequence
gtaacaagcaaggaatccaagtgaa

SEQ ID NO: 111079 - DNA, 25 bp, Probe Sequence
actagatgttgcttgttggagagat

SEQ ID NO: 111080 - DNA, 25 bp, Probe Sequence
aatgatgacaactatggacctggac

SEQ ID NO: 111081 - DNA, 25 bp, Probe Sequence
gcaaggaatccaagtgaatagtcag

SEQ ID NO: 111082 - DNA, 25 bp, Probe Sequence
aactagatgttgcttgttggagaga

SEQ ID NO: 111083 - DNA, 25 bp, Probe Sequence
agtaacaagcaaggaatccaagtga

SEQ ID NO: 111084 - DNA, 25 bp, Probe Sequence
cagtaacaagcaaggaatccaagtg

SEQ ID NO: 111085 - DNA, 25 bp, Probe Sequence
agcaaggaatccaagtgaatagtca

SEQ ID NO: 111086 - DNA, 25 bp, Probe Sequence
aaacaaatgatgacaactatggacc

SEQ ID NO: 111087 - DNA, 25 bp, Probe Sequence
aacaaatgatgacaactatggacct

SEQ ID NO: 111088 - DNA, 25 bp, Probe Sequence
ggaaacaaatgatgacaactatgga

SEQ ID NO: 111089 - DNA, 25 bp, Probe Sequence
aggaaacaaatgatgacaactatgg

SEQ ID NO: 111090 - DNA, 25 bp, Probe Sequence
acaaatgatgacaactatggacctg

SEQ ID NO: 111091 - DNA, 25 bp, Probe Sequence
atagtcagtttcagcaagaatttcc

SEQ ID NO: 111092 - DNA, 25 bp, Probe Sequence
gaaacaaatgatgacaactatggac

SEQ ID NO: 111093 - DNA, 25 bp, Probe Sequence
caaatgatgacaactatggacctgg

SEQ ID NO: 111094 - DNA, 25 bp, Probe Sequence
tatgttcttcggatatggttatggc

SEQ ID NO: 111095 - DNA, 25 bp, Probe Sequence
aactgaagataactggtgctggata

SEQ ID NO: 111096 - DNA, 25 bp, Probe Sequence
gttcttcggatatggttatggcatt

SEQ ID NO: 111097 - DNA, 25 bp, Probe Sequence
ttatgttcttcggatatggttatgg

SEQ ID NO: 111098 - DNA, 25 bp, Probe Sequence
atgaagaacagtgagtacctagaac

SEQ ID NO: 111099 - DNA, 25 bp, Probe Sequence
tgaagataactggtgctggatagag

SEQ ID NO: 111100 - DNA, 25 bp, Probe Sequence
ctgaagataactggtgctggataga

SEQ ID NO: 111101 - DNA, 25 bp, Probe Sequence
gagtgtgctggatgtctctataatt

SEQ ID NO: 111102 - DNA, 25 bp, Probe Sequence
actgaagataactggtgctggatag

SEQ ID NO: 111103 - DNA, 25 bp, Probe Sequence
ccttatgttcttcggatatggttat

SEQ ID NO: 111104 - DNA, 25 bp, Probe Sequence
gtacctagaactgtgccactaatta

SEQ ID NO: 111105 - DNA, 25 bp, Probe Sequence
actgtatcatacctctgtgaatgta

SEQ ID NO: 111106 - DNA, 25 bp, Probe Sequence
tactgtatcatacctctgtgaatgt

SEQ ID NO: 111107 - DNA, 25 bp, Probe Sequence
atgttcttcggatatggttatggca

SEQ ID NO: 111108 - DNA, 25 bp, Probe Sequence
tacctagaactgtgccactaattaa

SEQ ID NO: 111109 - DNA, 25 bp, Probe Sequence
tgaagaacagtgagtacctagaact

SEQ ID NO: 111110 - DNA, 25 bp, Probe Sequence
gaagataactggtgctggatagagg

SEQ ID NO: 111111 - DNA, 25 bp, Probe Sequence
tatgaagaacagtgagtacctagaa

SEQ ID NO: 111112 - DNA, 25 bp, Probe Sequence
ttatgaagaacagtgagtacctaga

SEQ ID NO: 111113 - DNA, 25 bp, Probe Sequence
tgttcttcggatatggttatggcat

SEQ ID NO: 111114 - DNA, 25 bp, Probe Sequence
ggagtgtgctggatgtctctataat

SEQ ID NO: 111115 - DNA, 25 bp, Probe Sequence
agtacctagaactgtgccactaatt

SEQ ID NO: 111116 - DNA, 25 bp, Probe Sequence
gtactgtatcatacctctgtgaatg

SEQ ID NO: 111117 - DNA, 25 bp, Probe Sequence
atgtcagcatccttgaaccatatca

SEQ ID NO: 111118 - DNA, 25 bp, Probe Sequence
gacactgtaacctactcttgaatca

SEQ ID NO: 111119 - DNA, 25 bp, Probe Sequence
ggacactgtaacctactcttgaatc

SEQ ID NO: 111120 - DNA, 25 bp, Probe Sequence
tggacactgtaacctactcttgaat

SEQ ID NO: 111121 - DNA, 25 bp, Probe Sequence
taacctactcttgaatcagtcacag

SEQ ID NO: 111122 - DNA, 25 bp, Probe Sequence
gtaacctactcttgaatcagtcaca

SEQ ID NO: 111123 - DNA, 25 bp, Probe Sequence
tgtaacctactcttgaatcagtcac

SEQ ID NO: 111124 - DNA, 25 bp, Probe Sequence
cgtagtgaacagtcatctaattgga

SEQ ID NO: 111125 - DNA, 25 bp, Probe Sequence
acactgtaacctactcttgaatcag

SEQ ID NO: 111126 - DNA, 25 bp, Probe Sequence
ctgtaacctactcttgaatcagtca

SEQ ID NO: 111127 - DNA, 25 bp, Probe Sequence
tacagactactggatggtgaagaat

SEQ ID NO: 111128 - DNA, 25 bp, Probe Sequence
gtggacactgtaacctactcttgaa

SEQ ID NO: 111129 - DNA, 25 bp, Probe Sequence
ttacagactactggatggtgaagaa

SEQ ID NO: 111130 - DNA, 25 bp, Probe Sequence
gtagtgaacagtcatctaattggat

SEQ ID NO: 111131 - DNA, 25 bp, Probe Sequence
tacagaccactggatgatgaagaat

SEQ ID NO: 111132 - DNA, 25 bp, Probe Sequence
acagactactggatggtgaagaatt

SEQ ID NO: 111133 - DNA, 25 bp, Probe Sequence
ttacagaccactggatgatgaagaa

SEQ ID NO: 111134 - DNA, 25 bp, Probe Sequence
ttcacactgtaaggacacactactc

SEQ ID NO: 111135 - DNA, 25 bp, Probe Sequence
gttcacactgtaaggacacactact

SEQ ID NO: 111136 - DNA, 25 bp, Probe Sequence
acagaccactggatgatgaagaatt

SEQ ID NO: 111137 - DNA, 25 bp, Probe Sequence
aacctactcttgaatcagtcacagg

SEQ ID NO: 111138 - DNA, 25 bp, Probe Sequence
tgtggacactgtaacctactcttga

SEQ ID NO: 111139 - DNA, 25 bp, Probe Sequence
ctaattggatgtgtggacactgtaa

SEQ ID NO: 111140 - DNA, 25 bp, Probe Sequence
ttccaactgtaaggacacactactc

SEQ ID NO: 111141 - DNA, 25 bp, Probe Sequence
taattggatgtgtggacactgtaac

SEQ ID NO: 111142 - DNA, 25 bp, Probe Sequence
taagaagttgtgagctggaattagt

SEQ ID NO: 111143 - DNA, 25 bp, Probe Sequence
cctaattaagaagttgtgagctgga

SEQ ID NO: 111144 - DNA, 25 bp, Probe Sequence
ttaagaagttgtgagctggaattag

SEQ ID NO: 111145 - DNA, 25 bp, Probe Sequence
ctaattaagaagttgtgagctggaa

SEQ ID NO: 111146 - DNA, 25 bp, Probe Sequence
aagaagttgtgagctggaattagtg

SEQ ID NO: 111147 - DNA, 25 bp, Probe Sequence
attaagaagttgtgagctggaatta

SEQ ID NO: 111148 - DNA, 25 bp, Probe Sequence
taattaagaagttgtgagctggaat

SEQ ID NO: 111149 - DNA, 25 bp, Probe Sequence
aattaagaagttgtgagctggaatt

SEQ ID NO: 111150 - DNA, 25 bp, Probe Sequence
gcctgctattaaatgtggaatatga

SEQ ID NO: 111151 - DNA, 25 bp, Probe Sequence
tcaataccatccactatgcaattag

SEQ ID NO: 111152 - DNA, 25 bp, Probe Sequence
gggagggaatcagggtttatagaaa

SEQ ID NO: 111153 - DNA, 25 bp, Probe Sequence
ttcaataccatccactatgcaatta

SEQ ID NO: 111154 - DNA, 25 bp, Probe Sequence
atctctgttccagtttccttcttag

SEQ ID NO: 111155 - DNA, 25 bp, Probe Sequence
ctaatctctgttccagtttccttct

SEQ ID NO: 111156 - DNA, 25 bp, Probe Sequence
tctaatctctgttccagtttccttc

SEQ ID NO: 111157 - DNA, 25 bp, Probe Sequence
ctgtgctctgtgtttcaataccatc

SEQ ID NO: 111158 - DNA, 25 bp, Probe Sequence
aatctctgttccagtttccttctta

SEQ ID NO: 111159 - DNA, 25 bp, Probe Sequence
taatctctgttccagtttccttctt

SEQ ID NO: 111160 - DNA, 25 bp, Probe Sequence
ttctaatctctgttccagtttcctt

SEQ ID NO: 111161 - DNA, 25 bp, Probe Sequence
agggagggaatcagggtttatagaa

SEQ ID NO: 111162 - DNA, 25 bp, Probe Sequence
attctaatctctgttccagtttcct

SEQ ID NO: 111163 - DNA, 25 bp, Probe Sequence
tatgattctaatctctgttccagtt

SEQ ID NO: 111164 - DNA, 25 bp, Probe Sequence
aataaactcacaaggtggttctttc

SEQ ID NO: 111165 - DNA, 25 bp, Probe Sequence
ctgtgtttcaataccatccactatg

SEQ ID NO: 111166 - DNA, 25 bp, Probe Sequence
agaaaatgtagcccattaccacatg

SEQ ID NO: 111167 - DNA, 25 bp, Probe Sequence
aaatgtagcccattaccacatgtag

SEQ ID NO: 111168 - DNA, 25 bp, Probe Sequence
aatgtagcccattaccacatgtagc

SEQ ID NO: 111169 - DNA, 25 bp, Probe Sequence
tagcccattaccacatgtagccttg

SEQ ID NO: 111170 - DNA, 25 bp, Probe Sequence
gtagcccattaccacatgtagcctt

SEQ ID NO: 111171 - DNA, 25 bp, Probe Sequence
aaaatgtagcccattaccacatgta

SEQ ID NO: 111172 - DNA, 25 bp, Probe Sequence
gaaaatgtagcccattaccacatgt

SEQ ID NO: 111173 - DNA, 25 bp, Probe Sequence
atgtagcccattaccacatgtagcc

SEQ ID NO: 111174 - DNA, 25 bp, Probe Sequence
aagatggtatagttatgttgcctgg

SEQ ID NO: 111175 - DNA, 25 bp, Probe Sequence
agatggtatagttatgttgcctgga

SEQ ID NO: 111176 - DNA, 25 bp, Probe Sequence
caagatggtatagttatgttgcctg

SEQ ID NO: 111177 - DNA, 25 bp, Probe Sequence
acagcaagatggtatagttatgttg

SEQ ID NO: 111178 - DNA, 25 bp, Probe Sequence
tacagcaagatggtatagttatgtt

SEQ ID NO: 111179 - DNA, 25 bp, Probe Sequence
ttacagcaagatggtatagttatgt

SEQ ID NO: 111180 - DNA, 25 bp, Probe Sequence
tttacagcaagatggtatagttatg

SEQ ID NO: 111181 - DNA, 25 bp, Probe Sequence
acttttacagcaagatggtatagtt

SEQ ID NO: 111182 - DNA, 25 bp, Probe Sequence
tacttttacagcaagatggtatagt

SEQ ID NO: 111183 - DNA, 25 bp, Probe Sequence
gtacttttacagcaagatggtatag

SEQ ID NO: 111184 - DNA, 25 bp, Probe Sequence
cttttacagcaagatggtatagtta

SEQ ID NO: 111185 - DNA, 25 bp, Probe Sequence
cagcaagatggtatagttatgttgc

SEQ ID NO: 111186 - DNA, 25 bp, Probe Sequence
gcaagatggtatagttatgttgcct

SEQ ID NO: 111187 - DNA, 25 bp, Probe Sequence
agcaagatggtatagttatgttgcc

SEQ ID NO: 111188 - DNA, 25 bp, Probe Sequence
ttttacagcaagatggtatagttat

SEQ ID NO: 111189 - DNA, 25 bp, Probe Sequence
agtacttttacagcaagatggtata

SEQ ID NO: 111190 - DNA, 25 bp, Probe Sequence
ggtggatgagactgattgaatagaa

SEQ ID NO: 111191 - DNA, 25 bp, Probe Sequence
tacaccattgagattaagtctgagg

SEQ ID NO: 111192 - DNA, 25 bp, Probe Sequence
gctacaccattgagattaagtctga

SEQ ID NO: 111193 - DNA, 25 bp, Probe Sequence
ctacaccattgagattaagtctgag

SEQ ID NO: 111194 - DNA, 25 bp, Probe Sequence
gagattaagtctgaggcagttcatt

SEQ ID NO: 111195 - DNA, 25 bp, Probe Sequence
attgagattaagtctgaggcagttc

SEQ ID NO: 111196 - DNA, 25 bp, Probe Sequence
attaagtctgaggcagttcattgag

SEQ ID NO: 111197 - DNA, 25 bp, Probe Sequence
gattaagtctgaggcagttcattga

SEQ ID NO: 111198 - DNA, 25 bp, Probe Sequence
agattaagtctgaggcagttcattg

SEQ ID NO: 111199 - DNA, 25 bp, Probe Sequence
cattgagattaagtctgaggcagtt

SEQ ID NO: 111200 - DNA, 25 bp, Probe Sequence
tgacacattcattcagatacttctt

SEQ ID NO: 111201 - DNA, 25 bp, Probe Sequence
tgagattaagtctgaggcagttcat

SEQ ID NO: 111202 - DNA, 25 bp, Probe Sequence
ttgagattaagtctgaggcagttca

SEQ ID NO: 111203 - DNA, 25 bp, Probe Sequence
agctacaccattgagattaagtctg

SEQ ID NO: 111204 - DNA, 25 bp, Probe Sequence
aagctacaccattgagattaagtct

SEQ ID NO: 111205 - DNA, 25 bp, Probe Sequence
caagctacaccattgagattaagtc

SEQ ID NO: 111206 - DNA, 25 bp, Probe Sequence
caccattgagattaagtctgaggca

SEQ ID NO: 111207 - DNA, 25 bp, Probe Sequence
acaccattgagattaagtctgaggc

SEQ ID NO: 111208 - DNA, 25 bp, Probe Sequence
gttcattgaggcagctctactataa

SEQ ID NO: 111209 - DNA, 25 bp, Probe Sequence
agttcattgaggcagctctactata

SEQ ID NO: 111210 - DNA, 25 bp, Probe Sequence
ccattgagattaagtctgaggcagt

SEQ ID NO: 111211 - DNA, 25 bp, Probe Sequence
accattgagattaagtctgaggcag

SEQ ID NO: 111212 - DNA, 25 bp, Probe Sequence
gtggatgagactgattgaatagaaa

SEQ ID NO: 111213 - DNA, 25 bp, Probe Sequence
gggtggatgagactgattgaataga

SEQ ID NO: 111214 - DNA, 25 bp, Probe Sequence
aggagaagttaagaattgagcagtt

SEQ ID NO: 111215 - DNA, 25 bp, Probe Sequence
cttcacactgttatcacctatcctg

SEQ ID NO: 111216 - DNA, 25 bp, Probe Sequence
caggagaagttaagaattgagcagt

SEQ ID NO: 111217 - DNA, 25 bp, Probe Sequence
acagcaggagaagttaagaattgag

SEQ ID NO: 111218 - DNA, 25 bp, Probe Sequence
ggagaagttaagaattgagcagttc

SEQ ID NO: 111219 - DNA, 25 bp, Probe Sequence
aacagcaggagaagttaagaattga

SEQ ID NO: 111220 - DNA, 25 bp, Probe Sequence
gcttggcaatagttaagtcaatcta

SEQ ID NO: 111221 - DNA, 25 bp, Probe Sequence
ctgttatcacctatcctgaagatgt

SEQ ID NO: 111222 - DNA, 25 bp, Probe Sequence
actgttatcacctatcctgaagatg

SEQ ID NO: 111223 - DNA, 25 bp, Probe Sequence
cactgttatcacctatcctgaagat

SEQ ID NO: 111224 - DNA, 25 bp, Probe Sequence
acactgttatcacctatcctgaaga

SEQ ID NO: 111225 - DNA, 25 bp, Probe Sequence
cacactgttatcacctatcctgaag

SEQ ID NO: 111226 - DNA, 25 bp, Probe Sequence
ccttcacactgttatcacctatcct

SEQ ID NO: 111227 - DNA, 25 bp, Probe Sequence
tcacactgttatcacctatcctgaa

SEQ ID NO: 111228 - DNA, 25 bp, Probe Sequence
ttcacactgttatcacctatcctga

SEQ ID NO: 111229 - DNA, 25 bp, Probe Sequence
ttgctcataatgacttacaggctaa

SEQ ID NO: 111230 - DNA, 25 bp, Probe Sequence
attgctcataatgacttacaggcta

SEQ ID NO: 111231 - DNA, 25 bp, Probe Sequence
tattgctcataatgacttacaggct

SEQ ID NO: 111232 - DNA, 25 bp, Probe Sequence
ctattgctcataatgacttacaggc

SEQ ID NO: 111233 - DNA, 25 bp, Probe Sequence
ttacaccatactgttaagagtcctt

SEQ ID NO: 111234 - DNA, 25 bp, Probe Sequence
gcaggagaagttaagaattgagcag

SEQ ID NO: 111235 - DNA, 25 bp, Probe Sequence
cagcaggagaagttaagaattgagc

SEQ ID NO: 111236 - DNA, 25 bp, Probe Sequence
tatcagacaagatgaggaggtacaa

SEQ ID NO: 111237 - DNA, 25 bp, Probe Sequence
ttatcagacaagatgaggaggtaca

SEQ ID NO: 111238 - DNA, 25 bp, Probe Sequence
atcagattagatgctcaggaagatg

SEQ ID NO: 111239 - DNA, 25 bp, Probe Sequence
gatcagattagatgctcaggaagat

SEQ ID NO: 111240 - DNA, 25 bp, Probe Sequence
agattagatgctcaggaagatgctc

SEQ ID NO: 111241 - DNA, 25 bp, Probe Sequence
ggatcagattagatgctcaggaaga

SEQ ID NO: 111242 - DNA, 25 bp, Probe Sequence
gattagatgctcaggaagatgctct

SEQ ID NO: 111243 - DNA, 25 bp, Probe Sequence
cagattagatgctcaggaagatgct

SEQ ID NO: 111244 - DNA, 25 bp, Probe Sequence
tcagattagatgctcaggaagatgc

SEQ ID NO: 111245 - DNA, 25 bp, Probe Sequence
gtctcatttccttatctctcagtgg

SEQ ID NO: 111246 - DNA, 25 bp, Probe Sequence
agtctcatttccttatctctcagtg

SEQ ID NO: 111247 - DNA, 25 bp, Probe Sequence
caggattgttacagggatcagatta

SEQ ID NO: 111248 - DNA, 25 bp, Probe Sequence
ttgttacagggatcagattagatgc

SEQ ID NO: 111249 - DNA, 25 bp, Probe Sequence
ggattgttacagggatcagattaga

SEQ ID NO: 111250 - DNA, 25 bp, Probe Sequence
aggattgttacagggatcagattag

SEQ ID NO: 111251 - DNA, 25 bp, Probe Sequence
gttacagggatcagattagatgctc

SEQ ID NO: 111252 - DNA, 25 bp, Probe Sequence
gagtctcatttccttatctctcagt

SEQ ID NO: 111253 - DNA, 25 bp, Probe Sequence
ttacagggatcagattagatgctca

SEQ ID NO: 111254 - DNA, 25 bp, Probe Sequence
ttggtcaccagcttatattgtcatt

SEQ ID NO: 111255 - DNA, 25 bp, Probe Sequence
tgttacagggatcagattagatgct

SEQ ID NO: 111256 - DNA, 25 bp, Probe Sequence
cttggtcaccagcttatattgtcat

SEQ ID NO: 111257 - DNA, 25 bp, Probe Sequence
tacagggatcagattagatgctcag

SEQ ID NO: 111258 - DNA, 25 bp, Probe Sequence
attagatgctcaggaagatgctctt

SEQ ID NO: 111259 - DNA, 25 bp, Probe Sequence
ctaccctgagtctcatttccttatc

SEQ ID NO: 111260 - DNA, 25 bp, Probe Sequence
taccctgagtctcatttccttatct

SEQ ID NO: 111261 - DNA, 25 bp, Probe Sequence
atttcactaccctgagtctcatttc

SEQ ID NO: 111262 - DNA, 25 bp, Probe Sequence
tcacacctgtagtcccaacacttag

SEQ ID NO: 111263 - DNA, 25 bp, Probe Sequence
ctcacacctgtagtcccaacactta

SEQ ID NO: 111264 - DNA, 25 bp, Probe Sequence
cacacctgtagtcccaacacttagg

SEQ ID NO: 111265 - DNA, 25 bp, Probe Sequence
atttagacaagagatgggaatgagg

SEQ ID NO: 111266 - DNA, 25 bp, Probe Sequence
tttagacaagagatgggaatgaggt

SEQ ID NO: 111267 - DNA, 25 bp, Probe Sequence
ttagacaagagatgggaatgaggtg

SEQ ID NO: 111268 - DNA, 25 bp, Probe Sequence
aagaagggagaagaaaggtgagttt

SEQ ID NO: 111269 - DNA, 25 bp, Probe Sequence
gaagaagggagaagaaaggtgagtt

SEQ ID NO: 111270 - DNA, 25 bp, Probe Sequence
tatttagacaagagatgggaatgag

SEQ ID NO: 111271 - DNA, 25 bp, Probe Sequence
aagggagaagaaaggtgagtttgag

SEQ ID NO: 111272 - DNA, 25 bp, Probe Sequence
gaagggagaagaaaggtgagtttga

SEQ ID NO: 111273 - DNA, 25 bp, Probe Sequence
agaagggagaagaaaggtgagtttg

SEQ ID NO: 111274 - DNA, 25 bp, Probe Sequence
ttatttagacaagagatgggaatga

SEQ ID NO: 111275 - DNA, 25 bp, Probe Sequence
tagacaagagatgggaatgaggtgg

SEQ ID NO: 111276 - DNA, 25 bp, Probe Sequence
tttatttagacaagagatgggaatg

SEQ ID NO: 111277 - DNA, 25 bp, Probe Sequence
ctctcctccccaaatcaatacacta

SEQ ID NO: 111278 - DNA, 25 bp, Probe Sequence
ggaagaagggagaagaaaggtgagt

SEQ ID NO: 111279 - DNA, 25 bp, Probe Sequence
tggaagaagggagaagaaaggtgag

SEQ ID NO: 111280 - DNA, 25 bp, Probe Sequence
cttctctcctccccaaatcaataca

SEQ ID NO: 111281 - DNA, 25 bp, Probe Sequence
gagagagagagagagaggacagctt

SEQ ID NO: 111282 - DNA, 25 bp, Probe Sequence
tctcctccccaaatcaatacactag

SEQ ID NO: 111283 - DNA, 25 bp, Probe Sequence
gtggaagaagggagaagaaaggtga

SEQ ID NO: 111284 - DNA, 25 bp, Probe Sequence
ttctctcctccccaaatcaatacac

SEQ ID NO: 111285 - DNA, 25 bp, Probe Sequence
agagagagagagaggacagcttgag

SEQ ID NO: 111286 - DNA, 25 bp, Probe Sequence
gagagagagagagaggacagcttga

SEQ ID NO: 111287 - DNA, 25 bp, Probe Sequence
agagagagagagagaggacagcttg

SEQ ID NO: 111288 - DNA, 25 bp, Probe Sequence
ccttctctcctccccaaatcaatac

SEQ ID NO: 111289 - DNA, 25 bp, Probe Sequence
ggagttaggaggcagattgatagta

SEQ ID NO: 111290 - DNA, 25 bp, Probe Sequence
tggagttaggaggcagattgatagt

SEQ ID NO: 111291 - DNA, 25 bp, Probe Sequence
ctggagttaggaggcagattgatag

SEQ ID NO: 111292 - DNA, 25 bp, Probe Sequence
gctggagttaggaggcagattgata

SEQ ID NO: 111293 - DNA, 25 bp, Probe Sequence
ccaactgttacaatcaaggtctatg

SEQ ID NO: 111294 - DNA, 25 bp, Probe Sequence
aaggatggttaatgatgctgagaag

SEQ ID NO: 111295 - DNA, 25 bp, Probe Sequence
cgaatgtaattggaatcttcacctc

SEQ ID NO: 111296 - DNA, 25 bp, Probe Sequence
ggatggttaatgatgctgagaagtt

SEQ ID NO: 111297 - DNA, 25 bp, Probe Sequence
aatgtaattggaatcttcacctcag

SEQ ID NO: 111298 - DNA, 25 bp, Probe Sequence
aatcaaccaactgttacaatcaagg

SEQ ID NO: 111299 - DNA, 25 bp, Probe Sequence
gtaattggaatcttcacctcagagt

SEQ ID NO: 111300 - DNA, 25 bp, Probe Sequence
tgtaattggaatcttcacctcagag

SEQ ID NO: 111301 - DNA, 25 bp, Probe Sequence
atgtaattggaatcttcacctcaga

SEQ ID NO: 111302 - DNA, 25 bp, Probe Sequence
gaatgtaattggaatcttcacctca

SEQ ID NO: 111303 - DNA, 25 bp, Probe Sequence
tacaatcaaggtctatgaaggtgaa

SEQ ID NO: 111304 - DNA, 25 bp, Probe Sequence
ttacaatcaaggtctatgaaggtga

SEQ ID NO: 111305 - DNA, 25 bp, Probe Sequence
gttacaatcaaggtctatgaaggtg

SEQ ID NO: 111306 - DNA, 25 bp, Probe Sequence
tgttacaatcaaggtctatgaaggt

SEQ ID NO: 111307 - DNA, 25 bp, Probe Sequence
ctgttacaatcaaggtctatgaagg

SEQ ID NO: 111308 - DNA, 25 bp, Probe Sequence
aggatggttaatgatgctgagaagt

SEQ ID NO: 111309 - DNA, 25 bp, Probe Sequence
atcacaatcaccaatgaccagaatc

SEQ ID NO: 111310 - DNA, 25 bp, Probe Sequence
caactgttacaatcaaggtctatga

SEQ ID NO: 111311 - DNA, 25 bp, Probe Sequence
ataagatcacaatcaccaatgacca

SEQ ID NO: 111312 - DNA, 25 bp, Probe Sequence
actgttacaatcaaggtctatgaag

SEQ ID NO: 111313 - DNA, 25 bp, Probe Sequence
gcttctgataatcaaccaactgtta

SEQ ID NO: 111314 - DNA, 25 bp, Probe Sequence
tgatctgctagtgctgtaatattgt

SEQ ID NO: 111315 - DNA, 25 bp, Probe Sequence
aataagatcacaatcaccaatgacc

SEQ ID NO: 111316 - DNA, 25 bp, Probe Sequence
taagatcacaatcaccaatgaccag

SEQ ID NO: 111317 - DNA, 25 bp, Probe Sequence
acctcctgtataagaagtaccgtat

SEQ ID NO: 111318 - DNA, 25 bp, Probe Sequence
aacctcctgtataagaagtaccgta

SEQ ID NO: 111319 - DNA, 25 bp, Probe Sequence
cctcctgtataagaagtaccgtatt

SEQ ID NO: 111320 - DNA, 25 bp, Probe Sequence
ccaaacctcctgtataagaagtacc

SEQ ID NO: 111321 - DNA, 25 bp, Probe Sequence
cccaaacctcctgtataagaagtac

SEQ ID NO: 111322 - DNA, 25 bp, Probe Sequence
caaacctcctgtataagaagtaccg

SEQ ID NO: 111323 - DNA, 25 bp, Probe Sequence
tctgcccatcatactttgtaataaa

SEQ ID NO: 111324 - DNA, 25 bp, Probe Sequence
ttctgcccatcatactttgtaataa

SEQ ID NO: 111325 - DNA, 25 bp, Probe Sequence
tttctgcccatcatactttgtaata

SEQ ID NO: 111326 - DNA, 25 bp, Probe Sequence
aaacctcctgtataagaagtaccgt

SEQ ID NO: 111327 - DNA, 25 bp, Probe Sequence
ctcctgtataagaagtaccgtattt

SEQ ID NO: 111328 - DNA, 25 bp, Probe Sequence
ttttctgcccatcatactttgtaat

SEQ ID NO: 111329 - DNA, 25 bp, Probe Sequence
attttctgcccatcatactttgtaa

SEQ ID NO: 111330 - DNA, 25 bp, Probe Sequence
ccccaaacctcctgtataagaagta

SEQ ID NO: 111331 - DNA, 25 bp, Probe Sequence
tattttctgcccatcatactttgta

SEQ ID NO: 111332 - DNA, 25 bp, Probe Sequence
tgcccatcatactttgtaataaaac

SEQ ID NO: 111333 - DNA, 25 bp, Probe Sequence
agtaccgtattttctgcccatcata

SEQ ID NO: 111334 - DNA, 25 bp, Probe Sequence
gtattttctgcccatcatactttgt

SEQ ID NO: 111335 - DNA, 25 bp, Probe Sequence
cgtattttctgcccatcatactttg

SEQ ID NO: 111336 - DNA, 25 bp, Probe Sequence
gcccatcatactttgtaataaaact

SEQ ID NO: 111337 - DNA, 25 bp, Probe Sequence
ctgcccatcatactttgtaataaaa

SEQ ID NO: 111338 - DNA, 25 bp, Probe Sequence
ccgtattttctgcccatcatacttt

SEQ ID NO: 111339 - DNA, 25 bp, Probe Sequence
taccgtattttctgcccatcatact

SEQ ID NO: 111340 - DNA, 25 bp, Probe Sequence
aagtaccgtattttctgcccatcat

SEQ ID NO: 111341 - DNA, 25 bp, Probe Sequence
attatcagagaacataagcacaagt

SEQ ID NO: 111342 - DNA, 25 bp, Probe Sequence
gtacttgaccaatacattgtgctat

SEQ ID NO: 111343 - DNA, 25 bp, Probe Sequence
tcagagaacataagcacaagtataa

SEQ ID NO: 111344 - DNA, 25 bp, Probe Sequence
cagagaacataagcacaagtataag

SEQ ID NO: 111345 - DNA, 25 bp, Probe Sequence
atcagagaacataagcacaagtata

SEQ ID NO: 111346 - DNA, 25 bp, Probe Sequence
tatcagagaacataagcacaagtat

SEQ ID NO: 111347 - DNA, 25 bp, Probe Sequence
acttgaccaatacattgtgctatat

SEQ ID NO: 111348 - DNA, 25 bp, Probe Sequence
ttatcagagaacataagcacaagta

SEQ ID NO: 111349 - DNA, 25 bp, Probe Sequence
agagaacataagcacaagtataaga

SEQ ID NO: 111350 - DNA, 25 bp, Probe Sequence
cttgaccaatacattgtgctatatg

SEQ ID NO: 111351 - DNA, 25 bp, Probe Sequence
tctcattgctacttgtgattatcaa

SEQ ID NO: 111352 - DNA, 25 bp, Probe Sequence
atctcattgctacttgtgattatca

SEQ ID NO: 111353 - DNA, 25 bp, Probe Sequence
tgggtttgtttgagggtattatctt

SEQ ID NO: 111354 - DNA, 25 bp, Probe Sequence
atgggtttgtttgagggtattatct

SEQ ID NO: 111355 - DNA, 25 bp, Probe Sequence
ttgtttgagggtattatcttctggt

SEQ ID NO: 111356 - DNA, 25 bp, Probe Sequence
gggtttgtttgagggtattatcttc

SEQ ID NO: 111357 - DNA, 25 bp, Probe Sequence
tacttgaccaatacattgtgctata

SEQ ID NO: 111358 - DNA, 25 bp, Probe Sequence
aaacaacttaaaccagcatcacttt

SEQ ID NO: 111359 - DNA, 25 bp, Probe Sequence
gcaggttgaattatctatctggata

SEQ ID NO: 111360 - DNA, 25 bp, Probe Sequence
gttaaactcatttcacttctcctgg

SEQ ID NO: 111361 - DNA, 25 bp, Probe Sequence
aatgggtttgtttgagggtattatc

SEQ ID NO: 111362 - DNA, 25 bp, Probe Sequence
aaacacaacttggaaactggaattt

SEQ ID NO: 111363 - DNA, 25 bp, Probe Sequence
caaacaacttaaaccagcatcactt

SEQ ID NO: 111364 - DNA, 25 bp, Probe Sequence
ttaaactcatttcacttctcctggg

SEQ ID NO: 111365 - DNA, 25 bp, Probe Sequence
ccgagataagttcatcattaggtgt

SEQ ID NO: 111366 - DNA, 25 bp, Probe Sequence
cgagataagttcatcattaggtgtg

SEQ ID NO: 111367 - DNA, 25 bp, Probe Sequence
tcaatgaatacctactctcctccat

SEQ ID NO: 111368 - DNA, 25 bp, Probe Sequence
ttccgtgtcttattgagtatggcta

SEQ ID NO: 111369 - DNA, 25 bp, Probe Sequence
gcaccgagataagttcatcattagg

SEQ ID NO: 111370 - DNA, 25 bp, Probe Sequence
ggcaccgagataagttcatcattag

SEQ ID NO: 111371 - DNA, 25 bp, Probe Sequence
atacctactctcctccattctccat

SEQ ID NO: 111372 - DNA, 25 bp, Probe Sequence
ataagttcatcattaggtgtgagca

SEQ ID NO: 111373 - DNA, 25 bp, Probe Sequence
gataagttcatcattaggtgtgagc

SEQ ID NO: 111374 - DNA, 25 bp, Probe Sequence
tgtgtaccttggaagttatgtcatt

SEQ ID NO: 111375 - DNA, 25 bp, Probe Sequence
tctatgtggtatatgatgtggtcag

SEQ ID NO: 111376 - DNA, 25 bp, Probe Sequence
ctgtgtaccttggaagttatgtcat

SEQ ID NO: 111377 - DNA, 25 bp, Probe Sequence
tacattgaagagagatgaagtcact

SEQ ID NO: 111378 - DNA, 25 bp, Probe Sequence
aatacctactctcctccattctcca

SEQ ID NO: 111379 - DNA, 25 bp, Probe Sequence
ctatgtggtatatgatgtggtcagc

SEQ ID NO: 111380 - DNA, 25 bp, Probe Sequence
aggcaccgagataagttcatcatta

SEQ ID NO: 111381 - DNA, 25 bp, Probe Sequence
atgaggtatatggaagatgaggcac

SEQ ID NO: 111382 - DNA, 25 bp, Probe Sequence
cttcaatgaatacctactctcctcc

SEQ ID NO: 111383 - DNA, 25 bp, Probe Sequence
attctgtgtaccttggaagttatgt

SEQ ID NO: 111384 - DNA, 25 bp, Probe Sequence
ttcaatgaatacctactctcctcca

SEQ ID NO: 111385 - DNA, 25 bp, Probe Sequence
ccacttcaatgaatacctactctcc

SEQ ID NO: 111386 - DNA, 25 bp, Probe Sequence
ttagattctgtgtaccttggaagtt

SEQ ID NO: 111387 - DNA, 25 bp, Probe Sequence
cacttcaatgaatacctactctcct

SEQ ID NO: 111388 - DNA, 25 bp, Probe Sequence
ttctgtgtaccttggaagttatgtc

SEQ ID NO: 111389 - DNA, 25 bp, Probe Sequence
atttgggaaagttcttgatgtagga

SEQ ID NO: 111390 - DNA, 25 bp, Probe Sequence
catttgggaaagttcttgatgtagg

SEQ ID NO: 111391 - DNA, 25 bp, Probe Sequence
ttgggaaagttcttgatgtaggaaa

SEQ ID NO: 111392 - DNA, 25 bp, Probe Sequence
tttgggaaagttcttgatgtaggaa

SEQ ID NO: 111393 - DNA, 25 bp, Probe Sequence
gaaagttcttgatgtaggaaagggt

SEQ ID NO: 111394 - DNA, 25 bp, Probe Sequence
tgggaaagttcttgatgtaggaaag

SEQ ID NO: 111395 - DNA, 25 bp, Probe Sequence
gttcttgatgtaggaaagggtgaaa

SEQ ID NO: 111396 - DNA, 25 bp, Probe Sequence
aaagttcttgatgtaggaaagggtg

SEQ ID NO: 111397 - DNA, 25 bp, Probe Sequence
ggaaagttcttgatgtaggaaaggg

SEQ ID NO: 111398 - DNA, 25 bp, Probe Sequence
gggaaagttcttgatgtaggaaagg

SEQ ID NO: 111399 - DNA, 25 bp, Probe Sequence
agttcttgatgtaggaaagggtgaa

SEQ ID NO: 111400 - DNA, 25 bp, Probe Sequence
aagttcttgatgtaggaaagggtga

SEQ ID NO: 111401 - DNA, 25 bp, Probe Sequence
aataaagataagagacttggactcc

SEQ ID NO: 111402 - DNA, 25 bp, Probe Sequence
atgctgccagtctgttaaaataaag

SEQ ID NO: 111403 - DNA, 25 bp, Probe Sequence
gatgctgccagtctgttaaaataaa

SEQ ID NO: 111404 - DNA, 25 bp, Probe Sequence
ttcttgatgtaggaaagggtgaaaa

SEQ ID NO: 111405 - DNA, 25 bp, Probe Sequence
ataaagataagagacttggactcca

SEQ ID NO: 111406 - DNA, 25 bp, Probe Sequence
cacatttgggaaagttcttgatgta

SEQ ID NO: 111407 - DNA, 25 bp, Probe Sequence
gctgccagtctgttaaaataaagat

SEQ ID NO: 111408 - DNA, 25 bp, Probe Sequence
tgatgctgccagtctgttaaaataa

SEQ ID NO: 111409 - DNA, 25 bp, Probe Sequence
acatttgggaaagttcttgatgtag

SEQ ID NO: 111410 - DNA, 25 bp, Probe Sequence
tgctgccagtctgttaaaataaaga

SEQ ID NO: 111411 - DNA, 25 bp, Probe Sequence
ccacatttgggaaagttcttgatgt

SEQ ID NO: 111412 - DNA, 25 bp, Probe Sequence
aaataaagataagagacttggactc

SEQ ID NO: 111413 - DNA, 25 bp, Probe Sequence
gtatatggaacagcctggataagtt

SEQ ID NO: 111414 - DNA, 25 bp, Probe Sequence
atgtatatggaacagcctggataag

SEQ ID NO: 111415 - DNA, 25 bp, Probe Sequence
aatgtatatggaacagcctggataa

SEQ ID NO: 111416 - DNA, 25 bp, Probe Sequence
tgtatatggaacagcctggataagt

SEQ ID NO: 111417 - DNA, 25 bp, Probe Sequence
taatgtatatggaacagcctggata

SEQ ID NO: 111418 - DNA, 25 bp, Probe Sequence
ataagtttgccttctgacctcattt

SEQ ID NO: 111419 - DNA, 25 bp, Probe Sequence
gataagtttgccttctgacctcatt

SEQ ID NO: 111420 - DNA, 25 bp, Probe Sequence
tatatggaacagcctggataagttt

SEQ ID NO: 111421 - DNA, 25 bp, Probe Sequence
atatggaacagcctggataagtttg

SEQ ID NO: 111422 - DNA, 25 bp, Probe Sequence
taagtttgccttctgacctcatttc

SEQ ID NO: 111423 - DNA, 25 bp, Probe Sequence
ggataagtttgccttctgacctcat

SEQ ID NO: 111424 - DNA, 25 bp, Probe Sequence
ctggataagtttgccttctgacctc

SEQ ID NO: 111425 - DNA, 25 bp, Probe Sequence
tatggaacagcctggataagtttgc

SEQ ID NO: 111426 - DNA, 25 bp, Probe Sequence
tggataagtttgccttctgacctca

SEQ ID NO: 111427 - DNA, 25 bp, Probe Sequence
gaacagcctggataagtttgccttc

SEQ ID NO: 111428 - DNA, 25 bp, Probe Sequence
cctggataagtttgccttctgacct

SEQ ID NO: 111429 - DNA, 25 bp, Probe Sequence
aacagcctggataagtttgccttct

SEQ ID NO: 111430 - DNA, 25 bp, Probe Sequence
agcctggataagtttgccttctgac

SEQ ID NO: 111431 - DNA, 25 bp, Probe Sequence
cagcctggataagtttgccttctga

SEQ ID NO: 111432 - DNA, 25 bp, Probe Sequence
acagcctggataagtttgccttctg

SEQ ID NO: 111433 - DNA, 25 bp, Probe Sequence
acaaaataaagtaaaatgtagcagt

SEQ ID NO: 111434 - DNA, 25 bp, Probe Sequence
caaaataaagtaaaatgtagcagtc

SEQ ID NO: 111435 - DNA, 25 bp, Probe Sequence
tagaatgagagggaagagatagcat

SEQ ID NO: 111436 - DNA, 25 bp, Probe Sequence
atgtgaaactagaatgagagggaag

SEQ ID NO: 111437 - DNA, 25 bp, Probe Sequence
tgaaactagaatgagagggaagaga

SEQ ID NO: 111438 - DNA, 25 bp, Probe Sequence
gtgaaactagaatgagagggaagag

SEQ ID NO: 111439 - DNA, 25 bp, Probe Sequence
aatgtgaaactagaatgagagggaa

SEQ ID NO: 111440 - DNA, 25 bp, Probe Sequence
aaatgtgaaactagaatgagaggga

SEQ ID NO: 111441 - DNA, 25 bp, Probe Sequence
caaatgtgaaactagaatgagaggg

SEQ ID NO: 111442 - DNA, 25 bp, Probe Sequence
ccaaatgtgaaactagaatgagagg

SEQ ID NO: 111443 - DNA, 25 bp, Probe Sequence
ctagaatgagagggaagagatagca

SEQ ID NO: 111444 - DNA, 25 bp, Probe Sequence
actagaatgagagggaagagatagc

SEQ ID NO: 111445 - DNA, 25 bp, Probe Sequence
gaaactagaatgagagggaagagat

SEQ ID NO: 111446 - DNA, 25 bp, Probe Sequence
tgtgaaactagaatgagagggaaga

SEQ ID NO: 111447 - DNA, 25 bp, Probe Sequence
ccttatgtaaactgagccctttgtt

SEQ ID NO: 111448 - DNA, 25 bp, Probe Sequence
tccaaatgtgaaactagaatgagag

SEQ ID NO: 111449 - DNA, 25 bp, Probe Sequence
tccttatgtaaactgagccctttgt

SEQ ID NO: 111450 - DNA, 25 bp, Probe Sequence
aactagaatgagagggaagagatag

SEQ ID NO: 111451 - DNA, 25 bp, Probe Sequence
ctccttatgtaaactgagccctttg

SEQ ID NO: 111452 - DNA, 25 bp, Probe Sequence
aaactagaatgagagggaagagata

SEQ ID NO: 111453 - DNA, 25 bp, Probe Sequence
ttccaaatgtgaaactagaatgaga

SEQ ID NO: 111454 - DNA, 25 bp, Probe Sequence
agaatgagagggaagagatagcatg

SEQ ID NO: 111455 - DNA, 25 bp, Probe Sequence
gaatgagagggaagagatagcatgg

SEQ ID NO: 111456 - DNA, 25 bp, Probe Sequence
gtggaacagtgctccttatgtaaac

SEQ ID NO: 111457 - DNA, 25 bp, Probe Sequence
tggaacagtgctccttatgtaaact

SEQ ID NO: 111458 - DNA, 25 bp, Probe Sequence
aacaattccaaatgtgaaactagaa

SEQ ID NO: 111459 - DNA, 25 bp, Probe Sequence
gtgtgtgctgatgagattgtaagtt

SEQ ID NO: 111460 - DNA, 25 bp, Probe Sequence
gagtgtgtgctgatgagattgtaag

SEQ ID NO: 111461 - DNA, 25 bp, Probe Sequence
agagtgtgtgctgatgagattgtaa

SEQ ID NO: 111462 - DNA, 25 bp, Probe Sequence
agtgtgtgctgatgagattgtaagt

SEQ ID NO: 111463 - DNA, 25 bp, Probe Sequence
gagagtgtgtgctgatgagattgta

SEQ ID NO: 111464 - DNA, 25 bp, Probe Sequence
aagagagtgtgtgctgatgagattg

SEQ ID NO: 111465 - DNA, 25 bp, Probe Sequence
caagagagtgtgtgctgatgagatt

SEQ ID NO: 111466 - DNA, 25 bp, Probe Sequence
gtgctgatgagattgtaagtttgtg

SEQ ID NO: 111467 - DNA, 25 bp, Probe Sequence
gtgtgctgatgagattgtaagtttg

SEQ ID NO: 111468 - DNA, 25 bp, Probe Sequence
tgctgatgagattgtaagtttgtgt

SEQ ID NO: 111469 - DNA, 25 bp, Probe Sequence
tgtgctgatgagattgtaagtttgt

SEQ ID NO: 111470 - DNA, 25 bp, Probe Sequence
tgtgtgctgatgagattgtaagttt

SEQ ID NO: 111471 - DNA, 25 bp, Probe Sequence
agtctgtctgaatctttaccagttc

SEQ ID NO: 111472 - DNA, 25 bp, Probe Sequence
gtagtctgtctgaatctttaccagt

SEQ ID NO: 111473 - DNA, 25 bp, Probe Sequence
cagtagtctgtctgaatctttacca

SEQ ID NO: 111474 - DNA, 25 bp, Probe Sequence
agtagtctgtctgaatctttaccag

SEQ ID NO: 111475 - DNA, 25 bp, Probe Sequence
tagtctgtctgaatctttaccagtt

SEQ ID NO: 111476 - DNA, 25 bp, Probe Sequence
agagagtgtgtgctgatgagattgt

SEQ ID NO: 111477 - DNA, 25 bp, Probe Sequence
acaagagagtgtgtgctgatgagat

SEQ ID NO: 111478 - DNA, 25 bp, Probe Sequence
tctgtcagtagtctgtctgaatctt

SEQ ID NO: 111479 - DNA, 25 bp, Probe Sequence
ctctgtcagtagtctgtctgaatct

SEQ ID NO: 111480 - DNA, 25 bp, Probe Sequence
tctgtctgaatctttaccagttcaa

SEQ ID NO: 111481 - DNA, 25 bp, Probe Sequence
gtctgaatctttaccagttcaatgc

SEQ ID NO: 111482 - DNA, 25 bp, Probe Sequence
gtctgtctgaatctttaccagttca

SEQ ID NO: 111483 - DNA, 25 bp, Probe Sequence
agcatcaactactacttcatcaaca

SEQ ID NO: 111484 - DNA, 25 bp, Probe Sequence
acagcatcaactactacttcatcaa

SEQ ID NO: 111485 - DNA, 25 bp, Probe Sequence
catcaactactacttcatcaacagc

SEQ ID NO: 111486 - DNA, 25 bp, Probe Sequence
gcatcaactactacttcatcaacag

SEQ ID NO: 111487 - DNA, 25 bp, Probe Sequence
cagcatcaactactacttcatcaac

SEQ ID NO: 111488 - DNA, 25 bp, Probe Sequence
atcaactactacttcatcaacagcc

SEQ ID NO: 111489 - DNA, 25 bp, Probe Sequence
cacagcatcaactactacttcatca

SEQ ID NO: 111490 - DNA, 25 bp, Probe Sequence
ccacagcatcaactactacttcatc

SEQ ID NO: 111491 - DNA, 25 bp, Probe Sequence
cttccacagcatcaactactacttc

SEQ ID NO: 111492 - DNA, 25 bp, Probe Sequence
caactactacttcatcaacagccag

SEQ ID NO: 111493 - DNA, 25 bp, Probe Sequence
tcttccacagcatcaactactactt

SEQ ID NO: 111494 - DNA, 25 bp, Probe Sequence
tccacagcatcaactactacttcat

SEQ ID NO: 111495 - DNA, 25 bp, Probe Sequence
tcaactactacttcatcaacagcca

SEQ ID NO: 111496 - DNA, 25 bp, Probe Sequence
ttccacagcatcaactactacttca

SEQ ID NO: 111497 - DNA, 25 bp, Probe Sequence
ggatgttcagatggagcaagtaatg

SEQ ID NO: 111498 - DNA, 25 bp, Probe Sequence
aggatgttcagatggagcaagtaat

SEQ ID NO: 111499 - DNA, 25 bp, Probe Sequence
gatgttcagatggagcaagtaatga

SEQ ID NO: 111500 - DNA, 25 bp, Probe Sequence
ctcttccacagcatcaactactact

SEQ ID NO: 111501 - DNA, 25 bp, Probe Sequence
atgttcagatggagcaagtaatgac

SEQ ID NO: 111502 - DNA, 25 bp, Probe Sequence
aactactacttcatcaacagccagg

SEQ ID NO: 111503 - DNA, 25 bp, Probe Sequence
gaggatgttcagatggagcaagtaa

SEQ ID NO: 111504 - DNA, 25 bp, Probe Sequence
cctcttccacagcatcaactactac

SEQ ID NO: 111505 - DNA, 25 bp, Probe Sequence
tcctcttccacagcatcaactacta

SEQ ID NO: 111506 - DNA, 25 bp, Probe Sequence
ctgtcggataaggagaagaaggtct

SEQ ID NO: 111507 - DNA, 25 bp, Probe Sequence
ttaatgattaaagtcatttgcagta

SEQ ID NO: 111508 - DNA, 25 bp, Probe Sequence
gagaacgaggtctaactggtatcaa

SEQ ID NO: 111509 - DNA, 25 bp, Probe Sequence
gaacgaggtctaactggtatcaaag

SEQ ID NO: 111510 - DNA, 25 bp, Probe Sequence
ggtctaactggtatcaaaggagaaa

SEQ ID NO: 111511 - DNA, 25 bp, Probe Sequence
aggagaacgaggtctaactggtatc

SEQ ID NO: 111512 - DNA, 25 bp, Probe Sequence
aggtctaactggtatcaaaggagaa

SEQ ID NO: 111513 - DNA, 25 bp, Probe Sequence
gaggtctaactggtatcaaaggaga

SEQ ID NO: 111514 - DNA, 25 bp, Probe Sequence
ggagaacgaggtctaactggtatca

SEQ ID NO: 111515 - DNA, 25 bp, Probe Sequence
agaacgaggtctaactggtatcaaa

SEQ ID NO: 111516 - DNA, 25 bp, Probe Sequence
aacgaggtctaactggtatcaaagg

SEQ ID NO: 111517 - DNA, 25 bp, Probe Sequence
cgaggtctaactggtatcaaaggag

SEQ ID NO: 111518 - DNA, 25 bp, Probe Sequence
caggagaacgaggtctaactggtat

SEQ ID NO: 111519 - DNA, 25 bp, Probe Sequence
acgaggtctaactggtatcaaagga

SEQ ID NO: 111520 - DNA, 25 bp, Probe Sequence
tacactgccatcctcaaccagattc

SEQ ID NO: 111521 - DNA, 25 bp, Probe Sequence
gtctaactggtatcaaaggagaaaa

SEQ ID NO: 111522 - DNA, 25 bp, Probe Sequence
aaaaggagagaaaggagatactggc

SEQ ID NO: 111523 - DNA, 25 bp, Probe Sequence
gtacactgccatcctcaaccagatt

SEQ ID NO: 111524 - DNA, 25 bp, Probe Sequence
aagtatgcgaacagctcatccagag

SEQ ID NO: 111525 - DNA, 25 bp, Probe Sequence
caagtatgcgaacagctcatccaga

SEQ ID NO: 111526 - DNA, 25 bp, Probe Sequence
tcaagtatgcgaacagctcatccag

SEQ ID NO: 111527 - DNA, 25 bp, Probe Sequence
aaaggagagaaaggagatactggcc

SEQ ID NO: 111528 - DNA, 25 bp, Probe Sequence
aaggagagaaaggagatactggcct

SEQ ID NO: 111529 - DNA, 25 bp, Probe Sequence
gagagaaaggagatactggccttcc

SEQ ID NO: 111530 - DNA, 25 bp, Probe Sequence
ggagagaaaggagatactggccttc

SEQ ID NO: 111531 - DNA, 25 bp, Probe Sequence
ccaggagaacgaggtctaactggta

SEQ ID NO: 111532 - DNA, 25 bp, Probe Sequence
atacagcttaatgaacaggtaatgc

SEQ ID NO: 111533 - DNA, 25 bp, Probe Sequence
tttcccttcttcctttctttcttca

SEQ ID NO: 111534 - DNA, 25 bp, Probe Sequence
tacagcttaatgaacaggtaatgca

SEQ ID NO: 111535 - DNA, 25 bp, Probe Sequence
ttcccttcttcctttctttcttcag

SEQ ID NO: 111536 - DNA, 25 bp, Probe Sequence
aagatattacgcttaatgctggtaa

SEQ ID NO: 111537 - DNA, 25 bp, Probe Sequence
cgcttaatgctggtaatataaaggt

SEQ ID NO: 111538 - DNA, 25 bp, Probe Sequence
acgcttaatgctggtaatataaagg

SEQ ID NO: 111539 - DNA, 25 bp, Probe Sequence
gaaagatattacgcttaatgctggt

SEQ ID NO: 111540 - DNA, 25 bp, Probe Sequence
tgaaagatattacgcttaatgctgg

SEQ ID NO: 111541 - DNA, 25 bp, Probe Sequence
catacagcttaatgaacaggtaatg

SEQ ID NO: 111542 - DNA, 25 bp, Probe Sequence
aaagatattacgcttaatgctggta

SEQ ID NO: 111543 - DNA, 25 bp, Probe Sequence
ccattctagatagtgctgcattagg

SEQ ID NO: 111544 - DNA, 25 bp, Probe Sequence
aagtgttagtcacaaatctcaaagc

SEQ ID NO: 111545 - DNA, 25 bp, Probe Sequence
atgaaagatattacgcttaatgctg

SEQ ID NO: 111546 - DNA, 25 bp, Probe Sequence
gccattctagatagtgctgcattag

SEQ ID NO: 111547 - DNA, 25 bp, Probe Sequence
ccttcttcctttctttcttcagcta

SEQ ID NO: 111548 - DNA, 25 bp, Probe Sequence
tcccttcttcctttctttcttcagc

SEQ ID NO: 111549 - DNA, 25 bp, Probe Sequence
cttcttcctttctttcttcagctat

SEQ ID NO: 111550 - DNA, 25 bp, Probe Sequence
gtcatacagcttaatgaacaggtaa

SEQ ID NO: 111551 - DNA, 25 bp, Probe Sequence
ttcttcctttctttcttcagctatt

SEQ ID NO: 111552 - DNA, 25 bp, Probe Sequence
aaagtgttagtcacaaatctcaaag

SEQ ID NO: 111553 - DNA, 25 bp, Probe Sequence
ttagtcacaaatctcaaagctgtac

SEQ ID NO: 111554 - DNA, 25 bp, Probe Sequence
gttagtcacaaatctcaaagctgta

SEQ ID NO: 111555 - DNA, 25 bp, Probe Sequence
tacgcttaatgctggtaatataaag

SEQ ID NO: 111556 - DNA, 25 bp, Probe Sequence
ccgtaaaggaaatcacaggtttgag

SEQ ID NO: 111557 - DNA, 25 bp, Probe Sequence
ggtttgagctgaattatcacatgaa

SEQ ID NO: 111558 - DNA, 25 bp, Probe Sequence
aggtttgagctgaattatcacatga

SEQ ID NO: 111559 - DNA, 25 bp, Probe Sequence
cgtaaaggaaatcacaggtttgagc

SEQ ID NO: 111560 - DNA, 25 bp, Probe Sequence
gaaatcacaggtttgagctgaatta

SEQ ID NO: 111561 - DNA, 25 bp, Probe Sequence
aatcacaggtttgagctgaattatc

SEQ ID NO: 111562 - DNA, 25 bp, Probe Sequence
caggtttgagctgaattatcacatg

SEQ ID NO: 111563 - DNA, 25 bp, Probe Sequence
atcacaggtttgagctgaattatca

SEQ ID NO: 111564 - DNA, 25 bp, Probe Sequence
gtaaaggaaatcacaggtttgagct

SEQ ID NO: 111565 - DNA, 25 bp, Probe Sequence
acaggtttgagctgaattatcacat

SEQ ID NO: 111566 - DNA, 25 bp, Probe Sequence
aaatcacaggtttgagctgaattat

SEQ ID NO: 111567 - DNA, 25 bp, Probe Sequence
tttcgacatatttcctgttcccttg

SEQ ID NO: 111568 - DNA, 25 bp, Probe Sequence
gtttgagctgaattatcacatgaat

SEQ ID NO: 111569 - DNA, 25 bp, Probe Sequence
tcacaggtttgagctgaattatcac

SEQ ID NO: 111570 - DNA, 25 bp, Probe Sequence
gggaaatcagtgttttagagagaga

SEQ ID NO: 111571 - DNA, 25 bp, Probe Sequence
tgggaaatcagtgttttagagagag

SEQ ID NO: 111572 - DNA, 25 bp, Probe Sequence
atgggaaatcagtgttttagagaga

SEQ ID NO: 111573 - DNA, 25 bp, Probe Sequence
taaaggaaatcacaggtttgagctg

SEQ ID NO: 111574 - DNA, 25 bp, Probe Sequence
ttgagctgaattatcacatgaatat

SEQ ID NO: 111575 - DNA, 25 bp, Probe Sequence
cacaggtttgagctgaattatcaca

SEQ ID NO: 111576 - DNA, 25 bp, Probe Sequence
aatgggaaatcagtgttttagagag

SEQ ID NO: 111577 - DNA, 25 bp, Probe Sequence
aaatgggaaatcagtgttttagaga

SEQ ID NO: 111578 - DNA, 25 bp, Probe Sequence
tgaatataaatgggaaatcagtgtt

SEQ ID NO: 111579 - DNA, 25 bp, Probe Sequence
ggaaatcagtgttttagagagagaa

SEQ ID NO: 111580 - DNA, 25 bp, Probe Sequence
aattaaccaccaatccaacatccag

SEQ ID NO: 111581 - DNA, 25 bp, Probe Sequence
taattaaccaccaatccaacatcca

SEQ ID NO: 111582 - DNA, 25 bp, Probe Sequence
ataattaaccaccaatccaacatcc

SEQ ID NO: 111583 - DNA, 25 bp, Probe Sequence
attaaccaccaatccaacatccaga

SEQ ID NO: 111584 - DNA, 25 bp, Probe Sequence
aaacatctcaataacaaactggctg

SEQ ID NO: 111585 - DNA, 25 bp, Probe Sequence
tgctgagtgaatgaacaaatgaata

SEQ ID NO: 111586 - DNA, 25 bp, Probe Sequence
aataattaaccaccaatccaacatc

SEQ ID NO: 111587 - DNA, 25 bp, Probe Sequence
caagagtatcctacccatttccttc

SEQ ID NO: 111588 - DNA, 25 bp, Probe Sequence
agtatcctacccatttccttccttc

SEQ ID NO: 111589 - DNA, 25 bp, Probe Sequence
gagtatcctacccatttccttcctt

SEQ ID NO: 111590 - DNA, 25 bp, Probe Sequence
ttgctgagtgaatgaacaaatgaat

SEQ ID NO: 111591 - DNA, 25 bp, Probe Sequence
atctcaataacaaactggctgcttt

SEQ ID NO: 111592 - DNA, 25 bp, Probe Sequence
aagagtatcctacccatttccttcc

SEQ ID NO: 111593 - DNA, 25 bp, Probe Sequence
ttcccaagagtatcctacccatttc

SEQ ID NO: 111594 - DNA, 25 bp, Probe Sequence
gctgagtgaatgaacaaatgaataa

SEQ ID NO: 111595 - DNA, 25 bp, Probe Sequence
gttcccaagagtatcctacccattt

SEQ ID NO: 111596 - DNA, 25 bp, Probe Sequence
ccaagagtatcctacccatttcctt

SEQ ID NO: 111597 - DNA, 25 bp, Probe Sequence
agatgattgttcaaagcacagaatt

SEQ ID NO: 111598 - DNA, 25 bp, Probe Sequence
cagatgattgttcaaagcacagaat

SEQ ID NO: 111599 - DNA, 25 bp, Probe Sequence
agagtatcctacccatttccttcct

SEQ ID NO: 111600 - DNA, 25 bp, Probe Sequence
catctcaataacaaactggctgctt

SEQ ID NO: 111601 - DNA, 25 bp, Probe Sequence
gatgattgttcaaagcacagaattt

SEQ ID NO: 111602 - DNA, 25 bp, Probe Sequence
gtatcctacccatttccttccttcc

SEQ ID NO: 111603 - DNA, 25 bp, Probe Sequence
agagtctcaaagccatgttattctg

SEQ ID NO: 111604 - DNA, 25 bp, Probe Sequence
ctgttacttaggctgttagatccaa

SEQ ID NO: 111605 - DNA, 25 bp, Probe Sequence
tcaatagttctgttacttaggctgt

SEQ ID NO: 111606 - DNA, 25 bp, Probe Sequence
ttaggctgttagatccaagttgatt

SEQ ID NO: 111607 - DNA, 25 bp, Probe Sequence
agttctgttacttaggctgttagat

SEQ ID NO: 111608 - DNA, 25 bp, Probe Sequence
actcaatagttctgttacttaggct

SEQ ID NO: 111609 - DNA, 25 bp, Probe Sequence
tgttacttaggctgttagatccaag

SEQ ID NO: 111610 - DNA, 25 bp, Probe Sequence
ctcaatagttctgttacttaggctg

SEQ ID NO: 111611 - DNA, 25 bp, Probe Sequence
cttaggctgttagatccaagttgat

SEQ ID NO: 111612 - DNA, 25 bp, Probe Sequence
ttctgttacttaggctgttagatcc

SEQ ID NO: 111613 - DNA, 25 bp, Probe Sequence
caatagttctgttacttaggctgtt

SEQ ID NO: 111614 - DNA, 25 bp, Probe Sequence
tagttctgttacttaggctgttaga

SEQ ID NO: 111615 - DNA, 25 bp, Probe Sequence
tctgttacttaggctgttagatcca

SEQ ID NO: 111616 - DNA, 25 bp, Probe Sequence
ttgctcagtattagtagacaaggtc

SEQ ID NO: 111617 - DNA, 25 bp, Probe Sequence
gttctgttacttaggctgttagatc

SEQ ID NO: 111618 - DNA, 25 bp, Probe Sequence
atagttctgttacttaggctgttag

SEQ ID NO: 111619 - DNA, 25 bp, Probe Sequence
atgtgggtttgctcagtattagtag

SEQ ID NO: 111620 - DNA, 25 bp, Probe Sequence
gatgtgggtttgctcagtattagta

SEQ ID NO: 111621 - DNA, 25 bp, Probe Sequence
gtgggtttgctcagtattagtagac

SEQ ID NO: 111622 - DNA, 25 bp, Probe Sequence
tctaaatgaatctgtgtaattgggc

SEQ ID NO: 111623 - DNA, 25 bp, Probe Sequence
aatagttctgttacttaggctgtta

SEQ ID NO: 111624 - DNA, 25 bp, Probe Sequence
tgggtttgctcagtattagtagaca

SEQ ID NO: 111625 - DNA, 25 bp, Probe Sequence
tgtgggtttgctcagtattagtaga

SEQ ID NO: 111626 - DNA, 25 bp, Probe Sequence
tagaatttgggacaggcactatttg

SEQ ID NO: 111627 - DNA, 25 bp, Probe Sequence
gggtttgctcagtattagtagacaa

SEQ ID NO: 111628 - DNA, 25 bp, Probe Sequence
taccttggaagcagttagaatctac

SEQ ID NO: 111629 - DNA, 25 bp, Probe Sequence
ctaccttggaagcagttagaatcta

SEQ ID NO: 111630 - DNA, 25 bp, Probe Sequence
ctggatgtaacttgtgtcttctagc

SEQ ID NO: 111631 - DNA, 25 bp, Probe Sequence
gctggatgtaacttgtgtcttctag

SEQ ID NO: 111632 - DNA, 25 bp, Probe Sequence
ggctggatgtaacttgtgtcttcta

SEQ ID NO: 111633 - DNA, 25 bp, Probe Sequence
accttggaagcagttagaatctacc

SEQ ID NO: 111634 - DNA, 25 bp, Probe Sequence
tggatgtaacttgtgtcttctagcc

SEQ ID NO: 111635 - DNA, 25 bp, Probe Sequence
ctctaccttggaagcagttagaatc

SEQ ID NO: 111636 - DNA, 25 bp, Probe Sequence
tctaccttggaagcagttagaatct

SEQ ID NO: 111637 - DNA, 25 bp, Probe Sequence
cttggaagcagttagaatctaccag

SEQ ID NO: 111638 - DNA, 25 bp, Probe Sequence
caagaaggtttcagcagtattacac

SEQ ID NO: 111639 - DNA, 25 bp, Probe Sequence
cctctaccttggaagcagttagaat

SEQ ID NO: 111640 - DNA, 25 bp, Probe Sequence
acaagaaggtttcagcagtattaca

SEQ ID NO: 111641 - DNA, 25 bp, Probe Sequence
aacaagaaggtttcagcagtattac

SEQ ID NO: 111642 - DNA, 25 bp, Probe Sequence
atgaattggtcactgcatcttgtat

SEQ ID NO: 111643 - DNA, 25 bp, Probe Sequence
ttaaggaatgaattggtcactgcat

SEQ ID NO: 111644 - DNA, 25 bp, Probe Sequence
aatgaattggtcactgcatcttgta

SEQ ID NO: 111645 - DNA, 25 bp, Probe Sequence
gaagcagttagaatctaccaggcac

SEQ ID NO: 111646 - DNA, 25 bp, Probe Sequence
ttggaagcagttagaatctaccagg

SEQ ID NO: 111647 - DNA, 25 bp, Probe Sequence
ccttggaagcagttagaatctacca

SEQ ID NO: 111648 - DNA, 25 bp, Probe Sequence
tgaattggtcactgcatcttgtatc

SEQ ID NO: 111649 - DNA, 25 bp, Probe Sequence
taaggaatgaattggtcactgcatc

SEQ ID NO: 111650 - DNA, 25 bp, Probe Sequence
ttagaatctaccaggcacagatgag

SEQ ID NO: 111651 - DNA, 25 bp, Probe Sequence
gttagaatctaccaggcacagatga

SEQ ID NO: 111652 - DNA, 25 bp, Probe Sequence
aaccttagacaatcaatcagtcagt

SEQ ID NO: 111653 - DNA, 25 bp, Probe Sequence
accttagacaatcaatcagtcagtc

SEQ ID NO: 111654 - DNA, 25 bp, Probe Sequence
aaccagccacttctgaatacaatat

SEQ ID NO: 111655 - DNA, 25 bp, Probe Sequence
ccagccacttctgaatacaatatgt

SEQ ID NO: 111656 - DNA, 25 bp, Probe Sequence
accagccacttctgaatacaatatg

SEQ ID NO: 111657 - DNA, 25 bp, Probe Sequence
cctggagttaatagagtgattcaca

SEQ ID NO: 111658 - DNA, 25 bp, Probe Sequence
ttgagaatttagtccatagaggtcc

SEQ ID NO: 111659 - DNA, 25 bp, Probe Sequence
gccacttctgaatacaatatgtagc

SEQ ID NO: 111660 - DNA, 25 bp, Probe Sequence
tccctggagttaatagagtgattca

SEQ ID NO: 111661 - DNA, 25 bp, Probe Sequence
ttccctggagttaatagagtgattc

SEQ ID NO: 111662 - DNA, 25 bp, Probe Sequence
cttccctggagttaatagagtgatt

SEQ ID NO: 111663 - DNA, 25 bp, Probe Sequence
gagacacttgggactactagagata

SEQ ID NO: 111664 - DNA, 25 bp, Probe Sequence
tatgagacacttgggactactagag

SEQ ID NO: 111665 - DNA, 25 bp, Probe Sequence
atatgagacacttgggactactaga

SEQ ID NO: 111666 - DNA, 25 bp, Probe Sequence
aatgaaacaaacgcttagaacaaat

SEQ ID NO: 111667 - DNA, 25 bp, Probe Sequence
gagaatttagtccatagaggtccct

SEQ ID NO: 111668 - DNA, 25 bp, Probe Sequence
tgagaatttagtccatagaggtccc

SEQ ID NO: 111669 - DNA, 25 bp, Probe Sequence
agacacttgggactactagagatat

SEQ ID NO: 111670 - DNA, 25 bp, Probe Sequence
aaatatgagacacttgggactacta

SEQ ID NO: 111671 - DNA, 25 bp, Probe Sequence
taaatatgagacacttgggactact

SEQ ID NO: 111672 - DNA, 25 bp, Probe Sequence
cctatctagtcaactgggcataatg

SEQ ID NO: 111673 - DNA, 25 bp, Probe Sequence
agaatttagtccatagaggtccctg

SEQ ID NO: 111674 - DNA, 25 bp, Probe Sequence
tcttccctggagttaatagagtgat

SEQ ID NO: 111675 - DNA, 25 bp, Probe Sequence
cttaatgaaacaaacgcttagaaca

SEQ ID NO: 111676 - DNA, 25 bp, Probe Sequence
ttctcttcctggttacattcattgg

SEQ ID NO: 111677 - DNA, 25 bp, Probe Sequence
atattccagccaaccagttaattct

SEQ ID NO: 111678 - DNA, 25 bp, Probe Sequence
attctcttcctggttacattcattg

SEQ ID NO: 111679 - DNA, 25 bp, Probe Sequence
tattccagccaaccagttaattctc

SEQ ID NO: 111680 - DNA, 25 bp, Probe Sequence
gccagtattacattgaagactacct

SEQ ID NO: 111681 - DNA, 25 bp, Probe Sequence
tgccagtattacattgaagactacc

SEQ ID NO: 111682 - DNA, 25 bp, Probe Sequence
ggtgccagtattacattgaagacta

SEQ ID NO: 111683 - DNA, 25 bp, Probe Sequence
gtgccagtattacattgaagactac

SEQ ID NO: 111684 - DNA, 25 bp, Probe Sequence
atgttgacaattagattcttggacc

SEQ ID NO: 111685 - DNA, 25 bp, Probe Sequence
tgttgacaattagattcttggacca

SEQ ID NO: 111686 - DNA, 25 bp, Probe Sequence
ttggtgccagtattacattgaagac

SEQ ID NO: 111687 - DNA, 25 bp, Probe Sequence
gttggtgccagtattacattgaaga

SEQ ID NO: 111688 - DNA, 25 bp, Probe Sequence
aattctcttcctggttacattcatt

SEQ ID NO: 111689 - DNA, 25 bp, Probe Sequence
gttctcttgttggtgccagtattac

SEQ ID NO: 111690 - DNA, 25 bp, Probe Sequence
atacaatattccagccaaccagtta

SEQ ID NO: 111691 - DNA, 25 bp, Probe Sequence
caatattccagccaaccagttaatt

SEQ ID NO: 111692 - DNA, 25 bp, Probe Sequence
tacaatattccagccaaccagttaa

SEQ ID NO: 111693 - DNA, 25 bp, Probe Sequence
aatattccagccaaccagttaattc

SEQ ID NO: 111694 - DNA, 25 bp, Probe Sequence
actacctatgatagaggcaatgttg

SEQ ID NO: 111695 - DNA, 25 bp, Probe Sequence
gactacctatgatagaggcaatgtt

SEQ ID NO: 111696 - DNA, 25 bp, Probe Sequence
agactacctatgatagaggcaatgt

SEQ ID NO: 111697 - DNA, 25 bp, Probe Sequence
tgaagactacctatgatagaggcaa

SEQ ID NO: 111698 - DNA, 25 bp, Probe Sequence
ttgaagactacctatgatagaggca

SEQ ID NO: 111699 - DNA, 25 bp, Probe Sequence
ttaattctcttcctggttacattca

SEQ ID NO: 111700 - DNA, 25 bp, Probe Sequence
tcctcctctgtgttctctccatgtc

SEQ ID NO: 111701 - DNA, 25 bp, Probe Sequence
ctcctcctctgtgttctctccatgt

SEQ ID NO: 111702 - DNA, 25 bp, Probe Sequence
ttcttacccatcatgcaccctgtac

SEQ ID NO: 111703 - DNA, 25 bp, Probe Sequence
gttcttacccatcatgcaccctgta

SEQ ID NO: 111704 - DNA, 25 bp, Probe Sequence
ctcggagctatcagaaagtgccttc

SEQ ID NO: 111705 - DNA, 25 bp, Probe Sequence
aaggtgatcaaagttggcaaggttc

SEQ ID NO: 111706 - DNA, 25 bp, Probe Sequence
gaaggtgatcaaagttggcaaggtt

SEQ ID NO: 111707 - DNA, 25 bp, Probe Sequence
gtgatcaaagttggcaaggttcgaa

SEQ ID NO: 111708 - DNA, 25 bp, Probe Sequence
gagtcaccttacagatatagagcat

SEQ ID NO: 111709 - DNA, 25 bp, Probe Sequence
ggagtcaccttacagatatagagca

SEQ ID NO: 111710 - DNA, 25 bp, Probe Sequence
tggagtcaccttacagatatagagc

SEQ ID NO: 111711 - DNA, 25 bp, Probe Sequence
agtcaccttacagatatagagcatt

SEQ ID NO: 111712 - DNA, 25 bp, Probe Sequence
gtggagtcaccttacagatatagag

SEQ ID NO: 111713 - DNA, 25 bp, Probe Sequence
cgtggagtcaccttacagatataga

SEQ ID NO: 111714 - DNA, 25 bp, Probe Sequence
ttatgcggtattcattggtgcctaa

SEQ ID NO: 111715 - DNA, 25 bp, Probe Sequence
cttagtgctctttctttcttatggg

SEQ ID NO: 111716 - DNA, 25 bp, Probe Sequence
gtattcattggtgcctaaagaactt

SEQ ID NO: 111717 - DNA, 25 bp, Probe Sequence
ggtattcattggtgcctaaagaact

SEQ ID NO: 111718 - DNA, 25 bp, Probe Sequence
acttagtgctctttctttcttatgg

SEQ ID NO: 111719 - DNA, 25 bp, Probe Sequence
gtcaccttacagatatagagcattt

SEQ ID NO: 111720 - DNA, 25 bp, Probe Sequence
gttgcctatgtaggttctctgacaa

SEQ ID NO: 111721 - DNA, 25 bp, Probe Sequence
tattcattggtgcctaaagaacttt

SEQ ID NO: 111722 - DNA, 25 bp, Probe Sequence
tacgtggagtcaccttacagatata

SEQ ID NO: 111723 - DNA, 25 bp, Probe Sequence
acgtggagtcaccttacagatatag

SEQ ID NO: 111724 - DNA, 25 bp, Probe Sequence
ctgttgcctatgtaggttctctgac

SEQ ID NO: 111725 - DNA, 25 bp, Probe Sequence
cggtattcattggtgcctaaagaac

SEQ ID NO: 111726 - DNA, 25 bp, Probe Sequence
gtacgtggagtcaccttacagatat

SEQ ID NO: 111727 - DNA, 25 bp, Probe Sequence
attcattggtgcctaaagaacttta

SEQ ID NO: 111728 - DNA, 25 bp, Probe Sequence
tatgcggtattcattggtgcctaaa

SEQ ID NO: 111729 - DNA, 25 bp, Probe Sequence
tttatgcggtattcattggtgccta

SEQ ID NO: 111730 - DNA, 25 bp, Probe Sequence
tgttgcctatgtaggttctctgaca

SEQ ID NO: 111731 - DNA, 25 bp, Probe Sequence
agtacgtggagtcaccttacagata

SEQ ID NO: 111732 - DNA, 25 bp, Probe Sequence
ttaagagatacaatggttcatgcct

SEQ ID NO: 111733 - DNA, 25 bp, Probe Sequence
gttaagagatacaatggttcatgcc

SEQ ID NO: 111734 - DNA, 25 bp, Probe Sequence
taagagatacaatggttcatgcctg

SEQ ID NO: 111735 - DNA, 25 bp, Probe Sequence
ggcatgttaagagatacaatggttc

SEQ ID NO: 111736 - DNA, 25 bp, Probe Sequence
tggcatgttaagagatacaatggtt

SEQ ID NO: 111737 - DNA, 25 bp, Probe Sequence
ttggcatgttaagagatacaatggt

SEQ ID NO: 111738 - DNA, 25 bp, Probe Sequence
tgttaagagatacaatggttcatgc

SEQ ID NO: 111739 - DNA, 25 bp, Probe Sequence
gcatgttaagagatacaatggttca

SEQ ID NO: 111740 - DNA, 25 bp, Probe Sequence
gatacaatggttcatgcctgtaatc

SEQ ID NO: 111741 - DNA, 25 bp, Probe Sequence
agatacaatggttcatgcctgtaat

SEQ ID NO: 111742 - DNA, 25 bp, Probe Sequence
tgggtgacagagtgaaattctatct

SEQ ID NO: 111743 - DNA, 25 bp, Probe Sequence
ggtgacagagtgaaattctatctca

SEQ ID NO: 111744 - DNA, 25 bp, Probe Sequence
ctgaggaaggagaatctcttgaacc

SEQ ID NO: 111745 - DNA, 25 bp, Probe Sequence
aagagatacaatggttcatgcctgt

SEQ ID NO: 111746 - DNA, 25 bp, Probe Sequence
gggtgacagagtgaaattctatctc

SEQ ID NO: 111747 - DNA, 25 bp, Probe Sequence
gagatacaatggttcatgcctgtaa

SEQ ID NO: 111748 - DNA, 25 bp, Probe Sequence
atacaatggttcatgcctgtaatcc

SEQ ID NO: 111749 - DNA, 25 bp, Probe Sequence
gaggaaggagaatctcttgaacctg

SEQ ID NO: 111750 - DNA, 25 bp, Probe Sequence
gtgacagagtgaaattctatctcaa

SEQ ID NO: 111751 - DNA, 25 bp, Probe Sequence
agagatacaatggttcatgcctgta

SEQ ID NO: 111752 - DNA, 25 bp, Probe Sequence
ctgggtgacagagtgaaattctatc

SEQ ID NO: 111753 - DNA, 25 bp, Probe Sequence
cttgagaagctgaggaaggagaatc

SEQ ID NO: 111754 - DNA, 25 bp, Probe Sequence
tacttgagaagctgaggaaggagaa

SEQ ID NO: 111755 - DNA, 25 bp, Probe Sequence
gctgaggaaggagaatctcttgaac

SEQ ID NO: 111756 - DNA, 25 bp, Probe Sequence
cattactgccaactgaccttataac

SEQ ID NO: 111757 - DNA, 25 bp, Probe Sequence
attactgccaactgaccttataacc

SEQ ID NO: 111758 - DNA, 25 bp, Probe Sequence
cctgttatagtacatctggaccttc

SEQ ID NO: 111759 - DNA, 25 bp, Probe Sequence
agcaatcctgttatagtacatctgg

SEQ ID NO: 111760 - DNA, 25 bp, Probe Sequence
tgagcaatcctgttatagtacatct

SEQ ID NO: 111761 - DNA, 25 bp, Probe Sequence
gagcaatcctgttatagtacatctg

SEQ ID NO: 111762 - DNA, 25 bp, Probe Sequence
atcctgttatagtacatctggacct

SEQ ID NO: 111763 - DNA, 25 bp, Probe Sequence
ctgttatagtacatctggaccttcc

SEQ ID NO: 111764 - DNA, 25 bp, Probe Sequence
tcctgttatagtacatctggacctt

SEQ ID NO: 111765 - DNA, 25 bp, Probe Sequence
gcaatcctgttatagtacatctgga

SEQ ID NO: 111766 - DNA, 25 bp, Probe Sequence
aatcctgttatagtacatctggacc

SEQ ID NO: 111767 - DNA, 25 bp, Probe Sequence
cccagcatttcattcataccagata

SEQ ID NO: 111768 - DNA, 25 bp, Probe Sequence
ccagcatttcattcataccagataa

SEQ ID NO: 111769 - DNA, 25 bp, Probe Sequence
atgagcaatcctgttatagtacatc

SEQ ID NO: 111770 - DNA, 25 bp, Probe Sequence
gatgagcaatcctgttatagtacat

SEQ ID NO: 111771 - DNA, 25 bp, Probe Sequence
caatcctgttatagtacatctggac

SEQ ID NO: 111772 - DNA, 25 bp, Probe Sequence
ttcattcataccagataatagctgc

SEQ ID NO: 111773 - DNA, 25 bp, Probe Sequence
tcattcataccagataatagctgca

SEQ ID NO: 111774 - DNA, 25 bp, Probe Sequence
cattcataccagataatagctgcat

SEQ ID NO: 111775 - DNA, 25 bp, Probe Sequence
ataccagataatagctgcattactg

SEQ ID NO: 111776 - DNA, 25 bp, Probe Sequence
cataccagataatagctgcattact

SEQ ID NO: 111777 - DNA, 25 bp, Probe Sequence
tcataccagataatagctgcattac

SEQ ID NO: 111778 - DNA, 25 bp, Probe Sequence
cagcatttcattcataccagataat

SEQ ID NO: 111779 - DNA, 25 bp, Probe Sequence
attcataccagataatagctgcatt

SEQ ID NO: 111780 - DNA, 25 bp, Probe Sequence
aaccaactctattcattcctcatca

SEQ ID NO: 111781 - DNA, 25 bp, Probe Sequence
accaactctattcattcctcatcat

SEQ ID NO: 111782 - DNA, 25 bp, Probe Sequence
gaaccaactctattcattcctcatc

SEQ ID NO: 111783 - DNA, 25 bp, Probe Sequence
tattcattcctcatcatgtggctta

SEQ ID NO: 111784 - DNA, 25 bp, Probe Sequence
actctattcattcctcatcatgtgg

SEQ ID NO: 111785 - DNA, 25 bp, Probe Sequence
ccaactctattcattcctcatcatg

SEQ ID NO: 111786 - DNA, 25 bp, Probe Sequence
ctattcattcctcatcatgtggctt

SEQ ID NO: 111787 - DNA, 25 bp, Probe Sequence
attcattcctcatcatgtggcttac

SEQ ID NO: 111788 - DNA, 25 bp, Probe Sequence
atatggatgaggtctcaagtgtaag

SEQ ID NO: 111789 - DNA, 25 bp, Probe Sequence
ctctattcattcctcatcatgtggc

SEQ ID NO: 111790 - DNA, 25 bp, Probe Sequence
aactctattcattcctcatcatgtg

SEQ ID NO: 111791 - DNA, 25 bp, Probe Sequence
caactctattcattcctcatcatgt

SEQ ID NO: 111792 - DNA, 25 bp, Probe Sequence
tatggatgaggtctcaagtgtaagt

SEQ ID NO: 111793 - DNA, 25 bp, Probe Sequence
aatatggatgaggtctcaagtgtaa

SEQ ID NO: 111794 - DNA, 25 bp, Probe Sequence
tctattcattcctcatcatgtggct

SEQ ID NO: 111795 - DNA, 25 bp, Probe Sequence
tcattcctcatcatgtggcttactt

SEQ ID NO: 111796 - DNA, 25 bp, Probe Sequence
ttcattcctcatcatgtggcttact

SEQ ID NO: 111797 - DNA, 25 bp, Probe Sequence
atggatgaggtctcaagtgtaagtg

SEQ ID NO: 111798 - DNA, 25 bp, Probe Sequence
ctcaaagtctggatacctctctctt

SEQ ID NO: 111799 - DNA, 25 bp, Probe Sequence
cctggactacaagtttggagattta

SEQ ID NO: 111800 - DNA, 25 bp, Probe Sequence
tacatcctgactctgacttctttgg

SEQ ID NO: 111801 - DNA, 25 bp, Probe Sequence
gtacatcctgactctgacttctttg

SEQ ID NO: 111802 - DNA, 25 bp, Probe Sequence
agtaagctaacagtggacacagatg

SEQ ID NO: 111803 - DNA, 25 bp, Probe Sequence
cagtaagctaacagtggacacagat

SEQ ID NO: 111804 - DNA, 25 bp, Probe Sequence
taagtctgagaggtaagagagaagg

SEQ ID NO: 111805 - DNA, 25 bp, Probe Sequence
ggtaagtctgagaggtaagagagaa

SEQ ID NO: 111806 - DNA, 25 bp, Probe Sequence
aaggtaagtctgagaggtaagagag

SEQ ID NO: 111807 - DNA, 25 bp, Probe Sequence
gtaagtctgagaggtaagagagaag

SEQ ID NO: 111808 - DNA, 25 bp, Probe Sequence
aggtaagtctgagaggtaagagaga

SEQ ID NO: 111809 - DNA, 25 bp, Probe Sequence
ctgagaggtaagagagaaggaacac

SEQ ID NO: 111810 - DNA, 25 bp, Probe Sequence
gaggtaagagagaaggaacacactt
